United States Patent Application Publication US 2015/0232836 A1 - sequence listing, part 40

SEQ ID NO: 1574070 - DNA, 15 bp, Homo sapiens
tgcaggcagtcacag

SEQ ID NO: 1574071 - DNA, 15 bp, Homo sapiens
gcaggcagtcacagg

SEQ ID NO: 1574072 - DNA, 15 bp, Homo sapiens
caggcagtcacaggc

SEQ ID NO: 1574073 - DNA, 15 bp, Homo sapiens
aggcagtcacaggca

SEQ ID NO: 1574074 - DNA, 15 bp, Homo sapiens
ggcagtcacaggcag

SEQ ID NO: 1574075 - DNA, 15 bp, Homo sapiens
gcagtcacaggcagg

SEQ ID NO: 1574076 - DNA, 15 bp, Homo sapiens
cagtcacaggcagga

SEQ ID NO: 1574077 - DNA, 15 bp, Homo sapiens
agtcacaggcaggag

SEQ ID NO: 1574078 - DNA, 15 bp, Homo sapiens
gtcacaggcaggaga

SEQ ID NO: 1574079 - DNA, 15 bp, Homo sapiens
tcacaggcaggagag

SEQ ID NO: 1574080 - DNA, 15 bp, Homo sapiens
acaggcaggagagga

SEQ ID NO: 1574081 - DNA, 15 bp, Homo sapiens
caggcaggagaggaa

SEQ ID NO: 1574082 - DNA, 15 bp, Homo sapiens
aggcaggagaggaaa

SEQ ID NO: 1574083 - DNA, 15 bp, Homo sapiens
ggcaggagaggaaag

SEQ ID NO: 1574084 - DNA, 15 bp, Homo sapiens
gcaggagaggaaagc

SEQ ID NO: 1574085 - DNA, 15 bp, Homo sapiens
caggagaggaaagct

SEQ ID NO: 1574086 - DNA, 15 bp, Homo sapiens
aggagaggaaagctg

SEQ ID NO: 1574087 - DNA, 15 bp, Homo sapiens
ggagaggaaagctgg

SEQ ID NO: 1574088 - DNA, 15 bp, Homo sapiens
gagaggaaagctggg

SEQ ID NO: 1574089 - DNA, 15 bp, Homo sapiens
agaggaaagctgggg

SEQ ID NO: 1574090 - DNA, 15 bp, Homo sapiens
gaggaaagctgggga

SEQ ID NO: 1574091 - DNA, 15 bp, Homo sapiens
aggaaagctggggaa

SEQ ID NO: 1574092 - DNA, 15 bp, Homo sapiens
ggaaagctggggaag

SEQ ID NO: 1574093 - DNA, 15 bp, Homo sapiens
gaaagctggggaaga

SEQ ID NO: 1574094 - DNA, 15 bp, Homo sapiens
aaagctggggaagaa

SEQ ID NO: 1574095 - DNA, 15 bp, Homo sapiens
aagctggggaagaag

SEQ ID NO: 1574096 - DNA, 15 bp, Homo sapiens
agctggggaagaagg

SEQ ID NO: 1574097 - DNA, 15 bp, Homo sapiens
gctggggaagaaggt

SEQ ID NO: 1574098 - DNA, 15 bp, Homo sapiens
ctggggaagaaggtg

SEQ ID NO: 1574099 - DNA, 15 bp, Homo sapiens
tggggaagaaggtgg

SEQ ID NO: 1574100 - DNA, 15 bp, Homo sapiens
ggggaagaaggtggc

SEQ ID NO: 1574101 - DNA, 15 bp, Homo sapiens
gggaagaaggtggcg

SEQ ID NO: 1574102 - DNA, 15 bp, Homo sapiens
ggaagaaggtggcgg

SEQ ID NO: 1574103 - DNA, 15 bp, Homo sapiens
gaagaaggtggcggg

SEQ ID NO: 1574104 - DNA, 15 bp, Homo sapiens
aagaaggtggcgggt

SEQ ID NO: 1574105 - DNA, 15 bp, Homo sapiens
agaaggtggcgggtg

SEQ ID NO: 1574106 - DNA, 15 bp, Homo sapiens
gaaggtggcgggtga

SEQ ID NO: 1574107 - DNA, 15 bp, Homo sapiens
aaggtggcgggtgat

SEQ ID NO: 1574108 - DNA, 15 bp, Homo sapiens
aggtggcgggtgatg

SEQ ID NO: 1574109 - DNA, 15 bp, Homo sapiens
ggtggcgggtgatgg

SEQ ID NO: 1574110 - DNA, 15 bp, Homo sapiens
gtggcgggtgatggc

SEQ ID NO: 1574111 - DNA, 15 bp, Homo sapiens
tggcgggtgatggcg

SEQ ID NO: 1574112 - DNA, 15 bp, Homo sapiens
ggcgggtgatggcgg

SEQ ID NO: 1574113 - DNA, 15 bp, Homo sapiens
gcgggtgatggcggc

SEQ ID NO: 1574114 - DNA, 15 bp, Homo sapiens
cgggtgatggcggca

SEQ ID NO: 1574115 - DNA, 15 bp, Homo sapiens
gggtgatggcggcat

SEQ ID NO: 1574116 - DNA, 15 bp, Homo sapiens
ggtgatggcggcatg

SEQ ID NO: 1574117 - DNA, 15 bp, Homo sapiens
gtgatggcggcatgg

SEQ ID NO: 1574118 - DNA, 15 bp, Homo sapiens
tgatggcggcatggt

SEQ ID NO: 1574119 - DNA, 15 bp, Homo sapiens
gatggcggcatggta

SEQ ID NO: 1574120 - DNA, 15 bp, Homo sapiens
atggcggcatggtag

SEQ ID NO: 1574121 - DNA, 15 bp, Homo sapiens
tggcggcatggtagt

SEQ ID NO: 1574122 - DNA, 15 bp, Homo sapiens
ggcggcatggtagtg

SEQ ID NO: 1574123 - DNA, 15 bp, Homo sapiens
gcggcatggtagtgt

SEQ ID NO: 1574124 - DNA, 15 bp, Homo sapiens
cggcatggtagtgtg

SEQ ID NO: 1574125 - DNA, 15 bp, Homo sapiens
ggcatggtagtgtgc

SEQ ID NO: 1574126 - DNA, 15 bp, Homo sapiens
gcatggtagtgtgct

SEQ ID NO: 1574127 - DNA, 15 bp, Homo sapiens
catggtagtgtgctc

SEQ ID NO: 1574128 - DNA, 15 bp, Homo sapiens
atggtagtgtgctct

SEQ ID NO: 1574129 - DNA, 15 bp, Homo sapiens
tggtagtgtgctctg

SEQ ID NO: 1574130 - DNA, 15 bp, Homo sapiens
ggtagtgtgctctga

SEQ ID NO: 1574131 - DNA, 15 bp, Homo sapiens
gtagtgtgctctgaa

SEQ ID NO: 1574132 - DNA, 15 bp, Homo sapiens
tagtgtgctctgaag

SEQ ID NO: 1574133 - DNA, 15 bp, Homo sapiens
agtgtgctctgaagg

SEQ ID NO: 1574134 - DNA, 15 bp, Homo sapiens
gtgtgctctgaaggg

SEQ ID NO: 1574135 - DNA, 15 bp, Homo sapiens
tgtgctctgaagggc

SEQ ID NO: 1574136 - DNA, 15 bp, Homo sapiens
gtgctctgaagggct

SEQ ID NO: 1574137 - DNA, 15 bp, Homo sapiens
tgctctgaagggctc

SEQ ID NO: 1574138 - DNA, 15 bp, Homo sapiens
gctctgaagggctct

SEQ ID NO: 1574139 - DNA, 15 bp, Homo sapiens
ctctgaagggctctt

SEQ ID NO: 1574140 - DNA, 15 bp, Homo sapiens
tctgaagggctcttc

SEQ ID NO: 1574141 - DNA, 15 bp, Homo sapiens
ctgaagggctcttcg

SEQ ID NO: 1574142 - DNA, 15 bp, Homo sapiens
tgaagggctcttcga

SEQ ID NO: 1574143 - DNA, 15 bp, Homo sapiens
gaagggctcttcgag

SEQ ID NO: 1574144 - DNA, 15 bp, Homo sapiens
aagggctcttcgaga

SEQ ID NO: 1574145 - DNA, 15 bp, Homo sapiens
agggctcttcgagag

SEQ ID NO: 1574146 - DNA, 15 bp, Homo sapiens
gggctcttcgagagg

SEQ ID NO: 1574147 - DNA, 15 bp, Homo sapiens
ggctcttcgagaggt

SEQ ID NO: 1574148 - DNA, 15 bp, Homo sapiens
gctcttcgagaggtg

SEQ ID NO: 1574149 - DNA, 15 bp, Homo sapiens
ctcttcgagaggtga

SEQ ID NO: 1574150 - DNA, 15 bp, Homo sapiens
tcttcgagaggtgac

SEQ ID NO: 1574151 - DNA, 15 bp, Homo sapiens
cttcgagaggtgaca

SEQ ID NO: 1574152 - DNA, 15 bp, Homo sapiens
ttcgagaggtgacat

SEQ ID NO: 1574153 - DNA, 15 bp, Homo sapiens
tcgagaggtgacatt

SEQ ID NO: 1574154 - DNA, 15 bp, Homo sapiens
cgagaggtgacattg

SEQ ID NO: 1574155 - DNA, 15 bp, Homo sapiens
gagaggtgacattga

SEQ ID NO: 1574156 - DNA, 15 bp, Homo sapiens
agaggtgacattgaa

SEQ ID NO: 1574157 - DNA, 15 bp, Homo sapiens
gaggtgacattgaag

SEQ ID NO: 1574158 - DNA, 15 bp, Homo sapiens
aggtgacattgaagc

SEQ ID NO: 1574159 - DNA, 15 bp, Homo sapiens
ggtgacattgaagca

SEQ ID NO: 1574160 - DNA, 15 bp, Homo sapiens
gtgacattgaagcag

SEQ ID NO: 1574161 - DNA, 15 bp, Homo sapiens
tgacattgaagcaga

SEQ ID NO: 1574162 - DNA, 15 bp, Homo sapiens
gacattgaagcagat

SEQ ID NO: 1574163 - DNA, 15 bp, Homo sapiens
acattgaagcagatc

SEQ ID NO: 1574164 - DNA, 15 bp, Homo sapiens
cattgaagcagatcc

SEQ ID NO: 1574165 - DNA, 15 bp, Homo sapiens
attgaagcagatccc

SEQ ID NO: 1574166 - DNA, 15 bp, Homo sapiens
ttgaagcagatccct

SEQ ID NO: 1574167 - DNA, 15 bp, Homo sapiens
tgaagcagatccctg

SEQ ID NO: 1574168 - DNA, 15 bp, Homo sapiens
gaagcagatccctga

SEQ ID NO: 1574169 - DNA, 15 bp, Homo sapiens
aagcagatccctgaa

SEQ ID NO: 1574170 - DNA, 15 bp, Homo sapiens
agcagatccctgaag

SEQ ID NO: 1574171 - DNA, 15 bp, Homo sapiens
gcagatccctgaagc

SEQ ID NO: 1574172 - DNA, 15 bp, Homo sapiens
cagatccctgaagcg

SEQ ID NO: 1574173 - DNA, 15 bp, Homo sapiens
agatccctgaagcga

SEQ ID NO: 1574174 - DNA, 15 bp, Homo sapiens
gatccctgaagcgac

SEQ ID NO: 1574175 - DNA, 15 bp, Homo sapiens
atccctgaagcgacc

SEQ ID NO: 1574176 - DNA, 15 bp, Homo sapiens
tccctgaagcgacct

SEQ ID NO: 1574177 - DNA, 15 bp, Homo sapiens
ccctgaagcgacctg

SEQ ID NO: 1574178 - DNA, 15 bp, Homo sapiens
cctgaagcgacctga

SEQ ID NO: 1574179 - DNA, 15 bp, Homo sapiens
ctgaagcgacctgag

SEQ ID NO: 1574180 - DNA, 15 bp, Homo sapiens
tgaagcgacctgagg

SEQ ID NO: 1574181 - DNA, 15 bp, Homo sapiens
gaagcgacctgaggg

SEQ ID NO: 1574182 - DNA, 15 bp, Homo sapiens
aagcgacctgaggga

SEQ ID NO: 1574183 - DNA, 15 bp, Homo sapiens
agcgacctgagggaa

SEQ ID NO: 1574184 - DNA, 15 bp, Homo sapiens
gcgacctgagggaag

SEQ ID NO: 1574185 - DNA, 15 bp, Homo sapiens
cgacctgagggaagg

SEQ ID NO: 1574186 - DNA, 15 bp, Homo sapiens
gacctgagggaaggg

SEQ ID NO: 1574187 - DNA, 15 bp, Homo sapiens
acctgagggaagggg

SEQ ID NO: 1574188 - DNA, 15 bp, Homo sapiens
cctgagggaaggggc

SEQ ID NO: 1574189 - DNA, 15 bp, Homo sapiens
ctgagggaaggggcc

SEQ ID NO: 1574190 - DNA, 15 bp, Homo sapiens
tgagggaaggggcct

SEQ ID NO: 1574191 - DNA, 15 bp, Homo sapiens
gagggaaggggcctg

SEQ ID NO: 1574192 - DNA, 15 bp, Homo sapiens
agggaaggggcctgt

SEQ ID NO: 1574193 - DNA, 15 bp, Homo sapiens
gggaaggggcctgtt

SEQ ID NO: 1574194 - DNA, 15 bp, Homo sapiens
ggaaggggcctgttg

SEQ ID NO: 1574195 - DNA, 15 bp, Homo sapiens
gaaggggcctgttga

SEQ ID NO: 1574196 - DNA, 15 bp, Homo sapiens
aaggggcctgttgag

SEQ ID NO: 1574197 - DNA, 15 bp, Homo sapiens
aggggcctgttgaga

SEQ ID NO: 1574198 - DNA, 15 bp, Homo sapiens
ggggcctgttgagaa

SEQ ID NO: 1574199 - DNA, 15 bp, Homo sapiens
gggcctgttgagaac

SEQ ID NO: 1574200 - DNA, 15 bp, Homo sapiens
ggcctgttgagaacc

SEQ ID NO: 1574201 - DNA, 15 bp, Homo sapiens
gcctgttgagaacct

SEQ ID NO: 1574202 - DNA, 15 bp, Homo sapiens
cctgttgagaacctc

SEQ ID NO: 1574203 - DNA, 15 bp, Homo sapiens
ctgttgagaacctca

SEQ ID NO: 1574204 - DNA, 15 bp, Homo sapiens
tgttgagaacctcag

SEQ ID NO: 1574205 - DNA, 15 bp, Homo sapiens
gttgagaacctcagg

SEQ ID NO: 1574206 - DNA, 15 bp, Homo sapiens
ttgagaacctcagga

SEQ ID NO: 1574207 - DNA, 15 bp, Homo sapiens
tgagaacctcaggag

SEQ ID NO: 1574208 - DNA, 15 bp, Homo sapiens
gagaacctcaggaga

SEQ ID NO: 1574209 - DNA, 15 bp, Homo sapiens
agaacctcaggagag

SEQ ID NO: 1574210 - DNA, 15 bp, Homo sapiens
gaacctcaggagagt

SEQ ID NO: 1574211 - DNA, 15 bp, Homo sapiens
aacctcaggagagtc

SEQ ID NO: 1574212 - DNA, 15 bp, Homo sapiens
acctcaggagagtcc

SEQ ID NO: 1574213 - DNA, 15 bp, Homo sapiens
cctcaggagagtccc

SEQ ID NO: 1574214 - DNA, 15 bp, Homo sapiens
ctcaggagagtcccg

SEQ ID NO: 1574215 - DNA, 15 bp, Homo sapiens
tcaggagagtcccgg

SEQ ID NO: 1574216 - DNA, 15 bp, Homo sapiens
caggagagtcccggg

SEQ ID NO: 1574217 - DNA, 15 bp, Homo sapiens
aggagagtcccgggc

SEQ ID NO: 1574218 - DNA, 15 bp, Homo sapiens
ggagagtcccgggca

SEQ ID NO: 1574219 - DNA, 15 bp, Homo sapiens
gagagtcccgggcag

SEQ ID NO: 1574220 - DNA, 15 bp, Homo sapiens
agagtcccgggcaga

SEQ ID NO: 1574221 - DNA, 15 bp, Homo sapiens
gagtcccgggcagag

SEQ ID NO: 1574222 - DNA, 15 bp, Homo sapiens
agtcccgggcagagg

SEQ ID NO: 1574223 - DNA, 15 bp, Homo sapiens
gtcccgggcagaggg

SEQ ID NO: 1574224 - DNA, 15 bp, Homo sapiens
tcccgggcagaggga

SEQ ID NO: 1574225 - DNA, 15 bp, Homo sapiens
cccgggcagagggaa

SEQ ID NO: 1574226 - DNA, 15 bp, Homo sapiens
ccgggcagagggaag

SEQ ID NO: 1574227 - DNA, 15 bp, Homo sapiens
cgggcagagggaaga

SEQ ID NO: 1574228 - DNA, 15 bp, Homo sapiens
gggcagagggaagag

SEQ ID NO: 1574229 - DNA, 15 bp, Homo sapiens
ggcagagggaagagc

SEQ ID NO: 1574230 - DNA, 15 bp, Homo sapiens
gcagagggaagagct

SEQ ID NO: 1574231 - DNA, 15 bp, Homo sapiens
cagagggaagagcta

SEQ ID NO: 1574232 - DNA, 15 bp, Homo sapiens
agagggaagagctag

SEQ ID NO: 1574233 - DNA, 15 bp, Homo sapiens
gagggaagagctaga

SEQ ID NO: 1574234 - DNA, 15 bp, Homo sapiens
agggaagagctagaa

SEQ ID NO: 1574235 - DNA, 15 bp, Homo sapiens
gggaagagctagaac

SEQ ID NO: 1574236 - DNA, 15 bp, Homo sapiens
ggaagagctagaaca

SEQ ID NO: 1574237 - DNA, 15 bp, Homo sapiens
gaagagctagaacac

SEQ ID NO: 1574238 - DNA, 15 bp, Homo sapiens
aagagctagaacaca

SEQ ID NO: 1574239 - DNA, 15 bp, Homo sapiens
agagctagaacacag

SEQ ID NO: 1574240 - DNA, 15 bp, Homo sapiens
gagctagaacacagg

SEQ ID NO: 1574241 - DNA, 15 bp, Homo sapiens
agctagaacacaggc

SEQ ID NO: 1574242 - DNA, 15 bp, Homo sapiens
gctagaacacaggcc

SEQ ID NO: 1574243 - DNA, 15 bp, Homo sapiens
ctagaacacaggcca

SEQ ID NO: 1574244 - DNA, 15 bp, Homo sapiens
tagaacacaggccag

SEQ ID NO: 1574245 - DNA, 15 bp, Homo sapiens
agaacacaggccagg

SEQ ID NO: 1574246 - DNA, 15 bp, Homo sapiens
gaacacaggccaggc

SEQ ID NO: 1574247 - DNA, 15 bp, Homo sapiens
aacacaggccaggcc

SEQ ID NO: 1574248 - DNA, 15 bp, Homo sapiens
acacaggccaggccc

SEQ ID NO: 1574249 - DNA, 15 bp, Homo sapiens
cacaggccaggccct

SEQ ID NO: 1574250 - DNA, 15 bp, Homo sapiens
acaggccaggccctg

SEQ ID NO: 1574251 - DNA, 15 bp, Homo sapiens
caggccaggccctga

SEQ ID NO: 1574252 - DNA, 15 bp, Homo sapiens
aggccaggccctgag

SEQ ID NO: 1574253 - DNA, 15 bp, Homo sapiens
ggccaggccctgagc

SEQ ID NO: 1574254 - DNA, 15 bp, Homo sapiens
gccaggccctgagcc

SEQ ID NO: 1574255 - DNA, 15 bp, Homo sapiens
ccaggccctgagcca

SEQ ID NO: 1574256 - DNA, 15 bp, Homo sapiens
caggccctgagccag

SEQ ID NO: 1574257 - DNA, 15 bp, Homo sapiens
aggccctgagccagg

SEQ ID NO: 1574258 - DNA, 15 bp, Homo sapiens
ggccctgagccaggg

SEQ ID NO: 1574259 - DNA, 15 bp, Homo sapiens
gccctgagccagggc

SEQ ID NO: 1574260 - DNA, 15 bp, Homo sapiens
ccctgagccagggcc

SEQ ID NO: 1574261 - DNA, 15 bp, Homo sapiens
cctgagccagggccg

SEQ ID NO: 1574262 - DNA, 15 bp, Homo sapiens
ctgagccagggccgc

SEQ ID NO: 1574263 - DNA, 15 bp, Homo sapiens
tgagccagggccgcc

SEQ ID NO: 1574264 - DNA, 15 bp, Homo sapiens
gagccagggccgcca

SEQ ID NO: 1574265 - DNA, 15 bp, Homo sapiens
agccagggccgccat

SEQ ID NO: 1574266 - DNA, 15 bp, Homo sapiens
gccagggccgccatg

SEQ ID NO: 1574267 - DNA, 15 bp, Homo sapiens
ccagggccgccatgg

SEQ ID NO: 1574268 - DNA, 15 bp, Homo sapiens
cagggccgccatggt

SEQ ID NO: 1574269 - DNA, 15 bp, Homo sapiens
agggccgccatggtg

SEQ ID NO: 1574270 - DNA, 15 bp, Homo sapiens
gggccgccatggtgt

SEQ ID NO: 1574271 - DNA, 15 bp, Homo sapiens
ggccgccatggtgtg

SEQ ID NO: 1574272 - DNA, 15 bp, Homo sapiens
gccgccatggtgtgt

SEQ ID NO: 1574273 - DNA, 15 bp, Homo sapiens
ccgccatggtgtgtc

SEQ ID NO: 1574274 - DNA, 15 bp, Homo sapiens
cgccatggtgtgtct

SEQ ID NO: 1574275 - DNA, 15 bp, Homo sapiens
gccatggtgtgtctg

SEQ ID NO: 1574276 - DNA, 15 bp, Homo sapiens
ccatggtgtgtctgc

SEQ ID NO: 1574277 - DNA, 15 bp, Homo sapiens
catggtgtgtctgca

SEQ ID NO: 1574278 - DNA, 15 bp, Homo sapiens
atggtgtgtctgcag

SEQ ID NO: 1574279 - DNA, 15 bp, Homo sapiens
tggtgtgtctgcaga

SEQ ID NO: 1574280 - DNA, 15 bp, Homo sapiens
ggtgtgtctgcagaa

SEQ ID NO: 1574281 - DNA, 15 bp, Homo sapiens
gtgtgtctgcagaag

SEQ ID NO: 1574282 - DNA, 15 bp, Homo sapiens
tgtgtctgcagaaga

SEQ ID NO: 1574283 - DNA, 15 bp, Homo sapiens
gtgtctgcagaagag

SEQ ID NO: 1574284 - DNA, 15 bp, Homo sapiens
tgtctgcagaagagc

SEQ ID NO: 1574285 - DNA, 15 bp, Homo sapiens
gtctgcagaagagca

SEQ ID NO: 1574286 - DNA, 15 bp, Homo sapiens
tctgcagaagagcag

SEQ ID NO: 1574287 - DNA, 15 bp, Homo sapiens
ctgcagaagagcaga

SEQ ID NO: 1574288 - DNA, 15 bp, Homo sapiens
tgcagaagagcagaa

SEQ ID NO: 1574289 - DNA, 15 bp, Homo sapiens
gcagaagagcagaat

SEQ ID NO: 1574290 - DNA, 15 bp, Homo sapiens
cagaagagcagaatt

SEQ ID NO: 1574291 - DNA, 15 bp, Homo sapiens
agaagagcagaattc

SEQ ID NO: 1574292 - DNA, 15 bp, Homo sapiens
gaagagcagaattca

SEQ ID NO: 1574293 - DNA, 15 bp, Homo sapiens
aagagcagaattcag

SEQ ID NO: 1574294 - DNA, 15 bp, Homo sapiens
agagcagaattcagg

SEQ ID NO: 1574295 - DNA, 15 bp, Homo sapiens
gagcagaattcagga

SEQ ID NO: 1574296 - DNA, 15 bp, Homo sapiens
agcagaattcaggaa

SEQ ID NO: 1574297 - DNA, 15 bp, Homo sapiens
gcagaattcaggaaa

SEQ ID NO: 1574298 - DNA, 15 bp, Homo sapiens
cagaattcaggaaag

SEQ ID NO: 1574299 - DNA, 15 bp, Homo sapiens
agaattcaggaaagg

SEQ ID NO: 1574300 - DNA, 15 bp, Homo sapiens
gaattcaggaaagga

SEQ ID NO: 1574301 - DNA, 15 bp, Homo sapiens
aattcaggaaaggaa

SEQ ID NO: 1574302 - DNA, 15 bp, Homo sapiens
attcaggaaaggaaa

SEQ ID NO: 1574303 - DNA, 15 bp, Homo sapiens
ttcaggaaaggaaag

SEQ ID NO: 1574304 - DNA, 15 bp, Homo sapiens
tcaggaaaggaaaga

SEQ ID NO: 1574305 - DNA, 15 bp, Homo sapiens
caggaaaggaaagag

SEQ ID NO: 1574306 - DNA, 15 bp, Homo sapiens
aggaaaggaaagagg

SEQ ID NO: 1574307 - DNA, 15 bp, Homo sapiens
ggaaaggaaagagga

SEQ ID NO: 1574308 - DNA, 15 bp, Homo sapiens
gaaaggaaagaggaa

SEQ ID NO: 1574309 - DNA, 15 bp, Homo sapiens
aaaggaaagaggaag

SEQ ID NO: 1574310 - DNA, 15 bp, Homo sapiens
aaggaaagaggaagt

SEQ ID NO: 1574311 - DNA, 15 bp, Homo sapiens
aggaaagaggaagtt

SEQ ID NO: 1574312 - DNA, 15 bp, Homo sapiens
ggaaagaggaagttg

SEQ ID NO: 1574313 - DNA, 15 bp, Homo sapiens
gaaagaggaagttgg

SEQ ID NO: 1574314 - DNA, 15 bp, Homo sapiens
aaagaggaagttggc

SEQ ID NO: 1574315 - DNA, 15 bp, Homo sapiens
aagaggaagttggcg

SEQ ID NO: 1574316 - DNA, 15 bp, Homo sapiens
agaggaagttggcgc

SEQ ID NO: 1574317 - DNA, 15 bp, Homo sapiens
gaggaagttggcgca

SEQ ID NO: 1574318 - DNA, 15 bp, Homo sapiens
aggaagttggcgcag

SEQ ID NO: 1574319 - DNA, 15 bp, Homo sapiens
ggaagttggcgcagt

SEQ ID NO: 1574320 - DNA, 15 bp, Homo sapiens
gaagttggcgcagtg

SEQ ID NO: 1574321 - DNA, 15 bp, Homo sapiens
aagttggcgcagtgg

SEQ ID NO: 1574322 - DNA, 15 bp, Homo sapiens
agttggcgcagtgga

SEQ ID NO: 1574323 - DNA, 15 bp, Homo sapiens
gttggcgcagtggag

SEQ ID NO: 1574324 - DNA, 15 bp, Homo sapiens
ttggcgcagtggagg

SEQ ID NO: 1574325 - DNA, 15 bp, Homo sapiens
tggcgcagtggaggg

SEQ ID NO: 1574326 - DNA, 15 bp, Homo sapiens
ggcgcagtggagggg

SEQ ID NO: 1574327 - DNA, 15 bp, Homo sapiens
gcgcagtggaggggg

SEQ ID NO: 1574328 - DNA, 15 bp, Homo sapiens
cgcagtggagggggc

SEQ ID NO: 1574329 - DNA, 15 bp, Homo sapiens
gcagtggagggggct

SEQ ID NO: 1574330 - DNA, 15 bp, Homo sapiens
cagtggagggggctg

SEQ ID NO: 1574331 - DNA, 15 bp, Homo sapiens
agtggagggggctgc

SEQ ID NO: 1574332 - DNA, 15 bp, Homo sapiens
gtggagggggctgcc

SEQ ID NO: 1574333 - DNA, 15 bp, Homo sapiens
tggagggggctgccc

SEQ ID NO: 1574334 - DNA, 15 bp, Homo sapiens
ggagggggctgccca

SEQ ID NO: 1574335 - DNA, 15 bp, Homo sapiens
gagggggctgcccag

SEQ ID NO: 1574336 - DNA, 15 bp, Homo sapiens
agggggctgcccagg

SEQ ID NO: 1574337 - DNA, 15 bp, Homo sapiens
gggggctgcccaggc

SEQ ID NO: 1574338 - DNA, 15 bp, Homo sapiens
ggggctgcccaggcc

SEQ ID NO: 1574339 - DNA, 15 bp, Homo sapiens
gggctgcccaggcca

SEQ ID NO: 1574340 - DNA, 15 bp, Homo sapiens
ggctgcccaggccag

SEQ ID NO: 1574341 - DNA, 15 bp, Homo sapiens
gctgcccaggccaga

SEQ ID NO: 1574342 - DNA, 15 bp, Homo sapiens
ctgcccaggccagat

SEQ ID NO: 1574343 - DNA, 15 bp, Homo sapiens
tgcccaggccagatg

SEQ ID NO: 1574344 - DNA, 15 bp, Homo sapiens
gcccaggccagatgg

SEQ ID NO: 1574345 - DNA, 15 bp, Homo sapiens
cccaggccagatggt

SEQ ID NO: 1574346 - DNA, 15 bp, Homo sapiens
ccaggccagatggtg

SEQ ID NO: 1574347 - DNA, 15 bp, Homo sapiens
caggccagatggtgg

SEQ ID NO: 1574348 - DNA, 15 bp, Homo sapiens
aggccagatggtgga

SEQ ID NO: 1574349 - DNA, 15 bp, Homo sapiens
ggccagatggtggag

SEQ ID NO: 1574350 - DNA, 15 bp, Homo sapiens
gccagatggtggagg

SEQ ID NO: 1574351 - DNA, 15 bp, Homo sapiens
ccagatggtggagga

SEQ ID NO: 1574352 - DNA, 15 bp, Homo sapiens
cagatggtggaggac

SEQ ID NO: 1574353 - DNA, 15 bp, Homo sapiens
agatggtggaggacc

SEQ ID NO: 1574354 - DNA, 15 bp, Homo sapiens
gatggtggaggacct

SEQ ID NO: 1574355 - DNA, 15 bp, Homo sapiens
atggtggaggacctt

SEQ ID NO: 1574356 - DNA, 15 bp, Homo sapiens
tggtggaggaccttg

SEQ ID NO: 1574357 - DNA, 15 bp, Homo sapiens
ggtggaggaccttgg

SEQ ID NO: 1574358 - DNA, 15 bp, Homo sapiens
gtggaggaccttgga

SEQ ID NO: 1574359 - DNA, 15 bp, Homo sapiens
tggaggaccttggaa

SEQ ID NO: 1574360 - DNA, 15 bp, Homo sapiens
ggaggaccttggaag

SEQ ID NO: 1574361 - DNA, 15 bp, Homo sapiens
gaggaccttggaaga

SEQ ID NO: 1574362 - DNA, 15 bp, Homo sapiens
aggaccttggaagaa

SEQ ID NO: 1574363 - DNA, 15 bp, Homo sapiens
ggaccttggaagaag

SEQ ID NO: 1574364 - DNA, 15 bp, Homo sapiens
gaccttggaagaagt

SEQ ID NO: 1574365 - DNA, 15 bp, Homo sapiens
accttggaagaagtc

SEQ ID NO: 1574366 - DNA, 15 bp, Homo sapiens
ccttggaagaagtcc

SEQ ID NO: 1574367 - DNA, 15 bp, Homo sapiens
cttggaagaagtccc

SEQ ID NO: 1574368 - DNA, 15 bp, Homo sapiens
ttggaagaagtcccc

SEQ ID NO: 1574369 - DNA, 15 bp, Homo sapiens
tggaagaagtcccca

SEQ ID NO: 1574370 - DNA, 15 bp, Homo sapiens
ggaagaagtccccag

SEQ ID NO: 1574371 - DNA, 15 bp, Homo sapiens
gaagaagtccccagt

SEQ ID NO: 1574372 - DNA, 15 bp, Homo sapiens
aagaagtccccagtg

SEQ ID NO: 1574373 - DNA, 15 bp, Homo sapiens
agaagtccccagtgt

SEQ ID NO: 1574374 - DNA, 15 bp, Homo sapiens
gaagtccccagtgtg

SEQ ID NO: 1574375 - DNA, 15 bp, Homo sapiens
aagtccccagtgtgg

SEQ ID NO: 1574376 - DNA, 15 bp, Homo sapiens
agtccccagtgtggc

SEQ ID NO: 1574377 - DNA, 15 bp, Homo sapiens
gtccccagtgtggct

SEQ ID NO: 1574378 - DNA, 15 bp, Homo sapiens
tccccagtgtggctg

SEQ ID NO: 1574379 - DNA, 15 bp, Homo sapiens
ccccagtgtggctgt

SEQ ID NO: 1574380 - DNA, 15 bp, Homo sapiens
cccagtgtggctgtc

SEQ ID NO: 1574381 - DNA, 15 bp, Homo sapiens
ccagtgtggctgtct

SEQ ID NO: 1574382 - DNA, 15 bp, Homo sapiens
cagtgtggctgtctg

SEQ ID NO: 1574383 - DNA, 15 bp, Homo sapiens
agtgtggctgtctgg

SEQ ID NO: 1574384 - DNA, 15 bp, Homo sapiens
gtgtggctgtctggg

SEQ ID NO: 1574385 - DNA, 15 bp, Homo sapiens
tgtggctgtctgggc

SEQ ID NO: 1574386 - DNA, 15 bp, Homo sapiens
gtggctgtctgggct

SEQ ID NO: 1574387 - DNA, 15 bp, Homo sapiens
tggctgtctgggctc

SEQ ID NO: 1574388 - DNA, 15 bp, Homo sapiens
ggctgtctgggctcc

SEQ ID NO: 1574389 - DNA, 15 bp, Homo sapiens
gctgtctgggctcct

SEQ ID NO: 1574390 - DNA, 15 bp, Homo sapiens
ctgtctgggctcctg

SEQ ID NO: 1574391 - DNA, 15 bp, Homo sapiens
tgtctgggctcctgt

SEQ ID NO: 1574392 - DNA, 15 bp, Homo sapiens
gtctgggctcctgtg

SEQ ID NO: 1574393 - DNA, 15 bp, Homo sapiens
tctgggctcctgtgg

SEQ ID NO: 1574394 - DNA, 15 bp, Homo sapiens
ctgggctcctgtggt

SEQ ID NO: 1574395 - DNA, 15 bp, Homo sapiens
tgggctcctgtggtt

SEQ ID NO: 1574396 - DNA, 15 bp, Homo sapiens
gggctcctgtggttt

SEQ ID NO: 1574397 - DNA, 15 bp, Homo sapiens
ggctcctgtggtttt

SEQ ID NO: 1574398 - DNA, 15 bp, Homo sapiens
gctcctgtggtttta

SEQ ID NO: 1574399 - DNA, 15 bp, Homo sapiens
ctcctgtggttttat

SEQ ID NO: 1574400 - DNA, 15 bp, Homo sapiens
tcctgtggttttatt

SEQ ID NO: 1574401 - DNA, 15 bp, Homo sapiens
cctgtggttttattc

SEQ ID NO: 1574402 - DNA, 15 bp, Homo sapiens
ctgtggttttattcc

SEQ ID NO: 1574403 - DNA, 15 bp, Homo sapiens
tgtggttttattcca

SEQ ID NO: 1574404 - DNA, 15 bp, Homo sapiens
gtggttttattccag

SEQ ID NO: 1574405 - DNA, 15 bp, Homo sapiens
tggttttattccagg

SEQ ID NO: 1574406 - DNA, 15 bp, Homo sapiens
ggttttattccaggg

SEQ ID NO: 1574407 - DNA, 15 bp, Homo sapiens
gttttattccagggt

SEQ ID NO: 1574408 - DNA, 15 bp, Homo sapiens
ttttattccagggtg

SEQ ID NO: 1574409 - DNA, 15 bp, Homo sapiens
tttattccagggtga

SEQ ID NO: 1574410 - DNA, 15 bp, Homo sapiens
ttattccagggtgat

SEQ ID NO: 1574411 - DNA, 15 bp, Homo sapiens
tattccagggtgatg

SEQ ID NO: 1574412 - DNA, 15 bp, Homo sapiens
attccagggtgatga

SEQ ID NO: 1574413 - DNA, 15 bp, Homo sapiens
ttccagggtgatgag

SEQ ID NO: 1574414 - DNA, 15 bp, Homo sapiens
tccagggtgatgaga

SEQ ID NO: 1574415 - DNA, 15 bp, Homo sapiens
ccagggtgatgagaa

SEQ ID NO: 1574416 - DNA, 15 bp, Homo sapiens
cagggtgatgagaag

SEQ ID NO: 1574417 - DNA, 15 bp, Homo sapiens
agggtgatgagaagc

SEQ ID NO: 1574418 - DNA, 15 bp, Homo sapiens
gggtgatgagaagcc

SEQ ID NO: 1574419 - DNA, 15 bp, Homo sapiens
ggtgatgagaagcca

SEQ ID NO: 1574420 - DNA, 15 bp, Homo sapiens
gtgatgagaagccag

SEQ ID NO: 1574421 - DNA, 15 bp, Homo sapiens
tgatgagaagccagc

SEQ ID NO: 1574422 - DNA, 15 bp, Homo sapiens
gatgagaagccagca

SEQ ID NO: 1574423 - DNA, 15 bp, Homo sapiens
atgagaagccagcag

SEQ ID NO: 1574424 - DNA, 15 bp, Homo sapiens
tgagaagccagcaga

SEQ ID NO: 1574425 - DNA, 15 bp, Homo sapiens
gagaagccagcagag

SEQ ID NO: 1574426 - DNA, 15 bp, Homo sapiens
agaagccagcagagg

SEQ ID NO: 1574427 - DNA, 15 bp, Homo sapiens
gaagccagcagaggg

SEQ ID NO: 1574428 - DNA, 15 bp, Homo sapiens
aagccagcagagggg

SEQ ID NO: 1574429 - DNA, 15 bp, Homo sapiens
agccagcagaggggt

SEQ ID NO: 1574430 - DNA, 15 bp, Homo sapiens
gccagcagaggggtt

SEQ ID NO: 1574431 - DNA, 15 bp, Homo sapiens
ccagcagaggggttt

SEQ ID NO: 1574432 - DNA, 15 bp, Homo sapiens
cagcagaggggtttg

SEQ ID NO: 1574433 - DNA, 15 bp, Homo sapiens
agcagaggggtttgg

SEQ ID NO: 1574434 - DNA, 15 bp, Homo sapiens
gcagaggggtttggg

SEQ ID NO: 1574435 - DNA, 15 bp, Homo sapiens
cagaggggtttgggt

SEQ ID NO: 1574436 - DNA, 15 bp, Homo sapiens
agaggggtttgggtt

SEQ ID NO: 1574437 - DNA, 15 bp, Homo sapiens
gaggggtttgggttg

SEQ ID NO: 1574438 - DNA, 15 bp, Homo sapiens
aggggtttgggttgt

SEQ ID NO: 1574439 - DNA, 15 bp, Homo sapiens
ggggtttgggttgtg

SEQ ID NO: 1574440 - DNA, 15 bp, Homo sapiens
gggtttgggttgtgg

SEQ ID NO: 1574441 - DNA, 15 bp, Homo sapiens
ggtttgggttgtgga

SEQ ID NO: 1574442 - DNA, 15 bp, Homo sapiens
gtttgggttgtggag

SEQ ID NO: 1574443 - DNA, 15 bp, Homo sapiens
tttgggttgtggagg

SEQ ID NO: 1574444 - DNA, 15 bp, Homo sapiens
ttgggttgtggaggc

SEQ ID NO: 1574445 - DNA, 15 bp, Homo sapiens
tgggttgtggaggct

SEQ ID NO: 1574446 - DNA, 15 bp, Homo sapiens
gggttgtggaggctg

SEQ ID NO: 1574447 - DNA, 15 bp, Homo sapiens
ggttgtggaggctgt

SEQ ID NO: 1574448 - DNA, 15 bp, Homo sapiens
gttgtggaggctgtt

SEQ ID NO: 1574449 - DNA, 15 bp, Homo sapiens
ttgtggaggctgttg

SEQ ID NO: 1574450 - DNA, 15 bp, Homo sapiens
tgtggaggctgttgg

SEQ ID NO: 1574451 - DNA, 15 bp, Homo sapiens
gtggaggctgttggc

SEQ ID NO: 1574452 - DNA, 15 bp, Homo sapiens
tggaggctgttggca

SEQ ID NO: 1574453 - DNA, 15 bp, Homo sapiens
ggaggctgttggcaa

SEQ ID NO: 1574454 - DNA, 15 bp, Homo sapiens
gaggctgttggcaag

SEQ ID NO: 1574455 - DNA, 15 bp, Homo sapiens
aggctgttggcaaga

SEQ ID NO: 1574456 - DNA, 15 bp, Homo sapiens
ggctgttggcaagag

SEQ ID NO: 1574457 - DNA, 15 bp, Homo sapiens
gctgttggcaagagt

SEQ ID NO: 1574458 - DNA, 15 bp, Homo sapiens
ctgttggcaagagtg

SEQ ID NO: 1574459 - DNA, 15 bp, Homo sapiens
tgttggcaagagtgg

SEQ ID NO: 1574460 - DNA, 15 bp, Homo sapiens
gttggcaagagtggt

SEQ ID NO: 1574461 - DNA, 15 bp, Homo sapiens
ttggcaagagtggtg

SEQ ID NO: 1574462 - DNA, 15 bp, Homo sapiens
tggcaagagtggtgg

SEQ ID NO: 1574463 - DNA, 15 bp, Homo sapiens
ggcaagagtggtggg

SEQ ID NO: 1574464 - DNA, 15 bp, Homo sapiens
gcaagagtggtggga

SEQ ID NO: 1574465 - DNA, 15 bp, Homo sapiens
caagagtggtgggaa

SEQ ID NO: 1574466 - DNA, 15 bp, Homo sapiens
aagagtggtgggaag

SEQ ID NO: 1574467 - DNA, 15 bp, Homo sapiens
agagtggtgggaagg

SEQ ID NO: 1574468 - DNA, 15 bp, Homo sapiens
gagtggtgggaaggg

SEQ ID NO: 1574469 - DNA, 15 bp, Homo sapiens
agtggtgggaagggg

SEQ ID NO: 1574470 - DNA, 15 bp, Homo sapiens
gtggtgggaaggggc

SEQ ID NO: 1574471 - DNA, 15 bp, Homo sapiens
tggtgggaaggggct

SEQ ID NO: 1574472 - DNA, 15 bp, Homo sapiens
ggtgggaaggggctg

SEQ ID NO: 1574473 - DNA, 15 bp, Homo sapiens
gtgggaaggggctgg

SEQ ID NO: 1574474 - DNA, 15 bp, Homo sapiens
tgggaaggggctggg

SEQ ID NO: 1574475 - DNA, 15 bp, Homo sapiens
gggaaggggctggga

SEQ ID NO: 1574476 - DNA, 15 bp, Homo sapiens
ggaaggggctgggag

SEQ ID NO: 1574477 - DNA, 15 bp, Homo sapiens
gaaggggctgggagg

SEQ ID NO: 1574478 - DNA, 15 bp, Homo sapiens
aaggggctgggaggt

SEQ ID NO: 1574479 - DNA, 15 bp, Homo sapiens
aggggctgggaggta

SEQ ID NO: 1574480 - DNA, 15 bp, Homo sapiens
ggggctgggaggtag

SEQ ID NO: 1574481 - DNA, 15 bp, Homo sapiens
gggctgggaggtagg

SEQ ID NO: 1574482 - DNA, 15 bp, Homo sapiens
ggctgggaggtagga

SEQ ID NO: 1574483 - DNA, 15 bp, Homo sapiens
gctgggaggtaggag

SEQ ID NO: 1574484 - DNA, 15 bp, Homo sapiens
ctgggaggtaggaga

SEQ ID NO: 1574485 - DNA, 15 bp, Homo sapiens
tgggaggtaggagac

SEQ ID NO: 1574486 - DNA, 15 bp, Homo sapiens
gggaggtaggagacc

SEQ ID NO: 1574487 - DNA, 15 bp, Homo sapiens
ggaggtaggagacca

SEQ ID NO: 1574488 - DNA, 15 bp, Homo sapiens
gaggtaggagaccat

SEQ ID NO: 1574489 - DNA, 15 bp, Homo sapiens
aggtaggagaccata

SEQ ID NO: 1574490 - DNA, 15 bp, Homo sapiens
ggtaggagaccatac

SEQ ID NO: 1574491 - DNA, 15 bp, Homo sapiens
gtaggagaccatacg

SEQ ID NO: 1574492 - DNA, 15 bp, Homo sapiens
taggagaccatacga

SEQ ID NO: 1574493 - DNA, 15 bp, Homo sapiens
aggagaccatacgac

SEQ ID NO: 1574494 - DNA, 15 bp, Homo sapiens
ggagaccatacgact

SEQ ID NO: 1574495 - DNA, 15 bp, Homo sapiens
gagaccatacgactg

SEQ ID NO: 1574496 - DNA, 15 bp, Homo sapiens
agaccatacgactgt

SEQ ID NO: 1574497 - DNA, 15 bp, Homo sapiens
gaccatacgactgtc

SEQ ID NO: 1574498 - DNA, 15 bp, Homo sapiens
accatacgactgtca

SEQ ID NO: 1574499 - DNA, 15 bp, Homo sapiens
ccatacgactgtcag

SEQ ID NO: 1574500 - DNA, 15 bp, Homo sapiens
catacgactgtcagg

SEQ ID NO: 1574501 - DNA, 15 bp, Homo sapiens
atacgactgtcaggc

SEQ ID NO: 1574502 - DNA, 15 bp, Homo sapiens
tacgactgtcaggcc

SEQ ID NO: 1574503 - DNA, 15 bp, Homo sapiens
acgactgtcaggcct

SEQ ID NO: 1574504 - DNA, 15 bp, Homo sapiens
cgactgtcaggcctg

SEQ ID NO: 1574505 - DNA, 15 bp, Homo sapiens
gactgtcaggcctga

SEQ ID NO: 1574506 - DNA, 15 bp, Homo sapiens
actgtcaggcctgag

SEQ ID NO: 1574507 - DNA, 15 bp, Homo sapiens
ctgtcaggcctgaga

SEQ ID NO: 1574508 - DNA, 15 bp, Homo sapiens
tgtcaggcctgagac

SEQ ID NO: 1574509 - DNA, 15 bp, Homo sapiens
gtcaggcctgagaca

SEQ ID NO: 1574510 - DNA, 15 bp, Homo sapiens
tcaggcctgagacag

SEQ ID NO: 1574511 - DNA, 15 bp, Homo sapiens
caggcctgagacagg

SEQ ID NO: 1574512 - DNA, 15 bp, Homo sapiens
aggcctgagacaggg

SEQ ID NO: 1574513 - DNA, 15 bp, Homo sapiens
ggcctgagacagggc

SEQ ID NO: 1574514 - DNA, 15 bp, Homo sapiens
gcctgagacagggca

SEQ ID NO: 1574515 - DNA, 15 bp, Homo sapiens
cctgagacagggcag

SEQ ID NO: 1574516 - DNA, 15 bp, Homo sapiens
ctgagacagggcagg

SEQ ID NO: 1574517 - DNA, 15 bp, Homo sapiens
tgagacagggcaggg

SEQ ID NO: 1574518 - DNA, 15 bp, Homo sapiens
gagacagggcagggg

SEQ ID NO: 1574519 - DNA, 15 bp, Homo sapiens
agacagggcaggggt

SEQ ID NO: 1574520 - DNA, 15 bp, Homo sapiens
gacagggcaggggtt

SEQ ID NO: 1574521 - DNA, 15 bp, Homo sapiens
acagggcaggggttg

SEQ ID NO: 1574522 - DNA, 15 bp, Homo sapiens
cagggcaggggttgg

SEQ ID NO: 1574523 - DNA, 15 bp, Homo sapiens
agggcaggggttggg

SEQ ID NO: 1574524 - DNA, 15 bp, Homo sapiens
gggcaggggttgggg

SEQ ID NO: 1574525 - DNA, 15 bp, Homo sapiens
ggcaggggttggggg

SEQ ID NO: 1574526 - DNA, 15 bp, Homo sapiens
gcaggggttggggga

SEQ ID NO: 1574527 - DNA, 15 bp, Homo sapiens
caggggttgggggaa

SEQ ID NO: 1574528 - DNA, 15 bp, Homo sapiens
aggggttgggggaaa

SEQ ID NO: 1574529 - DNA, 15 bp, Homo sapiens
ggggttgggggaaat

SEQ ID NO: 1574530 - DNA, 15 bp, Homo sapiens
gggttgggggaaatg

SEQ ID NO: 1574531 - DNA, 15 bp, Homo sapiens
ggttgggggaaatgt

SEQ ID NO: 1574532 - DNA, 15 bp, Homo sapiens
gttgggggaaatgtg

SEQ ID NO: 1574533 - DNA, 15 bp, Homo sapiens
ttgggggaaatgtgg

SEQ ID NO: 1574534 - DNA, 15 bp, Homo sapiens
tgggggaaatgtggg

SEQ ID NO: 1574535 - DNA, 15 bp, Homo sapiens
gggggaaatgtgggg

SEQ ID NO: 1574536 - DNA, 15 bp, Homo sapiens
ggggaaatgtgggga

SEQ ID NO: 1574537 - DNA, 15 bp, Homo sapiens
gggaaatgtggggag

SEQ ID NO: 1574538 - DNA, 15 bp, Homo sapiens
ggaaatgtggggagg

SEQ ID NO: 1574539 - DNA, 15 bp, Homo sapiens
gaaatgtggggagga

SEQ ID NO: 1574540 - DNA, 15 bp, Homo sapiens
aaatgtggggaggac

SEQ ID NO: 1574541 - DNA, 15 bp, Homo sapiens
aatgtggggaggact

SEQ ID NO: 1574542 - DNA, 15 bp, Homo sapiens
atgtggggaggactc

SEQ ID NO: 1574543 - DNA, 15 bp, Homo sapiens
tgtggggaggactcc

SEQ ID NO: 1574544 - DNA, 15 bp, Homo sapiens
gtggggaggactcca

SEQ ID NO: 1574545 - DNA, 15 bp, Homo sapiens
tggggaggactccaa

SEQ ID NO: 1574546 - DNA, 15 bp, Homo sapiens
ggggaggactccaag

SEQ ID NO: 1574547 - DNA, 15 bp, Homo sapiens
gggaggactccaagg

SEQ ID NO: 1574548 - DNA, 15 bp, Homo sapiens
ggaggactccaaggc

SEQ ID NO: 1574549 - DNA, 15 bp, Homo sapiens
gaggactccaaggct

SEQ ID NO: 1574550 - DNA, 15 bp, Homo sapiens
aggactccaaggctg

SEQ ID NO: 1574551 - DNA, 15 bp, Homo sapiens
ggactccaaggctgg

SEQ ID NO: 1574552 - DNA, 15 bp, Homo sapiens
gactccaaggctgga

SEQ ID NO: 1574553 - DNA, 15 bp, Homo sapiens
actccaaggctggag

SEQ ID NO: 1574554 - DNA, 15 bp, Homo sapiens
ctccaaggctggaga

SEQ ID NO: 1574555 - DNA, 15 bp, Homo sapiens
tccaaggctggagaa

SEQ ID NO: 1574556 - DNA, 15 bp, Homo sapiens
ccaaggctggagaat

SEQ ID NO: 1574557 - DNA, 15 bp, Homo sapiens
caaggctggagaata

SEQ ID NO: 1574558 - DNA, 15 bp, Homo sapiens
aaggctggagaataa

SEQ ID NO: 1574559 - DNA, 15 bp, Homo sapiens
aggctggagaataag

SEQ ID NO: 1574560 - DNA, 15 bp, Homo sapiens
ggctggagaataagg

SEQ ID NO: 1574561 - DNA, 15 bp, Homo sapiens
gctggagaataaggg

SEQ ID NO: 1574562 - DNA, 15 bp, Homo sapiens
ctggagaataagggt

SEQ ID NO: 1574563 - DNA, 15 bp, Homo sapiens
tggagaataagggtt

SEQ ID NO: 1574564 - DNA, 15 bp, Homo sapiens
ggagaataagggttt

SEQ ID NO: 1574565 - DNA, 15 bp, Homo sapiens
gagaataagggtttc

SEQ ID NO: 1574566 - DNA, 15 bp, Homo sapiens
agaataagggtttcg

SEQ ID NO: 1574567 - DNA, 15 bp, Homo sapiens
gaataagggtttcgt

SEQ ID NO: 1574568 - DNA, 15 bp, Homo sapiens
aataagggtttcgtg

SEQ ID NO: 1574569 - DNA, 15 bp, Homo sapiens
ataagggtttcgtgc

SEQ ID NO: 1574570 - DNA, 15 bp, Homo sapiens
taagggtttcgtgct

SEQ ID NO: 1574571 - DNA, 15 bp, Homo sapiens
aagggtttcgtgctg

SEQ ID NO: 1574572 - DNA, 15 bp, Homo sapiens
agggtttcgtgctga

SEQ ID NO: 1574573 - DNA, 15 bp, Homo sapiens
gggtttcgtgctgaa

SEQ ID NO: 1574574 - DNA, 15 bp, Homo sapiens
ggtttcgtgctgaac

SEQ ID NO: 1574575 - DNA, 15 bp, Homo sapiens
gtttcgtgctgaact

SEQ ID NO: 1574576 - DNA, 15 bp, Homo sapiens
tttcgtgctgaactc

SEQ ID NO: 1574577 - DNA, 15 bp, Homo sapiens
ttcgtgctgaactcc

SEQ ID NO: 1574578 - DNA, 15 bp, Homo sapiens
tcgtgctgaactccc

SEQ ID NO: 1574579 - DNA, 15 bp, Homo sapiens
cgtgctgaactcccc

SEQ ID NO: 1574580 - DNA, 15 bp, Homo sapiens
gtgctgaactcccct

SEQ ID NO: 1574581 - DNA, 15 bp, Homo sapiens
tgctgaactcccctc

SEQ ID NO: 1574582 - DNA, 15 bp, Homo sapiens
gctgaactcccctcc

SEQ ID NO: 1574583 - DNA, 15 bp, Homo sapiens
ctgaactcccctcca

SEQ ID NO: 1574584 - DNA, 15 bp, Homo sapiens
tgaactcccctccat

SEQ ID NO: 1574585 - DNA, 15 bp, Homo sapiens
gaactcccctccatg

SEQ ID NO: 1574586 - DNA, 15 bp, Homo sapiens
aactcccctccatgc

SEQ ID NO: 1574587 - DNA, 15 bp, Homo sapiens
actcccctccatgct

SEQ ID NO: 1574588 - DNA, 15 bp, Homo sapiens
ctcccctccatgctt

SEQ ID NO: 1574589 - DNA, 15 bp, Homo sapiens
tcccctccatgcttg

SEQ ID NO: 1574590 - DNA, 15 bp, Homo sapiens
cccctccatgcttgg

SEQ ID NO: 1574591 - DNA, 15 bp, Homo sapiens
ccctccatgcttgga

SEQ ID NO: 1574592 - DNA, 15 bp, Homo sapiens
cctccatgcttggaa

SEQ ID NO: 1574593 - DNA, 15 bp, Homo sapiens
ctccatgcttggaag

SEQ ID NO: 1574594 - DNA, 15 bp, Homo sapiens
tccatgcttggaagg

SEQ ID NO: 1574595 - DNA, 15 bp, Homo sapiens
ccatgcttggaaggg

SEQ ID NO: 1574596 - DNA, 15 bp, Homo sapiens
catgcttggaaggga

SEQ ID NO: 1574597 - DNA, 15 bp, Homo sapiens
atgcttggaagggaa

SEQ ID NO: 1574598 - DNA, 15 bp, Homo sapiens
tgcttggaagggaag

SEQ ID NO: 1574599 - DNA, 15 bp, Homo sapiens
gcttggaagggaagg

SEQ ID NO: 1574600 - DNA, 15 bp, Homo sapiens
cttggaagggaaggg

SEQ ID NO: 1574601 - DNA, 15 bp, Homo sapiens
ttggaagggaagggg

SEQ ID NO: 1574602 - DNA, 15 bp, Homo sapiens
tggaagggaaggggt

SEQ ID NO: 1574603 - DNA, 15 bp, Homo sapiens
ggaagggaaggggtg

SEQ ID NO: 1574604 - DNA, 15 bp, Homo sapiens
gaagggaaggggtgc

SEQ ID NO: 1574605 - DNA, 15 bp, Homo sapiens
aagggaaggggtgca

SEQ ID NO: 1574606 - DNA, 15 bp, Homo sapiens
agggaaggggtgcat

SEQ ID NO: 1574607 - DNA, 15 bp, Homo sapiens
gggaaggggtgcatc

SEQ ID NO: 1574608 - DNA, 15 bp, Homo sapiens
ggaaggggtgcatct

SEQ ID NO: 1574609 - DNA, 15 bp, Homo sapiens
gaaggggtgcatctg

SEQ ID NO: 1574610 - DNA, 15 bp, Homo sapiens
aaggggtgcatctga

SEQ ID NO: 1574611 - DNA, 15 bp, Homo sapiens
aggggtgcatctgag

SEQ ID NO: 1574612 - DNA, 15 bp, Homo sapiens
ggggtgcatctgagc

SEQ ID NO: 1574613 - DNA, 15 bp, Homo sapiens
gggtgcatctgagct

SEQ ID NO: 1574614 - DNA, 15 bp, Homo sapiens
ggtgcatctgagctt

SEQ ID NO: 1574615 - DNA, 15 bp, Homo sapiens
gtgcatctgagcttg

SEQ ID NO: 1574616 - DNA, 15 bp, Homo sapiens
tgcatctgagcttgg

SEQ ID NO: 1574617 - DNA, 15 bp, Homo sapiens
gcatctgagcttggt

SEQ ID NO: 1574618 - DNA, 15 bp, Homo sapiens
catctgagcttggtt

SEQ ID NO: 1574619 - DNA, 15 bp, Homo sapiens
atctgagcttggttt

SEQ ID NO: 1574620 - DNA, 15 bp, Homo sapiens
tctgagcttggtttt

SEQ ID NO: 1574621 - DNA, 15 bp, Homo sapiens
ctgagcttggttttg

SEQ ID NO: 1574622 - DNA, 15 bp, Homo sapiens
tgagcttggttttga

SEQ ID NO: 1574623 - DNA, 15 bp, Homo sapiens
gagcttggttttgag

SEQ ID NO: 1574624 - DNA, 15 bp, Homo sapiens
agcttggttttgaga

SEQ ID NO: 1574625 - DNA, 15 bp, Homo sapiens
gcttggttttgagat

SEQ ID NO: 1574626 - DNA, 15 bp, Homo sapiens
cttggttttgagatg

SEQ ID NO: 1574627 - DNA, 15 bp, Homo sapiens
ttggttttgagatgc

SEQ ID NO: 1574628 - DNA, 15 bp, Homo sapiens
tggttttgagatgca

SEQ ID NO: 1574629 - DNA, 15 bp, Homo sapiens
ggttttgagatgcag

SEQ ID NO: 1574630 - DNA, 15 bp, Homo sapiens
gttttgagatgcagt

SEQ ID NO: 1574631 - DNA, 15 bp, Homo sapiens
ttttgagatgcagtg

SEQ ID NO: 1574632 - DNA, 15 bp, Homo sapiens
tttgagatgcagtga

SEQ ID NO: 1574633 - DNA, 15 bp, Homo sapiens
ttgagatgcagtgag

SEQ ID NO: 1574634 - DNA, 15 bp, Homo sapiens
tgagatgcagtgagt

SEQ ID NO: 1574635 - DNA, 15 bp, Homo sapiens
gagatgcagtgagtt

SEQ ID NO: 1574636 - DNA, 15 bp, Homo sapiens
agatgcagtgagttt

SEQ ID NO: 1574637 - DNA, 15 bp, Homo sapiens
gatgcagtgagtttg

SEQ ID NO: 1574638 - DNA, 15 bp, Homo sapiens
atgcagtgagtttga

SEQ ID NO: 1574639 - DNA, 15 bp, Homo sapiens
tgcagtgagtttgag

SEQ ID NO: 1574640 - DNA, 15 bp, Homo sapiens
gcagtgagtttgagg

SEQ ID NO: 1574641 - DNA, 15 bp, Homo sapiens
cagtgagtttgaggg

SEQ ID NO: 1574642 - DNA, 15 bp, Homo sapiens
agtgagtttgagggg

SEQ ID NO: 1574643 - DNA, 15 bp, Homo sapiens
gtgagtttgaggggc

SEQ ID NO: 1574644 - DNA, 15 bp, Homo sapiens
tgagtttgaggggcc

SEQ ID NO: 1574645 - DNA, 15 bp, Homo sapiens
gagtttgaggggccc

SEQ ID NO: 1574646 - DNA, 15 bp, Homo sapiens
agtttgaggggcccc

SEQ ID NO: 1574647 - DNA, 15 bp, Homo sapiens
gtttgaggggccccc

SEQ ID NO: 1574648 - DNA, 15 bp, Homo sapiens
tttgaggggccccca

SEQ ID NO: 1574649 - DNA, 15 bp, Homo sapiens
ttgaggggcccccag

SEQ ID NO: 1574650 - DNA, 15 bp, Homo sapiens
tgaggggcccccaga

SEQ ID NO: 1574651 - DNA, 15 bp, Homo sapiens
gaggggcccccagag

SEQ ID NO: 1574652 - DNA, 15 bp, Homo sapiens
aggggcccccagagc

SEQ ID NO: 1574653 - DNA, 15 bp, Homo sapiens
ggggcccccagagca

SEQ ID NO: 1574654 - DNA, 15 bp, Homo sapiens
gggcccccagagcag

SEQ ID NO: 1574655 - DNA, 15 bp, Homo sapiens
ggcccccagagcagc

SEQ ID NO: 1574656 - DNA, 15 bp, Homo sapiens
gcccccagagcagcc

SEQ ID NO: 1574657 - DNA, 15 bp, Homo sapiens
cccccagagcagccc

SEQ ID NO: 1574658 - DNA, 15 bp, Homo sapiens
ccccagagcagcccc

SEQ ID NO: 1574659 - DNA, 15 bp, Homo sapiens
cccagagcagcccca

SEQ ID NO: 1574660 - DNA, 15 bp, Homo sapiens
ccagagcagccccag

SEQ ID NO: 1574661 - DNA, 15 bp, Homo sapiens
cagagcagccccagc

SEQ ID NO: 1574662 - DNA, 15 bp, Homo sapiens
agagcagccccagcc

SEQ ID NO: 1574663 - DNA, 15 bp, Homo sapiens
gagcagccccagccc

SEQ ID NO: 1574664 - DNA, 15 bp, Homo sapiens
agcagccccagcccc

SEQ ID NO: 1574665 - DNA, 15 bp, Homo sapiens
gcagccccagcccca

SEQ ID NO: 1574666 - DNA, 15 bp, Homo sapiens
cagccccagccccac

SEQ ID NO: 1574667 - DNA, 15 bp, Homo sapiens
agccccagccccacg

SEQ ID NO: 1574668 - DNA, 15 bp, Homo sapiens
gccccagccccacga

SEQ ID NO: 1574669 - DNA, 15 bp, Homo sapiens
ccccagccccacgac

SEQ ID NO: 1574670 - DNA, 15 bp, Homo sapiens
cccagccccacgact

SEQ ID NO: 1574671 - DNA, 15 bp, Homo sapiens
ccagccccacgactt

SEQ ID NO: 1574672 - DNA, 15 bp, Homo sapiens
cagccccacgactta

SEQ ID NO: 1574673 - DNA, 15 bp, Homo sapiens
agccccacgacttac

SEQ ID NO: 1574674 - DNA, 15 bp, Homo sapiens
gccccacgacttacc

SEQ ID NO: 1574675 - DNA, 15 bp, Homo sapiens
ccccacgacttacct

SEQ ID NO: 1574676 - DNA, 15 bp, Homo sapiens
cccacgacttacctg

SEQ ID NO: 1574677 - DNA, 15 bp, Homo sapiens
ccacgacttacctgt

SEQ ID NO: 1574678 - DNA, 15 bp, Homo sapiens
cacgacttacctgtg

SEQ ID NO: 1574679 - DNA, 15 bp, Homo sapiens
acgacttacctgtgg

SEQ ID NO: 1574680 - DNA, 15 bp, Homo sapiens
cgacttacctgtggt

SEQ ID NO: 1574681 - DNA, 15 bp, Homo sapiens
gacttacctgtggtg

SEQ ID NO: 1574682 - DNA, 15 bp, Homo sapiens
acttacctgtggtgg

SEQ ID NO: 1574683 - DNA, 15 bp, Homo sapiens
cttacctgtggtggg

SEQ ID NO: 1574684 - DNA, 15 bp, Homo sapiens
ttacctgtggtgggg

SEQ ID NO: 1574685 - DNA, 15 bp, Homo sapiens
tacctgtggtggggc

SEQ ID NO: 1574686 - DNA, 15 bp, Homo sapiens
acctgtggtggggcg

SEQ ID NO: 1574687 - DNA, 15 bp, Homo sapiens
cctgtggtggggcgt

SEQ ID NO: 1574688 - DNA, 15 bp, Homo sapiens
ctgtggtggggcgtc

SEQ ID NO: 1574689 - DNA, 15 bp, Homo sapiens
tgtggtggggcgtca

SEQ ID NO: 1574690 - DNA, 15 bp, Homo sapiens
gtggtggggcgtcag

SEQ ID NO: 1574691 - DNA, 15 bp, Homo sapiens
tggtggggcgtcagg

SEQ ID NO: 1574692 - DNA, 15 bp, Homo sapiens
ggtggggcgtcaggg

SEQ ID NO: 1574693 - DNA, 15 bp, Homo sapiens
gtggggcgtcagggt

SEQ ID NO: 1574694 - DNA, 15 bp, Homo sapiens
tggggcgtcagggtg

SEQ ID NO: 1574695 - DNA, 15 bp, Homo sapiens
ggggcgtcagggtgg

SEQ ID NO: 1574696 - DNA, 15 bp, Homo sapiens
gggcgtcagggtggt

SEQ ID NO: 1574697 - DNA, 15 bp, Homo sapiens
ggcgtcagggtggtt

SEQ ID NO: 1574698 - DNA, 15 bp, Homo sapiens
gcgtcagggtggttc

SEQ ID NO: 1574699 - DNA, 15 bp, Homo sapiens
cgtcagggtggttct

SEQ ID NO: 1574700 - DNA, 15 bp, Homo sapiens
gtcagggtggttctt

SEQ ID NO: 1574701 - DNA, 15 bp, Homo sapiens
tcagggtggttctta

SEQ ID NO: 1574702 - DNA, 15 bp, Homo sapiens
cagggtggttcttaa

SEQ ID NO: 1574703 - DNA, 15 bp, Homo sapiens
agggtggttcttaat

SEQ ID NO: 1574704 - DNA, 15 bp, Homo sapiens
gggtggttcttaatc

SEQ ID NO: 1574705 - DNA, 15 bp, Homo sapiens
ggtggttcttaatct

SEQ ID NO: 1574706 - DNA, 15 bp, Homo sapiens
gtggttcttaatctc

SEQ ID NO: 1574707 - DNA, 15 bp, Homo sapiens
tggttcttaatctcc

SEQ ID NO: 1574708 - DNA, 15 bp, Homo sapiens
ggttcttaatctccg

SEQ ID NO: 1574709 - DNA, 15 bp, Homo sapiens
gttcttaatctccgt

SEQ ID NO: 1574710 - DNA, 15 bp, Homo sapiens
ttcttaatctccgta

SEQ ID NO: 1574711 - DNA, 15 bp, Homo sapiens
tcttaatctccgtac

SEQ ID NO: 1574712 - DNA, 15 bp, Homo sapiens
cttaatctccgtacc

SEQ ID NO: 1574713 - DNA, 15 bp, Homo sapiens
ttaatctccgtacct

SEQ ID NO: 1574714 - DNA, 15 bp, Homo sapiens
taatctccgtacctg

SEQ ID NO: 1574715 - DNA, 15 bp, Homo sapiens
aatctccgtacctgt

SEQ ID NO: 1574716 - DNA, 15 bp, Homo sapiens
atctccgtacctgtc

SEQ ID NO: 1574717 - DNA, 15 bp, Homo sapiens
tctccgtacctgtct

SEQ ID NO: 1574718 - DNA, 15 bp, Homo sapiens
ctccgtacctgtctt

SEQ ID NO: 1574719 - DNA, 15 bp, Homo sapiens
tccgtacctgtcttc

SEQ ID NO: 1574720 - DNA, 15 bp, Homo sapiens
ccgtacctgtcttcc

SEQ ID NO: 1574721 - DNA, 15 bp, Homo sapiens
cgtacctgtcttccc

SEQ ID NO: 1574722 - DNA, 15 bp, Homo sapiens
gtacctgtcttccct

SEQ ID NO: 1574723 - DNA, 15 bp, Homo sapiens
acctgtcttccctct

SEQ ID NO: 1574724 - DNA, 15 bp, Homo sapiens
cctgtcttccctctg

SEQ ID NO: 1574725 - DNA, 15 bp, Homo sapiens
ctgtcttccctctgt

SEQ ID NO: 1574726 - DNA, 15 bp, Homo sapiens
tgtcttccctctgtg

SEQ ID NO: 1574727 - DNA, 15 bp, Homo sapiens
gtcttccctctgtga

SEQ ID NO: 1574728 - DNA, 15 bp, Homo sapiens
tcttccctctgtgaa

SEQ ID NO: 1574729 - DNA, 15 bp, Homo sapiens
cttccctctgtgaaa

SEQ ID NO: 1574730 - DNA, 15 bp, Homo sapiens
ttccctctgtgaaat

SEQ ID NO: 1574731 - DNA, 15 bp, Homo sapiens
tccctctgtgaaatg

SEQ ID NO: 1574732 - DNA, 15 bp, Homo sapiens
ccctctgtgaaatgg

SEQ ID NO: 1574733 - DNA, 15 bp, Homo sapiens
cctctgtgaaatggt

SEQ ID NO: 1574734 - DNA, 15 bp, Homo sapiens
ctctgtgaaatggtg

SEQ ID NO: 1574735 - DNA, 15 bp, Homo sapiens
tctgtgaaatggtgg

SEQ ID NO: 1574736 - DNA, 15 bp, Homo sapiens
ctgtgaaatggtgga

SEQ ID NO: 1574737 - DNA, 15 bp, Homo sapiens
tgtgaaatggtggaa

SEQ ID NO: 1574738 - DNA, 15 bp, Homo sapiens
gtgaaatggtggaag

SEQ ID NO: 1574739 - DNA, 15 bp, Homo sapiens
tgaaatggtggaagc

SEQ ID NO: 1574740 - DNA, 15 bp, Homo sapiens
gaaatggtggaagca

SEQ ID NO: 1574741 - DNA, 15 bp, Homo sapiens
aaatggtggaagcac

SEQ ID NO: 1574742 - DNA, 15 bp, Homo sapiens
aatggtggaagcaca

SEQ ID NO: 1574743 - DNA, 15 bp, Homo sapiens
atggtggaagcacag

SEQ ID NO: 1574744 - DNA, 15 bp, Homo sapiens
tggtggaagcacagc

SEQ ID NO: 1574745 - DNA, 15 bp, Homo sapiens
ggtggaagcacagcc

SEQ ID NO: 1574746 - DNA, 15 bp, Homo sapiens
gtggaagcacagccg

SEQ ID NO: 1574747 - DNA, 15 bp, Homo sapiens
tggaagcacagccgc

SEQ ID NO: 1574748 - DNA, 15 bp, Homo sapiens
ggaagcacagccgcc

SEQ ID NO: 1574749 - DNA, 15 bp, Homo sapiens
gaagcacagccgccc

SEQ ID NO: 1574750 - DNA, 15 bp, Homo sapiens
aagcacagccgcccc

SEQ ID NO: 1574751 - DNA, 15 bp, Homo sapiens
agcacagccgccccg

SEQ ID NO: 1574752 - DNA, 15 bp, Homo sapiens
gcacagccgccccgg

SEQ ID NO: 1574753 - DNA, 15 bp, Homo sapiens
cacagccgccccggg

SEQ ID NO: 1574754 - DNA, 15 bp, Homo sapiens
acagccgccccgggc

SEQ ID NO: 1574755 - DNA, 15 bp, Homo sapiens
cagccgccccgggca

SEQ ID NO: 1574756 - DNA, 15 bp, Homo sapiens
agccgccccgggcac

SEQ ID NO: 1574757 - DNA, 15 bp, Homo sapiens
gccgccccgggcacc

SEQ ID NO: 1574758 - DNA, 15 bp, Homo sapiens
ccgccccgggcacct

SEQ ID NO: 1574759 - DNA, 15 bp, Homo sapiens
cgccccgggcacctg

SEQ ID NO: 1574760 - DNA, 15 bp, Homo sapiens
gccccgggcacctgg

SEQ ID NO: 1574761 - DNA, 15 bp, Homo sapiens
ccccgggcacctggt

SEQ ID NO: 1574762 - DNA, 15 bp, Homo sapiens
cccgggcacctggtg

SEQ ID NO: 1574763 - DNA, 15 bp, Homo sapiens
ccgggcacctggtgg

SEQ ID NO: 1574764 - DNA, 15 bp, Homo sapiens
cgggcacctggtggg

SEQ ID NO: 1574765 - DNA, 15 bp, Homo sapiens
ggcacctggtgggga

SEQ ID NO: 1574766 - DNA, 15 bp, Homo sapiens
gcacctggtggggat

SEQ ID NO: 1574767 - DNA, 15 bp, Homo sapiens
cacctggtggggatg

SEQ ID NO: 1574768 - DNA, 15 bp, Homo sapiens
acctggtggggatgc

SEQ ID NO: 1574769 - DNA, 15 bp, Homo sapiens
cctggtggggatgca

SEQ ID NO: 1574770 - DNA, 15 bp, Homo sapiens
ctggtggggatgcag

SEQ ID NO: 1574771 - DNA, 15 bp, Homo sapiens
tggtggggatgcagt

SEQ ID NO: 1574772 - DNA, 15 bp, Homo sapiens
ggtggggatgcagtg

SEQ ID NO: 1574773 - DNA, 15 bp, Homo sapiens
gtggggatgcagtga

SEQ ID NO: 1574774 - DNA, 15 bp, Homo sapiens
tggggatgcagtgag

SEQ ID NO: 1574775 - DNA, 15 bp, Homo sapiens
ggggatgcagtgagt

SEQ ID NO: 1574776 - DNA, 15 bp, Homo sapiens
gggatgcagtgagtc

SEQ ID NO: 1574777 - DNA, 15 bp, Homo sapiens
ggatgcagtgagtct

SEQ ID NO: 1574778 - DNA, 15 bp, Homo sapiens
gatgcagtgagtctt

SEQ ID NO: 1574779 - DNA, 15 bp, Homo sapiens
atgcagtgagtcttg

SEQ ID NO: 1574780 - DNA, 15 bp, Homo sapiens
tgcagtgagtcttgg

SEQ ID NO: 1574781 - DNA, 15 bp, Homo sapiens
gcagtgagtcttggt

SEQ ID NO: 1574782 - DNA, 15 bp, Homo sapiens
cagtgagtcttggtg

SEQ ID NO: 1574783 - DNA, 15 bp, Homo sapiens
agtgagtcttggtgg

SEQ ID NO: 1574784 - DNA, 15 bp, Homo sapiens
gtgagtcttggtggc

SEQ ID NO: 1574785 - DNA, 15 bp, Homo sapiens
tgagtcttggtggcc

SEQ ID NO: 1574786 - DNA, 15 bp, Homo sapiens
gagtcttggtggcca

SEQ ID NO: 1574787 - DNA, 15 bp, Homo sapiens
agtcttggtggccac

SEQ ID NO: 1574788 - DNA, 15 bp, Homo sapiens
gtcttggtggccaca

SEQ ID NO: 1574789 - DNA, 15 bp, Homo sapiens
tcttggtggccacac

SEQ ID NO: 1574790 - DNA, 15 bp, Homo sapiens
cttggtggccacaca

SEQ ID NO: 1574791 - DNA, 15 bp, Homo sapiens
ttggtggccacacag

SEQ ID NO: 1574792 - DNA, 15 bp, Homo sapiens
tggtggccacacagt

SEQ ID NO: 1574793 - DNA, 15 bp, Homo sapiens
ggtggccacacagta

SEQ ID NO: 1574794 - DNA, 15 bp, Homo sapiens
gtggccacacagtaa

SEQ ID NO: 1574795 - DNA, 15 bp, Homo sapiens
tggccacacagtaag

SEQ ID NO: 1574796 - DNA, 15 bp, Homo sapiens
ggccacacagtaagg

SEQ ID NO: 1574797 - DNA, 15 bp, Homo sapiens
gccacacagtaaggc

SEQ ID NO: 1574798 - DNA, 15 bp, Homo sapiens
ccacacagtaaggcg

SEQ ID NO: 1574799 - DNA, 15 bp, Homo sapiens
cacacagtaaggcga

SEQ ID NO: 1574800 - DNA, 15 bp, Homo sapiens
acacagtaaggcgaa

SEQ ID NO: 1574801 - DNA, 15 bp, Homo sapiens
cacagtaaggcgaag

SEQ ID NO: 1574802 - DNA, 15 bp, Homo sapiens
acagtaaggcgaaga

SEQ ID NO: 1574803 - DNA, 15 bp, Homo sapiens
cagtaaggcgaagag

SEQ ID NO: 1574804 - DNA, 15 bp, Homo sapiens
agtaaggcgaagaga

SEQ ID NO: 1574805 - DNA, 15 bp, Homo sapiens
gtaaggcgaagagag

SEQ ID NO: 1574806 - DNA, 15 bp, Homo sapiens
taaggcgaagagagg

SEQ ID NO: 1574807 - DNA, 15 bp, Homo sapiens
aaggcgaagagagga

SEQ ID NO: 1574808 - DNA, 15 bp, Homo sapiens
aggcgaagagaggac

SEQ ID NO: 1574809 - DNA, 15 bp, Homo sapiens
ggcgaagagaggact

SEQ ID NO: 1574810 - DNA, 15 bp, Homo sapiens
gcgaagagaggactc

SEQ ID NO: 1574811 - DNA, 15 bp, Homo sapiens
cgaagagaggactca

SEQ ID NO: 1574812 - DNA, 15 bp, Homo sapiens
gaagagaggactcag

SEQ ID NO: 1574813 - DNA, 15 bp, Homo sapiens
aagagaggactcaga

SEQ ID NO: 1574814 - DNA, 15 bp, Homo sapiens
agagaggactcagaa

SEQ ID NO: 1574815 - DNA, 15 bp, Homo sapiens
gagaggactcagaac

SEQ ID NO: 1574816 - DNA, 15 bp, Homo sapiens
agaggactcagaacc

SEQ ID NO: 1574817 - DNA, 15 bp, Homo sapiens
gaggactcagaaccc

SEQ ID NO: 1574818 - DNA, 15 bp, Homo sapiens
aggactcagaaccct

SEQ ID NO: 1574819 - DNA, 15 bp, Homo sapiens
ggactcagaaccctc

SEQ ID NO: 1574820 - DNA, 15 bp, Homo sapiens
gactcagaaccctcc

SEQ ID NO: 1574821 - DNA, 15 bp, Homo sapiens
actcagaaccctccc

SEQ ID NO: 1574822 - DNA, 15 bp, Homo sapiens
ctcagaaccctccca

SEQ ID NO: 1574823 - DNA, 15 bp, Homo sapiens
tcagaaccctcccac

SEQ ID NO: 1574824 - DNA, 15 bp, Homo sapiens
cagaaccctcccacc

SEQ ID NO: 1574825 - DNA, 15 bp, Homo sapiens
agaaccctcccaccc

SEQ ID NO: 1574826 - DNA, 15 bp, Homo sapiens
gaaccctcccacccc

SEQ ID NO: 1574827 - DNA, 15 bp, Homo sapiens
aaccctcccacccca

SEQ ID NO: 1574828 - DNA, 15 bp, Homo sapiens
accctcccaccccac

SEQ ID NO: 1574829 - DNA, 15 bp, Homo sapiens
ccctcccaccccact

SEQ ID NO: 1574830 - DNA, 15 bp, Homo sapiens
cctcccaccccactc

SEQ ID NO: 1574831 - DNA, 15 bp, Homo sapiens
ctcccaccccactct

SEQ ID NO: 1574832 - DNA, 15 bp, Homo sapiens
tcccaccccactctc

SEQ ID NO: 1574833 - DNA, 15 bp, Homo sapiens
cccaccccactctca

SEQ ID NO: 1574834 - DNA, 15 bp, Homo sapiens
ccaccccactctcac

SEQ ID NO: 1574835 - DNA, 15 bp, Homo sapiens
caccccactctcacc

SEQ ID NO: 1574836 - DNA, 15 bp, Homo sapiens
accccactctcaccc

SEQ ID NO: 1574837 - DNA, 15 bp, Homo sapiens
ccccactctcacccc

SEQ ID NO: 1574838 - DNA, 15 bp, Homo sapiens
cccactctcaccccc

SEQ ID NO: 1574839 - DNA, 15 bp, Homo sapiens
ccactctcacccccg

SEQ ID NO: 1574840 - DNA, 15 bp, Homo sapiens
cccattgccacatcc

SEQ ID NO: 1574841 - DNA, 15 bp, Homo sapiens
ccattgccacatcca

SEQ ID NO: 1574842 - DNA, 15 bp, Homo sapiens
cattgccacatccac

SEQ ID NO: 1574843 - DNA, 15 bp, Homo sapiens
attgccacatccact

SEQ ID NO: 1574844 - DNA, 15 bp, Homo sapiens
ttgccacatccactg

SEQ ID NO: 1574845 - DNA, 15 bp, Homo sapiens
tgccacatccactgg

SEQ ID NO: 1574846 - DNA, 15 bp, Homo sapiens
gccacatccactggc

SEQ ID NO: 1574847 - DNA, 15 bp, Homo sapiens
ccacatccactggcc

SEQ ID NO: 1574848 - DNA, 15 bp, Homo sapiens
cacatccactggcct

SEQ ID NO: 1574849 - DNA, 15 bp, Homo sapiens
acatccactggcctc

SEQ ID NO: 1574850 - DNA, 15 bp, Homo sapiens
catccactggcctcc

SEQ ID NO: 1574851 - DNA, 15 bp, Homo sapiens
atccactggcctcct

SEQ ID NO: 1574852 - DNA, 15 bp, Homo sapiens
tccactggcctcctt

SEQ ID NO: 1574853 - DNA, 15 bp, Homo sapiens
ccactggcctccttt

SEQ ID NO: 1574854 - DNA, 15 bp, Homo sapiens
cactggcctcctttg

SEQ ID NO: 1574855 - DNA, 15 bp, Homo sapiens
actggcctcctttgc

SEQ ID NO: 1574856 - DNA, 15 bp, Homo sapiens
ctggcctcctttgct

SEQ ID NO: 1574857 - DNA, 15 bp, Homo sapiens
tggcctcctttgctg

SEQ ID NO: 1574858 - DNA, 15 bp, Homo sapiens
ggcctcctttgctgt

SEQ ID NO: 1574859 - DNA, 15 bp, Homo sapiens
gcctcctttgctgtc

SEQ ID NO: 1574860 - DNA, 15 bp, Homo sapiens
cctcctttgctgtct

SEQ ID NO: 1574861 - DNA, 15 bp, Homo sapiens
ctcctttgctgtctg

SEQ ID NO: 1574862 - DNA, 15 bp, Homo sapiens
tcctttgctgtctgg

SEQ ID NO: 1574863 - DNA, 15 bp, Homo sapiens
cctttgctgtctggg

SEQ ID NO: 1574864 - DNA, 15 bp, Homo sapiens
ctttgctgtctgggc

SEQ ID NO: 1574865 - DNA, 15 bp, Homo sapiens
tttgctgtctgggct

SEQ ID NO: 1574866 - DNA, 15 bp, Homo sapiens
ttgctgtctgggctc

SEQ ID NO: 1574867 - DNA, 15 bp, Homo sapiens
tgctgtctgggctcc

SEQ ID NO: 1574868 - DNA, 15 bp, Homo sapiens
gctgtctgggctcca

SEQ ID NO: 1574869 - DNA, 15 bp, Homo sapiens
ctgtctgggctccaa

SEQ ID NO: 1574870 - DNA, 15 bp, Homo sapiens
tgtctgggctccaag

SEQ ID NO: 1574871 - DNA, 15 bp, Homo sapiens
gtctgggctccaagc

SEQ ID NO: 1574872 - DNA, 15 bp, Homo sapiens
tctgggctccaagca

SEQ ID NO: 1574873 - DNA, 15 bp, Homo sapiens
ctgggctccaagcat

SEQ ID NO: 1574874 - DNA, 15 bp, Homo sapiens
tgggctccaagcatc

SEQ ID NO: 1574875 - DNA, 15 bp, Homo sapiens
gggctccaagcatct

SEQ ID NO: 1574876 - DNA, 15 bp, Homo sapiens
ggctccaagcatctg

SEQ ID NO: 1574877 - DNA, 15 bp, Homo sapiens
gctccaagcatctga

SEQ ID NO: 1574878 - DNA, 15 bp, Homo sapiens
ctccaagcatctgat

SEQ ID NO: 1574879 - DNA, 15 bp, Homo sapiens
tccaagcatctgatg

SEQ ID NO: 1574880 - DNA, 15 bp, Homo sapiens
ccaagcatctgatgc

SEQ ID NO: 1574881 - DNA, 15 bp, Homo sapiens
caagcatctgatgct

SEQ ID NO: 1574882 - DNA, 15 bp, Homo sapiens
aagcatctgatgctg

SEQ ID NO: 1574883 - DNA, 15 bp, Homo sapiens
agcatctgatgctgc

SEQ ID NO: 1574884 - DNA, 15 bp, Homo sapiens
gcatctgatgctgcc

SEQ ID NO: 1574885 - DNA, 15 bp, Homo sapiens
catctgatgctgcct

SEQ ID NO: 1574886 - DNA, 15 bp, Homo sapiens
atctgatgctgcctg

SEQ ID NO: 1574887 - DNA, 15 bp, Homo sapiens
tctgatgctgcctgt

SEQ ID NO: 1574888 - DNA, 15 bp, Homo sapiens
ctgatgctgcctgtt

SEQ ID NO: 1574889 - DNA, 15 bp, Homo sapiens
tgatgctgcctgttt

SEQ ID NO: 1574890 - DNA, 15 bp, Homo sapiens
gatgctgcctgtttc

SEQ ID NO: 1574891 - DNA, 15 bp, Homo sapiens
atgctgcctgtttcc

SEQ ID NO: 1574892 - DNA, 15 bp, Homo sapiens
tgctgcctgtttccc

SEQ ID NO: 1574893 - DNA, 15 bp, Homo sapiens
gctgcctgtttccct

SEQ ID NO: 1574894 - DNA, 15 bp, Homo sapiens
ctgcctgtttccctc

SEQ ID NO: 1574895 - DNA, 15 bp, Homo sapiens
tgcctgtttccctct

SEQ ID NO: 1574896 - DNA, 15 bp, Homo sapiens
gcctgtttccctctg

SEQ ID NO: 1574897 - DNA, 15 bp, Homo sapiens
cctgtttccctctgt

SEQ ID NO: 1574898 - DNA, 15 bp, Homo sapiens
ctgtttccctctgtt

SEQ ID NO: 1574899 - DNA, 15 bp, Homo sapiens
tgtttccctctgttc

SEQ ID NO: 1574900 - DNA, 15 bp, Homo sapiens
gtttccctctgttcc

SEQ ID NO: 1574901 - DNA, 15 bp, Homo sapiens
tttccctctgttcct

SEQ ID NO: 1574902 - DNA, 15 bp, Homo sapiens
ttccctctgttcctt

SEQ ID NO: 1574903 - DNA, 15 bp, Homo sapiens
tccctctgttccttt

SEQ ID NO: 1574904 - DNA, 15 bp, Homo sapiens
ccctctgttcctttc

SEQ ID NO: 1574905 - DNA, 15 bp, Homo sapiens
cctctgttcctttct

SEQ ID NO: 1574906 - DNA, 15 bp, Homo sapiens
ctctgttcctttctg

SEQ ID NO: 1574907 - DNA, 15 bp, Homo sapiens
tctgttcctttctgg

SEQ ID NO: 1574908 - DNA, 15 bp, Homo sapiens
ctgttcctttctgga

SEQ ID NO: 1574909 - DNA, 15 bp, Homo sapiens
tgttcctttctggaa

SEQ ID NO: 1574910 - DNA, 15 bp, Homo sapiens
gttcctttctggaat

SEQ ID NO: 1574911 - DNA, 15 bp, Homo sapiens
ttcctttctggaatc

SEQ ID NO: 1574912 - DNA, 15 bp, Homo sapiens
tcctttctggaatct

SEQ ID NO: 1574913 - DNA, 15 bp, Homo sapiens
cctttctggaatctt

SEQ ID NO: 1574914 - DNA, 15 bp, Homo sapiens
ctttctggaatcttc

SEQ ID NO: 1574915 - DNA, 15 bp, Homo sapiens
tttctggaatcttcc

SEQ ID NO: 1574916 - DNA, 15 bp, Homo sapiens
ttctggaatcttcct

SEQ ID NO: 1574917 - DNA, 15 bp, Homo sapiens
tctggaatcttcctt

SEQ ID NO: 1574918 - DNA, 15 bp, Homo sapiens
ctggaatcttccttt

SEQ ID NO: 1574919 - DNA, 15 bp, Homo sapiens
tggaatcttcctttc

SEQ ID NO: 1574920 - DNA, 15 bp, Homo sapiens
ggaatcttcctttct

SEQ ID NO: 1574921 - DNA, 15 bp, Homo sapiens
gaatcttcctttctc

SEQ ID NO: 1574922 - DNA, 15 bp, Homo sapiens
aatcttcctttctcc

SEQ ID NO: 1574923 - DNA, 15 bp, Homo sapiens
atcttcctttctcct

SEQ ID NO: 1574924 - DNA, 15 bp, Homo sapiens
tcttcctttctcctc

SEQ ID NO: 1574925 - DNA, 15 bp, Homo sapiens
cttcctttctcctcc

SEQ ID NO: 1574926 - DNA, 15 bp, Homo sapiens
ttcctttctcctcca

SEQ ID NO: 1574927 - DNA, 15 bp, Homo sapiens
tcctttctcctccat

SEQ ID NO: 1574928 - DNA, 15 bp, Homo sapiens
cctttctcctccatc

SEQ ID NO: 1574929 - DNA, 15 bp, Homo sapiens
ctttctcctccatcc

SEQ ID NO: 1574930 - DNA, 15 bp, Homo sapiens
tttctcctccatcct

SEQ ID NO: 1574931 - DNA, 15 bp, Homo sapiens
ttctcctccatcctc

SEQ ID NO: 1574932 - DNA, 15 bp, Homo sapiens
tctcctccatcctct

SEQ ID NO: 1574933 - DNA, 15 bp, Homo sapiens
ctcctccatcctctc

SEQ ID NO: 1574934 - DNA, 15 bp, Homo sapiens
tcctccatcctctct

SEQ ID NO: 1574935 - DNA, 15 bp, Homo sapiens
cctccatcctctctg

SEQ ID NO: 1574936 - DNA, 15 bp, Homo sapiens
ctccatcctctctga

SEQ ID NO: 1574937 - DNA, 15 bp, Homo sapiens
tccatcctctctgat

SEQ ID NO: 1574938 - DNA, 15 bp, Homo sapiens
ccatcctctctgatt

SEQ ID NO: 1574939 - DNA, 15 bp, Homo sapiens
catcctctctgattc

SEQ ID NO: 1574940 - DNA, 15 bp, Homo sapiens
atcctctctgattct

SEQ ID NO: 1574941 - DNA, 15 bp, Homo sapiens
tcctctctgattctc

SEQ ID NO: 1574942 - DNA, 15 bp, Homo sapiens
cctctctgattctcc

SEQ ID NO: 1574943 - DNA, 15 bp, Homo sapiens
ctctctgattctcct

SEQ ID NO: 1574944 - DNA, 15 bp, Homo sapiens
tctctgattctcctg

SEQ ID NO: 1574945 - DNA, 15 bp, Homo sapiens
ctctgattctcctgt

SEQ ID NO: 1574946 - DNA, 15 bp, Homo sapiens
tctgattctcctgtg

SEQ ID NO: 1574947 - DNA, 15 bp, Homo sapiens
ctgattctcctgtga

SEQ ID NO: 1574948 - DNA, 15 bp, Homo sapiens
tgattctcctgtgat

SEQ ID NO: 1574949 - DNA, 15 bp, Homo sapiens
gattctcctgtgatc

SEQ ID NO: 1574950 - DNA, 15 bp, Homo sapiens
attctcctgtgatct

SEQ ID NO: 1574951 - DNA, 15 bp, Homo sapiens
ttctcctgtgatctt

SEQ ID NO: 1574952 - DNA, 15 bp, Homo sapiens
tctcctgtgatcttt

SEQ ID NO: 1574953 - DNA, 15 bp, Homo sapiens
ctcctgtgatctttg

SEQ ID NO: 1574954 - DNA, 15 bp, Homo sapiens
tcctgtgatctttgc

SEQ ID NO: 1574955 - DNA, 15 bp, Homo sapiens
cctgtgatctttgcc

SEQ ID NO: 1574956 - DNA, 15 bp, Homo sapiens
ctgtgatctttgcct

SEQ ID NO: 1574957 - DNA, 15 bp, Homo sapiens
tgtgatctttgcctt

SEQ ID NO: 1574958 - DNA, 15 bp, Homo sapiens
gtgatctttgccttt

SEQ ID NO: 1574959 - DNA, 15 bp, Homo sapiens
tgatctttgcctttc

SEQ ID NO: 1574960 - DNA, 15 bp, Homo sapiens
gatctttgcctttcc

SEQ ID NO: 1574961 - DNA, 15 bp, Homo sapiens
atctttgcctttcct

SEQ ID NO: 1574962 - DNA, 15 bp, Homo sapiens
tctttgcctttccta

SEQ ID NO: 1574963 - DNA, 15 bp, Homo sapiens
ctttgcctttcctac

SEQ ID NO: 1574964 - DNA, 15 bp, Homo sapiens
tttgcctttcctacc

SEQ ID NO: 1574965 - DNA, 15 bp, Homo sapiens
ttgcctttcctaccc

SEQ ID NO: 1574966 - DNA, 15 bp, Homo sapiens
tgcctttcctacccc

SEQ ID NO: 1574967 - DNA, 15 bp, Homo sapiens
gcctttcctacccca

SEQ ID NO: 1574968 - DNA, 15 bp, Homo sapiens
cctttcctaccccac

SEQ ID NO: 1574969 - DNA, 15 bp, Homo sapiens
ctttcctaccccact

SEQ ID NO: 1574970 - DNA, 15 bp, Homo sapiens
tttcctaccccactg

SEQ ID NO: 1574971 - DNA, 15 bp, Homo sapiens
ttcctaccccactgt

SEQ ID NO: 1574972 - DNA, 15 bp, Homo sapiens
tcctaccccactgtt

SEQ ID NO: 1574973 - DNA, 15 bp, Homo sapiens
cctaccccactgtta

SEQ ID NO: 1574974 - DNA, 15 bp, Homo sapiens
ctaccccactgttaa

SEQ ID NO: 1574975 - DNA, 15 bp, Homo sapiens
taccccactgttaac

SEQ ID NO: 1574976 - DNA, 15 bp, Homo sapiens
accccactgttaaca

SEQ ID NO: 1574977 - DNA, 15 bp, Homo sapiens
ccccactgttaacag

SEQ ID NO: 1574978 - DNA, 15 bp, Homo sapiens
cccactgttaacagt

SEQ ID NO: 1574979 - DNA, 15 bp, Homo sapiens
ccactgttaacagtg

SEQ ID NO: 1574980 - DNA, 15 bp, Homo sapiens
cactgttaacagtga

SEQ ID NO: 1574981 - DNA, 15 bp, Homo sapiens
actgttaacagtgaa

SEQ ID NO: 1574982 - DNA, 15 bp, Homo sapiens
ctgttaacagtgaaa

SEQ ID NO: 1574983 - DNA, 15 bp, Homo sapiens
tgttaacagtgaaat

SEQ ID NO: 1574984 - DNA, 15 bp, Homo sapiens
gttaacagtgaaatt

SEQ ID NO: 1574985 - DNA, 15 bp, Homo sapiens
ttaacagtgaaattt

SEQ ID NO: 1574986 - DNA, 15 bp, Homo sapiens
taacagtgaaatttc

SEQ ID NO: 1574987 - DNA, 15 bp, Homo sapiens
aacagtgaaatttcc

SEQ ID NO: 1574988 - DNA, 15 bp, Homo sapiens
acagtgaaatttcca

SEQ ID NO: 1574989 - DNA, 15 bp, Homo sapiens
cagtgaaatttccag

SEQ ID NO: 1574990 - DNA, 15 bp, Homo sapiens
agtgaaatttccagg

SEQ ID NO: 1574991 - DNA, 15 bp, Homo sapiens
gtgaaatttccaggg

SEQ ID NO: 1574992 - DNA, 15 bp, Homo sapiens
tgaaatttccagggc

SEQ ID NO: 1574993 - DNA, 15 bp, Homo sapiens
gaaatttccagggct

SEQ ID NO: 1574994 - DNA, 15 bp, Homo sapiens
aaatttccagggctg

SEQ ID NO: 1574995 - DNA, 15 bp, Homo sapiens
aatttccagggctgt

SEQ ID NO: 1574996 - DNA, 15 bp, Homo sapiens
atttccagggctgtc

SEQ ID NO: 1574997 - DNA, 15 bp, Homo sapiens
tttccagggctgtcc

SEQ ID NO: 1574998 - DNA, 15 bp, Homo sapiens
ttccagggctgtccc

SEQ ID NO: 1574999 - DNA, 15 bp, Homo sapiens
tccagggctgtccca

SEQ ID NO: 1575000 - DNA, 15 bp, Homo sapiens
ccagggctgtcccag

SEQ ID NO: 1575001 - DNA, 15 bp, Homo sapiens
cagggctgtcccagt

SEQ ID NO: 1575002 - DNA, 15 bp, Homo sapiens
agggctgtcccagtt

SEQ ID NO: 1575003 - DNA, 15 bp, Homo sapiens
gggctgtcccagttc

SEQ ID NO: 1575004 - DNA, 15 bp, Homo sapiens
ggctgtcccagttcc

SEQ ID NO: 1575005 - DNA, 15 bp, Homo sapiens
gctgtcccagttcca

SEQ ID NO: 1575006 - DNA, 15 bp, Homo sapiens
ctgtcccagttccaa

SEQ ID NO: 1575007 - DNA, 15 bp, Homo sapiens
tgtcccagttccaag

SEQ ID NO: 1575008 - DNA, 15 bp, Homo sapiens
gtcccagttccaagt

SEQ ID NO: 1575009 - DNA, 15 bp, Homo sapiens
tcccagttccaagtg

SEQ ID NO: 1575010 - DNA, 15 bp, Homo sapiens
cccagttccaagtga

SEQ ID NO: 1575011 - DNA, 15 bp, Homo sapiens
ccagttccaagtgag

SEQ ID NO: 1575012 - DNA, 15 bp, Homo sapiens
cagttccaagtgagt

SEQ ID NO: 1575013 - DNA, 15 bp, Homo sapiens
agttccaagtgagta

SEQ ID NO: 1575014 - DNA, 15 bp, Homo sapiens
gttccaagtgagtag

SEQ ID NO: 1575015 - DNA, 15 bp, Homo sapiens
ttccaagtgagtaga

SEQ ID NO: 1575016 - DNA, 15 bp, Homo sapiens
tccaagtgagtagat

SEQ ID NO: 1575017 - DNA, 15 bp, Homo sapiens
ccaagtgagtagatg

SEQ ID NO: 1575018 - DNA, 15 bp, Homo sapiens
caagtgagtagatgg

SEQ ID NO: 1575019 - DNA, 15 bp, Homo sapiens
aagtgagtagatggg

SEQ ID NO: 1575020 - DNA, 15 bp, Homo sapiens
agtgagtagatgggg

SEQ ID NO: 1575021 - DNA, 15 bp, Homo sapiens
gtgagtagatggggg

SEQ ID NO: 1575022 - DNA, 15 bp, Homo sapiens
tgagtagatgggggt

SEQ ID NO: 1575023 - DNA, 15 bp, Homo sapiens
gagtagatgggggtg

SEQ ID NO: 1575024 - DNA, 15 bp, Homo sapiens
agtagatgggggtgc

SEQ ID NO: 1575025 - DNA, 15 bp, Homo sapiens
gtagatgggggtgcc

SEQ ID NO: 1575026 - DNA, 15 bp, Homo sapiens
tagatgggggtgccg

SEQ ID NO: 1575027 - DNA, 15 bp, Homo sapiens
agatgggggtgccgg

SEQ ID NO: 1575028 - DNA, 15 bp, Homo sapiens
gatgggggtgccggg

SEQ ID NO: 1575029 - DNA, 15 bp, Homo sapiens
atgggggtgccgggg

SEQ ID NO: 1575030 - DNA, 15 bp, Homo sapiens
tgggggtgccgggga

SEQ ID NO: 1575031 - DNA, 15 bp, Homo sapiens
gggggtgccggggaa

SEQ ID NO: 1575032 - DNA, 15 bp, Homo sapiens
ggggtgccggggaat

SEQ ID NO: 1575033 - DNA, 15 bp, Homo sapiens
gggtgccggggaatc

SEQ ID NO: 1575034 - DNA, 15 bp, Homo sapiens
ggtgccggggaatct

SEQ ID NO: 1575035 - DNA, 15 bp, Homo sapiens
gtgccggggaatctg

SEQ ID NO: 1575036 - DNA, 15 bp, Homo sapiens
tgccggggaatctgt

SEQ ID NO: 1575037 - DNA, 15 bp, Homo sapiens
gccggggaatctgtg

SEQ ID NO: 1575038 - DNA, 15 bp, Homo sapiens
ccggggaatctgtgt

SEQ ID NO: 1575039 - DNA, 15 bp, Homo sapiens
cggggaatctgtgtt

SEQ ID NO: 1575040 - DNA, 15 bp, Homo sapiens
ggggaatctgtgttt

SEQ ID NO: 1575041 - DNA, 15 bp, Homo sapiens
gggaatctgtgtttt

SEQ ID NO: 1575042 - DNA, 15 bp, Homo sapiens
ggaatctgtgttttc

SEQ ID NO: 1575043 - DNA, 15 bp, Homo sapiens
gaatctgtgttttcc

SEQ ID NO: 1575044 - DNA, 15 bp, Homo sapiens
aatctgtgttttcca

SEQ ID NO: 1575045 - DNA, 15 bp, Homo sapiens
atctgtgttttccat

SEQ ID NO: 1575046 - DNA, 15 bp, Homo sapiens
tctgtgttttccatc

SEQ ID NO: 1575047 - DNA, 15 bp, Homo sapiens
ctgtgttttccatca

SEQ ID NO: 1575048 - DNA, 15 bp, Homo sapiens
tgtgttttccatcag

SEQ ID NO: 1575049 - DNA, 15 bp, Homo sapiens
gtgttttccatcagc

SEQ ID NO: 1575050 - DNA, 15 bp, Homo sapiens
tgttttccatcagct

SEQ ID NO: 1575051 - DNA, 15 bp, Homo sapiens
gttttccatcagctc

SEQ ID NO: 1575052 - DNA, 15 bp, Homo sapiens
ttttccatcagctct

SEQ ID NO: 1575053 - DNA, 15 bp, Homo sapiens
tttccatcagctctt

SEQ ID NO: 1575054 - DNA, 15 bp, Homo sapiens
ttccatcagctcttc

SEQ ID NO: 1575055 - DNA, 15 bp, Homo sapiens
tccatcagctcttca

SEQ ID NO: 1575056 - DNA, 15 bp, Homo sapiens
ccatcagctcttcag

SEQ ID NO: 1575057 - DNA, 15 bp, Homo sapiens
catcagctcttcagg

SEQ ID NO: 1575058 - DNA, 15 bp, Homo sapiens
atcagctcttcaggt

SEQ ID NO: 1575059 - DNA, 15 bp, Homo sapiens
tcagctcttcaggtg

SEQ ID NO: 1575060 - DNA, 15 bp, Homo sapiens
cagctcttcaggtga

SEQ ID NO: 1575061 - DNA, 15 bp, Homo sapiens
agctcttcaggtgat

SEQ ID NO: 1575062 - DNA, 15 bp, Homo sapiens
gctcttcaggtgatt

SEQ ID NO: 1575063 - DNA, 15 bp, Homo sapiens
ctcttcaggtgattt

SEQ ID NO: 1575064 - DNA, 15 bp, Homo sapiens
tcttcaggtgatttg

SEQ ID NO: 1575065 - DNA, 15 bp, Homo sapiens
cttcaggtgatttgt

SEQ ID NO: 1575066 - DNA, 15 bp, Homo sapiens
ttcaggtgatttgtc

SEQ ID NO: 1575067 - DNA, 15 bp, Homo sapiens
tcaggtgatttgtca

SEQ ID NO: 1575068 - DNA, 15 bp, Homo sapiens
caggtgatttgtcat

SEQ ID NO: 1575069 - DNA, 15 bp, Homo sapiens
aggtgatttgtcata

SEQ ID NO: 1575070 - DNA, 15 bp, Homo sapiens
ggtgatttgtcatag

SEQ ID NO: 1575071 - DNA, 15 bp, Homo sapiens
gtgatttgtcatagt

SEQ ID NO: 1575072 - DNA, 15 bp, Homo sapiens
tgatttgtcatagtg

SEQ ID NO: 1575073 - DNA, 15 bp, Homo sapiens
gatttgtcatagtgg

SEQ ID NO: 1575074 - DNA, 15 bp, Homo sapiens
atttgtcatagtgga

SEQ ID NO: 1575075 - DNA, 15 bp, Homo sapiens
tttgtcatagtggac

SEQ ID NO: 1575076 - DNA, 15 bp, Homo sapiens
ttgtcatagtggaca

SEQ ID NO: 1575077 - DNA, 15 bp, Homo sapiens
tgtcatagtggacaa

SEQ ID NO: 1575078 - DNA, 15 bp, Homo sapiens
gtcatagtggacaag

SEQ ID NO: 1575079 - DNA, 15 bp, Homo sapiens
tcatagtggacaagc

SEQ ID NO: 1575080 - DNA, 15 bp, Homo sapiens
catagtggacaagct

SEQ ID NO: 1575081 - DNA, 15 bp, Homo sapiens
atagtggacaagctt

SEQ ID NO: 1575082 - DNA, 15 bp, Homo sapiens
tagtggacaagcttg

SEQ ID NO: 1575083 - DNA, 15 bp, Homo sapiens
agtggacaagcttga

SEQ ID NO: 1575084 - DNA, 15 bp, Homo sapiens
gtggacaagcttgag

SEQ ID NO: 1575085 - DNA, 15 bp, Homo sapiens
tggacaagcttgaga

SEQ ID NO: 1575086 - DNA, 15 bp, Homo sapiens
ggacaagcttgagaa

SEQ ID NO: 1575087 - DNA, 15 bp, Homo sapiens
gacaagcttgagaaa

SEQ ID NO: 1575088 - DNA, 15 bp, Homo sapiens
acaagcttgagaaac

SEQ ID NO: 1575089 - DNA, 15 bp, Homo sapiens
caagcttgagaaact

SEQ ID NO: 1575090 - DNA, 15 bp, Homo sapiens
aagcttgagaaactg

SEQ ID NO: 1575091 - DNA, 15 bp, Homo sapiens
agcttgagaaactgc

SEQ ID NO: 1575092 - DNA, 15 bp, Homo sapiens
gcttgagaaactgct

SEQ ID NO: 1575093 - DNA, 15 bp, Homo sapiens
cttgagaaactgctt

SEQ ID NO: 1575094 - DNA, 15 bp, Homo sapiens
ttgagaaactgcttt

SEQ ID NO: 1575095 - DNA, 15 bp, Homo sapiens
tgagaaactgctttg

SEQ ID NO: 1575096 - DNA, 15 bp, Homo sapiens
gagaaactgctttgg

SEQ ID NO: 1575097 - DNA, 15 bp, Homo sapiens
agaaactgctttggc

SEQ ID NO: 1575098 - DNA, 15 bp, Homo sapiens
gaaactgctttggct

SEQ ID NO: 1575099 - DNA, 15 bp, Homo sapiens
aaactgctttggctg

SEQ ID NO: 1575100 - DNA, 15 bp, Homo sapiens
aactgctttggctgc

SEQ ID NO: 1575101 - DNA, 15 bp, Homo sapiens
actgctttggctgcg

SEQ ID NO: 1575102 - DNA, 15 bp, Homo sapiens
ctgctttggctgcga

SEQ ID NO: 1575103 - DNA, 15 bp, Homo sapiens
tgctttggctgcgag

SEQ ID NO: 1575104 - DNA, 15 bp, Homo sapiens
gctttggctgcgagt

SEQ ID NO: 1575105 - DNA, 15 bp, Homo sapiens
ctttggctgcgagtg

SEQ ID NO: 1575106 - DNA, 15 bp, Homo sapiens
tttggctgcgagtgt

SEQ ID NO: 1575107 - DNA, 15 bp, Homo sapiens
ttggctgcgagtgtt

SEQ ID NO: 1575108 - DNA, 15 bp, Homo sapiens
tggctgcgagtgttt

SEQ ID NO: 1575109 - DNA, 15 bp, Homo sapiens
ggctgcgagtgtttc

SEQ ID NO: 1575110 - DNA, 15 bp, Homo sapiens
gctgcgagtgtttct

SEQ ID NO: 1575111 - DNA, 15 bp, Homo sapiens
ctgcgagtgtttctt

SEQ ID NO: 1575112 - DNA, 15 bp, Homo sapiens
tgcgagtgtttcttt

SEQ ID NO: 1575113 - DNA, 15 bp, Homo sapiens
gcgagtgtttctttt

SEQ ID NO: 1575114 - DNA, 15 bp, Homo sapiens
cgagtgtttcttttt

SEQ ID NO: 1575115 - DNA, 15 bp, Homo sapiens
gagtgtttctttttt

SEQ ID NO: 1575116 - DNA, 15 bp, Homo sapiens
agtgtttcttttttt

SEQ ID NO: 1575117 - DNA, 15 bp, Homo sapiens
gtgtttctttttttt

SEQ ID NO: 1575118 - DNA, 15 bp, Homo sapiens
gtttctttttttttg

SEQ ID NO: 1575119 - DNA, 15 bp, Homo sapiens
ctttttttttgagaa

SEQ ID NO: 1575120 - DNA, 15 bp, Homo sapiens
tttttgagaaggggg

SEQ ID NO: 1575121 - DNA, 15 bp, Homo sapiens
ttttgagaagggggt

SEQ ID NO: 1575122 - DNA, 15 bp, Homo sapiens
tttgagaagggggtc

SEQ ID NO: 1575123 - DNA, 15 bp, Homo sapiens
ttgagaagggggtct

SEQ ID NO: 1575124 - DNA, 15 bp, Homo sapiens
tgagaagggggtctc

SEQ ID NO: 1575125 - DNA, 15 bp, Homo sapiens
gagaagggggtctca

SEQ ID NO: 1575126 - DNA, 15 bp, Homo sapiens
agaagggggtctcac

SEQ ID NO: 1575127 - DNA, 15 bp, Homo sapiens
gaagggggtctcact

SEQ ID NO: 1575128 - DNA, 15 bp, Homo sapiens
aagggggtctcactc

SEQ ID NO: 1575129 - DNA, 15 bp, Homo sapiens
agggggtctcactct

SEQ ID NO: 1575130 - DNA, 15 bp, Homo sapiens
gagtacagtggcaca

SEQ ID NO: 1575131 - DNA, 15 bp, Homo sapiens
agtacagtggcacaa

SEQ ID NO: 1575132 - DNA, 15 bp, Homo sapiens
gtacagtggcacaat

SEQ ID NO: 1575133 - DNA, 15 bp, Homo sapiens
tacagtggcacaatc

SEQ ID NO: 1575134 - DNA, 15 bp, Homo sapiens
acagtggcacaatca

SEQ ID NO: 1575135 - DNA, 15 bp, Homo sapiens
agtggcacaatcaca

SEQ ID NO: 1575136 - DNA, 15 bp, Homo sapiens
gtggcacaatcacag

SEQ ID NO: 1575137 - DNA, 15 bp, Homo sapiens
tggcacaatcacagc

SEQ ID NO: 1575138 - DNA, 15 bp, Homo sapiens
ggcacaatcacagct

SEQ ID NO: 1575139 - DNA, 15 bp, Homo sapiens
gcacaatcacagctc

SEQ ID NO: 1575140 - DNA, 15 bp, Homo sapiens
cacaatcacagctca

SEQ ID NO: 1575141 - DNA, 15 bp, Homo sapiens
acaatcacagctcac

SEQ ID NO: 1575142 - DNA, 15 bp, Homo sapiens
cagccttgacctccc

SEQ ID NO: 1575143 - DNA, 15 bp, Homo sapiens
agccttgacctccca

SEQ ID NO: 1575144 - DNA, 15 bp, Homo sapiens
gccttgacctcccag

SEQ ID NO: 1575145 - DNA, 15 bp, Homo sapiens
ccttgacctcccagg

SEQ ID NO: 1575146 - DNA, 15 bp, Homo sapiens
cttgacctcccaggc

SEQ ID NO: 1575147 - DNA, 15 bp, Homo sapiens
ttgacctcccaggct

SEQ ID NO: 1575148 - DNA, 15 bp, Homo sapiens
tgacctcccaggctc

SEQ ID NO: 1575149 - DNA, 15 bp, Homo sapiens
gacctcccaggctca

SEQ ID NO: 1575150 - DNA, 15 bp, Homo sapiens
acctcccaggctcaa

SEQ ID NO: 1575151 - DNA, 15 bp, Homo sapiens
aggctcaagcgatcc

SEQ ID NO: 1575152 - DNA, 15 bp, Homo sapiens
ctcaagcgatcctca

SEQ ID NO: 1575153 - DNA, 15 bp, Homo sapiens
tcaagcgatcctcac

SEQ ID NO: 1575154 - DNA, 15 bp, Homo sapiens
caagcgatcctcaca

SEQ ID NO: 1575155 - DNA, 15 bp, Homo sapiens
aagcgatcctcacac

SEQ ID NO: 1575156 - DNA, 15 bp, Homo sapiens
agcgatcctcacacc

SEQ ID NO: 1575157 - DNA, 15 bp, Homo sapiens
gcgatcctcacacct

SEQ ID NO: 1575158 - DNA, 15 bp, Homo sapiens
cgatcctcacacctc

SEQ ID NO: 1575159 - DNA, 15 bp, Homo sapiens
gatcctcacacctca

SEQ ID NO: 1575160 - DNA, 15 bp, Homo sapiens
atcctcacacctcag

SEQ ID NO: 1575161 - DNA, 15 bp, Homo sapiens
tcctcacacctcagg

SEQ ID NO: 1575162 - DNA, 15 bp, Homo sapiens
cctcacacctcaggc

SEQ ID NO: 1575163 - DNA, 15 bp, Homo sapiens
ctcacacctcaggct

SEQ ID NO: 1575164 - DNA, 15 bp, Homo sapiens
tcacacctcaggctt

SEQ ID NO: 1575165 - DNA, 15 bp, Homo sapiens
cacacctcaggcttc

SEQ ID NO: 1575166 - DNA, 15 bp, Homo sapiens
acacctcaggcttct

SEQ ID NO: 1575167 - DNA, 15 bp, Homo sapiens
cacctcaggcttctg

SEQ ID NO: 1575168 - DNA, 15 bp, Homo sapiens
acctcaggcttctga

SEQ ID NO: 1575169 - DNA, 15 bp, Homo sapiens
cctcaggcttctgag

SEQ ID NO: 1575170 - DNA, 15 bp, Homo sapiens
ctcaggcttctgagt

SEQ ID NO: 1575171 - DNA, 15 bp, Homo sapiens
tcaggcttctgagtg

SEQ ID NO: 1575172 - DNA, 15 bp, Homo sapiens
caggcttctgagtgg

SEQ ID NO: 1575173 - DNA, 15 bp, Homo sapiens
aggcttctgagtggc

SEQ ID NO: 1575174 - DNA, 15 bp, Homo sapiens
ggcttctgagtggct

SEQ ID NO: 1575175 - DNA, 15 bp, Homo sapiens
gcttctgagtggctg

SEQ ID NO: 1575176 - DNA, 15 bp, Homo sapiens
cttctgagtggctgg

SEQ ID NO: 1575177 - DNA, 15 bp, Homo sapiens
ttctgagtggctggg

SEQ ID NO: 1575178 - DNA, 15 bp, Homo sapiens
tctgagtggctggga

SEQ ID NO: 1575179 - DNA, 15 bp, Homo sapiens
ctgagtggctgggac

SEQ ID NO: 1575180 - DNA, 15 bp, Homo sapiens
tgagtggctgggacc

SEQ ID NO: 1575181 - DNA, 15 bp, Homo sapiens
gagtggctgggacca

SEQ ID NO: 1575182 - DNA, 15 bp, Homo sapiens
agtggctgggaccac

SEQ ID NO: 1575183 - DNA, 15 bp, Homo sapiens
gtggctgggaccaca

SEQ ID NO: 1575184 - DNA, 15 bp, Homo sapiens
tggctgggaccacag

SEQ ID NO: 1575185 - DNA, 15 bp, Homo sapiens
ggctgggaccacagg

SEQ ID NO: 1575186 - DNA, 15 bp, Homo sapiens
tgggaccacaggcag

SEQ ID NO: 1575187 - DNA, 15 bp, Homo sapiens
gggaccacaggcagg

SEQ ID NO: 1575188 - DNA, 15 bp, Homo sapiens
ggaccacaggcaggc

SEQ ID NO: 1575189 - DNA, 15 bp, Homo sapiens
gaccacaggcaggcg

SEQ ID NO: 1575190 - DNA, 15 bp, Homo sapiens
accacaggcaggcgt

SEQ ID NO: 1575191 - DNA, 15 bp, Homo sapiens
ccacaggcaggcgtc

SEQ ID NO: 1575192 - DNA, 15 bp, Homo sapiens
cacaggcaggcgtca

SEQ ID NO: 1575193 - DNA, 15 bp, Homo sapiens
acaggcaggcgtcat

SEQ ID NO: 1575194 - DNA, 15 bp, Homo sapiens
caggcaggcgtcatc

SEQ ID NO: 1575195 - DNA, 15 bp, Homo sapiens
aggcaggcgtcatca

SEQ ID NO: 1575196 - DNA, 15 bp, Homo sapiens
ggcaggcgtcatcac

SEQ ID NO: 1575197 - DNA, 15 bp, Homo sapiens
gcaggcgtcatcaca

SEQ ID NO: 1575198 - DNA, 15 bp, Homo sapiens
caggcgtcatcacat

SEQ ID NO: 1575199 - DNA, 15 bp, Homo sapiens
aggcgtcatcacatg

SEQ ID NO: 1575200 - DNA, 15 bp, Homo sapiens
ggcgtcatcacatgg

SEQ ID NO: 1575201 - DNA, 15 bp, Homo sapiens
gcgtcatcacatggg

SEQ ID NO: 1575202 - DNA, 15 bp, Homo sapiens
cgtcatcacatgggg

SEQ ID NO: 1575203 - DNA, 15 bp, Homo sapiens
gtcatcacatggggt

SEQ ID NO: 1575204 - DNA, 15 bp, Homo sapiens
tcatcacatggggta

SEQ ID NO: 1575205 - DNA, 15 bp, Homo sapiens
catcacatggggtaa

SEQ ID NO: 1575206 - DNA, 15 bp, Homo sapiens
atcacatggggtaat

SEQ ID NO: 1575207 - DNA, 15 bp, Homo sapiens
tcacatggggtaatt

SEQ ID NO: 1575208 - DNA, 15 bp, Homo sapiens
cacatggggtaattt

SEQ ID NO: 1575209 - DNA, 15 bp, Homo sapiens
acatggggtaatttt

SEQ ID NO: 1575210 - DNA, 15 bp, Homo sapiens
catggggtaattttt

SEQ ID NO: 1575211 - DNA, 15 bp, Homo sapiens
atggggtaatttttt

SEQ ID NO: 1575212 - DNA, 15 bp, Homo sapiens
tggggtaattttttt

SEQ ID NO: 1575213 - DNA, 15 bp, Homo sapiens
ggggtaatttttttt

SEQ ID NO: 1575214 - DNA, 15 bp, Homo sapiens
gggtaattttttttt

SEQ ID NO: 1575215 - DNA, 15 bp, Homo sapiens
ggtaattttttttta

SEQ ID NO: 1575216 - DNA, 15 bp, Homo sapiens
gtaatttttttttat

SEQ ID NO: 1575217 - DNA, 15 bp, Homo sapiens
taatttttttttatc

SEQ ID NO: 1575218 - DNA, 15 bp, Homo sapiens
aatttttttttatct

SEQ ID NO: 1575219 - DNA, 15 bp, Homo sapiens
atttttttttatctg

SEQ ID NO: 1575220 - DNA, 15 bp, Homo sapiens
tttttttttatctgt

SEQ ID NO: 1575221 - DNA, 15 bp, Homo sapiens
ttttttttatctgta

SEQ ID NO: 1575222 - DNA, 15 bp, Homo sapiens
tttttttatctgtag

SEQ ID NO: 1575223 - DNA, 15 bp, Homo sapiens
ttttttatctgtaga

SEQ ID NO: 1575224 - DNA, 15 bp, Homo sapiens
tttttatctgtagag

SEQ ID NO: 1575225 - DNA, 15 bp, Homo sapiens
ttttatctgtagagt

SEQ ID NO: 1575226 - DNA, 15 bp, Homo sapiens
tttatctgtagagtg

SEQ ID NO: 1575227 - DNA, 15 bp, Homo sapiens
ttatctgtagagtgg

SEQ ID NO: 1575228 - DNA, 15 bp, Homo sapiens
tatctgtagagtgga

SEQ ID NO: 1575229 - DNA, 15 bp, Homo sapiens
atctgtagagtggag

SEQ ID NO: 1575230 - DNA, 15 bp, Homo sapiens
tctgtagagtggagg

SEQ ID NO: 1575231 - DNA, 15 bp, Homo sapiens
ctgtagagtggaggt

SEQ ID NO: 1575232 - DNA, 15 bp, Homo sapiens
tgtagagtggaggtc

SEQ ID NO: 1575233 - DNA, 15 bp, Homo sapiens
gtagagtggaggtct

SEQ ID NO: 1575234 - DNA, 15 bp, Homo sapiens
tagagtggaggtctt

SEQ ID NO: 1575235 - DNA, 15 bp, Homo sapiens
agagtggaggtcttg

SEQ ID NO: 1575236 - DNA, 15 bp, Homo sapiens
gagtggaggtcttgc

SEQ ID NO: 1575237 - DNA, 15 bp, Homo sapiens
agtggaggtcttgct

SEQ ID NO: 1575238 - DNA, 15 bp, Homo sapiens
gtggaggtcttgcta

SEQ ID NO: 1575239 - DNA, 15 bp, Homo sapiens
tggaggtcttgctat

SEQ ID NO: 1575240 - DNA, 15 bp, Homo sapiens
ggaggtcttgctatg

SEQ ID NO: 1575241 - DNA, 15 bp, Homo sapiens
gaggtcttgctatgc

SEQ ID NO: 1575242 - DNA, 15 bp, Homo sapiens
aggtcttgctatgct

SEQ ID NO: 1575243 - DNA, 15 bp, Homo sapiens
ggtcttgctatgctg

SEQ ID NO: 1575244 - DNA, 15 bp, Homo sapiens
gtcttgctatgctgc

SEQ ID NO: 1575245 - DNA, 15 bp, Homo sapiens
tcttgctatgctgcc

SEQ ID NO: 1575246 - DNA, 15 bp, Homo sapiens
cttgctatgctgccc

SEQ ID NO: 1575247 - DNA, 15 bp, Homo sapiens
ttgctatgctgccca

SEQ ID NO: 1575248 - DNA, 15 bp, Homo sapiens
tgctatgctgcccag

SEQ ID NO: 1575249 - DNA, 15 bp, Homo sapiens
gctatgctgcccagg

SEQ ID NO: 1575250 - DNA, 15 bp, Homo sapiens
ctatgctgcccaggc

SEQ ID NO: 1575251 - DNA, 15 bp, Homo sapiens
tatgctgcccaggct

SEQ ID NO: 1575252 - DNA, 15 bp, Homo sapiens
atgctgcccaggctc

SEQ ID NO: 1575253 - DNA, 15 bp, Homo sapiens
tgctgcccaggctcg

SEQ ID NO: 1575254 - DNA, 15 bp, Homo sapiens
gctgcccaggctcgt

SEQ ID NO: 1575255 - DNA, 15 bp, Homo sapiens
ctgcccaggctcgtc

SEQ ID NO: 1575256 - DNA, 15 bp, Homo sapiens
tgcccaggctcgtct

SEQ ID NO: 1575257 - DNA, 15 bp, Homo sapiens
gcccaggctcgtctt

SEQ ID NO: 1575258 - DNA, 15 bp, Homo sapiens
cccaggctcgtcttg

SEQ ID NO: 1575259 - DNA, 15 bp, Homo sapiens
ccaggctcgtcttga

SEQ ID NO: 1575260 - DNA, 15 bp, Homo sapiens
caggctcgtcttgaa

SEQ ID NO: 1575261 - DNA, 15 bp, Homo sapiens
aggctcgtcttgaac

SEQ ID NO: 1575262 - DNA, 15 bp, Homo sapiens
ggctcgtcttgaact

SEQ ID NO: 1575263 - DNA, 15 bp, Homo sapiens
gctcgtcttgaactt

SEQ ID NO: 1575264 - DNA, 15 bp, Homo sapiens
ctcgtcttgaacttc

SEQ ID NO: 1575265 - DNA, 15 bp, Homo sapiens
tcgtcttgaacttct

SEQ ID NO: 1575266 - DNA, 15 bp, Homo sapiens
cgtcttgaacttctg

SEQ ID NO: 1575267 - DNA, 15 bp, Homo sapiens
gtcttgaacttctgg

SEQ ID NO: 1575268 - DNA, 15 bp, Homo sapiens
tcttgaacttctggc

SEQ ID NO: 1575269 - DNA, 15 bp, Homo sapiens
cttgaacttctggcc

SEQ ID NO: 1575270 - DNA, 15 bp, Homo sapiens
ttgaacttctggcct

SEQ ID NO: 1575271 - DNA, 15 bp, Homo sapiens
tgaacttctggcctc

SEQ ID NO: 1575272 - DNA, 15 bp, Homo sapiens
gaacttctggcctca

SEQ ID NO: 1575273 - DNA, 15 bp, Homo sapiens
aacttctggcctcag

SEQ ID NO: 1575274 - DNA, 15 bp, Homo sapiens
acttctggcctcagg

SEQ ID NO: 1575275 - DNA, 15 bp, Homo sapiens
cttctggcctcaggc

SEQ ID NO: 1575276 - DNA, 15 bp, Homo sapiens
ttctggcctcaggca

SEQ ID NO: 1575277 - DNA, 15 bp, Homo sapiens
tctggcctcaggcag

SEQ ID NO: 1575278 - DNA, 15 bp, Homo sapiens
ctggcctcaggcagt

SEQ ID NO: 1575279 - DNA, 15 bp, Homo sapiens
tggcctcaggcagtc

SEQ ID NO: 1575280 - DNA, 15 bp, Homo sapiens
ggcctcaggcagtcc

SEQ ID NO: 1575281 - DNA, 15 bp, Homo sapiens
gcctcaggcagtcct

SEQ ID NO: 1575282 - DNA, 15 bp, Homo sapiens
cctcaggcagtcctc

SEQ ID NO: 1575283 - DNA, 15 bp, Homo sapiens
tcaggcagtcctccg

SEQ ID NO: 1575284 - DNA, 15 bp, Homo sapiens
caggcagtcctccgg

SEQ ID NO: 1575285 - DNA, 15 bp, Homo sapiens
aggcagtcctccggc

SEQ ID NO: 1575286 - DNA, 15 bp, Homo sapiens
ggcagtcctccggcc

SEQ ID NO: 1575287 - DNA, 15 bp, Homo sapiens
gcagtcctccggcct

SEQ ID NO: 1575288 - DNA, 15 bp, Homo sapiens
cagtcctccggcctc

SEQ ID NO: 1575289 - DNA, 15 bp, Homo sapiens
agtcctccggcctcg

SEQ ID NO: 1575290 - DNA, 15 bp, Homo sapiens
gtcctccggcctcgg

SEQ ID NO: 1575291 - DNA, 15 bp, Homo sapiens
tcctccggcctcggc

SEQ ID NO: 1575292 - DNA, 15 bp, Homo sapiens
cctccggcctcggct

SEQ ID NO: 1575293 - DNA, 15 bp, Homo sapiens
ctccggcctcggcta

SEQ ID NO: 1575294 - DNA, 15 bp, Homo sapiens
tccggcctcggctac

SEQ ID NO: 1575295 - DNA, 15 bp, Homo sapiens
ccggcctcggctaca

SEQ ID NO: 1575296 - DNA, 15 bp, Homo sapiens
cggcctcggctacag

SEQ ID NO: 1575297 - DNA, 15 bp, Homo sapiens
ggcctcggctacagg

SEQ ID NO: 1575298 - DNA, 15 bp, Homo sapiens
gcctcggctacaggc

SEQ ID NO: 1575299 - DNA, 15 bp, Homo sapiens
cctcggctacaggcc

SEQ ID NO: 1575300 - DNA, 15 bp, Homo sapiens
ctcggctacaggcct

SEQ ID NO: 1575301 - DNA, 15 bp, Homo sapiens
tcggctacaggcctg

SEQ ID NO: 1575302 - DNA, 15 bp, Homo sapiens
cggctacaggcctga

SEQ ID NO: 1575303 - DNA, 15 bp, Homo sapiens
ggctacaggcctgag

SEQ ID NO: 1575304 - DNA, 15 bp, Homo sapiens
gctacaggcctgagc

SEQ ID NO: 1575305 - DNA, 15 bp, Homo sapiens
ctacaggcctgagct

SEQ ID NO: 1575306 - DNA, 15 bp, Homo sapiens
tacaggcctgagctg

SEQ ID NO: 1575307 - DNA, 15 bp, Homo sapiens
acaggcctgagctgc

SEQ ID NO: 1575308 - DNA, 15 bp, Homo sapiens
caggcctgagctgcc

SEQ ID NO: 1575309 - DNA, 15 bp, Homo sapiens
aggcctgagctgcca

SEQ ID NO: 1575310 - DNA, 15 bp, Homo sapiens
ggcctgagctgccac

SEQ ID NO: 1575311 - DNA, 15 bp, Homo sapiens
gcctgagctgccaca

SEQ ID NO: 1575312 - DNA, 15 bp, Homo sapiens
cctgagctgccacac

SEQ ID NO: 1575313 - DNA, 15 bp, Homo sapiens
ctgagctgccacacc

SEQ ID NO: 1575314 - DNA, 15 bp, Homo sapiens
tgagctgccacaccc

SEQ ID NO: 1575315 - DNA, 15 bp, Homo sapiens
gagctgccacaccca

SEQ ID NO: 1575316 - DNA, 15 bp, Homo sapiens
agctgccacacccag

SEQ ID NO: 1575317 - DNA, 15 bp, Homo sapiens
gctgccacacccagt

SEQ ID NO: 1575318 - DNA, 15 bp, Homo sapiens
ctgccacacccagtc

SEQ ID NO: 1575319 - DNA, 15 bp, Homo sapiens
tgccacacccagtct

SEQ ID NO: 1575320 - DNA, 15 bp, Homo sapiens
gccacacccagtctt

SEQ ID NO: 1575321 - DNA, 15 bp, Homo sapiens
ccacacccagtcttg

SEQ ID NO: 1575322 - DNA, 15 bp, Homo sapiens
cacacccagtcttgc

SEQ ID NO: 1575323 - DNA, 15 bp, Homo sapiens
acacccagtcttgct

SEQ ID NO: 1575324 - DNA, 15 bp, Homo sapiens
cacccagtcttgctg

SEQ ID NO: 1575325 - DNA, 15 bp, Homo sapiens
acccagtcttgctgg

SEQ ID NO: 1575326 - DNA, 15 bp, Homo sapiens
cccagtcttgctggt

SEQ ID NO: 1575327 - DNA, 15 bp, Homo sapiens
ccagtcttgctggtg

SEQ ID NO: 1575328 - DNA, 15 bp, Homo sapiens
cagtcttgctggtgt

SEQ ID NO: 1575329 - DNA, 15 bp, Homo sapiens
agtcttgctggtgtt

SEQ ID NO: 1575330 - DNA, 15 bp, Homo sapiens
gtcttgctggtgttt

SEQ ID NO: 1575331 - DNA, 15 bp, Homo sapiens
tcttgctggtgtttc

SEQ ID NO: 1575332 - DNA, 15 bp, Homo sapiens
cttgctggtgtttca

SEQ ID NO: 1575333 - DNA, 15 bp, Homo sapiens
ttgctggtgtttcat

SEQ ID NO: 1575334 - DNA, 15 bp, Homo sapiens
tgctggtgtttcata

SEQ ID NO: 1575335 - DNA, 15 bp, Homo sapiens
gctggtgtttcataa

SEQ ID NO: 1575336 - DNA, 15 bp, Homo sapiens
ctggtgtttcataag

SEQ ID NO: 1575337 - DNA, 15 bp, Homo sapiens
tggtgtttcataagg

SEQ ID NO: 1575338 - DNA, 15 bp, Homo sapiens
ggtgtttcataaggt

SEQ ID NO: 1575339 - DNA, 15 bp, Homo sapiens
gtgtttcataaggtc

SEQ ID NO: 1575340 - DNA, 15 bp, Homo sapiens
tgtttcataaggtcc

SEQ ID NO: 1575341 - DNA, 15 bp, Homo sapiens
gtttcataaggtccg

SEQ ID NO: 1575342 - DNA, 15 bp, Homo sapiens
tttcataaggtccgg

SEQ ID NO: 1575343 - DNA, 15 bp, Homo sapiens
ttcataaggtccggc

SEQ ID NO: 1575344 - DNA, 15 bp, Homo sapiens
tcataaggtccggcc

SEQ ID NO: 1575345 - DNA, 15 bp, Homo sapiens
cataaggtccggccc

SEQ ID NO: 1575346 - DNA, 15 bp, Homo sapiens
ataaggtccggcccc

SEQ ID NO: 1575347 - DNA, 15 bp, Homo sapiens
taaggtccggcccct

SEQ ID NO: 1575348 - DNA, 15 bp, Homo sapiens
aaggtccggcccctc

SEQ ID NO: 1575349 - DNA, 15 bp, Homo sapiens
aggtccggcccctcc

SEQ ID NO: 1575350 - DNA, 15 bp, Homo sapiens
ggtccggcccctccc

SEQ ID NO: 1575351 - DNA, 15 bp, Homo sapiens
gtccggcccctcccg

SEQ ID NO: 1575352 - DNA, 15 bp, Homo sapiens
tccggcccctcccgt

SEQ ID NO: 1575353 - DNA, 15 bp, Homo sapiens
ccggcccctcccgtc

SEQ ID NO: 1575354 - DNA, 15 bp, Homo sapiens
cggcccctcccgtcg

SEQ ID NO: 1575355 - DNA, 15 bp, Homo sapiens
ggcccctcccgtcgg

SEQ ID NO: 1575356 - DNA, 15 bp, Homo sapiens
gcccctcccgtcggc

SEQ ID NO: 1575357 - DNA, 15 bp, Homo sapiens
cccctcccgtcggcc

SEQ ID NO: 1575358 - DNA, 15 bp, Homo sapiens
ccctcccgtcggcct

SEQ ID NO: 1575359 - DNA, 15 bp, Homo sapiens
cctcccgtcggcctc

SEQ ID NO: 1575360 - DNA, 15 bp, Homo sapiens
ctcccgtcggcctca

SEQ ID NO: 1575361 - DNA, 15 bp, Homo sapiens
tcccgtcggcctcag

SEQ ID NO: 1575362 - DNA, 15 bp, Homo sapiens
cccgtcggcctcagg

SEQ ID NO: 1575363 - DNA, 15 bp, Homo sapiens
ccgtcggcctcaggt

SEQ ID NO: 1575364 - DNA, 15 bp, Homo sapiens
cgtcggcctcaggtg

SEQ ID NO: 1575365 - DNA, 15 bp, Homo sapiens
gtcggcctcaggtgt

SEQ ID NO: 1575366 - DNA, 15 bp, Homo sapiens
tcggcctcaggtgta

SEQ ID NO: 1575367 - DNA, 15 bp, Homo sapiens
cggcctcaggtgtat

SEQ ID NO: 1575368 - DNA, 15 bp, Homo sapiens
ggcctcaggtgtatg

SEQ ID NO: 1575369 - DNA, 15 bp, Homo sapiens
gcctcaggtgtatga

SEQ ID NO: 1575370 - DNA, 15 bp, Homo sapiens
cctcaggtgtatgac

SEQ ID NO: 1575371 - DNA, 15 bp, Homo sapiens
ctcaggtgtatgact

SEQ ID NO: 1575372 - DNA, 15 bp, Homo sapiens
tcaggtgtatgactt

SEQ ID NO: 1575373 - DNA, 15 bp, Homo sapiens
caggtgtatgacttg

SEQ ID NO: 1575374 - DNA, 15 bp, Homo sapiens
aggtgtatgacttgt

SEQ ID NO: 1575375 - DNA, 15 bp, Homo sapiens
ggtgtatgacttgtg

SEQ ID NO: 1575376 - DNA, 15 bp, Homo sapiens
gtgtatgacttgtga

SEQ ID NO: 1575377 - DNA, 15 bp, Homo sapiens
tgtatgacttgtgag

SEQ ID NO: 1575378 - DNA, 15 bp, Homo sapiens
gtatgacttgtgagg

SEQ ID NO: 1575379 - DNA, 15 bp, Homo sapiens
tatgacttgtgaggc

SEQ ID NO: 1575380 - DNA, 15 bp, Homo sapiens
atgacttgtgaggcc

SEQ ID NO: 1575381 - DNA, 15 bp, Homo sapiens
tgacttgtgaggccc

SEQ ID NO: 1575382 - DNA, 15 bp, Homo sapiens
gacttgtgaggccca

SEQ ID NO: 1575383 - DNA, 15 bp, Homo sapiens
acttgtgaggcccag

SEQ ID NO: 1575384 - DNA, 15 bp, Homo sapiens
cttgtgaggcccagc

SEQ ID NO: 1575385 - DNA, 15 bp, Homo sapiens
ttgtgaggcccagcg

SEQ ID NO: 1575386 - DNA, 15 bp, Homo sapiens
tgtgaggcccagcga

SEQ ID NO: 1575387 - DNA, 15 bp, Homo sapiens
gtgaggcccagcgat

SEQ ID NO: 1575388 - DNA, 15 bp, Homo sapiens
tgaggcccagcgatg

SEQ ID NO: 1575389 - DNA, 15 bp, Homo sapiens
gaggcccagcgatgg

SEQ ID NO: 1575390 - DNA, 15 bp, Homo sapiens
aggcccagcgatggg

SEQ ID NO: 1575391 - DNA, 15 bp, Homo sapiens
ggcccagcgatgggc

SEQ ID NO: 1575392 - DNA, 15 bp, Homo sapiens
gcccagcgatgggct

SEQ ID NO: 1575393 - DNA, 15 bp, Homo sapiens
cccagcgatgggctc

SEQ ID NO: 1575394 - DNA, 15 bp, Homo sapiens
ccagcgatgggctcg

SEQ ID NO: 1575395 - DNA, 15 bp, Homo sapiens
cagcgatgggctcgg

SEQ ID NO: 1575396 - DNA, 15 bp, Homo sapiens
agcgatgggctcgga

SEQ ID NO: 1575397 - DNA, 15 bp, Homo sapiens
gcgatgggctcggaa

SEQ ID NO: 1575398 - DNA, 15 bp, Homo sapiens
cgatgggctcggaag

SEQ ID NO: 1575399 - DNA, 15 bp, Homo sapiens
gatgggctcggaagc

SEQ ID NO: 1575400 - DNA, 15 bp, Homo sapiens
atgggctcggaagct

SEQ ID NO: 1575401 - DNA, 15 bp, Homo sapiens
tgggctcggaagctc

SEQ ID NO: 1575402 - DNA, 15 bp, Homo sapiens
gggctcggaagctct

SEQ ID NO: 1575403 - DNA, 15 bp, Homo sapiens
ggctcggaagctctt

SEQ ID NO: 1575404 - DNA, 15 bp, Homo sapiens
gctcggaagctcttg

SEQ ID NO: 1575405 - DNA, 15 bp, Homo sapiens
ctcggaagctcttgg

SEQ ID NO: 1575406 - DNA, 15 bp, Homo sapiens
tcggaagctcttggt

SEQ ID NO: 1575407 - DNA, 15 bp, Homo sapiens
cggaagctcttggtc

SEQ ID NO: 1575408 - DNA, 15 bp, Homo sapiens
ggaagctcttggtca

SEQ ID NO: 1575409 - DNA, 15 bp, Homo sapiens
gaagctcttggtcag

SEQ ID NO: 1575410 - DNA, 15 bp, Homo sapiens
aagctcttggtcagt

SEQ ID NO: 1575411 - DNA, 15 bp, Homo sapiens
agctcttggtcagta

SEQ ID NO: 1575412 - DNA, 15 bp, Homo sapiens
gctcttggtcagtat

SEQ ID NO: 1575413 - DNA, 15 bp, Homo sapiens
ctcttggtcagtatc

SEQ ID NO: 1575414 - DNA, 15 bp, Homo sapiens
tcttggtcagtatcc

SEQ ID NO: 1575415 - DNA, 15 bp, Homo sapiens
cttggtcagtatccc

SEQ ID NO: 1575416 - DNA, 15 bp, Homo sapiens
ttggtcagtatcccc

SEQ ID NO: 1575417 - DNA, 15 bp, Homo sapiens
tggtcagtatccccc

SEQ ID NO: 1575418 - DNA, 15 bp, Homo sapiens
ggtcagtatccccca

SEQ ID NO: 1575419 - DNA, 15 bp, Homo sapiens
gtcagtatcccccaa

SEQ ID NO: 1575420 - DNA, 15 bp, Homo sapiens
tcagtatcccccaaa

SEQ ID NO: 1575421 - DNA, 15 bp, Homo sapiens
cagtatcccccaaac

SEQ ID NO: 1575422 - DNA, 15 bp, Homo sapiens
agtatcccccaaact

SEQ ID NO: 1575423 - DNA, 15 bp, Homo sapiens
gtatcccccaaactc

SEQ ID NO: 1575424 - DNA, 15 bp, Homo sapiens
tatcccccaaactct

SEQ ID NO: 1575425 - DNA, 15 bp, Homo sapiens
atcccccaaactctg

SEQ ID NO: 1575426 - DNA, 15 bp, Homo sapiens
tcccccaaactctgt

SEQ ID NO: 1575427 - DNA, 15 bp, Homo sapiens
cccccaaactctgtt

SEQ ID NO: 1575428 - DNA, 15 bp, Homo sapiens
ccccaaactctgttc

SEQ ID NO: 1575429 - DNA, 15 bp, Homo sapiens
cccaaactctgttcc

SEQ ID NO: 1575430 - DNA, 15 bp, Homo sapiens
ccaaactctgttccc

SEQ ID NO: 1575431 - DNA, 15 bp, Homo sapiens
caaactctgttcccc

SEQ ID NO: 1575432 - DNA, 15 bp, Homo sapiens
aaactctgttccccc

SEQ ID NO: 1575433 - DNA, 15 bp, Homo sapiens
aactctgttccccct

SEQ ID NO: 1575434 - DNA, 15 bp, Homo sapiens
actctgttccccctt

SEQ ID NO: 1575435 - DNA, 15 bp, Homo sapiens
ctctgttcccccttg

SEQ ID NO: 1575436 - DNA, 15 bp, Homo sapiens
tctgttcccccttgt

SEQ ID NO: 1575437 - DNA, 15 bp, Homo sapiens
ctgttcccccttgta

SEQ ID NO: 1575438 - DNA, 15 bp, Homo sapiens
tgttcccccttgtag

SEQ ID NO: 1575439 - DNA, 15 bp, Homo sapiens
gttcccccttgtagg

SEQ ID NO: 1575440 - DNA, 15 bp, Homo sapiens
ttcccccttgtaggt

SEQ ID NO: 1575441 - DNA, 15 bp, Homo sapiens
tcccccttgtaggtg

SEQ ID NO: 1575442 - DNA, 15 bp, Homo sapiens
cccccttgtaggtgt

SEQ ID NO: 1575443 - DNA, 15 bp, Homo sapiens
ccccttgtaggtgtt

SEQ ID NO: 1575444 - DNA, 15 bp, Homo sapiens
cccttgtaggtgttc

SEQ ID NO: 1575445 - DNA, 15 bp, Homo sapiens
ccttgtaggtgttcc

SEQ ID NO: 1575446 - DNA, 15 bp, Homo sapiens
cttgtaggtgttcct

SEQ ID NO: 1575447 - DNA, 15 bp, Homo sapiens
ttgtaggtgttcctc

SEQ ID NO: 1575448 - DNA, 15 bp, Homo sapiens
tgtaggtgttcctct

SEQ ID NO: 1575449 - DNA, 15 bp, Homo sapiens
gtaggtgttcctctt

SEQ ID NO: 1575450 - DNA, 15 bp, Homo sapiens
taggtgttcctcttt

SEQ ID NO: 1575451 - DNA, 15 bp, Homo sapiens
aggtgttcctctttt

SEQ ID NO: 1575452 - DNA, 15 bp, Homo sapiens
ggtgttcctcttttt

SEQ ID NO: 1575453 - DNA, 15 bp, Homo sapiens
gtgttcctctttttt

SEQ ID NO: 1575454 - DNA, 15 bp, Homo sapiens
tgttcctcttttttc

SEQ ID NO: 1575455 - DNA, 15 bp, Homo sapiens
gttcctcttttttct

SEQ ID NO: 1575456 - DNA, 15 bp, Homo sapiens
ttcctcttttttctt

SEQ ID NO: 1575457 - DNA, 15 bp, Homo sapiens
tcctcttttttcttt

SEQ ID NO: 1575458 - DNA, 15 bp, Homo sapiens
cctcttttttctttg

SEQ ID NO: 1575459 - DNA, 15 bp, Homo sapiens
ctcttttttctttgc

SEQ ID NO: 1575460 - DNA, 15 bp, Homo sapiens
tcttttttctttgct

SEQ ID NO: 1575461 - DNA, 15 bp, Homo sapiens
cttttttctttgctg

SEQ ID NO: 1575462 - DNA, 15 bp, Homo sapiens
ttttttctttgctgc

SEQ ID NO: 1575463 - DNA, 15 bp, Homo sapiens
tttttctttgctgca

SEQ ID NO: 1575464 - DNA, 15 bp, Homo sapiens
ttttctttgctgcag

SEQ ID NO: 1575465 - DNA, 15 bp, Homo sapiens
tttctttgctgcaga

SEQ ID NO: 1575466 - DNA, 15 bp, Homo sapiens
ttctttgctgcagaa

SEQ ID NO: 1575467 - DNA, 15 bp, Homo sapiens
tctttgctgcagaag

SEQ ID NO: 1575468 - DNA, 15 bp, Homo sapiens
ctttgctgcagaaga

SEQ ID NO: 1575469 - DNA, 15 bp, Homo sapiens
tttgctgcagaagag

SEQ ID NO: 1575470 - DNA, 15 bp, Homo sapiens
ttgctgcagaagagt

SEQ ID NO: 1575471 - DNA, 15 bp, Homo sapiens
tgctgcagaagagtg

SEQ ID NO: 1575472 - DNA, 15 bp, Homo sapiens
gctgcagaagagtgt

SEQ ID NO: 1575473 - DNA, 15 bp, Homo sapiens
ctgcagaagagtgtg

SEQ ID NO: 1575474 - DNA, 15 bp, Homo sapiens
tgcagaagagtgtgt

SEQ ID NO: 1575475 - DNA, 15 bp, Homo sapiens
gcagaagagtgtgtg

SEQ ID NO: 1575476 - DNA, 15 bp, Homo sapiens
cagaagagtgtgtga

SEQ ID NO: 1575477 - DNA, 15 bp, Homo sapiens
agaagagtgtgtgac

SEQ ID NO: 1575478 - DNA, 15 bp, Homo sapiens
gaagagtgtgtgact

SEQ ID NO: 1575479 - DNA, 15 bp, Homo sapiens
aagagtgtgtgactc

SEQ ID NO: 1575480 - DNA, 15 bp, Homo sapiens
agagtgtgtgactca

SEQ ID NO: 1575481 - DNA, 15 bp, Homo sapiens
gagtgtgtgactcac

SEQ ID NO: 1575482 - DNA, 15 bp, Homo sapiens
agtgtgtgactcaca

SEQ ID NO: 1575483 - DNA, 15 bp, Homo sapiens
gtgtgtgactcacaa

SEQ ID NO: 1575484 - DNA, 15 bp, Homo sapiens
tgtgtgactcacaaa

SEQ ID NO: 1575485 - DNA, 15 bp, Homo sapiens
gtgtgactcacaaaa

SEQ ID NO: 1575486 - DNA, 15 bp, Homo sapiens
tgtgactcacaaaaa

SEQ ID NO: 1575487 - DNA, 15 bp, Homo sapiens
gtgactcacaaaaag

SEQ ID NO: 1575488 - DNA, 15 bp, Homo sapiens
tgactcacaaaaagt

SEQ ID NO: 1575489 - DNA, 15 bp, Homo sapiens
gactcacaaaaagtt

SEQ ID NO: 1575490 - DNA, 15 bp, Homo sapiens
actcacaaaaagttg

SEQ ID NO: 1575491 - DNA, 15 bp, Homo sapiens
ctcacaaaaagttga

SEQ ID NO: 1575492 - DNA, 15 bp, Homo sapiens
tcacaaaaagttgag

SEQ ID NO: 1575493 - DNA, 15 bp, Homo sapiens
cacaaaaagttgagg

SEQ ID NO: 1575494 - DNA, 15 bp, Homo sapiens
acaaaaagttgagga

SEQ ID NO: 1575495 - DNA, 15 bp, Homo sapiens
caaaaagttgaggac

SEQ ID NO: 1575496 - DNA, 15 bp, Homo sapiens
aaaaagttgaggact

SEQ ID NO: 1575497 - DNA, 15 bp, Homo sapiens
aaaagttgaggactg

SEQ ID NO: 1575498 - DNA, 15 bp, Homo sapiens
aaagttgaggactgt

SEQ ID NO: 1575499 - DNA, 15 bp, Homo sapiens
aagttgaggactgtt

SEQ ID NO: 1575500 - DNA, 15 bp, Homo sapiens
agttgaggactgttc

SEQ ID NO: 1575501 - DNA, 15 bp, Homo sapiens
gttgaggactgttcc

SEQ ID NO: 1575502 - DNA, 15 bp, Homo sapiens
ttgaggactgttcct

SEQ ID NO: 1575503 - DNA, 15 bp, Homo sapiens
tgaggactgttcctt

SEQ ID NO: 1575504 - DNA, 15 bp, Homo sapiens
gaggactgttccttg

SEQ ID NO: 1575505 - DNA, 15 bp, Homo sapiens
aggactgttccttga

SEQ ID NO: 1575506 - DNA, 15 bp, Homo sapiens
ggactgttccttgat

SEQ ID NO: 1575507 - DNA, 15 bp, Homo sapiens
gactgttccttgatg

SEQ ID NO: 1575508 - DNA, 15 bp, Homo sapiens
actgttccttgatgt

SEQ ID NO: 1575509 - DNA, 15 bp, Homo sapiens
ctgttccttgatgtc

SEQ ID NO: 1575510 - DNA, 15 bp, Homo sapiens
tgttccttgatgtcc

SEQ ID NO: 1575511 - DNA, 15 bp, Homo sapiens
gttccttgatgtcct

SEQ ID NO: 1575512 - DNA, 15 bp, Homo sapiens
ttccttgatgtcctc

SEQ ID NO: 1575513 - DNA, 15 bp, Homo sapiens
tccttgatgtcctcc

SEQ ID NO: 1575514 - DNA, 15 bp, Homo sapiens
ccttgatgtcctccc

SEQ ID NO: 1575515 - DNA, 15 bp, Homo sapiens
cttgatgtcctccca

SEQ ID NO: 1575516 - DNA, 15 bp, Homo sapiens
ttgatgtcctcccag

SEQ ID NO: 1575517 - DNA, 15 bp, Homo sapiens
tgatgtcctcccagg

SEQ ID NO: 1575518 - DNA, 15 bp, Homo sapiens
gatgtcctcccaggc

SEQ ID NO: 1575519 - DNA, 15 bp, Homo sapiens
atgtcctcccaggct

SEQ ID NO: 1575520 - DNA, 15 bp, Homo sapiens
tgtcctcccaggctt

SEQ ID NO: 1575521 - DNA, 15 bp, Homo sapiens
gtcctcccaggcttc

SEQ ID NO: 1575522 - DNA, 15 bp, Homo sapiens
tcctcccaggcttcg

SEQ ID NO: 1575523 - DNA, 15 bp, Homo sapiens
cctcccaggcttcgc

SEQ ID NO: 1575524 - DNA, 15 bp, Homo sapiens
ctcccaggcttcgcc

SEQ ID NO: 1575525 - DNA, 15 bp, Homo sapiens
tcccaggcttcgccc

SEQ ID NO: 1575526 - DNA, 15 bp, Homo sapiens
cccaggcttcgccca

SEQ ID NO: 1575527 - DNA, 15 bp, Homo sapiens
ccaggcttcgcccac

SEQ ID NO: 1575528 - DNA, 15 bp, Homo sapiens
caggcttcgcccacc

SEQ ID NO: 1575529 - DNA, 15 bp, Homo sapiens
aggcttcgcccacca

SEQ ID NO: 1575530 - DNA, 15 bp, Homo sapiens
ggcttcgcccaccac

SEQ ID NO: 1575531 - DNA, 15 bp, Homo sapiens
gcttcgcccaccacc

SEQ ID NO: 1575532 - DNA, 15 bp, Homo sapiens
cttcgcccaccacct

SEQ ID NO: 1575533 - DNA, 15 bp, Homo sapiens
ttcgcccaccacctg

SEQ ID NO: 1575534 - DNA, 15 bp, Homo sapiens
tcgcccaccacctgg

SEQ ID NO: 1575535 - DNA, 15 bp, Homo sapiens
cgcccaccacctggc

SEQ ID NO: 1575536 - DNA, 15 bp, Homo sapiens
gcccaccacctggct

SEQ ID NO: 1575537 - DNA, 15 bp, Homo sapiens
cccaccacctggctc

SEQ ID NO: 1575538 - DNA, 15 bp, Homo sapiens
ccaccacctggctcc

SEQ ID NO: 1575539 - DNA, 15 bp, Homo sapiens
caccacctggctcct

SEQ ID NO: 1575540 - DNA, 15 bp, Homo sapiens
accacctggctcctg

SEQ ID NO: 1575541 - DNA, 15 bp, Homo sapiens
ccacctggctcctgg

SEQ ID NO: 1575542 - DNA, 15 bp, Homo sapiens
cacctggctcctggt

SEQ ID NO: 1575543 - DNA, 15 bp, Homo sapiens
acctggctcctggta

SEQ ID NO: 1575544 - DNA, 15 bp, Homo sapiens
cctggctcctggtaa

SEQ ID NO: 1575545 - DNA, 15 bp, Homo sapiens
ctggctcctggtaat

SEQ ID NO: 1575546 - DNA, 15 bp, Homo sapiens
tggctcctggtaatg

SEQ ID NO: 1575547 - DNA, 15 bp, Homo sapiens
ggctcctggtaatgc

SEQ ID NO: 1575548 - DNA, 15 bp, Homo sapiens
gctcctggtaatgca

SEQ ID NO: 1575549 - DNA, 15 bp, Homo sapiens
ctcctggtaatgcaa

SEQ ID NO: 1575550 - DNA, 15 bp, Homo sapiens
tcctggtaatgcaag

SEQ ID NO: 1575551 - DNA, 15 bp, Homo sapiens
cctggtaatgcaagg

SEQ ID NO: 1575552 - DNA, 15 bp, Homo sapiens
ctggtaatgcaagga

SEQ ID NO: 1575553 - DNA, 15 bp, Homo sapiens
tggtaatgcaaggaa

SEQ ID NO: 1575554 - DNA, 15 bp, Homo sapiens
ggtaatgcaaggaac

SEQ ID NO: 1575555 - DNA, 15 bp, Homo sapiens
gtaatgcaaggaact

SEQ ID NO: 1575556 - DNA, 15 bp, Homo sapiens
taatgcaaggaactg

SEQ ID NO: 1575557 - DNA, 15 bp, Homo sapiens
aatgcaaggaactgt

SEQ ID NO: 1575558 - DNA, 15 bp, Homo sapiens
atgcaaggaactgtg

SEQ ID NO: 1575559 - DNA, 15 bp, Homo sapiens
tgcaaggaactgtgt

SEQ ID NO: 1575560 - DNA, 15 bp, Homo sapiens
gcaaggaactgtgtt

SEQ ID NO: 1575561 - DNA, 15 bp, Homo sapiens
caaggaactgtgttt

SEQ ID NO: 1575562 - DNA, 15 bp, Homo sapiens
aaggaactgtgtttc

SEQ ID NO: 1575563 - DNA, 15 bp, Homo sapiens
aggaactgtgtttcc

SEQ ID NO: 1575564 - DNA, 15 bp, Homo sapiens
ggaactgtgtttcca

SEQ ID NO: 1575565 - DNA, 15 bp, Homo sapiens
gaactgtgtttccat

SEQ ID NO: 1575566 - DNA, 15 bp, Homo sapiens
aactgtgtttccatc

SEQ ID NO: 1575567 - DNA, 15 bp, Homo sapiens
actgtgtttccatcc

SEQ ID NO: 1575568 - DNA, 15 bp, Homo sapiens
ctgtgtttccatcca

SEQ ID NO: 1575569 - DNA, 15 bp, Homo sapiens
tgtgtttccatccat

SEQ ID NO: 1575570 - DNA, 15 bp, Homo sapiens
gtgtttccatccatt

SEQ ID NO: 1575571 - DNA, 15 bp, Homo sapiens
tgtttccatccattc

SEQ ID NO: 1575572 - DNA, 15 bp, Homo sapiens
gtttccatccattcc

SEQ ID NO: 1575573 - DNA, 15 bp, Homo sapiens
tttccatccattccc

SEQ ID NO: 1575574 - DNA, 15 bp, Homo sapiens
ttccatccattccct

SEQ ID NO: 1575575 - DNA, 15 bp, Homo sapiens
tccatccattccctt

SEQ ID NO: 1575576 - DNA, 15 bp, Homo sapiens
ccatccattcccttc

SEQ ID NO: 1575577 - DNA, 15 bp, Homo sapiens
catccattcccttcc

SEQ ID NO: 1575578 - DNA, 15 bp, Homo sapiens
atccattcccttcct

SEQ ID NO: 1575579 - DNA, 15 bp, Homo sapiens
tccattcccttcctt

SEQ ID NO: 1575580 - DNA, 15 bp, Homo sapiens
ccattcccttccttt

SEQ ID NO: 1575581 - DNA, 15 bp, Homo sapiens
cattcccttcctttc

SEQ ID NO: 1575582 - DNA, 15 bp, Homo sapiens
attcccttcctttca

SEQ ID NO: 1575583 - DNA, 15 bp, Homo sapiens
ttcccttcctttcac

SEQ ID NO: 1575584 - DNA, 15 bp, Homo sapiens
tcccttcctttcact

SEQ ID NO: 1575585 - DNA, 15 bp, Homo sapiens
cccttcctttcactg

SEQ ID NO: 1575586 - DNA, 15 bp, Homo sapiens
ccttcctttcactgc

SEQ ID NO: 1575587 - DNA, 15 bp, Homo sapiens
cttcctttcactgca

SEQ ID NO: 1575588 - DNA, 15 bp, Homo sapiens
ttcctttcactgcaa

SEQ ID NO: 1575589 - DNA, 15 bp, Homo sapiens
tcctttcactgcaac

SEQ ID NO: 1575590 - DNA, 15 bp, Homo sapiens
cctttcactgcaact

SEQ ID NO: 1575591 - DNA, 15 bp, Homo sapiens
ctttcactgcaactc

SEQ ID NO: 1575592 - DNA, 15 bp, Homo sapiens
tttcactgcaactcc

SEQ ID NO: 1575593 - DNA, 15 bp, Homo sapiens
ttcactgcaactcca

SEQ ID NO: 1575594 - DNA, 15 bp, Homo sapiens
tcactgcaactccag

SEQ ID NO: 1575595 - DNA, 15 bp, Homo sapiens
cactgcaactccagc

SEQ ID NO: 1575596 - DNA, 15 bp, Homo sapiens
actgcaactccagcc

SEQ ID NO: 1575597 - DNA, 15 bp, Homo sapiens
ctgcaactccagccc

SEQ ID NO: 1575598 - DNA, 15 bp, Homo sapiens
tgcaactccagcccc

SEQ ID NO: 1575599 - DNA, 15 bp, Homo sapiens
gcaactccagcccca

SEQ ID NO: 1575600 - DNA, 15 bp, Homo sapiens
caactccagccccac

SEQ ID NO: 1575601 - DNA, 15 bp, Homo sapiens
aactccagccccacg

SEQ ID NO: 1575602 - DNA, 15 bp, Homo sapiens
actccagccccacgt

SEQ ID NO: 1575603 - DNA, 15 bp, Homo sapiens
ctccagccccacgtt

SEQ ID NO: 1575604 - DNA, 15 bp, Homo sapiens
tccagccccacgttt

SEQ ID NO: 1575605 - DNA, 15 bp, Homo sapiens
ccagccccacgtttt

SEQ ID NO: 1575606 - DNA, 15 bp, Homo sapiens
cagccccacgttttg

SEQ ID NO: 1575607 - DNA, 15 bp, Homo sapiens
agccccacgttttga

SEQ ID NO: 1575608 - DNA, 15 bp, Homo sapiens
gccccacgttttgaa

SEQ ID NO: 1575609 - DNA, 15 bp, Homo sapiens
ccccacgttttgaac

SEQ ID NO: 1575610 - DNA, 15 bp, Homo sapiens
cccacgttttgaact

SEQ ID NO: 1575611 - DNA, 15 bp, Homo sapiens
ccacgttttgaacta

SEQ ID NO: 1575612 - DNA, 15 bp, Homo sapiens
cacgttttgaactac

SEQ ID NO: 1575613 - DNA, 15 bp, Homo sapiens
acgttttgaactacc

SEQ ID NO: 1575614 - DNA, 15 bp, Homo sapiens
cgttttgaactacct

SEQ ID NO: 1575615 - DNA, 15 bp, Homo sapiens
gttttgaactaccta

SEQ ID NO: 1575616 - DNA, 15 bp, Homo sapiens
ttttgaactacctat

SEQ ID NO: 1575617 - DNA, 15 bp, Homo sapiens
tttgaactacctatt

SEQ ID NO: 1575618 - DNA, 15 bp, Homo sapiens
ttgaactacctattc

SEQ ID NO: 1575619 - DNA, 15 bp, Homo sapiens
tgaactacctattcg

SEQ ID NO: 1575620 - DNA, 15 bp, Homo sapiens
gaactacctattcga

SEQ ID NO: 1575621 - DNA, 15 bp, Homo sapiens
aactacctattcgag

SEQ ID NO: 1575622 - DNA, 15 bp, Homo sapiens
actacctattcgaga

SEQ ID NO: 1575623 - DNA, 15 bp, Homo sapiens
ctacctattcgagat

SEQ ID NO: 1575624 - DNA, 15 bp, Homo sapiens
tacctattcgagatt

SEQ ID NO: 1575625 - DNA, 15 bp, Homo sapiens
acctattcgagattt

SEQ ID NO: 1575626 - DNA, 15 bp, Homo sapiens
cctattcgagatttc

SEQ ID NO: 1575627 - DNA, 15 bp, Homo sapiens
ctattcgagatttct

SEQ ID NO: 1575628 - DNA, 15 bp, Homo sapiens
tattcgagatttctg

SEQ ID NO: 1575629 - DNA, 15 bp, Homo sapiens
attcgagatttctgt

SEQ ID NO: 1575630 - DNA, 15 bp, Homo sapiens
ttcgagatttctgtc

SEQ ID NO: 1575631 - DNA, 15 bp, Homo sapiens
tcgagatttctgtct

SEQ ID NO: 1575632 - DNA, 15 bp, Homo sapiens
cgagatttctgtctc

SEQ ID NO: 1575633 - DNA, 15 bp, Homo sapiens
gagatttctgtctct

SEQ ID NO: 1575634 - DNA, 15 bp, Homo sapiens
agatttctgtctctg

SEQ ID NO: 1575635 - DNA, 15 bp, Homo sapiens
gatttctgtctctgg

SEQ ID NO: 1575636 - DNA, 15 bp, Homo sapiens
atttctgtctctgga

SEQ ID NO: 1575637 - DNA, 15 bp, Homo sapiens
tttctgtctctggac

SEQ ID NO: 1575638 - DNA, 15 bp, Homo sapiens
ttctgtctctggaca

SEQ ID NO: 1575639 - DNA, 15 bp, Homo sapiens
tctgtctctggacat

SEQ ID NO: 1575640 - DNA, 15 bp, Homo sapiens
ctgtctctggacatc

SEQ ID NO: 1575641 - DNA, 15 bp, Homo sapiens
tgtctctggacatcc

SEQ ID NO: 1575642 - DNA, 15 bp, Homo sapiens
gtctctggacatccc

SEQ ID NO: 1575643 - DNA, 15 bp, Homo sapiens
tctctggacatccct

SEQ ID NO: 1575644 - DNA, 15 bp, Homo sapiens
ctctggacatccctg

SEQ ID NO: 1575645 - DNA, 15 bp, Homo sapiens
tctggacatccctgt

SEQ ID NO: 1575646 - DNA, 15 bp, Homo sapiens
ctggacatccctgta

SEQ ID NO: 1575647 - DNA, 15 bp, Homo sapiens
tggacatccctgtaa

SEQ ID NO: 1575648 - DNA, 15 bp, Homo sapiens
ggacatccctgtaat

SEQ ID NO: 1575649 - DNA, 15 bp, Homo sapiens
gacatccctgtaatg

SEQ ID NO: 1575650 - DNA, 15 bp, Homo sapiens
acatccctgtaatgc

SEQ ID NO: 1575651 - DNA, 15 bp, Homo sapiens
catccctgtaatgcc

SEQ ID NO: 1575652 - DNA, 15 bp, Homo sapiens
atccctgtaatgcct

SEQ ID NO: 1575653 - DNA, 15 bp, Homo sapiens
tccctgtaatgcctc

SEQ ID NO: 1575654 - DNA, 15 bp, Homo sapiens
ccctgtaatgcctca

SEQ ID NO: 1575655 - DNA, 15 bp, Homo sapiens
cctgtaatgcctcaa

SEQ ID NO: 1575656 - DNA, 15 bp, Homo sapiens
ctgtaatgcctcaaa

SEQ ID NO: 1575657 - DNA, 15 bp, Homo sapiens
tgtaatgcctcaaac

SEQ ID NO: 1575658 - DNA, 15 bp, Homo sapiens
gtaatgcctcaaact

SEQ ID NO: 1575659 - DNA, 15 bp, Homo sapiens
taatgcctcaaactc

SEQ ID NO: 1575660 - DNA, 15 bp, Homo sapiens
aatgcctcaaactca

SEQ ID NO: 1575661 - DNA, 15 bp, Homo sapiens
atgcctcaaactcaa

SEQ ID NO: 1575662 - DNA, 15 bp, Homo sapiens
tgcctcaaactcaac

SEQ ID NO: 1575663 - DNA, 15 bp, Homo sapiens
gcctcaaactcaact

SEQ ID NO: 1575664 - DNA, 15 bp, Homo sapiens
cctcaaactcaactc

SEQ ID NO: 1575665 - DNA, 15 bp, Homo sapiens
ctcaaactcaactcg

SEQ ID NO: 1575666 - DNA, 15 bp, Homo sapiens
tcaaactcaactcgc

SEQ ID NO: 1575667 - DNA, 15 bp, Homo sapiens
caaactcaactcgcc

SEQ ID NO: 1575668 - DNA, 15 bp, Homo sapiens
aaactcaactcgccc

SEQ ID NO: 1575669 - DNA, 15 bp, Homo sapiens
aactcaactcgccca

SEQ ID NO: 1575670 - DNA, 15 bp, Homo sapiens
actcaactcgcccaa

SEQ ID NO: 1575671 - DNA, 15 bp, Homo sapiens
ctcaactcgcccaaa

SEQ ID NO: 1575672 - DNA, 15 bp, Homo sapiens
tcaactcgcccaaaa

SEQ ID NO: 1575673 - DNA, 15 bp, Homo sapiens
caactcgcccaaaag

SEQ ID NO: 1575674 - DNA, 15 bp, Homo sapiens
aactcgcccaaaaga

SEQ ID NO: 1575675 - DNA, 15 bp, Homo sapiens
actcgcccaaaagag

SEQ ID NO: 1575676 - DNA, 15 bp, Homo sapiens
ctcgcccaaaagaga

SEQ ID NO: 1575677 - DNA, 15 bp, Homo sapiens
tcgcccaaaagagaa

SEQ ID NO: 1575678 - DNA, 15 bp, Homo sapiens
cgcccaaaagagaat

SEQ ID NO: 1575679 - DNA, 15 bp, Homo sapiens
gcccaaaagagaatg

SEQ ID NO: 1575680 - DNA, 15 bp, Homo sapiens
cccaaaagagaatgt

SEQ ID NO: 1575681 - DNA, 15 bp, Homo sapiens
ccaaaagagaatgtg

SEQ ID NO: 1575682 - DNA, 15 bp, Homo sapiens
caaaagagaatgtgc

SEQ ID NO: 1575683 - DNA, 15 bp, Homo sapiens
aaaagagaatgtgcc

SEQ ID NO: 1575684 - DNA, 15 bp, Homo sapiens
aaagagaatgtgcca

SEQ ID NO: 1575685 - DNA, 15 bp, Homo sapiens
aagagaatgtgccat

SEQ ID NO: 1575686 - DNA, 15 bp, Homo sapiens
agagaatgtgccatc

SEQ ID NO: 1575687 - DNA, 15 bp, Homo sapiens
gagaatgtgccatct

SEQ ID NO: 1575688 - DNA, 15 bp, Homo sapiens
agaatgtgccatctc

SEQ ID NO: 1575689 - DNA, 15 bp, Homo sapiens
gaatgtgccatctcc

SEQ ID NO: 1575690 - DNA, 15 bp, Homo sapiens
aatgtgccatctccc

SEQ ID NO: 1575691 - DNA, 15 bp, Homo sapiens
atgtgccatctcccg

SEQ ID NO: 1575692 - DNA, 15 bp, Homo sapiens
tgtgccatctcccgt

SEQ ID NO: 1575693 - DNA, 15 bp, Homo sapiens
gtgccatctcccgtc

SEQ ID NO: 1575694 - DNA, 15 bp, Homo sapiens
tgccatctcccgtct

SEQ ID NO: 1575695 - DNA, 15 bp, Homo sapiens
gccatctcccgtctc

SEQ ID NO: 1575696 - DNA, 15 bp, Homo sapiens
ccatctcccgtctcc

SEQ ID NO: 1575697 - DNA, 15 bp, Homo sapiens
catctcccgtctcca

SEQ ID NO: 1575698 - DNA, 15 bp, Homo sapiens
atctcccgtctccaa

SEQ ID NO: 1575699 - DNA, 15 bp, Homo sapiens
tctcccgtctccaaa

SEQ ID NO: 1575700 - DNA, 15 bp, Homo sapiens
ctcccgtctccaaag

SEQ ID NO: 1575701 - DNA, 15 bp, Homo sapiens
tcccgtctccaaagg

SEQ ID NO: 1575702 - DNA, 15 bp, Homo sapiens
cccgtctccaaaggc

SEQ ID NO: 1575703 - DNA, 15 bp, Homo sapiens
ccgtctccaaaggct

SEQ ID NO: 1575704 - DNA, 15 bp, Homo sapiens
cgtctccaaaggctt

SEQ ID NO: 1575705 - DNA, 15 bp, Homo sapiens
gtctccaaaggcttt

SEQ ID NO: 1575706 - DNA, 15 bp, Homo sapiens
tctccaaaggctttc

SEQ ID NO: 1575707 - DNA, 15 bp, Homo sapiens
ctccaaaggctttca

SEQ ID NO: 1575708 - DNA, 15 bp, Homo sapiens
tccaaaggctttcat

SEQ ID NO: 1575709 - DNA, 15 bp, Homo sapiens
ccaaaggctttcatg

SEQ ID NO: 1575710 - DNA, 15 bp, Homo sapiens
caaaggctttcatgc

SEQ ID NO: 1575711 - DNA, 15 bp, Homo sapiens
aaaggctttcatgca

SEQ ID NO: 1575712 - DNA, 15 bp, Homo sapiens
aaggctttcatgcaa

SEQ ID NO: 1575713 - DNA, 15 bp, Homo sapiens
aggctttcatgcaac

SEQ ID NO: 1575714 - DNA, 15 bp, Homo sapiens
ggctttcatgcaacc

SEQ ID NO: 1575715 - DNA, 15 bp, Homo sapiens
gctttcatgcaacct

SEQ ID NO: 1575716 - DNA, 15 bp, Homo sapiens
ctttcatgcaacctt

SEQ ID NO: 1575717 - DNA, 15 bp, Homo sapiens
tttcatgcaaccttc

SEQ ID NO: 1575718 - DNA, 15 bp, Homo sapiens
ttcatgcaaccttct

SEQ ID NO: 1575719 - DNA, 15 bp, Homo sapiens
tcatgcaaccttctt

SEQ ID NO: 1575720 - DNA, 15 bp, Homo sapiens
catgcaaccttcttc

SEQ ID NO: 1575721 - DNA, 15 bp, Homo sapiens
atgcaaccttcttct

SEQ ID NO: 1575722 - DNA, 15 bp, Homo sapiens
tgcaaccttcttctt

SEQ ID NO: 1575723 - DNA, 15 bp, Homo sapiens
gcaaccttcttcttt

SEQ ID NO: 1575724 - DNA, 15 bp, Homo sapiens
caaccttcttctttg

SEQ ID NO: 1575725 - DNA, 15 bp, Homo sapiens
aaccttcttctttgc

SEQ ID NO: 1575726 - DNA, 15 bp, Homo sapiens
accttcttctttgca

SEQ ID NO: 1575727 - DNA, 15 bp, Homo sapiens
ccttcttctttgcag

SEQ ID NO: 1575728 - DNA, 15 bp, Homo sapiens
cttcttctttgcaga

SEQ ID NO: 1575729 - DNA, 15 bp, Homo sapiens
ttcttctttgcagag

SEQ ID NO: 1575730 - DNA, 15 bp, Homo sapiens
tcttctttgcagagc

SEQ ID NO: 1575731 - DNA, 15 bp, Homo sapiens
cttctttgcagagca

SEQ ID NO: 1575732 - DNA, 15 bp, Homo sapiens
ttctttgcagagcag

SEQ ID NO: 1575733 - DNA, 15 bp, Homo sapiens
tctttgcagagcagc

SEQ ID NO: 1575734 - DNA, 15 bp, Homo sapiens
ctttgcagagcagca

SEQ ID NO: 1575735 - DNA, 15 bp, Homo sapiens
tttgcagagcagcaa

SEQ ID NO: 1575736 - DNA, 15 bp, Homo sapiens
ttgcagagcagcaaa

SEQ ID NO: 1575737 - DNA, 15 bp, Homo sapiens
tgcagagcagcaaaa

SEQ ID NO: 1575738 - DNA, 15 bp, Homo sapiens
gcagagcagcaaaag

SEQ ID NO: 1575739 - DNA, 15 bp, Homo sapiens
cagagcagcaaaagc

SEQ ID NO: 1575740 - DNA, 15 bp, Homo sapiens
agagcagcaaaagct

SEQ ID NO: 1575741 - DNA, 15 bp, Homo sapiens
gagcagcaaaagcta

SEQ ID NO: 1575742 - DNA, 15 bp, Homo sapiens
agcagcaaaagctac

SEQ ID NO: 1575743 - DNA, 15 bp, Homo sapiens
gcagcaaaagctacc

SEQ ID NO: 1575744 - DNA, 15 bp, Homo sapiens
cagcaaaagctaccc

SEQ ID NO: 1575745 - DNA, 15 bp, Homo sapiens
agcaaaagctacccc

SEQ ID NO: 1575746 - DNA, 15 bp, Homo sapiens
gcaaaagctacccct

SEQ ID NO: 1575747 - DNA, 15 bp, Homo sapiens
caaaagctacccctg

SEQ ID NO: 1575748 - DNA, 15 bp, Homo sapiens
aaaagctacccctgt

SEQ ID NO: 1575749 - DNA, 15 bp, Homo sapiens
aaagctacccctgtc

SEQ ID NO: 1575750 - DNA, 15 bp, Homo sapiens
aagctacccctgtca

SEQ ID NO: 1575751 - DNA, 15 bp, Homo sapiens
agctacccctgtcac

SEQ ID NO: 1575752 - DNA, 15 bp, Homo sapiens
gctacccctgtcaca

SEQ ID NO: 1575753 - DNA, 15 bp, Homo sapiens
ctacccctgtcacag

SEQ ID NO: 1575754 - DNA, 15 bp, Homo sapiens
tacccctgtcacagc

SEQ ID NO: 1575755 - DNA, 15 bp, Homo sapiens
acccctgtcacagct

SEQ ID NO: 1575756 - DNA, 15 bp, Homo sapiens
cccctgtcacagctg

SEQ ID NO: 1575757 - DNA, 15 bp, Homo sapiens
ccctgtcacagctgc

SEQ ID NO: 1575758 - DNA, 15 bp, Homo sapiens
cctgtcacagctgcc

SEQ ID NO: 1575759 - DNA, 15 bp, Homo sapiens
ctgtcacagctgccc

SEQ ID NO: 1575760 - DNA, 15 bp, Homo sapiens
tgtcacagctgccca

SEQ ID NO: 1575761 - DNA, 15 bp, Homo sapiens
gtcacagctgcccaa

SEQ ID NO: 1575762 - DNA, 15 bp, Homo sapiens
tcacagctgcccaag

SEQ ID NO: 1575763 - DNA, 15 bp, Homo sapiens
cacagctgcccaagc

SEQ ID NO: 1575764 - DNA, 15 bp, Homo sapiens
acagctgcccaagcc

SEQ ID NO: 1575765 - DNA, 15 bp, Homo sapiens
cagctgcccaagcca

SEQ ID NO: 1575766 - DNA, 15 bp, Homo sapiens
agctgcccaagccag

SEQ ID NO: 1575767 - DNA, 15 bp, Homo sapiens
gctgcccaagccaga

SEQ ID NO: 1575768 - DNA, 15 bp, Homo sapiens
ctgcccaagccagaa

SEQ ID NO: 1575769 - DNA, 15 bp, Homo sapiens
tgcccaagccagaaa

SEQ ID NO: 1575770 - DNA, 15 bp, Homo sapiens
gcccaagccagaaac

SEQ ID NO: 1575771 - DNA, 15 bp, Homo sapiens
cccaagccagaaact

SEQ ID NO: 1575772 - DNA, 15 bp, Homo sapiens
ccaagccagaaacta

SEQ ID NO: 1575773 - DNA, 15 bp, Homo sapiens
caagccagaaactaa

SEQ ID NO: 1575774 - DNA, 15 bp, Homo sapiens
aagccagaaactaag

SEQ ID NO: 1575775 - DNA, 15 bp, Homo sapiens
agccagaaactaaga

SEQ ID NO: 1575776 - DNA, 15 bp, Homo sapiens
gccagaaactaagac

SEQ ID NO: 1575777 - DNA, 15 bp, Homo sapiens
ccagaaactaagacc

SEQ ID NO: 1575778 - DNA, 15 bp, Homo sapiens
cagaaactaagacca

SEQ ID NO: 1575779 - DNA, 15 bp, Homo sapiens
agaaactaagaccag

SEQ ID NO: 1575780 - DNA, 15 bp, Homo sapiens
gaaactaagaccaga

SEQ ID NO: 1575781 - DNA, 15 bp, Homo sapiens
aaactaagaccagag

SEQ ID NO: 1575782 - DNA, 15 bp, Homo sapiens
aactaagaccagagc

SEQ ID NO: 1575783 - DNA, 15 bp, Homo sapiens
actaagaccagagcc

SEQ ID NO: 1575784 - DNA, 15 bp, Homo sapiens
ctaagaccagagccg

SEQ ID NO: 1575785 - DNA, 15 bp, Homo sapiens
taagaccagagccgc

SEQ ID NO: 1575786 - DNA, 15 bp, Homo sapiens
aagaccagagccgct

SEQ ID NO: 1575787 - DNA, 15 bp, Homo sapiens
agaccagagccgctt

SEQ ID NO: 1575788 - DNA, 15 bp, Homo sapiens
gaccagagccgcttt

SEQ ID NO: 1575789 - DNA, 15 bp, Homo sapiens
accagagccgctttc

SEQ ID NO: 1575790 - DNA, 15 bp, Homo sapiens
ccagagccgctttca

SEQ ID NO: 1575791 - DNA, 15 bp, Homo sapiens
cagagccgctttcaa

SEQ ID NO: 1575792 - DNA, 15 bp, Homo sapiens
agagccgctttcaac

SEQ ID NO: 1575793 - DNA, 15 bp, Homo sapiens
gagccgctttcaact

SEQ ID NO: 1575794 - DNA, 15 bp, Homo sapiens
agccgctttcaactc

SEQ ID NO: 1575795 - DNA, 15 bp, Homo sapiens
gccgctttcaactct

SEQ ID NO: 1575796 - DNA, 15 bp, Homo sapiens
ccgctttcaactctg

SEQ ID NO: 1575797 - DNA, 15 bp, Homo sapiens
cgctttcaactctgc

SEQ ID NO: 1575798 - DNA, 15 bp, Homo sapiens
gctttcaactctgcc

SEQ ID NO: 1575799 - DNA, 15 bp, Homo sapiens
ctttcaactctgccc

SEQ ID NO: 1575800 - DNA, 15 bp, Homo sapiens
tttcaactctgccct

SEQ ID NO: 1575801 - DNA, 15 bp, Homo sapiens
ttcaactctgccctc

SEQ ID NO: 1575802 - DNA, 15 bp, Homo sapiens
tcaactctgccctct

SEQ ID NO: 1575803 - DNA, 15 bp, Homo sapiens
caactctgccctctt

SEQ ID NO: 1575804 - DNA, 15 bp, Homo sapiens
aactctgccctcttc

SEQ ID NO: 1575805 - DNA, 15 bp, Homo sapiens
actctgccctcttct

SEQ ID NO: 1575806 - DNA, 15 bp, Homo sapiens
ctctgccctcttctt

SEQ ID NO: 1575807 - DNA, 15 bp, Homo sapiens
tctgccctcttcttc

SEQ ID NO: 1575808 - DNA, 15 bp, Homo sapiens
ctgccctcttcttcc

SEQ ID NO: 1575809 - DNA, 15 bp, Homo sapiens
tgccctcttcttccc

SEQ ID NO: 1575810 - DNA, 15 bp, Homo sapiens
gccctcttcttccct

SEQ ID NO: 1575811 - DNA, 15 bp, Homo sapiens
ccctcttcttccctt

SEQ ID NO: 1575812 - DNA, 15 bp, Homo sapiens
cctcttcttccctta

SEQ ID NO: 1575813 - DNA, 15 bp, Homo sapiens
ctcttcttcccttat

SEQ ID NO: 1575814 - DNA, 15 bp, Homo sapiens
tcttcttcccttatg

SEQ ID NO: 1575815 - DNA, 15 bp, Homo sapiens
cttcttcccttatgg

SEQ ID NO: 1575816 - DNA, 15 bp, Homo sapiens
ttcttcccttatggc

SEQ ID NO: 1575817 - DNA, 15 bp, Homo sapiens
tcttcccttatggcc

SEQ ID NO: 1575818 - DNA, 15 bp, Homo sapiens
cttcccttatggcca

SEQ ID NO: 1575819 - DNA, 15 bp, Homo sapiens
ttcccttatggccac

SEQ ID NO: 1575820 - DNA, 15 bp, Homo sapiens
tcccttatggccaca

SEQ ID NO: 1575821 - DNA, 15 bp, Homo sapiens
cccttatggccacaa

SEQ ID NO: 1575822 - DNA, 15 bp, Homo sapiens
ccttatggccacaaa

SEQ ID NO: 1575823 - DNA, 15 bp, Homo sapiens
cttatggccacaaac

SEQ ID NO: 1575824 - DNA, 15 bp, Homo sapiens
ttatggccacaaacc

SEQ ID NO: 1575825 - DNA, 15 bp, Homo sapiens
tatggccacaaaccc

SEQ ID NO: 1575826 - DNA, 15 bp, Homo sapiens
atggccacaaacccc

SEQ ID NO: 1575827 - DNA, 15 bp, Homo sapiens
tggccacaaacccca

SEQ ID NO: 1575828 - DNA, 15 bp, Homo sapiens
ggccacaaaccccaa

SEQ ID NO: 1575829 - DNA, 15 bp, Homo sapiens
gccacaaaccccaag

SEQ ID NO: 1575830 - DNA, 15 bp, Homo sapiens
ccacaaaccccaagt

SEQ ID NO: 1575831 - DNA, 15 bp, Homo sapiens
cacaaaccccaagtt

SEQ ID NO: 1575832 - DNA, 15 bp, Homo sapiens
acaaaccccaagttt

SEQ ID NO: 1575833 - DNA, 15 bp, Homo sapiens
caaaccccaagtttc

SEQ ID NO: 1575834 - DNA, 15 bp, Homo sapiens
aaaccccaagtttct

SEQ ID NO: 1575835 - DNA, 15 bp, Homo sapiens
aaccccaagtttctc

SEQ ID NO: 1575836 - DNA, 15 bp, Homo sapiens
accccaagtttctct

SEQ ID NO: 1575837 - DNA, 15 bp, Homo sapiens
ccccaagtttctctt

SEQ ID NO: 1575838 - DNA, 15 bp, Homo sapiens
cccaagtttctcttc

SEQ ID NO: 1575839 - DNA, 15 bp, Homo sapiens
ccaagtttctcttct

SEQ ID NO: 1575840 - DNA, 15 bp, Homo sapiens
caagtttctcttctg

SEQ ID NO: 1575841 - DNA, 15 bp, Homo sapiens
aagtttctcttctgt

SEQ ID NO: 1575842 - DNA, 15 bp, Homo sapiens
agtttctcttctgtg

SEQ ID NO: 1575843 - DNA, 15 bp, Homo sapiens
gtttctcttctgtgg

SEQ ID NO: 1575844 - DNA, 15 bp, Homo sapiens
tttctcttctgtggt

SEQ ID NO: 1575845 - DNA, 15 bp, Homo sapiens
ttctcttctgtggtg

SEQ ID NO: 1575846 - DNA, 15 bp, Homo sapiens
tctcttctgtggtga

SEQ ID NO: 1575847 - DNA, 15 bp, Homo sapiens
ctcttctgtggtgat

SEQ ID NO: 1575848 - DNA, 15 bp, Homo sapiens
tcttctgtggtgatt

SEQ ID NO: 1575849 - DNA, 15 bp, Homo sapiens
cttctgtggtgattt

SEQ ID NO: 1575850 - DNA, 15 bp, Homo sapiens
ttctgtggtgatttc

SEQ ID NO: 1575851 - DNA, 15 bp, Homo sapiens
tctgtggtgatttca

SEQ ID NO: 1575852 - DNA, 15 bp, Homo sapiens
ctgtggtgatttcag

SEQ ID NO: 1575853 - DNA, 15 bp, Homo sapiens
tgtggtgatttcaga

SEQ ID NO: 1575854 - DNA, 15 bp, Homo sapiens
gtggtgatttcagat

SEQ ID NO: 1575855 - DNA, 15 bp, Homo sapiens
tggtgatttcagatc

SEQ ID NO: 1575856 - DNA, 15 bp, Homo sapiens
ggtgatttcagatcc

SEQ ID NO: 1575857 - DNA, 15 bp, Homo sapiens
gtgatttcagatccg

SEQ ID NO: 1575858 - DNA, 15 bp, Homo sapiens
tgatttcagatccgc

SEQ ID NO: 1575859 - DNA, 15 bp, Homo sapiens
gatttcagatccgct

SEQ ID NO: 1575860 - DNA, 15 bp, Homo sapiens
atttcagatccgctt

SEQ ID NO: 1575861 - DNA, 15 bp, Homo sapiens
tttcagatccgcttc

SEQ ID NO: 1575862 - DNA, 15 bp, Homo sapiens
ttcagatccgcttct

SEQ ID NO: 1575863 - DNA, 15 bp, Homo sapiens
tcagatccgcttctc

SEQ ID NO: 1575864 - DNA, 15 bp, Homo sapiens
cagatccgcttctct

SEQ ID NO: 1575865 - DNA, 15 bp, Homo sapiens
agatccgcttctctc

SEQ ID NO: 1575866 - DNA, 15 bp, Homo sapiens
gatccgcttctctca

SEQ ID NO: 1575867 - DNA, 15 bp, Homo sapiens
atccgcttctctcac

SEQ ID NO: 1575868 - DNA, 15 bp, Homo sapiens
tccgcttctctcact

SEQ ID NO: 1575869 - DNA, 15 bp, Homo sapiens
ccgcttctctcactt

SEQ ID NO: 1575870 - DNA, 15 bp, Homo sapiens
cgcttctctcacttc

SEQ ID NO: 1575871 - DNA, 15 bp, Homo sapiens
gcttctctcacttct

SEQ ID NO: 1575872 - DNA, 15 bp, Homo sapiens
cttctctcacttctt

SEQ ID NO: 1575873 - DNA, 15 bp, Homo sapiens
ttctctcacttcttt

SEQ ID NO: 1575874 - DNA, 15 bp, Homo sapiens
tctctcacttctttt

SEQ ID NO: 1575875 - DNA, 15 bp, Homo sapiens
ctctcacttcttttt

SEQ ID NO: 1575876 - DNA, 15 bp, Homo sapiens
tctcacttctttttc

SEQ ID NO: 1575877 - DNA, 15 bp, Homo sapiens
ctcacttctttttcc

SEQ ID NO: 1575878 - DNA, 15 bp, Homo sapiens
tcacttctttttccc

SEQ ID NO: 1575879 - DNA, 15 bp, Homo sapiens
cacttctttttccct

SEQ ID NO: 1575880 - DNA, 15 bp, Homo sapiens
acttctttttccctc

SEQ ID NO: 1575881 - DNA, 15 bp, Homo sapiens
cttctttttccctcc

SEQ ID NO: 1575882 - DNA, 15 bp, Homo sapiens
ttctttttccctcct

SEQ ID NO: 1575883 - DNA, 15 bp, Homo sapiens
tctttttccctcctt

SEQ ID NO: 1575884 - DNA, 15 bp, Homo sapiens
ctttttccctccttc

SEQ ID NO: 1575885 - DNA, 15 bp, Homo sapiens
tttttccctccttcc

SEQ ID NO: 1575886 - DNA, 15 bp, Homo sapiens
ttttccctccttccc

SEQ ID NO: 1575887 - DNA, 15 bp, Homo sapiens
tttccctccttccca

SEQ ID NO: 1575888 - DNA, 15 bp, Homo sapiens
ttccctccttcccac

SEQ ID NO: 1575889 - DNA, 15 bp, Homo sapiens
tccctccttcccacc

SEQ ID NO: 1575890 - DNA, 15 bp, Homo sapiens
ccctccttcccacca

SEQ ID NO: 1575891 - DNA, 15 bp, Homo sapiens
cctccttcccaccac

SEQ ID NO: 1575892 - DNA, 15 bp, Homo sapiens
ctccttcccaccact

SEQ ID NO: 1575893 - DNA, 15 bp, Homo sapiens
tccttcccaccactt

SEQ ID NO: 1575894 - DNA, 15 bp, Homo sapiens
ccttcccaccacttc

SEQ ID NO: 1575895 - DNA, 15 bp, Homo sapiens
cttcccaccacttct

SEQ ID NO: 1575896 - DNA, 15 bp, Homo sapiens
ttcccaccacttctt

SEQ ID NO: 1575897 - DNA, 15 bp, Homo sapiens
tcccaccacttcttg

SEQ ID NO: 1575898 - DNA, 15 bp, Homo sapiens
cccaccacttcttgg

SEQ ID NO: 1575899 - DNA, 15 bp, Homo sapiens
ccaccacttcttggt

SEQ ID NO: 1575900 - DNA, 15 bp, Homo sapiens
caccacttcttggta

SEQ ID NO: 1575901 - DNA, 15 bp, Homo sapiens
accacttcttggtac

SEQ ID NO: 1575902 - DNA, 15 bp, Homo sapiens
ccacttcttggtact

SEQ ID NO: 1575903 - DNA, 15 bp, Homo sapiens
cacttcttggtactg

SEQ ID NO: 1575904 - DNA, 15 bp, Homo sapiens
acttcttggtactgc

SEQ ID NO: 1575905 - DNA, 15 bp, Homo sapiens
cttcttggtactgca

SEQ ID NO: 1575906 - DNA, 15 bp, Homo sapiens
ttcttggtactgcag

SEQ ID NO: 1575907 - DNA, 15 bp, Homo sapiens
tcttggtactgcagg

SEQ ID NO: 1575908 - DNA, 15 bp, Homo sapiens
cttggtactgcagga

SEQ ID NO: 1575909 - DNA, 15 bp, Homo sapiens
ttggtactgcaggag

SEQ ID NO: 1575910 - DNA, 15 bp, Homo sapiens
tggtactgcaggagc

SEQ ID NO: 1575911 - DNA, 15 bp, Homo sapiens
ggtactgcaggagct

SEQ ID NO: 1575912 - DNA, 15 bp, Homo sapiens
gtactgcaggagctt

SEQ ID NO: 1575913 - DNA, 15 bp, Homo sapiens
tactgcaggagctta

SEQ ID NO: 1575914 - DNA, 15 bp, Homo sapiens
actgcaggagcttat

SEQ ID NO: 1575915 - DNA, 15 bp, Homo sapiens
ctgcaggagcttatc

SEQ ID NO: 1575916 - DNA, 15 bp, Homo sapiens
tgcaggagcttatcc

SEQ ID NO: 1575917 - DNA, 15 bp, Homo sapiens
gcaggagcttatccc

SEQ ID NO: 1575918 - DNA, 15 bp, Homo sapiens
caggagcttatccca

SEQ ID NO: 1575919 - DNA, 15 bp, Homo sapiens
aggagcttatcccag

SEQ ID NO: 1575920 - DNA, 15 bp, Homo sapiens
ggagcttatcccaga

SEQ ID NO: 1575921 - DNA, 15 bp, Homo sapiens
gagcttatcccagag

SEQ ID NO: 1575922 - DNA, 15 bp, Homo sapiens
agcttatcccagagt

SEQ ID NO: 1575923 - DNA, 15 bp, Homo sapiens
gcttatcccagagtc

SEQ ID NO: 1575924 - DNA, 15 bp, Homo sapiens
cttatcccagagtca

SEQ ID NO: 1575925 - DNA, 15 bp, Homo sapiens
ttatcccagagtcac

SEQ ID NO: 1575926 - DNA, 15 bp, Homo sapiens
tatcccagagtcaca

SEQ ID NO: 1575927 - DNA, 15 bp, Homo sapiens
atcccagagtcacag

SEQ ID NO: 1575928 - DNA, 15 bp, Homo sapiens
tcccagagtcacaga

SEQ ID NO: 1575929 - DNA, 15 bp, Homo sapiens
cccagagtcacagac

SEQ ID NO: 1575930 - DNA, 15 bp, Homo sapiens
ccagagtcacagact

SEQ ID NO: 1575931 - DNA, 15 bp, Homo sapiens
cagagtcacagactc

SEQ ID NO: 1575932 - DNA, 15 bp, Homo sapiens
agagtcacagactca

SEQ ID NO: 1575933 - DNA, 15 bp, Homo sapiens
gagtcacagactcaa

SEQ ID NO: 1575934 - DNA, 15 bp, Homo sapiens
agtcacagactcaaa

SEQ ID NO: 1575935 - DNA, 15 bp, Homo sapiens
gtcacagactcaaat

SEQ ID NO: 1575936 - DNA, 15 bp, Homo sapiens
tcacagactcaaatg

SEQ ID NO: 1575937 - DNA, 15 bp, Homo sapiens
cacagactcaaatgc

SEQ ID NO: 1575938 - DNA, 15 bp, Homo sapiens
acagactcaaatgcc

SEQ ID NO: 1575939 - DNA, 15 bp, Homo sapiens
cagactcaaatgcct

SEQ ID NO: 1575940 - DNA, 15 bp, Homo sapiens
agactcaaatgcctg

SEQ ID NO: 1575941 - DNA, 15 bp, Homo sapiens
gactcaaatgcctgc

SEQ ID NO: 1575942 - DNA, 15 bp, Homo sapiens
actcaaatgcctgca

SEQ ID NO: 1575943 - DNA, 15 bp, Homo sapiens
ctcaaatgcctgcag

SEQ ID NO: 1575944 - DNA, 15 bp, Homo sapiens
tcaaatgcctgcagg

SEQ ID NO: 1575945 - DNA, 15 bp, Homo sapiens
caaatgcctgcaggg

SEQ ID NO: 1575946 - DNA, 15 bp, Homo sapiens
aaatgcctgcagggg

SEQ ID NO: 1575947 - DNA, 15 bp, Homo sapiens
aatgcctgcaggggc

SEQ ID NO: 1575948 - DNA, 15 bp, Homo sapiens
atgcctgcaggggcc

SEQ ID NO: 1575949 - DNA, 15 bp, Homo sapiens
tgcctgcaggggcct

SEQ ID NO: 1575950 - DNA, 15 bp, Homo sapiens
gcctgcaggggcctg

SEQ ID NO: 1575951 - DNA, 15 bp, Homo sapiens
cctgcaggggcctga

SEQ ID NO: 1575952 - DNA, 15 bp, Homo sapiens
ctgcaggggcctgag

SEQ ID NO: 1575953 - DNA, 15 bp, Homo sapiens
tgcaggggcctgagg

SEQ ID NO: 1575954 - DNA, 15 bp, Homo sapiens
gcaggggcctgaggg

SEQ ID NO: 1575955 - DNA, 15 bp, Homo sapiens
caggggcctgaggga

SEQ ID NO: 1575956 - DNA, 15 bp, Homo sapiens
aggggcctgagggag

SEQ ID NO: 1575957 - DNA, 15 bp, Homo sapiens
ggggcctgagggagg

SEQ ID NO: 1575958 - DNA, 15 bp, Homo sapiens
gggcctgagggaggg

SEQ ID NO: 1575959 - DNA, 15 bp, Homo sapiens
ggcctgagggaggga

SEQ ID NO: 1575960 - DNA, 15 bp, Homo sapiens
gcctgagggagggag

SEQ ID NO: 1575961 - DNA, 15 bp, Homo sapiens
cctgagggagggagg

SEQ ID NO: 1575962 - DNA, 15 bp, Homo sapiens
ctgagggagggaggt

SEQ ID NO: 1575963 - DNA, 15 bp, Homo sapiens
tgagggagggaggtg

SEQ ID NO: 1575964 - DNA, 15 bp, Homo sapiens
gagggagggaggtgc

SEQ ID NO: 1575965 - DNA, 15 bp, Homo sapiens
agggagggaggtgca

SEQ ID NO: 1575966 - DNA, 15 bp, Homo sapiens
gggagggaggtgcac

SEQ ID NO: 1575967 - DNA, 15 bp, Homo sapiens
ggagggaggtgcact

SEQ ID NO: 1575968 - DNA, 15 bp, Homo sapiens
gagggaggtgcactt

SEQ ID NO: 1575969 - DNA, 15 bp, Homo sapiens
agggaggtgcacttg

SEQ ID NO: 1575970 - DNA, 15 bp, Homo sapiens
gggaggtgcacttgg

SEQ ID NO: 1575971 - DNA, 15 bp, Homo sapiens
ggaggtgcacttggc

SEQ ID NO: 1575972 - DNA, 15 bp, Homo sapiens
gaggtgcacttggca

SEQ ID NO: 1575973 - DNA, 15 bp, Homo sapiens
aggtgcacttggcat

SEQ ID NO: 1575974 - DNA, 15 bp, Homo sapiens
ggtgcacttggcatc

SEQ ID NO: 1575975 - DNA, 15 bp, Homo sapiens
gtgcacttggcatct

SEQ ID NO: 1575976 - DNA, 15 bp, Homo sapiens
tgcacttggcatctc

SEQ ID NO: 1575977 - DNA, 15 bp, Homo sapiens
gcacttggcatctca

SEQ ID NO: 1575978 - DNA, 15 bp, Homo sapiens
cacttggcatctcag

SEQ ID NO: 1575979 - DNA, 15 bp, Homo sapiens
acttggcatctcagg

SEQ ID NO: 1575980 - DNA, 15 bp, Homo sapiens
cttggcatctcagga

SEQ ID NO: 1575981 - DNA, 15 bp, Homo sapiens
ttggcatctcaggaa

SEQ ID NO: 1575982 - DNA, 15 bp, Homo sapiens
tggcatctcaggaag

SEQ ID NO: 1575983 - DNA, 15 bp, Homo sapiens
ggcatctcaggaagg

SEQ ID NO: 1575984 - DNA, 15 bp, Homo sapiens
gcatctcaggaaggg

SEQ ID NO: 1575985 - DNA, 15 bp, Homo sapiens
catctcaggaagggg

SEQ ID NO: 1575986 - DNA, 15 bp, Homo sapiens
atctcaggaaggggt

SEQ ID NO: 1575987 - DNA, 15 bp, Homo sapiens
tctcaggaaggggtg

SEQ ID NO: 1575988 - DNA, 15 bp, Homo sapiens
ctcaggaaggggtgt

SEQ ID NO: 1575989 - DNA, 15 bp, Homo sapiens
tcaggaaggggtgtg

SEQ ID NO: 1575990 - DNA, 15 bp, Homo sapiens
caggaaggggtgtgt

SEQ ID NO: 1575991 - DNA, 15 bp, Homo sapiens
aggaaggggtgtgtg

SEQ ID NO: 1575992 - DNA, 15 bp, Homo sapiens
ggaaggggtgtgtgg

SEQ ID NO: 1575993 - DNA, 15 bp, Homo sapiens
gaaggggtgtgtggc

SEQ ID NO: 1575994 - DNA, 15 bp, Homo sapiens
aaggggtgtgtggct

SEQ ID NO: 1575995 - DNA, 15 bp, Homo sapiens
aggggtgtgtggctg

SEQ ID NO: 1575996 - DNA, 15 bp, Homo sapiens
ggggtgtgtggctgg

SEQ ID NO: 1575997 - DNA, 15 bp, Homo sapiens
gggtgtgtggctggg

SEQ ID NO: 1575998 - DNA, 15 bp, Homo sapiens
ggtgtgtggctgggt

SEQ ID NO: 1575999 - DNA, 15 bp, Homo sapiens
gtgtgtggctgggtg

SEQ ID NO: 1576000 - DNA, 15 bp, Homo sapiens
tgtgtggctgggtgt

SEQ ID NO: 1576001 - DNA, 15 bp, Homo sapiens
gtgtggctgggtgtg

SEQ ID NO: 1576002 - DNA, 15 bp, Homo sapiens
tgtggctgggtgtgg

SEQ ID NO: 1576003 - DNA, 15 bp, Homo sapiens
gtggctgggtgtggt

SEQ ID NO: 1576004 - DNA, 15 bp, Homo sapiens
tggctgggtgtggtg

SEQ ID NO: 1576005 - DNA, 15 bp, Homo sapiens
gggtgtggtggctcc

SEQ ID NO: 1576006 - DNA, 15 bp, Homo sapiens
ggtgtggtggctccc

SEQ ID NO: 1576007 - DNA, 15 bp, Homo sapiens
gtgtggtggctcccg

SEQ ID NO: 1576008 - DNA, 15 bp, Homo sapiens
tgtggtggctcccgc

SEQ ID NO: 1576009 - DNA, 15 bp, Homo sapiens
gtggtggctcccgcc

SEQ ID NO: 1576010 - DNA, 15 bp, Homo sapiens
tggtggctcccgccc

SEQ ID NO: 1576011 - DNA, 15 bp, Homo sapiens
ggtggctcccgcccg

SEQ ID NO: 1576012 - DNA, 15 bp, Homo sapiens
gtggctcccgcccgg

SEQ ID NO: 1576013 - DNA, 15 bp, Homo sapiens
tggctcccgcccgga

SEQ ID NO: 1576014 - DNA, 15 bp, Homo sapiens
ggctcccgcccggaa

SEQ ID NO: 1576015 - DNA, 15 bp, Homo sapiens
gctcccgcccggaat

SEQ ID NO: 1576016 - DNA, 15 bp, Homo sapiens
ctcccgcccggaatc

SEQ ID NO: 1576017 - DNA, 15 bp, Homo sapiens
tcccgcccggaatcc

SEQ ID NO: 1576018 - DNA, 15 bp, Homo sapiens
cccgcccggaatccc

SEQ ID NO: 1576019 - DNA, 15 bp, Homo sapiens
ccgcccggaatccca

SEQ ID NO: 1576020 - DNA, 15 bp, Homo sapiens
cgcccggaatcccag

SEQ ID NO: 1576021 - DNA, 15 bp, Homo sapiens
gcccggaatcccagc

SEQ ID NO: 1576022 - DNA, 15 bp, Homo sapiens
cccggaatcccagca

SEQ ID NO: 1576023 - DNA, 15 bp, Homo sapiens
ccggaatcccagcac

SEQ ID NO: 1576024 - DNA, 15 bp, Homo sapiens
cggaatcccagcact

SEQ ID NO: 1576025 - DNA, 15 bp, Homo sapiens
ccagcacttttggga

SEQ ID NO: 1576026 - DNA, 15 bp, Homo sapiens
cagcacttttgggat

SEQ ID NO: 1576027 - DNA, 15 bp, Homo sapiens
agcacttttgggatt

SEQ ID NO: 1576028 - DNA, 15 bp, Homo sapiens
gcacttttgggatta

SEQ ID NO: 1576029 - DNA, 15 bp, Homo sapiens
cacttttgggattac

SEQ ID NO: 1576030 - DNA, 15 bp, Homo sapiens
acttttgggattaca

SEQ ID NO: 1576031 - DNA, 15 bp, Homo sapiens
cttttgggattacat

SEQ ID NO: 1576032 - DNA, 15 bp, Homo sapiens
ttttgggattacatt

SEQ ID NO: 1576033 - DNA, 15 bp, Homo sapiens
tttgggattacattt

SEQ ID NO: 1576034 - DNA, 15 bp, Homo sapiens
ttgggattacatttt

SEQ ID NO: 1576035 - DNA, 15 bp, Homo sapiens
tgggattacattttg

SEQ ID NO: 1576036 - DNA, 15 bp, Homo sapiens
gggattacattttgg

SEQ ID NO: 1576037 - DNA, 15 bp, Homo sapiens
ggattacattttggc

SEQ ID NO: 1576038 - DNA, 15 bp, Homo sapiens
gattacattttggcc

SEQ ID NO: 1576039 - DNA, 15 bp, Homo sapiens
attacattttggcca

SEQ ID NO: 1576040 - DNA, 15 bp, Homo sapiens
ttacattttggccaa

SEQ ID NO: 1576041 - DNA, 15 bp, Homo sapiens
tacattttggccaag

SEQ ID NO: 1576042 - DNA, 15 bp, Homo sapiens
acattttggccaaga

SEQ ID NO: 1576043 - DNA, 15 bp, Homo sapiens
cattttggccaagac

SEQ ID NO: 1576044 - DNA, 15 bp, Homo sapiens
attttggccaagacg

SEQ ID NO: 1576045 - DNA, 15 bp, Homo sapiens
ttttggccaagacgg

SEQ ID NO: 1576046 - DNA, 15 bp, Homo sapiens
tttggccaagacgga

SEQ ID NO: 1576047 - DNA, 15 bp, Homo sapiens
ttggccaagacggac

SEQ ID NO: 1576048 - DNA, 15 bp, Homo sapiens
tggccaagacggacg

SEQ ID NO: 1576049 - DNA, 15 bp, Homo sapiens
ggccaagacggacgg

SEQ ID NO: 1576050 - DNA, 15 bp, Homo sapiens
gccaagacggacgga

SEQ ID NO: 1576051 - DNA, 15 bp, Homo sapiens
ccaagacggacggat

SEQ ID NO: 1576052 - DNA, 15 bp, Homo sapiens
caagacggacggatc

SEQ ID NO: 1576053 - DNA, 15 bp, Homo sapiens
aagacggacggatca

SEQ ID NO: 1576054 - DNA, 15 bp, Homo sapiens
agacggacggatcac

SEQ ID NO: 1576055 - DNA, 15 bp, Homo sapiens
gacggacggatcact

SEQ ID NO: 1576056 - DNA, 15 bp, Homo sapiens
acggacggatcactt

SEQ ID NO: 1576057 - DNA, 15 bp, Homo sapiens
cggacggatcacttg

SEQ ID NO: 1576058 - DNA, 15 bp, Homo sapiens
ggacggatcacttga

SEQ ID NO: 1576059 - DNA, 15 bp, Homo sapiens
gacggatcacttgag

SEQ ID NO: 1576060 - DNA, 15 bp, Homo sapiens
acggatcacttgagc

SEQ ID NO: 1576061 - DNA, 15 bp, Homo sapiens
cggatcacttgagcc

SEQ ID NO: 1576062 - DNA, 15 bp, Homo sapiens
ggagtttgagaccat

SEQ ID NO: 1576063 - DNA, 15 bp, Homo sapiens
gagtttgagaccatc

SEQ ID NO: 1576064 - DNA, 15 bp, Homo sapiens
agtttgagaccatcc

SEQ ID NO: 1576065 - DNA, 15 bp, Homo sapiens
gtttgagaccatcct

SEQ ID NO: 1576066 - DNA, 15 bp, Homo sapiens
tttgagaccatccta

SEQ ID NO: 1576067 - DNA, 15 bp, Homo sapiens
ttgagaccatcctag

SEQ ID NO: 1576068 - DNA, 15 bp, Homo sapiens
tgagaccatcctagg

SEQ ID NO: 1576069 - DNA, 15 bp, Homo sapiens
gagaccatcctaggc

SEQ ID NO: 1576070 - DNA, 15 bp, Homo sapiens
agaccatcctaggca

SEQ ID NO: 1576071 - DNA, 15 bp, Homo sapiens
gaccatcctaggcaa

SEQ ID NO: 1576072 - DNA, 15 bp, Homo sapiens
accatcctaggcaat

SEQ ID NO: 1576073 - DNA, 15 bp, Homo sapiens
ccatcctaggcaatg

SEQ ID NO: 1576074 - DNA, 15 bp, Homo sapiens
catcctaggcaatgt

SEQ ID NO: 1576075 - DNA, 15 bp, Homo sapiens
atcctaggcaatgtg

SEQ ID NO: 1576076 - DNA, 15 bp, Homo sapiens
tcctaggcaatgtga

SEQ ID NO: 1576077 - DNA, 15 bp, Homo sapiens
cctaggcaatgtgac

SEQ ID NO: 1576078 - DNA, 15 bp, Homo sapiens
ctaggcaatgtgaca

SEQ ID NO: 1576079 - DNA, 15 bp, Homo sapiens
taggcaatgtgacaa

SEQ ID NO: 1576080 - DNA, 15 bp, Homo sapiens
aggcaatgtgacaaa

SEQ ID NO: 1576081 - DNA, 15 bp, Homo sapiens
ggcaatgtgacaaaa

SEQ ID NO: 1576082 - DNA, 15 bp, Homo sapiens
gcaatgtgacaaaac

SEQ ID NO: 1576083 - DNA, 15 bp, Homo sapiens
caatgtgacaaaacc

SEQ ID NO: 1576084 - DNA, 15 bp, Homo sapiens
aatgtgacaaaaccc

SEQ ID NO: 1576085 - DNA, 15 bp, Homo sapiens
atgtgacaaaaccct

SEQ ID NO: 1576086 - DNA, 15 bp, Homo sapiens
tgtgacaaaaccctg

SEQ ID NO: 1576087 - DNA, 15 bp, Homo sapiens
gtgacaaaaccctgt

SEQ ID NO: 1576088 - DNA, 15 bp, Homo sapiens
tgacaaaaccctgtc

SEQ ID NO: 1576089 - DNA, 15 bp, Homo sapiens
gacaaaaccctgtct

SEQ ID NO: 1576090 - DNA, 15 bp, Homo sapiens
acaaaaccctgtctc

SEQ ID NO: 1576091 - DNA, 15 bp, Homo sapiens
aaccctgtctctacc

SEQ ID NO: 1576092 - DNA, 15 bp, Homo sapiens
ctctaccaaaaaaat

SEQ ID NO: 1576093 - DNA, 15 bp, Homo sapiens
tctaccaaaaaaatt

SEQ ID NO: 1576094 - DNA, 15 bp, Homo sapiens
ctaccaaaaaaatta

SEQ ID NO: 1576095 - DNA, 15 bp, Homo sapiens
taccaaaaaaattaa

SEQ ID NO: 1576096 - DNA, 15 bp, Homo sapiens
accaaaaaaattaaa

SEQ ID NO: 1576097 - DNA, 15 bp, Homo sapiens
ccaaaaaaattaaaa

SEQ ID NO: 1576098 - DNA, 15 bp, Homo sapiens
aaaaaattaaaaatt

SEQ ID NO: 1576099 - DNA, 15 bp, Homo sapiens
aaaaattaaaaatta

SEQ ID NO: 1576100 - DNA, 15 bp, Homo sapiens
aaaattaaaaattag

SEQ ID NO: 1576101 - DNA, 15 bp, Homo sapiens
aaattaaaaattagc

SEQ ID NO: 1576102 - DNA, 15 bp, Homo sapiens
aattaaaaattagcc

SEQ ID NO: 1576103 - DNA, 15 bp, Homo sapiens
attaaaaattagcca

SEQ ID NO: 1576104 - DNA, 15 bp, Homo sapiens
aaaattagccaggcc

SEQ ID NO: 1576105 - DNA, 15 bp, Homo sapiens
aaattagccaggcct

SEQ ID NO: 1576106 - DNA, 15 bp, Homo sapiens
aattagccaggcctg

SEQ ID NO: 1576107 - DNA, 15 bp, Homo sapiens
attagccaggcctgg

SEQ ID NO: 1576108 - DNA, 15 bp, Homo sapiens
ttagccaggcctggt

SEQ ID NO: 1576109 - DNA, 15 bp, Homo sapiens
tagccaggcctggtg

SEQ ID NO: 1576110 - DNA, 15 bp, Homo sapiens
agccaggcctggtgg

SEQ ID NO: 1576111 - DNA, 15 bp, Homo sapiens
gccaggcctggtggt

SEQ ID NO: 1576112 - DNA, 15 bp, Homo sapiens
ccaggcctggtggta

SEQ ID NO: 1576113 - DNA, 15 bp, Homo sapiens
caggcctggtggtac

SEQ ID NO: 1576114 - DNA, 15 bp, Homo sapiens
aggcctggtggtaca

SEQ ID NO: 1576115 - DNA, 15 bp, Homo sapiens
ggcctggtggtacat

SEQ ID NO: 1576116 - DNA, 15 bp, Homo sapiens
gcctggtggtacatg

SEQ ID NO: 1576117 - DNA, 15 bp, Homo sapiens
cctggtggtacatgc

SEQ ID NO: 1576118 - DNA, 15 bp, Homo sapiens
ctggtggtacatgcc

SEQ ID NO: 1576119 - DNA, 15 bp, Homo sapiens
tggtggtacatgcct

SEQ ID NO: 1576120 - DNA, 15 bp, Homo sapiens
ggtggtacatgcctg

SEQ ID NO: 1576121 - DNA, 15 bp, Homo sapiens
gtggtacatgcctgt

SEQ ID NO: 1576122 - DNA, 15 bp, Homo sapiens
tggtacatgcctgta

SEQ ID NO: 1576123 - DNA, 15 bp, Homo sapiens
ggtacatgcctgtaa

SEQ ID NO: 1576124 - DNA, 15 bp, Homo sapiens
gtacatgcctgtaac

SEQ ID NO: 1576125 - DNA, 15 bp, Homo sapiens
tacatgcctgtaaca

SEQ ID NO: 1576126 - DNA, 15 bp, Homo sapiens
acatgcctgtaacag

SEQ ID NO: 1576127 - DNA, 15 bp, Homo sapiens
catgcctgtaacagt

SEQ ID NO: 1576128 - DNA, 15 bp, Homo sapiens
atgcctgtaacagtc

SEQ ID NO: 1576129 - DNA, 15 bp, Homo sapiens
tgcctgtaacagtcc

SEQ ID NO: 1576130 - DNA, 15 bp, Homo sapiens
gcctgtaacagtccc

SEQ ID NO: 1576131 - DNA, 15 bp, Homo sapiens
cctgtaacagtccca

SEQ ID NO: 1576132 - DNA, 15 bp, Homo sapiens
ctgtaacagtcccag

SEQ ID NO: 1576133 - DNA, 15 bp, Homo sapiens
tgtaacagtcccagc

SEQ ID NO: 1576134 - DNA, 15 bp, Homo sapiens
gtaacagtcccagct

SEQ ID NO: 1576135 - DNA, 15 bp, Homo sapiens
taacagtcccagcta

SEQ ID NO: 1576136 - DNA, 15 bp, Homo sapiens
aacagtcccagctac

SEQ ID NO: 1576137 - DNA, 15 bp, Homo sapiens
acagtcccagctact

SEQ ID NO: 1576138 - DNA, 15 bp, Homo sapiens
cagtcccagctactt

SEQ ID NO: 1576139 - DNA, 15 bp, Homo sapiens
agctacttgggaacc

SEQ ID NO: 1576140 - DNA, 15 bp, Homo sapiens
gctacttgggaacct

SEQ ID NO: 1576141 - DNA, 15 bp, Homo sapiens
ctacttgggaacctg

SEQ ID NO: 1576142 - DNA, 15 bp, Homo sapiens
tacttgggaacctgt

SEQ ID NO: 1576143 - DNA, 15 bp, Homo sapiens
acttgggaacctgtg

SEQ ID NO: 1576144 - DNA, 15 bp, Homo sapiens
cttgggaacctgtgg

SEQ ID NO: 1576145 - DNA, 15 bp, Homo sapiens
ttgggaacctgtggt

SEQ ID NO: 1576146 - DNA, 15 bp, Homo sapiens
tgggaacctgtggtg

SEQ ID NO: 1576147 - DNA, 15 bp, Homo sapiens
gggaacctgtggtgg

SEQ ID NO: 1576148 - DNA, 15 bp, Homo sapiens
ggaacctgtggtggg

SEQ ID NO: 1576149 - DNA, 15 bp, Homo sapiens
gaacctgtggtggga

SEQ ID NO: 1576150 - DNA, 15 bp, Homo sapiens
aacctgtggtgggaa

SEQ ID NO: 1576151 - DNA, 15 bp, Homo sapiens
acctgtggtgggaag

SEQ ID NO: 1576152 - DNA, 15 bp, Homo sapiens
cctgtggtgggaaga

SEQ ID NO: 1576153 - DNA, 15 bp, Homo sapiens
ctgtggtgggaagat

SEQ ID NO: 1576154 - DNA, 15 bp, Homo sapiens
tgtggtgggaagatg

SEQ ID NO: 1576155 - DNA, 15 bp, Homo sapiens
gtggtgggaagatgg

SEQ ID NO: 1576156 - DNA, 15 bp, Homo sapiens
tggtgggaagatggc

SEQ ID NO: 1576157 - DNA, 15 bp, Homo sapiens
ggtgggaagatggct

SEQ ID NO: 1576158 - DNA, 15 bp, Homo sapiens
gtgggaagatggctt

SEQ ID NO: 1576159 - DNA, 15 bp, Homo sapiens
tgggaagatggcttg

SEQ ID NO: 1576160 - DNA, 15 bp, Homo sapiens
gggaagatggcttga

SEQ ID NO: 1576161 - DNA, 15 bp, Homo sapiens
ggaagatggcttgag

SEQ ID NO: 1576162 - DNA, 15 bp, Homo sapiens
gaagatggcttgagt

SEQ ID NO: 1576163 - DNA, 15 bp, Homo sapiens
aagatggcttgagtc

SEQ ID NO: 1576164 - DNA, 15 bp, Homo sapiens
agatggcttgagtcc

SEQ ID NO: 1576165 - DNA, 15 bp, Homo sapiens
gatggcttgagtccg

SEQ ID NO: 1576166 - DNA, 15 bp, Homo sapiens
atggcttgagtccgg

SEQ ID NO: 1576167 - DNA, 15 bp, Homo sapiens
tggcttgagtccggg

SEQ ID NO: 1576168 - DNA, 15 bp, Homo sapiens
ggcttgagtccggga

SEQ ID NO: 1576169 - DNA, 15 bp, Homo sapiens
gcttgagtccgggag

SEQ ID NO: 1576170 - DNA, 15 bp, Homo sapiens
cttgagtccgggaga

SEQ ID NO: 1576171 - DNA, 15 bp, Homo sapiens
ttgagtccgggagac

SEQ ID NO: 1576172 - DNA, 15 bp, Homo sapiens
tgagtccgggagaca

SEQ ID NO: 1576173 - DNA, 15 bp, Homo sapiens
gagtccgggagacag

SEQ ID NO: 1576174 - DNA, 15 bp, Homo sapiens
agtccgggagacaga

SEQ ID NO: 1576175 - DNA, 15 bp, Homo sapiens
gtccgggagacagag

SEQ ID NO: 1576176 - DNA, 15 bp, Homo sapiens
tccgggagacagagg

SEQ ID NO: 1576177 - DNA, 15 bp, Homo sapiens
ccgggagacagaggt

SEQ ID NO: 1576178 - DNA, 15 bp, Homo sapiens
cgggagacagaggtt

SEQ ID NO: 1576179 - DNA, 15 bp, Homo sapiens
gtgagctgagattac

SEQ ID NO: 1576180 - DNA, 15 bp, Homo sapiens
tgagctgagattacc

SEQ ID NO: 1576181 - DNA, 15 bp, Homo sapiens
gagctgagattaccc

SEQ ID NO: 1576182 - DNA, 15 bp, Homo sapiens
agctgagattaccct

SEQ ID NO: 1576183 - DNA, 15 bp, Homo sapiens
gctgagattaccctc

SEQ ID NO: 1576184 - DNA, 15 bp, Homo sapiens
ctgagattaccctcc

SEQ ID NO: 1576185 - DNA, 15 bp, Homo sapiens
tgagattaccctcca

SEQ ID NO: 1576186 - DNA, 15 bp, Homo sapiens
gagattaccctccag

SEQ ID NO: 1576187 - DNA, 15 bp, Homo sapiens
agattaccctccagc

SEQ ID NO: 1576188 - DNA, 15 bp, Homo sapiens
gattaccctccagcc

SEQ ID NO: 1576189 - DNA, 15 bp, Homo sapiens
attaccctccagcct

SEQ ID NO: 1576190 - DNA, 15 bp, Homo sapiens
ttaccctccagcctg

SEQ ID NO: 1576191 - DNA, 15 bp, Homo sapiens
taccctccagcctga

SEQ ID NO: 1576192 - DNA, 15 bp, Homo sapiens
accctccagcctgag

SEQ ID NO: 1576193 - DNA, 15 bp, Homo sapiens
ccctccagcctgagc

SEQ ID NO: 1576194 - DNA, 15 bp, Homo sapiens
cctccagcctgagca

SEQ ID NO: 1576195 - DNA, 15 bp, Homo sapiens
cagcctgagcaacag

SEQ ID NO: 1576196 - DNA, 15 bp, Homo sapiens
agcctgagcaacaga

SEQ ID NO: 1576197 - DNA, 15 bp, Homo sapiens
gcctgagcaacagac

SEQ ID NO: 1576198 - DNA, 15 bp, Homo sapiens
cctgagcaacagacc

SEQ ID NO: 1576199 - DNA, 15 bp, Homo sapiens
ctgagcaacagaccc

SEQ ID NO: 1576200 - DNA, 15 bp, Homo sapiens
tgagcaacagaccca

SEQ ID NO: 1576201 - DNA, 15 bp, Homo sapiens
gagcaacagacccag

SEQ ID NO: 1576202 - DNA, 15 bp, Homo sapiens
agcaacagacccaga

SEQ ID NO: 1576203 - DNA, 15 bp, Homo sapiens
gcaacagacccagac

SEQ ID NO: 1576204 - DNA, 15 bp, Homo sapiens
caacagacccagacc

SEQ ID NO: 1576205 - DNA, 15 bp, Homo sapiens
aacagacccagacct

SEQ ID NO: 1576206 - DNA, 15 bp, Homo sapiens
acagacccagacctt

SEQ ID NO: 1576207 - DNA, 15 bp, Homo sapiens
cagacccagaccttg

SEQ ID NO: 1576208 - DNA, 15 bp, Homo sapiens
agacccagaccttgt

SEQ ID NO: 1576209 - DNA, 15 bp, Homo sapiens
gacccagaccttgtg

SEQ ID NO: 1576210 - DNA, 15 bp, Homo sapiens
acccagaccttgtgt

SEQ ID NO: 1576211 - DNA, 15 bp, Homo sapiens
cccagaccttgtgtc

SEQ ID NO: 1576212 - DNA, 15 bp, Homo sapiens
ccagaccttgtgtca

SEQ ID NO: 1576213 - DNA, 15 bp, Homo sapiens
cagaccttgtgtcag

SEQ ID NO: 1576214 - DNA, 15 bp, Homo sapiens
agaccttgtgtcaga

SEQ ID NO: 1576215 - DNA, 15 bp, Homo sapiens
gaccttgtgtcagaa

SEQ ID NO: 1576216 - DNA, 15 bp, Homo sapiens
accttgtgtcagaaa

SEQ ID NO: 1576217 - DNA, 15 bp, Homo sapiens
ccttgtgtcagaaaa

SEQ ID NO: 1576218 - DNA, 15 bp, Homo sapiens
cttgtgtcagaaaaa

SEQ ID NO: 1576219 - DNA, 15 bp, Homo sapiens
ttgtgtcagaaaaag

SEQ ID NO: 1576220 - DNA, 15 bp, Homo sapiens
tgtgtcagaaaaaga

SEQ ID NO: 1576221 - DNA, 15 bp, Homo sapiens
gtgtcagaaaaagat

SEQ ID NO: 1576222 - DNA, 15 bp, Homo sapiens
tgtcagaaaaagata

SEQ ID NO: 1576223 - DNA, 15 bp, Homo sapiens
gtcagaaaaagatag

SEQ ID NO: 1576224 - DNA, 15 bp, Homo sapiens
tcagaaaaagatagg

SEQ ID NO: 1576225 - DNA, 15 bp, Homo sapiens
cagaaaaagatagga

SEQ ID NO: 1576226 - DNA, 15 bp, Homo sapiens
agaaaaagataggaa

SEQ ID NO: 1576227 - DNA, 15 bp, Homo sapiens
gaaaaagataggaaa

SEQ ID NO: 1576228 - DNA, 15 bp, Homo sapiens
aaaaagataggaaag

SEQ ID NO: 1576229 - DNA, 15 bp, Homo sapiens
aaaagataggaaagg

SEQ ID NO: 1576230 - DNA, 15 bp, Homo sapiens
aaagataggaaaggt

SEQ ID NO: 1576231 - DNA, 15 bp, Homo sapiens
aagataggaaaggtt

SEQ ID NO: 1576232 - DNA, 15 bp, Homo sapiens
agataggaaaggttg

SEQ ID NO: 1576233 - DNA, 15 bp, Homo sapiens
gataggaaaggttgt

SEQ ID NO: 1576234 - DNA, 15 bp, Homo sapiens
ataggaaaggttgtg

SEQ ID NO: 1576235 - DNA, 15 bp, Homo sapiens
taggaaaggttgtgg

SEQ ID NO: 1576236 - DNA, 15 bp, Homo sapiens
aggaaaggttgtggg

SEQ ID NO: 1576237 - DNA, 15 bp, Homo sapiens
ggaaaggttgtgggg

SEQ ID NO: 1576238 - DNA, 15 bp, Homo sapiens
gaaaggttgtggggg

SEQ ID NO: 1576239 - DNA, 15 bp, Homo sapiens
aaaggttgtgggggg

SEQ ID NO: 1576240 - DNA, 15 bp, Homo sapiens
aaggttgtggggggc

SEQ ID NO: 1576241 - DNA, 15 bp, Homo sapiens
aggttgtggggggcc

SEQ ID NO: 1576242 - DNA, 15 bp, Homo sapiens
ggttgtggggggccc

SEQ ID NO: 1576243 - DNA, 15 bp, Homo sapiens
gttgtggggggcccc

SEQ ID NO: 1576244 - DNA, 15 bp, Homo sapiens
ttgtggggggccccc

SEQ ID NO: 1576245 - DNA, 15 bp, Homo sapiens
tgtggggggccccca

SEQ ID NO: 1576246 - DNA, 15 bp, Homo sapiens
gtggggggcccccag

SEQ ID NO: 1576247 - DNA, 15 bp, Homo sapiens
tggggggcccccagt

SEQ ID NO: 1576248 - DNA, 15 bp, Homo sapiens
ggggggcccccagtg

SEQ ID NO: 1576249 - DNA, 15 bp, Homo sapiens
gggggcccccagtga

SEQ ID NO: 1576250 - DNA, 15 bp, Homo sapiens
ggggcccccagtgat

SEQ ID NO: 1576251 - DNA, 15 bp, Homo sapiens
gggcccccagtgatc

SEQ ID NO: 1576252 - DNA, 15 bp, Homo sapiens
ggcccccagtgatct

SEQ ID NO: 1576253 - DNA, 15 bp, Homo sapiens
gcccccagtgatctg

SEQ ID NO: 1576254 - DNA, 15 bp, Homo sapiens
cccccagtgatctgg

SEQ ID NO: 1576255 - DNA, 15 bp, Homo sapiens
ccccagtgatctggg

SEQ ID NO: 1576256 - DNA, 15 bp, Homo sapiens
cccagtgatctgggg

SEQ ID NO: 1576257 - DNA, 15 bp, Homo sapiens
ccagtgatctggggc

SEQ ID NO: 1576258 - DNA, 15 bp, Homo sapiens
cagtgatctggggca

SEQ ID NO: 1576259 - DNA, 15 bp, Homo sapiens
agtgatctggggcat

SEQ ID NO: 1576260 - DNA, 15 bp, Homo sapiens
gtgatctggggcatg

SEQ ID NO: 1576261 - DNA, 15 bp, Homo sapiens
tgatctggggcatgt

SEQ ID NO: 1576262 - DNA, 15 bp, Homo sapiens
gatctggggcatgtg

SEQ ID NO: 1576263 - DNA, 15 bp, Homo sapiens
atctggggcatgtgt

SEQ ID NO: 1576264 - DNA, 15 bp, Homo sapiens
tctggggcatgtgtg

SEQ ID NO: 1576265 - DNA, 15 bp, Homo sapiens
ctggggcatgtgtgc

SEQ ID NO: 1576266 - DNA, 15 bp, Homo sapiens
tggggcatgtgtgcg

SEQ ID NO: 1576267 - DNA, 15 bp, Homo sapiens
ggggcatgtgtgcgc

SEQ ID NO: 1576268 - DNA, 15 bp, Homo sapiens
gggcatgtgtgcgct

SEQ ID NO: 1576269 - DNA, 15 bp, Homo sapiens
ggcatgtgtgcgctg

SEQ ID NO: 1576270 - DNA, 15 bp, Homo sapiens
gcatgtgtgcgctgc

SEQ ID NO: 1576271 - DNA, 15 bp, Homo sapiens
catgtgtgcgctgcc

SEQ ID NO: 1576272 - DNA, 15 bp, Homo sapiens
atgtgtgcgctgcct

SEQ ID NO: 1576273 - DNA, 15 bp, Homo sapiens
tgtgtgcgctgcctg

SEQ ID NO: 1576274 - DNA, 15 bp, Homo sapiens
gtgtgcgctgcctga

SEQ ID NO: 1576275 - DNA, 15 bp, Homo sapiens
tgtgcgctgcctgaa

SEQ ID NO: 1576276 - DNA, 15 bp, Homo sapiens
gtgcgctgcctgaag

SEQ ID NO: 1576277 - DNA, 15 bp, Homo sapiens
tgcgctgcctgaagg

SEQ ID NO: 1576278 - DNA, 15 bp, Homo sapiens
gcgctgcctgaaggg

SEQ ID NO: 1576279 - DNA, 15 bp, Homo sapiens
cgctgcctgaagggt

SEQ ID NO: 1576280 - DNA, 15 bp, Homo sapiens
gctgcctgaagggtg

SEQ ID NO: 1576281 - DNA, 15 bp, Homo sapiens
ctgcctgaagggtgg

SEQ ID NO: 1576282 - DNA, 15 bp, Homo sapiens
tgcctgaagggtggc

SEQ ID NO: 1576283 - DNA, 15 bp, Homo sapiens
gcctgaagggtggcc

SEQ ID NO: 1576284 - DNA, 15 bp, Homo sapiens
cctgaagggtggccc

SEQ ID NO: 1576285 - DNA, 15 bp, Homo sapiens
ctgaagggtggccct

SEQ ID NO: 1576286 - DNA, 15 bp, Homo sapiens
tgaagggtggccctt

SEQ ID NO: 1576287 - DNA, 15 bp, Homo sapiens
gaagggtggcccttg

SEQ ID NO: 1576288 - DNA, 15 bp, Homo sapiens
aagggtggcccttgc

SEQ ID NO: 1576289 - DNA, 15 bp, Homo sapiens
agggtggcccttgcc

SEQ ID NO: 1576290 - DNA, 15 bp, Homo sapiens
gggtggcccttgccc

SEQ ID NO: 1576291 - DNA, 15 bp, Homo sapiens
ggtggcccttgccca

SEQ ID NO: 1576292 - DNA, 15 bp, Homo sapiens
gtggcccttgcccag

SEQ ID NO: 1576293 - DNA, 15 bp, Homo sapiens
tggcccttgcccagt

SEQ ID NO: 1576294 - DNA, 15 bp, Homo sapiens
ggcccttgcccagtg

SEQ ID NO: 1576295 - DNA, 15 bp, Homo sapiens
gcccttgcccagtgc

SEQ ID NO: 1576296 - DNA, 15 bp, Homo sapiens
cccttgcccagtgcc

SEQ ID NO: 1576297 - DNA, 15 bp, Homo sapiens
ccttgcccagtgcct

SEQ ID NO: 1576298 - DNA, 15 bp, Homo sapiens
cttgcccagtgcctt

SEQ ID NO: 1576299 - DNA, 15 bp, Homo sapiens
ttgcccagtgccttc

SEQ ID NO: 1576300 - DNA, 15 bp, Homo sapiens
tgcccagtgccttcc

SEQ ID NO: 1576301 - DNA, 15 bp, Homo sapiens
gcccagtgccttccc

SEQ ID NO: 1576302 - DNA, 15 bp, Homo sapiens
cccagtgccttcccc

SEQ ID NO: 1576303 - DNA, 15 bp, Homo sapiens
ccagtgccttcccct

SEQ ID NO: 1576304 - DNA, 15 bp, Homo sapiens
cagtgccttcccctt

SEQ ID NO: 1576305 - DNA, 15 bp, Homo sapiens
agtgccttccccttg

SEQ ID NO: 1576306 - DNA, 15 bp, Homo sapiens
gtgccttccccttgc

SEQ ID NO: 1576307 - DNA, 15 bp, Homo sapiens
tgccttccccttgct

SEQ ID NO: 1576308 - DNA, 15 bp, Homo sapiens
gccttccccttgctg

SEQ ID NO: 1576309 - DNA, 15 bp, Homo sapiens
ccttccccttgctgc

SEQ ID NO: 1576310 - DNA, 15 bp, Homo sapiens
cttccccttgctgcc

SEQ ID NO: 1576311 - DNA, 15 bp, Homo sapiens
ttccccttgctgccc

SEQ ID NO: 1576312 - DNA, 15 bp, Homo sapiens
tccccttgctgccct

SEQ ID NO: 1576313 - DNA, 15 bp, Homo sapiens
ccccttgctgccctg

SEQ ID NO: 1576314 - DNA, 15 bp, Homo sapiens
cccttgctgccctgt

SEQ ID NO: 1576315 - DNA, 15 bp, Homo sapiens
ccttgctgccctgtc

SEQ ID NO: 1576316 - DNA, 15 bp, Homo sapiens
cttgctgccctgtca

SEQ ID NO: 1576317 - DNA, 15 bp, Homo sapiens
ttgctgccctgtcag

SEQ ID NO: 1576318 - DNA, 15 bp, Homo sapiens
tgctgccctgtcaga

SEQ ID NO: 1576319 - DNA, 15 bp, Homo sapiens
gctgccctgtcagaa

SEQ ID NO: 1576320 - DNA, 15 bp, Homo sapiens
ctgccctgtcagaat

SEQ ID NO: 1576321 - DNA, 15 bp, Homo sapiens
tgccctgtcagaatc

SEQ ID NO: 1576322 - DNA, 15 bp, Homo sapiens
gccctgtcagaatct

SEQ ID NO: 1576323 - DNA, 15 bp, Homo sapiens
ccctgtcagaatcta

SEQ ID NO: 1576324 - DNA, 15 bp, Homo sapiens
cctgtcagaatctag

SEQ ID NO: 1576325 - DNA, 15 bp, Homo sapiens
ctgtcagaatctagg

SEQ ID NO: 1576326 - DNA, 15 bp, Homo sapiens
tgtcagaatctaggg

SEQ ID NO: 1576327 - DNA, 15 bp, Homo sapiens
gtcagaatctagggc

SEQ ID NO: 1576328 - DNA, 15 bp, Homo sapiens
tcagaatctagggcc

SEQ ID NO: 1576329 - DNA, 15 bp, Homo sapiens
cagaatctagggcca

SEQ ID NO: 1576330 - DNA, 15 bp, Homo sapiens
agaatctagggccac

SEQ ID NO: 1576331 - DNA, 15 bp, Homo sapiens
gaatctagggccact

SEQ ID NO: 1576332 - DNA, 15 bp, Homo sapiens
aatctagggccactg

SEQ ID NO: 1576333 - DNA, 15 bp, Homo sapiens
atctagggccactgt

SEQ ID NO: 1576334 - DNA, 15 bp, Homo sapiens
tctagggccactgtt

SEQ ID NO: 1576335 - DNA, 15 bp, Homo sapiens
ctagggccactgttg

SEQ ID NO: 1576336 - DNA, 15 bp, Homo sapiens
tagggccactgttgc

SEQ ID NO: 1576337 - DNA, 15 bp, Homo sapiens
agggccactgttgcc

SEQ ID NO: 1576338 - DNA, 15 bp, Homo sapiens
gggccactgttgcca

SEQ ID NO: 1576339 - DNA, 15 bp, Homo sapiens
ggccactgttgccag

SEQ ID NO: 1576340 - DNA, 15 bp, Homo sapiens
gccactgttgccaga

SEQ ID NO: 1576341 - DNA, 15 bp, Homo sapiens
ccactgttgccagaa

SEQ ID NO: 1576342 - DNA, 15 bp, Homo sapiens
cactgttgccagaaa

SEQ ID NO: 1576343 - DNA, 15 bp, Homo sapiens
actgttgccagaaac

SEQ ID NO: 1576344 - DNA, 15 bp, Homo sapiens
ctgttgccagaaact

SEQ ID NO: 1576345 - DNA, 15 bp, Homo sapiens
tgttgccagaaactc

SEQ ID NO: 1576346 - DNA, 15 bp, Homo sapiens
gttgccagaaactct

SEQ ID NO: 1576347 - DNA, 15 bp, Homo sapiens
ttgccagaaactctg

SEQ ID NO: 1576348 - DNA, 15 bp, Homo sapiens
tgccagaaactctga

SEQ ID NO: 1576349 - DNA, 15 bp, Homo sapiens
gccagaaactctgag

SEQ ID NO: 1576350 - DNA, 15 bp, Homo sapiens
ccagaaactctgaga

SEQ ID NO: 1576351 - DNA, 15 bp, Homo sapiens
cagaaactctgagaa

SEQ ID NO: 1576352 - DNA, 15 bp, Homo sapiens
agaaactctgagaag

SEQ ID NO: 1576353 - DNA, 15 bp, Homo sapiens
gaaactctgagaagc

SEQ ID NO: 1576354 - DNA, 15 bp, Homo sapiens
aaactctgagaagct

SEQ ID NO: 1576355 - DNA, 15 bp, Homo sapiens
aactctgagaagcta

SEQ ID NO: 1576356 - DNA, 15 bp, Homo sapiens
actctgagaagctag

SEQ ID NO: 1576357 - DNA, 15 bp, Homo sapiens
ctctgagaagctaga

SEQ ID NO: 1576358 - DNA, 15 bp, Homo sapiens
tctgagaagctagaa

SEQ ID NO: 1576359 - DNA, 15 bp, Homo sapiens
ctgagaagctagaaa

SEQ ID NO: 1576360 - DNA, 15 bp, Homo sapiens
tgagaagctagaaat

SEQ ID NO: 1576361 - DNA, 15 bp, Homo sapiens
gagaagctagaaatc

SEQ ID NO: 1576362 - DNA, 15 bp, Homo sapiens
agaagctagaaatcg

SEQ ID NO: 1576363 - DNA, 15 bp, Homo sapiens
gaagctagaaatcga

SEQ ID NO: 1576364 - DNA, 15 bp, Homo sapiens
aagctagaaatcgag

SEQ ID NO: 1576365 - DNA, 15 bp, Homo sapiens
agctagaaatcgaga

SEQ ID NO: 1576366 - DNA, 15 bp, Homo sapiens
gctagaaatcgagac

SEQ ID NO: 1576367 - DNA, 15 bp, Homo sapiens
ctagaaatcgagact

SEQ ID NO: 1576368 - DNA, 15 bp, Homo sapiens
tagaaatcgagactt

SEQ ID NO: 1576369 - DNA, 15 bp, Homo sapiens
agaaatcgagactta

SEQ ID NO: 1576370 - DNA, 15 bp, Homo sapiens
gaaatcgagacttat

SEQ ID NO: 1576371 - DNA, 15 bp, Homo sapiens
aaatcgagacttatg

SEQ ID NO: 1576372 - DNA, 15 bp, Homo sapiens
aatcgagacttatgt

SEQ ID NO: 1576373 - DNA, 15 bp, Homo sapiens
atcgagacttatgtg

SEQ ID NO: 1576374 - DNA, 15 bp, Homo sapiens
tcgagacttatgtga

SEQ ID NO: 1576375 - DNA, 15 bp, Homo sapiens
cgagacttatgtgaa

SEQ ID NO: 1576376 - DNA, 15 bp, Homo sapiens
gagacttatgtgaaa

SEQ ID NO: 1576377 - DNA, 15 bp, Homo sapiens
agacttatgtgaaat

SEQ ID NO: 1576378 - DNA, 15 bp, Homo sapiens
gacttatgtgaaatc

SEQ ID NO: 1576379 - DNA, 15 bp, Homo sapiens
acttatgtgaaatct

SEQ ID NO: 1576380 - DNA, 15 bp, Homo sapiens
cttatgtgaaatctg

SEQ ID NO: 1576381 - DNA, 15 bp, Homo sapiens
ttatgtgaaatctga

SEQ ID NO: 1576382 - DNA, 15 bp, Homo sapiens
tatgtgaaatctgat

SEQ ID NO: 1576383 - DNA, 15 bp, Homo sapiens
atgtgaaatctgatt

SEQ ID NO: 1576384 - DNA, 15 bp, Homo sapiens
tgtgaaatctgattt

SEQ ID NO: 1576385 - DNA, 15 bp, Homo sapiens
gtgaaatctgatttt

SEQ ID NO: 1576386 - DNA, 15 bp, Homo sapiens
tgaaatctgattttt

SEQ ID NO: 1576387 - DNA, 15 bp, Homo sapiens
gaaatctgattttta

SEQ ID NO: 1576388 - DNA, 15 bp, Homo sapiens
aaatctgatttttag

SEQ ID NO: 1576389 - DNA, 15 bp, Homo sapiens
aatctgatttttagg

SEQ ID NO: 1576390 - DNA, 15 bp, Homo sapiens
atctgatttttaggt

SEQ ID NO: 1576391 - DNA, 15 bp, Homo sapiens
tctgatttttaggtg

SEQ ID NO: 1576392 - DNA, 15 bp, Homo sapiens
ctgatttttaggtgc

SEQ ID NO: 1576393 - DNA, 15 bp, Homo sapiens
tgatttttaggtgcc

SEQ ID NO: 1576394 - DNA, 15 bp, Homo sapiens
gatttttaggtgcca

SEQ ID NO: 1576395 - DNA, 15 bp, Homo sapiens
atttttaggtgccag

SEQ ID NO: 1576396 - DNA, 15 bp, Homo sapiens
tttttaggtgccaga

SEQ ID NO: 1576397 - DNA, 15 bp, Homo sapiens
ttttaggtgccagat

SEQ ID NO: 1576398 - DNA, 15 bp, Homo sapiens
tttaggtgccagatt

SEQ ID NO: 1576399 - DNA, 15 bp, Homo sapiens
ttaggtgccagatta

SEQ ID NO: 1576400 - DNA, 15 bp, Homo sapiens
taggtgccagattag

SEQ ID NO: 1576401 - DNA, 15 bp, Homo sapiens
aggtgccagattaga

SEQ ID NO: 1576402 - DNA, 15 bp, Homo sapiens
ggtgccagattagat

SEQ ID NO: 1576403 - DNA, 15 bp, Homo sapiens
gtgccagattagatt

SEQ ID NO: 1576404 - DNA, 15 bp, Homo sapiens
tgccagattagattg

SEQ ID NO: 1576405 - DNA, 15 bp, Homo sapiens
gccagattagattgc

SEQ ID NO: 1576406 - DNA, 15 bp, Homo sapiens
ccagattagattgct

SEQ ID NO: 1576407 - DNA, 15 bp, Homo sapiens
cagattagattgctt

SEQ ID NO: 1576408 - DNA, 15 bp, Homo sapiens
agattagattgcttt

SEQ ID NO: 1576409 - DNA, 15 bp, Homo sapiens
gattagattgctttt

SEQ ID NO: 1576410 - DNA, 15 bp, Homo sapiens
attagattgcttttt

SEQ ID NO: 1576411 - DNA, 15 bp, Homo sapiens
ttagattgctttttc

SEQ ID NO: 1576412 - DNA, 15 bp, Homo sapiens
tagattgctttttcc

SEQ ID NO: 1576413 - DNA, 15 bp, Homo sapiens
agattgctttttccg

SEQ ID NO: 1576414 - DNA, 15 bp, Homo sapiens
gattgctttttccgt

SEQ ID NO: 1576415 - DNA, 15 bp, Homo sapiens
attgctttttccgtt

SEQ ID NO: 1576416 - DNA, 15 bp, Homo sapiens
ttgctttttccgttt

SEQ ID NO: 1576417 - DNA, 15 bp, Homo sapiens
tgctttttccgtttc

SEQ ID NO: 1576418 - DNA, 15 bp, Homo sapiens
gctttttccgtttca

SEQ ID NO: 1576419 - DNA, 15 bp, Homo sapiens
ctttttccgtttcat

SEQ ID NO: 1576420 - DNA, 15 bp, Homo sapiens
tttttccgtttcatt

SEQ ID NO: 1576421 - DNA, 15 bp, Homo sapiens
ttttccgtttcattg

SEQ ID NO: 1576422 - DNA, 15 bp, Homo sapiens
tttccgtttcattga

SEQ ID NO: 1576423 - DNA, 15 bp, Homo sapiens
ttccgtttcattgat

SEQ ID NO: 1576424 - DNA, 15 bp, Homo sapiens
tccgtttcattgatt

SEQ ID NO: 1576425 - DNA, 15 bp, Homo sapiens
ccgtttcattgattt

SEQ ID NO: 1576426 - DNA, 15 bp, Homo sapiens
cgtttcattgatttc

SEQ ID NO: 1576427 - DNA, 15 bp, Homo sapiens
gtttcattgatttct

SEQ ID NO: 1576428 - DNA, 15 bp, Homo sapiens
tttcattgatttcta

SEQ ID NO: 1576429 - DNA, 15 bp, Homo sapiens
ttcattgatttctac

SEQ ID NO: 1576430 - DNA, 15 bp, Homo sapiens
tcattgatttctact

SEQ ID NO: 1576431 - DNA, 15 bp, Homo sapiens
cattgatttctactc

SEQ ID NO: 1576432 - DNA, 15 bp, Homo sapiens
attgatttctactct

SEQ ID NO: 1576433 - DNA, 15 bp, Homo sapiens
ttgatttctactctt

SEQ ID NO: 1576434 - DNA, 15 bp, Homo sapiens
tgatttctactctta

SEQ ID NO: 1576435 - DNA, 15 bp, Homo sapiens
gatttctactcttaa

SEQ ID NO: 1576436 - DNA, 15 bp, Homo sapiens
atttctactcttaat

SEQ ID NO: 1576437 - DNA, 15 bp, Homo sapiens
tttctactcttaatg

SEQ ID NO: 1576438 - DNA, 15 bp, Homo sapiens
ttctactcttaatgt

SEQ ID NO: 1576439 - DNA, 15 bp, Homo sapiens
tctactcttaatgtt

SEQ ID NO: 1576440 - DNA, 15 bp, Homo sapiens
ctactcttaatgtta

SEQ ID NO: 1576441 - DNA, 15 bp, Homo sapiens
tactcttaatgttac

SEQ ID NO: 1576442 - DNA, 15 bp, Homo sapiens
actcttaatgttact

SEQ ID NO: 1576443 - DNA, 15 bp, Homo sapiens
ctcttaatgttacta

SEQ ID NO: 1576444 - DNA, 15 bp, Homo sapiens
tcttaatgttactaa

SEQ ID NO: 1576445 - DNA, 15 bp, Homo sapiens
cttaatgttactaat

SEQ ID NO: 1576446 - DNA, 15 bp, Homo sapiens
ttaatgttactaatt

SEQ ID NO: 1576447 - DNA, 15 bp, Homo sapiens
taatgttactaattc

SEQ ID NO: 1576448 - DNA, 15 bp, Homo sapiens
aatgttactaattca

SEQ ID NO: 1576449 - DNA, 15 bp, Homo sapiens
atgttactaattcat

SEQ ID NO: 1576450 - DNA, 15 bp, Homo sapiens
tgttactaattcatg

SEQ ID NO: 1576451 - DNA, 15 bp, Homo sapiens
gttactaattcatgc

SEQ ID NO: 1576452 - DNA, 15 bp, Homo sapiens
ttactaattcatgct

SEQ ID NO: 1576453 - DNA, 15 bp, Homo sapiens
tactaattcatgctt

SEQ ID NO: 1576454 - DNA, 15 bp, Homo sapiens
actaattcatgcttc

SEQ ID NO: 1576455 - DNA, 15 bp, Homo sapiens
ctaattcatgcttct

SEQ ID NO: 1576456 - DNA, 15 bp, Homo sapiens
taattcatgcttcta

SEQ ID NO: 1576457 - DNA, 15 bp, Homo sapiens
aattcatgcttctac

SEQ ID NO: 1576458 - DNA, 15 bp, Homo sapiens
attcatgcttctact

SEQ ID NO: 1576459 - DNA, 15 bp, Homo sapiens
ttcatgcttctactc

SEQ ID NO: 1576460 - DNA, 15 bp, Homo sapiens
tcatgcttctactca

SEQ ID NO: 1576461 - DNA, 15 bp, Homo sapiens
catgcttctactcac

SEQ ID NO: 1576462 - DNA, 15 bp, Homo sapiens
atgcttctactcact

SEQ ID NO: 1576463 - DNA, 15 bp, Homo sapiens
tgcttctactcactt

SEQ ID NO: 1576464 - DNA, 15 bp, Homo sapiens
gcttctactcacttg

SEQ ID NO: 1576465 - DNA, 15 bp, Homo sapiens
cttctactcacttgg

SEQ ID NO: 1576466 - DNA, 15 bp, Homo sapiens
ttctactcacttggt

SEQ ID NO: 1576467 - DNA, 15 bp, Homo sapiens
tctactcacttggtt

SEQ ID NO: 1576468 - DNA, 15 bp, Homo sapiens
ctactcacttggttt

SEQ ID NO: 1576469 - DNA, 15 bp, Homo sapiens
tactcacttggtttt

SEQ ID NO: 1576470 - DNA, 15 bp, Homo sapiens
actcacttggttttt

SEQ ID NO: 1576471 - DNA, 15 bp, Homo sapiens
ctcacttggtttttt

SEQ ID NO: 1576472 - DNA, 15 bp, Homo sapiens
tcacttggttttttg

SEQ ID NO: 1576473 - DNA, 15 bp, Homo sapiens
cacttggttttttgt

SEQ ID NO: 1576474 - DNA, 15 bp, Homo sapiens
acttggttttttgtt

SEQ ID NO: 1576475 - DNA, 15 bp, Homo sapiens
cttggttttttgttt

SEQ ID NO: 1576476 - DNA, 15 bp, Homo sapiens
ttggttttttgtttg

SEQ ID NO: 1576477 - DNA, 15 bp, Homo sapiens
tggttttttgtttgt

SEQ ID NO: 1576478 - DNA, 15 bp, Homo sapiens
ggttttttgtttgtt

SEQ ID NO: 1576479 - DNA, 15 bp, Homo sapiens
tttgtttgtttgttg

SEQ ID NO: 1576480 - DNA, 15 bp, Homo sapiens
ttgtttgtttgttgt

SEQ ID NO: 1576481 - DNA, 15 bp, Homo sapiens
tgtttgtttgttgtt

SEQ ID NO: 1576482 - DNA, 15 bp, Homo sapiens
gtttgtttgttgttt

SEQ ID NO: 1576483 - DNA, 15 bp, Homo sapiens
tttgtttgttgtttt

SEQ ID NO: 1576484 - DNA, 15 bp, Homo sapiens
ttgtttgttgttttg

SEQ ID NO: 1576485 - DNA, 15 bp, Homo sapiens
tgtttgttgttttgt

SEQ ID NO: 1576486 - DNA, 15 bp, Homo sapiens
gtttgttgttttgtt

SEQ ID NO: 1576487 - DNA, 15 bp, Homo sapiens
tttgttgttttgttt

SEQ ID NO: 1576488 - DNA, 15 bp, Homo sapiens
ttgttgttttgtttt

SEQ ID NO: 1576489 - DNA, 15 bp, Homo sapiens
tgttgttttgttttg

SEQ ID NO: 1576490 - DNA, 15 bp, Homo sapiens
gttgttttgttttga

SEQ ID NO: 1576491 - DNA, 15 bp, Homo sapiens
gttttgttttgagat

SEQ ID NO: 1576492 - DNA, 15 bp, Homo sapiens
ttttgttttgagatg

SEQ ID NO: 1576493 - DNA, 15 bp, Homo sapiens
tgttttgagatggaa

SEQ ID NO: 1576494 - DNA, 15 bp, Homo sapiens
gttttgagatggaat

SEQ ID NO: 1576495 - DNA, 15 bp, Homo sapiens
ttttgagatggaatc

SEQ ID NO: 1576496 - DNA, 15 bp, Homo sapiens
tttgagatggaatct

SEQ ID NO: 1576497 - DNA, 15 bp, Homo sapiens
ttgagatggaatctc

SEQ ID NO: 1576498 - DNA, 15 bp, Homo sapiens
tgagatggaatctcg

SEQ ID NO: 1576499 - DNA, 15 bp, Homo sapiens
gagatggaatctcgc

SEQ ID NO: 1576500 - DNA, 15 bp, Homo sapiens
agatggaatctcgct

SEQ ID NO: 1576501 - DNA, 15 bp, Homo sapiens
aatctcgctctgtca

SEQ ID NO: 1576502 - DNA, 15 bp, Homo sapiens
atctcgctctgtcac

SEQ ID NO: 1576503 - DNA, 15 bp, Homo sapiens
tctcgctctgtcaca

SEQ ID NO: 1576504 - DNA, 15 bp, Homo sapiens
ctcgctctgtcacag

SEQ ID NO: 1576505 - DNA, 15 bp, Homo sapiens
tcgctctgtcacagt

SEQ ID NO: 1576506 - DNA, 15 bp, Homo sapiens
cgctctgtcacagtg

SEQ ID NO: 1576507 - DNA, 15 bp, Homo sapiens
gctctgtcacagtgg

SEQ ID NO: 1576508 - DNA, 15 bp, Homo sapiens
ctctgtcacagtggc

SEQ ID NO: 1576509 - DNA, 15 bp, Homo sapiens
tctgtcacagtggcg

SEQ ID NO: 1576510 - DNA, 15 bp, Homo sapiens
ctgtcacagtggcgc

SEQ ID NO: 1576511 - DNA, 15 bp, Homo sapiens
tgtcacagtggcgca

SEQ ID NO: 1576512 - DNA, 15 bp, Homo sapiens
gtcacagtggcgcaa

SEQ ID NO: 1576513 - DNA, 15 bp, Homo sapiens
tcacagtggcgcaat

SEQ ID NO: 1576514 - DNA, 15 bp, Homo sapiens
cacagtggcgcaatc

SEQ ID NO: 1576515 - DNA, 15 bp, Homo sapiens
acagtggcgcaatct

SEQ ID NO: 1576516 - DNA, 15 bp, Homo sapiens
gcgcaatctcagctt

SEQ ID NO: 1576517 - DNA, 15 bp, Homo sapiens
cgcaatctcagctta

SEQ ID NO: 1576518 - DNA, 15 bp, Homo sapiens
gcaatctcagcttac

SEQ ID NO: 1576519 - DNA, 15 bp, Homo sapiens
caatctcagcttact

SEQ ID NO: 1576520 - DNA, 15 bp, Homo sapiens
aatctcagcttacta

SEQ ID NO: 1576521 - DNA, 15 bp, Homo sapiens
atctcagcttactac

SEQ ID NO: 1576522 - DNA, 15 bp, Homo sapiens
tctcagcttactaca

SEQ ID NO: 1576523 - DNA, 15 bp, Homo sapiens
ctcagcttactacaa

SEQ ID NO: 1576524 - DNA, 15 bp, Homo sapiens
tcagcttactacaac

SEQ ID NO: 1576525 - DNA, 15 bp, Homo sapiens
cagcttactacaacc

SEQ ID NO: 1576526 - DNA, 15 bp, Homo sapiens
agcttactacaacct

SEQ ID NO: 1576527 - DNA, 15 bp, Homo sapiens
gcttactacaacctc

SEQ ID NO: 1576528 - DNA, 15 bp, Homo sapiens
cttactacaacctct

SEQ ID NO: 1576529 - DNA, 15 bp, Homo sapiens
ttactacaacctctg

SEQ ID NO: 1576530 - DNA, 15 bp, Homo sapiens
tactacaacctctgc

SEQ ID NO: 1576531 - DNA, 15 bp, Homo sapiens
aacctctgcctcccc

SEQ ID NO: 1576532 - DNA, 15 bp, Homo sapiens
acctctgcctccccg

SEQ ID NO: 1576533 - DNA, 15 bp, Homo sapiens
cctctgcctccccgg

SEQ ID NO: 1576534 - DNA, 15 bp, Homo sapiens
ctctgcctccccggt

SEQ ID NO: 1576535 - DNA, 15 bp, Homo sapiens
tctgcctccccggtt

SEQ ID NO: 1576536 - DNA, 15 bp, Homo sapiens
ctgcctccccggttc

SEQ ID NO: 1576537 - DNA, 15 bp, Homo sapiens
tgcctccccggttca

SEQ ID NO: 1576538 - DNA, 15 bp, Homo sapiens
gcctccccggttcaa

SEQ ID NO: 1576539 - DNA, 15 bp, Homo sapiens
cctccccggttcaag

SEQ ID NO: 1576540 - DNA, 15 bp, Homo sapiens
ctacaggtgcccgct

SEQ ID NO: 1576541 - DNA, 15 bp, Homo sapiens
tacaggtgcccgctg

SEQ ID NO: 1576542 - DNA, 15 bp, Homo sapiens
acaggtgcccgctgc

SEQ ID NO: 1576543 - DNA, 15 bp, Homo sapiens
caggtgcccgctgcc

SEQ ID NO: 1576544 - DNA, 15 bp, Homo sapiens
aggtgcccgctgcca

SEQ ID NO: 1576545 - DNA, 15 bp, Homo sapiens
ggtgcccgctgccac

SEQ ID NO: 1576546 - DNA, 15 bp, Homo sapiens
gtgcccgctgccaca

SEQ ID NO: 1576547 - DNA, 15 bp, Homo sapiens
tgcccgctgccacac

SEQ ID NO: 1576548 - DNA, 15 bp, Homo sapiens
gcccgctgccacacc

SEQ ID NO: 1576549 - DNA, 15 bp, Homo sapiens
cccgctgccacacct

SEQ ID NO: 1576550 - DNA, 15 bp, Homo sapiens
ccgctgccacaccta

SEQ ID NO: 1576551 - DNA, 15 bp, Homo sapiens
cgctgccacacctag

SEQ ID NO: 1576552 - DNA, 15 bp, Homo sapiens
gctgccacacctagc

SEQ ID NO: 1576553 - DNA, 15 bp, Homo sapiens
ctgccacacctagct

SEQ ID NO: 1576554 - DNA, 15 bp, Homo sapiens
tgccacacctagcta

SEQ ID NO: 1576555 - DNA, 15 bp, Homo sapiens
gccacacctagctag

SEQ ID NO: 1576556 - DNA, 15 bp, Homo sapiens
ccacacctagctagt

SEQ ID NO: 1576557 - DNA, 15 bp, Homo sapiens
cacacctagctagtt

SEQ ID NO: 1576558 - DNA, 15 bp, Homo sapiens
acacctagctagttt

SEQ ID NO: 1576559 - DNA, 15 bp, Homo sapiens
cacctagctagtttt

SEQ ID NO: 1576560 - DNA, 15 bp, Homo sapiens
acctagctagttttt

SEQ ID NO: 1576561 - DNA, 15 bp, Homo sapiens
cctagctagtttttg

SEQ ID NO: 1576562 - DNA, 15 bp, Homo sapiens
ctagctagtttttgt

SEQ ID NO: 1576563 - DNA, 15 bp, Homo sapiens
tagctagtttttgta

SEQ ID NO: 1576564 - DNA, 15 bp, Homo sapiens
agctagtttttgtat

SEQ ID NO: 1576565 - DNA, 15 bp, Homo sapiens
gtttttgtatttttg

SEQ ID NO: 1576566 - DNA, 15 bp, Homo sapiens
tttttggtagagacg

SEQ ID NO: 1576567 - DNA, 15 bp, Homo sapiens
ttttggtagagacgg

SEQ ID NO: 1576568 - DNA, 15 bp, Homo sapiens
tttggtagagacggg

SEQ ID NO: 1576569 - DNA, 15 bp, Homo sapiens
ttggtagagacgggg

SEQ ID NO: 1576570 - DNA, 15 bp, Homo sapiens
tggtagagacggggt

SEQ ID NO: 1576571 - DNA, 15 bp, Homo sapiens
ggtagagacggggtt

SEQ ID NO: 1576572 - DNA, 15 bp, Homo sapiens
tcagcctgcagcacc

SEQ ID NO: 1576573 - DNA, 15 bp, Homo sapiens
cagcctgcagcaccc

SEQ ID NO: 1576574 - DNA, 15 bp, Homo sapiens
agcctgcagcaccct

SEQ ID NO: 1576575 - DNA, 15 bp, Homo sapiens
gcctgcagcaccctt

SEQ ID NO: 1576576 - DNA, 15 bp, Homo sapiens
cctgcagcacccttc

SEQ ID NO: 1576577 - DNA, 15 bp, Homo sapiens
ctgcagcacccttca

SEQ ID NO: 1576578 - DNA, 15 bp, Homo sapiens
tgcagcacccttcaa

SEQ ID NO: 1576579 - DNA, 15 bp, Homo sapiens
gcagcacccttcaac

SEQ ID NO: 1576580 - DNA, 15 bp, Homo sapiens
cagcacccttcaact

SEQ ID NO: 1576581 - DNA, 15 bp, Homo sapiens
agcacccttcaactc

SEQ ID NO: 1576582 - DNA, 15 bp, Homo sapiens
gcacccttcaactcc

SEQ ID NO: 1576583 - DNA, 15 bp, Homo sapiens
cacccttcaactccc

SEQ ID NO: 1576584 - DNA, 15 bp, Homo sapiens
acccttcaactccca

SEQ ID NO: 1576585 - DNA, 15 bp, Homo sapiens
cccttcaactcccag

SEQ ID NO: 1576586 - DNA, 15 bp, Homo sapiens
ccttcaactcccagg

SEQ ID NO: 1576587 - DNA, 15 bp, Homo sapiens
cttcaactcccagga

SEQ ID NO: 1576588 - DNA, 15 bp, Homo sapiens
ttcaactcccaggag

SEQ ID NO: 1576589 - DNA, 15 bp, Homo sapiens
tcaactcccaggagc

SEQ ID NO: 1576590 - DNA, 15 bp, Homo sapiens
caactcccaggagct

SEQ ID NO: 1576591 - DNA, 15 bp, Homo sapiens
aactcccaggagctg

SEQ ID NO: 1576592 - DNA, 15 bp, Homo sapiens
actcccaggagctgg

SEQ ID NO: 1576593 - DNA, 15 bp, Homo sapiens
ctcccaggagctggg

SEQ ID NO: 1576594 - DNA, 15 bp, Homo sapiens
tcccaggagctgggc

SEQ ID NO: 1576595 - DNA, 15 bp, Homo sapiens
cccaggagctgggct

SEQ ID NO: 1576596 - DNA, 15 bp, Homo sapiens
ccaggagctgggctt

SEQ ID NO: 1576597 - DNA, 15 bp, Homo sapiens
caggagctgggcttg

SEQ ID NO: 1576598 - DNA, 15 bp, Homo sapiens
aggagctgggcttgc

SEQ ID NO: 1576599 - DNA, 15 bp, Homo sapiens
ggagctgggcttgcc

SEQ ID NO: 1576600 - DNA, 15 bp, Homo sapiens
gagctgggcttgcca

SEQ ID NO: 1576601 - DNA, 15 bp, Homo sapiens
agctgggcttgccac

SEQ ID NO: 1576602 - DNA, 15 bp, Homo sapiens
gctgggcttgccact

SEQ ID NO: 1576603 - DNA, 15 bp, Homo sapiens
ctgggcttgccactc

SEQ ID NO: 1576604 - DNA, 15 bp, Homo sapiens
tgggcttgccactct

SEQ ID NO: 1576605 - DNA, 15 bp, Homo sapiens
gggcttgccactctg

SEQ ID NO: 1576606 - DNA, 15 bp, Homo sapiens
ggcttgccactctgc

SEQ ID NO: 1576607 - DNA, 15 bp, Homo sapiens
gcttgccactctgct

SEQ ID NO: 1576608 - DNA, 15 bp, Homo sapiens
cttgccactctgctc

SEQ ID NO: 1576609 - DNA, 15 bp, Homo sapiens
ttgccactctgctca

SEQ ID NO: 1576610 - DNA, 15 bp, Homo sapiens
tgccactctgctcac

SEQ ID NO: 1576611 - DNA, 15 bp, Homo sapiens
gccactctgctcacc

SEQ ID NO: 1576612 - DNA, 15 bp, Homo sapiens
ccactctgctcacct

SEQ ID NO: 1576613 - DNA, 15 bp, Homo sapiens
cactctgctcacctt

SEQ ID NO: 1576614 - DNA, 15 bp, Homo sapiens
actctgctcaccttg

SEQ ID NO: 1576615 - DNA, 15 bp, Homo sapiens
ctctgctcaccttgt

SEQ ID NO: 1576616 - DNA, 15 bp, Homo sapiens
tctgctcaccttgtg

SEQ ID NO: 1576617 - DNA, 15 bp, Homo sapiens
ctgctcaccttgtgg

SEQ ID NO: 1576618 - DNA, 15 bp, Homo sapiens
tgctcaccttgtgga

SEQ ID NO: 1576619 - DNA, 15 bp, Homo sapiens
gctcaccttgtggag

SEQ ID NO: 1576620 - DNA, 15 bp, Homo sapiens
ctcaccttgtggagc

SEQ ID NO: 1576621 - DNA, 15 bp, Homo sapiens
tcaccttgtggagct

SEQ ID NO: 1576622 - DNA, 15 bp, Homo sapiens
caccttgtggagctc

SEQ ID NO: 1576623 - DNA, 15 bp, Homo sapiens
accttgtggagctcc

SEQ ID NO: 1576624 - DNA, 15 bp, Homo sapiens
ccttgtggagctcca

SEQ ID NO: 1576625 - DNA, 15 bp, Homo sapiens
cttgtggagctccat

SEQ ID NO: 1576626 - DNA, 15 bp, Homo sapiens
ttgtggagctccatc

SEQ ID NO: 1576627 - DNA, 15 bp, Homo sapiens
tgtggagctccatct

SEQ ID NO: 1576628 - DNA, 15 bp, Homo sapiens
gtggagctccatctg

SEQ ID NO: 1576629 - DNA, 15 bp, Homo sapiens
tggagctccatctgc

SEQ ID NO: 1576630 - DNA, 15 bp, Homo sapiens
ggagctccatctgcc

SEQ ID NO: 1576631 - DNA, 15 bp, Homo sapiens
gagctccatctgcct

SEQ ID NO: 1576632 - DNA, 15 bp, Homo sapiens
agctccatctgcctt

SEQ ID NO: 1576633 - DNA, 15 bp, Homo sapiens
gctccatctgccttt

SEQ ID NO: 1576634 - DNA, 15 bp, Homo sapiens
ctccatctgcctttc

SEQ ID NO: 1576635 - DNA, 15 bp, Homo sapiens
tccatctgcctttcc

SEQ ID NO: 1576636 - DNA, 15 bp, Homo sapiens
ccatctgcctttcct

SEQ ID NO: 1576637 - DNA, 15 bp, Homo sapiens
catctgcctttcctc

SEQ ID NO: 1576638 - DNA, 15 bp, Homo sapiens
atctgcctttcctcc

SEQ ID NO: 1576639 - DNA, 15 bp, Homo sapiens
tctgcctttcctccc

SEQ ID NO: 1576640 - DNA, 15 bp, Homo sapiens
ctgcctttcctcccc

SEQ ID NO: 1576641 - DNA, 15 bp, Homo sapiens
tgcctttcctcccca

SEQ ID NO: 1576642 - DNA, 15 bp, Homo sapiens
gcctttcctccccaa

SEQ ID NO: 1576643 - DNA, 15 bp, Homo sapiens
cctttcctccccaat

SEQ ID NO: 1576644 - DNA, 15 bp, Homo sapiens
ctttcctccccaatt

SEQ ID NO: 1576645 - DNA, 15 bp, Homo sapiens
tttcctccccaattc

SEQ ID NO: 1576646 - DNA, 15 bp, Homo sapiens
ttcctccccaattcc

SEQ ID NO: 1576647 - DNA, 15 bp, Homo sapiens
tcctccccaattccc

SEQ ID NO: 1576648 - DNA, 15 bp, Homo sapiens
cctccccaattcccc

SEQ ID NO: 1576649 - DNA, 15 bp, Homo sapiens
ctccccaattccccc

SEQ ID NO: 1576650 - DNA, 15 bp, Homo sapiens
tccccaattccccca

SEQ ID NO: 1576651 - DNA, 15 bp, Homo sapiens
ccccaattcccccac

SEQ ID NO: 1576652 - DNA, 15 bp, Homo sapiens
cccaattcccccact

SEQ ID NO: 1576653 - DNA, 15 bp, Homo sapiens
ccaattcccccactc

SEQ ID NO: 1576654 - DNA, 15 bp, Homo sapiens
caattcccccactcc

SEQ ID NO: 1576655 - DNA, 15 bp, Homo sapiens
aattcccccactccc

SEQ ID NO: 1576656 - DNA, 15 bp, Homo sapiens
attcccccactccct

SEQ ID NO: 1576657 - DNA, 15 bp, Homo sapiens
ttcccccactccctg

SEQ ID NO: 1576658 - DNA, 15 bp, Homo sapiens
tcccccactccctgc

SEQ ID NO: 1576659 - DNA, 15 bp, Homo sapiens
cccccactccctgca

SEQ ID NO: 1576660 - DNA, 15 bp, Homo sapiens
ccccactccctgcac

SEQ ID NO: 1576661 - DNA, 15 bp, Homo sapiens
cccactccctgcact

SEQ ID NO: 1576662 - DNA, 15 bp, Homo sapiens
ccactccctgcactc

SEQ ID NO: 1576663 - DNA, 15 bp, Homo sapiens
cactccctgcactcg

SEQ ID NO: 1576664 - DNA, 15 bp, Homo sapiens
actccctgcactcgt

SEQ ID NO: 1576665 - DNA, 15 bp, Homo sapiens
ctccctgcactcgtc

SEQ ID NO: 1576666 - DNA, 15 bp, Homo sapiens
tccctgcactcgtct

SEQ ID NO: 1576667 - DNA, 15 bp, Homo sapiens
ccctgcactcgtctc

SEQ ID NO: 1576668 - DNA, 15 bp, Homo sapiens
cctgcactcgtctct

SEQ ID NO: 1576669 - DNA, 15 bp, Homo sapiens
ctgcactcgtctctt

SEQ ID NO: 1576670 - DNA, 15 bp, Homo sapiens
tgcactcgtctcttc

SEQ ID NO: 1576671 - DNA, 15 bp, Homo sapiens
gcactcgtctcttcc

SEQ ID NO: 1576672 - DNA, 15 bp, Homo sapiens
cactcgtctcttccc

SEQ ID NO: 1576673 - DNA, 15 bp, Homo sapiens
actcgtctcttccca

SEQ ID NO: 1576674 - DNA, 15 bp, Homo sapiens
ctcgtctcttcccac

SEQ ID NO: 1576675 - DNA, 15 bp, Homo sapiens
tcgtctcttcccaca

SEQ ID NO: 1576676 - DNA, 15 bp, Homo sapiens
cgtctcttcccacaa

SEQ ID NO: 1576677 - DNA, 15 bp, Homo sapiens
gtctcttcccacaag

SEQ ID NO: 1576678 - DNA, 15 bp, Homo sapiens
tctcttcccacaaga

SEQ ID NO: 1576679 - DNA, 15 bp, Homo sapiens
ctcttcccacaagag

SEQ ID NO: 1576680 - DNA, 15 bp, Homo sapiens
tcttcccacaagagc

SEQ ID NO: 1576681 - DNA, 15 bp, Homo sapiens
cttcccacaagagcc

SEQ ID NO: 1576682 - DNA, 15 bp, Homo sapiens
ttcccacaagagccc

SEQ ID NO: 1576683 - DNA, 15 bp, Homo sapiens
tcccacaagagccct

SEQ ID NO: 1576684 - DNA, 15 bp, Homo sapiens
cccacaagagccctg

SEQ ID NO: 1576685 - DNA, 15 bp, Homo sapiens
ccacaagagccctgt

SEQ ID NO: 1576686 - DNA, 15 bp, Homo sapiens
cacaagagccctgtc

SEQ ID NO: 1576687 - DNA, 15 bp, Homo sapiens
acaagagccctgtct

SEQ ID NO: 1576688 - DNA, 15 bp, Homo sapiens
caagagccctgtctc

SEQ ID NO: 1576689 - DNA, 15 bp, Homo sapiens
aagagccctgtctcc

SEQ ID NO: 1576690 - DNA, 15 bp, Homo sapiens
agagccctgtctcct

SEQ ID NO: 1576691 - DNA, 15 bp, Homo sapiens
gagccctgtctcctt

SEQ ID NO: 1576692 - DNA, 15 bp, Homo sapiens
agccctgtctccttt

SEQ ID NO: 1576693 - DNA, 15 bp, Homo sapiens
gccctgtctcctttt

SEQ ID NO: 1576694 - DNA, 15 bp, Homo sapiens
ccctgtctccttttc

SEQ ID NO: 1576695 - DNA, 15 bp, Homo sapiens
cctgtctccttttcc

SEQ ID NO: 1576696 - DNA, 15 bp, Homo sapiens
ctgtctccttttcct

SEQ ID NO: 1576697 - DNA, 15 bp, Homo sapiens
tgtctccttttccta

SEQ ID NO: 1576698 - DNA, 15 bp, Homo sapiens
gtctccttttcctag

SEQ ID NO: 1576699 - DNA, 15 bp, Homo sapiens
tctccttttcctagc

SEQ ID NO: 1576700 - DNA, 15 bp, Homo sapiens
ctccttttcctagct

SEQ ID NO: 1576701 - DNA, 15 bp, Homo sapiens
tccttttcctagcta

SEQ ID NO: 1576702 - DNA, 15 bp, Homo sapiens
ccttttcctagctat

SEQ ID NO: 1576703 - DNA, 15 bp, Homo sapiens
cttttcctagctatt

SEQ ID NO: 1576704 - DNA, 15 bp, Homo sapiens
ttttcctagctattc

SEQ ID NO: 1576705 - DNA, 15 bp, Homo sapiens
tttcctagctattcc

SEQ ID NO: 1576706 - DNA, 15 bp, Homo sapiens
ttcctagctattccc

SEQ ID NO: 1576707 - DNA, 15 bp, Homo sapiens
tcctagctattccca

SEQ ID NO: 1576708 - DNA, 15 bp, Homo sapiens
cctagctattcccat

SEQ ID NO: 1576709 - DNA, 15 bp, Homo sapiens
ctagctattcccatc

SEQ ID NO: 1576710 - DNA, 15 bp, Homo sapiens
tagctattcccatct

SEQ ID NO: 1576711 - DNA, 15 bp, Homo sapiens
agctattcccatctg

SEQ ID NO: 1576712 - DNA, 15 bp, Homo sapiens
gctattcccatctga

SEQ ID NO: 1576713 - DNA, 15 bp, Homo sapiens
ctattcccatctgag

SEQ ID NO: 1576714 - DNA, 15 bp, Homo sapiens
tattcccatctgagg

SEQ ID NO: 1576715 - DNA, 15 bp, Homo sapiens
attcccatctgaggc

SEQ ID NO: 1576716 - DNA, 15 bp, Homo sapiens
ttcccatctgaggcc

SEQ ID NO: 1576717 - DNA, 15 bp, Homo sapiens
tcccatctgaggcca

SEQ ID NO: 1576718 - DNA, 15 bp, Homo sapiens
cccatctgaggccat

SEQ ID NO: 1576719 - DNA, 15 bp, Homo sapiens
ccatctgaggccatc

SEQ ID NO: 1576720 - DNA, 15 bp, Homo sapiens
catctgaggccatct

SEQ ID NO: 1576721 - DNA, 15 bp, Homo sapiens
atctgaggccatctt

SEQ ID NO: 1576722 - DNA, 15 bp, Homo sapiens
tctgaggccatcttt

SEQ ID NO: 1576723 - DNA, 15 bp, Homo sapiens
ctgaggccatcttta

SEQ ID NO: 1576724 - DNA, 15 bp, Homo sapiens
tgaggccatctttat

SEQ ID NO: 1576725 - DNA, 15 bp, Homo sapiens
gaggccatctttatt

SEQ ID NO: 1576726 - DNA, 15 bp, Homo sapiens
aggccatctttattc

SEQ ID NO: 1576727 - DNA, 15 bp, Homo sapiens
ggccatctttattca

SEQ ID NO: 1576728 - DNA, 15 bp, Homo sapiens
gccatctttattcat

SEQ ID NO: 1576729 - DNA, 15 bp, Homo sapiens
ccatctttattcatt

SEQ ID NO: 1576730 - DNA, 15 bp, Homo sapiens
catctttattcattt

SEQ ID NO: 1576731 - DNA, 15 bp, Homo sapiens
atctttattcattta

SEQ ID NO: 1576732 - DNA, 15 bp, Homo sapiens
tctttattcatttag

SEQ ID NO: 1576733 - DNA, 15 bp, Homo sapiens
ctttattcatttagt

SEQ ID NO: 1576734 - DNA, 15 bp, Homo sapiens
tttattcatttagtt

SEQ ID NO: 1576735 - DNA, 15 bp, Homo sapiens
ttattcatttagttt

SEQ ID NO: 1576736 - DNA, 15 bp, Homo sapiens
ttcatttagttttta

SEQ ID NO: 1576737 - DNA, 15 bp, Homo sapiens
tcatttagtttttag

SEQ ID NO: 1576738 - DNA, 15 bp, Homo sapiens
catttagtttttaga

SEQ ID NO: 1576739 - DNA, 15 bp, Homo sapiens
atttagtttttagag

SEQ ID NO: 1576740 - DNA, 15 bp, Homo sapiens
tttagtttttagaga

SEQ ID NO: 1576741 - DNA, 15 bp, Homo sapiens
ttagtttttagagac

SEQ ID NO: 1576742 - DNA, 15 bp, Homo sapiens
tagtttttagagaca

SEQ ID NO: 1576743 - DNA, 15 bp, Homo sapiens
agtttttagagacag

SEQ ID NO: 1576744 - DNA, 15 bp, Homo sapiens
gtttttagagacagg

SEQ ID NO: 1576745 - DNA, 15 bp, Homo sapiens
tttttagagacaggg

SEQ ID NO: 1576746 - DNA, 15 bp, Homo sapiens
tttagagacagggtt

SEQ ID NO: 1576747 - DNA, 15 bp, Homo sapiens
ttagagacagggttt

SEQ ID NO: 1576748 - DNA, 15 bp, Homo sapiens
gacagggtttcactc

SEQ ID NO: 1576749 - DNA, 15 bp, Homo sapiens
acagggtttcactct

SEQ ID NO: 1576750 - DNA, 15 bp, Homo sapiens
cagggtttcactctc

SEQ ID NO: 1576751 - DNA, 15 bp, Homo sapiens
agggtttcactctca

SEQ ID NO: 1576752 - DNA, 15 bp, Homo sapiens
gggtttcactctcac

SEQ ID NO: 1576753 - DNA, 15 bp, Homo sapiens
ggtttcactctcacc

SEQ ID NO: 1576754 - DNA, 15 bp, Homo sapiens
gtttcactctcaccc

SEQ ID NO: 1576755 - DNA, 15 bp, Homo sapiens
tttcactctcaccca

SEQ ID NO: 1576756 - DNA, 15 bp, Homo sapiens
ttcactctcacccag

SEQ ID NO: 1576757 - DNA, 15 bp, Homo sapiens
cactctcacccaggc

SEQ ID NO: 1576758 - DNA, 15 bp, Homo sapiens
actctcacccaggct

SEQ ID NO: 1576759 - DNA, 15 bp, Homo sapiens
ctctcacccaggctg

SEQ ID NO: 1576760 - DNA, 15 bp, Homo sapiens
tctcacccaggctgg

SEQ ID NO: 1576761 - DNA, 15 bp, Homo sapiens
ctcacccaggctggg

SEQ ID NO: 1576762 - DNA, 15 bp, Homo sapiens
tcacccaggctgggg

SEQ ID NO: 1576763 - DNA, 15 bp, Homo sapiens
cacccaggctggggt

SEQ ID NO: 1576764 - DNA, 15 bp, Homo sapiens
acccaggctggggtg

SEQ ID NO: 1576765 - DNA, 15 bp, Homo sapiens
cccaggctggggtgc

SEQ ID NO: 1576766 - DNA, 15 bp, Homo sapiens
ctggggtgcagtggc

SEQ ID NO: 1576767 - DNA, 15 bp, Homo sapiens
tggggtgcagtggca

SEQ ID NO: 1576768 - DNA, 15 bp, Homo sapiens
ggggtgcagtggcac

SEQ ID NO: 1576769 - DNA, 15 bp, Homo sapiens
gggtgcagtggcaca

SEQ ID NO: 1576770 - DNA, 15 bp, Homo sapiens
ggtgcagtggcacac

SEQ ID NO: 1576771 - DNA, 15 bp, Homo sapiens
gtgcagtggcacaca

SEQ ID NO: 1576772 - DNA, 15 bp, Homo sapiens
tgcagtggcacacaa

SEQ ID NO: 1576773 - DNA, 15 bp, Homo sapiens
gcagtggcacacaat

SEQ ID NO: 1576774 - DNA, 15 bp, Homo sapiens
cagtggcacacaatc

SEQ ID NO: 1576775 - DNA, 15 bp, Homo sapiens
agtggcacacaatca

SEQ ID NO: 1576776 - DNA, 15 bp, Homo sapiens
gtggcacacaatcac

SEQ ID NO: 1576777 - DNA, 15 bp, Homo sapiens
tggcacacaatcacg

SEQ ID NO: 1576778 - DNA, 15 bp, Homo sapiens
ggcacacaatcacgg

SEQ ID NO: 1576779 - DNA, 15 bp, Homo sapiens
gcacacaatcacggc

SEQ ID NO: 1576780 - DNA, 15 bp, Homo sapiens
cacacaatcacggct

SEQ ID NO: 1576781 - DNA, 15 bp, Homo sapiens
acacaatcacggctc

SEQ ID NO: 1576782 - DNA, 15 bp, Homo sapiens
cacaatcacggctca

SEQ ID NO: 1576783 - DNA, 15 bp, Homo sapiens
acaatcacggctcac

SEQ ID NO: 1576784 - DNA, 15 bp, Homo sapiens
caatcacggctcact

SEQ ID NO: 1576785 - DNA, 15 bp, Homo sapiens
aatcacggctcactg

SEQ ID NO: 1576786 - DNA, 15 bp, Homo sapiens
ctgcagccttgacca

SEQ ID NO: 1576787 - DNA, 15 bp, Homo sapiens
tgcagccttgaccaa

SEQ ID NO: 1576788 - DNA, 15 bp, Homo sapiens
gcagccttgaccaac

SEQ ID NO: 1576789 - DNA, 15 bp, Homo sapiens
cagccttgaccaact

SEQ ID NO: 1576790 - DNA, 15 bp, Homo sapiens
agccttgaccaacta

SEQ ID NO: 1576791 - DNA, 15 bp, Homo sapiens
gccttgaccaactac

SEQ ID NO: 1576792 - DNA, 15 bp, Homo sapiens
ccttgaccaactaca

SEQ ID NO: 1576793 - DNA, 15 bp, Homo sapiens
cttgaccaactacag

SEQ ID NO: 1576794 - DNA, 15 bp, Homo sapiens
ttgaccaactacagg

SEQ ID NO: 1576795 - DNA, 15 bp, Homo sapiens
tgaccaactacaggt

SEQ ID NO: 1576796 - DNA, 15 bp, Homo sapiens
gaccaactacaggtg

SEQ ID NO: 1576797 - DNA, 15 bp, Homo sapiens
accaactacaggtgc

SEQ ID NO: 1576798 - DNA, 15 bp, Homo sapiens
ccaactacaggtgcg

SEQ ID NO: 1576799 - DNA, 15 bp, Homo sapiens
caactacaggtgcgt

SEQ ID NO: 1576800 - DNA, 15 bp, Homo sapiens
aactacaggtgcgta

SEQ ID NO: 1576801 - DNA, 15 bp, Homo sapiens
actacaggtgcgtag

SEQ ID NO: 1576802 - DNA, 15 bp, Homo sapiens
ctacaggtgcgtagc

SEQ ID NO: 1576803 - DNA, 15 bp, Homo sapiens
tacaggtgcgtagca

SEQ ID NO: 1576804 - DNA, 15 bp, Homo sapiens
acaggtgcgtagcac

SEQ ID NO: 1576805 - DNA, 15 bp, Homo sapiens
caggtgcgtagcacc

SEQ ID NO: 1576806 - DNA, 15 bp, Homo sapiens
aggtgcgtagcacca

SEQ ID NO: 1576807 - DNA, 15 bp, Homo sapiens
ggtgcgtagcaccac

SEQ ID NO: 1576808 - DNA, 15 bp, Homo sapiens
gtgcgtagcaccaca

SEQ ID NO: 1576809 - DNA, 15 bp, Homo sapiens
tgcgtagcaccacag

SEQ ID NO: 1576810 - DNA, 15 bp, Homo sapiens
gcgtagcaccacagc

SEQ ID NO: 1576811 - DNA, 15 bp, Homo sapiens
cgtagcaccacagcc

SEQ ID NO: 1576812 - DNA, 15 bp, Homo sapiens
gtagcaccacagcca

SEQ ID NO: 1576813 - DNA, 15 bp, Homo sapiens
tagcaccacagccaa

SEQ ID NO: 1576814 - DNA, 15 bp, Homo sapiens
agcaccacagccaag

SEQ ID NO: 1576815 - DNA, 15 bp, Homo sapiens
gcaccacagccaagt

SEQ ID NO: 1576816 - DNA, 15 bp, Homo sapiens
caccacagccaagtt

SEQ ID NO: 1576817 - DNA, 15 bp, Homo sapiens
accacagccaagttt

SEQ ID NO: 1576818 - DNA, 15 bp, Homo sapiens
ccacagccaagtttt

SEQ ID NO: 1576819 - DNA, 15 bp, Homo sapiens
cacagccaagttttt

SEQ ID NO: 1576820 - DNA, 15 bp, Homo sapiens
acagccaagtttttg

SEQ ID NO: 1576821 - DNA, 15 bp, Homo sapiens
cagccaagtttttgt

SEQ ID NO: 1576822 - DNA, 15 bp, Homo sapiens
agccaagtttttgta

SEQ ID NO: 1576823 - DNA, 15 bp, Homo sapiens
gccaagtttttgtat

SEQ ID NO: 1576824 - DNA, 15 bp, Homo sapiens
ccaagtttttgtata

SEQ ID NO: 1576825 - DNA, 15 bp, Homo sapiens
caagtttttgtatag

SEQ ID NO: 1576826 - DNA, 15 bp, Homo sapiens
aagtttttgtataga

SEQ ID NO: 1576827 - DNA, 15 bp, Homo sapiens
agtttttgtatagat

SEQ ID NO: 1576828 - DNA, 15 bp, Homo sapiens
gtttttgtatagatg

SEQ ID NO: 1576829 - DNA, 15 bp, Homo sapiens
tttttgtatagatgg

SEQ ID NO: 1576830 - DNA, 15 bp, Homo sapiens
ttttgtatagatggg

SEQ ID NO: 1576831 - DNA, 15 bp, Homo sapiens
tttgtatagatgggg

SEQ ID NO: 1576832 - DNA, 15 bp, Homo sapiens
ttgtatagatggggt

SEQ ID NO: 1576833 - DNA, 15 bp, Homo sapiens
tgtatagatggggtc

SEQ ID NO: 1576834 - DNA, 15 bp, Homo sapiens
gtatagatggggtct

SEQ ID NO: 1576835 - DNA, 15 bp, Homo sapiens
atagatggggtctcg

SEQ ID NO: 1576836 - DNA, 15 bp, Homo sapiens
tagatggggtctcgc

SEQ ID NO: 1576837 - DNA, 15 bp, Homo sapiens
agatggggtctcgct

SEQ ID NO: 1576838 - DNA, 15 bp, Homo sapiens
gatggggtctcgctt

SEQ ID NO: 1576839 - DNA, 15 bp, Homo sapiens
atggggtctcgcttt

SEQ ID NO: 1576840 - DNA, 15 bp, Homo sapiens
tggggtctcgctttg

SEQ ID NO: 1576841 - DNA, 15 bp, Homo sapiens
ggggtctcgctttgt

SEQ ID NO: 1576842 - DNA, 15 bp, Homo sapiens
gggtctcgctttgtt

SEQ ID NO: 1576843 - DNA, 15 bp, Homo sapiens
ggtctcgctttgtta

SEQ ID NO: 1576844 - DNA, 15 bp, Homo sapiens
gtctcgctttgttac

SEQ ID NO: 1576845 - DNA, 15 bp, Homo sapiens
tctcgctttgttacc

SEQ ID NO: 1576846 - DNA, 15 bp, Homo sapiens
ctcgctttgttaccc

SEQ ID NO: 1576847 - DNA, 15 bp, Homo sapiens
tcgctttgttaccca

SEQ ID NO: 1576848 - DNA, 15 bp, Homo sapiens
cgctttgttacccag

SEQ ID NO: 1576849 - DNA, 15 bp, Homo sapiens
gctttgttacccagg

SEQ ID NO: 1576850 - DNA, 15 bp, Homo sapiens
ctttgttacccaggc

SEQ ID NO: 1576851 - DNA, 15 bp, Homo sapiens
tttgttacccaggct

SEQ ID NO: 1576852 - DNA, 15 bp, Homo sapiens
ttgttacccaggctg

SEQ ID NO: 1576853 - DNA, 15 bp, Homo sapiens
tgttacccaggctgt

SEQ ID NO: 1576854 - DNA, 15 bp, Homo sapiens
gttacccaggctgtg

SEQ ID NO: 1576855 - DNA, 15 bp, Homo sapiens
ttacccaggctgtga

SEQ ID NO: 1576856 - DNA, 15 bp, Homo sapiens
tacccaggctgtgac

SEQ ID NO: 1576857 - DNA, 15 bp, Homo sapiens
acccaggctgtgaca

SEQ ID NO: 1576858 - DNA, 15 bp, Homo sapiens
cccaggctgtgacaa

SEQ ID NO: 1576859 - DNA, 15 bp, Homo sapiens
ccaggctgtgacaag

SEQ ID NO: 1576860 - DNA, 15 bp, Homo sapiens
caggctgtgacaaga

SEQ ID NO: 1576861 - DNA, 15 bp, Homo sapiens
aggctgtgacaagag

SEQ ID NO: 1576862 - DNA, 15 bp, Homo sapiens
ggctgtgacaagagg

SEQ ID NO: 1576863 - DNA, 15 bp, Homo sapiens
gctgtgacaagagga

SEQ ID NO: 1576864 - DNA, 15 bp, Homo sapiens
ctgtgacaagaggag

SEQ ID NO: 1576865 - DNA, 15 bp, Homo sapiens
tgtgacaagaggagc

SEQ ID NO: 1576866 - DNA, 15 bp, Homo sapiens
gtgacaagaggagcc

SEQ ID NO: 1576867 - DNA, 15 bp, Homo sapiens
tgacaagaggagcct

SEQ ID NO: 1576868 - DNA, 15 bp, Homo sapiens
gacaagaggagcctc

SEQ ID NO: 1576869 - DNA, 15 bp, Homo sapiens
acaagaggagcctcc

SEQ ID NO: 1576870 - DNA, 15 bp, Homo sapiens
caagaggagcctccc

SEQ ID NO: 1576871 - DNA, 15 bp, Homo sapiens
aagaggagcctccca

SEQ ID NO: 1576872 - DNA, 15 bp, Homo sapiens
agaggagcctcccac

SEQ ID NO: 1576873 - DNA, 15 bp, Homo sapiens
gaggagcctcccacg

SEQ ID NO: 1576874 - DNA, 15 bp, Homo sapiens
aggagcctcccacgt

SEQ ID NO: 1576875 - DNA, 15 bp, Homo sapiens
ggagcctcccacgtg

SEQ ID NO: 1576876 - DNA, 15 bp, Homo sapiens
gagcctcccacgtgg

SEQ ID NO: 1576877 - DNA, 15 bp, Homo sapiens
agcctcccacgtggt

SEQ ID NO: 1576878 - DNA, 15 bp, Homo sapiens
gcctcccacgtggtg

SEQ ID NO: 1576879 - DNA, 15 bp, Homo sapiens
cctcccacgtggtgt

SEQ ID NO: 1576880 - DNA, 15 bp, Homo sapiens
ctcccacgtggtgtg

SEQ ID NO: 1576881 - DNA, 15 bp, Homo sapiens
tcccacgtggtgtgg

SEQ ID NO: 1576882 - DNA, 15 bp, Homo sapiens
cccacgtggtgtgga

SEQ ID NO: 1576883 - DNA, 15 bp, Homo sapiens
ccacgtggtgtggat

SEQ ID NO: 1576884 - DNA, 15 bp, Homo sapiens
cacgtggtgtggatg

SEQ ID NO: 1576885 - DNA, 15 bp, Homo sapiens
acgtggtgtggatga

SEQ ID NO: 1576886 - DNA, 15 bp, Homo sapiens
cgtggtgtggatgag

SEQ ID NO: 1576887 - DNA, 15 bp, Homo sapiens
gtggtgtggatgagg

SEQ ID NO: 1576888 - DNA, 15 bp, Homo sapiens
tggtgtggatgagga

SEQ ID NO: 1576889 - DNA, 15 bp, Homo sapiens
ggtgtggatgaggag

SEQ ID NO: 1576890 - DNA, 15 bp, Homo sapiens
gtgtggatgaggagg

SEQ ID NO: 1576891 - DNA, 15 bp, Homo sapiens
tgtggatgaggaggc

SEQ ID NO: 1576892 - DNA, 15 bp, Homo sapiens
gtggatgaggaggca

SEQ ID NO: 1576893 - DNA, 15 bp, Homo sapiens
tggatgaggaggcag

SEQ ID NO: 1576894 - DNA, 15 bp, Homo sapiens
ggatgaggaggcaga

SEQ ID NO: 1576895 - DNA, 15 bp, Homo sapiens
gatgaggaggcagat

SEQ ID NO: 1576896 - DNA, 15 bp, Homo sapiens
atgaggaggcagatg

SEQ ID NO: 1576897 - DNA, 15 bp, Homo sapiens
tgaggaggcagatgg

SEQ ID NO: 1576898 - DNA, 15 bp, Homo sapiens
gaggaggcagatggc

SEQ ID NO: 1576899 - DNA, 15 bp, Homo sapiens
aggaggcagatggca

SEQ ID NO: 1576900 - DNA, 15 bp, Homo sapiens
ggaggcagatggcag

SEQ ID NO: 1576901 - DNA, 15 bp, Homo sapiens
gaggcagatggcagg

SEQ ID NO: 1576902 - DNA, 15 bp, Homo sapiens
aggcagatggcaggg

SEQ ID NO: 1576903 - DNA, 15 bp, Homo sapiens
ggcagatggcagggc

SEQ ID NO: 1576904 - DNA, 15 bp, Homo sapiens
gcagatggcagggcc

SEQ ID NO: 1576905 - DNA, 15 bp, Homo sapiens
cagatggcagggcct

SEQ ID NO: 1576906 - DNA, 15 bp, Homo sapiens
agatggcagggcctg

SEQ ID NO: 1576907 - DNA, 15 bp, Homo sapiens
gatggcagggcctgt

SEQ ID NO: 1576908 - DNA, 15 bp, Homo sapiens
atggcagggcctgtg

SEQ ID NO: 1576909 - DNA, 15 bp, Homo sapiens
tggcagggcctgtgc

SEQ ID NO: 1576910 - DNA, 15 bp, Homo sapiens
ggcagggcctgtgca

SEQ ID NO: 1576911 - DNA, 15 bp, Homo sapiens
gcagggcctgtgcat

SEQ ID NO: 1576912 - DNA, 15 bp, Homo sapiens
cagggcctgtgcatt

SEQ ID NO: 1576913 - DNA, 15 bp, Homo sapiens
agggcctgtgcattt

SEQ ID NO: 1576914 - DNA, 15 bp, Homo sapiens
gggcctgtgcatttc

SEQ ID NO: 1576915 - DNA, 15 bp, Homo sapiens
ggcctgtgcatttct

SEQ ID NO: 1576916 - DNA, 15 bp, Homo sapiens
gcctgtgcatttctg

SEQ ID NO: 1576917 - DNA, 15 bp, Homo sapiens
cctgtgcatttctgt

SEQ ID NO: 1576918 - DNA, 15 bp, Homo sapiens
ctgtgcatttctgtg

SEQ ID NO: 1576919 - DNA, 15 bp, Homo sapiens
tgtgcatttctgtgc

SEQ ID NO: 1576920 - DNA, 15 bp, Homo sapiens
gtgcatttctgtgct

SEQ ID NO: 1576921 - DNA, 15 bp, Homo sapiens
tgcatttctgtgctt

SEQ ID NO: 1576922 - DNA, 15 bp, Homo sapiens
gcatttctgtgcttg

SEQ ID NO: 1576923 - DNA, 15 bp, Homo sapiens
catttctgtgcttga

SEQ ID NO: 1576924 - DNA, 15 bp, Homo sapiens
atttctgtgcttgag

SEQ ID NO: 1576925 - DNA, 15 bp, Homo sapiens
tttctgtgcttgagt

SEQ ID NO: 1576926 - DNA, 15 bp, Homo sapiens
ttctgtgcttgagtg

SEQ ID NO: 1576927 - DNA, 15 bp, Homo sapiens
tctgtgcttgagtgg

SEQ ID NO: 1576928 - DNA, 15 bp, Homo sapiens
ctgtgcttgagtggg

SEQ ID NO: 1576929 - DNA, 15 bp, Homo sapiens
tgtgcttgagtgggc

SEQ ID NO: 1576930 - DNA, 15 bp, Homo sapiens
gtgcttgagtgggcc

SEQ ID NO: 1576931 - DNA, 15 bp, Homo sapiens
tgcttgagtgggcct

SEQ ID NO: 1576932 - DNA, 15 bp, Homo sapiens
gcttgagtgggcctt

SEQ ID NO: 1576933 - DNA, 15 bp, Homo sapiens
cttgagtgggccttg

SEQ ID NO: 1576934 - DNA, 15 bp, Homo sapiens
ttgagtgggccttga

SEQ ID NO: 1576935 - DNA, 15 bp, Homo sapiens
tgagtgggccttgaa

SEQ ID NO: 1576936 - DNA, 15 bp, Homo sapiens
gagtgggccttgaaa

SEQ ID NO: 1576937 - DNA, 15 bp, Homo sapiens
agtgggccttgaaag

SEQ ID NO: 1576938 - DNA, 15 bp, Homo sapiens
gtgggccttgaaagt

SEQ ID NO: 1576939 - DNA, 15 bp, Homo sapiens
tgggccttgaaagtg

SEQ ID NO: 1576940 - DNA, 15 bp, Homo sapiens
gggccttgaaagtgg

SEQ ID NO: 1576941 - DNA, 15 bp, Homo sapiens
ggccttgaaagtggt

SEQ ID NO: 1576942 - DNA, 15 bp, Homo sapiens
gccttgaaagtggtt

SEQ ID NO: 1576943 - DNA, 15 bp, Homo sapiens
ccttgaaagtggttc

SEQ ID NO: 1576944 - DNA, 15 bp, Homo sapiens
cttgaaagtggttca

SEQ ID NO: 1576945 - DNA, 15 bp, Homo sapiens
ttgaaagtggttcag

SEQ ID NO: 1576946 - DNA, 15 bp, Homo sapiens
tgaaagtggttcagc

SEQ ID NO: 1576947 - DNA, 15 bp, Homo sapiens
gaaagtggttcagca

SEQ ID NO: 1576948 - DNA, 15 bp, Homo sapiens
aaagtggttcagcaa

SEQ ID NO: 1576949 - DNA, 15 bp, Homo sapiens
aagtggttcagcaac

SEQ ID NO: 1576950 - DNA, 15 bp, Homo sapiens
agtggttcagcaacc

SEQ ID NO: 1576951 - DNA, 15 bp, Homo sapiens
gtggttcagcaacca

SEQ ID NO: 1576952 - DNA, 15 bp, Homo sapiens
tggttcagcaaccag

SEQ ID NO: 1576953 - DNA, 15 bp, Homo sapiens
ggttcagcaaccagg

SEQ ID NO: 1576954 - DNA, 15 bp, Homo sapiens
gttcagcaaccagga

SEQ ID NO: 1576955 - DNA, 15 bp, Homo sapiens
ttcagcaaccaggaa

SEQ ID NO: 1576956 - DNA, 15 bp, Homo sapiens
tcagcaaccaggaag

SEQ ID NO: 1576957 - DNA, 15 bp, Homo sapiens
cagcaaccaggaaga

SEQ ID NO: 1576958 - DNA, 15 bp, Homo sapiens
agcaaccaggaagaa

SEQ ID NO: 1576959 - DNA, 15 bp, Homo sapiens
gcaaccaggaagaag

SEQ ID NO: 1576960 - DNA, 15 bp, Homo sapiens
caaccaggaagaagt

SEQ ID NO: 1576961 - DNA, 15 bp, Homo sapiens
aaccaggaagaagtg

SEQ ID NO: 1576962 - DNA, 15 bp, Homo sapiens
accaggaagaagtgt

SEQ ID NO: 1576963 - DNA, 15 bp, Homo sapiens
ccaggaagaagtgtt

SEQ ID NO: 1576964 - DNA, 15 bp, Homo sapiens
caggaagaagtgttc

SEQ ID NO: 1576965 - DNA, 15 bp, Homo sapiens
aggaagaagtgttca

SEQ ID NO: 1576966 - DNA, 15 bp, Homo sapiens
ggaagaagtgttcat

SEQ ID NO: 1576967 - DNA, 15 bp, Homo sapiens
gaagaagtgttcatt

SEQ ID NO: 1576968 - DNA, 15 bp, Homo sapiens
aagaagtgttcattc

SEQ ID NO: 1576969 - DNA, 15 bp, Homo sapiens
agaagtgttcattcc

SEQ ID NO: 1576970 - DNA, 15 bp, Homo sapiens
gaagtgttcattcct

SEQ ID NO: 1576971 - DNA, 15 bp, Homo sapiens
aagtgttcattcctc

SEQ ID NO: 1576972 - DNA, 15 bp, Homo sapiens
agtgttcattcctcg

SEQ ID NO: 1576973 - DNA, 15 bp, Homo sapiens
gtgttcattcctcga

SEQ ID NO: 1576974 - DNA, 15 bp, Homo sapiens
tgttcattcctcgac

SEQ ID NO: 1576975 - DNA, 15 bp, Homo sapiens
gttcattcctcgaca

SEQ ID NO: 1576976 - DNA, 15 bp, Homo sapiens
ttcattcctcgacaa

SEQ ID NO: 1576977 - DNA, 15 bp, Homo sapiens
tcattcctcgacaac

SEQ ID NO: 1576978 - DNA, 15 bp, Homo sapiens
cattcctcgacaaca

SEQ ID NO: 1576979 - DNA, 15 bp, Homo sapiens
attcctcgacaacaa

SEQ ID NO: 1576980 - DNA, 15 bp, Homo sapiens
ttcctcgacaacaac

SEQ ID NO: 1576981 - DNA, 15 bp, Homo sapiens
tcctcgacaacaaca

SEQ ID NO: 1576982 - DNA, 15 bp, Homo sapiens
cctcgacaacaacat

SEQ ID NO: 1576983 - DNA, 15 bp, Homo sapiens
ctcgacaacaacatc

SEQ ID NO: 1576984 - DNA, 15 bp, Homo sapiens
tcgacaacaacatcc

SEQ ID NO: 1576985 - DNA, 15 bp, Homo sapiens
cgacaacaacatccc

SEQ ID NO: 1576986 - DNA, 15 bp, Homo sapiens
gacaacaacatcccc

SEQ ID NO: 1576987 - DNA, 15 bp, Homo sapiens
acaacaacatccccg

SEQ ID NO: 1576988 - DNA, 15 bp, Homo sapiens
caacaacatccccgg

SEQ ID NO: 1576989 - DNA, 15 bp, Homo sapiens
aacaacatccccggg

SEQ ID NO: 1576990 - DNA, 15 bp, Homo sapiens
acaacatccccgggc

SEQ ID NO: 1576991 - DNA, 15 bp, Homo sapiens
caacatccccgggct

SEQ ID NO: 1576992 - DNA, 15 bp, Homo sapiens
aacatccccgggctc

SEQ ID NO: 1576993 - DNA, 15 bp, Homo sapiens
acatccccgggctct

SEQ ID NO: 1576994 - DNA, 15 bp, Homo sapiens
catccccgggctctg

SEQ ID NO: 1576995 - DNA, 15 bp, Homo sapiens
atccccgggctctgg

SEQ ID NO: 1576996 - DNA, 15 bp, Homo sapiens
tccccgggctctggt

SEQ ID NO: 1576997 - DNA, 15 bp, Homo sapiens
ccccgggctctggtg

SEQ ID NO: 1576998 - DNA, 15 bp, Homo sapiens
cccgggctctggtga

SEQ ID NO: 1576999 - DNA, 15 bp, Homo sapiens
ccgggctctggtgac

SEQ ID NO: 1577000 - DNA, 15 bp, Homo sapiens
cgggctctggtgact

SEQ ID NO: 1577001 - DNA, 15 bp, Homo sapiens
gggctctggtgactt

SEQ ID NO: 1577002 - DNA, 15 bp, Homo sapiens
ggctctggtgacttg

SEQ ID NO: 1577003 - DNA, 15 bp, Homo sapiens
gctctggtgacttgg

SEQ ID NO: 1577004 - DNA, 15 bp, Homo sapiens
ctctggtgacttggc

SEQ ID NO: 1577005 - DNA, 15 bp, Homo sapiens
tctggtgacttggct

SEQ ID NO: 1577006 - DNA, 15 bp, Homo sapiens
ctggtgacttggctg

SEQ ID NO: 1577007 - DNA, 15 bp, Homo sapiens
tggtgacttggctga

SEQ ID NO: 1577008 - DNA, 15 bp, Homo sapiens
ggtgacttggctgac

SEQ ID NO: 1577009 - DNA, 15 bp, Homo sapiens
gtgacttggctgaca

SEQ ID NO: 1577010 - DNA, 15 bp, Homo sapiens
tgacttggctgacac

SEQ ID NO: 1577011 - DNA, 15 bp, Homo sapiens
gacttggctgacact

SEQ ID NO: 1577012 - DNA, 15 bp, Homo sapiens
acttggctgacactg

SEQ ID NO: 1577013 - DNA, 15 bp, Homo sapiens
cttggctgacactgg

SEQ ID NO: 1577014 - DNA, 15 bp, Homo sapiens
ttggctgacactgga

SEQ ID NO: 1577015 - DNA, 15 bp, Homo sapiens
tggctgacactggat

SEQ ID NO: 1577016 - DNA, 15 bp, Homo sapiens
ggctgacactggatg

SEQ ID NO: 1577017 - DNA, 15 bp, Homo sapiens
gctgacactggatgg

SEQ ID NO: 1577018 - DNA, 15 bp, Homo sapiens
ctgacactggatggc

SEQ ID NO: 1577019 - DNA, 15 bp, Homo sapiens
tgacactggatggcc

SEQ ID NO: 1577020 - DNA, 15 bp, Homo sapiens
gacactggatggccc

SEQ ID NO: 1577021 - DNA, 15 bp, Homo sapiens
acactggatggccct

SEQ ID NO: 1577022 - DNA, 15 bp, Homo sapiens
cactggatggccctg

SEQ ID NO: 1577023 - DNA, 15 bp, Homo sapiens
actggatggccctgg

SEQ ID NO: 1577024 - DNA, 15 bp, Homo sapiens
ctggatggccctgga

SEQ ID NO: 1577025 - DNA, 15 bp, Homo sapiens
tggatggccctggaa

SEQ ID NO: 1577026 - DNA, 15 bp, Homo sapiens
ggatggccctggaat

SEQ ID NO: 1577027 - DNA, 15 bp, Homo sapiens
gatggccctggaatg

SEQ ID NO: 1577028 - DNA, 15 bp, Homo sapiens
atggccctggaatga

SEQ ID NO: 1577029 - DNA, 15 bp, Homo sapiens
tggccctggaatgaa

SEQ ID NO: 1577030 - DNA, 15 bp, Homo sapiens
ggccctggaatgaaa

SEQ ID NO: 1577031 - DNA, 15 bp, Homo sapiens
gccctggaatgaaaa

SEQ ID NO: 1577032 - DNA, 15 bp, Homo sapiens
ccctggaatgaaaaa

SEQ ID NO: 1577033 - DNA, 15 bp, Homo sapiens
cctggaatgaaaaag

SEQ ID NO: 1577034 - DNA, 15 bp, Homo sapiens
ctggaatgaaaaagg

SEQ ID NO: 1577035 - DNA, 15 bp, Homo sapiens
tggaatgaaaaaggc

SEQ ID NO: 1577036 - DNA, 15 bp, Homo sapiens
ggaatgaaaaaggca

SEQ ID NO: 1577037 - DNA, 15 bp, Homo sapiens
gaatgaaaaaggcaa

SEQ ID NO: 1577038 - DNA, 15 bp, Homo sapiens
aatgaaaaaggcaaa

SEQ ID NO: 1577039 - DNA, 15 bp, Homo sapiens
atgaaaaaggcaaag

SEQ ID NO: 1577040 - DNA, 15 bp, Homo sapiens
tgaaaaaggcaaaga

SEQ ID NO: 1577041 - DNA, 15 bp, Homo sapiens
gaaaaaggcaaagag

SEQ ID NO: 1577042 - DNA, 15 bp, Homo sapiens
aaaaaggcaaagagg

SEQ ID NO: 1577043 - DNA, 15 bp, Homo sapiens
aaaaggcaaagaggc

SEQ ID NO: 1577044 - DNA, 15 bp, Homo sapiens
aaaggcaaagaggca

SEQ ID NO: 1577045 - DNA, 15 bp, Homo sapiens
aaggcaaagaggcaa

SEQ ID NO: 1577046 - DNA, 15 bp, Homo sapiens
aggcaaagaggcaaa

SEQ ID NO: 1577047 - DNA, 15 bp, Homo sapiens
ggcaaagaggcaaaa

SEQ ID NO: 1577048 - DNA, 15 bp, Homo sapiens
gcaaagaggcaaaat

SEQ ID NO: 1577049 - DNA, 15 bp, Homo sapiens
caaagaggcaaaatg

SEQ ID NO: 1577050 - DNA, 15 bp, Homo sapiens
aaagaggcaaaatgt

SEQ ID NO: 1577051 - DNA, 15 bp, Homo sapiens
aagaggcaaaatgtg

SEQ ID NO: 1577052 - DNA, 15 bp, Homo sapiens
agaggcaaaatgtgc

SEQ ID NO: 1577053 - DNA, 15 bp, Homo sapiens
gaggcaaaatgtgca

SEQ ID NO: 1577054 - DNA, 15 bp, Homo sapiens
aggcaaaatgtgcaa

SEQ ID NO: 1577055 - DNA, 15 bp, Homo sapiens
ggcaaaatgtgcaag

SEQ ID NO: 1577056 - DNA, 15 bp, Homo sapiens
gcaaaatgtgcaagg

SEQ ID NO: 1577057 - DNA, 15 bp, Homo sapiens
caaaatgtgcaaggg

SEQ ID NO: 1577058 - DNA, 15 bp, Homo sapiens
aaaatgtgcaagggc

SEQ ID NO: 1577059 - DNA, 15 bp, Homo sapiens
aaatgtgcaagggcc

SEQ ID NO: 1577060 - DNA, 15 bp, Homo sapiens
aatgtgcaagggccc

SEQ ID NO: 1577061 - DNA, 15 bp, Homo sapiens
atgtgcaagggccca

SEQ ID NO: 1577062 - DNA, 15 bp, Homo sapiens
tgtgcaagggcccat

SEQ ID NO: 1577063 - DNA, 15 bp, Homo sapiens
gtgcaagggcccatc

SEQ ID NO: 1577064 - DNA, 15 bp, Homo sapiens
tgcaagggcccatct

SEQ ID NO: 1577065 - DNA, 15 bp, Homo sapiens
gcaagggcccatctg

SEQ ID NO: 1577066 - DNA, 15 bp, Homo sapiens
caagggcccatctgg

SEQ ID NO: 1577067 - DNA, 15 bp, Homo sapiens
aagggcccatctgga

SEQ ID NO: 1577068 - DNA, 15 bp, Homo sapiens
agggcccatctggaa

SEQ ID NO: 1577069 - DNA, 15 bp, Homo sapiens
gggcccatctggaac

SEQ ID NO: 1577070 - DNA, 15 bp, Homo sapiens
ggcccatctggaacc

SEQ ID NO: 1577071 - DNA, 15 bp, Homo sapiens
gcccatctggaacca

SEQ ID NO: 1577072 - DNA, 15 bp, Homo sapiens
cccatctggaaccaa

SEQ ID NO: 1577073 - DNA, 15 bp, Homo sapiens
ccatctggaaccaag

SEQ ID NO: 1577074 - DNA, 15 bp, Homo sapiens
catctggaaccaagg

SEQ ID NO: 1577075 - DNA, 15 bp, Homo sapiens
atctggaaccaaggt

SEQ ID NO: 1577076 - DNA, 15 bp, Homo sapiens
tctggaaccaaggtt

SEQ ID NO: 1577077 - DNA, 15 bp, Homo sapiens
ctggaaccaaggttt

SEQ ID NO: 1577078 - DNA, 15 bp, Homo sapiens
tggaaccaaggtttg

SEQ ID NO: 1577079 - DNA, 15 bp, Homo sapiens
ggaaccaaggtttgt

SEQ ID NO: 1577080 - DNA, 15 bp, Homo sapiens
gaaccaaggtttgtt

SEQ ID NO: 1577081 - DNA, 15 bp, Homo sapiens
aaccaaggtttgttg

SEQ ID NO: 1577082 - DNA, 15 bp, Homo sapiens
accaaggtttgttga

SEQ ID NO: 1577083 - DNA, 15 bp, Homo sapiens
ccaaggtttgttgat

SEQ ID NO: 1577084 - DNA, 15 bp, Homo sapiens
caaggtttgttgatc

SEQ ID NO: 1577085 - DNA, 15 bp, Homo sapiens
aaggtttgttgatcc

SEQ ID NO: 1577086 - DNA, 15 bp, Homo sapiens
aggtttgttgatccc

SEQ ID NO: 1577087 - DNA, 15 bp, Homo sapiens
ggtttgttgatcccc

SEQ ID NO: 1577088 - DNA, 15 bp, Homo sapiens
gtttgttgatcccct

SEQ ID NO: 1577089 - DNA, 15 bp, Homo sapiens
tttgttgatcccctg

SEQ ID NO: 1577090 - DNA, 15 bp, Homo sapiens
ttgttgatcccctgg

SEQ ID NO: 1577091 - DNA, 15 bp, Homo sapiens
tgttgatcccctggg

SEQ ID NO: 1577092 - DNA, 15 bp, Homo sapiens
gttgatcccctgggc

SEQ ID NO: 1577093 - DNA, 15 bp, Homo sapiens
ttgatcccctgggcc

SEQ ID NO: 1577094 - DNA, 15 bp, Homo sapiens
tgatcccctgggccg

SEQ ID NO: 1577095 - DNA, 15 bp, Homo sapiens
gatcccctgggccgt

SEQ ID NO: 1577096 - DNA, 15 bp, Homo sapiens
atcccctgggccgtg

SEQ ID NO: 1577097 - DNA, 15 bp, Homo sapiens
tcccctgggccgtgt

SEQ ID NO: 1577098 - DNA, 15 bp, Homo sapiens
cccctgggccgtgtg

SEQ ID NO: 1577099 - DNA, 15 bp, Homo sapiens
ccctgggccgtgtgc

SEQ ID NO: 1577100 - DNA, 15 bp, Homo sapiens
cctgggccgtgtgca

SEQ ID NO: 1577101 - DNA, 15 bp, Homo sapiens
ctgggccgtgtgcac

SEQ ID NO: 1577102 - DNA, 15 bp, Homo sapiens
tgggccgtgtgcacc

SEQ ID NO: 1577103 - DNA, 15 bp, Homo sapiens
gggccgtgtgcaccc

SEQ ID NO: 1577104 - DNA, 15 bp, Homo sapiens
ggccgtgtgcaccct

SEQ ID NO: 1577105 - DNA, 15 bp, Homo sapiens
gccgtgtgcaccctg

SEQ ID NO: 1577106 - DNA, 15 bp, Homo sapiens
ccgtgtgcaccctga

SEQ ID NO: 1577107 - DNA, 15 bp, Homo sapiens
cgtgtgcaccctgag

SEQ ID NO: 1577108 - DNA, 15 bp, Homo sapiens
gtgtgcaccctgagc

SEQ ID NO: 1577109 - DNA, 15 bp, Homo sapiens
tgtgcaccctgagct

SEQ ID NO: 1577110 - DNA, 15 bp, Homo sapiens
gtgcaccctgagctg

SEQ ID NO: 1577111 - DNA, 15 bp, Homo sapiens
tgcaccctgagctgg

SEQ ID NO: 1577112 - DNA, 15 bp, Homo sapiens
gcaccctgagctggg

SEQ ID NO: 1577113 - DNA, 15 bp, Homo sapiens
caccctgagctgggc

SEQ ID NO: 1577114 - DNA, 15 bp, Homo sapiens
accctgagctgggcc

SEQ ID NO: 1577115 - DNA, 15 bp, Homo sapiens
ccctgagctgggcct

SEQ ID NO: 1577116 - DNA, 15 bp, Homo sapiens
cctgagctgggcctg

SEQ ID NO: 1577117 - DNA, 15 bp, Homo sapiens
ctgagctgggcctgg

SEQ ID NO: 1577118 - DNA, 15 bp, Homo sapiens
tgagctgggcctggt

SEQ ID NO: 1577119 - DNA, 15 bp, Homo sapiens
gagctgggcctggta

SEQ ID NO: 1577120 - DNA, 15 bp, Homo sapiens
agctgggcctggtag

SEQ ID NO: 1577121 - DNA, 15 bp, Homo sapiens
gctgggcctggtagt

SEQ ID NO: 1577122 - DNA, 15 bp, Homo sapiens
ctgggcctggtagtg

SEQ ID NO: 1577123 - DNA, 15 bp, Homo sapiens
tgggcctggtagtgg

SEQ ID NO: 1577124 - DNA, 15 bp, Homo sapiens
gggcctggtagtgga

SEQ ID NO: 1577125 - DNA, 15 bp, Homo sapiens
ggcctggtagtggaa

SEQ ID NO: 1577126 - DNA, 15 bp, Homo sapiens
gcctggtagtggaaa

SEQ ID NO: 1577127 - DNA, 15 bp, Homo sapiens
cctggtagtggaaag

SEQ ID NO: 1577128 - DNA, 15 bp, Homo sapiens
ctggtagtggaaagg

SEQ ID NO: 1577129 - DNA, 15 bp, Homo sapiens
tggtagtggaaagga

SEQ ID NO: 1577130 - DNA, 15 bp, Homo sapiens
ggtagtggaaaggaa

SEQ ID NO: 1577131 - DNA, 15 bp, Homo sapiens
gtagtggaaaggaat

SEQ ID NO: 1577132 - DNA, 15 bp, Homo sapiens
tagtggaaaggaatg

SEQ ID NO: 1577133 - DNA, 15 bp, Homo sapiens
agtggaaaggaatga

SEQ ID NO: 1577134 - DNA, 15 bp, Homo sapiens
gtggaaaggaatgaa

SEQ ID NO: 1577135 - DNA, 15 bp, Homo sapiens
tggaaaggaatgaag

SEQ ID NO: 1577136 - DNA, 15 bp, Homo sapiens
ggaaaggaatgaagg

SEQ ID NO: 1577137 - DNA, 15 bp, Homo sapiens
gaaaggaatgaaggc

SEQ ID NO: 1577138 - DNA, 15 bp, Homo sapiens
aaaggaatgaaggca

SEQ ID NO: 1577139 - DNA, 15 bp, Homo sapiens
aaggaatgaaggcac

SEQ ID NO: 1577140 - DNA, 15 bp, Homo sapiens
aggaatgaaggcact

SEQ ID NO: 1577141 - DNA, 15 bp, Homo sapiens
ggaatgaaggcactg

SEQ ID NO: 1577142 - DNA, 15 bp, Homo sapiens
gaatgaaggcactgc

SEQ ID NO: 1577143 - DNA, 15 bp, Homo sapiens
aatgaaggcactgca

SEQ ID NO: 1577144 - DNA, 15 bp, Homo sapiens
atgaaggcactgcag

SEQ ID NO: 1577145 - DNA, 15 bp, Homo sapiens
tgaaggcactgcagt

SEQ ID NO: 1577146 - DNA, 15 bp, Homo sapiens
gaaggcactgcagtc

SEQ ID NO: 1577147 - DNA, 15 bp, Homo sapiens
aaggcactgcagtca

SEQ ID NO: 1577148 - DNA, 15 bp, Homo sapiens
aggcactgcagtcag

SEQ ID NO: 1577149 - DNA, 15 bp, Homo sapiens
ggcactgcagtcagg

SEQ ID NO: 1577150 - DNA, 15 bp, Homo sapiens
gcactgcagtcaggc

SEQ ID NO: 1577151 - DNA, 15 bp, Homo sapiens
cactgcagtcaggca

SEQ ID NO: 1577152 - DNA, 15 bp, Homo sapiens
actgcagtcaggcag

SEQ ID NO: 1577153 - DNA, 15 bp, Homo sapiens
ctgcagtcaggcagc

SEQ ID NO: 1577154 - DNA, 15 bp, Homo sapiens
tgcagtcaggcagcc

SEQ ID NO: 1577155 - DNA, 15 bp, Homo sapiens
gcagtcaggcagcct

SEQ ID NO: 1577156 - DNA, 15 bp, Homo sapiens
cagtcaggcagcctg

SEQ ID NO: 1577157 - DNA, 15 bp, Homo sapiens
agtcaggcagcctgg

SEQ ID NO: 1577158 - DNA, 15 bp, Homo sapiens
gtcaggcagcctggg

SEQ ID NO: 1577159 - DNA, 15 bp, Homo sapiens
tcaggcagcctgggt

SEQ ID NO: 1577160 - DNA, 15 bp, Homo sapiens
caggcagcctgggtt

SEQ ID NO: 1577161 - DNA, 15 bp, Homo sapiens
aggcagcctgggttc

SEQ ID NO: 1577162 - DNA, 15 bp, Homo sapiens
ggcagcctgggttca

SEQ ID NO: 1577163 - DNA, 15 bp, Homo sapiens
gcagcctgggttcat

SEQ ID NO: 1577164 - DNA, 15 bp, Homo sapiens
cagcctgggttcatc

SEQ ID NO: 1577165 - DNA, 15 bp, Homo sapiens
agcctgggttcatcc

SEQ ID NO: 1577166 - DNA, 15 bp, Homo sapiens
gcctgggttcatccc

SEQ ID NO: 1577167 - DNA, 15 bp, Homo sapiens
cctgggttcatcccc

SEQ ID NO: 1577168 - DNA, 15 bp, Homo sapiens
ctgggttcatccccc

SEQ ID NO: 1577169 - DNA, 15 bp, Homo sapiens
tgggttcatccccca

SEQ ID NO: 1577170 - DNA, 15 bp, Homo sapiens
gggttcatcccccag

SEQ ID NO: 1577171 - DNA, 15 bp, Homo sapiens
ggttcatcccccagc

SEQ ID NO: 1577172 - DNA, 15 bp, Homo sapiens
gttcatcccccagct

SEQ ID NO: 1577173 - DNA, 15 bp, Homo sapiens
ttcatcccccagcta

SEQ ID NO: 1577174 - DNA, 15 bp, Homo sapiens
tcatcccccagctag

SEQ ID NO: 1577175 - DNA, 15 bp, Homo sapiens
catcccccagctagt

SEQ ID NO: 1577176 - DNA, 15 bp, Homo sapiens
atcccccagctagtg

SEQ ID NO: 1577177 - DNA, 15 bp, Homo sapiens
tcccccagctagtgg

SEQ ID NO: 1577178 - DNA, 15 bp, Homo sapiens
cccccagctagtggt

SEQ ID NO: 1577179 - DNA, 15 bp, Homo sapiens
ccccagctagtggtg

SEQ ID NO: 1577180 - DNA, 15 bp, Homo sapiens
cccagctagtggtgt

SEQ ID NO: 1577181 - DNA, 15 bp, Homo sapiens
ccagctagtggtgtc

SEQ ID NO: 1577182 - DNA, 15 bp, Homo sapiens
cagctagtggtgtcc

SEQ ID NO: 1577183 - DNA, 15 bp, Homo sapiens
agctagtggtgtcct

SEQ ID NO: 1577184 - DNA, 15 bp, Homo sapiens
gctagtggtgtccta

SEQ ID NO: 1577185 - DNA, 15 bp, Homo sapiens
ctagtggtgtcctaa

SEQ ID NO: 1577186 - DNA, 15 bp, Homo sapiens
tagtggtgtcctaag

SEQ ID NO: 1577187 - DNA, 15 bp, Homo sapiens
agtggtgtcctaagg

SEQ ID NO: 1577188 - DNA, 15 bp, Homo sapiens
gtggtgtcctaagga

SEQ ID NO: 1577189 - DNA, 15 bp, Homo sapiens
tggtgtcctaaggaa

SEQ ID NO: 1577190 - DNA, 15 bp, Homo sapiens
ggtgtcctaaggaac

SEQ ID NO: 1577191 - DNA, 15 bp, Homo sapiens
gtgtcctaaggaacc

SEQ ID NO: 1577192 - DNA, 15 bp, Homo sapiens
tgtcctaaggaaccg

SEQ ID NO: 1577193 - DNA, 15 bp, Homo sapiens
gtcctaaggaaccgg

SEQ ID NO: 1577194 - DNA, 15 bp, Homo sapiens
tcctaaggaaccggc

SEQ ID NO: 1577195 - DNA, 15 bp, Homo sapiens
cctaaggaaccggct

SEQ ID NO: 1577196 - DNA, 15 bp, Homo sapiens
ctaaggaaccggctc

SEQ ID NO: 1577197 - DNA, 15 bp, Homo sapiens
taaggaaccggctcc

SEQ ID NO: 1577198 - DNA, 15 bp, Homo sapiens
aaggaaccggctccc

SEQ ID NO: 1577199 - DNA, 15 bp, Homo sapiens
aggaaccggctcccc

SEQ ID NO: 1577200 - DNA, 15 bp, Homo sapiens
ggaaccggctcccca

SEQ ID NO: 1577201 - DNA, 15 bp, Homo sapiens
gaaccggctccccaa

SEQ ID NO: 1577202 - DNA, 15 bp, Homo sapiens
aaccggctccccaaa

SEQ ID NO: 1577203 - DNA, 15 bp, Homo sapiens
accggctccccaaaa

SEQ ID NO: 1577204 - DNA, 15 bp, Homo sapiens
ccggctccccaaaaa

SEQ ID NO: 1577205 - DNA, 15 bp, Homo sapiens
cggctccccaaaaac

SEQ ID NO: 1577206 - DNA, 15 bp, Homo sapiens
ggctccccaaaaaca

SEQ ID NO: 1577207 - DNA, 15 bp, Homo sapiens
gctccccaaaaacat

SEQ ID NO: 1577208 - DNA, 15 bp, Homo sapiens
ctccccaaaaacatc

SEQ ID NO: 1577209 - DNA, 15 bp, Homo sapiens
tccccaaaaacatcc

SEQ ID NO: 1577210 - DNA, 15 bp, Homo sapiens
ccccaaaaacatccc

SEQ ID NO: 1577211 - DNA, 15 bp, Homo sapiens
cccaaaaacatccct

SEQ ID NO: 1577212 - DNA, 15 bp, Homo sapiens
ccaaaaacatccctg

SEQ ID NO: 1577213 - DNA, 15 bp, Homo sapiens
caaaaacatccctgg

SEQ ID NO: 1577214 - DNA, 15 bp, Homo sapiens
aaaaacatccctggc

SEQ ID NO: 1577215 - DNA, 15 bp, Homo sapiens
aaaacatccctggct

SEQ ID NO: 1577216 - DNA, 15 bp, Homo sapiens
aaacatccctggctt

SEQ ID NO: 1577217 - DNA, 15 bp, Homo sapiens
aacatccctggcttg

SEQ ID NO: 1577218 - DNA, 15 bp, Homo sapiens
acatccctggcttgt

SEQ ID NO: 1577219 - DNA, 15 bp, Homo sapiens
catccctggcttgta

SEQ ID NO: 1577220 - DNA, 15 bp, Homo sapiens
atccctggcttgtag

SEQ ID NO: 1577221 - DNA, 15 bp, Homo sapiens
tccctggcttgtagt

SEQ ID NO: 1577222 - DNA, 15 bp, Homo sapiens
ccctggcttgtagtg

SEQ ID NO: 1577223 - DNA, 15 bp, Homo sapiens
cctggcttgtagtgc

SEQ ID NO: 1577224 - DNA, 15 bp, Homo sapiens
ctggcttgtagtgct

SEQ ID NO: 1577225 - DNA, 15 bp, Homo sapiens
tggcttgtagtgctt

SEQ ID NO: 1577226 - DNA, 15 bp, Homo sapiens
ggcttgtagtgcttg

SEQ ID NO: 1577227 - DNA, 15 bp, Homo sapiens
gcttgtagtgcttgc

SEQ ID NO: 1577228 - DNA, 15 bp, Homo sapiens
cttgtagtgcttgcc

SEQ ID NO: 1577229 - DNA, 15 bp, Homo sapiens
ttgtagtgcttgcca

SEQ ID NO: 1577230 - DNA, 15 bp, Homo sapiens
tgtagtgcttgccaa

SEQ ID NO: 1577231 - DNA, 15 bp, Homo sapiens
gtagtgcttgccaat

SEQ ID NO: 1577232 - DNA, 15 bp, Homo sapiens
tagtgcttgccaatt

SEQ ID NO: 1577233 - DNA, 15 bp, Homo sapiens
agtgcttgccaattt

SEQ ID NO: 1577234 - DNA, 15 bp, Homo sapiens
gtgcttgccaatttc

SEQ ID NO: 1577235 - DNA, 15 bp, Homo sapiens
tgcttgccaatttct

SEQ ID NO: 1577236 - DNA, 15 bp, Homo sapiens
gcttgccaatttctg

SEQ ID NO: 1577237 - DNA, 15 bp, Homo sapiens
cttgccaatttctgg

SEQ ID NO: 1577238 - DNA, 15 bp, Homo sapiens
ttgccaatttctggg

SEQ ID NO: 1577239 - DNA, 15 bp, Homo sapiens
tgccaatttctgggt

SEQ ID NO: 1577240 - DNA, 15 bp, Homo sapiens
gccaatttctgggtg

SEQ ID NO: 1577241 - DNA, 15 bp, Homo sapiens
ccaatttctgggtgt

SEQ ID NO: 1577242 - DNA, 15 bp, Homo sapiens
caatttctgggtgtc

SEQ ID NO: 1577243 - DNA, 15 bp, Homo sapiens
aatttctgggtgtca

SEQ ID NO: 1577244 - DNA, 15 bp, Homo sapiens
atttctgggtgtcaa

SEQ ID NO: 1577245 - DNA, 15 bp, Homo sapiens
tttctgggtgtcaag

SEQ ID NO: 1577246 - DNA, 15 bp, Homo sapiens
ttctgggtgtcaaga

SEQ ID NO: 1577247 - DNA, 15 bp, Homo sapiens
tctgggtgtcaagac

SEQ ID NO: 1577248 - DNA, 15 bp, Homo sapiens
ctgggtgtcaagact

SEQ ID NO: 1577249 - DNA, 15 bp, Homo sapiens
tgggtgtcaagactc

SEQ ID NO: 1577250 - DNA, 15 bp, Homo sapiens
gggtgtcaagactcc

SEQ ID NO: 1577251 - DNA, 15 bp, Homo sapiens
ggtgtcaagactccc

SEQ ID NO: 1577252 - DNA, 15 bp, Homo sapiens
gtgtcaagactccca

SEQ ID NO: 1577253 - DNA, 15 bp, Homo sapiens
tgtcaagactcccac

SEQ ID NO: 1577254 - DNA, 15 bp, Homo sapiens
gtcaagactcccact

SEQ ID NO: 1577255 - DNA, 15 bp, Homo sapiens
tcaagactcccactg

SEQ ID NO: 1577256 - DNA, 15 bp, Homo sapiens
caagactcccactgc

SEQ ID NO: 1577257 - DNA, 15 bp, Homo sapiens
aagactcccactgct

SEQ ID NO: 1577258 - DNA, 15 bp, Homo sapiens
agactcccactgctg

SEQ ID NO: 1577259 - DNA, 15 bp, Homo sapiens
actccagactgggcg

SEQ ID NO: 1577260 - DNA, 15 bp, Homo sapiens
ctccagactgggcga

SEQ ID NO: 1577261 - DNA, 15 bp, Homo sapiens
tccagactgggcgac

SEQ ID NO: 1577262 - DNA, 15 bp, Homo sapiens
ccagactgggcgact

SEQ ID NO: 1577263 - DNA, 15 bp, Homo sapiens
cagactgggcgactg

SEQ ID NO: 1577264 - DNA, 15 bp, Homo sapiens
agactgggcgactga

SEQ ID NO: 1577265 - DNA, 15 bp, Homo sapiens
gactgggcgactgag

SEQ ID NO: 1577266 - DNA, 15 bp, Homo sapiens
actgggcgactgagc

SEQ ID NO: 1577267 - DNA, 15 bp, Homo sapiens
ctgggcgactgagca

SEQ ID NO: 1577268 - DNA, 15 bp, Homo sapiens
tgggcgactgagcaa

SEQ ID NO: 1577269 - DNA, 15 bp, Homo sapiens
gggcgactgagcaag

SEQ ID NO: 1577270 - DNA, 15 bp, Homo sapiens
ggcgactgagcaaga

SEQ ID NO: 1577271 - DNA, 15 bp, Homo sapiens
gcgactgagcaagac

SEQ ID NO: 1577272 - DNA, 15 bp, Homo sapiens
cgactgagcaagact

SEQ ID NO: 1577273 - DNA, 15 bp, Homo sapiens
gactgagcaagactc

SEQ ID NO: 1577274 - DNA, 15 bp, Homo sapiens
actgagcaagactcc

SEQ ID NO: 1577275 - DNA, 15 bp, Homo sapiens
ctgagcaagactcca

SEQ ID NO: 1577276 - DNA, 15 bp, Homo sapiens
tgagcaagactccat

SEQ ID NO: 1577277 - DNA, 15 bp, Homo sapiens
tctcaaaaaaaaaat

SEQ ID NO: 1577278 - DNA, 15 bp, Homo sapiens
ctcaaaaaaaaaatt

SEQ ID NO: 1577279 - DNA, 15 bp, Homo sapiens
tcaaaaaaaaaattt

SEQ ID NO: 1577280 - DNA, 15 bp, Homo sapiens
caaaaaaaaaatttt

SEQ ID NO: 1577281 - DNA, 15 bp, Homo sapiens
aaaaaatttttttta

SEQ ID NO: 1577282 - DNA, 15 bp, Homo sapiens
aaaaattttttttac

SEQ ID NO: 1577283 - DNA, 15 bp, Homo sapiens
aaaattttttttaca

SEQ ID NO: 1577284 - DNA, 15 bp, Homo sapiens
aaattttttttacat

SEQ ID NO: 1577285 - DNA, 15 bp, Homo sapiens
aattttttttacatc

SEQ ID NO: 1577286 - DNA, 15 bp, Homo sapiens
attttttttacatca

SEQ ID NO: 1577287 - DNA, 15 bp, Homo sapiens
ttttttttacatcat

SEQ ID NO: 1577288 - DNA, 15 bp, Homo sapiens
tttttttacatcata

SEQ ID NO: 1577289 - DNA, 15 bp, Homo sapiens
ttttttacatcataa

SEQ ID NO: 1577290 - DNA, 15 bp, Homo sapiens
tttttacatcataat

SEQ ID NO: 1577291 - DNA, 15 bp, Homo sapiens
ttttacatcataatt

SEQ ID NO: 1577292 - DNA, 15 bp, Homo sapiens
tttacatcataattt

SEQ ID NO: 1577293 - DNA, 15 bp, Homo sapiens
ttacatcataattta

SEQ ID NO: 1577294 - DNA, 15 bp, Homo sapiens
tacatcataatttaa

SEQ ID NO: 1577295 - DNA, 15 bp, Homo sapiens
acatcataatttaaa

SEQ ID NO: 1577296 - DNA, 15 bp, Homo sapiens
catcataatttaaat

SEQ ID NO: 1577297 - DNA, 15 bp, Homo sapiens
atcataatttaaatg

SEQ ID NO: 1577298 - DNA, 15 bp, Homo sapiens
tcataatttaaatgt

SEQ ID NO: 1577299 - DNA, 15 bp, Homo sapiens
cataatttaaatgtt

SEQ ID NO: 1577300 - DNA, 15 bp, Homo sapiens
ataatttaaatgtta

SEQ ID NO: 1577301 - DNA, 15 bp, Homo sapiens
taatttaaatgttat

SEQ ID NO: 1577302 - DNA, 15 bp, Homo sapiens
aatttaaatgttata

SEQ ID NO: 1577303 - DNA, 15 bp, Homo sapiens
atttaaatgttataa

SEQ ID NO: 1577304 - DNA, 15 bp, Homo sapiens
tttaaatgttataac

SEQ ID NO: 1577305 - DNA, 15 bp, Homo sapiens
ttaaatgttataact

SEQ ID NO: 1577306 - DNA, 15 bp, Homo sapiens
taaatgttataacta

SEQ ID NO: 1577307 - DNA, 15 bp, Homo sapiens
aaatgttataactac

SEQ ID NO: 1577308 - DNA, 15 bp, Homo sapiens
aatgttataactact

SEQ ID NO: 1577309 - DNA, 15 bp, Homo sapiens
atgttataactactg

SEQ ID NO: 1577310 - DNA, 15 bp, Homo sapiens
tgttataactactgc

SEQ ID NO: 1577311 - DNA, 15 bp, Homo sapiens
gttataactactgcc

SEQ ID NO: 1577312 - DNA, 15 bp, Homo sapiens
ttataactactgccc

SEQ ID NO: 1577313 - DNA, 15 bp, Homo sapiens
tataactactgccca

SEQ ID NO: 1577314 - DNA, 15 bp, Homo sapiens
ataactactgcccag

SEQ ID NO: 1577315 - DNA, 15 bp, Homo sapiens
taactactgcccaga

SEQ ID NO: 1577316 - DNA, 15 bp, Homo sapiens
aactactgcccagag

SEQ ID NO: 1577317 - DNA, 15 bp, Homo sapiens
actactgcccagagc

SEQ ID NO: 1577318 - DNA, 15 bp, Homo sapiens
ctactgcccagagct

SEQ ID NO: 1577319 - DNA, 15 bp, Homo sapiens
tactgcccagagctt

SEQ ID NO: 1577320 - DNA, 15 bp, Homo sapiens
actgcccagagcttg

SEQ ID NO: 1577321 - DNA, 15 bp, Homo sapiens
ctgcccagagcttgg

SEQ ID NO: 1577322 - DNA, 15 bp, Homo sapiens
tgcccagagcttggt

SEQ ID NO: 1577323 - DNA, 15 bp, Homo sapiens
gcccagagcttggtt

SEQ ID NO: 1577324 - DNA, 15 bp, Homo sapiens
cccagagcttggttt

SEQ ID NO: 1577325 - DNA, 15 bp, Homo sapiens
ccagagcttggtttc

SEQ ID NO: 1577326 - DNA, 15 bp, Homo sapiens
cagagcttggtttct

SEQ ID NO: 1577327 - DNA, 15 bp, Homo sapiens
agagcttggtttcta

SEQ ID NO: 1577328 - DNA, 15 bp, Homo sapiens
gagcttggtttctaa

SEQ ID NO: 1577329 - DNA, 15 bp, Homo sapiens
agcttggtttctaat

SEQ ID NO: 1577330 - DNA, 15 bp, Homo sapiens
gcttggtttctaata

SEQ ID NO: 1577331 - DNA, 15 bp, Homo sapiens
cttggtttctaataa

SEQ ID NO: 1577332 - DNA, 15 bp, Homo sapiens
ttggtttctaataat

SEQ ID NO: 1577333 - DNA, 15 bp, Homo sapiens
tggtttctaataata

SEQ ID NO: 1577334 - DNA, 15 bp, Homo sapiens
ggtttctaataatac

SEQ ID NO: 1577335 - DNA, 15 bp, Homo sapiens
gtttctaataatacc

SEQ ID NO: 1577336 - DNA, 15 bp, Homo sapiens
tttctaataatacca

SEQ ID NO: 1577337 - DNA, 15 bp, Homo sapiens
ttctaataataccat

SEQ ID NO: 1577338 - DNA, 15 bp, Homo sapiens
tctaataataccatt

SEQ ID NO: 1577339 - DNA, 15 bp, Homo sapiens
ctaataataccattt

SEQ ID NO: 1577340 - DNA, 15 bp, Homo sapiens
taataataccatttt

SEQ ID NO: 1577341 - DNA, 15 bp, Homo sapiens
aataataccattttc

SEQ ID NO: 1577342 - DNA, 15 bp, Homo sapiens
ataataccattttcc

SEQ ID NO: 1577343 - DNA, 15 bp, Homo sapiens
taataccattttcca

SEQ ID NO: 1577344 - DNA, 15 bp, Homo sapiens
aataccattttccaa

SEQ ID NO: 1577345 - DNA, 15 bp, Homo sapiens
ataccattttccaat

SEQ ID NO: 1577346 - DNA, 15 bp, Homo sapiens
taccattttccaata

SEQ ID NO: 1577347 - DNA, 15 bp, Homo sapiens
accattttccaatat

SEQ ID NO: 1577348 - DNA, 15 bp, Homo sapiens
ccattttccaatata

SEQ ID NO: 1577349 - DNA, 15 bp, Homo sapiens
cattttccaatataa

SEQ ID NO: 1577350 - DNA, 15 bp, Homo sapiens
attttccaatataag

SEQ ID NO: 1577351 - DNA, 15 bp, Homo sapiens
ttttccaatataaga

SEQ ID NO: 1577352 - DNA, 15 bp, Homo sapiens
tttccaatataagaa

SEQ ID NO: 1577353 - DNA, 15 bp, Homo sapiens
ttccaatataagaaa

SEQ ID NO: 1577354 - DNA, 15 bp, Homo sapiens
tccaatataagaaac

SEQ ID NO: 1577355 - DNA, 15 bp, Homo sapiens
ccaatataagaaacc

SEQ ID NO: 1577356 - DNA, 15 bp, Homo sapiens
caatataagaaacca

SEQ ID NO: 1577357 - DNA, 15 bp, Homo sapiens
aatataagaaaccag

SEQ ID NO: 1577358 - DNA, 15 bp, Homo sapiens
atataagaaaccaga

SEQ ID NO: 1577359 - DNA, 15 bp, Homo sapiens
tataagaaaccagag

SEQ ID NO: 1577360 - DNA, 15 bp, Homo sapiens
ataagaaaccagagc

SEQ ID NO: 1577361 - DNA, 15 bp, Homo sapiens
taagaaaccagagct

SEQ ID NO: 1577362 - DNA, 15 bp, Homo sapiens
aagaaaccagagctc

SEQ ID NO: 1577363 - DNA, 15 bp, Homo sapiens
agaaaccagagctcc

SEQ ID NO: 1577364 - DNA, 15 bp, Homo sapiens
gaaaccagagctcct

SEQ ID NO: 1577365 - DNA, 15 bp, Homo sapiens
aaaccagagctcctg

SEQ ID NO: 1577366 - DNA, 15 bp, Homo sapiens
aaccagagctcctgg

SEQ ID NO: 1577367 - DNA, 15 bp, Homo sapiens
accagagctcctggt

SEQ ID NO: 1577368 - DNA, 15 bp, Homo sapiens
ccagagctcctggtg

SEQ ID NO: 1577369 - DNA, 15 bp, Homo sapiens
cagagctcctggtgc

SEQ ID NO: 1577370 - DNA, 15 bp, Homo sapiens
agagctcctggtgca

SEQ ID NO: 1577371 - DNA, 15 bp, Homo sapiens
gagctcctggtgcag

SEQ ID NO: 1577372 - DNA, 15 bp, Homo sapiens
agctcctggtgcagc

SEQ ID NO: 1577373 - DNA, 15 bp, Homo sapiens
gctcctggtgcagca

SEQ ID NO: 1577374 - DNA, 15 bp, Homo sapiens
ctcctggtgcagcat

SEQ ID NO: 1577375 - DNA, 15 bp, Homo sapiens
tcctggtgcagcatc

SEQ ID NO: 1577376 - DNA, 15 bp, Homo sapiens
cctggtgcagcatct

SEQ ID NO: 1577377 - DNA, 15 bp, Homo sapiens
ctggtgcagcatctg

SEQ ID NO: 1577378 - DNA, 15 bp, Homo sapiens
tggtgcagcatctgc

SEQ ID NO: 1577379 - DNA, 15 bp, Homo sapiens
ggtgcagcatctgct

SEQ ID NO: 1577380 - DNA, 15 bp, Homo sapiens
gtgcagcatctgctc

SEQ ID NO: 1577381 - DNA, 15 bp, Homo sapiens
tgcagcatctgctct

SEQ ID NO: 1577382 - DNA, 15 bp, Homo sapiens
gcagcatctgctctg

SEQ ID NO: 1577383 - DNA, 15 bp, Homo sapiens
cagcatctgctctgg

SEQ ID NO: 1577384 - DNA, 15 bp, Homo sapiens
agcatctgctctggc

SEQ ID NO: 1577385 - DNA, 15 bp, Homo sapiens
gcatctgctctggcc

SEQ ID NO: 1577386 - DNA, 15 bp, Homo sapiens
catctgctctggccc

SEQ ID NO: 1577387 - DNA, 15 bp, Homo sapiens
atctgctctggcccc

SEQ ID NO: 1577388 - DNA, 15 bp, Homo sapiens
tctgctctggcccct

SEQ ID NO: 1577389 - DNA, 15 bp, Homo sapiens
ctgctctggcccctg

SEQ ID NO: 1577390 - DNA, 15 bp, Homo sapiens
tgctctggcccctgg

SEQ ID NO: 1577391 - DNA, 15 bp, Homo sapiens
gctctggcccctggt

SEQ ID NO: 1577392 - DNA, 15 bp, Homo sapiens
ctctggcccctggtc

SEQ ID NO: 1577393 - DNA, 15 bp, Homo sapiens
tctggcccctggtcc

SEQ ID NO: 1577394 - DNA, 15 bp, Homo sapiens
ctggcccctggtccc

SEQ ID NO: 1577395 - DNA, 15 bp, Homo sapiens
tggcccctggtcccc

SEQ ID NO: 1577396 - DNA, 15 bp, Homo sapiens
ggcccctggtcccct

SEQ ID NO: 1577397 - DNA, 15 bp, Homo sapiens
gcccctggtcccctc

SEQ ID NO: 1577398 - DNA, 15 bp, Homo sapiens
cccctggtcccctcg

SEQ ID NO: 1577399 - DNA, 15 bp, Homo sapiens
ccctggtcccctcgc

SEQ ID NO: 1577400 - DNA, 15 bp, Homo sapiens
cctggtcccctcgct

SEQ ID NO: 1577401 - DNA, 15 bp, Homo sapiens
ctggtcccctcgctc

SEQ ID NO: 1577402 - DNA, 15 bp, Homo sapiens
tggtcccctcgctcc

SEQ ID NO: 1577403 - DNA, 15 bp, Homo sapiens
ggtcccctcgctccc

SEQ ID NO: 1577404 - DNA, 15 bp, Homo sapiens
gtcccctcgctcccc

SEQ ID NO: 1577405 - DNA, 15 bp, Homo sapiens
tcccctcgctcccca

SEQ ID NO: 1577406 - DNA, 15 bp, Homo sapiens
cccctcgctccccac

SEQ ID NO: 1577407 - DNA, 15 bp, Homo sapiens
ccctcgctccccacc

SEQ ID NO: 1577408 - DNA, 15 bp, Homo sapiens
cctcgctccccaccc

SEQ ID NO: 1577409 - DNA, 15 bp, Homo sapiens
ctcgctccccaccca

SEQ ID NO: 1577410 - DNA, 15 bp, Homo sapiens
tcgctccccacccac

SEQ ID NO: 1577411 - DNA, 15 bp, Homo sapiens
cgctccccacccacc

SEQ ID NO: 1577412 - DNA, 15 bp, Homo sapiens
gctccccacccaccc

SEQ ID NO: 1577413 - DNA, 15 bp, Homo sapiens
ctccccacccaccca

SEQ ID NO: 1577414 - DNA, 15 bp, Homo sapiens
tccccacccacccag

SEQ ID NO: 1577415 - DNA, 15 bp, Homo sapiens
ccccacccacccagg

SEQ ID NO: 1577416 - DNA, 15 bp, Homo sapiens
cccacccacccaggc

SEQ ID NO: 1577417 - DNA, 15 bp, Homo sapiens
ccacccacccaggcc

SEQ ID NO: 1577418 - DNA, 15 bp, Homo sapiens
cacccacccaggccc

SEQ ID NO: 1577419 - DNA, 15 bp, Homo sapiens
acccacccaggcccc

SEQ ID NO: 1577420 - DNA, 15 bp, Homo sapiens
cccacccaggcccct

SEQ ID NO: 1577421 - DNA, 15 bp, Homo sapiens
ccacccaggcccctt

SEQ ID NO: 1577422 - DNA, 15 bp, Homo sapiens
cacccaggccccttc

SEQ ID NO: 1577423 - DNA, 15 bp, Homo sapiens
acccaggccccttcc

SEQ ID NO: 1577424 - DNA, 15 bp, Homo sapiens
cccaggccccttcct

SEQ ID NO: 1577425 - DNA, 15 bp, Homo sapiens
ccaggccccttcctc

SEQ ID NO: 1577426 - DNA, 15 bp, Homo sapiens
caggccccttcctcc

SEQ ID NO: 1577427 - DNA, 15 bp, Homo sapiens
aggccccttcctccg

SEQ ID NO: 1577428 - DNA, 15 bp, Homo sapiens
ggccccttcctccgg

SEQ ID NO: 1577429 - DNA, 15 bp, Homo sapiens
gccccttcctccgga

SEQ ID NO: 1577430 - DNA, 15 bp, Homo sapiens
ccccttcctccggag

SEQ ID NO: 1577431 - DNA, 15 bp, Homo sapiens
cccttcctccggagc

SEQ ID NO: 1577432 - DNA, 15 bp, Homo sapiens
ccttcctccggagct

SEQ ID NO: 1577433 - DNA, 15 bp, Homo sapiens
cttcctccggagctc

SEQ ID NO: 1577434 - DNA, 15 bp, Homo sapiens
ttcctccggagctca

SEQ ID NO: 1577435 - DNA, 15 bp, Homo sapiens
tcctccggagctcac

SEQ ID NO: 1577436 - DNA, 15 bp, Homo sapiens
cctccggagctcacc

SEQ ID NO: 1577437 - DNA, 15 bp, Homo sapiens
ctccggagctcacct

SEQ ID NO: 1577438 - DNA, 15 bp, Homo sapiens
tccggagctcacctg

SEQ ID NO: 1577439 - DNA, 15 bp, Homo sapiens
ccggagctcacctgg

SEQ ID NO: 1577440 - DNA, 15 bp, Homo sapiens
cggagctcacctggg

SEQ ID NO: 1577441 - DNA, 15 bp, Homo sapiens
ggagctcacctgggg

SEQ ID NO: 1577442 - DNA, 15 bp, Homo sapiens
gagctcacctggggc

SEQ ID NO: 1577443 - DNA, 15 bp, Homo sapiens
agctcacctggggcc

SEQ ID NO: 1577444 - DNA, 15 bp, Homo sapiens
gctcacctggggcct

SEQ ID NO: 1577445 - DNA, 15 bp, Homo sapiens
ctcacctggggcctc

SEQ ID NO: 1577446 - DNA, 15 bp, Homo sapiens
tcacctggggcctcc

SEQ ID NO: 1577447 - DNA, 15 bp, Homo sapiens
cacctggggcctcca

SEQ ID NO: 1577448 - DNA, 15 bp, Homo sapiens
acctggggcctccat

SEQ ID NO: 1577449 - DNA, 15 bp, Homo sapiens
cctggggcctccatc

SEQ ID NO: 1577450 - DNA, 15 bp, Homo sapiens
ctggggcctccatcc

SEQ ID NO: 1577451 - DNA, 15 bp, Homo sapiens
tggggcctccatccc

SEQ ID NO: 1577452 - DNA, 15 bp, Homo sapiens
ggggcctccatccca

SEQ ID NO: 1577453 - DNA, 15 bp, Homo sapiens
gggcctccatcccag

SEQ ID NO: 1577454 - DNA, 15 bp, Homo sapiens
ggcctccatcccaga

SEQ ID NO: 1577455 - DNA, 15 bp, Homo sapiens
gcctccatcccagaa

SEQ ID NO: 1577456 - DNA, 15 bp, Homo sapiens
cctccatcccagaag

SEQ ID NO: 1577457 - DNA, 15 bp, Homo sapiens
ctccatcccagaagc

SEQ ID NO: 1577458 - DNA, 15 bp, Homo sapiens
tccatcccagaagct

SEQ ID NO: 1577459 - DNA, 15 bp, Homo sapiens
ccatcccagaagctc

SEQ ID NO: 1577460 - DNA, 15 bp, Homo sapiens
catcccagaagctca

SEQ ID NO: 1577461 - DNA, 15 bp, Homo sapiens
atcccagaagctcag

SEQ ID NO: 1577462 - DNA, 15 bp, Homo sapiens
tcccagaagctcagg

SEQ ID NO: 1577463 - DNA, 15 bp, Homo sapiens
cccagaagctcaggg

SEQ ID NO: 1577464 - DNA, 15 bp, Homo sapiens
ccagaagctcagggc

SEQ ID NO: 1577465 - DNA, 15 bp, Homo sapiens
cagaagctcagggct

SEQ ID NO: 1577466 - DNA, 15 bp, Homo sapiens
agaagctcagggctt

SEQ ID NO: 1577467 - DNA, 15 bp, Homo sapiens
gaagctcagggctta

SEQ ID NO: 1577468 - DNA, 15 bp, Homo sapiens
aagctcagggcttat

SEQ ID NO: 1577469 - DNA, 15 bp, Homo sapiens
agctcagggcttatt

SEQ ID NO: 1577470 - DNA, 15 bp, Homo sapiens
gctcagggcttattt

SEQ ID NO: 1577471 - DNA, 15 bp, Homo sapiens
ctcagggcttatttt

SEQ ID NO: 1577472 - DNA, 15 bp, Homo sapiens
tcagggcttattttt

SEQ ID NO: 1577473 - DNA, 15 bp, Homo sapiens
cagggcttatttttc

SEQ ID NO: 1577474 - DNA, 15 bp, Homo sapiens
agggcttatttttct

SEQ ID NO: 1577475 - DNA, 15 bp, Homo sapiens
gggcttatttttctg

SEQ ID NO: 1577476 - DNA, 15 bp, Homo sapiens
ggcttatttttctga

SEQ ID NO: 1577477 - DNA, 15 bp, Homo sapiens
gcttatttttctgat

SEQ ID NO: 1577478 - DNA, 15 bp, Homo sapiens
tgcaactgtagtccc

SEQ ID NO: 1577479 - DNA, 15 bp, Homo sapiens
gcaactgtagtccca

SEQ ID NO: 1577480 - DNA, 15 bp, Homo sapiens
actgtagtcccagct

SEQ ID NO: 1577481 - DNA, 15 bp, Homo sapiens
tgtagtcccagctat

SEQ ID NO: 1577482 - DNA, 15 bp, Homo sapiens
gtagtcccagctatt

SEQ ID NO: 1577483 - DNA, 15 bp, Homo sapiens
tagtcccagctattc

SEQ ID NO: 1577484 - DNA, 15 bp, Homo sapiens
agtcccagctattcg

SEQ ID NO: 1577485 - DNA, 15 bp, Homo sapiens
gtcccagctattcgg

SEQ ID NO: 1577486 - DNA, 15 bp, Homo sapiens
tcgggaggctgagaa

SEQ ID NO: 1577487 - DNA, 15 bp, Homo sapiens
cgggaggctgagaaa

SEQ ID NO: 1577488 - DNA, 15 bp, Homo sapiens
gggaggctgagaaag

SEQ ID NO: 1577489 - DNA, 15 bp, Homo sapiens
ggaggctgagaaagg

SEQ ID NO: 1577490 - DNA, 15 bp, Homo sapiens
gaggctgagaaagga

SEQ ID NO: 1577491 - DNA, 15 bp, Homo sapiens
aggctgagaaaggag

SEQ ID NO: 1577492 - DNA, 15 bp, Homo sapiens
ggctgagaaaggaga

SEQ ID NO: 1577493 - DNA, 15 bp, Homo sapiens
gctgagaaaggagaa

SEQ ID NO: 1577494 - DNA, 15 bp, Homo sapiens
ctgagaaaggagaat

SEQ ID NO: 1577495 - DNA, 15 bp, Homo sapiens
tgagaaaggagaatt

SEQ ID NO: 1577496 - DNA, 15 bp, Homo sapiens
gagaaaggagaattg

SEQ ID NO: 1577497 - DNA, 15 bp, Homo sapiens
agaaaggagaattgc

SEQ ID NO: 1577498 - DNA, 15 bp, Homo sapiens
gaaaggagaattgct

SEQ ID NO: 1577499 - DNA, 15 bp, Homo sapiens
aaaggagaattgctt

SEQ ID NO: 1577500 - DNA, 15 bp, Homo sapiens
aaggagaattgcttg

SEQ ID NO: 1577501 - DNA, 15 bp, Homo sapiens
gaaggcagaggttgc

SEQ ID NO: 1577502 - DNA, 15 bp, Homo sapiens
aaggcagaggttgca

SEQ ID NO: 1577503 - DNA, 15 bp, Homo sapiens
gctgagatcacaccg

SEQ ID NO: 1577504 - DNA, 15 bp, Homo sapiens
ctgagatcacaccgc

SEQ ID NO: 1577505 - DNA, 15 bp, Homo sapiens
tgagatcacaccgct

SEQ ID NO: 1577506 - DNA, 15 bp, Homo sapiens
gagatcacaccgctg

SEQ ID NO: 1577507 - DNA, 15 bp, Homo sapiens
agatcacaccgctgg

SEQ ID NO: 1577508 - DNA, 15 bp, Homo sapiens
gatcacaccgctgga

SEQ ID NO: 1577509 - DNA, 15 bp, Homo sapiens
atcacaccgctggac

SEQ ID NO: 1577510 - DNA, 15 bp, Homo sapiens
tcacaccgctggact

SEQ ID NO: 1577511 - DNA, 15 bp, Homo sapiens
cacaccgctggactc

SEQ ID NO: 1577512 - DNA, 15 bp, Homo sapiens
acaccgctggactcc

SEQ ID NO: 1577513 - DNA, 15 bp, Homo sapiens
caccgctggactcca

SEQ ID NO: 1577514 - DNA, 15 bp, Homo sapiens
accgctggactccag

SEQ ID NO: 1577515 - DNA, 15 bp, Homo sapiens
ccgctggactccagc

SEQ ID NO: 1577516 - DNA, 15 bp, Homo sapiens
cgctggactccagcc

SEQ ID NO: 1577517 - DNA, 15 bp, Homo sapiens
gctggactccagcct

SEQ ID NO: 1577518 - DNA, 15 bp, Homo sapiens
gactccagcctgggt

SEQ ID NO: 1577519 - DNA, 15 bp, Homo sapiens
aaaaaaaaaattgtt

SEQ ID NO: 1577520 - DNA, 15 bp, Homo sapiens
aaaaaaaaattgttt

SEQ ID NO: 1577521 - DNA, 15 bp, Homo sapiens
aaaaaaaattgtttc

SEQ ID NO: 1577522 - DNA, 15 bp, Homo sapiens
aaaaaaattgtttct

SEQ ID NO: 1577523 - DNA, 15 bp, Homo sapiens
aaaaaattgtttctg

SEQ ID NO: 1577524 - DNA, 15 bp, Homo sapiens
aaaaattgtttctgg

SEQ ID NO: 1577525 - DNA, 15 bp, Homo sapiens
aaaattgtttctgga

SEQ ID NO: 1577526 - DNA, 15 bp, Homo sapiens
aaattgtttctggaa

SEQ ID NO: 1577527 - DNA, 15 bp, Homo sapiens
aattgtttctggaaa

SEQ ID NO: 1577528 - DNA, 15 bp, Homo sapiens
attgtttctggaaag

SEQ ID NO: 1577529 - DNA, 15 bp, Homo sapiens
ttgtttctggaaagg

SEQ ID NO: 1577530 - DNA, 15 bp, Homo sapiens
tgtttctggaaaggc

SEQ ID NO: 1577531 - DNA, 15 bp, Homo sapiens
gtttctggaaaggca

SEQ ID NO: 1577532 - DNA, 15 bp, Homo sapiens
tttctggaaaggcat

SEQ ID NO: 1577533 - DNA, 15 bp, Homo sapiens
ttctggaaaggcatc

SEQ ID NO: 1577534 - DNA, 15 bp, Homo sapiens
tctggaaaggcatcg

SEQ ID NO: 1577535 - DNA, 15 bp, Homo sapiens
ctggaaaggcatcgg

SEQ ID NO: 1577536 - DNA, 15 bp, Homo sapiens
tggaaaggcatcggg

SEQ ID NO: 1577537 - DNA, 15 bp, Homo sapiens
ggaaaggcatcggga

SEQ ID NO: 1577538 - DNA, 15 bp, Homo sapiens
gaaaggcatcgggaa

SEQ ID NO: 1577539 - DNA, 15 bp, Homo sapiens
aaaggcatcgggaag

SEQ ID NO: 1577540 - DNA, 15 bp, Homo sapiens
aaggcatcgggaaga

SEQ ID NO: 1577541 - DNA, 15 bp, Homo sapiens
aggcatcgggaagag

SEQ ID NO: 1577542 - DNA, 15 bp, Homo sapiens
ggcatcgggaagagg

SEQ ID NO: 1577543 - DNA, 15 bp, Homo sapiens
gcatcgggaagagga

SEQ ID NO: 1577544 - DNA, 15 bp, Homo sapiens
catcgggaagaggaa

SEQ ID NO: 1577545 - DNA, 15 bp, Homo sapiens
atcgggaagaggaat

SEQ ID NO: 1577546 - DNA, 15 bp, Homo sapiens
tcgggaagaggaatc

SEQ ID NO: 1577547 - DNA, 15 bp, Homo sapiens
cgggaagaggaatct

SEQ ID NO: 1577548 - DNA, 15 bp, Homo sapiens
gggaagaggaatctt

SEQ ID NO: 1577549 - DNA, 15 bp, Homo sapiens
ggaagaggaatctta

SEQ ID NO: 1577550 - DNA, 15 bp, Homo sapiens
gaagaggaatcttag

SEQ ID NO: 1577551 - DNA, 15 bp, Homo sapiens
aagaggaatcttagg

SEQ ID NO: 1577552 - DNA, 15 bp, Homo sapiens
agaggaatcttaggt

SEQ ID NO: 1577553 - DNA, 15 bp, Homo sapiens
gaggaatcttaggtt

SEQ ID NO: 1577554 - DNA, 15 bp, Homo sapiens
aggaatcttaggtta

SEQ ID NO: 1577555 - DNA, 15 bp, Homo sapiens
ggaatcttaggttac

SEQ ID NO: 1577556 - DNA, 15 bp, Homo sapiens
gaatcttaggttaca

SEQ ID NO: 1577557 - DNA, 15 bp, Homo sapiens
aatcttaggttacac

SEQ ID NO: 1577558 - DNA, 15 bp, Homo sapiens
atcttaggttacact

SEQ ID NO: 1577559 - DNA, 15 bp, Homo sapiens
tcttaggttacactc

SEQ ID NO: 1577560 - DNA, 15 bp, Homo sapiens
cttaggttacactca

SEQ ID NO: 1577561 - DNA, 15 bp, Homo sapiens
ttaggttacactcat

SEQ ID NO: 1577562 - DNA, 15 bp, Homo sapiens
taggttacactcatg

SEQ ID NO: 1577563 - DNA, 15 bp, Homo sapiens
aggttacactcatgc

SEQ ID NO: 1577564 - DNA, 15 bp, Homo sapiens
ggttacactcatgct

SEQ ID NO: 1577565 - DNA, 15 bp, Homo sapiens
gttacactcatgctt

SEQ ID NO: 1577566 - DNA, 15 bp, Homo sapiens
ttacactcatgcttt

SEQ ID NO: 1577567 - DNA, 15 bp, Homo sapiens
tacactcatgctttc

SEQ ID NO: 1577568 - DNA, 15 bp, Homo sapiens
acactcatgctttcc

SEQ ID NO: 1577569 - DNA, 15 bp, Homo sapiens
cactcatgctttcct

SEQ ID NO: 1577570 - DNA, 15 bp, Homo sapiens
actcatgctttcctt

SEQ ID NO: 1577571 - DNA, 15 bp, Homo sapiens
ctcatgctttcctta

SEQ ID NO: 1577572 - DNA, 15 bp, Homo sapiens
tcatgctttccttat

SEQ ID NO: 1577573 - DNA, 15 bp, Homo sapiens
catgctttccttatt

SEQ ID NO: 1577574 - DNA, 15 bp, Homo sapiens
atgctttccttattt

SEQ ID NO: 1577575 - DNA, 15 bp, Homo sapiens
tgctttccttatttc

SEQ ID NO: 1577576 - DNA, 15 bp, Homo sapiens
gctttccttatttct

SEQ ID NO: 1577577 - DNA, 15 bp, Homo sapiens
ctttccttatttctt

SEQ ID NO: 1577578 - DNA, 15 bp, Homo sapiens
tttccttatttcttc

SEQ ID NO: 1577579 - DNA, 15 bp, Homo sapiens
ttccttatttcttcc

SEQ ID NO: 1577580 - DNA, 15 bp, Homo sapiens
tccttatttcttcct

SEQ ID NO: 1577581 - DNA, 15 bp, Homo sapiens
ccttatttcttcctg

SEQ ID NO: 1577582 - DNA, 15 bp, Homo sapiens
cttatttcttcctgc

SEQ ID NO: 1577583 - DNA, 15 bp, Homo sapiens
ttatttcttcctgca

SEQ ID NO: 1577584 - DNA, 15 bp, Homo sapiens
tatttcttcctgcat

SEQ ID NO: 1577585 - DNA, 15 bp, Homo sapiens
atttcttcctgcatg

SEQ ID NO: 1577586 - DNA, 15 bp, Homo sapiens
tttcttcctgcatgc

SEQ ID NO: 1577587 - DNA, 15 bp, Homo sapiens
ttcttcctgcatgca

SEQ ID NO: 1577588 - DNA, 15 bp, Homo sapiens
tcttcctgcatgcag

SEQ ID NO: 1577589 - DNA, 15 bp, Homo sapiens
cttcctgcatgcaga

SEQ ID NO: 1577590 - DNA, 15 bp, Homo sapiens
ttcctgcatgcagat

SEQ ID NO: 1577591 - DNA, 15 bp, Homo sapiens
tcctgcatgcagata

SEQ ID NO: 1577592 - DNA, 15 bp, Homo sapiens
cctgcatgcagatat

SEQ ID NO: 1577593 - DNA, 15 bp, Homo sapiens
ctgcatgcagatatt

SEQ ID NO: 1577594 - DNA, 15 bp, Homo sapiens
tgcatgcagatattc

SEQ ID NO: 1577595 - DNA, 15 bp, Homo sapiens
gcatgcagatattcc

SEQ ID NO: 1577596 - DNA, 15 bp, Homo sapiens
catgcagatattcca

SEQ ID NO: 1577597 - DNA, 15 bp, Homo sapiens
atgcagatattccag

SEQ ID NO: 1577598 - DNA, 15 bp, Homo sapiens
tgcagatattccagt

SEQ ID NO: 1577599 - DNA, 15 bp, Homo sapiens
gcagatattccagta

SEQ ID NO: 1577600 - DNA, 15 bp, Homo sapiens
cagatattccagtaa

SEQ ID NO: 1577601 - DNA, 15 bp, Homo sapiens
agatattccagtaaa

SEQ ID NO: 1577602 - DNA, 15 bp, Homo sapiens
gatattccagtaaag

SEQ ID NO: 1577603 - DNA, 15 bp, Homo sapiens
atattccagtaaaga

SEQ ID NO: 1577604 - DNA, 15 bp, Homo sapiens
tattccagtaaagaa

SEQ ID NO: 1577605 - DNA, 15 bp, Homo sapiens
attccagtaaagaac

SEQ ID NO: 1577606 - DNA, 15 bp, Homo sapiens
ttccagtaaagaaca

SEQ ID NO: 1577607 - DNA, 15 bp, Homo sapiens
tccagtaaagaacag

SEQ ID NO: 1577608 - DNA, 15 bp, Homo sapiens
ccagtaaagaacagt

SEQ ID NO: 1577609 - DNA, 15 bp, Homo sapiens
cagtaaagaacagtg

SEQ ID NO: 1577610 - DNA, 15 bp, Homo sapiens
agtaaagaacagtga

SEQ ID NO: 1577611 - DNA, 15 bp, Homo sapiens
gtaaagaacagtgac

SEQ ID NO: 1577612 - DNA, 15 bp, Homo sapiens
taaagaacagtgaca

SEQ ID NO: 1577613 - DNA, 15 bp, Homo sapiens
aaagaacagtgacat

SEQ ID NO: 1577614 - DNA, 15 bp, Homo sapiens
aagaacagtgacata

SEQ ID NO: 1577615 - DNA, 15 bp, Homo sapiens
agaacagtgacatac

SEQ ID NO: 1577616 - DNA, 15 bp, Homo sapiens
gaacagtgacatacc

SEQ ID NO: 1577617 - DNA, 15 bp, Homo sapiens
aacagtgacatacct

SEQ ID NO: 1577618 - DNA, 15 bp, Homo sapiens
acagtgacataccta

SEQ ID NO: 1577619 - DNA, 15 bp, Homo sapiens
cagtgacatacctag

SEQ ID NO: 1577620 - DNA, 15 bp, Homo sapiens
agtgacatacctagc

SEQ ID NO: 1577621 - DNA, 15 bp, Homo sapiens
gtgacatacctagca

SEQ ID NO: 1577622 - DNA, 15 bp, Homo sapiens
tgacatacctagcat

SEQ ID NO: 1577623 - DNA, 15 bp, Homo sapiens
gacatacctagcata

SEQ ID NO: 1577624 - DNA, 15 bp, Homo sapiens
acatacctagcatat

SEQ ID NO: 1577625 - DNA, 15 bp, Homo sapiens
catacctagcatata

SEQ ID NO: 1577626 - DNA, 15 bp, Homo sapiens
atacctagcatatag

SEQ ID NO: 1577627 - DNA, 15 bp, Homo sapiens
tacctagcatatagg

SEQ ID NO: 1577628 - DNA, 15 bp, Homo sapiens
acctagcatatagga

SEQ ID NO: 1577629 - DNA, 15 bp, Homo sapiens
cctagcatataggac

SEQ ID NO: 1577630 - DNA, 15 bp, Homo sapiens
ctagcatataggacg

SEQ ID NO: 1577631 - DNA, 15 bp, Homo sapiens
tagcatataggacgt

SEQ ID NO: 1577632 - DNA, 15 bp, Homo sapiens
agcatataggacgtc

SEQ ID NO: 1577633 - DNA, 15 bp, Homo sapiens
gcatataggacgtcc

SEQ ID NO: 1577634 - DNA, 15 bp, Homo sapiens
catataggacgtcca

SEQ ID NO: 1577635 - DNA, 15 bp, Homo sapiens
atataggacgtccag

SEQ ID NO: 1577636 - DNA, 15 bp, Homo sapiens
tataggacgtccaga

SEQ ID NO: 1577637 - DNA, 15 bp, Homo sapiens
ataggacgtccagag

SEQ ID NO: 1577638 - DNA, 15 bp, Homo sapiens
taggacgtccagagt

SEQ ID NO: 1577639 - DNA, 15 bp, Homo sapiens
aggacgtccagagta

SEQ ID NO: 1577640 - DNA, 15 bp, Homo sapiens
ggacgtccagagtag

SEQ ID NO: 1577641 - DNA, 15 bp, Homo sapiens
gacgtccagagtaga

SEQ ID NO: 1577642 - DNA, 15 bp, Homo sapiens
acgtccagagtagat

SEQ ID NO: 1577643 - DNA, 15 bp, Homo sapiens
cgtccagagtagata

SEQ ID NO: 1577644 - DNA, 15 bp, Homo sapiens
gtccagagtagataa

SEQ ID NO: 1577645 - DNA, 15 bp, Homo sapiens
tccagagtagataat

SEQ ID NO: 1577646 - DNA, 15 bp, Homo sapiens
ccagagtagataatt

SEQ ID NO: 1577647 - DNA, 15 bp, Homo sapiens
cagagtagataattt

SEQ ID NO: 1577648 - DNA, 15 bp, Homo sapiens
agagtagataatttt

SEQ ID NO: 1577649 - DNA, 15 bp, Homo sapiens
gagtagataattttt

SEQ ID NO: 1577650 - DNA, 15 bp, Homo sapiens
agtagataatttttt

SEQ ID NO: 1577651 - DNA, 15 bp, Homo sapiens
gtagataatttttta

SEQ ID NO: 1577652 - DNA, 15 bp, Homo sapiens
tagataattttttaa

SEQ ID NO: 1577653 - DNA, 15 bp, Homo sapiens
agataattttttaac

SEQ ID NO: 1577654 - DNA, 15 bp, Homo sapiens
gataattttttaaca

SEQ ID NO: 1577655 - DNA, 15 bp, Homo sapiens
ataattttttaacat

SEQ ID NO: 1577656 - DNA, 15 bp, Homo sapiens
taattttttaacatt

SEQ ID NO: 1577657 - DNA, 15 bp, Homo sapiens
aattttttaacattt

SEQ ID NO: 1577658 - DNA, 15 bp, Homo sapiens
attttttaacatttt

SEQ ID NO: 1577659 - DNA, 15 bp, Homo sapiens
ttttttaacattttt

SEQ ID NO: 1577660 - DNA, 15 bp, Homo sapiens
tttttaacatttttc

SEQ ID NO: 1577661 - DNA, 15 bp, Homo sapiens
ttttaacatttttca

SEQ ID NO: 1577662 - DNA, 15 bp, Homo sapiens
tttaacatttttcac

SEQ ID NO: 1577663 - DNA, 15 bp, Homo sapiens
ttaacatttttcacc

SEQ ID NO: 1577664 - DNA, 15 bp, Homo sapiens
taacatttttcacct

SEQ ID NO: 1577665 - DNA, 15 bp, Homo sapiens
aacatttttcacctc

SEQ ID NO: 1577666 - DNA, 15 bp, Homo sapiens
acatttttcacctct

SEQ ID NO: 1577667 - DNA, 15 bp, Homo sapiens
catttttcacctcta

SEQ ID NO: 1577668 - DNA, 15 bp, Homo sapiens
atttttcacctctat

SEQ ID NO: 1577669 - DNA, 15 bp, Homo sapiens
tttttcacctctatg

SEQ ID NO: 1577670 - DNA, 15 bp, Homo sapiens
ttttcacctctatga

SEQ ID NO: 1577671 - DNA, 15 bp, Homo sapiens
tttcacctctatgac

SEQ ID NO: 1577672 - DNA, 15 bp, Homo sapiens
ttcacctctatgaca

SEQ ID NO: 1577673 - DNA, 15 bp, Homo sapiens
tcacctctatgacaa

SEQ ID NO: 1577674 - DNA, 15 bp, Homo sapiens
cacctctatgacaaa

SEQ ID NO: 1577675 - DNA, 15 bp, Homo sapiens
acctctatgacaaaa

SEQ ID NO: 1577676 - DNA, 15 bp, Homo sapiens
cctctatgacaaaat

SEQ ID NO: 1577677 - DNA, 15 bp, Homo sapiens
ctctatgacaaaatc

SEQ ID NO: 1577678 - DNA, 15 bp, Homo sapiens
tctatgacaaaatca

SEQ ID NO: 1577679 - DNA, 15 bp, Homo sapiens
ctatgacaaaatcat

SEQ ID NO: 1577680 - DNA, 15 bp, Homo sapiens
tatgacaaaatcatt

SEQ ID NO: 1577681 - DNA, 15 bp, Homo sapiens
atgacaaaatcattt

SEQ ID NO: 1577682 - DNA, 15 bp, Homo sapiens
tgacaaaatcatttt

SEQ ID NO: 1577683 - DNA, 15 bp, Homo sapiens
gacaaaatcattttc

SEQ ID NO: 1577684 - DNA, 15 bp, Homo sapiens
acaaaatcattttca

SEQ ID NO: 1577685 - DNA, 15 bp, Homo sapiens
caaaatcattttcaa

SEQ ID NO: 1577686 - DNA, 15 bp, Homo sapiens
aaaatcattttcaat

SEQ ID NO: 1577687 - DNA, 15 bp, Homo sapiens
aaatcattttcaata

SEQ ID NO: 1577688 - DNA, 15 bp, Homo sapiens
aatcattttcaataa

SEQ ID NO: 1577689 - DNA, 15 bp, Homo sapiens
atcattttcaataat

SEQ ID NO: 1577690 - DNA, 15 bp, Homo sapiens
tcattttcaataata

SEQ ID NO: 1577691 - DNA, 15 bp, Homo sapiens
cattttcaataataa

SEQ ID NO: 1577692 - DNA, 15 bp, Homo sapiens
attttcaataataat

SEQ ID NO: 1577693 - DNA, 15 bp, Homo sapiens
ttttcaataataatc

SEQ ID NO: 1577694 - DNA, 15 bp, Homo sapiens
tttcaataataatca

SEQ ID NO: 1577695 - DNA, 15 bp, Homo sapiens
ttcaataataatcat

SEQ ID NO: 1577696 - DNA, 15 bp, Homo sapiens
tcaataataatcata

SEQ ID NO: 1577697 - DNA, 15 bp, Homo sapiens
caataataatcatat

SEQ ID NO: 1577698 - DNA, 15 bp, Homo sapiens
aataataatcatata

SEQ ID NO: 1577699 - DNA, 15 bp, Homo sapiens
ataataatcatataa

SEQ ID NO: 1577700 - DNA, 15 bp, Homo sapiens
taataatcatataat

SEQ ID NO: 1577701 - DNA, 15 bp, Homo sapiens
aataatcatataata

SEQ ID NO: 1577702 - DNA, 15 bp, Homo sapiens
ataatcatataataa

SEQ ID NO: 1577703 - DNA, 15 bp, Homo sapiens
taatcatataataat

SEQ ID NO: 1577704 - DNA, 15 bp, Homo sapiens
aatcatataataatt

SEQ ID NO: 1577705 - DNA, 15 bp, Homo sapiens
atcatataataatta

SEQ ID NO: 1577706 - DNA, 15 bp, Homo sapiens
tcatataataattag

SEQ ID NO: 1577707 - DNA, 15 bp, Homo sapiens
catataataattagg

SEQ ID NO: 1577708 - DNA, 15 bp, Homo sapiens
atataataattagga

SEQ ID NO: 1577709 - DNA, 15 bp, Homo sapiens
tataataattaggaa

SEQ ID NO: 1577710 - DNA, 15 bp, Homo sapiens
ataataattaggaat

SEQ ID NO: 1577711 - DNA, 15 bp, Homo sapiens
taataattaggaata

SEQ ID NO: 1577712 - DNA, 15 bp, Homo sapiens
aataattaggaataa

SEQ ID NO: 1577713 - DNA, 15 bp, Homo sapiens
ataattaggaataat

SEQ ID NO: 1577714 - DNA, 15 bp, Homo sapiens
taattaggaataatt

SEQ ID NO: 1577715 - DNA, 15 bp, Homo sapiens
aattaggaataatta

SEQ ID NO: 1577716 - DNA, 15 bp, Homo sapiens
attaggaataattat

SEQ ID NO: 1577717 - DNA, 15 bp, Homo sapiens
ttaggaataattatt

SEQ ID NO: 1577718 - DNA, 15 bp, Homo sapiens
taggaataattattt

SEQ ID NO: 1577719 - DNA, 15 bp, Homo sapiens
aggaataattatttt

SEQ ID NO: 1577720 - DNA, 15 bp, Homo sapiens
ggaataattattttc

SEQ ID NO: 1577721 - DNA, 15 bp, Homo sapiens
gaataattattttct

SEQ ID NO: 1577722 - DNA, 15 bp, Homo sapiens
aataattattttctt

SEQ ID NO: 1577723 - DNA, 15 bp, Homo sapiens
ataattattttcttg

SEQ ID NO: 1577724 - DNA, 15 bp, Homo sapiens
taattattttcttgc

SEQ ID NO: 1577725 - DNA, 15 bp, Homo sapiens
aattattttcttgct

SEQ ID NO: 1577726 - DNA, 15 bp, Homo sapiens
attattttcttgctt

SEQ ID NO: 1577727 - DNA, 15 bp, Homo sapiens
ttattttcttgcttt

SEQ ID NO: 1577728 - DNA, 15 bp, Homo sapiens
tattttcttgctttt

SEQ ID NO: 1577729 - DNA, 15 bp, Homo sapiens
attttcttgcttttg

SEQ ID NO: 1577730 - DNA, 15 bp, Homo sapiens
ttttcttgcttttgt

SEQ ID NO: 1577731 - DNA, 15 bp, Homo sapiens
tttcttgcttttgtc

SEQ ID NO: 1577732 - DNA, 15 bp, Homo sapiens
ttcttgcttttgtct

SEQ ID NO: 1577733 - DNA, 15 bp, Homo sapiens
tcttgcttttgtctg

SEQ ID NO: 1577734 - DNA, 15 bp, Homo sapiens
cttgcttttgtctgt

SEQ ID NO: 1577735 - DNA, 15 bp, Homo sapiens
ttgcttttgtctgta

SEQ ID NO: 1577736 - DNA, 15 bp, Homo sapiens
tgcttttgtctgtag

SEQ ID NO: 1577737 - DNA, 15 bp, Homo sapiens
gcttttgtctgtagt

SEQ ID NO: 1577738 - DNA, 15 bp, Homo sapiens
cttttgtctgtagtg

SEQ ID NO: 1577739 - DNA, 15 bp, Homo sapiens
ttttgtctgtagtgg

SEQ ID NO: 1577740 - DNA, 15 bp, Homo sapiens
tttgtctgtagtggg

SEQ ID NO: 1577741 - DNA, 15 bp, Homo sapiens
ttgtctgtagtggga

SEQ ID NO: 1577742 - DNA, 15 bp, Homo sapiens
tgtctgtagtgggaa

SEQ ID NO: 1577743 - DNA, 15 bp, Homo sapiens
gtctgtagtgggaaa

SEQ ID NO: 1577744 - DNA, 15 bp, Homo sapiens
tctgtagtgggaaaa

SEQ ID NO: 1577745 - DNA, 15 bp, Homo sapiens
ctgtagtgggaaaac

SEQ ID NO: 1577746 - DNA, 15 bp, Homo sapiens
tgtagtgggaaaaca

SEQ ID NO: 1577747 - DNA, 15 bp, Homo sapiens
gtagtgggaaaacaa

SEQ ID NO: 1577748 - DNA, 15 bp, Homo sapiens
tagtgggaaaacaat

SEQ ID NO: 1577749 - DNA, 15 bp, Homo sapiens
agtgggaaaacaata

SEQ ID NO: 1577750 - DNA, 15 bp, Homo sapiens
gtgggaaaacaatat

SEQ ID NO: 1577751 - DNA, 15 bp, Homo sapiens
tgggaaaacaatatt

SEQ ID NO: 1577752 - DNA, 15 bp, Homo sapiens
gggaaaacaatattt

SEQ ID NO: 1577753 - DNA, 15 bp, Homo sapiens
ggaaaacaatatttt

SEQ ID NO: 1577754 - DNA, 15 bp, Homo sapiens
gaaaacaatatttta

SEQ ID NO: 1577755 - DNA, 15 bp, Homo sapiens
aaaacaatattttag

SEQ ID NO: 1577756 - DNA, 15 bp, Homo sapiens
aaacaatattttaga

SEQ ID NO: 1577757 - DNA, 15 bp, Homo sapiens
aacaatattttagaa

SEQ ID NO: 1577758 - DNA, 15 bp, Homo sapiens
acaatattttagaag

SEQ ID NO: 1577759 - DNA, 15 bp, Homo sapiens
caatattttagaaga

SEQ ID NO: 1577760 - DNA, 15 bp, Homo sapiens
aatattttagaagaa

SEQ ID NO: 1577761 - DNA, 15 bp, Homo sapiens
atattttagaagaat

SEQ ID NO: 1577762 - DNA, 15 bp, Homo sapiens
tattttagaagaata

SEQ ID NO: 1577763 - DNA, 15 bp, Homo sapiens
attttagaagaatac

SEQ ID NO: 1577764 - DNA, 15 bp, Homo sapiens
ttttagaagaataca

SEQ ID NO: 1577765 - DNA, 15 bp, Homo sapiens
tttagaagaatacat

SEQ ID NO: 1577766 - DNA, 15 bp, Homo sapiens
ttagaagaatacatt

SEQ ID NO: 1577767 - DNA, 15 bp, Homo sapiens
tagaagaatacattt

SEQ ID NO: 1577768 - DNA, 15 bp, Homo sapiens
agaagaatacatttc

SEQ ID NO: 1577769 - DNA, 15 bp, Homo sapiens
gaagaatacatttcc

SEQ ID NO: 1577770 - DNA, 15 bp, Homo sapiens
aagaatacatttcca

SEQ ID NO: 1577771 - DNA, 15 bp, Homo sapiens
agaatacatttccac

SEQ ID NO: 1577772 - DNA, 15 bp, Homo sapiens
gaatacatttccact

SEQ ID NO: 1577773 - DNA, 15 bp, Homo sapiens
aatacatttccactt

SEQ ID NO: 1577774 - DNA, 15 bp, Homo sapiens
atacatttccacttt

SEQ ID NO: 1577775 - DNA, 15 bp, Homo sapiens
tacatttccacttta

SEQ ID NO: 1577776 - DNA, 15 bp, Homo sapiens
acatttccactttaa

SEQ ID NO: 1577777 - DNA, 15 bp, Homo sapiens
catttccactttaaa

SEQ ID NO: 1577778 - DNA, 15 bp, Homo sapiens
atttccactttaaat

SEQ ID NO: 1577779 - DNA, 15 bp, Homo sapiens
tttccactttaaata

SEQ ID NO: 1577780 - DNA, 15 bp, Homo sapiens
ttccactttaaatat

SEQ ID NO: 1577781 - DNA, 15 bp, Homo sapiens
tccactttaaatata

SEQ ID NO: 1577782 - DNA, 15 bp, Homo sapiens
ccactttaaatataa

SEQ ID NO: 1577783 - DNA, 15 bp, Homo sapiens
cactttaaatataat

SEQ ID NO: 1577784 - DNA, 15 bp, Homo sapiens
actttaaatataatg

SEQ ID NO: 1577785 - DNA, 15 bp, Homo sapiens
ctttaaatataatgt

SEQ ID NO: 1577786 - DNA, 15 bp, Homo sapiens
tttaaatataatgtg

SEQ ID NO: 1577787 - DNA, 15 bp, Homo sapiens
ttaaatataatgtgg

SEQ ID NO: 1577788 - DNA, 15 bp, Homo sapiens
taaatataatgtgga

SEQ ID NO: 1577789 - DNA, 15 bp, Homo sapiens
aaatataatgtggaa

SEQ ID NO: 1577790 - DNA, 15 bp, Homo sapiens
aatataatgtggaaa

SEQ ID NO: 1577791 - DNA, 15 bp, Homo sapiens
atataatgtggaaat

SEQ ID NO: 1577792 - DNA, 15 bp, Homo sapiens
tataatgtggaaatt

SEQ ID NO: 1577793 - DNA, 15 bp, Homo sapiens
ataatgtggaaattc

SEQ ID NO: 1577794 - DNA, 15 bp, Homo sapiens
taatgtggaaattca

SEQ ID NO: 1577795 - DNA, 15 bp, Homo sapiens
aatgtggaaattcag

SEQ ID NO: 1577796 - DNA, 15 bp, Homo sapiens
atgtggaaattcagt

SEQ ID NO: 1577797 - DNA, 15 bp, Homo sapiens
tgtggaaattcagta

SEQ ID NO: 1577798 - DNA, 15 bp, Homo sapiens
gtggaaattcagtaa

SEQ ID NO: 1577799 - DNA, 15 bp, Homo sapiens
tggaaattcagtaaa

SEQ ID NO: 1577800 - DNA, 15 bp, Homo sapiens
ggaaattcagtaaac

SEQ ID NO: 1577801 - DNA, 15 bp, Homo sapiens
gaaattcagtaaacc

SEQ ID NO: 1577802 - DNA, 15 bp, Homo sapiens
aaattcagtaaacca

SEQ ID NO: 1577803 - DNA, 15 bp, Homo sapiens
aattcagtaaaccat

SEQ ID NO: 1577804 - DNA, 15 bp, Homo sapiens
attcagtaaaccatt

SEQ ID NO: 1577805 - DNA, 15 bp, Homo sapiens
ttcagtaaaccattt

SEQ ID NO: 1577806 - DNA, 15 bp, Homo sapiens
tcagtaaaccatttc

SEQ ID NO: 1577807 - DNA, 15 bp, Homo sapiens
cagtaaaccatttca

SEQ ID NO: 1577808 - DNA, 15 bp, Homo sapiens
agtaaaccatttcat

SEQ ID NO: 1577809 - DNA, 15 bp, Homo sapiens
gtaaaccatttcata

SEQ ID NO: 1577810 - DNA, 15 bp, Homo sapiens
taaaccatttcatat

SEQ ID NO: 1577811 - DNA, 15 bp, Homo sapiens
aaaccatttcatatg

SEQ ID NO: 1577812 - DNA, 15 bp, Homo sapiens
aaccatttcatatgt

SEQ ID NO: 1577813 - DNA, 15 bp, Homo sapiens
accatttcatatgtg

SEQ ID NO: 1577814 - DNA, 15 bp, Homo sapiens
ccatttcatatgtga

SEQ ID NO: 1577815 - DNA, 15 bp, Homo sapiens
catttcatatgtgaa

SEQ ID NO: 1577816 - DNA, 15 bp, Homo sapiens
atttcatatgtgaac

SEQ ID NO: 1577817 - DNA, 15 bp, Homo sapiens
tttcatatgtgaacc

SEQ ID NO: 1577818 - DNA, 15 bp, Homo sapiens
ttcatatgtgaacca

SEQ ID NO: 1577819 - DNA, 15 bp, Homo sapiens
tcatatgtgaaccag

SEQ ID NO: 1577820 - DNA, 15 bp, Homo sapiens
catatgtgaaccaga

SEQ ID NO: 1577821 - DNA, 15 bp, Homo sapiens
atatgtgaaccagat

SEQ ID NO: 1577822 - DNA, 15 bp, Homo sapiens
tatgtgaaccagatt

SEQ ID NO: 1577823 - DNA, 15 bp, Homo sapiens
atgtgaaccagattt

SEQ ID NO: 1577824 - DNA, 15 bp, Homo sapiens
tgtgaaccagatttt

SEQ ID NO: 1577825 - DNA, 15 bp, Homo sapiens
gtgaaccagattttc

SEQ ID NO: 1577826 - DNA, 15 bp, Homo sapiens
tgaaccagattttca

SEQ ID NO: 1577827 - DNA, 15 bp, Homo sapiens
gaaccagattttcac

SEQ ID NO: 1577828 - DNA, 15 bp, Homo sapiens
aaccagattttcact

SEQ ID NO: 1577829 - DNA, 15 bp, Homo sapiens
accagattttcactt

SEQ ID NO: 1577830 - DNA, 15 bp, Homo sapiens
ccagattttcactta

SEQ ID NO: 1577831 - DNA, 15 bp, Homo sapiens
cagattttcacttac

SEQ ID NO: 1577832 - DNA, 15 bp, Homo sapiens
agattttcacttacc

SEQ ID NO: 1577833 - DNA, 15 bp, Homo sapiens
gattttcacttacca

SEQ ID NO: 1577834 - DNA, 15 bp, Homo sapiens
attttcacttaccaa

SEQ ID NO: 1577835 - DNA, 15 bp, Homo sapiens
ttttcacttaccaag

SEQ ID NO: 1577836 - DNA, 15 bp, Homo sapiens
tttcacttaccaaga

SEQ ID NO: 1577837 - DNA, 15 bp, Homo sapiens
ttcacttaccaagaa

SEQ ID NO: 1577838 - DNA, 15 bp, Homo sapiens
tcacttaccaagaaa

SEQ ID NO: 1577839 - DNA, 15 bp, Homo sapiens
cacttaccaagaaaa

SEQ ID NO: 1577840 - DNA, 15 bp, Homo sapiens
acttaccaagaaaaa

SEQ ID NO: 1577841 - DNA, 15 bp, Homo sapiens
cttaccaagaaaaag

SEQ ID NO: 1577842 - DNA, 15 bp, Homo sapiens
ttaccaagaaaaagt

SEQ ID NO: 1577843 - DNA, 15 bp, Homo sapiens
taccaagaaaaagtc

SEQ ID NO: 1577844 - DNA, 15 bp, Homo sapiens
accaagaaaaagtct

SEQ ID NO: 1577845 - DNA, 15 bp, Homo sapiens
ccaagaaaaagtctt

SEQ ID NO: 1577846 - DNA, 15 bp, Homo sapiens
caagaaaaagtctta

SEQ ID NO: 1577847 - DNA, 15 bp, Homo sapiens
aagaaaaagtcttac

SEQ ID NO: 1577848 - DNA, 15 bp, Homo sapiens
agaaaaagtcttaca

SEQ ID NO: 1577849 - DNA, 15 bp, Homo sapiens
gaaaaagtcttacat

SEQ ID NO: 1577850 - DNA, 15 bp, Homo sapiens
aaaaagtcttacatc

SEQ ID NO: 1577851 - DNA, 15 bp, Homo sapiens
aaaagtcttacatct

SEQ ID NO: 1577852 - DNA, 15 bp, Homo sapiens
aaagtcttacatctt

SEQ ID NO: 1577853 - DNA, 15 bp, Homo sapiens
aagtcttacatcttg

SEQ ID NO: 1577854 - DNA, 15 bp, Homo sapiens
agtcttacatcttgc

SEQ ID NO: 1577855 - DNA, 15 bp, Homo sapiens
gtcttacatcttgca

SEQ ID NO: 1577856 - DNA, 15 bp, Homo sapiens
tcttacatcttgcag

SEQ ID NO: 1577857 - DNA, 15 bp, Homo sapiens
cttacatcttgcaga

SEQ ID NO: 1577858 - DNA, 15 bp, Homo sapiens
ttacatcttgcagat

SEQ ID NO: 1577859 - DNA, 15 bp, Homo sapiens
tacatcttgcagatt

SEQ ID NO: 1577860 - DNA, 15 bp, Homo sapiens
acatcttgcagattg

SEQ ID NO: 1577861 - DNA, 15 bp, Homo sapiens
catcttgcagattgc

SEQ ID NO: 1577862 - DNA, 15 bp, Homo sapiens
atcttgcagattgca

SEQ ID NO: 1577863 - DNA, 15 bp, Homo sapiens
tcttgcagattgcag

SEQ ID NO: 1577864 - DNA, 15 bp, Homo sapiens
cttgcagattgcagt

SEQ ID NO: 1577865 - DNA, 15 bp, Homo sapiens
ttgcagattgcagtg

SEQ ID NO: 1577866 - DNA, 15 bp, Homo sapiens
tgcagattgcagtgt

SEQ ID NO: 1577867 - DNA, 15 bp, Homo sapiens
gcagattgcagtgtt

SEQ ID NO: 1577868 - DNA, 15 bp, Homo sapiens
cagattgcagtgttt

SEQ ID NO: 1577869 - DNA, 15 bp, Homo sapiens
agattgcagtgtttg

SEQ ID NO: 1577870 - DNA, 15 bp, Homo sapiens
gattgcagtgtttgc

SEQ ID NO: 1577871 - DNA, 15 bp, Homo sapiens
attgcagtgtttgct

SEQ ID NO: 1577872 - DNA, 15 bp, Homo sapiens
ttgcagtgtttgctg

SEQ ID NO: 1577873 - DNA, 15 bp, Homo sapiens
tgcagtgtttgctgt

SEQ ID NO: 1577874 - DNA, 15 bp, Homo sapiens
gcagtgtttgctgtt

SEQ ID NO: 1577875 - DNA, 15 bp, Homo sapiens
cagtgtttgctgttt

SEQ ID NO: 1577876 - DNA, 15 bp, Homo sapiens
agtgtttgctgtttt

SEQ ID NO: 1577877 - DNA, 15 bp, Homo sapiens
gtgtttgctgttttc

SEQ ID NO: 1577878 - DNA, 15 bp, Homo sapiens
tgtttgctgttttcc

SEQ ID NO: 1577879 - DNA, 15 bp, Homo sapiens
gtttgctgttttcca

SEQ ID NO: 1577880 - DNA, 15 bp, Homo sapiens
tttgctgttttccat

SEQ ID NO: 1577881 - DNA, 15 bp, Homo sapiens
ttgctgttttccatt

SEQ ID NO: 1577882 - DNA, 15 bp, Homo sapiens
tgctgttttccattt

SEQ ID NO: 1577883 - DNA, 15 bp, Homo sapiens
gctgttttccatttt

SEQ ID NO: 1577884 - DNA, 15 bp, Homo sapiens
ctgttttccatttta

SEQ ID NO: 1577885 - DNA, 15 bp, Homo sapiens
tgttttccattttaa

SEQ ID NO: 1577886 - DNA, 15 bp, Homo sapiens
gttttccattttaaa

SEQ ID NO: 1577887 - DNA, 15 bp, Homo sapiens
ttttccattttaaat

SEQ ID NO: 1577888 - DNA, 15 bp, Homo sapiens
cattttaaatacaaa

SEQ ID NO: 1577889 - DNA, 15 bp, Homo sapiens
attttaaatacaaat

SEQ ID NO: 1577890 - DNA, 15 bp, Homo sapiens
ttttaaatacaaata

SEQ ID NO: 1577891 - DNA, 15 bp, Homo sapiens
tttaaatacaaataa

SEQ ID NO: 1577892 - DNA, 15 bp, Homo sapiens
ttaaatacaaataaa

SEQ ID NO: 1577893 - DNA, 15 bp, Homo sapiens
taaatacaaataaaa

SEQ ID NO: 1577894 - DNA, 15 bp, Homo sapiens
aaatacaaataaaaa

SEQ ID NO: 1577895 - DNA, 15 bp, Homo sapiens
aatacaaataaaaag

SEQ ID NO: 1577896 - DNA, 15 bp, Homo sapiens
atacaaataaaaagt

SEQ ID NO: 1577897 - DNA, 15 bp, Homo sapiens
tacaaataaaaagtc

SEQ ID NO: 1577898 - DNA, 15 bp, Homo sapiens
acaaataaaaagtcc

SEQ ID NO: 1577899 - DNA, 15 bp, Homo sapiens
caaataaaaagtcca

SEQ ID NO: 1577900 - DNA, 15 bp, Homo sapiens
aaataaaaagtccaa

SEQ ID NO: 1577901 - DNA, 15 bp, Homo sapiens
aataaaaagtccaaa

SEQ ID NO: 1577902 - DNA, 15 bp, Homo sapiens
ataaaaagtccaaat

SEQ ID NO: 1577903 - DNA, 15 bp, Homo sapiens
taaaaagtccaaatt

SEQ ID NO: 1577904 - DNA, 15 bp, Homo sapiens
aaaaagtccaaattg

SEQ ID NO: 1577905 - DNA, 15 bp, Homo sapiens
aaaagtccaaattgt

SEQ ID NO: 1577906 - DNA, 15 bp, Homo sapiens
aaagtccaaattgtc

SEQ ID NO: 1577907 - DNA, 15 bp, Homo sapiens
aagtccaaattgtca

SEQ ID NO: 1577908 - DNA, 15 bp, Homo sapiens
agtccaaattgtcac

SEQ ID NO: 1577909 - DNA, 15 bp, Homo sapiens
gtccaaattgtcaca

SEQ ID NO: 1577910 - DNA, 15 bp, Homo sapiens
tccaaattgtcacac

SEQ ID NO: 1577911 - DNA, 15 bp, Homo sapiens
ccaaattgtcacaca

SEQ ID NO: 1577912 - DNA, 15 bp, Homo sapiens
caaattgtcacacag

SEQ ID NO: 1577913 - DNA, 15 bp, Homo sapiens
aaattgtcacacaga

SEQ ID NO: 1577914 - DNA, 15 bp, Homo sapiens
aattgtcacacagaa

SEQ ID NO: 1577915 - DNA, 15 bp, Homo sapiens
attgtcacacagaat

SEQ ID NO: 1577916 - DNA, 15 bp, Homo sapiens
ttgtcacacagaatg

SEQ ID NO: 1577917 - DNA, 15 bp, Homo sapiens
tgtcacacagaatga

SEQ ID NO: 1577918 - DNA, 15 bp, Homo sapiens
gtcacacagaatgac

SEQ ID NO: 1577919 - DNA, 15 bp, Homo sapiens
tcacacagaatgaca

SEQ ID NO: 1577920 - DNA, 15 bp, Homo sapiens
cacacagaatgacaa

SEQ ID NO: 1577921 - DNA, 15 bp, Homo sapiens
acacagaatgacaag

SEQ ID NO: 1577922 - DNA, 15 bp, Homo sapiens
cacagaatgacaaga

SEQ ID NO: 1577923 - DNA, 15 bp, Homo sapiens
acagaatgacaagat

SEQ ID NO: 1577924 - DNA, 15 bp, Homo sapiens
cagaatgacaagatt

SEQ ID NO: 1577925 - DNA, 15 bp, Homo sapiens
agaatgacaagattg

SEQ ID NO: 1577926 - DNA, 15 bp, Homo sapiens
gaatgacaagattga

SEQ ID NO: 1577927 - DNA, 15 bp, Homo sapiens
aatgacaagattgaa

SEQ ID NO: 1577928 - DNA, 15 bp, Homo sapiens
atgacaagattgaaa

SEQ ID NO: 1577929 - DNA, 15 bp, Homo sapiens
tgacaagattgaaag

SEQ ID NO: 1577930 - DNA, 15 bp, Homo sapiens
acaagattgaaagaa

SEQ ID NO: 1577931 - DNA, 15 bp, Homo sapiens
caagattgaaagaac

SEQ ID NO: 1577932 - DNA, 15 bp, Homo sapiens
aagattgaaagaaca

SEQ ID NO: 1577933 - DNA, 15 bp, Homo sapiens
agattgaaagaacag

SEQ ID NO: 1577934 - DNA, 15 bp, Homo sapiens
gattgaaagaacagt

SEQ ID NO: 1577935 - DNA, 15 bp, Homo sapiens
attgaaagaacagta

SEQ ID NO: 1577936 - DNA, 15 bp, Homo sapiens
ttgaaagaacagtac

SEQ ID NO: 1577937 - DNA, 15 bp, Homo sapiens
tgaaagaacagtact

SEQ ID NO: 1577938 - DNA, 15 bp, Homo sapiens
gaaagaacagtactg

SEQ ID NO: 1577939 - DNA, 15 bp, Homo sapiens
aaagaacagtactgt

SEQ ID NO: 1577940 - DNA, 15 bp, Homo sapiens
aagaacagtactgtt

SEQ ID NO: 1577941 - DNA, 15 bp, Homo sapiens
agaacagtactgttt

SEQ ID NO: 1577942 - DNA, 15 bp, Homo sapiens
gaacagtactgtttc

SEQ ID NO: 1577943 - DNA, 15 bp, Homo sapiens
aacagtactgtttct

SEQ ID NO: 1577944 - DNA, 15 bp, Homo sapiens
acagtactgtttctt

SEQ ID NO: 1577945 - DNA, 15 bp, Homo sapiens
cagtactgtttcttt

SEQ ID NO: 1577946 - DNA, 15 bp, Homo sapiens
agtactgtttctttg

SEQ ID NO: 1577947 - DNA, 15 bp, Homo sapiens
gtactgtttctttgt

SEQ ID NO: 1577948 - DNA, 15 bp, Homo sapiens
tactgtttctttgtt

SEQ ID NO: 1577949 - DNA, 15 bp, Homo sapiens
actgtttctttgttt

SEQ ID NO: 1577950 - DNA, 15 bp, Homo sapiens
ctgtttctttgtttt

SEQ ID NO: 1577951 - DNA, 15 bp, Homo sapiens
tgtttctttgttttt

SEQ ID NO: 1577952 - DNA, 15 bp, Homo sapiens
gtttctttgttttta

SEQ ID NO: 1577953 - DNA, 15 bp, Homo sapiens
tttctttgtttttac

SEQ ID NO: 1577954 - DNA, 15 bp, Homo sapiens
ttctttgtttttaca

SEQ ID NO: 1577955 - DNA, 15 bp, Homo sapiens
tctttgtttttacaa

SEQ ID NO: 1577956 - DNA, 15 bp, Homo sapiens
ctttgtttttacaat

SEQ ID NO: 1577957 - DNA, 15 bp, Homo sapiens
tttgtttttacaatc

SEQ ID NO: 1577958 - DNA, 15 bp, Homo sapiens
ttgtttttacaatca

SEQ ID NO: 1577959 - DNA, 15 bp, Homo sapiens
tgtttttacaatcat

SEQ ID NO: 1577960 - DNA, 15 bp, Homo sapiens
gtttttacaatcatc

SEQ ID NO: 1577961 - DNA, 15 bp, Homo sapiens
tttttacaatcatct

SEQ ID NO: 1577962 - DNA, 15 bp, Homo sapiens
ttttacaatcatctg

SEQ ID NO: 1577963 - DNA, 15 bp, Homo sapiens
tttacaatcatctgg

SEQ ID NO: 1577964 - DNA, 15 bp, Homo sapiens
ttacaatcatctggc

SEQ ID NO: 1577965 - DNA, 15 bp, Homo sapiens
tacaatcatctggct

SEQ ID NO: 1577966 - DNA, 15 bp, Homo sapiens
acaatcatctggcta

SEQ ID NO: 1577967 - DNA, 15 bp, Homo sapiens
caatcatctggctat

SEQ ID NO: 1577968 - DNA, 15 bp, Homo sapiens
aatcatctggctatc

SEQ ID NO: 1577969 - DNA, 15 bp, Homo sapiens
atcatctggctatca

SEQ ID NO: 1577970 - DNA, 15 bp, Homo sapiens
tcatctggctatcat

SEQ ID NO: 1577971 - DNA, 15 bp, Homo sapiens
catctggctatcatt

SEQ ID NO: 1577972 - DNA, 15 bp, Homo sapiens
atctggctatcatta

SEQ ID NO: 1577973 - DNA, 15 bp, Homo sapiens
tctggctatcattat

SEQ ID NO: 1577974 - DNA, 15 bp, Homo sapiens
ctggctatcattatt

SEQ ID NO: 1577975 - DNA, 15 bp, Homo sapiens
tggctatcattattt

SEQ ID NO: 1577976 - DNA, 15 bp, Homo sapiens
ggctatcattatttg

SEQ ID NO: 1577977 - DNA, 15 bp, Homo sapiens
gctatcattatttgt

SEQ ID NO: 1577978 - DNA, 15 bp, Homo sapiens
ctatcattatttgtt

SEQ ID NO: 1577979 - DNA, 15 bp, Homo sapiens
tatcattatttgttt

SEQ ID NO: 1577980 - DNA, 15 bp, Homo sapiens
atcattatttgtttc

SEQ ID NO: 1577981 - DNA, 15 bp, Homo sapiens
tcattatttgtttca

SEQ ID NO: 1577982 - DNA, 15 bp, Homo sapiens
cattatttgtttcaa

SEQ ID NO: 1577983 - DNA, 15 bp, Homo sapiens
attatttgtttcaaa

SEQ ID NO: 1577984 - DNA, 15 bp, Homo sapiens
ttatttgtttcaaat

SEQ ID NO: 1577985 - DNA, 15 bp, Homo sapiens
atttgtttcaaatcc

SEQ ID NO: 1577986 - DNA, 15 bp, Homo sapiens
tttgtttcaaatcca

SEQ ID NO: 1577987 - DNA, 15 bp, Homo sapiens
ttgtttcaaatccac

SEQ ID NO: 1577988 - DNA, 15 bp, Homo sapiens
tgtttcaaatccact

SEQ ID NO: 1577989 - DNA, 15 bp, Homo sapiens
gtttcaaatccacta

SEQ ID NO: 1577990 - DNA, 15 bp, Homo sapiens
tttcaaatccactat

SEQ ID NO: 1577991 - DNA, 15 bp, Homo sapiens
ttcaaatccactatt

SEQ ID NO: 1577992 - DNA, 15 bp, Homo sapiens
tcaaatccactatta

SEQ ID NO: 1577993 - DNA, 15 bp, Homo sapiens
caaatccactattaa

SEQ ID NO: 1577994 - DNA, 15 bp, Homo sapiens
aaatccactattaaa

SEQ ID NO: 1577995 - DNA, 15 bp, Homo sapiens
aatccactattaaaa

SEQ ID NO: 1577996 - DNA, 15 bp, Homo sapiens
atccactattaaaat

SEQ ID NO: 1577997 - DNA, 15 bp, Homo sapiens
tccactattaaaata

SEQ ID NO: 1577998 - DNA, 15 bp, Homo sapiens
ccactattaaaatac

SEQ ID NO: 1577999 - DNA, 15 bp, Homo sapiens
cactattaaaataca

SEQ ID NO: 1578000 - DNA, 15 bp, Homo sapiens
actattaaaatacag

SEQ ID NO: 1578001 - DNA, 15 bp, Homo sapiens
ctattaaaatacagg

SEQ ID NO: 1578002 - DNA, 15 bp, Homo sapiens
tattaaaatacagga

SEQ ID NO: 1578003 - DNA, 15 bp, Homo sapiens
attaaaatacaggag

SEQ ID NO: 1578004 - DNA, 15 bp, Homo sapiens
ttaaaatacaggagt

SEQ ID NO: 1578005 - DNA, 15 bp, Homo sapiens
taaaatacaggagta

SEQ ID NO: 1578006 - DNA, 15 bp, Homo sapiens
aaaatacaggagtat

SEQ ID NO: 1578007 - DNA, 15 bp, Homo sapiens
aaatacaggagtatc

SEQ ID NO: 1578008 - DNA, 15 bp, Homo sapiens
aatacaggagtatct

SEQ ID NO: 1578009 - DNA, 15 bp, Homo sapiens
atacaggagtatctg

SEQ ID NO: 1578010 - DNA, 15 bp, Homo sapiens
tacaggagtatctgg

SEQ ID NO: 1578011 - DNA, 15 bp, Homo sapiens
acaggagtatctggt

SEQ ID NO: 1578012 - DNA, 15 bp, Homo sapiens
caggagtatctggta

SEQ ID NO: 1578013 - DNA, 15 bp, Homo sapiens
aggagtatctggtac

SEQ ID NO: 1578014 - DNA, 15 bp, Homo sapiens
ggagtatctggtact

SEQ ID NO: 1578015 - DNA, 15 bp, Homo sapiens
gagtatctggtactg

SEQ ID NO: 1578016 - DNA, 15 bp, Homo sapiens
agtatctggtactgc

SEQ ID NO: 1578017 - DNA, 15 bp, Homo sapiens
gtatctggtactgca

SEQ ID NO: 1578018 - DNA, 15 bp, Homo sapiens
tatctggtactgcag

SEQ ID NO: 1578019 - DNA, 15 bp, Homo sapiens
atctggtactgcagg

SEQ ID NO: 1578020 - DNA, 15 bp, Homo sapiens
tctggtactgcagga

SEQ ID NO: 1578021 - DNA, 15 bp, Homo sapiens
ctggtactgcaggat

SEQ ID NO: 1578022 - DNA, 15 bp, Homo sapiens
tggtactgcaggatt

SEQ ID NO: 1578023 - DNA, 15 bp, Homo sapiens
ggtactgcaggattt

SEQ ID NO: 1578024 - DNA, 15 bp, Homo sapiens
gtactgcaggatttg

SEQ ID NO: 1578025 - DNA, 15 bp, Homo sapiens
tactgcaggatttgg

SEQ ID NO: 1578026 - DNA, 15 bp, Homo sapiens
actgcaggatttgga

SEQ ID NO: 1578027 - DNA, 15 bp, Homo sapiens
ctgcaggatttggag

SEQ ID NO: 1578028 - DNA, 15 bp, Homo sapiens
tgcaggatttggaga

SEQ ID NO: 1578029 - DNA, 15 bp, Homo sapiens
gcaggatttggagaa

SEQ ID NO: 1578030 - DNA, 15 bp, Homo sapiens
caggatttggagaaa

SEQ ID NO: 1578031 - DNA, 15 bp, Homo sapiens
aggatttggagaaag

SEQ ID NO: 1578032 - DNA, 15 bp, Homo sapiens
ggatttggagaaagg

SEQ ID NO: 1578033 - DNA, 15 bp, Homo sapiens
gatttggagaaagga

SEQ ID NO: 1578034 - DNA, 15 bp, Homo sapiens
atttggagaaaggaa

SEQ ID NO: 1578035 - DNA, 15 bp, Homo sapiens
tttggagaaaggaac

SEQ ID NO: 1578036 - DNA, 15 bp, Homo sapiens
ttggagaaaggaact

SEQ ID NO: 1578037 - DNA, 15 bp, Homo sapiens
tggagaaaggaactg

SEQ ID NO: 1578038 - DNA, 15 bp, Homo sapiens
ggagaaaggaactgc

SEQ ID NO: 1578039 - DNA, 15 bp, Homo sapiens
gagaaaggaactgca

SEQ ID NO: 1578040 - DNA, 15 bp, Homo sapiens
agaaaggaactgcaa

SEQ ID NO: 1578041 - DNA, 15 bp, Homo sapiens
gaaaggaactgcaag

SEQ ID NO: 1578042 - DNA, 15 bp, Homo sapiens
aaaggaactgcaagc

SEQ ID NO: 1578043 - DNA, 15 bp, Homo sapiens
aaggaactgcaagcc

SEQ ID NO: 1578044 - DNA, 15 bp, Homo sapiens
aggaactgcaagcca

SEQ ID NO: 1578045 - DNA, 15 bp, Homo sapiens
ggaactgcaagccag

SEQ ID NO: 1578046 - DNA, 15 bp, Homo sapiens
gaactgcaagccaga

SEQ ID NO: 1578047 - DNA, 15 bp, Homo sapiens
aactgcaagccagag

SEQ ID NO: 1578048 - DNA, 15 bp, Homo sapiens
actgcaagccagagg

SEQ ID NO: 1578049 - DNA, 15 bp, Homo sapiens
ctgcaagccagaggc

SEQ ID NO: 1578050 - DNA, 15 bp, Homo sapiens
tgcaagccagaggca

SEQ ID NO: 1578051 - DNA, 15 bp, Homo sapiens
gcaagccagaggcaa

SEQ ID NO: 1578052 - DNA, 15 bp, Homo sapiens
caagccagaggcaag

SEQ ID NO: 1578053 - DNA, 15 bp, Homo sapiens
aagccagaggcaagc

SEQ ID NO: 1578054 - DNA, 15 bp, Homo sapiens
agccagaggcaagct

SEQ ID NO: 1578055 - DNA, 15 bp, Homo sapiens
gccagaggcaagctg

SEQ ID NO: 1578056 - DNA, 15 bp, Homo sapiens
ccagaggcaagctgg

SEQ ID NO: 1578057 - DNA, 15 bp, Homo sapiens
cagaggcaagctgga

SEQ ID NO: 1578058 - DNA, 15 bp, Homo sapiens
agaggcaagctggaa

SEQ ID NO: 1578059 - DNA, 15 bp, Homo sapiens
gaggcaagctggaag

SEQ ID NO: 1578060 - DNA, 15 bp, Homo sapiens
aggcaagctggaagg

SEQ ID NO: 1578061 - DNA, 15 bp, Homo sapiens
ggcaagctggaagga

SEQ ID NO: 1578062 - DNA, 15 bp, Homo sapiens
gcaagctggaaggat

SEQ ID NO: 1578063 - DNA, 15 bp, Homo sapiens
caagctggaaggatt

SEQ ID NO: 1578064 - DNA, 15 bp, Homo sapiens
aagctggaaggattc

SEQ ID NO: 1578065 - DNA, 15 bp, Homo sapiens
agctggaaggattct

SEQ ID NO: 1578066 - DNA, 15 bp, Homo sapiens
gctggaaggattctg

SEQ ID NO: 1578067 - DNA, 15 bp, Homo sapiens
ctggaaggattctga

SEQ ID NO: 1578068 - DNA, 15 bp, Homo sapiens
tggaaggattctgaa

SEQ ID NO: 1578069 - DNA, 15 bp, Homo sapiens
ggaaggattctgaat

SEQ ID NO: 1578070 - DNA, 15 bp, Homo sapiens
gaaggattctgaatt

SEQ ID NO: 1578071 - DNA, 15 bp, Homo sapiens
aaggattctgaattg

SEQ ID NO: 1578072 - DNA, 15 bp, Homo sapiens
aggattctgaattgt

SEQ ID NO: 1578073 - DNA, 15 bp, Homo sapiens
ggattctgaattgtt

SEQ ID NO: 1578074 - DNA, 15 bp, Homo sapiens
gattctgaattgttg

SEQ ID NO: 1578075 - DNA, 15 bp, Homo sapiens
attctgaattgttgg

SEQ ID NO: 1578076 - DNA, 15 bp, Homo sapiens
ttctgaattgttggg

SEQ ID NO: 1578077 - DNA, 15 bp, Homo sapiens
tctgaattgttgggt

SEQ ID NO: 1578078 - DNA, 15 bp, Homo sapiens
ctgaattgttgggta

SEQ ID NO: 1578079 - DNA, 15 bp, Homo sapiens
tgaattgttgggtac

SEQ ID NO: 1578080 - DNA, 15 bp, Homo sapiens
gaattgttgggtacc

SEQ ID NO: 1578081 - DNA, 15 bp, Homo sapiens
aattgttgggtacct

SEQ ID NO: 1578082 - DNA, 15 bp, Homo sapiens
attgttgggtaccta

SEQ ID NO: 1578083 - DNA, 15 bp, Homo sapiens
ttgttgggtacctaa

SEQ ID NO: 1578084 - DNA, 15 bp, Homo sapiens
tgttgggtacctaat

SEQ ID NO: 1578085 - DNA, 15 bp, Homo sapiens
gttgggtacctaatt

SEQ ID NO: 1578086 - DNA, 15 bp, Homo sapiens
ttgggtacctaattt

SEQ ID NO: 1578087 - DNA, 15 bp, Homo sapiens
tgggtacctaattta

SEQ ID NO: 1578088 - DNA, 15 bp, Homo sapiens
gggtacctaatttag

SEQ ID NO: 1578089 - DNA, 15 bp, Homo sapiens
ggtacctaatttaga

SEQ ID NO: 1578090 - DNA, 15 bp, Homo sapiens
gtacctaatttagaa

SEQ ID NO: 1578091 - DNA, 15 bp, Homo sapiens
tacctaatttagaaa

SEQ ID NO: 1578092 - DNA, 15 bp, Homo sapiens
acctaatttagaaac

SEQ ID NO: 1578093 - DNA, 15 bp, Homo sapiens
cctaatttagaaaca

SEQ ID NO: 1578094 - DNA, 15 bp, Homo sapiens
ctaatttagaaacaa

SEQ ID NO: 1578095 - DNA, 15 bp, Homo sapiens
taatttagaaacaaa

SEQ ID NO: 1578096 - DNA, 15 bp, Homo sapiens
aatttagaaacaaat

SEQ ID NO: 1578097 - DNA, 15 bp, Homo sapiens
atttagaaacaaatt

SEQ ID NO: 1578098 - DNA, 15 bp, Homo sapiens
tttagaaacaaattt

SEQ ID NO: 1578099 - DNA, 15 bp, Homo sapiens
ttagaaacaaatttg

SEQ ID NO: 1578100 - DNA, 15 bp, Homo sapiens
tagaaacaaatttga

SEQ ID NO: 1578101 - DNA, 15 bp, Homo sapiens
agaaacaaatttgag

SEQ ID NO: 1578102 - DNA, 15 bp, Homo sapiens
gaaacaaatttgagt

SEQ ID NO: 1578103 - DNA, 15 bp, Homo sapiens
aaacaaatttgagta

SEQ ID NO: 1578104 - DNA, 15 bp, Homo sapiens
aacaaatttgagtag

SEQ ID NO: 1578105 - DNA, 15 bp, Homo sapiens
acaaatttgagtagc

SEQ ID NO: 1578106 - DNA, 15 bp, Homo sapiens
caaatttgagtagct

SEQ ID NO: 1578107 - DNA, 15 bp, Homo sapiens
aaatttgagtagctg

SEQ ID NO: 1578108 - DNA, 15 bp, Homo sapiens
aatttgagtagctga

SEQ ID NO: 1578109 - DNA, 15 bp, Homo sapiens
atttgagtagctgag

SEQ ID NO: 1578110 - DNA, 15 bp, Homo sapiens
tttgagtagctgaga

SEQ ID NO: 1578111 - DNA, 15 bp, Homo sapiens
ttgagtagctgagac

SEQ ID NO: 1578112 - DNA, 15 bp, Homo sapiens
tgagtagctgagacc

SEQ ID NO: 1578113 - DNA, 15 bp, Homo sapiens
gagtagctgagacca

SEQ ID NO: 1578114 - DNA, 15 bp, Homo sapiens
tagctgagaccacat

SEQ ID NO: 1578115 - DNA, 15 bp, Homo sapiens
agctgagaccacatg

SEQ ID NO: 1578116 - DNA, 15 bp, Homo sapiens
gctgagaccacatgt

SEQ ID NO: 1578117 - DNA, 15 bp, Homo sapiens
ctgagaccacatgtg

SEQ ID NO: 1578118 - DNA, 15 bp, Homo sapiens
tgagaccacatgtgt

SEQ ID NO: 1578119 - DNA, 15 bp, Homo sapiens
gagaccacatgtgtc

SEQ ID NO: 1578120 - DNA, 15 bp, Homo sapiens
agaccacatgtgtca

SEQ ID NO: 1578121 - DNA, 15 bp, Homo sapiens
gaccacatgtgtcag

SEQ ID NO: 1578122 - DNA, 15 bp, Homo sapiens
accacatgtgtcagg

SEQ ID NO: 1578123 - DNA, 15 bp, Homo sapiens
ccacatgtgtcaggg

SEQ ID NO: 1578124 - DNA, 15 bp, Homo sapiens
cacatgtgtcagggg

SEQ ID NO: 1578125 - DNA, 15 bp, Homo sapiens
acatgtgtcagggga

SEQ ID NO: 1578126 - DNA, 15 bp, Homo sapiens
catgtgtcaggggac

SEQ ID NO: 1578127 - DNA, 15 bp, Homo sapiens
atgtgtcaggggacg

SEQ ID NO: 1578128 - DNA, 15 bp, Homo sapiens
tgtgtcaggggacga

SEQ ID NO: 1578129 - DNA, 15 bp, Homo sapiens
gtgtcaggggacgaa

SEQ ID NO: 1578130 - DNA, 15 bp, Homo sapiens
tgtcaggggacgaat

SEQ ID NO: 1578131 - DNA, 15 bp, Homo sapiens
gtcaggggacgaata

SEQ ID NO: 1578132 - DNA, 15 bp, Homo sapiens
tcaggggacgaatat

SEQ ID NO: 1578133 - DNA, 15 bp, Homo sapiens
caggggacgaatata

SEQ ID NO: 1578134 - DNA, 15 bp, Homo sapiens
aggggacgaatatat

SEQ ID NO: 1578135 - DNA, 15 bp, Homo sapiens
ggggacgaatatata

SEQ ID NO: 1578136 - DNA, 15 bp, Homo sapiens
gggacgaatatataa

SEQ ID NO: 1578137 - DNA, 15 bp, Homo sapiens
ggacgaatatataac

SEQ ID NO: 1578138 - DNA, 15 bp, Homo sapiens
gacgaatatataacc

SEQ ID NO: 1578139 - DNA, 15 bp, Homo sapiens
acgaatatataaccg

SEQ ID NO: 1578140 - DNA, 15 bp, Homo sapiens
cgaatatataaccgg

SEQ ID NO: 1578141 - DNA, 15 bp, Homo sapiens
gaatatataaccgga

SEQ ID NO: 1578142 - DNA, 15 bp, Homo sapiens
aatatataaccggaa

SEQ ID NO: 1578143 - DNA, 15 bp, Homo sapiens
atatataaccggaag

SEQ ID NO: 1578144 - DNA, 15 bp, Homo sapiens
tatataaccggaagt

SEQ ID NO: 1578145 - DNA, 15 bp, Homo sapiens
atataaccggaagtt

SEQ ID NO: 1578146 - DNA, 15 bp, Homo sapiens
tataaccggaagttc

SEQ ID NO: 1578147 - DNA, 15 bp, Homo sapiens
ataaccggaagttct

SEQ ID NO: 1578148 - DNA, 15 bp, Homo sapiens
taaccggaagttctc

SEQ ID NO: 1578149 - DNA, 15 bp, Homo sapiens
aaccggaagttctct

SEQ ID NO: 1578150 - DNA, 15 bp, Homo sapiens
accggaagttctctg

SEQ ID NO: 1578151 - DNA, 15 bp, Homo sapiens
ccggaagttctctga

SEQ ID NO: 1578152 - DNA, 15 bp, Homo sapiens
cggaagttctctgaa

SEQ ID NO: 1578153 - DNA, 15 bp, Homo sapiens
ggaagttctctgaat

SEQ ID NO: 1578154 - DNA, 15 bp, Homo sapiens
gaagttctctgaatt

SEQ ID NO: 1578155 - DNA, 15 bp, Homo sapiens
aagttctctgaatta

SEQ ID NO: 1578156 - DNA, 15 bp, Homo sapiens
agttctctgaattaa

SEQ ID NO: 1578157 - DNA, 15 bp, Homo sapiens
gttctctgaattaac

SEQ ID NO: 1578158 - DNA, 15 bp, Homo sapiens
ttctctgaattaact

SEQ ID NO: 1578159 - DNA, 15 bp, Homo sapiens
tctctgaattaactt

SEQ ID NO: 1578160 - DNA, 15 bp, Homo sapiens
ctctgaattaacttc

SEQ ID NO: 1578161 - DNA, 15 bp, Homo sapiens
tctgaattaacttcc

SEQ ID NO: 1578162 - DNA, 15 bp, Homo sapiens
ctgaattaacttcct

SEQ ID NO: 1578163 - DNA, 15 bp, Homo sapiens
tgaattaacttcctg

SEQ ID NO: 1578164 - DNA, 15 bp, Homo sapiens
gaattaacttcctga

SEQ ID NO: 1578165 - DNA, 15 bp, Homo sapiens
aattaacttcctgat

SEQ ID NO: 1578166 - DNA, 15 bp, Homo sapiens
attaacttcctgata

SEQ ID NO: 1578167 - DNA, 15 bp, Homo sapiens
ttaacttcctgatag

SEQ ID NO: 1578168 - DNA, 15 bp, Homo sapiens
taacttcctgataga

SEQ ID NO: 1578169 - DNA, 15 bp, Homo sapiens
aacttcctgatagaa

SEQ ID NO: 1578170 - DNA, 15 bp, Homo sapiens
acttcctgatagaac

SEQ ID NO: 1578171 - DNA, 15 bp, Homo sapiens
cttcctgatagaaca

SEQ ID NO: 1578172 - DNA, 15 bp, Homo sapiens
ttcctgatagaacac

SEQ ID NO: 1578173 - DNA, 15 bp, Homo sapiens
tcctgatagaacaca

SEQ ID NO: 1578174 - DNA, 15 bp, Homo sapiens
cctgatagaacacaa

SEQ ID NO: 1578175 - DNA, 15 bp, Homo sapiens
ctgatagaacacaat

SEQ ID NO: 1578176 - DNA, 15 bp, Homo sapiens
tgatagaacacaatg

SEQ ID NO: 1578177 - DNA, 15 bp, Homo sapiens
gatagaacacaatgt

SEQ ID NO: 1578178 - DNA, 15 bp, Homo sapiens
atagaacacaatgtt

SEQ ID NO: 1578179 - DNA, 15 bp, Homo sapiens
tagaacacaatgttt

SEQ ID NO: 1578180 - DNA, 15 bp, Homo sapiens
agaacacaatgtttg

SEQ ID NO: 1578181 - DNA, 15 bp, Homo sapiens
gaacacaatgtttgt

SEQ ID NO: 1578182 - DNA, 15 bp, Homo sapiens
aacacaatgtttgtt

SEQ ID NO: 1578183 - DNA, 15 bp, Homo sapiens
acacaatgtttgtta

SEQ ID NO: 1578184 - DNA, 15 bp, Homo sapiens
cacaatgtttgttaa

SEQ ID NO: 1578185 - DNA, 15 bp, Homo sapiens
acaatgtttgttaaa

SEQ ID NO: 1578186 - DNA, 15 bp, Homo sapiens
caatgtttgttaaaa

SEQ ID NO: 1578187 - DNA, 15 bp, Homo sapiens
aatgtttgttaaaag

SEQ ID NO: 1578188 - DNA, 15 bp, Homo sapiens
atgtttgttaaaagg

SEQ ID NO: 1578189 - DNA, 15 bp, Homo sapiens
tgtttgttaaaagga

SEQ ID NO: 1578190 - DNA, 15 bp, Homo sapiens
gtttgttaaaaggat

SEQ ID NO: 1578191 - DNA, 15 bp, Homo sapiens
tttgttaaaaggata

SEQ ID NO: 1578192 - DNA, 15 bp, Homo sapiens
ttgttaaaaggataa

SEQ ID NO: 1578193 - DNA, 15 bp, Homo sapiens
tgttaaaaggataag

SEQ ID NO: 1578194 - DNA, 15 bp, Homo sapiens
gttaaaaggataagt

SEQ ID NO: 1578195 - DNA, 15 bp, Homo sapiens
ttaaaaggataagta

SEQ ID NO: 1578196 - DNA, 15 bp, Homo sapiens
taaaaggataagtaa

SEQ ID NO: 1578197 - DNA, 15 bp, Homo sapiens
aaaaggataagtaat

SEQ ID NO: 1578198 - DNA, 15 bp, Homo sapiens
aaaggataagtaatg

SEQ ID NO: 1578199 - DNA, 15 bp, Homo sapiens
aaggataagtaatga

SEQ ID NO: 1578200 - DNA, 15 bp, Homo sapiens
aggataagtaatgaa

SEQ ID NO: 1578201 - DNA, 15 bp, Homo sapiens
ggataagtaatgaaa

SEQ ID NO: 1578202 - DNA, 15 bp, Homo sapiens
gataagtaatgaaaa

SEQ ID NO: 1578203 - DNA, 15 bp, Homo sapiens
ataagtaatgaaaat

SEQ ID NO: 1578204 - DNA, 15 bp, Homo sapiens
taagtaatgaaaatg

SEQ ID NO: 1578205 - DNA, 15 bp, Homo sapiens
aagtaatgaaaatgt

SEQ ID NO: 1578206 - DNA, 15 bp, Homo sapiens
agtaatgaaaatgtt

SEQ ID NO: 1578207 - DNA, 15 bp, Homo sapiens
gtaatgaaaatgttc

SEQ ID NO: 1578208 - DNA, 15 bp, Homo sapiens
taatgaaaatgttct

SEQ ID NO: 1578209 - DNA, 15 bp, Homo sapiens
aatgaaaatgttcta

SEQ ID NO: 1578210 - DNA, 15 bp, Homo sapiens
atgaaaatgttctaa

SEQ ID NO: 1578211 - DNA, 15 bp, Homo sapiens
tgaaaatgttctaat

SEQ ID NO: 1578212 - DNA, 15 bp, Homo sapiens
gaaaatgttctaata

SEQ ID NO: 1578213 - DNA, 15 bp, Homo sapiens
aaaatgttctaatat

SEQ ID NO: 1578214 - DNA, 15 bp, Homo sapiens
aaatgttctaatatg

SEQ ID NO: 1578215 - DNA, 15 bp, Homo sapiens
aatgttctaatatga

SEQ ID NO: 1578216 - DNA, 15 bp, Homo sapiens
atgttctaatatgaa

SEQ ID NO: 1578217 - DNA, 15 bp, Homo sapiens
tgttctaatatgaat

SEQ ID NO: 1578218 - DNA, 15 bp, Homo sapiens
gttctaatatgaatt

SEQ ID NO: 1578219 - DNA, 15 bp, Homo sapiens
ttctaatatgaattt

SEQ ID NO: 1578220 - DNA, 15 bp, Homo sapiens
tctaatatgaatttc

SEQ ID NO: 1578221 - DNA, 15 bp, Homo sapiens
ctaatatgaatttca

SEQ ID NO: 1578222 - DNA, 15 bp, Homo sapiens
taatatgaatttcaa

SEQ ID NO: 1578223 - DNA, 15 bp, Homo sapiens
aatatgaatttcaag

SEQ ID NO: 1578224 - DNA, 15 bp, Homo sapiens
atatgaatttcaagt

SEQ ID NO: 1578225 - DNA, 15 bp, Homo sapiens
tatgaatttcaagtt

SEQ ID NO: 1578226 - DNA, 15 bp, Homo sapiens
atgaatttcaagttc

SEQ ID NO: 1578227 - DNA, 15 bp, Homo sapiens
tgaatttcaagttct

SEQ ID NO: 1578228 - DNA, 15 bp, Homo sapiens
gaatttcaagttcta

SEQ ID NO: 1578229 - DNA, 15 bp, Homo sapiens
aatttcaagttctat

SEQ ID NO: 1578230 - DNA, 15 bp, Homo sapiens
atttcaagttctatg

SEQ ID NO: 1578231 - DNA, 15 bp, Homo sapiens
tttcaagttctatgc

SEQ ID NO: 1578232 - DNA, 15 bp, Homo sapiens
ttcaagttctatgcc

SEQ ID NO: 1578233 - DNA, 15 bp, Homo sapiens
tcaagttctatgcca

SEQ ID NO: 1578234 - DNA, 15 bp, Homo sapiens
caagttctatgccaa

SEQ ID NO: 1578235 - DNA, 15 bp, Homo sapiens
aagttctatgccaaa

SEQ ID NO: 1578236 - DNA, 15 bp, Homo sapiens
agttctatgccaaat

SEQ ID NO: 1578237 - DNA, 15 bp, Homo sapiens
gttctatgccaaata

SEQ ID NO: 1578238 - DNA, 15 bp, Homo sapiens
ttctatgccaaatag

SEQ ID NO: 1578239 - DNA, 15 bp, Homo sapiens
tctatgccaaataga

SEQ ID NO: 1578240 - DNA, 15 bp, Homo sapiens
ctatgccaaatagaa

SEQ ID NO: 1578241 - DNA, 15 bp, Homo sapiens
tatgccaaatagaaa

SEQ ID NO: 1578242 - DNA, 15 bp, Homo sapiens
atgccaaatagaaat

SEQ ID NO: 1578243 - DNA, 15 bp, Homo sapiens
tgccaaatagaaatg

SEQ ID NO: 1578244 - DNA, 15 bp, Homo sapiens
gccaaatagaaatgc

SEQ ID NO: 1578245 - DNA, 15 bp, Homo sapiens
ccaaatagaaatgca

SEQ ID NO: 1578246 - DNA, 15 bp, Homo sapiens
caaatagaaatgcat

SEQ ID NO: 1578247 - DNA, 15 bp, Homo sapiens
aaatagaaatgcatt

SEQ ID NO: 1578248 - DNA, 15 bp, Homo sapiens
aatagaaatgcattc

SEQ ID NO: 1578249 - DNA, 15 bp, Homo sapiens
atagaaatgcattca

SEQ ID NO: 1578250 - DNA, 15 bp, Homo sapiens
tagaaatgcattcat

SEQ ID NO: 1578251 - DNA, 15 bp, Homo sapiens
agaaatgcattcata

SEQ ID NO: 1578252 - DNA, 15 bp, Homo sapiens
gaaatgcattcatat

SEQ ID NO: 1578253 - DNA, 15 bp, Homo sapiens
aaatgcattcatata

SEQ ID NO: 1578254 - DNA, 15 bp, Homo sapiens
aatgcattcatatat

SEQ ID NO: 1578255 - DNA, 15 bp, Homo sapiens
atgcattcatatatt

SEQ ID NO: 1578256 - DNA, 15 bp, Homo sapiens
tgcattcatatattc

SEQ ID NO: 1578257 - DNA, 15 bp, Homo sapiens
gcattcatatattca

SEQ ID NO: 1578258 - DNA, 15 bp, Homo sapiens
cattcatatattcac

SEQ ID NO: 1578259 - DNA, 15 bp, Homo sapiens
attcatatattcacc

SEQ ID NO: 1578260 - DNA, 15 bp, Homo sapiens
ttcatatattcacca

SEQ ID NO: 1578261 - DNA, 15 bp, Homo sapiens
tcatatattcaccaa

SEQ ID NO: 1578262 - DNA, 15 bp, Homo sapiens
catatattcaccaaa

SEQ ID NO: 1578263 - DNA, 15 bp, Homo sapiens
atatattcaccaaaa

SEQ ID NO: 1578264 - DNA, 15 bp, Homo sapiens
tatattcaccaaaag

SEQ ID NO: 1578265 - DNA, 15 bp, Homo sapiens
atattcaccaaaaga

SEQ ID NO: 1578266 - DNA, 15 bp, Homo sapiens
tattcaccaaaagat

SEQ ID NO: 1578267 - DNA, 15 bp, Homo sapiens
attcaccaaaagata

SEQ ID NO: 1578268 - DNA, 15 bp, Homo sapiens
ttcaccaaaagatat

SEQ ID NO: 1578269 - DNA, 15 bp, Homo sapiens
tcaccaaaagatatg

SEQ ID NO: 1578270 - DNA, 15 bp, Homo sapiens
caccaaaagatatgt

SEQ ID NO: 1578271 - DNA, 15 bp, Homo sapiens
accaaaagatatgta

SEQ ID NO: 1578272 - DNA, 15 bp, Homo sapiens
ccaaaagatatgtac

SEQ ID NO: 1578273 - DNA, 15 bp, Homo sapiens
caaaagatatgtaca

SEQ ID NO: 1578274 - DNA, 15 bp, Homo sapiens
aaaagatatgtacaa

SEQ ID NO: 1578275 - DNA, 15 bp, Homo sapiens
aaagatatgtacaaa

SEQ ID NO: 1578276 - DNA, 15 bp, Homo sapiens
aagatatgtacaaaa

SEQ ID NO: 1578277 - DNA, 15 bp, Homo sapiens
agatatgtacaaaat

SEQ ID NO: 1578278 - DNA, 15 bp, Homo sapiens
gatatgtacaaaatg

SEQ ID NO: 1578279 - DNA, 15 bp, Homo sapiens
atatgtacaaaatgt

SEQ ID NO: 1578280 - DNA, 15 bp, Homo sapiens
tatgtacaaaatgtt

SEQ ID NO: 1578281 - DNA, 15 bp, Homo sapiens
atgtacaaaatgttc

SEQ ID NO: 1578282 - DNA, 15 bp, Homo sapiens
tgtacaaaatgttca

SEQ ID NO: 1578283 - DNA, 15 bp, Homo sapiens
gtacaaaatgttcat

SEQ ID NO: 1578284 - DNA, 15 bp, Homo sapiens
tacaaaatgttcata

SEQ ID NO: 1578285 - DNA, 15 bp, Homo sapiens
acaaaatgttcatag

SEQ ID NO: 1578286 - DNA, 15 bp, Homo sapiens
caaaatgttcatagt

SEQ ID NO: 1578287 - DNA, 15 bp, Homo sapiens
aaaatgttcatagta

SEQ ID NO: 1578288 - DNA, 15 bp, Homo sapiens
aaatgttcatagtag

SEQ ID NO: 1578289 - DNA, 15 bp, Homo sapiens
aatgttcatagtagc

SEQ ID NO: 1578290 - DNA, 15 bp, Homo sapiens
atgttcatagtagca

SEQ ID NO: 1578291 - DNA, 15 bp, Homo sapiens
tgttcatagtagcat

SEQ ID NO: 1578292 - DNA, 15 bp, Homo sapiens
gttcatagtagcatt

SEQ ID NO: 1578293 - DNA, 15 bp, Homo sapiens
ttcatagtagcatta

SEQ ID NO: 1578294 - DNA, 15 bp, Homo sapiens
tcatagtagcattat

SEQ ID NO: 1578295 - DNA, 15 bp, Homo sapiens
catagtagcattatt

SEQ ID NO: 1578296 - DNA, 15 bp, Homo sapiens
atagtagcattattt

SEQ ID NO: 1578297 - DNA, 15 bp, Homo sapiens
tagtagcattatttc

SEQ ID NO: 1578298 - DNA, 15 bp, Homo sapiens
agtagcattatttct

SEQ ID NO: 1578299 - DNA, 15 bp, Homo sapiens
gtagcattatttcta

SEQ ID NO: 1578300 - DNA, 15 bp, Homo sapiens
tagcattatttctaa

SEQ ID NO: 1578301 - DNA, 15 bp, Homo sapiens
agcattatttctaat

SEQ ID NO: 1578302 - DNA, 15 bp, Homo sapiens
gcattatttctaata

SEQ ID NO: 1578303 - DNA, 15 bp, Homo sapiens
cattatttctaatag

SEQ ID NO: 1578304 - DNA, 15 bp, Homo sapiens
attatttctaatagc

SEQ ID NO: 1578305 - DNA, 15 bp, Homo sapiens
ttatttctaatagcc

SEQ ID NO: 1578306 - DNA, 15 bp, Homo sapiens
tatttctaatagccc

SEQ ID NO: 1578307 - DNA, 15 bp, Homo sapiens
atttctaatagccca

SEQ ID NO: 1578308 - DNA, 15 bp, Homo sapiens
tttctaatagcccaa

SEQ ID NO: 1578309 - DNA, 15 bp, Homo sapiens
ttctaatagcccaaa

SEQ ID NO: 1578310 - DNA, 15 bp, Homo sapiens
tctaatagcccaaac

SEQ ID NO: 1578311 - DNA, 15 bp, Homo sapiens
ctaatagcccaaacc

SEQ ID NO: 1578312 - DNA, 15 bp, Homo sapiens
taatagcccaaacct

SEQ ID NO: 1578313 - DNA, 15 bp, Homo sapiens
aatagcccaaacctg

SEQ ID NO: 1578314 - DNA, 15 bp, Homo sapiens
atagcccaaacctgg

SEQ ID NO: 1578315 - DNA, 15 bp, Homo sapiens
tagcccaaacctgga

SEQ ID NO: 1578316 - DNA, 15 bp, Homo sapiens
agcccaaacctggaa

SEQ ID NO: 1578317 - DNA, 15 bp, Homo sapiens
gcccaaacctggaaa

SEQ ID NO: 1578318 - DNA, 15 bp, Homo sapiens
cccaaacctggaaac

SEQ ID NO: 1578319 - DNA, 15 bp, Homo sapiens
ccaaacctggaaact

SEQ ID NO: 1578320 - DNA, 15 bp, Homo sapiens
caaacctggaaactg

SEQ ID NO: 1578321 - DNA, 15 bp, Homo sapiens
aaacctggaaactgc

SEQ ID NO: 1578322 - DNA, 15 bp, Homo sapiens
aacctggaaactgcc

SEQ ID NO: 1578323 - DNA, 15 bp, Homo sapiens
acctggaaactgccc

SEQ ID NO: 1578324 - DNA, 15 bp, Homo sapiens
cctggaaactgccca

SEQ ID NO: 1578325 - DNA, 15 bp, Homo sapiens
ctggaaactgcccaa

SEQ ID NO: 1578326 - DNA, 15 bp, Homo sapiens
tggaaactgcccaaa

SEQ ID NO: 1578327 - DNA, 15 bp, Homo sapiens
ggaaactgcccaaat

SEQ ID NO: 1578328 - DNA, 15 bp, Homo sapiens
gaaactgcccaaatg

SEQ ID NO: 1578329 - DNA, 15 bp, Homo sapiens
aaactgcccaaatgt

SEQ ID NO: 1578330 - DNA, 15 bp, Homo sapiens
aactgcccaaatgtc

SEQ ID NO: 1578331 - DNA, 15 bp, Homo sapiens
actgcccaaatgtcc

SEQ ID NO: 1578332 - DNA, 15 bp, Homo sapiens
ctgcccaaatgtcca

SEQ ID NO: 1578333 - DNA, 15 bp, Homo sapiens
tgcccaaatgtccat

SEQ ID NO: 1578334 - DNA, 15 bp, Homo sapiens
gcccaaatgtccatc

SEQ ID NO: 1578335 - DNA, 15 bp, Homo sapiens
cccaaatgtccatca

SEQ ID NO: 1578336 - DNA, 15 bp, Homo sapiens
ccaaatgtccatcaa

SEQ ID NO: 1578337 - DNA, 15 bp, Homo sapiens
caaatgtccatcaac

SEQ ID NO: 1578338 - DNA, 15 bp, Homo sapiens
aaatgtccatcaaca

SEQ ID NO: 1578339 - DNA, 15 bp, Homo sapiens
aatgtccatcaacag

SEQ ID NO: 1578340 - DNA, 15 bp, Homo sapiens
atgtccatcaacagg

SEQ ID NO: 1578341 - DNA, 15 bp, Homo sapiens
tgtccatcaacaggg

SEQ ID NO: 1578342 - DNA, 15 bp, Homo sapiens
gtccatcaacagggg

SEQ ID NO: 1578343 - DNA, 15 bp, Homo sapiens
tccatcaacagggga

SEQ ID NO: 1578344 - DNA, 15 bp, Homo sapiens
ccatcaacaggggaa

SEQ ID NO: 1578345 - DNA, 15 bp, Homo sapiens
catcaacaggggaat

SEQ ID NO: 1578346 - DNA, 15 bp, Homo sapiens
atcaacaggggaatg

SEQ ID NO: 1578347 - DNA, 15 bp, Homo sapiens
tcaacaggggaatgg

SEQ ID NO: 1578348 - DNA, 15 bp, Homo sapiens
caacaggggaatgga

SEQ ID NO: 1578349 - DNA, 15 bp, Homo sapiens
aacaggggaatggat

SEQ ID NO: 1578350 - DNA, 15 bp, Homo sapiens
acaggggaatggata

SEQ ID NO: 1578351 - DNA, 15 bp, Homo sapiens
caggggaatggataa

SEQ ID NO: 1578352 - DNA, 15 bp, Homo sapiens
aggggaatggataag

SEQ ID NO: 1578353 - DNA, 15 bp, Homo sapiens
ggggaatggataaga

SEQ ID NO: 1578354 - DNA, 15 bp, Homo sapiens
gggaatggataagaa

SEQ ID NO: 1578355 - DNA, 15 bp, Homo sapiens
ggaatggataagaag

SEQ ID NO: 1578356 - DNA, 15 bp, Homo sapiens
gaatggataagaagt

SEQ ID NO: 1578357 - DNA, 15 bp, Homo sapiens
aatggataagaagtc

SEQ ID NO: 1578358 - DNA, 15 bp, Homo sapiens
atggataagaagtct

SEQ ID NO: 1578359 - DNA, 15 bp, Homo sapiens
tggataagaagtctt

SEQ ID NO: 1578360 - DNA, 15 bp, Homo sapiens
ggataagaagtctta

SEQ ID NO: 1578361 - DNA, 15 bp, Homo sapiens
gataagaagtcttag

SEQ ID NO: 1578362 - DNA, 15 bp, Homo sapiens
ataagaagtcttaga

SEQ ID NO: 1578363 - DNA, 15 bp, Homo sapiens
taagaagtcttagag

SEQ ID NO: 1578364 - DNA, 15 bp, Homo sapiens
aagaagtcttagagg

SEQ ID NO: 1578365 - DNA, 15 bp, Homo sapiens
agaagtcttagaggc

SEQ ID NO: 1578366 - DNA, 15 bp, Homo sapiens
gaagtcttagaggca

SEQ ID NO: 1578367 - DNA, 15 bp, Homo sapiens
aagtcttagaggcag

SEQ ID NO: 1578368 - DNA, 15 bp, Homo sapiens
agtcttagaggcagg

SEQ ID NO: 1578369 - DNA, 15 bp, Homo sapiens
gtcttagaggcaggc

SEQ ID NO: 1578370 - DNA, 15 bp, Homo sapiens
tcttagaggcaggct

SEQ ID NO: 1578371 - DNA, 15 bp, Homo sapiens
cttagaggcaggctg

SEQ ID NO: 1578372 - DNA, 15 bp, Homo sapiens
ttagaggcaggctgg

SEQ ID NO: 1578373 - DNA, 15 bp, Homo sapiens
tagaggcaggctggg

SEQ ID NO: 1578374 - DNA, 15 bp, Homo sapiens
agaggcaggctgggc

SEQ ID NO: 1578375 - DNA, 15 bp, Homo sapiens
gaggcaggctgggcg

SEQ ID NO: 1578376 - DNA, 15 bp, Homo sapiens
aggcaggctgggcgt

SEQ ID NO: 1578377 - DNA, 15 bp, Homo sapiens
ggcaggctgggcgtg

SEQ ID NO: 1578378 - DNA, 15 bp, Homo sapiens
gcaggctgggcgtgg

SEQ ID NO: 1578379 - DNA, 15 bp, Homo sapiens
caggctgggcgtggt

SEQ ID NO: 1578380 - DNA, 15 bp, Homo sapiens
aggctgggcgtggtg

SEQ ID NO: 1578381 - DNA, 15 bp, Homo sapiens
catctgtaatctcac

SEQ ID NO: 1578382 - DNA, 15 bp, Homo sapiens
atctgtaatctcacc

SEQ ID NO: 1578383 - DNA, 15 bp, Homo sapiens
tctgtaatctcacca

SEQ ID NO: 1578384 - DNA, 15 bp, Homo sapiens
ctgtaatctcaccac

SEQ ID NO: 1578385 - DNA, 15 bp, Homo sapiens
tgtaatctcaccact

SEQ ID NO: 1578386 - DNA, 15 bp, Homo sapiens
gtaatctcaccactt

SEQ ID NO: 1578387 - DNA, 15 bp, Homo sapiens
taatctcaccacttt

SEQ ID NO: 1578388 - DNA, 15 bp, Homo sapiens
aatctcaccactttg

SEQ ID NO: 1578389 - DNA, 15 bp, Homo sapiens
atctcaccactttgg

SEQ ID NO: 1578390 - DNA, 15 bp, Homo sapiens
tctcaccactttggg

SEQ ID NO: 1578391 - DNA, 15 bp, Homo sapiens
ctcaccactttggga

SEQ ID NO: 1578392 - DNA, 15 bp, Homo sapiens
tcaccactttgggaa

SEQ ID NO: 1578393 - DNA, 15 bp, Homo sapiens
caccactttgggaag

SEQ ID NO: 1578394 - DNA, 15 bp, Homo sapiens
accactttgggaagc

SEQ ID NO: 1578395 - DNA, 15 bp, Homo sapiens
ccactttgggaagcc

SEQ ID NO: 1578396 - DNA, 15 bp, Homo sapiens
tttgggaagccaaaa

SEQ ID NO: 1578397 - DNA, 15 bp, Homo sapiens
ttgggaagccaaaat

SEQ ID NO: 1578398 - DNA, 15 bp, Homo sapiens
tgggaagccaaaatg

SEQ ID NO: 1578399 - DNA, 15 bp, Homo sapiens
gggaagccaaaatgg

SEQ ID NO: 1578400 - DNA, 15 bp, Homo sapiens
ggaagccaaaatggg

SEQ ID NO: 1578401 - DNA, 15 bp, Homo sapiens
gaagccaaaatgggc

SEQ ID NO: 1578402 - DNA, 15 bp, Homo sapiens
aagccaaaatgggcg

SEQ ID NO: 1578403 - DNA, 15 bp, Homo sapiens
agccaaaatgggcgg

SEQ ID NO: 1578404 - DNA, 15 bp, Homo sapiens
gccaaaatgggcgga

SEQ ID NO: 1578405 - DNA, 15 bp, Homo sapiens
ccaaaatgggcggat

SEQ ID NO: 1578406 - DNA, 15 bp, Homo sapiens
caaaatgggcggatc

SEQ ID NO: 1578407 - DNA, 15 bp, Homo sapiens
aaaatgggcggatca

SEQ ID NO: 1578408 - DNA, 15 bp, Homo sapiens
aaatgggcggatcac

SEQ ID NO: 1578409 - DNA, 15 bp, Homo sapiens
aatgggcggatcacc

SEQ ID NO: 1578410 - DNA, 15 bp, Homo sapiens
atgggcggatcacct

SEQ ID NO: 1578411 - DNA, 15 bp, Homo sapiens
gggcggatcacctgg

SEQ ID NO: 1578412 - DNA, 15 bp, Homo sapiens
ggcggatcacctggg

SEQ ID NO: 1578413 - DNA, 15 bp, Homo sapiens
gcggatcacctgggg

SEQ ID NO: 1578414 - DNA, 15 bp, Homo sapiens
cggatcacctggggt

SEQ ID NO: 1578415 - DNA, 15 bp, Homo sapiens
ggatcacctggggtc

SEQ ID NO: 1578416 - DNA, 15 bp, Homo sapiens
gatcacctggggtca

SEQ ID NO: 1578417 - DNA, 15 bp, Homo sapiens
atcacctggggtcag

SEQ ID NO: 1578418 - DNA, 15 bp, Homo sapiens
tcacctggggtcagg

SEQ ID NO: 1578419 - DNA, 15 bp, Homo sapiens
cacctggggtcagga

SEQ ID NO: 1578420 - DNA, 15 bp, Homo sapiens
acctggggtcaggag

SEQ ID NO: 1578421 - DNA, 15 bp, Homo sapiens
cctggggtcaggagt

SEQ ID NO: 1578422 - DNA, 15 bp, Homo sapiens
ctggggtcaggagtt

SEQ ID NO: 1578423 - DNA, 15 bp, Homo sapiens
tggggtcaggagttc

SEQ ID NO: 1578424 - DNA, 15 bp, Homo sapiens
ggggtcaggagttca

SEQ ID NO: 1578425 - DNA, 15 bp, Homo sapiens
gggtcaggagttcaa

SEQ ID NO: 1578426 - DNA, 15 bp, Homo sapiens
gtgaaaccccatttt

SEQ ID NO: 1578427 - DNA, 15 bp, Homo sapiens
tgaaaccccattttc

SEQ ID NO: 1578428 - DNA, 15 bp, Homo sapiens
gaaaccccattttct

SEQ ID NO: 1578429 - DNA, 15 bp, Homo sapiens
aaaccccattttcta

SEQ ID NO: 1578430 - DNA, 15 bp, Homo sapiens
aaccccattttctac

SEQ ID NO: 1578431 - DNA, 15 bp, Homo sapiens
accccattttctact

SEQ ID NO: 1578432 - DNA, 15 bp, Homo sapiens
ccccattttctacta

SEQ ID NO: 1578433 - DNA, 15 bp, Homo sapiens
cccattttctactaa

SEQ ID NO: 1578434 - DNA, 15 bp, Homo sapiens
ccattttctactaaa

SEQ ID NO: 1578435 - DNA, 15 bp, Homo sapiens
cattttctactaaaa

SEQ ID NO: 1578436 - DNA, 15 bp, Homo sapiens
attttctactaaaaa

SEQ ID NO: 1578437 - DNA, 15 bp, Homo sapiens
ttttctactaaaaat

SEQ ID NO: 1578438 - DNA, 15 bp, Homo sapiens
taaaaatacaaacat

SEQ ID NO: 1578439 - DNA, 15 bp, Homo sapiens
aaaaatacaaacatt

SEQ ID NO: 1578440 - DNA, 15 bp, Homo sapiens
aaaatacaaacatta

SEQ ID NO: 1578441 - DNA, 15 bp, Homo sapiens
aaatacaaacattag

SEQ ID NO: 1578442 - DNA, 15 bp, Homo sapiens
aatacaaacattagc

SEQ ID NO: 1578443 - DNA, 15 bp, Homo sapiens
atacaaacattagcc

SEQ ID NO: 1578444 - DNA, 15 bp, Homo sapiens
tacaaacattagcca

SEQ ID NO: 1578445 - DNA, 15 bp, Homo sapiens
acaaacattagccag

SEQ ID NO: 1578446 - DNA, 15 bp, Homo sapiens
caaacattagccagg

SEQ ID NO: 1578447 - DNA, 15 bp, Homo sapiens
aaacattagccaggt

SEQ ID NO: 1578448 - DNA, 15 bp, Homo sapiens
aacattagccaggtc

SEQ ID NO: 1578449 - DNA, 15 bp, Homo sapiens
acattagccaggtct

SEQ ID NO: 1578450 - DNA, 15 bp, Homo sapiens
cattagccaggtctg

SEQ ID NO: 1578451 - DNA, 15 bp, Homo sapiens
ccaggtctggtgtca

SEQ ID NO: 1578452 - DNA, 15 bp, Homo sapiens
caggtctggtgtcac

SEQ ID NO: 1578453 - DNA, 15 bp, Homo sapiens
aggtctggtgtcaca

SEQ ID NO: 1578454 - DNA, 15 bp, Homo sapiens
ggtctggtgtcacac

SEQ ID NO: 1578455 - DNA, 15 bp, Homo sapiens
gtctggtgtcacacg

SEQ ID NO: 1578456 - DNA, 15 bp, Homo sapiens
tctggtgtcacacgc

SEQ ID NO: 1578457 - DNA, 15 bp, Homo sapiens
ctggtgtcacacgcc

SEQ ID NO: 1578458 - DNA, 15 bp, Homo sapiens
tggtgtcacacgcct

SEQ ID NO: 1578459 - DNA, 15 bp, Homo sapiens
ggtgtcacacgcctg

SEQ ID NO: 1578460 - DNA, 15 bp, Homo sapiens
gtgtcacacgcctgt

SEQ ID NO: 1578461 - DNA, 15 bp, Homo sapiens
tgtcacacgcctgta

SEQ ID NO: 1578462 - DNA, 15 bp, Homo sapiens
gtcacacgcctgtag

SEQ ID NO: 1578463 - DNA, 15 bp, Homo sapiens
tcacacgcctgtagt

SEQ ID NO: 1578464 - DNA, 15 bp, Homo sapiens
acacgcctgtagtcc

SEQ ID NO: 1578465 - DNA, 15 bp, Homo sapiens
tgagctgagatcatt

SEQ ID NO: 1578466 - DNA, 15 bp, Homo sapiens
gagctgagatcattc

SEQ ID NO: 1578467 - DNA, 15 bp, Homo sapiens
agctgagatcattca

SEQ ID NO: 1578468 - DNA, 15 bp, Homo sapiens
gctgagatcattcaa

SEQ ID NO: 1578469 - DNA, 15 bp, Homo sapiens
ctgagatcattcaac

SEQ ID NO: 1578470 - DNA, 15 bp, Homo sapiens
tgagatcattcaact

SEQ ID NO: 1578471 - DNA, 15 bp, Homo sapiens
gagatcattcaactg

SEQ ID NO: 1578472 - DNA, 15 bp, Homo sapiens
agatcattcaactgc

SEQ ID NO: 1578473 - DNA, 15 bp, Homo sapiens
gatcattcaactgca

SEQ ID NO: 1578474 - DNA, 15 bp, Homo sapiens
atcattcaactgcac

SEQ ID NO: 1578475 - DNA, 15 bp, Homo sapiens
tcattcaactgcact

SEQ ID NO: 1578476 - DNA, 15 bp, Homo sapiens
cattcaactgcactc

SEQ ID NO: 1578477 - DNA, 15 bp, Homo sapiens
attcaactgcactcc

SEQ ID NO: 1578478 - DNA, 15 bp, Homo sapiens
ttcaactgcactcca

SEQ ID NO: 1578479 - DNA, 15 bp, Homo sapiens
tcaactgcactccag

SEQ ID NO: 1578480 - DNA, 15 bp, Homo sapiens
caactgcactccagc

SEQ ID NO: 1578481 - DNA, 15 bp, Homo sapiens
aactgcactccagca

SEQ ID NO: 1578482 - DNA, 15 bp, Homo sapiens
actgcactccagcag

SEQ ID NO: 1578483 - DNA, 15 bp, Homo sapiens
ctgcactccagcaga

SEQ ID NO: 1578484 - DNA, 15 bp, Homo sapiens
tgcactccagcagag

SEQ ID NO: 1578485 - DNA, 15 bp, Homo sapiens
gcactccagcagagc

SEQ ID NO: 1578486 - DNA, 15 bp, Homo sapiens
cactccagcagagca

SEQ ID NO: 1578487 - DNA, 15 bp, Homo sapiens
actccagcagagcag

SEQ ID NO: 1578488 - DNA, 15 bp, Homo sapiens
ctccagcagagcagc

SEQ ID NO: 1578489 - DNA, 15 bp, Homo sapiens
tccagcagagcagca

SEQ ID NO: 1578490 - DNA, 15 bp, Homo sapiens
ccagcagagcagcag

SEQ ID NO: 1578491 - DNA, 15 bp, Homo sapiens
cagcagagcagcaga

SEQ ID NO: 1578492 - DNA, 15 bp, Homo sapiens
agcagagcagcagag

SEQ ID NO: 1578493 - DNA, 15 bp, Homo sapiens
gcagagcagcagagc

SEQ ID NO: 1578494 - DNA, 15 bp, Homo sapiens
cagagcagcagagcg

SEQ ID NO: 1578495 - DNA, 15 bp, Homo sapiens
agagcagcagagcga

SEQ ID NO: 1578496 - DNA, 15 bp, Homo sapiens
gagcagcagagcgag

SEQ ID NO: 1578497 - DNA, 15 bp, Homo sapiens
agcagcagagcgaga

SEQ ID NO: 1578498 - DNA, 15 bp, Homo sapiens
gcagcagagcgagac

SEQ ID NO: 1578499 - DNA, 15 bp, Homo sapiens
cagcagagcgagact

SEQ ID NO: 1578500 - DNA, 15 bp, Homo sapiens
agcagagcgagactc

SEQ ID NO: 1578501 - DNA, 15 bp, Homo sapiens
gcagagcgagactct

SEQ ID NO: 1578502 - DNA, 15 bp, Homo sapiens
aaaaaaaaaaagtct

SEQ ID NO: 1578503 - DNA, 15 bp, Homo sapiens
aaaaaaaaaagtctt

SEQ ID NO: 1578504 - DNA, 15 bp, Homo sapiens
aaaaaaaaagtctta

SEQ ID NO: 1578505 - DNA, 15 bp, Homo sapiens
aaaaaaaagtcttag

SEQ ID NO: 1578506 - DNA, 15 bp, Homo sapiens
aaaaaaagtcttaga

SEQ ID NO: 1578507 - DNA, 15 bp, Homo sapiens
aaaaaagtcttagag

SEQ ID NO: 1578508 - DNA, 15 bp, Homo sapiens
aaaaagtcttagagg

SEQ ID NO: 1578509 - DNA, 15 bp, Homo sapiens
aaaagtcttagaggc

SEQ ID NO: 1578510 - DNA, 15 bp, Homo sapiens
aaagtcttagaggct

SEQ ID NO: 1578511 - DNA, 15 bp, Homo sapiens
aagtcttagaggcta

SEQ ID NO: 1578512 - DNA, 15 bp, Homo sapiens
agtcttagaggctag

SEQ ID NO: 1578513 - DNA, 15 bp, Homo sapiens
gtcttagaggctaga

SEQ ID NO: 1578514 - DNA, 15 bp, Homo sapiens
tcttagaggctagaa

SEQ ID NO: 1578515 - DNA, 15 bp, Homo sapiens
cttagaggctagaag

SEQ ID NO: 1578516 - DNA, 15 bp, Homo sapiens
ttagaggctagaaga

SEQ ID NO: 1578517 - DNA, 15 bp, Homo sapiens
tagaggctagaagaa

SEQ ID NO: 1578518 - DNA, 15 bp, Homo sapiens
agaggctagaagaaa

SEQ ID NO: 1578519 - DNA, 15 bp, Homo sapiens
gaggctagaagaaag

SEQ ID NO: 1578520 - DNA, 15 bp, Homo sapiens
aggctagaagaaagt

SEQ ID NO: 1578521 - DNA, 15 bp, Homo sapiens
ggctagaagaaagtg

SEQ ID NO: 1578522 - DNA, 15 bp, Homo sapiens
gctagaagaaagtga

SEQ ID NO: 1578523 - DNA, 15 bp, Homo sapiens
ctagaagaaagtgaa

SEQ ID NO: 1578524 - DNA, 15 bp, Homo sapiens
tagaagaaagtgaac

SEQ ID NO: 1578525 - DNA, 15 bp, Homo sapiens
agaagaaagtgaact

SEQ ID NO: 1578526 - DNA, 15 bp, Homo sapiens
gaagaaagtgaactg

SEQ ID NO: 1578527 - DNA, 15 bp, Homo sapiens
aagaaagtgaactgt

SEQ ID NO: 1578528 - DNA, 15 bp, Homo sapiens
agaaagtgaactgtt

SEQ ID NO: 1578529 - DNA, 15 bp, Homo sapiens
gaaagtgaactgttt

SEQ ID NO: 1578530 - DNA, 15 bp, Homo sapiens
aaagtgaactgttta

SEQ ID NO: 1578531 - DNA, 15 bp, Homo sapiens
aagtgaactgtttaa

SEQ ID NO: 1578532 - DNA, 15 bp, Homo sapiens
ctgtttaaggcaaaa

SEQ ID NO: 1578533 - DNA, 15 bp, Homo sapiens
tgtttaaggcaaaat

SEQ ID NO: 1578534 - DNA, 15 bp, Homo sapiens
gtttaaggcaaaatt

SEQ ID NO: 1578535 - DNA, 15 bp, Homo sapiens
tttaaggcaaaatta

SEQ ID NO: 1578536 - DNA, 15 bp, Homo sapiens
ttaaggcaaaattat

SEQ ID NO: 1578537 - DNA, 15 bp, Homo sapiens
taaggcaaaattatt

SEQ ID NO: 1578538 - DNA, 15 bp, Homo sapiens
aaggcaaaattatta

SEQ ID NO: 1578539 - DNA, 15 bp, Homo sapiens
aggcaaaattattat

SEQ ID NO: 1578540 - DNA, 15 bp, Homo sapiens
ggcaaaattattatg

SEQ ID NO: 1578541 - DNA, 15 bp, Homo sapiens
gcaaaattattatgg

SEQ ID NO: 1578542 - DNA, 15 bp, Homo sapiens
caaaattattatgga

SEQ ID NO: 1578543 - DNA, 15 bp, Homo sapiens
aaaattattatggaa

SEQ ID NO: 1578544 - DNA, 15 bp, Homo sapiens
aaattattatggaac

SEQ ID NO: 1578545 - DNA, 15 bp, Homo sapiens
aattattatggaaca

SEQ ID NO: 1578546 - DNA, 15 bp, Homo sapiens
attattatggaacac

SEQ ID NO: 1578547 - DNA, 15 bp, Homo sapiens
ttattatggaacacg

SEQ ID NO: 1578548 - DNA, 15 bp, Homo sapiens
tattatggaacacgt

SEQ ID NO: 1578549 - DNA, 15 bp, Homo sapiens
attatggaacacgta

SEQ ID NO: 1578550 - DNA, 15 bp, Homo sapiens
ttatggaacacgtaa

SEQ ID NO: 1578551 - DNA, 15 bp, Homo sapiens
tatggaacacgtaac

SEQ ID NO: 1578552 - DNA, 15 bp, Homo sapiens
atggaacacgtaaca

SEQ ID NO: 1578553 - DNA, 15 bp, Homo sapiens
tggaacacgtaacat

SEQ ID NO: 1578554 - DNA, 15 bp, Homo sapiens
ggaacacgtaacatt

SEQ ID NO: 1578555 - DNA, 15 bp, Homo sapiens
gaacacgtaacattg

SEQ ID NO: 1578556 - DNA, 15 bp, Homo sapiens
aacacgtaacattgg

SEQ ID NO: 1578557 - DNA, 15 bp, Homo sapiens
acacgtaacattggt

SEQ ID NO: 1578558 - DNA, 15 bp, Homo sapiens
cacgtaacattggta

SEQ ID NO: 1578559 - DNA, 15 bp, Homo sapiens
acgtaacattggtat

SEQ ID NO: 1578560 - DNA, 15 bp, Homo sapiens
cgtaacattggtatc

SEQ ID NO: 1578561 - DNA, 15 bp, Homo sapiens
gtaacattggtatca

SEQ ID NO: 1578562 - DNA, 15 bp, Homo sapiens
taacattggtatcat

SEQ ID NO: 1578563 - DNA, 15 bp, Homo sapiens
aacattggtatcatc

SEQ ID NO: 1578564 - DNA, 15 bp, Homo sapiens
acattggtatcatca

SEQ ID NO: 1578565 - DNA, 15 bp, Homo sapiens
cattggtatcatcat

SEQ ID NO: 1578566 - DNA, 15 bp, Homo sapiens
attggtatcatcatg

SEQ ID NO: 1578567 - DNA, 15 bp, Homo sapiens
ttggtatcatcatgt

SEQ ID NO: 1578568 - DNA, 15 bp, Homo sapiens
tggtatcatcatgta

SEQ ID NO: 1578569 - DNA, 15 bp, Homo sapiens
ggtatcatcatgtat

SEQ ID NO: 1578570 - DNA, 15 bp, Homo sapiens
taatcctgccctagc

SEQ ID NO: 1578571 - DNA, 15 bp, Homo sapiens
aatcctgccctagcc

SEQ ID NO: 1578572 - DNA, 15 bp, Homo sapiens
atcctgccctagccg

SEQ ID NO: 1578573 - DNA, 15 bp, Homo sapiens
tcctgccctagccga

SEQ ID NO: 1578574 - DNA, 15 bp, Homo sapiens
cctgccctagccgag

SEQ ID NO: 1578575 - DNA, 15 bp, Homo sapiens
ctgccctagccgagc

SEQ ID NO: 1578576 - DNA, 15 bp, Homo sapiens
tgccctagccgagct

SEQ ID NO: 1578577 - DNA, 15 bp, Homo sapiens
gccctagccgagctt

SEQ ID NO: 1578578 - DNA, 15 bp, Homo sapiens
ccctagccgagctta

SEQ ID NO: 1578579 - DNA, 15 bp, Homo sapiens
cctagccgagcttac

SEQ ID NO: 1578580 - DNA, 15 bp, Homo sapiens
ctagccgagcttacc

SEQ ID NO: 1578581 - DNA, 15 bp, Homo sapiens
tagccgagcttaccc

SEQ ID NO: 1578582 - DNA, 15 bp, Homo sapiens
agccgagcttaccct

SEQ ID NO: 1578583 - DNA, 15 bp, Homo sapiens
gccgagcttaccctg

SEQ ID NO: 1578584 - DNA, 15 bp, Homo sapiens
ccgagcttaccctgc

SEQ ID NO: 1578585 - DNA, 15 bp, Homo sapiens
cgagcttaccctgcc

SEQ ID NO: 1578586 - DNA, 15 bp, Homo sapiens
gagcttaccctgcca

SEQ ID NO: 1578587 - DNA, 15 bp, Homo sapiens
agcttaccctgccaa

SEQ ID NO: 1578588 - DNA, 15 bp, Homo sapiens
gcttaccctgccaat

SEQ ID NO: 1578589 - DNA, 15 bp, Homo sapiens
cttaccctgccaata

SEQ ID NO: 1578590 - DNA, 15 bp, Homo sapiens
ttaccctgccaataa

SEQ ID NO: 1578591 - DNA, 15 bp, Homo sapiens
taccctgccaataat

SEQ ID NO: 1578592 - DNA, 15 bp, Homo sapiens
accctgccaataatt

SEQ ID NO: 1578593 - DNA, 15 bp, Homo sapiens
ccctgccaataattt

SEQ ID NO: 1578594 - DNA, 15 bp, Homo sapiens
cctgccaataatttt

SEQ ID NO: 1578595 - DNA, 15 bp, Homo sapiens
ctgccaataattttt

SEQ ID NO: 1578596 - DNA, 15 bp, Homo sapiens
tgccaataatttttt

SEQ ID NO: 1578597 - DNA, 15 bp, Homo sapiens
gccaataatttttta

SEQ ID NO: 1578598 - DNA, 15 bp, Homo sapiens
ccaataattttttac

SEQ ID NO: 1578599 - DNA, 15 bp, Homo sapiens
caataattttttaca

SEQ ID NO: 1578600 - DNA, 15 bp, Homo sapiens
aataattttttacag

SEQ ID NO: 1578601 - DNA, 15 bp, Homo sapiens
ataattttttacaga

SEQ ID NO: 1578602 - DNA, 15 bp, Homo sapiens
taattttttacagaa

SEQ ID NO: 1578603 - DNA, 15 bp, Homo sapiens
aattttttacagaat

SEQ ID NO: 1578604 - DNA, 15 bp, Homo sapiens
attttttacagaatt

SEQ ID NO: 1578605 - DNA, 15 bp, Homo sapiens
ttttttacagaattg

SEQ ID NO: 1578606 - DNA, 15 bp, Homo sapiens
tttttacagaattgg

SEQ ID NO: 1578607 - DNA, 15 bp, Homo sapiens
ttttacagaattggt

SEQ ID NO: 1578608 - DNA, 15 bp, Homo sapiens
tttacagaattggta

SEQ ID NO: 1578609 - DNA, 15 bp, Homo sapiens
ttacagaattggtaa

SEQ ID NO: 1578610 - DNA, 15 bp, Homo sapiens
tacagaattggtaaa

SEQ ID NO: 1578611 - DNA, 15 bp, Homo sapiens
acagaattggtaaaa

SEQ ID NO: 1578612 - DNA, 15 bp, Homo sapiens
cagaattggtaaaac

SEQ ID NO: 1578613 - DNA, 15 bp, Homo sapiens
agaattggtaaaacg

SEQ ID NO: 1578614 - DNA, 15 bp, Homo sapiens
gaattggtaaaacgg

SEQ ID NO: 1578615 - DNA, 15 bp, Homo sapiens
aattggtaaaacgga

SEQ ID NO: 1578616 - DNA, 15 bp, Homo sapiens
attggtaaaacggag

SEQ ID NO: 1578617 - DNA, 15 bp, Homo sapiens
ttggtaaaacggagc

SEQ ID NO: 1578618 - DNA, 15 bp, Homo sapiens
tggtaaaacggagca

SEQ ID NO: 1578619 - DNA, 15 bp, Homo sapiens
ggtaaaacggagcac

SEQ ID NO: 1578620 - DNA, 15 bp, Homo sapiens
gtaaaacggagcacc

SEQ ID NO: 1578621 - DNA, 15 bp, Homo sapiens
taaaacggagcacct

SEQ ID NO: 1578622 - DNA, 15 bp, Homo sapiens
aaaacggagcacctt

SEQ ID NO: 1578623 - DNA, 15 bp, Homo sapiens
aaacggagcaccttt

SEQ ID NO: 1578624 - DNA, 15 bp, Homo sapiens
aacggagcacctttt

SEQ ID NO: 1578625 - DNA, 15 bp, Homo sapiens
acggagcaccttttt

SEQ ID NO: 1578626 - DNA, 15 bp, Homo sapiens
cggagcacctttttt

SEQ ID NO: 1578627 - DNA, 15 bp, Homo sapiens
ggagcaccttttttt

SEQ ID NO: 1578628 - DNA, 15 bp, Homo sapiens
gagcacctttttttt

SEQ ID NO: 1578629 - DNA, 15 bp, Homo sapiens
agcaccttttttttg

SEQ ID NO: 1578630 - DNA, 15 bp, Homo sapiens
gcaccttttttttgt

SEQ ID NO: 1578631 - DNA, 15 bp, Homo sapiens
caccttttttttgtc

SEQ ID NO: 1578632 - DNA, 15 bp, Homo sapiens
accttttttttgtcc

SEQ ID NO: 1578633 - DNA, 15 bp, Homo sapiens
ccttttttttgtcct

SEQ ID NO: 1578634 - DNA, 15 bp, Homo sapiens
cttttttttgtcctt

SEQ ID NO: 1578635 - DNA, 15 bp, Homo sapiens
ttttttttgtccttg

SEQ ID NO: 1578636 - DNA, 15 bp, Homo sapiens
tttttttgtccttgg

SEQ ID NO: 1578637 - DNA, 15 bp, Homo sapiens
ttttttgtccttggc

SEQ ID NO: 1578638 - DNA, 15 bp, Homo sapiens
tttttgtccttggcc

SEQ ID NO: 1578639 - DNA, 15 bp, Homo sapiens
ttttgtccttggcca

SEQ ID NO: 1578640 - DNA, 15 bp, Homo sapiens
tttgtccttggccac

SEQ ID NO: 1578641 - DNA, 15 bp, Homo sapiens
ttgtccttggccaca

SEQ ID NO: 1578642 - DNA, 15 bp, Homo sapiens
tgtccttggccacac

SEQ ID NO: 1578643 - DNA, 15 bp, Homo sapiens
gtccttggccacact

SEQ ID NO: 1578644 - DNA, 15 bp, Homo sapiens
tccttggccacactg

SEQ ID NO: 1578645 - DNA, 15 bp, Homo sapiens
ccttggccacactgt

SEQ ID NO: 1578646 - DNA, 15 bp, Homo sapiens
cttggccacactgtt

SEQ ID NO: 1578647 - DNA, 15 bp, Homo sapiens
ttggccacactgtta

SEQ ID NO: 1578648 - DNA, 15 bp, Homo sapiens
tggccacactgttat

SEQ ID NO: 1578649 - DNA, 15 bp, Homo sapiens
ggccacactgttatc

SEQ ID NO: 1578650 - DNA, 15 bp, Homo sapiens
gccacactgttatca

SEQ ID NO: 1578651 - DNA, 15 bp, Homo sapiens
ccacactgttatcaa

SEQ ID NO: 1578652 - DNA, 15 bp, Homo sapiens
cacactgttatcaac

SEQ ID NO: 1578653 - DNA, 15 bp, Homo sapiens
acactgttatcaaca

SEQ ID NO: 1578654 - DNA, 15 bp, Homo sapiens
cactgttatcaacag

SEQ ID NO: 1578655 - DNA, 15 bp, Homo sapiens
actgttatcaacagg

SEQ ID NO: 1578656 - DNA, 15 bp, Homo sapiens
ctgttatcaacaggg

SEQ ID NO: 1578657 - DNA, 15 bp, Homo sapiens
tgttatcaacagggt

SEQ ID NO: 1578658 - DNA, 15 bp, Homo sapiens
gttatcaacagggtg

SEQ ID NO: 1578659 - DNA, 15 bp, Homo sapiens
ttatcaacagggtgt

SEQ ID NO: 1578660 - DNA, 15 bp, Homo sapiens
tatcaacagggtgta

SEQ ID NO: 1578661 - DNA, 15 bp, Homo sapiens
atcaacagggtgtag

SEQ ID NO: 1578662 - DNA, 15 bp, Homo sapiens
tcaacagggtgtaga

SEQ ID NO: 1578663 - DNA, 15 bp, Homo sapiens
caacagggtgtagat

SEQ ID NO: 1578664 - DNA, 15 bp, Homo sapiens
aacagggtgtagatt

SEQ ID NO: 1578665 - DNA, 15 bp, Homo sapiens
acagggtgtagattg

SEQ ID NO: 1578666 - DNA, 15 bp, Homo sapiens
cagggtgtagattga

SEQ ID NO: 1578667 - DNA, 15 bp, Homo sapiens
agggtgtagattgac

SEQ ID NO: 1578668 - DNA, 15 bp, Homo sapiens
gggtgtagattgaca

SEQ ID NO: 1578669 - DNA, 15 bp, Homo sapiens
ggtgtagattgacat

SEQ ID NO: 1578670 - DNA, 15 bp, Homo sapiens
gtgtagattgacatc

SEQ ID NO: 1578671 - DNA, 15 bp, Homo sapiens
tgtagattgacatca

SEQ ID NO: 1578672 - DNA, 15 bp, Homo sapiens
gtagattgacatcaa

SEQ ID NO: 1578673 - DNA, 15 bp, Homo sapiens
tagattgacatcaat

SEQ ID NO: 1578674 - DNA, 15 bp, Homo sapiens
agattgacatcaatc

SEQ ID NO: 1578675 - DNA, 15 bp, Homo sapiens
gattgacatcaatct

SEQ ID NO: 1578676 - DNA, 15 bp, Homo sapiens
attgacatcaatctg

SEQ ID NO: 1578677 - DNA, 15 bp, Homo sapiens
ttgacatcaatctgt

SEQ ID NO: 1578678 - DNA, 15 bp, Homo sapiens
tgacatcaatctgta

SEQ ID NO: 1578679 - DNA, 15 bp, Homo sapiens
gacatcaatctgtag

SEQ ID NO: 1578680 - DNA, 15 bp, Homo sapiens
acatcaatctgtagg

SEQ ID NO: 1578681 - DNA, 15 bp, Homo sapiens
catcaatctgtaggt

SEQ ID NO: 1578682 - DNA, 15 bp, Homo sapiens
atcaatctgtaggtg

SEQ ID NO: 1578683 - DNA, 15 bp, Homo sapiens
tcaatctgtaggtgt

SEQ ID NO: 1578684 - DNA, 15 bp, Homo sapiens
caatctgtaggtgta

SEQ ID NO: 1578685 - DNA, 15 bp, Homo sapiens
aatctgtaggtgtaa

SEQ ID NO: 1578686 - DNA, 15 bp, Homo sapiens
atctgtaggtgtaaa

SEQ ID NO: 1578687 - DNA, 15 bp, Homo sapiens
tctgtaggtgtaaac

SEQ ID NO: 1578688 - DNA, 15 bp, Homo sapiens
ctgtaggtgtaaacc

SEQ ID NO: 1578689 - DNA, 15 bp, Homo sapiens
tgtaggtgtaaacca

SEQ ID NO: 1578690 - DNA, 15 bp, Homo sapiens
gtaggtgtaaaccag

SEQ ID NO: 1578691 - DNA, 15 bp, Homo sapiens
taggtgtaaaccaga

SEQ ID NO: 1578692 - DNA, 15 bp, Homo sapiens
aggtgtaaaccagaa

SEQ ID NO: 1578693 - DNA, 15 bp, Homo sapiens
ggtgtaaaccagaat

SEQ ID NO: 1578694 - DNA, 15 bp, Homo sapiens
gtgtaaaccagaatt

SEQ ID NO: 1578695 - DNA, 15 bp, Homo sapiens
tgtaaaccagaatta

SEQ ID NO: 1578696 - DNA, 15 bp, Homo sapiens
gtaaaccagaattac

SEQ ID NO: 1578697 - DNA, 15 bp, Homo sapiens
taaaccagaattact

SEQ ID NO: 1578698 - DNA, 15 bp, Homo sapiens
aaaccagaattactc

SEQ ID NO: 1578699 - DNA, 15 bp, Homo sapiens
aaccagaattactct

SEQ ID NO: 1578700 - DNA, 15 bp, Homo sapiens
accagaattactctt

SEQ ID NO: 1578701 - DNA, 15 bp, Homo sapiens
ccagaattactcttt

SEQ ID NO: 1578702 - DNA, 15 bp, Homo sapiens
cagaattactctttg

SEQ ID NO: 1578703 - DNA, 15 bp, Homo sapiens
agaattactctttgt

SEQ ID NO: 1578704 - DNA, 15 bp, Homo sapiens
gaattactctttgtg

SEQ ID NO: 1578705 - DNA, 15 bp, Homo sapiens
aattactctttgtga

SEQ ID NO: 1578706 - DNA, 15 bp, Homo sapiens
attactctttgtgac

SEQ ID NO: 1578707 - DNA, 15 bp, Homo sapiens
ttactctttgtgacc

SEQ ID NO: 1578708 - DNA, 15 bp, Homo sapiens
tactctttgtgacca

SEQ ID NO: 1578709 - DNA, 15 bp, Homo sapiens
actctttgtgaccac

SEQ ID NO: 1578710 - DNA, 15 bp, Homo sapiens
ctctttgtgaccacc

SEQ ID NO: 1578711 - DNA, 15 bp, Homo sapiens
tctttgtgaccacca

SEQ ID NO: 1578712 - DNA, 15 bp, Homo sapiens
ctttgtgaccaccag

SEQ ID NO: 1578713 - DNA, 15 bp, Homo sapiens
tttgtgaccaccagg

SEQ ID NO: 1578714 - DNA, 15 bp, Homo sapiens
ttgtgaccaccagga

SEQ ID NO: 1578715 - DNA, 15 bp, Homo sapiens
tgtgaccaccaggaa

SEQ ID NO: 1578716 - DNA, 15 bp, Homo sapiens
gtgaccaccaggaaa

SEQ ID NO: 1578717 - DNA, 15 bp, Homo sapiens
tgaccaccaggaaat

SEQ ID NO: 1578718 - DNA, 15 bp, Homo sapiens
gaccaccaggaaata

SEQ ID NO: 1578719 - DNA, 15 bp, Homo sapiens
accaccaggaaatag

SEQ ID NO: 1578720 - DNA, 15 bp, Homo sapiens
ccaccaggaaataga

SEQ ID NO: 1578721 - DNA, 15 bp, Homo sapiens
caccaggaaatagag

SEQ ID NO: 1578722 - DNA, 15 bp, Homo sapiens
accaggaaatagagc

SEQ ID NO: 1578723 - DNA, 15 bp, Homo sapiens
ccaggaaatagagca

SEQ ID NO: 1578724 - DNA, 15 bp, Homo sapiens
caggaaatagagcag

SEQ ID NO: 1578725 - DNA, 15 bp, Homo sapiens
aggaaatagagcagt

SEQ ID NO: 1578726 - DNA, 15 bp, Homo sapiens
ggaaatagagcagtt

SEQ ID NO: 1578727 - DNA, 15 bp, Homo sapiens
gaaatagagcagttc

SEQ ID NO: 1578728 - DNA, 15 bp, Homo sapiens
aaatagagcagttca

SEQ ID NO: 1578729 - DNA, 15 bp, Homo sapiens
aatagagcagttcag

SEQ ID NO: 1578730 - DNA, 15 bp, Homo sapiens
atagagcagttcagt

SEQ ID NO: 1578731 - DNA, 15 bp, Homo sapiens
tagagcagttcagtt

SEQ ID NO: 1578732 - DNA, 15 bp, Homo sapiens
agagcagttcagttc

SEQ ID NO: 1578733 - DNA, 15 bp, Homo sapiens
gagcagttcagttca

SEQ ID NO: 1578734 - DNA, 15 bp, Homo sapiens
agcagttcagttcag

SEQ ID NO: 1578735 - DNA, 15 bp, Homo sapiens
gcagttcagttcagg

SEQ ID NO: 1578736 - DNA, 15 bp, Homo sapiens
cagttcagttcaggg

SEQ ID NO: 1578737 - DNA, 15 bp, Homo sapiens
agttcagttcagggg

SEQ ID NO: 1578738 - DNA, 15 bp, Homo sapiens
gttcagttcaggggt

SEQ ID NO: 1578739 - DNA, 15 bp, Homo sapiens
ttcagttcaggggtt

SEQ ID NO: 1578740 - DNA, 15 bp, Homo sapiens
tcagttcaggggttt

SEQ ID NO: 1578741 - DNA, 15 bp, Homo sapiens
cagttcaggggtttc

SEQ ID NO: 1578742 - DNA, 15 bp, Homo sapiens
agttcaggggtttct

SEQ ID NO: 1578743 - DNA, 15 bp, Homo sapiens
gttcaggggtttctt

SEQ ID NO: 1578744 - DNA, 15 bp, Homo sapiens
ttcaggggtttcttt

SEQ ID NO: 1578745 - DNA, 15 bp, Homo sapiens
tcaggggtttctttc

SEQ ID NO: 1578746 - DNA, 15 bp, Homo sapiens
caggggtttctttct

SEQ ID NO: 1578747 - DNA, 15 bp, Homo sapiens
aggggtttctttctg

SEQ ID NO: 1578748 - DNA, 15 bp, Homo sapiens
ggggtttctttctgt

SEQ ID NO: 1578749 - DNA, 15 bp, Homo sapiens
gggtttctttctgtg

SEQ ID NO: 1578750 - DNA, 15 bp, Homo sapiens
ggtttctttctgtga

SEQ ID NO: 1578751 - DNA, 15 bp, Homo sapiens
ttctttctgtgaatt

SEQ ID NO: 1578752 - DNA, 15 bp, Homo sapiens
tctttctgtgaattt

SEQ ID NO: 1578753 - DNA, 15 bp, Homo sapiens
ctttctgtgaattta

SEQ ID NO: 1578754 - DNA, 15 bp, Homo sapiens
tttctgtgaatttag

SEQ ID NO: 1578755 - DNA, 15 bp, Homo sapiens
ttctgtgaatttagc

SEQ ID NO: 1578756 - DNA, 15 bp, Homo sapiens
tctgtgaatttagca

SEQ ID NO: 1578757 - DNA, 15 bp, Homo sapiens
ctgtgaatttagcac

SEQ ID NO: 1578758 - DNA, 15 bp, Homo sapiens
tgtgaatttagcact

SEQ ID NO: 1578759 - DNA, 15 bp, Homo sapiens
gtgaatttagcactg

SEQ ID NO: 1578760 - DNA, 15 bp, Homo sapiens
tgaatttagcactgt

SEQ ID NO: 1578761 - DNA, 15 bp, Homo sapiens
gaatttagcactgtg

SEQ ID NO: 1578762 - DNA, 15 bp, Homo sapiens
aatttagcactgtga

SEQ ID NO: 1578763 - DNA, 15 bp, Homo sapiens
atttagcactgtgac

SEQ ID NO: 1578764 - DNA, 15 bp, Homo sapiens
tttagcactgtgacc

SEQ ID NO: 1578765 - DNA, 15 bp, Homo sapiens
ttagcactgtgacct

SEQ ID NO: 1578766 - DNA, 15 bp, Homo sapiens
tagcactgtgacctg

SEQ ID NO: 1578767 - DNA, 15 bp, Homo sapiens
agcactgtgacctgc

SEQ ID NO: 1578768 - DNA, 15 bp, Homo sapiens
gcactgtgacctgca

SEQ ID NO: 1578769 - DNA, 15 bp, Homo sapiens
cactgtgacctgcat

SEQ ID NO: 1578770 - DNA, 15 bp, Homo sapiens
actgtgacctgcata

SEQ ID NO: 1578771 - DNA, 15 bp, Homo sapiens
ctgtgacctgcatac

SEQ ID NO: 1578772 - DNA, 15 bp, Homo sapiens
tgtgacctgcatact

SEQ ID NO: 1578773 - DNA, 15 bp, Homo sapiens
gtgacctgcatacta

SEQ ID NO: 1578774 - DNA, 15 bp, Homo sapiens
tgacctgcatactac

SEQ ID NO: 1578775 - DNA, 15 bp, Homo sapiens
gacctgcatactaca

SEQ ID NO: 1578776 - DNA, 15 bp, Homo sapiens
acctgcatactacaa

SEQ ID NO: 1578777 - DNA, 15 bp, Homo sapiens
cctgcatactacaag

SEQ ID NO: 1578778 - DNA, 15 bp, Homo sapiens
ctgcatactacaagt

SEQ ID NO: 1578779 - DNA, 15 bp, Homo sapiens
tgcatactacaagtc

SEQ ID NO: 1578780 - DNA, 15 bp, Homo sapiens
gcatactacaagtct

SEQ ID NO: 1578781 - DNA, 15 bp, Homo sapiens
catactacaagtcta

SEQ ID NO: 1578782 - DNA, 15 bp, Homo sapiens
atactacaagtctac

SEQ ID NO: 1578783 - DNA, 15 bp, Homo sapiens
tactacaagtctact

SEQ ID NO: 1578784 - DNA, 15 bp, Homo sapiens
actacaagtctactt

SEQ ID NO: 1578785 - DNA, 15 bp, Homo sapiens
ctacaagtctacttt

SEQ ID NO: 1578786 - DNA, 15 bp, Homo sapiens
tacaagtctactttg

SEQ ID NO: 1578787 - DNA, 15 bp, Homo sapiens
acaagtctactttgt

SEQ ID NO: 1578788 - DNA, 15 bp, Homo sapiens
caagtctactttgtt

SEQ ID NO: 1578789 - DNA, 15 bp, Homo sapiens
aagtctactttgttt

SEQ ID NO: 1578790 - DNA, 15 bp, Homo sapiens
agtctactttgtttt

SEQ ID NO: 1578791 - DNA, 15 bp, Homo sapiens
gtctactttgttttc

SEQ ID NO: 1578792 - DNA, 15 bp, Homo sapiens
tctactttgttttct

SEQ ID NO: 1578793 - DNA, 15 bp, Homo sapiens
ctactttgttttcta

SEQ ID NO: 1578794 - DNA, 15 bp, Homo sapiens
tactttgttttctat

SEQ ID NO: 1578795 - DNA, 15 bp, Homo sapiens
actttgttttctatc

SEQ ID NO: 1578796 - DNA, 15 bp, Homo sapiens
ctttgttttctatcc

SEQ ID NO: 1578797 - DNA, 15 bp, Homo sapiens
tttgttttctatcca

SEQ ID NO: 1578798 - DNA, 15 bp, Homo sapiens
ttgttttctatccat

SEQ ID NO: 1578799 - DNA, 15 bp, Homo sapiens
tgttttctatccatt

SEQ ID NO: 1578800 - DNA, 15 bp, Homo sapiens
gttttctatccattg

SEQ ID NO: 1578801 - DNA, 15 bp, Homo sapiens
ttttctatccattgt

SEQ ID NO: 1578802 - DNA, 15 bp, Homo sapiens
tttctatccattgtt

SEQ ID NO: 1578803 - DNA, 15 bp, Homo sapiens
ttctatccattgttt

SEQ ID NO: 1578804 - DNA, 15 bp, Homo sapiens
tctatccattgtttg

SEQ ID NO: 1578805 - DNA, 15 bp, Homo sapiens
ctatccattgtttgt

SEQ ID NO: 1578806 - DNA, 15 bp, Homo sapiens
tatccattgtttgta

SEQ ID NO: 1578807 - DNA, 15 bp, Homo sapiens
atccattgtttgtat

SEQ ID NO: 1578808 - DNA, 15 bp, Homo sapiens
tccattgtttgtatc

SEQ ID NO: 1578809 - DNA, 15 bp, Homo sapiens
ccattgtttgtatct

SEQ ID NO: 1578810 - DNA, 15 bp, Homo sapiens
cattgtttgtatctg

SEQ ID NO: 1578811 - DNA, 15 bp, Homo sapiens
attgtttgtatctgg

SEQ ID NO: 1578812 - DNA, 15 bp, Homo sapiens
ttgtttgtatctggg

SEQ ID NO: 1578813 - DNA, 15 bp, Homo sapiens
tgtttgtatctgggt

SEQ ID NO: 1578814 - DNA, 15 bp, Homo sapiens
gtttgtatctgggta

SEQ ID NO: 1578815 - DNA, 15 bp, Homo sapiens
tttgtatctgggtat

SEQ ID NO: 1578816 - DNA, 15 bp, Homo sapiens
ttgtatctgggtatt

SEQ ID NO: 1578817 - DNA, 15 bp, Homo sapiens
tgtatctgggtattg

SEQ ID NO: 1578818 - DNA, 15 bp, Homo sapiens
gtatctgggtattgc

SEQ ID NO: 1578819 - DNA, 15 bp, Homo sapiens
tatctgggtattgca

SEQ ID NO: 1578820 - DNA, 15 bp, Homo sapiens
atctgggtattgcaa

SEQ ID NO: 1578821 - DNA, 15 bp, Homo sapiens
tctgggtattgcaaa

SEQ ID NO: 1578822 - DNA, 15 bp, Homo sapiens
ctgggtattgcaaaa

SEQ ID NO: 1578823 - DNA, 15 bp, Homo sapiens
tgggtattgcaaaag

SEQ ID NO: 1578824 - DNA, 15 bp, Homo sapiens
gggtattgcaaaagg

SEQ ID NO: 1578825 - DNA, 15 bp, Homo sapiens
ggtattgcaaaaggt

SEQ ID NO: 1578826 - DNA, 15 bp, Homo sapiens
gtattgcaaaaggta

SEQ ID NO: 1578827 - DNA, 15 bp, Homo sapiens
tattgcaaaaggtag

SEQ ID NO: 1578828 - DNA, 15 bp, Homo sapiens
attgcaaaaggtagg

SEQ ID NO: 1578829 - DNA, 15 bp, Homo sapiens
ttgcaaaaggtagga

SEQ ID NO: 1578830 - DNA, 15 bp, Homo sapiens
tgcaaaaggtaggaa

SEQ ID NO: 1578831 - DNA, 15 bp, Homo sapiens
gcaaaaggtaggaaa

SEQ ID NO: 1578832 - DNA, 15 bp, Homo sapiens
caaaaggtaggaaaa

SEQ ID NO: 1578833 - DNA, 15 bp, Homo sapiens
aaaaggtaggaaaag

SEQ ID NO: 1578834 - DNA, 15 bp, Homo sapiens
aaaggtaggaaaagg

SEQ ID NO: 1578835 - DNA, 15 bp, Homo sapiens
aaggtaggaaaagga

SEQ ID NO: 1578836 - DNA, 15 bp, Homo sapiens
aggtaggaaaaggac

SEQ ID NO: 1578837 - DNA, 15 bp, Homo sapiens
ggtaggaaaaggacc

SEQ ID NO: 1578838 - DNA, 15 bp, Homo sapiens
gtaggaaaaggacca

SEQ ID NO: 1578839 - DNA, 15 bp, Homo sapiens
taggaaaaggaccaa

SEQ ID NO: 1578840 - DNA, 15 bp, Homo sapiens
aggaaaaggaccaac

SEQ ID NO: 1578841 - DNA, 15 bp, Homo sapiens
ggaaaaggaccaacc

SEQ ID NO: 1578842 - DNA, 15 bp, Homo sapiens
gaaaaggaccaacca

SEQ ID NO: 1578843 - DNA, 15 bp, Homo sapiens
aaaaggaccaaccag

SEQ ID NO: 1578844 - DNA, 15 bp, Homo sapiens
aaaggaccaaccaga

SEQ ID NO: 1578845 - DNA, 15 bp, Homo sapiens
aaggaccaaccagat

SEQ ID NO: 1578846 - DNA, 15 bp, Homo sapiens
aggaccaaccagatc

SEQ ID NO: 1578847 - DNA, 15 bp, Homo sapiens
ggaccaaccagatca

SEQ ID NO: 1578848 - DNA, 15 bp, Homo sapiens
gaccaaccagatcag

SEQ ID NO: 1578849 - DNA, 15 bp, Homo sapiens
accaaccagatcagc

SEQ ID NO: 1578850 - DNA, 15 bp, Homo sapiens
ccaaccagatcagca

SEQ ID NO: 1578851 - DNA, 15 bp, Homo sapiens
caaccagatcagcag

SEQ ID NO: 1578852 - DNA, 15 bp, Homo sapiens
aaccagatcagcaga

SEQ ID NO: 1578853 - DNA, 15 bp, Homo sapiens
accagatcagcagag

SEQ ID NO: 1578854 - DNA, 15 bp, Homo sapiens
ccagatcagcagaga

SEQ ID NO: 1578855 - DNA, 15 bp, Homo sapiens
cagatcagcagagaa

SEQ ID NO: 1578856 - DNA, 15 bp, Homo sapiens
agatcagcagagaag

SEQ ID NO: 1578857 - DNA, 15 bp, Homo sapiens
gatcagcagagaaga

SEQ ID NO: 1578858 - DNA, 15 bp, Homo sapiens
atcagcagagaagag

SEQ ID NO: 1578859 - DNA, 15 bp, Homo sapiens
tcagcagagaagagt

SEQ ID NO: 1578860 - DNA, 15 bp, Homo sapiens
cagcagagaagagtt

SEQ ID NO: 1578861 - DNA, 15 bp, Homo sapiens
agcagagaagagttg

SEQ ID NO: 1578862 - DNA, 15 bp, Homo sapiens
gcagagaagagttgc

SEQ ID NO: 1578863 - DNA, 15 bp, Homo sapiens
cagagaagagttgcc

SEQ ID NO: 1578864 - DNA, 15 bp, Homo sapiens
agagaagagttgcct

SEQ ID NO: 1578865 - DNA, 15 bp, Homo sapiens
gagaagagttgcctt

SEQ ID NO: 1578866 - DNA, 15 bp, Homo sapiens
agaagagttgccttg

SEQ ID NO: 1578867 - DNA, 15 bp, Homo sapiens
gaagagttgccttgg

SEQ ID NO: 1578868 - DNA, 15 bp, Homo sapiens
aagagttgccttgga

SEQ ID NO: 1578869 - DNA, 15 bp, Homo sapiens
agagttgccttggag

SEQ ID NO: 1578870 - DNA, 15 bp, Homo sapiens
gagttgccttggagt

SEQ ID NO: 1578871 - DNA, 15 bp, Homo sapiens
agttgccttggagtt

SEQ ID NO: 1578872 - DNA, 15 bp, Homo sapiens
gttgccttggagttt

SEQ ID NO: 1578873 - DNA, 15 bp, Homo sapiens
ttgccttggagtttt

SEQ ID NO: 1578874 - DNA, 15 bp, Homo sapiens
tgccttggagttttc

SEQ ID NO: 1578875 - DNA, 15 bp, Homo sapiens
gccttggagttttct

SEQ ID NO: 1578876 - DNA, 15 bp, Homo sapiens
ccttggagttttctt

SEQ ID NO: 1578877 - DNA, 15 bp, Homo sapiens
cttggagttttcttt

SEQ ID NO: 1578878 - DNA, 15 bp, Homo sapiens
ttggagttttctttt

SEQ ID NO: 1578879 - DNA, 15 bp, Homo sapiens
tggagttttctttta

SEQ ID NO: 1578880 - DNA, 15 bp, Homo sapiens
ggagttttcttttag

SEQ ID NO: 1578881 - DNA, 15 bp, Homo sapiens
gagttttcttttagt

SEQ ID NO: 1578882 - DNA, 15 bp, Homo sapiens
agttttcttttagtt

SEQ ID NO: 1578883 - DNA, 15 bp, Homo sapiens
gttttcttttagttt

SEQ ID NO: 1578884 - DNA, 15 bp, Homo sapiens
ttttcttttagtttt

SEQ ID NO: 1578885 - DNA, 15 bp, Homo sapiens
tttcttttagttttc

SEQ ID NO: 1578886 - DNA, 15 bp, Homo sapiens
ttcttttagttttct

SEQ ID NO: 1578887 - DNA, 15 bp, Homo sapiens
tcttttagttttctg

SEQ ID NO: 1578888 - DNA, 15 bp, Homo sapiens
cttttagttttctgc

SEQ ID NO: 1578889 - DNA, 15 bp, Homo sapiens
ttttagttttctgca

SEQ ID NO: 1578890 - DNA, 15 bp, Homo sapiens
tttagttttctgcag

SEQ ID NO: 1578891 - DNA, 15 bp, Homo sapiens
ttagttttctgcagt

SEQ ID NO: 1578892 - DNA, 15 bp, Homo sapiens
tagttttctgcagtt

SEQ ID NO: 1578893 - DNA, 15 bp, Homo sapiens
agttttctgcagttc

SEQ ID NO: 1578894 - DNA, 15 bp, Homo sapiens
gttttctgcagttca

SEQ ID NO: 1578895 - DNA, 15 bp, Homo sapiens
ttttctgcagttcat

SEQ ID NO: 1578896 - DNA, 15 bp, Homo sapiens
tttctgcagttcatt

SEQ ID NO: 1578897 - DNA, 15 bp, Homo sapiens
ttctgcagttcatta

SEQ ID NO: 1578898 - DNA, 15 bp, Homo sapiens
tctgcagttcattag

SEQ ID NO: 1578899 - DNA, 15 bp, Homo sapiens
ctgcagttcattaga

SEQ ID NO: 1578900 - DNA, 15 bp, Homo sapiens
tgcagttcattagat

SEQ ID NO: 1578901 - DNA, 15 bp, Homo sapiens
gcagttcattagata

SEQ ID NO: 1578902 - DNA, 15 bp, Homo sapiens
cagttcattagatag

SEQ ID NO: 1578903 - DNA, 15 bp, Homo sapiens
agttcattagatagt

SEQ ID NO: 1578904 - DNA, 15 bp, Homo sapiens
gttcattagatagta

SEQ ID NO: 1578905 - DNA, 15 bp, Homo sapiens
ttcattagatagtaa

SEQ ID NO: 1578906 - DNA, 15 bp, Homo sapiens
tcattagatagtaac

SEQ ID NO: 1578907 - DNA, 15 bp, Homo sapiens
cattagatagtaact

SEQ ID NO: 1578908 - DNA, 15 bp, Homo sapiens
attagatagtaacta

SEQ ID NO: 1578909 - DNA, 15 bp, Homo sapiens
ttagatagtaactag

SEQ ID NO: 1578910 - DNA, 15 bp, Homo sapiens
tagatagtaactagg

SEQ ID NO: 1578911 - DNA, 15 bp, Homo sapiens
agatagtaactaggc

SEQ ID NO: 1578912 - DNA, 15 bp, Homo sapiens
gatagtaactaggcc

SEQ ID NO: 1578913 - DNA, 15 bp, Homo sapiens
atagtaactaggcca

SEQ ID NO: 1578914 - DNA, 15 bp, Homo sapiens
tagtaactaggccat

SEQ ID NO: 1578915 - DNA, 15 bp, Homo sapiens
agtaactaggccatg

SEQ ID NO: 1578916 - DNA, 15 bp, Homo sapiens
gtaactaggccatgt

SEQ ID NO: 1578917 - DNA, 15 bp, Homo sapiens
taactaggccatgtc

SEQ ID NO: 1578918 - DNA, 15 bp, Homo sapiens
aactaggccatgtca

SEQ ID NO: 1578919 - DNA, 15 bp, Homo sapiens
actaggccatgtcat

SEQ ID NO: 1578920 - DNA, 15 bp, Homo sapiens
ctaggccatgtcatt

SEQ ID NO: 1578921 - DNA, 15 bp, Homo sapiens
taggccatgtcattt

SEQ ID NO: 1578922 - DNA, 15 bp, Homo sapiens
aggccatgtcatttt

SEQ ID NO: 1578923 - DNA, 15 bp, Homo sapiens
ggccatgtcatttta

SEQ ID NO: 1578924 - DNA, 15 bp, Homo sapiens
gccatgtcattttac

SEQ ID NO: 1578925 - DNA, 15 bp, Homo sapiens
ccatgtcattttact

SEQ ID NO: 1578926 - DNA, 15 bp, Homo sapiens
catgtcattttactc

SEQ ID NO: 1578927 - DNA, 15 bp, Homo sapiens
atgtcattttactcc

SEQ ID NO: 1578928 - DNA, 15 bp, Homo sapiens
tgtcattttactccc

SEQ ID NO: 1578929 - DNA, 15 bp, Homo sapiens
gtcattttactccct

SEQ ID NO: 1578930 - DNA, 15 bp, Homo sapiens
tcattttactccctt

SEQ ID NO: 1578931 - DNA, 15 bp, Homo sapiens
cattttactcccttg

SEQ ID NO: 1578932 - DNA, 15 bp, Homo sapiens
attttactcccttgt

SEQ ID NO: 1578933 - DNA, 15 bp, Homo sapiens
ttttactcccttgta

SEQ ID NO: 1578934 - DNA, 15 bp, Homo sapiens
tttactcccttgtag

SEQ ID NO: 1578935 - DNA, 15 bp, Homo sapiens
ttactcccttgtagt

SEQ ID NO: 1578936 - DNA, 15 bp, Homo sapiens
tactcccttgtagtg

SEQ ID NO: 1578937 - DNA, 15 bp, Homo sapiens
actcccttgtagtga

SEQ ID NO: 1578938 - DNA, 15 bp, Homo sapiens
ctcccttgtagtgaa

SEQ ID NO: 1578939 - DNA, 15 bp, Homo sapiens
tcccttgtagtgaag

SEQ ID NO: 1578940 - DNA, 15 bp, Homo sapiens
cccttgtagtgaaga

SEQ ID NO: 1578941 - DNA, 15 bp, Homo sapiens
ccttgtagtgaagat

SEQ ID NO: 1578942 - DNA, 15 bp, Homo sapiens
cttgtagtgaagata

SEQ ID NO: 1578943 - DNA, 15 bp, Homo sapiens
ttgtagtgaagatat

SEQ ID NO: 1578944 - DNA, 15 bp, Homo sapiens
tgtagtgaagatatg

SEQ ID NO: 1578945 - DNA, 15 bp, Homo sapiens
gtagtgaagatatgt

SEQ ID NO: 1578946 - DNA, 15 bp, Homo sapiens
tagtgaagatatgtt

SEQ ID NO: 1578947 - DNA, 15 bp, Homo sapiens
agtgaagatatgttg

SEQ ID NO: 1578948 - DNA, 15 bp, Homo sapiens
gtgaagatatgttga

SEQ ID NO: 1578949 - DNA, 15 bp, Homo sapiens
tgaagatatgttgaa

SEQ ID NO: 1578950 - DNA, 15 bp, Homo sapiens
gaagatatgttgaag

SEQ ID NO: 1578951 - DNA, 15 bp, Homo sapiens
aagatatgttgaagt

SEQ ID NO: 1578952 - DNA, 15 bp, Homo sapiens
agatatgttgaagtt

SEQ ID NO: 1578953 - DNA, 15 bp, Homo sapiens
gatatgttgaagttg

SEQ ID NO: 1578954 - DNA, 15 bp, Homo sapiens
atatgttgaagttgt

SEQ ID NO: 1578955 - DNA, 15 bp, Homo sapiens
tatgttgaagttgta

SEQ ID NO: 1578956 - DNA, 15 bp, Homo sapiens
atgttgaagttgtac

SEQ ID NO: 1578957 - DNA, 15 bp, Homo sapiens
tgttgaagttgtact

SEQ ID NO: 1578958 - DNA, 15 bp, Homo sapiens
gttgaagttgtactg

SEQ ID NO: 1578959 - DNA, 15 bp, Homo sapiens
ttgaagttgtactgg

SEQ ID NO: 1578960 - DNA, 15 bp, Homo sapiens
tgaagttgtactggt

SEQ ID NO: 1578961 - DNA, 15 bp, Homo sapiens
gaagttgtactggta

SEQ ID NO: 1578962 - DNA, 15 bp, Homo sapiens
aagttgtactggtat

SEQ ID NO: 1578963 - DNA, 15 bp, Homo sapiens
agttgtactggtata

SEQ ID NO: 1578964 - DNA, 15 bp, Homo sapiens
gttgtactggtatac

SEQ ID NO: 1578965 - DNA, 15 bp, Homo sapiens
ttgtactggtatact

SEQ ID NO: 1578966 - DNA, 15 bp, Homo sapiens
tgtactggtatactc

SEQ ID NO: 1578967 - DNA, 15 bp, Homo sapiens
gtactggtatactct

SEQ ID NO: 1578968 - DNA, 15 bp, Homo sapiens
tactggtatactctt

SEQ ID NO: 1578969 - DNA, 15 bp, Homo sapiens
actggtatactcttc

SEQ ID NO: 1578970 - DNA, 15 bp, Homo sapiens
ctggtatactcttct

SEQ ID NO: 1578971 - DNA, 15 bp, Homo sapiens
tggtatactcttcta

SEQ ID NO: 1578972 - DNA, 15 bp, Homo sapiens
ggtatactcttctac

SEQ ID NO: 1578973 - DNA, 15 bp, Homo sapiens
gtatactcttctacc

SEQ ID NO: 1578974 - DNA, 15 bp, Homo sapiens
tatactcttctacct

SEQ ID NO: 1578975 - DNA, 15 bp, Homo sapiens
atactcttctacctt

SEQ ID NO: 1578976 - DNA, 15 bp, Homo sapiens
tactcttctaccttt

SEQ ID NO: 1578977 - DNA, 15 bp, Homo sapiens
actcttctacctttc

SEQ ID NO: 1578978 - DNA, 15 bp, Homo sapiens
ctcttctacctttct

SEQ ID NO: 1578979 - DNA, 15 bp, Homo sapiens
tcttctacctttctg

SEQ ID NO: 1578980 - DNA, 15 bp, Homo sapiens
cttctacctttctgt

SEQ ID NO: 1578981 - DNA, 15 bp, Homo sapiens
ttctacctttctgta

SEQ ID NO: 1578982 - DNA, 15 bp, Homo sapiens
tctacctttctgtaa

SEQ ID NO: 1578983 - DNA, 15 bp, Homo sapiens
ctacctttctgtaat

SEQ ID NO: 1578984 - DNA, 15 bp, Homo sapiens
tacctttctgtaatt

SEQ ID NO: 1578985 - DNA, 15 bp, Homo sapiens
acctttctgtaattt

SEQ ID NO: 1578986 - DNA, 15 bp, Homo sapiens
cctttctgtaatttt

SEQ ID NO: 1578987 - DNA, 15 bp, Homo sapiens
ctttctgtaatttta

SEQ ID NO: 1578988 - DNA, 15 bp, Homo sapiens
tttctgtaattttat

SEQ ID NO: 1578989 - DNA, 15 bp, Homo sapiens
ttctgtaattttata

SEQ ID NO: 1578990 - DNA, 15 bp, Homo sapiens
tctgtaattttatat

SEQ ID NO: 1578991 - DNA, 15 bp, Homo sapiens
ctgtaattttatatt

SEQ ID NO: 1578992 - DNA, 15 bp, Homo sapiens
tgtaattttatattg

SEQ ID NO: 1578993 - DNA, 15 bp, Homo sapiens
gtaattttatattgt

SEQ ID NO: 1578994 - DNA, 15 bp, Homo sapiens
taattttatattgtg

SEQ ID NO: 1578995 - DNA, 15 bp, Homo sapiens
aattttatattgtgt

SEQ ID NO: 1578996 - DNA, 15 bp, Homo sapiens
attttatattgtgta

SEQ ID NO: 1578997 - DNA, 15 bp, Homo sapiens
ttttatattgtgtag

SEQ ID NO: 1578998 - DNA, 15 bp, Homo sapiens
tttatattgtgtaga

SEQ ID NO: 1578999 - DNA, 15 bp, Homo sapiens
ttatattgtgtagac

SEQ ID NO: 1579000 - DNA, 15 bp, Homo sapiens
tatattgtgtagact

SEQ ID NO: 1579001 - DNA, 15 bp, Homo sapiens
atattgtgtagactt

SEQ ID NO: 1579002 - DNA, 15 bp, Homo sapiens
tattgtgtagacttg

SEQ ID NO: 1579003 - DNA, 15 bp, Homo sapiens
attgtgtagacttga

SEQ ID NO: 1579004 - DNA, 15 bp, Homo sapiens
ttgtgtagacttgat

SEQ ID NO: 1579005 - DNA, 15 bp, Homo sapiens
tgtgtagacttgata

SEQ ID NO: 1579006 - DNA, 15 bp, Homo sapiens
gtgtagacttgataa

SEQ ID NO: 1579007 - DNA, 15 bp, Homo sapiens
tgtagacttgataaa

SEQ ID NO: 1579008 - DNA, 15 bp, Homo sapiens
gtagacttgataaaa

SEQ ID NO: 1579009 - DNA, 15 bp, Homo sapiens
tagacttgataaaat

SEQ ID NO: 1579010 - DNA, 15 bp, Homo sapiens
agacttgataaaatt

SEQ ID NO: 1579011 - DNA, 15 bp, Homo sapiens
gacttgataaaattt

SEQ ID NO: 1579012 - DNA, 15 bp, Homo sapiens
acttgataaaattta

SEQ ID NO: 1579013 - DNA, 15 bp, Homo sapiens
cttgataaaatttat

SEQ ID NO: 1579014 - DNA, 15 bp, Homo sapiens
ttgataaaatttatg

SEQ ID NO: 1579015 - DNA, 15 bp, Homo sapiens
tgataaaatttatgt

SEQ ID NO: 1579016 - DNA, 15 bp, Homo sapiens
gataaaatttatgtg

SEQ ID NO: 1579017 - DNA, 15 bp, Homo sapiens
ataaaatttatgtgt

SEQ ID NO: 1579018 - DNA, 15 bp, Homo sapiens
taaaatttatgtgtc

SEQ ID NO: 1579019 - DNA, 15 bp, Homo sapiens
aaaatttatgtgtca

SEQ ID NO: 1579020 - DNA, 15 bp, Homo sapiens
aaatttatgtgtcaa

SEQ ID NO: 1579021 - DNA, 15 bp, Homo sapiens
aatttatgtgtcaat

SEQ ID NO: 1579022 - DNA, 15 bp, Homo sapiens
atttatgtgtcaatc

SEQ ID NO: 1579023 - DNA, 15 bp, Homo sapiens
tttatgtgtcaatca

SEQ ID NO: 1579024 - DNA, 15 bp, Homo sapiens
ttatgtgtcaatcac

SEQ ID NO: 1579025 - DNA, 15 bp, Homo sapiens
tatgtgtcaatcacc

SEQ ID NO: 1579026 - DNA, 15 bp, Homo sapiens
atgtgtcaatcacca

SEQ ID NO: 1579027 - DNA, 15 bp, Homo sapiens
tgtgtcaatcaccac

SEQ ID NO: 1579028 - DNA, 15 bp, Homo sapiens
gtgtcaatcaccacc

SEQ ID NO: 1579029 - DNA, 15 bp, Homo sapiens
tgtcaatcaccacca

SEQ ID NO: 1579030 - DNA, 15 bp, Homo sapiens
gtcaatcaccaccat

SEQ ID NO: 1579031 - DNA, 15 bp, Homo sapiens
tcaatcaccaccatt

SEQ ID NO: 1579032 - DNA, 15 bp, Homo sapiens
caatcaccaccatta

SEQ ID NO: 1579033 - DNA, 15 bp, Homo sapiens
aatcaccaccattaa

SEQ ID NO: 1579034 - DNA, 15 bp, Homo sapiens
atcaccaccattaat

SEQ ID NO: 1579035 - DNA, 15 bp, Homo sapiens
tcaccaccattaata

SEQ ID NO: 1579036 - DNA, 15 bp, Homo sapiens
caccaccattaatat

SEQ ID NO: 1579037 - DNA, 15 bp, Homo sapiens
accaccattaatatc

SEQ ID NO: 1579038 - DNA, 15 bp, Homo sapiens
ccaccattaatatca

SEQ ID NO: 1579039 - DNA, 15 bp, Homo sapiens
caccattaatatcaa

SEQ ID NO: 1579040 - DNA, 15 bp, Homo sapiens
accattaatatcaat

SEQ ID NO: 1579041 - DNA, 15 bp, Homo sapiens
ccattaatatcaata

SEQ ID NO: 1579042 - DNA, 15 bp, Homo sapiens
cattaatatcaatat

SEQ ID NO: 1579043 - DNA, 15 bp, Homo sapiens
attaatatcaatatt

SEQ ID NO: 1579044 - DNA, 15 bp, Homo sapiens
ttaatatcaatattg

SEQ ID NO: 1579045 - DNA, 15 bp, Homo sapiens
taatatcaatattga

SEQ ID NO: 1579046 - DNA, 15 bp, Homo sapiens
aatatcaatattgag

SEQ ID NO: 1579047 - DNA, 15 bp, Homo sapiens
atatcaatattgagc

SEQ ID NO: 1579048 - DNA, 15 bp, Homo sapiens
tatcaatattgagcc

SEQ ID NO: 1579049 - DNA, 15 bp, Homo sapiens
atcaatattgagcct

SEQ ID NO: 1579050 - DNA, 15 bp, Homo sapiens
tcaatattgagcctc

SEQ ID NO: 1579051 - DNA, 15 bp, Homo sapiens
caatattgagcctca

SEQ ID NO: 1579052 - DNA, 15 bp, Homo sapiens
aatattgagcctcaa

SEQ ID NO: 1579053 - DNA, 15 bp, Homo sapiens
atattgagcctcaat

SEQ ID NO: 1579054 - DNA, 15 bp, Homo sapiens
tattgagcctcaatt

SEQ ID NO: 1579055 - DNA, 15 bp, Homo sapiens
attgagcctcaattc

SEQ ID NO: 1579056 - DNA, 15 bp, Homo sapiens
ttgagcctcaattct

SEQ ID NO: 1579057 - DNA, 15 bp, Homo sapiens
tgagcctcaattctt

SEQ ID NO: 1579058 - DNA, 15 bp, Homo sapiens
gagcctcaattctta

SEQ ID NO: 1579059 - DNA, 15 bp, Homo sapiens
agcctcaattcttat

SEQ ID NO: 1579060 - DNA, 15 bp, Homo sapiens
gcctcaattcttatt

SEQ ID NO: 1579061 - DNA, 15 bp, Homo sapiens
cctcaattcttattt

SEQ ID NO: 1579062 - DNA, 15 bp, Homo sapiens
ctcaattcttatttt

SEQ ID NO: 1579063 - DNA, 15 bp, Homo sapiens
tcaattcttattttt

SEQ ID NO: 1579064 - DNA, 15 bp, Homo sapiens
caattcttatttttc

SEQ ID NO: 1579065 - DNA, 15 bp, Homo sapiens
aattcttatttttct

SEQ ID NO: 1579066 - DNA, 15 bp, Homo sapiens
attcttatttttctg

SEQ ID NO: 1579067 - DNA, 15 bp, Homo sapiens
ttcttatttttctgc

SEQ ID NO: 1579068 - DNA, 15 bp, Homo sapiens
tcttatttttctgcc

SEQ ID NO: 1579069 - DNA, 15 bp, Homo sapiens
cttatttttctgccc

SEQ ID NO: 1579070 - DNA, 15 bp, Homo sapiens
ttatttttctgccca

SEQ ID NO: 1579071 - DNA, 15 bp, Homo sapiens
tatttttctgcccag

SEQ ID NO: 1579072 - DNA, 15 bp, Homo sapiens
atttttctgcccagt

SEQ ID NO: 1579073 - DNA, 15 bp, Homo sapiens
tttttctgcccagtg

SEQ ID NO: 1579074 - DNA, 15 bp, Homo sapiens
ttttctgcccagtgg

SEQ ID NO: 1579075 - DNA, 15 bp, Homo sapiens
tttctgcccagtggc

SEQ ID NO: 1579076 - DNA, 15 bp, Homo sapiens
ttctgcccagtggct

SEQ ID NO: 1579077 - DNA, 15 bp, Homo sapiens
tctgcccagtggctg

SEQ ID NO: 1579078 - DNA, 15 bp, Homo sapiens
ctgcccagtggctgc

SEQ ID NO: 1579079 - DNA, 15 bp, Homo sapiens
tgcccagtggctgcc

SEQ ID NO: 1579080 - DNA, 15 bp, Homo sapiens
gcccagtggctgcca

SEQ ID NO: 1579081 - DNA, 15 bp, Homo sapiens
cccagtggctgccaa

SEQ ID NO: 1579082 - DNA, 15 bp, Homo sapiens
ccagtggctgccaaa

SEQ ID NO: 1579083 - DNA, 15 bp, Homo sapiens
cagtggctgccaaat

SEQ ID NO: 1579084 - DNA, 15 bp, Homo sapiens
agtggctgccaaatt

SEQ ID NO: 1579085 - DNA, 15 bp, Homo sapiens
gtggctgccaaatta

SEQ ID NO: 1579086 - DNA, 15 bp, Homo sapiens
tggctgccaaattac

SEQ ID NO: 1579087 - DNA, 15 bp, Homo sapiens
ggctgccaaattact

SEQ ID NO: 1579088 - DNA, 15 bp, Homo sapiens
gctgccaaattacta

SEQ ID NO: 1579089 - DNA, 15 bp, Homo sapiens
ctgccaaattactaa

SEQ ID NO: 1579090 - DNA, 15 bp, Homo sapiens
tgccaaattactaac

SEQ ID NO: 1579091 - DNA, 15 bp, Homo sapiens
gccaaattactaaca

SEQ ID NO: 1579092 - DNA, 15 bp, Homo sapiens
ccaaattactaacat

SEQ ID NO: 1579093 - DNA, 15 bp, Homo sapiens
caaattactaacatt

SEQ ID NO: 1579094 - DNA, 15 bp, Homo sapiens
aaattactaacattt

SEQ ID NO: 1579095 - DNA, 15 bp, Homo sapiens
aattactaacattta

SEQ ID NO: 1579096 - DNA, 15 bp, Homo sapiens
attactaacatttac

SEQ ID NO: 1579097 - DNA, 15 bp, Homo sapiens
ttactaacatttaca

SEQ ID NO: 1579098 - DNA, 15 bp, Homo sapiens
tactaacatttacaa

SEQ ID NO: 1579099 - DNA, 15 bp, Homo sapiens
actaacatttacaat

SEQ ID NO: 1579100 - DNA, 15 bp, Homo sapiens
ctaacatttacaata

SEQ ID NO: 1579101 - DNA, 15 bp, Homo sapiens
taacatttacaataa

SEQ ID NO: 1579102 - DNA, 15 bp, Homo sapiens
aacatttacaataat

SEQ ID NO: 1579103 - DNA, 15 bp, Homo sapiens
acatttacaataatt

SEQ ID NO: 1579104 - DNA, 15 bp, Homo sapiens
catttacaataattc

SEQ ID NO: 1579105 - DNA, 15 bp, Homo sapiens
atttacaataattca

SEQ ID NO: 1579106 - DNA, 15 bp, Homo sapiens
tttacaataattcac

SEQ ID NO: 1579107 - DNA, 15 bp, Homo sapiens
ttacaataattcact

SEQ ID NO: 1579108 - DNA, 15 bp, Homo sapiens
tacaataattcacta

SEQ ID NO: 1579109 - DNA, 15 bp, Homo sapiens
acaataattcactac

SEQ ID NO: 1579110 - DNA, 15 bp, Homo sapiens
caataattcactact

SEQ ID NO: 1579111 - DNA, 15 bp, Homo sapiens
aataattcactacta

SEQ ID NO: 1579112 - DNA, 15 bp, Homo sapiens
ataattcactactac

SEQ ID NO: 1579113 - DNA, 15 bp, Homo sapiens
taattcactactact

SEQ ID NO: 1579114 - DNA, 15 bp, Homo sapiens
aattcactactacta

SEQ ID NO: 1579115 - DNA, 15 bp, Homo sapiens
attcactactactaa

SEQ ID NO: 1579116 - DNA, 15 bp, Homo sapiens
ttcactactactaag

SEQ ID NO: 1579117 - DNA, 15 bp, Homo sapiens
tcactactactaaga

SEQ ID NO: 1579118 - DNA, 15 bp, Homo sapiens
cactactactaagat

SEQ ID NO: 1579119 - DNA, 15 bp, Homo sapiens
actactactaagata

SEQ ID NO: 1579120 - DNA, 15 bp, Homo sapiens
ctactactaagataa

SEQ ID NO: 1579121 - DNA, 15 bp, Homo sapiens
tactactaagataat

SEQ ID NO: 1579122 - DNA, 15 bp, Homo sapiens
actactaagataatc

SEQ ID NO: 1579123 - DNA, 15 bp, Homo sapiens
ctactaagataatct

SEQ ID NO: 1579124 - DNA, 15 bp, Homo sapiens
tactaagataatcta

SEQ ID NO: 1579125 - DNA, 15 bp, Homo sapiens
actaagataatctac

SEQ ID NO: 1579126 - DNA, 15 bp, Homo sapiens
ctaagataatctact

SEQ ID NO: 1579127 - DNA, 15 bp, Homo sapiens
taagataatctacta

SEQ ID NO: 1579128 - DNA, 15 bp, Homo sapiens
aagataatctactag

SEQ ID NO: 1579129 - DNA, 15 bp, Homo sapiens
agataatctactagt

SEQ ID NO: 1579130 - DNA, 15 bp, Homo sapiens
gataatctactagtt

SEQ ID NO: 1579131 - DNA, 15 bp, Homo sapiens
ataatctactagttc

SEQ ID NO: 1579132 - DNA, 15 bp, Homo sapiens
taatctactagttcg

SEQ ID NO: 1579133 - DNA, 15 bp, Homo sapiens
aatctactagttcga

SEQ ID NO: 1579134 - DNA, 15 bp, Homo sapiens
atctactagttcgat

SEQ ID NO: 1579135 - DNA, 15 bp, Homo sapiens
tctactagttcgatc

SEQ ID NO: 1579136 - DNA, 15 bp, Homo sapiens
ctactagttcgatca

SEQ ID NO: 1579137 - DNA, 15 bp, Homo sapiens
tactagttcgatcac

SEQ ID NO: 1579138 - DNA, 15 bp, Homo sapiens
actagttcgatcaca

SEQ ID NO: 1579139 - DNA, 15 bp, Homo sapiens
ctagttcgatcacat

SEQ ID NO: 1579140 - DNA, 15 bp, Homo sapiens
tagttcgatcacata

SEQ ID NO: 1579141 - DNA, 15 bp, Homo sapiens
agttcgatcacatac

SEQ ID NO: 1579142 - DNA, 15 bp, Homo sapiens
gttcgatcacatact

SEQ ID NO: 1579143 - DNA, 15 bp, Homo sapiens
ttcgatcacatactt

SEQ ID NO: 1579144 - DNA, 15 bp, Homo sapiens
tcgatcacatacttc

SEQ ID NO: 1579145 - DNA, 15 bp, Homo sapiens
cgatcacatacttca

SEQ ID NO: 1579146 - DNA, 15 bp, Homo sapiens
gatcacatacttcaa

SEQ ID NO: 1579147 - DNA, 15 bp, Homo sapiens
atcacatacttcaaa

SEQ ID NO: 1579148 - DNA, 15 bp, Homo sapiens
tcacatacttcaaat

SEQ ID NO: 1579149 - DNA, 15 bp, Homo sapiens
cacatacttcaaatt

SEQ ID NO: 1579150 - DNA, 15 bp, Homo sapiens
acatacttcaaattg

SEQ ID NO: 1579151 - DNA, 15 bp, Homo sapiens
catacttcaaattgt

SEQ ID NO: 1579152 - DNA, 15 bp, Homo sapiens
atacttcaaattgtt

SEQ ID NO: 1579153 - DNA, 15 bp, Homo sapiens
tacttcaaattgtta

SEQ ID NO: 1579154 - DNA, 15 bp, Homo sapiens
acttcaaattgttat

SEQ ID NO: 1579155 - DNA, 15 bp, Homo sapiens
cttcaaattgttatg

SEQ ID NO: 1579156 - DNA, 15 bp, Homo sapiens
ttcaaattgttatgg

SEQ ID NO: 1579157 - DNA, 15 bp, Homo sapiens
tcaaattgttatgga

SEQ ID NO: 1579158 - DNA, 15 bp, Homo sapiens
caaattgttatggaa

SEQ ID NO: 1579159 - DNA, 15 bp, Homo sapiens
aaattgttatggaac

SEQ ID NO: 1579160 - DNA, 15 bp, Homo sapiens
aattgttatggaact

SEQ ID NO: 1579161 - DNA, 15 bp, Homo sapiens
attgttatggaacta

SEQ ID NO: 1579162 - DNA, 15 bp, Homo sapiens
ttgttatggaactac

SEQ ID NO: 1579163 - DNA, 15 bp, Homo sapiens
tgttatggaactact

SEQ ID NO: 1579164 - DNA, 15 bp, Homo sapiens
gttatggaactactg

SEQ ID NO: 1579165 - DNA, 15 bp, Homo sapiens
ttatggaactactgt

SEQ ID NO: 1579166 - DNA, 15 bp, Homo sapiens
tatggaactactgtc

SEQ ID NO: 1579167 - DNA, 15 bp, Homo sapiens
atggaactactgtct

SEQ ID NO: 1579168 - DNA, 15 bp, Homo sapiens
tggaactactgtctt

SEQ ID NO: 1579169 - DNA, 15 bp, Homo sapiens
ggaactactgtcttc

SEQ ID NO: 1579170 - DNA, 15 bp, Homo sapiens
gaactactgtcttca

SEQ ID NO: 1579171 - DNA, 15 bp, Homo sapiens
aactactgtcttcag

SEQ ID NO: 1579172 - DNA, 15 bp, Homo sapiens
actactgtcttcagc

SEQ ID NO: 1579173 - DNA, 15 bp, Homo sapiens
ctactgtcttcagca

SEQ ID NO: 1579174 - DNA, 15 bp, Homo sapiens
tactgtcttcagcat

SEQ ID NO: 1579175 - DNA, 15 bp, Homo sapiens
actgtcttcagcatt

SEQ ID NO: 1579176 - DNA, 15 bp, Homo sapiens
ctgtcttcagcattg

SEQ ID NO: 1579177 - DNA, 15 bp, Homo sapiens
tgtcttcagcattgt

SEQ ID NO: 1579178 - DNA, 15 bp, Homo sapiens
gtcttcagcattgtg

SEQ ID NO: 1579179 - DNA, 15 bp, Homo sapiens
tcttcagcattgtgc

SEQ ID NO: 1579180 - DNA, 15 bp, Homo sapiens
cttcagcattgtgct

SEQ ID NO: 1579181 - DNA, 15 bp, Homo sapiens
ttcagcattgtgctt

SEQ ID NO: 1579182 - DNA, 15 bp, Homo sapiens
tcagcattgtgcttc

SEQ ID NO: 1579183 - DNA, 15 bp, Homo sapiens
cagcattgtgcttct

SEQ ID NO: 1579184 - DNA, 15 bp, Homo sapiens
agcattgtgcttctg

SEQ ID NO: 1579185 - DNA, 15 bp, Homo sapiens
gcattgtgcttctga

SEQ ID NO: 1579186 - DNA, 15 bp, Homo sapiens
cattgtgcttctgat

SEQ ID NO: 1579187 - DNA, 15 bp, Homo sapiens
attgtgcttctgata

SEQ ID NO: 1579188 - DNA, 15 bp, Homo sapiens
ttgtgcttctgataa

SEQ ID NO: 1579189 - DNA, 15 bp, Homo sapiens
tgtgcttctgataac

SEQ ID NO: 1579190 - DNA, 15 bp, Homo sapiens
gtgcttctgataact

SEQ ID NO: 1579191 - DNA, 15 bp, Homo sapiens
tgcttctgataactg

SEQ ID NO: 1579192 - DNA, 15 bp, Homo sapiens
gcttctgataactga

SEQ ID NO: 1579193 - DNA, 15 bp, Homo sapiens
cttctgataactgat

SEQ ID NO: 1579194 - DNA, 15 bp, Homo sapiens
ttctgataactgata

SEQ ID NO: 1579195 - DNA, 15 bp, Homo sapiens
tctgataactgataa

SEQ ID NO: 1579196 - DNA, 15 bp, Homo sapiens
ctgataactgataag

SEQ ID NO: 1579197 - DNA, 15 bp, Homo sapiens
tgataactgataagt

SEQ ID NO: 1579198 - DNA, 15 bp, Homo sapiens
gataactgataagta

SEQ ID NO: 1579199 - DNA, 15 bp, Homo sapiens
ataactgataagtat

SEQ ID NO: 1579200 - DNA, 15 bp, Homo sapiens
taactgataagtata

SEQ ID NO: 1579201 - DNA, 15 bp, Homo sapiens
aactgataagtataa

SEQ ID NO: 1579202 - DNA, 15 bp, Homo sapiens
actgataagtataat

SEQ ID NO: 1579203 - DNA, 15 bp, Homo sapiens
ctgataagtataatt

SEQ ID NO: 1579204 - DNA, 15 bp, Homo sapiens
tgataagtataattt

SEQ ID NO: 1579205 - DNA, 15 bp, Homo sapiens
gataagtataatttt

SEQ ID NO: 1579206 - DNA, 15 bp, Homo sapiens
ataagtataattttt

SEQ ID NO: 1579207 - DNA, 15 bp, Homo sapiens
taagtataatttttt

SEQ ID NO: 1579208 - DNA, 15 bp, Homo sapiens
aagtataattttttt

SEQ ID NO: 1579209 - DNA, 15 bp, Homo sapiens
agtataatttttttt

SEQ ID NO: 1579210 - DNA, 15 bp, Homo sapiens
gtataattttttttt

SEQ ID NO: 1579211 - DNA, 15 bp, Homo sapiens
ataattttttttttg

SEQ ID NO: 1579212 - DNA, 15 bp, Homo sapiens
aattttttttttgtc

SEQ ID NO: 1579213 - DNA, 15 bp, Homo sapiens
attttttttttgtcc

SEQ ID NO: 1579214 - DNA, 15 bp, Homo sapiens
ttttttttttgtcca

SEQ ID NO: 1579215 - DNA, 15 bp, Homo sapiens
tttttttttgtccag

SEQ ID NO: 1579216 - DNA, 15 bp, Homo sapiens
ttttttttgtccaga

SEQ ID NO: 1579217 - DNA, 15 bp, Homo sapiens
tttttttgtccagag

SEQ ID NO: 1579218 - DNA, 15 bp, Homo sapiens
ttttttgtccagagt

SEQ ID NO: 1579219 - DNA, 15 bp, Homo sapiens
tttttgtccagagtg

SEQ ID NO: 1579220 - DNA, 15 bp, Homo sapiens
ttttgtccagagtga

SEQ ID NO: 1579221 - DNA, 15 bp, Homo sapiens
tttgtccagagtgaa

SEQ ID NO: 1579222 - DNA, 15 bp, Homo sapiens
ttgtccagagtgaac

SEQ ID NO: 1579223 - DNA, 15 bp, Homo sapiens
tgtccagagtgaaca

SEQ ID NO: 1579224 - DNA, 15 bp, Homo sapiens
gtccagagtgaacat

SEQ ID NO: 1579225 - DNA, 15 bp, Homo sapiens
tccagagtgaacatg

SEQ ID NO: 1579226 - DNA, 15 bp, Homo sapiens
ccagagtgaacatgt

SEQ ID NO: 1579227 - DNA, 15 bp, Homo sapiens
cagagtgaacatgtc

SEQ ID NO: 1579228 - DNA, 15 bp, Homo sapiens
agagtgaacatgtct

SEQ ID NO: 1579229 - DNA, 15 bp, Homo sapiens
gagtgaacatgtcta

SEQ ID NO: 1579230 - DNA, 15 bp, Homo sapiens
agtgaacatgtctat

SEQ ID NO: 1579231 - DNA, 15 bp, Homo sapiens
gtgaacatgtctatt

SEQ ID NO: 1579232 - DNA, 15 bp, Homo sapiens
tgaacatgtctattc

SEQ ID NO: 1579233 - DNA, 15 bp, Homo sapiens
gaacatgtctattct

SEQ ID NO: 1579234 - DNA, 15 bp, Homo sapiens
aacatgtctattctt

SEQ ID NO: 1579235 - DNA, 15 bp, Homo sapiens
acatgtctattcttc

SEQ ID NO: 1579236 - DNA, 15 bp, Homo sapiens
catgtctattcttcc

SEQ ID NO: 1579237 - DNA, 15 bp, Homo sapiens
atgtctattcttcca

SEQ ID NO: 1579238 - DNA, 15 bp, Homo sapiens
tgtctattcttccac

SEQ ID NO: 1579239 - DNA, 15 bp, Homo sapiens
gtctattcttccact

SEQ ID NO: 1579240 - DNA, 15 bp, Homo sapiens
tctattcttccactg

SEQ ID NO: 1579241 - DNA, 15 bp, Homo sapiens
ctattcttccactgt

SEQ ID NO: 1579242 - DNA, 15 bp, Homo sapiens
tattcttccactgta

SEQ ID NO: 1579243 - DNA, 15 bp, Homo sapiens
attcttccactgtac

SEQ ID NO: 1579244 - DNA, 15 bp, Homo sapiens
ttcttccactgtaca

SEQ ID NO: 1579245 - DNA, 15 bp, Homo sapiens
tcttccactgtacac

SEQ ID NO: 1579246 - DNA, 15 bp, Homo sapiens
cttccactgtacaca

SEQ ID NO: 1579247 - DNA, 15 bp, Homo sapiens
ttccactgtacacac

SEQ ID NO: 1579248 - DNA, 15 bp, Homo sapiens
tccactgtacacact

SEQ ID NO: 1579249 - DNA, 15 bp, Homo sapiens
ccactgtacacacta

SEQ ID NO: 1579250 - DNA, 15 bp, Homo sapiens
cactgtacacactaa

SEQ ID NO: 1579251 - DNA, 15 bp, Homo sapiens
actgtacacactaat

SEQ ID NO: 1579252 - DNA, 15 bp, Homo sapiens
ctgtacacactaata

SEQ ID NO: 1579253 - DNA, 15 bp, Homo sapiens
tgtacacactaataa

SEQ ID NO: 1579254 - DNA, 15 bp, Homo sapiens
gtacacactaataaa

SEQ ID NO: 1579255 - DNA, 15 bp, Homo sapiens
tacacactaataaaa

SEQ ID NO: 1579256 - DNA, 15 bp, Homo sapiens
acacactaataaaag

SEQ ID NO: 1579257 - DNA, 15 bp, Homo sapiens
cacactaataaaagg

SEQ ID NO: 1579258 - DNA, 15 bp, Homo sapiens
acactaataaaagga

SEQ ID NO: 1579259 - DNA, 15 bp, Homo sapiens
cactaataaaaggaa

SEQ ID NO: 1579260 - DNA, 15 bp, Homo sapiens
actaataaaaggaaa

SEQ ID NO: 1579261 - DNA, 15 bp, Homo sapiens
ctaataaaaggaaaa

SEQ ID NO: 1579262 - DNA, 15 bp, Homo sapiens
taataaaaggaaaaa

SEQ ID NO: 1579263 - DNA, 15 bp, Homo sapiens
aataaaaggaaaaat

SEQ ID NO: 1579264 - DNA, 15 bp, Homo sapiens
ataaaaggaaaaatt

SEQ ID NO: 1579265 - DNA, 15 bp, Homo sapiens
taaaaggaaaaattg

SEQ ID NO: 1579266 - DNA, 15 bp, Homo sapiens
aaaaggaaaaattgt

SEQ ID NO: 1579267 - DNA, 15 bp, Homo sapiens
aaaggaaaaattgta

SEQ ID NO: 1579268 - DNA, 15 bp, Homo sapiens
aaggaaaaattgtaa

SEQ ID NO: 1579269 - DNA, 15 bp, Homo sapiens
aggaaaaattgtaat

SEQ ID NO: 1579270 - DNA, 15 bp, Homo sapiens
ggaaaaattgtaata

SEQ ID NO: 1579271 - DNA, 15 bp, Homo sapiens
gaaaaattgtaatat

SEQ ID NO: 1579272 - DNA, 15 bp, Homo sapiens
aaaaattgtaatatt

SEQ ID NO: 1579273 - DNA, 15 bp, Homo sapiens
aaaattgtaatattg

SEQ ID NO: 1579274 - DNA, 15 bp, Homo sapiens
aaattgtaatattgg

SEQ ID NO: 1579275 - DNA, 15 bp, Homo sapiens
aattgtaatattggg

SEQ ID NO: 1579276 - DNA, 15 bp, Homo sapiens
attgtaatattgggt

SEQ ID NO: 1579277 - DNA, 15 bp, Homo sapiens
ttgtaatattgggta

SEQ ID NO: 1579278 - DNA, 15 bp, Homo sapiens
tgtaatattgggtaa

SEQ ID NO: 1579279 - DNA, 15 bp, Homo sapiens
gtaatattgggtaaa

SEQ ID NO: 1579280 - DNA, 15 bp, Homo sapiens
taatattgggtaaat

SEQ ID NO: 1579281 - DNA, 15 bp, Homo sapiens
aatattgggtaaatt

SEQ ID NO: 1579282 - DNA, 15 bp, Homo sapiens
atattgggtaaattc

SEQ ID NO: 1579283 - DNA, 15 bp, Homo sapiens
tattgggtaaattca

SEQ ID NO: 1579284 - DNA, 15 bp, Homo sapiens
attgggtaaattcat

SEQ ID NO: 1579285 - DNA, 15 bp, Homo sapiens
ttgggtaaattcatg

SEQ ID NO: 1579286 - DNA, 15 bp, Homo sapiens
tgggtaaattcatgt

SEQ ID NO: 1579287 - DNA, 15 bp, Homo sapiens
gggtaaattcatgtc

SEQ ID NO: 1579288 - DNA, 15 bp, Homo sapiens
ggtaaattcatgtcc

SEQ ID NO: 1579289 - DNA, 15 bp, Homo sapiens
gtaaattcatgtcct

SEQ ID NO: 1579290 - DNA, 15 bp, Homo sapiens
taaattcatgtcctt

SEQ ID NO: 1579291 - DNA, 15 bp, Homo sapiens
aaattcatgtcctta

SEQ ID NO: 1579292 - DNA, 15 bp, Homo sapiens
aattcatgtccttac

SEQ ID NO: 1579293 - DNA, 15 bp, Homo sapiens
attcatgtccttaca

SEQ ID NO: 1579294 - DNA, 15 bp, Homo sapiens
ttcatgtccttacac

SEQ ID NO: 1579295 - DNA, 15 bp, Homo sapiens
tcatgtccttacaca

SEQ ID NO: 1579296 - DNA, 15 bp, Homo sapiens
catgtccttacacat

SEQ ID NO: 1579297 - DNA, 15 bp, Homo sapiens
atgtccttacacatg

SEQ ID NO: 1579298 - DNA, 15 bp, Homo sapiens
tgtccttacacatgt

SEQ ID NO: 1579299 - DNA, 15 bp, Homo sapiens
gtccttacacatgta

SEQ ID NO: 1579300 - DNA, 15 bp, Homo sapiens
tccttacacatgtag

SEQ ID NO: 1579301 - DNA, 15 bp, Homo sapiens
ccttacacatgtagt

SEQ ID NO: 1579302 - DNA, 15 bp, Homo sapiens
cttacacatgtagta

SEQ ID NO: 1579303 - DNA, 15 bp, Homo sapiens
ttacacatgtagtag

SEQ ID NO: 1579304 - DNA, 15 bp, Homo sapiens
tacacatgtagtagt

SEQ ID NO: 1579305 - DNA, 15 bp, Homo sapiens
acacatgtagtagtt

SEQ ID NO: 1579306 - DNA, 15 bp, Homo sapiens
cacatgtagtagtta

SEQ ID NO: 1579307 - DNA, 15 bp, Homo sapiens
acatgtagtagttat

SEQ ID NO: 1579308 - DNA, 15 bp, Homo sapiens
catgtagtagttatg

SEQ ID NO: 1579309 - DNA, 15 bp, Homo sapiens
atgtagtagttatga

SEQ ID NO: 1579310 - DNA, 15 bp, Homo sapiens
tgtagtagttatgag

SEQ ID NO: 1579311 - DNA, 15 bp, Homo sapiens
gtagtagttatgagc

SEQ ID NO: 1579312 - DNA, 15 bp, Homo sapiens
tagtagttatgagcc

SEQ ID NO: 1579313 - DNA, 15 bp, Homo sapiens
agtagttatgagccc

SEQ ID NO: 1579314 - DNA, 15 bp, Homo sapiens
gtagttatgagccca

SEQ ID NO: 1579315 - DNA, 15 bp, Homo sapiens
tagttatgagcccat

SEQ ID NO: 1579316 - DNA, 15 bp, Homo sapiens
agttatgagcccatg

SEQ ID NO: 1579317 - DNA, 15 bp, Homo sapiens
gttatgagcccatgt

SEQ ID NO: 1579318 - DNA, 15 bp, Homo sapiens
ttatgagcccatgtc

SEQ ID NO: 1579319 - DNA, 15 bp, Homo sapiens
tatgagcccatgtcc

SEQ ID NO: 1579320 - DNA, 15 bp, Homo sapiens
atgagcccatgtccc

SEQ ID NO: 1579321 - DNA, 15 bp, Homo sapiens
tgagcccatgtccct

SEQ ID NO: 1579322 - DNA, 15 bp, Homo sapiens
gagcccatgtcccta

SEQ ID NO: 1579323 - DNA, 15 bp, Homo sapiens
agcccatgtccctag

SEQ ID NO: 1579324 - DNA, 15 bp, Homo sapiens
gcccatgtccctaga

SEQ ID NO: 1579325 - DNA, 15 bp, Homo sapiens
cccatgtccctagaa

SEQ ID NO: 1579326 - DNA, 15 bp, Homo sapiens
ccatgtccctagaat

SEQ ID NO: 1579327 - DNA, 15 bp, Homo sapiens
catgtccctagaatg

SEQ ID NO: 1579328 - DNA, 15 bp, Homo sapiens
atgtccctagaatga

SEQ ID NO: 1579329 - DNA, 15 bp, Homo sapiens
tgtccctagaatgag

SEQ ID NO: 1579330 - DNA, 15 bp, Homo sapiens
gtccctagaatgagt

SEQ ID NO: 1579331 - DNA, 15 bp, Homo sapiens
tccctagaatgagta

SEQ ID NO: 1579332 - DNA, 15 bp, Homo sapiens
ccctagaatgagtaa

SEQ ID NO: 1579333 - DNA, 15 bp, Homo sapiens
cctagaatgagtaat

SEQ ID NO: 1579334 - DNA, 15 bp, Homo sapiens
ctagaatgagtaata

SEQ ID NO: 1579335 - DNA, 15 bp, Homo sapiens
tagaatgagtaataa

SEQ ID NO: 1579336 - DNA, 15 bp, Homo sapiens
agaatgagtaataat

SEQ ID NO: 1579337 - DNA, 15 bp, Homo sapiens
gaatgagtaataatt

SEQ ID NO: 1579338 - DNA, 15 bp, Homo sapiens
aatgagtaataattt

SEQ ID NO: 1579339 - DNA, 15 bp, Homo sapiens
atgagtaataattta

SEQ ID NO: 1579340 - DNA, 15 bp, Homo sapiens
tgagtaataatttat

SEQ ID NO: 1579341 - DNA, 15 bp, Homo sapiens
gagtaataatttatc

SEQ ID NO: 1579342 - DNA, 15 bp, Homo sapiens
agtaataatttatcc

SEQ ID NO: 1579343 - DNA, 15 bp, Homo sapiens
gtaataatttatccc

SEQ ID NO: 1579344 - DNA, 15 bp, Homo sapiens
taataatttatccct

SEQ ID NO: 1579345 - DNA, 15 bp, Homo sapiens
aataatttatccctc

SEQ ID NO: 1579346 - DNA, 15 bp, Homo sapiens
ataatttatccctcc

SEQ ID NO: 1579347 - DNA, 15 bp, Homo sapiens
taatttatccctccc

SEQ ID NO: 1579348 - DNA, 15 bp, Homo sapiens
aatttatccctccct

SEQ ID NO: 1579349 - DNA, 15 bp, Homo sapiens
atttatccctccctt

SEQ ID NO: 1579350 - DNA, 15 bp, Homo sapiens
tttatccctcccttg

SEQ ID NO: 1579351 - DNA, 15 bp, Homo sapiens
ttatccctcccttgg

SEQ ID NO: 1579352 - DNA, 15 bp, Homo sapiens
tatccctcccttggt

SEQ ID NO: 1579353 - DNA, 15 bp, Homo sapiens
atccctcccttggtt

SEQ ID NO: 1579354 - DNA, 15 bp, Homo sapiens
tccctcccttggttg

SEQ ID NO: 1579355 - DNA, 15 bp, Homo sapiens
ccctcccttggttga

SEQ ID NO: 1579356 - DNA, 15 bp, Homo sapiens
cctcccttggttgaa

SEQ ID NO: 1579357 - DNA, 15 bp, Homo sapiens
ctcccttggttgaat

SEQ ID NO: 1579358 - DNA, 15 bp, Homo sapiens
tcccttggttgaata

SEQ ID NO: 1579359 - DNA, 15 bp, Homo sapiens
cccttggttgaatag

SEQ ID NO: 1579360 - DNA, 15 bp, Homo sapiens
ccttggttgaatagt

SEQ ID NO: 1579361 - DNA, 15 bp, Homo sapiens
cttggttgaatagtc

SEQ ID NO: 1579362 - DNA, 15 bp, Homo sapiens
ttggttgaatagtca

SEQ ID NO: 1579363 - DNA, 15 bp, Homo sapiens
tggttgaatagtcaa

SEQ ID NO: 1579364 - DNA, 15 bp, Homo sapiens
ggttgaatagtcaag

SEQ ID NO: 1579365 - DNA, 15 bp, Homo sapiens
gttgaatagtcaaga

SEQ ID NO: 1579366 - DNA, 15 bp, Homo sapiens
ttgaatagtcaagaa

SEQ ID NO: 1579367 - DNA, 15 bp, Homo sapiens
tgaatagtcaagaat

SEQ ID NO: 1579368 - DNA, 15 bp, Homo sapiens
gaatagtcaagaatg

SEQ ID NO: 1579369 - DNA, 15 bp, Homo sapiens
aatagtcaagaatgc

SEQ ID NO: 1579370 - DNA, 15 bp, Homo sapiens
atagtcaagaatgct

SEQ ID NO: 1579371 - DNA, 15 bp, Homo sapiens
tagtcaagaatgctg

SEQ ID NO: 1579372 - DNA, 15 bp, Homo sapiens
agtcaagaatgctga

SEQ ID NO: 1579373 - DNA, 15 bp, Homo sapiens
gtcaagaatgctgat

SEQ ID NO: 1579374 - DNA, 15 bp, Homo sapiens
tcaagaatgctgatt

SEQ ID NO: 1579375 - DNA, 15 bp, Homo sapiens
caagaatgctgattt

SEQ ID NO: 1579376 - DNA, 15 bp, Homo sapiens
aagaatgctgatttt

SEQ ID NO: 1579377 - DNA, 15 bp, Homo sapiens
agaatgctgatttta

SEQ ID NO: 1579378 - DNA, 15 bp, Homo sapiens
gaatgctgattttaa

SEQ ID NO: 1579379 - DNA, 15 bp, Homo sapiens
aatgctgattttaat

SEQ ID NO: 1579380 - DNA, 15 bp, Homo sapiens
atgctgattttaatt

SEQ ID NO: 1579381 - DNA, 15 bp, Homo sapiens
tgctgattttaattc

SEQ ID NO: 1579382 - DNA, 15 bp, Homo sapiens
gctgattttaattct

SEQ ID NO: 1579383 - DNA, 15 bp, Homo sapiens
ctgattttaattctt

SEQ ID NO: 1579384 - DNA, 15 bp, Homo sapiens
tgattttaattcttc

SEQ ID NO: 1579385 - DNA, 15 bp, Homo sapiens
gattttaattcttct

SEQ ID NO: 1579386 - DNA, 15 bp, Homo sapiens
attttaattcttcta

SEQ ID NO: 1579387 - DNA, 15 bp, Homo sapiens
ttttaattcttctaa

SEQ ID NO: 1579388 - DNA, 15 bp, Homo sapiens
tttaattcttctaac

SEQ ID NO: 1579389 - DNA, 15 bp, Homo sapiens
ttaattcttctaaca

SEQ ID NO: 1579390 - DNA, 15 bp, Homo sapiens
taattcttctaacag

SEQ ID NO: 1579391 - DNA, 15 bp, Homo sapiens
aattcttctaacagc

SEQ ID NO: 1579392 - DNA, 15 bp, Homo sapiens
attcttctaacagct

SEQ ID NO: 1579393 - DNA, 15 bp, Homo sapiens
ttcttctaacagctt

SEQ ID NO: 1579394 - DNA, 15 bp, Homo sapiens
tcttctaacagcttt

SEQ ID NO: 1579395 - DNA, 15 bp, Homo sapiens
cttctaacagcttta

SEQ ID NO: 1579396 - DNA, 15 bp, Homo sapiens
ttctaacagctttat

SEQ ID NO: 1579397 - DNA, 15 bp, Homo sapiens
tctaacagctttatc

SEQ ID NO: 1579398 - DNA, 15 bp, Homo sapiens
ctaacagctttatcc

SEQ ID NO: 1579399 - DNA, 15 bp, Homo sapiens
taacagctttatccc

SEQ ID NO: 1579400 - DNA, 15 bp, Homo sapiens
aacagctttatccct

SEQ ID NO: 1579401 - DNA, 15 bp, Homo sapiens
acagctttatccctc

SEQ ID NO: 1579402 - DNA, 15 bp, Homo sapiens
cagctttatccctca

SEQ ID NO: 1579403 - DNA, 15 bp, Homo sapiens
agctttatccctcag

SEQ ID NO: 1579404 - DNA, 15 bp, Homo sapiens
gctttatccctcaga

SEQ ID NO: 1579405 - DNA, 15 bp, Homo sapiens
ctttatccctcagaa

SEQ ID NO: 1579406 - DNA, 15 bp, Homo sapiens
tttatccctcagaag

SEQ ID NO: 1579407 - DNA, 15 bp, Homo sapiens
ttatccctcagaagg

SEQ ID NO: 1579408 - DNA, 15 bp, Homo sapiens
tatccctcagaaggg

SEQ ID NO: 1579409 - DNA, 15 bp, Homo sapiens
atccctcagaaggga

SEQ ID NO: 1579410 - DNA, 15 bp, Homo sapiens
tccctcagaagggaa

SEQ ID NO: 1579411 - DNA, 15 bp, Homo sapiens
ccctcagaagggaag

SEQ ID NO: 1579412 - DNA, 15 bp, Homo sapiens
cctcagaagggaagg

SEQ ID NO: 1579413 - DNA, 15 bp, Homo sapiens
ctcagaagggaaggc

SEQ ID NO: 1579414 - DNA, 15 bp, Homo sapiens
tcagaagggaaggca

SEQ ID NO: 1579415 - DNA, 15 bp, Homo sapiens
cagaagggaaggcaa

SEQ ID NO: 1579416 - DNA, 15 bp, Homo sapiens
agaagggaaggcaag

SEQ ID NO: 1579417 - DNA, 15 bp, Homo sapiens
gaagggaaggcaagc

SEQ ID NO: 1579418 - DNA, 15 bp, Homo sapiens
aagggaaggcaagca

SEQ ID NO: 1579419 - DNA, 15 bp, Homo sapiens
agggaaggcaagcaa

SEQ ID NO: 1579420 - DNA, 15 bp, Homo sapiens
gggaaggcaagcaag

SEQ ID NO: 1579421 - DNA, 15 bp, Homo sapiens
ggaaggcaagcaagt

SEQ ID NO: 1579422 - DNA, 15 bp, Homo sapiens
gaaggcaagcaagtt

SEQ ID NO: 1579423 - DNA, 15 bp, Homo sapiens
aaggcaagcaagtta

SEQ ID NO: 1579424 - DNA, 15 bp, Homo sapiens
aggcaagcaagttat

SEQ ID NO: 1579425 - DNA, 15 bp, Homo sapiens
ggcaagcaagttata

SEQ ID NO: 1579426 - DNA, 15 bp, Homo sapiens
gcaagcaagttatat

SEQ ID NO: 1579427 - DNA, 15 bp, Homo sapiens
caagcaagttatata

SEQ ID NO: 1579428 - DNA, 15 bp, Homo sapiens
aagcaagttatatat

SEQ ID NO: 1579429 - DNA, 15 bp, Homo sapiens
agcaagttatatatg

SEQ ID NO: 1579430 - DNA, 15 bp, Homo sapiens
gcaagttatatatgt

SEQ ID NO: 1579431 - DNA, 15 bp, Homo sapiens
caagttatatatgta

SEQ ID NO: 1579432 - DNA, 15 bp, Homo sapiens
aagttatatatgtag

SEQ ID NO: 1579433 - DNA, 15 bp, Homo sapiens
agttatatatgtagt

SEQ ID NO: 1579434 - DNA, 15 bp, Homo sapiens
gttatatatgtagtt

SEQ ID NO: 1579435 - DNA, 15 bp, Homo sapiens
ttatatatgtagttt

SEQ ID NO: 1579436 - DNA, 15 bp, Homo sapiens
tatatatgtagttta

SEQ ID NO: 1579437 - DNA, 15 bp, Homo sapiens
atatatgtagtttat

SEQ ID NO: 1579438 - DNA, 15 bp, Homo sapiens
tatatgtagtttatt

SEQ ID NO: 1579439 - DNA, 15 bp, Homo sapiens
atatgtagtttattt

SEQ ID NO: 1579440 - DNA, 15 bp, Homo sapiens
tatgtagtttatttg

SEQ ID NO: 1579441 - DNA, 15 bp, Homo sapiens
atgtagtttatttgt

SEQ ID NO: 1579442 - DNA, 15 bp, Homo sapiens
tgtagtttatttgta

SEQ ID NO: 1579443 - DNA, 15 bp, Homo sapiens
gtagtttatttgtaa

SEQ ID NO: 1579444 - DNA, 15 bp, Homo sapiens
tagtttatttgtaag

SEQ ID NO: 1579445 - DNA, 15 bp, Homo sapiens
agtttatttgtaaga

SEQ ID NO: 1579446 - DNA, 15 bp, Homo sapiens
gtttatttgtaagac

SEQ ID NO: 1579447 - DNA, 15 bp, Homo sapiens
tttatttgtaagact

SEQ ID NO: 1579448 - DNA, 15 bp, Homo sapiens
ttatttgtaagactg

SEQ ID NO: 1579449 - DNA, 15 bp, Homo sapiens
tatttgtaagactga

SEQ ID NO: 1579450 - DNA, 15 bp, Homo sapiens
atttgtaagactgat

SEQ ID NO: 1579451 - DNA, 15 bp, Homo sapiens
tttgtaagactgata

SEQ ID NO: 1579452 - DNA, 15 bp, Homo sapiens
ttgtaagactgatat

SEQ ID NO: 1579453 - DNA, 15 bp, Homo sapiens
tgtaagactgatatg

SEQ ID NO: 1579454 - DNA, 15 bp, Homo sapiens
gtaagactgatatga

SEQ ID NO: 1579455 - DNA, 15 bp, Homo sapiens
taagactgatatgaa

SEQ ID NO: 1579456 - DNA, 15 bp, Homo sapiens
aagactgatatgaaa

SEQ ID NO: 1579457 - DNA, 15 bp, Homo sapiens
agactgatatgaaat

SEQ ID NO: 1579458 - DNA, 15 bp, Homo sapiens
gactgatatgaaatt

SEQ ID NO: 1579459 - DNA, 15 bp, Homo sapiens
actgatatgaaattg

SEQ ID NO: 1579460 - DNA, 15 bp, Homo sapiens
ctgatatgaaattgg

SEQ ID NO: 1579461 - DNA, 15 bp, Homo sapiens
tgatatgaaattgga

SEQ ID NO: 1579462 - DNA, 15 bp, Homo sapiens
gatatgaaattggaa

SEQ ID NO: 1579463 - DNA, 15 bp, Homo sapiens
atatgaaattggaag

SEQ ID NO: 1579464 - DNA, 15 bp, Homo sapiens
tatgaaattggaaga

SEQ ID NO: 1579465 - DNA, 15 bp, Homo sapiens
atgaaattggaagat

SEQ ID NO: 1579466 - DNA, 15 bp, Homo sapiens
tgaaattggaagatg

SEQ ID NO: 1579467 - DNA, 15 bp, Homo sapiens
gaaattggaagatga

SEQ ID NO: 1579468 - DNA, 15 bp, Homo sapiens
aaattggaagatgaa

SEQ ID NO: 1579469 - DNA, 15 bp, Homo sapiens
aattggaagatgaat

SEQ ID NO: 1579470 - DNA, 15 bp, Homo sapiens
attggaagatgaatc

SEQ ID NO: 1579471 - DNA, 15 bp, Homo sapiens
ttggaagatgaatct

SEQ ID NO: 1579472 - DNA, 15 bp, Homo sapiens
tggaagatgaatcta

SEQ ID NO: 1579473 - DNA, 15 bp, Homo sapiens
ggaagatgaatctac

SEQ ID NO: 1579474 - DNA, 15 bp, Homo sapiens
gaagatgaatctact

SEQ ID NO: 1579475 - DNA, 15 bp, Homo sapiens
aagatgaatctacta

SEQ ID NO: 1579476 - DNA, 15 bp, Homo sapiens
agatgaatctactat

SEQ ID NO: 1579477 - DNA, 15 bp, Homo sapiens
gatgaatctactatt

SEQ ID NO: 1579478 - DNA, 15 bp, Homo sapiens
atgaatctactatta

SEQ ID NO: 1579479 - DNA, 15 bp, Homo sapiens
tgaatctactattag

SEQ ID NO: 1579480 - DNA, 15 bp, Homo sapiens
gaatctactattagc

SEQ ID NO: 1579481 - DNA, 15 bp, Homo sapiens
aatctactattagct

SEQ ID NO: 1579482 - DNA, 15 bp, Homo sapiens
atctactattagctt

SEQ ID NO: 1579483 - DNA, 15 bp, Homo sapiens
tctactattagcttt

SEQ ID NO: 1579484 - DNA, 15 bp, Homo sapiens
ctactattagcttta

SEQ ID NO: 1579485 - DNA, 15 bp, Homo sapiens
tactattagctttaa

SEQ ID NO: 1579486 - DNA, 15 bp, Homo sapiens
actattagctttaat

SEQ ID NO: 1579487 - DNA, 15 bp, Homo sapiens
ctattagctttaatt

SEQ ID NO: 1579488 - DNA, 15 bp, Homo sapiens
tattagctttaatta

SEQ ID NO: 1579489 - DNA, 15 bp, Homo sapiens
attagctttaattat

SEQ ID NO: 1579490 - DNA, 15 bp, Homo sapiens
ttagctttaattatt

SEQ ID NO: 1579491 - DNA, 15 bp, Homo sapiens
tagctttaattattt

SEQ ID NO: 1579492 - DNA, 15 bp, Homo sapiens
agctttaattatttt

SEQ ID NO: 1579493 - DNA, 15 bp, Homo sapiens
gctttaattattttt

SEQ ID NO: 1579494 - DNA, 15 bp, Homo sapiens
ctttaattattttta

SEQ ID NO: 1579495 - DNA, 15 bp, Homo sapiens
taattatttttacat

SEQ ID NO: 1579496 - DNA, 15 bp, Homo sapiens
aattatttttacatt

SEQ ID NO: 1579497 - DNA, 15 bp, Homo sapiens
attatttttacattt

SEQ ID NO: 1579498 - DNA, 15 bp, Homo sapiens
ttatttttacattta

SEQ ID NO: 1579499 - DNA, 15 bp, Homo sapiens
tatttttacatttag

SEQ ID NO: 1579500 - DNA, 15 bp, Homo sapiens
atttttacatttagg

SEQ ID NO: 1579501 - DNA, 15 bp, Homo sapiens
tttttacatttagga

SEQ ID NO: 1579502 - DNA, 15 bp, Homo sapiens
ttttacatttaggaa

SEQ ID NO: 1579503 - DNA, 15 bp, Homo sapiens
tttacatttaggaat

SEQ ID NO: 1579504 - DNA, 15 bp, Homo sapiens
ttacatttaggaata

SEQ ID NO: 1579505 - DNA, 15 bp, Homo sapiens
tacatttaggaatat

SEQ ID NO: 1579506 - DNA, 15 bp, Homo sapiens
acatttaggaatatt

SEQ ID NO: 1579507 - DNA, 15 bp, Homo sapiens
catttaggaatattg

SEQ ID NO: 1579508 - DNA, 15 bp, Homo sapiens
atttaggaatattgc

SEQ ID NO: 1579509 - DNA, 15 bp, Homo sapiens
tttaggaatattgca

SEQ ID NO: 1579510 - DNA, 15 bp, Homo sapiens
ttaggaatattgcat

SEQ ID NO: 1579511 - DNA, 15 bp, Homo sapiens
taggaatattgcatc

SEQ ID NO: 1579512 - DNA, 15 bp, Homo sapiens
aggaatattgcatca

SEQ ID NO: 1579513 - DNA, 15 bp, Homo sapiens
ggaatattgcatcag

SEQ ID NO: 1579514 - DNA, 15 bp, Homo sapiens
gaatattgcatcagt

SEQ ID NO: 1579515 - DNA, 15 bp, Homo sapiens
aatattgcatcagta

SEQ ID NO: 1579516 - DNA, 15 bp, Homo sapiens
atattgcatcagtaa

SEQ ID NO: 1579517 - DNA, 15 bp, Homo sapiens
tattgcatcagtaac

SEQ ID NO: 1579518 - DNA, 15 bp, Homo sapiens
attgcatcagtaact

SEQ ID NO: 1579519 - DNA, 15 bp, Homo sapiens
ttgcatcagtaactc

SEQ ID NO: 1579520 - DNA, 15 bp, Homo sapiens
tgcatcagtaactca

SEQ ID NO: 1579521 - DNA, 15 bp, Homo sapiens
gcatcagtaactcat

SEQ ID NO: 1579522 - DNA, 15 bp, Homo sapiens
catcagtaactcata

SEQ ID NO: 1579523 - DNA, 15 bp, Homo sapiens
atcagtaactcataa

SEQ ID NO: 1579524 - DNA, 15 bp, Homo sapiens
tcagtaactcataat

SEQ ID NO: 1579525 - DNA, 15 bp, Homo sapiens
cagtaactcataatt

SEQ ID NO: 1579526 - DNA, 15 bp, Homo sapiens
agtaactcataattt

SEQ ID NO: 1579527 - DNA, 15 bp, Homo sapiens
gtaactcataatttt

SEQ ID NO: 1579528 - DNA, 15 bp, Homo sapiens
taactcataattttg

SEQ ID NO: 1579529 - DNA, 15 bp, Homo sapiens
aactcataattttgg

SEQ ID NO: 1579530 - DNA, 15 bp, Homo sapiens
actcataattttggt

SEQ ID NO: 1579531 - DNA, 15 bp, Homo sapiens
ctcataattttggtt

SEQ ID NO: 1579532 - DNA, 15 bp, Homo sapiens
tcataattttggttt

SEQ ID NO: 1579533 - DNA, 15 bp, Homo sapiens
cataattttggtttt

SEQ ID NO: 1579534 - DNA, 15 bp, Homo sapiens
ataattttggttttc

SEQ ID NO: 1579535 - DNA, 15 bp, Homo sapiens
taattttggttttct

SEQ ID NO: 1579536 - DNA, 15 bp, Homo sapiens
aattttggttttctg

SEQ ID NO: 1579537 - DNA, 15 bp, Homo sapiens
attttggttttctgt

SEQ ID NO: 1579538 - DNA, 15 bp, Homo sapiens
ttttggttttctgtt

SEQ ID NO: 1579539 - DNA, 15 bp, Homo sapiens
tttggttttctgtta

SEQ ID NO: 1579540 - DNA, 15 bp, Homo sapiens
ttggttttctgttat

SEQ ID NO: 1579541 - DNA, 15 bp, Homo sapiens
tggttttctgttatc

SEQ ID NO: 1579542 - DNA, 15 bp, Homo sapiens
ggttttctgttatcc

SEQ ID NO: 1579543 - DNA, 15 bp, Homo sapiens
gttttctgttatcct

SEQ ID NO: 1579544 - DNA, 15 bp, Homo sapiens
ttttctgttatcctg

SEQ ID NO: 1579545 - DNA, 15 bp, Homo sapiens
tttctgttatcctga

SEQ ID NO: 1579546 - DNA, 15 bp, Homo sapiens
ttctgttatcctgag

SEQ ID NO: 1579547 - DNA, 15 bp, Homo sapiens
tctgttatcctgagt

SEQ ID NO: 1579548 - DNA, 15 bp, Homo sapiens
ctgttatcctgagtt

SEQ ID NO: 1579549 - DNA, 15 bp, Homo sapiens
tgttatcctgagtta

SEQ ID NO: 1579550 - DNA, 15 bp, Homo sapiens
gttatcctgagttaa

SEQ ID NO: 1579551 - DNA, 15 bp, Homo sapiens
ttatcctgagttaac

SEQ ID NO: 1579552 - DNA, 15 bp, Homo sapiens
tatcctgagttaaca

SEQ ID NO: 1579553 - DNA, 15 bp, Homo sapiens
atcctgagttaacac

SEQ ID NO: 1579554 - DNA, 15 bp, Homo sapiens
tcctgagttaacaca

SEQ ID NO: 1579555 - DNA, 15 bp, Homo sapiens
cctgagttaacacaa

SEQ ID NO: 1579556 - DNA, 15 bp, Homo sapiens
ctgagttaacacaaa

SEQ ID NO: 1579557 - DNA, 15 bp, Homo sapiens
tgagttaacacaaat

SEQ ID NO: 1579558 - DNA, 15 bp, Homo sapiens
gagttaacacaaatt

SEQ ID NO: 1579559 - DNA, 15 bp, Homo sapiens
agttaacacaaatta

SEQ ID NO: 1579560 - DNA, 15 bp, Homo sapiens
gttaacacaaattat

SEQ ID NO: 1579561 - DNA, 15 bp, Homo sapiens
ttaacacaaattatc

SEQ ID NO: 1579562 - DNA, 15 bp, Homo sapiens
taacacaaattatcc

SEQ ID NO: 1579563 - DNA, 15 bp, Homo sapiens
aacacaaattatcca

SEQ ID NO: 1579564 - DNA, 15 bp, Homo sapiens
acacaaattatccaa

SEQ ID NO: 1579565 - DNA, 15 bp, Homo sapiens
cacaaattatccaag

SEQ ID NO: 1579566 - DNA, 15 bp, Homo sapiens
acaaattatccaagg

SEQ ID NO: 1579567 - DNA, 15 bp, Homo sapiens
caaattatccaagga

SEQ ID NO: 1579568 - DNA, 15 bp, Homo sapiens
aaattatccaaggag

SEQ ID NO: 1579569 - DNA, 15 bp, Homo sapiens
aattatccaaggaga

SEQ ID NO: 1579570 - DNA, 15 bp, Homo sapiens
attatccaaggagat

SEQ ID NO: 1579571 - DNA, 15 bp, Homo sapiens
ttatccaaggagatg

SEQ ID NO: 1579572 - DNA, 15 bp, Homo sapiens
tatccaaggagatgg

SEQ ID NO: 1579573 - DNA, 15 bp, Homo sapiens
atccaaggagatggc

SEQ ID NO: 1579574 - DNA, 15 bp, Homo sapiens
tccaaggagatggcg

SEQ ID NO: 1579575 - DNA, 15 bp, Homo sapiens
ccaaggagatggcgg

SEQ ID NO: 1579576 - DNA, 15 bp, Homo sapiens
caaggagatggcgga

SEQ ID NO: 1579577 - DNA, 15 bp, Homo sapiens
aaggagatggcggat

SEQ ID NO: 1579578 - DNA, 15 bp, Homo sapiens
aggagatggcggatc

SEQ ID NO: 1579579 - DNA, 15 bp, Homo sapiens
ggagatggcggatca

SEQ ID NO: 1579580 - DNA, 15 bp, Homo sapiens
gagatggcggatcat

SEQ ID NO: 1579581 - DNA, 15 bp, Homo sapiens
agatggcggatcatc

SEQ ID NO: 1579582 - DNA, 15 bp, Homo sapiens
gatggcggatcatct

SEQ ID NO: 1579583 - DNA, 15 bp, Homo sapiens
atggcggatcatctg

SEQ ID NO: 1579584 - DNA, 15 bp, Homo sapiens
tggcggatcatctgc

SEQ ID NO: 1579585 - DNA, 15 bp, Homo sapiens
ggcggatcatctgct

SEQ ID NO: 1579586 - DNA, 15 bp, Homo sapiens
gcggatcatctgctt

SEQ ID NO: 1579587 - DNA, 15 bp, Homo sapiens
cggatcatctgcttt

SEQ ID NO: 1579588 - DNA, 15 bp, Homo sapiens
ggatcatctgctttg

SEQ ID NO: 1579589 - DNA, 15 bp, Homo sapiens
gatcatctgctttga

SEQ ID NO: 1579590 - DNA, 15 bp, Homo sapiens
atcatctgctttgag

SEQ ID NO: 1579591 - DNA, 15 bp, Homo sapiens
tcatctgctttgagg

SEQ ID NO: 1579592 - DNA, 15 bp, Homo sapiens
catctgctttgaggt

SEQ ID NO: 1579593 - DNA, 15 bp, Homo sapiens
atctgctttgaggtg

SEQ ID NO: 1579594 - DNA, 15 bp, Homo sapiens
tctgctttgaggtgt

SEQ ID NO: 1579595 - DNA, 15 bp, Homo sapiens
ctgctttgaggtgtt

SEQ ID NO: 1579596 - DNA, 15 bp, Homo sapiens
tgctttgaggtgttt

SEQ ID NO: 1579597 - DNA, 15 bp, Homo sapiens
gctttgaggtgtttt

SEQ ID NO: 1579598 - DNA, 15 bp, Homo sapiens
ctttgaggtgttttt

SEQ ID NO: 1579599 - DNA, 15 bp, Homo sapiens
tttgaggtgtttttt

SEQ ID NO: 1579600 - DNA, 15 bp, Homo sapiens
ttgaggtgttttttt

SEQ ID NO: 1579601 - DNA, 15 bp, Homo sapiens
tgaggtgtttttttt

SEQ ID NO: 1579602 - DNA, 15 bp, Homo sapiens
gaggtgttttttttt

SEQ ID NO: 1579603 - DNA, 15 bp, Homo sapiens
aggtgtttttttttg

SEQ ID NO: 1579604 - DNA, 15 bp, Homo sapiens
ggtgtttttttttga

SEQ ID NO: 1579605 - DNA, 15 bp, Homo sapiens
gtgtttttttttgag

SEQ ID NO: 1579606 - DNA, 15 bp, Homo sapiens
tgtttttttttgaga

SEQ ID NO: 1579607 - DNA, 15 bp, Homo sapiens
gtttttttttgagaa

SEQ ID NO: 1579608 - DNA, 15 bp, Homo sapiens
tttttttttgagaat

SEQ ID NO: 1579609 - DNA, 15 bp, Homo sapiens
ttttttttgagaatt

SEQ ID NO: 1579610 - DNA, 15 bp, Homo sapiens
tttttttgagaattt

SEQ ID NO: 1579611 - DNA, 15 bp, Homo sapiens
ttttttgagaatttt

SEQ ID NO: 1579612 - DNA, 15 bp, Homo sapiens
tttttgagaatttta

SEQ ID NO: 1579613 - DNA, 15 bp, Homo sapiens
ttttgagaattttaa

SEQ ID NO: 1579614 - DNA, 15 bp, Homo sapiens
tttgagaattttaat

SEQ ID NO: 1579615 - DNA, 15 bp, Homo sapiens
ttgagaattttaatg

SEQ ID NO: 1579616 - DNA, 15 bp, Homo sapiens
tgagaattttaatgt

SEQ ID NO: 1579617 - DNA, 15 bp, Homo sapiens
gagaattttaatgta

SEQ ID NO: 1579618 - DNA, 15 bp, Homo sapiens
agaattttaatgtat

SEQ ID NO: 1579619 - DNA, 15 bp, Homo sapiens
gaattttaatgtatc

SEQ ID NO: 1579620 - DNA, 15 bp, Homo sapiens
aattttaatgtatct

SEQ ID NO: 1579621 - DNA, 15 bp, Homo sapiens
attttaatgtatctg

SEQ ID NO: 1579622 - DNA, 15 bp, Homo sapiens
ttttaatgtatctga

SEQ ID NO: 1579623 - DNA, 15 bp, Homo sapiens
tttaatgtatctgaa

SEQ ID NO: 1579624 - DNA, 15 bp, Homo sapiens
ttaatgtatctgaat

SEQ ID NO: 1579625 - DNA, 15 bp, Homo sapiens
taatgtatctgaata

SEQ ID NO: 1579626 - DNA, 15 bp, Homo sapiens
aatgtatctgaatat

SEQ ID NO: 1579627 - DNA, 15 bp, Homo sapiens
atgtatctgaatata

SEQ ID NO: 1579628 - DNA, 15 bp, Homo sapiens
tgtatctgaatataa

SEQ ID NO: 1579629 - DNA, 15 bp, Homo sapiens
gtatctgaatataaa

SEQ ID NO: 1579630 - DNA, 15 bp, Homo sapiens
tatctgaatataaaa

SEQ ID NO: 1579631 - DNA, 15 bp, Homo sapiens
atctgaatataaaag

SEQ ID NO: 1579632 - DNA, 15 bp, Homo sapiens
tctgaatataaaagg

SEQ ID NO: 1579633 - DNA, 15 bp, Homo sapiens
ctgaatataaaaggt

SEQ ID NO: 1579634 - DNA, 15 bp, Homo sapiens
tgaatataaaaggta

SEQ ID NO: 1579635 - DNA, 15 bp, Homo sapiens
gaatataaaaggtaa

SEQ ID NO: 1579636 - DNA, 15 bp, Homo sapiens
aatataaaaggtaaa

SEQ ID NO: 1579637 - DNA, 15 bp, Homo sapiens
atataaaaggtaaaa

SEQ ID NO: 1579638 - DNA, 15 bp, Homo sapiens
tataaaaggtaaaaa

SEQ ID NO: 1579639 - DNA, 15 bp, Homo sapiens
ataaaaggtaaaaat

SEQ ID NO: 1579640 - DNA, 15 bp, Homo sapiens
taaaaggtaaaaata

SEQ ID NO: 1579641 - DNA, 15 bp, Homo sapiens
aaaaggtaaaaatat

SEQ ID NO: 1579642 - DNA, 15 bp, Homo sapiens
aaaggtaaaaatatg

SEQ ID NO: 1579643 - DNA, 15 bp, Homo sapiens
aaggtaaaaatatgc

SEQ ID NO: 1579644 - DNA, 15 bp, Homo sapiens
aggtaaaaatatgcc

SEQ ID NO: 1579645 - DNA, 15 bp, Homo sapiens
ggtaaaaatatgcca

SEQ ID NO: 1579646 - DNA, 15 bp, Homo sapiens
gtaaaaatatgccaa

SEQ ID NO: 1579647 - DNA, 15 bp, Homo sapiens
taaaaatatgccaac

SEQ ID NO: 1579648 - DNA, 15 bp, Homo sapiens
aaaaatatgccaact

SEQ ID NO: 1579649 - DNA, 15 bp, Homo sapiens
aaaatatgccaacta

SEQ ID NO: 1579650 - DNA, 15 bp, Homo sapiens
aaatatgccaactag

SEQ ID NO: 1579651 - DNA, 15 bp, Homo sapiens
aatatgccaactagc

SEQ ID NO: 1579652 - DNA, 15 bp, Homo sapiens
atatgccaactagca

SEQ ID NO: 1579653 - DNA, 15 bp, Homo sapiens
tatgccaactagcaa

SEQ ID NO: 1579654 - DNA, 15 bp, Homo sapiens
atgccaactagcaat

SEQ ID NO: 1579655 - DNA, 15 bp, Homo sapiens
tgccaactagcaatt

SEQ ID NO: 1579656 - DNA, 15 bp, Homo sapiens
gccaactagcaattt

SEQ ID NO: 1579657 - DNA, 15 bp, Homo sapiens
ccaactagcaatttc

SEQ ID NO: 1579658 - DNA, 15 bp, Homo sapiens
caactagcaatttct

SEQ ID NO: 1579659 - DNA, 15 bp, Homo sapiens
aactagcaatttctg

SEQ ID NO: 1579660 - DNA, 15 bp, Homo sapiens
actagcaatttctgc

SEQ ID NO: 1579661 - DNA, 15 bp, Homo sapiens
ctagcaatttctgcc

SEQ ID NO: 1579662 - DNA, 15 bp, Homo sapiens
tagcaatttctgccc

SEQ ID NO: 1579663 - DNA, 15 bp, Homo sapiens
agcaatttctgccca

SEQ ID NO: 1579664 - DNA, 15 bp, Homo sapiens
gcaatttctgcccat

SEQ ID NO: 1579665 - DNA, 15 bp, Homo sapiens
caatttctgcccatt

SEQ ID NO: 1579666 - DNA, 15 bp, Homo sapiens
aatttctgcccattc

SEQ ID NO: 1579667 - DNA, 15 bp, Homo sapiens
atttctgcccattcc

SEQ ID NO: 1579668 - DNA, 15 bp, Homo sapiens
tttctgcccattcca

SEQ ID NO: 1579669 - DNA, 15 bp, Homo sapiens
ttctgcccattccag

SEQ ID NO: 1579670 - DNA, 15 bp, Homo sapiens
tctgcccattccaga

SEQ ID NO: 1579671 - DNA, 15 bp, Homo sapiens
ctgcccattccagaa

SEQ ID NO: 1579672 - DNA, 15 bp, Homo sapiens
tgcccattccagaag

SEQ ID NO: 1579673 - DNA, 15 bp, Homo sapiens
gcccattccagaagt

SEQ ID NO: 1579674 - DNA, 15 bp, Homo sapiens
cccattccagaagtt

SEQ ID NO: 1579675 - DNA, 15 bp, Homo sapiens
ccattccagaagttt

SEQ ID NO: 1579676 - DNA, 15 bp, Homo sapiens
cattccagaagtttg

SEQ ID NO: 1579677 - DNA, 15 bp, Homo sapiens
attccagaagtttgg

SEQ ID NO: 1579678 - DNA, 15 bp, Homo sapiens
ttccagaagtttgga

SEQ ID NO: 1579679 - DNA, 15 bp, Homo sapiens
tccagaagtttggaa

SEQ ID NO: 1579680 - DNA, 15 bp, Homo sapiens
ccagaagtttggaaa

SEQ ID NO: 1579681 - DNA, 15 bp, Homo sapiens
cagaagtttggaaat

SEQ ID NO: 1579682 - DNA, 15 bp, Homo sapiens
agaagtttggaaata

SEQ ID NO: 1579683 - DNA, 15 bp, Homo sapiens
gaagtttggaaatat

SEQ ID NO: 1579684 - DNA, 15 bp, Homo sapiens
aagtttggaaatatt

SEQ ID NO: 1579685 - DNA, 15 bp, Homo sapiens
agtttggaaatatta

SEQ ID NO: 1579686 - DNA, 15 bp, Homo sapiens
gtttggaaatattac

SEQ ID NO: 1579687 - DNA, 15 bp, Homo sapiens
tttggaaatattact

SEQ ID NO: 1579688 - DNA, 15 bp, Homo sapiens
ttggaaatattactc

SEQ ID NO: 1579689 - DNA, 15 bp, Homo sapiens
tggaaatattactca

SEQ ID NO: 1579690 - DNA, 15 bp, Homo sapiens
ggaaatattactcat

SEQ ID NO: 1579691 - DNA, 15 bp, Homo sapiens
gaaatattactcatt

SEQ ID NO: 1579692 - DNA, 15 bp, Homo sapiens
aaatattactcatta

SEQ ID NO: 1579693 - DNA, 15 bp, Homo sapiens
aatattactcattac

SEQ ID NO: 1579694 - DNA, 15 bp, Homo sapiens
atattactcattact

SEQ ID NO: 1579695 - DNA, 15 bp, Homo sapiens
tattactcattacta

SEQ ID NO: 1579696 - DNA, 15 bp, Homo sapiens
attactcattactag

SEQ ID NO: 1579697 - DNA, 15 bp, Homo sapiens
ttactcattactagg

SEQ ID NO: 1579698 - DNA, 15 bp, Homo sapiens
tactcattactagga

SEQ ID NO: 1579699 - DNA, 15 bp, Homo sapiens
actcattactaggaa

SEQ ID NO: 1579700 - DNA, 15 bp, Homo sapiens
ctcattactaggaat

SEQ ID NO: 1579701 - DNA, 15 bp, Homo sapiens
tcattactaggaatt

SEQ ID NO: 1579702 - DNA, 15 bp, Homo sapiens
cattactaggaatta

SEQ ID NO: 1579703 - DNA, 15 bp, Homo sapiens
attactaggaattaa

SEQ ID NO: 1579704 - DNA, 15 bp, Homo sapiens
ttactaggaattaaa

SEQ ID NO: 1579705 - DNA, 15 bp, Homo sapiens
tactaggaattaaat

SEQ ID NO: 1579706 - DNA, 15 bp, Homo sapiens
actaggaattaaata

SEQ ID NO: 1579707 - DNA, 15 bp, Homo sapiens
ctaggaattaaataa

SEQ ID NO: 1579708 - DNA, 15 bp, Homo sapiens
taggaattaaataaa

SEQ ID NO: 1579709 - DNA, 15 bp, Homo sapiens
aggaattaaataaaa

SEQ ID NO: 1579710 - DNA, 15 bp, Homo sapiens
ggaattaaataaaat

SEQ ID NO: 1579711 - DNA, 15 bp, Homo sapiens
gaattaaataaaata

SEQ ID NO: 1579712 - DNA, 15 bp, Homo sapiens
aattaaataaaatat

SEQ ID NO: 1579713 - DNA, 15 bp, Homo sapiens
attaaataaaatatg

SEQ ID NO: 1579714 - DNA, 15 bp, Homo sapiens
ttaaataaaatatgg

SEQ ID NO: 1579715 - DNA, 15 bp, Homo sapiens
taaataaaatatggt

SEQ ID NO: 1579716 - DNA, 15 bp, Homo sapiens
aaataaaatatggtt

SEQ ID NO: 1579717 - DNA, 15 bp, Homo sapiens
aataaaatatggttt

SEQ ID NO: 1579718 - DNA, 15 bp, Homo sapiens
ataaaatatggttta

SEQ ID NO: 1579719 - DNA, 15 bp, Homo sapiens
taaaatatggtttat

SEQ ID NO: 1579720 - DNA, 15 bp, Homo sapiens
aaaatatggtttatc

SEQ ID NO: 1579721 - DNA, 15 bp, Homo sapiens
aaatatggtttatct

SEQ ID NO: 1579722 - DNA, 15 bp, Homo sapiens
aatatggtttatcta

SEQ ID NO: 1579723 - DNA, 15 bp, Homo sapiens
atatggtttatctat

SEQ ID NO: 1579724 - DNA, 15 bp, Homo sapiens
tatggtttatctatt

SEQ ID NO: 1579725 - DNA, 15 bp, Homo sapiens
atggtttatctattg

SEQ ID NO: 1579726 - DNA, 15 bp, Homo sapiens
tggtttatctattgt

SEQ ID NO: 1579727 - DNA, 15 bp, Homo sapiens
ggtttatctattgtt

SEQ ID NO: 1579728 - DNA, 15 bp, Homo sapiens
gtttatctattgtta

SEQ ID NO: 1579729 - DNA, 15 bp, Homo sapiens
tttatctattgttat

SEQ ID NO: 1579730 - DNA, 15 bp, Homo sapiens
ttatctattgttata

SEQ ID NO: 1579731 - DNA, 15 bp, Homo sapiens
tatctattgttatac

SEQ ID NO: 1579732 - DNA, 15 bp, Homo sapiens
atctattgttatacc

SEQ ID NO: 1579733 - DNA, 15 bp, Homo sapiens
tctattgttatacct

SEQ ID NO: 1579734 - DNA, 15 bp, Homo sapiens
ctattgttatacctc

SEQ ID NO: 1579735 - DNA, 15 bp, Homo sapiens
tattgttatacctct

SEQ ID NO: 1579736 - DNA, 15 bp, Homo sapiens
attgttatacctctt

SEQ ID NO: 1579737 - DNA, 15 bp, Homo sapiens
ttgttatacctcttt

SEQ ID NO: 1579738 - DNA, 15 bp, Homo sapiens
tgttatacctctttt

SEQ ID NO: 1579739 - DNA, 15 bp, Homo sapiens
gttatacctctttta

SEQ ID NO: 1579740 - DNA, 15 bp, Homo sapiens
ttatacctcttttaa

SEQ ID NO: 1579741 - DNA, 15 bp, Homo sapiens
tatacctcttttaat

SEQ ID NO: 1579742 - DNA, 15 bp, Homo sapiens
atacctcttttaatt

SEQ ID NO: 1579743 - DNA, 15 bp, Homo sapiens
tacctcttttaattc

SEQ ID NO: 1579744 - DNA, 15 bp, Homo sapiens
acctcttttaattca

SEQ ID NO: 1579745 - DNA, 15 bp, Homo sapiens
cctcttttaattcac

SEQ ID NO: 1579746 - DNA, 15 bp, Homo sapiens
ctcttttaattcaca

SEQ ID NO: 1579747 - DNA, 15 bp, Homo sapiens
tcttttaattcacat

SEQ ID NO: 1579748 - DNA, 15 bp, Homo sapiens
cttttaattcacata

SEQ ID NO: 1579749 - DNA, 15 bp, Homo sapiens
ttttaattcacatag

SEQ ID NO: 1579750 - DNA, 15 bp, Homo sapiens
tttaattcacatagc

SEQ ID NO: 1579751 - DNA, 15 bp, Homo sapiens
ttaattcacatagct

SEQ ID NO: 1579752 - DNA, 15 bp, Homo sapiens
taattcacatagctc

SEQ ID NO: 1579753 - DNA, 15 bp, Homo sapiens
aattcacatagctca

SEQ ID NO: 1579754 - DNA, 15 bp, Homo sapiens
attcacatagctcat

SEQ ID NO: 1579755 - DNA, 15 bp, Homo sapiens
ttcacatagctcatt

SEQ ID NO: 1579756 - DNA, 15 bp, Homo sapiens
tcacatagctcattt

SEQ ID NO: 1579757 - DNA, 15 bp, Homo sapiens
cacatagctcatttt

SEQ ID NO: 1579758 - DNA, 15 bp, Homo sapiens
acatagctcattttt

SEQ ID NO: 1579759 - DNA, 15 bp, Homo sapiens
catagctcattttta

SEQ ID NO: 1579760 - DNA, 15 bp, Homo sapiens
atagctcatttttat

SEQ ID NO: 1579761 - DNA, 15 bp, Homo sapiens
tagctcatttttatc

SEQ ID NO: 1579762 - DNA, 15 bp, Homo sapiens
agctcatttttatct

SEQ ID NO: 1579763 - DNA, 15 bp, Homo sapiens
gctcatttttatctt

SEQ ID NO: 1579764 - DNA, 15 bp, Homo sapiens
ctcatttttatcttt

SEQ ID NO: 1579765 - DNA, 15 bp, Homo sapiens
tcatttttatctttt

SEQ ID NO: 1579766 - DNA, 15 bp, Homo sapiens
catttttatctttta

SEQ ID NO: 1579767 - DNA, 15 bp, Homo sapiens
atttttatcttttat

SEQ ID NO: 1579768 - DNA, 15 bp, Homo sapiens
tttttatcttttatt

SEQ ID NO: 1579769 - DNA, 15 bp, Homo sapiens
ttttatcttttattt

SEQ ID NO: 1579770 - DNA, 15 bp, Homo sapiens
tttatcttttatttt

SEQ ID NO: 1579771 - DNA, 15 bp, Homo sapiens
ttatcttttattttt

SEQ ID NO: 1579772 - DNA, 15 bp, Homo sapiens
tatcttttatttttg

SEQ ID NO: 1579773 - DNA, 15 bp, Homo sapiens
atcttttatttttgt

SEQ ID NO: 1579774 - DNA, 15 bp, Homo sapiens
tcttttatttttgtt

SEQ ID NO: 1579775 - DNA, 15 bp, Homo sapiens
cttttatttttgttt

SEQ ID NO: 1579776 - DNA, 15 bp, Homo sapiens
ttttatttttgtttg

SEQ ID NO: 1579777 - DNA, 15 bp, Homo sapiens
tttatttttgtttgt

SEQ ID NO: 1579778 - DNA, 15 bp, Homo sapiens
ttatttttgtttgtt

SEQ ID NO: 1579779 - DNA, 15 bp, Homo sapiens
tatttttgtttgttt

SEQ ID NO: 1579780 - DNA, 15 bp, Homo sapiens
tttgtttgttttttt

SEQ ID NO: 1579781 - DNA, 15 bp, Homo sapiens
ttgtttgtttttttt

SEQ ID NO: 1579782 - DNA, 15 bp, Homo sapiens
tgtttgttttttttg

SEQ ID NO: 1579783 - DNA, 15 bp, Homo sapiens
gtttgttttttttga

SEQ ID NO: 1579784 - DNA, 15 bp, Homo sapiens
tttgttttttttgag

SEQ ID NO: 1579785 - DNA, 15 bp, Homo sapiens
ttgttttttttgaga

SEQ ID NO: 1579786 - DNA, 15 bp, Homo sapiens
tgttttttttgagat

SEQ ID NO: 1579787 - DNA, 15 bp, Homo sapiens
gttttttttgagatg

SEQ ID NO: 1579788 - DNA, 15 bp, Homo sapiens
ctctgtcaccaggca

SEQ ID NO: 1579789 - DNA, 15 bp, Homo sapiens
tctgtcaccaggcag

SEQ ID NO: 1579790 - DNA, 15 bp, Homo sapiens
ctgtcaccaggcagg

SEQ ID NO: 1579791 - DNA, 15 bp, Homo sapiens
tgtcaccaggcagga

SEQ ID NO: 1579792 - DNA, 15 bp, Homo sapiens
gtcaccaggcaggag

SEQ ID NO: 1579793 - DNA, 15 bp, Homo sapiens
tcaccaggcaggagt

SEQ ID NO: 1579794 - DNA, 15 bp, Homo sapiens
caccaggcaggagtg

SEQ ID NO: 1579795 - DNA, 15 bp, Homo sapiens
accaggcaggagtgc

SEQ ID NO: 1579796 - DNA, 15 bp, Homo sapiens
ccaggcaggagtgca

SEQ ID NO: 1579797 - DNA, 15 bp, Homo sapiens
caggcaggagtgcag

SEQ ID NO: 1579798 - DNA, 15 bp, Homo sapiens
aggcaggagtgcagt

SEQ ID NO: 1579799 - DNA, 15 bp, Homo sapiens
ggcaggagtgcagtg

SEQ ID NO: 1579800 - DNA, 15 bp, Homo sapiens
gcaggagtgcagtga

SEQ ID NO: 1579801 - DNA, 15 bp, Homo sapiens
caggagtgcagtgat

SEQ ID NO: 1579802 - DNA, 15 bp, Homo sapiens
aggagtgcagtgatg

SEQ ID NO: 1579803 - DNA, 15 bp, Homo sapiens
gagtgcagtgatgca

SEQ ID NO: 1579804 - DNA, 15 bp, Homo sapiens
agtgcagtgatgcaa

SEQ ID NO: 1579805 - DNA, 15 bp, Homo sapiens
gtgcagtgatgcaat

SEQ ID NO: 1579806 - DNA, 15 bp, Homo sapiens
tgcagtgatgcaatc

SEQ ID NO: 1579807 - DNA, 15 bp, Homo sapiens
gcagtgatgcaatct

SEQ ID NO: 1579808 - DNA, 15 bp, Homo sapiens
cagtgatgcaatctc

SEQ ID NO: 1579809 - DNA, 15 bp, Homo sapiens
agtgatgcaatctcg

SEQ ID NO: 1579810 - DNA, 15 bp, Homo sapiens
gtgatgcaatctcgg

SEQ ID NO: 1579811 - DNA, 15 bp, Homo sapiens
tgatgcaatctcggc

SEQ ID NO: 1579812 - DNA, 15 bp, Homo sapiens
gatgcaatctcggct

SEQ ID NO: 1579813 - DNA, 15 bp, Homo sapiens
atgcaatctcggctc

SEQ ID NO: 1579814 - DNA, 15 bp, Homo sapiens
aatctcggctcactc

SEQ ID NO: 1579815 - DNA, 15 bp, Homo sapiens
atctcggctcactct

SEQ ID NO: 1579816 - DNA, 15 bp, Homo sapiens
tctcggctcactcta

SEQ ID NO: 1579817 - DNA, 15 bp, Homo sapiens
ctcggctcactctag

SEQ ID NO: 1579818 - DNA, 15 bp, Homo sapiens
tcggctcactctagc

SEQ ID NO: 1579819 - DNA, 15 bp, Homo sapiens
cggctcactctagcc

SEQ ID NO: 1579820 - DNA, 15 bp, Homo sapiens
ggctcactctagcca

SEQ ID NO: 1579821 - DNA, 15 bp, Homo sapiens
gctcactctagccac

SEQ ID NO: 1579822 - DNA, 15 bp, Homo sapiens
ctcactctagccacc

SEQ ID NO: 1579823 - DNA, 15 bp, Homo sapiens
tcactctagccaccg

SEQ ID NO: 1579824 - DNA, 15 bp, Homo sapiens
cactctagccaccga

SEQ ID NO: 1579825 - DNA, 15 bp, Homo sapiens
actctagccaccgac

SEQ ID NO: 1579826 - DNA, 15 bp, Homo sapiens
ctctagccaccgact

SEQ ID NO: 1579827 - DNA, 15 bp, Homo sapiens
tctagccaccgactc

SEQ ID NO: 1579828 - DNA, 15 bp, Homo sapiens
ctagccaccgactcc

SEQ ID NO: 1579829 - DNA, 15 bp, Homo sapiens
tagccaccgactccc

SEQ ID NO: 1579830 - DNA, 15 bp, Homo sapiens
agccaccgactccct

SEQ ID NO: 1579831 - DNA, 15 bp, Homo sapiens
gccaccgactccctg

SEQ ID NO: 1579832 - DNA, 15 bp, Homo sapiens
ccaccgactccctgg

SEQ ID NO: 1579833 - DNA, 15 bp, Homo sapiens
caccgactccctggt

SEQ ID NO: 1579834 - DNA, 15 bp, Homo sapiens
accgactccctggtt

SEQ ID NO: 1579835 - DNA, 15 bp, Homo sapiens
ccgactccctggttc

SEQ ID NO: 1579836 - DNA, 15 bp, Homo sapiens
cgactccctggttca

SEQ ID NO: 1579837 - DNA, 15 bp, Homo sapiens
gactccctggttcaa

SEQ ID NO: 1579838 - DNA, 15 bp, Homo sapiens
actccctggttcaag

SEQ ID NO: 1579839 - DNA, 15 bp, Homo sapiens
ctccctggttcaagc

SEQ ID NO: 1579840 - DNA, 15 bp, Homo sapiens
tccctggttcaagcg

SEQ ID NO: 1579841 - DNA, 15 bp, Homo sapiens
ccctggttcaagcga

SEQ ID NO: 1579842 - DNA, 15 bp, Homo sapiens
cctggttcaagcgat

SEQ ID NO: 1579843 - DNA, 15 bp, Homo sapiens
ctggttcaagcgatt

SEQ ID NO: 1579844 - DNA, 15 bp, Homo sapiens
tggttcaagcgattc

SEQ ID NO: 1579845 - DNA, 15 bp, Homo sapiens
tcctgcctgagcctt

SEQ ID NO: 1579846 - DNA, 15 bp, Homo sapiens
cctgcctgagccttc

SEQ ID NO: 1579847 - DNA, 15 bp, Homo sapiens
ctgcctgagccttct

SEQ ID NO: 1579848 - DNA, 15 bp, Homo sapiens
tgcctgagccttctg

SEQ ID NO: 1579849 - DNA, 15 bp, Homo sapiens
gcctgagccttctga

SEQ ID NO: 1579850 - DNA, 15 bp, Homo sapiens
cctgagccttctgag

SEQ ID NO: 1579851 - DNA, 15 bp, Homo sapiens
ctgagccttctgagt

SEQ ID NO: 1579852 - DNA, 15 bp, Homo sapiens
tgagccttctgagta

SEQ ID NO: 1579853 - DNA, 15 bp, Homo sapiens
gagccttctgagtag

SEQ ID NO: 1579854 - DNA, 15 bp, Homo sapiens
tgggattacaggcag

SEQ ID NO: 1579855 - DNA, 15 bp, Homo sapiens
gggattacaggcagg

SEQ ID NO: 1579856 - DNA, 15 bp, Homo sapiens
ggattacaggcaggc

SEQ ID NO: 1579857 - DNA, 15 bp, Homo sapiens
gattacaggcaggca

SEQ ID NO: 1579858 - DNA, 15 bp, Homo sapiens
attacaggcaggcac

SEQ ID NO: 1579859 - DNA, 15 bp, Homo sapiens
ttacaggcaggcacc

SEQ ID NO: 1579860 - DNA, 15 bp, Homo sapiens
tacaggcaggcacca

SEQ ID NO: 1579861 - DNA, 15 bp, Homo sapiens
acaggcaggcaccac

SEQ ID NO: 1579862 - DNA, 15 bp, Homo sapiens
caggcaggcaccacc

SEQ ID NO: 1579863 - DNA, 15 bp, Homo sapiens
aggcaggcaccacca

SEQ ID NO: 1579864 - DNA, 15 bp, Homo sapiens
ggcaggcaccaccac

SEQ ID NO: 1579865 - DNA, 15 bp, Homo sapiens
gcaggcaccaccacg

SEQ ID NO: 1579866 - DNA, 15 bp, Homo sapiens
caggcaccaccacgc

SEQ ID NO: 1579867 - DNA, 15 bp, Homo sapiens
aggcaccaccacgcc

SEQ ID NO: 1579868 - DNA, 15 bp, Homo sapiens
ggcaccaccacgccc

SEQ ID NO: 1579869 - DNA, 15 bp, Homo sapiens
gcaccaccacgccca

SEQ ID NO: 1579870 - DNA, 15 bp, Homo sapiens
accaccacgcccagc

SEQ ID NO: 1579871 - DNA, 15 bp, Homo sapiens
tttgtagagacagga

SEQ ID NO: 1579872 - DNA, 15 bp, Homo sapiens
ttgtagagacaggat

SEQ ID NO: 1579873 - DNA, 15 bp, Homo sapiens
tgtagagacaggatt

SEQ ID NO: 1579874 - DNA, 15 bp, Homo sapiens
gtagagacaggattt

SEQ ID NO: 1579875 - DNA, 15 bp, Homo sapiens
tagagacaggatttc

SEQ ID NO: 1579876 - DNA, 15 bp, Homo sapiens
agagacaggatttca

SEQ ID NO: 1579877 - DNA, 15 bp, Homo sapiens
gagacaggatttcac

SEQ ID NO: 1579878 - DNA, 15 bp, Homo sapiens
agacaggatttcacc

SEQ ID NO: 1579879 - DNA, 15 bp, Homo sapiens
gacaggatttcaccg

SEQ ID NO: 1579880 - DNA, 15 bp, Homo sapiens
acaggatttcaccgt

SEQ ID NO: 1579881 - DNA, 15 bp, Homo sapiens
caggatttcaccgtg

SEQ ID NO: 1579882 - DNA, 15 bp, Homo sapiens
aggatttcaccgtgt

SEQ ID NO: 1579883 - DNA, 15 bp, Homo sapiens
gatttcaccgtgttg

SEQ ID NO: 1579884 - DNA, 15 bp, Homo sapiens
atttcaccgtgttgg

SEQ ID NO: 1579885 - DNA, 15 bp, Homo sapiens
tttcaccgtgttggc

SEQ ID NO: 1579886 - DNA, 15 bp, Homo sapiens
ttcaccgtgttggcc

SEQ ID NO: 1579887 - DNA, 15 bp, Homo sapiens
ccgtgttggccagga

SEQ ID NO: 1579888 - DNA, 15 bp, Homo sapiens
cgtgttggccaggat

SEQ ID NO: 1579889 - DNA, 15 bp, Homo sapiens
tgttggccaggatgg

SEQ ID NO: 1579890 - DNA, 15 bp, Homo sapiens
gccaggatggtctcc

SEQ ID NO: 1579891 - DNA, 15 bp, Homo sapiens
ccaggatggtctcca

SEQ ID NO: 1579892 - DNA, 15 bp, Homo sapiens
caggatggtctccat

SEQ ID NO: 1579893 - DNA, 15 bp, Homo sapiens
aggatggtctccatc

SEQ ID NO: 1579894 - DNA, 15 bp, Homo sapiens
ggatggtctccatct

SEQ ID NO: 1579895 - DNA, 15 bp, Homo sapiens
gatggtctccatctc

SEQ ID NO: 1579896 - DNA, 15 bp, Homo sapiens
atggtctccatctcc

SEQ ID NO: 1579897 - DNA, 15 bp, Homo sapiens
tggtctccatctcct

SEQ ID NO: 1579898 - DNA, 15 bp, Homo sapiens
ggtctccatctcctg

SEQ ID NO: 1579899 - DNA, 15 bp, Homo sapiens
gtctccatctcctga

SEQ ID NO: 1579900 - DNA, 15 bp, Homo sapiens
tctccatctcctgac

SEQ ID NO: 1579901 - DNA, 15 bp, Homo sapiens
ctccatctcctgacc

SEQ ID NO: 1579902 - DNA, 15 bp, Homo sapiens
tccatctcctgacct

SEQ ID NO: 1579903 - DNA, 15 bp, Homo sapiens
ccatctcctgacctc

SEQ ID NO: 1579904 - DNA, 15 bp, Homo sapiens
catctcctgacctca

SEQ ID NO: 1579905 - DNA, 15 bp, Homo sapiens
cctcatgatctgcct

SEQ ID NO: 1579906 - DNA, 15 bp, Homo sapiens
ctcatgatctgcctg

SEQ ID NO: 1579907 - DNA, 15 bp, Homo sapiens
tcatgatctgcctgc

SEQ ID NO: 1579908 - DNA, 15 bp, Homo sapiens
catgatctgcctgct

SEQ ID NO: 1579909 - DNA, 15 bp, Homo sapiens
atgatctgcctgctt

SEQ ID NO: 1579910 - DNA, 15 bp, Homo sapiens
gatctgcctgcttcg

SEQ ID NO: 1579911 - DNA, 15 bp, Homo sapiens
atctgcctgcttcgg

SEQ ID NO: 1579912 - DNA, 15 bp, Homo sapiens
tctgcctgcttcggc

SEQ ID NO: 1579913 - DNA, 15 bp, Homo sapiens
ctgcctgcttcggcc

SEQ ID NO: 1579914 - DNA, 15 bp, Homo sapiens
tgcctgcttcggcct

SEQ ID NO: 1579915 - DNA, 15 bp, Homo sapiens
gcctgcttcggcctc

SEQ ID NO: 1579916 - DNA, 15 bp, Homo sapiens
cctgcttcggcctcc

SEQ ID NO: 1579917 - DNA, 15 bp, Homo sapiens
ctgcttcggcctccc

SEQ ID NO: 1579918 - DNA, 15 bp, Homo sapiens
tgcttcggcctccca

SEQ ID NO: 1579919 - DNA, 15 bp, Homo sapiens
gcttcggcctcccaa

SEQ ID NO: 1579920 - DNA, 15 bp, Homo sapiens
cttcggcctcccaaa

SEQ ID NO: 1579921 - DNA, 15 bp, Homo sapiens
ttcggcctcccaaag

SEQ ID NO: 1579922 - DNA, 15 bp, Homo sapiens
tgggattacaggtgg

SEQ ID NO: 1579923 - DNA, 15 bp, Homo sapiens
gggattacaggtggg

SEQ ID NO: 1579924 - DNA, 15 bp, Homo sapiens
ggattacaggtggga

SEQ ID NO: 1579925 - DNA, 15 bp, Homo sapiens
gattacaggtgggag

SEQ ID NO: 1579926 - DNA, 15 bp, Homo sapiens
attacaggtgggagc

SEQ ID NO: 1579927 - DNA, 15 bp, Homo sapiens
ttacaggtgggagcc

SEQ ID NO: 1579928 - DNA, 15 bp, Homo sapiens
tacaggtgggagcca

SEQ ID NO: 1579929 - DNA, 15 bp, Homo sapiens
acaggtgggagccac

SEQ ID NO: 1579930 - DNA, 15 bp, Homo sapiens
caggtgggagccact

SEQ ID NO: 1579931 - DNA, 15 bp, Homo sapiens
aggtgggagccacta

SEQ ID NO: 1579932 - DNA, 15 bp, Homo sapiens
ggtgggagccactac

SEQ ID NO: 1579933 - DNA, 15 bp, Homo sapiens
gtgggagccactacg

SEQ ID NO: 1579934 - DNA, 15 bp, Homo sapiens
tgggagccactacgc

SEQ ID NO: 1579935 - DNA, 15 bp, Homo sapiens
gggagccactacgcc

SEQ ID NO: 1579936 - DNA, 15 bp, Homo sapiens
ggagccactacgcct

SEQ ID NO: 1579937 - DNA, 15 bp, Homo sapiens
gagccactacgcctg

SEQ ID NO: 1579938 - DNA, 15 bp, Homo sapiens
agccactacgcctgg

SEQ ID NO: 1579939 - DNA, 15 bp, Homo sapiens
gccactacgcctggc

SEQ ID NO: 1579940 - DNA, 15 bp, Homo sapiens
ccactacgcctggcc

SEQ ID NO: 1579941 - DNA, 15 bp, Homo sapiens
cactacgcctggccc

SEQ ID NO: 1579942 - DNA, 15 bp, Homo sapiens
actacgcctggccca

SEQ ID NO: 1579943 - DNA, 15 bp, Homo sapiens
ctacgcctggcccac

SEQ ID NO: 1579944 - DNA, 15 bp, Homo sapiens
tacgcctggcccaca

SEQ ID NO: 1579945 - DNA, 15 bp, Homo sapiens
acgcctggcccacat

SEQ ID NO: 1579946 - DNA, 15 bp, Homo sapiens
cgcctggcccacata

SEQ ID NO: 1579947 - DNA, 15 bp, Homo sapiens
gcctggcccacatag

SEQ ID NO: 1579948 - DNA, 15 bp, Homo sapiens
cctggcccacatagc

SEQ ID NO: 1579949 - DNA, 15 bp, Homo sapiens
ctggcccacatagct

SEQ ID NO: 1579950 - DNA, 15 bp, Homo sapiens
tggcccacatagctc

SEQ ID NO: 1579951 - DNA, 15 bp, Homo sapiens
ggcccacatagctca

SEQ ID NO: 1579952 - DNA, 15 bp, Homo sapiens
gcccacatagctcat

SEQ ID NO: 1579953 - DNA, 15 bp, Homo sapiens
cccacatagctcatt

SEQ ID NO: 1579954 - DNA, 15 bp, Homo sapiens
ccacatagctcattt

SEQ ID NO: 1579955 - DNA, 15 bp, Homo sapiens
atagctcatttttag

SEQ ID NO: 1579956 - DNA, 15 bp, Homo sapiens
tagctcatttttaga

SEQ ID NO: 1579957 - DNA, 15 bp, Homo sapiens
agctcatttttagac

SEQ ID NO: 1579958 - DNA, 15 bp, Homo sapiens
gctcatttttagact

SEQ ID NO: 1579959 - DNA, 15 bp, Homo sapiens
ctcatttttagactc

SEQ ID NO: 1579960 - DNA, 15 bp, Homo sapiens
tcatttttagactca

SEQ ID NO: 1579961 - DNA, 15 bp, Homo sapiens
catttttagactcac

SEQ ID NO: 1579962 - DNA, 15 bp, Homo sapiens
atttttagactcact

SEQ ID NO: 1579963 - DNA, 15 bp, Homo sapiens
tttttagactcactt

SEQ ID NO: 1579964 - DNA, 15 bp, Homo sapiens
ttttagactcacttc

SEQ ID NO: 1579965 - DNA, 15 bp, Homo sapiens
tttagactcacttcc

SEQ ID NO: 1579966 - DNA, 15 bp, Homo sapiens
ttagactcacttcca

SEQ ID NO: 1579967 - DNA, 15 bp, Homo sapiens
tagactcacttccat

SEQ ID NO: 1579968 - DNA, 15 bp, Homo sapiens
agactcacttccatt

SEQ ID NO: 1579969 - DNA, 15 bp, Homo sapiens
gactcacttccatta

SEQ ID NO: 1579970 - DNA, 15 bp, Homo sapiens
actcacttccattaa

SEQ ID NO: 1579971 - DNA, 15 bp, Homo sapiens
ctcacttccattaag

SEQ ID NO: 1579972 - DNA, 15 bp, Homo sapiens
tcacttccattaagt

SEQ ID NO: 1579973 - DNA, 15 bp, Homo sapiens
cacttccattaagtc

SEQ ID NO: 1579974 - DNA, 15 bp, Homo sapiens
acttccattaagtct

SEQ ID NO: 1579975 - DNA, 15 bp, Homo sapiens
cttccattaagtctt

SEQ ID NO: 1579976 - DNA, 15 bp, Homo sapiens
ttccattaagtcttg

SEQ ID NO: 1579977 - DNA, 15 bp, Homo sapiens
tccattaagtcttgt

SEQ ID NO: 1579978 - DNA, 15 bp, Homo sapiens
ccattaagtcttgtt

SEQ ID NO: 1579979 - DNA, 15 bp, Homo sapiens
cattaagtcttgttt

SEQ ID NO: 1579980 - DNA, 15 bp, Homo sapiens
attaagtcttgtttg

SEQ ID NO: 1579981 - DNA, 15 bp, Homo sapiens
ttaagtcttgtttgg

SEQ ID NO: 1579982 - DNA, 15 bp, Homo sapiens
taagtcttgtttgga

SEQ ID NO: 1579983 - DNA, 15 bp, Homo sapiens
aagtcttgtttggac

SEQ ID NO: 1579984 - DNA, 15 bp, Homo sapiens
agtcttgtttggacc

SEQ ID NO: 1579985 - DNA, 15 bp, Homo sapiens
gtcttgtttggaccc

SEQ ID NO: 1579986 - DNA, 15 bp, Homo sapiens
tcttgtttggaccca

SEQ ID NO: 1579987 - DNA, 15 bp, Homo sapiens
cttgtttggacccac

SEQ ID NO: 1579988 - DNA, 15 bp, Homo sapiens
ttgtttggacccacg

SEQ ID NO: 1579989 - DNA, 15 bp, Homo sapiens
tgtttggacccacga

SEQ ID NO: 1579990 - DNA, 15 bp, Homo sapiens
gtttggacccacgaa

SEQ ID NO: 1579991 - DNA, 15 bp, Homo sapiens
tttggacccacgaac

SEQ ID NO: 1579992 - DNA, 15 bp, Homo sapiens
ttggacccacgaaca

SEQ ID NO: 1579993 - DNA, 15 bp, Homo sapiens
tggacccacgaacat

SEQ ID NO: 1579994 - DNA, 15 bp, Homo sapiens
ggacccacgaacatt

SEQ ID NO: 1579995 - DNA, 15 bp, Homo sapiens
gacccacgaacattg

SEQ ID NO: 1579996 - DNA, 15 bp, Homo sapiens
acccacgaacattgt

SEQ ID NO: 1579997 - DNA, 15 bp, Homo sapiens
cccacgaacattgtc

SEQ ID NO: 1579998 - DNA, 15 bp, Homo sapiens
ccacgaacattgtct

SEQ ID NO: 1579999 - DNA, 15 bp, Homo sapiens
cacgaacattgtctt

SEQ ID NO: 1580000 - DNA, 15 bp, Homo sapiens
acgaacattgtcttt

SEQ ID NO: 1580001 - DNA, 15 bp, Homo sapiens
cgaacattgtctttt

SEQ ID NO: 1580002 - DNA, 15 bp, Homo sapiens
gaacattgtcttttt

SEQ ID NO: 1580003 - DNA, 15 bp, Homo sapiens
aacattgtctttttt

SEQ ID NO: 1580004 - DNA, 15 bp, Homo sapiens
acattgtcttttttt

SEQ ID NO: 1580005 - DNA, 15 bp, Homo sapiens
cattgtctttttttt

SEQ ID NO: 1580006 - DNA, 15 bp, Homo sapiens
attgtcttttttttt

SEQ ID NO: 1580007 - DNA, 15 bp, Homo sapiens
gtcttttttttttta

SEQ ID NO: 1580008 - DNA, 15 bp, Homo sapiens
ttttttttttaagat

SEQ ID NO: 1580009 - DNA, 15 bp, Homo sapiens
tttttttttaagatg

SEQ ID NO: 1580010 - DNA, 15 bp, Homo sapiens
ttttttttaagatgg

SEQ ID NO: 1580011 - DNA, 15 bp, Homo sapiens
tttttttaagatgga

SEQ ID NO: 1580012 - DNA, 15 bp, Homo sapiens
ttttttaagatggag

SEQ ID NO: 1580013 - DNA, 15 bp, Homo sapiens
tttttaagatggagt

SEQ ID NO: 1580014 - DNA, 15 bp, Homo sapiens
ttttaagatggagtt

SEQ ID NO: 1580015 - DNA, 15 bp, Homo sapiens
tttaagatggagttt

SEQ ID NO: 1580016 - DNA, 15 bp, Homo sapiens
ttaagatggagtttc

SEQ ID NO: 1580017 - DNA, 15 bp, Homo sapiens
taagatggagtttca

SEQ ID NO: 1580018 - DNA, 15 bp, Homo sapiens
aagatggagtttcac

SEQ ID NO: 1580019 - DNA, 15 bp, Homo sapiens
gatggagtttcactt

SEQ ID NO: 1580020 - DNA, 15 bp, Homo sapiens
atggagtttcacttt

SEQ ID NO: 1580021 - DNA, 15 bp, Homo sapiens
tggagtttcactttt

SEQ ID NO: 1580022 - DNA, 15 bp, Homo sapiens
ggagtttcacttttg

SEQ ID NO: 1580023 - DNA, 15 bp, Homo sapiens
gagtttcacttttgt

SEQ ID NO: 1580024 - DNA, 15 bp, Homo sapiens
agtttcacttttgtt

SEQ ID NO: 1580025 - DNA, 15 bp, Homo sapiens
gtttcacttttgttg

SEQ ID NO: 1580026 - DNA, 15 bp, Homo sapiens
tttcacttttgttgc

SEQ ID NO: 1580027 - DNA, 15 bp, Homo sapiens
ttcacttttgttgcc

SEQ ID NO: 1580028 - DNA, 15 bp, Homo sapiens
tcacttttgttgccc

SEQ ID NO: 1580029 - DNA, 15 bp, Homo sapiens
cacttttgttgccca

SEQ ID NO: 1580030 - DNA, 15 bp, Homo sapiens
acttttgttgcccag

SEQ ID NO: 1580031 - DNA, 15 bp, Homo sapiens
cttttgttgcccaga

SEQ ID NO: 1580032 - DNA, 15 bp, Homo sapiens
tgttgcccagactgt

SEQ ID NO: 1580033 - DNA, 15 bp, Homo sapiens
gttgcccagactgta

SEQ ID NO: 1580034 - DNA, 15 bp, Homo sapiens
ttgcccagactgtag

SEQ ID NO: 1580035 - DNA, 15 bp, Homo sapiens
tgcccagactgtagt

SEQ ID NO: 1580036 - DNA, 15 bp, Homo sapiens
gcccagactgtagtg

SEQ ID NO: 1580037 - DNA, 15 bp, Homo sapiens
cccagactgtagtgc

SEQ ID NO: 1580038 - DNA, 15 bp, Homo sapiens
ccagactgtagtgca

SEQ ID NO: 1580039 - DNA, 15 bp, Homo sapiens
cagactgtagtgcaa

SEQ ID NO: 1580040 - DNA, 15 bp, Homo sapiens
agactgtagtgcaat

SEQ ID NO: 1580041 - DNA, 15 bp, Homo sapiens
gactgtagtgcaatg

SEQ ID NO: 1580042 - DNA, 15 bp, Homo sapiens
actgtagtgcaatgg

SEQ ID NO: 1580043 - DNA, 15 bp, Homo sapiens
ctgtagtgcaatggt

SEQ ID NO: 1580044 - DNA, 15 bp, Homo sapiens
tgtagtgcaatggtg

SEQ ID NO: 1580045 - DNA, 15 bp, Homo sapiens
gtagtgcaatggtgc

SEQ ID NO: 1580046 - DNA, 15 bp, Homo sapiens
tagtgcaatggtgca

SEQ ID NO: 1580047 - DNA, 15 bp, Homo sapiens
tgcaatctctgcctc

SEQ ID NO: 1580048 - DNA, 15 bp, Homo sapiens
gcaatctctgcctcc

SEQ ID NO: 1580049 - DNA, 15 bp, Homo sapiens
caatctctgcctcct

SEQ ID NO: 1580050 - DNA, 15 bp, Homo sapiens
aatctctgcctcctg

SEQ ID NO: 1580051 - DNA, 15 bp, Homo sapiens
atctctgcctcctgg

SEQ ID NO: 1580052 - DNA, 15 bp, Homo sapiens
tctctgcctcctggg

SEQ ID NO: 1580053 - DNA, 15 bp, Homo sapiens
tgcctcctgggttct

SEQ ID NO: 1580054 - DNA, 15 bp, Homo sapiens
gcctcctgggttcta

SEQ ID NO: 1580055 - DNA, 15 bp, Homo sapiens
cctcctgggttctag

SEQ ID NO: 1580056 - DNA, 15 bp, Homo sapiens
ctcctgggttctagc

SEQ ID NO: 1580057 - DNA, 15 bp, Homo sapiens
tcctgggttctagca

SEQ ID NO: 1580058 - DNA, 15 bp, Homo sapiens
cctgggttctagcaa

SEQ ID NO: 1580059 - DNA, 15 bp, Homo sapiens
ctgggttctagcaat

SEQ ID NO: 1580060 - DNA, 15 bp, Homo sapiens
tgggttctagcaatt

SEQ ID NO: 1580061 - DNA, 15 bp, Homo sapiens
gggttctagcaattc

SEQ ID NO: 1580062 - DNA, 15 bp, Homo sapiens
ggttctagcaattct

SEQ ID NO: 1580063 - DNA, 15 bp, Homo sapiens
gttctagcaattctc

SEQ ID NO: 1580064 - DNA, 15 bp, Homo sapiens
ttctagcaattctcc

SEQ ID NO: 1580065 - DNA, 15 bp, Homo sapiens
tctagcaattctcct

SEQ ID NO: 1580066 - DNA, 15 bp, Homo sapiens
ctagcaattctcctg

SEQ ID NO: 1580067 - DNA, 15 bp, Homo sapiens
tagcaattctcctgc

SEQ ID NO: 1580068 - DNA, 15 bp, Homo sapiens
tggaattacaggcgc

SEQ ID NO: 1580069 - DNA, 15 bp, Homo sapiens
ggaattacaggcgcc

SEQ ID NO: 1580070 - DNA, 15 bp, Homo sapiens
gaattacaggcgccc

SEQ ID NO: 1580071 - DNA, 15 bp, Homo sapiens
aattacaggcgcccg

SEQ ID NO: 1580072 - DNA, 15 bp, Homo sapiens
catgttgggcaggcc

SEQ ID NO: 1580073 - DNA, 15 bp, Homo sapiens
atgttgggcaggcca

SEQ ID NO: 1580074 - DNA, 15 bp, Homo sapiens
tgttgggcaggccag

SEQ ID NO: 1580075 - DNA, 15 bp, Homo sapiens
gttgggcaggccagg

SEQ ID NO: 1580076 - DNA, 15 bp, Homo sapiens
ttgggcaggccaggg

SEQ ID NO: 1580077 - DNA, 15 bp, Homo sapiens
gggcaggccaggggt

SEQ ID NO: 1580078 - DNA, 15 bp, Homo sapiens
ggcaggccaggggtg

SEQ ID NO: 1580079 - DNA, 15 bp, Homo sapiens
gcaggccaggggtga

SEQ ID NO: 1580080 - DNA, 15 bp, Homo sapiens
caggccaggggtgat

SEQ ID NO: 1580081 - DNA, 15 bp, Homo sapiens
aggccaggggtgatc

SEQ ID NO: 1580082 - DNA, 15 bp, Homo sapiens
ggccaggggtgatcc

SEQ ID NO: 1580083 - DNA, 15 bp, Homo sapiens
gccaggggtgatccg

SEQ ID NO: 1580084 - DNA, 15 bp, Homo sapiens
ccaggggtgatccgc

SEQ ID NO: 1580085 - DNA, 15 bp, Homo sapiens
caggggtgatccgcc

SEQ ID NO: 1580086 - DNA, 15 bp, Homo sapiens
aggggtgatccgccc

SEQ ID NO: 1580087 - DNA, 15 bp, Homo sapiens
ggggtgatccgccca

SEQ ID NO: 1580088 - DNA, 15 bp, Homo sapiens
gggtgatccgcccac

SEQ ID NO: 1580089 - DNA, 15 bp, Homo sapiens
tgatccgcccacctc

SEQ ID NO: 1580090 - DNA, 15 bp, Homo sapiens
gatccgcccacctca

SEQ ID NO: 1580091 - DNA, 15 bp, Homo sapiens
atccgcccacctcag

SEQ ID NO: 1580092 - DNA, 15 bp, Homo sapiens
tccgcccacctcagc

SEQ ID NO: 1580093 - DNA, 15 bp, Homo sapiens
ccgcccacctcagcc

SEQ ID NO: 1580094 - DNA, 15 bp, Homo sapiens
cgcccacctcagcct

SEQ ID NO: 1580095 - DNA, 15 bp, Homo sapiens
gcccacctcagcctc

SEQ ID NO: 1580096 - DNA, 15 bp, Homo sapiens
tgtgagccaccgcat

SEQ ID NO: 1580097 - DNA, 15 bp, Homo sapiens
gtgagccaccgcatc

SEQ ID NO: 1580098 - DNA, 15 bp, Homo sapiens
tgagccaccgcatct

SEQ ID NO: 1580099 - DNA, 15 bp, Homo sapiens
gagccaccgcatctg

SEQ ID NO: 1580100 - DNA, 15 bp, Homo sapiens
agccaccgcatctgg

SEQ ID NO: 1580101 - DNA, 15 bp, Homo sapiens
gccaccgcatctggc

SEQ ID NO: 1580102 - DNA, 15 bp, Homo sapiens
ccaccgcatctggcc

SEQ ID NO: 1580103 - DNA, 15 bp, Homo sapiens
caccgcatctggcca

SEQ ID NO: 1580104 - DNA, 15 bp, Homo sapiens
accgcatctggccaa

SEQ ID NO: 1580105 - DNA, 15 bp, Homo sapiens
ccgcatctggccaac

SEQ ID NO: 1580106 - DNA, 15 bp, Homo sapiens
cgcatctggccaaca

SEQ ID NO: 1580107 - DNA, 15 bp, Homo sapiens
gcatctggccaacat

SEQ ID NO: 1580108 - DNA, 15 bp, Homo sapiens
catctggccaacatg

SEQ ID NO: 1580109 - DNA, 15 bp, Homo sapiens
atctggccaacatgt

SEQ ID NO: 1580110 - DNA, 15 bp, Homo sapiens
tctggccaacatgtc

SEQ ID NO: 1580111 - DNA, 15 bp, Homo sapiens
ctggccaacatgtct

SEQ ID NO: 1580112 - DNA, 15 bp, Homo sapiens
tggccaacatgtctt

SEQ ID NO: 1580113 - DNA, 15 bp, Homo sapiens
ggccaacatgtcttt

SEQ ID NO: 1580114 - DNA, 15 bp, Homo sapiens
gccaacatgtctttt

SEQ ID NO: 1580115 - DNA, 15 bp, Homo sapiens
ccaacatgtcttttt

SEQ ID NO: 1580116 - DNA, 15 bp, Homo sapiens
caacatgtctttttt

SEQ ID NO: 1580117 - DNA, 15 bp, Homo sapiens
aacatgtcttttttt

SEQ ID NO: 1580118 - DNA, 15 bp, Homo sapiens
acatgtctttttttt

SEQ ID NO: 1580119 - DNA, 15 bp, Homo sapiens
catgtcttttttttt

SEQ ID NO: 1580120 - DNA, 15 bp, Homo sapiens
atgtctttttttttt

SEQ ID NO: 1580121 - DNA, 15 bp, Homo sapiens
tttttttttttcctt

SEQ ID NO: 1580122 - DNA, 15 bp, Homo sapiens
ttttttttttccttt

SEQ ID NO: 1580123 - DNA, 15 bp, Homo sapiens
tttttttccttttta

SEQ ID NO: 1580124 - DNA, 15 bp, Homo sapiens
ttttttcctttttaa

SEQ ID NO: 1580125 - DNA, 15 bp, Homo sapiens
tttttcctttttaac

SEQ ID NO: 1580126 - DNA, 15 bp, Homo sapiens
ttttcctttttaacc

SEQ ID NO: 1580127 - DNA, 15 bp, Homo sapiens
tttcctttttaacca

SEQ ID NO: 1580128 - DNA, 15 bp, Homo sapiens
ttcctttttaaccac

SEQ ID NO: 1580129 - DNA, 15 bp, Homo sapiens
tcctttttaaccaca

SEQ ID NO: 1580130 - DNA, 15 bp, Homo sapiens
cctttttaaccacaa

SEQ ID NO: 1580131 - DNA, 15 bp, Homo sapiens
ctttttaaccacaaa

SEQ ID NO: 1580132 - DNA, 15 bp, Homo sapiens
tttttaaccacaaag

SEQ ID NO: 1580133 - DNA, 15 bp, Homo sapiens
ttttaaccacaaaga

SEQ ID NO: 1580134 - DNA, 15 bp, Homo sapiens
tttaaccacaaagag

SEQ ID NO: 1580135 - DNA, 15 bp, Homo sapiens
ttaaccacaaagaga

SEQ ID NO: 1580136 - DNA, 15 bp, Homo sapiens
taaccacaaagagac

SEQ ID NO: 1580137 - DNA, 15 bp, Homo sapiens
aaccacaaagagact

SEQ ID NO: 1580138 - DNA, 15 bp, Homo sapiens
accacaaagagactt

SEQ ID NO: 1580139 - DNA, 15 bp, Homo sapiens
ccacaaagagactta

SEQ ID NO: 1580140 - DNA, 15 bp, Homo sapiens
cacaaagagacttaa

SEQ ID NO: 1580141 - DNA, 15 bp, Homo sapiens
acaaagagacttaag

SEQ ID NO: 1580142 - DNA, 15 bp, Homo sapiens
caaagagacttaagc

SEQ ID NO: 1580143 - DNA, 15 bp, Homo sapiens
aaagagacttaagca

SEQ ID NO: 1580144 - DNA, 15 bp, Homo sapiens
aagagacttaagcag

SEQ ID NO: 1580145 - DNA, 15 bp, Homo sapiens
agagacttaagcagt

SEQ ID NO: 1580146 - DNA, 15 bp, Homo sapiens
gagacttaagcagtc

SEQ ID NO: 1580147 - DNA, 15 bp, Homo sapiens
agacttaagcagtcc

SEQ ID NO: 1580148 - DNA, 15 bp, Homo sapiens
gacttaagcagtcct

SEQ ID NO: 1580149 - DNA, 15 bp, Homo sapiens
acttaagcagtcctt

SEQ ID NO: 1580150 - DNA, 15 bp, Homo sapiens
cttaagcagtccttg

SEQ ID NO: 1580151 - DNA, 15 bp, Homo sapiens
ttaagcagtccttgt

SEQ ID NO: 1580152 - DNA, 15 bp, Homo sapiens
taagcagtccttgtc

SEQ ID NO: 1580153 - DNA, 15 bp, Homo sapiens
aagcagtccttgtca

SEQ ID NO: 1580154 - DNA, 15 bp, Homo sapiens
agcagtccttgtcac

SEQ ID NO: 1580155 - DNA, 15 bp, Homo sapiens
gcagtccttgtcaca

SEQ ID NO: 1580156 - DNA, 15 bp, Homo sapiens
cagtccttgtcacag

SEQ ID NO: 1580157 - DNA, 15 bp, Homo sapiens
agtccttgtcacaga

SEQ ID NO: 1580158 - DNA, 15 bp, Homo sapiens
gtccttgtcacagat

SEQ ID NO: 1580159 - DNA, 15 bp, Homo sapiens
tccttgtcacagatg

SEQ ID NO: 1580160 - DNA, 15 bp, Homo sapiens
ccttgtcacagatga

SEQ ID NO: 1580161 - DNA, 15 bp, Homo sapiens
cttgtcacagatgat

SEQ ID NO: 1580162 - DNA, 15 bp, Homo sapiens
ttgtcacagatgatg

SEQ ID NO: 1580163 - DNA, 15 bp, Homo sapiens
tgtcacagatgatga

SEQ ID NO: 1580164 - DNA, 15 bp, Homo sapiens
gtcacagatgatgaa

SEQ ID NO: 1580165 - DNA, 15 bp, Homo sapiens
tcacagatgatgaat

SEQ ID NO: 1580166 - DNA, 15 bp, Homo sapiens
cacagatgatgaatt

SEQ ID NO: 1580167 - DNA, 15 bp, Homo sapiens
acagatgatgaattg

SEQ ID NO: 1580168 - DNA, 15 bp, Homo sapiens
cagatgatgaattga

SEQ ID NO: 1580169 - DNA, 15 bp, Homo sapiens
agatgatgaattgat

SEQ ID NO: 1580170 - DNA, 15 bp, Homo sapiens
gatgatgaattgatg

SEQ ID NO: 1580171 - DNA, 15 bp, Homo sapiens
atgatgaattgatgt

SEQ ID NO: 1580172 - DNA, 15 bp, Homo sapiens
tgatgaattgatgtt

SEQ ID NO: 1580173 - DNA, 15 bp, Homo sapiens
gatgaattgatgttg

SEQ ID NO: 1580174 - DNA, 15 bp, Homo sapiens
atgaattgatgttgc

SEQ ID NO: 1580175 - DNA, 15 bp, Homo sapiens
tgaattgatgttgca

SEQ ID NO: 1580176 - DNA, 15 bp, Homo sapiens
gaattgatgttgcaa

SEQ ID NO: 1580177 - DNA, 15 bp, Homo sapiens
aattgatgttgcaag

SEQ ID NO: 1580178 - DNA, 15 bp, Homo sapiens
attgatgttgcaagt

SEQ ID NO: 1580179 - DNA, 15 bp, Homo sapiens
ttgatgttgcaagta

SEQ ID NO: 1580180 - DNA, 15 bp, Homo sapiens
tgatgttgcaagtat

SEQ ID NO: 1580181 - DNA, 15 bp, Homo sapiens
gatgttgcaagtatt

SEQ ID NO: 1580182 - DNA, 15 bp, Homo sapiens
atgttgcaagtattg

SEQ ID NO: 1580183 - DNA, 15 bp, Homo sapiens
tgttgcaagtattgt

SEQ ID NO: 1580184 - DNA, 15 bp, Homo sapiens
gttgcaagtattgtc

SEQ ID NO: 1580185 - DNA, 15 bp, Homo sapiens
ttgcaagtattgtct

SEQ ID NO: 1580186 - DNA, 15 bp, Homo sapiens
tgcaagtattgtctt

SEQ ID NO: 1580187 - DNA, 15 bp, Homo sapiens
gcaagtattgtctta

SEQ ID NO: 1580188 - DNA, 15 bp, Homo sapiens
caagtattgtcttag

SEQ ID NO: 1580189 - DNA, 15 bp, Homo sapiens
aagtattgtcttagc

SEQ ID NO: 1580190 - DNA, 15 bp, Homo sapiens
agtattgtcttagct

SEQ ID NO: 1580191 - DNA, 15 bp, Homo sapiens
gtattgtcttagctt

SEQ ID NO: 1580192 - DNA, 15 bp, Homo sapiens
tattgtcttagcttg

SEQ ID NO: 1580193 - DNA, 15 bp, Homo sapiens
attgtcttagcttgg

SEQ ID NO: 1580194 - DNA, 15 bp, Homo sapiens
ttgtcttagcttgga

SEQ ID NO: 1580195 - DNA, 15 bp, Homo sapiens
tgtcttagcttggat

SEQ ID NO: 1580196 - DNA, 15 bp, Homo sapiens
gtcttagcttggatt

SEQ ID NO: 1580197 - DNA, 15 bp, Homo sapiens
tcttagcttggatta

SEQ ID NO: 1580198 - DNA, 15 bp, Homo sapiens
cttagcttggattaa

SEQ ID NO: 1580199 - DNA, 15 bp, Homo sapiens
ttagcttggattaat

SEQ ID NO: 1580200 - DNA, 15 bp, Homo sapiens
tagcttggattaatt

SEQ ID NO: 1580201 - DNA, 15 bp, Homo sapiens
agcttggattaattt

SEQ ID NO: 1580202 - DNA, 15 bp, Homo sapiens
gcttggattaatttt

SEQ ID NO: 1580203 - DNA, 15 bp, Homo sapiens
cttggattaattttc

SEQ ID NO: 1580204 - DNA, 15 bp, Homo sapiens
ttggattaattttct

SEQ ID NO: 1580205 - DNA, 15 bp, Homo sapiens
tggattaattttctt

SEQ ID NO: 1580206 - DNA, 15 bp, Homo sapiens
ggattaattttcttg

SEQ ID NO: 1580207 - DNA, 15 bp, Homo sapiens
gattaattttcttgc

SEQ ID NO: 1580208 - DNA, 15 bp, Homo sapiens
attaattttcttgct

SEQ ID NO: 1580209 - DNA, 15 bp, Homo sapiens
ttaattttcttgctt

SEQ ID NO: 1580210 - DNA, 15 bp, Homo sapiens
taattttcttgctta

SEQ ID NO: 1580211 - DNA, 15 bp, Homo sapiens
aattttcttgcttac

SEQ ID NO: 1580212 - DNA, 15 bp, Homo sapiens
attttcttgcttact

SEQ ID NO: 1580213 - DNA, 15 bp, Homo sapiens
ttttcttgcttactg

SEQ ID NO: 1580214 - DNA, 15 bp, Homo sapiens
tttcttgcttactgt

SEQ ID NO: 1580215 - DNA, 15 bp, Homo sapiens
ttcttgcttactgta

SEQ ID NO: 1580216 - DNA, 15 bp, Homo sapiens
tcttgcttactgtaa

SEQ ID NO: 1580217 - DNA, 15 bp, Homo sapiens
cttgcttactgtaat

SEQ ID NO: 1580218 - DNA, 15 bp, Homo sapiens
ttgcttactgtaatt

SEQ ID NO: 1580219 - DNA, 15 bp, Homo sapiens
tgcttactgtaattt

SEQ ID NO: 1580220 - DNA, 15 bp, Homo sapiens
gcttactgtaatttt

SEQ ID NO: 1580221 - DNA, 15 bp, Homo sapiens
cttactgtaatttta

SEQ ID NO: 1580222 - DNA, 15 bp, Homo sapiens
ttactgtaattttag

SEQ ID NO: 1580223 - DNA, 15 bp, Homo sapiens
tactgtaattttaga

SEQ ID NO: 1580224 - DNA, 15 bp, Homo sapiens
actgtaattttagat

SEQ ID NO: 1580225 - DNA, 15 bp, Homo sapiens
ctgtaattttagata

SEQ ID NO: 1580226 - DNA, 15 bp, Homo sapiens
tgtaattttagataa

SEQ ID NO: 1580227 - DNA, 15 bp, Homo sapiens
gtaattttagataat

SEQ ID NO: 1580228 - DNA, 15 bp, Homo sapiens
taattttagataata

SEQ ID NO: 1580229 - DNA, 15 bp, Homo sapiens
aattttagataatat

SEQ ID NO: 1580230 - DNA, 15 bp, Homo sapiens
attttagataatata

SEQ ID NO: 1580231 - DNA, 15 bp, Homo sapiens
ttttagataatatag

SEQ ID NO: 1580232 - DNA, 15 bp, Homo sapiens
tttagataatatagc

SEQ ID NO: 1580233 - DNA, 15 bp, Homo sapiens
ttagataatatagct

SEQ ID NO: 1580234 - DNA, 15 bp, Homo sapiens
tagataatatagctt

SEQ ID NO: 1580235 - DNA, 15 bp, Homo sapiens
agataatatagcttt

SEQ ID NO: 1580236 - DNA, 15 bp, Homo sapiens
gataatatagctttg

SEQ ID NO: 1580237 - DNA, 15 bp, Homo sapiens
ataatatagctttgt

SEQ ID NO: 1580238 - DNA, 15 bp, Homo sapiens
taatatagctttgta

SEQ ID NO: 1580239 - DNA, 15 bp, Homo sapiens
aatatagctttgtaa

SEQ ID NO: 1580240 - DNA, 15 bp, Homo sapiens
atatagctttgtaat

SEQ ID NO: 1580241 - DNA, 15 bp, Homo sapiens
tatagctttgtaatt

SEQ ID NO: 1580242 - DNA, 15 bp, Homo sapiens
atagctttgtaatta

SEQ ID NO: 1580243 - DNA, 15 bp, Homo sapiens
tagctttgtaattag

SEQ ID NO: 1580244 - DNA, 15 bp, Homo sapiens
agctttgtaattaga

SEQ ID NO: 1580245 - DNA, 15 bp, Homo sapiens
gctttgtaattagag

SEQ ID NO: 1580246 - DNA, 15 bp, Homo sapiens
ctttgtaattagaga

SEQ ID NO: 1580247 - DNA, 15 bp, Homo sapiens
tttgtaattagagat

SEQ ID NO: 1580248 - DNA, 15 bp, Homo sapiens
ttgtaattagagatt

SEQ ID NO: 1580249 - DNA, 15 bp, Homo sapiens
tgtaattagagattt

SEQ ID NO: 1580250 - DNA, 15 bp, Homo sapiens
gtaattagagatttt

SEQ ID NO: 1580251 - DNA, 15 bp, Homo sapiens
taattagagatttta

SEQ ID NO: 1580252 - DNA, 15 bp, Homo sapiens
aattagagattttat

SEQ ID NO: 1580253 - DNA, 15 bp, Homo sapiens
attagagattttatg

SEQ ID NO: 1580254 - DNA, 15 bp, Homo sapiens
ttagagattttatgt

SEQ ID NO: 1580255 - DNA, 15 bp, Homo sapiens
tagagattttatgtg

SEQ ID NO: 1580256 - DNA, 15 bp, Homo sapiens
agagattttatgtgt

SEQ ID NO: 1580257 - DNA, 15 bp, Homo sapiens
gagattttatgtgta

SEQ ID NO: 1580258 - DNA, 15 bp, Homo sapiens
agattttatgtgtaa

SEQ ID NO: 1580259 - DNA, 15 bp, Homo sapiens
gattttatgtgtaaa

SEQ ID NO: 1580260 - DNA, 15 bp, Homo sapiens
attttatgtgtaaac

SEQ ID NO: 1580261 - DNA, 15 bp, Homo sapiens
ttttatgtgtaaacc

SEQ ID NO: 1580262 - DNA, 15 bp, Homo sapiens
tttatgtgtaaacca

SEQ ID NO: 1580263 - DNA, 15 bp, Homo sapiens
ttatgtgtaaaccac

SEQ ID NO: 1580264 - DNA, 15 bp, Homo sapiens
tatgtgtaaaccaca

SEQ ID NO: 1580265 - DNA, 15 bp, Homo sapiens
atgtgtaaaccacaa

SEQ ID NO: 1580266 - DNA, 15 bp, Homo sapiens
tgtgtaaaccacaaa

SEQ ID NO: 1580267 - DNA, 15 bp, Homo sapiens
gtgtaaaccacaaaa

SEQ ID NO: 1580268 - DNA, 15 bp, Homo sapiens
tgtaaaccacaaaaa

SEQ ID NO: 1580269 - DNA, 15 bp, Homo sapiens
gtaaaccacaaaaat

SEQ ID NO: 1580270 - DNA, 15 bp, Homo sapiens
taaaccacaaaaatg

SEQ ID NO: 1580271 - DNA, 15 bp, Homo sapiens
aaaccacaaaaatgt

SEQ ID NO: 1580272 - DNA, 15 bp, Homo sapiens
aaccacaaaaatgtt

SEQ ID NO: 1580273 - DNA, 15 bp, Homo sapiens
accacaaaaatgttt

SEQ ID NO: 1580274 - DNA, 15 bp, Homo sapiens
ccacaaaaatgttta

SEQ ID NO: 1580275 - DNA, 15 bp, Homo sapiens
cacaaaaatgtttac

SEQ ID NO: 1580276 - DNA, 15 bp, Homo sapiens
acaaaaatgtttaca

SEQ ID NO: 1580277 - DNA, 15 bp, Homo sapiens
caaaaatgtttacat

SEQ ID NO: 1580278 - DNA, 15 bp, Homo sapiens
aaaaatgtttacatg

SEQ ID NO: 1580279 - DNA, 15 bp, Homo sapiens
aaaatgtttacatga

SEQ ID NO: 1580280 - DNA, 15 bp, Homo sapiens
aaatgtttacatgaa

SEQ ID NO: 1580281 - DNA, 15 bp, Homo sapiens
aatgtttacatgaag

SEQ ID NO: 1580282 - DNA, 15 bp, Homo sapiens
atgtttacatgaagg

SEQ ID NO: 1580283 - DNA, 15 bp, Homo sapiens
tgtttacatgaaggc

SEQ ID NO: 1580284 - DNA, 15 bp, Homo sapiens
gtttacatgaaggcc

SEQ ID NO: 1580285 - DNA, 15 bp, Homo sapiens
tttacatgaaggcca

SEQ ID NO: 1580286 - DNA, 15 bp, Homo sapiens
ttacatgaaggccat

SEQ ID NO: 1580287 - DNA, 15 bp, Homo sapiens
tacatgaaggccatt

SEQ ID NO: 1580288 - DNA, 15 bp, Homo sapiens
acatgaaggccatta

SEQ ID NO: 1580289 - DNA, 15 bp, Homo sapiens
catgaaggccattat

SEQ ID NO: 1580290 - DNA, 15 bp, Homo sapiens
atgaaggccattatt

SEQ ID NO: 1580291 - DNA, 15 bp, Homo sapiens
tgaaggccattatta

SEQ ID NO: 1580292 - DNA, 15 bp, Homo sapiens
gaaggccattattac

SEQ ID NO: 1580293 - DNA, 15 bp, Homo sapiens
aaggccattattaca

SEQ ID NO: 1580294 - DNA, 15 bp, Homo sapiens
aggccattattacag

SEQ ID NO: 1580295 - DNA, 15 bp, Homo sapiens
ggccattattacaga

SEQ ID NO: 1580296 - DNA, 15 bp, Homo sapiens
gccattattacagat

SEQ ID NO: 1580297 - DNA, 15 bp, Homo sapiens
ccattattacagatg

SEQ ID NO: 1580298 - DNA, 15 bp, Homo sapiens
cattattacagatgt

SEQ ID NO: 1580299 - DNA, 15 bp, Homo sapiens
attattacagatgtg

SEQ ID NO: 1580300 - DNA, 15 bp, Homo sapiens
ttattacagatgtga

SEQ ID NO: 1580301 - DNA, 15 bp, Homo sapiens
tattacagatgtgac

SEQ ID NO: 1580302 - DNA, 15 bp, Homo sapiens
attacagatgtgacg

SEQ ID NO: 1580303 - DNA, 15 bp, Homo sapiens
ttacagatgtgacgt

SEQ ID NO: 1580304 - DNA, 15 bp, Homo sapiens
tacagatgtgacgtg

SEQ ID NO: 1580305 - DNA, 15 bp, Homo sapiens
acagatgtgacgtgc

SEQ ID NO: 1580306 - DNA, 15 bp, Homo sapiens
cagatgtgacgtgca

SEQ ID NO: 1580307 - DNA, 15 bp, Homo sapiens
agatgtgacgtgcat

SEQ ID NO: 1580308 - DNA, 15 bp, Homo sapiens
gatgtgacgtgcata

SEQ ID NO: 1580309 - DNA, 15 bp, Homo sapiens
atgtgacgtgcataa

SEQ ID NO: 1580310 - DNA, 15 bp, Homo sapiens
tgtgacgtgcataat

SEQ ID NO: 1580311 - DNA, 15 bp, Homo sapiens
gtgacgtgcataatt

SEQ ID NO: 1580312 - DNA, 15 bp, Homo sapiens
tgacgtgcataatta

SEQ ID NO: 1580313 - DNA, 15 bp, Homo sapiens
gacgtgcataattat

SEQ ID NO: 1580314 - DNA, 15 bp, Homo sapiens
acgtgcataattatt

SEQ ID NO: 1580315 - DNA, 15 bp, Homo sapiens
cgtgcataattatta

SEQ ID NO: 1580316 - DNA, 15 bp, Homo sapiens
gtgcataattattag

SEQ ID NO: 1580317 - DNA, 15 bp, Homo sapiens
tgcataattattagt

SEQ ID NO: 1580318 - DNA, 15 bp, Homo sapiens
gcataattattagta

SEQ ID NO: 1580319 - DNA, 15 bp, Homo sapiens
cataattattagtaa

SEQ ID NO: 1580320 - DNA, 15 bp, Homo sapiens
ataattattagtaat

SEQ ID NO: 1580321 - DNA, 15 bp, Homo sapiens
taattattagtaatt

SEQ ID NO: 1580322 - DNA, 15 bp, Homo sapiens
aattattagtaattt

SEQ ID NO: 1580323 - DNA, 15 bp, Homo sapiens
attattagtaatttg

SEQ ID NO: 1580324 - DNA, 15 bp, Homo sapiens
ttattagtaatttgt

SEQ ID NO: 1580325 - DNA, 15 bp, Homo sapiens
tattagtaatttgta

SEQ ID NO: 1580326 - DNA, 15 bp, Homo sapiens
attagtaatttgtat

SEQ ID NO: 1580327 - DNA, 15 bp, Homo sapiens
ttagtaatttgtatg

SEQ ID NO: 1580328 - DNA, 15 bp, Homo sapiens
tagtaatttgtatgt

SEQ ID NO: 1580329 - DNA, 15 bp, Homo sapiens
agtaatttgtatgtt

SEQ ID NO: 1580330 - DNA, 15 bp, Homo sapiens
gtaatttgtatgttt

SEQ ID NO: 1580331 - DNA, 15 bp, Homo sapiens
taatttgtatgttta

SEQ ID NO: 1580332 - DNA, 15 bp, Homo sapiens
aatttgtatgtttac

SEQ ID NO: 1580333 - DNA, 15 bp, Homo sapiens
atttgtatgtttaca

SEQ ID NO: 1580334 - DNA, 15 bp, Homo sapiens
tttgtatgtttacat

SEQ ID NO: 1580335 - DNA, 15 bp, Homo sapiens
ttgtatgtttacatg

SEQ ID NO: 1580336 - DNA, 15 bp, Homo sapiens
tgtatgtttacatgg

SEQ ID NO: 1580337 - DNA, 15 bp, Homo sapiens
gtatgtttacatggg

SEQ ID NO: 1580338 - DNA, 15 bp, Homo sapiens
tatgtttacatgggt

SEQ ID NO: 1580339 - DNA, 15 bp, Homo sapiens
atgtttacatgggtc

SEQ ID NO: 1580340 - DNA, 15 bp, Homo sapiens
tgtttacatgggtca

SEQ ID NO: 1580341 - DNA, 15 bp, Homo sapiens
gtttacatgggtcag

SEQ ID NO: 1580342 - DNA, 15 bp, Homo sapiens
tttacatgggtcagt

SEQ ID NO: 1580343 - DNA, 15 bp, Homo sapiens
ttacatgggtcagtc

SEQ ID NO: 1580344 - DNA, 15 bp, Homo sapiens
tacatgggtcagtct

SEQ ID NO: 1580345 - DNA, 15 bp, Homo sapiens
acatgggtcagtctg

SEQ ID NO: 1580346 - DNA, 15 bp, Homo sapiens
catgggtcagtctgg

SEQ ID NO: 1580347 - DNA, 15 bp, Homo sapiens
atgggtcagtctggc

SEQ ID NO: 1580348 - DNA, 15 bp, Homo sapiens
tgggtcagtctggca

SEQ ID NO: 1580349 - DNA, 15 bp, Homo sapiens
gggtcagtctggcaa

SEQ ID NO: 1580350 - DNA, 15 bp, Homo sapiens
ggtcagtctggcaaa

SEQ ID NO: 1580351 - DNA, 15 bp, Homo sapiens
gtcagtctggcaaaa

SEQ ID NO: 1580352 - DNA, 15 bp, Homo sapiens
tcagtctggcaaaaa

SEQ ID NO: 1580353 - DNA, 15 bp, Homo sapiens
cagtctggcaaaaaa

SEQ ID NO: 1580354 - DNA, 15 bp, Homo sapiens
agtctggcaaaaaat

SEQ ID NO: 1580355 - DNA, 15 bp, Homo sapiens
gtctggcaaaaaatt

SEQ ID NO: 1580356 - DNA, 15 bp, Homo sapiens
tctggcaaaaaatta

SEQ ID NO: 1580357 - DNA, 15 bp, Homo sapiens
ctggcaaaaaattat

SEQ ID NO: 1580358 - DNA, 15 bp, Homo sapiens
tggcaaaaaattatg

SEQ ID NO: 1580359 - DNA, 15 bp, Homo sapiens
ggcaaaaaattatga

SEQ ID NO: 1580360 - DNA, 15 bp, Homo sapiens
gcaaaaaattatgaa

SEQ ID NO: 1580361 - DNA, 15 bp, Homo sapiens
caaaaaattatgaag

SEQ ID NO: 1580362 - DNA, 15 bp, Homo sapiens
aaaaaattatgaagt

SEQ ID NO: 1580363 - DNA, 15 bp, Homo sapiens
aaaaattatgaagtt

SEQ ID NO: 1580364 - DNA, 15 bp, Homo sapiens
aaaattatgaagttt

SEQ ID NO: 1580365 - DNA, 15 bp, Homo sapiens
aaattatgaagtttt

SEQ ID NO: 1580366 - DNA, 15 bp, Homo sapiens
aattatgaagtttta

SEQ ID NO: 1580367 - DNA, 15 bp, Homo sapiens
attatgaagttttaa

SEQ ID NO: 1580368 - DNA, 15 bp, Homo sapiens
ttatgaagttttaaa

SEQ ID NO: 1580369 - DNA, 15 bp, Homo sapiens
tatgaagttttaaaa

SEQ ID NO: 1580370 - DNA, 15 bp, Homo sapiens
atgaagttttaaaaa

SEQ ID NO: 1580371 - DNA, 15 bp, Homo sapiens
tgaagttttaaaaat

SEQ ID NO: 1580372 - DNA, 15 bp, Homo sapiens
gaagttttaaaaatt

SEQ ID NO: 1580373 - DNA, 15 bp, Homo sapiens
aagttttaaaaatta

SEQ ID NO: 1580374 - DNA, 15 bp, Homo sapiens
agttttaaaaattaa

SEQ ID NO: 1580375 - DNA, 15 bp, Homo sapiens
gttttaaaaattaaa

SEQ ID NO: 1580376 - DNA, 15 bp, Homo sapiens
ttaaaaattaaaaaa

SEQ ID NO: 1580377 - DNA, 15 bp, Homo sapiens
taaaaattaaaaaaa

SEQ ID NO: 1580378 - DNA, 15 bp, Homo sapiens
aaaaattaaaaaaaa

SEQ ID NO: 1580379 - DNA, 15 bp, Homo sapiens
aaaattaaaaaaaat

SEQ ID NO: 1580380 - DNA, 15 bp, Homo sapiens
aaattaaaaaaaatt

SEQ ID NO: 1580381 - DNA, 15 bp, Homo sapiens
aattaaaaaaaatta

SEQ ID NO: 1580382 - DNA, 15 bp, Homo sapiens
ttaaaaaaaattata

SEQ ID NO: 1580383 - DNA, 15 bp, Homo sapiens
taaaaaaaattataa

SEQ ID NO: 1580384 - DNA, 15 bp, Homo sapiens
aaaaaaattataatg

SEQ ID NO: 1580385 - DNA, 15 bp, Homo sapiens
aaaaaattataatgc

SEQ ID NO: 1580386 - DNA, 15 bp, Homo sapiens
aaaaattataatgcc

SEQ ID NO: 1580387 - DNA, 15 bp, Homo sapiens
aaaattataatgcca

SEQ ID NO: 1580388 - DNA, 15 bp, Homo sapiens
aaattataatgccag

SEQ ID NO: 1580389 - DNA, 15 bp, Homo sapiens
aattataatgccagt

SEQ ID NO: 1580390 - DNA, 15 bp, Homo sapiens
attataatgccagtt

SEQ ID NO: 1580391 - DNA, 15 bp, Homo sapiens
ttataatgccagttt

SEQ ID NO: 1580392 - DNA, 15 bp, Homo sapiens
tataatgccagtttt

SEQ ID NO: 1580393 - DNA, 15 bp, Homo sapiens
ataatgccagtttta

SEQ ID NO: 1580394 - DNA, 15 bp, Homo sapiens
taatgccagttttac

SEQ ID NO: 1580395 - DNA, 15 bp, Homo sapiens
aatgccagttttact

SEQ ID NO: 1580396 - DNA, 15 bp, Homo sapiens
atgccagttttactg

SEQ ID NO: 1580397 - DNA, 15 bp, Homo sapiens
tgccagttttactgg

SEQ ID NO: 1580398 - DNA, 15 bp, Homo sapiens
gccagttttactgga

SEQ ID NO: 1580399 - DNA, 15 bp, Homo sapiens
ccagttttactggaa

SEQ ID NO: 1580400 - DNA, 15 bp, Homo sapiens
cagttttactggaaa

SEQ ID NO: 1580401 - DNA, 15 bp, Homo sapiens
agttttactggaaag

SEQ ID NO: 1580402 - DNA, 15 bp, Homo sapiens
gttttactggaaagt

SEQ ID NO: 1580403 - DNA, 15 bp, Homo sapiens
ttttactggaaagta

SEQ ID NO: 1580404 - DNA, 15 bp, Homo sapiens
tttactggaaagtaa

SEQ ID NO: 1580405 - DNA, 15 bp, Homo sapiens
ttactggaaagtaaa

SEQ ID NO: 1580406 - DNA, 15 bp, Homo sapiens
tactggaaagtaaaa

SEQ ID NO: 1580407 - DNA, 15 bp, Homo sapiens
actggaaagtaaaat

SEQ ID NO: 1580408 - DNA, 15 bp, Homo sapiens
ctggaaagtaaaatt

SEQ ID NO: 1580409 - DNA, 15 bp, Homo sapiens
ggaaagtaaaattat

SEQ ID NO: 1580410 - DNA, 15 bp, Homo sapiens
gaaagtaaaattatt

SEQ ID NO: 1580411 - DNA, 15 bp, Homo sapiens
aaagtaaaattattt

SEQ ID NO: 1580412 - DNA, 15 bp, Homo sapiens
aagtaaaattatttc

SEQ ID NO: 1580413 - DNA, 15 bp, Homo sapiens
agtaaaattatttca

SEQ ID NO: 1580414 - DNA, 15 bp, Homo sapiens
gtaaaattatttcag

SEQ ID NO: 1580415 - DNA, 15 bp, Homo sapiens
taaaattatttcagt

SEQ ID NO: 1580416 - DNA, 15 bp, Homo sapiens
aaaattatttcagta

SEQ ID NO: 1580417 - DNA, 15 bp, Homo sapiens
aaattatttcagtaa

SEQ ID NO: 1580418 - DNA, 15 bp, Homo sapiens
aattatttcagtaat

SEQ ID NO: 1580419 - DNA, 15 bp, Homo sapiens
attatttcagtaatc

SEQ ID NO: 1580420 - DNA, 15 bp, Homo sapiens
ttatttcagtaatcg

SEQ ID NO: 1580421 - DNA, 15 bp, Homo sapiens
tatttcagtaatcga

SEQ ID NO: 1580422 - DNA, 15 bp, Homo sapiens
atttcagtaatcgat

SEQ ID NO: 1580423 - DNA, 15 bp, Homo sapiens
tttcagtaatcgatt

SEQ ID NO: 1580424 - DNA, 15 bp, Homo sapiens
ttcagtaatcgatta

SEQ ID NO: 1580425 - DNA, 15 bp, Homo sapiens
tcagtaatcgattat

SEQ ID NO: 1580426 - DNA, 15 bp, Homo sapiens
cagtaatcgattata

SEQ ID NO: 1580427 - DNA, 15 bp, Homo sapiens
agtaatcgattatag

SEQ ID NO: 1580428 - DNA, 15 bp, Homo sapiens
gtaatcgattatagc

SEQ ID NO: 1580429 - DNA, 15 bp, Homo sapiens
taatcgattatagca

SEQ ID NO: 1580430 - DNA, 15 bp, Homo sapiens
aatcgattatagcaa

SEQ ID NO: 1580431 - DNA, 15 bp, Homo sapiens
atcgattatagcaaa

SEQ ID NO: 1580432 - DNA, 15 bp, Homo sapiens
tcgattatagcaaaa

SEQ ID NO: 1580433 - DNA, 15 bp, Homo sapiens
cgattatagcaaaag

SEQ ID NO: 1580434 - DNA, 15 bp, Homo sapiens
gattatagcaaaagt

SEQ ID NO: 1580435 - DNA, 15 bp, Homo sapiens
attatagcaaaagta

SEQ ID NO: 1580436 - DNA, 15 bp, Homo sapiens
ttatagcaaaagtat

SEQ ID NO: 1580437 - DNA, 15 bp, Homo sapiens
tatagcaaaagtatt

SEQ ID NO: 1580438 - DNA, 15 bp, Homo sapiens
atagcaaaagtattg

SEQ ID NO: 1580439 - DNA, 15 bp, Homo sapiens
tagcaaaagtattga

SEQ ID NO: 1580440 - DNA, 15 bp, Homo sapiens
agcaaaagtattgat

SEQ ID NO: 1580441 - DNA, 15 bp, Homo sapiens
gcaaaagtattgatt

SEQ ID NO: 1580442 - DNA, 15 bp, Homo sapiens
caaaagtattgattt

SEQ ID NO: 1580443 - DNA, 15 bp, Homo sapiens
aaaagtattgatttt

SEQ ID NO: 1580444 - DNA, 15 bp, Homo sapiens
aaagtattgattttc

SEQ ID NO: 1580445 - DNA, 15 bp, Homo sapiens
aagtattgattttca

SEQ ID NO: 1580446 - DNA, 15 bp, Homo sapiens
agtattgattttcat

SEQ ID NO: 1580447 - DNA, 15 bp, Homo sapiens
gtattgattttcatt

SEQ ID NO: 1580448 - DNA, 15 bp, Homo sapiens
tattgattttcattc

SEQ ID NO: 1580449 - DNA, 15 bp, Homo sapiens
attgattttcattcc

SEQ ID NO: 1580450 - DNA, 15 bp, Homo sapiens
ttgattttcattcca

SEQ ID NO: 1580451 - DNA, 15 bp, Homo sapiens
tgattttcattccag

SEQ ID NO: 1580452 - DNA, 15 bp, Homo sapiens
gattttcattccaga

SEQ ID NO: 1580453 - DNA, 15 bp, Homo sapiens
attttcattccagac

SEQ ID NO: 1580454 - DNA, 15 bp, Homo sapiens
ttttcattccagaca

SEQ ID NO: 1580455 - DNA, 15 bp, Homo sapiens
tttcattccagacaa

SEQ ID NO: 1580456 - DNA, 15 bp, Homo sapiens
ttcattccagacaaa

SEQ ID NO: 1580457 - DNA, 15 bp, Homo sapiens
tcattccagacaaaa

SEQ ID NO: 1580458 - DNA, 15 bp, Homo sapiens
cattccagacaaaag

SEQ ID NO: 1580459 - DNA, 15 bp, Homo sapiens
attccagacaaaagt

SEQ ID NO: 1580460 - DNA, 15 bp, Homo sapiens
ttccagacaaaagtc

SEQ ID NO: 1580461 - DNA, 15 bp, Homo sapiens
tccagacaaaagtca

SEQ ID NO: 1580462 - DNA, 15 bp, Homo sapiens
ccagacaaaagtcag

SEQ ID NO: 1580463 - DNA, 15 bp, Homo sapiens
cagacaaaagtcaga

SEQ ID NO: 1580464 - DNA, 15 bp, Homo sapiens
agacaaaagtcagaa

SEQ ID NO: 1580465 - DNA, 15 bp, Homo sapiens
gacaaaagtcagaat

SEQ ID NO: 1580466 - DNA, 15 bp, Homo sapiens
acaaaagtcagaatg

SEQ ID NO: 1580467 - DNA, 15 bp, Homo sapiens
caaaagtcagaatga

SEQ ID NO: 1580468 - DNA, 15 bp, Homo sapiens
aaaagtcagaatgaa

SEQ ID NO: 1580469 - DNA, 15 bp, Homo sapiens
aaagtcagaatgaaa

SEQ ID NO: 1580470 - DNA, 15 bp, Homo sapiens
aagtcagaatgaaag

SEQ ID NO: 1580471 - DNA, 15 bp, Homo sapiens
agtcagaatgaaagg

SEQ ID NO: 1580472 - DNA, 15 bp, Homo sapiens
gtcagaatgaaaggt

SEQ ID NO: 1580473 - DNA, 15 bp, Homo sapiens
tcagaatgaaaggta

SEQ ID NO: 1580474 - DNA, 15 bp, Homo sapiens
cagaatgaaaggtaa

SEQ ID NO: 1580475 - DNA, 15 bp, Homo sapiens
agaatgaaaggtaat

SEQ ID NO: 1580476 - DNA, 15 bp, Homo sapiens
gaatgaaaggtaatt

SEQ ID NO: 1580477 - DNA, 15 bp, Homo sapiens
aatgaaaggtaattt

SEQ ID NO: 1580478 - DNA, 15 bp, Homo sapiens
atgaaaggtaatttc

SEQ ID NO: 1580479 - DNA, 15 bp, Homo sapiens
tgaaaggtaatttct

SEQ ID NO: 1580480 - DNA, 15 bp, Homo sapiens
gaaaggtaatttctc

SEQ ID NO: 1580481 - DNA, 15 bp, Homo sapiens
aaaggtaatttctca

SEQ ID NO: 1580482 - DNA, 15 bp, Homo sapiens
aaggtaatttctcaa

SEQ ID NO: 1580483 - DNA, 15 bp, Homo sapiens
aggtaatttctcaat

SEQ ID NO: 1580484 - DNA, 15 bp, Homo sapiens
ggtaatttctcaata

SEQ ID NO: 1580485 - DNA, 15 bp, Homo sapiens
gtaatttctcaatac

SEQ ID NO: 1580486 - DNA, 15 bp, Homo sapiens
taatttctcaatact

SEQ ID NO: 1580487 - DNA, 15 bp, Homo sapiens
aatttctcaatactc

SEQ ID NO: 1580488 - DNA, 15 bp, Homo sapiens
atttctcaatactct

SEQ ID NO: 1580489 - DNA, 15 bp, Homo sapiens
tttctcaatactctt

SEQ ID NO: 1580490 - DNA, 15 bp, Homo sapiens
ttctcaatactcttt

SEQ ID NO: 1580491 - DNA, 15 bp, Homo sapiens
tctcaatactctttc

SEQ ID NO: 1580492 - DNA, 15 bp, Homo sapiens
ctcaatactctttca

SEQ ID NO: 1580493 - DNA, 15 bp, Homo sapiens
tcaatactctttcag

SEQ ID NO: 1580494 - DNA, 15 bp, Homo sapiens
caatactctttcaga

SEQ ID NO: 1580495 - DNA, 15 bp, Homo sapiens
aatactctttcagat

SEQ ID NO: 1580496 - DNA, 15 bp, Homo sapiens
atactctttcagatt

SEQ ID NO: 1580497 - DNA, 15 bp, Homo sapiens
tactctttcagatta

SEQ ID NO: 1580498 - DNA, 15 bp, Homo sapiens
actctttcagattaa

SEQ ID NO: 1580499 - DNA, 15 bp, Homo sapiens
ctctttcagattaat

SEQ ID NO: 1580500 - DNA, 15 bp, Homo sapiens
tctttcagattaata

SEQ ID NO: 1580501 - DNA, 15 bp, Homo sapiens
ctttcagattaataa

SEQ ID NO: 1580502 - DNA, 15 bp, Homo sapiens
tttcagattaataaa

SEQ ID NO: 1580503 - DNA, 15 bp, Homo sapiens
ttcagattaataaaa

SEQ ID NO: 1580504 - DNA, 15 bp, Homo sapiens
tcagattaataaaag

SEQ ID NO: 1580505 - DNA, 15 bp, Homo sapiens
cagattaataaaagt

SEQ ID NO: 1580506 - DNA, 15 bp, Homo sapiens
agattaataaaagta

SEQ ID NO: 1580507 - DNA, 15 bp, Homo sapiens
gattaataaaagtac

SEQ ID NO: 1580508 - DNA, 15 bp, Homo sapiens
attaataaaagtacc

SEQ ID NO: 1580509 - DNA, 15 bp, Homo sapiens
ttaataaaagtacct

SEQ ID NO: 1580510 - DNA, 15 bp, Homo sapiens
taataaaagtacctg

SEQ ID NO: 1580511 - DNA, 15 bp, Homo sapiens
aataaaagtacctgt

SEQ ID NO: 1580512 - DNA, 15 bp, Homo sapiens
ataaaagtacctgta

SEQ ID NO: 1580513 - DNA, 15 bp, Homo sapiens
taaaagtacctgtag

SEQ ID NO: 1580514 - DNA, 15 bp, Homo sapiens
aaaagtacctgtagc

SEQ ID NO: 1580515 - DNA, 15 bp, Homo sapiens
aaagtacctgtagcg

SEQ ID NO: 1580516 - DNA, 15 bp, Homo sapiens
aagtacctgtagcga

SEQ ID NO: 1580517 - DNA, 15 bp, Homo sapiens
agtacctgtagcgat

SEQ ID NO: 1580518 - DNA, 15 bp, Homo sapiens
gtacctgtagcgatt

SEQ ID NO: 1580519 - DNA, 15 bp, Homo sapiens
tacctgtagcgattt

SEQ ID NO: 1580520 - DNA, 15 bp, Homo sapiens
acctgtagcgatttt

SEQ ID NO: 1580521 - DNA, 15 bp, Homo sapiens
cctgtagcgattttt

SEQ ID NO: 1580522 - DNA, 15 bp, Homo sapiens
ctgtagcgattttta

SEQ ID NO: 1580523 - DNA, 15 bp, Homo sapiens
tgtagcgatttttat

SEQ ID NO: 1580524 - DNA, 15 bp, Homo sapiens
gtagcgatttttatc

SEQ ID NO: 1580525 - DNA, 15 bp, Homo sapiens
tagcgatttttatca

SEQ ID NO: 1580526 - DNA, 15 bp, Homo sapiens
agcgatttttatcat

SEQ ID NO: 1580527 - DNA, 15 bp, Homo sapiens
gcgatttttatcatt

SEQ ID NO: 1580528 - DNA, 15 bp, Homo sapiens
cgatttttatcattc

SEQ ID NO: 1580529 - DNA, 15 bp, Homo sapiens
gatttttatcattca

SEQ ID NO: 1580530 - DNA, 15 bp, Homo sapiens
atttttatcattcac

SEQ ID NO: 1580531 - DNA, 15 bp, Homo sapiens
tttttatcattcaca

SEQ ID NO: 1580532 - DNA, 15 bp, Homo sapiens
ttttatcattcacaa

SEQ ID NO: 1580533 - DNA, 15 bp, Homo sapiens
tttatcattcacaag

SEQ ID NO: 1580534 - DNA, 15 bp, Homo sapiens
ttatcattcacaagt

SEQ ID NO: 1580535 - DNA, 15 bp, Homo sapiens
tatcattcacaagta

SEQ ID NO: 1580536 - DNA, 15 bp, Homo sapiens
atcattcacaagtat

SEQ ID NO: 1580537 - DNA, 15 bp, Homo sapiens
tcattcacaagtata

SEQ ID NO: 1580538 - DNA, 15 bp, Homo sapiens
cattcacaagtatat

SEQ ID NO: 1580539 - DNA, 15 bp, Homo sapiens
attcacaagtatatc

SEQ ID NO: 1580540 - DNA, 15 bp, Homo sapiens
ttcacaagtatatca

SEQ ID NO: 1580541 - DNA, 15 bp, Homo sapiens
tcacaagtatatcac

SEQ ID NO: 1580542 - DNA, 15 bp, Homo sapiens
cacaagtatatcaca

SEQ ID NO: 1580543 - DNA, 15 bp, Homo sapiens
acaagtatatcacaa

SEQ ID NO: 1580544 - DNA, 15 bp, Homo sapiens
caagtatatcacaag

SEQ ID NO: 1580545 - DNA, 15 bp, Homo sapiens
aagtatatcacaagt

SEQ ID NO: 1580546 - DNA, 15 bp, Homo sapiens
agtatatcacaagta

SEQ ID NO: 1580547 - DNA, 15 bp, Homo sapiens
gtatatcacaagtaa

SEQ ID NO: 1580548 - DNA, 15 bp, Homo sapiens
tatatcacaagtaag

SEQ ID NO: 1580549 - DNA, 15 bp, Homo sapiens
atatcacaagtaagt

SEQ ID NO: 1580550 - DNA, 15 bp, Homo sapiens
tatcacaagtaagtt

SEQ ID NO: 1580551 - DNA, 15 bp, Homo sapiens
atcacaagtaagtta

SEQ ID NO: 1580552 - DNA, 15 bp, Homo sapiens
tcacaagtaagttag

SEQ ID NO: 1580553 - DNA, 15 bp, Homo sapiens
cacaagtaagttaga

SEQ ID NO: 1580554 - DNA, 15 bp, Homo sapiens
acaagtaagttagaa

SEQ ID NO: 1580555 - DNA, 15 bp, Homo sapiens
caagtaagttagaat

SEQ ID NO: 1580556 - DNA, 15 bp, Homo sapiens
aagtaagttagaatt

SEQ ID NO: 1580557 - DNA, 15 bp, Homo sapiens
agtaagttagaattt

SEQ ID NO: 1580558 - DNA, 15 bp, Homo sapiens
gtaagttagaatttg

SEQ ID NO: 1580559 - DNA, 15 bp, Homo sapiens
taagttagaatttga

SEQ ID NO: 1580560 - DNA, 15 bp, Homo sapiens
aagttagaatttgag

SEQ ID NO: 1580561 - DNA, 15 bp, Homo sapiens
agttagaatttgaga

SEQ ID NO: 1580562 - DNA, 15 bp, Homo sapiens
gttagaatttgagaa

SEQ ID NO: 1580563 - DNA, 15 bp, Homo sapiens
ttagaatttgagaac

SEQ ID NO: 1580564 - DNA, 15 bp, Homo sapiens
tagaatttgagaact

SEQ ID NO: 1580565 - DNA, 15 bp, Homo sapiens
agaatttgagaactg

SEQ ID NO: 1580566 - DNA, 15 bp, Homo sapiens
gaatttgagaactgt

SEQ ID NO: 1580567 - DNA, 15 bp, Homo sapiens
aatttgagaactgtg

SEQ ID NO: 1580568 - DNA, 15 bp, Homo sapiens
atttgagaactgtgt

SEQ ID NO: 1580569 - DNA, 15 bp, Homo sapiens
tttgagaactgtgtt

SEQ ID NO: 1580570 - DNA, 15 bp, Homo sapiens
ttgagaactgtgttc

SEQ ID NO: 1580571 - DNA, 15 bp, Homo sapiens
tgagaactgtgttct

SEQ ID NO: 1580572 - DNA, 15 bp, Homo sapiens
gagaactgtgttcta

SEQ ID NO: 1580573 - DNA, 15 bp, Homo sapiens
agaactgtgttctag

SEQ ID NO: 1580574 - DNA, 15 bp, Homo sapiens
gaactgtgttctaga

SEQ ID NO: 1580575 - DNA, 15 bp, Homo sapiens
aactgtgttctagat

SEQ ID NO: 1580576 - DNA, 15 bp, Homo sapiens
actgtgttctagatc

SEQ ID NO: 1580577 - DNA, 15 bp, Homo sapiens
ctgtgttctagatct

SEQ ID NO: 1580578 - DNA, 15 bp, Homo sapiens
tgtgttctagatctc

SEQ ID NO: 1580579 - DNA, 15 bp, Homo sapiens
gtgttctagatctct

SEQ ID NO: 1580580 - DNA, 15 bp, Homo sapiens
tgttctagatctctg

SEQ ID NO: 1580581 - DNA, 15 bp, Homo sapiens
gttctagatctctga

SEQ ID NO: 1580582 - DNA, 15 bp, Homo sapiens
ttctagatctctgag

SEQ ID NO: 1580583 - DNA, 15 bp, Homo sapiens
tctagatctctgagg

SEQ ID NO: 1580584 - DNA, 15 bp, Homo sapiens
ctagatctctgagga

SEQ ID NO: 1580585 - DNA, 15 bp, Homo sapiens
tagatctctgaggag

SEQ ID NO: 1580586 - DNA, 15 bp, Homo sapiens
agatctctgaggaga

SEQ ID NO: 1580587 - DNA, 15 bp, Homo sapiens
gatctctgaggagat

SEQ ID NO: 1580588 - DNA, 15 bp, Homo sapiens
atctctgaggagatg

SEQ ID NO: 1580589 - DNA, 15 bp, Homo sapiens
tctctgaggagatgc

SEQ ID NO: 1580590 - DNA, 15 bp, Homo sapiens
ctctgaggagatgca

SEQ ID NO: 1580591 - DNA, 15 bp, Homo sapiens
tctgaggagatgcag

SEQ ID NO: 1580592 - DNA, 15 bp, Homo sapiens
ctgaggagatgcagt

SEQ ID NO: 1580593 - DNA, 15 bp, Homo sapiens
tgaggagatgcagtc

SEQ ID NO: 1580594 - DNA, 15 bp, Homo sapiens
gaggagatgcagtca

SEQ ID NO: 1580595 - DNA, 15 bp, Homo sapiens
aggagatgcagtcag

SEQ ID NO: 1580596 - DNA, 15 bp, Homo sapiens
ggagatgcagtcaga

SEQ ID NO: 1580597 - DNA, 15 bp, Homo sapiens
gagatgcagtcagat

SEQ ID NO: 1580598 - DNA, 15 bp, Homo sapiens
agatgcagtcagatt

SEQ ID NO: 1580599 - DNA, 15 bp, Homo sapiens
gatgcagtcagattt

SEQ ID NO: 1580600 - DNA, 15 bp, Homo sapiens
atgcagtcagatttc

SEQ ID NO: 1580601 - DNA, 15 bp, Homo sapiens
tgcagtcagatttct

SEQ ID NO: 1580602 - DNA, 15 bp, Homo sapiens
gcagtcagatttctg

SEQ ID NO: 1580603 - DNA, 15 bp, Homo sapiens
cagtcagatttctga

SEQ ID NO: 1580604 - DNA, 15 bp, Homo sapiens
agtcagatttctgaa

SEQ ID NO: 1580605 - DNA, 15 bp, Homo sapiens
gtcagatttctgaac

SEQ ID NO: 1580606 - DNA, 15 bp, Homo sapiens
tcagatttctgaact

SEQ ID NO: 1580607 - DNA, 15 bp, Homo sapiens
cagatttctgaactg

SEQ ID NO: 1580608 - DNA, 15 bp, Homo sapiens
agatttctgaactgt

SEQ ID NO: 1580609 - DNA, 15 bp, Homo sapiens
gatttctgaactgtc

SEQ ID NO: 1580610 - DNA, 15 bp, Homo sapiens
atttctgaactgtct

SEQ ID NO: 1580611 - DNA, 15 bp, Homo sapiens
tttctgaactgtctc

SEQ ID NO: 1580612 - DNA, 15 bp, Homo sapiens
ttctgaactgtctca

SEQ ID NO: 1580613 - DNA, 15 bp, Homo sapiens
tctgaactgtctcag

SEQ ID NO: 1580614 - DNA, 15 bp, Homo sapiens
ctgaactgtctcagc

SEQ ID NO: 1580615 - DNA, 15 bp, Homo sapiens
tgaactgtctcagca

SEQ ID NO: 1580616 - DNA, 15 bp, Homo sapiens
gaactgtctcagcaa

SEQ ID NO: 1580617 - DNA, 15 bp, Homo sapiens
aactgtctcagcaaa

SEQ ID NO: 1580618 - DNA, 15 bp, Homo sapiens
actgtctcagcaaat

SEQ ID NO: 1580619 - DNA, 15 bp, Homo sapiens
ctgtctcagcaaatg

SEQ ID NO: 1580620 - DNA, 15 bp, Homo sapiens
tgtctcagcaaatgg

SEQ ID NO: 1580621 - DNA, 15 bp, Homo sapiens
gtctcagcaaatggt

SEQ ID NO: 1580622 - DNA, 15 bp, Homo sapiens
tctcagcaaatggta

SEQ ID NO: 1580623 - DNA, 15 bp, Homo sapiens
ctcagcaaatggtaa

SEQ ID NO: 1580624 - DNA, 15 bp, Homo sapiens
tcagcaaatggtaag

SEQ ID NO: 1580625 - DNA, 15 bp, Homo sapiens
cagcaaatggtaagt

SEQ ID NO: 1580626 - DNA, 15 bp, Homo sapiens
agcaaatggtaagta

SEQ ID NO: 1580627 - DNA, 15 bp, Homo sapiens
gcaaatggtaagtaa

SEQ ID NO: 1580628 - DNA, 15 bp, Homo sapiens
caaatggtaagtaac

SEQ ID NO: 1580629 - DNA, 15 bp, Homo sapiens
aaatggtaagtaact

SEQ ID NO: 1580630 - DNA, 15 bp, Homo sapiens
aatggtaagtaactt

SEQ ID NO: 1580631 - DNA, 15 bp, Homo sapiens
atggtaagtaactta

SEQ ID NO: 1580632 - DNA, 15 bp, Homo sapiens
tggtaagtaacttag

SEQ ID NO: 1580633 - DNA, 15 bp, Homo sapiens
ggtaagtaacttaga

SEQ ID NO: 1580634 - DNA, 15 bp, Homo sapiens
gtaagtaacttagag

SEQ ID NO: 1580635 - DNA, 15 bp, Homo sapiens
taagtaacttagagc

SEQ ID NO: 1580636 - DNA, 15 bp, Homo sapiens
aagtaacttagagct

SEQ ID NO: 1580637 - DNA, 15 bp, Homo sapiens
agtaacttagagcta

SEQ ID NO: 1580638 - DNA, 15 bp, Homo sapiens
gtaacttagagctag

SEQ ID NO: 1580639 - DNA, 15 bp, Homo sapiens
taacttagagctagt

SEQ ID NO: 1580640 - DNA, 15 bp, Homo sapiens
aacttagagctagta

SEQ ID NO: 1580641 - DNA, 15 bp, Homo sapiens
acttagagctagtaa

SEQ ID NO: 1580642 - DNA, 15 bp, Homo sapiens
cttagagctagtaat

SEQ ID NO: 1580643 - DNA, 15 bp, Homo sapiens
ttagagctagtaatt

SEQ ID NO: 1580644 - DNA, 15 bp, Homo sapiens
tagagctagtaatta

SEQ ID NO: 1580645 - DNA, 15 bp, Homo sapiens
agagctagtaattaa

SEQ ID NO: 1580646 - DNA, 15 bp, Homo sapiens
gagctagtaattaat

SEQ ID NO: 1580647 - DNA, 15 bp, Homo sapiens
agctagtaattaata

SEQ ID NO: 1580648 - DNA, 15 bp, Homo sapiens
gctagtaattaataa

SEQ ID NO: 1580649 - DNA, 15 bp, Homo sapiens
ctagtaattaataac

SEQ ID NO: 1580650 - DNA, 15 bp, Homo sapiens
tagtaattaataacc

SEQ ID NO: 1580651 - DNA, 15 bp, Homo sapiens
agtaattaataacct

SEQ ID NO: 1580652 - DNA, 15 bp, Homo sapiens
gtaattaataacctg

SEQ ID NO: 1580653 - DNA, 15 bp, Homo sapiens
taattaataacctgt

SEQ ID NO: 1580654 - DNA, 15 bp, Homo sapiens
aattaataacctgtc

SEQ ID NO: 1580655 - DNA, 15 bp, Homo sapiens
attaataacctgtcc

SEQ ID NO: 1580656 - DNA, 15 bp, Homo sapiens
ttaataacctgtcct

SEQ ID NO: 1580657 - DNA, 15 bp, Homo sapiens
taataacctgtcctt

SEQ ID NO: 1580658 - DNA, 15 bp, Homo sapiens
aataacctgtccttt

SEQ ID NO: 1580659 - DNA, 15 bp, Homo sapiens
ataacctgtcctttg

SEQ ID NO: 1580660 - DNA, 15 bp, Homo sapiens
taacctgtcctttga

SEQ ID NO: 1580661 - DNA, 15 bp, Homo sapiens
aacctgtcctttgat

SEQ ID NO: 1580662 - DNA, 15 bp, Homo sapiens
acctgtcctttgatt

SEQ ID NO: 1580663 - DNA, 15 bp, Homo sapiens
cctgtcctttgattt

SEQ ID NO: 1580664 - DNA, 15 bp, Homo sapiens
ctgtcctttgatttc

SEQ ID NO: 1580665 - DNA, 15 bp, Homo sapiens
tgtcctttgatttct

SEQ ID NO: 1580666 - DNA, 15 bp, Homo sapiens
gtcctttgatttctg

SEQ ID NO: 1580667 - DNA, 15 bp, Homo sapiens
tcctttgatttctga

SEQ ID NO: 1580668 - DNA, 15 bp, Homo sapiens
cctttgatttctgat

SEQ ID NO: 1580669 - DNA, 15 bp, Homo sapiens
ctttgatttctgatt

SEQ ID NO: 1580670 - DNA, 15 bp, Homo sapiens
tttgatttctgattc

SEQ ID NO: 1580671 - DNA, 15 bp, Homo sapiens
ttgatttctgattca

SEQ ID NO: 1580672 - DNA, 15 bp, Homo sapiens
tgatttctgattcag

SEQ ID NO: 1580673 - DNA, 15 bp, Homo sapiens
gatttctgattcagc

SEQ ID NO: 1580674 - DNA, 15 bp, Homo sapiens
atttctgattcagcc

SEQ ID NO: 1580675 - DNA, 15 bp, Homo sapiens
tttctgattcagcca

SEQ ID NO: 1580676 - DNA, 15 bp, Homo sapiens
ttctgattcagccaa

SEQ ID NO: 1580677 - DNA, 15 bp, Homo sapiens
tctgattcagccaag

SEQ ID NO: 1580678 - DNA, 15 bp, Homo sapiens
ctgattcagccaaga

SEQ ID NO: 1580679 - DNA, 15 bp, Homo sapiens
tgattcagccaagaa

SEQ ID NO: 1580680 - DNA, 15 bp, Homo sapiens
gattcagccaagaat

SEQ ID NO: 1580681 - DNA, 15 bp, Homo sapiens
attcagccaagaatg

SEQ ID NO: 1580682 - DNA, 15 bp, Homo sapiens
ttcagccaagaatgg

SEQ ID NO: 1580683 - DNA, 15 bp, Homo sapiens
tcagccaagaatggc

SEQ ID NO: 1580684 - DNA, 15 bp, Homo sapiens
cagccaagaatggcc

SEQ ID NO: 1580685 - DNA, 15 bp, Homo sapiens
agccaagaatggcca

SEQ ID NO: 1580686 - DNA, 15 bp, Homo sapiens
gccaagaatggccat

SEQ ID NO: 1580687 - DNA, 15 bp, Homo sapiens
ccaagaatggccata

SEQ ID NO: 1580688 - DNA, 15 bp, Homo sapiens
caagaatggccatat

SEQ ID NO: 1580689 - DNA, 15 bp, Homo sapiens
aagaatggccatatt

SEQ ID NO: 1580690 - DNA, 15 bp, Homo sapiens
agaatggccatattt

SEQ ID NO: 1580691 - DNA, 15 bp, Homo sapiens
gaatggccatatttg

SEQ ID NO: 1580692 - DNA, 15 bp, Homo sapiens
aatggccatatttgg

SEQ ID NO: 1580693 - DNA, 15 bp, Homo sapiens
atggccatatttggg

SEQ ID NO: 1580694 - DNA, 15 bp, Homo sapiens
tggccatatttggga

SEQ ID NO: 1580695 - DNA, 15 bp, Homo sapiens
ggccatatttgggaa

SEQ ID NO: 1580696 - DNA, 15 bp, Homo sapiens
gccatatttgggaaa

SEQ ID NO: 1580697 - DNA, 15 bp, Homo sapiens
ccatatttgggaaag

SEQ ID NO: 1580698 - DNA, 15 bp, Homo sapiens
catatttgggaaagg

SEQ ID NO: 1580699 - DNA, 15 bp, Homo sapiens
atatttgggaaaggc

SEQ ID NO: 1580700 - DNA, 15 bp, Homo sapiens
tatttgggaaaggca

SEQ ID NO: 1580701 - DNA, 15 bp, Homo sapiens
atttgggaaaggcag

SEQ ID NO: 1580702 - DNA, 15 bp, Homo sapiens
tttgggaaaggcaga

SEQ ID NO: 1580703 - DNA, 15 bp, Homo sapiens
ttgggaaaggcagat

SEQ ID NO: 1580704 - DNA, 15 bp, Homo sapiens
tgggaaaggcagatc

SEQ ID NO: 1580705 - DNA, 15 bp, Homo sapiens
gggaaaggcagatct

SEQ ID NO: 1580706 - DNA, 15 bp, Homo sapiens
ggaaaggcagatctg

SEQ ID NO: 1580707 - DNA, 15 bp, Homo sapiens
gaaaggcagatctgg

SEQ ID NO: 1580708 - DNA, 15 bp, Homo sapiens
aaaggcagatctgga

SEQ ID NO: 1580709 - DNA, 15 bp, Homo sapiens
aaggcagatctggag

SEQ ID NO: 1580710 - DNA, 15 bp, Homo sapiens
aggcagatctggaga

SEQ ID NO: 1580711 - DNA, 15 bp, Homo sapiens
ggcagatctggagag

SEQ ID NO: 1580712 - DNA, 15 bp, Homo sapiens
gcagatctggagagt

SEQ ID NO: 1580713 - DNA, 15 bp, Homo sapiens
cagatctggagagta

SEQ ID NO: 1580714 - DNA, 15 bp, Homo sapiens
agatctggagagtaa

SEQ ID NO: 1580715 - DNA, 15 bp, Homo sapiens
gatctggagagtaac

SEQ ID NO: 1580716 - DNA, 15 bp, Homo sapiens
atctggagagtaacc

SEQ ID NO: 1580717 - DNA, 15 bp, Homo sapiens
tctggagagtaacca

SEQ ID NO: 1580718 - DNA, 15 bp, Homo sapiens
ctggagagtaaccac

SEQ ID NO: 1580719 - DNA, 15 bp, Homo sapiens
tggagagtaaccacg

SEQ ID NO: 1580720 - DNA, 15 bp, Homo sapiens
ggagagtaaccacgt

SEQ ID NO: 1580721 - DNA, 15 bp, Homo sapiens
gagagtaaccacgtt

SEQ ID NO: 1580722 - DNA, 15 bp, Homo sapiens
agagtaaccacgttt

SEQ ID NO: 1580723 - DNA, 15 bp, Homo sapiens
gagtaaccacgtttt

SEQ ID NO: 1580724 - DNA, 15 bp, Homo sapiens
agtaaccacgttttc

SEQ ID NO: 1580725 - DNA, 15 bp, Homo sapiens
gtaaccacgttttca

SEQ ID NO: 1580726 - DNA, 15 bp, Homo sapiens
taaccacgttttcat

SEQ ID NO: 1580727 - DNA, 15 bp, Homo sapiens
aaccacgttttcatt

SEQ ID NO: 1580728 - DNA, 15 bp, Homo sapiens
accacgttttcattc

SEQ ID NO: 1580729 - DNA, 15 bp, Homo sapiens
ccacgttttcattca

SEQ ID NO: 1580730 - DNA, 15 bp, Homo sapiens
cacgttttcattcat

SEQ ID NO: 1580731 - DNA, 15 bp, Homo sapiens
acgttttcattcatt

SEQ ID NO: 1580732 - DNA, 15 bp, Homo sapiens
cgttttcattcattt

SEQ ID NO: 1580733 - DNA, 15 bp, Homo sapiens
gttttcattcattta

SEQ ID NO: 1580734 - DNA, 15 bp, Homo sapiens
ttttcattcatttac

SEQ ID NO: 1580735 - DNA, 15 bp, Homo sapiens
tttcattcatttacc

SEQ ID NO: 1580736 - DNA, 15 bp, Homo sapiens
ttcattcatttacca

SEQ ID NO: 1580737 - DNA, 15 bp, Homo sapiens
tcattcatttaccac

SEQ ID NO: 1580738 - DNA, 15 bp, Homo sapiens
cattcatttaccact

SEQ ID NO: 1580739 - DNA, 15 bp, Homo sapiens
attcatttaccactt

SEQ ID NO: 1580740 - DNA, 15 bp, Homo sapiens
ttcatttaccacttc

SEQ ID NO: 1580741 - DNA, 15 bp, Homo sapiens
tcatttaccacttct

SEQ ID NO: 1580742 - DNA, 15 bp, Homo sapiens
catttaccacttcta

SEQ ID NO: 1580743 - DNA, 15 bp, Homo sapiens
atttaccacttctag

SEQ ID NO: 1580744 - DNA, 15 bp, Homo sapiens
tttaccacttctagg

SEQ ID NO: 1580745 - DNA, 15 bp, Homo sapiens
ttaccacttctaggc

SEQ ID NO: 1580746 - DNA, 15 bp, Homo sapiens
taccacttctaggcc

SEQ ID NO: 1580747 - DNA, 15 bp, Homo sapiens
accacttctaggccc

SEQ ID NO: 1580748 - DNA, 15 bp, Homo sapiens
ccacttctaggcccc

SEQ ID NO: 1580749 - DNA, 15 bp, Homo sapiens
cacttctaggcccct

SEQ ID NO: 1580750 - DNA, 15 bp, Homo sapiens
acttctaggcccctc

SEQ ID NO: 1580751 - DNA, 15 bp, Homo sapiens
cttctaggcccctcc

SEQ ID NO: 1580752 - DNA, 15 bp, Homo sapiens
ttctaggcccctcca

SEQ ID NO: 1580753 - DNA, 15 bp, Homo sapiens
tctaggcccctccag

SEQ ID NO: 1580754 - DNA, 15 bp, Homo sapiens
ctaggcccctccaga

SEQ ID NO: 1580755 - DNA, 15 bp, Homo sapiens
taggcccctccagag

SEQ ID NO: 1580756 - DNA, 15 bp, Homo sapiens
aggcccctccagagc

SEQ ID NO: 1580757 - DNA, 15 bp, Homo sapiens
ggcccctccagagct

SEQ ID NO: 1580758 - DNA, 15 bp, Homo sapiens
gcccctccagagctc

SEQ ID NO: 1580759 - DNA, 15 bp, Homo sapiens
cccctccagagctct

SEQ ID NO: 1580760 - DNA, 15 bp, Homo sapiens
ccctccagagctctc

SEQ ID NO: 1580761 - DNA, 15 bp, Homo sapiens
cctccagagctctca

SEQ ID NO: 1580762 - DNA, 15 bp, Homo sapiens
ctccagagctctcag

SEQ ID NO: 1580763 - DNA, 15 bp, Homo sapiens
tccagagctctcaga

SEQ ID NO: 1580764 - DNA, 15 bp, Homo sapiens
ccagagctctcagat

SEQ ID NO: 1580765 - DNA, 15 bp, Homo sapiens
cagagctctcagata

SEQ ID NO: 1580766 - DNA, 15 bp, Homo sapiens
agagctctcagatat

SEQ ID NO: 1580767 - DNA, 15 bp, Homo sapiens
gagctctcagatatt

SEQ ID NO: 1580768 - DNA, 15 bp, Homo sapiens
agctctcagatattt

SEQ ID NO: 1580769 - DNA, 15 bp, Homo sapiens
gctctcagatatttt

SEQ ID NO: 1580770 - DNA, 15 bp, Homo sapiens
ctctcagatattttg

SEQ ID NO: 1580771 - DNA, 15 bp, Homo sapiens
tctcagatattttgg

SEQ ID NO: 1580772 - DNA, 15 bp, Homo sapiens
ctcagatattttggg

SEQ ID NO: 1580773 - DNA, 15 bp, Homo sapiens
tcagatattttgggg

SEQ ID NO: 1580774 - DNA, 15 bp, Homo sapiens
cagatattttggggt

SEQ ID NO: 1580775 - DNA, 15 bp, Homo sapiens
agatattttggggtt

SEQ ID NO: 1580776 - DNA, 15 bp, Homo sapiens
gatattttggggttg

SEQ ID NO: 1580777 - DNA, 15 bp, Homo sapiens
atattttggggttga

SEQ ID NO: 1580778 - DNA, 15 bp, Homo sapiens
tattttggggttgag

SEQ ID NO: 1580779 - DNA, 15 bp, Homo sapiens
attttggggttgagc

SEQ ID NO: 1580780 - DNA, 15 bp, Homo sapiens
ttttggggttgagcc

SEQ ID NO: 1580781 - DNA, 15 bp, Homo sapiens
tttggggttgagccc

SEQ ID NO: 1580782 - DNA, 15 bp, Homo sapiens
ttggggttgagccct

SEQ ID NO: 1580783 - DNA, 15 bp, Homo sapiens
tggggttgagccctt

SEQ ID NO: 1580784 - DNA, 15 bp, Homo sapiens
ggggttgagcccttc

SEQ ID NO: 1580785 - DNA, 15 bp, Homo sapiens
gggttgagcccttcc

SEQ ID NO: 1580786 - DNA, 15 bp, Homo sapiens
ggttgagcccttccc

SEQ ID NO: 1580787 - DNA, 15 bp, Homo sapiens
gttgagcccttcccc

SEQ ID NO: 1580788 - DNA, 15 bp, Homo sapiens
ttgagcccttcccca

SEQ ID NO: 1580789 - DNA, 15 bp, Homo sapiens
tgagcccttccccaa

SEQ ID NO: 1580790 - DNA, 15 bp, Homo sapiens
gagcccttccccaaa

SEQ ID NO: 1580791 - DNA, 15 bp, Homo sapiens
agcccttccccaaag

SEQ ID NO: 1580792 - DNA, 15 bp, Homo sapiens
gcccttccccaaagc

SEQ ID NO: 1580793 - DNA, 15 bp, Homo sapiens
cccttccccaaagcc

SEQ ID NO: 1580794 - DNA, 15 bp, Homo sapiens
ccttccccaaagcca

SEQ ID NO: 1580795 - DNA, 15 bp, Homo sapiens
cttccccaaagccat

SEQ ID NO: 1580796 - DNA, 15 bp, Homo sapiens
ttccccaaagccata

SEQ ID NO: 1580797 - DNA, 15 bp, Homo sapiens
tccccaaagccatac

SEQ ID NO: 1580798 - DNA, 15 bp, Homo sapiens
ccccaaagccataca

SEQ ID NO: 1580799 - DNA, 15 bp, Homo sapiens
cccaaagccatacag

SEQ ID NO: 1580800 - DNA, 15 bp, Homo sapiens
ccaaagccatacagg

SEQ ID NO: 1580801 - DNA, 15 bp, Homo sapiens
caaagccatacagga

SEQ ID NO: 1580802 - DNA, 15 bp, Homo sapiens
aaagccatacaggac

SEQ ID NO: 1580803 - DNA, 15 bp, Homo sapiens
aagccatacaggacc

SEQ ID NO: 1580804 - DNA, 15 bp, Homo sapiens
agccatacaggacct

SEQ ID NO: 1580805 - DNA, 15 bp, Homo sapiens
gccatacaggacctt

SEQ ID NO: 1580806 - DNA, 15 bp, Homo sapiens
ccatacaggaccttt

SEQ ID NO: 1580807 - DNA, 15 bp, Homo sapiens
catacaggacctttt

SEQ ID NO: 1580808 - DNA, 15 bp, Homo sapiens
atacaggaccttttt

SEQ ID NO: 1580809 - DNA, 15 bp, Homo sapiens
tacaggacctttttt

SEQ ID NO: 1580810 - DNA, 15 bp, Homo sapiens
acaggaccttttttt

SEQ ID NO: 1580811 - DNA, 15 bp, Homo sapiens
caggacctttttttt

SEQ ID NO: 1580812 - DNA, 15 bp, Homo sapiens
aggaccttttttttg

SEQ ID NO: 1580813 - DNA, 15 bp, Homo sapiens
ggaccttttttttgt

SEQ ID NO: 1580814 - DNA, 15 bp, Homo sapiens
gaccttttttttgtg

SEQ ID NO: 1580815 - DNA, 15 bp, Homo sapiens
accttttttttgtga

SEQ ID NO: 1580816 - DNA, 15 bp, Homo sapiens
ccttttttttgtgat

SEQ ID NO: 1580817 - DNA, 15 bp, Homo sapiens
cttttttttgtgatc

SEQ ID NO: 1580818 - DNA, 15 bp, Homo sapiens
ttttttttgtgatct

SEQ ID NO: 1580819 - DNA, 15 bp, Homo sapiens
tttttttgtgatctg

SEQ ID NO: 1580820 - DNA, 15 bp, Homo sapiens
ttttttgtgatctgt

SEQ ID NO: 1580821 - DNA, 15 bp, Homo sapiens
tttttgtgatctgtt

SEQ ID NO: 1580822 - DNA, 15 bp, Homo sapiens
ttttgtgatctgttc

SEQ ID NO: 1580823 - DNA, 15 bp, Homo sapiens
tttgtgatctgttct

SEQ ID NO: 1580824 - DNA, 15 bp, Homo sapiens
ttgtgatctgttcta

SEQ ID NO: 1580825 - DNA, 15 bp, Homo sapiens
tgtgatctgttctag

SEQ ID NO: 1580826 - DNA, 15 bp, Homo sapiens
gtgatctgttctagc

SEQ ID NO: 1580827 - DNA, 15 bp, Homo sapiens
tgatctgttctagcc

SEQ ID NO: 1580828 - DNA, 15 bp, Homo sapiens
gatctgttctagcca

SEQ ID NO: 1580829 - DNA, 15 bp, Homo sapiens
atctgttctagccat

SEQ ID NO: 1580830 - DNA, 15 bp, Homo sapiens
tctgttctagccatt

SEQ ID NO: 1580831 - DNA, 15 bp, Homo sapiens
ctgttctagccattt

SEQ ID NO: 1580832 - DNA, 15 bp, Homo sapiens
tgttctagccatttt

SEQ ID NO: 1580833 - DNA, 15 bp, Homo sapiens
gttctagccattttt

SEQ ID NO: 1580834 - DNA, 15 bp, Homo sapiens
ttctagccattttta

SEQ ID NO: 1580835 - DNA, 15 bp, Homo sapiens
tctagccatttttat

SEQ ID NO: 1580836 - DNA, 15 bp, Homo sapiens
ctagccatttttatg

SEQ ID NO: 1580837 - DNA, 15 bp, Homo sapiens
tagccatttttatgt

SEQ ID NO: 1580838 - DNA, 15 bp, Homo sapiens
agccatttttatgtt

SEQ ID NO: 1580839 - DNA, 15 bp, Homo sapiens
gccatttttatgttg

SEQ ID NO: 1580840 - DNA, 15 bp, Homo sapiens
ccatttttatgttgg

SEQ ID NO: 1580841 - DNA, 15 bp, Homo sapiens
catttttatgttggg

SEQ ID NO: 1580842 - DNA, 15 bp, Homo sapiens
atttttatgttgggt

SEQ ID NO: 1580843 - DNA, 15 bp, Homo sapiens
tttttatgttgggtg

SEQ ID NO: 1580844 - DNA, 15 bp, Homo sapiens
ttttatgttgggtgc

SEQ ID NO: 1580845 - DNA, 15 bp, Homo sapiens
tttatgttgggtgct

SEQ ID NO: 1580846 - DNA, 15 bp, Homo sapiens
ttatgttgggtgctt

SEQ ID NO: 1580847 - DNA, 15 bp, Homo sapiens
tatgttgggtgcttg

SEQ ID NO: 1580848 - DNA, 15 bp, Homo sapiens
atgttgggtgcttgt

SEQ ID NO: 1580849 - DNA, 15 bp, Homo sapiens
tgttgggtgcttgtt

SEQ ID NO: 1580850 - DNA, 15 bp, Homo sapiens
gttgggtgcttgtta

SEQ ID NO: 1580851 - DNA, 15 bp, Homo sapiens
ttgggtgcttgttat

SEQ ID NO: 1580852 - DNA, 15 bp, Homo sapiens
tgggtgcttgttatg

SEQ ID NO: 1580853 - DNA, 15 bp, Homo sapiens
gggtgcttgttatgg

SEQ ID NO: 1580854 - DNA, 15 bp, Homo sapiens
ggtgcttgttatgga

SEQ ID NO: 1580855 - DNA, 15 bp, Homo sapiens
gtgcttgttatggac

SEQ ID NO: 1580856 - DNA, 15 bp, Homo sapiens
tgcttgttatggact

SEQ ID NO: 1580857 - DNA, 15 bp, Homo sapiens
gcttgttatggactg

SEQ ID NO: 1580858 - DNA, 15 bp, Homo sapiens
cttgttatggactga

SEQ ID NO: 1580859 - DNA, 15 bp, Homo sapiens
ttgttatggactgag

SEQ ID NO: 1580860 - DNA, 15 bp, Homo sapiens
tgttatggactgagc

SEQ ID NO: 1580861 - DNA, 15 bp, Homo sapiens
gttatggactgagca

SEQ ID NO: 1580862 - DNA, 15 bp, Homo sapiens
ttatggactgagcat

SEQ ID NO: 1580863 - DNA, 15 bp, Homo sapiens
tatggactgagcatt

SEQ ID NO: 1580864 - DNA, 15 bp, Homo sapiens
atggactgagcattt

SEQ ID NO: 1580865 - DNA, 15 bp, Homo sapiens
tggactgagcattta

SEQ ID NO: 1580866 - DNA, 15 bp, Homo sapiens
ggactgagcatttat

SEQ ID NO: 1580867 - DNA, 15 bp, Homo sapiens
gactgagcatttatg

SEQ ID NO: 1580868 - DNA, 15 bp, Homo sapiens
actgagcatttatgt

SEQ ID NO: 1580869 - DNA, 15 bp, Homo sapiens
ctgagcatttatgtc

SEQ ID NO: 1580870 - DNA, 15 bp, Homo sapiens
tgagcatttatgtcc

SEQ ID NO: 1580871 - DNA, 15 bp, Homo sapiens
gagcatttatgtcct

SEQ ID NO: 1580872 - DNA, 15 bp, Homo sapiens
agcatttatgtcctc

SEQ ID NO: 1580873 - DNA, 15 bp, Homo sapiens
gcatttatgtcctcc

SEQ ID NO: 1580874 - DNA, 15 bp, Homo sapiens
catttatgtcctccc

SEQ ID NO: 1580875 - DNA, 15 bp, Homo sapiens
atttatgtcctccca

SEQ ID NO: 1580876 - DNA, 15 bp, Homo sapiens
tttatgtcctcccac

SEQ ID NO: 1580877 - DNA, 15 bp, Homo sapiens
ttatgtcctcccaca

SEQ ID NO: 1580878 - DNA, 15 bp, Homo sapiens
tatgtcctcccacac

SEQ ID NO: 1580879 - DNA, 15 bp, Homo sapiens
atgtcctcccacacc

SEQ ID NO: 1580880 - DNA, 15 bp, Homo sapiens
tgtcctcccacaccc

SEQ ID NO: 1580881 - DNA, 15 bp, Homo sapiens
gtcctcccacacccc

SEQ ID NO: 1580882 - DNA, 15 bp, Homo sapiens
tcctcccacaccccc

SEQ ID NO: 1580883 - DNA, 15 bp, Homo sapiens
cctcccacacccccc

SEQ ID NO: 1580884 - DNA, 15 bp, Homo sapiens
ctcccacaccccccc

SEQ ID NO: 1580885 - DNA, 15 bp, Homo sapiens
tcccacacccccccc

SEQ ID NO: 1580886 - DNA, 15 bp, Homo sapiens
cccacacccccccca

SEQ ID NO: 1580887 - DNA, 15 bp, Homo sapiens
ccacaccccccccat

SEQ ID NO: 1580888 - DNA, 15 bp, Homo sapiens
cacaccccccccata

SEQ ID NO: 1580889 - DNA, 15 bp, Homo sapiens
acaccccccccatac

SEQ ID NO: 1580890 - DNA, 15 bp, Homo sapiens
caccccccccatacc

SEQ ID NO: 1580891 - DNA, 15 bp, Homo sapiens
accccccccatacct

SEQ ID NO: 1580892 - DNA, 15 bp, Homo sapiens
ccccccccatacctt

SEQ ID NO: 1580893 - DNA, 15 bp, Homo sapiens
cccccccataccttt

SEQ ID NO: 1580894 - DNA, 15 bp, Homo sapiens
ccccccatacctttt

SEQ ID NO: 1580895 - DNA, 15 bp, Homo sapiens
cccccataccttttt

SEQ ID NO: 1580896 - DNA, 15 bp, Homo sapiens
ccccatacctttttt

SEQ ID NO: 1580897 - DNA, 15 bp, Homo sapiens
cccataccttttttg

SEQ ID NO: 1580898 - DNA, 15 bp, Homo sapiens
ccataccttttttga

SEQ ID NO: 1580899 - DNA, 15 bp, Homo sapiens
cataccttttttgaa

SEQ ID NO: 1580900 - DNA, 15 bp, Homo sapiens
ataccttttttgaag

SEQ ID NO: 1580901 - DNA, 15 bp, Homo sapiens
taccttttttgaagt

SEQ ID NO: 1580902 - DNA, 15 bp, Homo sapiens
accttttttgaagtc

SEQ ID NO: 1580903 - DNA, 15 bp, Homo sapiens
ccttttttgaagtcc

SEQ ID NO: 1580904 - DNA, 15 bp, Homo sapiens
cttttttgaagtcct

SEQ ID NO: 1580905 - DNA, 15 bp, Homo sapiens
ttttttgaagtccta

SEQ ID NO: 1580906 - DNA, 15 bp, Homo sapiens
tttttgaagtcctaa

SEQ ID NO: 1580907 - DNA, 15 bp, Homo sapiens
ttttgaagtcctaac

SEQ ID NO: 1580908 - DNA, 15 bp, Homo sapiens
tttgaagtcctaacc

SEQ ID NO: 1580909 - DNA, 15 bp, Homo sapiens
ttgaagtcctaaccc

SEQ ID NO: 1580910 - DNA, 15 bp, Homo sapiens
tgaagtcctaacccc

SEQ ID NO: 1580911 - DNA, 15 bp, Homo sapiens
gaagtcctaaccccc

SEQ ID NO: 1580912 - DNA, 15 bp, Homo sapiens
aagtcctaaccccca

SEQ ID NO: 1580913 - DNA, 15 bp, Homo sapiens
agtcctaacccccag

SEQ ID NO: 1580914 - DNA, 15 bp, Homo sapiens
gtcctaacccccagt

SEQ ID NO: 1580915 - DNA, 15 bp, Homo sapiens
tcctaacccccagtg

SEQ ID NO: 1580916 - DNA, 15 bp, Homo sapiens
cctaacccccagtgt

SEQ ID NO: 1580917 - DNA, 15 bp, Homo sapiens
ctaacccccagtgtg

SEQ ID NO: 1580918 - DNA, 15 bp, Homo sapiens
taacccccagtgtga

SEQ ID NO: 1580919 - DNA, 15 bp, Homo sapiens
aacccccagtgtgat

SEQ ID NO: 1580920 - DNA, 15 bp, Homo sapiens
acccccagtgtgatg

SEQ ID NO: 1580921 - DNA, 15 bp, Homo sapiens
cccccagtgtgatgg

SEQ ID NO: 1580922 - DNA, 15 bp, Homo sapiens
ccccagtgtgatggt

SEQ ID NO: 1580923 - DNA, 15 bp, Homo sapiens
cccagtgtgatggta

SEQ ID NO: 1580924 - DNA, 15 bp, Homo sapiens
ccagtgtgatggtat

SEQ ID NO: 1580925 - DNA, 15 bp, Homo sapiens
cagtgtgatggtatt

SEQ ID NO: 1580926 - DNA, 15 bp, Homo sapiens
agtgtgatggtattt

SEQ ID NO: 1580927 - DNA, 15 bp, Homo sapiens
gtgtgatggtatttg

SEQ ID NO: 1580928 - DNA, 15 bp, Homo sapiens
tgtgatggtatttgg

SEQ ID NO: 1580929 - DNA, 15 bp, Homo sapiens
gtgatggtatttgga

SEQ ID NO: 1580930 - DNA, 15 bp, Homo sapiens
tgatggtatttggag

SEQ ID NO: 1580931 - DNA, 15 bp, Homo sapiens
gatggtatttggaga

SEQ ID NO: 1580932 - DNA, 15 bp, Homo sapiens
atggtatttggagac

SEQ ID NO: 1580933 - DNA, 15 bp, Homo sapiens
tggtatttggagaca

SEQ ID NO: 1580934 - DNA, 15 bp, Homo sapiens
ggtatttggagacag

SEQ ID NO: 1580935 - DNA, 15 bp, Homo sapiens
gtatttggagacagg

SEQ ID NO: 1580936 - DNA, 15 bp, Homo sapiens
tatttggagacaggg

SEQ ID NO: 1580937 - DNA, 15 bp, Homo sapiens
atttggagacagggc

SEQ ID NO: 1580938 - DNA, 15 bp, Homo sapiens
tttggagacagggcc

SEQ ID NO: 1580939 - DNA, 15 bp, Homo sapiens
ttggagacagggcct

SEQ ID NO: 1580940 - DNA, 15 bp, Homo sapiens
tggagacagggcctt

SEQ ID NO: 1580941 - DNA, 15 bp, Homo sapiens
ggagacagggccttt

SEQ ID NO: 1580942 - DNA, 15 bp, Homo sapiens
gagacagggcctttg

SEQ ID NO: 1580943 - DNA, 15 bp, Homo sapiens
agacagggcctttgg

SEQ ID NO: 1580944 - DNA, 15 bp, Homo sapiens
gacagggcctttgga

SEQ ID NO: 1580945 - DNA, 15 bp, Homo sapiens
acagggcctttggaa

SEQ ID NO: 1580946 - DNA, 15 bp, Homo sapiens
cagggcctttggaag

SEQ ID NO: 1580947 - DNA, 15 bp, Homo sapiens
agggcctttggaagg

SEQ ID NO: 1580948 - DNA, 15 bp, Homo sapiens
gggcctttggaaggt

SEQ ID NO: 1580949 - DNA, 15 bp, Homo sapiens
ggcctttggaaggta

SEQ ID NO: 1580950 - DNA, 15 bp, Homo sapiens
gcctttggaaggtaa

SEQ ID NO: 1580951 - DNA, 15 bp, Homo sapiens
cctttggaaggtaat

SEQ ID NO: 1580952 - DNA, 15 bp, Homo sapiens
ctttggaaggtaatt

SEQ ID NO: 1580953 - DNA, 15 bp, Homo sapiens
tttggaaggtaatta

SEQ ID NO: 1580954 - DNA, 15 bp, Homo sapiens
ttggaaggtaattac

SEQ ID NO: 1580955 - DNA, 15 bp, Homo sapiens
tggaaggtaattaca

SEQ ID NO: 1580956 - DNA, 15 bp, Homo sapiens
ggaaggtaattacag

SEQ ID NO: 1580957 - DNA, 15 bp, Homo sapiens
gaaggtaattacagt

SEQ ID NO: 1580958 - DNA, 15 bp, Homo sapiens
aaggtaattacagtt

SEQ ID NO: 1580959 - DNA, 15 bp, Homo sapiens
aggtaattacagtta

SEQ ID NO: 1580960 - DNA, 15 bp, Homo sapiens
ggtaattacagttag

SEQ ID NO: 1580961 - DNA, 15 bp, Homo sapiens
gtaattacagttaga

SEQ ID NO: 1580962 - DNA, 15 bp, Homo sapiens
taattacagttagaa

SEQ ID NO: 1580963 - DNA, 15 bp, Homo sapiens
aattacagttagaag

SEQ ID NO: 1580964 - DNA, 15 bp, Homo sapiens
attacagttagaaga

SEQ ID NO: 1580965 - DNA, 15 bp, Homo sapiens
ttacagttagaagaa

SEQ ID NO: 1580966 - DNA, 15 bp, Homo sapiens
tacagttagaagaag

SEQ ID NO: 1580967 - DNA, 15 bp, Homo sapiens
acagttagaagaagt

SEQ ID NO: 1580968 - DNA, 15 bp, Homo sapiens
cagttagaagaagtc

SEQ ID NO: 1580969 - DNA, 15 bp, Homo sapiens
agttagaagaagtcg

SEQ ID NO: 1580970 - DNA, 15 bp, Homo sapiens
gttagaagaagtcgg

SEQ ID NO: 1580971 - DNA, 15 bp, Homo sapiens
ttagaagaagtcggg

SEQ ID NO: 1580972 - DNA, 15 bp, Homo sapiens
tagaagaagtcggga

SEQ ID NO: 1580973 - DNA, 15 bp, Homo sapiens
agaagaagtcgggag

SEQ ID NO: 1580974 - DNA, 15 bp, Homo sapiens
gaagaagtcgggagg

SEQ ID NO: 1580975 - DNA, 15 bp, Homo sapiens
aagaagtcgggaggg

SEQ ID NO: 1580976 - DNA, 15 bp, Homo sapiens
agaagtcgggagggt

SEQ ID NO: 1580977 - DNA, 15 bp, Homo sapiens
gaagtcgggagggtt

SEQ ID NO: 1580978 - DNA, 15 bp, Homo sapiens
aagtcgggagggttg

SEQ ID NO: 1580979 - DNA, 15 bp, Homo sapiens
agtcgggagggttgg

SEQ ID NO: 1580980 - DNA, 15 bp, Homo sapiens
gtcgggagggttggg

SEQ ID NO: 1580981 - DNA, 15 bp, Homo sapiens
tcgggagggttgggc

SEQ ID NO: 1580982 - DNA, 15 bp, Homo sapiens
cgggagggttgggcc

SEQ ID NO: 1580983 - DNA, 15 bp, Homo sapiens
gggagggttgggccc

SEQ ID NO: 1580984 - DNA, 15 bp, Homo sapiens
ggagggttgggccca

SEQ ID NO: 1580985 - DNA, 15 bp, Homo sapiens
gagggttgggcccag

SEQ ID NO: 1580986 - DNA, 15 bp, Homo sapiens
agggttgggcccagg

SEQ ID NO: 1580987 - DNA, 15 bp, Homo sapiens
gggttgggcccaggt

SEQ ID NO: 1580988 - DNA, 15 bp, Homo sapiens
ggttgggcccaggtc

SEQ ID NO: 1580989 - DNA, 15 bp, Homo sapiens
gttgggcccaggtct

SEQ ID NO: 1580990 - DNA, 15 bp, Homo sapiens
ttgggcccaggtctg

SEQ ID NO: 1580991 - DNA, 15 bp, Homo sapiens
tgggcccaggtctga

SEQ ID NO: 1580992 - DNA, 15 bp, Homo sapiens
gggcccaggtctgat

SEQ ID NO: 1580993 - DNA, 15 bp, Homo sapiens
ggcccaggtctgatt

SEQ ID NO: 1580994 - DNA, 15 bp, Homo sapiens
gcccaggtctgattg

SEQ ID NO: 1580995 - DNA, 15 bp, Homo sapiens
cccaggtctgattgg

SEQ ID NO: 1580996 - DNA, 15 bp, Homo sapiens
ccaggtctgattgga

SEQ ID NO: 1580997 - DNA, 15 bp, Homo sapiens
caggtctgattggat

SEQ ID NO: 1580998 - DNA, 15 bp, Homo sapiens
aggtctgattggatt

SEQ ID NO: 1580999 - DNA, 15 bp, Homo sapiens
ggtctgattggatta

SEQ ID NO: 1581000 - DNA, 15 bp, Homo sapiens
gtctgattggattag

SEQ ID NO: 1581001 - DNA, 15 bp, Homo sapiens
tctgattggattagt

SEQ ID NO: 1581002 - DNA, 15 bp, Homo sapiens
ctgattggattagtg

SEQ ID NO: 1581003 - DNA, 15 bp, Homo sapiens
tgattggattagtgc

SEQ ID NO: 1581004 - DNA, 15 bp, Homo sapiens
gattggattagtgcc

SEQ ID NO: 1581005 - DNA, 15 bp, Homo sapiens
attggattagtgccc

SEQ ID NO: 1581006 - DNA, 15 bp, Homo sapiens
ttggattagtgccct

SEQ ID NO: 1581007 - DNA, 15 bp, Homo sapiens
tggattagtgccctt

SEQ ID NO: 1581008 - DNA, 15 bp, Homo sapiens
ggattagtgccctta

SEQ ID NO: 1581009 - DNA, 15 bp, Homo sapiens
gattagtgcccttat

SEQ ID NO: 1581010 - DNA, 15 bp, Homo sapiens
attagtgcccttata

SEQ ID NO: 1581011 - DNA, 15 bp, Homo sapiens
ttagtgcccttatat

SEQ ID NO: 1581012 - DNA, 15 bp, Homo sapiens
tagtgcccttatatg

SEQ ID NO: 1581013 - DNA, 15 bp, Homo sapiens
agtgcccttatatga

SEQ ID NO: 1581014 - DNA, 15 bp, Homo sapiens
gtgcccttatatgaa

SEQ ID NO: 1581015 - DNA, 15 bp, Homo sapiens
tgcccttatatgaaa

SEQ ID NO: 1581016 - DNA, 15 bp, Homo sapiens
gcccttatatgaaaa

SEQ ID NO: 1581017 - DNA, 15 bp, Homo sapiens
cccttatatgaaaag

SEQ ID NO: 1581018 - DNA, 15 bp, Homo sapiens
cttatatgaaaagac

SEQ ID NO: 1581019 - DNA, 15 bp, Homo sapiens
ttatatgaaaagaca

SEQ ID NO: 1581020 - DNA, 15 bp, Homo sapiens
tatatgaaaagacac

SEQ ID NO: 1581021 - DNA, 15 bp, Homo sapiens
atatgaaaagacacc

SEQ ID NO: 1581022 - DNA, 15 bp, Homo sapiens
tatgaaaagacacca

SEQ ID NO: 1581023 - DNA, 15 bp, Homo sapiens
atgaaaagacaccag

SEQ ID NO: 1581024 - DNA, 15 bp, Homo sapiens
tgaaaagacaccagg

SEQ ID NO: 1581025 - DNA, 15 bp, Homo sapiens
gaaaagacaccagga

SEQ ID NO: 1581026 - DNA, 15 bp, Homo sapiens
aaaagacaccaggac

SEQ ID NO: 1581027 - DNA, 15 bp, Homo sapiens
aaagacaccaggacg

SEQ ID NO: 1581028 - DNA, 15 bp, Homo sapiens
aagacaccaggacgg

SEQ ID NO: 1581029 - DNA, 15 bp, Homo sapiens
agacaccaggacggg

SEQ ID NO: 1581030 - DNA, 15 bp, Homo sapiens
gacaccaggacgggc

SEQ ID NO: 1581031 - DNA, 15 bp, Homo sapiens
acaccaggacgggcg

SEQ ID NO: 1581032 - DNA, 15 bp, Homo sapiens
caccaggacgggcgc

SEQ ID NO: 1581033 - DNA, 15 bp, Homo sapiens
accaggacgggcgca

SEQ ID NO: 1581034 - DNA, 15 bp, Homo sapiens
ccaggacgggcgcag

SEQ ID NO: 1581035 - DNA, 15 bp, Homo sapiens
caggacgggcgcagt

SEQ ID NO: 1581036 - DNA, 15 bp, Homo sapiens
aggacgggcgcagtg

SEQ ID NO: 1581037 - DNA, 15 bp, Homo sapiens
ggacgggcgcagtgg

SEQ ID NO: 1581038 - DNA, 15 bp, Homo sapiens
gacgggcgcagtggc

SEQ ID NO: 1581039 - DNA, 15 bp, Homo sapiens
acgggcgcagtggct

SEQ ID NO: 1581040 - DNA, 15 bp, Homo sapiens
aggccaaggtgggtg

SEQ ID NO: 1581041 - DNA, 15 bp, Homo sapiens
ggccaaggtgggtgg

SEQ ID NO: 1581042 - DNA, 15 bp, Homo sapiens
gccaaggtgggtgga

SEQ ID NO: 1581043 - DNA, 15 bp, Homo sapiens
ccaaggtgggtggat

SEQ ID NO: 1581044 - DNA, 15 bp, Homo sapiens
caaggtgggtggatc

SEQ ID NO: 1581045 - DNA, 15 bp, Homo sapiens
aaggtgggtggatca

SEQ ID NO: 1581046 - DNA, 15 bp, Homo sapiens
ggtgggtggatcacg

SEQ ID NO: 1581047 - DNA, 15 bp, Homo sapiens
gtgggtggatcacga

SEQ ID NO: 1581048 - DNA, 15 bp, Homo sapiens
tgggtggatcacgag

SEQ ID NO: 1581049 - DNA, 15 bp, Homo sapiens
agcctggccaatgta

SEQ ID NO: 1581050 - DNA, 15 bp, Homo sapiens
gcctggccaatgtag

SEQ ID NO: 1581051 - DNA, 15 bp, Homo sapiens
cctggccaatgtagt

SEQ ID NO: 1581052 - DNA, 15 bp, Homo sapiens
ctggccaatgtagtg

SEQ ID NO: 1581053 - DNA, 15 bp, Homo sapiens
tggccaatgtagtga

SEQ ID NO: 1581054 - DNA, 15 bp, Homo sapiens
ggccaatgtagtgaa

SEQ ID NO: 1581055 - DNA, 15 bp, Homo sapiens
gccaatgtagtgaaa

SEQ ID NO: 1581056 - DNA, 15 bp, Homo sapiens
ccaatgtagtgaaac

SEQ ID NO: 1581057 - DNA, 15 bp, Homo sapiens
caatgtagtgaaaca

SEQ ID NO: 1581058 - DNA, 15 bp, Homo sapiens
aatgtagtgaaacac

SEQ ID NO: 1581059 - DNA, 15 bp, Homo sapiens
atgtagtgaaacacc

SEQ ID NO: 1581060 - DNA, 15 bp, Homo sapiens
tgtagtgaaacacca

SEQ ID NO: 1581061 - DNA, 15 bp, Homo sapiens
gtagtgaaacaccat

SEQ ID NO: 1581062 - DNA, 15 bp, Homo sapiens
tagtgaaacaccatc

SEQ ID NO: 1581063 - DNA, 15 bp, Homo sapiens
tgaaacaccatctct

SEQ ID NO: 1581064 - DNA, 15 bp, Homo sapiens
gaaacaccatctcta

SEQ ID NO: 1581065 - DNA, 15 bp, Homo sapiens
aaacaccatctctac

SEQ ID NO: 1581066 - DNA, 15 bp, Homo sapiens
aacaccatctctact

SEQ ID NO: 1581067 - DNA, 15 bp, Homo sapiens
acaccatctctacta

SEQ ID NO: 1581068 - DNA, 15 bp, Homo sapiens
caccatctctactaa

SEQ ID NO: 1581069 - DNA, 15 bp, Homo sapiens
accatctctactaaa

SEQ ID NO: 1581070 - DNA, 15 bp, Homo sapiens
ctgggtgtggtagcg

SEQ ID NO: 1581071 - DNA, 15 bp, Homo sapiens
tgggtgtggtagcgg

SEQ ID NO: 1581072 - DNA, 15 bp, Homo sapiens
gggtgtggtagcggg

SEQ ID NO: 1581073 - DNA, 15 bp, Homo sapiens
ggtgtggtagcgggc

SEQ ID NO: 1581074 - DNA, 15 bp, Homo sapiens
gtgtggtagcgggct

SEQ ID NO: 1581075 - DNA, 15 bp, Homo sapiens
tgtggtagcgggctc

SEQ ID NO: 1581076 - DNA, 15 bp, Homo sapiens
gtggtagcgggctcc

SEQ ID NO: 1581077 - DNA, 15 bp, Homo sapiens
tggtagcgggctcct

SEQ ID NO: 1581078 - DNA, 15 bp, Homo sapiens
ggtagcgggctcctg

SEQ ID NO: 1581079 - DNA, 15 bp, Homo sapiens
gtagcgggctcctgt

SEQ ID NO: 1581080 - DNA, 15 bp, Homo sapiens
tagcgggctcctgtc

SEQ ID NO: 1581081 - DNA, 15 bp, Homo sapiens
agcgggctcctgtca

SEQ ID NO: 1581082 - DNA, 15 bp, Homo sapiens
gcgggctcctgtcat

SEQ ID NO: 1581083 - DNA, 15 bp, Homo sapiens
cgggctcctgtcatc

SEQ ID NO: 1581084 - DNA, 15 bp, Homo sapiens
gggctcctgtcatcc

SEQ ID NO: 1581085 - DNA, 15 bp, Homo sapiens
ggctcctgtcatcca

SEQ ID NO: 1581086 - DNA, 15 bp, Homo sapiens
gctcctgtcatccaa

SEQ ID NO: 1581087 - DNA, 15 bp, Homo sapiens
ctcctgtcatccaag

SEQ ID NO: 1581088 - DNA, 15 bp, Homo sapiens
tcctgtcatccaagc

SEQ ID NO: 1581089 - DNA, 15 bp, Homo sapiens
cctgtcatccaagct

SEQ ID NO: 1581090 - DNA, 15 bp, Homo sapiens
ctgtcatccaagcta

SEQ ID NO: 1581091 - DNA, 15 bp, Homo sapiens
tgtcatccaagctac

SEQ ID NO: 1581092 - DNA, 15 bp, Homo sapiens
gtcatccaagctact

SEQ ID NO: 1581093 - DNA, 15 bp, Homo sapiens
tcatccaagctactc

SEQ ID NO: 1581094 - DNA, 15 bp, Homo sapiens
catccaagctactcg

SEQ ID NO: 1581095 - DNA, 15 bp, Homo sapiens
atccaagctactcgg

SEQ ID NO: 1581096 - DNA, 15 bp, Homo sapiens
tccaagctactcggg

SEQ ID NO: 1581097 - DNA, 15 bp, Homo sapiens
ccaagctactcggga

SEQ ID NO: 1581098 - DNA, 15 bp, Homo sapiens
caagctactcgggag

SEQ ID NO: 1581099 - DNA, 15 bp, Homo sapiens
aagctactcgggagg

SEQ ID NO: 1581100 - DNA, 15 bp, Homo sapiens
agctactcgggaggg

SEQ ID NO: 1581101 - DNA, 15 bp, Homo sapiens
gctactcgggagggt

SEQ ID NO: 1581102 - DNA, 15 bp, Homo sapiens
ctactcgggagggtg

SEQ ID NO: 1581103 - DNA, 15 bp, Homo sapiens
tactcgggagggtga

SEQ ID NO: 1581104 - DNA, 15 bp, Homo sapiens
actcgggagggtgag

SEQ ID NO: 1581105 - DNA, 15 bp, Homo sapiens
ctcgggagggtgagg

SEQ ID NO: 1581106 - DNA, 15 bp, Homo sapiens
tcgggagggtgaggc

SEQ ID NO: 1581107 - DNA, 15 bp, Homo sapiens
cgggagggtgaggca

SEQ ID NO: 1581108 - DNA, 15 bp, Homo sapiens
cttgaacccgggagt

SEQ ID NO: 1581109 - DNA, 15 bp, Homo sapiens
ttgaacccgggagtt

SEQ ID NO: 1581110 - DNA, 15 bp, Homo sapiens
tgaacccgggagttg

SEQ ID NO: 1581111 - DNA, 15 bp, Homo sapiens
gaacccgggagttgg

SEQ ID NO: 1581112 - DNA, 15 bp, Homo sapiens
aacccgggagttgga

SEQ ID NO: 1581113 - DNA, 15 bp, Homo sapiens
acccgggagttggag

SEQ ID NO: 1581114 - DNA, 15 bp, Homo sapiens
cccgggagttggagg

SEQ ID NO: 1581115 - DNA, 15 bp, Homo sapiens
ccgggagttggaggt

SEQ ID NO: 1581116 - DNA, 15 bp, Homo sapiens
cgggagttggaggtt

SEQ ID NO: 1581117 - DNA, 15 bp, Homo sapiens
gggagttggaggttg

SEQ ID NO: 1581118 - DNA, 15 bp, Homo sapiens
ggagttggaggttgc

SEQ ID NO: 1581119 - DNA, 15 bp, Homo sapiens
gagttggaggttgca

SEQ ID NO: 1581120 - DNA, 15 bp, Homo sapiens
agttggaggttgcag

SEQ ID NO: 1581121 - DNA, 15 bp, Homo sapiens
gttggaggttgcagt

SEQ ID NO: 1581122 - DNA, 15 bp, Homo sapiens
ttggaggttgcagtg

SEQ ID NO: 1581123 - DNA, 15 bp, Homo sapiens
cagtgagcccagatt

SEQ ID NO: 1581124 - DNA, 15 bp, Homo sapiens
agtgagcccagattg

SEQ ID NO: 1581125 - DNA, 15 bp, Homo sapiens
gtgagcccagattgt

SEQ ID NO: 1581126 - DNA, 15 bp, Homo sapiens
tgagcccagattgtg

SEQ ID NO: 1581127 - DNA, 15 bp, Homo sapiens
gagcccagattgtgc

SEQ ID NO: 1581128 - DNA, 15 bp, Homo sapiens
agcccagattgtgcc

SEQ ID NO: 1581129 - DNA, 15 bp, Homo sapiens
gcccagattgtgcca

SEQ ID NO: 1581130 - DNA, 15 bp, Homo sapiens
cccagattgtgccac

SEQ ID NO: 1581131 - DNA, 15 bp, Homo sapiens
ccagattgtgccact

SEQ ID NO: 1581132 - DNA, 15 bp, Homo sapiens
cagattgtgccactg

SEQ ID NO: 1581133 - DNA, 15 bp, Homo sapiens
tctgtctcaaaaaag

SEQ ID NO: 1581134 - DNA, 15 bp, Homo sapiens
ctgtctcaaaaaaga

SEQ ID NO: 1581135 - DNA, 15 bp, Homo sapiens
tgtctcaaaaaagaa

SEQ ID NO: 1581136 - DNA, 15 bp, Homo sapiens
gtctcaaaaaagaaa

SEQ ID NO: 1581137 - DNA, 15 bp, Homo sapiens
tctcaaaaaagaaaa

SEQ ID NO: 1581138 - DNA, 15 bp, Homo sapiens
ctcaaaaaagaaaaa

SEQ ID NO: 1581139 - DNA, 15 bp, Homo sapiens
aaaaaaaagagacac

SEQ ID NO: 1581140 - DNA, 15 bp, Homo sapiens
aaaaaaagagacacc

SEQ ID NO: 1581141 - DNA, 15 bp, Homo sapiens
aaaaaagagacacca

SEQ ID NO: 1581142 - DNA, 15 bp, Homo sapiens
aaaaagagacaccag

SEQ ID NO: 1581143 - DNA, 15 bp, Homo sapiens
aaaagagacaccaga

SEQ ID NO: 1581144 - DNA, 15 bp, Homo sapiens
aaagagacaccagag

SEQ ID NO: 1581145 - DNA, 15 bp, Homo sapiens
aagagacaccagaga

SEQ ID NO: 1581146 - DNA, 15 bp, Homo sapiens
agagacaccagagag

SEQ ID NO: 1581147 - DNA, 15 bp, Homo sapiens
gagacaccagagagc

SEQ ID NO: 1581148 - DNA, 15 bp, Homo sapiens
agacaccagagagct

SEQ ID NO: 1581149 - DNA, 15 bp, Homo sapiens
gacaccagagagctt

SEQ ID NO: 1581150 - DNA, 15 bp, Homo sapiens
acaccagagagcttg

SEQ ID NO: 1581151 - DNA, 15 bp, Homo sapiens
caccagagagcttgt

SEQ ID NO: 1581152 - DNA, 15 bp, Homo sapiens
accagagagcttgtt

SEQ ID NO: 1581153 - DNA, 15 bp, Homo sapiens
ccagagagcttgtta

SEQ ID NO: 1581154 - DNA, 15 bp, Homo sapiens
cagagagcttgttag

SEQ ID NO: 1581155 - DNA, 15 bp, Homo sapiens
agagagcttgttaga

SEQ ID NO: 1581156 - DNA, 15 bp, Homo sapiens
gagagcttgttagaa

SEQ ID NO: 1581157 - DNA, 15 bp, Homo sapiens
agagcttgttagaag

SEQ ID NO: 1581158 - DNA, 15 bp, Homo sapiens
gagcttgttagaaga

SEQ ID NO: 1581159 - DNA, 15 bp, Homo sapiens
agcttgttagaagag

SEQ ID NO: 1581160 - DNA, 15 bp, Homo sapiens
gcttgttagaagagg

SEQ ID NO: 1581161 - DNA, 15 bp, Homo sapiens
cttgttagaagaggt

SEQ ID NO: 1581162 - DNA, 15 bp, Homo sapiens
ttgttagaagaggtc

SEQ ID NO: 1581163 - DNA, 15 bp, Homo sapiens
tgttagaagaggtca

SEQ ID NO: 1581164 - DNA, 15 bp, Homo sapiens
gttagaagaggtcat

SEQ ID NO: 1581165 - DNA, 15 bp, Homo sapiens
ttagaagaggtcatg

SEQ ID NO: 1581166 - DNA, 15 bp, Homo sapiens
tagaagaggtcatgt

SEQ ID NO: 1581167 - DNA, 15 bp, Homo sapiens
agaagaggtcatgtg

SEQ ID NO: 1581168 - DNA, 15 bp, Homo sapiens
gaagaggtcatgtga

SEQ ID NO: 1581169 - DNA, 15 bp, Homo sapiens
aagaggtcatgtgag

SEQ ID NO: 1581170 - DNA, 15 bp, Homo sapiens
agaggtcatgtgagc

SEQ ID NO: 1581171 - DNA, 15 bp, Homo sapiens
gaggtcatgtgagca

SEQ ID NO: 1581172 - DNA, 15 bp, Homo sapiens
aggtcatgtgagcac

SEQ ID NO: 1581173 - DNA, 15 bp, Homo sapiens
ggtcatgtgagcaca

SEQ ID NO: 1581174 - DNA, 15 bp, Homo sapiens
gtcatgtgagcacac

SEQ ID NO: 1581175 - DNA, 15 bp, Homo sapiens
tcatgtgagcacaca

SEQ ID NO: 1581176 - DNA, 15 bp, Homo sapiens
catgtgagcacacag

SEQ ID NO: 1581177 - DNA, 15 bp, Homo sapiens
atgtgagcacacagt

SEQ ID NO: 1581178 - DNA, 15 bp, Homo sapiens
tgtgagcacacagtt

SEQ ID NO: 1581179 - DNA, 15 bp, Homo sapiens
gtgagcacacagtta

SEQ ID NO: 1581180 - DNA, 15 bp, Homo sapiens
tgagcacacagttag

SEQ ID NO: 1581181 - DNA, 15 bp, Homo sapiens
gagcacacagttaga

SEQ ID NO: 1581182 - DNA, 15 bp, Homo sapiens
agcacacagttagaa

SEQ ID NO: 1581183 - DNA, 15 bp, Homo sapiens
gcacacagttagaag

SEQ ID NO: 1581184 - DNA, 15 bp, Homo sapiens
cacacagttagaaga

SEQ ID NO: 1581185 - DNA, 15 bp, Homo sapiens
acacagttagaagac

SEQ ID NO: 1581186 - DNA, 15 bp, Homo sapiens
cacagttagaagacc

SEQ ID NO: 1581187 - DNA, 15 bp, Homo sapiens
acagttagaagacct

SEQ ID NO: 1581188 - DNA, 15 bp, Homo sapiens
cagttagaagacctt

SEQ ID NO: 1581189 - DNA, 15 bp, Homo sapiens
agttagaagaccttc

SEQ ID NO: 1581190 - DNA, 15 bp, Homo sapiens
gttagaagaccttca

SEQ ID NO: 1581191 - DNA, 15 bp, Homo sapiens
ttagaagaccttcaa

SEQ ID NO: 1581192 - DNA, 15 bp, Homo sapiens
tagaagaccttcaag

SEQ ID NO: 1581193 - DNA, 15 bp, Homo sapiens
agaagaccttcaagc

SEQ ID NO: 1581194 - DNA, 15 bp, Homo sapiens
gaagaccttcaagcc

SEQ ID NO: 1581195 - DNA, 15 bp, Homo sapiens
aagaccttcaagcca

SEQ ID NO: 1581196 - DNA, 15 bp, Homo sapiens
agaccttcaagccaa

SEQ ID NO: 1581197 - DNA, 15 bp, Homo sapiens
gaccttcaagccaaa

SEQ ID NO: 1581198 - DNA, 15 bp, Homo sapiens
accttcaagccaaag

SEQ ID NO: 1581199 - DNA, 15 bp, Homo sapiens
ccttcaagccaaaga

SEQ ID NO: 1581200 - DNA, 15 bp, Homo sapiens
cttcaagccaaagaa

SEQ ID NO: 1581201 - DNA, 15 bp, Homo sapiens
ttcaagccaaagaag

SEQ ID NO: 1581202 - DNA, 15 bp, Homo sapiens
tcaagccaaagaaga

SEQ ID NO: 1581203 - DNA, 15 bp, Homo sapiens
caagccaaagaagag

SEQ ID NO: 1581204 - DNA, 15 bp, Homo sapiens
aagccaaagaagagg

SEQ ID NO: 1581205 - DNA, 15 bp, Homo sapiens
agccaaagaagaggc

SEQ ID NO: 1581206 - DNA, 15 bp, Homo sapiens
gccaaagaagaggcc

SEQ ID NO: 1581207 - DNA, 15 bp, Homo sapiens
ccaaagaagaggcct

SEQ ID NO: 1581208 - DNA, 15 bp, Homo sapiens
caaagaagaggcctg

SEQ ID NO: 1581209 - DNA, 15 bp, Homo sapiens
aaagaagaggcctga

SEQ ID NO: 1581210 - DNA, 15 bp, Homo sapiens
aagaagaggcctgag

SEQ ID NO: 1581211 - DNA, 15 bp, Homo sapiens
agaagaggcctgaga

SEQ ID NO: 1581212 - DNA, 15 bp, Homo sapiens
gaagaggcctgagat

SEQ ID NO: 1581213 - DNA, 15 bp, Homo sapiens
aagaggcctgagatt

SEQ ID NO: 1581214 - DNA, 15 bp, Homo sapiens
agaggcctgagattg

SEQ ID NO: 1581215 - DNA, 15 bp, Homo sapiens
gaggcctgagattga

SEQ ID NO: 1581216 - DNA, 15 bp, Homo sapiens
aggcctgagattgaa

SEQ ID NO: 1581217 - DNA, 15 bp, Homo sapiens
ggcctgagattgaaa

SEQ ID NO: 1581218 - DNA, 15 bp, Homo sapiens
gcctgagattgaaac

SEQ ID NO: 1581219 - DNA, 15 bp, Homo sapiens
cctgagattgaaacc

SEQ ID NO: 1581220 - DNA, 15 bp, Homo sapiens
ctgagattgaaacct

SEQ ID NO: 1581221 - DNA, 15 bp, Homo sapiens
tgagattgaaaccta

SEQ ID NO: 1581222 - DNA, 15 bp, Homo sapiens
gagattgaaacctac

SEQ ID NO: 1581223 - DNA, 15 bp, Homo sapiens
agattgaaacctacc

SEQ ID NO: 1581224 - DNA, 15 bp, Homo sapiens
gattgaaacctacct

SEQ ID NO: 1581225 - DNA, 15 bp, Homo sapiens
attgaaacctacctt

SEQ ID NO: 1581226 - DNA, 15 bp, Homo sapiens
ttgaaacctaccttg

SEQ ID NO: 1581227 - DNA, 15 bp, Homo sapiens
tgaaacctaccttgc

SEQ ID NO: 1581228 - DNA, 15 bp, Homo sapiens
gaaacctaccttgca

SEQ ID NO: 1581229 - DNA, 15 bp, Homo sapiens
aaacctaccttgcag

SEQ ID NO: 1581230 - DNA, 15 bp, Homo sapiens
aacctaccttgcagg

SEQ ID NO: 1581231 - DNA, 15 bp, Homo sapiens
acctaccttgcaggt

SEQ ID NO: 1581232 - DNA, 15 bp, Homo sapiens
cctaccttgcaggta

SEQ ID NO: 1581233 - DNA, 15 bp, Homo sapiens
ctaccttgcaggtac

SEQ ID NO: 1581234 - DNA, 15 bp, Homo sapiens
taccttgcaggtacc

SEQ ID NO: 1581235 - DNA, 15 bp, Homo sapiens
accttgcaggtacct

SEQ ID NO: 1581236 - DNA, 15 bp, Homo sapiens
ccttgcaggtacctt

SEQ ID NO: 1581237 - DNA, 15 bp, Homo sapiens
cttgcaggtacctta

SEQ ID NO: 1581238 - DNA, 15 bp, Homo sapiens
ttgcaggtaccttaa

SEQ ID NO: 1581239 - DNA, 15 bp, Homo sapiens
tgcaggtaccttaat

SEQ ID NO: 1581240 - DNA, 15 bp, Homo sapiens
gcaggtaccttaatt

SEQ ID NO: 1581241 - DNA, 15 bp, Homo sapiens
caggtaccttaattt

SEQ ID NO: 1581242 - DNA, 15 bp, Homo sapiens
aggtaccttaatttt

SEQ ID NO: 1581243 - DNA, 15 bp, Homo sapiens
ggtaccttaattttg

SEQ ID NO: 1581244 - DNA, 15 bp, Homo sapiens
gtaccttaattttgg

SEQ ID NO: 1581245 - DNA, 15 bp, Homo sapiens
taccttaattttgga

SEQ ID NO: 1581246 - DNA, 15 bp, Homo sapiens
accttaattttggac

SEQ ID NO: 1581247 - DNA, 15 bp, Homo sapiens
ccttaattttggact

SEQ ID NO: 1581248 - DNA, 15 bp, Homo sapiens
cttaattttggactt

SEQ ID NO: 1581249 - DNA, 15 bp, Homo sapiens
ttaattttggacttc

SEQ ID NO: 1581250 - DNA, 15 bp, Homo sapiens
taattttggacttcc

SEQ ID NO: 1581251 - DNA, 15 bp, Homo sapiens
aattttggacttccc

SEQ ID NO: 1581252 - DNA, 15 bp, Homo sapiens
attttggacttccca

SEQ ID NO: 1581253 - DNA, 15 bp, Homo sapiens
ttttggacttcccag

SEQ ID NO: 1581254 - DNA, 15 bp, Homo sapiens
tttggacttcccagc

SEQ ID NO: 1581255 - DNA, 15 bp, Homo sapiens
ttggacttcccagcc

SEQ ID NO: 1581256 - DNA, 15 bp, Homo sapiens
tggacttcccagcct

SEQ ID NO: 1581257 - DNA, 15 bp, Homo sapiens
ggacttcccagcctc

SEQ ID NO: 1581258 - DNA, 15 bp, Homo sapiens
gacttcccagcctcc

SEQ ID NO: 1581259 - DNA, 15 bp, Homo sapiens
acttcccagcctcca

SEQ ID NO: 1581260 - DNA, 15 bp, Homo sapiens
cttcccagcctccaa

SEQ ID NO: 1581261 - DNA, 15 bp, Homo sapiens
ttcccagcctccaaa

SEQ ID NO: 1581262 - DNA, 15 bp, Homo sapiens
tcccagcctccaaaa

SEQ ID NO: 1581263 - DNA, 15 bp, Homo sapiens
cccagcctccaaaac

SEQ ID NO: 1581264 - DNA, 15 bp, Homo sapiens
ccagcctccaaaact

SEQ ID NO: 1581265 - DNA, 15 bp, Homo sapiens
cagcctccaaaactg

SEQ ID NO: 1581266 - DNA, 15 bp, Homo sapiens
agcctccaaaactgt

SEQ ID NO: 1581267 - DNA, 15 bp, Homo sapiens
gcctccaaaactgtg

SEQ ID NO: 1581268 - DNA, 15 bp, Homo sapiens
cctccaaaactgtga

SEQ ID NO: 1581269 - DNA, 15 bp, Homo sapiens
ctccaaaactgtgag

SEQ ID NO: 1581270 - DNA, 15 bp, Homo sapiens
tccaaaactgtgaga

SEQ ID NO: 1581271 - DNA, 15 bp, Homo sapiens
ccaaaactgtgagaa

SEQ ID NO: 1581272 - DNA, 15 bp, Homo sapiens
caaaactgtgagaaa

SEQ ID NO: 1581273 - DNA, 15 bp, Homo sapiens
aaaactgtgagaaat

SEQ ID NO: 1581274 - DNA, 15 bp, Homo sapiens
aaactgtgagaaata

SEQ ID NO: 1581275 - DNA, 15 bp, Homo sapiens
aactgtgagaaataa

SEQ ID NO: 1581276 - DNA, 15 bp, Homo sapiens
actgtgagaaataag

SEQ ID NO: 1581277 - DNA, 15 bp, Homo sapiens
ctgtgagaaataagt

SEQ ID NO: 1581278 - DNA, 15 bp, Homo sapiens
tgtgagaaataagtt

SEQ ID NO: 1581279 - DNA, 15 bp, Homo sapiens
gtgagaaataagttt

SEQ ID NO: 1581280 - DNA, 15 bp, Homo sapiens
tgagaaataagtttc

SEQ ID NO: 1581281 - DNA, 15 bp, Homo sapiens
gagaaataagtttct

SEQ ID NO: 1581282 - DNA, 15 bp, Homo sapiens
agaaataagtttctg

SEQ ID NO: 1581283 - DNA, 15 bp, Homo sapiens
gaaataagtttctgt

SEQ ID NO: 1581284 - DNA, 15 bp, Homo sapiens
aaataagtttctgtt

SEQ ID NO: 1581285 - DNA, 15 bp, Homo sapiens
aataagtttctgtta

SEQ ID NO: 1581286 - DNA, 15 bp, Homo sapiens
ataagtttctgttaa

SEQ ID NO: 1581287 - DNA, 15 bp, Homo sapiens
taagtttctgttaag

SEQ ID NO: 1581288 - DNA, 15 bp, Homo sapiens
aagtttctgttaagt

SEQ ID NO: 1581289 - DNA, 15 bp, Homo sapiens
agtttctgttaagtc

SEQ ID NO: 1581290 - DNA, 15 bp, Homo sapiens
gtttctgttaagtca

SEQ ID NO: 1581291 - DNA, 15 bp, Homo sapiens
tttctgttaagtcac

SEQ ID NO: 1581292 - DNA, 15 bp, Homo sapiens
ttctgttaagtcact

SEQ ID NO: 1581293 - DNA, 15 bp, Homo sapiens
tctgttaagtcactc

SEQ ID NO: 1581294 - DNA, 15 bp, Homo sapiens
ctgttaagtcactca

SEQ ID NO: 1581295 - DNA, 15 bp, Homo sapiens
tgttaagtcactcag

SEQ ID NO: 1581296 - DNA, 15 bp, Homo sapiens
gttaagtcactcagt

SEQ ID NO: 1581297 - DNA, 15 bp, Homo sapiens
ttaagtcactcagtc

SEQ ID NO: 1581298 - DNA, 15 bp, Homo sapiens
taagtcactcagtct

SEQ ID NO: 1581299 - DNA, 15 bp, Homo sapiens
aagtcactcagtctg

SEQ ID NO: 1581300 - DNA, 15 bp, Homo sapiens
agtcactcagtctgt

SEQ ID NO: 1581301 - DNA, 15 bp, Homo sapiens
gtcactcagtctgtg

SEQ ID NO: 1581302 - DNA, 15 bp, Homo sapiens
tcactcagtctgtgg

SEQ ID NO: 1581303 - DNA, 15 bp, Homo sapiens
cactcagtctgtggt

SEQ ID NO: 1581304 - DNA, 15 bp, Homo sapiens
actcagtctgtggta

SEQ ID NO: 1581305 - DNA, 15 bp, Homo sapiens
ctcagtctgtggtat

SEQ ID NO: 1581306 - DNA, 15 bp, Homo sapiens
tcagtctgtggtatt

SEQ ID NO: 1581307 - DNA, 15 bp, Homo sapiens
cagtctgtggtattt

SEQ ID NO: 1581308 - DNA, 15 bp, Homo sapiens
agtctgtggtatttt

SEQ ID NO: 1581309 - DNA, 15 bp, Homo sapiens
gtctgtggtattttg

SEQ ID NO: 1581310 - DNA, 15 bp, Homo sapiens
tctgtggtattttgt

SEQ ID NO: 1581311 - DNA, 15 bp, Homo sapiens
ctgtggtattttgtt

SEQ ID NO: 1581312 - DNA, 15 bp, Homo sapiens
tgtggtattttgtta

SEQ ID NO: 1581313 - DNA, 15 bp, Homo sapiens
gtggtattttgttat

SEQ ID NO: 1581314 - DNA, 15 bp, Homo sapiens
tggtattttgttatg

SEQ ID NO: 1581315 - DNA, 15 bp, Homo sapiens
ggtattttgttatgg

SEQ ID NO: 1581316 - DNA, 15 bp, Homo sapiens
gtattttgttatggc

SEQ ID NO: 1581317 - DNA, 15 bp, Homo sapiens
tattttgttatggca

SEQ ID NO: 1581318 - DNA, 15 bp, Homo sapiens
attttgttatggcag

SEQ ID NO: 1581319 - DNA, 15 bp, Homo sapiens
ttttgttatggcagc

SEQ ID NO: 1581320 - DNA, 15 bp, Homo sapiens
tttgttatggcagcc

SEQ ID NO: 1581321 - DNA, 15 bp, Homo sapiens
ttgttatggcagcct

SEQ ID NO: 1581322 - DNA, 15 bp, Homo sapiens
tgttatggcagcctg

SEQ ID NO: 1581323 - DNA, 15 bp, Homo sapiens
gttatggcagcctga

SEQ ID NO: 1581324 - DNA, 15 bp, Homo sapiens
ttatggcagcctgag

SEQ ID NO: 1581325 - DNA, 15 bp, Homo sapiens
tatggcagcctgagc

SEQ ID NO: 1581326 - DNA, 15 bp, Homo sapiens
atggcagcctgagca

SEQ ID NO: 1581327 - DNA, 15 bp, Homo sapiens
tggcagcctgagcag

SEQ ID NO: 1581328 - DNA, 15 bp, Homo sapiens
ggcagcctgagcagg

SEQ ID NO: 1581329 - DNA, 15 bp, Homo sapiens
gcagcctgagcaggt

SEQ ID NO: 1581330 - DNA, 15 bp, Homo sapiens
cagcctgagcaggta

SEQ ID NO: 1581331 - DNA, 15 bp, Homo sapiens
agcctgagcaggtag

SEQ ID NO: 1581332 - DNA, 15 bp, Homo sapiens
gcctgagcaggtagt

SEQ ID NO: 1581333 - DNA, 15 bp, Homo sapiens
cctgagcaggtagtt

SEQ ID NO: 1581334 - DNA, 15 bp, Homo sapiens
ctgagcaggtagttg

SEQ ID NO: 1581335 - DNA, 15 bp, Homo sapiens
tgagcaggtagttgt

SEQ ID NO: 1581336 - DNA, 15 bp, Homo sapiens
gagcaggtagttgtt

SEQ ID NO: 1581337 - DNA, 15 bp, Homo sapiens
agcaggtagttgttc

SEQ ID NO: 1581338 - DNA, 15 bp, Homo sapiens
gcaggtagttgttct

SEQ ID NO: 1581339 - DNA, 15 bp, Homo sapiens
caggtagttgttctt

SEQ ID NO: 1581340 - DNA, 15 bp, Homo sapiens
aggtagttgttcttt

SEQ ID NO: 1581341 - DNA, 15 bp, Homo sapiens
ggtagttgttctttc

SEQ ID NO: 1581342 - DNA, 15 bp, Homo sapiens
gtagttgttctttca

SEQ ID NO: 1581343 - DNA, 15 bp, Homo sapiens
tagttgttctttcag

SEQ ID NO: 1581344 - DNA, 15 bp, Homo sapiens
agttgttctttcaga

SEQ ID NO: 1581345 - DNA, 15 bp, Homo sapiens
gttgttctttcagaa

SEQ ID NO: 1581346 - DNA, 15 bp, Homo sapiens
ttgttctttcagaag

SEQ ID NO: 1581347 - DNA, 15 bp, Homo sapiens
tgttctttcagaagg

SEQ ID NO: 1581348 - DNA, 15 bp, Homo sapiens
gttctttcagaaggt

SEQ ID NO: 1581349 - DNA, 15 bp, Homo sapiens
ttctttcagaaggtg

SEQ ID NO: 1581350 - DNA, 15 bp, Homo sapiens
tctttcagaaggtgt

SEQ ID NO: 1581351 - DNA, 15 bp, Homo sapiens
ctttcagaaggtgtt

SEQ ID NO: 1581352 - DNA, 15 bp, Homo sapiens
tttcagaaggtgttg

SEQ ID NO: 1581353 - DNA, 15 bp, Homo sapiens
ttcagaaggtgttga

SEQ ID NO: 1581354 - DNA, 15 bp, Homo sapiens
tcagaaggtgttgat

SEQ ID NO: 1581355 - DNA, 15 bp, Homo sapiens
cagaaggtgttgata

SEQ ID NO: 1581356 - DNA, 15 bp, Homo sapiens
agaaggtgttgataa

SEQ ID NO: 1581357 - DNA, 15 bp, Homo sapiens
gaaggtgttgataat

SEQ ID NO: 1581358 - DNA, 15 bp, Homo sapiens
aaggtgttgataata

SEQ ID NO: 1581359 - DNA, 15 bp, Homo sapiens
aggtgttgataataa

SEQ ID NO: 1581360 - DNA, 15 bp, Homo sapiens
ggtgttgataataac

SEQ ID NO: 1581361 - DNA, 15 bp, Homo sapiens
gtgttgataataacc

SEQ ID NO: 1581362 - DNA, 15 bp, Homo sapiens
tgttgataataacca

SEQ ID NO: 1581363 - DNA, 15 bp, Homo sapiens
gttgataataaccac

SEQ ID NO: 1581364 - DNA, 15 bp, Homo sapiens
ttgataataaccaca

SEQ ID NO: 1581365 - DNA, 15 bp, Homo sapiens
tgataataaccacat

SEQ ID NO: 1581366 - DNA, 15 bp, Homo sapiens
gataataaccacatg

SEQ ID NO: 1581367 - DNA, 15 bp, Homo sapiens
ataataaccacatgc

SEQ ID NO: 1581368 - DNA, 15 bp, Homo sapiens
taataaccacatgca

SEQ ID NO: 1581369 - DNA, 15 bp, Homo sapiens
aataaccacatgcaa

SEQ ID NO: 1581370 - DNA, 15 bp, Homo sapiens
ataaccacatgcaac

SEQ ID NO: 1581371 - DNA, 15 bp, Homo sapiens
taaccacatgcaaca

SEQ ID NO: 1581372 - DNA, 15 bp, Homo sapiens
aaccacatgcaacac

SEQ ID NO: 1581373 - DNA, 15 bp, Homo sapiens
accacatgcaacacc

SEQ ID NO: 1581374 - DNA, 15 bp, Homo sapiens
ccacatgcaacacca

SEQ ID NO: 1581375 - DNA, 15 bp, Homo sapiens
cacatgcaacaccaa

SEQ ID NO: 1581376 - DNA, 15 bp, Homo sapiens
acatgcaacaccaag

SEQ ID NO: 1581377 - DNA, 15 bp, Homo sapiens
catgcaacaccaagt

SEQ ID NO: 1581378 - DNA, 15 bp, Homo sapiens
atgcaacaccaagtc

SEQ ID NO: 1581379 - DNA, 15 bp, Homo sapiens
tgcaacaccaagtca

SEQ ID NO: 1581380 - DNA, 15 bp, Homo sapiens
gcaacaccaagtcac

SEQ ID NO: 1581381 - DNA, 15 bp, Homo sapiens
caacaccaagtcaca

SEQ ID NO: 1581382 - DNA, 15 bp, Homo sapiens
aacaccaagtcacaa

SEQ ID NO: 1581383 - DNA, 15 bp, Homo sapiens
acaccaagtcacaaa

SEQ ID NO: 1581384 - DNA, 15 bp, Homo sapiens
caccaagtcacaaat

SEQ ID NO: 1581385 - DNA, 15 bp, Homo sapiens
accaagtcacaaata

SEQ ID NO: 1581386 - DNA, 15 bp, Homo sapiens
ccaagtcacaaataa

SEQ ID NO: 1581387 - DNA, 15 bp, Homo sapiens
caagtcacaaataat

SEQ ID NO: 1581388 - DNA, 15 bp, Homo sapiens
aagtcacaaataata

SEQ ID NO: 1581389 - DNA, 15 bp, Homo sapiens
agtcacaaataataa

SEQ ID NO: 1581390 - DNA, 15 bp, Homo sapiens
gtcacaaataataaa

SEQ ID NO: 1581391 - DNA, 15 bp, Homo sapiens
tcacaaataataaaa

SEQ ID NO: 1581392 - DNA, 15 bp, Homo sapiens
cacaaataataaaac

SEQ ID NO: 1581393 - DNA, 15 bp, Homo sapiens
acaaataataaaaca

SEQ ID NO: 1581394 - DNA, 15 bp, Homo sapiens
caaataataaaacag

SEQ ID NO: 1581395 - DNA, 15 bp, Homo sapiens
aaataataaaacaga

SEQ ID NO: 1581396 - DNA, 15 bp, Homo sapiens
aataataaaacagat

SEQ ID NO: 1581397 - DNA, 15 bp, Homo sapiens
ataataaaacagatg

SEQ ID NO: 1581398 - DNA, 15 bp, Homo sapiens
taataaaacagatgt

SEQ ID NO: 1581399 - DNA, 15 bp, Homo sapiens
aataaaacagatgta

SEQ ID NO: 1581400 - DNA, 15 bp, Homo sapiens
ataaaacagatgtaa

SEQ ID NO: 1581401 - DNA, 15 bp, Homo sapiens
taaaacagatgtaac

SEQ ID NO: 1581402 - DNA, 15 bp, Homo sapiens
aaaacagatgtaact

SEQ ID NO: 1581403 - DNA, 15 bp, Homo sapiens
aaacagatgtaactt

SEQ ID NO: 1581404 - DNA, 15 bp, Homo sapiens
aacagatgtaactta

SEQ ID NO: 1581405 - DNA, 15 bp, Homo sapiens
acagatgtaacttat

SEQ ID NO: 1581406 - DNA, 15 bp, Homo sapiens
cagatgtaacttata

SEQ ID NO: 1581407 - DNA, 15 bp, Homo sapiens
agatgtaacttatat

SEQ ID NO: 1581408 - DNA, 15 bp, Homo sapiens
gatgtaacttatatt

SEQ ID NO: 1581409 - DNA, 15 bp, Homo sapiens
atgtaacttatattc

SEQ ID NO: 1581410 - DNA, 15 bp, Homo sapiens
tgtaacttatattca

SEQ ID NO: 1581411 - DNA, 15 bp, Homo sapiens
gtaacttatattcat

SEQ ID NO: 1581412 - DNA, 15 bp, Homo sapiens
taacttatattcata

SEQ ID NO: 1581413 - DNA, 15 bp, Homo sapiens
aacttatattcatac

SEQ ID NO: 1581414 - DNA, 15 bp, Homo sapiens
acttatattcataca

SEQ ID NO: 1581415 - DNA, 15 bp, Homo sapiens
cttatattcatacag

SEQ ID NO: 1581416 - DNA, 15 bp, Homo sapiens
ttatattcatacaga

SEQ ID NO: 1581417 - DNA, 15 bp, Homo sapiens
tatattcatacagaa

SEQ ID NO: 1581418 - DNA, 15 bp, Homo sapiens
atattcatacagaaa

SEQ ID NO: 1581419 - DNA, 15 bp, Homo sapiens
tattcatacagaaag

SEQ ID NO: 1581420 - DNA, 15 bp, Homo sapiens
attcatacagaaagt

SEQ ID NO: 1581421 - DNA, 15 bp, Homo sapiens
ttcatacagaaagtt

SEQ ID NO: 1581422 - DNA, 15 bp, Homo sapiens
tcatacagaaagttg

SEQ ID NO: 1581423 - DNA, 15 bp, Homo sapiens
catacagaaagttgg

SEQ ID NO: 1581424 - DNA, 15 bp, Homo sapiens
atacagaaagttggg

SEQ ID NO: 1581425 - DNA, 15 bp, Homo sapiens
tacagaaagttgggc

SEQ ID NO: 1581426 - DNA, 15 bp, Homo sapiens
acagaaagttgggca

SEQ ID NO: 1581427 - DNA, 15 bp, Homo sapiens
cagaaagttgggcac

SEQ ID NO: 1581428 - DNA, 15 bp, Homo sapiens
agaaagttgggcact

SEQ ID NO: 1581429 - DNA, 15 bp, Homo sapiens
gaaagttgggcactg

SEQ ID NO: 1581430 - DNA, 15 bp, Homo sapiens
aaagttgggcactgc

SEQ ID NO: 1581431 - DNA, 15 bp, Homo sapiens
aagttgggcactgcc

SEQ ID NO: 1581432 - DNA, 15 bp, Homo sapiens
agttgggcactgcca

SEQ ID NO: 1581433 - DNA, 15 bp, Homo sapiens
gttgggcactgccat

SEQ ID NO: 1581434 - DNA, 15 bp, Homo sapiens
ttgggcactgccatt

SEQ ID NO: 1581435 - DNA, 15 bp, Homo sapiens
tgggcactgccattg

SEQ ID NO: 1581436 - DNA, 15 bp, Homo sapiens
gggcactgccattgc

SEQ ID NO: 1581437 - DNA, 15 bp, Homo sapiens
ggcactgccattgcc

SEQ ID NO: 1581438 - DNA, 15 bp, Homo sapiens
gcactgccattgcct

SEQ ID NO: 1581439 - DNA, 15 bp, Homo sapiens
cactgccattgcctt

SEQ ID NO: 1581440 - DNA, 15 bp, Homo sapiens
actgccattgccttg

SEQ ID NO: 1581441 - DNA, 15 bp, Homo sapiens
ctgccattgccttgt

SEQ ID NO: 1581442 - DNA, 15 bp, Homo sapiens
tgccattgccttgtt

SEQ ID NO: 1581443 - DNA, 15 bp, Homo sapiens
gccattgccttgttg

SEQ ID NO: 1581444 - DNA, 15 bp, Homo sapiens
ccattgccttgttgg

SEQ ID NO: 1581445 - DNA, 15 bp, Homo sapiens
cattgccttgttggt

SEQ ID NO: 1581446 - DNA, 15 bp, Homo sapiens
attgccttgttggtt

SEQ ID NO: 1581447 - DNA, 15 bp, Homo sapiens
ttgccttgttggttt

SEQ ID NO: 1581448 - DNA, 15 bp, Homo sapiens
tgccttgttggttta

SEQ ID NO: 1581449 - DNA, 15 bp, Homo sapiens
gccttgttggtttac

SEQ ID NO: 1581450 - DNA, 15 bp, Homo sapiens
ccttgttggtttaca

SEQ ID NO: 1581451 - DNA, 15 bp, Homo sapiens
cttgttggtttacac

SEQ ID NO: 1581452 - DNA, 15 bp, Homo sapiens
ttgttggtttacacg

SEQ ID NO: 1581453 - DNA, 15 bp, Homo sapiens
tgttggtttacacgg

SEQ ID NO: 1581454 - DNA, 15 bp, Homo sapiens
gttggtttacacggc

SEQ ID NO: 1581455 - DNA, 15 bp, Homo sapiens
ttggtttacacggct

SEQ ID NO: 1581456 - DNA, 15 bp, Homo sapiens
tggtttacacggctg

SEQ ID NO: 1581457 - DNA, 15 bp, Homo sapiens
ggtttacacggctgt

SEQ ID NO: 1581458 - DNA, 15 bp, Homo sapiens
gtttacacggctgtg

SEQ ID NO: 1581459 - DNA, 15 bp, Homo sapiens
tttacacggctgtgc

SEQ ID NO: 1581460 - DNA, 15 bp, Homo sapiens
ttacacggctgtgct

SEQ ID NO: 1581461 - DNA, 15 bp, Homo sapiens
tacacggctgtgcta

SEQ ID NO: 1581462 - DNA, 15 bp, Homo sapiens
acacggctgtgctag

SEQ ID NO: 1581463 - DNA, 15 bp, Homo sapiens
cacggctgtgctagt

SEQ ID NO: 1581464 - DNA, 15 bp, Homo sapiens
acggctgtgctagtt

SEQ ID NO: 1581465 - DNA, 15 bp, Homo sapiens
cggctgtgctagttc

SEQ ID NO: 1581466 - DNA, 15 bp, Homo sapiens
ggctgtgctagttca

SEQ ID NO: 1581467 - DNA, 15 bp, Homo sapiens
gctgtgctagttcag

SEQ ID NO: 1581468 - DNA, 15 bp, Homo sapiens
ctgtgctagttcagt

SEQ ID NO: 1581469 - DNA, 15 bp, Homo sapiens
tgtgctagttcagta

SEQ ID NO: 1581470 - DNA, 15 bp, Homo sapiens
gtgctagttcagtag

SEQ ID NO: 1581471 - DNA, 15 bp, Homo sapiens
tgctagttcagtagc

SEQ ID NO: 1581472 - DNA, 15 bp, Homo sapiens
gctagttcagtagca

SEQ ID NO: 1581473 - DNA, 15 bp, Homo sapiens
ctagttcagtagcag

SEQ ID NO: 1581474 - DNA, 15 bp, Homo sapiens
tagttcagtagcaga

SEQ ID NO: 1581475 - DNA, 15 bp, Homo sapiens
agttcagtagcagaa

SEQ ID NO: 1581476 - DNA, 15 bp, Homo sapiens
gttcagtagcagaaa

SEQ ID NO: 1581477 - DNA, 15 bp, Homo sapiens
ttcagtagcagaaag

SEQ ID NO: 1581478 - DNA, 15 bp, Homo sapiens
tcagtagcagaaagg

SEQ ID NO: 1581479 - DNA, 15 bp, Homo sapiens
cagtagcagaaaggt

SEQ ID NO: 1581480 - DNA, 15 bp, Homo sapiens
agtagcagaaaggtg

SEQ ID NO: 1581481 - DNA, 15 bp, Homo sapiens
gtagcagaaaggtgc

SEQ ID NO: 1581482 - DNA, 15 bp, Homo sapiens
tagcagaaaggtgct

SEQ ID NO: 1581483 - DNA, 15 bp, Homo sapiens
agcagaaaggtgctg

SEQ ID NO: 1581484 - DNA, 15 bp, Homo sapiens
gcagaaaggtgctgg

SEQ ID NO: 1581485 - DNA, 15 bp, Homo sapiens
cagaaaggtgctggt

SEQ ID NO: 1581486 - DNA, 15 bp, Homo sapiens
agaaaggtgctggtc

SEQ ID NO: 1581487 - DNA, 15 bp, Homo sapiens
gaaaggtgctggtct

SEQ ID NO: 1581488 - DNA, 15 bp, Homo sapiens
aaaggtgctggtctc

SEQ ID NO: 1581489 - DNA, 15 bp, Homo sapiens
aaggtgctggtctcc

SEQ ID NO: 1581490 - DNA, 15 bp, Homo sapiens
aggtgctggtctcct

SEQ ID NO: 1581491 - DNA, 15 bp, Homo sapiens
ggtgctggtctcctt

SEQ ID NO: 1581492 - DNA, 15 bp, Homo sapiens
gtgctggtctccttt

SEQ ID NO: 1581493 - DNA, 15 bp, Homo sapiens
tgctggtctccttta

SEQ ID NO: 1581494 - DNA, 15 bp, Homo sapiens
gctggtctcctttac

SEQ ID NO: 1581495 - DNA, 15 bp, Homo sapiens
ctggtctcctttact

SEQ ID NO: 1581496 - DNA, 15 bp, Homo sapiens
tggtctcctttactc

SEQ ID NO: 1581497 - DNA, 15 bp, Homo sapiens
ggtctcctttactca

SEQ ID NO: 1581498 - DNA, 15 bp, Homo sapiens
gtctcctttactcag

SEQ ID NO: 1581499 - DNA, 15 bp, Homo sapiens
tctcctttactcagt

SEQ ID NO: 1581500 - DNA, 15 bp, Homo sapiens
ctcctttactcagtt

SEQ ID NO: 1581501 - DNA, 15 bp, Homo sapiens
cctttactcagttta

SEQ ID NO: 1581502 - DNA, 15 bp, Homo sapiens
ctttactcagtttac

SEQ ID NO: 1581503 - DNA, 15 bp, Homo sapiens
tttactcagtttaca

SEQ ID NO: 1581504 - DNA, 15 bp, Homo sapiens
ttactcagtttacaa

SEQ ID NO: 1581505 - DNA, 15 bp, Homo sapiens
tactcagtttacaat

SEQ ID NO: 1581506 - DNA, 15 bp, Homo sapiens
actcagtttacaatc

SEQ ID NO: 1581507 - DNA, 15 bp, Homo sapiens
ctcagtttacaatct

SEQ ID NO: 1581508 - DNA, 15 bp, Homo sapiens
tcagtttacaatcta

SEQ ID NO: 1581509 - DNA, 15 bp, Homo sapiens
cagtttacaatctag

SEQ ID NO: 1581510 - DNA, 15 bp, Homo sapiens
agtttacaatctagg

SEQ ID NO: 1581511 - DNA, 15 bp, Homo sapiens
gtttacaatctaggc

SEQ ID NO: 1581512 - DNA, 15 bp, Homo sapiens
tttacaatctaggca

SEQ ID NO: 1581513 - DNA, 15 bp, Homo sapiens
ttacaatctaggcag

SEQ ID NO: 1581514 - DNA, 15 bp, Homo sapiens
tacaatctaggcagt

SEQ ID NO: 1581515 - DNA, 15 bp, Homo sapiens
acaatctaggcagta

SEQ ID NO: 1581516 - DNA, 15 bp, Homo sapiens
caatctaggcagtag

SEQ ID NO: 1581517 - DNA, 15 bp, Homo sapiens
aatctaggcagtaga

SEQ ID NO: 1581518 - DNA, 15 bp, Homo sapiens
atctaggcagtagaa

SEQ ID NO: 1581519 - DNA, 15 bp, Homo sapiens
tctaggcagtagaat

SEQ ID NO: 1581520 - DNA, 15 bp, Homo sapiens
ctaggcagtagaatg

SEQ ID NO: 1581521 - DNA, 15 bp, Homo sapiens
taggcagtagaatgt

SEQ ID NO: 1581522 - DNA, 15 bp, Homo sapiens
aggcagtagaatgta

SEQ ID NO: 1581523 - DNA, 15 bp, Homo sapiens
ggcagtagaatgtaa

SEQ ID NO: 1581524 - DNA, 15 bp, Homo sapiens
gcagtagaatgtaat

SEQ ID NO: 1581525 - DNA, 15 bp, Homo sapiens
cagtagaatgtaatc

SEQ ID NO: 1581526 - DNA, 15 bp, Homo sapiens
agtagaatgtaatca

SEQ ID NO: 1581527 - DNA, 15 bp, Homo sapiens
gtagaatgtaatcac

SEQ ID NO: 1581528 - DNA, 15 bp, Homo sapiens
tagaatgtaatcact

SEQ ID NO: 1581529 - DNA, 15 bp, Homo sapiens
agaatgtaatcactg

SEQ ID NO: 1581530 - DNA, 15 bp, Homo sapiens
gaatgtaatcactgc

SEQ ID NO: 1581531 - DNA, 15 bp, Homo sapiens
aatgtaatcactgct

SEQ ID NO: 1581532 - DNA, 15 bp, Homo sapiens
atgtaatcactgctt

SEQ ID NO: 1581533 - DNA, 15 bp, Homo sapiens
tgtaatcactgcttt

SEQ ID NO: 1581534 - DNA, 15 bp, Homo sapiens
gtaatcactgcttta

SEQ ID NO: 1581535 - DNA, 15 bp, Homo sapiens
taatcactgctttaa

SEQ ID NO: 1581536 - DNA, 15 bp, Homo sapiens
aatcactgctttaaa

SEQ ID NO: 1581537 - DNA, 15 bp, Homo sapiens
atcactgctttaaac

SEQ ID NO: 1581538 - DNA, 15 bp, Homo sapiens
tcactgctttaaact

SEQ ID NO: 1581539 - DNA, 15 bp, Homo sapiens
cactgctttaaactt

SEQ ID NO: 1581540 - DNA, 15 bp, Homo sapiens
ctgctttaaacttga

SEQ ID NO: 1581541 - DNA, 15 bp, Homo sapiens
tgctttaaacttgat

SEQ ID NO: 1581542 - DNA, 15 bp, Homo sapiens
gctttaaacttgata

SEQ ID NO: 1581543 - DNA, 15 bp, Homo sapiens
ctttaaacttgatac

SEQ ID NO: 1581544 - DNA, 15 bp, Homo sapiens
tttaaacttgatact

SEQ ID NO: 1581545 - DNA, 15 bp, Homo sapiens
ttaaacttgatactg

SEQ ID NO: 1581546 - DNA, 15 bp, Homo sapiens
taaacttgatactgc

SEQ ID NO: 1581547 - DNA, 15 bp, Homo sapiens
aaacttgatactgct

SEQ ID NO: 1581548 - DNA, 15 bp, Homo sapiens
aacttgatactgctt

SEQ ID NO: 1581549 - DNA, 15 bp, Homo sapiens
acttgatactgctta

SEQ ID NO: 1581550 - DNA, 15 bp, Homo sapiens
cttgatactgcttag

SEQ ID NO: 1581551 - DNA, 15 bp, Homo sapiens
ttgatactgcttagg

SEQ ID NO: 1581552 - DNA, 15 bp, Homo sapiens
tgatactgcttaggg

SEQ ID NO: 1581553 - DNA, 15 bp, Homo sapiens
gatactgcttaggga

SEQ ID NO: 1581554 - DNA, 15 bp, Homo sapiens
atactgcttagggag

SEQ ID NO: 1581555 - DNA, 15 bp, Homo sapiens
tactgcttagggaga

SEQ ID NO: 1581556 - DNA, 15 bp, Homo sapiens
actgcttagggagag

SEQ ID NO: 1581557 - DNA, 15 bp, Homo sapiens
ctgcttagggagaga

SEQ ID NO: 1581558 - DNA, 15 bp, Homo sapiens
tgcttagggagagaa

SEQ ID NO: 1581559 - DNA, 15 bp, Homo sapiens
gcttagggagagaat

SEQ ID NO: 1581560 - DNA, 15 bp, Homo sapiens
cttagggagagaatc

SEQ ID NO: 1581561 - DNA, 15 bp, Homo sapiens
ttagggagagaatca

SEQ ID NO: 1581562 - DNA, 15 bp, Homo sapiens
tagggagagaatcat

SEQ ID NO: 1581563 - DNA, 15 bp, Homo sapiens
agggagagaatcatt

SEQ ID NO: 1581564 - DNA, 15 bp, Homo sapiens
gggagagaatcattg

SEQ ID NO: 1581565 - DNA, 15 bp, Homo sapiens
ggagagaatcattgg

SEQ ID NO: 1581566 - DNA, 15 bp, Homo sapiens
gagagaatcattggt

SEQ ID NO: 1581567 - DNA, 15 bp, Homo sapiens
agagaatcattggtg

SEQ ID NO: 1581568 - DNA, 15 bp, Homo sapiens
gagaatcattggtgc

SEQ ID NO: 1581569 - DNA, 15 bp, Homo sapiens
agaatcattggtgct

SEQ ID NO: 1581570 - DNA, 15 bp, Homo sapiens
gaatcattggtgctg

SEQ ID NO: 1581571 - DNA, 15 bp, Homo sapiens
aatcattggtgctgg

SEQ ID NO: 1581572 - DNA, 15 bp, Homo sapiens
atcattggtgctggg

SEQ ID NO: 1581573 - DNA, 15 bp, Homo sapiens
tcattggtgctgggt

SEQ ID NO: 1581574 - DNA, 15 bp, Homo sapiens
cattggtgctgggta

SEQ ID NO: 1581575 - DNA, 15 bp, Homo sapiens
attggtgctgggtaa

SEQ ID NO: 1581576 - DNA, 15 bp, Homo sapiens
ttggtgctgggtaac

SEQ ID NO: 1581577 - DNA, 15 bp, Homo sapiens
tggtgctgggtaact

SEQ ID NO: 1581578 - DNA, 15 bp, Homo sapiens
ggtgctgggtaactt

SEQ ID NO: 1581579 - DNA, 15 bp, Homo sapiens
gtgctgggtaacttt

SEQ ID NO: 1581580 - DNA, 15 bp, Homo sapiens
tgctgggtaactttg

SEQ ID NO: 1581581 - DNA, 15 bp, Homo sapiens
gctgggtaactttgg

SEQ ID NO: 1581582 - DNA, 15 bp, Homo sapiens
ctgggtaactttggg

SEQ ID NO: 1581583 - DNA, 15 bp, Homo sapiens
tgggtaactttgggt

SEQ ID NO: 1581584 - DNA, 15 bp, Homo sapiens
gggtaactttgggtt

SEQ ID NO: 1581585 - DNA, 15 bp, Homo sapiens
ggtaactttgggttc

SEQ ID NO: 1581586 - DNA, 15 bp, Homo sapiens
gtaactttgggttct

SEQ ID NO: 1581587 - DNA, 15 bp, Homo sapiens
taactttgggttcta

SEQ ID NO: 1581588 - DNA, 15 bp, Homo sapiens
aactttgggttctag

SEQ ID NO: 1581589 - DNA, 15 bp, Homo sapiens
actttgggttctagg

SEQ ID NO: 1581590 - DNA, 15 bp, Homo sapiens
ctttgggttctaggt

SEQ ID NO: 1581591 - DNA, 15 bp, Homo sapiens
tttgggttctaggtt

SEQ ID NO: 1581592 - DNA, 15 bp, Homo sapiens
ttgggttctaggttt

SEQ ID NO: 1581593 - DNA, 15 bp, Homo sapiens
tgggttctaggttta

SEQ ID NO: 1581594 - DNA, 15 bp, Homo sapiens
gggttctaggtttac

SEQ ID NO: 1581595 - DNA, 15 bp, Homo sapiens
ggttctaggtttact

SEQ ID NO: 1581596 - DNA, 15 bp, Homo sapiens
gttctaggtttactt

SEQ ID NO: 1581597 - DNA, 15 bp, Homo sapiens
ttctaggtttacttt

SEQ ID NO: 1581598 - DNA, 15 bp, Homo sapiens
tctaggtttactttt

SEQ ID NO: 1581599 - DNA, 15 bp, Homo sapiens
ctaggtttacttttt

SEQ ID NO: 1581600 - DNA, 15 bp, Homo sapiens
taggtttactttttg

SEQ ID NO: 1581601 - DNA, 15 bp, Homo sapiens
aggtttactttttgt

SEQ ID NO: 1581602 - DNA, 15 bp, Homo sapiens
ggtttactttttgtg

SEQ ID NO: 1581603 - DNA, 15 bp, Homo sapiens
gtttactttttgtgt

SEQ ID NO: 1581604 - DNA, 15 bp, Homo sapiens
tttactttttgtgta

SEQ ID NO: 1581605 - DNA, 15 bp, Homo sapiens
ttactttttgtgtat

SEQ ID NO: 1581606 - DNA, 15 bp, Homo sapiens
tactttttgtgtata

SEQ ID NO: 1581607 - DNA, 15 bp, Homo sapiens
actttttgtgtatat

SEQ ID NO: 1581608 - DNA, 15 bp, Homo sapiens
ctttttgtgtatata

SEQ ID NO: 1581609 - DNA, 15 bp, Homo sapiens
tttttgtgtatatat

SEQ ID NO: 1581610 - DNA, 15 bp, Homo sapiens
ttttgtgtatatata

SEQ ID NO: 1581611 - DNA, 15 bp, Homo sapiens
tttgtgtatatataa

SEQ ID NO: 1581612 - DNA, 15 bp, Homo sapiens
ttgtgtatatataac

SEQ ID NO: 1581613 - DNA, 15 bp, Homo sapiens
tgtgtatatataact

SEQ ID NO: 1581614 - DNA, 15 bp, Homo sapiens
gtgtatatataactg

SEQ ID NO: 1581615 - DNA, 15 bp, Homo sapiens
tgtatatataactgt

SEQ ID NO: 1581616 - DNA, 15 bp, Homo sapiens
gtatatataactgtt

SEQ ID NO: 1581617 - DNA, 15 bp, Homo sapiens
tatatataactgttt

SEQ ID NO: 1581618 - DNA, 15 bp, Homo sapiens
atatataactgtttt

SEQ ID NO: 1581619 - DNA, 15 bp, Homo sapiens
tatataactgttttt

SEQ ID NO: 1581620 - DNA, 15 bp, Homo sapiens
atataactgtttttg

SEQ ID NO: 1581621 - DNA, 15 bp, Homo sapiens
tataactgtttttgg

SEQ ID NO: 1581622 - DNA, 15 bp, Homo sapiens
ataactgtttttggt

SEQ ID NO: 1581623 - DNA, 15 bp, Homo sapiens
taactgtttttggta

SEQ ID NO: 1581624 - DNA, 15 bp, Homo sapiens
aactgtttttggtaa

SEQ ID NO: 1581625 - DNA, 15 bp, Homo sapiens
actgtttttggtaaa

SEQ ID NO: 1581626 - DNA, 15 bp, Homo sapiens
ctgtttttggtaaat

SEQ ID NO: 1581627 - DNA, 15 bp, Homo sapiens
tgtttttggtaaatc

SEQ ID NO: 1581628 - DNA, 15 bp, Homo sapiens
gtttttggtaaatca

SEQ ID NO: 1581629 - DNA, 15 bp, Homo sapiens
tttttggtaaatcac

SEQ ID NO: 1581630 - DNA, 15 bp, Homo sapiens
ttttggtaaatcaca

SEQ ID NO: 1581631 - DNA, 15 bp, Homo sapiens
tttggtaaatcacaa

SEQ ID NO: 1581632 - DNA, 15 bp, Homo sapiens
ttggtaaatcacaag

SEQ ID NO: 1581633 - DNA, 15 bp, Homo sapiens
tggtaaatcacaagt

SEQ ID NO: 1581634 - DNA, 15 bp, Homo sapiens
ggtaaatcacaagtt

SEQ ID NO: 1581635 - DNA, 15 bp, Homo sapiens
gtaaatcacaagttt

SEQ ID NO: 1581636 - DNA, 15 bp, Homo sapiens
taaatcacaagtttc

SEQ ID NO: 1581637 - DNA, 15 bp, Homo sapiens
aaatcacaagtttct

SEQ ID NO: 1581638 - DNA, 15 bp, Homo sapiens
aatcacaagtttctg

SEQ ID NO: 1581639 - DNA, 15 bp, Homo sapiens
atcacaagtttctgg

SEQ ID NO: 1581640 - DNA, 15 bp, Homo sapiens
tcacaagtttctggg

SEQ ID NO: 1581641 - DNA, 15 bp, Homo sapiens
cacaagtttctgggc

SEQ ID NO: 1581642 - DNA, 15 bp, Homo sapiens
acaagtttctgggct

SEQ ID NO: 1581643 - DNA, 15 bp, Homo sapiens
caagtttctgggctt

SEQ ID NO: 1581644 - DNA, 15 bp, Homo sapiens
aagtttctgggcttg

SEQ ID NO: 1581645 - DNA, 15 bp, Homo sapiens
agtttctgggcttgt

SEQ ID NO: 1581646 - DNA, 15 bp, Homo sapiens
gtttctgggcttgtc

SEQ ID NO: 1581647 - DNA, 15 bp, Homo sapiens
tttctgggcttgtcg

SEQ ID NO: 1581648 - DNA, 15 bp, Homo sapiens
ttctgggcttgtcga

SEQ ID NO: 1581649 - DNA, 15 bp, Homo sapiens
tctgggcttgtcgaa

SEQ ID NO: 1581650 - DNA, 15 bp, Homo sapiens
ctgggcttgtcgaat

SEQ ID NO: 1581651 - DNA, 15 bp, Homo sapiens
tgggcttgtcgaatt

SEQ ID NO: 1581652 - DNA, 15 bp, Homo sapiens
gggcttgtcgaatta

SEQ ID NO: 1581653 - DNA, 15 bp, Homo sapiens
ggcttgtcgaattag

SEQ ID NO: 1581654 - DNA, 15 bp, Homo sapiens
gcttgtcgaattaga

SEQ ID NO: 1581655 - DNA, 15 bp, Homo sapiens
cttgtcgaattagat

SEQ ID NO: 1581656 - DNA, 15 bp, Homo sapiens
ttgtcgaattagatt

SEQ ID NO: 1581657 - DNA, 15 bp, Homo sapiens
tgtcgaattagattt

SEQ ID NO: 1581658 - DNA, 15 bp, Homo sapiens
gtcgaattagatttt

SEQ ID NO: 1581659 - DNA, 15 bp, Homo sapiens
tcgaattagattttg

SEQ ID NO: 1581660 - DNA, 15 bp, Homo sapiens
cgaattagattttgt

SEQ ID NO: 1581661 - DNA, 15 bp, Homo sapiens
gaattagattttgtt

SEQ ID NO: 1581662 - DNA, 15 bp, Homo sapiens
aattagattttgtta

SEQ ID NO: 1581663 - DNA, 15 bp, Homo sapiens
attagattttgttac

SEQ ID NO: 1581664 - DNA, 15 bp, Homo sapiens
ttagattttgttaca

SEQ ID NO: 1581665 - DNA, 15 bp, Homo sapiens
tagattttgttacag

SEQ ID NO: 1581666 - DNA, 15 bp, Homo sapiens
agattttgttacaga

SEQ ID NO: 1581667 - DNA, 15 bp, Homo sapiens
gattttgttacagat

SEQ ID NO: 1581668 - DNA, 15 bp, Homo sapiens
attttgttacagatt

SEQ ID NO: 1581669 - DNA, 15 bp, Homo sapiens
ttttgttacagatta

SEQ ID NO: 1581670 - DNA, 15 bp, Homo sapiens
tttgttacagattat

SEQ ID NO: 1581671 - DNA, 15 bp, Homo sapiens
ttgttacagattatg

SEQ ID NO: 1581672 - DNA, 15 bp, Homo sapiens
tgttacagattatga

SEQ ID NO: 1581673 - DNA, 15 bp, Homo sapiens
gttacagattatgag

SEQ ID NO: 1581674 - DNA, 15 bp, Homo sapiens
ttacagattatgagc

SEQ ID NO: 1581675 - DNA, 15 bp, Homo sapiens
tacagattatgagct

SEQ ID NO: 1581676 - DNA, 15 bp, Homo sapiens
acagattatgagctt

SEQ ID NO: 1581677 - DNA, 15 bp, Homo sapiens
cagattatgagcttt

SEQ ID NO: 1581678 - DNA, 15 bp, Homo sapiens
agattatgagcttta

SEQ ID NO: 1581679 - DNA, 15 bp, Homo sapiens
gattatgagctttat

SEQ ID NO: 1581680 - DNA, 15 bp, Homo sapiens
tatgagctttattat

SEQ ID NO: 1581681 - DNA, 15 bp, Homo sapiens
atgagctttattatg

SEQ ID NO: 1581682 - DNA, 15 bp, Homo sapiens
tgagctttattatgc

SEQ ID NO: 1581683 - DNA, 15 bp, Homo sapiens
gagctttattatgct

SEQ ID NO: 1581684 - DNA, 15 bp, Homo sapiens
agctttattatgcta

SEQ ID NO: 1581685 - DNA, 15 bp, Homo sapiens
gctttattatgctat

SEQ ID NO: 1581686 - DNA, 15 bp, Homo sapiens
ctttattatgctata

SEQ ID NO: 1581687 - DNA, 15 bp, Homo sapiens
tttattatgctatac

SEQ ID NO: 1581688 - DNA, 15 bp, Homo sapiens
ttattatgctataca

SEQ ID NO: 1581689 - DNA, 15 bp, Homo sapiens
tattatgctatacag

SEQ ID NO: 1581690 - DNA, 15 bp, Homo sapiens
attatgctatacagt

SEQ ID NO: 1581691 - DNA, 15 bp, Homo sapiens
ttatgctatacagtt

SEQ ID NO: 1581692 - DNA, 15 bp, Homo sapiens
tatgctatacagtta

SEQ ID NO: 1581693 - DNA, 15 bp, Homo sapiens
atgctatacagttag

SEQ ID NO: 1581694 - DNA, 15 bp, Homo sapiens
tgctatacagttagt

SEQ ID NO: 1581695 - DNA, 15 bp, Homo sapiens
gctatacagttagtt

SEQ ID NO: 1581696 - DNA, 15 bp, Homo sapiens
ctatacagttagttg

SEQ ID NO: 1581697 - DNA, 15 bp, Homo sapiens
tatacagttagttgt

SEQ ID NO: 1581698 - DNA, 15 bp, Homo sapiens
atacagttagttgta

SEQ ID NO: 1581699 - DNA, 15 bp, Homo sapiens
tacagttagttgtat

SEQ ID NO: 1581700 - DNA, 15 bp, Homo sapiens
acagttagttgtatg

SEQ ID NO: 1581701 - DNA, 15 bp, Homo sapiens
cagttagttgtatgt

SEQ ID NO: 1581702 - DNA, 15 bp, Homo sapiens
agttagttgtatgta

SEQ ID NO: 1581703 - DNA, 15 bp, Homo sapiens
gttagttgtatgtat

SEQ ID NO: 1581704 - DNA, 15 bp, Homo sapiens
ttagttgtatgtata

SEQ ID NO: 1581705 - DNA, 15 bp, Homo sapiens
tagttgtatgtatat

SEQ ID NO: 1581706 - DNA, 15 bp, Homo sapiens
agttgtatgtatata

SEQ ID NO: 1581707 - DNA, 15 bp, Homo sapiens
gttgtatgtatatat

SEQ ID NO: 1581708 - DNA, 15 bp, Homo sapiens
ttgtatgtatatatg

SEQ ID NO: 1581709 - DNA, 15 bp, Homo sapiens
tgtatgtatatatgc

SEQ ID NO: 1581710 - DNA, 15 bp, Homo sapiens
gtatgtatatatgcc

SEQ ID NO: 1581711 - DNA, 15 bp, Homo sapiens
tatgtatatatgcct

SEQ ID NO: 1581712 - DNA, 15 bp, Homo sapiens
atgtatatatgcctt

SEQ ID NO: 1581713 - DNA, 15 bp, Homo sapiens
tgtatatatgccttt

SEQ ID NO: 1581714 - DNA, 15 bp, Homo sapiens
gtatatatgcctttc

SEQ ID NO: 1581715 - DNA, 15 bp, Homo sapiens
tatatatgcctttcc

SEQ ID NO: 1581716 - DNA, 15 bp, Homo sapiens
atatatgcctttccc

SEQ ID NO: 1581717 - DNA, 15 bp, Homo sapiens
tatatgcctttccca

SEQ ID NO: 1581718 - DNA, 15 bp, Homo sapiens
atatgcctttcccac

SEQ ID NO: 1581719 - DNA, 15 bp, Homo sapiens
tatgcctttcccact

SEQ ID NO: 1581720 - DNA, 15 bp, Homo sapiens
atgcctttcccacta

SEQ ID NO: 1581721 - DNA, 15 bp, Homo sapiens
tgcctttcccactag

SEQ ID NO: 1581722 - DNA, 15 bp, Homo sapiens
gcctttcccactaga

SEQ ID NO: 1581723 - DNA, 15 bp, Homo sapiens
cctttcccactagat

SEQ ID NO: 1581724 - DNA, 15 bp, Homo sapiens
ctttcccactagatt

SEQ ID NO: 1581725 - DNA, 15 bp, Homo sapiens
tttcccactagattt

SEQ ID NO: 1581726 - DNA, 15 bp, Homo sapiens
ttcccactagatttt

SEQ ID NO: 1581727 - DNA, 15 bp, Homo sapiens
tcccactagatttta

SEQ ID NO: 1581728 - DNA, 15 bp, Homo sapiens
cccactagattttaa

SEQ ID NO: 1581729 - DNA, 15 bp, Homo sapiens
ccactagattttaag

SEQ ID NO: 1581730 - DNA, 15 bp, Homo sapiens
cactagattttaagc

SEQ ID NO: 1581731 - DNA, 15 bp, Homo sapiens
actagattttaagct

SEQ ID NO: 1581732 - DNA, 15 bp, Homo sapiens
ctagattttaagctt

SEQ ID NO: 1581733 - DNA, 15 bp, Homo sapiens
tagattttaagcttt

SEQ ID NO: 1581734 - DNA, 15 bp, Homo sapiens
agattttaagctttt

SEQ ID NO: 1581735 - DNA, 15 bp, Homo sapiens
gattttaagcttttt

SEQ ID NO: 1581736 - DNA, 15 bp, Homo sapiens
attttaagctttttt

SEQ ID NO: 1581737 - DNA, 15 bp, Homo sapiens
ttttaagcttttttt

SEQ ID NO: 1581738 - DNA, 15 bp, Homo sapiens
tttaagctttttttt

SEQ ID NO: 1581739 - DNA, 15 bp, Homo sapiens
ttaagcttttttttt

SEQ ID NO: 1581740 - DNA, 15 bp, Homo sapiens
ttttttttttttgtg

SEQ ID NO: 1581741 - DNA, 15 bp, Homo sapiens
tttttttttttgtga

SEQ ID NO: 1581742 - DNA, 15 bp, Homo sapiens
ttttttttttgtgac

SEQ ID NO: 1581743 - DNA, 15 bp, Homo sapiens
tttttttttgtgacg

SEQ ID NO: 1581744 - DNA, 15 bp, Homo sapiens
ttttttttgtgacgg

SEQ ID NO: 1581745 - DNA, 15 bp, Homo sapiens
tttttttgtgacgga

SEQ ID NO: 1581746 - DNA, 15 bp, Homo sapiens
ttttttgtgacggag

SEQ ID NO: 1581747 - DNA, 15 bp, Homo sapiens
gtcttgctcttgtcg

SEQ ID NO: 1581748 - DNA, 15 bp, Homo sapiens
tcttgctcttgtcgc

SEQ ID NO: 1581749 - DNA, 15 bp, Homo sapiens
cttgctcttgtcgcc

SEQ ID NO: 1581750 - DNA, 15 bp, Homo sapiens
gctcttgtcgcccag

SEQ ID NO: 1581751 - DNA, 15 bp, Homo sapiens
tgtcgcccaggctga

SEQ ID NO: 1581752 - DNA, 15 bp, Homo sapiens
gtcgcccaggctgaa

SEQ ID NO: 1581753 - DNA, 15 bp, Homo sapiens
tcgcccaggctgaag

SEQ ID NO: 1581754 - DNA, 15 bp, Homo sapiens
cgcccaggctgaagt

SEQ ID NO: 1581755 - DNA, 15 bp, Homo sapiens
ccaggctgaagtgga

SEQ ID NO: 1581756 - DNA, 15 bp, Homo sapiens
caggctgaagtggag

SEQ ID NO: 1581757 - DNA, 15 bp, Homo sapiens
aggctgaagtggagt

SEQ ID NO: 1581758 - DNA, 15 bp, Homo sapiens
ggctgaagtggagtg

SEQ ID NO: 1581759 - DNA, 15 bp, Homo sapiens
gctgaagtggagtgc

SEQ ID NO: 1581760 - DNA, 15 bp, Homo sapiens
ctgaagtggagtgca

SEQ ID NO: 1581761 - DNA, 15 bp, Homo sapiens
tgaagtggagtgcag

SEQ ID NO: 1581762 - DNA, 15 bp, Homo sapiens
gaagtggagtgcagt

SEQ ID NO: 1581763 - DNA, 15 bp, Homo sapiens
aagtggagtgcagtg

SEQ ID NO: 1581764 - DNA, 15 bp, Homo sapiens
agtggagtgcagtgg

SEQ ID NO: 1581765 - DNA, 15 bp, Homo sapiens
agcctccacctccta

SEQ ID NO: 1581766 - DNA, 15 bp, Homo sapiens
gcctccacctcctag

SEQ ID NO: 1581767 - DNA, 15 bp, Homo sapiens
cctccacctcctagg

SEQ ID NO: 1581768 - DNA, 15 bp, Homo sapiens
ctccacctcctaggt

SEQ ID NO: 1581769 - DNA, 15 bp, Homo sapiens
tccacctcctaggtt

SEQ ID NO: 1581770 - DNA, 15 bp, Homo sapiens
ccacctcctaggttc

SEQ ID NO: 1581771 - DNA, 15 bp, Homo sapiens
cacctcctaggttca

SEQ ID NO: 1581772 - DNA, 15 bp, Homo sapiens
acctcctaggttcaa

SEQ ID NO: 1581773 - DNA, 15 bp, Homo sapiens
tcggcctcccaagta

SEQ ID NO: 1581774 - DNA, 15 bp, Homo sapiens
cggcctcccaagtaa

SEQ ID NO: 1581775 - DNA, 15 bp, Homo sapiens
ggcctcccaagtaac

SEQ ID NO: 1581776 - DNA, 15 bp, Homo sapiens
gcctcccaagtaact

SEQ ID NO: 1581777 - DNA, 15 bp, Homo sapiens
cctcccaagtaactg

SEQ ID NO: 1581778 - DNA, 15 bp, Homo sapiens
ctcccaagtaactgg

SEQ ID NO: 1581779 - DNA, 15 bp, Homo sapiens
tcccaagtaactggg

SEQ ID NO: 1581780 - DNA, 15 bp, Homo sapiens
cccaagtaactggga

SEQ ID NO: 1581781 - DNA, 15 bp, Homo sapiens
ccaagtaactgggac

SEQ ID NO: 1581782 - DNA, 15 bp, Homo sapiens
aactgggactacagg

SEQ ID NO: 1581783 - DNA, 15 bp, Homo sapiens
actgggactacaggc

SEQ ID NO: 1581784 - DNA, 15 bp, Homo sapiens
gactacaggcacgtg

SEQ ID NO: 1581785 - DNA, 15 bp, Homo sapiens
actacaggcacgtgc

SEQ ID NO: 1581786 - DNA, 15 bp, Homo sapiens
ctacaggcacgtgcc

SEQ ID NO: 1581787 - DNA, 15 bp, Homo sapiens
gtgccaccacacccg

SEQ ID NO: 1581788 - DNA, 15 bp, Homo sapiens
caccacacccggcta

SEQ ID NO: 1581789 - DNA, 15 bp, Homo sapiens
accacacccggctaa

SEQ ID NO: 1581790 - DNA, 15 bp, Homo sapiens
ccacacccggctaat

SEQ ID NO: 1581791 - DNA, 15 bp, Homo sapiens
cacacccggctaatt

SEQ ID NO: 1581792 - DNA, 15 bp, Homo sapiens
acacccggctaattt

SEQ ID NO: 1581793 - DNA, 15 bp, Homo sapiens
cacccggctaatttt

SEQ ID NO: 1581794 - DNA, 15 bp, Homo sapiens
acccggctaattttt

SEQ ID NO: 1581795 - DNA, 15 bp, Homo sapiens
tgtagagacagggtt

SEQ ID NO: 1581796 - DNA, 15 bp, Homo sapiens
agagacagggtttcg

SEQ ID NO: 1581797 - DNA, 15 bp, Homo sapiens
gagacagggtttcgc

SEQ ID NO: 1581798 - DNA, 15 bp, Homo sapiens
agacagggtttcgcc

SEQ ID NO: 1581799 - DNA, 15 bp, Homo sapiens
gacagggtttcgcca

SEQ ID NO: 1581800 - DNA, 15 bp, Homo sapiens
acagggtttcgccat

SEQ ID NO: 1581801 - DNA, 15 bp, Homo sapiens
ttcgccatgttggct

SEQ ID NO: 1581802 - DNA, 15 bp, Homo sapiens
tcgccatgttggcta

SEQ ID NO: 1581803 - DNA, 15 bp, Homo sapiens
cgccatgttggctag

SEQ ID NO: 1581804 - DNA, 15 bp, Homo sapiens
gccatgttggctagg

SEQ ID NO: 1581805 - DNA, 15 bp, Homo sapiens
ccatgttggctaggc

SEQ ID NO: 1581806 - DNA, 15 bp, Homo sapiens
catgttggctaggct

SEQ ID NO: 1581807 - DNA, 15 bp, Homo sapiens
atgttggctaggctg

SEQ ID NO: 1581808 - DNA, 15 bp, Homo sapiens
tgttggctaggctgg

SEQ ID NO: 1581809 - DNA, 15 bp, Homo sapiens
gttggctaggctggt

SEQ ID NO: 1581810 - DNA, 15 bp, Homo sapiens
ttggctaggctggtc

SEQ ID NO: 1581811 - DNA, 15 bp, Homo sapiens
tggctaggctggtct

SEQ ID NO: 1581812 - DNA, 15 bp, Homo sapiens
ggctaggctggtctt

SEQ ID NO: 1581813 - DNA, 15 bp, Homo sapiens
gctaggctggtcttg

SEQ ID NO: 1581814 - DNA, 15 bp, Homo sapiens
gctggtcttgaactt

SEQ ID NO: 1581815 - DNA, 15 bp, Homo sapiens
ctggtcttgaacttc

SEQ ID NO: 1581816 - DNA, 15 bp, Homo sapiens
tggtcttgaacttct

SEQ ID NO: 1581817 - DNA, 15 bp, Homo sapiens
ggtcttgaacttctg

SEQ ID NO: 1581818 - DNA, 15 bp, Homo sapiens
gtcttgaacttctgg

SEQ ID NO: 1581819 - DNA, 15 bp, Homo sapiens
tcttgaacttctggc

SEQ ID NO: 1581820 - DNA, 15 bp, Homo sapiens
cttgaacttctggcc

SEQ ID NO: 1581821 - DNA, 15 bp, Homo sapiens
ttgaacttctggcct

SEQ ID NO: 1581822 - DNA, 15 bp, Homo sapiens
tgaacttctggcctc

SEQ ID NO: 1581823 - DNA, 15 bp, Homo sapiens
gaacttctggcctca

SEQ ID NO: 1581824 - DNA, 15 bp, Homo sapiens
aacttctggcctcag

SEQ ID NO: 1581825 - DNA, 15 bp, Homo sapiens
acttctggcctcagg

SEQ ID NO: 1581826 - DNA, 15 bp, Homo sapiens
cttctggcctcaggt

SEQ ID NO: 1581827 - DNA, 15 bp, Homo sapiens
ttctggcctcaggtg

SEQ ID NO: 1581828 - DNA, 15 bp, Homo sapiens
tctggcctcaggtga

SEQ ID NO: 1581829 - DNA, 15 bp, Homo sapiens
ctggcctcaggtgat

SEQ ID NO: 1581830 - DNA, 15 bp, Homo sapiens
tggcctcaggtgatc

SEQ ID NO: 1581831 - DNA, 15 bp, Homo sapiens
ggcctcaggtgatcc

SEQ ID NO: 1581832 - DNA, 15 bp, Homo sapiens
gcctcaggtgatcca

SEQ ID NO: 1581833 - DNA, 15 bp, Homo sapiens
aagtgctgggattta

SEQ ID NO: 1581834 - DNA, 15 bp, Homo sapiens
agtgctgggatttac

SEQ ID NO: 1581835 - DNA, 15 bp, Homo sapiens
gtgctgggatttaca

SEQ ID NO: 1581836 - DNA, 15 bp, Homo sapiens
tgctgggatttacag

SEQ ID NO: 1581837 - DNA, 15 bp, Homo sapiens
gctgggatttacagg

SEQ ID NO: 1581838 - DNA, 15 bp, Homo sapiens
ctgggatttacaggc

SEQ ID NO: 1581839 - DNA, 15 bp, Homo sapiens
tgggatttacaggca

SEQ ID NO: 1581840 - DNA, 15 bp, Homo sapiens
gggatttacaggcat

SEQ ID NO: 1581841 - DNA, 15 bp, Homo sapiens
ggatttacaggcatg

SEQ ID NO: 1581842 - DNA, 15 bp, Homo sapiens
gatttacaggcatga

SEQ ID NO: 1581843 - DNA, 15 bp, Homo sapiens
atttacaggcatgag

SEQ ID NO: 1581844 - DNA, 15 bp, Homo sapiens
accacgcccagctat

SEQ ID NO: 1581845 - DNA, 15 bp, Homo sapiens
ccacgcccagctata

SEQ ID NO: 1581846 - DNA, 15 bp, Homo sapiens
cacgcccagctataa

SEQ ID NO: 1581847 - DNA, 15 bp, Homo sapiens
acgcccagctataag

SEQ ID NO: 1581848 - DNA, 15 bp, Homo sapiens
cgcccagctataagc

SEQ ID NO: 1581849 - DNA, 15 bp, Homo sapiens
gcccagctataagct

SEQ ID NO: 1581850 - DNA, 15 bp, Homo sapiens
cccagctataagctc

SEQ ID NO: 1581851 - DNA, 15 bp, Homo sapiens
ccagctataagctct

SEQ ID NO: 1581852 - DNA, 15 bp, Homo sapiens
cagctataagctctt

SEQ ID NO: 1581853 - DNA, 15 bp, Homo sapiens
agctataagctcttt

SEQ ID NO: 1581854 - DNA, 15 bp, Homo sapiens
gctataagctcttta

SEQ ID NO: 1581855 - DNA, 15 bp, Homo sapiens
ctataagctctttaa

SEQ ID NO: 1581856 - DNA, 15 bp, Homo sapiens
tataagctctttaag

SEQ ID NO: 1581857 - DNA, 15 bp, Homo sapiens
ataagctctttaagg

SEQ ID NO: 1581858 - DNA, 15 bp, Homo sapiens
taagctctttaaggg

SEQ ID NO: 1581859 - DNA, 15 bp, Homo sapiens
aagctctttaagggt

SEQ ID NO: 1581860 - DNA, 15 bp, Homo sapiens
agctctttaagggtt

SEQ ID NO: 1581861 - DNA, 15 bp, Homo sapiens
gctctttaagggttg

SEQ ID NO: 1581862 - DNA, 15 bp, Homo sapiens
ctctttaagggttgt

SEQ ID NO: 1581863 - DNA, 15 bp, Homo sapiens
tctttaagggttgta

SEQ ID NO: 1581864 - DNA, 15 bp, Homo sapiens
ctttaagggttgtaa

SEQ ID NO: 1581865 - DNA, 15 bp, Homo sapiens
tttaagggttgtaaa

SEQ ID NO: 1581866 - DNA, 15 bp, Homo sapiens
ttaagggttgtaaat

SEQ ID NO: 1581867 - DNA, 15 bp, Homo sapiens
taagggttgtaaatt

SEQ ID NO: 1581868 - DNA, 15 bp, Homo sapiens
aagggttgtaaattt

SEQ ID NO: 1581869 - DNA, 15 bp, Homo sapiens
agggttgtaaattta

SEQ ID NO: 1581870 - DNA, 15 bp, Homo sapiens
gggttgtaaatttat

SEQ ID NO: 1581871 - DNA, 15 bp, Homo sapiens
ggttgtaaatttata

SEQ ID NO: 1581872 - DNA, 15 bp, Homo sapiens
gttgtaaatttataa

SEQ ID NO: 1581873 - DNA, 15 bp, Homo sapiens
ttgtaaatttataat

SEQ ID NO: 1581874 - DNA, 15 bp, Homo sapiens
tgtaaatttataatc

SEQ ID NO: 1581875 - DNA, 15 bp, Homo sapiens
gtaaatttataatca

SEQ ID NO: 1581876 - DNA, 15 bp, Homo sapiens
taaatttataatcat

SEQ ID NO: 1581877 - DNA, 15 bp, Homo sapiens
aaatttataatcatt

SEQ ID NO: 1581878 - DNA, 15 bp, Homo sapiens
aatttataatcattc

SEQ ID NO: 1581879 - DNA, 15 bp, Homo sapiens
atttataatcattct

SEQ ID NO: 1581880 - DNA, 15 bp, Homo sapiens
tttataatcattctt

SEQ ID NO: 1581881 - DNA, 15 bp, Homo sapiens
ttataatcattcttt

SEQ ID NO: 1581882 - DNA, 15 bp, Homo sapiens
tataatcattctttt

SEQ ID NO: 1581883 - DNA, 15 bp, Homo sapiens
ataatcattctttta

SEQ ID NO: 1581884 - DNA, 15 bp, Homo sapiens
taatcattcttttac

SEQ ID NO: 1581885 - DNA, 15 bp, Homo sapiens
aatcattcttttact

SEQ ID NO: 1581886 - DNA, 15 bp, Homo sapiens
atcattcttttactc

SEQ ID NO: 1581887 - DNA, 15 bp, Homo sapiens
tcattcttttactct

SEQ ID NO: 1581888 - DNA, 15 bp, Homo sapiens
cattcttttactctc

SEQ ID NO: 1581889 - DNA, 15 bp, Homo sapiens
attcttttactctcc

SEQ ID NO: 1581890 - DNA, 15 bp, Homo sapiens
ttcttttactctcct

SEQ ID NO: 1581891 - DNA, 15 bp, Homo sapiens
tcttttactctcctg

SEQ ID NO: 1581892 - DNA, 15 bp, Homo sapiens
cttttactctcctgc

SEQ ID NO: 1581893 - DNA, 15 bp, Homo sapiens
ttttactctcctgca

SEQ ID NO: 1581894 - DNA, 15 bp, Homo sapiens
tttactctcctgcaa

SEQ ID NO: 1581895 - DNA, 15 bp, Homo sapiens
ttactctcctgcaaa

SEQ ID NO: 1581896 - DNA, 15 bp, Homo sapiens
tactctcctgcaaat

SEQ ID NO: 1581897 - DNA, 15 bp, Homo sapiens
actctcctgcaaatt

SEQ ID NO: 1581898 - DNA, 15 bp, Homo sapiens
ctctcctgcaaattc

SEQ ID NO: 1581899 - DNA, 15 bp, Homo sapiens
tctcctgcaaattct

SEQ ID NO: 1581900 - DNA, 15 bp, Homo sapiens
ctcctgcaaattctg

SEQ ID NO: 1581901 - DNA, 15 bp, Homo sapiens
tcctgcaaattctgt

SEQ ID NO: 1581902 - DNA, 15 bp, Homo sapiens
cctgcaaattctgtt

SEQ ID NO: 1581903 - DNA, 15 bp, Homo sapiens
ctgcaaattctgttg

SEQ ID NO: 1581904 - DNA, 15 bp, Homo sapiens
tgcaaattctgttgc

SEQ ID NO: 1581905 - DNA, 15 bp, Homo sapiens
gcaaattctgttgca

SEQ ID NO: 1581906 - DNA, 15 bp, Homo sapiens
caaattctgttgcac

SEQ ID NO: 1581907 - DNA, 15 bp, Homo sapiens
aaattctgttgcaca

SEQ ID NO: 1581908 - DNA, 15 bp, Homo sapiens
aattctgttgcacac

SEQ ID NO: 1581909 - DNA, 15 bp, Homo sapiens
attctgttgcacact

SEQ ID NO: 1581910 - DNA, 15 bp, Homo sapiens
ttctgttgcacactg

SEQ ID NO: 1581911 - DNA, 15 bp, Homo sapiens
tctgttgcacactgc

SEQ ID NO: 1581912 - DNA, 15 bp, Homo sapiens
ctgttgcacactgcc

SEQ ID NO: 1581913 - DNA, 15 bp, Homo sapiens
tgttgcacactgcct

SEQ ID NO: 1581914 - DNA, 15 bp, Homo sapiens
gttgcacactgcctt

SEQ ID NO: 1581915 - DNA, 15 bp, Homo sapiens
ttgcacactgcctta

SEQ ID NO: 1581916 - DNA, 15 bp, Homo sapiens
tgcacactgccttaa

SEQ ID NO: 1581917 - DNA, 15 bp, Homo sapiens
gcacactgccttaat

SEQ ID NO: 1581918 - DNA, 15 bp, Homo sapiens
cacactgccttaatc

SEQ ID NO: 1581919 - DNA, 15 bp, Homo sapiens
acactgccttaatca

SEQ ID NO: 1581920 - DNA, 15 bp, Homo sapiens
cactgccttaatcaa

SEQ ID NO: 1581921 - DNA, 15 bp, Homo sapiens
actgccttaatcaag

SEQ ID NO: 1581922 - DNA, 15 bp, Homo sapiens
ctgccttaatcaagg

SEQ ID NO: 1581923 - DNA, 15 bp, Homo sapiens
tgccttaatcaaggt

SEQ ID NO: 1581924 - DNA, 15 bp, Homo sapiens
gccttaatcaaggta

SEQ ID NO: 1581925 - DNA, 15 bp, Homo sapiens
ccttaatcaaggtag

SEQ ID NO: 1581926 - DNA, 15 bp, Homo sapiens
cttaatcaaggtaga

SEQ ID NO: 1581927 - DNA, 15 bp, Homo sapiens
ttaatcaaggtagat

SEQ ID NO: 1581928 - DNA, 15 bp, Homo sapiens
taatcaaggtagatg

SEQ ID NO: 1581929 - DNA, 15 bp, Homo sapiens
aatcaaggtagatgc

SEQ ID NO: 1581930 - DNA, 15 bp, Homo sapiens
atcaaggtagatgct

SEQ ID NO: 1581931 - DNA, 15 bp, Homo sapiens
tcaaggtagatgctg

SEQ ID NO: 1581932 - DNA, 15 bp, Homo sapiens
caaggtagatgctga

SEQ ID NO: 1581933 - DNA, 15 bp, Homo sapiens
aaggtagatgctgaa

SEQ ID NO: 1581934 - DNA, 15 bp, Homo sapiens
aggtagatgctgaat

SEQ ID NO: 1581935 - DNA, 15 bp, Homo sapiens
ggtagatgctgaatg

SEQ ID NO: 1581936 - DNA, 15 bp, Homo sapiens
gtagatgctgaatgc

SEQ ID NO: 1581937 - DNA, 15 bp, Homo sapiens
tagatgctgaatgca

SEQ ID NO: 1581938 - DNA, 15 bp, Homo sapiens
agatgctgaatgcat

SEQ ID NO: 1581939 - DNA, 15 bp, Homo sapiens
gatgctgaatgcatt

SEQ ID NO: 1581940 - DNA, 15 bp, Homo sapiens
atgctgaatgcattt

SEQ ID NO: 1581941 - DNA, 15 bp, Homo sapiens
tgctgaatgcatttt

SEQ ID NO: 1581942 - DNA, 15 bp, Homo sapiens
gctgaatgcattttt

SEQ ID NO: 1581943 - DNA, 15 bp, Homo sapiens
ctgaatgcatttttg

SEQ ID NO: 1581944 - DNA, 15 bp, Homo sapiens
tgaatgcatttttgt

SEQ ID NO: 1581945 - DNA, 15 bp, Homo sapiens
gaatgcatttttgta

SEQ ID NO: 1581946 - DNA, 15 bp, Homo sapiens
aatgcatttttgtat

SEQ ID NO: 1581947 - DNA, 15 bp, Homo sapiens
atgcatttttgtata

SEQ ID NO: 1581948 - DNA, 15 bp, Homo sapiens
tgcatttttgtataa

SEQ ID NO: 1581949 - DNA, 15 bp, Homo sapiens
gcatttttgtataat

SEQ ID NO: 1581950 - DNA, 15 bp, Homo sapiens
catttttgtataatt

SEQ ID NO: 1581951 - DNA, 15 bp, Homo sapiens
atttttgtataattg

SEQ ID NO: 1581952 - DNA, 15 bp, Homo sapiens
tttttgtataattga

SEQ ID NO: 1581953 - DNA, 15 bp, Homo sapiens
ttttgtataattgaa

SEQ ID NO: 1581954 - DNA, 15 bp, Homo sapiens
tttgtataattgaat

SEQ ID NO: 1581955 - DNA, 15 bp, Homo sapiens
ttgtataattgaata

SEQ ID NO: 1581956 - DNA, 15 bp, Homo sapiens
tgtataattgaatat

SEQ ID NO: 1581957 - DNA, 15 bp, Homo sapiens
gtataattgaatatg

SEQ ID NO: 1581958 - DNA, 15 bp, Homo sapiens
tataattgaatatgt

SEQ ID NO: 1581959 - DNA, 15 bp, Homo sapiens
ataattgaatatgtt

SEQ ID NO: 1581960 - DNA, 15 bp, Homo sapiens
taattgaatatgttg

SEQ ID NO: 1581961 - DNA, 15 bp, Homo sapiens
aattgaatatgttgc

SEQ ID NO: 1581962 - DNA, 15 bp, Homo sapiens
attgaatatgttgca

SEQ ID NO: 1581963 - DNA, 15 bp, Homo sapiens
ttgaatatgttgcaa

SEQ ID NO: 1581964 - DNA, 15 bp, Homo sapiens
tgaatatgttgcaat

SEQ ID NO: 1581965 - DNA, 15 bp, Homo sapiens
gaatatgttgcaatc

SEQ ID NO: 1581966 - DNA, 15 bp, Homo sapiens
aatatgttgcaatcc

SEQ ID NO: 1581967 - DNA, 15 bp, Homo sapiens
atatgttgcaatccc

SEQ ID NO: 1581968 - DNA, 15 bp, Homo sapiens
tatgttgcaatcccc

SEQ ID NO: 1581969 - DNA, 15 bp, Homo sapiens
atgttgcaatcccca

SEQ ID NO: 1581970 - DNA, 15 bp, Homo sapiens
tgttgcaatccccaa

SEQ ID NO: 1581971 - DNA, 15 bp, Homo sapiens
gttgcaatccccaac

SEQ ID NO: 1581972 - DNA, 15 bp, Homo sapiens
ttgcaatccccaact

SEQ ID NO: 1581973 - DNA, 15 bp, Homo sapiens
tgcaatccccaactc

SEQ ID NO: 1581974 - DNA, 15 bp, Homo sapiens
gcaatccccaactct

SEQ ID NO: 1581975 - DNA, 15 bp, Homo sapiens
caatccccaactctc

SEQ ID NO: 1581976 - DNA, 15 bp, Homo sapiens
aatccccaactctct

SEQ ID NO: 1581977 - DNA, 15 bp, Homo sapiens
atccccaactctctc

SEQ ID NO: 1581978 - DNA, 15 bp, Homo sapiens
tccccaactctctcc

SEQ ID NO: 1581979 - DNA, 15 bp, Homo sapiens
ccccaactctctcca

SEQ ID NO: 1581980 - DNA, 15 bp, Homo sapiens
cccaactctctccaa

SEQ ID NO: 1581981 - DNA, 15 bp, Homo sapiens
ccaactctctccaac

SEQ ID NO: 1581982 - DNA, 15 bp, Homo sapiens
caactctctccaact

SEQ ID NO: 1581983 - DNA, 15 bp, Homo sapiens
aactctctccaactg

SEQ ID NO: 1581984 - DNA, 15 bp, Homo sapiens
actctctccaactgt

SEQ ID NO: 1581985 - DNA, 15 bp, Homo sapiens
ctctctccaactgtt

SEQ ID NO: 1581986 - DNA, 15 bp, Homo sapiens
tctctccaactgttc

SEQ ID NO: 1581987 - DNA, 15 bp, Homo sapiens
ctctccaactgttcc

SEQ ID NO: 1581988 - DNA, 15 bp, Homo sapiens
tctccaactgttcct

SEQ ID NO: 1581989 - DNA, 15 bp, Homo sapiens
ctccaactgttcctg

SEQ ID NO: 1581990 - DNA, 15 bp, Homo sapiens
tccaactgttcctgt

SEQ ID NO: 1581991 - DNA, 15 bp, Homo sapiens
ccaactgttcctgtc

SEQ ID NO: 1581992 - DNA, 15 bp, Homo sapiens
caactgttcctgtca

SEQ ID NO: 1581993 - DNA, 15 bp, Homo sapiens
aactgttcctgtcaa

SEQ ID NO: 1581994 - DNA, 15 bp, Homo sapiens
actgttcctgtcaaa

SEQ ID NO: 1581995 - DNA, 15 bp, Homo sapiens
ctgttcctgtcaaag

SEQ ID NO: 1581996 - DNA, 15 bp, Homo sapiens
tgttcctgtcaaagc

SEQ ID NO: 1581997 - DNA, 15 bp, Homo sapiens
gttcctgtcaaagca

SEQ ID NO: 1581998 - DNA, 15 bp, Homo sapiens
ttcctgtcaaagcag

SEQ ID NO: 1581999 - DNA, 15 bp, Homo sapiens
tcctgtcaaagcagc

SEQ ID NO: 1582000 - DNA, 15 bp, Homo sapiens
cctgtcaaagcagcc

SEQ ID NO: 1582001 - DNA, 15 bp, Homo sapiens
ctgtcaaagcagcca

SEQ ID NO: 1582002 - DNA, 15 bp, Homo sapiens
tgtcaaagcagccac

SEQ ID NO: 1582003 - DNA, 15 bp, Homo sapiens
gtcaaagcagccact

SEQ ID NO: 1582004 - DNA, 15 bp, Homo sapiens
tcaaagcagccactg

SEQ ID NO: 1582005 - DNA, 15 bp, Homo sapiens
caaagcagccactgg

SEQ ID NO: 1582006 - DNA, 15 bp, Homo sapiens
aaagcagccactgga

SEQ ID NO: 1582007 - DNA, 15 bp, Homo sapiens
aagcagccactggat

SEQ ID NO: 1582008 - DNA, 15 bp, Homo sapiens
agcagccactggatt

SEQ ID NO: 1582009 - DNA, 15 bp, Homo sapiens
gcagccactggattg

SEQ ID NO: 1582010 - DNA, 15 bp, Homo sapiens
cagccactggattgt

SEQ ID NO: 1582011 - DNA, 15 bp, Homo sapiens
agccactggattgtt

SEQ ID NO: 1582012 - DNA, 15 bp, Homo sapiens
gccactggattgtta

SEQ ID NO: 1582013 - DNA, 15 bp, Homo sapiens
ccactggattgttaa

SEQ ID NO: 1582014 - DNA, 15 bp, Homo sapiens
cactggattgttaac

SEQ ID NO: 1582015 - DNA, 15 bp, Homo sapiens
actggattgttaact

SEQ ID NO: 1582016 - DNA, 15 bp, Homo sapiens
ctggattgttaacta

SEQ ID NO: 1582017 - DNA, 15 bp, Homo sapiens
tggattgttaactaa

SEQ ID NO: 1582018 - DNA, 15 bp, Homo sapiens
ggattgttaactaat

SEQ ID NO: 1582019 - DNA, 15 bp, Homo sapiens
gattgttaactaatc

SEQ ID NO: 1582020 - DNA, 15 bp, Homo sapiens
attgttaactaatcc

SEQ ID NO: 1582021 - DNA, 15 bp, Homo sapiens
ttgttaactaatcca

SEQ ID NO: 1582022 - DNA, 15 bp, Homo sapiens
tgttaactaatccat

SEQ ID NO: 1582023 - DNA, 15 bp, Homo sapiens
gttaactaatccata

SEQ ID NO: 1582024 - DNA, 15 bp, Homo sapiens
ttaactaatccatat

SEQ ID NO: 1582025 - DNA, 15 bp, Homo sapiens
taactaatccatatt

SEQ ID NO: 1582026 - DNA, 15 bp, Homo sapiens
aactaatccatatta

SEQ ID NO: 1582027 - DNA, 15 bp, Homo sapiens
actaatccatattag

SEQ ID NO: 1582028 - DNA, 15 bp, Homo sapiens
ctaatccatattaga

SEQ ID NO: 1582029 - DNA, 15 bp, Homo sapiens
taatccatattagat

SEQ ID NO: 1582030 - DNA, 15 bp, Homo sapiens
aatccatattagatg

SEQ ID NO: 1582031 - DNA, 15 bp, Homo sapiens
atccatattagatgg

SEQ ID NO: 1582032 - DNA, 15 bp, Homo sapiens
tccatattagatggg

SEQ ID NO: 1582033 - DNA, 15 bp, Homo sapiens
ccatattagatgggg

SEQ ID NO: 1582034 - DNA, 15 bp, Homo sapiens
catattagatggggt

SEQ ID NO: 1582035 - DNA, 15 bp, Homo sapiens
atattagatggggtt

SEQ ID NO: 1582036 - DNA, 15 bp, Homo sapiens
tattagatggggtta

SEQ ID NO: 1582037 - DNA, 15 bp, Homo sapiens
attagatggggttaa

SEQ ID NO: 1582038 - DNA, 15 bp, Homo sapiens
ttagatggggttaat

SEQ ID NO: 1582039 - DNA, 15 bp, Homo sapiens
tagatggggttaatt

SEQ ID NO: 1582040 - DNA, 15 bp, Homo sapiens
agatggggttaatta

SEQ ID NO: 1582041 - DNA, 15 bp, Homo sapiens
gatggggttaattaa

SEQ ID NO: 1582042 - DNA, 15 bp, Homo sapiens
atggggttaattaat

SEQ ID NO: 1582043 - DNA, 15 bp, Homo sapiens
tggggttaattaata

SEQ ID NO: 1582044 - DNA, 15 bp, Homo sapiens
ggggttaattaatat

SEQ ID NO: 1582045 - DNA, 15 bp, Homo sapiens
gggttaattaatatc

SEQ ID NO: 1582046 - DNA, 15 bp, Homo sapiens
ggttaattaatatca

SEQ ID NO: 1582047 - DNA, 15 bp, Homo sapiens
gttaattaatatcag

SEQ ID NO: 1582048 - DNA, 15 bp, Homo sapiens
ttaattaatatcaga

SEQ ID NO: 1582049 - DNA, 15 bp, Homo sapiens
taattaatatcagat

SEQ ID NO: 1582050 - DNA, 15 bp, Homo sapiens
aattaatatcagatg

SEQ ID NO: 1582051 - DNA, 15 bp, Homo sapiens
attaatatcagatgg

SEQ ID NO: 1582052 - DNA, 15 bp, Homo sapiens
ttaatatcagatggg

SEQ ID NO: 1582053 - DNA, 15 bp, Homo sapiens
taatatcagatggga

SEQ ID NO: 1582054 - DNA, 15 bp, Homo sapiens
aatatcagatgggac

SEQ ID NO: 1582055 - DNA, 15 bp, Homo sapiens
atatcagatgggaca

SEQ ID NO: 1582056 - DNA, 15 bp, Homo sapiens
tatcagatgggacaa

SEQ ID NO: 1582057 - DNA, 15 bp, Homo sapiens
atcagatgggacaag

SEQ ID NO: 1582058 - DNA, 15 bp, Homo sapiens
tcagatgggacaagt

SEQ ID NO: 1582059 - DNA, 15 bp, Homo sapiens
cagatgggacaagta

SEQ ID NO: 1582060 - DNA, 15 bp, Homo sapiens
agatgggacaagtaa

SEQ ID NO: 1582061 - DNA, 15 bp, Homo sapiens
gatgggacaagtaag

SEQ ID NO: 1582062 - DNA, 15 bp, Homo sapiens
atgggacaagtaagg

SEQ ID NO: 1582063 - DNA, 15 bp, Homo sapiens
tgggacaagtaaggg

SEQ ID NO: 1582064 - DNA, 15 bp, Homo sapiens
gggacaagtaagggc

SEQ ID NO: 1582065 - DNA, 15 bp, Homo sapiens
ggacaagtaagggct

SEQ ID NO: 1582066 - DNA, 15 bp, Homo sapiens
gacaagtaagggcta

SEQ ID NO: 1582067 - DNA, 15 bp, Homo sapiens
acaagtaagggctaa

SEQ ID NO: 1582068 - DNA, 15 bp, Homo sapiens
caagtaagggctaat

SEQ ID NO: 1582069 - DNA, 15 bp, Homo sapiens
aagtaagggctaata

SEQ ID NO: 1582070 - DNA, 15 bp, Homo sapiens
agtaagggctaataa

SEQ ID NO: 1582071 - DNA, 15 bp, Homo sapiens
gtaagggctaataag

SEQ ID NO: 1582072 - DNA, 15 bp, Homo sapiens
taagggctaataaga

SEQ ID NO: 1582073 - DNA, 15 bp, Homo sapiens
aagggctaataagat

SEQ ID NO: 1582074 - DNA, 15 bp, Homo sapiens
agggctaataagatt

SEQ ID NO: 1582075 - DNA, 15 bp, Homo sapiens
gggctaataagatta

SEQ ID NO: 1582076 - DNA, 15 bp, Homo sapiens
ggctaataagattat

SEQ ID NO: 1582077 - DNA, 15 bp, Homo sapiens
gctaataagattata

SEQ ID NO: 1582078 - DNA, 15 bp, Homo sapiens
ctaataagattatag

SEQ ID NO: 1582079 - DNA, 15 bp, Homo sapiens
taataagattatagg

SEQ ID NO: 1582080 - DNA, 15 bp, Homo sapiens
aataagattataggc

SEQ ID NO: 1582081 - DNA, 15 bp, Homo sapiens
ataagattataggcc

SEQ ID NO: 1582082 - DNA, 15 bp, Homo sapiens
taagattataggcca

SEQ ID NO: 1582083 - DNA, 15 bp, Homo sapiens
aagattataggccac

SEQ ID NO: 1582084 - DNA, 15 bp, Homo sapiens
agattataggccacc

SEQ ID NO: 1582085 - DNA, 15 bp, Homo sapiens
gattataggccacca

SEQ ID NO: 1582086 - DNA, 15 bp, Homo sapiens
attataggccaccaa

SEQ ID NO: 1582087 - DNA, 15 bp, Homo sapiens
ttataggccaccaag

SEQ ID NO: 1582088 - DNA, 15 bp, Homo sapiens
tataggccaccaagt

SEQ ID NO: 1582089 - DNA, 15 bp, Homo sapiens
ataggccaccaagta

SEQ ID NO: 1582090 - DNA, 15 bp, Homo sapiens
taggccaccaagtag

SEQ ID NO: 1582091 - DNA, 15 bp, Homo sapiens
aggccaccaagtaga

SEQ ID NO: 1582092 - DNA, 15 bp, Homo sapiens
ggccaccaagtagat

SEQ ID NO: 1582093 - DNA, 15 bp, Homo sapiens
gccaccaagtagatt

SEQ ID NO: 1582094 - DNA, 15 bp, Homo sapiens
ccaccaagtagattt

SEQ ID NO: 1582095 - DNA, 15 bp, Homo sapiens
caccaagtagatttc

SEQ ID NO: 1582096 - DNA, 15 bp, Homo sapiens
accaagtagatttct

SEQ ID NO: 1582097 - DNA, 15 bp, Homo sapiens
ccaagtagatttctg

SEQ ID NO: 1582098 - DNA, 15 bp, Homo sapiens
caagtagatttctgt

SEQ ID NO: 1582099 - DNA, 15 bp, Homo sapiens
aagtagatttctgtc

SEQ ID NO: 1582100 - DNA, 15 bp, Homo sapiens
agtagatttctgtct

SEQ ID NO: 1582101 - DNA, 15 bp, Homo sapiens
gtagatttctgtcta

SEQ ID NO: 1582102 - DNA, 15 bp, Homo sapiens
tagatttctgtctag

SEQ ID NO: 1582103 - DNA, 15 bp, Homo sapiens
agatttctgtctagc

SEQ ID NO: 1582104 - DNA, 15 bp, Homo sapiens
gatttctgtctagct

SEQ ID NO: 1582105 - DNA, 15 bp, Homo sapiens
atttctgtctagctc

SEQ ID NO: 1582106 - DNA, 15 bp, Homo sapiens
tttctgtctagctct

SEQ ID NO: 1582107 - DNA, 15 bp, Homo sapiens
ttctgtctagctctt

SEQ ID NO: 1582108 - DNA, 15 bp, Homo sapiens
tctgtctagctctta

SEQ ID NO: 1582109 - DNA, 15 bp, Homo sapiens
ctgtctagctcttat

SEQ ID NO: 1582110 - DNA, 15 bp, Homo sapiens
tgtctagctcttata

SEQ ID NO: 1582111 - DNA, 15 bp, Homo sapiens
gtctagctcttatag

SEQ ID NO: 1582112 - DNA, 15 bp, Homo sapiens
tctagctcttataga

SEQ ID NO: 1582113 - DNA, 15 bp, Homo sapiens
ctagctcttatagag

SEQ ID NO: 1582114 - DNA, 15 bp, Homo sapiens
tagctcttatagaga

SEQ ID NO: 1582115 - DNA, 15 bp, Homo sapiens
agctcttatagagat

SEQ ID NO: 1582116 - DNA, 15 bp, Homo sapiens
gctcttatagagatt

SEQ ID NO: 1582117 - DNA, 15 bp, Homo sapiens
ctcttatagagattg

SEQ ID NO: 1582118 - DNA, 15 bp, Homo sapiens
tcttatagagattga

SEQ ID NO: 1582119 - DNA, 15 bp, Homo sapiens
cttatagagattgag

SEQ ID NO: 1582120 - DNA, 15 bp, Homo sapiens
ttatagagattgagt

SEQ ID NO: 1582121 - DNA, 15 bp, Homo sapiens
tatagagattgagtt

SEQ ID NO: 1582122 - DNA, 15 bp, Homo sapiens
atagagattgagttt

SEQ ID NO: 1582123 - DNA, 15 bp, Homo sapiens
tagagattgagttta

SEQ ID NO: 1582124 - DNA, 15 bp, Homo sapiens
agagattgagtttat

SEQ ID NO: 1582125 - DNA, 15 bp, Homo sapiens
gagattgagtttatt

SEQ ID NO: 1582126 - DNA, 15 bp, Homo sapiens
agattgagtttattg

SEQ ID NO: 1582127 - DNA, 15 bp, Homo sapiens
gattgagtttattgg

SEQ ID NO: 1582128 - DNA, 15 bp, Homo sapiens
attgagtttattgga

SEQ ID NO: 1582129 - DNA, 15 bp, Homo sapiens
ttgagtttattggac

SEQ ID NO: 1582130 - DNA, 15 bp, Homo sapiens
tgagtttattggacc

SEQ ID NO: 1582131 - DNA, 15 bp, Homo sapiens
gagtttattggacct

SEQ ID NO: 1582132 - DNA, 15 bp, Homo sapiens
agtttattggacctg

SEQ ID NO: 1582133 - DNA, 15 bp, Homo sapiens
gtttattggacctgt

SEQ ID NO: 1582134 - DNA, 15 bp, Homo sapiens
tttattggacctgtt

SEQ ID NO: 1582135 - DNA, 15 bp, Homo sapiens
ttattggacctgttt

SEQ ID NO: 1582136 - DNA, 15 bp, Homo sapiens
tattggacctgtttg

SEQ ID NO: 1582137 - DNA, 15 bp, Homo sapiens
attggacctgtttga

SEQ ID NO: 1582138 - DNA, 15 bp, Homo sapiens
ttggacctgtttgat

SEQ ID NO: 1582139 - DNA, 15 bp, Homo sapiens
tggacctgtttgata

SEQ ID NO: 1582140 - DNA, 15 bp, Homo sapiens
ggacctgtttgatag

SEQ ID NO: 1582141 - DNA, 15 bp, Homo sapiens
gacctgtttgatagg

SEQ ID NO: 1582142 - DNA, 15 bp, Homo sapiens
acctgtttgatagga

SEQ ID NO: 1582143 - DNA, 15 bp, Homo sapiens
cctgtttgataggaa

SEQ ID NO: 1582144 - DNA, 15 bp, Homo sapiens
ctgtttgataggaag

SEQ ID NO: 1582145 - DNA, 15 bp, Homo sapiens
tgtttgataggaagt

SEQ ID NO: 1582146 - DNA, 15 bp, Homo sapiens
gtttgataggaagtt

SEQ ID NO: 1582147 - DNA, 15 bp, Homo sapiens
tttgataggaagttt

SEQ ID NO: 1582148 - DNA, 15 bp, Homo sapiens
ttgataggaagtttt

SEQ ID NO: 1582149 - DNA, 15 bp, Homo sapiens
tgataggaagttttg

SEQ ID NO: 1582150 - DNA, 15 bp, Homo sapiens
gataggaagttttgg

SEQ ID NO: 1582151 - DNA, 15 bp, Homo sapiens
ataggaagttttggt

SEQ ID NO: 1582152 - DNA, 15 bp, Homo sapiens
taggaagttttggtg

SEQ ID NO: 1582153 - DNA, 15 bp, Homo sapiens
aggaagttttggtgt

SEQ ID NO: 1582154 - DNA, 15 bp, Homo sapiens
ggaagttttggtgtt

SEQ ID NO: 1582155 - DNA, 15 bp, Homo sapiens
gaagttttggtgttt

SEQ ID NO: 1582156 - DNA, 15 bp, Homo sapiens
aagttttggtgtttg

SEQ ID NO: 1582157 - DNA, 15 bp, Homo sapiens
agttttggtgtttgg

SEQ ID NO: 1582158 - DNA, 15 bp, Homo sapiens
gttttggtgtttggg

SEQ ID NO: 1582159 - DNA, 15 bp, Homo sapiens
ttttggtgtttggga

SEQ ID NO: 1582160 - DNA, 15 bp, Homo sapiens
tttggtgtttgggat

SEQ ID NO: 1582161 - DNA, 15 bp, Homo sapiens
ttggtgtttgggatg

SEQ ID NO: 1582162 - DNA, 15 bp, Homo sapiens
tggtgtttgggatga

SEQ ID NO: 1582163 - DNA, 15 bp, Homo sapiens
ggtgtttgggatgat

SEQ ID NO: 1582164 - DNA, 15 bp, Homo sapiens
gtgtttgggatgatt

SEQ ID NO: 1582165 - DNA, 15 bp, Homo sapiens
tgtttgggatgatta

SEQ ID NO: 1582166 - DNA, 15 bp, Homo sapiens
gtttgggatgattaa

SEQ ID NO: 1582167 - DNA, 15 bp, Homo sapiens
tttgggatgattaaa

SEQ ID NO: 1582168 - DNA, 15 bp, Homo sapiens
ttgggatgattaaaa

SEQ ID NO: 1582169 - DNA, 15 bp, Homo sapiens
tgggatgattaaaac

SEQ ID NO: 1582170 - DNA, 15 bp, Homo sapiens
gggatgattaaaact

SEQ ID NO: 1582171 - DNA, 15 bp, Homo sapiens
ggatgattaaaactg

SEQ ID NO: 1582172 - DNA, 15 bp, Homo sapiens
gatgattaaaactga

SEQ ID NO: 1582173 - DNA, 15 bp, Homo sapiens
atgattaaaactgaa

SEQ ID NO: 1582174 - DNA, 15 bp, Homo sapiens
tgattaaaactgaag

SEQ ID NO: 1582175 - DNA, 15 bp, Homo sapiens
gattaaaactgaagt

SEQ ID NO: 1582176 - DNA, 15 bp, Homo sapiens
attaaaactgaagtt

SEQ ID NO: 1582177 - DNA, 15 bp, Homo sapiens
ttaaaactgaagttc

SEQ ID NO: 1582178 - DNA, 15 bp, Homo sapiens
taaaactgaagttcc

SEQ ID NO: 1582179 - DNA, 15 bp, Homo sapiens
aaaactgaagttcct

SEQ ID NO: 1582180 - DNA, 15 bp, Homo sapiens
aaactgaagttccta

SEQ ID NO: 1582181 - DNA, 15 bp, Homo sapiens
aactgaagttcctat

SEQ ID NO: 1582182 - DNA, 15 bp, Homo sapiens
actgaagttcctatt

SEQ ID NO: 1582183 - DNA, 15 bp, Homo sapiens
ctgaagttcctattt

SEQ ID NO: 1582184 - DNA, 15 bp, Homo sapiens
tgaagttcctattta

SEQ ID NO: 1582185 - DNA, 15 bp, Homo sapiens
gaagttcctatttat

SEQ ID NO: 1582186 - DNA, 15 bp, Homo sapiens
aagttcctatttatt

SEQ ID NO: 1582187 - DNA, 15 bp, Homo sapiens
agttcctatttattg

SEQ ID NO: 1582188 - DNA, 15 bp, Homo sapiens
gttcctatttattga

SEQ ID NO: 1582189 - DNA, 15 bp, Homo sapiens
ttcctatttattgaa

SEQ ID NO: 1582190 - DNA, 15 bp, Homo sapiens
tcctatttattgaat

SEQ ID NO: 1582191 - DNA, 15 bp, Homo sapiens
cctatttattgaatt

SEQ ID NO: 1582192 - DNA, 15 bp, Homo sapiens
ctatttattgaatta

SEQ ID NO: 1582193 - DNA, 15 bp, Homo sapiens
tatttattgaattat

SEQ ID NO: 1582194 - DNA, 15 bp, Homo sapiens
atttattgaattata

SEQ ID NO: 1582195 - DNA, 15 bp, Homo sapiens
tttattgaattatac

SEQ ID NO: 1582196 - DNA, 15 bp, Homo sapiens
ttattgaattatacc

SEQ ID NO: 1582197 - DNA, 15 bp, Homo sapiens
tattgaattatacct

SEQ ID NO: 1582198 - DNA, 15 bp, Homo sapiens
attgaattataccta

SEQ ID NO: 1582199 - DNA, 15 bp, Homo sapiens
ttgaattatacctat

SEQ ID NO: 1582200 - DNA, 15 bp, Homo sapiens
tgaattatacctatt

SEQ ID NO: 1582201 - DNA, 15 bp, Homo sapiens
gaattatacctattt

SEQ ID NO: 1582202 - DNA, 15 bp, Homo sapiens
aattatacctattta

SEQ ID NO: 1582203 - DNA, 15 bp, Homo sapiens
attatacctatttat

SEQ ID NO: 1582204 - DNA, 15 bp, Homo sapiens
ttatacctatttata

SEQ ID NO: 1582205 - DNA, 15 bp, Homo sapiens
tatacctatttatat

SEQ ID NO: 1582206 - DNA, 15 bp, Homo sapiens
atacctatttatatt

SEQ ID NO: 1582207 - DNA, 15 bp, Homo sapiens
tacctatttatatta

SEQ ID NO: 1582208 - DNA, 15 bp, Homo sapiens
acctatttatattat

SEQ ID NO: 1582209 - DNA, 15 bp, Homo sapiens
cctatttatattatt

SEQ ID NO: 1582210 - DNA, 15 bp, Homo sapiens
ctatttatattattt

SEQ ID NO: 1582211 - DNA, 15 bp, Homo sapiens
tatttatattatttc

SEQ ID NO: 1582212 - DNA, 15 bp, Homo sapiens
atttatattatttca

SEQ ID NO: 1582213 - DNA, 15 bp, Homo sapiens
tttatattatttcat

SEQ ID NO: 1582214 - DNA, 15 bp, Homo sapiens
ttatattatttcata

SEQ ID NO: 1582215 - DNA, 15 bp, Homo sapiens
tatattatttcatat

SEQ ID NO: 1582216 - DNA, 15 bp, Homo sapiens
atattatttcatatc

SEQ ID NO: 1582217 - DNA, 15 bp, Homo sapiens
tattatttcatatca

SEQ ID NO: 1582218 - DNA, 15 bp, Homo sapiens
attatttcatatcag

SEQ ID NO: 1582219 - DNA, 15 bp, Homo sapiens
ttatttcatatcagt

SEQ ID NO: 1582220 - DNA, 15 bp, Homo sapiens
tatttcatatcagtg

SEQ ID NO: 1582221 - DNA, 15 bp, Homo sapiens
atttcatatcagtgg

SEQ ID NO: 1582222 - DNA, 15 bp, Homo sapiens
tttcatatcagtggt

SEQ ID NO: 1582223 - DNA, 15 bp, Homo sapiens
ttcatatcagtggtc

SEQ ID NO: 1582224 - DNA, 15 bp, Homo sapiens
tcatatcagtggtcc

SEQ ID NO: 1582225 - DNA, 15 bp, Homo sapiens
catatcagtggtcca

SEQ ID NO: 1582226 - DNA, 15 bp, Homo sapiens
atatcagtggtccac

SEQ ID NO: 1582227 - DNA, 15 bp, Homo sapiens
tatcagtggtccaca

SEQ ID NO: 1582228 - DNA, 15 bp, Homo sapiens
atcagtggtccacat

SEQ ID NO: 1582229 - DNA, 15 bp, Homo sapiens
tcagtggtccacatg

SEQ ID NO: 1582230 - DNA, 15 bp, Homo sapiens
cagtggtccacatgc

SEQ ID NO: 1582231 - DNA, 15 bp, Homo sapiens
agtggtccacatgca

SEQ ID NO: 1582232 - DNA, 15 bp, Homo sapiens
gtggtccacatgcaa

SEQ ID NO: 1582233 - DNA, 15 bp, Homo sapiens
tggtccacatgcaag

SEQ ID NO: 1582234 - DNA, 15 bp, Homo sapiens
ggtccacatgcaagt

SEQ ID NO: 1582235 - DNA, 15 bp, Homo sapiens
gtccacatgcaagtg

SEQ ID NO: 1582236 - DNA, 15 bp, Homo sapiens
tccacatgcaagtga

SEQ ID NO: 1582237 - DNA, 15 bp, Homo sapiens
ccacatgcaagtgag

SEQ ID NO: 1582238 - DNA, 15 bp, Homo sapiens
cacatgcaagtgagg

SEQ ID NO: 1582239 - DNA, 15 bp, Homo sapiens
acatgcaagtgaggc

SEQ ID NO: 1582240 - DNA, 15 bp, Homo sapiens
catgcaagtgaggct

SEQ ID NO: 1582241 - DNA, 15 bp, Homo sapiens
atgcaagtgaggctt

SEQ ID NO: 1582242 - DNA, 15 bp, Homo sapiens
tgcaagtgaggcttc

SEQ ID NO: 1582243 - DNA, 15 bp, Homo sapiens
gcaagtgaggcttct

SEQ ID NO: 1582244 - DNA, 15 bp, Homo sapiens
caagtgaggcttctg

SEQ ID NO: 1582245 - DNA, 15 bp, Homo sapiens
aagtgaggcttctga

SEQ ID NO: 1582246 - DNA, 15 bp, Homo sapiens
agtgaggcttctgag

SEQ ID NO: 1582247 - DNA, 15 bp, Homo sapiens
gtgaggcttctgaga

SEQ ID NO: 1582248 - DNA, 15 bp, Homo sapiens
tgaggcttctgagac

SEQ ID NO: 1582249 - DNA, 15 bp, Homo sapiens
gaggcttctgagaca

SEQ ID NO: 1582250 - DNA, 15 bp, Homo sapiens
aggcttctgagacag

SEQ ID NO: 1582251 - DNA, 15 bp, Homo sapiens
ggcttctgagacaga

SEQ ID NO: 1582252 - DNA, 15 bp, Homo sapiens
gcttctgagacagag

SEQ ID NO: 1582253 - DNA, 15 bp, Homo sapiens
cttctgagacagagt

SEQ ID NO: 1582254 - DNA, 15 bp, Homo sapiens
ctgagacagagtttg

SEQ ID NO: 1582255 - DNA, 15 bp, Homo sapiens
tgagacagagtttga

SEQ ID NO: 1582256 - DNA, 15 bp, Homo sapiens
gagacagagtttgag

SEQ ID NO: 1582257 - DNA, 15 bp, Homo sapiens
agacagagtttgagt

SEQ ID NO: 1582258 - DNA, 15 bp, Homo sapiens
gacagagtttgagtt

SEQ ID NO: 1582259 - DNA, 15 bp, Homo sapiens
acagagtttgagttc

SEQ ID NO: 1582260 - DNA, 15 bp, Homo sapiens
cagagtttgagttct

SEQ ID NO: 1582261 - DNA, 15 bp, Homo sapiens
agagtttgagttctc

SEQ ID NO: 1582262 - DNA, 15 bp, Homo sapiens
gagtttgagttctct

SEQ ID NO: 1582263 - DNA, 15 bp, Homo sapiens
agtttgagttctctc

SEQ ID NO: 1582264 - DNA, 15 bp, Homo sapiens
gtttgagttctctct

SEQ ID NO: 1582265 - DNA, 15 bp, Homo sapiens
tttgagttctctctt

SEQ ID NO: 1582266 - DNA, 15 bp, Homo sapiens
ttgagttctctcttc

SEQ ID NO: 1582267 - DNA, 15 bp, Homo sapiens
tgagttctctcttca

SEQ ID NO: 1582268 - DNA, 15 bp, Homo sapiens
gagttctctcttcaa

SEQ ID NO: 1582269 - DNA, 15 bp, Homo sapiens
agttctctcttcaac

SEQ ID NO: 1582270 - DNA, 15 bp, Homo sapiens
gttctctcttcaact

SEQ ID NO: 1582271 - DNA, 15 bp, Homo sapiens
tctctcttcaactac

SEQ ID NO: 1582272 - DNA, 15 bp, Homo sapiens
ctctcttcaactacc

SEQ ID NO: 1582273 - DNA, 15 bp, Homo sapiens
tctcttcaactacca

SEQ ID NO: 1582274 - DNA, 15 bp, Homo sapiens
ctcttcaactaccat

SEQ ID NO: 1582275 - DNA, 15 bp, Homo sapiens
tcttcaactaccata

SEQ ID NO: 1582276 - DNA, 15 bp, Homo sapiens
cttcaactaccataa

SEQ ID NO: 1582277 - DNA, 15 bp, Homo sapiens
ttcaactaccataac

SEQ ID NO: 1582278 - DNA, 15 bp, Homo sapiens
tcaactaccataaca

SEQ ID NO: 1582279 - DNA, 15 bp, Homo sapiens
caactaccataacac

SEQ ID NO: 1582280 - DNA, 15 bp, Homo sapiens
aactaccataacact

SEQ ID NO: 1582281 - DNA, 15 bp, Homo sapiens
actaccataacactt

SEQ ID NO: 1582282 - DNA, 15 bp, Homo sapiens
ctaccataacactta

SEQ ID NO: 1582283 - DNA, 15 bp, Homo sapiens
taccataacacttaa

SEQ ID NO: 1582284 - DNA, 15 bp, Homo sapiens
accataacacttaac

SEQ ID NO: 1582285 - DNA, 15 bp, Homo sapiens
ccataacacttaacc

SEQ ID NO: 1582286 - DNA, 15 bp, Homo sapiens
cataacacttaacct

SEQ ID NO: 1582287 - DNA, 15 bp, Homo sapiens
ataacacttaacctg

SEQ ID NO: 1582288 - DNA, 15 bp, Homo sapiens
taacacttaacctgt

SEQ ID NO: 1582289 - DNA, 15 bp, Homo sapiens
aacacttaacctgta

SEQ ID NO: 1582290 - DNA, 15 bp, Homo sapiens
acacttaacctgtat

SEQ ID NO: 1582291 - DNA, 15 bp, Homo sapiens
cacttaacctgtatc

SEQ ID NO: 1582292 - DNA, 15 bp, Homo sapiens
acttaacctgtatct

SEQ ID NO: 1582293 - DNA, 15 bp, Homo sapiens
cttaacctgtatctt

SEQ ID NO: 1582294 - DNA, 15 bp, Homo sapiens
ttaacctgtatcttt

SEQ ID NO: 1582295 - DNA, 15 bp, Homo sapiens
taacctgtatctttt

SEQ ID NO: 1582296 - DNA, 15 bp, Homo sapiens
aacctgtatcttttt

SEQ ID NO: 1582297 - DNA, 15 bp, Homo sapiens
acctgtatctttttt

SEQ ID NO: 1582298 - DNA, 15 bp, Homo sapiens
cctgtatcttttttt

SEQ ID NO: 1582299 - DNA, 15 bp, Homo sapiens
ctgtatctttttttt

SEQ ID NO: 1582300 - DNA, 15 bp, Homo sapiens
tttagacggagtctc

SEQ ID NO: 1582301 - DNA, 15 bp, Homo sapiens
ttagacggagtctcg

SEQ ID NO: 1582302 - DNA, 15 bp, Homo sapiens
tagacggagtctcgc

SEQ ID NO: 1582303 - DNA, 15 bp, Homo sapiens
tctcgctctgtcact

SEQ ID NO: 1582304 - DNA, 15 bp, Homo sapiens
ctcgctctgtcactc

SEQ ID NO: 1582305 - DNA, 15 bp, Homo sapiens
tcgctctgtcactca

SEQ ID NO: 1582306 - DNA, 15 bp, Homo sapiens
cgctctgtcactcag

SEQ ID NO: 1582307 - DNA, 15 bp, Homo sapiens
gctctgtcactcagg

SEQ ID NO: 1582308 - DNA, 15 bp, Homo sapiens
tctgtcactcaggct

SEQ ID NO: 1582309 - DNA, 15 bp, Homo sapiens
tcactcaggctggag

SEQ ID NO: 1582310 - DNA, 15 bp, Homo sapiens
cactcaggctggagt

SEQ ID NO: 1582311 - DNA, 15 bp, Homo sapiens
actcaggctggagtg

SEQ ID NO: 1582312 - DNA, 15 bp, Homo sapiens
ctcaggctggagtgt

SEQ ID NO: 1582313 - DNA, 15 bp, Homo sapiens
tcaggctggagtgta

SEQ ID NO: 1582314 - DNA, 15 bp, Homo sapiens
tggagtgtagtggta

SEQ ID NO: 1582315 - DNA, 15 bp, Homo sapiens
ggagtgtagtggtat

SEQ ID NO: 1582316 - DNA, 15 bp, Homo sapiens
gagtgtagtggtatg

SEQ ID NO: 1582317 - DNA, 15 bp, Homo sapiens
agtgtagtggtatga

SEQ ID NO: 1582318 - DNA, 15 bp, Homo sapiens
gtgtagtggtatgat

SEQ ID NO: 1582319 - DNA, 15 bp, Homo sapiens
tgtagtggtatgatc

SEQ ID NO: 1582320 - DNA, 15 bp, Homo sapiens
gtagtggtatgatct

SEQ ID NO: 1582321 - DNA, 15 bp, Homo sapiens
tagtggtatgatctc

SEQ ID NO: 1582322 - DNA, 15 bp, Homo sapiens
agtggtatgatctcg

SEQ ID NO: 1582323 - DNA, 15 bp, Homo sapiens
gtggtatgatctcgg

SEQ ID NO: 1582324 - DNA, 15 bp, Homo sapiens
tggtatgatctcggc

SEQ ID NO: 1582325 - DNA, 15 bp, Homo sapiens
ggtatgatctcggct

SEQ ID NO: 1582326 - DNA, 15 bp, Homo sapiens
gtatgatctcggctc

SEQ ID NO: 1582327 - DNA, 15 bp, Homo sapiens
tatgatctcggctca

SEQ ID NO: 1582328 - DNA, 15 bp, Homo sapiens
tcggctcactgtaac

SEQ ID NO: 1582329 - DNA, 15 bp, Homo sapiens
cggctcactgtaacc

SEQ ID NO: 1582330 - DNA, 15 bp, Homo sapiens
ctcactgtaacctct

SEQ ID NO: 1582331 - DNA, 15 bp, Homo sapiens
tcactgtaacctctg

SEQ ID NO: 1582332 - DNA, 15 bp, Homo sapiens
cactgtaacctctgc

SEQ ID NO: 1582333 - DNA, 15 bp, Homo sapiens
taacctctgcctcct

SEQ ID NO: 1582334 - DNA, 15 bp, Homo sapiens
cctggattcaagcag

SEQ ID NO: 1582335 - DNA, 15 bp, Homo sapiens
ctggattcaagcagt

SEQ ID NO: 1582336 - DNA, 15 bp, Homo sapiens
tggattcaagcagtt

SEQ ID NO: 1582337 - DNA, 15 bp, Homo sapiens
ggattcaagcagttc

SEQ ID NO: 1582338 - DNA, 15 bp, Homo sapiens
tcaagcagttctcca

SEQ ID NO: 1582339 - DNA, 15 bp, Homo sapiens
caagcagttctccat

SEQ ID NO: 1582340 - DNA, 15 bp, Homo sapiens
aagcagttctccatg

SEQ ID NO: 1582341 - DNA, 15 bp, Homo sapiens
agcagttctccatgt

SEQ ID NO: 1582342 - DNA, 15 bp, Homo sapiens
gcagttctccatgtc

SEQ ID NO: 1582343 - DNA, 15 bp, Homo sapiens
cagttctccatgtct

SEQ ID NO: 1582344 - DNA, 15 bp, Homo sapiens
agttctccatgtctc

SEQ ID NO: 1582345 - DNA, 15 bp, Homo sapiens
gttctccatgtctca

SEQ ID NO: 1582346 - DNA, 15 bp, Homo sapiens
ttctccatgtctcag

SEQ ID NO: 1582347 - DNA, 15 bp, Homo sapiens
tctccatgtctcagc

SEQ ID NO: 1582348 - DNA, 15 bp, Homo sapiens
ctccatgtctcagcc

SEQ ID NO: 1582349 - DNA, 15 bp, Homo sapiens
tccatgtctcagcct

SEQ ID NO: 1582350 - DNA, 15 bp, Homo sapiens
ccatgtctcagcctc

SEQ ID NO: 1582351 - DNA, 15 bp, Homo sapiens
atgtctcagcctccc

SEQ ID NO: 1582352 - DNA, 15 bp, Homo sapiens
tgtctcagcctccct

SEQ ID NO: 1582353 - DNA, 15 bp, Homo sapiens
gtctcagcctcccta

SEQ ID NO: 1582354 - DNA, 15 bp, Homo sapiens
tctcagcctccctag

SEQ ID NO: 1582355 - DNA, 15 bp, Homo sapiens
ctcagcctccctagt

SEQ ID NO: 1582356 - DNA, 15 bp, Homo sapiens
tcagcctccctagta

SEQ ID NO: 1582357 - DNA, 15 bp, Homo sapiens
cagcctccctagtag

SEQ ID NO: 1582358 - DNA, 15 bp, Homo sapiens
agcctccctagtagc

SEQ ID NO: 1582359 - DNA, 15 bp, Homo sapiens
gcctccctagtagct

SEQ ID NO: 1582360 - DNA, 15 bp, Homo sapiens
cctccctagtagctg

SEQ ID NO: 1582361 - DNA, 15 bp, Homo sapiens
ctccctagtagctgg

SEQ ID NO: 1582362 - DNA, 15 bp, Homo sapiens
tccctagtagctggg

SEQ ID NO: 1582363 - DNA, 15 bp, Homo sapiens
ccctagtagctggga

SEQ ID NO: 1582364 - DNA, 15 bp, Homo sapiens
cctagtagctgggat

SEQ ID NO: 1582365 - DNA, 15 bp, Homo sapiens
ctagtagctgggatt

SEQ ID NO: 1582366 - DNA, 15 bp, Homo sapiens
tagtagctgggatta

SEQ ID NO: 1582367 - DNA, 15 bp, Homo sapiens
ggattacaggcctgt

SEQ ID NO: 1582368 - DNA, 15 bp, Homo sapiens
gattacaggcctgtg

SEQ ID NO: 1582369 - DNA, 15 bp, Homo sapiens
attacaggcctgtgc

SEQ ID NO: 1582370 - DNA, 15 bp, Homo sapiens
ttacaggcctgtgcc

SEQ ID NO: 1582371 - DNA, 15 bp, Homo sapiens
tacaggcctgtgcca

SEQ ID NO: 1582372 - DNA, 15 bp, Homo sapiens
acaggcctgtgccac

SEQ ID NO: 1582373 - DNA, 15 bp, Homo sapiens
caggcctgtgccacc

SEQ ID NO: 1582374 - DNA, 15 bp, Homo sapiens
aggcctgtgccacca

SEQ ID NO: 1582375 - DNA, 15 bp, Homo sapiens
ggcctgtgccaccat

SEQ ID NO: 1582376 - DNA, 15 bp, Homo sapiens
gcctgtgccaccatg

SEQ ID NO: 1582377 - DNA, 15 bp, Homo sapiens
cctgtgccaccatgc

SEQ ID NO: 1582378 - DNA, 15 bp, Homo sapiens
ctgtgccaccatgcc

SEQ ID NO: 1582379 - DNA, 15 bp, Homo sapiens
ggctaattttttttt

SEQ ID NO: 1582380 - DNA, 15 bp, Homo sapiens
attttttttttgtat

SEQ ID NO: 1582381 - DNA, 15 bp, Homo sapiens
tttttttttgtattt

SEQ ID NO: 1582382 - DNA, 15 bp, Homo sapiens
acggggttttaccac

SEQ ID NO: 1582383 - DNA, 15 bp, Homo sapiens
cggggttttaccacg

SEQ ID NO: 1582384 - DNA, 15 bp, Homo sapiens
ggggttttaccacgt

SEQ ID NO: 1582385 - DNA, 15 bp, Homo sapiens
gggttttaccacgtt

SEQ ID NO: 1582386 - DNA, 15 bp, Homo sapiens
ggttttaccacgttg

SEQ ID NO: 1582387 - DNA, 15 bp, Homo sapiens
gttttaccacgttgg

SEQ ID NO: 1582388 - DNA, 15 bp, Homo sapiens
ttttaccacgttggc

SEQ ID NO: 1582389 - DNA, 15 bp, Homo sapiens
tttaccacgttggcc

SEQ ID NO: 1582390 - DNA, 15 bp, Homo sapiens
ttaccacgttggcca

SEQ ID NO: 1582391 - DNA, 15 bp, Homo sapiens
taccacgttggccag

SEQ ID NO: 1582392 - DNA, 15 bp, Homo sapiens
accacgttggccagg

SEQ ID NO: 1582393 - DNA, 15 bp, Homo sapiens
aactcttgacctcga

SEQ ID NO: 1582394 - DNA, 15 bp, Homo sapiens
actcttgacctcgag

SEQ ID NO: 1582395 - DNA, 15 bp, Homo sapiens
ctcttgacctcgagc

SEQ ID NO: 1582396 - DNA, 15 bp, Homo sapiens
tcttgacctcgagcg

SEQ ID NO: 1582397 - DNA, 15 bp, Homo sapiens
cttgacctcgagcga

SEQ ID NO: 1582398 - DNA, 15 bp, Homo sapiens
ttgacctcgagcgat

SEQ ID NO: 1582399 - DNA, 15 bp, Homo sapiens
tgacctcgagcgatc

SEQ ID NO: 1582400 - DNA, 15 bp, Homo sapiens
gacctcgagcgatca

SEQ ID NO: 1582401 - DNA, 15 bp, Homo sapiens
acctcgagcgatcaa

SEQ ID NO: 1582402 - DNA, 15 bp, Homo sapiens
cctcgagcgatcaac

SEQ ID NO: 1582403 - DNA, 15 bp, Homo sapiens
ctcgagcgatcaact

SEQ ID NO: 1582404 - DNA, 15 bp, Homo sapiens
tcgagcgatcaactt

SEQ ID NO: 1582405 - DNA, 15 bp, Homo sapiens
cgagcgatcaacttg

SEQ ID NO: 1582406 - DNA, 15 bp, Homo sapiens
gagcgatcaacttgc

SEQ ID NO: 1582407 - DNA, 15 bp, Homo sapiens
agcgatcaacttgcc

SEQ ID NO: 1582408 - DNA, 15 bp, Homo sapiens
gcgatcaacttgcct

SEQ ID NO: 1582409 - DNA, 15 bp, Homo sapiens
cgatcaacttgcctt

SEQ ID NO: 1582410 - DNA, 15 bp, Homo sapiens
gatcaacttgccttg

SEQ ID NO: 1582411 - DNA, 15 bp, Homo sapiens
atcaacttgccttgg

SEQ ID NO: 1582412 - DNA, 15 bp, Homo sapiens
tcaacttgccttggc

SEQ ID NO: 1582413 - DNA, 15 bp, Homo sapiens
caacttgccttggcc

SEQ ID NO: 1582414 - DNA, 15 bp, Homo sapiens
aacttgccttggcct

SEQ ID NO: 1582415 - DNA, 15 bp, Homo sapiens
acttgccttggcctc

SEQ ID NO: 1582416 - DNA, 15 bp, Homo sapiens
caggcatgagccaca

SEQ ID NO: 1582417 - DNA, 15 bp, Homo sapiens
aggcatgagccacag

SEQ ID NO: 1582418 - DNA, 15 bp, Homo sapiens
ggcatgagccacagc

SEQ ID NO: 1582419 - DNA, 15 bp, Homo sapiens
gcatgagccacagcg

SEQ ID NO: 1582420 - DNA, 15 bp, Homo sapiens
catgagccacagcgc

SEQ ID NO: 1582421 - DNA, 15 bp, Homo sapiens
atgagccacagcgcc

SEQ ID NO: 1582422 - DNA, 15 bp, Homo sapiens
tgagccacagcgccc

SEQ ID NO: 1582423 - DNA, 15 bp, Homo sapiens
gagccacagcgccca

SEQ ID NO: 1582424 - DNA, 15 bp, Homo sapiens
agccacagcgcccag

SEQ ID NO: 1582425 - DNA, 15 bp, Homo sapiens
gccacagcgcccagc

SEQ ID NO: 1582426 - DNA, 15 bp, Homo sapiens
ccacagcgcccagcc

SEQ ID NO: 1582427 - DNA, 15 bp, Homo sapiens
cacagcgcccagccg

SEQ ID NO: 1582428 - DNA, 15 bp, Homo sapiens
acagcgcccagccgt

SEQ ID NO: 1582429 - DNA, 15 bp, Homo sapiens
cagcgcccagccgtc

SEQ ID NO: 1582430 - DNA, 15 bp, Homo sapiens
agcgcccagccgtct

SEQ ID NO: 1582431 - DNA, 15 bp, Homo sapiens
gcgcccagccgtctt

SEQ ID NO: 1582432 - DNA, 15 bp, Homo sapiens
cgcccagccgtcttt

SEQ ID NO: 1582433 - DNA, 15 bp, Homo sapiens
gcccagccgtctttt

SEQ ID NO: 1582434 - DNA, 15 bp, Homo sapiens
cccagccgtcttttt

SEQ ID NO: 1582435 - DNA, 15 bp, Homo sapiens
ccagccgtctttttt

SEQ ID NO: 1582436 - DNA, 15 bp, Homo sapiens
cagccgtcttttttt

SEQ ID NO: 1582437 - DNA, 15 bp, Homo sapiens
agccgtctttttttt

SEQ ID NO: 1582438 - DNA, 15 bp, Homo sapiens
gccgtcttttttttt

SEQ ID NO: 1582439 - DNA, 15 bp, Homo sapiens
ccgtcttttttttta

SEQ ID NO: 1582440 - DNA, 15 bp, Homo sapiens
cgtctttttttttaa

SEQ ID NO: 1582441 - DNA, 15 bp, Homo sapiens
gtctttttttttaaa

SEQ ID NO: 1582442 - DNA, 15 bp, Homo sapiens
tctttttttttaaat

SEQ ID NO: 1582443 - DNA, 15 bp, Homo sapiens
ctttttttttaaata

SEQ ID NO: 1582444 - DNA, 15 bp, Homo sapiens
tttttttttaaatag

SEQ ID NO: 1582445 - DNA, 15 bp, Homo sapiens
ttttttttaaatagc

SEQ ID NO: 1582446 - DNA, 15 bp, Homo sapiens
tttttttaaatagca

SEQ ID NO: 1582447 - DNA, 15 bp, Homo sapiens
ttttttaaatagcaa

SEQ ID NO: 1582448 - DNA, 15 bp, Homo sapiens
tttttaaatagcaat

SEQ ID NO: 1582449 - DNA, 15 bp, Homo sapiens
ttttaaatagcaatt

SEQ ID NO: 1582450 - DNA, 15 bp, Homo sapiens
tttaaatagcaattt

SEQ ID NO: 1582451 - DNA, 15 bp, Homo sapiens
ttaaatagcaattta

SEQ ID NO: 1582452 - DNA, 15 bp, Homo sapiens
taaatagcaatttaa

SEQ ID NO: 1582453 - DNA, 15 bp, Homo sapiens
aaatagcaatttaac

SEQ ID NO: 1582454 - DNA, 15 bp, Homo sapiens
aatagcaatttaaca

SEQ ID NO: 1582455 - DNA, 15 bp, Homo sapiens
atagcaatttaacac

SEQ ID NO: 1582456 - DNA, 15 bp, Homo sapiens
tagcaatttaacact

SEQ ID NO: 1582457 - DNA, 15 bp, Homo sapiens
agcaatttaacactg

SEQ ID NO: 1582458 - DNA, 15 bp, Homo sapiens
gcaatttaacactgt

SEQ ID NO: 1582459 - DNA, 15 bp, Homo sapiens
caatttaacactgtt

SEQ ID NO: 1582460 - DNA, 15 bp, Homo sapiens
aatttaacactgttc

SEQ ID NO: 1582461 - DNA, 15 bp, Homo sapiens
atttaacactgttca

SEQ ID NO: 1582462 - DNA, 15 bp, Homo sapiens
tttaacactgttcac

SEQ ID NO: 1582463 - DNA, 15 bp, Homo sapiens
ttaacactgttcaca

SEQ ID NO: 1582464 - DNA, 15 bp, Homo sapiens
taacactgttcacag

SEQ ID NO: 1582465 - DNA, 15 bp, Homo sapiens
aacactgttcacagt

SEQ ID NO: 1582466 - DNA, 15 bp, Homo sapiens
acactgttcacagtt

SEQ ID NO: 1582467 - DNA, 15 bp, Homo sapiens
cactgttcacagtta

SEQ ID NO: 1582468 - DNA, 15 bp, Homo sapiens
actgttcacagttac

SEQ ID NO: 1582469 - DNA, 15 bp, Homo sapiens
ctgttcacagttact

SEQ ID NO: 1582470 - DNA, 15 bp, Homo sapiens
tgttcacagttactc

SEQ ID NO: 1582471 - DNA, 15 bp, Homo sapiens
gttcacagttactca

SEQ ID NO: 1582472 - DNA, 15 bp, Homo sapiens
ttcacagttactcat

SEQ ID NO: 1582473 - DNA, 15 bp, Homo sapiens
tcacagttactcatg

SEQ ID NO: 1582474 - DNA, 15 bp, Homo sapiens
cacagttactcatgt

SEQ ID NO: 1582475 - DNA, 15 bp, Homo sapiens
acagttactcatgta

SEQ ID NO: 1582476 - DNA, 15 bp, Homo sapiens
cagttactcatgtac

SEQ ID NO: 1582477 - DNA, 15 bp, Homo sapiens
agttactcatgtaca

SEQ ID NO: 1582478 - DNA, 15 bp, Homo sapiens
gttactcatgtacat

SEQ ID NO: 1582479 - DNA, 15 bp, Homo sapiens
ttactcatgtacatg

SEQ ID NO: 1582480 - DNA, 15 bp, Homo sapiens
tactcatgtacatgt

SEQ ID NO: 1582481 - DNA, 15 bp, Homo sapiens
actcatgtacatgtc

SEQ ID NO: 1582482 - DNA, 15 bp, Homo sapiens
ctcatgtacatgtca

SEQ ID NO: 1582483 - DNA, 15 bp, Homo sapiens
tcatgtacatgtcat

SEQ ID NO: 1582484 - DNA, 15 bp, Homo sapiens
catgtacatgtcatg

SEQ ID NO: 1582485 - DNA, 15 bp, Homo sapiens
atgtacatgtcatgc

SEQ ID NO: 1582486 - DNA, 15 bp, Homo sapiens
tgtacatgtcatgcc

SEQ ID NO: 1582487 - DNA, 15 bp, Homo sapiens
gtacatgtcatgcca

SEQ ID NO: 1582488 - DNA, 15 bp, Homo sapiens
tacatgtcatgccat

SEQ ID NO: 1582489 - DNA, 15 bp, Homo sapiens
acatgtcatgccatc

SEQ ID NO: 1582490 - DNA, 15 bp, Homo sapiens
catgtcatgccatct

SEQ ID NO: 1582491 - DNA, 15 bp, Homo sapiens
atgtcatgccatcta

SEQ ID NO: 1582492 - DNA, 15 bp, Homo sapiens
tgtcatgccatctat

SEQ ID NO: 1582493 - DNA, 15 bp, Homo sapiens
gtcatgccatctatt

SEQ ID NO: 1582494 - DNA, 15 bp, Homo sapiens
tcatgccatctatta

SEQ ID NO: 1582495 - DNA, 15 bp, Homo sapiens
catgccatctattac

SEQ ID NO: 1582496 - DNA, 15 bp, Homo sapiens
atgccatctattaca

SEQ ID NO: 1582497 - DNA, 15 bp, Homo sapiens
tgccatctattacac

SEQ ID NO: 1582498 - DNA, 15 bp, Homo sapiens
gccatctattacact

SEQ ID NO: 1582499 - DNA, 15 bp, Homo sapiens
ccatctattacactg

SEQ ID NO: 1582500 - DNA, 15 bp, Homo sapiens
catctattacactgt

SEQ ID NO: 1582501 - DNA, 15 bp, Homo sapiens
atctattacactgta

SEQ ID NO: 1582502 - DNA, 15 bp, Homo sapiens
tctattacactgtaa

SEQ ID NO: 1582503 - DNA, 15 bp, Homo sapiens
ctattacactgtaag

SEQ ID NO: 1582504 - DNA, 15 bp, Homo sapiens
tattacactgtaagt

SEQ ID NO: 1582505 - DNA, 15 bp, Homo sapiens
attacactgtaagtt

SEQ ID NO: 1582506 - DNA, 15 bp, Homo sapiens
ttacactgtaagttc

SEQ ID NO: 1582507 - DNA, 15 bp, Homo sapiens
tacactgtaagttct

SEQ ID NO: 1582508 - DNA, 15 bp, Homo sapiens
acactgtaagttctg

SEQ ID NO: 1582509 - DNA, 15 bp, Homo sapiens
cactgtaagttctgt

SEQ ID NO: 1582510 - DNA, 15 bp, Homo sapiens
actgtaagttctgtg

SEQ ID NO: 1582511 - DNA, 15 bp, Homo sapiens
ctgtaagttctgtga

SEQ ID NO: 1582512 - DNA, 15 bp, Homo sapiens
tgtaagttctgtgag

SEQ ID NO: 1582513 - DNA, 15 bp, Homo sapiens
gtaagttctgtgagg

SEQ ID NO: 1582514 - DNA, 15 bp, Homo sapiens
taagttctgtgaggg

SEQ ID NO: 1582515 - DNA, 15 bp, Homo sapiens
aagttctgtgagggt

SEQ ID NO: 1582516 - DNA, 15 bp, Homo sapiens
agttctgtgagggta

SEQ ID NO: 1582517 - DNA, 15 bp, Homo sapiens
gttctgtgagggtag

SEQ ID NO: 1582518 - DNA, 15 bp, Homo sapiens
ttctgtgagggtagc

SEQ ID NO: 1582519 - DNA, 15 bp, Homo sapiens
tctgtgagggtagct

SEQ ID NO: 1582520 - DNA, 15 bp, Homo sapiens
ctgtgagggtagctg

SEQ ID NO: 1582521 - DNA, 15 bp, Homo sapiens
tgtgagggtagctgt

SEQ ID NO: 1582522 - DNA, 15 bp, Homo sapiens
gtgagggtagctgta

SEQ ID NO: 1582523 - DNA, 15 bp, Homo sapiens
tgagggtagctgtat

SEQ ID NO: 1582524 - DNA, 15 bp, Homo sapiens
gagggtagctgtatc

SEQ ID NO: 1582525 - DNA, 15 bp, Homo sapiens
agggtagctgtatca

SEQ ID NO: 1582526 - DNA, 15 bp, Homo sapiens
gggtagctgtatcaa

SEQ ID NO: 1582527 - DNA, 15 bp, Homo sapiens
ggtagctgtatcaaa

SEQ ID NO: 1582528 - DNA, 15 bp, Homo sapiens
gtagctgtatcaaat

SEQ ID NO: 1582529 - DNA, 15 bp, Homo sapiens
tagctgtatcaaatt

SEQ ID NO: 1582530 - DNA, 15 bp, Homo sapiens
agctgtatcaaattt

SEQ ID NO: 1582531 - DNA, 15 bp, Homo sapiens
gctgtatcaaattta

SEQ ID NO: 1582532 - DNA, 15 bp, Homo sapiens
ctgtatcaaatttat

SEQ ID NO: 1582533 - DNA, 15 bp, Homo sapiens
tgtatcaaatttatc

SEQ ID NO: 1582534 - DNA, 15 bp, Homo sapiens
gtatcaaatttatct

SEQ ID NO: 1582535 - DNA, 15 bp, Homo sapiens
tatcaaatttatcta

SEQ ID NO: 1582536 - DNA, 15 bp, Homo sapiens
atcaaatttatctaa

SEQ ID NO: 1582537 - DNA, 15 bp, Homo sapiens
tcaaatttatctaac

SEQ ID NO: 1582538 - DNA, 15 bp, Homo sapiens
caaatttatctaact

SEQ ID NO: 1582539 - DNA, 15 bp, Homo sapiens
aaatttatctaactc

SEQ ID NO: 1582540 - DNA, 15 bp, Homo sapiens
aatttatctaactct

SEQ ID NO: 1582541 - DNA, 15 bp, Homo sapiens
atttatctaactctc

SEQ ID NO: 1582542 - DNA, 15 bp, Homo sapiens
tttatctaactctct

SEQ ID NO: 1582543 - DNA, 15 bp, Homo sapiens
ttatctaactctctc

SEQ ID NO: 1582544 - DNA, 15 bp, Homo sapiens
tatctaactctctct

SEQ ID NO: 1582545 - DNA, 15 bp, Homo sapiens
atctaactctctcta

SEQ ID NO: 1582546 - DNA, 15 bp, Homo sapiens
tctaactctctctag

SEQ ID NO: 1582547 - DNA, 15 bp, Homo sapiens
ctaactctctctagt

SEQ ID NO: 1582548 - DNA, 15 bp, Homo sapiens
taactctctctagta

SEQ ID NO: 1582549 - DNA, 15 bp, Homo sapiens
aactctctctagtat

SEQ ID NO: 1582550 - DNA, 15 bp, Homo sapiens
actctctctagtatg

SEQ ID NO: 1582551 - DNA, 15 bp, Homo sapiens
ctctctctagtatgc

SEQ ID NO: 1582552 - DNA, 15 bp, Homo sapiens
tctctctagtatgca

SEQ ID NO: 1582553 - DNA, 15 bp, Homo sapiens
ctctctagtatgcat

SEQ ID NO: 1582554 - DNA, 15 bp, Homo sapiens
tctctagtatgcatg

SEQ ID NO: 1582555 - DNA, 15 bp, Homo sapiens
ctctagtatgcatga

SEQ ID NO: 1582556 - DNA, 15 bp, Homo sapiens
tctagtatgcatgac

SEQ ID NO: 1582557 - DNA, 15 bp, Homo sapiens
ctagtatgcatgaca

SEQ ID NO: 1582558 - DNA, 15 bp, Homo sapiens
tagtatgcatgacat

SEQ ID NO: 1582559 - DNA, 15 bp, Homo sapiens
agtatgcatgacata

SEQ ID NO: 1582560 - DNA, 15 bp, Homo sapiens
gtatgcatgacatag

SEQ ID NO: 1582561 - DNA, 15 bp, Homo sapiens
tatgcatgacatagt

SEQ ID NO: 1582562 - DNA, 15 bp, Homo sapiens
atgcatgacatagta

SEQ ID NO: 1582563 - DNA, 15 bp, Homo sapiens
tgcatgacatagtaa

SEQ ID NO: 1582564 - DNA, 15 bp, Homo sapiens
gcatgacatagtaag

SEQ ID NO: 1582565 - DNA, 15 bp, Homo sapiens
catgacatagtaagt

SEQ ID NO: 1582566 - DNA, 15 bp, Homo sapiens
atgacatagtaagta

SEQ ID NO: 1582567 - DNA, 15 bp, Homo sapiens
tgacatagtaagtat

SEQ ID NO: 1582568 - DNA, 15 bp, Homo sapiens
gacatagtaagtatt

SEQ ID NO: 1582569 - DNA, 15 bp, Homo sapiens
acatagtaagtattc

SEQ ID NO: 1582570 - DNA, 15 bp, Homo sapiens
catagtaagtattca

SEQ ID NO: 1582571 - DNA, 15 bp, Homo sapiens
atagtaagtattcaa

SEQ ID NO: 1582572 - DNA, 15 bp, Homo sapiens
agtaagtattcaata

SEQ ID NO: 1582573 - DNA, 15 bp, Homo sapiens
gtaagtattcaataa

SEQ ID NO: 1582574 - DNA, 15 bp, Homo sapiens
taagtattcaataaa

SEQ ID NO: 1582575 - DNA, 15 bp, Homo sapiens
aagtattcaataaat

SEQ ID NO: 1582576 - DNA, 15 bp, Homo sapiens
agtattcaataaata

SEQ ID NO: 1582577 - DNA, 15 bp, Homo sapiens
gtattcaataaatat

SEQ ID NO: 1582578 - DNA, 15 bp, Homo sapiens
tattcaataaatatt

SEQ ID NO: 1582579 - DNA, 15 bp, Homo sapiens
attcaataaatattt

SEQ ID NO: 1582580 - DNA, 15 bp, Homo sapiens
ttcaataaatatttg

SEQ ID NO: 1582581 - DNA, 15 bp, Homo sapiens
tcaataaatatttgc

SEQ ID NO: 1582582 - DNA, 15 bp, Homo sapiens
caataaatatttgca

SEQ ID NO: 1582583 - DNA, 15 bp, Homo sapiens
ataaatatttgcata

SEQ ID NO: 1582584 - DNA, 15 bp, Homo sapiens
taaatatttgcatat

SEQ ID NO: 1582585 - DNA, 15 bp, Homo sapiens
aaatatttgcatatt

SEQ ID NO: 1582586 - DNA, 15 bp, Homo sapiens
aatatttgcatatta

SEQ ID NO: 1582587 - DNA, 15 bp, Homo sapiens
atatttgcatattag

SEQ ID NO: 1582588 - DNA, 15 bp, Homo sapiens
tatttgcatattagt

SEQ ID NO: 1582589 - DNA, 15 bp, Homo sapiens
atttgcatattagtg

SEQ ID NO: 1582590 - DNA, 15 bp, Homo sapiens
tttgcatattagtga

SEQ ID NO: 1582591 - DNA, 15 bp, Homo sapiens
ttgcatattagtgat

SEQ ID NO: 1582592 - DNA, 15 bp, Homo sapiens
tgcatattagtgata

SEQ ID NO: 1582593 - DNA, 15 bp, Homo sapiens
gcatattagtgataa

SEQ ID NO: 1582594 - DNA, 15 bp, Homo sapiens
catattagtgataag

SEQ ID NO: 1582595 - DNA, 15 bp, Homo sapiens
atattagtgataagg

SEQ ID NO: 1582596 - DNA, 15 bp, Homo sapiens
tattagtgataagga

SEQ ID NO: 1582597 - DNA, 15 bp, Homo sapiens
attagtgataaggat

SEQ ID NO: 1582598 - DNA, 15 bp, Homo sapiens
ttagtgataaggata

SEQ ID NO: 1582599 - DNA, 15 bp, Homo sapiens
tagtgataaggatac

SEQ ID NO: 1582600 - DNA, 15 bp, Homo sapiens
agtgataaggataca

SEQ ID NO: 1582601 - DNA, 15 bp, Homo sapiens
gtgataaggatacag

SEQ ID NO: 1582602 - DNA, 15 bp, Homo sapiens
tgataaggatacagg

SEQ ID NO: 1582603 - DNA, 15 bp, Homo sapiens
gataaggatacaggt

SEQ ID NO: 1582604 - DNA, 15 bp, Homo sapiens
ataaggatacaggtt

SEQ ID NO: 1582605 - DNA, 15 bp, Homo sapiens
taaggatacaggttc

SEQ ID NO: 1582606 - DNA, 15 bp, Homo sapiens
aaggatacaggttct

SEQ ID NO: 1582607 - DNA, 15 bp, Homo sapiens
aggatacaggttctg

SEQ ID NO: 1582608 - DNA, 15 bp, Homo sapiens
ggatacaggttctga

SEQ ID NO: 1582609 - DNA, 15 bp, Homo sapiens
gatacaggttctgaa

SEQ ID NO: 1582610 - DNA, 15 bp, Homo sapiens
atacaggttctgaat

SEQ ID NO: 1582611 - DNA, 15 bp, Homo sapiens
tacaggttctgaata

SEQ ID NO: 1582612 - DNA, 15 bp, Homo sapiens
acaggttctgaatag

SEQ ID NO: 1582613 - DNA, 15 bp, Homo sapiens
caggttctgaatagt

SEQ ID NO: 1582614 - DNA, 15 bp, Homo sapiens
aggttctgaatagtg

SEQ ID NO: 1582615 - DNA, 15 bp, Homo sapiens
ggttctgaatagtgg

SEQ ID NO: 1582616 - DNA, 15 bp, Homo sapiens
gttctgaatagtggg

SEQ ID NO: 1582617 - DNA, 15 bp, Homo sapiens
ttctgaatagtgggt

SEQ ID NO: 1582618 - DNA, 15 bp, Homo sapiens
tctgaatagtgggtc

SEQ ID NO: 1582619 - DNA, 15 bp, Homo sapiens
ctgaatagtgggtcc

SEQ ID NO: 1582620 - DNA, 15 bp, Homo sapiens
tgaatagtgggtcct

SEQ ID NO: 1582621 - DNA, 15 bp, Homo sapiens
gaatagtgggtcctt

SEQ ID NO: 1582622 - DNA, 15 bp, Homo sapiens
aatagtgggtcctta

SEQ ID NO: 1582623 - DNA, 15 bp, Homo sapiens
atagtgggtccttac

SEQ ID NO: 1582624 - DNA, 15 bp, Homo sapiens
tagtgggtccttacc

SEQ ID NO: 1582625 - DNA, 15 bp, Homo sapiens
agtgggtccttacca

SEQ ID NO: 1582626 - DNA, 15 bp, Homo sapiens
gtgggtccttaccat

SEQ ID NO: 1582627 - DNA, 15 bp, Homo sapiens
tgggtccttaccatt

SEQ ID NO: 1582628 - DNA, 15 bp, Homo sapiens
gggtccttaccattt

SEQ ID NO: 1582629 - DNA, 15 bp, Homo sapiens
ggtccttaccattta

SEQ ID NO: 1582630 - DNA, 15 bp, Homo sapiens
gtccttaccatttaa

SEQ ID NO: 1582631 - DNA, 15 bp, Homo sapiens
tccttaccatttaag

SEQ ID NO: 1582632 - DNA, 15 bp, Homo sapiens
ccttaccatttaaga

SEQ ID NO: 1582633 - DNA, 15 bp, Homo sapiens
cttaccatttaagaa

SEQ ID NO: 1582634 - DNA, 15 bp, Homo sapiens
ttaccatttaagaat

SEQ ID NO: 1582635 - DNA, 15 bp, Homo sapiens
taccatttaagaatt

SEQ ID NO: 1582636 - DNA, 15 bp, Homo sapiens
accatttaagaatta

SEQ ID NO: 1582637 - DNA, 15 bp, Homo sapiens
ccatttaagaattag

SEQ ID NO: 1582638 - DNA, 15 bp, Homo sapiens
catttaagaattagt

SEQ ID NO: 1582639 - DNA, 15 bp, Homo sapiens
atttaagaattagta

SEQ ID NO: 1582640 - DNA, 15 bp, Homo sapiens
tttaagaattagtat

SEQ ID NO: 1582641 - DNA, 15 bp, Homo sapiens
ttaagaattagtatt

SEQ ID NO: 1582642 - DNA, 15 bp, Homo sapiens
taagaattagtattt

SEQ ID NO: 1582643 - DNA, 15 bp, Homo sapiens
aagaattagtatttg

SEQ ID NO: 1582644 - DNA, 15 bp, Homo sapiens
agaattagtatttga

SEQ ID NO: 1582645 - DNA, 15 bp, Homo sapiens
gaattagtatttgat

SEQ ID NO: 1582646 - DNA, 15 bp, Homo sapiens
aattagtatttgatg

SEQ ID NO: 1582647 - DNA, 15 bp, Homo sapiens
attagtatttgatgg

SEQ ID NO: 1582648 - DNA, 15 bp, Homo sapiens
ttagtatttgatggc

SEQ ID NO: 1582649 - DNA, 15 bp, Homo sapiens
tagtatttgatggcc

SEQ ID NO: 1582650 - DNA, 15 bp, Homo sapiens
agtatttgatggccg

SEQ ID NO: 1582651 - DNA, 15 bp, Homo sapiens
gtatttgatggccgg

SEQ ID NO: 1582652 - DNA, 15 bp, Homo sapiens
tatttgatggccggg

SEQ ID NO: 1582653 - DNA, 15 bp, Homo sapiens
atttgatggccgggc

SEQ ID NO: 1582654 - DNA, 15 bp, Homo sapiens
tttgatggccgggcg

SEQ ID NO: 1582655 - DNA, 15 bp, Homo sapiens
ttgatggccgggcgg

SEQ ID NO: 1582656 - DNA, 15 bp, Homo sapiens
tgatggccgggcggg

SEQ ID NO: 1582657 - DNA, 15 bp, Homo sapiens
gatggccgggcgggg

SEQ ID NO: 1582658 - DNA, 15 bp, Homo sapiens
atggccgggcggggt

SEQ ID NO: 1582659 - DNA, 15 bp, Homo sapiens
tggccgggcggggtg

SEQ ID NO: 1582660 - DNA, 15 bp, Homo sapiens
ggccgggcggggtgg

SEQ ID NO: 1582661 - DNA, 15 bp, Homo sapiens
gccgggcggggtggc

SEQ ID NO: 1582662 - DNA, 15 bp, Homo sapiens
ccgggcggggtggct

SEQ ID NO: 1582663 - DNA, 15 bp, Homo sapiens
cgggcggggtggctc

SEQ ID NO: 1582664 - DNA, 15 bp, Homo sapiens
gggcggggtggctca

SEQ ID NO: 1582665 - DNA, 15 bp, Homo sapiens
ggcggggtggctcac

SEQ ID NO: 1582666 - DNA, 15 bp, Homo sapiens
gcggggtggctcacg

SEQ ID NO: 1582667 - DNA, 15 bp, Homo sapiens
cggggtggctcacgc

SEQ ID NO: 1582668 - DNA, 15 bp, Homo sapiens
ggggtggctcacgcc

SEQ ID NO: 1582669 - DNA, 15 bp, Homo sapiens
gggcggatcatgaga

SEQ ID NO: 1582670 - DNA, 15 bp, Homo sapiens
ggcggatcatgagat

SEQ ID NO: 1582671 - DNA, 15 bp, Homo sapiens
gcggatcatgagatc

SEQ ID NO: 1582672 - DNA, 15 bp, Homo sapiens
cggatcatgagatca

SEQ ID NO: 1582673 - DNA, 15 bp, Homo sapiens
ggatcatgagatcag

SEQ ID NO: 1582674 - DNA, 15 bp, Homo sapiens
gatcatgagatcagg

SEQ ID NO: 1582675 - DNA, 15 bp, Homo sapiens
atcatgagatcagga

SEQ ID NO: 1582676 - DNA, 15 bp, Homo sapiens
tcatgagatcaggag

SEQ ID NO: 1582677 - DNA, 15 bp, Homo sapiens
catgagatcaggaga

SEQ ID NO: 1582678 - DNA, 15 bp, Homo sapiens
atgagatcaggagat

SEQ ID NO: 1582679 - DNA, 15 bp, Homo sapiens
tgagatcaggagatc

SEQ ID NO: 1582680 - DNA, 15 bp, Homo sapiens
gagatcaggagatcg

SEQ ID NO: 1582681 - DNA, 15 bp, Homo sapiens
agatcaggagatcga

SEQ ID NO: 1582682 - DNA, 15 bp, Homo sapiens
gatcaggagatcgag

SEQ ID NO: 1582683 - DNA, 15 bp, Homo sapiens
atcaggagatcgaga

SEQ ID NO: 1582684 - DNA, 15 bp, Homo sapiens
ctaacatggtgaaat

SEQ ID NO: 1582685 - DNA, 15 bp, Homo sapiens
taacatggtgaaatc

SEQ ID NO: 1582686 - DNA, 15 bp, Homo sapiens
gtgaaatcccgtctt

SEQ ID NO: 1582687 - DNA, 15 bp, Homo sapiens
tgaaatcccgtcttt

SEQ ID NO: 1582688 - DNA, 15 bp, Homo sapiens
gaaatcccgtcttta

SEQ ID NO: 1582689 - DNA, 15 bp, Homo sapiens
aaatcccgtctttac

SEQ ID NO: 1582690 - DNA, 15 bp, Homo sapiens
aatcccgtctttaca

SEQ ID NO: 1582691 - DNA, 15 bp, Homo sapiens
atcccgtctttacaa

SEQ ID NO: 1582692 - DNA, 15 bp, Homo sapiens
tcccgtctttacaaa

SEQ ID NO: 1582693 - DNA, 15 bp, Homo sapiens
cccgtctttacaaaa

SEQ ID NO: 1582694 - DNA, 15 bp, Homo sapiens
ccgtctttacaaaaa

SEQ ID NO: 1582695 - DNA, 15 bp, Homo sapiens
cgtctttacaaaaaa

SEQ ID NO: 1582696 - DNA, 15 bp, Homo sapiens
gtctttacaaaaaaa

SEQ ID NO: 1582697 - DNA, 15 bp, Homo sapiens
tctttacaaaaaaaa

SEQ ID NO: 1582698 - DNA, 15 bp, Homo sapiens
ctttacaaaaaaaat

SEQ ID NO: 1582699 - DNA, 15 bp, Homo sapiens
tttacaaaaaaaata

SEQ ID NO: 1582700 - DNA, 15 bp, Homo sapiens
ttacaaaaaaaatac

SEQ ID NO: 1582701 - DNA, 15 bp, Homo sapiens
tacaaaaaaaataca

SEQ ID NO: 1582702 - DNA, 15 bp, Homo sapiens
acaaaaaaaatacaa

SEQ ID NO: 1582703 - DNA, 15 bp, Homo sapiens
caaaaaaaatacaaa

SEQ ID NO: 1582704 - DNA, 15 bp, Homo sapiens
aaaaaaatacaaaag

SEQ ID NO: 1582705 - DNA, 15 bp, Homo sapiens
aaaaaatacaaaaga

SEQ ID NO: 1582706 - DNA, 15 bp, Homo sapiens
aaaaatacaaaagaa

SEQ ID NO: 1582707 - DNA, 15 bp, Homo sapiens
aaaatacaaaagaat

SEQ ID NO: 1582708 - DNA, 15 bp, Homo sapiens
aaatacaaaagaatt

SEQ ID NO: 1582709 - DNA, 15 bp, Homo sapiens
aatacaaaagaatta

SEQ ID NO: 1582710 - DNA, 15 bp, Homo sapiens
atacaaaagaattaa

SEQ ID NO: 1582711 - DNA, 15 bp, Homo sapiens
tacaaaagaattaac

SEQ ID NO: 1582712 - DNA, 15 bp, Homo sapiens
acaaaagaattaacc

SEQ ID NO: 1582713 - DNA, 15 bp, Homo sapiens
caaaagaattaacca

SEQ ID NO: 1582714 - DNA, 15 bp, Homo sapiens
aaaagaattaaccaa

SEQ ID NO: 1582715 - DNA, 15 bp, Homo sapiens
aaagaattaaccaag

SEQ ID NO: 1582716 - DNA, 15 bp, Homo sapiens
aagaattaaccaagt

SEQ ID NO: 1582717 - DNA, 15 bp, Homo sapiens
agaattaaccaagtg

SEQ ID NO: 1582718 - DNA, 15 bp, Homo sapiens
gaattaaccaagtgt

SEQ ID NO: 1582719 - DNA, 15 bp, Homo sapiens
aattaaccaagtgtg

SEQ ID NO: 1582720 - DNA, 15 bp, Homo sapiens
attaaccaagtgtgg

SEQ ID NO: 1582721 - DNA, 15 bp, Homo sapiens
ttaaccaagtgtggt

SEQ ID NO: 1582722 - DNA, 15 bp, Homo sapiens
taaccaagtgtggtg

SEQ ID NO: 1582723 - DNA, 15 bp, Homo sapiens
aaccaagtgtggtgg

SEQ ID NO: 1582724 - DNA, 15 bp, Homo sapiens
accaagtgtggtggt

SEQ ID NO: 1582725 - DNA, 15 bp, Homo sapiens
ccaagtgtggtggtg

SEQ ID NO: 1582726 - DNA, 15 bp, Homo sapiens
caagtgtggtggtgg

SEQ ID NO: 1582727 - DNA, 15 bp, Homo sapiens
aagtgtggtggtggg

SEQ ID NO: 1582728 - DNA, 15 bp, Homo sapiens
agtgtggtggtgggt

SEQ ID NO: 1582729 - DNA, 15 bp, Homo sapiens
gtgtggtggtgggtg

SEQ ID NO: 1582730 - DNA, 15 bp, Homo sapiens
tgtggtggtgggtgc

SEQ ID NO: 1582731 - DNA, 15 bp, Homo sapiens
gtggtggtgggtgcc

SEQ ID NO: 1582732 - DNA, 15 bp, Homo sapiens
tggtggtgggtgcct

SEQ ID NO: 1582733 - DNA, 15 bp, Homo sapiens
ggtggtgggtgcctg

SEQ ID NO: 1582734 - DNA, 15 bp, Homo sapiens
gtggtgggtgcctgt

SEQ ID NO: 1582735 - DNA, 15 bp, Homo sapiens
tggtgggtgcctgta

SEQ ID NO: 1582736 - DNA, 15 bp, Homo sapiens
ggtgggtgcctgtag

SEQ ID NO: 1582737 - DNA, 15 bp, Homo sapiens
gtgggtgcctgtagt

SEQ ID NO: 1582738 - DNA, 15 bp, Homo sapiens
tgggtgcctgtagtc

SEQ ID NO: 1582739 - DNA, 15 bp, Homo sapiens
agtcccagctactgc

SEQ ID NO: 1582740 - DNA, 15 bp, Homo sapiens
gtcccagctactgct

SEQ ID NO: 1582741 - DNA, 15 bp, Homo sapiens
tcccagctactgctt

SEQ ID NO: 1582742 - DNA, 15 bp, Homo sapiens
cccagctactgcttt

SEQ ID NO: 1582743 - DNA, 15 bp, Homo sapiens
ccagctactgctttg

SEQ ID NO: 1582744 - DNA, 15 bp, Homo sapiens
cagctactgctttgt

SEQ ID NO: 1582745 - DNA, 15 bp, Homo sapiens
agctactgctttgtg

SEQ ID NO: 1582746 - DNA, 15 bp, Homo sapiens
gctactgctttgtga

SEQ ID NO: 1582747 - DNA, 15 bp, Homo sapiens
ctactgctttgtgag

SEQ ID NO: 1582748 - DNA, 15 bp, Homo sapiens
tactgctttgtgagg

SEQ ID NO: 1582749 - DNA, 15 bp, Homo sapiens
actgctttgtgaggc

SEQ ID NO: 1582750 - DNA, 15 bp, Homo sapiens
ctgctttgtgaggct

SEQ ID NO: 1582751 - DNA, 15 bp, Homo sapiens
tgctttgtgaggctg

SEQ ID NO: 1582752 - DNA, 15 bp, Homo sapiens
gctttgtgaggctga

SEQ ID NO: 1582753 - DNA, 15 bp, Homo sapiens
ctttgtgaggctgag

SEQ ID NO: 1582754 - DNA, 15 bp, Homo sapiens
tttgtgaggctgagg

SEQ ID NO: 1582755 - DNA, 15 bp, Homo sapiens
ttgtgaggctgaggc

SEQ ID NO: 1582756 - DNA, 15 bp, Homo sapiens
tgtgaggctgaggca

SEQ ID NO: 1582757 - DNA, 15 bp, Homo sapiens
gtgaggctgaggcag

SEQ ID NO: 1582758 - DNA, 15 bp, Homo sapiens
agatcacctgaggtg

SEQ ID NO: 1582759 - DNA, 15 bp, Homo sapiens
gatcacctgaggtgg

SEQ ID NO: 1582760 - DNA, 15 bp, Homo sapiens
atcacctgaggtggg

SEQ ID NO: 1582761 - DNA, 15 bp, Homo sapiens
tcacctgaggtggga

SEQ ID NO: 1582762 - DNA, 15 bp, Homo sapiens
cacctgaggtgggaa

SEQ ID NO: 1582763 - DNA, 15 bp, Homo sapiens
acctgaggtgggaaa

SEQ ID NO: 1582764 - DNA, 15 bp, Homo sapiens
cctgaggtgggaaat

SEQ ID NO: 1582765 - DNA, 15 bp, Homo sapiens
ctgaggtgggaaatt

SEQ ID NO: 1582766 - DNA, 15 bp, Homo sapiens
tgaggtgggaaattc

SEQ ID NO: 1582767 - DNA, 15 bp, Homo sapiens
gaggtgggaaattca

SEQ ID NO: 1582768 - DNA, 15 bp, Homo sapiens
aggtgggaaattcaa

SEQ ID NO: 1582769 - DNA, 15 bp, Homo sapiens
ggtgggaaattcaag

SEQ ID NO: 1582770 - DNA, 15 bp, Homo sapiens
gtgggaaattcaaga

SEQ ID NO: 1582771 - DNA, 15 bp, Homo sapiens
tgggaaattcaagac

SEQ ID NO: 1582772 - DNA, 15 bp, Homo sapiens
gggaaattcaagacc

SEQ ID NO: 1582773 - DNA, 15 bp, Homo sapiens
ggaaattcaagacca

SEQ ID NO: 1582774 - DNA, 15 bp, Homo sapiens
cgtggtggcgcatgt

SEQ ID NO: 1582775 - DNA, 15 bp, Homo sapiens
gtggtggcgcatgtc

SEQ ID NO: 1582776 - DNA, 15 bp, Homo sapiens
tggtggcgcatgtct

SEQ ID NO: 1582777 - DNA, 15 bp, Homo sapiens
ggtggcgcatgtctg

SEQ ID NO: 1582778 - DNA, 15 bp, Homo sapiens
gtggcgcatgtctgt

SEQ ID NO: 1582779 - DNA, 15 bp, Homo sapiens
tggcgcatgtctgta

SEQ ID NO: 1582780 - DNA, 15 bp, Homo sapiens
ggcgcatgtctgtaa

SEQ ID NO: 1582781 - DNA, 15 bp, Homo sapiens
gcgcatgtctgtaat

SEQ ID NO: 1582782 - DNA, 15 bp, Homo sapiens
cgcatgtctgtaatc

SEQ ID NO: 1582783 - DNA, 15 bp, Homo sapiens
cttgcagtgagccag

SEQ ID NO: 1582784 - DNA, 15 bp, Homo sapiens
ttgcagtgagccagg

SEQ ID NO: 1582785 - DNA, 15 bp, Homo sapiens
tgcagtgagccagga

SEQ ID NO: 1582786 - DNA, 15 bp, Homo sapiens
gcagtgagccaggat

SEQ ID NO: 1582787 - DNA, 15 bp, Homo sapiens
cagtgagccaggatc

SEQ ID NO: 1582788 - DNA, 15 bp, Homo sapiens
agtgagccaggatcg

SEQ ID NO: 1582789 - DNA, 15 bp, Homo sapiens
gtgagccaggatcgc

SEQ ID NO: 1582790 - DNA, 15 bp, Homo sapiens
tgagccaggatcgcg

SEQ ID NO: 1582791 - DNA, 15 bp, Homo sapiens
gagccaggatcgcgc

SEQ ID NO: 1582792 - DNA, 15 bp, Homo sapiens
agccaggatcgcgcc

SEQ ID NO: 1582793 - DNA, 15 bp, Homo sapiens
gccaggatcgcgcca

SEQ ID NO: 1582794 - DNA, 15 bp, Homo sapiens
ccaggatcgcgccac

SEQ ID NO: 1582795 - DNA, 15 bp, Homo sapiens
caggatcgcgccact

SEQ ID NO: 1582796 - DNA, 15 bp, Homo sapiens
aggatcgcgccactg

SEQ ID NO: 1582797 - DNA, 15 bp, Homo sapiens
ggatcgcgccactgc

SEQ ID NO: 1582798 - DNA, 15 bp, Homo sapiens
aaaaaaaattagtat

SEQ ID NO: 1582799 - DNA, 15 bp, Homo sapiens
aaaaaaattagtatt

SEQ ID NO: 1582800 - DNA, 15 bp, Homo sapiens
aaaaaattagtattt

SEQ ID NO: 1582801 - DNA, 15 bp, Homo sapiens
aaaaattagtatttg

SEQ ID NO: 1582802 - DNA, 15 bp, Homo sapiens
aaaattagtatttga

SEQ ID NO: 1582803 - DNA, 15 bp, Homo sapiens
aaattagtatttgat

SEQ ID NO: 1582804 - DNA, 15 bp, Homo sapiens
aattagtatttgata

SEQ ID NO: 1582805 - DNA, 15 bp, Homo sapiens
attagtatttgatat

SEQ ID NO: 1582806 - DNA, 15 bp, Homo sapiens
ttagtatttgatatt

SEQ ID NO: 1582807 - DNA, 15 bp, Homo sapiens
tagtatttgatattt

SEQ ID NO: 1582808 - DNA, 15 bp, Homo sapiens
agtatttgatatttg

SEQ ID NO: 1582809 - DNA, 15 bp, Homo sapiens
gtatttgatatttga

SEQ ID NO: 1582810 - DNA, 15 bp, Homo sapiens
tatttgatatttgat

SEQ ID NO: 1582811 - DNA, 15 bp, Homo sapiens
atttgatatttgatc

SEQ ID NO: 1582812 - DNA, 15 bp, Homo sapiens
tttgatatttgatca

SEQ ID NO: 1582813 - DNA, 15 bp, Homo sapiens
ttgatatttgatcat

SEQ ID NO: 1582814 - DNA, 15 bp, Homo sapiens
tgatatttgatcatt

SEQ ID NO: 1582815 - DNA, 15 bp, Homo sapiens
gatatttgatcatta

SEQ ID NO: 1582816 - DNA, 15 bp, Homo sapiens
atatttgatcattaa

SEQ ID NO: 1582817 - DNA, 15 bp, Homo sapiens
tatttgatcattaaa

SEQ ID NO: 1582818 - DNA, 15 bp, Homo sapiens
atttgatcattaaat

SEQ ID NO: 1582819 - DNA, 15 bp, Homo sapiens
tttgatcattaaata

SEQ ID NO: 1582820 - DNA, 15 bp, Homo sapiens
ttgatcattaaatat

SEQ ID NO: 1582821 - DNA, 15 bp, Homo sapiens
tgatcattaaatatg

SEQ ID NO: 1582822 - DNA, 15 bp, Homo sapiens
gatcattaaatatga

SEQ ID NO: 1582823 - DNA, 15 bp, Homo sapiens
atcattaaatatgaa

SEQ ID NO: 1582824 - DNA, 15 bp, Homo sapiens
tcattaaatatgaat

SEQ ID NO: 1582825 - DNA, 15 bp, Homo sapiens
cattaaatatgaatt

SEQ ID NO: 1582826 - DNA, 15 bp, Homo sapiens
attaaatatgaatta

SEQ ID NO: 1582827 - DNA, 15 bp, Homo sapiens
ttaaatatgaattaa

SEQ ID NO: 1582828 - DNA, 15 bp, Homo sapiens
taaatatgaattaag

SEQ ID NO: 1582829 - DNA, 15 bp, Homo sapiens
aaatatgaattaaga

SEQ ID NO: 1582830 - DNA, 15 bp, Homo sapiens
aatatgaattaagag

SEQ ID NO: 1582831 - DNA, 15 bp, Homo sapiens
atatgaattaagagg

SEQ ID NO: 1582832 - DNA, 15 bp, Homo sapiens
tatgaattaagagga

SEQ ID NO: 1582833 - DNA, 15 bp, Homo sapiens
atgaattaagaggac

SEQ ID NO: 1582834 - DNA, 15 bp, Homo sapiens
tgaattaagaggact

SEQ ID NO: 1582835 - DNA, 15 bp, Homo sapiens
gaattaagaggactt

SEQ ID NO: 1582836 - DNA, 15 bp, Homo sapiens
aattaagaggactta

SEQ ID NO: 1582837 - DNA, 15 bp, Homo sapiens
attaagaggacttag

SEQ ID NO: 1582838 - DNA, 15 bp, Homo sapiens
ttaagaggacttaga

SEQ ID NO: 1582839 - DNA, 15 bp, Homo sapiens
taagaggacttagac

SEQ ID NO: 1582840 - DNA, 15 bp, Homo sapiens
aagaggacttagact

SEQ ID NO: 1582841 - DNA, 15 bp, Homo sapiens
agaggacttagactt

SEQ ID NO: 1582842 - DNA, 15 bp, Homo sapiens
gaggacttagacttt

SEQ ID NO: 1582843 - DNA, 15 bp, Homo sapiens
aggacttagactttt

SEQ ID NO: 1582844 - DNA, 15 bp, Homo sapiens
ggacttagacttttt

SEQ ID NO: 1582845 - DNA, 15 bp, Homo sapiens
gacttagactttttg

SEQ ID NO: 1582846 - DNA, 15 bp, Homo sapiens
acttagactttttgt

SEQ ID NO: 1582847 - DNA, 15 bp, Homo sapiens
cttagactttttgtt

SEQ ID NO: 1582848 - DNA, 15 bp, Homo sapiens
ttagactttttgtta

SEQ ID NO: 1582849 - DNA, 15 bp, Homo sapiens
tagactttttgttaa

SEQ ID NO: 1582850 - DNA, 15 bp, Homo sapiens
agactttttgttaaa

SEQ ID NO: 1582851 - DNA, 15 bp, Homo sapiens
gactttttgttaaat

SEQ ID NO: 1582852 - DNA, 15 bp, Homo sapiens
actttttgttaaatg

SEQ ID NO: 1582853 - DNA, 15 bp, Homo sapiens
ctttttgttaaatgt

SEQ ID NO: 1582854 - DNA, 15 bp, Homo sapiens
tttttgttaaatgtc

SEQ ID NO: 1582855 - DNA, 15 bp, Homo sapiens
ttttgttaaatgtca

SEQ ID NO: 1582856 - DNA, 15 bp, Homo sapiens
tttgttaaatgtcaa

SEQ ID NO: 1582857 - DNA, 15 bp, Homo sapiens
ttgttaaatgtcaag

SEQ ID NO: 1582858 - DNA, 15 bp, Homo sapiens
tgttaaatgtcaagc

SEQ ID NO: 1582859 - DNA, 15 bp, Homo sapiens
gttaaatgtcaagct

SEQ ID NO: 1582860 - DNA, 15 bp, Homo sapiens
ttaaatgtcaagctg

SEQ ID NO: 1582861 - DNA, 15 bp, Homo sapiens
taaatgtcaagctgg

SEQ ID NO: 1582862 - DNA, 15 bp, Homo sapiens
aaatgtcaagctggg

SEQ ID NO: 1582863 - DNA, 15 bp, Homo sapiens
aatgtcaagctggga

SEQ ID NO: 1582864 - DNA, 15 bp, Homo sapiens
atgtcaagctgggaa

SEQ ID NO: 1582865 - DNA, 15 bp, Homo sapiens
tgtcaagctgggaaa

SEQ ID NO: 1582866 - DNA, 15 bp, Homo sapiens
gtcaagctgggaaaa

SEQ ID NO: 1582867 - DNA, 15 bp, Homo sapiens
tcaagctgggaaaag

SEQ ID NO: 1582868 - DNA, 15 bp, Homo sapiens
caagctgggaaaagt

SEQ ID NO: 1582869 - DNA, 15 bp, Homo sapiens
aagctgggaaaagtt

SEQ ID NO: 1582870 - DNA, 15 bp, Homo sapiens
agctgggaaaagttg

SEQ ID NO: 1582871 - DNA, 15 bp, Homo sapiens
gctgggaaaagttgt

SEQ ID NO: 1582872 - DNA, 15 bp, Homo sapiens
ctgggaaaagttgtc

SEQ ID NO: 1582873 - DNA, 15 bp, Homo sapiens
tgggaaaagttgtca

SEQ ID NO: 1582874 - DNA, 15 bp, Homo sapiens
gggaaaagttgtcat

SEQ ID NO: 1582875 - DNA, 15 bp, Homo sapiens
ggaaaagttgtcatt

SEQ ID NO: 1582876 - DNA, 15 bp, Homo sapiens
gaaaagttgtcattt

SEQ ID NO: 1582877 - DNA, 15 bp, Homo sapiens
aaaagttgtcattta

SEQ ID NO: 1582878 - DNA, 15 bp, Homo sapiens
aaagttgtcatttaa

SEQ ID NO: 1582879 - DNA, 15 bp, Homo sapiens
aagttgtcatttaaa

SEQ ID NO: 1582880 - DNA, 15 bp, Homo sapiens
agttgtcatttaaat

SEQ ID NO: 1582881 - DNA, 15 bp, Homo sapiens
gttgtcatttaaatg

SEQ ID NO: 1582882 - DNA, 15 bp, Homo sapiens
ttgtcatttaaatga

SEQ ID NO: 1582883 - DNA, 15 bp, Homo sapiens
tgtcatttaaatgaa

SEQ ID NO: 1582884 - DNA, 15 bp, Homo sapiens
gtcatttaaatgaat

SEQ ID NO: 1582885 - DNA, 15 bp, Homo sapiens
tcatttaaatgaatt

SEQ ID NO: 1582886 - DNA, 15 bp, Homo sapiens
catttaaatgaattg

SEQ ID NO: 1582887 - DNA, 15 bp, Homo sapiens
atttaaatgaattgc

SEQ ID NO: 1582888 - DNA, 15 bp, Homo sapiens
tttaaatgaattgcc

SEQ ID NO: 1582889 - DNA, 15 bp, Homo sapiens
ttaaatgaattgcct

SEQ ID NO: 1582890 - DNA, 15 bp, Homo sapiens
taaatgaattgcctc

SEQ ID NO: 1582891 - DNA, 15 bp, Homo sapiens
aaatgaattgcctct

SEQ ID NO: 1582892 - DNA, 15 bp, Homo sapiens
aatgaattgcctctt

SEQ ID NO: 1582893 - DNA, 15 bp, Homo sapiens
atgaattgcctctta

SEQ ID NO: 1582894 - DNA, 15 bp, Homo sapiens
tgaattgcctcttat

SEQ ID NO: 1582895 - DNA, 15 bp, Homo sapiens
gaattgcctcttatt

SEQ ID NO: 1582896 - DNA, 15 bp, Homo sapiens
aattgcctcttattt

SEQ ID NO: 1582897 - DNA, 15 bp, Homo sapiens
attgcctcttattta

SEQ ID NO: 1582898 - DNA, 15 bp, Homo sapiens
ttgcctcttatttaa

SEQ ID NO: 1582899 - DNA, 15 bp, Homo sapiens
tgcctcttatttaat

SEQ ID NO: 1582900 - DNA, 15 bp, Homo sapiens
gcctcttatttaatt

SEQ ID NO: 1582901 - DNA, 15 bp, Homo sapiens
cctcttatttaattt

SEQ ID NO: 1582902 - DNA, 15 bp, Homo sapiens
ctcttatttaatttc

SEQ ID NO: 1582903 - DNA, 15 bp, Homo sapiens
tcttatttaatttcg

SEQ ID NO: 1582904 - DNA, 15 bp, Homo sapiens
cttatttaatttcgt

SEQ ID NO: 1582905 - DNA, 15 bp, Homo sapiens
ttatttaatttcgtc

SEQ ID NO: 1582906 - DNA, 15 bp, Homo sapiens
tatttaatttcgtct

SEQ ID NO: 1582907 - DNA, 15 bp, Homo sapiens
atttaatttcgtctg

SEQ ID NO: 1582908 - DNA, 15 bp, Homo sapiens
tttaatttcgtctga

SEQ ID NO: 1582909 - DNA, 15 bp, Homo sapiens
ttaatttcgtctgat

SEQ ID NO: 1582910 - DNA, 15 bp, Homo sapiens
taatttcgtctgatg

SEQ ID NO: 1582911 - DNA, 15 bp, Homo sapiens
aatttcgtctgatga

SEQ ID NO: 1582912 - DNA, 15 bp, Homo sapiens
atttcgtctgatgat

SEQ ID NO: 1582913 - DNA, 15 bp, Homo sapiens
tttcgtctgatgata

SEQ ID NO: 1582914 - DNA, 15 bp, Homo sapiens
ttcgtctgatgatac

SEQ ID NO: 1582915 - DNA, 15 bp, Homo sapiens
tcgtctgatgataca

SEQ ID NO: 1582916 - DNA, 15 bp, Homo sapiens
cgtctgatgatacat

SEQ ID NO: 1582917 - DNA, 15 bp, Homo sapiens
gtctgatgatacatt

SEQ ID NO: 1582918 - DNA, 15 bp, Homo sapiens
tctgatgatacattt

SEQ ID NO: 1582919 - DNA, 15 bp, Homo sapiens
ctgatgatacatttt

SEQ ID NO: 1582920 - DNA, 15 bp, Homo sapiens
tgatgatacattttg

SEQ ID NO: 1582921 - DNA, 15 bp, Homo sapiens
gatgatacattttgt

SEQ ID NO: 1582922 - DNA, 15 bp, Homo sapiens
atgatacattttgtt

SEQ ID NO: 1582923 - DNA, 15 bp, Homo sapiens
tgatacattttgttt

SEQ ID NO: 1582924 - DNA, 15 bp, Homo sapiens
gatacattttgtttt

SEQ ID NO: 1582925 - DNA, 15 bp, Homo sapiens
atacattttgttttt

SEQ ID NO: 1582926 - DNA, 15 bp, Homo sapiens
tacattttgttttta

SEQ ID NO: 1582927 - DNA, 15 bp, Homo sapiens
acattttgtttttat

SEQ ID NO: 1582928 - DNA, 15 bp, Homo sapiens
cattttgtttttatt

SEQ ID NO: 1582929 - DNA, 15 bp, Homo sapiens
attttgtttttattt

SEQ ID NO: 1582930 - DNA, 15 bp, Homo sapiens
ttttgtttttatttt

SEQ ID NO: 1582931 - DNA, 15 bp, Homo sapiens
tttgtttttattttg

SEQ ID NO: 1582932 - DNA, 15 bp, Homo sapiens
ttgtttttattttgt

SEQ ID NO: 1582933 - DNA, 15 bp, Homo sapiens
tgtttttattttgta

SEQ ID NO: 1582934 - DNA, 15 bp, Homo sapiens
gtttttattttgtaa

SEQ ID NO: 1582935 - DNA, 15 bp, Homo sapiens
tttttattttgtaaa

SEQ ID NO: 1582936 - DNA, 15 bp, Homo sapiens
ttttattttgtaaaa

SEQ ID NO: 1582937 - DNA, 15 bp, Homo sapiens
tttattttgtaaaaa

SEQ ID NO: 1582938 - DNA, 15 bp, Homo sapiens
ttattttgtaaaaaa

SEQ ID NO: 1582939 - DNA, 15 bp, Homo sapiens
tattttgtaaaaaat

SEQ ID NO: 1582940 - DNA, 15 bp, Homo sapiens
attttgtaaaaaatt

SEQ ID NO: 1582941 - DNA, 15 bp, Homo sapiens
ttttgtaaaaaatta

SEQ ID NO: 1582942 - DNA, 15 bp, Homo sapiens
tttgtaaaaaattat

SEQ ID NO: 1582943 - DNA, 15 bp, Homo sapiens
ttgtaaaaaattatt

SEQ ID NO: 1582944 - DNA, 15 bp, Homo sapiens
tgtaaaaaattattt

SEQ ID NO: 1582945 - DNA, 15 bp, Homo sapiens
gtaaaaaattatttt

SEQ ID NO: 1582946 - DNA, 15 bp, Homo sapiens
aaaaaattatttttt

SEQ ID NO: 1582947 - DNA, 15 bp, Homo sapiens
aaaaattattttttt

SEQ ID NO: 1582948 - DNA, 15 bp, Homo sapiens
aaaattatttttttt

SEQ ID NO: 1582949 - DNA, 15 bp, Homo sapiens
aaattattttttttc

SEQ ID NO: 1582950 - DNA, 15 bp, Homo sapiens
aattattttttttct

SEQ ID NO: 1582951 - DNA, 15 bp, Homo sapiens
attattttttttctt

SEQ ID NO: 1582952 - DNA, 15 bp, Homo sapiens
ttattttttttcttt

SEQ ID NO: 1582953 - DNA, 15 bp, Homo sapiens
tattttttttctttt

SEQ ID NO: 1582954 - DNA, 15 bp, Homo sapiens
attttttttcttttt

SEQ ID NO: 1582955 - DNA, 15 bp, Homo sapiens
tttttttctttttgg

SEQ ID NO: 1582956 - DNA, 15 bp, Homo sapiens
ttttttctttttgga

SEQ ID NO: 1582957 - DNA, 15 bp, Homo sapiens
tttttctttttggag

SEQ ID NO: 1582958 - DNA, 15 bp, Homo sapiens
ttttctttttggaga

SEQ ID NO: 1582959 - DNA, 15 bp, Homo sapiens
tttctttttggagac

SEQ ID NO: 1582960 - DNA, 15 bp, Homo sapiens
ttctttttggagaca

SEQ ID NO: 1582961 - DNA, 15 bp, Homo sapiens
tctttttggagacag

SEQ ID NO: 1582962 - DNA, 15 bp, Homo sapiens
ctttttggagacagg

SEQ ID NO: 1582963 - DNA, 15 bp, Homo sapiens
tggagacagggtctt

SEQ ID NO: 1582964 - DNA, 15 bp, Homo sapiens
ggagacagggtcttg

SEQ ID NO: 1582965 - DNA, 15 bp, Homo sapiens
ggtcttgctctgttg

SEQ ID NO: 1582966 - DNA, 15 bp, Homo sapiens
tgcccaggctggtca

SEQ ID NO: 1582967 - DNA, 15 bp, Homo sapiens
gcccaggctggtcac

SEQ ID NO: 1582968 - DNA, 15 bp, Homo sapiens
cccaggctggtcaca

SEQ ID NO: 1582969 - DNA, 15 bp, Homo sapiens
acctcaagcaatcct

SEQ ID NO: 1582970 - DNA, 15 bp, Homo sapiens
aatcctcctgcctta

SEQ ID NO: 1582971 - DNA, 15 bp, Homo sapiens
atcctcctgccttag

SEQ ID NO: 1582972 - DNA, 15 bp, Homo sapiens
tcctcctgccttagc

SEQ ID NO: 1582973 - DNA, 15 bp, Homo sapiens
cctcctgccttagcc

SEQ ID NO: 1582974 - DNA, 15 bp, Homo sapiens
cttagcctcccaaaa

SEQ ID NO: 1582975 - DNA, 15 bp, Homo sapiens
ttagcctcccaaaat

SEQ ID NO: 1582976 - DNA, 15 bp, Homo sapiens
tagcctcccaaaatg

SEQ ID NO: 1582977 - DNA, 15 bp, Homo sapiens
aggcgtgagccacct

SEQ ID NO: 1582978 - DNA, 15 bp, Homo sapiens
ggcgtgagccacctc

SEQ ID NO: 1582979 - DNA, 15 bp, Homo sapiens
gcgtgagccacctcg

SEQ ID NO: 1582980 - DNA, 15 bp, Homo sapiens
cgtgagccacctcgc

SEQ ID NO: 1582981 - DNA, 15 bp, Homo sapiens
gtgagccacctcgcc

SEQ ID NO: 1582982 - DNA, 15 bp, Homo sapiens
tgagccacctcgccc

SEQ ID NO: 1582983 - DNA, 15 bp, Homo sapiens
gagccacctcgcccg

SEQ ID NO: 1582984 - DNA, 15 bp, Homo sapiens
agccacctcgcccgg

SEQ ID NO: 1582985 - DNA, 15 bp, Homo sapiens
gccacctcgcccggc

SEQ ID NO: 1582986 - DNA, 15 bp, Homo sapiens
ccacctcgcccggcc

SEQ ID NO: 1582987 - DNA, 15 bp, Homo sapiens
cacctcgcccggcct

SEQ ID NO: 1582988 - DNA, 15 bp, Homo sapiens
acctcgcccggcctt

SEQ ID NO: 1582989 - DNA, 15 bp, Homo sapiens
cctcgcccggccttg

SEQ ID NO: 1582990 - DNA, 15 bp, Homo sapiens
ctcgcccggccttgt

SEQ ID NO: 1582991 - DNA, 15 bp, Homo sapiens
tcgcccggccttgta

SEQ ID NO: 1582992 - DNA, 15 bp, Homo sapiens
cgcccggccttgtat

SEQ ID NO: 1582993 - DNA, 15 bp, Homo sapiens
gcccggccttgtatt

SEQ ID NO: 1582994 - DNA, 15 bp, Homo sapiens
cccggccttgtatta

SEQ ID NO: 1582995 - DNA, 15 bp, Homo sapiens
ccggccttgtattat

SEQ ID NO: 1582996 - DNA, 15 bp, Homo sapiens
cggccttgtattatg

SEQ ID NO: 1582997 - DNA, 15 bp, Homo sapiens
ggccttgtattatga

SEQ ID NO: 1582998 - DNA, 15 bp, Homo sapiens
gccttgtattatgat

SEQ ID NO: 1582999 - DNA, 15 bp, Homo sapiens
ccttgtattatgata

SEQ ID NO: 1583000 - DNA, 15 bp, Homo sapiens
cttgtattatgatac

SEQ ID NO: 1583001 - DNA, 15 bp, Homo sapiens
ttgtattatgataca

SEQ ID NO: 1583002 - DNA, 15 bp, Homo sapiens
tgtattatgatacat

SEQ ID NO: 1583003 - DNA, 15 bp, Homo sapiens
gtattatgatacatt

SEQ ID NO: 1583004 - DNA, 15 bp, Homo sapiens
tattatgatacattt

SEQ ID NO: 1583005 - DNA, 15 bp, Homo sapiens
attatgatacatttt

SEQ ID NO: 1583006 - DNA, 15 bp, Homo sapiens
ttatgatacattttg

SEQ ID NO: 1583007 - DNA, 15 bp, Homo sapiens
tatgatacattttga

SEQ ID NO: 1583008 - DNA, 15 bp, Homo sapiens
atgatacattttgaa

SEQ ID NO: 1583009 - DNA, 15 bp, Homo sapiens
tgatacattttgaac

SEQ ID NO: 1583010 - DNA, 15 bp, Homo sapiens
gatacattttgaaca

SEQ ID NO: 1583011 - DNA, 15 bp, Homo sapiens
atacattttgaacaa

SEQ ID NO: 1583012 - DNA, 15 bp, Homo sapiens
tacattttgaacaac

SEQ ID NO: 1583013 - DNA, 15 bp, Homo sapiens
acattttgaacaact

SEQ ID NO: 1583014 - DNA, 15 bp, Homo sapiens
cattttgaacaacta

SEQ ID NO: 1583015 - DNA, 15 bp, Homo sapiens
attttgaacaactac

SEQ ID NO: 1583016 - DNA, 15 bp, Homo sapiens
ttttgaacaactaca

SEQ ID NO: 1583017 - DNA, 15 bp, Homo sapiens
tttgaacaactacaa

SEQ ID NO: 1583018 - DNA, 15 bp, Homo sapiens
ttgaacaactacaag

SEQ ID NO: 1583019 - DNA, 15 bp, Homo sapiens
tgaacaactacaagt

SEQ ID NO: 1583020 - DNA, 15 bp, Homo sapiens
gaacaactacaagta

SEQ ID NO: 1583021 - DNA, 15 bp, Homo sapiens
aacaactacaagtag

SEQ ID NO: 1583022 - DNA, 15 bp, Homo sapiens
acaactacaagtaga

SEQ ID NO: 1583023 - DNA, 15 bp, Homo sapiens
caactacaagtagac

SEQ ID NO: 1583024 - DNA, 15 bp, Homo sapiens
aactacaagtagact

SEQ ID NO: 1583025 - DNA, 15 bp, Homo sapiens
actacaagtagactt

SEQ ID NO: 1583026 - DNA, 15 bp, Homo sapiens
ctacaagtagacttg

SEQ ID NO: 1583027 - DNA, 15 bp, Homo sapiens
tacaagtagacttgg

SEQ ID NO: 1583028 - DNA, 15 bp, Homo sapiens
acaagtagacttggt

SEQ ID NO: 1583029 - DNA, 15 bp, Homo sapiens
caagtagacttggta

SEQ ID NO: 1583030 - DNA, 15 bp, Homo sapiens
aagtagacttggtat

SEQ ID NO: 1583031 - DNA, 15 bp, Homo sapiens
agtagacttggtata

SEQ ID NO: 1583032 - DNA, 15 bp, Homo sapiens
gtagacttggtataa

SEQ ID NO: 1583033 - DNA, 15 bp, Homo sapiens
tagacttggtataat

SEQ ID NO: 1583034 - DNA, 15 bp, Homo sapiens
agacttggtataatg

SEQ ID NO: 1583035 - DNA, 15 bp, Homo sapiens
gacttggtataatga

SEQ ID NO: 1583036 - DNA, 15 bp, Homo sapiens
acttggtataatgaa

SEQ ID NO: 1583037 - DNA, 15 bp, Homo sapiens
cttggtataatgaac

SEQ ID NO: 1583038 - DNA, 15 bp, Homo sapiens
ttggtataatgaacc

SEQ ID NO: 1583039 - DNA, 15 bp, Homo sapiens
tggtataatgaacct

SEQ ID NO: 1583040 - DNA, 15 bp, Homo sapiens
ggtataatgaacctg

SEQ ID NO: 1583041 - DNA, 15 bp, Homo sapiens
gtataatgaacctgc

SEQ ID NO: 1583042 - DNA, 15 bp, Homo sapiens
tataatgaacctgca

SEQ ID NO: 1583043 - DNA, 15 bp, Homo sapiens
ataatgaacctgcac

SEQ ID NO: 1583044 - DNA, 15 bp, Homo sapiens
taatgaacctgcacg

SEQ ID NO: 1583045 - DNA, 15 bp, Homo sapiens
aatgaacctgcacgt

SEQ ID NO: 1583046 - DNA, 15 bp, Homo sapiens
atgaacctgcacgta

SEQ ID NO: 1583047 - DNA, 15 bp, Homo sapiens
tgaacctgcacgtac

SEQ ID NO: 1583048 - DNA, 15 bp, Homo sapiens
gaacctgcacgtacc

SEQ ID NO: 1583049 - DNA, 15 bp, Homo sapiens
aacctgcacgtaccc

SEQ ID NO: 1583050 - DNA, 15 bp, Homo sapiens
acctgcacgtaccca

SEQ ID NO: 1583051 - DNA, 15 bp, Homo sapiens
cctgcacgtacccat

SEQ ID NO: 1583052 - DNA, 15 bp, Homo sapiens
ctgcacgtacccatt

SEQ ID NO: 1583053 - DNA, 15 bp, Homo sapiens
tgcacgtacccattg

SEQ ID NO: 1583054 - DNA, 15 bp, Homo sapiens
gcacgtacccattgc

SEQ ID NO: 1583055 - DNA, 15 bp, Homo sapiens
cacgtacccattgcc

SEQ ID NO: 1583056 - DNA, 15 bp, Homo sapiens
acgtacccattgcca

SEQ ID NO: 1583057 - DNA, 15 bp, Homo sapiens
cgtacccattgccaa

SEQ ID NO: 1583058 - DNA, 15 bp, Homo sapiens
gtacccattgccaag

SEQ ID NO: 1583059 - DNA, 15 bp, Homo sapiens
tacccattgccaagt

SEQ ID NO: 1583060 - DNA, 15 bp, Homo sapiens
acccattgccaagtt

SEQ ID NO: 1583061 - DNA, 15 bp, Homo sapiens
cccattgccaagttc

SEQ ID NO: 1583062 - DNA, 15 bp, Homo sapiens
ccattgccaagttct

SEQ ID NO: 1583063 - DNA, 15 bp, Homo sapiens
cattgccaagttctg

SEQ ID NO: 1583064 - DNA, 15 bp, Homo sapiens
attgccaagttctga

SEQ ID NO: 1583065 - DNA, 15 bp, Homo sapiens
ttgccaagttctgac

SEQ ID NO: 1583066 - DNA, 15 bp, Homo sapiens
tgccaagttctgaca

SEQ ID NO: 1583067 - DNA, 15 bp, Homo sapiens
gccaagttctgacaa

SEQ ID NO: 1583068 - DNA, 15 bp, Homo sapiens
ccaagttctgacaac

SEQ ID NO: 1583069 - DNA, 15 bp, Homo sapiens
caagttctgacaact

SEQ ID NO: 1583070 - DNA, 15 bp, Homo sapiens
aagttctgacaactg

SEQ ID NO: 1583071 - DNA, 15 bp, Homo sapiens
agttctgacaactgt

SEQ ID NO: 1583072 - DNA, 15 bp, Homo sapiens
gttctgacaactgtc

SEQ ID NO: 1583073 - DNA, 15 bp, Homo sapiens
ttctgacaactgtct

SEQ ID NO: 1583074 - DNA, 15 bp, Homo sapiens
tctgacaactgtctg

SEQ ID NO: 1583075 - DNA, 15 bp, Homo sapiens
ctgacaactgtctgt

SEQ ID NO: 1583076 - DNA, 15 bp, Homo sapiens
tgacaactgtctgtc

SEQ ID NO: 1583077 - DNA, 15 bp, Homo sapiens
gacaactgtctgtct

SEQ ID NO: 1583078 - DNA, 15 bp, Homo sapiens
acaactgtctgtcta

SEQ ID NO: 1583079 - DNA, 15 bp, Homo sapiens
caactgtctgtctat

SEQ ID NO: 1583080 - DNA, 15 bp, Homo sapiens
aactgtctgtctata

SEQ ID NO: 1583081 - DNA, 15 bp, Homo sapiens
actgtctgtctatag

SEQ ID NO: 1583082 - DNA, 15 bp, Homo sapiens
ctgtctgtctatagc

SEQ ID NO: 1583083 - DNA, 15 bp, Homo sapiens
tgtctgtctatagcc

SEQ ID NO: 1583084 - DNA, 15 bp, Homo sapiens
gtctgtctatagcca

SEQ ID NO: 1583085 - DNA, 15 bp, Homo sapiens
tctgtctatagccaa

SEQ ID NO: 1583086 - DNA, 15 bp, Homo sapiens
ctgtctatagccaat

SEQ ID NO: 1583087 - DNA, 15 bp, Homo sapiens
tgtctatagccaatt

SEQ ID NO: 1583088 - DNA, 15 bp, Homo sapiens
gtctatagccaatta

SEQ ID NO: 1583089 - DNA, 15 bp, Homo sapiens
tctatagccaattat

SEQ ID NO: 1583090 - DNA, 15 bp, Homo sapiens
ctatagccaattatg

SEQ ID NO: 1583091 - DNA, 15 bp, Homo sapiens
tatagccaattatgc

SEQ ID NO: 1583092 - DNA, 15 bp, Homo sapiens
atagccaattatgca

SEQ ID NO: 1583093 - DNA, 15 bp, Homo sapiens
tagccaattatgcat

SEQ ID NO: 1583094 - DNA, 15 bp, Homo sapiens
agccaattatgcatt

SEQ ID NO: 1583095 - DNA, 15 bp, Homo sapiens
gccaattatgcattt

SEQ ID NO: 1583096 - DNA, 15 bp, Homo sapiens
ccaattatgcatttc

SEQ ID NO: 1583097 - DNA, 15 bp, Homo sapiens
caattatgcatttct

SEQ ID NO: 1583098 - DNA, 15 bp, Homo sapiens
aattatgcatttctt

SEQ ID NO: 1583099 - DNA, 15 bp, Homo sapiens
attatgcatttctta

SEQ ID NO: 1583100 - DNA, 15 bp, Homo sapiens
ttatgcatttcttaa

SEQ ID NO: 1583101 - DNA, 15 bp, Homo sapiens
tatgcatttcttaaa

SEQ ID NO: 1583102 - DNA, 15 bp, Homo sapiens
atgcatttcttaaat

SEQ ID NO: 1583103 - DNA, 15 bp, Homo sapiens
tgcatttcttaaatt

SEQ ID NO: 1583104 - DNA, 15 bp, Homo sapiens
gcatttcttaaatta

SEQ ID NO: 1583105 - DNA, 15 bp, Homo sapiens
catttcttaaattag

SEQ ID NO: 1583106 - DNA, 15 bp, Homo sapiens
atttcttaaattaga

SEQ ID NO: 1583107 - DNA, 15 bp, Homo sapiens
tttcttaaattagaa

SEQ ID NO: 1583108 - DNA, 15 bp, Homo sapiens
ttcttaaattagaac

SEQ ID NO: 1583109 - DNA, 15 bp, Homo sapiens
tcttaaattagaacc

SEQ ID NO: 1583110 - DNA, 15 bp, Homo sapiens
cttaaattagaaccc

SEQ ID NO: 1583111 - DNA, 15 bp, Homo sapiens
ttaaattagaacccc

SEQ ID NO: 1583112 - DNA, 15 bp, Homo sapiens
taaattagaaccccc

SEQ ID NO: 1583113 - DNA, 15 bp, Homo sapiens
aaattagaacccccc

SEQ ID NO: 1583114 - DNA, 15 bp, Homo sapiens
aattagaaccccccc

SEQ ID NO: 1583115 - DNA, 15 bp, Homo sapiens
attagaaccccccca

SEQ ID NO: 1583116 - DNA, 15 bp, Homo sapiens
ttagaacccccccaa

SEQ ID NO: 1583117 - DNA, 15 bp, Homo sapiens
tagaacccccccaat

SEQ ID NO: 1583118 - DNA, 15 bp, Homo sapiens
agaacccccccaata

SEQ ID NO: 1583119 - DNA, 15 bp, Homo sapiens
gaacccccccaatat

SEQ ID NO: 1583120 - DNA, 15 bp, Homo sapiens
aacccccccaatata

SEQ ID NO: 1583121 - DNA, 15 bp, Homo sapiens
acccccccaatatac

SEQ ID NO: 1583122 - DNA, 15 bp, Homo sapiens
cccccccaatatacc

SEQ ID NO: 1583123 - DNA, 15 bp, Homo sapiens
ccccccaatataccc

SEQ ID NO: 1583124 - DNA, 15 bp, Homo sapiens
cccccaatataccca

SEQ ID NO: 1583125 - DNA, 15 bp, Homo sapiens
ccccaatatacccaa

SEQ ID NO: 1583126 - DNA, 15 bp, Homo sapiens
cccaatatacccaaa

SEQ ID NO: 1583127 - DNA, 15 bp, Homo sapiens
ccaatatacccaaat

SEQ ID NO: 1583128 - DNA, 15 bp, Homo sapiens
caatatacccaaata

SEQ ID NO: 1583129 - DNA, 15 bp, Homo sapiens
aatatacccaaatat

SEQ ID NO: 1583130 - DNA, 15 bp, Homo sapiens
atatacccaaatata

SEQ ID NO: 1583131 - DNA, 15 bp, Homo sapiens
tatacccaaatatat

SEQ ID NO: 1583132 - DNA, 15 bp, Homo sapiens
atacccaaatatata

SEQ ID NO: 1583133 - DNA, 15 bp, Homo sapiens
tacccaaatatatat

SEQ ID NO: 1583134 - DNA, 15 bp, Homo sapiens
acccaaatatatata

SEQ ID NO: 1583135 - DNA, 15 bp, Homo sapiens
cccaaatatatatat

SEQ ID NO: 1583136 - DNA, 15 bp, Homo sapiens
ccaaatatatatata

SEQ ID NO: 1583137 - DNA, 15 bp, Homo sapiens
caaatatatatatat

SEQ ID NO: 1583138 - DNA, 15 bp, Homo sapiens
aaatatatatatatg

SEQ ID NO: 1583139 - DNA, 15 bp, Homo sapiens
aatatatatatatgt

SEQ ID NO: 1583140 - DNA, 15 bp, Homo sapiens
tatatatatgtgtgc

SEQ ID NO: 1583141 - DNA, 15 bp, Homo sapiens
atatatatgtgtgca

SEQ ID NO: 1583142 - DNA, 15 bp, Homo sapiens
tatatatgtgtgcat

SEQ ID NO: 1583143 - DNA, 15 bp, Homo sapiens
atatatgtgtgcata

SEQ ID NO: 1583144 - DNA, 15 bp, Homo sapiens
tatatgtgtgcatat

SEQ ID NO: 1583145 - DNA, 15 bp, Homo sapiens
atatgtgtgcatata

SEQ ID NO: 1583146 - DNA, 15 bp, Homo sapiens
tatgtgtgcatatat

SEQ ID NO: 1583147 - DNA, 15 bp, Homo sapiens
atgtgtgcatatata

SEQ ID NO: 1583148 - DNA, 15 bp, Homo sapiens
tgtgcatatatatag

SEQ ID NO: 1583149 - DNA, 15 bp, Homo sapiens
gtgcatatatatagt

SEQ ID NO: 1583150 - DNA, 15 bp, Homo sapiens
tgcatatatatagta

SEQ ID NO: 1583151 - DNA, 15 bp, Homo sapiens
gcatatatatagtaa

SEQ ID NO: 1583152 - DNA, 15 bp, Homo sapiens
catatatatagtaag

SEQ ID NO: 1583153 - DNA, 15 bp, Homo sapiens
atatatatagtaagt

SEQ ID NO: 1583154 - DNA, 15 bp, Homo sapiens
tatatatagtaagtt

SEQ ID NO: 1583155 - DNA, 15 bp, Homo sapiens
atatatagtaagttg

SEQ ID NO: 1583156 - DNA, 15 bp, Homo sapiens
tatatagtaagttgt

SEQ ID NO: 1583157 - DNA, 15 bp, Homo sapiens
atatagtaagttgta

SEQ ID NO: 1583158 - DNA, 15 bp, Homo sapiens
tatagtaagttgtaa

SEQ ID NO: 1583159 - DNA, 15 bp, Homo sapiens
atagtaagttgtaac

SEQ ID NO: 1583160 - DNA, 15 bp, Homo sapiens
tagtaagttgtaaca

SEQ ID NO: 1583161 - DNA, 15 bp, Homo sapiens
agtaagttgtaacaa

SEQ ID NO: 1583162 - DNA, 15 bp, Homo sapiens
gtaagttgtaacaaa

SEQ ID NO: 1583163 - DNA, 15 bp, Homo sapiens
taagttgtaacaaag

SEQ ID NO: 1583164 - DNA, 15 bp, Homo sapiens
aagttgtaacaaagt

SEQ ID NO: 1583165 - DNA, 15 bp, Homo sapiens
agttgtaacaaagtt

SEQ ID NO: 1583166 - DNA, 15 bp, Homo sapiens
gttgtaacaaagttg

SEQ ID NO: 1583167 - DNA, 15 bp, Homo sapiens
ttgtaacaaagttgt

SEQ ID NO: 1583168 - DNA, 15 bp, Homo sapiens
tgtaacaaagttgtg

SEQ ID NO: 1583169 - DNA, 15 bp, Homo sapiens
gtaacaaagttgtga

SEQ ID NO: 1583170 - DNA, 15 bp, Homo sapiens
taacaaagttgtgaa

SEQ ID NO: 1583171 - DNA, 15 bp, Homo sapiens
aacaaagttgtgaat

SEQ ID NO: 1583172 - DNA, 15 bp, Homo sapiens
acaaagttgtgaatt

SEQ ID NO: 1583173 - DNA, 15 bp, Homo sapiens
caaagttgtgaattc

SEQ ID NO: 1583174 - DNA, 15 bp, Homo sapiens
aaagttgtgaattca

SEQ ID NO: 1583175 - DNA, 15 bp, Homo sapiens
aagttgtgaattcat

SEQ ID NO: 1583176 - DNA, 15 bp, Homo sapiens
agttgtgaattcata

SEQ ID NO: 1583177 - DNA, 15 bp, Homo sapiens
gttgtgaattcatac

SEQ ID NO: 1583178 - DNA, 15 bp, Homo sapiens
ttgtgaattcatacc

SEQ ID NO: 1583179 - DNA, 15 bp, Homo sapiens
tgtgaattcatacct

SEQ ID NO: 1583180 - DNA, 15 bp, Homo sapiens
gtgaattcatacctg

SEQ ID NO: 1583181 - DNA, 15 bp, Homo sapiens
tgaattcatacctga

SEQ ID NO: 1583182 - DNA, 15 bp, Homo sapiens
gaattcatacctgaa

SEQ ID NO: 1583183 - DNA, 15 bp, Homo sapiens
aattcatacctgaag

SEQ ID NO: 1583184 - DNA, 15 bp, Homo sapiens
attcatacctgaagt

SEQ ID NO: 1583185 - DNA, 15 bp, Homo sapiens
ttcatacctgaagta

SEQ ID NO: 1583186 - DNA, 15 bp, Homo sapiens
tcatacctgaagtat

SEQ ID NO: 1583187 - DNA, 15 bp, Homo sapiens
catacctgaagtatc

SEQ ID NO: 1583188 - DNA, 15 bp, Homo sapiens
atacctgaagtatct

SEQ ID NO: 1583189 - DNA, 15 bp, Homo sapiens
tacctgaagtatctc

SEQ ID NO: 1583190 - DNA, 15 bp, Homo sapiens
acctgaagtatctca

SEQ ID NO: 1583191 - DNA, 15 bp, Homo sapiens
cctgaagtatctcaa

SEQ ID NO: 1583192 - DNA, 15 bp, Homo sapiens
ctgaagtatctcaag

SEQ ID NO: 1583193 - DNA, 15 bp, Homo sapiens
tgaagtatctcaagt

SEQ ID NO: 1583194 - DNA, 15 bp, Homo sapiens
gaagtatctcaagtg

SEQ ID NO: 1583195 - DNA, 15 bp, Homo sapiens
aagtatctcaagtga

SEQ ID NO: 1583196 - DNA, 15 bp, Homo sapiens
agtatctcaagtgat

SEQ ID NO: 1583197 - DNA, 15 bp, Homo sapiens
gtatctcaagtgatg

SEQ ID NO: 1583198 - DNA, 15 bp, Homo sapiens
tatctcaagtgatgc

SEQ ID NO: 1583199 - DNA, 15 bp, Homo sapiens
atctcaagtgatgca

SEQ ID NO: 1583200 - DNA, 15 bp, Homo sapiens
tctcaagtgatgcaa

SEQ ID NO: 1583201 - DNA, 15 bp, Homo sapiens
ctcaagtgatgcaag

SEQ ID NO: 1583202 - DNA, 15 bp, Homo sapiens
tcaagtgatgcaagt

SEQ ID NO: 1583203 - DNA, 15 bp, Homo sapiens
caagtgatgcaagtt

SEQ ID NO: 1583204 - DNA, 15 bp, Homo sapiens
aagtgatgcaagttt

SEQ ID NO: 1583205 - DNA, 15 bp, Homo sapiens
agtgatgcaagtttt

SEQ ID NO: 1583206 - DNA, 15 bp, Homo sapiens
gtgatgcaagtttta

SEQ ID NO: 1583207 - DNA, 15 bp, Homo sapiens
tgatgcaagttttat

SEQ ID NO: 1583208 - DNA, 15 bp, Homo sapiens
gatgcaagttttatg

SEQ ID NO: 1583209 - DNA, 15 bp, Homo sapiens
atgcaagttttatga

SEQ ID NO: 1583210 - DNA, 15 bp, Homo sapiens
tgcaagttttatgaa

SEQ ID NO: 1583211 - DNA, 15 bp, Homo sapiens
gcaagttttatgaat

SEQ ID NO: 1583212 - DNA, 15 bp, Homo sapiens
caagttttatgaatt

SEQ ID NO: 1583213 - DNA, 15 bp, Homo sapiens
aagttttatgaattt

SEQ ID NO: 1583214 - DNA, 15 bp, Homo sapiens
agttttatgaatttt

SEQ ID NO: 1583215 - DNA, 15 bp, Homo sapiens
gttttatgaattttt

SEQ ID NO: 1583216 - DNA, 15 bp, Homo sapiens
ttttatgaatttttg

SEQ ID NO: 1583217 - DNA, 15 bp, Homo sapiens
tttatgaatttttgt

SEQ ID NO: 1583218 - DNA, 15 bp, Homo sapiens
ttatgaatttttgtt

SEQ ID NO: 1583219 - DNA, 15 bp, Homo sapiens
tatgaatttttgttt

SEQ ID NO: 1583220 - DNA, 15 bp, Homo sapiens
atgaatttttgttta

SEQ ID NO: 1583221 - DNA, 15 bp, Homo sapiens
tgaatttttgtttat

SEQ ID NO: 1583222 - DNA, 15 bp, Homo sapiens
gaatttttgtttatg

SEQ ID NO: 1583223 - DNA, 15 bp, Homo sapiens
aatttttgtttatgc

SEQ ID NO: 1583224 - DNA, 15 bp, Homo sapiens
atttttgtttatgcc

SEQ ID NO: 1583225 - DNA, 15 bp, Homo sapiens
tttttgtttatgcct

SEQ ID NO: 1583226 - DNA, 15 bp, Homo sapiens
ttttgtttatgcctt

SEQ ID NO: 1583227 - DNA, 15 bp, Homo sapiens
tttgtttatgccttt

SEQ ID NO: 1583228 - DNA, 15 bp, Homo sapiens
ttgtttatgcctttt

SEQ ID NO: 1583229 - DNA, 15 bp, Homo sapiens
tgtttatgccttttg

SEQ ID NO: 1583230 - DNA, 15 bp, Homo sapiens
gtttatgccttttgg

SEQ ID NO: 1583231 - DNA, 15 bp, Homo sapiens
tttatgccttttggg

SEQ ID NO: 1583232 - DNA, 15 bp, Homo sapiens
ttatgccttttggga

SEQ ID NO: 1583233 - DNA, 15 bp, Homo sapiens
tatgccttttgggaa

SEQ ID NO: 1583234 - DNA, 15 bp, Homo sapiens
atgccttttgggaag

SEQ ID NO: 1583235 - DNA, 15 bp, Homo sapiens
tgccttttgggaaga

SEQ ID NO: 1583236 - DNA, 15 bp, Homo sapiens
gccttttgggaagag

SEQ ID NO: 1583237 - DNA, 15 bp, Homo sapiens
ccttttgggaagagt

SEQ ID NO: 1583238 - DNA, 15 bp, Homo sapiens
cttttgggaagagtt

SEQ ID NO: 1583239 - DNA, 15 bp, Homo sapiens
ttttgggaagagttg

SEQ ID NO: 1583240 - DNA, 15 bp, Homo sapiens
tttgggaagagttgt

SEQ ID NO: 1583241 - DNA, 15 bp, Homo sapiens
ttgggaagagttgta

SEQ ID NO: 1583242 - DNA, 15 bp, Homo sapiens
tgggaagagttgtat

SEQ ID NO: 1583243 - DNA, 15 bp, Homo sapiens
gggaagagttgtatt

SEQ ID NO: 1583244 - DNA, 15 bp, Homo sapiens
ggaagagttgtattg

SEQ ID NO: 1583245 - DNA, 15 bp, Homo sapiens
gaagagttgtattga

SEQ ID NO: 1583246 - DNA, 15 bp, Homo sapiens
aagagttgtattgac

SEQ ID NO: 1583247 - DNA, 15 bp, Homo sapiens
agagttgtattgaca

SEQ ID NO: 1583248 - DNA, 15 bp, Homo sapiens
gagttgtattgacaa

SEQ ID NO: 1583249 - DNA, 15 bp, Homo sapiens
agttgtattgacaaa

SEQ ID NO: 1583250 - DNA, 15 bp, Homo sapiens
gttgtattgacaaat

SEQ ID NO: 1583251 - DNA, 15 bp, Homo sapiens
ttgtattgacaaatt

SEQ ID NO: 1583252 - DNA, 15 bp, Homo sapiens
tgtattgacaaattt

SEQ ID NO: 1583253 - DNA, 15 bp, Homo sapiens
gtattgacaaatttt

SEQ ID NO: 1583254 - DNA, 15 bp, Homo sapiens
tattgacaaattttt

SEQ ID NO: 1583255 - DNA, 15 bp, Homo sapiens
attgacaaatttttt

SEQ ID NO: 1583256 - DNA, 15 bp, Homo sapiens
ttgacaaatttttta

SEQ ID NO: 1583257 - DNA, 15 bp, Homo sapiens
tgacaaattttttat

SEQ ID NO: 1583258 - DNA, 15 bp, Homo sapiens
gacaaattttttatg

SEQ ID NO: 1583259 - DNA, 15 bp, Homo sapiens
acaaattttttatgc

SEQ ID NO: 1583260 - DNA, 15 bp, Homo sapiens
caaattttttatgct

SEQ ID NO: 1583261 - DNA, 15 bp, Homo sapiens
aaattttttatgctt

SEQ ID NO: 1583262 - DNA, 15 bp, Homo sapiens
aattttttatgctta

SEQ ID NO: 1583263 - DNA, 15 bp, Homo sapiens
attttttatgcttaa

SEQ ID NO: 1583264 - DNA, 15 bp, Homo sapiens
ttttttatgcttaaa

SEQ ID NO: 1583265 - DNA, 15 bp, Homo sapiens
tttttatgcttaaag

SEQ ID NO: 1583266 - DNA, 15 bp, Homo sapiens
ttttatgcttaaagt

SEQ ID NO: 1583267 - DNA, 15 bp, Homo sapiens
tttatgcttaaagta

SEQ ID NO: 1583268 - DNA, 15 bp, Homo sapiens
ttatgcttaaagtaa

SEQ ID NO: 1583269 - DNA, 15 bp, Homo sapiens
tatgcttaaagtaaa

SEQ ID NO: 1583270 - DNA, 15 bp, Homo sapiens
atgcttaaagtaaac

SEQ ID NO: 1583271 - DNA, 15 bp, Homo sapiens
tgcttaaagtaaacc

SEQ ID NO: 1583272 - DNA, 15 bp, Homo sapiens
gcttaaagtaaacca

SEQ ID NO: 1583273 - DNA, 15 bp, Homo sapiens
cttaaagtaaaccat

SEQ ID NO: 1583274 - DNA, 15 bp, Homo sapiens
ttaaagtaaaccata

SEQ ID NO: 1583275 - DNA, 15 bp, Homo sapiens
taaagtaaaccataa

SEQ ID NO: 1583276 - DNA, 15 bp, Homo sapiens
aaagtaaaccataaa

SEQ ID NO: 1583277 - DNA, 15 bp, Homo sapiens
aagtaaaccataaat

SEQ ID NO: 1583278 - DNA, 15 bp, Homo sapiens
agtaaaccataaatc

SEQ ID NO: 1583279 - DNA, 15 bp, Homo sapiens
gtaaaccataaatca

SEQ ID NO: 1583280 - DNA, 15 bp, Homo sapiens
taaaccataaatcaa

SEQ ID NO: 1583281 - DNA, 15 bp, Homo sapiens
aaaccataaatcaaa

SEQ ID NO: 1583282 - DNA, 15 bp, Homo sapiens
aaccataaatcaaaa

SEQ ID NO: 1583283 - DNA, 15 bp, Homo sapiens
accataaatcaaaaa

SEQ ID NO: 1583284 - DNA, 15 bp, Homo sapiens
ccataaatcaaaaaa

SEQ ID NO: 1583285 - DNA, 15 bp, Homo sapiens
cataaatcaaaaaaa

SEQ ID NO: 1583286 - DNA, 15 bp, Homo sapiens
ataaatcaaaaaaat

SEQ ID NO: 1583287 - DNA, 15 bp, Homo sapiens
taaatcaaaaaaata

SEQ ID NO: 1583288 - DNA, 15 bp, Homo sapiens
aaatcaaaaaaataa

SEQ ID NO: 1583289 - DNA, 15 bp, Homo sapiens
aatcaaaaaaataaa

SEQ ID NO: 1583290 - DNA, 15 bp, Homo sapiens
atcaaaaaaataaaa

SEQ ID NO: 1583291 - DNA, 15 bp, Homo sapiens
tcaaaaaaataaaat

SEQ ID NO: 1583292 - DNA, 15 bp, Homo sapiens
caaaaaaataaaatc

SEQ ID NO: 1583293 - DNA, 15 bp, Homo sapiens
aaaaaaataaaatct

SEQ ID NO: 1583294 - DNA, 15 bp, Homo sapiens
aaaaaataaaatcta

SEQ ID NO: 1583295 - DNA, 15 bp, Homo sapiens
aaaaataaaatctag

SEQ ID NO: 1583296 - DNA, 15 bp, Homo sapiens
aaaataaaatctagg

SEQ ID NO: 1583297 - DNA, 15 bp, Homo sapiens
aaataaaatctagga

SEQ ID NO: 1583298 - DNA, 15 bp, Homo sapiens
aataaaatctaggat

SEQ ID NO: 1583299 - DNA, 15 bp, Homo sapiens
ataaaatctaggatg

SEQ ID NO: 1583300 - DNA, 15 bp, Homo sapiens
taaaatctaggatgc

SEQ ID NO: 1583301 - DNA, 15 bp, Homo sapiens
aaaatctaggatgca

SEQ ID NO: 1583302 - DNA, 15 bp, Homo sapiens
aaatctaggatgcaa

SEQ ID NO: 1583303 - DNA, 15 bp, Homo sapiens
aatctaggatgcaat

SEQ ID NO: 1583304 - DNA, 15 bp, Homo sapiens
atctaggatgcaata

SEQ ID NO: 1583305 - DNA, 15 bp, Homo sapiens
tctaggatgcaataa

SEQ ID NO: 1583306 - DNA, 15 bp, Homo sapiens
ctaggatgcaataaa

SEQ ID NO: 1583307 - DNA, 15 bp, Homo sapiens
taggatgcaataaaa

SEQ ID NO: 1583308 - DNA, 15 bp, Homo sapiens
aggatgcaataaaac

SEQ ID NO: 1583309 - DNA, 15 bp, Homo sapiens
ggatgcaataaaaca

SEQ ID NO: 1583310 - DNA, 15 bp, Homo sapiens
gatgcaataaaacaa

SEQ ID NO: 1583311 - DNA, 15 bp, Homo sapiens
atgcaataaaacaaa

SEQ ID NO: 1583312 - DNA, 15 bp, Homo sapiens
tgcaataaaacaaaa

SEQ ID NO: 1583313 - DNA, 15 bp, Homo sapiens
gcaataaaacaaaac

SEQ ID NO: 1583314 - DNA, 15 bp, Homo sapiens
caataaaacaaaaca

SEQ ID NO: 1583315 - DNA, 15 bp, Homo sapiens
ataaaacaaaacaac

SEQ ID NO: 1583316 - DNA, 15 bp, Homo sapiens
taaaacaaaacaact

SEQ ID NO: 1583317 - DNA, 15 bp, Homo sapiens
aaaacaaaacaactt

SEQ ID NO: 1583318 - DNA, 15 bp, Homo sapiens
aaacaaaacaacttc

SEQ ID NO: 1583319 - DNA, 15 bp, Homo sapiens
aacaaaacaacttct

SEQ ID NO: 1583320 - DNA, 15 bp, Homo sapiens
acaaaacaacttctt

SEQ ID NO: 1583321 - DNA, 15 bp, Homo sapiens
caaaacaacttcttg

SEQ ID NO: 1583322 - DNA, 15 bp, Homo sapiens
aaaacaacttcttga

SEQ ID NO: 1583323 - DNA, 15 bp, Homo sapiens
aaacaacttcttgac

SEQ ID NO: 1583324 - DNA, 15 bp, Homo sapiens
aacaacttcttgaca

SEQ ID NO: 1583325 - DNA, 15 bp, Homo sapiens
acaacttcttgacat

SEQ ID NO: 1583326 - DNA, 15 bp, Homo sapiens
caacttcttgacata

SEQ ID NO: 1583327 - DNA, 15 bp, Homo sapiens
aacttcttgacataa

SEQ ID NO: 1583328 - DNA, 15 bp, Homo sapiens
acttcttgacataag

SEQ ID NO: 1583329 - DNA, 15 bp, Homo sapiens
cttcttgacataagt

SEQ ID NO: 1583330 - DNA, 15 bp, Homo sapiens
ttcttgacataagta

SEQ ID NO: 1583331 - DNA, 15 bp, Homo sapiens
tcttgacataagtat

SEQ ID NO: 1583332 - DNA, 15 bp, Homo sapiens
cttgacataagtatg

SEQ ID NO: 1583333 - DNA, 15 bp, Homo sapiens
ttgacataagtatgg

SEQ ID NO: 1583334 - DNA, 15 bp, Homo sapiens
tgacataagtatggt

SEQ ID NO: 1583335 - DNA, 15 bp, Homo sapiens
gacataagtatggta

SEQ ID NO: 1583336 - DNA, 15 bp, Homo sapiens
acataagtatggtat

SEQ ID NO: 1583337 - DNA, 15 bp, Homo sapiens
cataagtatggtatg

SEQ ID NO: 1583338 - DNA, 15 bp, Homo sapiens
ataagtatggtatgt

SEQ ID NO: 1583339 - DNA, 15 bp, Homo sapiens
taagtatggtatgta

SEQ ID NO: 1583340 - DNA, 15 bp, Homo sapiens
aagtatggtatgtaa

SEQ ID NO: 1583341 - DNA, 15 bp, Homo sapiens
agtatggtatgtaaa

SEQ ID NO: 1583342 - DNA, 15 bp, Homo sapiens
gtatggtatgtaaat

SEQ ID NO: 1583343 - DNA, 15 bp, Homo sapiens
tatggtatgtaaatc

SEQ ID NO: 1583344 - DNA, 15 bp, Homo sapiens
atggtatgtaaatct

SEQ ID NO: 1583345 - DNA, 15 bp, Homo sapiens
tggtatgtaaatctg

SEQ ID NO: 1583346 - DNA, 15 bp, Homo sapiens
ggtatgtaaatctgt

SEQ ID NO: 1583347 - DNA, 15 bp, Homo sapiens
gtatgtaaatctgtt

SEQ ID NO: 1583348 - DNA, 15 bp, Homo sapiens
tatgtaaatctgttt

SEQ ID NO: 1583349 - DNA, 15 bp, Homo sapiens
atgtaaatctgtttt

SEQ ID NO: 1583350 - DNA, 15 bp, Homo sapiens
tgtaaatctgttttg

SEQ ID NO: 1583351 - DNA, 15 bp, Homo sapiens
gtaaatctgttttga

SEQ ID NO: 1583352 - DNA, 15 bp, Homo sapiens
taaatctgttttgat

SEQ ID NO: 1583353 - DNA, 15 bp, Homo sapiens
aaatctgttttgatt

SEQ ID NO: 1583354 - DNA, 15 bp, Homo sapiens
aatctgttttgattg

SEQ ID NO: 1583355 - DNA, 15 bp, Homo sapiens
atctgttttgattgg

SEQ ID NO: 1583356 - DNA, 15 bp, Homo sapiens
tctgttttgattgga

SEQ ID NO: 1583357 - DNA, 15 bp, Homo sapiens
ctgttttgattggaa

SEQ ID NO: 1583358 - DNA, 15 bp, Homo sapiens
tgttttgattggaaa

SEQ ID NO: 1583359 - DNA, 15 bp, Homo sapiens
gttttgattggaaat

SEQ ID NO: 1583360 - DNA, 15 bp, Homo sapiens
ttttgattggaaatc

SEQ ID NO: 1583361 - DNA, 15 bp, Homo sapiens
tttgattggaaatca

SEQ ID NO: 1583362 - DNA, 15 bp, Homo sapiens
ttgattggaaatcaa

SEQ ID NO: 1583363 - DNA, 15 bp, Homo sapiens
tgattggaaatcaat

SEQ ID NO: 1583364 - DNA, 15 bp, Homo sapiens
gattggaaatcaatt

SEQ ID NO: 1583365 - DNA, 15 bp, Homo sapiens
attggaaatcaattt

SEQ ID NO: 1583366 - DNA, 15 bp, Homo sapiens
ttggaaatcaatttg

SEQ ID NO: 1583367 - DNA, 15 bp, Homo sapiens
tggaaatcaatttgt

SEQ ID NO: 1583368 - DNA, 15 bp, Homo sapiens
ggaaatcaatttgtt

SEQ ID NO: 1583369 - DNA, 15 bp, Homo sapiens
gaaatcaatttgtta

SEQ ID NO: 1583370 - DNA, 15 bp, Homo sapiens
aaatcaatttgttat

SEQ ID NO: 1583371 - DNA, 15 bp, Homo sapiens
aatcaatttgttata

SEQ ID NO: 1583372 - DNA, 15 bp, Homo sapiens
atcaatttgttatat

SEQ ID NO: 1583373 - DNA, 15 bp, Homo sapiens
tcaatttgttatatt

SEQ ID NO: 1583374 - DNA, 15 bp, Homo sapiens
caatttgttatattg

SEQ ID NO: 1583375 - DNA, 15 bp, Homo sapiens
aatttgttatattgc

SEQ ID NO: 1583376 - DNA, 15 bp, Homo sapiens
atttgttatattgcc

SEQ ID NO: 1583377 - DNA, 15 bp, Homo sapiens
tttgttatattgcca

SEQ ID NO: 1583378 - DNA, 15 bp, Homo sapiens
ttgttatattgccag

SEQ ID NO: 1583379 - DNA, 15 bp, Homo sapiens
tgttatattgccaga

SEQ ID NO: 1583380 - DNA, 15 bp, Homo sapiens
gttatattgccagaa

SEQ ID NO: 1583381 - DNA, 15 bp, Homo sapiens
ttatattgccagaat

SEQ ID NO: 1583382 - DNA, 15 bp, Homo sapiens
tatattgccagaatt

SEQ ID NO: 1583383 - DNA, 15 bp, Homo sapiens
atattgccagaattc

SEQ ID NO: 1583384 - DNA, 15 bp, Homo sapiens
tattgccagaattcc

SEQ ID NO: 1583385 - DNA, 15 bp, Homo sapiens
attgccagaattcct

SEQ ID NO: 1583386 - DNA, 15 bp, Homo sapiens
ttgccagaattcctg

SEQ ID NO: 1583387 - DNA, 15 bp, Homo sapiens
tgccagaattcctgt

SEQ ID NO: 1583388 - DNA, 15 bp, Homo sapiens
gccagaattcctgtt

SEQ ID NO: 1583389 - DNA, 15 bp, Homo sapiens
ccagaattcctgttt

SEQ ID NO: 1583390 - DNA, 15 bp, Homo sapiens
cagaattcctgtttt

SEQ ID NO: 1583391 - DNA, 15 bp, Homo sapiens
agaattcctgtttta

SEQ ID NO: 1583392 - DNA, 15 bp, Homo sapiens
gaattcctgttttag

SEQ ID NO: 1583393 - DNA, 15 bp, Homo sapiens
aattcctgttttaga

SEQ ID NO: 1583394 - DNA, 15 bp, Homo sapiens
attcctgttttagaa

SEQ ID NO: 1583395 - DNA, 15 bp, Homo sapiens
ttcctgttttagaat

SEQ ID NO: 1583396 - DNA, 15 bp, Homo sapiens
tcctgttttagaata

SEQ ID NO: 1583397 - DNA, 15 bp, Homo sapiens
cctgttttagaatac

SEQ ID NO: 1583398 - DNA, 15 bp, Homo sapiens
ctgttttagaataca

SEQ ID NO: 1583399 - DNA, 15 bp, Homo sapiens
tgttttagaatacat

SEQ ID NO: 1583400 - DNA, 15 bp, Homo sapiens
gttttagaatacatc

SEQ ID NO: 1583401 - DNA, 15 bp, Homo sapiens
ttttagaatacatct

SEQ ID NO: 1583402 - DNA, 15 bp, Homo sapiens
tttagaatacatctc

SEQ ID NO: 1583403 - DNA, 15 bp, Homo sapiens
ttagaatacatctct

SEQ ID NO: 1583404 - DNA, 15 bp, Homo sapiens
tagaatacatctctg

SEQ ID NO: 1583405 - DNA, 15 bp, Homo sapiens
agaatacatctctgc

SEQ ID NO: 1583406 - DNA, 15 bp, Homo sapiens
gaatacatctctgct

SEQ ID NO: 1583407 - DNA, 15 bp, Homo sapiens
aatacatctctgctg

SEQ ID NO: 1583408 - DNA, 15 bp, Homo sapiens
atacatctctgctga

SEQ ID NO: 1583409 - DNA, 15 bp, Homo sapiens
tacatctctgctgat

SEQ ID NO: 1583410 - DNA, 15 bp, Homo sapiens
acatctctgctgatc

SEQ ID NO: 1583411 - DNA, 15 bp, Homo sapiens
catctctgctgatct

SEQ ID NO: 1583412 - DNA, 15 bp, Homo sapiens
atctctgctgatctg

SEQ ID NO: 1583413 - DNA, 15 bp, Homo sapiens
tctctgctgatctgt

SEQ ID NO: 1583414 - DNA, 15 bp, Homo sapiens
ctctgctgatctgtc

SEQ ID NO: 1583415 - DNA, 15 bp, Homo sapiens
tctgctgatctgtct

SEQ ID NO: 1583416 - DNA, 15 bp, Homo sapiens
ctgctgatctgtctg

SEQ ID NO: 1583417 - DNA, 15 bp, Homo sapiens
tgctgatctgtctgt

SEQ ID NO: 1583418 - DNA, 15 bp, Homo sapiens
gctgatctgtctgta

SEQ ID NO: 1583419 - DNA, 15 bp, Homo sapiens
ctgatctgtctgtat

SEQ ID NO: 1583420 - DNA, 15 bp, Homo sapiens
tgatctgtctgtatt

SEQ ID NO: 1583421 - DNA, 15 bp, Homo sapiens
gatctgtctgtattc

SEQ ID NO: 1583422 - DNA, 15 bp, Homo sapiens
atctgtctgtattct

SEQ ID NO: 1583423 - DNA, 15 bp, Homo sapiens
tctgtctgtattctt

SEQ ID NO: 1583424 - DNA, 15 bp, Homo sapiens
ctgtctgtattctta

SEQ ID NO: 1583425 - DNA, 15 bp, Homo sapiens
tgtctgtattcttag

SEQ ID NO: 1583426 - DNA, 15 bp, Homo sapiens
gtctgtattcttaga

SEQ ID NO: 1583427 - DNA, 15 bp, Homo sapiens
tctgtattcttagac

SEQ ID NO: 1583428 - DNA, 15 bp, Homo sapiens
ctgtattcttagact

SEQ ID NO: 1583429 - DNA, 15 bp, Homo sapiens
tgtattcttagactg

SEQ ID NO: 1583430 - DNA, 15 bp, Homo sapiens
gtattcttagactgc

SEQ ID NO: 1583431 - DNA, 15 bp, Homo sapiens
tattcttagactgca

SEQ ID NO: 1583432 - DNA, 15 bp, Homo sapiens
attcttagactgcat

SEQ ID NO: 1583433 - DNA, 15 bp, Homo sapiens
ttcttagactgcata

SEQ ID NO: 1583434 - DNA, 15 bp, Homo sapiens
tcttagactgcatat

SEQ ID NO: 1583435 - DNA, 15 bp, Homo sapiens
cttagactgcatatc

SEQ ID NO: 1583436 - DNA, 15 bp, Homo sapiens
ttagactgcatatct

SEQ ID NO: 1583437 - DNA, 15 bp, Homo sapiens
tagactgcatatctg

SEQ ID NO: 1583438 - DNA, 15 bp, Homo sapiens
agactgcatatctgg

SEQ ID NO: 1583439 - DNA, 15 bp, Homo sapiens
gactgcatatctggg

SEQ ID NO: 1583440 - DNA, 15 bp, Homo sapiens
actgcatatctggga

SEQ ID NO: 1583441 - DNA, 15 bp, Homo sapiens
ctgcatatctgggat

SEQ ID NO: 1583442 - DNA, 15 bp, Homo sapiens
tgcatatctgggatg

SEQ ID NO: 1583443 - DNA, 15 bp, Homo sapiens
gcatatctgggatga

SEQ ID NO: 1583444 - DNA, 15 bp, Homo sapiens
catatctgggatgaa

SEQ ID NO: 1583445 - DNA, 15 bp, Homo sapiens
atatctgggatgaac

SEQ ID NO: 1583446 - DNA, 15 bp, Homo sapiens
tatctgggatgaact

SEQ ID NO: 1583447 - DNA, 15 bp, Homo sapiens
atctgggatgaactc

SEQ ID NO: 1583448 - DNA, 15 bp, Homo sapiens
tctgggatgaactct

SEQ ID NO: 1583449 - DNA, 15 bp, Homo sapiens
ctgggatgaactctg

SEQ ID NO: 1583450 - DNA, 15 bp, Homo sapiens
tgggatgaactctgg

SEQ ID NO: 1583451 - DNA, 15 bp, Homo sapiens
gggatgaactctggg

SEQ ID NO: 1583452 - DNA, 15 bp, Homo sapiens
ggatgaactctgggc

SEQ ID NO: 1583453 - DNA, 15 bp, Homo sapiens
gatgaactctgggca

SEQ ID NO: 1583454 - DNA, 15 bp, Homo sapiens
atgaactctgggcag

SEQ ID NO: 1583455 - DNA, 15 bp, Homo sapiens
tgaactctgggcaga

SEQ ID NO: 1583456 - DNA, 15 bp, Homo sapiens
gaactctgggcagaa

SEQ ID NO: 1583457 - DNA, 15 bp, Homo sapiens
aactctgggcagaat

SEQ ID NO: 1583458 - DNA, 15 bp, Homo sapiens
actctgggcagaatt

SEQ ID NO: 1583459 - DNA, 15 bp, Homo sapiens
ctctgggcagaattc

SEQ ID NO: 1583460 - DNA, 15 bp, Homo sapiens
tctgggcagaattca

SEQ ID NO: 1583461 - DNA, 15 bp, Homo sapiens
ctgggcagaattcac

SEQ ID NO: 1583462 - DNA, 15 bp, Homo sapiens
tgggcagaattcaca

SEQ ID NO: 1583463 - DNA, 15 bp, Homo sapiens
gggcagaattcacat

SEQ ID NO: 1583464 - DNA, 15 bp, Homo sapiens
ggcagaattcacatg

SEQ ID NO: 1583465 - DNA, 15 bp, Homo sapiens
gcagaattcacatgg

SEQ ID NO: 1583466 - DNA, 15 bp, Homo sapiens
cagaattcacatggg

SEQ ID NO: 1583467 - DNA, 15 bp, Homo sapiens
agaattcacatgggc

SEQ ID NO: 1583468 - DNA, 15 bp, Homo sapiens
gaattcacatgggct

SEQ ID NO: 1583469 - DNA, 15 bp, Homo sapiens
aattcacatgggctt

SEQ ID NO: 1583470 - DNA, 15 bp, Homo sapiens
attcacatgggcttc

SEQ ID NO: 1583471 - DNA, 15 bp, Homo sapiens
ttcacatgggcttcc

SEQ ID NO: 1583472 - DNA, 15 bp, Homo sapiens
tcacatgggcttcct

SEQ ID NO: 1583473 - DNA, 15 bp, Homo sapiens
cacatgggcttcctt

SEQ ID NO: 1583474 - DNA, 15 bp, Homo sapiens
acatgggcttccttt

SEQ ID NO: 1583475 - DNA, 15 bp, Homo sapiens
catgggcttcctttg

SEQ ID NO: 1583476 - DNA, 15 bp, Homo sapiens
atgggcttcctttga

SEQ ID NO: 1583477 - DNA, 15 bp, Homo sapiens
tgggcttcctttgaa

SEQ ID NO: 1583478 - DNA, 15 bp, Homo sapiens
gggcttcctttgaaa

SEQ ID NO: 1583479 - DNA, 15 bp, Homo sapiens
ggcttcctttgaaat

SEQ ID NO: 1583480 - DNA, 15 bp, Homo sapiens
gcttcctttgaaata

SEQ ID NO: 1583481 - DNA, 15 bp, Homo sapiens
cttcctttgaaataa

SEQ ID NO: 1583482 - DNA, 15 bp, Homo sapiens
ttcctttgaaataaa

SEQ ID NO: 1583483 - DNA, 15 bp, Homo sapiens
tcctttgaaataaac

SEQ ID NO: 1583484 - DNA, 15 bp, Homo sapiens
cctttgaaataaaca

SEQ ID NO: 1583485 - DNA, 15 bp, Homo sapiens
ctttgaaataaacaa

SEQ ID NO: 1583486 - DNA, 15 bp, Homo sapiens
tttgaaataaacaag

SEQ ID NO: 1583487 - DNA, 15 bp, Homo sapiens
ttgaaataaacaaga

SEQ ID NO: 1583488 - DNA, 15 bp, Homo sapiens
tgaaataaacaagac

SEQ ID NO: 1583489 - DNA, 15 bp, Homo sapiens
gaaataaacaagact

SEQ ID NO: 1583490 - DNA, 15 bp, Homo sapiens
aaataaacaagactt

SEQ ID NO: 1583491 - DNA, 15 bp, Homo sapiens
aataaacaagacttt

SEQ ID NO: 1583492 - DNA, 15 bp, Homo sapiens
ataaacaagactttt

SEQ ID NO: 1583493 - DNA, 15 bp, Homo sapiens
taaacaagacttttc

SEQ ID NO: 1583494 - DNA, 15 bp, Homo sapiens
aaacaagacttttca

SEQ ID NO: 1583495 - DNA, 15 bp, Homo sapiens
aacaagacttttcaa

SEQ ID NO: 1583496 - DNA, 15 bp, Homo sapiens
acaagacttttcaaa

SEQ ID NO: 1583497 - DNA, 15 bp, Homo sapiens
caagacttttcaaat

SEQ ID NO: 1583498 - DNA, 15 bp, Homo sapiens
aagacttttcaaatt

SEQ ID NO: 1583499 - DNA, 15 bp, Homo sapiens
agacttttcaaattc

SEQ ID NO: 1583500 - DNA, 15 bp, Homo sapiens
gacttttcaaattct

SEQ ID NO: 1583501 - DNA, 15 bp, Homo sapiens
acttttcaaattctt

SEQ ID NO: 1583502 - DNA, 15 bp, Homo sapiens
cttttcaaattctta

SEQ ID NO: 1583503 - DNA, 15 bp, Homo sapiens
ttttcaaattcttag

SEQ ID NO: 1583504 - DNA, 15 bp, Homo sapiens
tttcaaattcttagt

SEQ ID NO: 1583505 - DNA, 15 bp, Homo sapiens
ttcaaattcttagtc

SEQ ID NO: 1583506 - DNA, 15 bp, Homo sapiens
tcaaattcttagtcg

SEQ ID NO: 1583507 - DNA, 15 bp, Homo sapiens
caaattcttagtcga

SEQ ID NO: 1583508 - DNA, 15 bp, Homo sapiens
aaattcttagtcgat

SEQ ID NO: 1583509 - DNA, 15 bp, Homo sapiens
aattcttagtcgatc

SEQ ID NO: 1583510 - DNA, 15 bp, Homo sapiens
attcttagtcgatct

SEQ ID NO: 1583511 - DNA, 15 bp, Homo sapiens
ttcttagtcgatctg

SEQ ID NO: 1583512 - DNA, 15 bp, Homo sapiens
tcttagtcgatctgc

SEQ ID NO: 1583513 - DNA, 15 bp, Homo sapiens
cttagtcgatctgca

SEQ ID NO: 1583514 - DNA, 15 bp, Homo sapiens
ttagtcgatctgcag

SEQ ID NO: 1583515 - DNA, 15 bp, Homo sapiens
tagtcgatctgcaga

SEQ ID NO: 1583516 - DNA, 15 bp, Homo sapiens
agtcgatctgcagaa

SEQ ID NO: 1583517 - DNA, 15 bp, Homo sapiens
gtcgatctgcagaac

SEQ ID NO: 1583518 - DNA, 15 bp, Homo sapiens
tcgatctgcagaacc

SEQ ID NO: 1583519 - DNA, 15 bp, Homo sapiens
cgatctgcagaacct

SEQ ID NO: 1583520 - DNA, 15 bp, Homo sapiens
gatctgcagaacctg

SEQ ID NO: 1583521 - DNA, 15 bp, Homo sapiens
atctgcagaacctgt

SEQ ID NO: 1583522 - DNA, 15 bp, Homo sapiens
tctgcagaacctgta

SEQ ID NO: 1583523 - DNA, 15 bp, Homo sapiens
ctgcagaacctgtag

SEQ ID NO: 1583524 - DNA, 15 bp, Homo sapiens
tgcagaacctgtagc

SEQ ID NO: 1583525 - DNA, 15 bp, Homo sapiens
gcagaacctgtagcc

SEQ ID NO: 1583526 - DNA, 15 bp, Homo sapiens
cagaacctgtagcca

SEQ ID NO: 1583527 - DNA, 15 bp, Homo sapiens
agaacctgtagccag

SEQ ID NO: 1583528 - DNA, 15 bp, Homo sapiens
gaacctgtagccagg

SEQ ID NO: 1583529 - DNA, 15 bp, Homo sapiens
aacctgtagccaggc

SEQ ID NO: 1583530 - DNA, 15 bp, Homo sapiens
acctgtagccaggca

SEQ ID NO: 1583531 - DNA, 15 bp, Homo sapiens
cctgtagccaggcac

SEQ ID NO: 1583532 - DNA, 15 bp, Homo sapiens
ctgtagccaggcact

SEQ ID NO: 1583533 - DNA, 15 bp, Homo sapiens
tgtagccaggcactg

SEQ ID NO: 1583534 - DNA, 15 bp, Homo sapiens
gtagccaggcactga

SEQ ID NO: 1583535 - DNA, 15 bp, Homo sapiens
tagccaggcactgaa

SEQ ID NO: 1583536 - DNA, 15 bp, Homo sapiens
agccaggcactgaac

SEQ ID NO: 1583537 - DNA, 15 bp, Homo sapiens
gccaggcactgaacc

SEQ ID NO: 1583538 - DNA, 15 bp, Homo sapiens
ccaggcactgaacca

SEQ ID NO: 1583539 - DNA, 15 bp, Homo sapiens
caggcactgaaccat

SEQ ID NO: 1583540 - DNA, 15 bp, Homo sapiens
aggcactgaaccatt

SEQ ID NO: 1583541 - DNA, 15 bp, Homo sapiens
ggcactgaaccattt

SEQ ID NO: 1583542 - DNA, 15 bp, Homo sapiens
gcactgaaccatttt

SEQ ID NO: 1583543 - DNA, 15 bp, Homo sapiens
cactgaaccattttg

SEQ ID NO: 1583544 - DNA, 15 bp, Homo sapiens
actgaaccattttga

SEQ ID NO: 1583545 - DNA, 15 bp, Homo sapiens
ctgaaccattttgat

SEQ ID NO: 1583546 - DNA, 15 bp, Homo sapiens
tgaaccattttgata

SEQ ID NO: 1583547 - DNA, 15 bp, Homo sapiens
gaaccattttgatag

SEQ ID NO: 1583548 - DNA, 15 bp, Homo sapiens
aaccattttgataga

SEQ ID NO: 1583549 - DNA, 15 bp, Homo sapiens
accattttgatagat

SEQ ID NO: 1583550 - DNA, 15 bp, Homo sapiens
ccattttgatagatg

SEQ ID NO: 1583551 - DNA, 15 bp, Homo sapiens
cattttgatagatgc

SEQ ID NO: 1583552 - DNA, 15 bp, Homo sapiens
attttgatagatgca

SEQ ID NO: 1583553 - DNA, 15 bp, Homo sapiens
ttttgatagatgcag

SEQ ID NO: 1583554 - DNA, 15 bp, Homo sapiens
tttgatagatgcagt

SEQ ID NO: 1583555 - DNA, 15 bp, Homo sapiens
ttgatagatgcagta

SEQ ID NO: 1583556 - DNA, 15 bp, Homo sapiens
tgatagatgcagtaa

SEQ ID NO: 1583557 - DNA, 15 bp, Homo sapiens
gatagatgcagtaat

SEQ ID NO: 1583558 - DNA, 15 bp, Homo sapiens
atagatgcagtaatc

SEQ ID NO: 1583559 - DNA, 15 bp, Homo sapiens
tagatgcagtaatcg

SEQ ID NO: 1583560 - DNA, 15 bp, Homo sapiens
agatgcagtaatcgt

SEQ ID NO: 1583561 - DNA, 15 bp, Homo sapiens
gatgcagtaatcgtt

SEQ ID NO: 1583562 - DNA, 15 bp, Homo sapiens
atgcagtaatcgttg

SEQ ID NO: 1583563 - DNA, 15 bp, Homo sapiens
tgcagtaatcgttgc

SEQ ID NO: 1583564 - DNA, 15 bp, Homo sapiens
gcagtaatcgttgca

SEQ ID NO: 1583565 - DNA, 15 bp, Homo sapiens
cagtaatcgttgcaa

SEQ ID NO: 1583566 - DNA, 15 bp, Homo sapiens
agtaatcgttgcaag

SEQ ID NO: 1583567 - DNA, 15 bp, Homo sapiens
gtaatcgttgcaagt

SEQ ID NO: 1583568 - DNA, 15 bp, Homo sapiens
taatcgttgcaagtg

SEQ ID NO: 1583569 - DNA, 15 bp, Homo sapiens
aatcgttgcaagtgt

SEQ ID NO: 1583570 - DNA, 15 bp, Homo sapiens
atcgttgcaagtgta

SEQ ID NO: 1583571 - DNA, 15 bp, Homo sapiens
tcgttgcaagtgtat

SEQ ID NO: 1583572 - DNA, 15 bp, Homo sapiens
cgttgcaagtgtata

SEQ ID NO: 1583573 - DNA, 15 bp, Homo sapiens
gttgcaagtgtatat

SEQ ID NO: 1583574 - DNA, 15 bp, Homo sapiens
ttgcaagtgtatatt

SEQ ID NO: 1583575 - DNA, 15 bp, Homo sapiens
tgcaagtgtatattt

SEQ ID NO: 1583576 - DNA, 15 bp, Homo sapiens
gcaagtgtatatttc

SEQ ID NO: 1583577 - DNA, 15 bp, Homo sapiens
caagtgtatatttca

SEQ ID NO: 1583578 - DNA, 15 bp, Homo sapiens
aagtgtatatttcaa

SEQ ID NO: 1583579 - DNA, 15 bp, Homo sapiens
agtgtatatttcaag

SEQ ID NO: 1583580 - DNA, 15 bp, Homo sapiens
gtgtatatttcaagg

SEQ ID NO: 1583581 - DNA, 15 bp, Homo sapiens
tgtatatttcaagga

SEQ ID NO: 1583582 - DNA, 15 bp, Homo sapiens
gtatatttcaaggag

SEQ ID NO: 1583583 - DNA, 15 bp, Homo sapiens
tatatttcaaggagt

SEQ ID NO: 1583584 - DNA, 15 bp, Homo sapiens
atatttcaaggagtt

SEQ ID NO: 1583585 - DNA, 15 bp, Homo sapiens
tatttcaaggagttc

SEQ ID NO: 1583586 - DNA, 15 bp, Homo sapiens
atttcaaggagttct

SEQ ID NO: 1583587 - DNA, 15 bp, Homo sapiens
tttcaaggagttctg

SEQ ID NO: 1583588 - DNA, 15 bp, Homo sapiens
ttcaaggagttctgg

SEQ ID NO: 1583589 - DNA, 15 bp, Homo sapiens
tcaaggagttctggc

SEQ ID NO: 1583590 - DNA, 15 bp, Homo sapiens
caaggagttctggct

SEQ ID NO: 1583591 - DNA, 15 bp, Homo sapiens
aaggagttctggctg

SEQ ID NO: 1583592 - DNA, 15 bp, Homo sapiens
aggagttctggctgg

SEQ ID NO: 1583593 - DNA, 15 bp, Homo sapiens
ggagttctggctggg

SEQ ID NO: 1583594 - DNA, 15 bp, Homo sapiens
gagttctggctgggt

SEQ ID NO: 1583595 - DNA, 15 bp, Homo sapiens
agttctggctgggtc

SEQ ID NO: 1583596 - DNA, 15 bp, Homo sapiens
gttctggctgggtcc

SEQ ID NO: 1583597 - DNA, 15 bp, Homo sapiens
ttctggctgggtcct

SEQ ID NO: 1583598 - DNA, 15 bp, Homo sapiens
tctggctgggtccta

SEQ ID NO: 1583599 - DNA, 15 bp, Homo sapiens
ctggctgggtcctag

SEQ ID NO: 1583600 - DNA, 15 bp, Homo sapiens
tggctgggtcctagt

SEQ ID NO: 1583601 - DNA, 15 bp, Homo sapiens
ggctgggtcctagtt

SEQ ID NO: 1583602 - DNA, 15 bp, Homo sapiens
gctgggtcctagttt

SEQ ID NO: 1583603 - DNA, 15 bp, Homo sapiens
ctgggtcctagttta

SEQ ID NO: 1583604 - DNA, 15 bp, Homo sapiens
tgggtcctagtttat

SEQ ID NO: 1583605 - DNA, 15 bp, Homo sapiens
gggtcctagtttatg

SEQ ID NO: 1583606 - DNA, 15 bp, Homo sapiens
ggtcctagtttatgc

SEQ ID NO: 1583607 - DNA, 15 bp, Homo sapiens
gtcctagtttatgct

SEQ ID NO: 1583608 - DNA, 15 bp, Homo sapiens
tcctagtttatgctt

SEQ ID NO: 1583609 - DNA, 15 bp, Homo sapiens
cctagtttatgcttg

SEQ ID NO: 1583610 - DNA, 15 bp, Homo sapiens
ctagtttatgcttgt

SEQ ID NO: 1583611 - DNA, 15 bp, Homo sapiens
tagtttatgcttgtg

SEQ ID NO: 1583612 - DNA, 15 bp, Homo sapiens
agtttatgcttgtgg

SEQ ID NO: 1583613 - DNA, 15 bp, Homo sapiens
gtttatgcttgtggc

SEQ ID NO: 1583614 - DNA, 15 bp, Homo sapiens
tttatgcttgtggca

SEQ ID NO: 1583615 - DNA, 15 bp, Homo sapiens
ttatgcttgtggcag

SEQ ID NO: 1583616 - DNA, 15 bp, Homo sapiens
tatgcttgtggcaga

SEQ ID NO: 1583617 - DNA, 15 bp, Homo sapiens
atgcttgtggcagaa

SEQ ID NO: 1583618 - DNA, 15 bp, Homo sapiens
tgcttgtggcagaag

SEQ ID NO: 1583619 - DNA, 15 bp, Homo sapiens
gcttgtggcagaagc

SEQ ID NO: 1583620 - DNA, 15 bp, Homo sapiens
cttgtggcagaagca

SEQ ID NO: 1583621 - DNA, 15 bp, Homo sapiens
ttgtggcagaagcag

SEQ ID NO: 1583622 - DNA, 15 bp, Homo sapiens
tgtggcagaagcagt

SEQ ID NO: 1583623 - DNA, 15 bp, Homo sapiens
gtggcagaagcagtg

SEQ ID NO: 1583624 - DNA, 15 bp, Homo sapiens
tggcagaagcagtga

SEQ ID NO: 1583625 - DNA, 15 bp, Homo sapiens
ggcagaagcagtgag

SEQ ID NO: 1583626 - DNA, 15 bp, Homo sapiens
gcagaagcagtgagt

SEQ ID NO: 1583627 - DNA, 15 bp, Homo sapiens
cagaagcagtgagta

SEQ ID NO: 1583628 - DNA, 15 bp, Homo sapiens
agaagcagtgagtaa

SEQ ID NO: 1583629 - DNA, 15 bp, Homo sapiens
gaagcagtgagtaac

SEQ ID NO: 1583630 - DNA, 15 bp, Homo sapiens
aagcagtgagtaact

SEQ ID NO: 1583631 - DNA, 15 bp, Homo sapiens
agcagtgagtaactg

SEQ ID NO: 1583632 - DNA, 15 bp, Homo sapiens
gcagtgagtaactgg

SEQ ID NO: 1583633 - DNA, 15 bp, Homo sapiens
cagtgagtaactggg

SEQ ID NO: 1583634 - DNA, 15 bp, Homo sapiens
agtgagtaactggga

SEQ ID NO: 1583635 - DNA, 15 bp, Homo sapiens
gtgagtaactgggag

SEQ ID NO: 1583636 - DNA, 15 bp, Homo sapiens
tgagtaactgggagg

SEQ ID NO: 1583637 - DNA, 15 bp, Homo sapiens
gagtaactgggagga

SEQ ID NO: 1583638 - DNA, 15 bp, Homo sapiens
agtaactgggaggaa

SEQ ID NO: 1583639 - DNA, 15 bp, Homo sapiens
gtaactgggaggaag

SEQ ID NO: 1583640 - DNA, 15 bp, Homo sapiens
taactgggaggaagt

SEQ ID NO: 1583641 - DNA, 15 bp, Homo sapiens
aactgggaggaagtt

SEQ ID NO: 1583642 - DNA, 15 bp, Homo sapiens
actgggaggaagttg

SEQ ID NO: 1583643 - DNA, 15 bp, Homo sapiens
ctgggaggaagttgg

SEQ ID NO: 1583644 - DNA, 15 bp, Homo sapiens
tgggaggaagttggt

SEQ ID NO: 1583645 - DNA, 15 bp, Homo sapiens
gggaggaagttggtg

SEQ ID NO: 1583646 - DNA, 15 bp, Homo sapiens
ggaggaagttggtga

SEQ ID NO: 1583647 - DNA, 15 bp, Homo sapiens
gaggaagttggtgag

SEQ ID NO: 1583648 - DNA, 15 bp, Homo sapiens
aggaagttggtgagt

SEQ ID NO: 1583649 - DNA, 15 bp, Homo sapiens
ggaagttggtgagta

SEQ ID NO: 1583650 - DNA, 15 bp, Homo sapiens
gaagttggtgagtaa

SEQ ID NO: 1583651 - DNA, 15 bp, Homo sapiens
aagttggtgagtaag

SEQ ID NO: 1583652 - DNA, 15 bp, Homo sapiens
agttggtgagtaagc

SEQ ID NO: 1583653 - DNA, 15 bp, Homo sapiens
gttggtgagtaagct

SEQ ID NO: 1583654 - DNA, 15 bp, Homo sapiens
ttggtgagtaagctt

SEQ ID NO: 1583655 - DNA, 15 bp, Homo sapiens
tggtgagtaagcttc

SEQ ID NO: 1583656 - DNA, 15 bp, Homo sapiens
ggtgagtaagcttca

SEQ ID NO: 1583657 - DNA, 15 bp, Homo sapiens
gtgagtaagcttcaa

SEQ ID NO: 1583658 - DNA, 15 bp, Homo sapiens
tgagtaagcttcaag

SEQ ID NO: 1583659 - DNA, 15 bp, Homo sapiens
gagtaagcttcaagg

SEQ ID NO: 1583660 - DNA, 15 bp, Homo sapiens
agtaagcttcaagga

SEQ ID NO: 1583661 - DNA, 15 bp, Homo sapiens
gtaagcttcaaggaa

SEQ ID NO: 1583662 - DNA, 15 bp, Homo sapiens
taagcttcaaggaag

SEQ ID NO: 1583663 - DNA, 15 bp, Homo sapiens
aagcttcaaggaaga

SEQ ID NO: 1583664 - DNA, 15 bp, Homo sapiens
agcttcaaggaagaa

SEQ ID NO: 1583665 - DNA, 15 bp, Homo sapiens
gcttcaaggaagaag

SEQ ID NO: 1583666 - DNA, 15 bp, Homo sapiens
cttcaaggaagaagt

SEQ ID NO: 1583667 - DNA, 15 bp, Homo sapiens
ttcaaggaagaagtc

SEQ ID NO: 1583668 - DNA, 15 bp, Homo sapiens
tcaaggaagaagtca

SEQ ID NO: 1583669 - DNA, 15 bp, Homo sapiens
caaggaagaagtcat

SEQ ID NO: 1583670 - DNA, 15 bp, Homo sapiens
aaggaagaagtcatt

SEQ ID NO: 1583671 - DNA, 15 bp, Homo sapiens
aggaagaagtcattt

SEQ ID NO: 1583672 - DNA, 15 bp, Homo sapiens
ggaagaagtcatttt

SEQ ID NO: 1583673 - DNA, 15 bp, Homo sapiens
gaagaagtcattttt

SEQ ID NO: 1583674 - DNA, 15 bp, Homo sapiens
aagaagtcattttta

SEQ ID NO: 1583675 - DNA, 15 bp, Homo sapiens
agaagtcatttttag

SEQ ID NO: 1583676 - DNA, 15 bp, Homo sapiens
gaagtcatttttagt

SEQ ID NO: 1583677 - DNA, 15 bp, Homo sapiens
aagtcatttttagta

SEQ ID NO: 1583678 - DNA, 15 bp, Homo sapiens
agtcatttttagtac

SEQ ID NO: 1583679 - DNA, 15 bp, Homo sapiens
gtcatttttagtact

SEQ ID NO: 1583680 - DNA, 15 bp, Homo sapiens
tcatttttagtactc

SEQ ID NO: 1583681 - DNA, 15 bp, Homo sapiens
catttttagtactct

SEQ ID NO: 1583682 - DNA, 15 bp, Homo sapiens
atttttagtactctg

SEQ ID NO: 1583683 - DNA, 15 bp, Homo sapiens
tttttagtactctgg

SEQ ID NO: 1583684 - DNA, 15 bp, Homo sapiens
ttttagtactctgga

SEQ ID NO: 1583685 - DNA, 15 bp, Homo sapiens
tttagtactctggat

SEQ ID NO: 1583686 - DNA, 15 bp, Homo sapiens
ttagtactctggatc

SEQ ID NO: 1583687 - DNA, 15 bp, Homo sapiens
tagtactctggatct

SEQ ID NO: 1583688 - DNA, 15 bp, Homo sapiens
agtactctggatctt

SEQ ID NO: 1583689 - DNA, 15 bp, Homo sapiens
gtactctggatcttc

SEQ ID NO: 1583690 - DNA, 15 bp, Homo sapiens
tactctggatcttcc

SEQ ID NO: 1583691 - DNA, 15 bp, Homo sapiens
actctggatcttcct

SEQ ID NO: 1583692 - DNA, 15 bp, Homo sapiens
ctctggatcttcctg

SEQ ID NO: 1583693 - DNA, 15 bp, Homo sapiens
tctggatcttcctga

SEQ ID NO: 1583694 - DNA, 15 bp, Homo sapiens
ctggatcttcctgat

SEQ ID NO: 1583695 - DNA, 15 bp, Homo sapiens
tggatcttcctgatt

SEQ ID NO: 1583696 - DNA, 15 bp, Homo sapiens
ggatcttcctgattt

SEQ ID NO: 1583697 - DNA, 15 bp, Homo sapiens
gatcttcctgatttt

SEQ ID NO: 1583698 - DNA, 15 bp, Homo sapiens
atcttcctgatttta

SEQ ID NO: 1583699 - DNA, 15 bp, Homo sapiens
tcttcctgattttaa

SEQ ID NO: 1583700 - DNA, 15 bp, Homo sapiens
cttcctgattttaaa

SEQ ID NO: 1583701 - DNA, 15 bp, Homo sapiens
ttcctgattttaaag

SEQ ID NO: 1583702 - DNA, 15 bp, Homo sapiens
tcctgattttaaagc

SEQ ID NO: 1583703 - DNA, 15 bp, Homo sapiens
cctgattttaaagca

SEQ ID NO: 1583704 - DNA, 15 bp, Homo sapiens
ctgattttaaagcac

SEQ ID NO: 1583705 - DNA, 15 bp, Homo sapiens
tgattttaaagcact

SEQ ID NO: 1583706 - DNA, 15 bp, Homo sapiens
gattttaaagcacta

SEQ ID NO: 1583707 - DNA, 15 bp, Homo sapiens
attttaaagcactac

SEQ ID NO: 1583708 - DNA, 15 bp, Homo sapiens
ttttaaagcactaca

SEQ ID NO: 1583709 - DNA, 15 bp, Homo sapiens
tttaaagcactacaa

SEQ ID NO: 1583710 - DNA, 15 bp, Homo sapiens
ttaaagcactacaaa

SEQ ID NO: 1583711 - DNA, 15 bp, Homo sapiens
taaagcactacaaaa

SEQ ID NO: 1583712 - DNA, 15 bp, Homo sapiens
aaagcactacaaaat

SEQ ID NO: 1583713 - DNA, 15 bp, Homo sapiens
aagcactacaaaatg

SEQ ID NO: 1583714 - DNA, 15 bp, Homo sapiens
agcactacaaaatgg

SEQ ID NO: 1583715 - DNA, 15 bp, Homo sapiens
gcactacaaaatggt

SEQ ID NO: 1583716 - DNA, 15 bp, Homo sapiens
cactacaaaatggtg

SEQ ID NO: 1583717 - DNA, 15 bp, Homo sapiens
actacaaaatggtgc

SEQ ID NO: 1583718 - DNA, 15 bp, Homo sapiens
ctacaaaatggtgca

SEQ ID NO: 1583719 - DNA, 15 bp, Homo sapiens
tacaaaatggtgcat

SEQ ID NO: 1583720 - DNA, 15 bp, Homo sapiens
acaaaatggtgcatt

SEQ ID NO: 1583721 - DNA, 15 bp, Homo sapiens
caaaatggtgcattt

SEQ ID NO: 1583722 - DNA, 15 bp, Homo sapiens
aaaatggtgcatttt

SEQ ID NO: 1583723 - DNA, 15 bp, Homo sapiens
aaatggtgcattttc

SEQ ID NO: 1583724 - DNA, 15 bp, Homo sapiens
aatggtgcattttca

SEQ ID NO: 1583725 - DNA, 15 bp, Homo sapiens
atggtgcattttcat

SEQ ID NO: 1583726 - DNA, 15 bp, Homo sapiens
tggtgcattttcatt

SEQ ID NO: 1583727 - DNA, 15 bp, Homo sapiens
ggtgcattttcattc

SEQ ID NO: 1583728 - DNA, 15 bp, Homo sapiens
gtgcattttcattct

SEQ ID NO: 1583729 - DNA, 15 bp, Homo sapiens
tgcattttcattctt

SEQ ID NO: 1583730 - DNA, 15 bp, Homo sapiens
gcattttcattcttg

SEQ ID NO: 1583731 - DNA, 15 bp, Homo sapiens
cattttcattcttgt

SEQ ID NO: 1583732 - DNA, 15 bp, Homo sapiens
attttcattcttgtc

SEQ ID NO: 1583733 - DNA, 15 bp, Homo sapiens
ttttcattcttgtca

SEQ ID NO: 1583734 - DNA, 15 bp, Homo sapiens
tttcattcttgtcaa

SEQ ID NO: 1583735 - DNA, 15 bp, Homo sapiens
ttcattcttgtcaag

SEQ ID NO: 1583736 - DNA, 15 bp, Homo sapiens
tcattcttgtcaagt

SEQ ID NO: 1583737 - DNA, 15 bp, Homo sapiens
cattcttgtcaagtg

SEQ ID NO: 1583738 - DNA, 15 bp, Homo sapiens
attcttgtcaagtga

SEQ ID NO: 1583739 - DNA, 15 bp, Homo sapiens
ttcttgtcaagtgat

SEQ ID NO: 1583740 - DNA, 15 bp, Homo sapiens
tcttgtcaagtgata

SEQ ID NO: 1583741 - DNA, 15 bp, Homo sapiens
cttgtcaagtgataa

SEQ ID NO: 1583742 - DNA, 15 bp, Homo sapiens
ttgtcaagtgataac

SEQ ID NO: 1583743 - DNA, 15 bp, Homo sapiens
tgtcaagtgataaca

SEQ ID NO: 1583744 - DNA, 15 bp, Homo sapiens
gtcaagtgataacag

SEQ ID NO: 1583745 - DNA, 15 bp, Homo sapiens
tcaagtgataacaga

SEQ ID NO: 1583746 - DNA, 15 bp, Homo sapiens
caagtgataacagat

SEQ ID NO: 1583747 - DNA, 15 bp, Homo sapiens
aagtgataacagata

SEQ ID NO: 1583748 - DNA, 15 bp, Homo sapiens
agtgataacagatat

SEQ ID NO: 1583749 - DNA, 15 bp, Homo sapiens
gtgataacagatata

SEQ ID NO: 1583750 - DNA, 15 bp, Homo sapiens
tgataacagatatat

SEQ ID NO: 1583751 - DNA, 15 bp, Homo sapiens
gataacagatatatt

SEQ ID NO: 1583752 - DNA, 15 bp, Homo sapiens
ataacagatatattc

SEQ ID NO: 1583753 - DNA, 15 bp, Homo sapiens
taacagatatattct

SEQ ID NO: 1583754 - DNA, 15 bp, Homo sapiens
aacagatatattctg

SEQ ID NO: 1583755 - DNA, 15 bp, Homo sapiens
acagatatattctga

SEQ ID NO: 1583756 - DNA, 15 bp, Homo sapiens
cagatatattctgat

SEQ ID NO: 1583757 - DNA, 15 bp, Homo sapiens
agatatattctgatg

SEQ ID NO: 1583758 - DNA, 15 bp, Homo sapiens
gatatattctgatga

SEQ ID NO: 1583759 - DNA, 15 bp, Homo sapiens
atatattctgatgag

SEQ ID NO: 1583760 - DNA, 15 bp, Homo sapiens
tatattctgatgagc

SEQ ID NO: 1583761 - DNA, 15 bp, Homo sapiens
atattctgatgagcc

SEQ ID NO: 1583762 - DNA, 15 bp, Homo sapiens
tattctgatgagcct

SEQ ID NO: 1583763 - DNA, 15 bp, Homo sapiens
attctgatgagcctg

SEQ ID NO: 1583764 - DNA, 15 bp, Homo sapiens
ttctgatgagcctga

SEQ ID NO: 1583765 - DNA, 15 bp, Homo sapiens
tctgatgagcctgaa

SEQ ID NO: 1583766 - DNA, 15 bp, Homo sapiens
ctgatgagcctgaaa

SEQ ID NO: 1583767 - DNA, 15 bp, Homo sapiens
tgatgagcctgaaat

SEQ ID NO: 1583768 - DNA, 15 bp, Homo sapiens
gatgagcctgaaatg

SEQ ID NO: 1583769 - DNA, 15 bp, Homo sapiens
atgagcctgaaatga

SEQ ID NO: 1583770 - DNA, 15 bp, Homo sapiens
tgagcctgaaatgaa

SEQ ID NO: 1583771 - DNA, 15 bp, Homo sapiens
gagcctgaaatgaat

SEQ ID NO: 1583772 - DNA, 15 bp, Homo sapiens
agcctgaaatgaata

SEQ ID NO: 1583773 - DNA, 15 bp, Homo sapiens
gcctgaaatgaatat

SEQ ID NO: 1583774 - DNA, 15 bp, Homo sapiens
cctgaaatgaatata

SEQ ID NO: 1583775 - DNA, 15 bp, Homo sapiens
ctgaaatgaatatat

SEQ ID NO: 1583776 - DNA, 15 bp, Homo sapiens
tgaaatgaatatata

SEQ ID NO: 1583777 - DNA, 15 bp, Homo sapiens
gaaatgaatatatat

SEQ ID NO: 1583778 - DNA, 15 bp, Homo sapiens
aaatgaatatatatt

SEQ ID NO: 1583779 - DNA, 15 bp, Homo sapiens
aatgaatatatattg

SEQ ID NO: 1583780 - DNA, 15 bp, Homo sapiens
atgaatatatattgt

SEQ ID NO: 1583781 - DNA, 15 bp, Homo sapiens
tgaatatatattgta

SEQ ID NO: 1583782 - DNA, 15 bp, Homo sapiens
gaatatatattgtat

SEQ ID NO: 1583783 - DNA, 15 bp, Homo sapiens
aatatatattgtatc

SEQ ID NO: 1583784 - DNA, 15 bp, Homo sapiens
atatatattgtatca

SEQ ID NO: 1583785 - DNA, 15 bp, Homo sapiens
tatatattgtatcat

SEQ ID NO: 1583786 - DNA, 15 bp, Homo sapiens
atatattgtatcatt

SEQ ID NO: 1583787 - DNA, 15 bp, Homo sapiens
tatattgtatcattt

SEQ ID NO: 1583788 - DNA, 15 bp, Homo sapiens
atattgtatcatttt

SEQ ID NO: 1583789 - DNA, 15 bp, Homo sapiens
tattgtatcattttt

SEQ ID NO: 1583790 - DNA, 15 bp, Homo sapiens
attgtatcattttta

SEQ ID NO: 1583791 - DNA, 15 bp, Homo sapiens
ttgtatcatttttat

SEQ ID NO: 1583792 - DNA, 15 bp, Homo sapiens
tgtatcatttttata

SEQ ID NO: 1583793 - DNA, 15 bp, Homo sapiens
gtatcatttttataa

SEQ ID NO: 1583794 - DNA, 15 bp, Homo sapiens
tatcatttttataat

SEQ ID NO: 1583795 - DNA, 15 bp, Homo sapiens
atcatttttataata

SEQ ID NO: 1583796 - DNA, 15 bp, Homo sapiens
tcatttttataatat

SEQ ID NO: 1583797 - DNA, 15 bp, Homo sapiens
catttttataatatc

SEQ ID NO: 1583798 - DNA, 15 bp, Homo sapiens
atttttataatatct

SEQ ID NO: 1583799 - DNA, 15 bp, Homo sapiens
tttttataatatcta

SEQ ID NO: 1583800 - DNA, 15 bp, Homo sapiens
ttttataatatctag

SEQ ID NO: 1583801 - DNA, 15 bp, Homo sapiens
tttataatatctagc

SEQ ID NO: 1583802 - DNA, 15 bp, Homo sapiens
ttataatatctagca

SEQ ID NO: 1583803 - DNA, 15 bp, Homo sapiens
tataatatctagcaa

SEQ ID NO: 1583804 - DNA, 15 bp, Homo sapiens
ataatatctagcaag

SEQ ID NO: 1583805 - DNA, 15 bp, Homo sapiens
taatatctagcaagg

SEQ ID NO: 1583806 - DNA, 15 bp, Homo sapiens
aatatctagcaaggt

SEQ ID NO: 1583807 - DNA, 15 bp, Homo sapiens
atatctagcaaggtt

SEQ ID NO: 1583808 - DNA, 15 bp, Homo sapiens
tatctagcaaggttt

SEQ ID NO: 1583809 - DNA, 15 bp, Homo sapiens
atctagcaaggtttg

SEQ ID NO: 1583810 - DNA, 15 bp, Homo sapiens
tctagcaaggtttgt

SEQ ID NO: 1583811 - DNA, 15 bp, Homo sapiens
ctagcaaggtttgta

SEQ ID NO: 1583812 - DNA, 15 bp, Homo sapiens
tagcaaggtttgtat

SEQ ID NO: 1583813 - DNA, 15 bp, Homo sapiens
agcaaggtttgtatt

SEQ ID NO: 1583814 - DNA, 15 bp, Homo sapiens
gcaaggtttgtattt

SEQ ID NO: 1583815 - DNA, 15 bp, Homo sapiens
caaggtttgtatttt

SEQ ID NO: 1583816 - DNA, 15 bp, Homo sapiens
aaggtttgtattttc

SEQ ID NO: 1583817 - DNA, 15 bp, Homo sapiens
aggtttgtattttcc

SEQ ID NO: 1583818 - DNA, 15 bp, Homo sapiens
ggtttgtattttcct

SEQ ID NO: 1583819 - DNA, 15 bp, Homo sapiens
gtttgtattttccta

SEQ ID NO: 1583820 - DNA, 15 bp, Homo sapiens
tttgtattttcctag

SEQ ID NO: 1583821 - DNA, 15 bp, Homo sapiens
ttgtattttcctaga

SEQ ID NO: 1583822 - DNA, 15 bp, Homo sapiens
tgtattttcctagaa

SEQ ID NO: 1583823 - DNA, 15 bp, Homo sapiens
gtattttcctagaac

SEQ ID NO: 1583824 - DNA, 15 bp, Homo sapiens
tattttcctagaact

SEQ ID NO: 1583825 - DNA, 15 bp, Homo sapiens
attttcctagaactt

SEQ ID NO: 1583826 - DNA, 15 bp, Homo sapiens
ttttcctagaacttg

SEQ ID NO: 1583827 - DNA, 15 bp, Homo sapiens
cctagaacttgaact

SEQ ID NO: 1583828 - DNA, 15 bp, Homo sapiens
ctagaacttgaacta

SEQ ID NO: 1583829 - DNA, 15 bp, Homo sapiens
tagaacttgaactaa

SEQ ID NO: 1583830 - DNA, 15 bp, Homo sapiens
agaacttgaactaaa

SEQ ID NO: 1583831 - DNA, 15 bp, Homo sapiens
gaacttgaactaaat

SEQ ID NO: 1583832 - DNA, 15 bp, Homo sapiens
aacttgaactaaatt

SEQ ID NO: 1583833 - DNA, 15 bp, Homo sapiens
acttgaactaaattt

SEQ ID NO: 1583834 - DNA, 15 bp, Homo sapiens
cttgaactaaatttc

SEQ ID NO: 1583835 - DNA, 15 bp, Homo sapiens
ttgaactaaatttca

SEQ ID NO: 1583836 - DNA, 15 bp, Homo sapiens
tgaactaaatttcag

SEQ ID NO: 1583837 - DNA, 15 bp, Homo sapiens
gaactaaatttcagt

SEQ ID NO: 1583838 - DNA, 15 bp, Homo sapiens
aactaaatttcagtt

SEQ ID NO: 1583839 - DNA, 15 bp, Homo sapiens
actaaatttcagttc

SEQ ID NO: 1583840 - DNA, 15 bp, Homo sapiens
ctaaatttcagttca

SEQ ID NO: 1583841 - DNA, 15 bp, Homo sapiens
taaatttcagttcat

SEQ ID NO: 1583842 - DNA, 15 bp, Homo sapiens
aatttcagttcataa

SEQ ID NO: 1583843 - DNA, 15 bp, Homo sapiens
atttcagttcataaa

SEQ ID NO: 1583844 - DNA, 15 bp, Homo sapiens
tttcagttcataaaa

SEQ ID NO: 1583845 - DNA, 15 bp, Homo sapiens
ttcagttcataaaat

SEQ ID NO: 1583846 - DNA, 15 bp, Homo sapiens
tcagttcataaaatt

SEQ ID NO: 1583847 - DNA, 15 bp, Homo sapiens
cagttcataaaattt

SEQ ID NO: 1583848 - DNA, 15 bp, Homo sapiens
agttcataaaattta

SEQ ID NO: 1583849 - DNA, 15 bp, Homo sapiens
gttcataaaatttat

SEQ ID NO: 1583850 - DNA, 15 bp, Homo sapiens
ttcataaaatttata

SEQ ID NO: 1583851 - DNA, 15 bp, Homo sapiens
tcataaaatttataa

SEQ ID NO: 1583852 - DNA, 15 bp, Homo sapiens
cataaaatttataaa

SEQ ID NO: 1583853 - DNA, 15 bp, Homo sapiens
ataaaatttataaaa

SEQ ID NO: 1583854 - DNA, 15 bp, Homo sapiens
taaaatttataaaat

SEQ ID NO: 1583855 - DNA, 15 bp, Homo sapiens
aaaatttataaaata

SEQ ID NO: 1583856 - DNA, 15 bp, Homo sapiens
aaatttataaaatac

SEQ ID NO: 1583857 - DNA, 15 bp, Homo sapiens
aatttataaaatact

SEQ ID NO: 1583858 - DNA, 15 bp, Homo sapiens
atttataaaatactt

SEQ ID NO: 1583859 - DNA, 15 bp, Homo sapiens
tttataaaatactta

SEQ ID NO: 1583860 - DNA, 15 bp, Homo sapiens
ttataaaatacttag

SEQ ID NO: 1583861 - DNA, 15 bp, Homo sapiens
tataaaatacttagt

SEQ ID NO: 1583862 - DNA, 15 bp, Homo sapiens
ataaaatacttagtt

SEQ ID NO: 1583863 - DNA, 15 bp, Homo sapiens
taaaatacttagttg

SEQ ID NO: 1583864 - DNA, 15 bp, Homo sapiens
aaaatacttagttgt

SEQ ID NO: 1583865 - DNA, 15 bp, Homo sapiens
aaatacttagttgtt

SEQ ID NO: 1583866 - DNA, 15 bp, Homo sapiens
aatacttagttgttg

SEQ ID NO: 1583867 - DNA, 15 bp, Homo sapiens
atacttagttgttgt

SEQ ID NO: 1583868 - DNA, 15 bp, Homo sapiens
tacttagttgttgta

SEQ ID NO: 1583869 - DNA, 15 bp, Homo sapiens
acttagttgttgtaa

SEQ ID NO: 1583870 - DNA, 15 bp, Homo sapiens
cttagttgttgtaaa

SEQ ID NO: 1583871 - DNA, 15 bp, Homo sapiens
ttagttgttgtaaaa

SEQ ID NO: 1583872 - DNA, 15 bp, Homo sapiens
tagttgttgtaaaat

SEQ ID NO: 1583873 - DNA, 15 bp, Homo sapiens
agttgttgtaaaata

SEQ ID NO: 1583874 - DNA, 15 bp, Homo sapiens
gttgttgtaaaatat

SEQ ID NO: 1583875 - DNA, 15 bp, Homo sapiens
ttgttgtaaaatatt

SEQ ID NO: 1583876 - DNA, 15 bp, Homo sapiens
tgttgtaaaatattt

SEQ ID NO: 1583877 - DNA, 15 bp, Homo sapiens
gttgtaaaatatttt

SEQ ID NO: 1583878 - DNA, 15 bp, Homo sapiens
ttgtaaaatattttt

SEQ ID NO: 1583879 - DNA, 15 bp, Homo sapiens
tgtaaaatatttttg

SEQ ID NO: 1583880 - DNA, 15 bp, Homo sapiens
gtaaaatatttttgg

SEQ ID NO: 1583881 - DNA, 15 bp, Homo sapiens
taaaatatttttgga

SEQ ID NO: 1583882 - DNA, 15 bp, Homo sapiens
aatatttttggaatg

SEQ ID NO: 1583883 - DNA, 15 bp, Homo sapiens
atatttttggaatgt

SEQ ID NO: 1583884 - DNA, 15 bp, Homo sapiens
tatttttggaatgtt

SEQ ID NO: 1583885 - DNA, 15 bp, Homo sapiens
atttttggaatgttc

SEQ ID NO: 1583886 - DNA, 15 bp, Homo sapiens
tttttggaatgttca

SEQ ID NO: 1583887 - DNA, 15 bp, Homo sapiens
ttttggaatgttcac

SEQ ID NO: 1583888 - DNA, 15 bp, Homo sapiens
tttggaatgttcaca

SEQ ID NO: 1583889 - DNA, 15 bp, Homo sapiens
ttggaatgttcacat

SEQ ID NO: 1583890 - DNA, 15 bp, Homo sapiens
tggaatgttcacata

SEQ ID NO: 1583891 - DNA, 15 bp, Homo sapiens
ggaatgttcacatag

SEQ ID NO: 1583892 - DNA, 15 bp, Homo sapiens
gaatgttcacatagg

SEQ ID NO: 1583893 - DNA, 15 bp, Homo sapiens
aatgttcacataggt

SEQ ID NO: 1583894 - DNA, 15 bp, Homo sapiens
atgttcacataggtg

SEQ ID NO: 1583895 - DNA, 15 bp, Homo sapiens
tgttcacataggtga

SEQ ID NO: 1583896 - DNA, 15 bp, Homo sapiens
gttcacataggtgac

SEQ ID NO: 1583897 - DNA, 15 bp, Homo sapiens
ttcacataggtgaca

SEQ ID NO: 1583898 - DNA, 15 bp, Homo sapiens
tcacataggtgacac

SEQ ID NO: 1583899 - DNA, 15 bp, Homo sapiens
cacataggtgacaca

SEQ ID NO: 1583900 - DNA, 15 bp, Homo sapiens
acataggtgacacac

SEQ ID NO: 1583901 - DNA, 15 bp, Homo sapiens
cataggtgacacaca

SEQ ID NO: 1583902 - DNA, 15 bp, Homo sapiens
ataggtgacacacaa

SEQ ID NO: 1583903 - DNA, 15 bp, Homo sapiens
taggtgacacacaaa

SEQ ID NO: 1583904 - DNA, 15 bp, Homo sapiens
aggtgacacacaaat

SEQ ID NO: 1583905 - DNA, 15 bp, Homo sapiens
ggtgacacacaaatg

SEQ ID NO: 1583906 - DNA, 15 bp, Homo sapiens
gtgacacacaaatgt

SEQ ID NO: 1583907 - DNA, 15 bp, Homo sapiens
tgacacacaaatgtc

SEQ ID NO: 1583908 - DNA, 15 bp, Homo sapiens
gacacacaaatgtcc

SEQ ID NO: 1583909 - DNA, 15 bp, Homo sapiens
acacacaaatgtccc

SEQ ID NO: 1583910 - DNA, 15 bp, Homo sapiens
cacacaaatgtccca

SEQ ID NO: 1583911 - DNA, 15 bp, Homo sapiens
acacaaatgtcccat

SEQ ID NO: 1583912 - DNA, 15 bp, Homo sapiens
cacaaatgtcccatt

SEQ ID NO: 1583913 - DNA, 15 bp, Homo sapiens
acaaatgtcccattt

SEQ ID NO: 1583914 - DNA, 15 bp, Homo sapiens
caaatgtcccatttt

SEQ ID NO: 1583915 - DNA, 15 bp, Homo sapiens
aatgtcccattttca

SEQ ID NO: 1583916 - DNA, 15 bp, Homo sapiens
atgtcccattttcat

SEQ ID NO: 1583917 - DNA, 15 bp, Homo sapiens
tgtcccattttcatt

SEQ ID NO: 1583918 - DNA, 15 bp, Homo sapiens
gtcccattttcattc

SEQ ID NO: 1583919 - DNA, 15 bp, Homo sapiens
tcccattttcattct

SEQ ID NO: 1583920 - DNA, 15 bp, Homo sapiens
cccattttcattctt

SEQ ID NO: 1583921 - DNA, 15 bp, Homo sapiens
ccattttcattcttt

SEQ ID NO: 1583922 - DNA, 15 bp, Homo sapiens
cattttcattctttc

SEQ ID NO: 1583923 - DNA, 15 bp, Homo sapiens
attttcattctttct

SEQ ID NO: 1583924 - DNA, 15 bp, Homo sapiens
ttttcattctttcta

SEQ ID NO: 1583925 - DNA, 15 bp, Homo sapiens
tttcattctttctat

SEQ ID NO: 1583926 - DNA, 15 bp, Homo sapiens
ttcattctttctata

SEQ ID NO: 1583927 - DNA, 15 bp, Homo sapiens
tcattctttctatag

SEQ ID NO: 1583928 - DNA, 15 bp, Homo sapiens
cattctttctatagt

SEQ ID NO: 1583929 - DNA, 15 bp, Homo sapiens
attctttctatagta

SEQ ID NO: 1583930 - DNA, 15 bp, Homo sapiens
ttctttctatagtaa

SEQ ID NO: 1583931 - DNA, 15 bp, Homo sapiens
tctttctatagtaaa

SEQ ID NO: 1583932 - DNA, 15 bp, Homo sapiens
ctttctatagtaaat

SEQ ID NO: 1583933 - DNA, 15 bp, Homo sapiens
tttctatagtaaata

SEQ ID NO: 1583934 - DNA, 15 bp, Homo sapiens
ttctatagtaaatat

SEQ ID NO: 1583935 - DNA, 15 bp, Homo sapiens
tctatagtaaatatg

SEQ ID NO: 1583936 - DNA, 15 bp, Homo sapiens
ctatagtaaatatgt

SEQ ID NO: 1583937 - DNA, 15 bp, Homo sapiens
tatagtaaatatgtt

SEQ ID NO: 1583938 - DNA, 15 bp, Homo sapiens
atagtaaatatgttc

SEQ ID NO: 1583939 - DNA, 15 bp, Homo sapiens
tagtaaatatgttct

SEQ ID NO: 1583940 - DNA, 15 bp, Homo sapiens
agtaaatatgttctg

SEQ ID NO: 1583941 - DNA, 15 bp, Homo sapiens
gtaaatatgttctga

SEQ ID NO: 1583942 - DNA, 15 bp, Homo sapiens
taaatatgttctgat

SEQ ID NO: 1583943 - DNA, 15 bp, Homo sapiens
aaatatgttctgata

SEQ ID NO: 1583944 - DNA, 15 bp, Homo sapiens
aatatgttctgatat

SEQ ID NO: 1583945 - DNA, 15 bp, Homo sapiens
atatgttctgatatg

SEQ ID NO: 1583946 - DNA, 15 bp, Homo sapiens
tatgttctgatatgt

SEQ ID NO: 1583947 - DNA, 15 bp, Homo sapiens
atgttctgatatgtg

SEQ ID NO: 1583948 - DNA, 15 bp, Homo sapiens
tgttctgatatgtga

SEQ ID NO: 1583949 - DNA, 15 bp, Homo sapiens
gttctgatatgtgaa

SEQ ID NO: 1583950 - DNA, 15 bp, Homo sapiens
ttctgatatgtgaag

SEQ ID NO: 1583951 - DNA, 15 bp, Homo sapiens
tctgatatgtgaagg

SEQ ID NO: 1583952 - DNA, 15 bp, Homo sapiens
ctgatatgtgaaggt

SEQ ID NO: 1583953 - DNA, 15 bp, Homo sapiens
tgatatgtgaaggtt

SEQ ID NO: 1583954 - DNA, 15 bp, Homo sapiens
gatatgtgaaggttt

SEQ ID NO: 1583955 - DNA, 15 bp, Homo sapiens
atatgtgaaggttta

SEQ ID NO: 1583956 - DNA, 15 bp, Homo sapiens
tatgtgaaggtttag

SEQ ID NO: 1583957 - DNA, 15 bp, Homo sapiens
atgtgaaggtttagc

SEQ ID NO: 1583958 - DNA, 15 bp, Homo sapiens
tgtgaaggtttagca

SEQ ID NO: 1583959 - DNA, 15 bp, Homo sapiens
gtgaaggtttagcag

SEQ ID NO: 1583960 - DNA, 15 bp, Homo sapiens
tgaaggtttagcaga

SEQ ID NO: 1583961 - DNA, 15 bp, Homo sapiens
gaaggtttagcagat

SEQ ID NO: 1583962 - DNA, 15 bp, Homo sapiens
aaggtttagcagatg

SEQ ID NO: 1583963 - DNA, 15 bp, Homo sapiens
aggtttagcagatgc

SEQ ID NO: 1583964 - DNA, 15 bp, Homo sapiens
ggtttagcagatgca

SEQ ID NO: 1583965 - DNA, 15 bp, Homo sapiens
gtttagcagatgcat

SEQ ID NO: 1583966 - DNA, 15 bp, Homo sapiens
tttagcagatgcatc

SEQ ID NO: 1583967 - DNA, 15 bp, Homo sapiens
ttagcagatgcatca

SEQ ID NO: 1583968 - DNA, 15 bp, Homo sapiens
tagcagatgcatcag

SEQ ID NO: 1583969 - DNA, 15 bp, Homo sapiens
agcagatgcatcagc

SEQ ID NO: 1583970 - DNA, 15 bp, Homo sapiens
gcagatgcatcagca

SEQ ID NO: 1583971 - DNA, 15 bp, Homo sapiens
cagatgcatcagcat

SEQ ID NO: 1583972 - DNA, 15 bp, Homo sapiens
agatgcatcagcatt

SEQ ID NO: 1583973 - DNA, 15 bp, Homo sapiens
gatgcatcagcattt

SEQ ID NO: 1583974 - DNA, 15 bp, Homo sapiens
atgcatcagcattta

SEQ ID NO: 1583975 - DNA, 15 bp, Homo sapiens
tgcatcagcatttaa

SEQ ID NO: 1583976 - DNA, 15 bp, Homo sapiens
gcatcagcatttaat

SEQ ID NO: 1583977 - DNA, 15 bp, Homo sapiens
catcagcatttaatc

SEQ ID NO: 1583978 - DNA, 15 bp, Homo sapiens
atcagcatttaatcc

SEQ ID NO: 1583979 - DNA, 15 bp, Homo sapiens
tcagcatttaatcct

SEQ ID NO: 1583980 - DNA, 15 bp, Homo sapiens
cagcatttaatccta

SEQ ID NO: 1583981 - DNA, 15 bp, Homo sapiens
agcatttaatcctag

SEQ ID NO: 1583982 - DNA, 15 bp, Homo sapiens
gcatttaatcctaga

SEQ ID NO: 1583983 - DNA, 15 bp, Homo sapiens
catttaatcctagag

SEQ ID NO: 1583984 - DNA, 15 bp, Homo sapiens
atttaatcctagagg

SEQ ID NO: 1583985 - DNA, 15 bp, Homo sapiens
tttaatcctagagga

SEQ ID NO: 1583986 - DNA, 15 bp, Homo sapiens
ttaatcctagaggat

SEQ ID NO: 1583987 - DNA, 15 bp, Homo sapiens
taatcctagaggatc

SEQ ID NO: 1583988 - DNA, 15 bp, Homo sapiens
aatcctagaggatct

SEQ ID NO: 1583989 - DNA, 15 bp, Homo sapiens
atcctagaggatctg

SEQ ID NO: 1583990 - DNA, 15 bp, Homo sapiens
tcctagaggatctgg

SEQ ID NO: 1583991 - DNA, 15 bp, Homo sapiens
cctagaggatctggc

SEQ ID NO: 1583992 - DNA, 15 bp, Homo sapiens
ctagaggatctggca

SEQ ID NO: 1583993 - DNA, 15 bp, Homo sapiens
tagaggatctggcat

SEQ ID NO: 1583994 - DNA, 15 bp, Homo sapiens
agaggatctggcata

SEQ ID NO: 1583995 - DNA, 15 bp, Homo sapiens
gaggatctggcataa

SEQ ID NO: 1583996 - DNA, 15 bp, Homo sapiens
aggatctggcataat

SEQ ID NO: 1583997 - DNA, 15 bp, Homo sapiens
ggatctggcataatc

SEQ ID NO: 1583998 - DNA, 15 bp, Homo sapiens
gatctggcataatct

SEQ ID NO: 1583999 - DNA, 15 bp, Homo sapiens
atctggcataatctt

SEQ ID NO: 1584000 - DNA, 15 bp, Homo sapiens
tctggcataatcttt

SEQ ID NO: 1584001 - DNA, 15 bp, Homo sapiens
ctggcataatctttt

SEQ ID NO: 1584002 - DNA, 15 bp, Homo sapiens
tggcataatcttttc

SEQ ID NO: 1584003 - DNA, 15 bp, Homo sapiens
ggcataatcttttcc

SEQ ID NO: 1584004 - DNA, 15 bp, Homo sapiens
gcataatcttttccc

SEQ ID NO: 1584005 - DNA, 15 bp, Homo sapiens
cataatcttttcccc

SEQ ID NO: 1584006 - DNA, 15 bp, Homo sapiens
ataatcttttccccc

SEQ ID NO: 1584007 - DNA, 15 bp, Homo sapiens
taatcttttccccca

SEQ ID NO: 1584008 - DNA, 15 bp, Homo sapiens
aatcttttcccccaa

SEQ ID NO: 1584009 - DNA, 15 bp, Homo sapiens
atcttttcccccaag

SEQ ID NO: 1584010 - DNA, 15 bp, Homo sapiens
tcttttcccccaaga

SEQ ID NO: 1584011 - DNA, 15 bp, Homo sapiens
cttttcccccaagaa

SEQ ID NO: 1584012 - DNA, 15 bp, Homo sapiens
ttttcccccaagaat

SEQ ID NO: 1584013 - DNA, 15 bp, Homo sapiens
tttcccccaagaata

SEQ ID NO: 1584014 - DNA, 15 bp, Homo sapiens
ttcccccaagaatag

SEQ ID NO: 1584015 - DNA, 15 bp, Homo sapiens
tcccccaagaataga

SEQ ID NO: 1584016 - DNA, 15 bp, Homo sapiens
cccccaagaatagaa

SEQ ID NO: 1584017 - DNA, 15 bp, Homo sapiens
ccccaagaatagaaa

SEQ ID NO: 1584018 - DNA, 15 bp, Homo sapiens
cccaagaatagaaat

SEQ ID NO: 1584019 - DNA, 15 bp, Homo sapiens
ccaagaatagaaatt

SEQ ID NO: 1584020 - DNA, 15 bp, Homo sapiens
caagaatagaaattt

SEQ ID NO: 1584021 - DNA, 15 bp, Homo sapiens
aagaatagaaatttt

SEQ ID NO: 1584022 - DNA, 15 bp, Homo sapiens
agaatagaaattttt

SEQ ID NO: 1584023 - DNA, 15 bp, Homo sapiens
gaatagaaatttttt

SEQ ID NO: 1584024 - DNA, 15 bp, Homo sapiens
aatagaaattttttc

SEQ ID NO: 1584025 - DNA, 15 bp, Homo sapiens
atagaaattttttct

SEQ ID NO: 1584026 - DNA, 15 bp, Homo sapiens
tagaaattttttctg

SEQ ID NO: 1584027 - DNA, 15 bp, Homo sapiens
agaaattttttctgc

SEQ ID NO: 1584028 - DNA, 15 bp, Homo sapiens
gaaattttttctgct

SEQ ID NO: 1584029 - DNA, 15 bp, Homo sapiens
aaattttttctgctt

SEQ ID NO: 1584030 - DNA, 15 bp, Homo sapiens
aattttttctgctta

SEQ ID NO: 1584031 - DNA, 15 bp, Homo sapiens
attttttctgcttat

SEQ ID NO: 1584032 - DNA, 15 bp, Homo sapiens
ttttttctgcttatg

SEQ ID NO: 1584033 - DNA, 15 bp, Homo sapiens
tttttctgcttatga

SEQ ID NO: 1584034 - DNA, 15 bp, Homo sapiens
ttttctgcttatgaa

SEQ ID NO: 1584035 - DNA, 15 bp, Homo sapiens
tttctgcttatgaaa

SEQ ID NO: 1584036 - DNA, 15 bp, Homo sapiens
ttctgcttatgaaag

SEQ ID NO: 1584037 - DNA, 15 bp, Homo sapiens
tctgcttatgaaagt

SEQ ID NO: 1584038 - DNA, 15 bp, Homo sapiens
ctgcttatgaaagta

SEQ ID NO: 1584039 - DNA, 15 bp, Homo sapiens
tgcttatgaaagtag

SEQ ID NO: 1584040 - DNA, 15 bp, Homo sapiens
gcttatgaaagtagt

SEQ ID NO: 1584041 - DNA, 15 bp, Homo sapiens
cttatgaaagtagta

SEQ ID NO: 1584042 - DNA, 15 bp, Homo sapiens
ttatgaaagtagtac

SEQ ID NO: 1584043 - DNA, 15 bp, Homo sapiens
tatgaaagtagtaca

SEQ ID NO: 1584044 - DNA, 15 bp, Homo sapiens
atgaaagtagtacat

SEQ ID NO: 1584045 - DNA, 15 bp, Homo sapiens
tgaaagtagtacatg

SEQ ID NO: 1584046 - DNA, 15 bp, Homo sapiens
gaaagtagtacatgt

SEQ ID NO: 1584047 - DNA, 15 bp, Homo sapiens
aaagtagtacatgtt

SEQ ID NO: 1584048 - DNA, 15 bp, Homo sapiens
aagtagtacatgttt

SEQ ID NO: 1584049 - DNA, 15 bp, Homo sapiens
agtagtacatgtttc

SEQ ID NO: 1584050 - DNA, 15 bp, Homo sapiens
gtagtacatgtttct

SEQ ID NO: 1584051 - DNA, 15 bp, Homo sapiens
tagtacatgtttctt

SEQ ID NO: 1584052 - DNA, 15 bp, Homo sapiens
agtacatgtttcttt

SEQ ID NO: 1584053 - DNA, 15 bp, Homo sapiens
gtacatgtttcttta

SEQ ID NO: 1584054 - DNA, 15 bp, Homo sapiens
tacatgtttctttaa

SEQ ID NO: 1584055 - DNA, 15 bp, Homo sapiens
acatgtttctttaaa

SEQ ID NO: 1584056 - DNA, 15 bp, Homo sapiens
catgtttctttaaaa

SEQ ID NO: 1584057 - DNA, 15 bp, Homo sapiens
atgtttctttaaaaa

SEQ ID NO: 1584058 - DNA, 15 bp, Homo sapiens
tgtttctttaaaaac

SEQ ID NO: 1584059 - DNA, 15 bp, Homo sapiens
gtttctttaaaaaca

SEQ ID NO: 1584060 - DNA, 15 bp, Homo sapiens
tttctttaaaaacaa

SEQ ID NO: 1584061 - DNA, 15 bp, Homo sapiens
tctttaaaaacaaat

SEQ ID NO: 1584062 - DNA, 15 bp, Homo sapiens
ctttaaaaacaaatc

SEQ ID NO: 1584063 - DNA, 15 bp, Homo sapiens
tttaaaaacaaatca

SEQ ID NO: 1584064 - DNA, 15 bp, Homo sapiens
ttaaaaacaaatcaa

SEQ ID NO: 1584065 - DNA, 15 bp, Homo sapiens
taaaaacaaatcaat

SEQ ID NO: 1584066 - DNA, 15 bp, Homo sapiens
aaaaacaaatcaata

SEQ ID NO: 1584067 - DNA, 15 bp, Homo sapiens
aaaacaaatcaatat

SEQ ID NO: 1584068 - DNA, 15 bp, Homo sapiens
aaacaaatcaatatt

SEQ ID NO: 1584069 - DNA, 15 bp, Homo sapiens
aacaaatcaatattg

SEQ ID NO: 1584070 - DNA, 15 bp, Homo sapiens
acaaatcaatattga

SEQ ID NO: 1584071 - DNA, 15 bp, Homo sapiens
caaatcaatattgac

SEQ ID NO: 1584072 - DNA, 15 bp, Homo sapiens
aaatcaatattgact

SEQ ID NO: 1584073 - DNA, 15 bp, Homo sapiens
aatcaatattgactt

SEQ ID NO: 1584074 - DNA, 15 bp, Homo sapiens
atcaatattgacttc

SEQ ID NO: 1584075 - DNA, 15 bp, Homo sapiens
tcaatattgacttct

SEQ ID NO: 1584076 - DNA, 15 bp, Homo sapiens
caatattgacttctg

SEQ ID NO: 1584077 - DNA, 15 bp, Homo sapiens
aatattgacttctgc

SEQ ID NO: 1584078 - DNA, 15 bp, Homo sapiens
atattgacttctgcc

SEQ ID NO: 1584079 - DNA, 15 bp, Homo sapiens
tattgacttctgcct

SEQ ID NO: 1584080 - DNA, 15 bp, Homo sapiens
attgacttctgcctg

SEQ ID NO: 1584081 - DNA, 15 bp, Homo sapiens
ttgacttctgcctgc

SEQ ID NO: 1584082 - DNA, 15 bp, Homo sapiens
tgacttctgcctgct

SEQ ID NO: 1584083 - DNA, 15 bp, Homo sapiens
gacttctgcctgctg

SEQ ID NO: 1584084 - DNA, 15 bp, Homo sapiens
acttctgcctgctgt

SEQ ID NO: 1584085 - DNA, 15 bp, Homo sapiens
tctgcctgctgtata

SEQ ID NO: 1584086 - DNA, 15 bp, Homo sapiens
ctgcctgctgtatag

SEQ ID NO: 1584087 - DNA, 15 bp, Homo sapiens
tgcctgctgtatagc

SEQ ID NO: 1584088 - DNA, 15 bp, Homo sapiens
gcctgctgtatagca

SEQ ID NO: 1584089 - DNA, 15 bp, Homo sapiens
cctgctgtatagcac

SEQ ID NO: 1584090 - DNA, 15 bp, Homo sapiens
ctgctgtatagcact

SEQ ID NO: 1584091 - DNA, 15 bp, Homo sapiens
tgctgtatagcacta

SEQ ID NO: 1584092 - DNA, 15 bp, Homo sapiens
gctgtatagcactat

SEQ ID NO: 1584093 - DNA, 15 bp, Homo sapiens
ctgtatagcactatg

SEQ ID NO: 1584094 - DNA, 15 bp, Homo sapiens
tgtatagcactatgc

SEQ ID NO: 1584095 - DNA, 15 bp, Homo sapiens
gtatagcactatgcc

SEQ ID NO: 1584096 - DNA, 15 bp, Homo sapiens
tatagcactatgcct

SEQ ID NO: 1584097 - DNA, 15 bp, Homo sapiens
atagcactatgcctc

SEQ ID NO: 1584098 - DNA, 15 bp, Homo sapiens
tagcactatgcctcc

SEQ ID NO: 1584099 - DNA, 15 bp, Homo sapiens
agcactatgcctcca

SEQ ID NO: 1584100 - DNA, 15 bp, Homo sapiens
gcactatgcctccac

SEQ ID NO: 1584101 - DNA, 15 bp, Homo sapiens
cactatgcctccacc

SEQ ID NO: 1584102 - DNA, 15 bp, Homo sapiens
actatgcctccacct

SEQ ID NO: 1584103 - DNA, 15 bp, Homo sapiens
ctatgcctccacctg

SEQ ID NO: 1584104 - DNA, 15 bp, Homo sapiens
tatgcctccacctgg

SEQ ID NO: 1584105 - DNA, 15 bp, Homo sapiens
atgcctccacctggc

SEQ ID NO: 1584106 - DNA, 15 bp, Homo sapiens
tgcctccacctggcc

SEQ ID NO: 1584107 - DNA, 15 bp, Homo sapiens
gcctccacctggcca

SEQ ID NO: 1584108 - DNA, 15 bp, Homo sapiens
cctccacctggccat

SEQ ID NO: 1584109 - DNA, 15 bp, Homo sapiens
ctccacctggccatg

SEQ ID NO: 1584110 - DNA, 15 bp, Homo sapiens
tccacctggccatga

SEQ ID NO: 1584111 - DNA, 15 bp, Homo sapiens
ccacctggccatgac

SEQ ID NO: 1584112 - DNA, 15 bp, Homo sapiens
cacctggccatgacc

SEQ ID NO: 1584113 - DNA, 15 bp, Homo sapiens
acctggccatgacca

SEQ ID NO: 1584114 - DNA, 15 bp, Homo sapiens
cctggccatgaccag

SEQ ID NO: 1584115 - DNA, 15 bp, Homo sapiens
ctggccatgaccagg

SEQ ID NO: 1584116 - DNA, 15 bp, Homo sapiens
tggccatgaccaggg

SEQ ID NO: 1584117 - DNA, 15 bp, Homo sapiens
ggccatgaccagggg

SEQ ID NO: 1584118 - DNA, 15 bp, Homo sapiens
gccatgaccaggggc

SEQ ID NO: 1584119 - DNA, 15 bp, Homo sapiens
ccatgaccaggggca

SEQ ID NO: 1584120 - DNA, 15 bp, Homo sapiens
catgaccaggggcat

SEQ ID NO: 1584121 - DNA, 15 bp, Homo sapiens
atgaccaggggcatg

SEQ ID NO: 1584122 - DNA, 15 bp, Homo sapiens
tgaccaggggcatgt

SEQ ID NO: 1584123 - DNA, 15 bp, Homo sapiens
gaccaggggcatgtc

SEQ ID NO: 1584124 - DNA, 15 bp, Homo sapiens
accaggggcatgtcc

SEQ ID NO: 1584125 - DNA, 15 bp, Homo sapiens
ccaggggcatgtcct

SEQ ID NO: 1584126 - DNA, 15 bp, Homo sapiens
caggggcatgtcctg

SEQ ID NO: 1584127 - DNA, 15 bp, Homo sapiens
aggggcatgtcctgg

SEQ ID NO: 1584128 - DNA, 15 bp, Homo sapiens
ggggcatgtcctggt

SEQ ID NO: 1584129 - DNA, 15 bp, Homo sapiens
gggcatgtcctggtc

SEQ ID NO: 1584130 - DNA, 15 bp, Homo sapiens
ggcatgtcctggtcc

SEQ ID NO: 1584131 - DNA, 15 bp, Homo sapiens
gcatgtcctggtcca

SEQ ID NO: 1584132 - DNA, 15 bp, Homo sapiens
catgtcctggtccac

SEQ ID NO: 1584133 - DNA, 15 bp, Homo sapiens
atgtcctggtccacc

SEQ ID NO: 1584134 - DNA, 15 bp, Homo sapiens
tgtcctggtccacct

SEQ ID NO: 1584135 - DNA, 15 bp, Homo sapiens
gtcctggtccaccta

SEQ ID NO: 1584136 - DNA, 15 bp, Homo sapiens
tcctggtccacctac

SEQ ID NO: 1584137 - DNA, 15 bp, Homo sapiens
cctggtccacctacc

SEQ ID NO: 1584138 - DNA, 15 bp, Homo sapiens
ctggtccacctacct

SEQ ID NO: 1584139 - DNA, 15 bp, Homo sapiens
tggtccacctacctg

SEQ ID NO: 1584140 - DNA, 15 bp, Homo sapiens
ggtccacctacctga

SEQ ID NO: 1584141 - DNA, 15 bp, Homo sapiens
gtccacctacctgaa

SEQ ID NO: 1584142 - DNA, 15 bp, Homo sapiens
tccacctacctgaaa

SEQ ID NO: 1584143 - DNA, 15 bp, Homo sapiens
ccacctacctgaaaa

SEQ ID NO: 1584144 - DNA, 15 bp, Homo sapiens
cacctacctgaaaat

SEQ ID NO: 1584145 - DNA, 15 bp, Homo sapiens
acctacctgaaaatg

SEQ ID NO: 1584146 - DNA, 15 bp, Homo sapiens
cctacctgaaaatgt

SEQ ID NO: 1584147 - DNA, 15 bp, Homo sapiens
ctacctgaaaatgtt

SEQ ID NO: 1584148 - DNA, 15 bp, Homo sapiens
tacctgaaaatgttt

SEQ ID NO: 1584149 - DNA, 15 bp, Homo sapiens
acctgaaaatgtttg

SEQ ID NO: 1584150 - DNA, 15 bp, Homo sapiens
cctgaaaatgtttgc

SEQ ID NO: 1584151 - DNA, 15 bp, Homo sapiens
ctgaaaatgtttgca

SEQ ID NO: 1584152 - DNA, 15 bp, Homo sapiens
tgaaaatgtttgcaa

SEQ ID NO: 1584153 - DNA, 15 bp, Homo sapiens
gaaaatgtttgcaac

SEQ ID NO: 1584154 - DNA, 15 bp, Homo sapiens
aaaatgtttgcaacc

SEQ ID NO: 1584155 - DNA, 15 bp, Homo sapiens
aaatgtttgcaacca

SEQ ID NO: 1584156 - DNA, 15 bp, Homo sapiens
aatgtttgcaaccag

SEQ ID NO: 1584157 - DNA, 15 bp, Homo sapiens
atgtttgcaaccagc

SEQ ID NO: 1584158 - DNA, 15 bp, Homo sapiens
tgtttgcaaccagcc

SEQ ID NO: 1584159 - DNA, 15 bp, Homo sapiens
gtttgcaaccagcct

SEQ ID NO: 1584160 - DNA, 15 bp, Homo sapiens
tttgcaaccagcctc

SEQ ID NO: 1584161 - DNA, 15 bp, Homo sapiens
ttgcaaccagcctcc

SEQ ID NO: 1584162 - DNA, 15 bp, Homo sapiens
tgcaaccagcctcct

SEQ ID NO: 1584163 - DNA, 15 bp, Homo sapiens
gcaaccagcctcctg

SEQ ID NO: 1584164 - DNA, 15 bp, Homo sapiens
caaccagcctcctgg

SEQ ID NO: 1584165 - DNA, 15 bp, Homo sapiens
aaccagcctcctggc

SEQ ID NO: 1584166 - DNA, 15 bp, Homo sapiens
accagcctcctggcc

SEQ ID NO: 1584167 - DNA, 15 bp, Homo sapiens
ccagcctcctggcca

SEQ ID NO: 1584168 - DNA, 15 bp, Homo sapiens
cagcctcctggccat

SEQ ID NO: 1584169 - DNA, 15 bp, Homo sapiens
agcctcctggccatg

SEQ ID NO: 1584170 - DNA, 15 bp, Homo sapiens
gcctcctggccatgt

SEQ ID NO: 1584171 - DNA, 15 bp, Homo sapiens
cctcctggccatgtg

SEQ ID NO: 1584172 - DNA, 15 bp, Homo sapiens
ctcctggccatgtgc

SEQ ID NO: 1584173 - DNA, 15 bp, Homo sapiens
tcctggccatgtgca

SEQ ID NO: 1584174 - DNA, 15 bp, Homo sapiens
cctggccatgtgcac

SEQ ID NO: 1584175 - DNA, 15 bp, Homo sapiens
ctggccatgtgcaca

SEQ ID NO: 1584176 - DNA, 15 bp, Homo sapiens
tggccatgtgcacag

SEQ ID NO: 1584177 - DNA, 15 bp, Homo sapiens
ggccatgtgcacagg

SEQ ID NO: 1584178 - DNA, 15 bp, Homo sapiens
gccatgtgcacaggg

SEQ ID NO: 1584179 - DNA, 15 bp, Homo sapiens
ccatgtgcacagggg

SEQ ID NO: 1584180 - DNA, 15 bp, Homo sapiens
catgtgcacaggggc

SEQ ID NO: 1584181 - DNA, 15 bp, Homo sapiens
atgtgcacaggggct

SEQ ID NO: 1584182 - DNA, 15 bp, Homo sapiens
tgtgcacaggggctg

SEQ ID NO: 1584183 - DNA, 15 bp, Homo sapiens
gtgcacaggggctga

SEQ ID NO: 1584184 - DNA, 15 bp, Homo sapiens
tgcacaggggctgaa

SEQ ID NO: 1584185 - DNA, 15 bp, Homo sapiens
gcacaggggctgaag

SEQ ID NO: 1584186 - DNA, 15 bp, Homo sapiens
cacaggggctgaagt

SEQ ID NO: 1584187 - DNA, 15 bp, Homo sapiens
acaggggctgaagtt

SEQ ID NO: 1584188 - DNA, 15 bp, Homo sapiens
caggggctgaagttg

SEQ ID NO: 1584189 - DNA, 15 bp, Homo sapiens
aggggctgaagttgt

SEQ ID NO: 1584190 - DNA, 15 bp, Homo sapiens
ggggctgaagttgtc

SEQ ID NO: 1584191 - DNA, 15 bp, Homo sapiens
gggctgaagttgtcc

SEQ ID NO: 1584192 - DNA, 15 bp, Homo sapiens
ggctgaagttgtccc

SEQ ID NO: 1584193 - DNA, 15 bp, Homo sapiens
gctgaagttgtccca

SEQ ID NO: 1584194 - DNA, 15 bp, Homo sapiens
ctgaagttgtcccac

SEQ ID NO: 1584195 - DNA, 15 bp, Homo sapiens
tgaagttgtcccaca

SEQ ID NO: 1584196 - DNA, 15 bp, Homo sapiens
gaagttgtcccacag

SEQ ID NO: 1584197 - DNA, 15 bp, Homo sapiens
aagttgtcccacagg

SEQ ID NO: 1584198 - DNA, 15 bp, Homo sapiens
agttgtcccacaggt

SEQ ID NO: 1584199 - DNA, 15 bp, Homo sapiens
gttgtcccacaggta

SEQ ID NO: 1584200 - DNA, 15 bp, Homo sapiens
ttgtcccacaggtat

SEQ ID NO: 1584201 - DNA, 15 bp, Homo sapiens
tgtcccacaggtatt

SEQ ID NO: 1584202 - DNA, 15 bp, Homo sapiens
gtcccacaggtatta

SEQ ID NO: 1584203 - DNA, 15 bp, Homo sapiens
tcccacaggtattac

SEQ ID NO: 1584204 - DNA, 15 bp, Homo sapiens
cccacaggtattacg

SEQ ID NO: 1584205 - DNA, 15 bp, Homo sapiens
ccacaggtattacgg

SEQ ID NO: 1584206 - DNA, 15 bp, Homo sapiens
cacaggtattacggg

SEQ ID NO: 1584207 - DNA, 15 bp, Homo sapiens
acaggtattacgggc

SEQ ID NO: 1584208 - DNA, 15 bp, Homo sapiens
caggtattacgggcc

SEQ ID NO: 1584209 - DNA, 15 bp, Homo sapiens
aggtattacgggcca

SEQ ID NO: 1584210 - DNA, 15 bp, Homo sapiens
ggtattacgggccaa

SEQ ID NO: 1584211 - DNA, 15 bp, Homo sapiens
gtattacgggccaac

SEQ ID NO: 1584212 - DNA, 15 bp, Homo sapiens
tattacgggccaacc

SEQ ID NO: 1584213 - DNA, 15 bp, Homo sapiens
attacgggccaacct

SEQ ID NO: 1584214 - DNA, 15 bp, Homo sapiens
ttacgggccaacctg

SEQ ID NO: 1584215 - DNA, 15 bp, Homo sapiens
tacgggccaacctga

SEQ ID NO: 1584216 - DNA, 15 bp, Homo sapiens
acgggccaacctgac

SEQ ID NO: 1584217 - DNA, 15 bp, Homo sapiens
cgggccaacctgaca

SEQ ID NO: 1584218 - DNA, 15 bp, Homo sapiens
gggccaacctgacaa

SEQ ID NO: 1584219 - DNA, 15 bp, Homo sapiens
ggccaacctgacaat

SEQ ID NO: 1584220 - DNA, 15 bp, Homo sapiens
gccaacctgacaata

SEQ ID NO: 1584221 - DNA, 15 bp, Homo sapiens
ccaacctgacaatac

SEQ ID NO: 1584222 - DNA, 15 bp, Homo sapiens
caacctgacaataca

SEQ ID NO: 1584223 - DNA, 15 bp, Homo sapiens
aacctgacaatacat

SEQ ID NO: 1584224 - DNA, 15 bp, Homo sapiens
acctgacaatacatg

SEQ ID NO: 1584225 - DNA, 15 bp, Homo sapiens
cctgacaatacatga

SEQ ID NO: 1584226 - DNA, 15 bp, Homo sapiens
ctgacaatacatgaa

SEQ ID NO: 1584227 - DNA, 15 bp, Homo sapiens
tgacaatacatgaag

SEQ ID NO: 1584228 - DNA, 15 bp, Homo sapiens
gacaatacatgaagt

SEQ ID NO: 1584229 - DNA, 15 bp, Homo sapiens
acaatacatgaagtt

SEQ ID NO: 1584230 - DNA, 15 bp, Homo sapiens
caatacatgaagttc

SEQ ID NO: 1584231 - DNA, 15 bp, Homo sapiens
aatacatgaagttcc

SEQ ID NO: 1584232 - DNA, 15 bp, Homo sapiens
atacatgaagttcca

SEQ ID NO: 1584233 - DNA, 15 bp, Homo sapiens
tacatgaagttccac

SEQ ID NO: 1584234 - DNA, 15 bp, Homo sapiens
acatgaagttccacc

SEQ ID NO: 1584235 - DNA, 15 bp, Homo sapiens
catgaagttccacca

SEQ ID NO: 1584236 - DNA, 15 bp, Homo sapiens
atgaagttccaccaa

SEQ ID NO: 1584237 - DNA, 15 bp, Homo sapiens
tgaagttccaccaaa

SEQ ID NO: 1584238 - DNA, 15 bp, Homo sapiens
gaagttccaccaaag

SEQ ID NO: 1584239 - DNA, 15 bp, Homo sapiens
aagttccaccaaagt

SEQ ID NO: 1584240 - DNA, 15 bp, Homo sapiens
agttccaccaaagtc

SEQ ID NO: 1584241 - DNA, 15 bp, Homo sapiens
gttccaccaaagtct

SEQ ID NO: 1584242 - DNA, 15 bp, Homo sapiens
ttccaccaaagtctg

SEQ ID NO: 1584243 - DNA, 15 bp, Homo sapiens
tccaccaaagtctga

SEQ ID NO: 1584244 - DNA, 15 bp, Homo sapiens
ccaccaaagtctgag

SEQ ID NO: 1584245 - DNA, 15 bp, Homo sapiens
caccaaagtctgaga

SEQ ID NO: 1584246 - DNA, 15 bp, Homo sapiens
accaaagtctgagaa

SEQ ID NO: 1584247 - DNA, 15 bp, Homo sapiens
ccaaagtctgagaac

SEQ ID NO: 1584248 - DNA, 15 bp, Homo sapiens
caaagtctgagaact

SEQ ID NO: 1584249 - DNA, 15 bp, Homo sapiens
aaagtctgagaactc

SEQ ID NO: 1584250 - DNA, 15 bp, Homo sapiens
aagtctgagaactca

SEQ ID NO: 1584251 - DNA, 15 bp, Homo sapiens
agtctgagaactcag

SEQ ID NO: 1584252 - DNA, 15 bp, Homo sapiens
gtctgagaactcaga

SEQ ID NO: 1584253 - DNA, 15 bp, Homo sapiens
tctgagaactcagaa

SEQ ID NO: 1584254 - DNA, 15 bp, Homo sapiens
ctgagaactcagaac

SEQ ID NO: 1584255 - DNA, 15 bp, Homo sapiens
tgagaactcagaact

SEQ ID NO: 1584256 - DNA, 15 bp, Homo sapiens
gagaactcagaactg

SEQ ID NO: 1584257 - DNA, 15 bp, Homo sapiens
agaactcagaactga

SEQ ID NO: 1584258 - DNA, 15 bp, Homo sapiens
gaactcagaactgag

SEQ ID NO: 1584259 - DNA, 15 bp, Homo sapiens
aactcagaactgagc

SEQ ID NO: 1584260 - DNA, 15 bp, Homo sapiens
actcagaactgagct

SEQ ID NO: 1584261 - DNA, 15 bp, Homo sapiens
ctcagaactgagctt

SEQ ID NO: 1584262 - DNA, 15 bp, Homo sapiens
tcagaactgagcttt

SEQ ID NO: 1584263 - DNA, 15 bp, Homo sapiens
cagaactgagctttg

SEQ ID NO: 1584264 - DNA, 15 bp, Homo sapiens
agaactgagctttgg

SEQ ID NO: 1584265 - DNA, 15 bp, Homo sapiens
gaactgagctttggg

SEQ ID NO: 1584266 - DNA, 15 bp, Homo sapiens
aactgagctttgggg

SEQ ID NO: 1584267 - DNA, 15 bp, Homo sapiens
actgagctttgggga

SEQ ID NO: 1584268 - DNA, 15 bp, Homo sapiens
ctgagctttggggac

SEQ ID NO: 1584269 - DNA, 15 bp, Homo sapiens
tgagctttggggact

SEQ ID NO: 1584270 - DNA, 15 bp, Homo sapiens
gagctttggggactg

SEQ ID NO: 1584271 - DNA, 15 bp, Homo sapiens
agctttggggactga

SEQ ID NO: 1584272 - DNA, 15 bp, Homo sapiens
gctttggggactgaa

SEQ ID NO: 1584273 - DNA, 15 bp, Homo sapiens
ctttggggactgaaa

SEQ ID NO: 1584274 - DNA, 15 bp, Homo sapiens
tttggggactgaaag

SEQ ID NO: 1584275 - DNA, 15 bp, Homo sapiens
ttggggactgaaaga

SEQ ID NO: 1584276 - DNA, 15 bp, Homo sapiens
tggggactgaaagac

SEQ ID NO: 1584277 - DNA, 15 bp, Homo sapiens
ggggactgaaagaca

SEQ ID NO: 1584278 - DNA, 15 bp, Homo sapiens
gggactgaaagacag

SEQ ID NO: 1584279 - DNA, 15 bp, Homo sapiens
ggactgaaagacagc

SEQ ID NO: 1584280 - DNA, 15 bp, Homo sapiens
gactgaaagacagca

SEQ ID NO: 1584281 - DNA, 15 bp, Homo sapiens
actgaaagacagcac

SEQ ID NO: 1584282 - DNA, 15 bp, Homo sapiens
ctgaaagacagcaca

SEQ ID NO: 1584283 - DNA, 15 bp, Homo sapiens
tgaaagacagcacaa

SEQ ID NO: 1584284 - DNA, 15 bp, Homo sapiens
gaaagacagcacaaa

SEQ ID NO: 1584285 - DNA, 15 bp, Homo sapiens
aaagacagcacaaac

SEQ ID NO: 1584286 - DNA, 15 bp, Homo sapiens
aagacagcacaaacc

SEQ ID NO: 1584287 - DNA, 15 bp, Homo sapiens
agacagcacaaacct

SEQ ID NO: 1584288 - DNA, 15 bp, Homo sapiens
gacagcacaaacctc

SEQ ID NO: 1584289 - DNA, 15 bp, Homo sapiens
acagcacaaacctca

SEQ ID NO: 1584290 - DNA, 15 bp, Homo sapiens
cagcacaaacctcaa

SEQ ID NO: 1584291 - DNA, 15 bp, Homo sapiens
agcacaaacctcaaa

SEQ ID NO: 1584292 - DNA, 15 bp, Homo sapiens
gcacaaacctcaaat

SEQ ID NO: 1584293 - DNA, 15 bp, Homo sapiens
cacaaacctcaaatt

SEQ ID NO: 1584294 - DNA, 15 bp, Homo sapiens
acaaacctcaaattt

SEQ ID NO: 1584295 - DNA, 15 bp, Homo sapiens
caaacctcaaatttc

SEQ ID NO: 1584296 - DNA, 15 bp, Homo sapiens
aaacctcaaatttct

SEQ ID NO: 1584297 - DNA, 15 bp, Homo sapiens
aacctcaaatttctc

SEQ ID NO: 1584298 - DNA, 15 bp, Homo sapiens
acctcaaatttctca

SEQ ID NO: 1584299 - DNA, 15 bp, Homo sapiens
cctcaaatttctcag

SEQ ID NO: 1584300 - DNA, 15 bp, Homo sapiens
ctcaaatttctcagc

SEQ ID NO: 1584301 - DNA, 15 bp, Homo sapiens
tcaaatttctcagca

SEQ ID NO: 1584302 - DNA, 15 bp, Homo sapiens
caaatttctcagcac

SEQ ID NO: 1584303 - DNA, 15 bp, Homo sapiens
aaatttctcagcact

SEQ ID NO: 1584304 - DNA, 15 bp, Homo sapiens
aatttctcagcactg

SEQ ID NO: 1584305 - DNA, 15 bp, Homo sapiens
atttctcagcactgg

SEQ ID NO: 1584306 - DNA, 15 bp, Homo sapiens
tttctcagcactgga

SEQ ID NO: 1584307 - DNA, 15 bp, Homo sapiens
ttctcagcactggaa

SEQ ID NO: 1584308 - DNA, 15 bp, Homo sapiens
tctcagcactggaaa

SEQ ID NO: 1584309 - DNA, 15 bp, Homo sapiens
ctcagcactggaaac

SEQ ID NO: 1584310 - DNA, 15 bp, Homo sapiens
tcagcactggaaacc

SEQ ID NO: 1584311 - DNA, 15 bp, Homo sapiens
cagcactggaaacct

SEQ ID NO: 1584312 - DNA, 15 bp, Homo sapiens
agcactggaaacctc

SEQ ID NO: 1584313 - DNA, 15 bp, Homo sapiens
gcactggaaacctca

SEQ ID NO: 1584314 - DNA, 15 bp, Homo sapiens
cactggaaacctcaa

SEQ ID NO: 1584315 - DNA, 15 bp, Homo sapiens
actggaaacctcaaa

SEQ ID NO: 1584316 - DNA, 15 bp, Homo sapiens
ctggaaacctcaaaa

SEQ ID NO: 1584317 - DNA, 15 bp, Homo sapiens
tggaaacctcaaaat

SEQ ID NO: 1584318 - DNA, 15 bp, Homo sapiens
ggaaacctcaaaata

SEQ ID NO: 1584319 - DNA, 15 bp, Homo sapiens
gaaacctcaaaatat

SEQ ID NO: 1584320 - DNA, 15 bp, Homo sapiens
aaacctcaaaatata

SEQ ID NO: 1584321 - DNA, 15 bp, Homo sapiens
aacctcaaaatataa

SEQ ID NO: 1584322 - DNA, 15 bp, Homo sapiens
acctcaaaatataac

SEQ ID NO: 1584323 - DNA, 15 bp, Homo sapiens
cctcaaaatataact

SEQ ID NO: 1584324 - DNA, 15 bp, Homo sapiens
ctcaaaatataactg

SEQ ID NO: 1584325 - DNA, 15 bp, Homo sapiens
tcaaaatataactga

SEQ ID NO: 1584326 - DNA, 15 bp, Homo sapiens
caaaatataactgaa

SEQ ID NO: 1584327 - DNA, 15 bp, Homo sapiens
aaaatataactgaat

SEQ ID NO: 1584328 - DNA, 15 bp, Homo sapiens
aaatataactgaatt

SEQ ID NO: 1584329 - DNA, 15 bp, Homo sapiens
aatataactgaattc

SEQ ID NO: 1584330 - DNA, 15 bp, Homo sapiens
atataactgaattcc

SEQ ID NO: 1584331 - DNA, 15 bp, Homo sapiens
tataactgaattcca

SEQ ID NO: 1584332 - DNA, 15 bp, Homo sapiens
ataactgaattccat

SEQ ID NO: 1584333 - DNA, 15 bp, Homo sapiens
taactgaattccata

SEQ ID NO: 1584334 - DNA, 15 bp, Homo sapiens
aactgaattccataa

SEQ ID NO: 1584335 - DNA, 15 bp, Homo sapiens
actgaattccataaa

SEQ ID NO: 1584336 - DNA, 15 bp, Homo sapiens
ctgaattccataaat

SEQ ID NO: 1584337 - DNA, 15 bp, Homo sapiens
tgaattccataaata

SEQ ID NO: 1584338 - DNA, 15 bp, Homo sapiens
gaattccataaataa

SEQ ID NO: 1584339 - DNA, 15 bp, Homo sapiens
aattccataaataag

SEQ ID NO: 1584340 - DNA, 15 bp, Homo sapiens
attccataaataaga

SEQ ID NO: 1584341 - DNA, 15 bp, Homo sapiens
ttccataaataagat

SEQ ID NO: 1584342 - DNA, 15 bp, Homo sapiens
tccataaataagatt

SEQ ID NO: 1584343 - DNA, 15 bp, Homo sapiens
ccataaataagattt

SEQ ID NO: 1584344 - DNA, 15 bp, Homo sapiens
cataaataagatttt

SEQ ID NO: 1584345 - DNA, 15 bp, Homo sapiens
ataaataagatttta

SEQ ID NO: 1584346 - DNA, 15 bp, Homo sapiens
taaataagattttaa

SEQ ID NO: 1584347 - DNA, 15 bp, Homo sapiens
aaataagattttaag

SEQ ID NO: 1584348 - DNA, 15 bp, Homo sapiens
aataagattttaagt

SEQ ID NO: 1584349 - DNA, 15 bp, Homo sapiens
ataagattttaagtc

SEQ ID NO: 1584350 - DNA, 15 bp, Homo sapiens
taagattttaagtct

SEQ ID NO: 1584351 - DNA, 15 bp, Homo sapiens
aagattttaagtctt

SEQ ID NO: 1584352 - DNA, 15 bp, Homo sapiens
agattttaagtctta

SEQ ID NO: 1584353 - DNA, 15 bp, Homo sapiens
gattttaagtcttaa

SEQ ID NO: 1584354 - DNA, 15 bp, Homo sapiens
attttaagtcttaaa

SEQ ID NO: 1584355 - DNA, 15 bp, Homo sapiens
ttttaagtcttaaat

SEQ ID NO: 1584356 - DNA, 15 bp, Homo sapiens
tttaagtcttaaata

SEQ ID NO: 1584357 - DNA, 15 bp, Homo sapiens
ttaagtcttaaatat

SEQ ID NO: 1584358 - DNA, 15 bp, Homo sapiens
taagtcttaaatatg

SEQ ID NO: 1584359 - DNA, 15 bp, Homo sapiens
aagtcttaaatatgt

SEQ ID NO: 1584360 - DNA, 15 bp, Homo sapiens
agtcttaaatatgta

SEQ ID NO: 1584361 - DNA, 15 bp, Homo sapiens
gtcttaaatatgtat

SEQ ID NO: 1584362 - DNA, 15 bp, Homo sapiens
tcttaaatatgtatt

SEQ ID NO: 1584363 - DNA, 15 bp, Homo sapiens
cttaaatatgtattt

SEQ ID NO: 1584364 - DNA, 15 bp, Homo sapiens
ttaaatatgtatttt

SEQ ID NO: 1584365 - DNA, 15 bp, Homo sapiens
taaatatgtattttt

SEQ ID NO: 1584366 - DNA, 15 bp, Homo sapiens
aaatatgtattttta

SEQ ID NO: 1584367 - DNA, 15 bp, Homo sapiens
aatatgtatttttaa

SEQ ID NO: 1584368 - DNA, 15 bp, Homo sapiens
atatgtatttttaaa

SEQ ID NO: 1584369 - DNA, 15 bp, Homo sapiens
tatgtatttttaaat

SEQ ID NO: 1584370 - DNA, 15 bp, Homo sapiens
atgtatttttaaatg

SEQ ID NO: 1584371 - DNA, 15 bp, Homo sapiens
tgtatttttaaatgt

SEQ ID NO: 1584372 - DNA, 15 bp, Homo sapiens
gtatttttaaatgta

SEQ ID NO: 1584373 - DNA, 15 bp, Homo sapiens
atttttaaatgtatt

SEQ ID NO: 1584374 - DNA, 15 bp, Homo sapiens
tttttaaatgtatta

SEQ ID NO: 1584375 - DNA, 15 bp, Homo sapiens
ttttaaatgtattaa

SEQ ID NO: 1584376 - DNA, 15 bp, Homo sapiens
tttaaatgtattaaa

SEQ ID NO: 1584377 - DNA, 15 bp, Homo sapiens
ttaaatgtattaaaa

SEQ ID NO: 1584378 - DNA, 15 bp, Homo sapiens
taaatgtattaaaag

SEQ ID NO: 1584379 - DNA, 15 bp, Homo sapiens
aaatgtattaaaagt

SEQ ID NO: 1584380 - DNA, 15 bp, Homo sapiens
aatgtattaaaagtc

SEQ ID NO: 1584381 - DNA, 15 bp, Homo sapiens
atgtattaaaagtca

SEQ ID NO: 1584382 - DNA, 15 bp, Homo sapiens
tgtattaaaagtcaa

SEQ ID NO: 1584383 - DNA, 15 bp, Homo sapiens
gtattaaaagtcaag

SEQ ID NO: 1584384 - DNA, 15 bp, Homo sapiens
tattaaaagtcaagc

SEQ ID NO: 1584385 - DNA, 15 bp, Homo sapiens
attaaaagtcaagct

SEQ ID NO: 1584386 - DNA, 15 bp, Homo sapiens
ttaaaagtcaagctg

SEQ ID NO: 1584387 - DNA, 15 bp, Homo sapiens
taaaagtcaagctgc

SEQ ID NO: 1584388 - DNA, 15 bp, Homo sapiens
aaaagtcaagctgct

SEQ ID NO: 1584389 - DNA, 15 bp, Homo sapiens
aaagtcaagctgctt

SEQ ID NO: 1584390 - DNA, 15 bp, Homo sapiens
aagtcaagctgcttg

SEQ ID NO: 1584391 - DNA, 15 bp, Homo sapiens
agtcaagctgcttgt

SEQ ID NO: 1584392 - DNA, 15 bp, Homo sapiens
gtcaagctgcttgta

SEQ ID NO: 1584393 - DNA, 15 bp, Homo sapiens
tcaagctgcttgtat

SEQ ID NO: 1584394 - DNA, 15 bp, Homo sapiens
caagctgcttgtatt

SEQ ID NO: 1584395 - DNA, 15 bp, Homo sapiens
aagctgcttgtattt

SEQ ID NO: 1584396 - DNA, 15 bp, Homo sapiens
agctgcttgtattta

SEQ ID NO: 1584397 - DNA, 15 bp, Homo sapiens
gctgcttgtatttaa

SEQ ID NO: 1584398 - DNA, 15 bp, Homo sapiens
ctgcttgtatttaag

SEQ ID NO: 1584399 - DNA, 15 bp, Homo sapiens
tgcttgtatttaagc

SEQ ID NO: 1584400 - DNA, 15 bp, Homo sapiens
gcttgtatttaagca

SEQ ID NO: 1584401 - DNA, 15 bp, Homo sapiens
cttgtatttaagcac

SEQ ID NO: 1584402 - DNA, 15 bp, Homo sapiens
ttgtatttaagcacc

SEQ ID NO: 1584403 - DNA, 15 bp, Homo sapiens
tgtatttaagcacct

SEQ ID NO: 1584404 - DNA, 15 bp, Homo sapiens
gtatttaagcaccta

SEQ ID NO: 1584405 - DNA, 15 bp, Homo sapiens
tatttaagcacctaa

SEQ ID NO: 1584406 - DNA, 15 bp, Homo sapiens
atttaagcacctaat

SEQ ID NO: 1584407 - DNA, 15 bp, Homo sapiens
tttaagcacctaata

SEQ ID NO: 1584408 - DNA, 15 bp, Homo sapiens
ttaagcacctaatac

SEQ ID NO: 1584409 - DNA, 15 bp, Homo sapiens
taagcacctaataca

SEQ ID NO: 1584410 - DNA, 15 bp, Homo sapiens
aagcacctaatacaa

SEQ ID NO: 1584411 - DNA, 15 bp, Homo sapiens
agcacctaatacaat

SEQ ID NO: 1584412 - DNA, 15 bp, Homo sapiens
gcacctaatacaatg

SEQ ID NO: 1584413 - DNA, 15 bp, Homo sapiens
cacctaatacaatgc

SEQ ID NO: 1584414 - DNA, 15 bp, Homo sapiens
acctaatacaatgct

SEQ ID NO: 1584415 - DNA, 15 bp, Homo sapiens
cctaatacaatgctt

SEQ ID NO: 1584416 - DNA, 15 bp, Homo sapiens
ctaatacaatgctta

SEQ ID NO: 1584417 - DNA, 15 bp, Homo sapiens
taatacaatgcttag

SEQ ID NO: 1584418 - DNA, 15 bp, Homo sapiens
aatacaatgcttagg

SEQ ID NO: 1584419 - DNA, 15 bp, Homo sapiens
atacaatgcttaggt

SEQ ID NO: 1584420 - DNA, 15 bp, Homo sapiens
tacaatgcttaggtt

SEQ ID NO: 1584421 - DNA, 15 bp, Homo sapiens
acaatgcttaggttg

SEQ ID NO: 1584422 - DNA, 15 bp, Homo sapiens
caatgcttaggttgt

SEQ ID NO: 1584423 - DNA, 15 bp, Homo sapiens
aatgcttaggttgta

SEQ ID NO: 1584424 - DNA, 15 bp, Homo sapiens
atgcttaggttgtaa

SEQ ID NO: 1584425 - DNA, 15 bp, Homo sapiens
tgcttaggttgtaaa

SEQ ID NO: 1584426 - DNA, 15 bp, Homo sapiens
gcttaggttgtaaaa

SEQ ID NO: 1584427 - DNA, 15 bp, Homo sapiens
cttaggttgtaaaag

SEQ ID NO: 1584428 - DNA, 15 bp, Homo sapiens
ttaggttgtaaaagg

SEQ ID NO: 1584429 - DNA, 15 bp, Homo sapiens
taggttgtaaaagga

SEQ ID NO: 1584430 - DNA, 15 bp, Homo sapiens
aggttgtaaaaggag

SEQ ID NO: 1584431 - DNA, 15 bp, Homo sapiens
ggttgtaaaaggaga

SEQ ID NO: 1584432 - DNA, 15 bp, Homo sapiens
gttgtaaaaggagat

SEQ ID NO: 1584433 - DNA, 15 bp, Homo sapiens
ttgtaaaaggagatg

SEQ ID NO: 1584434 - DNA, 15 bp, Homo sapiens
tgtaaaaggagatgc

SEQ ID NO: 1584435 - DNA, 15 bp, Homo sapiens
gtaaaaggagatgct

SEQ ID NO: 1584436 - DNA, 15 bp, Homo sapiens
taaaaggagatgctc

SEQ ID NO: 1584437 - DNA, 15 bp, Homo sapiens
aaaaggagatgctca

SEQ ID NO: 1584438 - DNA, 15 bp, Homo sapiens
aaaggagatgctcaa

SEQ ID NO: 1584439 - DNA, 15 bp, Homo sapiens
aaggagatgctcaat

SEQ ID NO: 1584440 - DNA, 15 bp, Homo sapiens
aggagatgctcaata

SEQ ID NO: 1584441 - DNA, 15 bp, Homo sapiens
ggagatgctcaatag

SEQ ID NO: 1584442 - DNA, 15 bp, Homo sapiens
gagatgctcaatagg

SEQ ID NO: 1584443 - DNA, 15 bp, Homo sapiens
agatgctcaataggt

SEQ ID NO: 1584444 - DNA, 15 bp, Homo sapiens
gatgctcaataggta

SEQ ID NO: 1584445 - DNA, 15 bp, Homo sapiens
atgctcaataggtac

SEQ ID NO: 1584446 - DNA, 15 bp, Homo sapiens
tgctcaataggtact

SEQ ID NO: 1584447 - DNA, 15 bp, Homo sapiens
gctcaataggtacta

SEQ ID NO: 1584448 - DNA, 15 bp, Homo sapiens
ctcaataggtactaa

SEQ ID NO: 1584449 - DNA, 15 bp, Homo sapiens
tcaataggtactaac

SEQ ID NO: 1584450 - DNA, 15 bp, Homo sapiens
caataggtactaact

SEQ ID NO: 1584451 - DNA, 15 bp, Homo sapiens
aataggtactaactg

SEQ ID NO: 1584452 - DNA, 15 bp, Homo sapiens
ataggtactaactga

SEQ ID NO: 1584453 - DNA, 15 bp, Homo sapiens
taggtactaactgat

SEQ ID NO: 1584454 - DNA, 15 bp, Homo sapiens
aggtactaactgata

SEQ ID NO: 1584455 - DNA, 15 bp, Homo sapiens
ggtactaactgatat

SEQ ID NO: 1584456 - DNA, 15 bp, Homo sapiens
gtactaactgatata

SEQ ID NO: 1584457 - DNA, 15 bp, Homo sapiens
tactaactgatatat

SEQ ID NO: 1584458 - DNA, 15 bp, Homo sapiens
actaactgatatatt

SEQ ID NO: 1584459 - DNA, 15 bp, Homo sapiens
ctaactgatatattg

SEQ ID NO: 1584460 - DNA, 15 bp, Homo sapiens
taactgatatattga

SEQ ID NO: 1584461 - DNA, 15 bp, Homo sapiens
aactgatatattgag

SEQ ID NO: 1584462 - DNA, 15 bp, Homo sapiens
actgatatattgaga

SEQ ID NO: 1584463 - DNA, 15 bp, Homo sapiens
ctgatatattgagat

SEQ ID NO: 1584464 - DNA, 15 bp, Homo sapiens
tgatatattgagatt

SEQ ID NO: 1584465 - DNA, 15 bp, Homo sapiens
gatatattgagattt

SEQ ID NO: 1584466 - DNA, 15 bp, Homo sapiens
atatattgagattta

SEQ ID NO: 1584467 - DNA, 15 bp, Homo sapiens
tatattgagatttaa

SEQ ID NO: 1584468 - DNA, 15 bp, Homo sapiens
atattgagatttaat

SEQ ID NO: 1584469 - DNA, 15 bp, Homo sapiens
tattgagatttaatt

SEQ ID NO: 1584470 - DNA, 15 bp, Homo sapiens
attgagatttaatta

SEQ ID NO: 1584471 - DNA, 15 bp, Homo sapiens
ttgagatttaattat

SEQ ID NO: 1584472 - DNA, 15 bp, Homo sapiens
tgagatttaattatg

SEQ ID NO: 1584473 - DNA, 15 bp, Homo sapiens
gagatttaattatgg

SEQ ID NO: 1584474 - DNA, 15 bp, Homo sapiens
agatttaattatggt

SEQ ID NO: 1584475 - DNA, 15 bp, Homo sapiens
gatttaattatggtt

SEQ ID NO: 1584476 - DNA, 15 bp, Homo sapiens
atttaattatggttt

SEQ ID NO: 1584477 - DNA, 15 bp, Homo sapiens
tttaattatggtttg

SEQ ID NO: 1584478 - DNA, 15 bp, Homo sapiens
ttaattatggtttga

SEQ ID NO: 1584479 - DNA, 15 bp, Homo sapiens
taattatggtttgac

SEQ ID NO: 1584480 - DNA, 15 bp, Homo sapiens
aattatggtttgacc

SEQ ID NO: 1584481 - DNA, 15 bp, Homo sapiens
attatggtttgacca

SEQ ID NO: 1584482 - DNA, 15 bp, Homo sapiens
ttatggtttgaccaa

SEQ ID NO: 1584483 - DNA, 15 bp, Homo sapiens
tatggtttgaccaat

SEQ ID NO: 1584484 - DNA, 15 bp, Homo sapiens
atggtttgaccaata

SEQ ID NO: 1584485 - DNA, 15 bp, Homo sapiens
tggtttgaccaatat

SEQ ID NO: 1584486 - DNA, 15 bp, Homo sapiens
ggtttgaccaatatt

SEQ ID NO: 1584487 - DNA, 15 bp, Homo sapiens
gtttgaccaatattt

SEQ ID NO: 1584488 - DNA, 15 bp, Homo sapiens
tttgaccaatattta

SEQ ID NO: 1584489 - DNA, 15 bp, Homo sapiens
ttgaccaatatttat

SEQ ID NO: 1584490 - DNA, 15 bp, Homo sapiens
tgaccaatatttatt

SEQ ID NO: 1584491 - DNA, 15 bp, Homo sapiens
gaccaatatttattg

SEQ ID NO: 1584492 - DNA, 15 bp, Homo sapiens
accaatatttattgg

SEQ ID NO: 1584493 - DNA, 15 bp, Homo sapiens
ccaatatttattgga

SEQ ID NO: 1584494 - DNA, 15 bp, Homo sapiens
caatatttattggaa

SEQ ID NO: 1584495 - DNA, 15 bp, Homo sapiens
aatatttattggaaa

SEQ ID NO: 1584496 - DNA, 15 bp, Homo sapiens
atatttattggaaac

SEQ ID NO: 1584497 - DNA, 15 bp, Homo sapiens
tatttattggaaacc

SEQ ID NO: 1584498 - DNA, 15 bp, Homo sapiens
atttattggaaaccg

SEQ ID NO: 1584499 - DNA, 15 bp, Homo sapiens
tttattggaaaccgc

SEQ ID NO: 1584500 - DNA, 15 bp, Homo sapiens
ttattggaaaccgcc

SEQ ID NO: 1584501 - DNA, 15 bp, Homo sapiens
tattggaaaccgcca

SEQ ID NO: 1584502 - DNA, 15 bp, Homo sapiens
attggaaaccgccaa

SEQ ID NO: 1584503 - DNA, 15 bp, Homo sapiens
ttggaaaccgccaaa

SEQ ID NO: 1584504 - DNA, 15 bp, Homo sapiens
tggaaaccgccaaag

SEQ ID NO: 1584505 - DNA, 15 bp, Homo sapiens
ggaaaccgccaaagc

SEQ ID NO: 1584506 - DNA, 15 bp, Homo sapiens
gaaaccgccaaagct

SEQ ID NO: 1584507 - DNA, 15 bp, Homo sapiens
aaaccgccaaagctt

SEQ ID NO: 1584508 - DNA, 15 bp, Homo sapiens
aaccgccaaagctta

SEQ ID NO: 1584509 - DNA, 15 bp, Homo sapiens
accgccaaagcttaa

SEQ ID NO: 1584510 - DNA, 15 bp, Homo sapiens
ccgccaaagcttaaa

SEQ ID NO: 1584511 - DNA, 15 bp, Homo sapiens
cgccaaagcttaaat

SEQ ID NO: 1584512 - DNA, 15 bp, Homo sapiens
gccaaagcttaaatc

SEQ ID NO: 1584513 - DNA, 15 bp, Homo sapiens
ccaaagcttaaatca

SEQ ID NO: 1584514 - DNA, 15 bp, Homo sapiens
caaagcttaaatcat

SEQ ID NO: 1584515 - DNA, 15 bp, Homo sapiens
aaagcttaaatcatc

SEQ ID NO: 1584516 - DNA, 15 bp, Homo sapiens
aagcttaaatcatca

SEQ ID NO: 1584517 - DNA, 15 bp, Homo sapiens
agcttaaatcatcag

SEQ ID NO: 1584518 - DNA, 15 bp, Homo sapiens
gcttaaatcatcagc

SEQ ID NO: 1584519 - DNA, 15 bp, Homo sapiens
cttaaatcatcagct

SEQ ID NO: 1584520 - DNA, 15 bp, Homo sapiens
ttaaatcatcagctt

SEQ ID NO: 1584521 - DNA, 15 bp, Homo sapiens
taaatcatcagcttc

SEQ ID NO: 1584522 - DNA, 15 bp, Homo sapiens
aaatcatcagcttct

SEQ ID NO: 1584523 - DNA, 15 bp, Homo sapiens
aatcatcagcttctt

SEQ ID NO: 1584524 - DNA, 15 bp, Homo sapiens
atcatcagcttcttg

SEQ ID NO: 1584525 - DNA, 15 bp, Homo sapiens
tcatcagcttcttga

SEQ ID NO: 1584526 - DNA, 15 bp, Homo sapiens
catcagcttcttgaa

SEQ ID NO: 1584527 - DNA, 15 bp, Homo sapiens
atcagcttcttgaat

SEQ ID NO: 1584528 - DNA, 15 bp, Homo sapiens
tcagcttcttgaatg

SEQ ID NO: 1584529 - DNA, 15 bp, Homo sapiens
cagcttcttgaatgt

SEQ ID NO: 1584530 - DNA, 15 bp, Homo sapiens
agcttcttgaatgtg

SEQ ID NO: 1584531 - DNA, 15 bp, Homo sapiens
gcttcttgaatgtga

SEQ ID NO: 1584532 - DNA, 15 bp, Homo sapiens
cttcttgaatgtgat

SEQ ID NO: 1584533 - DNA, 15 bp, Homo sapiens
ttcttgaatgtgatt

SEQ ID NO: 1584534 - DNA, 15 bp, Homo sapiens
tcttgaatgtgattt

SEQ ID NO: 1584535 - DNA, 15 bp, Homo sapiens
cttgaatgtgatttg

SEQ ID NO: 1584536 - DNA, 15 bp, Homo sapiens
ttgaatgtgatttga

SEQ ID NO: 1584537 - DNA, 15 bp, Homo sapiens
tgaatgtgatttgaa

SEQ ID NO: 1584538 - DNA, 15 bp, Homo sapiens
gaatgtgatttgaaa

SEQ ID NO: 1584539 - DNA, 15 bp, Homo sapiens
aatgtgatttgaaag

SEQ ID NO: 1584540 - DNA, 15 bp, Homo sapiens
atgtgatttgaaagg

SEQ ID NO: 1584541 - DNA, 15 bp, Homo sapiens
tgtgatttgaaaggt

SEQ ID NO: 1584542 - DNA, 15 bp, Homo sapiens
gtgatttgaaaggta

SEQ ID NO: 1584543 - DNA, 15 bp, Homo sapiens
tgatttgaaaggtaa

SEQ ID NO: 1584544 - DNA, 15 bp, Homo sapiens
gatttgaaaggtaat

SEQ ID NO: 1584545 - DNA, 15 bp, Homo sapiens
atttgaaaggtaatt

SEQ ID NO: 1584546 - DNA, 15 bp, Homo sapiens
tttgaaaggtaattt

SEQ ID NO: 1584547 - DNA, 15 bp, Homo sapiens
ttgaaaggtaattta

SEQ ID NO: 1584548 - DNA, 15 bp, Homo sapiens
tgaaaggtaatttag

SEQ ID NO: 1584549 - DNA, 15 bp, Homo sapiens
gaaaggtaatttagt

SEQ ID NO: 1584550 - DNA, 15 bp, Homo sapiens
aaaggtaatttagta

SEQ ID NO: 1584551 - DNA, 15 bp, Homo sapiens
aaggtaatttagtat

SEQ ID NO: 1584552 - DNA, 15 bp, Homo sapiens
aggtaatttagtatt

SEQ ID NO: 1584553 - DNA, 15 bp, Homo sapiens
ggtaatttagtattg

SEQ ID NO: 1584554 - DNA, 15 bp, Homo sapiens
gtaatttagtattga

SEQ ID NO: 1584555 - DNA, 15 bp, Homo sapiens
taatttagtattgaa

SEQ ID NO: 1584556 - DNA, 15 bp, Homo sapiens
aatttagtattgaat

SEQ ID NO: 1584557 - DNA, 15 bp, Homo sapiens
atttagtattgaata

SEQ ID NO: 1584558 - DNA, 15 bp, Homo sapiens
tttagtattgaatag

SEQ ID NO: 1584559 - DNA, 15 bp, Homo sapiens
ttagtattgaatagc

SEQ ID NO: 1584560 - DNA, 15 bp, Homo sapiens
tagtattgaatagca

SEQ ID NO: 1584561 - DNA, 15 bp, Homo sapiens
agtattgaatagcat

SEQ ID NO: 1584562 - DNA, 15 bp, Homo sapiens
gtattgaatagcatg

SEQ ID NO: 1584563 - DNA, 15 bp, Homo sapiens
tattgaatagcatgt

SEQ ID NO: 1584564 - DNA, 15 bp, Homo sapiens
attgaatagcatgtg

SEQ ID NO: 1584565 - DNA, 15 bp, Homo sapiens
ttgaatagcatgtga

SEQ ID NO: 1584566 - DNA, 15 bp, Homo sapiens
tgaatagcatgtgag

SEQ ID NO: 1584567 - DNA, 15 bp, Homo sapiens
gaatagcatgtgagc

SEQ ID NO: 1584568 - DNA, 15 bp, Homo sapiens
aatagcatgtgagct

SEQ ID NO: 1584569 - DNA, 15 bp, Homo sapiens
atagcatgtgagcta

SEQ ID NO: 1584570 - DNA, 15 bp, Homo sapiens
tagcatgtgagctag

SEQ ID NO: 1584571 - DNA, 15 bp, Homo sapiens
agcatgtgagctaga

SEQ ID NO: 1584572 - DNA, 15 bp, Homo sapiens
gcatgtgagctagag

SEQ ID NO: 1584573 - DNA, 15 bp, Homo sapiens
catgtgagctagagt

SEQ ID NO: 1584574 - DNA, 15 bp, Homo sapiens
atgtgagctagagta

SEQ ID NO: 1584575 - DNA, 15 bp, Homo sapiens
tgtgagctagagtat

SEQ ID NO: 1584576 - DNA, 15 bp, Homo sapiens
gtgagctagagtatt

SEQ ID NO: 1584577 - DNA, 15 bp, Homo sapiens
tgagctagagtattt

SEQ ID NO: 1584578 - DNA, 15 bp, Homo sapiens
gagctagagtatttc

SEQ ID NO: 1584579 - DNA, 15 bp, Homo sapiens
agctagagtatttca

SEQ ID NO: 1584580 - DNA, 15 bp, Homo sapiens
gctagagtatttcat

SEQ ID NO: 1584581 - DNA, 15 bp, Homo sapiens
ctagagtatttcatt

SEQ ID NO: 1584582 - DNA, 15 bp, Homo sapiens
tagagtatttcattc

SEQ ID NO: 1584583 - DNA, 15 bp, Homo sapiens
agagtatttcattct

SEQ ID NO: 1584584 - DNA, 15 bp, Homo sapiens
gagtatttcattctt

SEQ ID NO: 1584585 - DNA, 15 bp, Homo sapiens
agtatttcattcttt

SEQ ID NO: 1584586 - DNA, 15 bp, Homo sapiens
gtatttcattctttc

SEQ ID NO: 1584587 - DNA, 15 bp, Homo sapiens
tatttcattctttct

SEQ ID NO: 1584588 - DNA, 15 bp, Homo sapiens
atttcattctttctg

SEQ ID NO: 1584589 - DNA, 15 bp, Homo sapiens
tttcattctttctgg

SEQ ID NO: 1584590 - DNA, 15 bp, Homo sapiens
ttcattctttctggt

SEQ ID NO: 1584591 - DNA, 15 bp, Homo sapiens
tcattctttctggtt

SEQ ID NO: 1584592 - DNA, 15 bp, Homo sapiens
cattctttctggttt

SEQ ID NO: 1584593 - DNA, 15 bp, Homo sapiens
attctttctggttta

SEQ ID NO: 1584594 - DNA, 15 bp, Homo sapiens
ttctttctggtttat

SEQ ID NO: 1584595 - DNA, 15 bp, Homo sapiens
tctttctggtttatt

SEQ ID NO: 1584596 - DNA, 15 bp, Homo sapiens
ctttctggtttattt

SEQ ID NO: 1584597 - DNA, 15 bp, Homo sapiens
tttctggtttatttc

SEQ ID NO: 1584598 - DNA, 15 bp, Homo sapiens
ttctggtttatttct

SEQ ID NO: 1584599 - DNA, 15 bp, Homo sapiens
tctggtttatttctt

SEQ ID NO: 1584600 - DNA, 15 bp, Homo sapiens
ctggtttatttcttc

SEQ ID NO: 1584601 - DNA, 15 bp, Homo sapiens
tggtttatttcttca

SEQ ID NO: 1584602 - DNA, 15 bp, Homo sapiens
ggtttatttcttcaa

SEQ ID NO: 1584603 - DNA, 15 bp, Homo sapiens
gtttatttcttcaaa

SEQ ID NO: 1584604 - DNA, 15 bp, Homo sapiens
tttatttcttcaaat

SEQ ID NO: 1584605 - DNA, 15 bp, Homo sapiens
ttatttcttcaaata

SEQ ID NO: 1584606 - DNA, 15 bp, Homo sapiens
tatttcttcaaatag

SEQ ID NO: 1584607 - DNA, 15 bp, Homo sapiens
atttcttcaaataga

SEQ ID NO: 1584608 - DNA, 15 bp, Homo sapiens
tttcttcaaatagac

SEQ ID NO: 1584609 - DNA, 15 bp, Homo sapiens
ttcttcaaatagact

SEQ ID NO: 1584610 - DNA, 15 bp, Homo sapiens
tcttcaaatagactt

SEQ ID NO: 1584611 - DNA, 15 bp, Homo sapiens
cttcaaatagacttt

SEQ ID NO: 1584612 - DNA, 15 bp, Homo sapiens
ttcaaatagactttg

SEQ ID NO: 1584613 - DNA, 15 bp, Homo sapiens
tcaaatagactttga

SEQ ID NO: 1584614 - DNA, 15 bp, Homo sapiens
caaatagactttgaa

SEQ ID NO: 1584615 - DNA, 15 bp, Homo sapiens
aaatagactttgaat

SEQ ID NO: 1584616 - DNA, 15 bp, Homo sapiens
aatagactttgaata

SEQ ID NO: 1584617 - DNA, 15 bp, Homo sapiens
atagactttgaatat

SEQ ID NO: 1584618 - DNA, 15 bp, Homo sapiens
tagactttgaatata

SEQ ID NO: 1584619 - DNA, 15 bp, Homo sapiens
agactttgaatataa

SEQ ID NO: 1584620 - DNA, 15 bp, Homo sapiens
gactttgaatataat

SEQ ID NO: 1584621 - DNA, 15 bp, Homo sapiens
actttgaatataatg

SEQ ID NO: 1584622 - DNA, 15 bp, Homo sapiens
ctttgaatataatgg

SEQ ID NO: 1584623 - DNA, 15 bp, Homo sapiens
tttgaatataatggt

SEQ ID NO: 1584624 - DNA, 15 bp, Homo sapiens
ttgaatataatggtg

SEQ ID NO: 1584625 - DNA, 15 bp, Homo sapiens
tgaatataatggtga

SEQ ID NO: 1584626 - DNA, 15 bp, Homo sapiens
gaatataatggtgaa

SEQ ID NO: 1584627 - DNA, 15 bp, Homo sapiens
aatataatggtgaat

SEQ ID NO: 1584628 - DNA, 15 bp, Homo sapiens
atataatggtgaatg

SEQ ID NO: 1584629 - DNA, 15 bp, Homo sapiens
tataatggtgaatgg

SEQ ID NO: 1584630 - DNA, 15 bp, Homo sapiens
ataatggtgaatggg

SEQ ID NO: 1584631 - DNA, 15 bp, Homo sapiens
taatggtgaatgggt

SEQ ID NO: 1584632 - DNA, 15 bp, Homo sapiens
aatggtgaatgggta

SEQ ID NO: 1584633 - DNA, 15 bp, Homo sapiens
atggtgaatgggtat

SEQ ID NO: 1584634 - DNA, 15 bp, Homo sapiens
tggtgaatgggtatt

SEQ ID NO: 1584635 - DNA, 15 bp, Homo sapiens
ggtgaatgggtatta

SEQ ID NO: 1584636 - DNA, 15 bp, Homo sapiens
tattgccaaattttc

SEQ ID NO: 1584637 - DNA, 15 bp, Homo sapiens
attgccaaattttcc

SEQ ID NO: 1584638 - DNA, 15 bp, Homo sapiens
ttgccaaattttcct

SEQ ID NO: 1584639 - DNA, 15 bp, Homo sapiens
tgccaaattttcctc

SEQ ID NO: 1584640 - DNA, 15 bp, Homo sapiens
gccaaattttcctct

SEQ ID NO: 1584641 - DNA, 15 bp, Homo sapiens
ccaaattttcctcta

SEQ ID NO: 1584642 - DNA, 15 bp, Homo sapiens
caaattttcctctaa

SEQ ID NO: 1584643 - DNA, 15 bp, Homo sapiens
aaattttcctctaag

SEQ ID NO: 1584644 - DNA, 15 bp, Homo sapiens
aattttcctctaaga

SEQ ID NO: 1584645 - DNA, 15 bp, Homo sapiens
attttcctctaagaa

SEQ ID NO: 1584646 - DNA, 15 bp, Homo sapiens
ttttcctctaagaag

SEQ ID NO: 1584647 - DNA, 15 bp, Homo sapiens
tttcctctaagaagt

SEQ ID NO: 1584648 - DNA, 15 bp, Homo sapiens
ttcctctaagaagtt

SEQ ID NO: 1584649 - DNA, 15 bp, Homo sapiens
tcctctaagaagttg

SEQ ID NO: 1584650 - DNA, 15 bp, Homo sapiens
cctctaagaagttga

SEQ ID NO: 1584651 - DNA, 15 bp, Homo sapiens
ctctaagaagttgaa

SEQ ID NO: 1584652 - DNA, 15 bp, Homo sapiens
tctaagaagttgaat

SEQ ID NO: 1584653 - DNA, 15 bp, Homo sapiens
ctaagaagttgaatc

SEQ ID NO: 1584654 - DNA, 15 bp, Homo sapiens
taagaagttgaatca

SEQ ID NO: 1584655 - DNA, 15 bp, Homo sapiens
aagaagttgaatcat

SEQ ID NO: 1584656 - DNA, 15 bp, Homo sapiens
agaagttgaatcatt

SEQ ID NO: 1584657 - DNA, 15 bp, Homo sapiens
gaagttgaatcattt

SEQ ID NO: 1584658 - DNA, 15 bp, Homo sapiens
aagttgaatcatttt

SEQ ID NO: 1584659 - DNA, 15 bp, Homo sapiens
agttgaatcatttta

SEQ ID NO: 1584660 - DNA, 15 bp, Homo sapiens
gttgaatcattttat

SEQ ID NO: 1584661 - DNA, 15 bp, Homo sapiens
ttgaatcattttata

SEQ ID NO: 1584662 - DNA, 15 bp, Homo sapiens
tgaatcattttatac

SEQ ID NO: 1584663 - DNA, 15 bp, Homo sapiens
gaatcattttatact

SEQ ID NO: 1584664 - DNA, 15 bp, Homo sapiens
aatcattttatactc

SEQ ID NO: 1584665 - DNA, 15 bp, Homo sapiens
atcattttatactcc

SEQ ID NO: 1584666 - DNA, 15 bp, Homo sapiens
tcattttatactcct

SEQ ID NO: 1584667 - DNA, 15 bp, Homo sapiens
cattttatactcctg

SEQ ID NO: 1584668 - DNA, 15 bp, Homo sapiens
attttatactcctga

SEQ ID NO: 1584669 - DNA, 15 bp, Homo sapiens
ttttatactcctgat

SEQ ID NO: 1584670 - DNA, 15 bp, Homo sapiens
tttatactcctgatg

SEQ ID NO: 1584671 - DNA, 15 bp, Homo sapiens
ttatactcctgatgt

SEQ ID NO: 1584672 - DNA, 15 bp, Homo sapiens
tatactcctgatgtt

SEQ ID NO: 1584673 - DNA, 15 bp, Homo sapiens
atactcctgatgtta

SEQ ID NO: 1584674 - DNA, 15 bp, Homo sapiens
tactcctgatgttat

SEQ ID NO: 1584675 - DNA, 15 bp, Homo sapiens
actcctgatgttata

SEQ ID NO: 1584676 - DNA, 15 bp, Homo sapiens
ctcctgatgttatat

SEQ ID NO: 1584677 - DNA, 15 bp, Homo sapiens
tcctgatgttatatg

SEQ ID NO: 1584678 - DNA, 15 bp, Homo sapiens
cctgatgttatatga

SEQ ID NO: 1584679 - DNA, 15 bp, Homo sapiens
ctgatgttatatgag

SEQ ID NO: 1584680 - DNA, 15 bp, Homo sapiens
tgatgttatatgaga

SEQ ID NO: 1584681 - DNA, 15 bp, Homo sapiens
gatgttatatgagag

SEQ ID NO: 1584682 - DNA, 15 bp, Homo sapiens
atgttatatgagagt

SEQ ID NO: 1584683 - DNA, 15 bp, Homo sapiens
tgttatatgagagta

SEQ ID NO: 1584684 - DNA, 15 bp, Homo sapiens
gttatatgagagtac

SEQ ID NO: 1584685 - DNA, 15 bp, Homo sapiens
ttatatgagagtacc

SEQ ID NO: 1584686 - DNA, 15 bp, Homo sapiens
tatatgagagtacct

SEQ ID NO: 1584687 - DNA, 15 bp, Homo sapiens
atatgagagtacctt

SEQ ID NO: 1584688 - DNA, 15 bp, Homo sapiens
tatgagagtaccttt

SEQ ID NO: 1584689 - DNA, 15 bp, Homo sapiens
atgagagtacctttc

SEQ ID NO: 1584690 - DNA, 15 bp, Homo sapiens
tgagagtacctttct

SEQ ID NO: 1584691 - DNA, 15 bp, Homo sapiens
gagagtacctttctc

SEQ ID NO: 1584692 - DNA, 15 bp, Homo sapiens
agagtacctttctct

SEQ ID NO: 1584693 - DNA, 15 bp, Homo sapiens
gagtacctttctctt

SEQ ID NO: 1584694 - DNA, 15 bp, Homo sapiens
agtacctttctcttc

SEQ ID NO: 1584695 - DNA, 15 bp, Homo sapiens
gtacctttctcttca

SEQ ID NO: 1584696 - DNA, 15 bp, Homo sapiens
tacctttctcttcac

SEQ ID NO: 1584697 - DNA, 15 bp, Homo sapiens
acctttctcttcaca

SEQ ID NO: 1584698 - DNA, 15 bp, Homo sapiens
cctttctcttcacaa

SEQ ID NO: 1584699 - DNA, 15 bp, Homo sapiens
ctttctcttcacaat

SEQ ID NO: 1584700 - DNA, 15 bp, Homo sapiens
tttctcttcacaatt

SEQ ID NO: 1584701 - DNA, 15 bp, Homo sapiens
ttctcttcacaattt

SEQ ID NO: 1584702 - DNA, 15 bp, Homo sapiens
tctcttcacaatttg

SEQ ID NO: 1584703 - DNA, 15 bp, Homo sapiens
ctcttcacaatttgt

SEQ ID NO: 1584704 - DNA, 15 bp, Homo sapiens
tcttcacaatttgtc

SEQ ID NO: 1584705 - DNA, 15 bp, Homo sapiens
cttcacaatttgtct

SEQ ID NO: 1584706 - DNA, 15 bp, Homo sapiens
ttcacaatttgtctc

SEQ ID NO: 1584707 - DNA, 15 bp, Homo sapiens
tcacaatttgtctct

SEQ ID NO: 1584708 - DNA, 15 bp, Homo sapiens
cacaatttgtctctt

SEQ ID NO: 1584709 - DNA, 15 bp, Homo sapiens
acaatttgtctcttt

SEQ ID NO: 1584710 - DNA, 15 bp, Homo sapiens
caatttgtctctttt

SEQ ID NO: 1584711 - DNA, 15 bp, Homo sapiens
aatttgtctcttttt

SEQ ID NO: 1584712 - DNA, 15 bp, Homo sapiens
atttgtctctttttt

SEQ ID NO: 1584713 - DNA, 15 bp, Homo sapiens
tttgtctcttttttt

SEQ ID NO: 1584714 - DNA, 15 bp, Homo sapiens
ttgtctctttttttt

SEQ ID NO: 1584715 - DNA, 15 bp, Homo sapiens
tgtctcttttttttt

SEQ ID NO: 1584716 - DNA, 15 bp, Homo sapiens
gtctctttttttttt

SEQ ID NO: 1584717 - DNA, 15 bp, Homo sapiens
ttgagacaaggtctc

SEQ ID NO: 1584718 - DNA, 15 bp, Homo sapiens
tgagacaaggtctct

SEQ ID NO: 1584719 - DNA, 15 bp, Homo sapiens
gagacaaggtctctg

SEQ ID NO: 1584720 - DNA, 15 bp, Homo sapiens
agacaaggtctctgt

SEQ ID NO: 1584721 - DNA, 15 bp, Homo sapiens
gacaaggtctctgtt

SEQ ID NO: 1584722 - DNA, 15 bp, Homo sapiens
acaaggtctctgttg

SEQ ID NO: 1584723 - DNA, 15 bp, Homo sapiens
caaggtctctgttgc

SEQ ID NO: 1584724 - DNA, 15 bp, Homo sapiens
aaggtctctgttgcc

SEQ ID NO: 1584725 - DNA, 15 bp, Homo sapiens
aggtctctgttgccc

SEQ ID NO: 1584726 - DNA, 15 bp, Homo sapiens
ggtctctgttgccca

SEQ ID NO: 1584727 - DNA, 15 bp, Homo sapiens
gttgcccaggctggg

SEQ ID NO: 1584728 - DNA, 15 bp, Homo sapiens
ttgcccaggctgggg

SEQ ID NO: 1584729 - DNA, 15 bp, Homo sapiens
tgcccaggctggggt

SEQ ID NO: 1584730 - DNA, 15 bp, Homo sapiens
gcccaggctggggtg

SEQ ID NO: 1584731 - DNA, 15 bp, Homo sapiens
cccaggctggggtgc

SEQ ID NO: 1584732 - DNA, 15 bp, Homo sapiens
gctggggtgcagtgc

SEQ ID NO: 1584733 - DNA, 15 bp, Homo sapiens
ctggggtgcagtgca

SEQ ID NO: 1584734 - DNA, 15 bp, Homo sapiens
tggggtgcagtgcag

SEQ ID NO: 1584735 - DNA, 15 bp, Homo sapiens
ggggtgcagtgcagc

SEQ ID NO: 1584736 - DNA, 15 bp, Homo sapiens
gggtgcagtgcagca

SEQ ID NO: 1584737 - DNA, 15 bp, Homo sapiens
ggtgcagtgcagcag

SEQ ID NO: 1584738 - DNA, 15 bp, Homo sapiens
gtgcagtgcagcaga

SEQ ID NO: 1584739 - DNA, 15 bp, Homo sapiens
tgcagtgcagcagaa

SEQ ID NO: 1584740 - DNA, 15 bp, Homo sapiens
gcagtgcagcagaat

SEQ ID NO: 1584741 - DNA, 15 bp, Homo sapiens
cagtgcagcagaatg

SEQ ID NO: 1584742 - DNA, 15 bp, Homo sapiens
agtgcagcagaatga

SEQ ID NO: 1584743 - DNA, 15 bp, Homo sapiens
gtgcagcagaatgat

SEQ ID NO: 1584744 - DNA, 15 bp, Homo sapiens
tgcagcagaatgatc

SEQ ID NO: 1584745 - DNA, 15 bp, Homo sapiens
gcagcagaatgatca

SEQ ID NO: 1584746 - DNA, 15 bp, Homo sapiens
cagcagaatgatcac

SEQ ID NO: 1584747 - DNA, 15 bp, Homo sapiens
agcagaatgatcaca

SEQ ID NO: 1584748 - DNA, 15 bp, Homo sapiens
gcagaatgatcacag

SEQ ID NO: 1584749 - DNA, 15 bp, Homo sapiens
cagaatgatcacagt

SEQ ID NO: 1584750 - DNA, 15 bp, Homo sapiens
agaatgatcacagtt

SEQ ID NO: 1584751 - DNA, 15 bp, Homo sapiens
gaatgatcacagttc

SEQ ID NO: 1584752 - DNA, 15 bp, Homo sapiens
aatgatcacagttca

SEQ ID NO: 1584753 - DNA, 15 bp, Homo sapiens
atgatcacagttcac

SEQ ID NO: 1584754 - DNA, 15 bp, Homo sapiens
tgatcacagttcact

SEQ ID NO: 1584755 - DNA, 15 bp, Homo sapiens
gatcacagttcactg

SEQ ID NO: 1584756 - DNA, 15 bp, Homo sapiens
atcacagttcactgc

SEQ ID NO: 1584757 - DNA, 15 bp, Homo sapiens
tcacagttcactgca

SEQ ID NO: 1584758 - DNA, 15 bp, Homo sapiens
cacagttcactgcag

SEQ ID NO: 1584759 - DNA, 15 bp, Homo sapiens
acagttcactgcagt

SEQ ID NO: 1584760 - DNA, 15 bp, Homo sapiens
cagttcactgcagtc

SEQ ID NO: 1584761 - DNA, 15 bp, Homo sapiens
agttcactgcagtct

SEQ ID NO: 1584762 - DNA, 15 bp, Homo sapiens
gttcactgcagtctc

SEQ ID NO: 1584763 - DNA, 15 bp, Homo sapiens
ttcactgcagtctca

SEQ ID NO: 1584764 - DNA, 15 bp, Homo sapiens
cactgcagtctcaac

SEQ ID NO: 1584765 - DNA, 15 bp, Homo sapiens
actgcagtctcaacc

SEQ ID NO: 1584766 - DNA, 15 bp, Homo sapiens
ctgcagtctcaacct

SEQ ID NO: 1584767 - DNA, 15 bp, Homo sapiens
tgcagtctcaacctc

SEQ ID NO: 1584768 - DNA, 15 bp, Homo sapiens
gcagtctcaacctcc

SEQ ID NO: 1584769 - DNA, 15 bp, Homo sapiens
cagtctcaacctcct

SEQ ID NO: 1584770 - DNA, 15 bp, Homo sapiens
agtctcaacctcctg

SEQ ID NO: 1584771 - DNA, 15 bp, Homo sapiens
gtctcaacctcctgg

SEQ ID NO: 1584772 - DNA, 15 bp, Homo sapiens
tctcaacctcctggg

SEQ ID NO: 1584773 - DNA, 15 bp, Homo sapiens
ctcaacctcctgggt

SEQ ID NO: 1584774 - DNA, 15 bp, Homo sapiens
tcaacctcctgggtt

SEQ ID NO: 1584775 - DNA, 15 bp, Homo sapiens
caacctcctgggttc

SEQ ID NO: 1584776 - DNA, 15 bp, Homo sapiens
aacctcctgggttca

SEQ ID NO: 1584777 - DNA, 15 bp, Homo sapiens
tgggttcaagcgatc

SEQ ID NO: 1584778 - DNA, 15 bp, Homo sapiens
gggttcaagcgatcc

SEQ ID NO: 1584779 - DNA, 15 bp, Homo sapiens
ggttcaagcgatcct

SEQ ID NO: 1584780 - DNA, 15 bp, Homo sapiens
gttcaagcgatcctt

SEQ ID NO: 1584781 - DNA, 15 bp, Homo sapiens
ttcaagcgatccttc

SEQ ID NO: 1584782 - DNA, 15 bp, Homo sapiens
tcaagcgatccttcc

SEQ ID NO: 1584783 - DNA, 15 bp, Homo sapiens
caagcgatccttcca

SEQ ID NO: 1584784 - DNA, 15 bp, Homo sapiens
aagcgatccttccac

SEQ ID NO: 1584785 - DNA, 15 bp, Homo sapiens
agcgatccttccacc

SEQ ID NO: 1584786 - DNA, 15 bp, Homo sapiens
gcgatccttccacct

SEQ ID NO: 1584787 - DNA, 15 bp, Homo sapiens
cgatccttccacctc

SEQ ID NO: 1584788 - DNA, 15 bp, Homo sapiens
gatccttccacctca

SEQ ID NO: 1584789 - DNA, 15 bp, Homo sapiens
atccttccacctcag

SEQ ID NO: 1584790 - DNA, 15 bp, Homo sapiens
tccttccacctcagc

SEQ ID NO: 1584791 - DNA, 15 bp, Homo sapiens
ccttccacctcagcc

SEQ ID NO: 1584792 - DNA, 15 bp, Homo sapiens
cttccacctcagcct

SEQ ID NO: 1584793 - DNA, 15 bp, Homo sapiens
ttccacctcagcctc

SEQ ID NO: 1584794 - DNA, 15 bp, Homo sapiens
tccacctcagcctcc

SEQ ID NO: 1584795 - DNA, 15 bp, Homo sapiens
gactataggtgtgcg

SEQ ID NO: 1584796 - DNA, 15 bp, Homo sapiens
actataggtgtgcgc

SEQ ID NO: 1584797 - DNA, 15 bp, Homo sapiens
ctataggtgtgcgcc

SEQ ID NO: 1584798 - DNA, 15 bp, Homo sapiens
ataggtgtgcgccac

SEQ ID NO: 1584799 - DNA, 15 bp, Homo sapiens
taggtgtgcgccacc

SEQ ID NO: 1584800 - DNA, 15 bp, Homo sapiens
aggtgtgcgccacca

SEQ ID NO: 1584801 - DNA, 15 bp, Homo sapiens
ggtgtgcgccaccac

SEQ ID NO: 1584802 - DNA, 15 bp, Homo sapiens
gtgtgcgccaccact

SEQ ID NO: 1584803 - DNA, 15 bp, Homo sapiens
tgtgcgccaccactc

SEQ ID NO: 1584804 - DNA, 15 bp, Homo sapiens
gtgcgccaccactcc

SEQ ID NO: 1584805 - DNA, 15 bp, Homo sapiens
tgcgccaccactccc

SEQ ID NO: 1584806 - DNA, 15 bp, Homo sapiens
gcgccaccactccca

SEQ ID NO: 1584807 - DNA, 15 bp, Homo sapiens
cgccaccactcccag

SEQ ID NO: 1584808 - DNA, 15 bp, Homo sapiens
gccaccactcccagc

SEQ ID NO: 1584809 - DNA, 15 bp, Homo sapiens
ccaccactcccagct

SEQ ID NO: 1584810 - DNA, 15 bp, Homo sapiens
caccactcccagcta

SEQ ID NO: 1584811 - DNA, 15 bp, Homo sapiens
accactcccagctaa

SEQ ID NO: 1584812 - DNA, 15 bp, Homo sapiens
ccactcccagctaat

SEQ ID NO: 1584813 - DNA, 15 bp, Homo sapiens
cactcccagctaata

SEQ ID NO: 1584814 - DNA, 15 bp, Homo sapiens
actcccagctaatat

SEQ ID NO: 1584815 - DNA, 15 bp, Homo sapiens
ctcccagctaatatt

SEQ ID NO: 1584816 - DNA, 15 bp, Homo sapiens
tcccagctaatattt

SEQ ID NO: 1584817 - DNA, 15 bp, Homo sapiens
cccagctaatatttt

SEQ ID NO: 1584818 - DNA, 15 bp, Homo sapiens
ccagctaatattttt

SEQ ID NO: 1584819 - DNA, 15 bp, Homo sapiens
cagctaatattttta

SEQ ID NO: 1584820 - DNA, 15 bp, Homo sapiens
agctaatatttttat

SEQ ID NO: 1584821 - DNA, 15 bp, Homo sapiens
gctaatatttttatt

SEQ ID NO: 1584822 - DNA, 15 bp, Homo sapiens
ctaatatttttattt

SEQ ID NO: 1584823 - DNA, 15 bp, Homo sapiens
taatatttttatttt

SEQ ID NO: 1584824 - DNA, 15 bp, Homo sapiens
aatatttttattttg

SEQ ID NO: 1584825 - DNA, 15 bp, Homo sapiens
atatttttattttgt

SEQ ID NO: 1584826 - DNA, 15 bp, Homo sapiens
tatttttattttgta

SEQ ID NO: 1584827 - DNA, 15 bp, Homo sapiens
atttttattttgtag

SEQ ID NO: 1584828 - DNA, 15 bp, Homo sapiens
tttttattttgtaga

SEQ ID NO: 1584829 - DNA, 15 bp, Homo sapiens
ttttattttgtagaa

SEQ ID NO: 1584830 - DNA, 15 bp, Homo sapiens
tttattttgtagaaa

SEQ ID NO: 1584831 - DNA, 15 bp, Homo sapiens
ttattttgtagaaac

SEQ ID NO: 1584832 - DNA, 15 bp, Homo sapiens
tattttgtagaaaca

SEQ ID NO: 1584833 - DNA, 15 bp, Homo sapiens
attttgtagaaacag

SEQ ID NO: 1584834 - DNA, 15 bp, Homo sapiens
gtagaaacagggttc

SEQ ID NO: 1584835 - DNA, 15 bp, Homo sapiens
tagaaacagggttcg

SEQ ID NO: 1584836 - DNA, 15 bp, Homo sapiens
agaaacagggttcgc

SEQ ID NO: 1584837 - DNA, 15 bp, Homo sapiens
gaaacagggttcgcc

SEQ ID NO: 1584838 - DNA, 15 bp, Homo sapiens
aaacagggttcgcca

SEQ ID NO: 1584839 - DNA, 15 bp, Homo sapiens
aacagggttcgccat

SEQ ID NO: 1584840 - DNA, 15 bp, Homo sapiens
acagggttcgccatg

SEQ ID NO: 1584841 - DNA, 15 bp, Homo sapiens
cagggttcgccatgt

SEQ ID NO: 1584842 - DNA, 15 bp, Homo sapiens
agggttcgccatgtt

SEQ ID NO: 1584843 - DNA, 15 bp, Homo sapiens
gggttcgccatgtta

SEQ ID NO: 1584844 - DNA, 15 bp, Homo sapiens
ggttcgccatgttac

SEQ ID NO: 1584845 - DNA, 15 bp, Homo sapiens
gttcgccatgttacc

SEQ ID NO: 1584846 - DNA, 15 bp, Homo sapiens
ttcgccatgttaccc

SEQ ID NO: 1584847 - DNA, 15 bp, Homo sapiens
tcgccatgttaccca

SEQ ID NO: 1584848 - DNA, 15 bp, Homo sapiens
cgccatgttacccag

SEQ ID NO: 1584849 - DNA, 15 bp, Homo sapiens
gccatgttacccagc

SEQ ID NO: 1584850 - DNA, 15 bp, Homo sapiens
ccatgttacccagcc

SEQ ID NO: 1584851 - DNA, 15 bp, Homo sapiens
catgttacccagcct

SEQ ID NO: 1584852 - DNA, 15 bp, Homo sapiens
atgttacccagcctc

SEQ ID NO: 1584853 - DNA, 15 bp, Homo sapiens
tgttacccagcctcc

SEQ ID NO: 1584854 - DNA, 15 bp, Homo sapiens
gttacccagcctccc

SEQ ID NO: 1584855 - DNA, 15 bp, Homo sapiens
ttacccagcctccca

SEQ ID NO: 1584856 - DNA, 15 bp, Homo sapiens
tacccagcctcccaa

SEQ ID NO: 1584857 - DNA, 15 bp, Homo sapiens
acccagcctcccaaa

SEQ ID NO: 1584858 - DNA, 15 bp, Homo sapiens
cccagcctcccaaag

SEQ ID NO: 1584859 - DNA, 15 bp, Homo sapiens
ccagcctcccaaagt

SEQ ID NO: 1584860 - DNA, 15 bp, Homo sapiens
ggcatgagccactgg

SEQ ID NO: 1584861 - DNA, 15 bp, Homo sapiens
gcatgagccactggc

SEQ ID NO: 1584862 - DNA, 15 bp, Homo sapiens
catgagccactggcc

SEQ ID NO: 1584863 - DNA, 15 bp, Homo sapiens
atgagccactggccc

SEQ ID NO: 1584864 - DNA, 15 bp, Homo sapiens
tgagccactggccca

SEQ ID NO: 1584865 - DNA, 15 bp, Homo sapiens
gagccactggcccag

SEQ ID NO: 1584866 - DNA, 15 bp, Homo sapiens
agccactggcccagt

SEQ ID NO: 1584867 - DNA, 15 bp, Homo sapiens
gccactggcccagtt

SEQ ID NO: 1584868 - DNA, 15 bp, Homo sapiens
ccactggcccagttt

SEQ ID NO: 1584869 - DNA, 15 bp, Homo sapiens
cactggcccagtttc

SEQ ID NO: 1584870 - DNA, 15 bp, Homo sapiens
actggcccagtttct

SEQ ID NO: 1584871 - DNA, 15 bp, Homo sapiens
ctggcccagtttcta

SEQ ID NO: 1584872 - DNA, 15 bp, Homo sapiens
tggcccagtttctac

SEQ ID NO: 1584873 - DNA, 15 bp, Homo sapiens
ggcccagtttctaca

SEQ ID NO: 1584874 - DNA, 15 bp, Homo sapiens
gcccagtttctacag

SEQ ID NO: 1584875 - DNA, 15 bp, Homo sapiens
cccagtttctacagt

SEQ ID NO: 1584876 - DNA, 15 bp, Homo sapiens
ccagtttctacagtc

SEQ ID NO: 1584877 - DNA, 15 bp, Homo sapiens
cagtttctacagtct

SEQ ID NO: 1584878 - DNA, 15 bp, Homo sapiens
agtttctacagtctc

SEQ ID NO: 1584879 - DNA, 15 bp, Homo sapiens
gtttctacagtctct

SEQ ID NO: 1584880 - DNA, 15 bp, Homo sapiens
tttctacagtctctc

SEQ ID NO: 1584881 - DNA, 15 bp, Homo sapiens
ttctacagtctctct

SEQ ID NO: 1584882 - DNA, 15 bp, Homo sapiens
tctacagtctctctt

SEQ ID NO: 1584883 - DNA, 15 bp, Homo sapiens
ctacagtctctctta

SEQ ID NO: 1584884 - DNA, 15 bp, Homo sapiens
tacagtctctcttaa

SEQ ID NO: 1584885 - DNA, 15 bp, Homo sapiens
acagtctctcttaat

SEQ ID NO: 1584886 - DNA, 15 bp, Homo sapiens
cagtctctcttaata

SEQ ID NO: 1584887 - DNA, 15 bp, Homo sapiens
agtctctcttaatat

SEQ ID NO: 1584888 - DNA, 15 bp, Homo sapiens
gtctctcttaatatt

SEQ ID NO: 1584889 - DNA, 15 bp, Homo sapiens
tctctcttaatattg

SEQ ID NO: 1584890 - DNA, 15 bp, Homo sapiens
ctctcttaatattgt

SEQ ID NO: 1584891 - DNA, 15 bp, Homo sapiens
tctcttaatattgta

SEQ ID NO: 1584892 - DNA, 15 bp, Homo sapiens
ctcttaatattgtat

SEQ ID NO: 1584893 - DNA, 15 bp, Homo sapiens
tcttaatattgtata

SEQ ID NO: 1584894 - DNA, 15 bp, Homo sapiens
cttaatattgtatat

SEQ ID NO: 1584895 - DNA, 15 bp, Homo sapiens
ttaatattgtatatt

SEQ ID NO: 1584896 - DNA, 15 bp, Homo sapiens
taatattgtatatta

SEQ ID NO: 1584897 - DNA, 15 bp, Homo sapiens
aatattgtatattat

SEQ ID NO: 1584898 - DNA, 15 bp, Homo sapiens
atattgtatattatc

SEQ ID NO: 1584899 - DNA, 15 bp, Homo sapiens
tattgtatattatcc

SEQ ID NO: 1584900 - DNA, 15 bp, Homo sapiens
attgtatattatcca

SEQ ID NO: 1584901 - DNA, 15 bp, Homo sapiens
ttgtatattatccaa

SEQ ID NO: 1584902 - DNA, 15 bp, Homo sapiens
tgtatattatccaag

SEQ ID NO: 1584903 - DNA, 15 bp, Homo sapiens
gtatattatccaaga

SEQ ID NO: 1584904 - DNA, 15 bp, Homo sapiens
tatattatccaagaa

SEQ ID NO: 1584905 - DNA, 15 bp, Homo sapiens
atattatccaagaaa

SEQ ID NO: 1584906 - DNA, 15 bp, Homo sapiens
tattatccaagaaat

SEQ ID NO: 1584907 - DNA, 15 bp, Homo sapiens
attatccaagaaatt

SEQ ID NO: 1584908 - DNA, 15 bp, Homo sapiens
ttatccaagaaattt

SEQ ID NO: 1584909 - DNA, 15 bp, Homo sapiens
tatccaagaaatttc

SEQ ID NO: 1584910 - DNA, 15 bp, Homo sapiens
atccaagaaatttca

SEQ ID NO: 1584911 - DNA, 15 bp, Homo sapiens
tccaagaaatttcat

SEQ ID NO: 1584912 - DNA, 15 bp, Homo sapiens
ccaagaaatttcatt

SEQ ID NO: 1584913 - DNA, 15 bp, Homo sapiens
caagaaatttcattt

SEQ ID NO: 1584914 - DNA, 15 bp, Homo sapiens
aagaaatttcattta

SEQ ID NO: 1584915 - DNA, 15 bp, Homo sapiens
agaaatttcatttaa

SEQ ID NO: 1584916 - DNA, 15 bp, Homo sapiens
gaaatttcatttaat

SEQ ID NO: 1584917 - DNA, 15 bp, Homo sapiens
aaatttcatttaatc

SEQ ID NO: 1584918 - DNA, 15 bp, Homo sapiens
aatttcatttaatca

SEQ ID NO: 1584919 - DNA, 15 bp, Homo sapiens
atttcatttaatcag

SEQ ID NO: 1584920 - DNA, 15 bp, Homo sapiens
tttcatttaatcaga

SEQ ID NO: 1584921 - DNA, 15 bp, Homo sapiens
ttcatttaatcagaa

SEQ ID NO: 1584922 - DNA, 15 bp, Homo sapiens
tcatttaatcagaac

SEQ ID NO: 1584923 - DNA, 15 bp, Homo sapiens
catttaatcagaacc

SEQ ID NO: 1584924 - DNA, 15 bp, Homo sapiens
atttaatcagaacct

SEQ ID NO: 1584925 - DNA, 15 bp, Homo sapiens
tttaatcagaacctg

SEQ ID NO: 1584926 - DNA, 15 bp, Homo sapiens
ttaatcagaacctgc

SEQ ID NO: 1584927 - DNA, 15 bp, Homo sapiens
taatcagaacctgcc

SEQ ID NO: 1584928 - DNA, 15 bp, Homo sapiens
aatcagaacctgcca

SEQ ID NO: 1584929 - DNA, 15 bp, Homo sapiens
atcagaacctgccag

SEQ ID NO: 1584930 - DNA, 15 bp, Homo sapiens
tcagaacctgccagt

SEQ ID NO: 1584931 - DNA, 15 bp, Homo sapiens
cagaacctgccagtc

SEQ ID NO: 1584932 - DNA, 15 bp, Homo sapiens
agaacctgccagtct

SEQ ID NO: 1584933 - DNA, 15 bp, Homo sapiens
gaacctgccagtctg

SEQ ID NO: 1584934 - DNA, 15 bp, Homo sapiens
aacctgccagtctga

SEQ ID NO: 1584935 - DNA, 15 bp, Homo sapiens
acctgccagtctgat

SEQ ID NO: 1584936 - DNA, 15 bp, Homo sapiens
cctgccagtctgata

SEQ ID NO: 1584937 - DNA, 15 bp, Homo sapiens
ctgccagtctgatag

SEQ ID NO: 1584938 - DNA, 15 bp, Homo sapiens
tgccagtctgatagg

SEQ ID NO: 1584939 - DNA, 15 bp, Homo sapiens
gccagtctgataggt

SEQ ID NO: 1584940 - DNA, 15 bp, Homo sapiens
ccagtctgataggtg

SEQ ID NO: 1584941 - DNA, 15 bp, Homo sapiens
cagtctgataggtga

SEQ ID NO: 1584942 - DNA, 15 bp, Homo sapiens
agtctgataggtgaa

SEQ ID NO: 1584943 - DNA, 15 bp, Homo sapiens
gtctgataggtgaaa

SEQ ID NO: 1584944 - DNA, 15 bp, Homo sapiens
tctgataggtgaaaa

SEQ ID NO: 1584945 - DNA, 15 bp, Homo sapiens
ctgataggtgaaaat

SEQ ID NO: 1584946 - DNA, 15 bp, Homo sapiens
tgataggtgaaaatg

SEQ ID NO: 1584947 - DNA, 15 bp, Homo sapiens
gataggtgaaaatgg

SEQ ID NO: 1584948 - DNA, 15 bp, Homo sapiens
ataggtgaaaatggt

SEQ ID NO: 1584949 - DNA, 15 bp, Homo sapiens
taggtgaaaatggta

SEQ ID NO: 1584950 - DNA, 15 bp, Homo sapiens
aggtgaaaatggtat

SEQ ID NO: 1584951 - DNA, 15 bp, Homo sapiens
ggtgaaaatggtatc

SEQ ID NO: 1584952 - DNA, 15 bp, Homo sapiens
gtgaaaatggtatct

SEQ ID NO: 1584953 - DNA, 15 bp, Homo sapiens
tgaaaatggtatctt

SEQ ID NO: 1584954 - DNA, 15 bp, Homo sapiens
gaaaatggtatcttg

SEQ ID NO: 1584955 - DNA, 15 bp, Homo sapiens
aaaatggtatcttgt

SEQ ID NO: 1584956 - DNA, 15 bp, Homo sapiens
aaatggtatcttgtt

SEQ ID NO: 1584957 - DNA, 15 bp, Homo sapiens
aatggtatcttgttt

SEQ ID NO: 1584958 - DNA, 15 bp, Homo sapiens
atggtatcttgtttt

SEQ ID NO: 1584959 - DNA, 15 bp, Homo sapiens
tggtatcttgttttt

SEQ ID NO: 1584960 - DNA, 15 bp, Homo sapiens
ggtatcttgttttta

SEQ ID NO: 1584961 - DNA, 15 bp, Homo sapiens
gtatcttgtttttat

SEQ ID NO: 1584962 - DNA, 15 bp, Homo sapiens
tatcttgtttttatt

SEQ ID NO: 1584963 - DNA, 15 bp, Homo sapiens
atcttgtttttattt

SEQ ID NO: 1584964 - DNA, 15 bp, Homo sapiens
tcttgtttttatttg

SEQ ID NO: 1584965 - DNA, 15 bp, Homo sapiens
cttgtttttatttgc

SEQ ID NO: 1584966 - DNA, 15 bp, Homo sapiens
ttgtttttatttgca

SEQ ID NO: 1584967 - DNA, 15 bp, Homo sapiens
tgtttttatttgcat

SEQ ID NO: 1584968 - DNA, 15 bp, Homo sapiens
gtttttatttgcatt

SEQ ID NO: 1584969 - DNA, 15 bp, Homo sapiens
tttttatttgcattt

SEQ ID NO: 1584970 - DNA, 15 bp, Homo sapiens
ttttatttgcattta

SEQ ID NO: 1584971 - DNA, 15 bp, Homo sapiens
tttatttgcatttaa

SEQ ID NO: 1584972 - DNA, 15 bp, Homo sapiens
ttatttgcatttaaa

SEQ ID NO: 1584973 - DNA, 15 bp, Homo sapiens
tatttgcatttaaaa

SEQ ID NO: 1584974 - DNA, 15 bp, Homo sapiens
atttgcatttaaaaa

SEQ ID NO: 1584975 - DNA, 15 bp, Homo sapiens
tttgcatttaaaaaa

SEQ ID NO: 1584976 - DNA, 15 bp, Homo sapiens
ttgcatttaaaaaaa

SEQ ID NO: 1584977 - DNA, 15 bp, Homo sapiens
tgcatttaaaaaaaa

SEQ ID NO: 1584978 - DNA, 15 bp, Homo sapiens
gcatttaaaaaaaat

SEQ ID NO: 1584979 - DNA, 15 bp, Homo sapiens
catttaaaaaaaatt

SEQ ID NO: 1584980 - DNA, 15 bp, Homo sapiens
ttaaaaaaaattatg

SEQ ID NO: 1584981 - DNA, 15 bp, Homo sapiens
taaaaaaaattatga

SEQ ID NO: 1584982 - DNA, 15 bp, Homo sapiens
aaaaaaaattatgat

SEQ ID NO: 1584983 - DNA, 15 bp, Homo sapiens
aaaaaaattatgata

SEQ ID NO: 1584984 - DNA, 15 bp, Homo sapiens
aaaaaattatgatag

SEQ ID NO: 1584985 - DNA, 15 bp, Homo sapiens
aaaaattatgatagt

SEQ ID NO: 1584986 - DNA, 15 bp, Homo sapiens
aaaattatgatagtg

SEQ ID NO: 1584987 - DNA, 15 bp, Homo sapiens
aaattatgatagtgg

SEQ ID NO: 1584988 - DNA, 15 bp, Homo sapiens
aattatgatagtggt

SEQ ID NO: 1584989 - DNA, 15 bp, Homo sapiens
attatgatagtggta

SEQ ID NO: 1584990 - DNA, 15 bp, Homo sapiens
ttatgatagtggtat

SEQ ID NO: 1584991 - DNA, 15 bp, Homo sapiens
tatgatagtggtatg

SEQ ID NO: 1584992 - DNA, 15 bp, Homo sapiens
atgatagtggtatgc

SEQ ID NO: 1584993 - DNA, 15 bp, Homo sapiens
tgatagtggtatgct

SEQ ID NO: 1584994 - DNA, 15 bp, Homo sapiens
gatagtggtatgctt

SEQ ID NO: 1584995 - DNA, 15 bp, Homo sapiens
atagtggtatgcttg

SEQ ID NO: 1584996 - DNA, 15 bp, Homo sapiens
tagtggtatgcttgg

SEQ ID NO: 1584997 - DNA, 15 bp, Homo sapiens
agtggtatgcttggt

SEQ ID NO: 1584998 - DNA, 15 bp, Homo sapiens
gtggtatgcttggtt

SEQ ID NO: 1584999 - DNA, 15 bp, Homo sapiens
tggtatgcttggttt

SEQ ID NO: 1585000 - DNA, 15 bp, Homo sapiens
ggtatgcttggtttt

SEQ ID NO: 1585001 - DNA, 15 bp, Homo sapiens
gtatgcttggttttt

SEQ ID NO: 1585002 - DNA, 15 bp, Homo sapiens
tatgcttggtttttt

SEQ ID NO: 1585003 - DNA, 15 bp, Homo sapiens
atgcttggttttttt

SEQ ID NO: 1585004 - DNA, 15 bp, Homo sapiens
tgcttggtttttttg

SEQ ID NO: 1585005 - DNA, 15 bp, Homo sapiens
gcttggtttttttga

SEQ ID NO: 1585006 - DNA, 15 bp, Homo sapiens
cttggtttttttgaa

SEQ ID NO: 1585007 - DNA, 15 bp, Homo sapiens
ttggtttttttgaag

SEQ ID NO: 1585008 - DNA, 15 bp, Homo sapiens
tggtttttttgaagg

SEQ ID NO: 1585009 - DNA, 15 bp, Homo sapiens
ggtttttttgaaggt

SEQ ID NO: 1585010 - DNA, 15 bp, Homo sapiens
gtttttttgaaggta

SEQ ID NO: 1585011 - DNA, 15 bp, Homo sapiens
tttttttgaaggtat

SEQ ID NO: 1585012 - DNA, 15 bp, Homo sapiens
ttttttgaaggtatc

SEQ ID NO: 1585013 - DNA, 15 bp, Homo sapiens
tttttgaaggtatca

SEQ ID NO: 1585014 - DNA, 15 bp, Homo sapiens
ttttgaaggtatcaa

SEQ ID NO: 1585015 - DNA, 15 bp, Homo sapiens
tttgaaggtatcaaa

SEQ ID NO: 1585016 - DNA, 15 bp, Homo sapiens
ttgaaggtatcaaat

SEQ ID NO: 1585017 - DNA, 15 bp, Homo sapiens
tgaaggtatcaaatt

SEQ ID NO: 1585018 - DNA, 15 bp, Homo sapiens
gaaggtatcaaattt

SEQ ID NO: 1585019 - DNA, 15 bp, Homo sapiens
aaggtatcaaatttt

SEQ ID NO: 1585020 - DNA, 15 bp, Homo sapiens
aggtatcaaattttt

SEQ ID NO: 1585021 - DNA, 15 bp, Homo sapiens
ggtatcaaatttttt

SEQ ID NO: 1585022 - DNA, 15 bp, Homo sapiens
gtatcaaatttttta

SEQ ID NO: 1585023 - DNA, 15 bp, Homo sapiens
tatcaaattttttac

SEQ ID NO: 1585024 - DNA, 15 bp, Homo sapiens
atcaaattttttacc

SEQ ID NO: 1585025 - DNA, 15 bp, Homo sapiens
tcaaattttttacct

SEQ ID NO: 1585026 - DNA, 15 bp, Homo sapiens
caaattttttacctt

SEQ ID NO: 1585027 - DNA, 15 bp, Homo sapiens
aaattttttacctta

SEQ ID NO: 1585028 - DNA, 15 bp, Homo sapiens
attttttaccttatg

SEQ ID NO: 1585029 - DNA, 15 bp, Homo sapiens
ttttttaccttatga

SEQ ID NO: 1585030 - DNA, 15 bp, Homo sapiens
tttttaccttatgaa

SEQ ID NO: 1585031 - DNA, 15 bp, Homo sapiens
ttttaccttatgaaa

SEQ ID NO: 1585032 - DNA, 15 bp, Homo sapiens
tttaccttatgaaac

SEQ ID NO: 1585033 - DNA, 15 bp, Homo sapiens
ttaccttatgaaaca

SEQ ID NO: 1585034 - DNA, 15 bp, Homo sapiens
taccttatgaaacat

SEQ ID NO: 1585035 - DNA, 15 bp, Homo sapiens
accttatgaaacatg

SEQ ID NO: 1585036 - DNA, 15 bp, Homo sapiens
ccttatgaaacatga

SEQ ID NO: 1585037 - DNA, 15 bp, Homo sapiens
cttatgaaacatgag

SEQ ID NO: 1585038 - DNA, 15 bp, Homo sapiens
ttatgaaacatgagg

SEQ ID NO: 1585039 - DNA, 15 bp, Homo sapiens
tatgaaacatgaggg

SEQ ID NO: 1585040 - DNA, 15 bp, Homo sapiens
atgaaacatgagggc

SEQ ID NO: 1585041 - DNA, 15 bp, Homo sapiens
tgaaacatgagggca

SEQ ID NO: 1585042 - DNA, 15 bp, Homo sapiens
gaaacatgagggcaa

SEQ ID NO: 1585043 - DNA, 15 bp, Homo sapiens
aaacatgagggcaaa

SEQ ID NO: 1585044 - DNA, 15 bp, Homo sapiens
aacatgagggcaaag

SEQ ID NO: 1585045 - DNA, 15 bp, Homo sapiens
acatgagggcaaagg

SEQ ID NO: 1585046 - DNA, 15 bp, Homo sapiens
catgagggcaaagga

SEQ ID NO: 1585047 - DNA, 15 bp, Homo sapiens
atgagggcaaaggat

SEQ ID NO: 1585048 - DNA, 15 bp, Homo sapiens
tgagggcaaaggatg

SEQ ID NO: 1585049 - DNA, 15 bp, Homo sapiens
gagggcaaaggatgt

SEQ ID NO: 1585050 - DNA, 15 bp, Homo sapiens
agggcaaaggatgtg

SEQ ID NO: 1585051 - DNA, 15 bp, Homo sapiens
gggcaaaggatgtgt

SEQ ID NO: 1585052 - DNA, 15 bp, Homo sapiens
ggcaaaggatgtgtt

SEQ ID NO: 1585053 - DNA, 15 bp, Homo sapiens
gcaaaggatgtgtta

SEQ ID NO: 1585054 - DNA, 15 bp, Homo sapiens
caaaggatgtgttac

SEQ ID NO: 1585055 - DNA, 15 bp, Homo sapiens
aaaggatgtgttacg

SEQ ID NO: 1585056 - DNA, 15 bp, Homo sapiens
aaggatgtgttacgt

SEQ ID NO: 1585057 - DNA, 15 bp, Homo sapiens
aggatgtgttacgtg

SEQ ID NO: 1585058 - DNA, 15 bp, Homo sapiens
ggatgtgttacgtgg

SEQ ID NO: 1585059 - DNA, 15 bp, Homo sapiens
gatgtgttacgtgga

SEQ ID NO: 1585060 - DNA, 15 bp, Homo sapiens
atgtgttacgtggaa

SEQ ID NO: 1585061 - DNA, 15 bp, Homo sapiens
tgtgttacgtggaag

SEQ ID NO: 1585062 - DNA, 15 bp, Homo sapiens
gtgttacgtggaaga

SEQ ID NO: 1585063 - DNA, 15 bp, Homo sapiens
tgttacgtggaagat

SEQ ID NO: 1585064 - DNA, 15 bp, Homo sapiens
gttacgtggaagatt

SEQ ID NO: 1585065 - DNA, 15 bp, Homo sapiens
ttacgtggaagattt

SEQ ID NO: 1585066 - DNA, 15 bp, Homo sapiens
tacgtggaagattta

SEQ ID NO: 1585067 - DNA, 15 bp, Homo sapiens
acgtggaagatttaa

SEQ ID NO: 1585068 - DNA, 15 bp, Homo sapiens
cgtggaagatttaaa

SEQ ID NO: 1585069 - DNA, 15 bp, Homo sapiens
gtggaagatttaaaa

SEQ ID NO: 1585070 - DNA, 15 bp, Homo sapiens
tggaagatttaaaaa

SEQ ID NO: 1585071 - DNA, 15 bp, Homo sapiens
ggaagatttaaaaaa

SEQ ID NO: 1585072 - DNA, 15 bp, Homo sapiens
gaagatttaaaaaaa

SEQ ID NO: 1585073 - DNA, 15 bp, Homo sapiens
aagatttaaaaaaaa

SEQ ID NO: 1585074 - DNA, 15 bp, Homo sapiens
agatttaaaaaaaat

SEQ ID NO: 1585075 - DNA, 15 bp, Homo sapiens
gatttaaaaaaaatt

SEQ ID NO: 1585076 - DNA, 15 bp, Homo sapiens
atttaaaaaaaattt

SEQ ID NO: 1585077 - DNA, 15 bp, Homo sapiens
tttaaaaaaaatttt

SEQ ID NO: 1585078 - DNA, 15 bp, Homo sapiens
ttaaaaaaaattttt

SEQ ID NO: 1585079 - DNA, 15 bp, Homo sapiens
aaaaaaatttttaat

SEQ ID NO: 1585080 - DNA, 15 bp, Homo sapiens
aaaaaatttttaatg

SEQ ID NO: 1585081 - DNA, 15 bp, Homo sapiens
aaaaatttttaatgc

SEQ ID NO: 1585082 - DNA, 15 bp, Homo sapiens
aaaatttttaatgca

SEQ ID NO: 1585083 - DNA, 15 bp, Homo sapiens
aaatttttaatgcat

SEQ ID NO: 1585084 - DNA, 15 bp, Homo sapiens
aatttttaatgcatt

SEQ ID NO: 1585085 - DNA, 15 bp, Homo sapiens
atttttaatgcattt

SEQ ID NO: 1585086 - DNA, 15 bp, Homo sapiens
tttttaatgcatttt

SEQ ID NO: 1585087 - DNA, 15 bp, Homo sapiens
ttttaatgcattttt

SEQ ID NO: 1585088 - DNA, 15 bp, Homo sapiens
tttaatgcatttttt

SEQ ID NO: 1585089 - DNA, 15 bp, Homo sapiens
ttaatgcattttttt

SEQ ID NO: 1585090 - DNA, 15 bp, Homo sapiens
taatgcatttttttg

SEQ ID NO: 1585091 - DNA, 15 bp, Homo sapiens
aatgcatttttttga

SEQ ID NO: 1585092 - DNA, 15 bp, Homo sapiens
atgcatttttttgag

SEQ ID NO: 1585093 - DNA, 15 bp, Homo sapiens
tgcatttttttgaga

SEQ ID NO: 1585094 - DNA, 15 bp, Homo sapiens
gcatttttttgagac

SEQ ID NO: 1585095 - DNA, 15 bp, Homo sapiens
catttttttgagaca

SEQ ID NO: 1585096 - DNA, 15 bp, Homo sapiens
tgagacaaggtcttg

SEQ ID NO: 1585097 - DNA, 15 bp, Homo sapiens
gagacaaggtcttgc

SEQ ID NO: 1585098 - DNA, 15 bp, Homo sapiens
agacaaggtcttgct

SEQ ID NO: 1585099 - DNA, 15 bp, Homo sapiens
gacaaggtcttgctc

SEQ ID NO: 1585100 - DNA, 15 bp, Homo sapiens
acaaggtcttgctct

SEQ ID NO: 1585101 - DNA, 15 bp, Homo sapiens
caaggtcttgctcta

SEQ ID NO: 1585102 - DNA, 15 bp, Homo sapiens
aaggtcttgctctat

SEQ ID NO: 1585103 - DNA, 15 bp, Homo sapiens
aggtcttgctctatt

SEQ ID NO: 1585104 - DNA, 15 bp, Homo sapiens
ggtcttgctctattg

SEQ ID NO: 1585105 - DNA, 15 bp, Homo sapiens
gtcttgctctattgt

SEQ ID NO: 1585106 - DNA, 15 bp, Homo sapiens
tcttgctctattgtc

SEQ ID NO: 1585107 - DNA, 15 bp, Homo sapiens
cttgctctattgtcc

SEQ ID NO: 1585108 - DNA, 15 bp, Homo sapiens
ttgctctattgtcca

SEQ ID NO: 1585109 - DNA, 15 bp, Homo sapiens
tgctctattgtccag

SEQ ID NO: 1585110 - DNA, 15 bp, Homo sapiens
gctctattgtccagg

SEQ ID NO: 1585111 - DNA, 15 bp, Homo sapiens
ctctattgtccaggc

SEQ ID NO: 1585112 - DNA, 15 bp, Homo sapiens
tctattgtccaggct

SEQ ID NO: 1585113 - DNA, 15 bp, Homo sapiens
ctattgtccaggctg

SEQ ID NO: 1585114 - DNA, 15 bp, Homo sapiens
tattgtccaggctgg

SEQ ID NO: 1585115 - DNA, 15 bp, Homo sapiens
attgtccaggctgga

SEQ ID NO: 1585116 - DNA, 15 bp, Homo sapiens
ttgtccaggctggag

SEQ ID NO: 1585117 - DNA, 15 bp, Homo sapiens
tgtccaggctggagt

SEQ ID NO: 1585118 - DNA, 15 bp, Homo sapiens
agtggcacaatcaca

SEQ ID NO: 1585119 - DNA, 15 bp, Homo sapiens
gtggcacaatcacag

SEQ ID NO: 1585120 - DNA, 15 bp, Homo sapiens
tggcacaatcacagt

SEQ ID NO: 1585121 - DNA, 15 bp, Homo sapiens
ggcacaatcacagtt

SEQ ID NO: 1585122 - DNA, 15 bp, Homo sapiens
gcacaatcacagttc

SEQ ID NO: 1585123 - DNA, 15 bp, Homo sapiens
cacaatcacagttca

SEQ ID NO: 1585124 - DNA, 15 bp, Homo sapiens
acaatcacagttcac

SEQ ID NO: 1585125 - DNA, 15 bp, Homo sapiens
caatcacagttcact

SEQ ID NO: 1585126 - DNA, 15 bp, Homo sapiens
aatcacagttcactc

SEQ ID NO: 1585127 - DNA, 15 bp, Homo sapiens
atcacagttcactcc

SEQ ID NO: 1585128 - DNA, 15 bp, Homo sapiens
tcacagttcactcca

SEQ ID NO: 1585129 - DNA, 15 bp, Homo sapiens
cacagttcactccag

SEQ ID NO: 1585130 - DNA, 15 bp, Homo sapiens
acagttcactccagc

SEQ ID NO: 1585131 - DNA, 15 bp, Homo sapiens
cagttcactccagcc

SEQ ID NO: 1585132 - DNA, 15 bp, Homo sapiens
agttcactccagcct

SEQ ID NO: 1585133 - DNA, 15 bp, Homo sapiens
gttcactccagcctc

SEQ ID NO: 1585134 - DNA, 15 bp, Homo sapiens
ttcactccagcctca

SEQ ID NO: 1585135 - DNA, 15 bp, Homo sapiens
tcactccagcctcaa

SEQ ID NO: 1585136 - DNA, 15 bp, Homo sapiens
cactccagcctcaac

SEQ ID NO: 1585137 - DNA, 15 bp, Homo sapiens
actccagcctcaaca

SEQ ID NO: 1585138 - DNA, 15 bp, Homo sapiens
ctccagcctcaacat

SEQ ID NO: 1585139 - DNA, 15 bp, Homo sapiens
tccagcctcaacatc

SEQ ID NO: 1585140 - DNA, 15 bp, Homo sapiens
ccagcctcaacatcc

SEQ ID NO: 1585141 - DNA, 15 bp, Homo sapiens
cagcctcaacatcct

SEQ ID NO: 1585142 - DNA, 15 bp, Homo sapiens
agcctcaacatcctg

SEQ ID NO: 1585143 - DNA, 15 bp, Homo sapiens
gcctcaacatcctgc

SEQ ID NO: 1585144 - DNA, 15 bp, Homo sapiens
cctcaacatcctgca

SEQ ID NO: 1585145 - DNA, 15 bp, Homo sapiens
ctcaacatcctgcac

SEQ ID NO: 1585146 - DNA, 15 bp, Homo sapiens
tcaacatcctgcact

SEQ ID NO: 1585147 - DNA, 15 bp, Homo sapiens
caacatcctgcacta

SEQ ID NO: 1585148 - DNA, 15 bp, Homo sapiens
aacatcctgcactaa

SEQ ID NO: 1585149 - DNA, 15 bp, Homo sapiens
acatcctgcactaaa

SEQ ID NO: 1585150 - DNA, 15 bp, Homo sapiens
catcctgcactaaag

SEQ ID NO: 1585151 - DNA, 15 bp, Homo sapiens
atcctgcactaaagt

SEQ ID NO: 1585152 - DNA, 15 bp, Homo sapiens
tcctgcactaaagtg

SEQ ID NO: 1585153 - DNA, 15 bp, Homo sapiens
cctgcactaaagtga

SEQ ID NO: 1585154 - DNA, 15 bp, Homo sapiens
ctgcactaaagtgat

SEQ ID NO: 1585155 - DNA, 15 bp, Homo sapiens
tgcactaaagtgatt

SEQ ID NO: 1585156 - DNA, 15 bp, Homo sapiens
gcactaaagtgattt

SEQ ID NO: 1585157 - DNA, 15 bp, Homo sapiens
cactaaagtgatttt

SEQ ID NO: 1585158 - DNA, 15 bp, Homo sapiens
actaaagtgattttc

SEQ ID NO: 1585159 - DNA, 15 bp, Homo sapiens
ctaaagtgattttcc

SEQ ID NO: 1585160 - DNA, 15 bp, Homo sapiens
taaagtgattttccc

SEQ ID NO: 1585161 - DNA, 15 bp, Homo sapiens
aaagtgattttccca

SEQ ID NO: 1585162 - DNA, 15 bp, Homo sapiens
aagtgattttcccac

SEQ ID NO: 1585163 - DNA, 15 bp, Homo sapiens
agtgattttcccacc

SEQ ID NO: 1585164 - DNA, 15 bp, Homo sapiens
gtgattttcccacct

SEQ ID NO: 1585165 - DNA, 15 bp, Homo sapiens
tgattttcccacctc

SEQ ID NO: 1585166 - DNA, 15 bp, Homo sapiens
gattttcccacctca

SEQ ID NO: 1585167 - DNA, 15 bp, Homo sapiens
attttcccacctcac

SEQ ID NO: 1585168 - DNA, 15 bp, Homo sapiens
ttttcccacctcacc

SEQ ID NO: 1585169 - DNA, 15 bp, Homo sapiens
ttcccacctcacctc

SEQ ID NO: 1585170 - DNA, 15 bp, Homo sapiens
tcccacctcacctct

SEQ ID NO: 1585171 - DNA, 15 bp, Homo sapiens
cccacctcacctctc

SEQ ID NO: 1585172 - DNA, 15 bp, Homo sapiens
ccacctcacctctca

SEQ ID NO: 1585173 - DNA, 15 bp, Homo sapiens
cacctcacctctcaa

SEQ ID NO: 1585174 - DNA, 15 bp, Homo sapiens
acctcacctctcaag

SEQ ID NO: 1585175 - DNA, 15 bp, Homo sapiens
cctcacctctcaagt

SEQ ID NO: 1585176 - DNA, 15 bp, Homo sapiens
ctcacctctcaagta

SEQ ID NO: 1585177 - DNA, 15 bp, Homo sapiens
tcacctctcaagtag

SEQ ID NO: 1585178 - DNA, 15 bp, Homo sapiens
cacctctcaagtagc

SEQ ID NO: 1585179 - DNA, 15 bp, Homo sapiens
acctctcaagtagct

SEQ ID NO: 1585180 - DNA, 15 bp, Homo sapiens
gggactacaggtaca

SEQ ID NO: 1585181 - DNA, 15 bp, Homo sapiens
ggactacaggtacat

SEQ ID NO: 1585182 - DNA, 15 bp, Homo sapiens
gactacaggtacatg

SEQ ID NO: 1585183 - DNA, 15 bp, Homo sapiens
actacaggtacatgc

SEQ ID NO: 1585184 - DNA, 15 bp, Homo sapiens
ctacaggtacatgct

SEQ ID NO: 1585185 - DNA, 15 bp, Homo sapiens
tacaggtacatgcta

SEQ ID NO: 1585186 - DNA, 15 bp, Homo sapiens
acaggtacatgctac

SEQ ID NO: 1585187 - DNA, 15 bp, Homo sapiens
caggtacatgctacc

SEQ ID NO: 1585188 - DNA, 15 bp, Homo sapiens
aggtacatgctacca

SEQ ID NO: 1585189 - DNA, 15 bp, Homo sapiens
ggtacatgctaccat

SEQ ID NO: 1585190 - DNA, 15 bp, Homo sapiens
gtacatgctaccatg

SEQ ID NO: 1585191 - DNA, 15 bp, Homo sapiens
tacatgctaccatgc

SEQ ID NO: 1585192 - DNA, 15 bp, Homo sapiens
acatgctaccatgcc

SEQ ID NO: 1585193 - DNA, 15 bp, Homo sapiens
catgctaccatgcct

SEQ ID NO: 1585194 - DNA, 15 bp, Homo sapiens
atgctaccatgcctg

SEQ ID NO: 1585195 - DNA, 15 bp, Homo sapiens
ttttttttttttgca

SEQ ID NO: 1585196 - DNA, 15 bp, Homo sapiens
tttttttttttgcag

SEQ ID NO: 1585197 - DNA, 15 bp, Homo sapiens
ttttttttttgcagg

SEQ ID NO: 1585198 - DNA, 15 bp, Homo sapiens
tttttttttgcaggc

SEQ ID NO: 1585199 - DNA, 15 bp, Homo sapiens
ttttttttgcaggca

SEQ ID NO: 1585200 - DNA, 15 bp, Homo sapiens
tttttttgcaggcat

SEQ ID NO: 1585201 - DNA, 15 bp, Homo sapiens
ttttttgcaggcatg

SEQ ID NO: 1585202 - DNA, 15 bp, Homo sapiens
tttttgcaggcatgg

SEQ ID NO: 1585203 - DNA, 15 bp, Homo sapiens
ttttgcaggcatggg

SEQ ID NO: 1585204 - DNA, 15 bp, Homo sapiens
tttgcaggcatgggg

SEQ ID NO: 1585205 - DNA, 15 bp, Homo sapiens
ttgcaggcatggggt

SEQ ID NO: 1585206 - DNA, 15 bp, Homo sapiens
tgcaggcatggggtc

SEQ ID NO: 1585207 - DNA, 15 bp, Homo sapiens
gcaggcatggggtct

SEQ ID NO: 1585208 - DNA, 15 bp, Homo sapiens
caggcatggggtctc

SEQ ID NO: 1585209 - DNA, 15 bp, Homo sapiens
aggcatggggtctca

SEQ ID NO: 1585210 - DNA, 15 bp, Homo sapiens
ggcatggggtctcac

SEQ ID NO: 1585211 - DNA, 15 bp, Homo sapiens
gcatggggtctcact

SEQ ID NO: 1585212 - DNA, 15 bp, Homo sapiens
catggggtctcactg

SEQ ID NO: 1585213 - DNA, 15 bp, Homo sapiens
atggggtctcactgt

SEQ ID NO: 1585214 - DNA, 15 bp, Homo sapiens
tggggtctcactgta

SEQ ID NO: 1585215 - DNA, 15 bp, Homo sapiens
ggggtctcactgtat

SEQ ID NO: 1585216 - DNA, 15 bp, Homo sapiens
gggtctcactgtatt

SEQ ID NO: 1585217 - DNA, 15 bp, Homo sapiens
ggtctcactgtattg

SEQ ID NO: 1585218 - DNA, 15 bp, Homo sapiens
gtctcactgtattgc

SEQ ID NO: 1585219 - DNA, 15 bp, Homo sapiens
tctcactgtattgcc

SEQ ID NO: 1585220 - DNA, 15 bp, Homo sapiens
ctcactgtattgccc

SEQ ID NO: 1585221 - DNA, 15 bp, Homo sapiens
tcactgtattgccca

SEQ ID NO: 1585222 - DNA, 15 bp, Homo sapiens
cactgtattgcccag

SEQ ID NO: 1585223 - DNA, 15 bp, Homo sapiens
ctgtattgcccaggt

SEQ ID NO: 1585224 - DNA, 15 bp, Homo sapiens
tgtattgcccaggtt

SEQ ID NO: 1585225 - DNA, 15 bp, Homo sapiens
gtattgcccaggttg

SEQ ID NO: 1585226 - DNA, 15 bp, Homo sapiens
tattgcccaggttgg

SEQ ID NO: 1585227 - DNA, 15 bp, Homo sapiens
attgcccaggttggt

SEQ ID NO: 1585228 - DNA, 15 bp, Homo sapiens
ttgcccaggttggtg

SEQ ID NO: 1585229 - DNA, 15 bp, Homo sapiens
tgcccaggttggtgt

SEQ ID NO: 1585230 - DNA, 15 bp, Homo sapiens
gcccaggttggtgtg

SEQ ID NO: 1585231 - DNA, 15 bp, Homo sapiens
cccaggttggtgtgg

SEQ ID NO: 1585232 - DNA, 15 bp, Homo sapiens
ccaggttggtgtgga

SEQ ID NO: 1585233 - DNA, 15 bp, Homo sapiens
caggttggtgtggaa

SEQ ID NO: 1585234 - DNA, 15 bp, Homo sapiens
aggttggtgtggaag

SEQ ID NO: 1585235 - DNA, 15 bp, Homo sapiens
ggttggtgtggaagt

SEQ ID NO: 1585236 - DNA, 15 bp, Homo sapiens
gttggtgtggaagtt

SEQ ID NO: 1585237 - DNA, 15 bp, Homo sapiens
ttggtgtggaagttt

SEQ ID NO: 1585238 - DNA, 15 bp, Homo sapiens
tggtgtggaagttta

SEQ ID NO: 1585239 - DNA, 15 bp, Homo sapiens
ggtgtggaagtttaa

SEQ ID NO: 1585240 - DNA, 15 bp, Homo sapiens
gtgtggaagtttaat

SEQ ID NO: 1585241 - DNA, 15 bp, Homo sapiens
tgtggaagtttaatg

SEQ ID NO: 1585242 - DNA, 15 bp, Homo sapiens
gtggaagtttaatga

SEQ ID NO: 1585243 - DNA, 15 bp, Homo sapiens
tggaagtttaatgac

SEQ ID NO: 1585244 - DNA, 15 bp, Homo sapiens
ggaagtttaatgact

SEQ ID NO: 1585245 - DNA, 15 bp, Homo sapiens
gaagtttaatgacta

SEQ ID NO: 1585246 - DNA, 15 bp, Homo sapiens
aagtttaatgactaa

SEQ ID NO: 1585247 - DNA, 15 bp, Homo sapiens
agtttaatgactaag

SEQ ID NO: 1585248 - DNA, 15 bp, Homo sapiens
gtttaatgactaaga

SEQ ID NO: 1585249 - DNA, 15 bp, Homo sapiens
tttaatgactaagag

SEQ ID NO: 1585250 - DNA, 15 bp, Homo sapiens
ttaatgactaagagg

SEQ ID NO: 1585251 - DNA, 15 bp, Homo sapiens
taatgactaagaggt

SEQ ID NO: 1585252 - DNA, 15 bp, Homo sapiens
aatgactaagaggtg

SEQ ID NO: 1585253 - DNA, 15 bp, Homo sapiens
atgactaagaggtgt

SEQ ID NO: 1585254 - DNA, 15 bp, Homo sapiens
tgactaagaggtgtt

SEQ ID NO: 1585255 - DNA, 15 bp, Homo sapiens
gactaagaggtgttt

SEQ ID NO: 1585256 - DNA, 15 bp, Homo sapiens
actaagaggtgtttg

SEQ ID NO: 1585257 - DNA, 15 bp, Homo sapiens
ctaagaggtgtttgt

SEQ ID NO: 1585258 - DNA, 15 bp, Homo sapiens
taagaggtgtttgtt

SEQ ID NO: 1585259 - DNA, 15 bp, Homo sapiens
aagaggtgtttgtta

SEQ ID NO: 1585260 - DNA, 15 bp, Homo sapiens
gaggtgtttgttata

SEQ ID NO: 1585261 - DNA, 15 bp, Homo sapiens
aggtgtttgttataa

SEQ ID NO: 1585262 - DNA, 15 bp, Homo sapiens
ggtgtttgttataaa

SEQ ID NO: 1585263 - DNA, 15 bp, Homo sapiens
gtgtttgttataaag

SEQ ID NO: 1585264 - DNA, 15 bp, Homo sapiens
tgtttgttataaagt

SEQ ID NO: 1585265 - DNA, 15 bp, Homo sapiens
gtttgttataaagtt

SEQ ID NO: 1585266 - DNA, 15 bp, Homo sapiens
tgttataaagtttaa

SEQ ID NO: 1585267 - DNA, 15 bp, Homo sapiens
gttataaagtttaat

SEQ ID NO: 1585268 - DNA, 15 bp, Homo sapiens
ttataaagtttaatg

SEQ ID NO: 1585269 - DNA, 15 bp, Homo sapiens
tataaagtttaatgt

SEQ ID NO: 1585270 - DNA, 15 bp, Homo sapiens
ataaagtttaatgta

SEQ ID NO: 1585271 - DNA, 15 bp, Homo sapiens
taaagtttaatgtat

SEQ ID NO: 1585272 - DNA, 15 bp, Homo sapiens
aaagtttaatgtatg

SEQ ID NO: 1585273 - DNA, 15 bp, Homo sapiens
aagtttaatgtatga

SEQ ID NO: 1585274 - DNA, 15 bp, Homo sapiens
agtttaatgtatgaa

SEQ ID NO: 1585275 - DNA, 15 bp, Homo sapiens
gtttaatgtatgaaa

SEQ ID NO: 1585276 - DNA, 15 bp, Homo sapiens
tttaatgtatgaaac

SEQ ID NO: 1585277 - DNA, 15 bp, Homo sapiens
ttaatgtatgaaact

SEQ ID NO: 1585278 - DNA, 15 bp, Homo sapiens
taatgtatgaaactt

SEQ ID NO: 1585279 - DNA, 15 bp, Homo sapiens
aatgtatgaaacttt

SEQ ID NO: 1585280 - DNA, 15 bp, Homo sapiens
atgtatgaaactttc

SEQ ID NO: 1585281 - DNA, 15 bp, Homo sapiens
tgtatgaaactttct

SEQ ID NO: 1585282 - DNA, 15 bp, Homo sapiens
gtatgaaactttcta

SEQ ID NO: 1585283 - DNA, 15 bp, Homo sapiens
tatgaaactttctat

SEQ ID NO: 1585284 - DNA, 15 bp, Homo sapiens
atgaaactttctatt

SEQ ID NO: 1585285 - DNA, 15 bp, Homo sapiens
tgaaactttctatta

SEQ ID NO: 1585286 - DNA, 15 bp, Homo sapiens
gaaactttctattaa

SEQ ID NO: 1585287 - DNA, 15 bp, Homo sapiens
aaactttctattaaa

SEQ ID NO: 1585288 - DNA, 15 bp, Homo sapiens
aactttctattaaat

SEQ ID NO: 1585289 - DNA, 15 bp, Homo sapiens
actttctattaaatt

SEQ ID NO: 1585290 - DNA, 15 bp, Homo sapiens
ctttctattaaattc

SEQ ID NO: 1585291 - DNA, 15 bp, Homo sapiens
tttctattaaattcc

SEQ ID NO: 1585292 - DNA, 15 bp, Homo sapiens
ttctattaaattcct

SEQ ID NO: 1585293 - DNA, 15 bp, Homo sapiens
tctattaaattcctg

SEQ ID NO: 1585294 - DNA, 15 bp, Homo sapiens
ctattaaattcctga

SEQ ID NO: 1585295 - DNA, 15 bp, Homo sapiens
tattaaattcctgat

SEQ ID NO: 1585296 - DNA, 15 bp, Homo sapiens
attaaattcctgatt

SEQ ID NO: 1585297 - DNA, 15 bp, Homo sapiens
ttaaattcctgattt

SEQ ID NO: 1585298 - DNA, 15 bp, Homo sapiens
taaattcctgatttt

SEQ ID NO: 1585299 - DNA, 15 bp, Homo sapiens
aaattcctgatttta

SEQ ID NO: 1585300 - DNA, 15 bp, Homo sapiens
aattcctgattttat

SEQ ID NO: 1585301 - DNA, 15 bp, Homo sapiens
tcctgattttatttc

SEQ ID NO: 1585302 - DNA, 15 bp, Homo sapiens
cctgattttatttct

SEQ ID NO: 1585303 - DNA, 15 bp, Homo sapiens
ctgattttatttctg

SEQ ID NO: 1585304 - DNA, 15 bp, Homo sapiens
tgattttatttctgt

SEQ ID NO: 1585305 - DNA, 15 bp, Homo sapiens
gattttatttctgta

SEQ ID NO: 1585306 - DNA, 15 bp, Homo sapiens
attttatttctgtag

SEQ ID NO: 1585307 - DNA, 15 bp, Homo sapiens
ttttatttctgtagg

SEQ ID NO: 1585308 - DNA, 15 bp, Homo sapiens
tttatttctgtagga

SEQ ID NO: 1585309 - DNA, 15 bp, Homo sapiens
ttatttctgtaggac

SEQ ID NO: 1585310 - DNA, 15 bp, Homo sapiens
tatttctgtaggact

SEQ ID NO: 1585311 - DNA, 15 bp, Homo sapiens
atttctgtaggactg

SEQ ID NO: 1585312 - DNA, 15 bp, Homo sapiens
tttctgtaggactga

SEQ ID NO: 1585313 - DNA, 15 bp, Homo sapiens
ttctgtaggactgaa

SEQ ID NO: 1585314 - DNA, 15 bp, Homo sapiens
tctgtaggactgaac

SEQ ID NO: 1585315 - DNA, 15 bp, Homo sapiens
ctgtaggactgaacg

SEQ ID NO: 1585316 - DNA, 15 bp, Homo sapiens
tgtaggactgaacgt

SEQ ID NO: 1585317 - DNA, 15 bp, Homo sapiens
gtaggactgaacgtc

SEQ ID NO: 1585318 - DNA, 15 bp, Homo sapiens
taggactgaacgtct

SEQ ID NO: 1585319 - DNA, 15 bp, Homo sapiens
aggactgaacgtctt

SEQ ID NO: 1585320 - DNA, 15 bp, Homo sapiens
ggactgaacgtcttg

SEQ ID NO: 1585321 - DNA, 15 bp, Homo sapiens
gactgaacgtcttgc

SEQ ID NO: 1585322 - DNA, 15 bp, Homo sapiens
actgaacgtcttgct

SEQ ID NO: 1585323 - DNA, 15 bp, Homo sapiens
ctgaacgtcttgctc

SEQ ID NO: 1585324 - DNA, 15 bp, Homo sapiens
tgaacgtcttgctcg

SEQ ID NO: 1585325 - DNA, 15 bp, Homo sapiens
gaacgtcttgctcga

SEQ ID NO: 1585326 - DNA, 15 bp, Homo sapiens
aacgtcttgctcgag

SEQ ID NO: 1585327 - DNA, 15 bp, Homo sapiens
acgtcttgctcgaga

SEQ ID NO: 1585328 - DNA, 15 bp, Homo sapiens
cgtcttgctcgagat

SEQ ID NO: 1585329 - DNA, 15 bp, Homo sapiens
gtcttgctcgagatg

SEQ ID NO: 1585330 - DNA, 15 bp, Homo sapiens
tcttgctcgagatgt

SEQ ID NO: 1585331 - DNA, 15 bp, Homo sapiens
cttgctcgagatgtg

SEQ ID NO: 1585332 - DNA, 15 bp, Homo sapiens
ttgctcgagatgtga

SEQ ID NO: 1585333 - DNA, 15 bp, Homo sapiens
tgctcgagatgtgat

SEQ ID NO: 1585334 - DNA, 15 bp, Homo sapiens
gctcgagatgtgatg

SEQ ID NO: 1585335 - DNA, 15 bp, Homo sapiens
ctcgagatgtgatga

SEQ ID NO: 1585336 - DNA, 15 bp, Homo sapiens
tcgagatgtgatgaa

SEQ ID NO: 1585337 - DNA, 15 bp, Homo sapiens
cgagatgtgatgaag

SEQ ID NO: 1585338 - DNA, 15 bp, Homo sapiens
gagatgtgatgaagg

SEQ ID NO: 1585339 - DNA, 15 bp, Homo sapiens
agatgtgatgaagga

SEQ ID NO: 1585340 - DNA, 15 bp, Homo sapiens
gatgtgatgaaggag

SEQ ID NO: 1585341 - DNA, 15 bp, Homo sapiens
atgtgatgaaggaga

SEQ ID NO: 1585342 - DNA, 15 bp, Homo sapiens
tgtgatgaaggagat

SEQ ID NO: 1585343 - DNA, 15 bp, Homo sapiens
gtgatgaaggagatg

SEQ ID NO: 1585344 - DNA, 15 bp, Homo sapiens
tgatgaaggagatgg

SEQ ID NO: 1585345 - DNA, 15 bp, Homo sapiens
gatgaaggagatggg

SEQ ID NO: 1585346 - DNA, 15 bp, Homo sapiens
atgaaggagatggga

SEQ ID NO: 1585347 - DNA, 15 bp, Homo sapiens
tgaaggagatgggag

SEQ ID NO: 1585348 - DNA, 15 bp, Homo sapiens
gaaggagatgggagg

SEQ ID NO: 1585349 - DNA, 15 bp, Homo sapiens
aaggagatgggaggc

SEQ ID NO: 1585350 - DNA, 15 bp, Homo sapiens
aggagatgggaggcc

SEQ ID NO: 1585351 - DNA, 15 bp, Homo sapiens
ggagatgggaggcca

SEQ ID NO: 1585352 - DNA, 15 bp, Homo sapiens
gagatgggaggccat

SEQ ID NO: 1585353 - DNA, 15 bp, Homo sapiens
agatgggaggccatc

SEQ ID NO: 1585354 - DNA, 15 bp, Homo sapiens
gatgggaggccatca

SEQ ID NO: 1585355 - DNA, 15 bp, Homo sapiens
atgggaggccatcac

SEQ ID NO: 1585356 - DNA, 15 bp, Homo sapiens
tgggaggccatcaca

SEQ ID NO: 1585357 - DNA, 15 bp, Homo sapiens
gggaggccatcacat

SEQ ID NO: 1585358 - DNA, 15 bp, Homo sapiens
ggaggccatcacatt

SEQ ID NO: 1585359 - DNA, 15 bp, Homo sapiens
gaggccatcacattg

SEQ ID NO: 1585360 - DNA, 15 bp, Homo sapiens
aggccatcacattgt

SEQ ID NO: 1585361 - DNA, 15 bp, Homo sapiens
ggccatcacattgta

SEQ ID NO: 1585362 - DNA, 15 bp, Homo sapiens
gccatcacattgtag

SEQ ID NO: 1585363 - DNA, 15 bp, Homo sapiens
ccatcacattgtagc

SEQ ID NO: 1585364 - DNA, 15 bp, Homo sapiens
catcacattgtagcc

SEQ ID NO: 1585365 - DNA, 15 bp, Homo sapiens
atcacattgtagccc

SEQ ID NO: 1585366 - DNA, 15 bp, Homo sapiens
tcacattgtagccct

SEQ ID NO: 1585367 - DNA, 15 bp, Homo sapiens
cacattgtagccctc

SEQ ID NO: 1585368 - DNA, 15 bp, Homo sapiens
acattgtagccctct

SEQ ID NO: 1585369 - DNA, 15 bp, Homo sapiens
cattgtagccctctg

SEQ ID NO: 1585370 - DNA, 15 bp, Homo sapiens
attgtagccctctgt

SEQ ID NO: 1585371 - DNA, 15 bp, Homo sapiens
ttgtagccctctgtg

SEQ ID NO: 1585372 - DNA, 15 bp, Homo sapiens
tgtagccctctgtgt

SEQ ID NO: 1585373 - DNA, 15 bp, Homo sapiens
gtagccctctgtgtg

SEQ ID NO: 1585374 - DNA, 15 bp, Homo sapiens
tagccctctgtgtgc

SEQ ID NO: 1585375 - DNA, 15 bp, Homo sapiens
agccctctgtgtgct

SEQ ID NO: 1585376 - DNA, 15 bp, Homo sapiens
gccctctgtgtgctc

SEQ ID NO: 1585377 - DNA, 15 bp, Homo sapiens
ccctctgtgtgctca

SEQ ID NO: 1585378 - DNA, 15 bp, Homo sapiens
cctctgtgtgctcaa

SEQ ID NO: 1585379 - DNA, 15 bp, Homo sapiens
ctctgtgtgctcaag

SEQ ID NO: 1585380 - DNA, 15 bp, Homo sapiens
tctgtgtgctcaagg

SEQ ID NO: 1585381 - DNA, 15 bp, Homo sapiens
ctgtgtgctcaaggg

SEQ ID NO: 1585382 - DNA, 15 bp, Homo sapiens
tgtgtgctcaagggg

SEQ ID NO: 1585383 - DNA, 15 bp, Homo sapiens
gtgtgctcaaggggg

SEQ ID NO: 1585384 - DNA, 15 bp, Homo sapiens
tgtgctcaagggggg

SEQ ID NO: 1585385 - DNA, 15 bp, Homo sapiens
gtgctcaaggggggc

SEQ ID NO: 1585386 - DNA, 15 bp, Homo sapiens
tgctcaaggggggct

SEQ ID NO: 1585387 - DNA, 15 bp, Homo sapiens
gctcaaggggggcta

SEQ ID NO: 1585388 - DNA, 15 bp, Homo sapiens
ctcaaggggggctat

SEQ ID NO: 1585389 - DNA, 15 bp, Homo sapiens
tcaaggggggctata

SEQ ID NO: 1585390 - DNA, 15 bp, Homo sapiens
caaggggggctataa

SEQ ID NO: 1585391 - DNA, 15 bp, Homo sapiens
aaggggggctataaa

SEQ ID NO: 1585392 - DNA, 15 bp, Homo sapiens
aggggggctataaat

SEQ ID NO: 1585393 - DNA, 15 bp, Homo sapiens
ggggggctataaatt

SEQ ID NO: 1585394 - DNA, 15 bp, Homo sapiens
gggggctataaattc

SEQ ID NO: 1585395 - DNA, 15 bp, Homo sapiens
ggggctataaattct

SEQ ID NO: 1585396 - DNA, 15 bp, Homo sapiens
gggctataaattctt

SEQ ID NO: 1585397 - DNA, 15 bp, Homo sapiens
ggctataaattcttt

SEQ ID NO: 1585398 - DNA, 15 bp, Homo sapiens
gctataaattctttg

SEQ ID NO: 1585399 - DNA, 15 bp, Homo sapiens
ctataaattctttgc

SEQ ID NO: 1585400 - DNA, 15 bp, Homo sapiens
tataaattctttgct

SEQ ID NO: 1585401 - DNA, 15 bp, Homo sapiens
ataaattctttgctg

SEQ ID NO: 1585402 - DNA, 15 bp, Homo sapiens
taaattctttgctga

SEQ ID NO: 1585403 - DNA, 15 bp, Homo sapiens
aaattctttgctgac

SEQ ID NO: 1585404 - DNA, 15 bp, Homo sapiens
aattctttgctgacc

SEQ ID NO: 1585405 - DNA, 15 bp, Homo sapiens
attctttgctgacct

SEQ ID NO: 1585406 - DNA, 15 bp, Homo sapiens
ttctttgctgacctg

SEQ ID NO: 1585407 - DNA, 15 bp, Homo sapiens
tctttgctgacctgc

SEQ ID NO: 1585408 - DNA, 15 bp, Homo sapiens
ctttgctgacctgct

SEQ ID NO: 1585409 - DNA, 15 bp, Homo sapiens
tttgctgacctgctg

SEQ ID NO: 1585410 - DNA, 15 bp, Homo sapiens
ttgctgacctgctgg

SEQ ID NO: 1585411 - DNA, 15 bp, Homo sapiens
tgctgacctgctgga

SEQ ID NO: 1585412 - DNA, 15 bp, Homo sapiens
gctgacctgctggat

SEQ ID NO: 1585413 - DNA, 15 bp, Homo sapiens
ctgacctgctggatt

SEQ ID NO: 1585414 - DNA, 15 bp, Homo sapiens
tgacctgctggatta

SEQ ID NO: 1585415 - DNA, 15 bp, Homo sapiens
gacctgctggattac

SEQ ID NO: 1585416 - DNA, 15 bp, Homo sapiens
acctgctggattaca

SEQ ID NO: 1585417 - DNA, 15 bp, Homo sapiens
cctgctggattacat

SEQ ID NO: 1585418 - DNA, 15 bp, Homo sapiens
ctgctggattacatc

SEQ ID NO: 1585419 - DNA, 15 bp, Homo sapiens
tgctggattacatca

SEQ ID NO: 1585420 - DNA, 15 bp, Homo sapiens
gctggattacatcaa

SEQ ID NO: 1585421 - DNA, 15 bp, Homo sapiens
ctggattacatcaaa

SEQ ID NO: 1585422 - DNA, 15 bp, Homo sapiens
tggattacatcaaag

SEQ ID NO: 1585423 - DNA, 15 bp, Homo sapiens
ggattacatcaaagc

SEQ ID NO: 1585424 - DNA, 15 bp, Homo sapiens
gattacatcaaagca

SEQ ID NO: 1585425 - DNA, 15 bp, Homo sapiens
attacatcaaagcac

SEQ ID NO: 1585426 - DNA, 15 bp, Homo sapiens
ttacatcaaagcact

SEQ ID NO: 1585427 - DNA, 15 bp, Homo sapiens
tacatcaaagcactg

SEQ ID NO: 1585428 - DNA, 15 bp, Homo sapiens
acatcaaagcactga

SEQ ID NO: 1585429 - DNA, 15 bp, Homo sapiens
catcaaagcactgaa

SEQ ID NO: 1585430 - DNA, 15 bp, Homo sapiens
atcaaagcactgaat

SEQ ID NO: 1585431 - DNA, 15 bp, Homo sapiens
tcaaagcactgaata

SEQ ID NO: 1585432 - DNA, 15 bp, Homo sapiens
caaagcactgaatag

SEQ ID NO: 1585433 - DNA, 15 bp, Homo sapiens
aaagcactgaataga

SEQ ID NO: 1585434 - DNA, 15 bp, Homo sapiens
aagcactgaatagaa

SEQ ID NO: 1585435 - DNA, 15 bp, Homo sapiens
agcactgaatagaaa

SEQ ID NO: 1585436 - DNA, 15 bp, Homo sapiens
gcactgaatagaaat

SEQ ID NO: 1585437 - DNA, 15 bp, Homo sapiens
cactgaatagaaata

SEQ ID NO: 1585438 - DNA, 15 bp, Homo sapiens
actgaatagaaatag

SEQ ID NO: 1585439 - DNA, 15 bp, Homo sapiens
ctgaatagaaatagt

SEQ ID NO: 1585440 - DNA, 15 bp, Homo sapiens
tgaatagaaatagtg

SEQ ID NO: 1585441 - DNA, 15 bp, Homo sapiens
gaatagaaatagtga

SEQ ID NO: 1585442 - DNA, 15 bp, Homo sapiens
aatagaaatagtgat

SEQ ID NO: 1585443 - DNA, 15 bp, Homo sapiens
atagaaatagtgata

SEQ ID NO: 1585444 - DNA, 15 bp, Homo sapiens
tagaaatagtgatag

SEQ ID NO: 1585445 - DNA, 15 bp, Homo sapiens
agaaatagtgataga

SEQ ID NO: 1585446 - DNA, 15 bp, Homo sapiens
gaaatagtgatagat

SEQ ID NO: 1585447 - DNA, 15 bp, Homo sapiens
aaatagtgatagatc

SEQ ID NO: 1585448 - DNA, 15 bp, Homo sapiens
aatagtgatagatcc

SEQ ID NO: 1585449 - DNA, 15 bp, Homo sapiens
atagtgatagatcca

SEQ ID NO: 1585450 - DNA, 15 bp, Homo sapiens
tagtgatagatccat

SEQ ID NO: 1585451 - DNA, 15 bp, Homo sapiens
agtgatagatccatt

SEQ ID NO: 1585452 - DNA, 15 bp, Homo sapiens
gtgatagatccattc

SEQ ID NO: 1585453 - DNA, 15 bp, Homo sapiens
tgatagatccattcc

SEQ ID NO: 1585454 - DNA, 15 bp, Homo sapiens
gatagatccattcct

SEQ ID NO: 1585455 - DNA, 15 bp, Homo sapiens
atagatccattccta

SEQ ID NO: 1585456 - DNA, 15 bp, Homo sapiens
tagatccattcctat

SEQ ID NO: 1585457 - DNA, 15 bp, Homo sapiens
agatccattcctatg

SEQ ID NO: 1585458 - DNA, 15 bp, Homo sapiens
gatccattcctatga

SEQ ID NO: 1585459 - DNA, 15 bp, Homo sapiens
atccattcctatgac

SEQ ID NO: 1585460 - DNA, 15 bp, Homo sapiens
tccattcctatgact

SEQ ID NO: 1585461 - DNA, 15 bp, Homo sapiens
ccattcctatgactg

SEQ ID NO: 1585462 - DNA, 15 bp, Homo sapiens
cattcctatgactgt

SEQ ID NO: 1585463 - DNA, 15 bp, Homo sapiens
attcctatgactgta

SEQ ID NO: 1585464 - DNA, 15 bp, Homo sapiens
ttcctatgactgtag

SEQ ID NO: 1585465 - DNA, 15 bp, Homo sapiens
tcctatgactgtaga

SEQ ID NO: 1585466 - DNA, 15 bp, Homo sapiens
cctatgactgtagat

SEQ ID NO: 1585467 - DNA, 15 bp, Homo sapiens
ctatgactgtagatt

SEQ ID NO: 1585468 - DNA, 15 bp, Homo sapiens
tatgactgtagattt

SEQ ID NO: 1585469 - DNA, 15 bp, Homo sapiens
atgactgtagatttt

SEQ ID NO: 1585470 - DNA, 15 bp, Homo sapiens
tgactgtagatttta

SEQ ID NO: 1585471 - DNA, 15 bp, Homo sapiens
gactgtagattttat

SEQ ID NO: 1585472 - DNA, 15 bp, Homo sapiens
actgtagattttatc

SEQ ID NO: 1585473 - DNA, 15 bp, Homo sapiens
ctgtagattttatca

SEQ ID NO: 1585474 - DNA, 15 bp, Homo sapiens
tgtagattttatcag

SEQ ID NO: 1585475 - DNA, 15 bp, Homo sapiens
gtagattttatcaga

SEQ ID NO: 1585476 - DNA, 15 bp, Homo sapiens
tagattttatcagac

SEQ ID NO: 1585477 - DNA, 15 bp, Homo sapiens
agattttatcagact

SEQ ID NO: 1585478 - DNA, 15 bp, Homo sapiens
gattttatcagactg

SEQ ID NO: 1585479 - DNA, 15 bp, Homo sapiens
attttatcagactga

SEQ ID NO: 1585480 - DNA, 15 bp, Homo sapiens
ttttatcagactgaa

SEQ ID NO: 1585481 - DNA, 15 bp, Homo sapiens
tttatcagactgaag

SEQ ID NO: 1585482 - DNA, 15 bp, Homo sapiens
ttatcagactgaaga

SEQ ID NO: 1585483 - DNA, 15 bp, Homo sapiens
tatcagactgaagag

SEQ ID NO: 1585484 - DNA, 15 bp, Homo sapiens
atcagactgaagagc

SEQ ID NO: 1585485 - DNA, 15 bp, Homo sapiens
tcagactgaagagct

SEQ ID NO: 1585486 - DNA, 15 bp, Homo sapiens
cagactgaagagcta

SEQ ID NO: 1585487 - DNA, 15 bp, Homo sapiens
agactgaagagctat

SEQ ID NO: 1585488 - DNA, 15 bp, Homo sapiens
gactgaagagctatt

SEQ ID NO: 1585489 - DNA, 15 bp, Homo sapiens
actgaagagctattg

SEQ ID NO: 1585490 - DNA, 15 bp, Homo sapiens
ctgaagagctattgt

SEQ ID NO: 1585491 - DNA, 15 bp, Homo sapiens
tgaagagctattgtg

SEQ ID NO: 1585492 - DNA, 15 bp, Homo sapiens
gaagagctattgtgt

SEQ ID NO: 1585493 - DNA, 15 bp, Homo sapiens
aagagctattgtgtg

SEQ ID NO: 1585494 - DNA, 15 bp, Homo sapiens
agagctattgtgtga

SEQ ID NO: 1585495 - DNA, 15 bp, Homo sapiens
gagctattgtgtgag

SEQ ID NO: 1585496 - DNA, 15 bp, Homo sapiens
agctattgtgtgagt

SEQ ID NO: 1585497 - DNA, 15 bp, Homo sapiens
gctattgtgtgagta

SEQ ID NO: 1585498 - DNA, 15 bp, Homo sapiens
ctattgtgtgagtat

SEQ ID NO: 1585499 - DNA, 15 bp, Homo sapiens
tattgtgtgagtata

SEQ ID NO: 1585500 - DNA, 15 bp, Homo sapiens
attgtgtgagtatat

SEQ ID NO: 1585501 - DNA, 15 bp, Homo sapiens
ttgtgtgagtatatt

SEQ ID NO: 1585502 - DNA, 15 bp, Homo sapiens
tgtgtgagtatattt

SEQ ID NO: 1585503 - DNA, 15 bp, Homo sapiens
gtgtgagtatattta

SEQ ID NO: 1585504 - DNA, 15 bp, Homo sapiens
tgtgagtatatttaa

SEQ ID NO: 1585505 - DNA, 15 bp, Homo sapiens
gtgagtatatttaat

SEQ ID NO: 1585506 - DNA, 15 bp, Homo sapiens
tgagtatatttaata

SEQ ID NO: 1585507 - DNA, 15 bp, Homo sapiens
gagtatatttaatat

SEQ ID NO: 1585508 - DNA, 15 bp, Homo sapiens
agtatatttaatata

SEQ ID NO: 1585509 - DNA, 15 bp, Homo sapiens
gtatatttaatatat

SEQ ID NO: 1585510 - DNA, 15 bp, Homo sapiens
tatatttaatatatg

SEQ ID NO: 1585511 - DNA, 15 bp, Homo sapiens
atatttaatatatga

SEQ ID NO: 1585512 - DNA, 15 bp, Homo sapiens
tatttaatatatgat

SEQ ID NO: 1585513 - DNA, 15 bp, Homo sapiens
atttaatatatgatt

SEQ ID NO: 1585514 - DNA, 15 bp, Homo sapiens
tttaatatatgattc

SEQ ID NO: 1585515 - DNA, 15 bp, Homo sapiens
ttaatatatgattct

SEQ ID NO: 1585516 - DNA, 15 bp, Homo sapiens
taatatatgattctt

SEQ ID NO: 1585517 - DNA, 15 bp, Homo sapiens
aatatatgattcttt

SEQ ID NO: 1585518 - DNA, 15 bp, Homo sapiens
atatatgattctttt

SEQ ID NO: 1585519 - DNA, 15 bp, Homo sapiens
tatatgattcttttt

SEQ ID NO: 1585520 - DNA, 15 bp, Homo sapiens
atatgattcttttta

SEQ ID NO: 1585521 - DNA, 15 bp, Homo sapiens
tatgattctttttag

SEQ ID NO: 1585522 - DNA, 15 bp, Homo sapiens
atgattctttttagt

SEQ ID NO: 1585523 - DNA, 15 bp, Homo sapiens
tgattctttttagtg

SEQ ID NO: 1585524 - DNA, 15 bp, Homo sapiens
gagcctaggagtttg

SEQ ID NO: 1585525 - DNA, 15 bp, Homo sapiens
agcctaggagtttga

SEQ ID NO: 1585526 - DNA, 15 bp, Homo sapiens
gcctaggagtttgag

SEQ ID NO: 1585527 - DNA, 15 bp, Homo sapiens
cctaggagtttgaga

SEQ ID NO: 1585528 - DNA, 15 bp, Homo sapiens
taggagtttgagact

SEQ ID NO: 1585529 - DNA, 15 bp, Homo sapiens
aggagtttgagactg

SEQ ID NO: 1585530 - DNA, 15 bp, Homo sapiens
ggagtttgagactgc

SEQ ID NO: 1585531 - DNA, 15 bp, Homo sapiens
gagtttgagactgca

SEQ ID NO: 1585532 - DNA, 15 bp, Homo sapiens
agtttgagactgcag

SEQ ID NO: 1585533 - DNA, 15 bp, Homo sapiens
gtttgagactgcagg

SEQ ID NO: 1585534 - DNA, 15 bp, Homo sapiens
tttgagactgcagga

SEQ ID NO: 1585535 - DNA, 15 bp, Homo sapiens
ttgagactgcaggag

SEQ ID NO: 1585536 - DNA, 15 bp, Homo sapiens
tgagactgcaggagt

SEQ ID NO: 1585537 - DNA, 15 bp, Homo sapiens
gagactgcaggagtt

SEQ ID NO: 1585538 - DNA, 15 bp, Homo sapiens
agactgcaggagttc

SEQ ID NO: 1585539 - DNA, 15 bp, Homo sapiens
gactgcaggagttcg

SEQ ID NO: 1585540 - DNA, 15 bp, Homo sapiens
actgcaggagttcga

SEQ ID NO: 1585541 - DNA, 15 bp, Homo sapiens
ctgcaggagttcgag

SEQ ID NO: 1585542 - DNA, 15 bp, Homo sapiens
tgcaggagttcgaga

SEQ ID NO: 1585543 - DNA, 15 bp, Homo sapiens
gcaggagttcgagac

SEQ ID NO: 1585544 - DNA, 15 bp, Homo sapiens
aggagttcgagactg

SEQ ID NO: 1585545 - DNA, 15 bp, Homo sapiens
ggagttcgagactga

SEQ ID NO: 1585546 - DNA, 15 bp, Homo sapiens
gagttcgagactgag

SEQ ID NO: 1585547 - DNA, 15 bp, Homo sapiens
agttcgagactgagt

SEQ ID NO: 1585548 - DNA, 15 bp, Homo sapiens
gttcgagactgagtg

SEQ ID NO: 1585549 - DNA, 15 bp, Homo sapiens
ttcgagactgagtgg

SEQ ID NO: 1585550 - DNA, 15 bp, Homo sapiens
tcgagactgagtgga

SEQ ID NO: 1585551 - DNA, 15 bp, Homo sapiens
cgagactgagtggaa

SEQ ID NO: 1585552 - DNA, 15 bp, Homo sapiens
gagactgagtggaat

SEQ ID NO: 1585553 - DNA, 15 bp, Homo sapiens
agactgagtggaatg

SEQ ID NO: 1585554 - DNA, 15 bp, Homo sapiens
gactgagtggaatgc

SEQ ID NO: 1585555 - DNA, 15 bp, Homo sapiens
actgagtggaatgca

SEQ ID NO: 1585556 - DNA, 15 bp, Homo sapiens
ctgagtggaatgcag

SEQ ID NO: 1585557 - DNA, 15 bp, Homo sapiens
tgagtggaatgcagt

SEQ ID NO: 1585558 - DNA, 15 bp, Homo sapiens
gagtggaatgcagtg

SEQ ID NO: 1585559 - DNA, 15 bp, Homo sapiens
agtggaatgcagtgg

SEQ ID NO: 1585560 - DNA, 15 bp, Homo sapiens
gtggaatgcagtgga

SEQ ID NO: 1585561 - DNA, 15 bp, Homo sapiens
tggaatgcagtggaa

SEQ ID NO: 1585562 - DNA, 15 bp, Homo sapiens
ggaatgcagtggaac

SEQ ID NO: 1585563 - DNA, 15 bp, Homo sapiens
gaatgcagtggaact

SEQ ID NO: 1585564 - DNA, 15 bp, Homo sapiens
aatgcagtggaactg

SEQ ID NO: 1585565 - DNA, 15 bp, Homo sapiens
atgcagtggaactgc

SEQ ID NO: 1585566 - DNA, 15 bp, Homo sapiens
tgcagtggaactgca

SEQ ID NO: 1585567 - DNA, 15 bp, Homo sapiens
gcagtggaactgcat

SEQ ID NO: 1585568 - DNA, 15 bp, Homo sapiens
cagtggaactgcatt

SEQ ID NO: 1585569 - DNA, 15 bp, Homo sapiens
agtggaactgcattc

SEQ ID NO: 1585570 - DNA, 15 bp, Homo sapiens
gtggaactgcattcc

SEQ ID NO: 1585571 - DNA, 15 bp, Homo sapiens
tggaactgcattcca

SEQ ID NO: 1585572 - DNA, 15 bp, Homo sapiens
ggaactgcattccag

SEQ ID NO: 1585573 - DNA, 15 bp, Homo sapiens
gaactgcattccagc

SEQ ID NO: 1585574 - DNA, 15 bp, Homo sapiens
aactgcattccagcc

SEQ ID NO: 1585575 - DNA, 15 bp, Homo sapiens
tgcattccagcctga

SEQ ID NO: 1585576 - DNA, 15 bp, Homo sapiens
gcattccagcctgag

SEQ ID NO: 1585577 - DNA, 15 bp, Homo sapiens
cctgagtgacagagg

SEQ ID NO: 1585578 - DNA, 15 bp, Homo sapiens
ctgagtgacagaggg

SEQ ID NO: 1585579 - DNA, 15 bp, Homo sapiens
tgagtgacagaggga

SEQ ID NO: 1585580 - DNA, 15 bp, Homo sapiens
gagtgacagagggag

SEQ ID NO: 1585581 - DNA, 15 bp, Homo sapiens
agtgacagagggaga

SEQ ID NO: 1585582 - DNA, 15 bp, Homo sapiens
tgacagagggagacc

SEQ ID NO: 1585583 - DNA, 15 bp, Homo sapiens
gacagagggagaccc

SEQ ID NO: 1585584 - DNA, 15 bp, Homo sapiens
acagagggagaccct

SEQ ID NO: 1585585 - DNA, 15 bp, Homo sapiens
cagagggagaccctg

SEQ ID NO: 1585586 - DNA, 15 bp, Homo sapiens
agagggagaccctgt

SEQ ID NO: 1585587 - DNA, 15 bp, Homo sapiens
gagggagaccctgtc

SEQ ID NO: 1585588 - DNA, 15 bp, Homo sapiens
agggagaccctgtct

SEQ ID NO: 1585589 - DNA, 15 bp, Homo sapiens
gggagaccctgtctt

SEQ ID NO: 1585590 - DNA, 15 bp, Homo sapiens
ggagaccctgtctta

SEQ ID NO: 1585591 - DNA, 15 bp, Homo sapiens
ctgtcttaaaaaaat

SEQ ID NO: 1585592 - DNA, 15 bp, Homo sapiens
tgtcttaaaaaaata

SEQ ID NO: 1585593 - DNA, 15 bp, Homo sapiens
gtcttaaaaaaataa

SEQ ID NO: 1585594 - DNA, 15 bp, Homo sapiens
tcttaaaaaaataag

SEQ ID NO: 1585595 - DNA, 15 bp, Homo sapiens
cttaaaaaaataaga

SEQ ID NO: 1585596 - DNA, 15 bp, Homo sapiens
ttaaaaaaataagaa

SEQ ID NO: 1585597 - DNA, 15 bp, Homo sapiens
taaaaaaataagaaa

SEQ ID NO: 1585598 - DNA, 15 bp, Homo sapiens
aaaaaaataagaaag

SEQ ID NO: 1585599 - DNA, 15 bp, Homo sapiens
aaaaaataagaaaga

SEQ ID NO: 1585600 - DNA, 15 bp, Homo sapiens
aaaaataagaaagaa

SEQ ID NO: 1585601 - DNA, 15 bp, Homo sapiens
aaaataagaaagaaa

SEQ ID NO: 1585602 - DNA, 15 bp, Homo sapiens
aaataagaaagaaaa

SEQ ID NO: 1585603 - DNA, 15 bp, Homo sapiens
aataagaaagaaaac

SEQ ID NO: 1585604 - DNA, 15 bp, Homo sapiens
ataagaaagaaaaca

SEQ ID NO: 1585605 - DNA, 15 bp, Homo sapiens
taagaaagaaaacac

SEQ ID NO: 1585606 - DNA, 15 bp, Homo sapiens
aagaaagaaaacaca

SEQ ID NO: 1585607 - DNA, 15 bp, Homo sapiens
agaaagaaaacacaa

SEQ ID NO: 1585608 - DNA, 15 bp, Homo sapiens
gaaagaaaacacaac

SEQ ID NO: 1585609 - DNA, 15 bp, Homo sapiens
aaagaaaacacaact

SEQ ID NO: 1585610 - DNA, 15 bp, Homo sapiens
aagaaaacacaactg

SEQ ID NO: 1585611 - DNA, 15 bp, Homo sapiens
agaaaacacaactgc

SEQ ID NO: 1585612 - DNA, 15 bp, Homo sapiens
gaaaacacaactgca

SEQ ID NO: 1585613 - DNA, 15 bp, Homo sapiens
aaaacacaactgcag

SEQ ID NO: 1585614 - DNA, 15 bp, Homo sapiens
aaacacaactgcaga

SEQ ID NO: 1585615 - DNA, 15 bp, Homo sapiens
aacacaactgcagaa

SEQ ID NO: 1585616 - DNA, 15 bp, Homo sapiens
acacaactgcagaaa

SEQ ID NO: 1585617 - DNA, 15 bp, Homo sapiens
cacaactgcagaaaa

SEQ ID NO: 1585618 - DNA, 15 bp, Homo sapiens
acaactgcagaaaat

SEQ ID NO: 1585619 - DNA, 15 bp, Homo sapiens
caactgcagaaaatt

SEQ ID NO: 1585620 - DNA, 15 bp, Homo sapiens
aactgcagaaaatta

SEQ ID NO: 1585621 - DNA, 15 bp, Homo sapiens
actgcagaaaattat

SEQ ID NO: 1585622 - DNA, 15 bp, Homo sapiens
ctgcagaaaattata

SEQ ID NO: 1585623 - DNA, 15 bp, Homo sapiens
tgcagaaaattataa

SEQ ID NO: 1585624 - DNA, 15 bp, Homo sapiens
gcagaaaattataaa

SEQ ID NO: 1585625 - DNA, 15 bp, Homo sapiens
cagaaaattataaag

SEQ ID NO: 1585626 - DNA, 15 bp, Homo sapiens
agaaaattataaagg

SEQ ID NO: 1585627 - DNA, 15 bp, Homo sapiens
gaaaattataaagga

SEQ ID NO: 1585628 - DNA, 15 bp, Homo sapiens
aaaattataaaggat

SEQ ID NO: 1585629 - DNA, 15 bp, Homo sapiens
aaattataaaggatt

SEQ ID NO: 1585630 - DNA, 15 bp, Homo sapiens
aattataaaggattt

SEQ ID NO: 1585631 - DNA, 15 bp, Homo sapiens
attataaaggattta

SEQ ID NO: 1585632 - DNA, 15 bp, Homo sapiens
ttataaaggatttaa

SEQ ID NO: 1585633 - DNA, 15 bp, Homo sapiens
tataaaggatttaag

SEQ ID NO: 1585634 - DNA, 15 bp, Homo sapiens
ataaaggatttaagt

SEQ ID NO: 1585635 - DNA, 15 bp, Homo sapiens
taaaggatttaagtc

SEQ ID NO: 1585636 - DNA, 15 bp, Homo sapiens
aaaggatttaagtca

SEQ ID NO: 1585637 - DNA, 15 bp, Homo sapiens
aaggatttaagtcat

SEQ ID NO: 1585638 - DNA, 15 bp, Homo sapiens
aggatttaagtcatt

SEQ ID NO: 1585639 - DNA, 15 bp, Homo sapiens
ggatttaagtcattc

SEQ ID NO: 1585640 - DNA, 15 bp, Homo sapiens
gatttaagtcattcc

SEQ ID NO: 1585641 - DNA, 15 bp, Homo sapiens
atttaagtcattcca

SEQ ID NO: 1585642 - DNA, 15 bp, Homo sapiens
tttaagtcattccaa

SEQ ID NO: 1585643 - DNA, 15 bp, Homo sapiens
ttaagtcattccaaa

SEQ ID NO: 1585644 - DNA, 15 bp, Homo sapiens
taagtcattccaaat

SEQ ID NO: 1585645 - DNA, 15 bp, Homo sapiens
aagtcattccaaata

SEQ ID NO: 1585646 - DNA, 15 bp, Homo sapiens
agtcattccaaatat

SEQ ID NO: 1585647 - DNA, 15 bp, Homo sapiens
gtcattccaaatatc

SEQ ID NO: 1585648 - DNA, 15 bp, Homo sapiens
tcattccaaatatca

SEQ ID NO: 1585649 - DNA, 15 bp, Homo sapiens
cattccaaatatcac

SEQ ID NO: 1585650 - DNA, 15 bp, Homo sapiens
attccaaatatcact

SEQ ID NO: 1585651 - DNA, 15 bp, Homo sapiens
ttccaaatatcactg

SEQ ID NO: 1585652 - DNA, 15 bp, Homo sapiens
tccaaatatcactgc

SEQ ID NO: 1585653 - DNA, 15 bp, Homo sapiens
ccaaatatcactgcc

SEQ ID NO: 1585654 - DNA, 15 bp, Homo sapiens
caaatatcactgcca

SEQ ID NO: 1585655 - DNA, 15 bp, Homo sapiens
aaatatcactgccac

SEQ ID NO: 1585656 - DNA, 15 bp, Homo sapiens
aatatcactgccact

SEQ ID NO: 1585657 - DNA, 15 bp, Homo sapiens
atatcactgccactt

SEQ ID NO: 1585658 - DNA, 15 bp, Homo sapiens
tatcactgccacttt

SEQ ID NO: 1585659 - DNA, 15 bp, Homo sapiens
atcactgccactttt

SEQ ID NO: 1585660 - DNA, 15 bp, Homo sapiens
tcactgccacttttt

SEQ ID NO: 1585661 - DNA, 15 bp, Homo sapiens
cactgccacttttta

SEQ ID NO: 1585662 - DNA, 15 bp, Homo sapiens
actgccactttttat

SEQ ID NO: 1585663 - DNA, 15 bp, Homo sapiens
ctgccactttttatt

SEQ ID NO: 1585664 - DNA, 15 bp, Homo sapiens
tgccactttttattt

SEQ ID NO: 1585665 - DNA, 15 bp, Homo sapiens
gccactttttattta

SEQ ID NO: 1585666 - DNA, 15 bp, Homo sapiens
ccactttttatttag

SEQ ID NO: 1585667 - DNA, 15 bp, Homo sapiens
cactttttatttaga

SEQ ID NO: 1585668 - DNA, 15 bp, Homo sapiens
actttttatttagaa

SEQ ID NO: 1585669 - DNA, 15 bp, Homo sapiens
ctttttatttagaat

SEQ ID NO: 1585670 - DNA, 15 bp, Homo sapiens
tttttatttagaata

SEQ ID NO: 1585671 - DNA, 15 bp, Homo sapiens
ttttatttagaatat

SEQ ID NO: 1585672 - DNA, 15 bp, Homo sapiens
tttatttagaatatt

SEQ ID NO: 1585673 - DNA, 15 bp, Homo sapiens
ttatttagaatattc

SEQ ID NO: 1585674 - DNA, 15 bp, Homo sapiens
tatttagaatattct

SEQ ID NO: 1585675 - DNA, 15 bp, Homo sapiens
atttagaatattcta

SEQ ID NO: 1585676 - DNA, 15 bp, Homo sapiens
tttagaatattctaa

SEQ ID NO: 1585677 - DNA, 15 bp, Homo sapiens
ttagaatattctaaa

SEQ ID NO: 1585678 - DNA, 15 bp, Homo sapiens
tagaatattctaaag

SEQ ID NO: 1585679 - DNA, 15 bp, Homo sapiens
agaatattctaaaga

SEQ ID NO: 1585680 - DNA, 15 bp, Homo sapiens
gaatattctaaagaa

SEQ ID NO: 1585681 - DNA, 15 bp, Homo sapiens
aatattctaaagaat

SEQ ID NO: 1585682 - DNA, 15 bp, Homo sapiens
atattctaaagaatt

SEQ ID NO: 1585683 - DNA, 15 bp, Homo sapiens
tattctaaagaattc

SEQ ID NO: 1585684 - DNA, 15 bp, Homo sapiens
attctaaagaattct

SEQ ID NO: 1585685 - DNA, 15 bp, Homo sapiens
ttctaaagaattctc

SEQ ID NO: 1585686 - DNA, 15 bp, Homo sapiens
tctaaagaattctct

SEQ ID NO: 1585687 - DNA, 15 bp, Homo sapiens
ctaaagaattctctc

SEQ ID NO: 1585688 - DNA, 15 bp, Homo sapiens
taaagaattctctct

SEQ ID NO: 1585689 - DNA, 15 bp, Homo sapiens
aaagaattctctctc

SEQ ID NO: 1585690 - DNA, 15 bp, Homo sapiens
aagaattctctctct

SEQ ID NO: 1585691 - DNA, 15 bp, Homo sapiens
agaattctctctctg

SEQ ID NO: 1585692 - DNA, 15 bp, Homo sapiens
gaattctctctctgt

SEQ ID NO: 1585693 - DNA, 15 bp, Homo sapiens
aattctctctctgtg

SEQ ID NO: 1585694 - DNA, 15 bp, Homo sapiens
attctctctctgtgt

SEQ ID NO: 1585695 - DNA, 15 bp, Homo sapiens
ttctctctctgtgta

SEQ ID NO: 1585696 - DNA, 15 bp, Homo sapiens
tctctctctgtgtac

SEQ ID NO: 1585697 - DNA, 15 bp, Homo sapiens
ctctctctgtgtaca

SEQ ID NO: 1585698 - DNA, 15 bp, Homo sapiens
tctctctgtgtacac

SEQ ID NO: 1585699 - DNA, 15 bp, Homo sapiens
ctctctgtgtacaca

SEQ ID NO: 1585700 - DNA, 15 bp, Homo sapiens
tctctgtgtacacac

SEQ ID NO: 1585701 - DNA, 15 bp, Homo sapiens
tctgtgtacacacac

SEQ ID NO: 1585702 - DNA, 15 bp, Homo sapiens
ctgtgtacacacaca

SEQ ID NO: 1585703 - DNA, 15 bp, Homo sapiens
tgtgtacacacacac

SEQ ID NO: 1585704 - DNA, 15 bp, Homo sapiens
tgtacacacacacat

SEQ ID NO: 1585705 - DNA, 15 bp, Homo sapiens
gtacacacacacata

SEQ ID NO: 1585706 - DNA, 15 bp, Homo sapiens
acacacacacatatg

SEQ ID NO: 1585707 - DNA, 15 bp, Homo sapiens
cacacacacatatgc

SEQ ID NO: 1585708 - DNA, 15 bp, Homo sapiens
acacacacatatgcg

SEQ ID NO: 1585709 - DNA, 15 bp, Homo sapiens
cacacacatatgcgt

SEQ ID NO: 1585710 - DNA, 15 bp, Homo sapiens
acacacatatgcgta

SEQ ID NO: 1585711 - DNA, 15 bp, Homo sapiens
cacacatatgcgtac

SEQ ID NO: 1585712 - DNA, 15 bp, Homo sapiens
acacatatgcgtact

SEQ ID NO: 1585713 - DNA, 15 bp, Homo sapiens
cacatatgcgtactc

SEQ ID NO: 1585714 - DNA, 15 bp, Homo sapiens
acatatgcgtactct

SEQ ID NO: 1585715 - DNA, 15 bp, Homo sapiens
catatgcgtactctt

SEQ ID NO: 1585716 - DNA, 15 bp, Homo sapiens
atatgcgtactctta

SEQ ID NO: 1585717 - DNA, 15 bp, Homo sapiens
tatgcgtactcttaa

SEQ ID NO: 1585718 - DNA, 15 bp, Homo sapiens
atgcgtactcttaat

SEQ ID NO: 1585719 - DNA, 15 bp, Homo sapiens
tgcgtactcttaatc

SEQ ID NO: 1585720 - DNA, 15 bp, Homo sapiens
gcgtactcttaatcc

SEQ ID NO: 1585721 - DNA, 15 bp, Homo sapiens
cgtactcttaatcca

SEQ ID NO: 1585722 - DNA, 15 bp, Homo sapiens
gtactcttaatccaa

SEQ ID NO: 1585723 - DNA, 15 bp, Homo sapiens
tactcttaatccaag

SEQ ID NO: 1585724 - DNA, 15 bp, Homo sapiens
actcttaatccaagt

SEQ ID NO: 1585725 - DNA, 15 bp, Homo sapiens
ctcttaatccaagta

SEQ ID NO: 1585726 - DNA, 15 bp, Homo sapiens
tcttaatccaagtag

SEQ ID NO: 1585727 - DNA, 15 bp, Homo sapiens
cttaatccaagtagc

SEQ ID NO: 1585728 - DNA, 15 bp, Homo sapiens
ttaatccaagtagct

SEQ ID NO: 1585729 - DNA, 15 bp, Homo sapiens
taatccaagtagctt

SEQ ID NO: 1585730 - DNA, 15 bp, Homo sapiens
aatccaagtagcttg

SEQ ID NO: 1585731 - DNA, 15 bp, Homo sapiens
atccaagtagcttgg

SEQ ID NO: 1585732 - DNA, 15 bp, Homo sapiens
tccaagtagcttggt

SEQ ID NO: 1585733 - DNA, 15 bp, Homo sapiens
ccaagtagcttggta

SEQ ID NO: 1585734 - DNA, 15 bp, Homo sapiens
caagtagcttggtag

SEQ ID NO: 1585735 - DNA, 15 bp, Homo sapiens
aagtagcttggtagg

SEQ ID NO: 1585736 - DNA, 15 bp, Homo sapiens
agtagcttggtagga

SEQ ID NO: 1585737 - DNA, 15 bp, Homo sapiens
gtagcttggtaggat

SEQ ID NO: 1585738 - DNA, 15 bp, Homo sapiens
tagcttggtaggatt

SEQ ID NO: 1585739 - DNA, 15 bp, Homo sapiens
agcttggtaggattt

SEQ ID NO: 1585740 - DNA, 15 bp, Homo sapiens
gcttggtaggatttt

SEQ ID NO: 1585741 - DNA, 15 bp, Homo sapiens
cttggtaggatttta

SEQ ID NO: 1585742 - DNA, 15 bp, Homo sapiens
ttggtaggattttat

SEQ ID NO: 1585743 - DNA, 15 bp, Homo sapiens
tggtaggattttatt

SEQ ID NO: 1585744 - DNA, 15 bp, Homo sapiens
ggtaggattttattt

SEQ ID NO: 1585745 - DNA, 15 bp, Homo sapiens
gtaggattttattta

SEQ ID NO: 1585746 - DNA, 15 bp, Homo sapiens
taggattttatttac

SEQ ID NO: 1585747 - DNA, 15 bp, Homo sapiens
aggattttatttacc

SEQ ID NO: 1585748 - DNA, 15 bp, Homo sapiens
ggattttatttacct

SEQ ID NO: 1585749 - DNA, 15 bp, Homo sapiens
gattttatttaccta

SEQ ID NO: 1585750 - DNA, 15 bp, Homo sapiens
attttatttacctag

SEQ ID NO: 1585751 - DNA, 15 bp, Homo sapiens
ttttatttacctagt

SEQ ID NO: 1585752 - DNA, 15 bp, Homo sapiens
tttatttacctagtg

SEQ ID NO: 1585753 - DNA, 15 bp, Homo sapiens
ttatttacctagtgc

SEQ ID NO: 1585754 - DNA, 15 bp, Homo sapiens
tatttacctagtgcc

SEQ ID NO: 1585755 - DNA, 15 bp, Homo sapiens
atttacctagtgcct

SEQ ID NO: 1585756 - DNA, 15 bp, Homo sapiens
tttacctagtgccta

SEQ ID NO: 1585757 - DNA, 15 bp, Homo sapiens
ttacctagtgcctag

SEQ ID NO: 1585758 - DNA, 15 bp, Homo sapiens
tacctagtgcctaga

SEQ ID NO: 1585759 - DNA, 15 bp, Homo sapiens
acctagtgcctagat

SEQ ID NO: 1585760 - DNA, 15 bp, Homo sapiens
cctagtgcctagatg

SEQ ID NO: 1585761 - DNA, 15 bp, Homo sapiens
ctagtgcctagatgg

SEQ ID NO: 1585762 - DNA, 15 bp, Homo sapiens
tagtgcctagatggg

SEQ ID NO: 1585763 - DNA, 15 bp, Homo sapiens
agtgcctagatggga

SEQ ID NO: 1585764 - DNA, 15 bp, Homo sapiens
gtgcctagatgggaa

SEQ ID NO: 1585765 - DNA, 15 bp, Homo sapiens
tgcctagatgggaaa

SEQ ID NO: 1585766 - DNA, 15 bp, Homo sapiens
gcctagatgggaaat

SEQ ID NO: 1585767 - DNA, 15 bp, Homo sapiens
cctagatgggaaatt

SEQ ID NO: 1585768 - DNA, 15 bp, Homo sapiens
ctagatgggaaattg

SEQ ID NO: 1585769 - DNA, 15 bp, Homo sapiens
tagatgggaaattgc

SEQ ID NO: 1585770 - DNA, 15 bp, Homo sapiens
agatgggaaattgcc

SEQ ID NO: 1585771 - DNA, 15 bp, Homo sapiens
gatgggaaattgcct

SEQ ID NO: 1585772 - DNA, 15 bp, Homo sapiens
atgggaaattgcctg

SEQ ID NO: 1585773 - DNA, 15 bp, Homo sapiens
tgggaaattgcctgg

SEQ ID NO: 1585774 - DNA, 15 bp, Homo sapiens
gggaaattgcctggg

SEQ ID NO: 1585775 - DNA, 15 bp, Homo sapiens
ggaaattgcctgggg

SEQ ID NO: 1585776 - DNA, 15 bp, Homo sapiens
gaaattgcctgggga

SEQ ID NO: 1585777 - DNA, 15 bp, Homo sapiens
aaattgcctggggat

SEQ ID NO: 1585778 - DNA, 15 bp, Homo sapiens
aattgcctggggatt

SEQ ID NO: 1585779 - DNA, 15 bp, Homo sapiens
attgcctggggattc

SEQ ID NO: 1585780 - DNA, 15 bp, Homo sapiens
ttgcctggggattcc

SEQ ID NO: 1585781 - DNA, 15 bp, Homo sapiens
tgcctggggattcca

SEQ ID NO: 1585782 - DNA, 15 bp, Homo sapiens
gcctggggattccaa

SEQ ID NO: 1585783 - DNA, 15 bp, Homo sapiens
cctggggattccaaa

SEQ ID NO: 1585784 - DNA, 15 bp, Homo sapiens
ctggggattccaaat

SEQ ID NO: 1585785 - DNA, 15 bp, Homo sapiens
tggggattccaaata

SEQ ID NO: 1585786 - DNA, 15 bp, Homo sapiens
ggggattccaaatac

SEQ ID NO: 1585787 - DNA, 15 bp, Homo sapiens
gggattccaaatacc

SEQ ID NO: 1585788 - DNA, 15 bp, Homo sapiens
ggattccaaatacct

SEQ ID NO: 1585789 - DNA, 15 bp, Homo sapiens
gattccaaataccta

SEQ ID NO: 1585790 - DNA, 15 bp, Homo sapiens
attccaaatacctat

SEQ ID NO: 1585791 - DNA, 15 bp, Homo sapiens
ttccaaatacctatt

SEQ ID NO: 1585792 - DNA, 15 bp, Homo sapiens
tccaaatacctattt

SEQ ID NO: 1585793 - DNA, 15 bp, Homo sapiens
ccaaatacctatttc

SEQ ID NO: 1585794 - DNA, 15 bp, Homo sapiens
caaatacctatttca

SEQ ID NO: 1585795 - DNA, 15 bp, Homo sapiens
aaatacctatttcat

SEQ ID NO: 1585796 - DNA, 15 bp, Homo sapiens
aatacctatttcatt

SEQ ID NO: 1585797 - DNA, 15 bp, Homo sapiens
atacctatttcatta

SEQ ID NO: 1585798 - DNA, 15 bp, Homo sapiens
tacctatttcattaa

SEQ ID NO: 1585799 - DNA, 15 bp, Homo sapiens
acctatttcattaaa

SEQ ID NO: 1585800 - DNA, 15 bp, Homo sapiens
cctatttcattaaat

SEQ ID NO: 1585801 - DNA, 15 bp, Homo sapiens
ctatttcattaaatt

SEQ ID NO: 1585802 - DNA, 15 bp, Homo sapiens
tatttcattaaatta

SEQ ID NO: 1585803 - DNA, 15 bp, Homo sapiens
atttcattaaattaa

SEQ ID NO: 1585804 - DNA, 15 bp, Homo sapiens
tttcattaaattaaa

SEQ ID NO: 1585805 - DNA, 15 bp, Homo sapiens
ttcattaaattaaag

SEQ ID NO: 1585806 - DNA, 15 bp, Homo sapiens
tcattaaattaaaga

SEQ ID NO: 1585807 - DNA, 15 bp, Homo sapiens
cattaaattaaagat

SEQ ID NO: 1585808 - DNA, 15 bp, Homo sapiens
attaaattaaagatg

SEQ ID NO: 1585809 - DNA, 15 bp, Homo sapiens
ttaaattaaagatgt

SEQ ID NO: 1585810 - DNA, 15 bp, Homo sapiens
taaattaaagatgtc

SEQ ID NO: 1585811 - DNA, 15 bp, Homo sapiens
aaattaaagatgtca

SEQ ID NO: 1585812 - DNA, 15 bp, Homo sapiens
aattaaagatgtcac

SEQ ID NO: 1585813 - DNA, 15 bp, Homo sapiens
attaaagatgtcact

SEQ ID NO: 1585814 - DNA, 15 bp, Homo sapiens
ttaaagatgtcactg

SEQ ID NO: 1585815 - DNA, 15 bp, Homo sapiens
taaagatgtcactga

SEQ ID NO: 1585816 - DNA, 15 bp, Homo sapiens
aaagatgtcactgat

SEQ ID NO: 1585817 - DNA, 15 bp, Homo sapiens
aagatgtcactgatt

SEQ ID NO: 1585818 - DNA, 15 bp, Homo sapiens
agatgtcactgattt

SEQ ID NO: 1585819 - DNA, 15 bp, Homo sapiens
gatgtcactgatttt

SEQ ID NO: 1585820 - DNA, 15 bp, Homo sapiens
atgtcactgatttta

SEQ ID NO: 1585821 - DNA, 15 bp, Homo sapiens
tgtcactgattttaa

SEQ ID NO: 1585822 - DNA, 15 bp, Homo sapiens
gtcactgattttaag

SEQ ID NO: 1585823 - DNA, 15 bp, Homo sapiens
tcactgattttaaga

SEQ ID NO: 1585824 - DNA, 15 bp, Homo sapiens
cactgattttaagac

SEQ ID NO: 1585825 - DNA, 15 bp, Homo sapiens
actgattttaagact

SEQ ID NO: 1585826 - DNA, 15 bp, Homo sapiens
ctgattttaagactt

SEQ ID NO: 1585827 - DNA, 15 bp, Homo sapiens
tgattttaagactta

SEQ ID NO: 1585828 - DNA, 15 bp, Homo sapiens
gattttaagacttaa

SEQ ID NO: 1585829 - DNA, 15 bp, Homo sapiens
attttaagacttaac

SEQ ID NO: 1585830 - DNA, 15 bp, Homo sapiens
ttttaagacttaaca

SEQ ID NO: 1585831 - DNA, 15 bp, Homo sapiens
tttaagacttaacac

SEQ ID NO: 1585832 - DNA, 15 bp, Homo sapiens
ttaagacttaacact

SEQ ID NO: 1585833 - DNA, 15 bp, Homo sapiens
taagacttaacacta

SEQ ID NO: 1585834 - DNA, 15 bp, Homo sapiens
aagacttaacactat

SEQ ID NO: 1585835 - DNA, 15 bp, Homo sapiens
agacttaacactatt

SEQ ID NO: 1585836 - DNA, 15 bp, Homo sapiens
gacttaacactattt

SEQ ID NO: 1585837 - DNA, 15 bp, Homo sapiens
acttaacactatttt

SEQ ID NO: 1585838 - DNA, 15 bp, Homo sapiens
cttaacactattttt

SEQ ID NO: 1585839 - DNA, 15 bp, Homo sapiens
ttaacactatttttc

SEQ ID NO: 1585840 - DNA, 15 bp, Homo sapiens
taacactatttttca

SEQ ID NO: 1585841 - DNA, 15 bp, Homo sapiens
aacactatttttcat

SEQ ID NO: 1585842 - DNA, 15 bp, Homo sapiens
acactatttttcata

SEQ ID NO: 1585843 - DNA, 15 bp, Homo sapiens
cactatttttcatac

SEQ ID NO: 1585844 - DNA, 15 bp, Homo sapiens
actatttttcatact

SEQ ID NO: 1585845 - DNA, 15 bp, Homo sapiens
ctatttttcatactg

SEQ ID NO: 1585846 - DNA, 15 bp, Homo sapiens
tatttttcatactgc

SEQ ID NO: 1585847 - DNA, 15 bp, Homo sapiens
atttttcatactgcc

SEQ ID NO: 1585848 - DNA, 15 bp, Homo sapiens
tttttcatactgcca

SEQ ID NO: 1585849 - DNA, 15 bp, Homo sapiens
ttttcatactgccaa

SEQ ID NO: 1585850 - DNA, 15 bp, Homo sapiens
tttcatactgccaag

SEQ ID NO: 1585851 - DNA, 15 bp, Homo sapiens
ttcatactgccaaga

SEQ ID NO: 1585852 - DNA, 15 bp, Homo sapiens
tcatactgccaagaa

SEQ ID NO: 1585853 - DNA, 15 bp, Homo sapiens
catactgccaagaaa

SEQ ID NO: 1585854 - DNA, 15 bp, Homo sapiens
tgccaagaaagaaaa

SEQ ID NO: 1585855 - DNA, 15 bp, Homo sapiens
gccaagaaagaaaac

SEQ ID NO: 1585856 - DNA, 15 bp, Homo sapiens
ccaagaaagaaaaca

SEQ ID NO: 1585857 - DNA, 15 bp, Homo sapiens
caagaaagaaaacac

SEQ ID NO: 1585858 - DNA, 15 bp, Homo sapiens
aagaaagaaaacact

SEQ ID NO: 1585859 - DNA, 15 bp, Homo sapiens
agaaagaaaacacta

SEQ ID NO: 1585860 - DNA, 15 bp, Homo sapiens
gaaagaaaacactac

SEQ ID NO: 1585861 - DNA, 15 bp, Homo sapiens
aaagaaaacactacc

SEQ ID NO: 1585862 - DNA, 15 bp, Homo sapiens
aagaaaacactacca

SEQ ID NO: 1585863 - DNA, 15 bp, Homo sapiens
agaaaacactaccag

SEQ ID NO: 1585864 - DNA, 15 bp, Homo sapiens
gaaaacactaccagt

SEQ ID NO: 1585865 - DNA, 15 bp, Homo sapiens
aaaacactaccagtt

SEQ ID NO: 1585866 - DNA, 15 bp, Homo sapiens
aaacactaccagtta

SEQ ID NO: 1585867 - DNA, 15 bp, Homo sapiens
aacactaccagttat

SEQ ID NO: 1585868 - DNA, 15 bp, Homo sapiens
acactaccagttata

SEQ ID NO: 1585869 - DNA, 15 bp, Homo sapiens
cactaccagttataa

SEQ ID NO: 1585870 - DNA, 15 bp, Homo sapiens
actaccagttataaa

SEQ ID NO: 1585871 - DNA, 15 bp, Homo sapiens
ctaccagttataaat

SEQ ID NO: 1585872 - DNA, 15 bp, Homo sapiens
taccagttataaatg

SEQ ID NO: 1585873 - DNA, 15 bp, Homo sapiens
accagttataaatgt

SEQ ID NO: 1585874 - DNA, 15 bp, Homo sapiens
ccagttataaatgta

SEQ ID NO: 1585875 - DNA, 15 bp, Homo sapiens
cagttataaatgtaa

SEQ ID NO: 1585876 - DNA, 15 bp, Homo sapiens
agttataaatgtaaa

SEQ ID NO: 1585877 - DNA, 15 bp, Homo sapiens
gttataaatgtaaat

SEQ ID NO: 1585878 - DNA, 15 bp, Homo sapiens
ttataaatgtaaatt

SEQ ID NO: 1585879 - DNA, 15 bp, Homo sapiens
tataaatgtaaattg

SEQ ID NO: 1585880 - DNA, 15 bp, Homo sapiens
ataaatgtaaattgc

SEQ ID NO: 1585881 - DNA, 15 bp, Homo sapiens
taaatgtaaattgcc

SEQ ID NO: 1585882 - DNA, 15 bp, Homo sapiens
aaatgtaaattgcca

SEQ ID NO: 1585883 - DNA, 15 bp, Homo sapiens
aatgtaaattgccat

SEQ ID NO: 1585884 - DNA, 15 bp, Homo sapiens
atgtaaattgccatc

SEQ ID NO: 1585885 - DNA, 15 bp, Homo sapiens
tgtaaattgccatca

SEQ ID NO: 1585886 - DNA, 15 bp, Homo sapiens
gtaaattgccatcaa

SEQ ID NO: 1585887 - DNA, 15 bp, Homo sapiens
taaattgccatcaat

SEQ ID NO: 1585888 - DNA, 15 bp, Homo sapiens
aaattgccatcaatt

SEQ ID NO: 1585889 - DNA, 15 bp, Homo sapiens
aattgccatcaattg

SEQ ID NO: 1585890 - DNA, 15 bp, Homo sapiens
attgccatcaattgt

SEQ ID NO: 1585891 - DNA, 15 bp, Homo sapiens
ttgccatcaattgta

SEQ ID NO: 1585892 - DNA, 15 bp, Homo sapiens
tgccatcaattgtaa

SEQ ID NO: 1585893 - DNA, 15 bp, Homo sapiens
gccatcaattgtaat

SEQ ID NO: 1585894 - DNA, 15 bp, Homo sapiens
ccatcaattgtaata

SEQ ID NO: 1585895 - DNA, 15 bp, Homo sapiens
catcaattgtaatac

SEQ ID NO: 1585896 - DNA, 15 bp, Homo sapiens
atcaattgtaataca

SEQ ID NO: 1585897 - DNA, 15 bp, Homo sapiens
tcaattgtaatacat

SEQ ID NO: 1585898 - DNA, 15 bp, Homo sapiens
caattgtaatacatc

SEQ ID NO: 1585899 - DNA, 15 bp, Homo sapiens
aattgtaatacatca

SEQ ID NO: 1585900 - DNA, 15 bp, Homo sapiens
attgtaatacatcaa

SEQ ID NO: 1585901 - DNA, 15 bp, Homo sapiens
ttgtaatacatcaat

SEQ ID NO: 1585902 - DNA, 15 bp, Homo sapiens
tgtaatacatcaatt

SEQ ID NO: 1585903 - DNA, 15 bp, Homo sapiens
gtaatacatcaattt

SEQ ID NO: 1585904 - DNA, 15 bp, Homo sapiens
taatacatcaatttt

SEQ ID NO: 1585905 - DNA, 15 bp, Homo sapiens
aatacatcaatttta

SEQ ID NO: 1585906 - DNA, 15 bp, Homo sapiens
atacatcaattttag

SEQ ID NO: 1585907 - DNA, 15 bp, Homo sapiens
tacatcaattttaga

SEQ ID NO: 1585908 - DNA, 15 bp, Homo sapiens
acatcaattttagag

SEQ ID NO: 1585909 - DNA, 15 bp, Homo sapiens
catcaattttagagc

SEQ ID NO: 1585910 - DNA, 15 bp, Homo sapiens
atcaattttagagct

SEQ ID NO: 1585911 - DNA, 15 bp, Homo sapiens
tcaattttagagcta

SEQ ID NO: 1585912 - DNA, 15 bp, Homo sapiens
caattttagagctat

SEQ ID NO: 1585913 - DNA, 15 bp, Homo sapiens
aattttagagctatt

SEQ ID NO: 1585914 - DNA, 15 bp, Homo sapiens
attttagagctatta

SEQ ID NO: 1585915 - DNA, 15 bp, Homo sapiens
ttttagagctattat

SEQ ID NO: 1585916 - DNA, 15 bp, Homo sapiens
tttagagctattatt

SEQ ID NO: 1585917 - DNA, 15 bp, Homo sapiens
ttagagctattatta

SEQ ID NO: 1585918 - DNA, 15 bp, Homo sapiens
tagagctattattaa

SEQ ID NO: 1585919 - DNA, 15 bp, Homo sapiens
agagctattattaat

SEQ ID NO: 1585920 - DNA, 15 bp, Homo sapiens
gagctattattaata

SEQ ID NO: 1585921 - DNA, 15 bp, Homo sapiens
agctattattaataa

SEQ ID NO: 1585922 - DNA, 15 bp, Homo sapiens
gctattattaataaa

SEQ ID NO: 1585923 - DNA, 15 bp, Homo sapiens
ctattattaataaaa

SEQ ID NO: 1585924 - DNA, 15 bp, Homo sapiens
tattattaataaaat

SEQ ID NO: 1585925 - DNA, 15 bp, Homo sapiens
attattaataaaatg

SEQ ID NO: 1585926 - DNA, 15 bp, Homo sapiens
ttattaataaaatgt

SEQ ID NO: 1585927 - DNA, 15 bp, Homo sapiens
tattaataaaatgtg

SEQ ID NO: 1585928 - DNA, 15 bp, Homo sapiens
attaataaaatgtga

SEQ ID NO: 1585929 - DNA, 15 bp, Homo sapiens
ttaataaaatgtgaa

SEQ ID NO: 1585930 - DNA, 15 bp, Homo sapiens
taataaaatgtgaat

SEQ ID NO: 1585931 - DNA, 15 bp, Homo sapiens
aataaaatgtgaatg

SEQ ID NO: 1585932 - DNA, 15 bp, Homo sapiens
ataaaatgtgaatgt

SEQ ID NO: 1585933 - DNA, 15 bp, Homo sapiens
taaaatgtgaatgtg

SEQ ID NO: 1585934 - DNA, 15 bp, Homo sapiens
aaaatgtgaatgtgc

SEQ ID NO: 1585935 - DNA, 15 bp, Homo sapiens
aaatgtgaatgtgca

SEQ ID NO: 1585936 - DNA, 15 bp, Homo sapiens
aatgtgaatgtgcat

SEQ ID NO: 1585937 - DNA, 15 bp, Homo sapiens
atgtgaatgtgcatc

SEQ ID NO: 1585938 - DNA, 15 bp, Homo sapiens
tgtgaatgtgcatct

SEQ ID NO: 1585939 - DNA, 15 bp, Homo sapiens
gtgaatgtgcatctt

SEQ ID NO: 1585940 - DNA, 15 bp, Homo sapiens
tgaatgtgcatctta

SEQ ID NO: 1585941 - DNA, 15 bp, Homo sapiens
gaatgtgcatcttag

SEQ ID NO: 1585942 - DNA, 15 bp, Homo sapiens
aatgtgcatcttaga

SEQ ID NO: 1585943 - DNA, 15 bp, Homo sapiens
atgtgcatcttagag

SEQ ID NO: 1585944 - DNA, 15 bp, Homo sapiens
tgtgcatcttagagc

SEQ ID NO: 1585945 - DNA, 15 bp, Homo sapiens
gtgcatcttagagca

SEQ ID NO: 1585946 - DNA, 15 bp, Homo sapiens
tgcatcttagagcaa

SEQ ID NO: 1585947 - DNA, 15 bp, Homo sapiens
gcatcttagagcaat

SEQ ID NO: 1585948 - DNA, 15 bp, Homo sapiens
catcttagagcaatg

SEQ ID NO: 1585949 - DNA, 15 bp, Homo sapiens
atcttagagcaatga

SEQ ID NO: 1585950 - DNA, 15 bp, Homo sapiens
tcttagagcaatgaa

SEQ ID NO: 1585951 - DNA, 15 bp, Homo sapiens
cttagagcaatgaaa

SEQ ID NO: 1585952 - DNA, 15 bp, Homo sapiens
ttagagcaatgaaat

SEQ ID NO: 1585953 - DNA, 15 bp, Homo sapiens
tagagcaatgaaata

SEQ ID NO: 1585954 - DNA, 15 bp, Homo sapiens
agagcaatgaaatat

SEQ ID NO: 1585955 - DNA, 15 bp, Homo sapiens
gagcaatgaaatata

SEQ ID NO: 1585956 - DNA, 15 bp, Homo sapiens
agcaatgaaatatag

SEQ ID NO: 1585957 - DNA, 15 bp, Homo sapiens
gcaatgaaatatagt

SEQ ID NO: 1585958 - DNA, 15 bp, Homo sapiens
caatgaaatatagta

SEQ ID NO: 1585959 - DNA, 15 bp, Homo sapiens
aatgaaatatagtac

SEQ ID NO: 1585960 - DNA, 15 bp, Homo sapiens
atgaaatatagtact

SEQ ID NO: 1585961 - DNA, 15 bp, Homo sapiens
tgaaatatagtacta

SEQ ID NO: 1585962 - DNA, 15 bp, Homo sapiens
gaaatatagtactat

SEQ ID NO: 1585963 - DNA, 15 bp, Homo sapiens
aaatatagtactata

SEQ ID NO: 1585964 - DNA, 15 bp, Homo sapiens
aatatagtactatat

SEQ ID NO: 1585965 - DNA, 15 bp, Homo sapiens
atatagtactatata

SEQ ID NO: 1585966 - DNA, 15 bp, Homo sapiens
tatagtactatatat

SEQ ID NO: 1585967 - DNA, 15 bp, Homo sapiens
atagtactatatatt

SEQ ID NO: 1585968 - DNA, 15 bp, Homo sapiens
tagtactatatattt

SEQ ID NO: 1585969 - DNA, 15 bp, Homo sapiens
agtactatatatttg

SEQ ID NO: 1585970 - DNA, 15 bp, Homo sapiens
gtactatatatttga

SEQ ID NO: 1585971 - DNA, 15 bp, Homo sapiens
tactatatatttgat

SEQ ID NO: 1585972 - DNA, 15 bp, Homo sapiens
actatatatttgatg

SEQ ID NO: 1585973 - DNA, 15 bp, Homo sapiens
ctatatatttgatga

SEQ ID NO: 1585974 - DNA, 15 bp, Homo sapiens
tatatatttgatgac

SEQ ID NO: 1585975 - DNA, 15 bp, Homo sapiens
atatatttgatgacc

SEQ ID NO: 1585976 - DNA, 15 bp, Homo sapiens
tatatttgatgacct

SEQ ID NO: 1585977 - DNA, 15 bp, Homo sapiens
atatttgatgacctt

SEQ ID NO: 1585978 - DNA, 15 bp, Homo sapiens
tatttgatgaccttt

SEQ ID NO: 1585979 - DNA, 15 bp, Homo sapiens
atttgatgacctttt

SEQ ID NO: 1585980 - DNA, 15 bp, Homo sapiens
tttgatgaccttttc

SEQ ID NO: 1585981 - DNA, 15 bp, Homo sapiens
ttgatgaccttttct

SEQ ID NO: 1585982 - DNA, 15 bp, Homo sapiens
tgatgaccttttctg

SEQ ID NO: 1585983 - DNA, 15 bp, Homo sapiens
gatgaccttttctgc

SEQ ID NO: 1585984 - DNA, 15 bp, Homo sapiens
atgaccttttctgcc

SEQ ID NO: 1585985 - DNA, 15 bp, Homo sapiens
tgaccttttctgccc

SEQ ID NO: 1585986 - DNA, 15 bp, Homo sapiens
gaccttttctgccct

SEQ ID NO: 1585987 - DNA, 15 bp, Homo sapiens
accttttctgccctg

SEQ ID NO: 1585988 - DNA, 15 bp, Homo sapiens
ccttttctgccctgt

SEQ ID NO: 1585989 - DNA, 15 bp, Homo sapiens
cttttctgccctgtg

SEQ ID NO: 1585990 - DNA, 15 bp, Homo sapiens
ttttctgccctgtga

SEQ ID NO: 1585991 - DNA, 15 bp, Homo sapiens
tttctgccctgtgat

SEQ ID NO: 1585992 - DNA, 15 bp, Homo sapiens
ttctgccctgtgata

SEQ ID NO: 1585993 - DNA, 15 bp, Homo sapiens
tctgccctgtgatat

SEQ ID NO: 1585994 - DNA, 15 bp, Homo sapiens
ctgccctgtgatatt

SEQ ID NO: 1585995 - DNA, 15 bp, Homo sapiens
tgccctgtgatattc

SEQ ID NO: 1585996 - DNA, 15 bp, Homo sapiens
gccctgtgatattca

SEQ ID NO: 1585997 - DNA, 15 bp, Homo sapiens
ccctgtgatattcag

SEQ ID NO: 1585998 - DNA, 15 bp, Homo sapiens
cctgtgatattcaga

SEQ ID NO: 1585999 - DNA, 15 bp, Homo sapiens
ctgtgatattcagaa

SEQ ID NO: 1586000 - DNA, 15 bp, Homo sapiens
tgtgatattcagaaa

SEQ ID NO: 1586001 - DNA, 15 bp, Homo sapiens
gtgatattcagaaag

SEQ ID NO: 1586002 - DNA, 15 bp, Homo sapiens
tgatattcagaaagt

SEQ ID NO: 1586003 - DNA, 15 bp, Homo sapiens
gatattcagaaagtg

SEQ ID NO: 1586004 - DNA, 15 bp, Homo sapiens
atattcagaaagtga

SEQ ID NO: 1586005 - DNA, 15 bp, Homo sapiens
tattcagaaagtgaa

SEQ ID NO: 1586006 - DNA, 15 bp, Homo sapiens
attcagaaagtgaaa

SEQ ID NO: 1586007 - DNA, 15 bp, Homo sapiens
ttcagaaagtgaaag

SEQ ID NO: 1586008 - DNA, 15 bp, Homo sapiens
tcagaaagtgaaagt

SEQ ID NO: 1586009 - DNA, 15 bp, Homo sapiens
cagaaagtgaaagtt

SEQ ID NO: 1586010 - DNA, 15 bp, Homo sapiens
agaaagtgaaagtta

SEQ ID NO: 1586011 - DNA, 15 bp, Homo sapiens
gaaagtgaaagttaa

SEQ ID NO: 1586012 - DNA, 15 bp, Homo sapiens
aaagtgaaagttaaa

SEQ ID NO: 1586013 - DNA, 15 bp, Homo sapiens
aagtgaaagttaaat

SEQ ID NO: 1586014 - DNA, 15 bp, Homo sapiens
agtgaaagttaaata

SEQ ID NO: 1586015 - DNA, 15 bp, Homo sapiens
gtgaaagttaaatat

SEQ ID NO: 1586016 - DNA, 15 bp, Homo sapiens
tgaaagttaaatatg

SEQ ID NO: 1586017 - DNA, 15 bp, Homo sapiens
gaaagttaaatatgg

SEQ ID NO: 1586018 - DNA, 15 bp, Homo sapiens
aaagttaaatatggg

SEQ ID NO: 1586019 - DNA, 15 bp, Homo sapiens
aagttaaatatgggc

SEQ ID NO: 1586020 - DNA, 15 bp, Homo sapiens
agttaaatatgggct

SEQ ID NO: 1586021 - DNA, 15 bp, Homo sapiens
gttaaatatgggctg

SEQ ID NO: 1586022 - DNA, 15 bp, Homo sapiens
ttaaatatgggctga

SEQ ID NO: 1586023 - DNA, 15 bp, Homo sapiens
taaatatgggctgag

SEQ ID NO: 1586024 - DNA, 15 bp, Homo sapiens
aaatatgggctgagc

SEQ ID NO: 1586025 - DNA, 15 bp, Homo sapiens
aatatgggctgagca

SEQ ID NO: 1586026 - DNA, 15 bp, Homo sapiens
atatgggctgagcat

SEQ ID NO: 1586027 - DNA, 15 bp, Homo sapiens
tatgggctgagcatg

SEQ ID NO: 1586028 - DNA, 15 bp, Homo sapiens
atgggctgagcatgg

SEQ ID NO: 1586029 - DNA, 15 bp, Homo sapiens
tgggctgagcatggt

SEQ ID NO: 1586030 - DNA, 15 bp, Homo sapiens
gggctgagcatggtg

SEQ ID NO: 1586031 - DNA, 15 bp, Homo sapiens
ggctgagcatggtgg

SEQ ID NO: 1586032 - DNA, 15 bp, Homo sapiens
gctgagcatggtggc

SEQ ID NO: 1586033 - DNA, 15 bp, Homo sapiens
ctgagcatggtggct

SEQ ID NO: 1586034 - DNA, 15 bp, Homo sapiens
tgagcatggtggctc

SEQ ID NO: 1586035 - DNA, 15 bp, Homo sapiens
gagcatggtggctca

SEQ ID NO: 1586036 - DNA, 15 bp, Homo sapiens
agcatggtggctcac

SEQ ID NO: 1586037 - DNA, 15 bp, Homo sapiens
acctgtaatcccagt

SEQ ID NO: 1586038 - DNA, 15 bp, Homo sapiens
ctgtaatcccagtac

SEQ ID NO: 1586039 - DNA, 15 bp, Homo sapiens
tgtaatcccagtact

SEQ ID NO: 1586040 - DNA, 15 bp, Homo sapiens
gtaatcccagtactt

SEQ ID NO: 1586041 - DNA, 15 bp, Homo sapiens
taatcccagtacttt

SEQ ID NO: 1586042 - DNA, 15 bp, Homo sapiens
aatcccagtactttg

SEQ ID NO: 1586043 - DNA, 15 bp, Homo sapiens
atcccagtactttgg

SEQ ID NO: 1586044 - DNA, 15 bp, Homo sapiens
tcccagtactttggg

SEQ ID NO: 1586045 - DNA, 15 bp, Homo sapiens
cccagtactttggga

SEQ ID NO: 1586046 - DNA, 15 bp, Homo sapiens
ccagtactttgggaa

SEQ ID NO: 1586047 - DNA, 15 bp, Homo sapiens
cagtactttgggaag

SEQ ID NO: 1586048 - DNA, 15 bp, Homo sapiens
agtactttgggaagt

SEQ ID NO: 1586049 - DNA, 15 bp, Homo sapiens
gtactttgggaagtc

SEQ ID NO: 1586050 - DNA, 15 bp, Homo sapiens
tactttgggaagtca

SEQ ID NO: 1586051 - DNA, 15 bp, Homo sapiens
actttgggaagtcaa

SEQ ID NO: 1586052 - DNA, 15 bp, Homo sapiens
ctttgggaagtcaag

SEQ ID NO: 1586053 - DNA, 15 bp, Homo sapiens
tttgggaagtcaaga

SEQ ID NO: 1586054 - DNA, 15 bp, Homo sapiens
ttgggaagtcaagac

SEQ ID NO: 1586055 - DNA, 15 bp, Homo sapiens
tgggaagtcaagacg

SEQ ID NO: 1586056 - DNA, 15 bp, Homo sapiens
gggaagtcaagacgg

SEQ ID NO: 1586057 - DNA, 15 bp, Homo sapiens
ggaagtcaagacggg

SEQ ID NO: 1586058 - DNA, 15 bp, Homo sapiens
gaagtcaagacggga

SEQ ID NO: 1586059 - DNA, 15 bp, Homo sapiens
aagtcaagacgggag

SEQ ID NO: 1586060 - DNA, 15 bp, Homo sapiens
agtcaagacgggagg

SEQ ID NO: 1586061 - DNA, 15 bp, Homo sapiens
gtcaagacgggaggc

SEQ ID NO: 1586062 - DNA, 15 bp, Homo sapiens
tcaagacgggaggct

SEQ ID NO: 1586063 - DNA, 15 bp, Homo sapiens
caagacgggaggctg

SEQ ID NO: 1586064 - DNA, 15 bp, Homo sapiens
aagacgggaggctgg

SEQ ID NO: 1586065 - DNA, 15 bp, Homo sapiens
agacgggaggctggc

SEQ ID NO: 1586066 - DNA, 15 bp, Homo sapiens
gacgggaggctggct

SEQ ID NO: 1586067 - DNA, 15 bp, Homo sapiens
acgggaggctggctt

SEQ ID NO: 1586068 - DNA, 15 bp, Homo sapiens
cgggaggctggcttg

SEQ ID NO: 1586069 - DNA, 15 bp, Homo sapiens
gggaggctggcttga

SEQ ID NO: 1586070 - DNA, 15 bp, Homo sapiens
ggaggctggcttgaa

SEQ ID NO: 1586071 - DNA, 15 bp, Homo sapiens
gaggctggcttgaac

SEQ ID NO: 1586072 - DNA, 15 bp, Homo sapiens
aggctggcttgaacc

SEQ ID NO: 1586073 - DNA, 15 bp, Homo sapiens
ggctggcttgaaccc

SEQ ID NO: 1586074 - DNA, 15 bp, Homo sapiens
gctggcttgaaccca

SEQ ID NO: 1586075 - DNA, 15 bp, Homo sapiens
ctggcttgaacccag

SEQ ID NO: 1586076 - DNA, 15 bp, Homo sapiens
cttgaacccaggagt

SEQ ID NO: 1586077 - DNA, 15 bp, Homo sapiens
tgaacccaggagttc

SEQ ID NO: 1586078 - DNA, 15 bp, Homo sapiens
caagaccagcctagg

SEQ ID NO: 1586079 - DNA, 15 bp, Homo sapiens
aagaccagcctaggc

SEQ ID NO: 1586080 - DNA, 15 bp, Homo sapiens
accagcctaggcaat

SEQ ID NO: 1586081 - DNA, 15 bp, Homo sapiens
ccagcctaggcaatg

SEQ ID NO: 1586082 - DNA, 15 bp, Homo sapiens
cagcctaggcaatgt

SEQ ID NO: 1586083 - DNA, 15 bp, Homo sapiens
agcctaggcaatgta

SEQ ID NO: 1586084 - DNA, 15 bp, Homo sapiens
gcctaggcaatgtag

SEQ ID NO: 1586085 - DNA, 15 bp, Homo sapiens
cctaggcaatgtagc

SEQ ID NO: 1586086 - DNA, 15 bp, Homo sapiens
ctaggcaatgtagcg

SEQ ID NO: 1586087 - DNA, 15 bp, Homo sapiens
taggcaatgtagcga

SEQ ID NO: 1586088 - DNA, 15 bp, Homo sapiens
aggcaatgtagcgag

SEQ ID NO: 1586089 - DNA, 15 bp, Homo sapiens
caatgtagcgagacg

SEQ ID NO: 1586090 - DNA, 15 bp, Homo sapiens
aatgtagcgagacgc

SEQ ID NO: 1586091 - DNA, 15 bp, Homo sapiens
atgtagcgagacgcc

SEQ ID NO: 1586092 - DNA, 15 bp, Homo sapiens
tgtagcgagacgcca

SEQ ID NO: 1586093 - DNA, 15 bp, Homo sapiens
gtagcgagacgccat

SEQ ID NO: 1586094 - DNA, 15 bp, Homo sapiens
tagcgagacgccatc

SEQ ID NO: 1586095 - DNA, 15 bp, Homo sapiens
agcgagacgccatct

SEQ ID NO: 1586096 - DNA, 15 bp, Homo sapiens
gcgagacgccatctc

SEQ ID NO: 1586097 - DNA, 15 bp, Homo sapiens
cgagacgccatctca

SEQ ID NO: 1586098 - DNA, 15 bp, Homo sapiens
gagacgccatctcaa

SEQ ID NO: 1586099 - DNA, 15 bp, Homo sapiens
agacgccatctcaaa

SEQ ID NO: 1586100 - DNA, 15 bp, Homo sapiens
gacgccatctcaaaa

SEQ ID NO: 1586101 - DNA, 15 bp, Homo sapiens
acgccatctcaaaat

SEQ ID NO: 1586102 - DNA, 15 bp, Homo sapiens
cgccatctcaaaata

SEQ ID NO: 1586103 - DNA, 15 bp, Homo sapiens
gccatctcaaaatat

SEQ ID NO: 1586104 - DNA, 15 bp, Homo sapiens
ccatctcaaaatatt

SEQ ID NO: 1586105 - DNA, 15 bp, Homo sapiens
catctcaaaatatta

SEQ ID NO: 1586106 - DNA, 15 bp, Homo sapiens
atctcaaaatattaa

SEQ ID NO: 1586107 - DNA, 15 bp, Homo sapiens
tctcaaaatattaaa

SEQ ID NO: 1586108 - DNA, 15 bp, Homo sapiens
ctcaaaatattaaaa

SEQ ID NO: 1586109 - DNA, 15 bp, Homo sapiens
tcaaaatattaaaaa

SEQ ID NO: 1586110 - DNA, 15 bp, Homo sapiens
caaaatattaaaaat

SEQ ID NO: 1586111 - DNA, 15 bp, Homo sapiens
aaaatattaaaaata

SEQ ID NO: 1586112 - DNA, 15 bp, Homo sapiens
aaatattaaaaataa

SEQ ID NO: 1586113 - DNA, 15 bp, Homo sapiens
aatattaaaaataag

SEQ ID NO: 1586114 - DNA, 15 bp, Homo sapiens
atattaaaaataagt

SEQ ID NO: 1586115 - DNA, 15 bp, Homo sapiens
tattaaaaataagta

SEQ ID NO: 1586116 - DNA, 15 bp, Homo sapiens
attaaaaataagtaa

SEQ ID NO: 1586117 - DNA, 15 bp, Homo sapiens
ttaaaaataagtaaa

SEQ ID NO: 1586118 - DNA, 15 bp, Homo sapiens
taaaaataagtaaat

SEQ ID NO: 1586119 - DNA, 15 bp, Homo sapiens
aaaaataagtaaata

SEQ ID NO: 1586120 - DNA, 15 bp, Homo sapiens
aaaataagtaaataa

SEQ ID NO: 1586121 - DNA, 15 bp, Homo sapiens
aaataagtaaataag

SEQ ID NO: 1586122 - DNA, 15 bp, Homo sapiens
aataagtaaataagt

SEQ ID NO: 1586123 - DNA, 15 bp, Homo sapiens
ataagtaaataagta

SEQ ID NO: 1586124 - DNA, 15 bp, Homo sapiens
taagtaaataagtaa

SEQ ID NO: 1586125 - DNA, 15 bp, Homo sapiens
aagtaaataagtaaa

SEQ ID NO: 1586126 - DNA, 15 bp, Homo sapiens
agtaaataagtaaat

SEQ ID NO: 1586127 - DNA, 15 bp, Homo sapiens
gtaaataagtaaata

SEQ ID NO: 1586128 - DNA, 15 bp, Homo sapiens
aaataagtaaataaa

SEQ ID NO: 1586129 - DNA, 15 bp, Homo sapiens
aataagtaaataaaa

SEQ ID NO: 1586130 - DNA, 15 bp, Homo sapiens
ataagtaaataaaaa

SEQ ID NO: 1586131 - DNA, 15 bp, Homo sapiens
taagtaaataaaaag

SEQ ID NO: 1586132 - DNA, 15 bp, Homo sapiens
aagtaaataaaaaga

SEQ ID NO: 1586133 - DNA, 15 bp, Homo sapiens
agtaaataaaaagaa

SEQ ID NO: 1586134 - DNA, 15 bp, Homo sapiens
gtaaataaaaagaag

SEQ ID NO: 1586135 - DNA, 15 bp, Homo sapiens
taaataaaaagaagg

SEQ ID NO: 1586136 - DNA, 15 bp, Homo sapiens
aaataaaaagaaggt

SEQ ID NO: 1586137 - DNA, 15 bp, Homo sapiens
aataaaaagaaggtt

SEQ ID NO: 1586138 - DNA, 15 bp, Homo sapiens
ataaaaagaaggtta

SEQ ID NO: 1586139 - DNA, 15 bp, Homo sapiens
taaaaagaaggttaa

SEQ ID NO: 1586140 - DNA, 15 bp, Homo sapiens
aaaaagaaggttaag

SEQ ID NO: 1586141 - DNA, 15 bp, Homo sapiens
aaaagaaggttaagt

SEQ ID NO: 1586142 - DNA, 15 bp, Homo sapiens
aaagaaggttaagta

SEQ ID NO: 1586143 - DNA, 15 bp, Homo sapiens
aagaaggttaagtat

SEQ ID NO: 1586144 - DNA, 15 bp, Homo sapiens
agaaggttaagtata

SEQ ID NO: 1586145 - DNA, 15 bp, Homo sapiens
gaaggttaagtatac

SEQ ID NO: 1586146 - DNA, 15 bp, Homo sapiens
aaggttaagtataca

SEQ ID NO: 1586147 - DNA, 15 bp, Homo sapiens
aggttaagtatacaa

SEQ ID NO: 1586148 - DNA, 15 bp, Homo sapiens
ggttaagtatacaaa

SEQ ID NO: 1586149 - DNA, 15 bp, Homo sapiens
gttaagtatacaaat

SEQ ID NO: 1586150 - DNA, 15 bp, Homo sapiens
ttaagtatacaaatg

SEQ ID NO: 1586151 - DNA, 15 bp, Homo sapiens
taagtatacaaatgt

SEQ ID NO: 1586152 - DNA, 15 bp, Homo sapiens
aagtatacaaatgta

SEQ ID NO: 1586153 - DNA, 15 bp, Homo sapiens
agtatacaaatgtat

SEQ ID NO: 1586154 - DNA, 15 bp, Homo sapiens
gtatacaaatgtatt

SEQ ID NO: 1586155 - DNA, 15 bp, Homo sapiens
tatacaaatgtattt

SEQ ID NO: 1586156 - DNA, 15 bp, Homo sapiens
atacaaatgtatttc

SEQ ID NO: 1586157 - DNA, 15 bp, Homo sapiens
tacaaatgtatttcc

SEQ ID NO: 1586158 - DNA, 15 bp, Homo sapiens
acaaatgtatttcct

SEQ ID NO: 1586159 - DNA, 15 bp, Homo sapiens
caaatgtatttcctt

SEQ ID NO: 1586160 - DNA, 15 bp, Homo sapiens
aaatgtatttccttt

SEQ ID NO: 1586161 - DNA, 15 bp, Homo sapiens
aatgtatttcctttg

SEQ ID NO: 1586162 - DNA, 15 bp, Homo sapiens
atgtatttcctttgt

SEQ ID NO: 1586163 - DNA, 15 bp, Homo sapiens
tgtatttcctttgtt

SEQ ID NO: 1586164 - DNA, 15 bp, Homo sapiens
gtatttcctttgttg

SEQ ID NO: 1586165 - DNA, 15 bp, Homo sapiens
tatttcctttgttgt

SEQ ID NO: 1586166 - DNA, 15 bp, Homo sapiens
atttcctttgttgtg

SEQ ID NO: 1586167 - DNA, 15 bp, Homo sapiens
tttcctttgttgtga

SEQ ID NO: 1586168 - DNA, 15 bp, Homo sapiens
ttcctttgttgtgaa

SEQ ID NO: 1586169 - DNA, 15 bp, Homo sapiens
tcctttgttgtgaat

SEQ ID NO: 1586170 - DNA, 15 bp, Homo sapiens
cctttgttgtgaatt

SEQ ID NO: 1586171 - DNA, 15 bp, Homo sapiens
ctttgttgtgaattt

SEQ ID NO: 1586172 - DNA, 15 bp, Homo sapiens
tttgttgtgaattta

SEQ ID NO: 1586173 - DNA, 15 bp, Homo sapiens
ttgttgtgaatttat

SEQ ID NO: 1586174 - DNA, 15 bp, Homo sapiens
tgttgtgaatttatt

SEQ ID NO: 1586175 - DNA, 15 bp, Homo sapiens
gttgtgaatttattt

SEQ ID NO: 1586176 - DNA, 15 bp, Homo sapiens
ttgtgaatttatttc

SEQ ID NO: 1586177 - DNA, 15 bp, Homo sapiens
tgtgaatttatttca

SEQ ID NO: 1586178 - DNA, 15 bp, Homo sapiens
gtgaatttatttcaa

SEQ ID NO: 1586179 - DNA, 15 bp, Homo sapiens
tgaatttatttcaat

SEQ ID NO: 1586180 - DNA, 15 bp, Homo sapiens
gaatttatttcaatt

SEQ ID NO: 1586181 - DNA, 15 bp, Homo sapiens
aatttatttcaattt

SEQ ID NO: 1586182 - DNA, 15 bp, Homo sapiens
atttatttcaatttt

SEQ ID NO: 1586183 - DNA, 15 bp, Homo sapiens
tttatttcaatttta

SEQ ID NO: 1586184 - DNA, 15 bp, Homo sapiens
ttatttcaattttat

SEQ ID NO: 1586185 - DNA, 15 bp, Homo sapiens
tatttcaattttata

SEQ ID NO: 1586186 - DNA, 15 bp, Homo sapiens
atttcaattttatag

SEQ ID NO: 1586187 - DNA, 15 bp, Homo sapiens
tttcaattttatagt

SEQ ID NO: 1586188 - DNA, 15 bp, Homo sapiens
ttcaattttatagtg

SEQ ID NO: 1586189 - DNA, 15 bp, Homo sapiens
tcaattttatagtga

SEQ ID NO: 1586190 - DNA, 15 bp, Homo sapiens
caattttatagtgat

SEQ ID NO: 1586191 - DNA, 15 bp, Homo sapiens
aattttatagtgatt

SEQ ID NO: 1586192 - DNA, 15 bp, Homo sapiens
attttatagtgattt

SEQ ID NO: 1586193 - DNA, 15 bp, Homo sapiens
ttttatagtgatttt

SEQ ID NO: 1586194 - DNA, 15 bp, Homo sapiens
tttatagtgattttt

SEQ ID NO: 1586195 - DNA, 15 bp, Homo sapiens
ttatagtgatttttt

SEQ ID NO: 1586196 - DNA, 15 bp, Homo sapiens
tatagtgattttttt

SEQ ID NO: 1586197 - DNA, 15 bp, Homo sapiens
atagtgatttttttt

SEQ ID NO: 1586198 - DNA, 15 bp, Homo sapiens
tagtgattttttttt

SEQ ID NO: 1586199 - DNA, 15 bp, Homo sapiens
agtgatttttttttt

SEQ ID NO: 1586200 - DNA, 15 bp, Homo sapiens
gattttttttttttg

SEQ ID NO: 1586201 - DNA, 15 bp, Homo sapiens
attttttttttttga

SEQ ID NO: 1586202 - DNA, 15 bp, Homo sapiens
tttttttgagacgaa

SEQ ID NO: 1586203 - DNA, 15 bp, Homo sapiens
ttttttgagacgaag

SEQ ID NO: 1586204 - DNA, 15 bp, Homo sapiens
tttttgagacgaagt

SEQ ID NO: 1586205 - DNA, 15 bp, Homo sapiens
ttttgagacgaagtc

SEQ ID NO: 1586206 - DNA, 15 bp, Homo sapiens
tttgagacgaagtct

SEQ ID NO: 1586207 - DNA, 15 bp, Homo sapiens
ttgagacgaagtctc

SEQ ID NO: 1586208 - DNA, 15 bp, Homo sapiens
tgagacgaagtctca

SEQ ID NO: 1586209 - DNA, 15 bp, Homo sapiens
gagacgaagtctcac

SEQ ID NO: 1586210 - DNA, 15 bp, Homo sapiens
agacgaagtctcact

SEQ ID NO: 1586211 - DNA, 15 bp, Homo sapiens
gacgaagtctcactc

SEQ ID NO: 1586212 - DNA, 15 bp, Homo sapiens
acgaagtctcactct

SEQ ID NO: 1586213 - DNA, 15 bp, Homo sapiens
cgaagtctcactctt

SEQ ID NO: 1586214 - DNA, 15 bp, Homo sapiens
gaagtctcactcttg

SEQ ID NO: 1586215 - DNA, 15 bp, Homo sapiens
aagtctcactcttgt

SEQ ID NO: 1586216 - DNA, 15 bp, Homo sapiens
agtctcactcttgtc

SEQ ID NO: 1586217 - DNA, 15 bp, Homo sapiens
gtctcactcttgtcc

SEQ ID NO: 1586218 - DNA, 15 bp, Homo sapiens
tctcactcttgtccc

SEQ ID NO: 1586219 - DNA, 15 bp, Homo sapiens
ctcactcttgtcccc

SEQ ID NO: 1586220 - DNA, 15 bp, Homo sapiens
tcactcttgtccccc

SEQ ID NO: 1586221 - DNA, 15 bp, Homo sapiens
cactcttgtccccca

SEQ ID NO: 1586222 - DNA, 15 bp, Homo sapiens
actcttgtcccccag

SEQ ID NO: 1586223 - DNA, 15 bp, Homo sapiens
caggctggagtgcga

SEQ ID NO: 1586224 - DNA, 15 bp, Homo sapiens
aggctggagtgcgat

SEQ ID NO: 1586225 - DNA, 15 bp, Homo sapiens
ggctggagtgcgatg

SEQ ID NO: 1586226 - DNA, 15 bp, Homo sapiens
gctggagtgcgatgg

SEQ ID NO: 1586227 - DNA, 15 bp, Homo sapiens
ctggagtgcgatggc

SEQ ID NO: 1586228 - DNA, 15 bp, Homo sapiens
tggagtgcgatggcg

SEQ ID NO: 1586229 - DNA, 15 bp, Homo sapiens
ggagtgcgatggcgt

SEQ ID NO: 1586230 - DNA, 15 bp, Homo sapiens
gagtgcgatggcgtg

SEQ ID NO: 1586231 - DNA, 15 bp, Homo sapiens
agtgcgatggcgtga

SEQ ID NO: 1586232 - DNA, 15 bp, Homo sapiens
gtgcgatggcgtgat

SEQ ID NO: 1586233 - DNA, 15 bp, Homo sapiens
tgcgatggcgtgatc

SEQ ID NO: 1586234 - DNA, 15 bp, Homo sapiens
gcgatggcgtgatct

SEQ ID NO: 1586235 - DNA, 15 bp, Homo sapiens
cgatggcgtgatctc

SEQ ID NO: 1586236 - DNA, 15 bp, Homo sapiens
gatggcgtgatctca

SEQ ID NO: 1586237 - DNA, 15 bp, Homo sapiens
atggcgtgatctcag

SEQ ID NO: 1586238 - DNA, 15 bp, Homo sapiens
tggcgtgatctcagc

SEQ ID NO: 1586239 - DNA, 15 bp, Homo sapiens
ggcgtgatctcagct

SEQ ID NO: 1586240 - DNA, 15 bp, Homo sapiens
gcgtgatctcagctc

SEQ ID NO: 1586241 - DNA, 15 bp, Homo sapiens
cgtgatctcagctca

SEQ ID NO: 1586242 - DNA, 15 bp, Homo sapiens
caggttcaagctata

SEQ ID NO: 1586243 - DNA, 15 bp, Homo sapiens
aggttcaagctatac

SEQ ID NO: 1586244 - DNA, 15 bp, Homo sapiens
ggttcaagctatact

SEQ ID NO: 1586245 - DNA, 15 bp, Homo sapiens
gttcaagctatactc

SEQ ID NO: 1586246 - DNA, 15 bp, Homo sapiens
ttcaagctatactcc

SEQ ID NO: 1586247 - DNA, 15 bp, Homo sapiens
tcaagctatactcct

SEQ ID NO: 1586248 - DNA, 15 bp, Homo sapiens
caagctatactcctg

SEQ ID NO: 1586249 - DNA, 15 bp, Homo sapiens
aagctatactcctgc

SEQ ID NO: 1586250 - DNA, 15 bp, Homo sapiens
agctatactcctgcc

SEQ ID NO: 1586251 - DNA, 15 bp, Homo sapiens
gctatactcctgcct

SEQ ID NO: 1586252 - DNA, 15 bp, Homo sapiens
ctatactcctgcctt

SEQ ID NO: 1586253 - DNA, 15 bp, Homo sapiens
tatactcctgccttg

SEQ ID NO: 1586254 - DNA, 15 bp, Homo sapiens
atactcctgccttgg

SEQ ID NO: 1586255 - DNA, 15 bp, Homo sapiens
tactcctgccttggc

SEQ ID NO: 1586256 - DNA, 15 bp, Homo sapiens
actcctgccttggcc

SEQ ID NO: 1586257 - DNA, 15 bp, Homo sapiens
tcctgccttggcccc

SEQ ID NO: 1586258 - DNA, 15 bp, Homo sapiens
cctgccttggccccc

SEQ ID NO: 1586259 - DNA, 15 bp, Homo sapiens
ctgccttggcccccc

SEQ ID NO: 1586260 - DNA, 15 bp, Homo sapiens
tgccttggccccccg

SEQ ID NO: 1586261 - DNA, 15 bp, Homo sapiens
gccttggccccccga

SEQ ID NO: 1586262 - DNA, 15 bp, Homo sapiens
ccttggccccccgag

SEQ ID NO: 1586263 - DNA, 15 bp, Homo sapiens
cttggccccccgagt

SEQ ID NO: 1586264 - DNA, 15 bp, Homo sapiens
ttggccccccgagta

SEQ ID NO: 1586265 - DNA, 15 bp, Homo sapiens
tggccccccgagtag

SEQ ID NO: 1586266 - DNA, 15 bp, Homo sapiens
ggccccccgagtagc

SEQ ID NO: 1586267 - DNA, 15 bp, Homo sapiens
gccccccgagtagct

SEQ ID NO: 1586268 - DNA, 15 bp, Homo sapiens
ccccccgagtagctg

SEQ ID NO: 1586269 - DNA, 15 bp, Homo sapiens
cccccgagtagctgg

SEQ ID NO: 1586270 - DNA, 15 bp, Homo sapiens
ccccgagtagctggg

SEQ ID NO: 1586271 - DNA, 15 bp, Homo sapiens
ttacaggcgcctgct

SEQ ID NO: 1586272 - DNA, 15 bp, Homo sapiens
tacaggcgcctgcta

SEQ ID NO: 1586273 - DNA, 15 bp, Homo sapiens
acaggcgcctgctac

SEQ ID NO: 1586274 - DNA, 15 bp, Homo sapiens
caggcgcctgctacc

SEQ ID NO: 1586275 - DNA, 15 bp, Homo sapiens
aggcgcctgctacca

SEQ ID NO: 1586276 - DNA, 15 bp, Homo sapiens
ggcgcctgctaccat

SEQ ID NO: 1586277 - DNA, 15 bp, Homo sapiens
gcgcctgctaccatg

SEQ ID NO: 1586278 - DNA, 15 bp, Homo sapiens
cgcctgctaccatgc

SEQ ID NO: 1586279 - DNA, 15 bp, Homo sapiens
gcctgctaccatgcc

SEQ ID NO: 1586280 - DNA, 15 bp, Homo sapiens
cctgctaccatgcct

SEQ ID NO: 1586281 - DNA, 15 bp, Homo sapiens
ggtctagaactcttg

SEQ ID NO: 1586282 - DNA, 15 bp, Homo sapiens
gtctagaactcttga

SEQ ID NO: 1586283 - DNA, 15 bp, Homo sapiens
tctagaactcttgac

SEQ ID NO: 1586284 - DNA, 15 bp, Homo sapiens
ctagaactcttgacc

SEQ ID NO: 1586285 - DNA, 15 bp, Homo sapiens
tagaactcttgacct

SEQ ID NO: 1586286 - DNA, 15 bp, Homo sapiens
agaactcttgacctc

SEQ ID NO: 1586287 - DNA, 15 bp, Homo sapiens
gaactcttgacctct

SEQ ID NO: 1586288 - DNA, 15 bp, Homo sapiens
aactcttgacctctg

SEQ ID NO: 1586289 - DNA, 15 bp, Homo sapiens
actcttgacctctgg

SEQ ID NO: 1586290 - DNA, 15 bp, Homo sapiens
ctcttgacctctggt

SEQ ID NO: 1586291 - DNA, 15 bp, Homo sapiens
tcttgacctctggtg

SEQ ID NO: 1586292 - DNA, 15 bp, Homo sapiens
cttgacctctggtga

SEQ ID NO: 1586293 - DNA, 15 bp, Homo sapiens
ttgacctctggtgat

SEQ ID NO: 1586294 - DNA, 15 bp, Homo sapiens
tccacccgcctcgga

SEQ ID NO: 1586295 - DNA, 15 bp, Homo sapiens
ccacccgcctcggac

SEQ ID NO: 1586296 - DNA, 15 bp, Homo sapiens
cacccgcctcggact

SEQ ID NO: 1586297 - DNA, 15 bp, Homo sapiens
acccgcctcggactc

SEQ ID NO: 1586298 - DNA, 15 bp, Homo sapiens
cccgcctcggactcc

SEQ ID NO: 1586299 - DNA, 15 bp, Homo sapiens
ccgcctcggactccc

SEQ ID NO: 1586300 - DNA, 15 bp, Homo sapiens
cgcctcggactccca

SEQ ID NO: 1586301 - DNA, 15 bp, Homo sapiens
gcctcggactcccaa

SEQ ID NO: 1586302 - DNA, 15 bp, Homo sapiens
cctcggactcccaaa

SEQ ID NO: 1586303 - DNA, 15 bp, Homo sapiens
ctcggactcccaaaa

SEQ ID NO: 1586304 - DNA, 15 bp, Homo sapiens
tcggactcccaaaat

SEQ ID NO: 1586305 - DNA, 15 bp, Homo sapiens
cggactcccaaaatg

SEQ ID NO: 1586306 - DNA, 15 bp, Homo sapiens
ggactcccaaaatgc

SEQ ID NO: 1586307 - DNA, 15 bp, Homo sapiens
gactcccaaaatgct

SEQ ID NO: 1586308 - DNA, 15 bp, Homo sapiens
actcccaaaatgctg

SEQ ID NO: 1586309 - DNA, 15 bp, Homo sapiens
gtgagccaccgtgcc

SEQ ID NO: 1586310 - DNA, 15 bp, Homo sapiens
accgtgcctggccag

SEQ ID NO: 1586311 - DNA, 15 bp, Homo sapiens
ccgtgcctggccagt

SEQ ID NO: 1586312 - DNA, 15 bp, Homo sapiens
cgtgcctggccagtg

SEQ ID NO: 1586313 - DNA, 15 bp, Homo sapiens
gtgcctggccagtgg

SEQ ID NO: 1586314 - DNA, 15 bp, Homo sapiens
tgcctggccagtggt

SEQ ID NO: 1586315 - DNA, 15 bp, Homo sapiens
gcctggccagtggtt

SEQ ID NO: 1586316 - DNA, 15 bp, Homo sapiens
cctggccagtggttt

SEQ ID NO: 1586317 - DNA, 15 bp, Homo sapiens
ctggccagtggtttt

SEQ ID NO: 1586318 - DNA, 15 bp, Homo sapiens
tggccagtggttttt

SEQ ID NO: 1586319 - DNA, 15 bp, Homo sapiens
ggccagtggtttttt

SEQ ID NO: 1586320 - DNA, 15 bp, Homo sapiens
gccagtggttttttg

SEQ ID NO: 1586321 - DNA, 15 bp, Homo sapiens
ccagtggttttttgt

SEQ ID NO: 1586322 - DNA, 15 bp, Homo sapiens
cagtggttttttgtt

SEQ ID NO: 1586323 - DNA, 15 bp, Homo sapiens
agtggttttttgttg

SEQ ID NO: 1586324 - DNA, 15 bp, Homo sapiens
gtggttttttgttgt

SEQ ID NO: 1586325 - DNA, 15 bp, Homo sapiens
ggttttttgttgttg

SEQ ID NO: 1586326 - DNA, 15 bp, Homo sapiens
gttttttgttgttgt

SEQ ID NO: 1586327 - DNA, 15 bp, Homo sapiens
gttgttgttgttttg

SEQ ID NO: 1586328 - DNA, 15 bp, Homo sapiens
ttgttgttgttttgt

SEQ ID NO: 1586329 - DNA, 15 bp, Homo sapiens
tgttgttgttttgtt

SEQ ID NO: 1586330 - DNA, 15 bp, Homo sapiens
gttgttgttttgttt

SEQ ID NO: 1586331 - DNA, 15 bp, Homo sapiens
ttgttgttttgtttt

SEQ ID NO: 1586332 - DNA, 15 bp, Homo sapiens
tgttgttttgttttt

SEQ ID NO: 1586333 - DNA, 15 bp, Homo sapiens
gttgttttgtttttg

SEQ ID NO: 1586334 - DNA, 15 bp, Homo sapiens
tgttttgtttttgtt

SEQ ID NO: 1586335 - DNA, 15 bp, Homo sapiens
gttttgtttttgttt

SEQ ID NO: 1586336 - DNA, 15 bp, Homo sapiens
ttgtttttgttttga

SEQ ID NO: 1586337 - DNA, 15 bp, Homo sapiens
tgtttttgttttgag

SEQ ID NO: 1586338 - DNA, 15 bp, Homo sapiens
gtttttgttttgaga

SEQ ID NO: 1586339 - DNA, 15 bp, Homo sapiens
ttgttttgagacagg

SEQ ID NO: 1586340 - DNA, 15 bp, Homo sapiens
tgttttgagacagga

SEQ ID NO: 1586341 - DNA, 15 bp, Homo sapiens
gttttgagacaggat

SEQ ID NO: 1586342 - DNA, 15 bp, Homo sapiens
ttttgagacaggatc

SEQ ID NO: 1586343 - DNA, 15 bp, Homo sapiens
tttgagacaggatct

SEQ ID NO: 1586344 - DNA, 15 bp, Homo sapiens
ttgagacaggatctt

SEQ ID NO: 1586345 - DNA, 15 bp, Homo sapiens
tgagacaggatcttg

SEQ ID NO: 1586346 - DNA, 15 bp, Homo sapiens
gagacaggatcttgc

SEQ ID NO: 1586347 - DNA, 15 bp, Homo sapiens
agacaggatcttgct

SEQ ID NO: 1586348 - DNA, 15 bp, Homo sapiens
gacaggatcttgctc

SEQ ID NO: 1586349 - DNA, 15 bp, Homo sapiens
acaggatcttgctct

SEQ ID NO: 1586350 - DNA, 15 bp, Homo sapiens
caggatcttgctctg

SEQ ID NO: 1586351 - DNA, 15 bp, Homo sapiens
aggatcttgctctgt

SEQ ID NO: 1586352 - DNA, 15 bp, Homo sapiens
ggatcttgctctgtc

SEQ ID NO: 1586353 - DNA, 15 bp, Homo sapiens
gatcttgctctgtca

SEQ ID NO: 1586354 - DNA, 15 bp, Homo sapiens
atcttgctctgtcac

SEQ ID NO: 1586355 - DNA, 15 bp, Homo sapiens
tggtgccatcttggt

SEQ ID NO: 1586356 - DNA, 15 bp, Homo sapiens
ggtgccatcttggtt

SEQ ID NO: 1586357 - DNA, 15 bp, Homo sapiens
gtgccatcttggttc

SEQ ID NO: 1586358 - DNA, 15 bp, Homo sapiens
tgccatcttggttca

SEQ ID NO: 1586359 - DNA, 15 bp, Homo sapiens
gccatcttggttcac

SEQ ID NO: 1586360 - DNA, 15 bp, Homo sapiens
ccatcttggttcact

SEQ ID NO: 1586361 - DNA, 15 bp, Homo sapiens
catcttggttcactg

SEQ ID NO: 1586362 - DNA, 15 bp, Homo sapiens
actgcaacctctgcg

SEQ ID NO: 1586363 - DNA, 15 bp, Homo sapiens
ctgcaacctctgcgt

SEQ ID NO: 1586364 - DNA, 15 bp, Homo sapiens
tgcaacctctgcgtg

SEQ ID NO: 1586365 - DNA, 15 bp, Homo sapiens
gcaacctctgcgtgg

SEQ ID NO: 1586366 - DNA, 15 bp, Homo sapiens
caacctctgcgtggg

SEQ ID NO: 1586367 - DNA, 15 bp, Homo sapiens
aacctctgcgtgggc

SEQ ID NO: 1586368 - DNA, 15 bp, Homo sapiens
acctctgcgtgggct

SEQ ID NO: 1586369 - DNA, 15 bp, Homo sapiens
cctctgcgtgggctc

SEQ ID NO: 1586370 - DNA, 15 bp, Homo sapiens
ctctgcgtgggctca

SEQ ID NO: 1586371 - DNA, 15 bp, Homo sapiens
tctgcgtgggctcaa

SEQ ID NO: 1586372 - DNA, 15 bp, Homo sapiens
ctgcgtgggctcaag

SEQ ID NO: 1586373 - DNA, 15 bp, Homo sapiens
tgcgtgggctcaagc

SEQ ID NO: 1586374 - DNA, 15 bp, Homo sapiens
gcgtgggctcaagca

SEQ ID NO: 1586375 - DNA, 15 bp, Homo sapiens
cgtgggctcaagcaa

SEQ ID NO: 1586376 - DNA, 15 bp, Homo sapiens
gtgggctcaagcaat

SEQ ID NO: 1586377 - DNA, 15 bp, Homo sapiens
aatcctcccacctcc

SEQ ID NO: 1586378 - DNA, 15 bp, Homo sapiens
atcctcccacctccc

SEQ ID NO: 1586379 - DNA, 15 bp, Homo sapiens
tcctcccacctccct

SEQ ID NO: 1586380 - DNA, 15 bp, Homo sapiens
cctcccacctccctt

SEQ ID NO: 1586381 - DNA, 15 bp, Homo sapiens
ctcccacctcccttt

SEQ ID NO: 1586382 - DNA, 15 bp, Homo sapiens
tcccacctccctttc

SEQ ID NO: 1586383 - DNA, 15 bp, Homo sapiens
cccacctccctttcc

SEQ ID NO: 1586384 - DNA, 15 bp, Homo sapiens
ccacctccctttcca

SEQ ID NO: 1586385 - DNA, 15 bp, Homo sapiens
cacctccctttccag

SEQ ID NO: 1586386 - DNA, 15 bp, Homo sapiens
acctccctttccaga

SEQ ID NO: 1586387 - DNA, 15 bp, Homo sapiens
cctccctttccagag

SEQ ID NO: 1586388 - DNA, 15 bp, Homo sapiens
ctccctttccagagt

SEQ ID NO: 1586389 - DNA, 15 bp, Homo sapiens
tccctttccagagta

SEQ ID NO: 1586390 - DNA, 15 bp, Homo sapiens
ccctttccagagtag

SEQ ID NO: 1586391 - DNA, 15 bp, Homo sapiens
cctttccagagtagc

SEQ ID NO: 1586392 - DNA, 15 bp, Homo sapiens
ctttccagagtagcg

SEQ ID NO: 1586393 - DNA, 15 bp, Homo sapiens
tttccagagtagcgg

SEQ ID NO: 1586394 - DNA, 15 bp, Homo sapiens
ttccagagtagcggg

SEQ ID NO: 1586395 - DNA, 15 bp, Homo sapiens
tccagagtagcgggg

SEQ ID NO: 1586396 - DNA, 15 bp, Homo sapiens
ccagagtagcgggga

SEQ ID NO: 1586397 - DNA, 15 bp, Homo sapiens
cagagtagcggggac

SEQ ID NO: 1586398 - DNA, 15 bp, Homo sapiens
agagtagcggggacc

SEQ ID NO: 1586399 - DNA, 15 bp, Homo sapiens
gagtagcggggacca

SEQ ID NO: 1586400 - DNA, 15 bp, Homo sapiens
agtagcggggaccac

SEQ ID NO: 1586401 - DNA, 15 bp, Homo sapiens
gtagcggggaccaca

SEQ ID NO: 1586402 - DNA, 15 bp, Homo sapiens
tagcggggaccacag

SEQ ID NO: 1586403 - DNA, 15 bp, Homo sapiens
agcggggaccacagg

SEQ ID NO: 1586404 - DNA, 15 bp, Homo sapiens
gcggggaccacaggt

SEQ ID NO: 1586405 - DNA, 15 bp, Homo sapiens
cggggaccacaggtg

SEQ ID NO: 1586406 - DNA, 15 bp, Homo sapiens
ggggaccacaggtgt

SEQ ID NO: 1586407 - DNA, 15 bp, Homo sapiens
accacaggtgtgtgc

SEQ ID NO: 1586408 - DNA, 15 bp, Homo sapiens
ccacaggtgtgtgcc

SEQ ID NO: 1586409 - DNA, 15 bp, Homo sapiens
cacaggtgtgtgcca

SEQ ID NO: 1586410 - DNA, 15 bp, Homo sapiens
acaggtgtgtgccac

SEQ ID NO: 1586411 - DNA, 15 bp, Homo sapiens
caggtgtgtgccacc

SEQ ID NO: 1586412 - DNA, 15 bp, Homo sapiens
aggtgtgtgccacca

SEQ ID NO: 1586413 - DNA, 15 bp, Homo sapiens
ggtgtgtgccaccac

SEQ ID NO: 1586414 - DNA, 15 bp, Homo sapiens
gtgtgtgccaccaca

SEQ ID NO: 1586415 - DNA, 15 bp, Homo sapiens
tgtgtgccaccacac

SEQ ID NO: 1586416 - DNA, 15 bp, Homo sapiens
tgccaccacacctga

SEQ ID NO: 1586417 - DNA, 15 bp, Homo sapiens
gccaccacacctgac

SEQ ID NO: 1586418 - DNA, 15 bp, Homo sapiens
ccaccacacctgact

SEQ ID NO: 1586419 - DNA, 15 bp, Homo sapiens
caccacacctgacta

SEQ ID NO: 1586420 - DNA, 15 bp, Homo sapiens
accacacctgactaa

SEQ ID NO: 1586421 - DNA, 15 bp, Homo sapiens
ccacacctgactaat

SEQ ID NO: 1586422 - DNA, 15 bp, Homo sapiens
cacacctgactaatt

SEQ ID NO: 1586423 - DNA, 15 bp, Homo sapiens
acacctgactaattt

SEQ ID NO: 1586424 - DNA, 15 bp, Homo sapiens
cacctgactaatttt

SEQ ID NO: 1586425 - DNA, 15 bp, Homo sapiens
cctgactaatttttg

SEQ ID NO: 1586426 - DNA, 15 bp, Homo sapiens
ctgactaatttttgc

SEQ ID NO: 1586427 - DNA, 15 bp, Homo sapiens
tgactaatttttgca

SEQ ID NO: 1586428 - DNA, 15 bp, Homo sapiens
gactaatttttgcat

SEQ ID NO: 1586429 - DNA, 15 bp, Homo sapiens
actaatttttgcatt

SEQ ID NO: 1586430 - DNA, 15 bp, Homo sapiens
tttttgcattttttt

SEQ ID NO: 1586431 - DNA, 15 bp, Homo sapiens
ttttgcatttttttt

SEQ ID NO: 1586432 - DNA, 15 bp, Homo sapiens
ttgcatttttttttg

SEQ ID NO: 1586433 - DNA, 15 bp, Homo sapiens
tgcatttttttttgt

SEQ ID NO: 1586434 - DNA, 15 bp, Homo sapiens
gcatttttttttgta

SEQ ID NO: 1586435 - DNA, 15 bp, Homo sapiens
catttttttttgtag

SEQ ID NO: 1586436 - DNA, 15 bp, Homo sapiens
atttttttttgtaga

SEQ ID NO: 1586437 - DNA, 15 bp, Homo sapiens
tttttttttgtagaa

SEQ ID NO: 1586438 - DNA, 15 bp, Homo sapiens
ttttttttgtagaaa

SEQ ID NO: 1586439 - DNA, 15 bp, Homo sapiens
tttttttgtagaaac

SEQ ID NO: 1586440 - DNA, 15 bp, Homo sapiens
ttttttgtagaaaca

SEQ ID NO: 1586441 - DNA, 15 bp, Homo sapiens
agaaacagggttttg

SEQ ID NO: 1586442 - DNA, 15 bp, Homo sapiens
gaaacagggttttgc

SEQ ID NO: 1586443 - DNA, 15 bp, Homo sapiens
aaacagggttttgcc

SEQ ID NO: 1586444 - DNA, 15 bp, Homo sapiens
aacagggttttgcca

SEQ ID NO: 1586445 - DNA, 15 bp, Homo sapiens
ccatgttgcccaggt

SEQ ID NO: 1586446 - DNA, 15 bp, Homo sapiens
catgttgcccaggtt

SEQ ID NO: 1586447 - DNA, 15 bp, Homo sapiens
atgttgcccaggttg

SEQ ID NO: 1586448 - DNA, 15 bp, Homo sapiens
gttgcccaggttggt

SEQ ID NO: 1586449 - DNA, 15 bp, Homo sapiens
ttgcccaggttggtc

SEQ ID NO: 1586450 - DNA, 15 bp, Homo sapiens
tgcccaggttggtct

SEQ ID NO: 1586451 - DNA, 15 bp, Homo sapiens
gcccaggttggtctg

SEQ ID NO: 1586452 - DNA, 15 bp, Homo sapiens
cccaggttggtctga

SEQ ID NO: 1586453 - DNA, 15 bp, Homo sapiens
ccaggttggtctgaa

SEQ ID NO: 1586454 - DNA, 15 bp, Homo sapiens
actcctgagctcaaa

SEQ ID NO: 1586455 - DNA, 15 bp, Homo sapiens
ctcctgagctcaaac

SEQ ID NO: 1586456 - DNA, 15 bp, Homo sapiens
tcctgagctcaaaca

SEQ ID NO: 1586457 - DNA, 15 bp, Homo sapiens
cctgagctcaaacaa

SEQ ID NO: 1586458 - DNA, 15 bp, Homo sapiens
ctgagctcaaacaat

SEQ ID NO: 1586459 - DNA, 15 bp, Homo sapiens
tgagctcaaacaatc

SEQ ID NO: 1586460 - DNA, 15 bp, Homo sapiens
gagctcaaacaatcc

SEQ ID NO: 1586461 - DNA, 15 bp, Homo sapiens
agctcaaacaatcca

SEQ ID NO: 1586462 - DNA, 15 bp, Homo sapiens
gctcaaacaatccaa

SEQ ID NO: 1586463 - DNA, 15 bp, Homo sapiens
ctcaaacaatccaac

SEQ ID NO: 1586464 - DNA, 15 bp, Homo sapiens
tcaaacaatccaact

SEQ ID NO: 1586465 - DNA, 15 bp, Homo sapiens
caaacaatccaactg

SEQ ID NO: 1586466 - DNA, 15 bp, Homo sapiens
aaacaatccaactgc

SEQ ID NO: 1586467 - DNA, 15 bp, Homo sapiens
aacaatccaactgcc

SEQ ID NO: 1586468 - DNA, 15 bp, Homo sapiens
acaatccaactgcct

SEQ ID NO: 1586469 - DNA, 15 bp, Homo sapiens
caatccaactgcctt

SEQ ID NO: 1586470 - DNA, 15 bp, Homo sapiens
aatccaactgccttg

SEQ ID NO: 1586471 - DNA, 15 bp, Homo sapiens
atccaactgccttgg

SEQ ID NO: 1586472 - DNA, 15 bp, Homo sapiens
tccaactgccttggc

SEQ ID NO: 1586473 - DNA, 15 bp, Homo sapiens
ccaactgccttggct

SEQ ID NO: 1586474 - DNA, 15 bp, Homo sapiens
caactgccttggctt

SEQ ID NO: 1586475 - DNA, 15 bp, Homo sapiens
aactgccttggcttc

SEQ ID NO: 1586476 - DNA, 15 bp, Homo sapiens
actgccttggcttcc

SEQ ID NO: 1586477 - DNA, 15 bp, Homo sapiens
tgccttggcttccct

SEQ ID NO: 1586478 - DNA, 15 bp, Homo sapiens
gccttggcttcccta

SEQ ID NO: 1586479 - DNA, 15 bp, Homo sapiens
ccttggcttccctaa

SEQ ID NO: 1586480 - DNA, 15 bp, Homo sapiens
cttggcttccctaag

SEQ ID NO: 1586481 - DNA, 15 bp, Homo sapiens
ttggcttccctaagt

SEQ ID NO: 1586482 - DNA, 15 bp, Homo sapiens
tggcttccctaagtg

SEQ ID NO: 1586483 - DNA, 15 bp, Homo sapiens
ggcttccctaagtga

SEQ ID NO: 1586484 - DNA, 15 bp, Homo sapiens
gcttccctaagtgaa

SEQ ID NO: 1586485 - DNA, 15 bp, Homo sapiens
cttccctaagtgaaa

SEQ ID NO: 1586486 - DNA, 15 bp, Homo sapiens
ttccctaagtgaaat

SEQ ID NO: 1586487 - DNA, 15 bp, Homo sapiens
tccctaagtgaaatt

SEQ ID NO: 1586488 - DNA, 15 bp, Homo sapiens
ccctaagtgaaatta

SEQ ID NO: 1586489 - DNA, 15 bp, Homo sapiens
cctaagtgaaattac

SEQ ID NO: 1586490 - DNA, 15 bp, Homo sapiens
ctaagtgaaattaca

SEQ ID NO: 1586491 - DNA, 15 bp, Homo sapiens
taagtgaaattacag

SEQ ID NO: 1586492 - DNA, 15 bp, Homo sapiens
aagtgaaattacagg

SEQ ID NO: 1586493 - DNA, 15 bp, Homo sapiens
agtgaaattacaggc

SEQ ID NO: 1586494 - DNA, 15 bp, Homo sapiens
gtgaaattacaggca

SEQ ID NO: 1586495 - DNA, 15 bp, Homo sapiens
tgaaattacaggcat

SEQ ID NO: 1586496 - DNA, 15 bp, Homo sapiens
gaaattacaggcatg

SEQ ID NO: 1586497 - DNA, 15 bp, Homo sapiens
aaattacaggcatgg

SEQ ID NO: 1586498 - DNA, 15 bp, Homo sapiens
aattacaggcatggg

SEQ ID NO: 1586499 - DNA, 15 bp, Homo sapiens
attacaggcatgggc

SEQ ID NO: 1586500 - DNA, 15 bp, Homo sapiens
ttacaggcatgggcc

SEQ ID NO: 1586501 - DNA, 15 bp, Homo sapiens
tacaggcatgggcca

SEQ ID NO: 1586502 - DNA, 15 bp, Homo sapiens
acaggcatgggccac

SEQ ID NO: 1586503 - DNA, 15 bp, Homo sapiens
caggcatgggccact

SEQ ID NO: 1586504 - DNA, 15 bp, Homo sapiens
aggcatgggccactg

SEQ ID NO: 1586505 - DNA, 15 bp, Homo sapiens
ggcatgggccactgt

SEQ ID NO: 1586506 - DNA, 15 bp, Homo sapiens
gcatgggccactgta

SEQ ID NO: 1586507 - DNA, 15 bp, Homo sapiens
catgggccactgtac

SEQ ID NO: 1586508 - DNA, 15 bp, Homo sapiens
atgggccactgtacc

SEQ ID NO: 1586509 - DNA, 15 bp, Homo sapiens
tgggccactgtaccc

SEQ ID NO: 1586510 - DNA, 15 bp, Homo sapiens
gggccactgtaccca

SEQ ID NO: 1586511 - DNA, 15 bp, Homo sapiens
ggccactgtacccag

SEQ ID NO: 1586512 - DNA, 15 bp, Homo sapiens
gccactgtacccagt

SEQ ID NO: 1586513 - DNA, 15 bp, Homo sapiens
ccactgtacccagtc

SEQ ID NO: 1586514 - DNA, 15 bp, Homo sapiens
cactgtacccagtct

SEQ ID NO: 1586515 - DNA, 15 bp, Homo sapiens
actgtacccagtcta

SEQ ID NO: 1586516 - DNA, 15 bp, Homo sapiens
ctgtacccagtctag

SEQ ID NO: 1586517 - DNA, 15 bp, Homo sapiens
tgtacccagtctagt

SEQ ID NO: 1586518 - DNA, 15 bp, Homo sapiens
gtacccagtctagtg

SEQ ID NO: 1586519 - DNA, 15 bp, Homo sapiens
tacccagtctagtga

SEQ ID NO: 1586520 - DNA, 15 bp, Homo sapiens
acccagtctagtgat

SEQ ID NO: 1586521 - DNA, 15 bp, Homo sapiens
cccagtctagtgatt

SEQ ID NO: 1586522 - DNA, 15 bp, Homo sapiens
ccagtctagtgattt

SEQ ID NO: 1586523 - DNA, 15 bp, Homo sapiens
cagtctagtgatttt

SEQ ID NO: 1586524 - DNA, 15 bp, Homo sapiens
agtctagtgattttt

SEQ ID NO: 1586525 - DNA, 15 bp, Homo sapiens
gtctagtgatttttt

SEQ ID NO: 1586526 - DNA, 15 bp, Homo sapiens
tctagtgattttttt

SEQ ID NO: 1586527 - DNA, 15 bp, Homo sapiens
ctagtgattttttta

SEQ ID NO: 1586528 - DNA, 15 bp, Homo sapiens
tagtgatttttttat

SEQ ID NO: 1586529 - DNA, 15 bp, Homo sapiens
agtgatttttttatt

SEQ ID NO: 1586530 - DNA, 15 bp, Homo sapiens
gtgatttttttattt

SEQ ID NO: 1586531 - DNA, 15 bp, Homo sapiens
tgatttttttatttt

SEQ ID NO: 1586532 - DNA, 15 bp, Homo sapiens
gatttttttattttt

SEQ ID NO: 1586533 - DNA, 15 bp, Homo sapiens
ttatttttattttat

SEQ ID NO: 1586534 - DNA, 15 bp, Homo sapiens
tatttttattttatt

SEQ ID NO: 1586535 - DNA, 15 bp, Homo sapiens
atttttattttattt

SEQ ID NO: 1586536 - DNA, 15 bp, Homo sapiens
ttattttattttttt

SEQ ID NO: 1586537 - DNA, 15 bp, Homo sapiens
tattttattttttta

SEQ ID NO: 1586538 - DNA, 15 bp, Homo sapiens
attttatttttttac

SEQ ID NO: 1586539 - DNA, 15 bp, Homo sapiens
ttttatttttttacc

SEQ ID NO: 1586540 - DNA, 15 bp, Homo sapiens
tttatttttttacca

SEQ ID NO: 1586541 - DNA, 15 bp, Homo sapiens
ttatttttttaccaa

SEQ ID NO: 1586542 - DNA, 15 bp, Homo sapiens
tatttttttaccaaa

SEQ ID NO: 1586543 - DNA, 15 bp, Homo sapiens
atttttttaccaaaa

SEQ ID NO: 1586544 - DNA, 15 bp, Homo sapiens
tttttttaccaaaaa

SEQ ID NO: 1586545 - DNA, 15 bp, Homo sapiens
ttttttaccaaaaaa

SEQ ID NO: 1586546 - DNA, 15 bp, Homo sapiens
tttttaccaaaaaaa

SEQ ID NO: 1586547 - DNA, 15 bp, Homo sapiens
ttttaccaaaaaaac

SEQ ID NO: 1586548 - DNA, 15 bp, Homo sapiens
tttaccaaaaaaaca

SEQ ID NO: 1586549 - DNA, 15 bp, Homo sapiens
ttaccaaaaaaacaa

SEQ ID NO: 1586550 - DNA, 15 bp, Homo sapiens
taccaaaaaaacaac

SEQ ID NO: 1586551 - DNA, 15 bp, Homo sapiens
accaaaaaaacaaca

SEQ ID NO: 1586552 - DNA, 15 bp, Homo sapiens
ccaaaaaaacaacaa

SEQ ID NO: 1586553 - DNA, 15 bp, Homo sapiens
caaaaaaacaacaaa

SEQ ID NO: 1586554 - DNA, 15 bp, Homo sapiens
aaaaaaacaacaaag

SEQ ID NO: 1586555 - DNA, 15 bp, Homo sapiens
aaaaaacaacaaagc

SEQ ID NO: 1586556 - DNA, 15 bp, Homo sapiens
aaaaacaacaaagcc

SEQ ID NO: 1586557 - DNA, 15 bp, Homo sapiens
aaaacaacaaagcct

SEQ ID NO: 1586558 - DNA, 15 bp, Homo sapiens
aaacaacaaagcctc

SEQ ID NO: 1586559 - DNA, 15 bp, Homo sapiens
aacaacaaagcctca

SEQ ID NO: 1586560 - DNA, 15 bp, Homo sapiens
acaacaaagcctcag

SEQ ID NO: 1586561 - DNA, 15 bp, Homo sapiens
caacaaagcctcagg

SEQ ID NO: 1586562 - DNA, 15 bp, Homo sapiens
aacaaagcctcagga

SEQ ID NO: 1586563 - DNA, 15 bp, Homo sapiens
acaaagcctcaggag

SEQ ID NO: 1586564 - DNA, 15 bp, Homo sapiens
caaagcctcaggagg

SEQ ID NO: 1586565 - DNA, 15 bp, Homo sapiens
aaagcctcaggagga

SEQ ID NO: 1586566 - DNA, 15 bp, Homo sapiens
aagcctcaggaggaa

SEQ ID NO: 1586567 - DNA, 15 bp, Homo sapiens
agcctcaggaggaaa

SEQ ID NO: 1586568 - DNA, 15 bp, Homo sapiens
gcctcaggaggaaaa

SEQ ID NO: 1586569 - DNA, 15 bp, Homo sapiens
cctcaggaggaaaag

SEQ ID NO: 1586570 - DNA, 15 bp, Homo sapiens
ctcaggaggaaaagt

SEQ ID NO: 1586571 - DNA, 15 bp, Homo sapiens
tcaggaggaaaagtt

SEQ ID NO: 1586572 - DNA, 15 bp, Homo sapiens
caggaggaaaagttg

SEQ ID NO: 1586573 - DNA, 15 bp, Homo sapiens
aggaggaaaagttga

SEQ ID NO: 1586574 - DNA, 15 bp, Homo sapiens
ggaggaaaagttgat

SEQ ID NO: 1586575 - DNA, 15 bp, Homo sapiens
gaggaaaagttgata

SEQ ID NO: 1586576 - DNA, 15 bp, Homo sapiens
aggaaaagttgatac

SEQ ID NO: 1586577 - DNA, 15 bp, Homo sapiens
ggaaaagttgataca

SEQ ID NO: 1586578 - DNA, 15 bp, Homo sapiens
gaaaagttgatacac

SEQ ID NO: 1586579 - DNA, 15 bp, Homo sapiens
aaaagttgatacaca

SEQ ID NO: 1586580 - DNA, 15 bp, Homo sapiens
aaagttgatacacaa

SEQ ID NO: 1586581 - DNA, 15 bp, Homo sapiens
aagttgatacacaag

SEQ ID NO: 1586582 - DNA, 15 bp, Homo sapiens
agttgatacacaagt

SEQ ID NO: 1586583 - DNA, 15 bp, Homo sapiens
gttgatacacaagta

SEQ ID NO: 1586584 - DNA, 15 bp, Homo sapiens
ttgatacacaagtaa

SEQ ID NO: 1586585 - DNA, 15 bp, Homo sapiens
tgatacacaagtaaa

SEQ ID NO: 1586586 - DNA, 15 bp, Homo sapiens
gatacacaagtaaat

SEQ ID NO: 1586587 - DNA, 15 bp, Homo sapiens
atacacaagtaaatt

SEQ ID NO: 1586588 - DNA, 15 bp, Homo sapiens
tacacaagtaaattt

SEQ ID NO: 1586589 - DNA, 15 bp, Homo sapiens
acacaagtaaatttt

SEQ ID NO: 1586590 - DNA, 15 bp, Homo sapiens
cacaagtaaatttta

SEQ ID NO: 1586591 - DNA, 15 bp, Homo sapiens
acaagtaaattttat

SEQ ID NO: 1586592 - DNA, 15 bp, Homo sapiens
caagtaaattttatt

SEQ ID NO: 1586593 - DNA, 15 bp, Homo sapiens
aagtaaattttattg

SEQ ID NO: 1586594 - DNA, 15 bp, Homo sapiens
agtaaattttattgg

SEQ ID NO: 1586595 - DNA, 15 bp, Homo sapiens
gtaaattttattgga

SEQ ID NO: 1586596 - DNA, 15 bp, Homo sapiens
taaattttattggaa

SEQ ID NO: 1586597 - DNA, 15 bp, Homo sapiens
aaattttattggaaa

SEQ ID NO: 1586598 - DNA, 15 bp, Homo sapiens
aattttattggaaat

SEQ ID NO: 1586599 - DNA, 15 bp, Homo sapiens
attttattggaaatg

SEQ ID NO: 1586600 - DNA, 15 bp, Homo sapiens
ttttattggaaatgt

SEQ ID NO: 1586601 - DNA, 15 bp, Homo sapiens
tttattggaaatgtt

SEQ ID NO: 1586602 - DNA, 15 bp, Homo sapiens
ttattggaaatgttt

SEQ ID NO: 1586603 - DNA, 15 bp, Homo sapiens
tattggaaatgtttt

SEQ ID NO: 1586604 - DNA, 15 bp, Homo sapiens
attggaaatgttttt

SEQ ID NO: 1586605 - DNA, 15 bp, Homo sapiens
ttggaaatgtttttg

SEQ ID NO: 1586606 - DNA, 15 bp, Homo sapiens
tggaaatgtttttgt

SEQ ID NO: 1586607 - DNA, 15 bp, Homo sapiens
gaaatgtttttgtgt

SEQ ID NO: 1586608 - DNA, 15 bp, Homo sapiens
aaatgtttttgtgtg

SEQ ID NO: 1586609 - DNA, 15 bp, Homo sapiens
aatgtttttgtgtgg

SEQ ID NO: 1586610 - DNA, 15 bp, Homo sapiens
atgtttttgtgtgga

SEQ ID NO: 1586611 - DNA, 15 bp, Homo sapiens
tgtttttgtgtggac

SEQ ID NO: 1586612 - DNA, 15 bp, Homo sapiens
gtttttgtgtggacc

SEQ ID NO: 1586613 - DNA, 15 bp, Homo sapiens
tttttgtgtggacct

SEQ ID NO: 1586614 - DNA, 15 bp, Homo sapiens
ttttgtgtggacctt

SEQ ID NO: 1586615 - DNA, 15 bp, Homo sapiens
tttgtgtggacctta

SEQ ID NO: 1586616 - DNA, 15 bp, Homo sapiens
ttgtgtggaccttaa

SEQ ID NO: 1586617 - DNA, 15 bp, Homo sapiens
tgtgtggaccttaag

SEQ ID NO: 1586618 - DNA, 15 bp, Homo sapiens
gtgtggaccttaagc

SEQ ID NO: 1586619 - DNA, 15 bp, Homo sapiens
tgtggaccttaagca

SEQ ID NO: 1586620 - DNA, 15 bp, Homo sapiens
gtggaccttaagcag

SEQ ID NO: 1586621 - DNA, 15 bp, Homo sapiens
tggaccttaagcaga

SEQ ID NO: 1586622 - DNA, 15 bp, Homo sapiens
ggaccttaagcagag

SEQ ID NO: 1586623 - DNA, 15 bp, Homo sapiens
gaccttaagcagagg

SEQ ID NO: 1586624 - DNA, 15 bp, Homo sapiens
accttaagcagaggg

SEQ ID NO: 1586625 - DNA, 15 bp, Homo sapiens
ccttaagcagaggga

SEQ ID NO: 1586626 - DNA, 15 bp, Homo sapiens
cttaagcagagggaa

SEQ ID NO: 1586627 - DNA, 15 bp, Homo sapiens
ttaagcagagggaaa

SEQ ID NO: 1586628 - DNA, 15 bp, Homo sapiens
taagcagagggaaaa

SEQ ID NO: 1586629 - DNA, 15 bp, Homo sapiens
aagcagagggaaaat

SEQ ID NO: 1586630 - DNA, 15 bp, Homo sapiens
agcagagggaaaatt

SEQ ID NO: 1586631 - DNA, 15 bp, Homo sapiens
gcagagggaaaatta

SEQ ID NO: 1586632 - DNA, 15 bp, Homo sapiens
cagagggaaaattag

SEQ ID NO: 1586633 - DNA, 15 bp, Homo sapiens
agagggaaaattagt

SEQ ID NO: 1586634 - DNA, 15 bp, Homo sapiens
gagggaaaattagtc

SEQ ID NO: 1586635 - DNA, 15 bp, Homo sapiens
agggaaaattagtct

SEQ ID NO: 1586636 - DNA, 15 bp, Homo sapiens
gggaaaattagtctg

SEQ ID NO: 1586637 - DNA, 15 bp, Homo sapiens
ggaaaattagtctgc

SEQ ID NO: 1586638 - DNA, 15 bp, Homo sapiens
gaaaattagtctgca

SEQ ID NO: 1586639 - DNA, 15 bp, Homo sapiens
aaaattagtctgcat

SEQ ID NO: 1586640 - DNA, 15 bp, Homo sapiens
aaattagtctgcatt

SEQ ID NO: 1586641 - DNA, 15 bp, Homo sapiens
aattagtctgcatta

SEQ ID NO: 1586642 - DNA, 15 bp, Homo sapiens
attagtctgcattat

SEQ ID NO: 1586643 - DNA, 15 bp, Homo sapiens
ttagtctgcattatg

SEQ ID NO: 1586644 - DNA, 15 bp, Homo sapiens
tagtctgcattatgg

SEQ ID NO: 1586645 - DNA, 15 bp, Homo sapiens
agtctgcattatggt

SEQ ID NO: 1586646 - DNA, 15 bp, Homo sapiens
gtctgcattatggtg

SEQ ID NO: 1586647 - DNA, 15 bp, Homo sapiens
tctgcattatggtgt

SEQ ID NO: 1586648 - DNA, 15 bp, Homo sapiens
ctgcattatggtgta

SEQ ID NO: 1586649 - DNA, 15 bp, Homo sapiens
tgcattatggtgtat

SEQ ID NO: 1586650 - DNA, 15 bp, Homo sapiens
gcattatggtgtatc

SEQ ID NO: 1586651 - DNA, 15 bp, Homo sapiens
cattatggtgtatcc

SEQ ID NO: 1586652 - DNA, 15 bp, Homo sapiens
attatggtgtatcca

SEQ ID NO: 1586653 - DNA, 15 bp, Homo sapiens
ttatggtgtatccag

SEQ ID NO: 1586654 - DNA, 15 bp, Homo sapiens
tatggtgtatccaga

SEQ ID NO: 1586655 - DNA, 15 bp, Homo sapiens
atggtgtatccagac

SEQ ID NO: 1586656 - DNA, 15 bp, Homo sapiens
tggtgtatccagact

SEQ ID NO: 1586657 - DNA, 15 bp, Homo sapiens
ggtgtatccagacta

SEQ ID NO: 1586658 - DNA, 15 bp, Homo sapiens
gtgtatccagactaa

SEQ ID NO: 1586659 - DNA, 15 bp, Homo sapiens
tgtatccagactaaa

SEQ ID NO: 1586660 - DNA, 15 bp, Homo sapiens
gtatccagactaaat

SEQ ID NO: 1586661 - DNA, 15 bp, Homo sapiens
tatccagactaaatg

SEQ ID NO: 1586662 - DNA, 15 bp, Homo sapiens
atccagactaaatga

SEQ ID NO: 1586663 - DNA, 15 bp, Homo sapiens
tccagactaaatgac

SEQ ID NO: 1586664 - DNA, 15 bp, Homo sapiens
ccagactaaatgact

SEQ ID NO: 1586665 - DNA, 15 bp, Homo sapiens
cagactaaatgactg

SEQ ID NO: 1586666 - DNA, 15 bp, Homo sapiens
agactaaatgactga

SEQ ID NO: 1586667 - DNA, 15 bp, Homo sapiens
gactaaatgactgat

SEQ ID NO: 1586668 - DNA, 15 bp, Homo sapiens
actaaatgactgata

SEQ ID NO: 1586669 - DNA, 15 bp, Homo sapiens
ctaaatgactgatat

SEQ ID NO: 1586670 - DNA, 15 bp, Homo sapiens
taaatgactgatatt

SEQ ID NO: 1586671 - DNA, 15 bp, Homo sapiens
aaatgactgatatta

SEQ ID NO: 1586672 - DNA, 15 bp, Homo sapiens
aatgactgatattaa

SEQ ID NO: 1586673 - DNA, 15 bp, Homo sapiens
atgactgatattaaa

SEQ ID NO: 1586674 - DNA, 15 bp, Homo sapiens
tgactgatattaaaa

SEQ ID NO: 1586675 - DNA, 15 bp, Homo sapiens
gactgatattaaaat

SEQ ID NO: 1586676 - DNA, 15 bp, Homo sapiens
actgatattaaaatg

SEQ ID NO: 1586677 - DNA, 15 bp, Homo sapiens
ctgatattaaaatga

SEQ ID NO: 1586678 - DNA, 15 bp, Homo sapiens
tgatattaaaatgaa

SEQ ID NO: 1586679 - DNA, 15 bp, Homo sapiens
gatattaaaatgaaa

SEQ ID NO: 1586680 - DNA, 15 bp, Homo sapiens
atattaaaatgaaat

SEQ ID NO: 1586681 - DNA, 15 bp, Homo sapiens
tattaaaatgaaatt

SEQ ID NO: 1586682 - DNA, 15 bp, Homo sapiens
attaaaatgaaatta

SEQ ID NO: 1586683 - DNA, 15 bp, Homo sapiens
ttaaaatgaaattat

SEQ ID NO: 1586684 - DNA, 15 bp, Homo sapiens
taaaatgaaattatt

SEQ ID NO: 1586685 - DNA, 15 bp, Homo sapiens
aaaatgaaattattc

SEQ ID NO: 1586686 - DNA, 15 bp, Homo sapiens
aaatgaaattattct

SEQ ID NO: 1586687 - DNA, 15 bp, Homo sapiens
aatgaaattattctt

SEQ ID NO: 1586688 - DNA, 15 bp, Homo sapiens
atgaaattattctta

SEQ ID NO: 1586689 - DNA, 15 bp, Homo sapiens
tgaaattattcttag

SEQ ID NO: 1586690 - DNA, 15 bp, Homo sapiens
gaaattattcttagg

SEQ ID NO: 1586691 - DNA, 15 bp, Homo sapiens
aaattattcttagga

SEQ ID NO: 1586692 - DNA, 15 bp, Homo sapiens
aattattcttaggat

SEQ ID NO: 1586693 - DNA, 15 bp, Homo sapiens
attattcttaggatt

SEQ ID NO: 1586694 - DNA, 15 bp, Homo sapiens
ttattcttaggattt

SEQ ID NO: 1586695 - DNA, 15 bp, Homo sapiens
tattcttaggatttg

SEQ ID NO: 1586696 - DNA, 15 bp, Homo sapiens
attcttaggatttgc

SEQ ID NO: 1586697 - DNA, 15 bp, Homo sapiens
ttcttaggatttgca

SEQ ID NO: 1586698 - DNA, 15 bp, Homo sapiens
tcttaggatttgcaa

SEQ ID NO: 1586699 - DNA, 15 bp, Homo sapiens
cttaggatttgcaat

SEQ ID NO: 1586700 - DNA, 15 bp, Homo sapiens
ttaggatttgcaatc

SEQ ID NO: 1586701 - DNA, 15 bp, Homo sapiens
taggatttgcaatct

SEQ ID NO: 1586702 - DNA, 15 bp, Homo sapiens
aggatttgcaatctt

SEQ ID NO: 1586703 - DNA, 15 bp, Homo sapiens
ggatttgcaatctta

SEQ ID NO: 1586704 - DNA, 15 bp, Homo sapiens
gatttgcaatcttag

SEQ ID NO: 1586705 - DNA, 15 bp, Homo sapiens
atttgcaatcttaga

SEQ ID NO: 1586706 - DNA, 15 bp, Homo sapiens
tttgcaatcttagag

SEQ ID NO: 1586707 - DNA, 15 bp, Homo sapiens
ttgcaatcttagaga

SEQ ID NO: 1586708 - DNA, 15 bp, Homo sapiens
tgcaatcttagagaa

SEQ ID NO: 1586709 - DNA, 15 bp, Homo sapiens
gcaatcttagagaaa

SEQ ID NO: 1586710 - DNA, 15 bp, Homo sapiens
caatcttagagaaaa

SEQ ID NO: 1586711 - DNA, 15 bp, Homo sapiens
aatcttagagaaaac

SEQ ID NO: 1586712 - DNA, 15 bp, Homo sapiens
atcttagagaaaact

SEQ ID NO: 1586713 - DNA, 15 bp, Homo sapiens
tcttagagaaaactt

SEQ ID NO: 1586714 - DNA, 15 bp, Homo sapiens
cttagagaaaacttt

SEQ ID NO: 1586715 - DNA, 15 bp, Homo sapiens
ttagagaaaactttt

SEQ ID NO: 1586716 - DNA, 15 bp, Homo sapiens
tagagaaaacttttt

SEQ ID NO: 1586717 - DNA, 15 bp, Homo sapiens
agagaaaactttttc

SEQ ID NO: 1586718 - DNA, 15 bp, Homo sapiens
gagaaaactttttca

SEQ ID NO: 1586719 - DNA, 15 bp, Homo sapiens
agaaaactttttcat

SEQ ID NO: 1586720 - DNA, 15 bp, Homo sapiens
gaaaactttttcatt

SEQ ID NO: 1586721 - DNA, 15 bp, Homo sapiens
aaaactttttcattt

SEQ ID NO: 1586722 - DNA, 15 bp, Homo sapiens
aaactttttcatttt

SEQ ID NO: 1586723 - DNA, 15 bp, Homo sapiens
aactttttcattttt

SEQ ID NO: 1586724 - DNA, 15 bp, Homo sapiens
actttttcattttta

SEQ ID NO: 1586725 - DNA, 15 bp, Homo sapiens
ctttttcatttttat

SEQ ID NO: 1586726 - DNA, 15 bp, Homo sapiens
ttttcatttttattt

SEQ ID NO: 1586727 - DNA, 15 bp, Homo sapiens
tttcatttttatttt

SEQ ID NO: 1586728 - DNA, 15 bp, Homo sapiens
ttcatttttattttt

SEQ ID NO: 1586729 - DNA, 15 bp, Homo sapiens
tcatttttatttttt

SEQ ID NO: 1586730 - DNA, 15 bp, Homo sapiens
catttttattttttt

SEQ ID NO: 1586731 - DNA, 15 bp, Homo sapiens
tttatttttttgagt

SEQ ID NO: 1586732 - DNA, 15 bp, Homo sapiens
ttatttttttgagtt

SEQ ID NO: 1586733 - DNA, 15 bp, Homo sapiens
tatttttttgagtta

SEQ ID NO: 1586734 - DNA, 15 bp, Homo sapiens
atttttttgagttac

SEQ ID NO: 1586735 - DNA, 15 bp, Homo sapiens
tttttttgagttaca

SEQ ID NO: 1586736 - DNA, 15 bp, Homo sapiens
ttttttgagttacaa

SEQ ID NO: 1586737 - DNA, 15 bp, Homo sapiens
tttttgagttacaaa

SEQ ID NO: 1586738 - DNA, 15 bp, Homo sapiens
ttttgagttacaaat

SEQ ID NO: 1586739 - DNA, 15 bp, Homo sapiens
tttgagttacaaatt

SEQ ID NO: 1586740 - DNA, 15 bp, Homo sapiens
ttgagttacaaatta

SEQ ID NO: 1586741 - DNA, 15 bp, Homo sapiens
tgagttacaaattat

SEQ ID NO: 1586742 - DNA, 15 bp, Homo sapiens
gagttacaaattatc

SEQ ID NO: 1586743 - DNA, 15 bp, Homo sapiens
agttacaaattatct

SEQ ID NO: 1586744 - DNA, 15 bp, Homo sapiens
gttacaaattatctt

SEQ ID NO: 1586745 - DNA, 15 bp, Homo sapiens
ttacaaattatcttc

SEQ ID NO: 1586746 - DNA, 15 bp, Homo sapiens
tacaaattatcttca

SEQ ID NO: 1586747 - DNA, 15 bp, Homo sapiens
acaaattatcttcat

SEQ ID NO: 1586748 - DNA, 15 bp, Homo sapiens
caaattatcttcatt

SEQ ID NO: 1586749 - DNA, 15 bp, Homo sapiens
aaattatcttcattt

SEQ ID NO: 1586750 - DNA, 15 bp, Homo sapiens
aattatcttcattta

SEQ ID NO: 1586751 - DNA, 15 bp, Homo sapiens
attatcttcatttac

SEQ ID NO: 1586752 - DNA, 15 bp, Homo sapiens
ttatcttcatttaca

SEQ ID NO: 1586753 - DNA, 15 bp, Homo sapiens
tatcttcatttacat

SEQ ID NO: 1586754 - DNA, 15 bp, Homo sapiens
atcttcatttacatt

SEQ ID NO: 1586755 - DNA, 15 bp, Homo sapiens
tcttcatttacattt

SEQ ID NO: 1586756 - DNA, 15 bp, Homo sapiens
cttcatttacatttg

SEQ ID NO: 1586757 - DNA, 15 bp, Homo sapiens
ttcatttacatttga

SEQ ID NO: 1586758 - DNA, 15 bp, Homo sapiens
tcatttacatttgag

SEQ ID NO: 1586759 - DNA, 15 bp, Homo sapiens
atttacatttgagaa

SEQ ID NO: 1586760 - DNA, 15 bp, Homo sapiens
tttacatttgagaac

SEQ ID NO: 1586761 - DNA, 15 bp, Homo sapiens
ttacatttgagaaca

SEQ ID NO: 1586762 - DNA, 15 bp, Homo sapiens
tacatttgagaacag

SEQ ID NO: 1586763 - DNA, 15 bp, Homo sapiens
acatttgagaacagt

SEQ ID NO: 1586764 - DNA, 15 bp, Homo sapiens
catttgagaacagtg

SEQ ID NO: 1586765 - DNA, 15 bp, Homo sapiens
atttgagaacagtga

SEQ ID NO: 1586766 - DNA, 15 bp, Homo sapiens
tttgagaacagtgag

SEQ ID NO: 1586767 - DNA, 15 bp, Homo sapiens
ttgagaacagtgagt

SEQ ID NO: 1586768 - DNA, 15 bp, Homo sapiens
tgagaacagtgagtc

SEQ ID NO: 1586769 - DNA, 15 bp, Homo sapiens
gagaacagtgagtca

SEQ ID NO: 1586770 - DNA, 15 bp, Homo sapiens
agaacagtgagtcac

SEQ ID NO: 1586771 - DNA, 15 bp, Homo sapiens
gaacagtgagtcaca

SEQ ID NO: 1586772 - DNA, 15 bp, Homo sapiens
aacagtgagtcacag

SEQ ID NO: 1586773 - DNA, 15 bp, Homo sapiens
acagtgagtcacaga

SEQ ID NO: 1586774 - DNA, 15 bp, Homo sapiens
cagtgagtcacagag

SEQ ID NO: 1586775 - DNA, 15 bp, Homo sapiens
agtgagtcacagagg

SEQ ID NO: 1586776 - DNA, 15 bp, Homo sapiens
gtgagtcacagaggg

SEQ ID NO: 1586777 - DNA, 15 bp, Homo sapiens
tgagtcacagaggga

SEQ ID NO: 1586778 - DNA, 15 bp, Homo sapiens
gagtcacagagggat

SEQ ID NO: 1586779 - DNA, 15 bp, Homo sapiens
agtcacagagggatt

SEQ ID NO: 1586780 - DNA, 15 bp, Homo sapiens
gtcacagagggatta

SEQ ID NO: 1586781 - DNA, 15 bp, Homo sapiens
tcacagagggattaa

SEQ ID NO: 1586782 - DNA, 15 bp, Homo sapiens
cacagagggattaag

SEQ ID NO: 1586783 - DNA, 15 bp, Homo sapiens
acagagggattaagt

SEQ ID NO: 1586784 - DNA, 15 bp, Homo sapiens
cagagggattaagta

SEQ ID NO: 1586785 - DNA, 15 bp, Homo sapiens
agagggattaagtaa

SEQ ID NO: 1586786 - DNA, 15 bp, Homo sapiens
gagggattaagtaac

SEQ ID NO: 1586787 - DNA, 15 bp, Homo sapiens
agggattaagtaact

SEQ ID NO: 1586788 - DNA, 15 bp, Homo sapiens
gggattaagtaactt

SEQ ID NO: 1586789 - DNA, 15 bp, Homo sapiens
ggattaagtaactta

SEQ ID NO: 1586790 - DNA, 15 bp, Homo sapiens
gattaagtaacttac

SEQ ID NO: 1586791 - DNA, 15 bp, Homo sapiens
attaagtaacttact

SEQ ID NO: 1586792 - DNA, 15 bp, Homo sapiens
ttaagtaacttactc

SEQ ID NO: 1586793 - DNA, 15 bp, Homo sapiens
taagtaacttactca

SEQ ID NO: 1586794 - DNA, 15 bp, Homo sapiens
aagtaacttactcaa

SEQ ID NO: 1586795 - DNA, 15 bp, Homo sapiens
agtaacttactcaag

SEQ ID NO: 1586796 - DNA, 15 bp, Homo sapiens
gtaacttactcaaga

SEQ ID NO: 1586797 - DNA, 15 bp, Homo sapiens
taacttactcaagat

SEQ ID NO: 1586798 - DNA, 15 bp, Homo sapiens
aacttactcaagatc

SEQ ID NO: 1586799 - DNA, 15 bp, Homo sapiens
acttactcaagatca

SEQ ID NO: 1586800 - DNA, 15 bp, Homo sapiens
cttactcaagatcat

SEQ ID NO: 1586801 - DNA, 15 bp, Homo sapiens
ttactcaagatcata

SEQ ID NO: 1586802 - DNA, 15 bp, Homo sapiens
tactcaagatcatac

SEQ ID NO: 1586803 - DNA, 15 bp, Homo sapiens
actcaagatcataca

SEQ ID NO: 1586804 - DNA, 15 bp, Homo sapiens
ctcaagatcatacaa

SEQ ID NO: 1586805 - DNA, 15 bp, Homo sapiens
tcaagatcatacaag

SEQ ID NO: 1586806 - DNA, 15 bp, Homo sapiens
caagatcatacaagt

SEQ ID NO: 1586807 - DNA, 15 bp, Homo sapiens
aagatcatacaagtc

SEQ ID NO: 1586808 - DNA, 15 bp, Homo sapiens
agatcatacaagtct

SEQ ID NO: 1586809 - DNA, 15 bp, Homo sapiens
gatcatacaagtctt

SEQ ID NO: 1586810 - DNA, 15 bp, Homo sapiens
atcatacaagtcttt

SEQ ID NO: 1586811 - DNA, 15 bp, Homo sapiens
tcatacaagtctttg

SEQ ID NO: 1586812 - DNA, 15 bp, Homo sapiens
catacaagtctttga

SEQ ID NO: 1586813 - DNA, 15 bp, Homo sapiens
atacaagtctttgat

SEQ ID NO: 1586814 - DNA, 15 bp, Homo sapiens
tacaagtctttgatt

SEQ ID NO: 1586815 - DNA, 15 bp, Homo sapiens
acaagtctttgattt

SEQ ID NO: 1586816 - DNA, 15 bp, Homo sapiens
caagtctttgatttg

SEQ ID NO: 1586817 - DNA, 15 bp, Homo sapiens
aagtctttgatttga

SEQ ID NO: 1586818 - DNA, 15 bp, Homo sapiens
agtctttgatttgaa

SEQ ID NO: 1586819 - DNA, 15 bp, Homo sapiens
gtctttgatttgaac

SEQ ID NO: 1586820 - DNA, 15 bp, Homo sapiens
tctttgatttgaacc

SEQ ID NO: 1586821 - DNA, 15 bp, Homo sapiens
ctttgatttgaaccc

SEQ ID NO: 1586822 - DNA, 15 bp, Homo sapiens
tttgatttgaaccca

SEQ ID NO: 1586823 - DNA, 15 bp, Homo sapiens
ttgatttgaacccaa

SEQ ID NO: 1586824 - DNA, 15 bp, Homo sapiens
tgatttgaacccaat

SEQ ID NO: 1586825 - DNA, 15 bp, Homo sapiens
gatttgaacccaatc

SEQ ID NO: 1586826 - DNA, 15 bp, Homo sapiens
atttgaacccaatct

SEQ ID NO: 1586827 - DNA, 15 bp, Homo sapiens
tttgaacccaatctt

SEQ ID NO: 1586828 - DNA, 15 bp, Homo sapiens
ttgaacccaatcttt

SEQ ID NO: 1586829 - DNA, 15 bp, Homo sapiens
tgaacccaatctttt

SEQ ID NO: 1586830 - DNA, 15 bp, Homo sapiens
gaacccaatctttta

SEQ ID NO: 1586831 - DNA, 15 bp, Homo sapiens
aacccaatcttttaa

SEQ ID NO: 1586832 - DNA, 15 bp, Homo sapiens
acccaatcttttaac

SEQ ID NO: 1586833 - DNA, 15 bp, Homo sapiens
cccaatcttttaact

SEQ ID NO: 1586834 - DNA, 15 bp, Homo sapiens
ccaatcttttaactc

SEQ ID NO: 1586835 - DNA, 15 bp, Homo sapiens
caatcttttaactct

SEQ ID NO: 1586836 - DNA, 15 bp, Homo sapiens
aatcttttaactctg

SEQ ID NO: 1586837 - DNA, 15 bp, Homo sapiens
atcttttaactctgc

SEQ ID NO: 1586838 - DNA, 15 bp, Homo sapiens
tcttttaactctgca

SEQ ID NO: 1586839 - DNA, 15 bp, Homo sapiens
cttttaactctgcag

SEQ ID NO: 1586840 - DNA, 15 bp, Homo sapiens
ttttaactctgcaga

SEQ ID NO: 1586841 - DNA, 15 bp, Homo sapiens
tttaactctgcagaa

SEQ ID NO: 1586842 - DNA, 15 bp, Homo sapiens
ttaactctgcagaac

SEQ ID NO: 1586843 - DNA, 15 bp, Homo sapiens
taactctgcagaact

SEQ ID NO: 1586844 - DNA, 15 bp, Homo sapiens
aactctgcagaactc

SEQ ID NO: 1586845 - DNA, 15 bp, Homo sapiens
actctgcagaactca

SEQ ID NO: 1586846 - DNA, 15 bp, Homo sapiens
ctctgcagaactcag

SEQ ID NO: 1586847 - DNA, 15 bp, Homo sapiens
tctgcagaactcaga

SEQ ID NO: 1586848 - DNA, 15 bp, Homo sapiens
ctgcagaactcagag

SEQ ID NO: 1586849 - DNA, 15 bp, Homo sapiens
tgcagaactcagagt

SEQ ID NO: 1586850 - DNA, 15 bp, Homo sapiens
gcagaactcagagtc

SEQ ID NO: 1586851 - DNA, 15 bp, Homo sapiens
cagaactcagagtca

SEQ ID NO: 1586852 - DNA, 15 bp, Homo sapiens
agaactcagagtcac

SEQ ID NO: 1586853 - DNA, 15 bp, Homo sapiens
gaactcagagtcact

SEQ ID NO: 1586854 - DNA, 15 bp, Homo sapiens
aactcagagtcactc

SEQ ID NO: 1586855 - DNA, 15 bp, Homo sapiens
actcagagtcactct

SEQ ID NO: 1586856 - DNA, 15 bp, Homo sapiens
ctcagagtcactctt

SEQ ID NO: 1586857 - DNA, 15 bp, Homo sapiens
tcagagtcactctta

SEQ ID NO: 1586858 - DNA, 15 bp, Homo sapiens
cagagtcactcttat

SEQ ID NO: 1586859 - DNA, 15 bp, Homo sapiens
agagtcactcttatt

SEQ ID NO: 1586860 - DNA, 15 bp, Homo sapiens
gagtcactcttattt

SEQ ID NO: 1586861 - DNA, 15 bp, Homo sapiens
agtcactcttatttg

SEQ ID NO: 1586862 - DNA, 15 bp, Homo sapiens
gtcactcttatttgg

SEQ ID NO: 1586863 - DNA, 15 bp, Homo sapiens
tcactcttatttgga

SEQ ID NO: 1586864 - DNA, 15 bp, Homo sapiens
cactcttatttggaa

SEQ ID NO: 1586865 - DNA, 15 bp, Homo sapiens
actcttatttggaaa

SEQ ID NO: 1586866 - DNA, 15 bp, Homo sapiens
ctcttatttggaaaa

SEQ ID NO: 1586867 - DNA, 15 bp, Homo sapiens
tcttatttggaaaaa

SEQ ID NO: 1586868 - DNA, 15 bp, Homo sapiens
cttatttggaaaaac

SEQ ID NO: 1586869 - DNA, 15 bp, Homo sapiens
ttatttggaaaaact

SEQ ID NO: 1586870 - DNA, 15 bp, Homo sapiens
tatttggaaaaactt

SEQ ID NO: 1586871 - DNA, 15 bp, Homo sapiens
atttggaaaaacttt

SEQ ID NO: 1586872 - DNA, 15 bp, Homo sapiens
tttggaaaaactttt

SEQ ID NO: 1586873 - DNA, 15 bp, Homo sapiens
ttggaaaaacttttt

SEQ ID NO: 1586874 - DNA, 15 bp, Homo sapiens
tggaaaaacttttta

SEQ ID NO: 1586875 - DNA, 15 bp, Homo sapiens
ggaaaaactttttaa

SEQ ID NO: 1586876 - DNA, 15 bp, Homo sapiens
gaaaaactttttaac

SEQ ID NO: 1586877 - DNA, 15 bp, Homo sapiens
aaaaactttttaact

SEQ ID NO: 1586878 - DNA, 15 bp, Homo sapiens
aaaactttttaactg

SEQ ID NO: 1586879 - DNA, 15 bp, Homo sapiens
aaactttttaactga

SEQ ID NO: 1586880 - DNA, 15 bp, Homo sapiens
aactttttaactgat

SEQ ID NO: 1586881 - DNA, 15 bp, Homo sapiens
actttttaactgatg

SEQ ID NO: 1586882 - DNA, 15 bp, Homo sapiens
ctttttaactgatgt

SEQ ID NO: 1586883 - DNA, 15 bp, Homo sapiens
tttttaactgatgtg

SEQ ID NO: 1586884 - DNA, 15 bp, Homo sapiens
ttttaactgatgtgg

SEQ ID NO: 1586885 - DNA, 15 bp, Homo sapiens
tttaactgatgtgga

SEQ ID NO: 1586886 - DNA, 15 bp, Homo sapiens
ttaactgatgtggat

SEQ ID NO: 1586887 - DNA, 15 bp, Homo sapiens
taactgatgtggatc

SEQ ID NO: 1586888 - DNA, 15 bp, Homo sapiens
aactgatgtggatcc

SEQ ID NO: 1586889 - DNA, 15 bp, Homo sapiens
actgatgtggatcct

SEQ ID NO: 1586890 - DNA, 15 bp, Homo sapiens
ctgatgtggatcctc

SEQ ID NO: 1586891 - DNA, 15 bp, Homo sapiens
tgatgtggatcctct

SEQ ID NO: 1586892 - DNA, 15 bp, Homo sapiens
gatgtggatcctcta

SEQ ID NO: 1586893 - DNA, 15 bp, Homo sapiens
atgtggatcctctaa

SEQ ID NO: 1586894 - DNA, 15 bp, Homo sapiens
tgtggatcctctaat

SEQ ID NO: 1586895 - DNA, 15 bp, Homo sapiens
gtggatcctctaata

SEQ ID NO: 1586896 - DNA, 15 bp, Homo sapiens
tggatcctctaatat

SEQ ID NO: 1586897 - DNA, 15 bp, Homo sapiens
ggatcctctaatatg

SEQ ID NO: 1586898 - DNA, 15 bp, Homo sapiens
gatcctctaatatgg

SEQ ID NO: 1586899 - DNA, 15 bp, Homo sapiens
atcctctaatatggg

SEQ ID NO: 1586900 - DNA, 15 bp, Homo sapiens
tcctctaatatgggc

SEQ ID NO: 1586901 - DNA, 15 bp, Homo sapiens
cctctaatatgggct

SEQ ID NO: 1586902 - DNA, 15 bp, Homo sapiens
ctctaatatgggctt

SEQ ID NO: 1586903 - DNA, 15 bp, Homo sapiens
tctaatatgggcttc

SEQ ID NO: 1586904 - DNA, 15 bp, Homo sapiens
ctaatatgggcttcc

SEQ ID NO: 1586905 - DNA, 15 bp, Homo sapiens
taatatgggcttcct

SEQ ID NO: 1586906 - DNA, 15 bp, Homo sapiens
aatatgggcttccta

SEQ ID NO: 1586907 - DNA, 15 bp, Homo sapiens
atatgggcttcctat

SEQ ID NO: 1586908 - DNA, 15 bp, Homo sapiens
tatgggcttcctatt

SEQ ID NO: 1586909 - DNA, 15 bp, Homo sapiens
atgggcttcctatta

SEQ ID NO: 1586910 - DNA, 15 bp, Homo sapiens
tgggcttcctattat

SEQ ID NO: 1586911 - DNA, 15 bp, Homo sapiens
gggcttcctattatt

SEQ ID NO: 1586912 - DNA, 15 bp, Homo sapiens
ggcttcctattattc

SEQ ID NO: 1586913 - DNA, 15 bp, Homo sapiens
gcttcctattattca

SEQ ID NO: 1586914 - DNA, 15 bp, Homo sapiens
cttcctattattcat

SEQ ID NO: 1586915 - DNA, 15 bp, Homo sapiens
ttcctattattcatt

SEQ ID NO: 1586916 - DNA, 15 bp, Homo sapiens
tcctattattcattc

SEQ ID NO: 1586917 - DNA, 15 bp, Homo sapiens
cctattattcattct

SEQ ID NO: 1586918 - DNA, 15 bp, Homo sapiens
ctattattcattctc

SEQ ID NO: 1586919 - DNA, 15 bp, Homo sapiens
tattattcattctct

SEQ ID NO: 1586920 - DNA, 15 bp, Homo sapiens
attattcattctcta

SEQ ID NO: 1586921 - DNA, 15 bp, Homo sapiens
ttattcattctctat

SEQ ID NO: 1586922 - DNA, 15 bp, Homo sapiens
tattcattctctatt

SEQ ID NO: 1586923 - DNA, 15 bp, Homo sapiens
attcattctctatta

SEQ ID NO: 1586924 - DNA, 15 bp, Homo sapiens
ttcattctctattag

SEQ ID NO: 1586925 - DNA, 15 bp, Homo sapiens
tcattctctattagt

SEQ ID NO: 1586926 - DNA, 15 bp, Homo sapiens
cattctctattagtc

SEQ ID NO: 1586927 - DNA, 15 bp, Homo sapiens
attctctattagtca

SEQ ID NO: 1586928 - DNA, 15 bp, Homo sapiens
ttctctattagtcag

SEQ ID NO: 1586929 - DNA, 15 bp, Homo sapiens
tctctattagtcaga

SEQ ID NO: 1586930 - DNA, 15 bp, Homo sapiens
ctctattagtcagaa

SEQ ID NO: 1586931 - DNA, 15 bp, Homo sapiens
tctattagtcagaag

SEQ ID NO: 1586932 - DNA, 15 bp, Homo sapiens
ctattagtcagaagt

SEQ ID NO: 1586933 - DNA, 15 bp, Homo sapiens
tattagtcagaagtt

SEQ ID NO: 1586934 - DNA, 15 bp, Homo sapiens
attagtcagaagttt

SEQ ID NO: 1586935 - DNA, 15 bp, Homo sapiens
ttagtcagaagtttt

SEQ ID NO: 1586936 - DNA, 15 bp, Homo sapiens
tagtcagaagttttg

SEQ ID NO: 1586937 - DNA, 15 bp, Homo sapiens
agtcagaagttttgc

SEQ ID NO: 1586938 - DNA, 15 bp, Homo sapiens
gtcagaagttttgca

SEQ ID NO: 1586939 - DNA, 15 bp, Homo sapiens
tcagaagttttgcaa

SEQ ID NO: 1586940 - DNA, 15 bp, Homo sapiens
cagaagttttgcaag

SEQ ID NO: 1586941 - DNA, 15 bp, Homo sapiens
agaagttttgcaagc

SEQ ID NO: 1586942 - DNA, 15 bp, Homo sapiens
gaagttttgcaagca

SEQ ID NO: 1586943 - DNA, 15 bp, Homo sapiens
aagttttgcaagcag

SEQ ID NO: 1586944 - DNA, 15 bp, Homo sapiens
agttttgcaagcaga

SEQ ID NO: 1586945 - DNA, 15 bp, Homo sapiens
gttttgcaagcagac

SEQ ID NO: 1586946 - DNA, 15 bp, Homo sapiens
ttttgcaagcagaca

SEQ ID NO: 1586947 - DNA, 15 bp, Homo sapiens
tttgcaagcagacag

SEQ ID NO: 1586948 - DNA, 15 bp, Homo sapiens
ttgcaagcagacaga

SEQ ID NO: 1586949 - DNA, 15 bp, Homo sapiens
tgcaagcagacagaa

SEQ ID NO: 1586950 - DNA, 15 bp, Homo sapiens
gcaagcagacagaat

SEQ ID NO: 1586951 - DNA, 15 bp, Homo sapiens
caagcagacagaatt

SEQ ID NO: 1586952 - DNA, 15 bp, Homo sapiens
aagcagacagaattc

SEQ ID NO: 1586953 - DNA, 15 bp, Homo sapiens
agcagacagaattca

SEQ ID NO: 1586954 - DNA, 15 bp, Homo sapiens
gcagacagaattcat

SEQ ID NO: 1586955 - DNA, 15 bp, Homo sapiens
cagacagaattcatt

SEQ ID NO: 1586956 - DNA, 15 bp, Homo sapiens
agacagaattcattt

SEQ ID NO: 1586957 - DNA, 15 bp, Homo sapiens
gacagaattcatttt

SEQ ID NO: 1586958 - DNA, 15 bp, Homo sapiens
acagaattcattttg

SEQ ID NO: 1586959 - DNA, 15 bp, Homo sapiens
cagaattcattttgc

SEQ ID NO: 1586960 - DNA, 15 bp, Homo sapiens
agaattcattttgcc

SEQ ID NO: 1586961 - DNA, 15 bp, Homo sapiens
gaattcattttgcca

SEQ ID NO: 1586962 - DNA, 15 bp, Homo sapiens
aattcattttgccaa

SEQ ID NO: 1586963 - DNA, 15 bp, Homo sapiens
attcattttgccaat

SEQ ID NO: 1586964 - DNA, 15 bp, Homo sapiens
ttcattttgccaatt

SEQ ID NO: 1586965 - DNA, 15 bp, Homo sapiens
tcattttgccaatta

SEQ ID NO: 1586966 - DNA, 15 bp, Homo sapiens
cattttgccaattac

SEQ ID NO: 1586967 - DNA, 15 bp, Homo sapiens
attttgccaattacg

SEQ ID NO: 1586968 - DNA, 15 bp, Homo sapiens
ttttgccaattacgg

SEQ ID NO: 1586969 - DNA, 15 bp, Homo sapiens
tttgccaattacggg

SEQ ID NO: 1586970 - DNA, 15 bp, Homo sapiens
ttgccaattacggga

SEQ ID NO: 1586971 - DNA, 15 bp, Homo sapiens
tgccaattacgggat

SEQ ID NO: 1586972 - DNA, 15 bp, Homo sapiens
gccaattacgggatt

SEQ ID NO: 1586973 - DNA, 15 bp, Homo sapiens
ccaattacgggattt

SEQ ID NO: 1586974 - DNA, 15 bp, Homo sapiens
caattacgggatttt

SEQ ID NO: 1586975 - DNA, 15 bp, Homo sapiens
aattacgggattttc

SEQ ID NO: 1586976 - DNA, 15 bp, Homo sapiens
attacgggattttcc

SEQ ID NO: 1586977 - DNA, 15 bp, Homo sapiens
ttacgggattttccc

SEQ ID NO: 1586978 - DNA, 15 bp, Homo sapiens
tacgggattttccct

SEQ ID NO: 1586979 - DNA, 15 bp, Homo sapiens
acgggattttccctc

SEQ ID NO: 1586980 - DNA, 15 bp, Homo sapiens
cgggattttccctca

SEQ ID NO: 1586981 - DNA, 15 bp, Homo sapiens
gggattttccctcag

SEQ ID NO: 1586982 - DNA, 15 bp, Homo sapiens
ggattttccctcagt

SEQ ID NO: 1586983 - DNA, 15 bp, Homo sapiens
gattttccctcagtt

SEQ ID NO: 1586984 - DNA, 15 bp, Homo sapiens
attttccctcagttg

SEQ ID NO: 1586985 - DNA, 15 bp, Homo sapiens
ttttccctcagttgc

SEQ ID NO: 1586986 - DNA, 15 bp, Homo sapiens
tttccctcagttgca

SEQ ID NO: 1586987 - DNA, 15 bp, Homo sapiens
ttccctcagttgcag

SEQ ID NO: 1586988 - DNA, 15 bp, Homo sapiens
tccctcagttgcagt

SEQ ID NO: 1586989 - DNA, 15 bp, Homo sapiens
ccctcagttgcagtc

SEQ ID NO: 1586990 - DNA, 15 bp, Homo sapiens
cctcagttgcagtca

SEQ ID NO: 1586991 - DNA, 15 bp, Homo sapiens
ctcagttgcagtcaa

SEQ ID NO: 1586992 - DNA, 15 bp, Homo sapiens
tcagttgcagtcaag

SEQ ID NO: 1586993 - DNA, 15 bp, Homo sapiens
cagttgcagtcaagg

SEQ ID NO: 1586994 - DNA, 15 bp, Homo sapiens
agttgcagtcaaggt

SEQ ID NO: 1586995 - DNA, 15 bp, Homo sapiens
gttgcagtcaaggtt

SEQ ID NO: 1586996 - DNA, 15 bp, Homo sapiens
ttgcagtcaaggttc

SEQ ID NO: 1586997 - DNA, 15 bp, Homo sapiens
tgcagtcaaggttca

SEQ ID NO: 1586998 - DNA, 15 bp, Homo sapiens
gcagtcaaggttcat

SEQ ID NO: 1586999 - DNA, 15 bp, Homo sapiens
cagtcaaggttcata

SEQ ID NO: 1587000 - DNA, 15 bp, Homo sapiens
agtcaaggttcataa

SEQ ID NO: 1587001 - DNA, 15 bp, Homo sapiens
gtcaaggttcataaa

SEQ ID NO: 1587002 - DNA, 15 bp, Homo sapiens
tcaaggttcataaaa

SEQ ID NO: 1587003 - DNA, 15 bp, Homo sapiens
caaggttcataaaac

SEQ ID NO: 1587004 - DNA, 15 bp, Homo sapiens
aaggttcataaaact

SEQ ID NO: 1587005 - DNA, 15 bp, Homo sapiens
aggttcataaaacta

SEQ ID NO: 1587006 - DNA, 15 bp, Homo sapiens
ggttcataaaactat

SEQ ID NO: 1587007 - DNA, 15 bp, Homo sapiens
gttcataaaactata

SEQ ID NO: 1587008 - DNA, 15 bp, Homo sapiens
ttcataaaactataa

SEQ ID NO: 1587009 - DNA, 15 bp, Homo sapiens
tcataaaactataac

SEQ ID NO: 1587010 - DNA, 15 bp, Homo sapiens
cataaaactataact

SEQ ID NO: 1587011 - DNA, 15 bp, Homo sapiens
ataaaactataactc

SEQ ID NO: 1587012 - DNA, 15 bp, Homo sapiens
taaaactataactct

SEQ ID NO: 1587013 - DNA, 15 bp, Homo sapiens
aaaactataactctt

SEQ ID NO: 1587014 - DNA, 15 bp, Homo sapiens
aaactataactcttt

SEQ ID NO: 1587015 - DNA, 15 bp, Homo sapiens
aactataactcttta

SEQ ID NO: 1587016 - DNA, 15 bp, Homo sapiens
actataactctttat

SEQ ID NO: 1587017 - DNA, 15 bp, Homo sapiens
ctataactctttatc

SEQ ID NO: 1587018 - DNA, 15 bp, Homo sapiens
tataactctttatct

SEQ ID NO: 1587019 - DNA, 15 bp, Homo sapiens
ataactctttatctt

SEQ ID NO: 1587020 - DNA, 15 bp, Homo sapiens
taactctttatcttt

SEQ ID NO: 1587021 - DNA, 15 bp, Homo sapiens
aactctttatcttta

SEQ ID NO: 1587022 - DNA, 15 bp, Homo sapiens
actctttatctttaa

SEQ ID NO: 1587023 - DNA, 15 bp, Homo sapiens
ctctttatctttaat

SEQ ID NO: 1587024 - DNA, 15 bp, Homo sapiens
tctttatctttaatt

SEQ ID NO: 1587025 - DNA, 15 bp, Homo sapiens
ctttatctttaatta

SEQ ID NO: 1587026 - DNA, 15 bp, Homo sapiens
tttatctttaattag

SEQ ID NO: 1587027 - DNA, 15 bp, Homo sapiens
ttatctttaattaga

SEQ ID NO: 1587028 - DNA, 15 bp, Homo sapiens
tatctttaattagaa

SEQ ID NO: 1587029 - DNA, 15 bp, Homo sapiens
atctttaattagaaa

SEQ ID NO: 1587030 - DNA, 15 bp, Homo sapiens
tctttaattagaaat

SEQ ID NO: 1587031 - DNA, 15 bp, Homo sapiens
ctttaattagaaatg

SEQ ID NO: 1587032 - DNA, 15 bp, Homo sapiens
tttaattagaaatgt

SEQ ID NO: 1587033 - DNA, 15 bp, Homo sapiens
ttaattagaaatgtt

SEQ ID NO: 1587034 - DNA, 15 bp, Homo sapiens
taattagaaatgttt

SEQ ID NO: 1587035 - DNA, 15 bp, Homo sapiens
aattagaaatgtttt

SEQ ID NO: 1587036 - DNA, 15 bp, Homo sapiens
attagaaatgttttt

SEQ ID NO: 1587037 - DNA, 15 bp, Homo sapiens
ttagaaatgtttttt

SEQ ID NO: 1587038 - DNA, 15 bp, Homo sapiens
tagaaatgttttttt

SEQ ID NO: 1587039 - DNA, 15 bp, Homo sapiens
agaaatgtttttttt

SEQ ID NO: 1587040 - DNA, 15 bp, Homo sapiens
gaaatgttttttttt

SEQ ID NO: 1587041 - DNA, 15 bp, Homo sapiens
aaatgtttttttttt

SEQ ID NO: 1587042 - DNA, 15 bp, Homo sapiens
aatgttttttttttt

SEQ ID NO: 1587043 - DNA, 15 bp, Homo sapiens
atgtttttttttttg

SEQ ID NO: 1587044 - DNA, 15 bp, Homo sapiens
aggtcttgctctgtt

SEQ ID NO: 1587045 - DNA, 15 bp, Homo sapiens
ttgcccagactggaa

SEQ ID NO: 1587046 - DNA, 15 bp, Homo sapiens
tgcccagactggaat

SEQ ID NO: 1587047 - DNA, 15 bp, Homo sapiens
gcccagactggaatg

SEQ ID NO: 1587048 - DNA, 15 bp, Homo sapiens
gactggaatgcagtg

SEQ ID NO: 1587049 - DNA, 15 bp, Homo sapiens
actggaatgcagtgg

SEQ ID NO: 1587050 - DNA, 15 bp, Homo sapiens
ggaatgcagtggcat

SEQ ID NO: 1587051 - DNA, 15 bp, Homo sapiens
gaatgcagtggcata

SEQ ID NO: 1587052 - DNA, 15 bp, Homo sapiens
aatgcagtggcatag

SEQ ID NO: 1587053 - DNA, 15 bp, Homo sapiens
atgcagtggcatagt

SEQ ID NO: 1587054 - DNA, 15 bp, Homo sapiens
tgcagtggcatagtg

SEQ ID NO: 1587055 - DNA, 15 bp, Homo sapiens
gcagtggcatagtgg

SEQ ID NO: 1587056 - DNA, 15 bp, Homo sapiens
cagtggcatagtggc

SEQ ID NO: 1587057 - DNA, 15 bp, Homo sapiens
agtggcatagtggcc

SEQ ID NO: 1587058 - DNA, 15 bp, Homo sapiens
gtggcatagtggccc

SEQ ID NO: 1587059 - DNA, 15 bp, Homo sapiens
tggcatagtggccca

SEQ ID NO: 1587060 - DNA, 15 bp, Homo sapiens
ggcatagtggcccat

SEQ ID NO: 1587061 - DNA, 15 bp, Homo sapiens
gcatagtggcccatt

SEQ ID NO: 1587062 - DNA, 15 bp, Homo sapiens
catagtggcccattg

SEQ ID NO: 1587063 - DNA, 15 bp, Homo sapiens
atagtggcccattgc

SEQ ID NO: 1587064 - DNA, 15 bp, Homo sapiens
tagtggcccattgca

SEQ ID NO: 1587065 - DNA, 15 bp, Homo sapiens
agtggcccattgcag

SEQ ID NO: 1587066 - DNA, 15 bp, Homo sapiens
gtggcccattgcagc

SEQ ID NO: 1587067 - DNA, 15 bp, Homo sapiens
tggcccattgcagct

SEQ ID NO: 1587068 - DNA, 15 bp, Homo sapiens
ggcccattgcagctt

SEQ ID NO: 1587069 - DNA, 15 bp, Homo sapiens
gcccattgcagcttt

SEQ ID NO: 1587070 - DNA, 15 bp, Homo sapiens
cccattgcagctttg

SEQ ID NO: 1587071 - DNA, 15 bp, Homo sapiens
ccattgcagctttga

SEQ ID NO: 1587072 - DNA, 15 bp, Homo sapiens
cattgcagctttgaa

SEQ ID NO: 1587073 - DNA, 15 bp, Homo sapiens
attgcagctttgaac

SEQ ID NO: 1587074 - DNA, 15 bp, Homo sapiens
ttgcagctttgaact

SEQ ID NO: 1587075 - DNA, 15 bp, Homo sapiens
tgcagctttgaactc

SEQ ID NO: 1587076 - DNA, 15 bp, Homo sapiens
gcagctttgaactcc

SEQ ID NO: 1587077 - DNA, 15 bp, Homo sapiens
cagctttgaactcct

SEQ ID NO: 1587078 - DNA, 15 bp, Homo sapiens
agctttgaactcctg

SEQ ID NO: 1587079 - DNA, 15 bp, Homo sapiens
gctttgaactcctgg

SEQ ID NO: 1587080 - DNA, 15 bp, Homo sapiens
ctttgaactcctggg

SEQ ID NO: 1587081 - DNA, 15 bp, Homo sapiens
ctcaagggatcctct

SEQ ID NO: 1587082 - DNA, 15 bp, Homo sapiens
tcaagggatcctctg

SEQ ID NO: 1587083 - DNA, 15 bp, Homo sapiens
caagggatcctctgc

SEQ ID NO: 1587084 - DNA, 15 bp, Homo sapiens
aagggatcctctgcc

SEQ ID NO: 1587085 - DNA, 15 bp, Homo sapiens
agggatcctctgcct

SEQ ID NO: 1587086 - DNA, 15 bp, Homo sapiens
gggatcctctgcctc

SEQ ID NO: 1587087 - DNA, 15 bp, Homo sapiens
ggatcctctgcctca

SEQ ID NO: 1587088 - DNA, 15 bp, Homo sapiens
gatcctctgcctcag

SEQ ID NO: 1587089 - DNA, 15 bp, Homo sapiens
atcctctgcctcagc

SEQ ID NO: 1587090 - DNA, 15 bp, Homo sapiens
tcctctgcctcagcc

SEQ ID NO: 1587091 - DNA, 15 bp, Homo sapiens
cctctgcctcagcct

SEQ ID NO: 1587092 - DNA, 15 bp, Homo sapiens
ctctgcctcagcctc

SEQ ID NO: 1587093 - DNA, 15 bp, Homo sapiens
cagcctcccaagtat

SEQ ID NO: 1587094 - DNA, 15 bp, Homo sapiens
agcctcccaagtatc

SEQ ID NO: 1587095 - DNA, 15 bp, Homo sapiens
gcctcccaagtatct

SEQ ID NO: 1587096 - DNA, 15 bp, Homo sapiens
cctcccaagtatctg

SEQ ID NO: 1587097 - DNA, 15 bp, Homo sapiens
ctcccaagtatctga

SEQ ID NO: 1587098 - DNA, 15 bp, Homo sapiens
tcccaagtatctgag

SEQ ID NO: 1587099 - DNA, 15 bp, Homo sapiens
cccaagtatctgaga

SEQ ID NO: 1587100 - DNA, 15 bp, Homo sapiens
ccaagtatctgagac

SEQ ID NO: 1587101 - DNA, 15 bp, Homo sapiens
caagtatctgagact

SEQ ID NO: 1587102 - DNA, 15 bp, Homo sapiens
aagtatctgagacta

SEQ ID NO: 1587103 - DNA, 15 bp, Homo sapiens
agtatctgagactac

SEQ ID NO: 1587104 - DNA, 15 bp, Homo sapiens
gtatctgagactaca

SEQ ID NO: 1587105 - DNA, 15 bp, Homo sapiens
tatctgagactacaa

SEQ ID NO: 1587106 - DNA, 15 bp, Homo sapiens
atctgagactacaag

SEQ ID NO: 1587107 - DNA, 15 bp, Homo sapiens
tctgagactacaagt

SEQ ID NO: 1587108 - DNA, 15 bp, Homo sapiens
ctgagactacaagtg

SEQ ID NO: 1587109 - DNA, 15 bp, Homo sapiens
tgagactacaagtgc

SEQ ID NO: 1587110 - DNA, 15 bp, Homo sapiens
gagactacaagtgcg

SEQ ID NO: 1587111 - DNA, 15 bp, Homo sapiens
agactacaagtgcgt

SEQ ID NO: 1587112 - DNA, 15 bp, Homo sapiens
acaagtgcgtgccat

SEQ ID NO: 1587113 - DNA, 15 bp, Homo sapiens
caagtgcgtgccatc

SEQ ID NO: 1587114 - DNA, 15 bp, Homo sapiens
aagtgcgtgccatca

SEQ ID NO: 1587115 - DNA, 15 bp, Homo sapiens
agtgcgtgccatcac

SEQ ID NO: 1587116 - DNA, 15 bp, Homo sapiens
gtgcgtgccatcacc

SEQ ID NO: 1587117 - DNA, 15 bp, Homo sapiens
tgcgtgccatcaccc

SEQ ID NO: 1587118 - DNA, 15 bp, Homo sapiens
gcgtgccatcaccca

SEQ ID NO: 1587119 - DNA, 15 bp, Homo sapiens
cgtgccatcacccat

SEQ ID NO: 1587120 - DNA, 15 bp, Homo sapiens
gtgccatcacccatg

SEQ ID NO: 1587121 - DNA, 15 bp, Homo sapiens
tgccatcacccatgg

SEQ ID NO: 1587122 - DNA, 15 bp, Homo sapiens
gccatcacccatggc

SEQ ID NO: 1587123 - DNA, 15 bp, Homo sapiens
ccatcacccatggct

SEQ ID NO: 1587124 - DNA, 15 bp, Homo sapiens
catcacccatggcta

SEQ ID NO: 1587125 - DNA, 15 bp, Homo sapiens
atcacccatggctat

SEQ ID NO: 1587126 - DNA, 15 bp, Homo sapiens
tcacccatggctatt

SEQ ID NO: 1587127 - DNA, 15 bp, Homo sapiens
cacccatggctattt

SEQ ID NO: 1587128 - DNA, 15 bp, Homo sapiens
acccatggctatttt

SEQ ID NO: 1587129 - DNA, 15 bp, Homo sapiens
cccatggctatttta

SEQ ID NO: 1587130 - DNA, 15 bp, Homo sapiens
ccatggctattttaa

SEQ ID NO: 1587131 - DNA, 15 bp, Homo sapiens
catggctattttaaa

SEQ ID NO: 1587132 - DNA, 15 bp, Homo sapiens
atggctattttaaaa

SEQ ID NO: 1587133 - DNA, 15 bp, Homo sapiens
tggctattttaaaaa

SEQ ID NO: 1587134 - DNA, 15 bp, Homo sapiens
ggctattttaaaaaa

SEQ ID NO: 1587135 - DNA, 15 bp, Homo sapiens
gctattttaaaaaaa

SEQ ID NO: 1587136 - DNA, 15 bp, Homo sapiens
ctattttaaaaaaaa

SEQ ID NO: 1587137 - DNA, 15 bp, Homo sapiens
tattttaaaaaaaaa

SEQ ID NO: 1587138 - DNA, 15 bp, Homo sapiens
attttaaaaaaaaaa

SEQ ID NO: 1587139 - DNA, 15 bp, Homo sapiens
aaaaaaaaaattgta

SEQ ID NO: 1587140 - DNA, 15 bp, Homo sapiens
aaaaaaaaattgtag

SEQ ID NO: 1587141 - DNA, 15 bp, Homo sapiens
aaaaaaaattgtaga

SEQ ID NO: 1587142 - DNA, 15 bp, Homo sapiens
aaaaaaattgtagag

SEQ ID NO: 1587143 - DNA, 15 bp, Homo sapiens
aaaaaattgtagaga

SEQ ID NO: 1587144 - DNA, 15 bp, Homo sapiens
aaaaattgtagagat

SEQ ID NO: 1587145 - DNA, 15 bp, Homo sapiens
aaaattgtagagata

SEQ ID NO: 1587146 - DNA, 15 bp, Homo sapiens
aaattgtagagatag

SEQ ID NO: 1587147 - DNA, 15 bp, Homo sapiens
aattgtagagatagg

SEQ ID NO: 1587148 - DNA, 15 bp, Homo sapiens
attgtagagataggg

SEQ ID NO: 1587149 - DNA, 15 bp, Homo sapiens
gatagggtcttgctg

SEQ ID NO: 1587150 - DNA, 15 bp, Homo sapiens
atagggtcttgctgt

SEQ ID NO: 1587151 - DNA, 15 bp, Homo sapiens
tagggtcttgctgtg

SEQ ID NO: 1587152 - DNA, 15 bp, Homo sapiens
agggtcttgctgtgt

SEQ ID NO: 1587153 - DNA, 15 bp, Homo sapiens
gggtcttgctgtgtt

SEQ ID NO: 1587154 - DNA, 15 bp, Homo sapiens
ggtcttgctgtgttg

SEQ ID NO: 1587155 - DNA, 15 bp, Homo sapiens
gtcttgctgtgttgc

SEQ ID NO: 1587156 - DNA, 15 bp, Homo sapiens
tcttgctgtgttgcc

SEQ ID NO: 1587157 - DNA, 15 bp, Homo sapiens
cttgctgtgttgccc

SEQ ID NO: 1587158 - DNA, 15 bp, Homo sapiens
ttgctgtgttgccca

SEQ ID NO: 1587159 - DNA, 15 bp, Homo sapiens
tgctgtgttgcccag

SEQ ID NO: 1587160 - DNA, 15 bp, Homo sapiens
gctgtgttgcccagg

SEQ ID NO: 1587161 - DNA, 15 bp, Homo sapiens
tctcaagcaatcctt

SEQ ID NO: 1587162 - DNA, 15 bp, Homo sapiens
tcaagcaatccttct

SEQ ID NO: 1587163 - DNA, 15 bp, Homo sapiens
caagcaatccttctg

SEQ ID NO: 1587164 - DNA, 15 bp, Homo sapiens
aagcaatccttctgc

SEQ ID NO: 1587165 - DNA, 15 bp, Homo sapiens
agcaatccttctgcc

SEQ ID NO: 1587166 - DNA, 15 bp, Homo sapiens
gcaatccttctgcct

SEQ ID NO: 1587167 - DNA, 15 bp, Homo sapiens
caatccttctgcctt

SEQ ID NO: 1587168 - DNA, 15 bp, Homo sapiens
aatccttctgccttg

SEQ ID NO: 1587169 - DNA, 15 bp, Homo sapiens
atccttctgccttgg

SEQ ID NO: 1587170 - DNA, 15 bp, Homo sapiens
tccttctgccttggt

SEQ ID NO: 1587171 - DNA, 15 bp, Homo sapiens
ccttctgccttggtc

SEQ ID NO: 1587172 - DNA, 15 bp, Homo sapiens
tctgccttggtctcc

SEQ ID NO: 1587173 - DNA, 15 bp, Homo sapiens
ctgccttggtctccc

SEQ ID NO: 1587174 - DNA, 15 bp, Homo sapiens
gagattacaggtgtc

SEQ ID NO: 1587175 - DNA, 15 bp, Homo sapiens
agattacaggtgtca

SEQ ID NO: 1587176 - DNA, 15 bp, Homo sapiens
gattacaggtgtcag

SEQ ID NO: 1587177 - DNA, 15 bp, Homo sapiens
attacaggtgtcagc

SEQ ID NO: 1587178 - DNA, 15 bp, Homo sapiens
ttacaggtgtcagcc

SEQ ID NO: 1587179 - DNA, 15 bp, Homo sapiens
tacaggtgtcagccg

SEQ ID NO: 1587180 - DNA, 15 bp, Homo sapiens
acaggtgtcagccgt

SEQ ID NO: 1587181 - DNA, 15 bp, Homo sapiens
caggtgtcagccgtt

SEQ ID NO: 1587182 - DNA, 15 bp, Homo sapiens
aggtgtcagccgttg

SEQ ID NO: 1587183 - DNA, 15 bp, Homo sapiens
ggtgtcagccgttgc

SEQ ID NO: 1587184 - DNA, 15 bp, Homo sapiens
gtgtcagccgttgca

SEQ ID NO: 1587185 - DNA, 15 bp, Homo sapiens
tgtcagccgttgcac

SEQ ID NO: 1587186 - DNA, 15 bp, Homo sapiens
gtcagccgttgcacc

SEQ ID NO: 1587187 - DNA, 15 bp, Homo sapiens
tcagccgttgcacct

SEQ ID NO: 1587188 - DNA, 15 bp, Homo sapiens
cagccgttgcacctg

SEQ ID NO: 1587189 - DNA, 15 bp, Homo sapiens
agccgttgcacctgg

SEQ ID NO: 1587190 - DNA, 15 bp, Homo sapiens
gccgttgcacctggc

SEQ ID NO: 1587191 - DNA, 15 bp, Homo sapiens
ccgttgcacctggcc

SEQ ID NO: 1587192 - DNA, 15 bp, Homo sapiens
cgttgcacctggcca

SEQ ID NO: 1587193 - DNA, 15 bp, Homo sapiens
gttgcacctggccaa

SEQ ID NO: 1587194 - DNA, 15 bp, Homo sapiens
ttgcacctggccaaa

SEQ ID NO: 1587195 - DNA, 15 bp, Homo sapiens
tgcacctggccaaaa

SEQ ID NO: 1587196 - DNA, 15 bp, Homo sapiens
gcacctggccaaaac

SEQ ID NO: 1587197 - DNA, 15 bp, Homo sapiens
cacctggccaaaacg

SEQ ID NO: 1587198 - DNA, 15 bp, Homo sapiens
acctggccaaaacga

SEQ ID NO: 1587199 - DNA, 15 bp, Homo sapiens
cctggccaaaacgat

SEQ ID NO: 1587200 - DNA, 15 bp, Homo sapiens
ctggccaaaacgata

SEQ ID NO: 1587201 - DNA, 15 bp, Homo sapiens
tggccaaaacgataa

SEQ ID NO: 1587202 - DNA, 15 bp, Homo sapiens
ggccaaaacgataac

SEQ ID NO: 1587203 - DNA, 15 bp, Homo sapiens
gccaaaacgataact

SEQ ID NO: 1587204 - DNA, 15 bp, Homo sapiens
ccaaaacgataactt

SEQ ID NO: 1587205 - DNA, 15 bp, Homo sapiens
caaaacgataactta

SEQ ID NO: 1587206 - DNA, 15 bp, Homo sapiens
aaaacgataacttaa

SEQ ID NO: 1587207 - DNA, 15 bp, Homo sapiens
aaacgataacttaaa

SEQ ID NO: 1587208 - DNA, 15 bp, Homo sapiens
aacgataacttaaaa

SEQ ID NO: 1587209 - DNA, 15 bp, Homo sapiens
acgataacttaaaat

SEQ ID NO: 1587210 - DNA, 15 bp, Homo sapiens
cgataacttaaaata

SEQ ID NO: 1587211 - DNA, 15 bp, Homo sapiens
gataacttaaaatac

SEQ ID NO: 1587212 - DNA, 15 bp, Homo sapiens
ataacttaaaataca

SEQ ID NO: 1587213 - DNA, 15 bp, Homo sapiens
taacttaaaatacac

SEQ ID NO: 1587214 - DNA, 15 bp, Homo sapiens
aacttaaaatacaca

SEQ ID NO: 1587215 - DNA, 15 bp, Homo sapiens
acttaaaatacacac

SEQ ID NO: 1587216 - DNA, 15 bp, Homo sapiens
cttaaaatacacaca

SEQ ID NO: 1587217 - DNA, 15 bp, Homo sapiens
ttaaaatacacacac

SEQ ID NO: 1587218 - DNA, 15 bp, Homo sapiens
taaaatacacacaca

SEQ ID NO: 1587219 - DNA, 15 bp, Homo sapiens
aaaatacacacacac

SEQ ID NO: 1587220 - DNA, 15 bp, Homo sapiens
aaatacacacacaca

SEQ ID NO: 1587221 - DNA, 15 bp, Homo sapiens
aatacacacacacac

SEQ ID NO: 1587222 - DNA, 15 bp, Homo sapiens
cacacacaaacacat

SEQ ID NO: 1587223 - DNA, 15 bp, Homo sapiens
acacacaaacacata

SEQ ID NO: 1587224 - DNA, 15 bp, Homo sapiens
cacacaaacacatat

SEQ ID NO: 1587225 - DNA, 15 bp, Homo sapiens
acacaaacacatatg

SEQ ID NO: 1587226 - DNA, 15 bp, Homo sapiens
cacaaacacatatgt

SEQ ID NO: 1587227 - DNA, 15 bp, Homo sapiens
acaaacacatatgtg

SEQ ID NO: 1587228 - DNA, 15 bp, Homo sapiens
caaacacatatgtgt

SEQ ID NO: 1587229 - DNA, 15 bp, Homo sapiens
aaacacatatgtgta

SEQ ID NO: 1587230 - DNA, 15 bp, Homo sapiens
aacacatatgtgtat

SEQ ID NO: 1587231 - DNA, 15 bp, Homo sapiens
acacatatgtgtatt

SEQ ID NO: 1587232 - DNA, 15 bp, Homo sapiens
cacatatgtgtattt

SEQ ID NO: 1587233 - DNA, 15 bp, Homo sapiens
acatatgtgtatttg

SEQ ID NO: 1587234 - DNA, 15 bp, Homo sapiens
catatgtgtatttgt

SEQ ID NO: 1587235 - DNA, 15 bp, Homo sapiens
atatgtgtatttgtg

SEQ ID NO: 1587236 - DNA, 15 bp, Homo sapiens
tatgtgtatttgtgt

SEQ ID NO: 1587237 - DNA, 15 bp, Homo sapiens
atgtgtatttgtgtg

SEQ ID NO: 1587238 - DNA, 15 bp, Homo sapiens
tgtgtatttgtgtgt

SEQ ID NO: 1587239 - DNA, 15 bp, Homo sapiens
gtgtatttgtgtgtg

SEQ ID NO: 1587240 - DNA, 15 bp, Homo sapiens
tgtatttgtgtgtgt

SEQ ID NO: 1587241 - DNA, 15 bp, Homo sapiens
gtatttgtgtgtgtg

SEQ ID NO: 1587242 - DNA, 15 bp, Homo sapiens
gtgtgtgtgtgtctc

SEQ ID NO: 1587243 - DNA, 15 bp, Homo sapiens
tgtgtgtgtgtctca

SEQ ID NO: 1587244 - DNA, 15 bp, Homo sapiens
gtgtgtgtgtctcaa

SEQ ID NO: 1587245 - DNA, 15 bp, Homo sapiens
tgtgtgtgtctcaaa

SEQ ID NO: 1587246 - DNA, 15 bp, Homo sapiens
gtgtgtgtctcaaaa

SEQ ID NO: 1587247 - DNA, 15 bp, Homo sapiens
tgtgtgtctcaaaag

SEQ ID NO: 1587248 - DNA, 15 bp, Homo sapiens
gtgtgtctcaaaagg

SEQ ID NO: 1587249 - DNA, 15 bp, Homo sapiens
tgtgtctcaaaaggt

SEQ ID NO: 1587250 - DNA, 15 bp, Homo sapiens
gtgtctcaaaaggta

SEQ ID NO: 1587251 - DNA, 15 bp, Homo sapiens
tgtctcaaaaggtat

SEQ ID NO: 1587252 - DNA, 15 bp, Homo sapiens
gtctcaaaaggtatc

SEQ ID NO: 1587253 - DNA, 15 bp, Homo sapiens
tctcaaaaggtatca

SEQ ID NO: 1587254 - DNA, 15 bp, Homo sapiens
ctcaaaaggtatcaa

SEQ ID NO: 1587255 - DNA, 15 bp, Homo sapiens
tcaaaaggtatcaaa

SEQ ID NO: 1587256 - DNA, 15 bp, Homo sapiens
caaaaggtatcaaaa

SEQ ID NO: 1587257 - DNA, 15 bp, Homo sapiens
aaaaggtatcaaaag

SEQ ID NO: 1587258 - DNA, 15 bp, Homo sapiens
aaaggtatcaaaaga

SEQ ID NO: 1587259 - DNA, 15 bp, Homo sapiens
aaggtatcaaaagag

SEQ ID NO: 1587260 - DNA, 15 bp, Homo sapiens
aggtatcaaaagaga

SEQ ID NO: 1587261 - DNA, 15 bp, Homo sapiens
ggtatcaaaagagaa

SEQ ID NO: 1587262 - DNA, 15 bp, Homo sapiens
gtatcaaaagagaat

SEQ ID NO: 1587263 - DNA, 15 bp, Homo sapiens
tatcaaaagagaata

SEQ ID NO: 1587264 - DNA, 15 bp, Homo sapiens
atcaaaagagaatag

SEQ ID NO: 1587265 - DNA, 15 bp, Homo sapiens
tcaaaagagaatagc

SEQ ID NO: 1587266 - DNA, 15 bp, Homo sapiens
caaaagagaatagct

SEQ ID NO: 1587267 - DNA, 15 bp, Homo sapiens
aaaagagaatagcta

SEQ ID NO: 1587268 - DNA, 15 bp, Homo sapiens
aaagagaatagctat

SEQ ID NO: 1587269 - DNA, 15 bp, Homo sapiens
aagagaatagctata

SEQ ID NO: 1587270 - DNA, 15 bp, Homo sapiens
agagaatagctataa

SEQ ID NO: 1587271 - DNA, 15 bp, Homo sapiens
gagaatagctataac

SEQ ID NO: 1587272 - DNA, 15 bp, Homo sapiens
agaatagctataact

SEQ ID NO: 1587273 - DNA, 15 bp, Homo sapiens
gaatagctataactt

SEQ ID NO: 1587274 - DNA, 15 bp, Homo sapiens
aatagctataacttt

SEQ ID NO: 1587275 - DNA, 15 bp, Homo sapiens
atagctataacttta

SEQ ID NO: 1587276 - DNA, 15 bp, Homo sapiens
tagctataactttag

SEQ ID NO: 1587277 - DNA, 15 bp, Homo sapiens
agctataactttagt

SEQ ID NO: 1587278 - DNA, 15 bp, Homo sapiens
gctataactttagtg

SEQ ID NO: 1587279 - DNA, 15 bp, Homo sapiens
ctataactttagtgt

SEQ ID NO: 1587280 - DNA, 15 bp, Homo sapiens
tataactttagtgtt

SEQ ID NO: 1587281 - DNA, 15 bp, Homo sapiens
ataactttagtgttg

SEQ ID NO: 1587282 - DNA, 15 bp, Homo sapiens
taactttagtgttga

SEQ ID NO: 1587283 - DNA, 15 bp, Homo sapiens
aactttagtgttgat

SEQ ID NO: 1587284 - DNA, 15 bp, Homo sapiens
actttagtgttgatc

SEQ ID NO: 1587285 - DNA, 15 bp, Homo sapiens
ctttagtgttgatct

SEQ ID NO: 1587286 - DNA, 15 bp, Homo sapiens
tttagtgttgatctt

SEQ ID NO: 1587287 - DNA, 15 bp, Homo sapiens
ttagtgttgatcttg

SEQ ID NO: 1587288 - DNA, 15 bp, Homo sapiens
tagtgttgatcttga

SEQ ID NO: 1587289 - DNA, 15 bp, Homo sapiens
agtgttgatcttgat

SEQ ID NO: 1587290 - DNA, 15 bp, Homo sapiens
gtgttgatcttgata

SEQ ID NO: 1587291 - DNA, 15 bp, Homo sapiens
tgttgatcttgatag

SEQ ID NO: 1587292 - DNA, 15 bp, Homo sapiens
gttgatcttgatagt

SEQ ID NO: 1587293 - DNA, 15 bp, Homo sapiens
ttgatcttgatagtg

SEQ ID NO: 1587294 - DNA, 15 bp, Homo sapiens
tgatcttgatagtga

SEQ ID NO: 1587295 - DNA, 15 bp, Homo sapiens
gatcttgatagtgac

SEQ ID NO: 1587296 - DNA, 15 bp, Homo sapiens
atcttgatagtgact

SEQ ID NO: 1587297 - DNA, 15 bp, Homo sapiens
tcttgatagtgactt

SEQ ID NO: 1587298 - DNA, 15 bp, Homo sapiens
cttgatagtgacttg

SEQ ID NO: 1587299 - DNA, 15 bp, Homo sapiens
ttgatagtgacttga

SEQ ID NO: 1587300 - DNA, 15 bp, Homo sapiens
tgatagtgacttgat

SEQ ID NO: 1587301 - DNA, 15 bp, Homo sapiens
gatagtgacttgatt

SEQ ID NO: 1587302 - DNA, 15 bp, Homo sapiens
atagtgacttgatta

SEQ ID NO: 1587303 - DNA, 15 bp, Homo sapiens
tagtgacttgattag

SEQ ID NO: 1587304 - DNA, 15 bp, Homo sapiens
agtgacttgattagg

SEQ ID NO: 1587305 - DNA, 15 bp, Homo sapiens
gtgacttgattaggc

SEQ ID NO: 1587306 - DNA, 15 bp, Homo sapiens
tgacttgattaggct

SEQ ID NO: 1587307 - DNA, 15 bp, Homo sapiens
gacttgattaggctc

SEQ ID NO: 1587308 - DNA, 15 bp, Homo sapiens
acttgattaggctct

SEQ ID NO: 1587309 - DNA, 15 bp, Homo sapiens
cttgattaggctctg

SEQ ID NO: 1587310 - DNA, 15 bp, Homo sapiens
ttgattaggctctgt

SEQ ID NO: 1587311 - DNA, 15 bp, Homo sapiens
tgattaggctctgtt

SEQ ID NO: 1587312 - DNA, 15 bp, Homo sapiens
gattaggctctgttt

SEQ ID NO: 1587313 - DNA, 15 bp, Homo sapiens
attaggctctgttta

SEQ ID NO: 1587314 - DNA, 15 bp, Homo sapiens
ttaggctctgtttaa

SEQ ID NO: 1587315 - DNA, 15 bp, Homo sapiens
taggctctgtttaac

SEQ ID NO: 1587316 - DNA, 15 bp, Homo sapiens
aggctctgtttaaca

SEQ ID NO: 1587317 - DNA, 15 bp, Homo sapiens
ggctctgtttaacat

SEQ ID NO: 1587318 - DNA, 15 bp, Homo sapiens
gctctgtttaacatc

SEQ ID NO: 1587319 - DNA, 15 bp, Homo sapiens
ctctgtttaacatca

SEQ ID NO: 1587320 - DNA, 15 bp, Homo sapiens
tctgtttaacatcaa

SEQ ID NO: 1587321 - DNA, 15 bp, Homo sapiens
ctgtttaacatcaaa

SEQ ID NO: 1587322 - DNA, 15 bp, Homo sapiens
tgtttaacatcaaag

SEQ ID NO: 1587323 - DNA, 15 bp, Homo sapiens
gtttaacatcaaaga

SEQ ID NO: 1587324 - DNA, 15 bp, Homo sapiens
tttaacatcaaagat

SEQ ID NO: 1587325 - DNA, 15 bp, Homo sapiens
ttaacatcaaagatg

SEQ ID NO: 1587326 - DNA, 15 bp, Homo sapiens
taacatcaaagatgc

SEQ ID NO: 1587327 - DNA, 15 bp, Homo sapiens
aacatcaaagatgca

SEQ ID NO: 1587328 - DNA, 15 bp, Homo sapiens
acatcaaagatgcaa

SEQ ID NO: 1587329 - DNA, 15 bp, Homo sapiens
catcaaagatgcaaa

SEQ ID NO: 1587330 - DNA, 15 bp, Homo sapiens
atcaaagatgcaaat

SEQ ID NO: 1587331 - DNA, 15 bp, Homo sapiens
tcaaagatgcaaatt

SEQ ID NO: 1587332 - DNA, 15 bp, Homo sapiens
caaagatgcaaatta

SEQ ID NO: 1587333 - DNA, 15 bp, Homo sapiens
aaagatgcaaattaa

SEQ ID NO: 1587334 - DNA, 15 bp, Homo sapiens
aagatgcaaattaat

SEQ ID NO: 1587335 - DNA, 15 bp, Homo sapiens
agatgcaaattaata

SEQ ID NO: 1587336 - DNA, 15 bp, Homo sapiens
gatgcaaattaatac

SEQ ID NO: 1587337 - DNA, 15 bp, Homo sapiens
atgcaaattaatact

SEQ ID NO: 1587338 - DNA, 15 bp, Homo sapiens
tgcaaattaatactt

SEQ ID NO: 1587339 - DNA, 15 bp, Homo sapiens
gcaaattaatacttt

SEQ ID NO: 1587340 - DNA, 15 bp, Homo sapiens
caaattaatactttc

SEQ ID NO: 1587341 - DNA, 15 bp, Homo sapiens
aaattaatactttct

SEQ ID NO: 1587342 - DNA, 15 bp, Homo sapiens
aattaatactttctt

SEQ ID NO: 1587343 - DNA, 15 bp, Homo sapiens
attaatactttcttt

SEQ ID NO: 1587344 - DNA, 15 bp, Homo sapiens
ttaatactttctttg

SEQ ID NO: 1587345 - DNA, 15 bp, Homo sapiens
taatactttctttga

SEQ ID NO: 1587346 - DNA, 15 bp, Homo sapiens
aatactttctttgaa

SEQ ID NO: 1587347 - DNA, 15 bp, Homo sapiens
atactttctttgaac

SEQ ID NO: 1587348 - DNA, 15 bp, Homo sapiens
tactttctttgaaca

SEQ ID NO: 1587349 - DNA, 15 bp, Homo sapiens
actttctttgaacat

SEQ ID NO: 1587350 - DNA, 15 bp, Homo sapiens
ctttctttgaacata

SEQ ID NO: 1587351 - DNA, 15 bp, Homo sapiens
tttctttgaacatat

SEQ ID NO: 1587352 - DNA, 15 bp, Homo sapiens
ttctttgaacatatt

SEQ ID NO: 1587353 - DNA, 15 bp, Homo sapiens
tctttgaacatatta

SEQ ID NO: 1587354 - DNA, 15 bp, Homo sapiens
ctttgaacatattaa

SEQ ID NO: 1587355 - DNA, 15 bp, Homo sapiens
tttgaacatattaaa

SEQ ID NO: 1587356 - DNA, 15 bp, Homo sapiens
ttgaacatattaaaa

SEQ ID NO: 1587357 - DNA, 15 bp, Homo sapiens
tgaacatattaaaaa

SEQ ID NO: 1587358 - DNA, 15 bp, Homo sapiens
gaacatattaaaaat

SEQ ID NO: 1587359 - DNA, 15 bp, Homo sapiens
aacatattaaaaatg

SEQ ID NO: 1587360 - DNA, 15 bp, Homo sapiens
acatattaaaaatgc

SEQ ID NO: 1587361 - DNA, 15 bp, Homo sapiens
catattaaaaatgca

SEQ ID NO: 1587362 - DNA, 15 bp, Homo sapiens
atattaaaaatgcag

SEQ ID NO: 1587363 - DNA, 15 bp, Homo sapiens
tattaaaaatgcaga

SEQ ID NO: 1587364 - DNA, 15 bp, Homo sapiens
attaaaaatgcagaa

SEQ ID NO: 1587365 - DNA, 15 bp, Homo sapiens
ttaaaaatgcagaaa

SEQ ID NO: 1587366 - DNA, 15 bp, Homo sapiens
taaaaatgcagaaaa

SEQ ID NO: 1587367 - DNA, 15 bp, Homo sapiens
aaaaatgcagaaaat

SEQ ID NO: 1587368 - DNA, 15 bp, Homo sapiens
aaaatgcagaaaata

SEQ ID NO: 1587369 - DNA, 15 bp, Homo sapiens
aaatgcagaaaatat

SEQ ID NO: 1587370 - DNA, 15 bp, Homo sapiens
aatgcagaaaatatt

SEQ ID NO: 1587371 - DNA, 15 bp, Homo sapiens
atgcagaaaatattg

SEQ ID NO: 1587372 - DNA, 15 bp, Homo sapiens
tgcagaaaatattgg

SEQ ID NO: 1587373 - DNA, 15 bp, Homo sapiens
gcagaaaatattgga

SEQ ID NO: 1587374 - DNA, 15 bp, Homo sapiens
cagaaaatattggag

SEQ ID NO: 1587375 - DNA, 15 bp, Homo sapiens
agaaaatattggagt

SEQ ID NO: 1587376 - DNA, 15 bp, Homo sapiens
gaaaatattggagta

SEQ ID NO: 1587377 - DNA, 15 bp, Homo sapiens
aaaatattggagtat

SEQ ID NO: 1587378 - DNA, 15 bp, Homo sapiens
aaatattggagtatt

SEQ ID NO: 1587379 - DNA, 15 bp, Homo sapiens
aatattggagtattt

SEQ ID NO: 1587380 - DNA, 15 bp, Homo sapiens
atattggagtatttt

SEQ ID NO: 1587381 - DNA, 15 bp, Homo sapiens
tattggagtatttta

SEQ ID NO: 1587382 - DNA, 15 bp, Homo sapiens
attggagtattttat

SEQ ID NO: 1587383 - DNA, 15 bp, Homo sapiens
ttggagtattttatt

SEQ ID NO: 1587384 - DNA, 15 bp, Homo sapiens
tggagtattttattt

SEQ ID NO: 1587385 - DNA, 15 bp, Homo sapiens
ggagtattttatttt

SEQ ID NO: 1587386 - DNA, 15 bp, Homo sapiens
gagtattttatttta

SEQ ID NO: 1587387 - DNA, 15 bp, Homo sapiens
agtattttattttaa

SEQ ID NO: 1587388 - DNA, 15 bp, Homo sapiens
gtattttattttaaa

SEQ ID NO: 1587389 - DNA, 15 bp, Homo sapiens
tattttattttaaat

SEQ ID NO: 1587390 - DNA, 15 bp, Homo sapiens
attttattttaaata

SEQ ID NO: 1587391 - DNA, 15 bp, Homo sapiens
ttttattttaaataa

SEQ ID NO: 1587392 - DNA, 15 bp, Homo sapiens
tttattttaaataaa

SEQ ID NO: 1587393 - DNA, 15 bp, Homo sapiens
ttattttaaataaat

SEQ ID NO: 1587394 - DNA, 15 bp, Homo sapiens
tattttaaataaatt

SEQ ID NO: 1587395 - DNA, 15 bp, Homo sapiens
attttaaataaattg

SEQ ID NO: 1587396 - DNA, 15 bp, Homo sapiens
ttttaaataaattgt

SEQ ID NO: 1587397 - DNA, 15 bp, Homo sapiens
tttaaataaattgta

SEQ ID NO: 1587398 - DNA, 15 bp, Homo sapiens
ttaaataaattgtat

SEQ ID NO: 1587399 - DNA, 15 bp, Homo sapiens
taaataaattgtatt

SEQ ID NO: 1587400 - DNA, 15 bp, Homo sapiens
aaataaattgtattc

SEQ ID NO: 1587401 - DNA, 15 bp, Homo sapiens
aataaattgtattct

SEQ ID NO: 1587402 - DNA, 15 bp, Homo sapiens
ataaattgtattctg

SEQ ID NO: 1587403 - DNA, 15 bp, Homo sapiens
taaattgtattctgt

SEQ ID NO: 1587404 - DNA, 15 bp, Homo sapiens
aaattgtattctgta

SEQ ID NO: 1587405 - DNA, 15 bp, Homo sapiens
aattgtattctgtat

SEQ ID NO: 1587406 - DNA, 15 bp, Homo sapiens
attgtattctgtata

SEQ ID NO: 1587407 - DNA, 15 bp, Homo sapiens
ttgtattctgtatat

SEQ ID NO: 1587408 - DNA, 15 bp, Homo sapiens
tgtattctgtatatt

SEQ ID NO: 1587409 - DNA, 15 bp, Homo sapiens
gtattctgtatattt

SEQ ID NO: 1587410 - DNA, 15 bp, Homo sapiens
tattctgtatattta

SEQ ID NO: 1587411 - DNA, 15 bp, Homo sapiens
attctgtatatttaa

SEQ ID NO: 1587412 - DNA, 15 bp, Homo sapiens
ttctgtatatttaag

SEQ ID NO: 1587413 - DNA, 15 bp, Homo sapiens
tctgtatatttaagg

SEQ ID NO: 1587414 - DNA, 15 bp, Homo sapiens
ctgtatatttaaggt

SEQ ID NO: 1587415 - DNA, 15 bp, Homo sapiens
tgtatatttaaggta

SEQ ID NO: 1587416 - DNA, 15 bp, Homo sapiens
gtatatttaaggtat

SEQ ID NO: 1587417 - DNA, 15 bp, Homo sapiens
tatatttaaggtata

SEQ ID NO: 1587418 - DNA, 15 bp, Homo sapiens
atatttaaggtatac

SEQ ID NO: 1587419 - DNA, 15 bp, Homo sapiens
tatttaaggtataca

SEQ ID NO: 1587420 - DNA, 15 bp, Homo sapiens
atttaaggtatacaa

SEQ ID NO: 1587421 - DNA, 15 bp, Homo sapiens
tttaaggtatacaac

SEQ ID NO: 1587422 - DNA, 15 bp, Homo sapiens
ttaaggtatacaaca

SEQ ID NO: 1587423 - DNA, 15 bp, Homo sapiens
taaggtatacaacat

SEQ ID NO: 1587424 - DNA, 15 bp, Homo sapiens
aaggtatacaacatg

SEQ ID NO: 1587425 - DNA, 15 bp, Homo sapiens
aggtatacaacatga

SEQ ID NO: 1587426 - DNA, 15 bp, Homo sapiens
ggtatacaacatgat

SEQ ID NO: 1587427 - DNA, 15 bp, Homo sapiens
gtatacaacatgatg

SEQ ID NO: 1587428 - DNA, 15 bp, Homo sapiens
tatacaacatgatgt

SEQ ID NO: 1587429 - DNA, 15 bp, Homo sapiens
atacaacatgatgtt

SEQ ID NO: 1587430 - DNA, 15 bp, Homo sapiens
tacaacatgatgtta

SEQ ID NO: 1587431 - DNA, 15 bp, Homo sapiens
acaacatgatgttat

SEQ ID NO: 1587432 - DNA, 15 bp, Homo sapiens
caacatgatgttatg

SEQ ID NO: 1587433 - DNA, 15 bp, Homo sapiens
aacatgatgttatgg

SEQ ID NO: 1587434 - DNA, 15 bp, Homo sapiens
acatgatgttatggg

SEQ ID NO: 1587435 - DNA, 15 bp, Homo sapiens
catgatgttatggga

SEQ ID NO: 1587436 - DNA, 15 bp, Homo sapiens
atgatgttatgggat

SEQ ID NO: 1587437 - DNA, 15 bp, Homo sapiens
tgatgttatgggata

SEQ ID NO: 1587438 - DNA, 15 bp, Homo sapiens
gatgttatgggatac

SEQ ID NO: 1587439 - DNA, 15 bp, Homo sapiens
atgttatgggataca

SEQ ID NO: 1587440 - DNA, 15 bp, Homo sapiens
tgttatgggatacat

SEQ ID NO: 1587441 - DNA, 15 bp, Homo sapiens
gttatgggatacata

SEQ ID NO: 1587442 - DNA, 15 bp, Homo sapiens
ttatgggatacatat

SEQ ID NO: 1587443 - DNA, 15 bp, Homo sapiens
tatgggatacatata

SEQ ID NO: 1587444 - DNA, 15 bp, Homo sapiens
atgggatacatatag

SEQ ID NO: 1587445 - DNA, 15 bp, Homo sapiens
tgggatacatatagg

SEQ ID NO: 1587446 - DNA, 15 bp, Homo sapiens
gggatacatataggt

SEQ ID NO: 1587447 - DNA, 15 bp, Homo sapiens
ggatacatataggtg

SEQ ID NO: 1587448 - DNA, 15 bp, Homo sapiens
gatacatataggtgg

SEQ ID NO: 1587449 - DNA, 15 bp, Homo sapiens
atacatataggtggt

SEQ ID NO: 1587450 - DNA, 15 bp, Homo sapiens
tacatataggtggtt

SEQ ID NO: 1587451 - DNA, 15 bp, Homo sapiens
acatataggtggtta

SEQ ID NO: 1587452 - DNA, 15 bp, Homo sapiens
catataggtggttaa

SEQ ID NO: 1587453 - DNA, 15 bp, Homo sapiens
atataggtggttaaa

SEQ ID NO: 1587454 - DNA, 15 bp, Homo sapiens
tataggtggttaaaa

SEQ ID NO: 1587455 - DNA, 15 bp, Homo sapiens
ataggtggttaaaag

SEQ ID NO: 1587456 - DNA, 15 bp, Homo sapiens
taggtggttaaaaga

SEQ ID NO: 1587457 - DNA, 15 bp, Homo sapiens
aggtggttaaaagat

SEQ ID NO: 1587458 - DNA, 15 bp, Homo sapiens
ggtggttaaaagatt

SEQ ID NO: 1587459 - DNA, 15 bp, Homo sapiens
gtggttaaaagatta

SEQ ID NO: 1587460 - DNA, 15 bp, Homo sapiens
tggttaaaagattac

SEQ ID NO: 1587461 - DNA, 15 bp, Homo sapiens
ggttaaaagattact

SEQ ID NO: 1587462 - DNA, 15 bp, Homo sapiens
gttaaaagattactg

SEQ ID NO: 1587463 - DNA, 15 bp, Homo sapiens
ttaaaagattactgc

SEQ ID NO: 1587464 - DNA, 15 bp, Homo sapiens
taaaagattactgca

SEQ ID NO: 1587465 - DNA, 15 bp, Homo sapiens
aaaagattactgcag

SEQ ID NO: 1587466 - DNA, 15 bp, Homo sapiens
aaagattactgcagt

SEQ ID NO: 1587467 - DNA, 15 bp, Homo sapiens
aagattactgcagtg

SEQ ID NO: 1587468 - DNA, 15 bp, Homo sapiens
agattactgcagtga

SEQ ID NO: 1587469 - DNA, 15 bp, Homo sapiens
gattactgcagtgaa

SEQ ID NO: 1587470 - DNA, 15 bp, Homo sapiens
attactgcagtgaag

SEQ ID NO: 1587471 - DNA, 15 bp, Homo sapiens
ttactgcagtgaagc

SEQ ID NO: 1587472 - DNA, 15 bp, Homo sapiens
tactgcagtgaagca

SEQ ID NO: 1587473 - DNA, 15 bp, Homo sapiens
actgcagtgaagcaa

SEQ ID NO: 1587474 - DNA, 15 bp, Homo sapiens
ctgcagtgaagcaaa

SEQ ID NO: 1587475 - DNA, 15 bp, Homo sapiens
tgcagtgaagcaaat

SEQ ID NO: 1587476 - DNA, 15 bp, Homo sapiens
gcagtgaagcaaatt

SEQ ID NO: 1587477 - DNA, 15 bp, Homo sapiens
cagtgaagcaaatta

SEQ ID NO: 1587478 - DNA, 15 bp, Homo sapiens
agtgaagcaaattaa

SEQ ID NO: 1587479 - DNA, 15 bp, Homo sapiens
gtgaagcaaattaac

SEQ ID NO: 1587480 - DNA, 15 bp, Homo sapiens
tgaagcaaattaacg

SEQ ID NO: 1587481 - DNA, 15 bp, Homo sapiens
gaagcaaattaacgt

SEQ ID NO: 1587482 - DNA, 15 bp, Homo sapiens
aagcaaattaacgta

SEQ ID NO: 1587483 - DNA, 15 bp, Homo sapiens
agcaaattaacgtat

SEQ ID NO: 1587484 - DNA, 15 bp, Homo sapiens
gcaaattaacgtatc

SEQ ID NO: 1587485 - DNA, 15 bp, Homo sapiens
caaattaacgtatcc

SEQ ID NO: 1587486 - DNA, 15 bp, Homo sapiens
aaattaacgtatccc

SEQ ID NO: 1587487 - DNA, 15 bp, Homo sapiens
aattaacgtatccct

SEQ ID NO: 1587488 - DNA, 15 bp, Homo sapiens
attaacgtatccctc

SEQ ID NO: 1587489 - DNA, 15 bp, Homo sapiens
ttaacgtatccctca

SEQ ID NO: 1587490 - DNA, 15 bp, Homo sapiens
taacgtatccctcaa

SEQ ID NO: 1587491 - DNA, 15 bp, Homo sapiens
aacgtatccctcaac

SEQ ID NO: 1587492 - DNA, 15 bp, Homo sapiens
acgtatccctcaact

SEQ ID NO: 1587493 - DNA, 15 bp, Homo sapiens
cgtatccctcaactc

SEQ ID NO: 1587494 - DNA, 15 bp, Homo sapiens
gtatccctcaactca

SEQ ID NO: 1587495 - DNA, 15 bp, Homo sapiens
tatccctcaactcac

SEQ ID NO: 1587496 - DNA, 15 bp, Homo sapiens
atccctcaactcaca

SEQ ID NO: 1587497 - DNA, 15 bp, Homo sapiens
tccctcaactcacat

SEQ ID NO: 1587498 - DNA, 15 bp, Homo sapiens
ccctcaactcacata

SEQ ID NO: 1587499 - DNA, 15 bp, Homo sapiens
cctcaactcacatag

SEQ ID NO: 1587500 - DNA, 15 bp, Homo sapiens
ctcaactcacatagt

SEQ ID NO: 1587501 - DNA, 15 bp, Homo sapiens
tcaactcacatagtt

SEQ ID NO: 1587502 - DNA, 15 bp, Homo sapiens
caactcacatagtta

SEQ ID NO: 1587503 - DNA, 15 bp, Homo sapiens
aactcacatagttac

SEQ ID NO: 1587504 - DNA, 15 bp, Homo sapiens
actcacatagttacc

SEQ ID NO: 1587505 - DNA, 15 bp, Homo sapiens
ctcacatagttaccc

SEQ ID NO: 1587506 - DNA, 15 bp, Homo sapiens
tcacatagttaccca

SEQ ID NO: 1587507 - DNA, 15 bp, Homo sapiens
cacatagttacccat

SEQ ID NO: 1587508 - DNA, 15 bp, Homo sapiens
acatagttacccatt

SEQ ID NO: 1587509 - DNA, 15 bp, Homo sapiens
catagttacccattt

SEQ ID NO: 1587510 - DNA, 15 bp, Homo sapiens
atagttacccatttt

SEQ ID NO: 1587511 - DNA, 15 bp, Homo sapiens
tagttacccattttt

SEQ ID NO: 1587512 - DNA, 15 bp, Homo sapiens
agttacccatttttt

SEQ ID NO: 1587513 - DNA, 15 bp, Homo sapiens
gttacccattttttt

SEQ ID NO: 1587514 - DNA, 15 bp, Homo sapiens
ttacccatttttttt

SEQ ID NO: 1587515 - DNA, 15 bp, Homo sapiens
tacccattttttttt

SEQ ID NO: 1587516 - DNA, 15 bp, Homo sapiens
acccatttttttttt

SEQ ID NO: 1587517 - DNA, 15 bp, Homo sapiens
cccattttttttttg

SEQ ID NO: 1587518 - DNA, 15 bp, Homo sapiens
ccattttttttttgt

SEQ ID NO: 1587519 - DNA, 15 bp, Homo sapiens
cattttttttttgtt

SEQ ID NO: 1587520 - DNA, 15 bp, Homo sapiens
attttttttttgttt

SEQ ID NO: 1587521 - DNA, 15 bp, Homo sapiens
tttttttgttttggt

SEQ ID NO: 1587522 - DNA, 15 bp, Homo sapiens
ttttttgttttggtg

SEQ ID NO: 1587523 - DNA, 15 bp, Homo sapiens
tttttgttttggtgg

SEQ ID NO: 1587524 - DNA, 15 bp, Homo sapiens
ttttgttttggtggc

SEQ ID NO: 1587525 - DNA, 15 bp, Homo sapiens
tttgttttggtggca

SEQ ID NO: 1587526 - DNA, 15 bp, Homo sapiens
ttgttttggtggcaa

SEQ ID NO: 1587527 - DNA, 15 bp, Homo sapiens
tgttttggtggcaag

SEQ ID NO: 1587528 - DNA, 15 bp, Homo sapiens
gttttggtggcaaga

SEQ ID NO: 1587529 - DNA, 15 bp, Homo sapiens
ttttggtggcaagag

SEQ ID NO: 1587530 - DNA, 15 bp, Homo sapiens
tttggtggcaagagg

SEQ ID NO: 1587531 - DNA, 15 bp, Homo sapiens
ttggtggcaagagga

SEQ ID NO: 1587532 - DNA, 15 bp, Homo sapiens
tggtggcaagaggag

SEQ ID NO: 1587533 - DNA, 15 bp, Homo sapiens
ggtggcaagaggagc

SEQ ID NO: 1587534 - DNA, 15 bp, Homo sapiens
gtggcaagaggagct

SEQ ID NO: 1587535 - DNA, 15 bp, Homo sapiens
tggcaagaggagctt

SEQ ID NO: 1587536 - DNA, 15 bp, Homo sapiens
ggcaagaggagctta

SEQ ID NO: 1587537 - DNA, 15 bp, Homo sapiens
gcaagaggagcttaa

SEQ ID NO: 1587538 - DNA, 15 bp, Homo sapiens
caagaggagcttaaa

SEQ ID NO: 1587539 - DNA, 15 bp, Homo sapiens
aagaggagcttaaaa

SEQ ID NO: 1587540 - DNA, 15 bp, Homo sapiens
agaggagcttaaaat

SEQ ID NO: 1587541 - DNA, 15 bp, Homo sapiens
gaggagcttaaaatc

SEQ ID NO: 1587542 - DNA, 15 bp, Homo sapiens
aggagcttaaaatct

SEQ ID NO: 1587543 - DNA, 15 bp, Homo sapiens
ggagcttaaaatctc

SEQ ID NO: 1587544 - DNA, 15 bp, Homo sapiens
gagcttaaaatctca

SEQ ID NO: 1587545 - DNA, 15 bp, Homo sapiens
agcttaaaatctcat

SEQ ID NO: 1587546 - DNA, 15 bp, Homo sapiens
gcttaaaatctcatt

SEQ ID NO: 1587547 - DNA, 15 bp, Homo sapiens
cttaaaatctcattt

SEQ ID NO: 1587548 - DNA, 15 bp, Homo sapiens
ttaaaatctcattta

SEQ ID NO: 1587549 - DNA, 15 bp, Homo sapiens
taaaatctcatttag

SEQ ID NO: 1587550 - DNA, 15 bp, Homo sapiens
aaaatctcatttagt

SEQ ID NO: 1587551 - DNA, 15 bp, Homo sapiens
aaatctcatttagtg

SEQ ID NO: 1587552 - DNA, 15 bp, Homo sapiens
aatctcatttagtgt

SEQ ID NO: 1587553 - DNA, 15 bp, Homo sapiens
atctcatttagtgtg

SEQ ID NO: 1587554 - DNA, 15 bp, Homo sapiens
tctcatttagtgtga

SEQ ID NO: 1587555 - DNA, 15 bp, Homo sapiens
ctcatttagtgtgaa

SEQ ID NO: 1587556 - DNA, 15 bp, Homo sapiens
tcatttagtgtgaat

SEQ ID NO: 1587557 - DNA, 15 bp, Homo sapiens
catttagtgtgaatc

SEQ ID NO: 1587558 - DNA, 15 bp, Homo sapiens
atttagtgtgaatcc

SEQ ID NO: 1587559 - DNA, 15 bp, Homo sapiens
tttagtgtgaatccc

SEQ ID NO: 1587560 - DNA, 15 bp, Homo sapiens
ttagtgtgaatccca

SEQ ID NO: 1587561 - DNA, 15 bp, Homo sapiens
tagtgtgaatcccaa

SEQ ID NO: 1587562 - DNA, 15 bp, Homo sapiens
agtgtgaatcccaaa

SEQ ID NO: 1587563 - DNA, 15 bp, Homo sapiens
gtgtgaatcccaaat

SEQ ID NO: 1587564 - DNA, 15 bp, Homo sapiens
tgtgaatcccaaata

SEQ ID NO: 1587565 - DNA, 15 bp, Homo sapiens
gtgaatcccaaatac

SEQ ID NO: 1587566 - DNA, 15 bp, Homo sapiens
tgaatcccaaataca

SEQ ID NO: 1587567 - DNA, 15 bp, Homo sapiens
gaatcccaaatacag

SEQ ID NO: 1587568 - DNA, 15 bp, Homo sapiens
aatcccaaatacagc

SEQ ID NO: 1587569 - DNA, 15 bp, Homo sapiens
atcccaaatacagca

SEQ ID NO: 1587570 - DNA, 15 bp, Homo sapiens
tcccaaatacagcac

SEQ ID NO: 1587571 - DNA, 15 bp, Homo sapiens
cccaaatacagcaca

SEQ ID NO: 1587572 - DNA, 15 bp, Homo sapiens
ccaaatacagcacaa

SEQ ID NO: 1587573 - DNA, 15 bp, Homo sapiens
caaatacagcacaat

SEQ ID NO: 1587574 - DNA, 15 bp, Homo sapiens
aaatacagcacaatt

SEQ ID NO: 1587575 - DNA, 15 bp, Homo sapiens
aatacagcacaattt

SEQ ID NO: 1587576 - DNA, 15 bp, Homo sapiens
atacagcacaatttt

SEQ ID NO: 1587577 - DNA, 15 bp, Homo sapiens
tacagcacaatttta

SEQ ID NO: 1587578 - DNA, 15 bp, Homo sapiens
acagcacaattttat

SEQ ID NO: 1587579 - DNA, 15 bp, Homo sapiens
cagcacaattttatt

SEQ ID NO: 1587580 - DNA, 15 bp, Homo sapiens
agcacaattttatta

SEQ ID NO: 1587581 - DNA, 15 bp, Homo sapiens
gcacaattttattac

SEQ ID NO: 1587582 - DNA, 15 bp, Homo sapiens
cacaattttattacc

SEQ ID NO: 1587583 - DNA, 15 bp, Homo sapiens
acaattttattacct

SEQ ID NO: 1587584 - DNA, 15 bp, Homo sapiens
caattttattaccta

SEQ ID NO: 1587585 - DNA, 15 bp, Homo sapiens
aattttattacctat

SEQ ID NO: 1587586 - DNA, 15 bp, Homo sapiens
attttattacctata

SEQ ID NO: 1587587 - DNA, 15 bp, Homo sapiens
ttttattacctatat

SEQ ID NO: 1587588 - DNA, 15 bp, Homo sapiens
tttattacctatata

SEQ ID NO: 1587589 - DNA, 15 bp, Homo sapiens
ttattacctatatac

SEQ ID NO: 1587590 - DNA, 15 bp, Homo sapiens
tattacctatatact

SEQ ID NO: 1587591 - DNA, 15 bp, Homo sapiens
attacctatatactt

SEQ ID NO: 1587592 - DNA, 15 bp, Homo sapiens
ttacctatatacttc

SEQ ID NO: 1587593 - DNA, 15 bp, Homo sapiens
tacctatatacttca

SEQ ID NO: 1587594 - DNA, 15 bp, Homo sapiens
acctatatacttcat

SEQ ID NO: 1587595 - DNA, 15 bp, Homo sapiens
cctatatacttcatg

SEQ ID NO: 1587596 - DNA, 15 bp, Homo sapiens
ctatatacttcatgt

SEQ ID NO: 1587597 - DNA, 15 bp, Homo sapiens
tatatacttcatgtt

SEQ ID NO: 1587598 - DNA, 15 bp, Homo sapiens
atatacttcatgttg

SEQ ID NO: 1587599 - DNA, 15 bp, Homo sapiens
tatacttcatgttgt

SEQ ID NO: 1587600 - DNA, 15 bp, Homo sapiens
atacttcatgttgta

SEQ ID NO: 1587601 - DNA, 15 bp, Homo sapiens
tacttcatgttgtac

SEQ ID NO: 1587602 - DNA, 15 bp, Homo sapiens
acttcatgttgtaca

SEQ ID NO: 1587603 - DNA, 15 bp, Homo sapiens
cttcatgttgtacat

SEQ ID NO: 1587604 - DNA, 15 bp, Homo sapiens
ttcatgttgtacatt

SEQ ID NO: 1587605 - DNA, 15 bp, Homo sapiens
tcatgttgtacatta

SEQ ID NO: 1587606 - DNA, 15 bp, Homo sapiens
catgttgtacattat

SEQ ID NO: 1587607 - DNA, 15 bp, Homo sapiens
atgttgtacattata

SEQ ID NO: 1587608 - DNA, 15 bp, Homo sapiens
tgttgtacattatat

SEQ ID NO: 1587609 - DNA, 15 bp, Homo sapiens
gttgtacattatatt

SEQ ID NO: 1587610 - DNA, 15 bp, Homo sapiens
ttgtacattatattt

SEQ ID NO: 1587611 - DNA, 15 bp, Homo sapiens
tgtacattatatttc

SEQ ID NO: 1587612 - DNA, 15 bp, Homo sapiens
gtacattatatttct

SEQ ID NO: 1587613 - DNA, 15 bp, Homo sapiens
tacattatatttcta

SEQ ID NO: 1587614 - DNA, 15 bp, Homo sapiens
acattatatttctag

SEQ ID NO: 1587615 - DNA, 15 bp, Homo sapiens
cattatatttctaga

SEQ ID NO: 1587616 - DNA, 15 bp, Homo sapiens
attatatttctagac

SEQ ID NO: 1587617 - DNA, 15 bp, Homo sapiens
ttatatttctagact

SEQ ID NO: 1587618 - DNA, 15 bp, Homo sapiens
tatatttctagactt

SEQ ID NO: 1587619 - DNA, 15 bp, Homo sapiens
atatttctagacttg

SEQ ID NO: 1587620 - DNA, 15 bp, Homo sapiens
tatttctagacttgt

SEQ ID NO: 1587621 - DNA, 15 bp, Homo sapiens
atttctagacttgtt

SEQ ID NO: 1587622 - DNA, 15 bp, Homo sapiens
tttctagacttgttc

SEQ ID NO: 1587623 - DNA, 15 bp, Homo sapiens
ttctagacttgttca

SEQ ID NO: 1587624 - DNA, 15 bp, Homo sapiens
tctagacttgttcat

SEQ ID NO: 1587625 - DNA, 15 bp, Homo sapiens
ctagacttgttcatc

SEQ ID NO: 1587626 - DNA, 15 bp, Homo sapiens
tagacttgttcatcc

SEQ ID NO: 1587627 - DNA, 15 bp, Homo sapiens
agacttgttcatcct

SEQ ID NO: 1587628 - DNA, 15 bp, Homo sapiens
gacttgttcatccta

SEQ ID NO: 1587629 - DNA, 15 bp, Homo sapiens
acttgttcatcctac

SEQ ID NO: 1587630 - DNA, 15 bp, Homo sapiens
cttgttcatcctaca

SEQ ID NO: 1587631 - DNA, 15 bp, Homo sapiens
ttgttcatcctacat

SEQ ID NO: 1587632 - DNA, 15 bp, Homo sapiens
tgttcatcctacata

SEQ ID NO: 1587633 - DNA, 15 bp, Homo sapiens
gttcatcctacatat

SEQ ID NO: 1587634 - DNA, 15 bp, Homo sapiens
ttcatcctacatatc

SEQ ID NO: 1587635 - DNA, 15 bp, Homo sapiens
tcatcctacatatct

SEQ ID NO: 1587636 - DNA, 15 bp, Homo sapiens
catcctacatatctg

SEQ ID NO: 1587637 - DNA, 15 bp, Homo sapiens
atcctacatatctgc

SEQ ID NO: 1587638 - DNA, 15 bp, Homo sapiens
tcctacatatctgct

SEQ ID NO: 1587639 - DNA, 15 bp, Homo sapiens
cctacatatctgcta

SEQ ID NO: 1587640 - DNA, 15 bp, Homo sapiens
ctacatatctgctac

SEQ ID NO: 1587641 - DNA, 15 bp, Homo sapiens
tacatatctgctact

SEQ ID NO: 1587642 - DNA, 15 bp, Homo sapiens
acatatctgctactt

SEQ ID NO: 1587643 - DNA, 15 bp, Homo sapiens
catatctgctacttt

SEQ ID NO: 1587644 - DNA, 15 bp, Homo sapiens
atatctgctactttg

SEQ ID NO: 1587645 - DNA, 15 bp, Homo sapiens
tatctgctactttgt

SEQ ID NO: 1587646 - DNA, 15 bp, Homo sapiens
atctgctactttgta

SEQ ID NO: 1587647 - DNA, 15 bp, Homo sapiens
tctgctactttgtat

SEQ ID NO: 1587648 - DNA, 15 bp, Homo sapiens
ctgctactttgtatc

SEQ ID NO: 1587649 - DNA, 15 bp, Homo sapiens
tgctactttgtatcc

SEQ ID NO: 1587650 - DNA, 15 bp, Homo sapiens
gctactttgtatcct

SEQ ID NO: 1587651 - DNA, 15 bp, Homo sapiens
ctactttgtatcctc

SEQ ID NO: 1587652 - DNA, 15 bp, Homo sapiens
tactttgtatcctct

SEQ ID NO: 1587653 - DNA, 15 bp, Homo sapiens
actttgtatcctctg

SEQ ID NO: 1587654 - DNA, 15 bp, Homo sapiens
ctttgtatcctctga

SEQ ID NO: 1587655 - DNA, 15 bp, Homo sapiens
tttgtatcctctgag

SEQ ID NO: 1587656 - DNA, 15 bp, Homo sapiens
ttgtatcctctgagc

SEQ ID NO: 1587657 - DNA, 15 bp, Homo sapiens
tgtatcctctgagct

SEQ ID NO: 1587658 - DNA, 15 bp, Homo sapiens
gtatcctctgagcta

SEQ ID NO: 1587659 - DNA, 15 bp, Homo sapiens
tatcctctgagctac

SEQ ID NO: 1587660 - DNA, 15 bp, Homo sapiens
atcctctgagctaca

SEQ ID NO: 1587661 - DNA, 15 bp, Homo sapiens
tcctctgagctacat

SEQ ID NO: 1587662 - DNA, 15 bp, Homo sapiens
cctctgagctacatc

SEQ ID NO: 1587663 - DNA, 15 bp, Homo sapiens
ctctgagctacatct

SEQ ID NO: 1587664 - DNA, 15 bp, Homo sapiens
tctgagctacatctc

SEQ ID NO: 1587665 - DNA, 15 bp, Homo sapiens
ctgagctacatctcc

SEQ ID NO: 1587666 - DNA, 15 bp, Homo sapiens
tgagctacatctccc

SEQ ID NO: 1587667 - DNA, 15 bp, Homo sapiens
gagctacatctcccc

SEQ ID NO: 1587668 - DNA, 15 bp, Homo sapiens
agctacatctcccca

SEQ ID NO: 1587669 - DNA, 15 bp, Homo sapiens
gctacatctccccat

SEQ ID NO: 1587670 - DNA, 15 bp, Homo sapiens
ctacatctccccatt

SEQ ID NO: 1587671 - DNA, 15 bp, Homo sapiens
tacatctccccattt

SEQ ID NO: 1587672 - DNA, 15 bp, Homo sapiens
acatctccccatttt

SEQ ID NO: 1587673 - DNA, 15 bp, Homo sapiens
catctccccattttc

SEQ ID NO: 1587674 - DNA, 15 bp, Homo sapiens
atctccccattttct

SEQ ID NO: 1587675 - DNA, 15 bp, Homo sapiens
tctccccattttctc

SEQ ID NO: 1587676 - DNA, 15 bp, Homo sapiens
ctccccattttctca

SEQ ID NO: 1587677 - DNA, 15 bp, Homo sapiens
tccccattttctcac

SEQ ID NO: 1587678 - DNA, 15 bp, Homo sapiens
ccccattttctcact

SEQ ID NO: 1587679 - DNA, 15 bp, Homo sapiens
cccattttctcactt

SEQ ID NO: 1587680 - DNA, 15 bp, Homo sapiens
ccattttctcacttg

SEQ ID NO: 1587681 - DNA, 15 bp, Homo sapiens
cattttctcacttgc

SEQ ID NO: 1587682 - DNA, 15 bp, Homo sapiens
attttctcacttgcc

SEQ ID NO: 1587683 - DNA, 15 bp, Homo sapiens
ttttctcacttgccc

SEQ ID NO: 1587684 - DNA, 15 bp, Homo sapiens
tttctcacttgcccc

SEQ ID NO: 1587685 - DNA, 15 bp, Homo sapiens
ttctcacttgccccc

SEQ ID NO: 1587686 - DNA, 15 bp, Homo sapiens
tctcacttgcccccc

SEQ ID NO: 1587687 - DNA, 15 bp, Homo sapiens
ctcacttgcccccca

SEQ ID NO: 1587688 - DNA, 15 bp, Homo sapiens
tcacttgccccccaa

SEQ ID NO: 1587689 - DNA, 15 bp, Homo sapiens
cacttgccccccaag

SEQ ID NO: 1587690 - DNA, 15 bp, Homo sapiens
acttgccccccaagt

SEQ ID NO: 1587691 - DNA, 15 bp, Homo sapiens
cttgccccccaagta

SEQ ID NO: 1587692 - DNA, 15 bp, Homo sapiens
ttgccccccaagtag

SEQ ID NO: 1587693 - DNA, 15 bp, Homo sapiens
tgccccccaagtagt

SEQ ID NO: 1587694 - DNA, 15 bp, Homo sapiens
gccccccaagtagtt

SEQ ID NO: 1587695 - DNA, 15 bp, Homo sapiens
ccccccaagtagttt

SEQ ID NO: 1587696 - DNA, 15 bp, Homo sapiens
cccccaagtagtttc

SEQ ID NO: 1587697 - DNA, 15 bp, Homo sapiens
ccccaagtagtttct

SEQ ID NO: 1587698 - DNA, 15 bp, Homo sapiens
cccaagtagtttctt

SEQ ID NO: 1587699 - DNA, 15 bp, Homo sapiens
ccaagtagtttctta

SEQ ID NO: 1587700 - DNA, 15 bp, Homo sapiens
caagtagtttcttaa

SEQ ID NO: 1587701 - DNA, 15 bp, Homo sapiens
aagtagtttcttaaa

SEQ ID NO: 1587702 - DNA, 15 bp, Homo sapiens
agtagtttcttaaag

SEQ ID NO: 1587703 - DNA, 15 bp, Homo sapiens
gtagtttcttaaagt

SEQ ID NO: 1587704 - DNA, 15 bp, Homo sapiens
tagtttcttaaagtg

SEQ ID NO: 1587705 - DNA, 15 bp, Homo sapiens
agtttcttaaagtgt

SEQ ID NO: 1587706 - DNA, 15 bp, Homo sapiens
gtttcttaaagtgtc

SEQ ID NO: 1587707 - DNA, 15 bp, Homo sapiens
tttcttaaagtgtct

SEQ ID NO: 1587708 - DNA, 15 bp, Homo sapiens
ttcttaaagtgtctc

SEQ ID NO: 1587709 - DNA, 15 bp, Homo sapiens
tcttaaagtgtctca

SEQ ID NO: 1587710 - DNA, 15 bp, Homo sapiens
cttaaagtgtctcat

SEQ ID NO: 1587711 - DNA, 15 bp, Homo sapiens
ttaaagtgtctcatg

SEQ ID NO: 1587712 - DNA, 15 bp, Homo sapiens
taaagtgtctcatgt

SEQ ID NO: 1587713 - DNA, 15 bp, Homo sapiens
aaagtgtctcatgta

SEQ ID NO: 1587714 - DNA, 15 bp, Homo sapiens
aagtgtctcatgtaa

SEQ ID NO: 1587715 - DNA, 15 bp, Homo sapiens
agtgtctcatgtaag

SEQ ID NO: 1587716 - DNA, 15 bp, Homo sapiens
gtgtctcatgtaaga

SEQ ID NO: 1587717 - DNA, 15 bp, Homo sapiens
tgtctcatgtaagag

SEQ ID NO: 1587718 - DNA, 15 bp, Homo sapiens
gtctcatgtaagagg

SEQ ID NO: 1587719 - DNA, 15 bp, Homo sapiens
tctcatgtaagaggg

SEQ ID NO: 1587720 - DNA, 15 bp, Homo sapiens
ctcatgtaagagggc

SEQ ID NO: 1587721 - DNA, 15 bp, Homo sapiens
tcatgtaagagggca

SEQ ID NO: 1587722 - DNA, 15 bp, Homo sapiens
catgtaagagggcag

SEQ ID NO: 1587723 - DNA, 15 bp, Homo sapiens
atgtaagagggcagt

SEQ ID NO: 1587724 - DNA, 15 bp, Homo sapiens
tgtaagagggcagta

SEQ ID NO: 1587725 - DNA, 15 bp, Homo sapiens
gtaagagggcagtag

SEQ ID NO: 1587726 - DNA, 15 bp, Homo sapiens
taagagggcagtagc

SEQ ID NO: 1587727 - DNA, 15 bp, Homo sapiens
aagagggcagtagct

SEQ ID NO: 1587728 - DNA, 15 bp, Homo sapiens
agagggcagtagctt

SEQ ID NO: 1587729 - DNA, 15 bp, Homo sapiens
gagggcagtagcttt

SEQ ID NO: 1587730 - DNA, 15 bp, Homo sapiens
agggcagtagctttc

SEQ ID NO: 1587731 - DNA, 15 bp, Homo sapiens
gggcagtagctttca

SEQ ID NO: 1587732 - DNA, 15 bp, Homo sapiens
ggcagtagctttcag

SEQ ID NO: 1587733 - DNA, 15 bp, Homo sapiens
gcagtagctttcagc

SEQ ID NO: 1587734 - DNA, 15 bp, Homo sapiens
cagtagctttcagct

SEQ ID NO: 1587735 - DNA, 15 bp, Homo sapiens
agtagctttcagctt

SEQ ID NO: 1587736 - DNA, 15 bp, Homo sapiens
gtagctttcagctta

SEQ ID NO: 1587737 - DNA, 15 bp, Homo sapiens
tagctttcagcttaa

SEQ ID NO: 1587738 - DNA, 15 bp, Homo sapiens
agctttcagcttaaa

SEQ ID NO: 1587739 - DNA, 15 bp, Homo sapiens
gctttcagcttaaac

SEQ ID NO: 1587740 - DNA, 15 bp, Homo sapiens
ctttcagcttaaact

SEQ ID NO: 1587741 - DNA, 15 bp, Homo sapiens
tttcagcttaaactt

SEQ ID NO: 1587742 - DNA, 15 bp, Homo sapiens
ttcagcttaaacttt

SEQ ID NO: 1587743 - DNA, 15 bp, Homo sapiens
tcagcttaaactttt

SEQ ID NO: 1587744 - DNA, 15 bp, Homo sapiens
cagcttaaacttttt

SEQ ID NO: 1587745 - DNA, 15 bp, Homo sapiens
agcttaaactttttc

SEQ ID NO: 1587746 - DNA, 15 bp, Homo sapiens
gcttaaactttttct

SEQ ID NO: 1587747 - DNA, 15 bp, Homo sapiens
cttaaactttttctc

SEQ ID NO: 1587748 - DNA, 15 bp, Homo sapiens
ttaaactttttctct

SEQ ID NO: 1587749 - DNA, 15 bp, Homo sapiens
taaactttttctctg

SEQ ID NO: 1587750 - DNA, 15 bp, Homo sapiens
aaactttttctctgt

SEQ ID NO: 1587751 - DNA, 15 bp, Homo sapiens
aactttttctctgta

SEQ ID NO: 1587752 - DNA, 15 bp, Homo sapiens
actttttctctgtat

SEQ ID NO: 1587753 - DNA, 15 bp, Homo sapiens
ctttttctctgtatg

SEQ ID NO: 1587754 - DNA, 15 bp, Homo sapiens
tttttctctgtatgt

SEQ ID NO: 1587755 - DNA, 15 bp, Homo sapiens
ttttctctgtatgta

SEQ ID NO: 1587756 - DNA, 15 bp, Homo sapiens
tttctctgtatgtag

SEQ ID NO: 1587757 - DNA, 15 bp, Homo sapiens
ttctctgtatgtagt

SEQ ID NO: 1587758 - DNA, 15 bp, Homo sapiens
tctctgtatgtagtc

SEQ ID NO: 1587759 - DNA, 15 bp, Homo sapiens
ctctgtatgtagtcg

SEQ ID NO: 1587760 - DNA, 15 bp, Homo sapiens
tctgtatgtagtcga

SEQ ID NO: 1587761 - DNA, 15 bp, Homo sapiens
ctgtatgtagtcgat

SEQ ID NO: 1587762 - DNA, 15 bp, Homo sapiens
tgtatgtagtcgatt

SEQ ID NO: 1587763 - DNA, 15 bp, Homo sapiens
gtatgtagtcgattt

SEQ ID NO: 1587764 - DNA, 15 bp, Homo sapiens
tatgtagtcgatttc

SEQ ID NO: 1587765 - DNA, 15 bp, Homo sapiens
atgtagtcgatttct

SEQ ID NO: 1587766 - DNA, 15 bp, Homo sapiens
tgtagtcgatttctt

SEQ ID NO: 1587767 - DNA, 15 bp, Homo sapiens
gtagtcgatttcttt

SEQ ID NO: 1587768 - DNA, 15 bp, Homo sapiens
tagtcgatttctttg

SEQ ID NO: 1587769 - DNA, 15 bp, Homo sapiens
agtcgatttctttga

SEQ ID NO: 1587770 - DNA, 15 bp, Homo sapiens
gtcgatttctttgag

SEQ ID NO: 1587771 - DNA, 15 bp, Homo sapiens
tcgatttctttgagg

SEQ ID NO: 1587772 - DNA, 15 bp, Homo sapiens
cgatttctttgaggt

SEQ ID NO: 1587773 - DNA, 15 bp, Homo sapiens
gatttctttgaggta

SEQ ID NO: 1587774 - DNA, 15 bp, Homo sapiens
atttctttgaggtat

SEQ ID NO: 1587775 - DNA, 15 bp, Homo sapiens
tttctttgaggtata

SEQ ID NO: 1587776 - DNA, 15 bp, Homo sapiens
ttctttgaggtatac

SEQ ID NO: 1587777 - DNA, 15 bp, Homo sapiens
tctttgaggtatact

SEQ ID NO: 1587778 - DNA, 15 bp, Homo sapiens
ctttgaggtatactt

SEQ ID NO: 1587779 - DNA, 15 bp, Homo sapiens
tttgaggtatacttt

SEQ ID NO: 1587780 - DNA, 15 bp, Homo sapiens
ttgaggtatactttt

SEQ ID NO: 1587781 - DNA, 15 bp, Homo sapiens
tgaggtatacttttc

SEQ ID NO: 1587782 - DNA, 15 bp, Homo sapiens
gaggtatacttttct

SEQ ID NO: 1587783 - DNA, 15 bp, Homo sapiens
aggtatacttttctc

SEQ ID NO: 1587784 - DNA, 15 bp, Homo sapiens
ggtatacttttctct

SEQ ID NO: 1587785 - DNA, 15 bp, Homo sapiens
gtatacttttctctc

SEQ ID NO: 1587786 - DNA, 15 bp, Homo sapiens
tatacttttctctcc

SEQ ID NO: 1587787 - DNA, 15 bp, Homo sapiens
atacttttctctcca

SEQ ID NO: 1587788 - DNA, 15 bp, Homo sapiens
tacttttctctccag

SEQ ID NO: 1587789 - DNA, 15 bp, Homo sapiens
acttttctctccaga

SEQ ID NO: 1587790 - DNA, 15 bp, Homo sapiens
cttttctctccagaa

SEQ ID NO: 1587791 - DNA, 15 bp, Homo sapiens
ttttctctccagaat

SEQ ID NO: 1587792 - DNA, 15 bp, Homo sapiens
tttctctccagaata

SEQ ID NO: 1587793 - DNA, 15 bp, Homo sapiens
ttctctccagaatag

SEQ ID NO: 1587794 - DNA, 15 bp, Homo sapiens
tctctccagaatagt

SEQ ID NO: 1587795 - DNA, 15 bp, Homo sapiens
ctctccagaatagtt

SEQ ID NO: 1587796 - DNA, 15 bp, Homo sapiens
tctccagaatagtta

SEQ ID NO: 1587797 - DNA, 15 bp, Homo sapiens
ctccagaatagttag

SEQ ID NO: 1587798 - DNA, 15 bp, Homo sapiens
tccagaatagttaga

SEQ ID NO: 1587799 - DNA, 15 bp, Homo sapiens
ccagaatagttagat

SEQ ID NO: 1587800 - DNA, 15 bp, Homo sapiens
cagaatagttagatg

SEQ ID NO: 1587801 - DNA, 15 bp, Homo sapiens
agaatagttagatgt

SEQ ID NO: 1587802 - DNA, 15 bp, Homo sapiens
gaatagttagatgta

SEQ ID NO: 1587803 - DNA, 15 bp, Homo sapiens
aatagttagatgtag

SEQ ID NO: 1587804 - DNA, 15 bp, Homo sapiens
atagttagatgtagg

SEQ ID NO: 1587805 - DNA, 15 bp, Homo sapiens
tagttagatgtaggt

SEQ ID NO: 1587806 - DNA, 15 bp, Homo sapiens
agttagatgtaggta

SEQ ID NO: 1587807 - DNA, 15 bp, Homo sapiens
gttagatgtaggtat

SEQ ID NO: 1587808 - DNA, 15 bp, Homo sapiens
ttagatgtaggtata

SEQ ID NO: 1587809 - DNA, 15 bp, Homo sapiens
tagatgtaggtatac

SEQ ID NO: 1587810 - DNA, 15 bp, Homo sapiens
agatgtaggtatacc

SEQ ID NO: 1587811 - DNA, 15 bp, Homo sapiens
gatgtaggtatacca

SEQ ID NO: 1587812 - DNA, 15 bp, Homo sapiens
atgtaggtataccac

SEQ ID NO: 1587813 - DNA, 15 bp, Homo sapiens
tgtaggtataccact

SEQ ID NO: 1587814 - DNA, 15 bp, Homo sapiens
gtaggtataccactt

SEQ ID NO: 1587815 - DNA, 15 bp, Homo sapiens
taggtataccacttt

SEQ ID NO: 1587816 - DNA, 15 bp, Homo sapiens
aggtataccactttg

SEQ ID NO: 1587817 - DNA, 15 bp, Homo sapiens
ggtataccactttga

SEQ ID NO: 1587818 - DNA, 15 bp, Homo sapiens
gtataccactttgat

SEQ ID NO: 1587819 - DNA, 15 bp, Homo sapiens
tataccactttgatg

SEQ ID NO: 1587820 - DNA, 15 bp, Homo sapiens
ataccactttgatgt

SEQ ID NO: 1587821 - DNA, 15 bp, Homo sapiens
taccactttgatgtt

SEQ ID NO: 1587822 - DNA, 15 bp, Homo sapiens
accactttgatgttg

SEQ ID NO: 1587823 - DNA, 15 bp, Homo sapiens
ccactttgatgttga

SEQ ID NO: 1587824 - DNA, 15 bp, Homo sapiens
cactttgatgttgac

SEQ ID NO: 1587825 - DNA, 15 bp, Homo sapiens
actttgatgttgaca

SEQ ID NO: 1587826 - DNA, 15 bp, Homo sapiens
ctttgatgttgacac

SEQ ID NO: 1587827 - DNA, 15 bp, Homo sapiens
tttgatgttgacact

SEQ ID NO: 1587828 - DNA, 15 bp, Homo sapiens
ttgatgttgacacta

SEQ ID NO: 1587829 - DNA, 15 bp, Homo sapiens
tgatgttgacactag

SEQ ID NO: 1587830 - DNA, 15 bp, Homo sapiens
gatgttgacactagt

SEQ ID NO: 1587831 - DNA, 15 bp, Homo sapiens
atgttgacactagtt

SEQ ID NO: 1587832 - DNA, 15 bp, Homo sapiens
tgttgacactagttt

SEQ ID NO: 1587833 - DNA, 15 bp, Homo sapiens
gttgacactagttta

SEQ ID NO: 1587834 - DNA, 15 bp, Homo sapiens
ttgacactagtttac

SEQ ID NO: 1587835 - DNA, 15 bp, Homo sapiens
tgacactagtttacc

SEQ ID NO: 1587836 - DNA, 15 bp, Homo sapiens
gacactagtttacct

SEQ ID NO: 1587837 - DNA, 15 bp, Homo sapiens
acactagtttaccta

SEQ ID NO: 1587838 - DNA, 15 bp, Homo sapiens
cactagtttacctag

SEQ ID NO: 1587839 - DNA, 15 bp, Homo sapiens
actagtttacctaga

SEQ ID NO: 1587840 - DNA, 15 bp, Homo sapiens
ctagtttacctagaa

SEQ ID NO: 1587841 - DNA, 15 bp, Homo sapiens
tagtttacctagaac

SEQ ID NO: 1587842 - DNA, 15 bp, Homo sapiens
agtttacctagaact

SEQ ID NO: 1587843 - DNA, 15 bp, Homo sapiens
gtttacctagaactt

SEQ ID NO: 1587844 - DNA, 15 bp, Homo sapiens
tttacctagaactta

SEQ ID NO: 1587845 - DNA, 15 bp, Homo sapiens
ttacctagaacttat

SEQ ID NO: 1587846 - DNA, 15 bp, Homo sapiens
tacctagaacttatc

SEQ ID NO: 1587847 - DNA, 15 bp, Homo sapiens
acctagaacttatct

SEQ ID NO: 1587848 - DNA, 15 bp, Homo sapiens
cctagaacttatctt

SEQ ID NO: 1587849 - DNA, 15 bp, Homo sapiens
ctagaacttatcttc

SEQ ID NO: 1587850 - DNA, 15 bp, Homo sapiens
tagaacttatcttct

SEQ ID NO: 1587851 - DNA, 15 bp, Homo sapiens
agaacttatcttctg

SEQ ID NO: 1587852 - DNA, 15 bp, Homo sapiens
gaacttatcttctgt

SEQ ID NO: 1587853 - DNA, 15 bp, Homo sapiens
aacttatcttctgta

SEQ ID NO: 1587854 - DNA, 15 bp, Homo sapiens
acttatcttctgtaa

SEQ ID NO: 1587855 - DNA, 15 bp, Homo sapiens
cttatcttctgtaaa

SEQ ID NO: 1587856 - DNA, 15 bp, Homo sapiens
ttatcttctgtaaat

SEQ ID NO: 1587857 - DNA, 15 bp, Homo sapiens
tatcttctgtaaatc

SEQ ID NO: 1587858 - DNA, 15 bp, Homo sapiens
atcttctgtaaatct

SEQ ID NO: 1587859 - DNA, 15 bp, Homo sapiens
tcttctgtaaatctg

SEQ ID NO: 1587860 - DNA, 15 bp, Homo sapiens
cttctgtaaatctgt

SEQ ID NO: 1587861 - DNA, 15 bp, Homo sapiens
ttctgtaaatctgtc

SEQ ID NO: 1587862 - DNA, 15 bp, Homo sapiens
tctgtaaatctgtct

SEQ ID NO: 1587863 - DNA, 15 bp, Homo sapiens
ctgtaaatctgtctc

SEQ ID NO: 1587864 - DNA, 15 bp, Homo sapiens
tgtaaatctgtctct

SEQ ID NO: 1587865 - DNA, 15 bp, Homo sapiens
gtaaatctgtctcta

SEQ ID NO: 1587866 - DNA, 15 bp, Homo sapiens
taaatctgtctctat

SEQ ID NO: 1587867 - DNA, 15 bp, Homo sapiens
aaatctgtctctatt

SEQ ID NO: 1587868 - DNA, 15 bp, Homo sapiens
aatctgtctctattt

SEQ ID NO: 1587869 - DNA, 15 bp, Homo sapiens
atctgtctctatttc

SEQ ID NO: 1587870 - DNA, 15 bp, Homo sapiens
tctgtctctatttcc

SEQ ID NO: 1587871 - DNA, 15 bp, Homo sapiens
ctgtctctatttcca

SEQ ID NO: 1587872 - DNA, 15 bp, Homo sapiens
tgtctctatttccat

SEQ ID NO: 1587873 - DNA, 15 bp, Homo sapiens
gtctctatttccatc

SEQ ID NO: 1587874 - DNA, 15 bp, Homo sapiens
tctctatttccatct

SEQ ID NO: 1587875 - DNA, 15 bp, Homo sapiens
ctctatttccatctc

SEQ ID NO: 1587876 - DNA, 15 bp, Homo sapiens
tctatttccatctct

SEQ ID NO: 1587877 - DNA, 15 bp, Homo sapiens
ctatttccatctctg

SEQ ID NO: 1587878 - DNA, 15 bp, Homo sapiens
tatttccatctctgt

SEQ ID NO: 1587879 - DNA, 15 bp, Homo sapiens
atttccatctctgtc

SEQ ID NO: 1587880 - DNA, 15 bp, Homo sapiens
tttccatctctgtct

SEQ ID NO: 1587881 - DNA, 15 bp, Homo sapiens
ttccatctctgtctc

SEQ ID NO: 1587882 - DNA, 15 bp, Homo sapiens
tccatctctgtctcc

SEQ ID NO: 1587883 - DNA, 15 bp, Homo sapiens
ccatctctgtctcca

SEQ ID NO: 1587884 - DNA, 15 bp, Homo sapiens
catctctgtctccat

SEQ ID NO: 1587885 - DNA, 15 bp, Homo sapiens
atctctgtctccatc

SEQ ID NO: 1587886 - DNA, 15 bp, Homo sapiens
tctctgtctccatct

SEQ ID NO: 1587887 - DNA, 15 bp, Homo sapiens
ctctgtctccatctt

SEQ ID NO: 1587888 - DNA, 15 bp, Homo sapiens
tctgtctccatcttt

SEQ ID NO: 1587889 - DNA, 15 bp, Homo sapiens
ctgtctccatctttg

SEQ ID NO: 1587890 - DNA, 15 bp, Homo sapiens
tgtctccatctttgt

SEQ ID NO: 1587891 - DNA, 15 bp, Homo sapiens
gtctccatctttgtc

SEQ ID NO: 1587892 - DNA, 15 bp, Homo sapiens
tctccatctttgtct

SEQ ID NO: 1587893 - DNA, 15 bp, Homo sapiens
ctccatctttgtctc

SEQ ID NO: 1587894 - DNA, 15 bp, Homo sapiens
tccatctttgtctct

SEQ ID NO: 1587895 - DNA, 15 bp, Homo sapiens
ccatctttgtctcta

SEQ ID NO: 1587896 - DNA, 15 bp, Homo sapiens
catctttgtctctat

SEQ ID NO: 1587897 - DNA, 15 bp, Homo sapiens
atctttgtctctatc

SEQ ID NO: 1587898 - DNA, 15 bp, Homo sapiens
tctttgtctctatct

SEQ ID NO: 1587899 - DNA, 15 bp, Homo sapiens
ctttgtctctatctc

SEQ ID NO: 1587900 - DNA, 15 bp, Homo sapiens
tttgtctctatctct

SEQ ID NO: 1587901 - DNA, 15 bp, Homo sapiens
ttgtctctatctcta

SEQ ID NO: 1587902 - DNA, 15 bp, Homo sapiens
tgtctctatctctat

SEQ ID NO: 1587903 - DNA, 15 bp, Homo sapiens
gtctctatctctatc

SEQ ID NO: 1587904 - DNA, 15 bp, Homo sapiens
tctctatctctatct

SEQ ID NO: 1587905 - DNA, 15 bp, Homo sapiens
ctctatctctatctg

SEQ ID NO: 1587906 - DNA, 15 bp, Homo sapiens
tctatctctatctgt

SEQ ID NO: 1587907 - DNA, 15 bp, Homo sapiens
ctatctctatctgtc

SEQ ID NO: 1587908 - DNA, 15 bp, Homo sapiens
tatctctatctgtct

SEQ ID NO: 1587909 - DNA, 15 bp, Homo sapiens
atctctatctgtcta

SEQ ID NO: 1587910 - DNA, 15 bp, Homo sapiens
tctctatctgtctat

SEQ ID NO: 1587911 - DNA, 15 bp, Homo sapiens
ctctatctgtctatc

SEQ ID NO: 1587912 - DNA, 15 bp, Homo sapiens
ctatctgtctatctc

SEQ ID NO: 1587913 - DNA, 15 bp, Homo sapiens
tatctgtctatctct

SEQ ID NO: 1587914 - DNA, 15 bp, Homo sapiens
atctgtctatctcta

SEQ ID NO: 1587915 - DNA, 15 bp, Homo sapiens
tctgtctatctctat

SEQ ID NO: 1587916 - DNA, 15 bp, Homo sapiens
ctgtctatctctatc

SEQ ID NO: 1587917 - DNA, 15 bp, Homo sapiens
tgtctatctctatct

SEQ ID NO: 1587918 - DNA, 15 bp, Homo sapiens
gtctatctctatcta

SEQ ID NO: 1587919 - DNA, 15 bp, Homo sapiens
tctatctctatctat

SEQ ID NO: 1587920 - DNA, 15 bp, Homo sapiens
ctatctctatctatc

SEQ ID NO: 1587921 - DNA, 15 bp, Homo sapiens
tatctctatctatct

SEQ ID NO: 1587922 - DNA, 15 bp, Homo sapiens
atctctatctatcta

SEQ ID NO: 1587923 - DNA, 15 bp, Homo sapiens
tctctatctatctat

SEQ ID NO: 1587924 - DNA, 15 bp, Homo sapiens
ctctatctatctatc

SEQ ID NO: 1587925 - DNA, 15 bp, Homo sapiens
atctatctatctaaa

SEQ ID NO: 1587926 - DNA, 15 bp, Homo sapiens
tctatctatctaaag

SEQ ID NO: 1587927 - DNA, 15 bp, Homo sapiens
ctatctatctaaagc

SEQ ID NO: 1587928 - DNA, 15 bp, Homo sapiens
tatctatctaaagca

SEQ ID NO: 1587929 - DNA, 15 bp, Homo sapiens
atctatctaaagcaa

SEQ ID NO: 1587930 - DNA, 15 bp, Homo sapiens
tctatctaaagcaaa

SEQ ID NO: 1587931 - DNA, 15 bp, Homo sapiens
ctatctaaagcaaat

SEQ ID NO: 1587932 - DNA, 15 bp, Homo sapiens
tatctaaagcaaatt

SEQ ID NO: 1587933 - DNA, 15 bp, Homo sapiens
atctaaagcaaattc

SEQ ID NO: 1587934 - DNA, 15 bp, Homo sapiens
tctaaagcaaattca

SEQ ID NO: 1587935 - DNA, 15 bp, Homo sapiens
ctaaagcaaattcat

SEQ ID NO: 1587936 - DNA, 15 bp, Homo sapiens
taaagcaaattcatg

SEQ ID NO: 1587937 - DNA, 15 bp, Homo sapiens
aaagcaaattcatgc

SEQ ID NO: 1587938 - DNA, 15 bp, Homo sapiens
aagcaaattcatgcc

SEQ ID NO: 1587939 - DNA, 15 bp, Homo sapiens
agcaaattcatgccc

SEQ ID NO: 1587940 - DNA, 15 bp, Homo sapiens
gcaaattcatgccct

SEQ ID NO: 1587941 - DNA, 15 bp, Homo sapiens
caaattcatgccctt

SEQ ID NO: 1587942 - DNA, 15 bp, Homo sapiens
aaattcatgcccttc

SEQ ID NO: 1587943 - DNA, 15 bp, Homo sapiens
aattcatgcccttct

SEQ ID NO: 1587944 - DNA, 15 bp, Homo sapiens
attcatgcccttctc

SEQ ID NO: 1587945 - DNA, 15 bp, Homo sapiens
ttcatgcccttctcc

SEQ ID NO: 1587946 - DNA, 15 bp, Homo sapiens
tcatgcccttctcct

SEQ ID NO: 1587947 - DNA, 15 bp, Homo sapiens
catgcccttctccta

SEQ ID NO: 1587948 - DNA, 15 bp, Homo sapiens
atgcccttctcctat

SEQ ID NO: 1587949 - DNA, 15 bp, Homo sapiens
tgcccttctcctatt

SEQ ID NO: 1587950 - DNA, 15 bp, Homo sapiens
gcccttctcctattt

SEQ ID NO: 1587951 - DNA, 15 bp, Homo sapiens
cccttctcctattta

SEQ ID NO: 1587952 - DNA, 15 bp, Homo sapiens
ccttctcctatttat

SEQ ID NO: 1587953 - DNA, 15 bp, Homo sapiens
cttctcctatttatt

SEQ ID NO: 1587954 - DNA, 15 bp, Homo sapiens
ttctcctatttattg

SEQ ID NO: 1587955 - DNA, 15 bp, Homo sapiens
tctcctatttattga

SEQ ID NO: 1587956 - DNA, 15 bp, Homo sapiens
ctcctatttattgaa

SEQ ID NO: 1587957 - DNA, 15 bp, Homo sapiens
cctatttattgaatc

SEQ ID NO: 1587958 - DNA, 15 bp, Homo sapiens
ctatttattgaatcg

SEQ ID NO: 1587959 - DNA, 15 bp, Homo sapiens
tatttattgaatcga

SEQ ID NO: 1587960 - DNA, 15 bp, Homo sapiens
atttattgaatcgag

SEQ ID NO: 1587961 - DNA, 15 bp, Homo sapiens
tttattgaatcgaga

SEQ ID NO: 1587962 - DNA, 15 bp, Homo sapiens
ttattgaatcgagac

SEQ ID NO: 1587963 - DNA, 15 bp, Homo sapiens
tattgaatcgagacc

SEQ ID NO: 1587964 - DNA, 15 bp, Homo sapiens
attgaatcgagacca

SEQ ID NO: 1587965 - DNA, 15 bp, Homo sapiens
ttgaatcgagaccat

SEQ ID NO: 1587966 - DNA, 15 bp, Homo sapiens
tgaatcgagaccata

SEQ ID NO: 1587967 - DNA, 15 bp, Homo sapiens
gaatcgagaccatag

SEQ ID NO: 1587968 - DNA, 15 bp, Homo sapiens
aatcgagaccataga

SEQ ID NO: 1587969 - DNA, 15 bp, Homo sapiens
atcgagaccatagac

SEQ ID NO: 1587970 - DNA, 15 bp, Homo sapiens
tcgagaccatagaca

SEQ ID NO: 1587971 - DNA, 15 bp, Homo sapiens
cgagaccatagacag

SEQ ID NO: 1587972 - DNA, 15 bp, Homo sapiens
gagaccatagacagg

SEQ ID NO: 1587973 - DNA, 15 bp, Homo sapiens
agaccatagacaggg

SEQ ID NO: 1587974 - DNA, 15 bp, Homo sapiens
gaccatagacagggg

SEQ ID NO: 1587975 - DNA, 15 bp, Homo sapiens
accatagacaggggt

SEQ ID NO: 1587976 - DNA, 15 bp, Homo sapiens
ccatagacaggggtg

SEQ ID NO: 1587977 - DNA, 15 bp, Homo sapiens
catagacaggggtga

SEQ ID NO: 1587978 - DNA, 15 bp, Homo sapiens
atagacaggggtgag

SEQ ID NO: 1587979 - DNA, 15 bp, Homo sapiens
tagacaggggtgaga

SEQ ID NO: 1587980 - DNA, 15 bp, Homo sapiens
agacaggggtgagag

SEQ ID NO: 1587981 - DNA, 15 bp, Homo sapiens
gacaggggtgagaga

SEQ ID NO: 1587982 - DNA, 15 bp, Homo sapiens
acaggggtgagagaa

SEQ ID NO: 1587983 - DNA, 15 bp, Homo sapiens
caggggtgagagaaa

SEQ ID NO: 1587984 - DNA, 15 bp, Homo sapiens
aggggtgagagaaag

SEQ ID NO: 1587985 - DNA, 15 bp, Homo sapiens
ggggtgagagaaaga

SEQ ID NO: 1587986 - DNA, 15 bp, Homo sapiens
gggtgagagaaagaa

SEQ ID NO: 1587987 - DNA, 15 bp, Homo sapiens
ggtgagagaaagaat

SEQ ID NO: 1587988 - DNA, 15 bp, Homo sapiens
gtgagagaaagaatt

SEQ ID NO: 1587989 - DNA, 15 bp, Homo sapiens
tgagagaaagaattt

SEQ ID NO: 1587990 - DNA, 15 bp, Homo sapiens
gagagaaagaatttg

SEQ ID NO: 1587991 - DNA, 15 bp, Homo sapiens
agagaaagaatttgg

SEQ ID NO: 1587992 - DNA, 15 bp, Homo sapiens
gagaaagaatttggc

SEQ ID NO: 1587993 - DNA, 15 bp, Homo sapiens
agaaagaatttggca

SEQ ID NO: 1587994 - DNA, 15 bp, Homo sapiens
gaaagaatttggcag

SEQ ID NO: 1587995 - DNA, 15 bp, Homo sapiens
aaagaatttggcagg

SEQ ID NO: 1587996 - DNA, 15 bp, Homo sapiens
aagaatttggcagga

SEQ ID NO: 1587997 - DNA, 15 bp, Homo sapiens
agaatttggcaggaa

SEQ ID NO: 1587998 - DNA, 15 bp, Homo sapiens
gaatttggcaggaat

SEQ ID NO: 1587999 - DNA, 15 bp, Homo sapiens
aatttggcaggaatg

SEQ ID NO: 1588000 - DNA, 15 bp, Homo sapiens
atttggcaggaatgg

SEQ ID NO: 1588001 - DNA, 15 bp, Homo sapiens
tttggcaggaatggg

SEQ ID NO: 1588002 - DNA, 15 bp, Homo sapiens
ttggcaggaatgggg

SEQ ID NO: 1588003 - DNA, 15 bp, Homo sapiens
tggcaggaatgggga

SEQ ID NO: 1588004 - DNA, 15 bp, Homo sapiens
ggcaggaatggggat

SEQ ID NO: 1588005 - DNA, 15 bp, Homo sapiens
gcaggaatggggatg

SEQ ID NO: 1588006 - DNA, 15 bp, Homo sapiens
caggaatggggatgt

SEQ ID NO: 1588007 - DNA, 15 bp, Homo sapiens
aggaatggggatgtg

SEQ ID NO: 1588008 - DNA, 15 bp, Homo sapiens
ggaatggggatgtgt

SEQ ID NO: 1588009 - DNA, 15 bp, Homo sapiens
gaatggggatgtgta

SEQ ID NO: 1588010 - DNA, 15 bp, Homo sapiens
aatggggatgtgtat

SEQ ID NO: 1588011 - DNA, 15 bp, Homo sapiens
atggggatgtgtatt

SEQ ID NO: 1588012 - DNA, 15 bp, Homo sapiens
tggggatgtgtatta

SEQ ID NO: 1588013 - DNA, 15 bp, Homo sapiens
ggggatgtgtattat

SEQ ID NO: 1588014 - DNA, 15 bp, Homo sapiens
gggatgtgtattatc

SEQ ID NO: 1588015 - DNA, 15 bp, Homo sapiens
ggatgtgtattatct

SEQ ID NO: 1588016 - DNA, 15 bp, Homo sapiens
gatgtgtattatctg

SEQ ID NO: 1588017 - DNA, 15 bp, Homo sapiens
atgtgtattatctgt

SEQ ID NO: 1588018 - DNA, 15 bp, Homo sapiens
tgtgtattatctgtg

SEQ ID NO: 1588019 - DNA, 15 bp, Homo sapiens
gtgtattatctgtgg

SEQ ID NO: 1588020 - DNA, 15 bp, Homo sapiens
gtattatctgtggca

SEQ ID NO: 1588021 - DNA, 15 bp, Homo sapiens
tattatctgtggcat

SEQ ID NO: 1588022 - DNA, 15 bp, Homo sapiens
attatctgtggcata

SEQ ID NO: 1588023 - DNA, 15 bp, Homo sapiens
ttatctgtggcataa

SEQ ID NO: 1588024 - DNA, 15 bp, Homo sapiens
tatctgtggcataag

SEQ ID NO: 1588025 - DNA, 15 bp, Homo sapiens
atctgtggcataagg

SEQ ID NO: 1588026 - DNA, 15 bp, Homo sapiens
tctgtggcataagga

SEQ ID NO: 1588027 - DNA, 15 bp, Homo sapiens
ctgtggcataaggaa

SEQ ID NO: 1588028 - DNA, 15 bp, Homo sapiens
tgtggcataaggaaa

SEQ ID NO: 1588029 - DNA, 15 bp, Homo sapiens
gtggcataaggaaac

SEQ ID NO: 1588030 - DNA, 15 bp, Homo sapiens
tggcataaggaaact

SEQ ID NO: 1588031 - DNA, 15 bp, Homo sapiens
ggcataaggaaactt

SEQ ID NO: 1588032 - DNA, 15 bp, Homo sapiens
gcataaggaaacttt

SEQ ID NO: 1588033 - DNA, 15 bp, Homo sapiens
cataaggaaacttta

SEQ ID NO: 1588034 - DNA, 15 bp, Homo sapiens
ataaggaaactttac

SEQ ID NO: 1588035 - DNA, 15 bp, Homo sapiens
taaggaaactttaca

SEQ ID NO: 1588036 - DNA, 15 bp, Homo sapiens
aaggaaactttacag

SEQ ID NO: 1588037 - DNA, 15 bp, Homo sapiens
aggaaactttacaga

SEQ ID NO: 1588038 - DNA, 15 bp, Homo sapiens
ggaaactttacagaa

SEQ ID NO: 1588039 - DNA, 15 bp, Homo sapiens
gaaactttacagaac

SEQ ID NO: 1588040 - DNA, 15 bp, Homo sapiens
aaactttacagaact

SEQ ID NO: 1588041 - DNA, 15 bp, Homo sapiens
aactttacagaacta

SEQ ID NO: 1588042 - DNA, 15 bp, Homo sapiens
actttacagaactag

SEQ ID NO: 1588043 - DNA, 15 bp, Homo sapiens
ctttacagaactagg

SEQ ID NO: 1588044 - DNA, 15 bp, Homo sapiens
tttacagaactaggt

SEQ ID NO: 1588045 - DNA, 15 bp, Homo sapiens
ttacagaactaggtt

SEQ ID NO: 1588046 - DNA, 15 bp, Homo sapiens
tacagaactaggttc

SEQ ID NO: 1588047 - DNA, 15 bp, Homo sapiens
acagaactaggttca

SEQ ID NO: 1588048 - DNA, 15 bp, Homo sapiens
cagaactaggttcaa

SEQ ID NO: 1588049 - DNA, 15 bp, Homo sapiens
agaactaggttcaaa

SEQ ID NO: 1588050 - DNA, 15 bp, Homo sapiens
gaactaggttcaaaa

SEQ ID NO: 1588051 - DNA, 15 bp, Homo sapiens
aactaggttcaaaag

SEQ ID NO: 1588052 - DNA, 15 bp, Homo sapiens
actaggttcaaaagt

SEQ ID NO: 1588053 - DNA, 15 bp, Homo sapiens
ctaggttcaaaagta

SEQ ID NO: 1588054 - DNA, 15 bp, Homo sapiens
taggttcaaaagtat

SEQ ID NO: 1588055 - DNA, 15 bp, Homo sapiens
aggttcaaaagtata

SEQ ID NO: 1588056 - DNA, 15 bp, Homo sapiens
ggttcaaaagtatac

SEQ ID NO: 1588057 - DNA, 15 bp, Homo sapiens
gttcaaaagtatact

SEQ ID NO: 1588058 - DNA, 15 bp, Homo sapiens
ttcaaaagtatactt

SEQ ID NO: 1588059 - DNA, 15 bp, Homo sapiens
tcaaaagtatacttt

SEQ ID NO: 1588060 - DNA, 15 bp, Homo sapiens
caaaagtatactttc

SEQ ID NO: 1588061 - DNA, 15 bp, Homo sapiens
aaaagtatactttct

SEQ ID NO: 1588062 - DNA, 15 bp, Homo sapiens
aaagtatactttcta

SEQ ID NO: 1588063 - DNA, 15 bp, Homo sapiens
aagtatactttctag

SEQ ID NO: 1588064 - DNA, 15 bp, Homo sapiens
agtatactttctagt

SEQ ID NO: 1588065 - DNA, 15 bp, Homo sapiens
gtatactttctagtt

SEQ ID NO: 1588066 - DNA, 15 bp, Homo sapiens
tatactttctagttc

SEQ ID NO: 1588067 - DNA, 15 bp, Homo sapiens
atactttctagttct

SEQ ID NO: 1588068 - DNA, 15 bp, Homo sapiens
tactttctagttctt

SEQ ID NO: 1588069 - DNA, 15 bp, Homo sapiens
actttctagttcttt

SEQ ID NO: 1588070 - DNA, 15 bp, Homo sapiens
ctttctagttctttc

SEQ ID NO: 1588071 - DNA, 15 bp, Homo sapiens
tttctagttctttcc

SEQ ID NO: 1588072 - DNA, 15 bp, Homo sapiens
ttctagttctttccc

SEQ ID NO: 1588073 - DNA, 15 bp, Homo sapiens
tctagttctttccca

SEQ ID NO: 1588074 - DNA, 15 bp, Homo sapiens
ctagttctttcccat

SEQ ID NO: 1588075 - DNA, 15 bp, Homo sapiens
tagttctttcccatg

SEQ ID NO: 1588076 - DNA, 15 bp, Homo sapiens
agttctttcccatgg

SEQ ID NO: 1588077 - DNA, 15 bp, Homo sapiens
gttctttcccatggc

SEQ ID NO: 1588078 - DNA, 15 bp, Homo sapiens
ttctttcccatggct

SEQ ID NO: 1588079 - DNA, 15 bp, Homo sapiens
tctttcccatggctt

SEQ ID NO: 1588080 - DNA, 15 bp, Homo sapiens
ctttcccatggcttt

SEQ ID NO: 1588081 - DNA, 15 bp, Homo sapiens
tttcccatggctttt

SEQ ID NO: 1588082 - DNA, 15 bp, Homo sapiens
ttcccatggcttttc

SEQ ID NO: 1588083 - DNA, 15 bp, Homo sapiens
tcccatggcttttca

SEQ ID NO: 1588084 - DNA, 15 bp, Homo sapiens
cccatggcttttcac

SEQ ID NO: 1588085 - DNA, 15 bp, Homo sapiens
ccatggcttttcact

SEQ ID NO: 1588086 - DNA, 15 bp, Homo sapiens
catggcttttcactt

SEQ ID NO: 1588087 - DNA, 15 bp, Homo sapiens
atggcttttcacttt

SEQ ID NO: 1588088 - DNA, 15 bp, Homo sapiens
tggcttttcactttg

SEQ ID NO: 1588089 - DNA, 15 bp, Homo sapiens
ggcttttcactttga

SEQ ID NO: 1588090 - DNA, 15 bp, Homo sapiens
gcttttcactttgat

SEQ ID NO: 1588091 - DNA, 15 bp, Homo sapiens
cttttcactttgatg

SEQ ID NO: 1588092 - DNA, 15 bp, Homo sapiens
ttttcactttgatgt

SEQ ID NO: 1588093 - DNA, 15 bp, Homo sapiens
tttcactttgatgta

SEQ ID NO: 1588094 - DNA, 15 bp, Homo sapiens
ttcactttgatgtag

SEQ ID NO: 1588095 - DNA, 15 bp, Homo sapiens
tcactttgatgtagt

SEQ ID NO: 1588096 - DNA, 15 bp, Homo sapiens
cactttgatgtagtc

SEQ ID NO: 1588097 - DNA, 15 bp, Homo sapiens
actttgatgtagtcc

SEQ ID NO: 1588098 - DNA, 15 bp, Homo sapiens
ctttgatgtagtcct

SEQ ID NO: 1588099 - DNA, 15 bp, Homo sapiens
tttgatgtagtcctt

SEQ ID NO: 1588100 - DNA, 15 bp, Homo sapiens
ttgatgtagtcctta

SEQ ID NO: 1588101 - DNA, 15 bp, Homo sapiens
tgatgtagtccttat

SEQ ID NO: 1588102 - DNA, 15 bp, Homo sapiens
gatgtagtccttatc

SEQ ID NO: 1588103 - DNA, 15 bp, Homo sapiens
atgtagtccttatca

SEQ ID NO: 1588104 - DNA, 15 bp, Homo sapiens
tgtagtccttatcag

SEQ ID NO: 1588105 - DNA, 15 bp, Homo sapiens
gtagtccttatcagg

SEQ ID NO: 1588106 - DNA, 15 bp, Homo sapiens
tagtccttatcaggt

SEQ ID NO: 1588107 - DNA, 15 bp, Homo sapiens
agtccttatcaggta

SEQ ID NO: 1588108 - DNA, 15 bp, Homo sapiens
gtccttatcaggtaa

SEQ ID NO: 1588109 - DNA, 15 bp, Homo sapiens
tccttatcaggtaac

SEQ ID NO: 1588110 - DNA, 15 bp, Homo sapiens
ccttatcaggtaact

SEQ ID NO: 1588111 - DNA, 15 bp, Homo sapiens
cttatcaggtaactg

SEQ ID NO: 1588112 - DNA, 15 bp, Homo sapiens
ttatcaggtaactga

SEQ ID NO: 1588113 - DNA, 15 bp, Homo sapiens
tatcaggtaactgag

SEQ ID NO: 1588114 - DNA, 15 bp, Homo sapiens
atcaggtaactgagg

SEQ ID NO: 1588115 - DNA, 15 bp, Homo sapiens
tcaggtaactgaggt

SEQ ID NO: 1588116 - DNA, 15 bp, Homo sapiens
caggtaactgaggtt

SEQ ID NO: 1588117 - DNA, 15 bp, Homo sapiens
aggtaactgaggttt

SEQ ID NO: 1588118 - DNA, 15 bp, Homo sapiens
ggtaactgaggtttt

SEQ ID NO: 1588119 - DNA, 15 bp, Homo sapiens
gtaactgaggtttta

SEQ ID NO: 1588120 - DNA, 15 bp, Homo sapiens
taactgaggttttat

SEQ ID NO: 1588121 - DNA, 15 bp, Homo sapiens
aactgaggttttata

SEQ ID NO: 1588122 - DNA, 15 bp, Homo sapiens
actgaggttttatat

SEQ ID NO: 1588123 - DNA, 15 bp, Homo sapiens
ctgaggttttatata

SEQ ID NO: 1588124 - DNA, 15 bp, Homo sapiens
tgaggttttatataa

SEQ ID NO: 1588125 - DNA, 15 bp, Homo sapiens
gaggttttatataag

SEQ ID NO: 1588126 - DNA, 15 bp, Homo sapiens
aggttttatataagt

SEQ ID NO: 1588127 - DNA, 15 bp, Homo sapiens
ggttttatataagtc

SEQ ID NO: 1588128 - DNA, 15 bp, Homo sapiens
gttttatataagtcc

SEQ ID NO: 1588129 - DNA, 15 bp, Homo sapiens
ttttatataagtccc

SEQ ID NO: 1588130 - DNA, 15 bp, Homo sapiens
tttatataagtcccc

SEQ ID NO: 1588131 - DNA, 15 bp, Homo sapiens
ttatataagtcccct

SEQ ID NO: 1588132 - DNA, 15 bp, Homo sapiens
tatataagtcccctg

SEQ ID NO: 1588133 - DNA, 15 bp, Homo sapiens
atataagtcccctga

SEQ ID NO: 1588134 - DNA, 15 bp, Homo sapiens
tataagtcccctgat

SEQ ID NO: 1588135 - DNA, 15 bp, Homo sapiens
ataagtcccctgatt

SEQ ID NO: 1588136 - DNA, 15 bp, Homo sapiens
taagtcccctgattc

SEQ ID NO: 1588137 - DNA, 15 bp, Homo sapiens
aagtcccctgattct

SEQ ID NO: 1588138 - DNA, 15 bp, Homo sapiens
agtcccctgattctt

SEQ ID NO: 1588139 - DNA, 15 bp, Homo sapiens
gtcccctgattctta

SEQ ID NO: 1588140 - DNA, 15 bp, Homo sapiens
tcccctgattcttag

SEQ ID NO: 1588141 - DNA, 15 bp, Homo sapiens
cccctgattcttaga

SEQ ID NO: 1588142 - DNA, 15 bp, Homo sapiens
ccctgattcttagaa

SEQ ID NO: 1588143 - DNA, 15 bp, Homo sapiens
cctgattcttagaac

SEQ ID NO: 1588144 - DNA, 15 bp, Homo sapiens
ctgattcttagaaca

SEQ ID NO: 1588145 - DNA, 15 bp, Homo sapiens
tgattcttagaacat

SEQ ID NO: 1588146 - DNA, 15 bp, Homo sapiens
gattcttagaacatg

SEQ ID NO: 1588147 - DNA, 15 bp, Homo sapiens
attcttagaacatga

SEQ ID NO: 1588148 - DNA, 15 bp, Homo sapiens
ttcttagaacatgaa

SEQ ID NO: 1588149 - DNA, 15 bp, Homo sapiens
tcttagaacatgaag

SEQ ID NO: 1588150 - DNA, 15 bp, Homo sapiens
cttagaacatgaagg

SEQ ID NO: 1588151 - DNA, 15 bp, Homo sapiens
ttagaacatgaaggt

SEQ ID NO: 1588152 - DNA, 15 bp, Homo sapiens
tagaacatgaaggtg

SEQ ID NO: 1588153 - DNA, 15 bp, Homo sapiens
agaacatgaaggtgt

SEQ ID NO: 1588154 - DNA, 15 bp, Homo sapiens
gaacatgaaggtgta

SEQ ID NO: 1588155 - DNA, 15 bp, Homo sapiens
aacatgaaggtgtag

SEQ ID NO: 1588156 - DNA, 15 bp, Homo sapiens
acatgaaggtgtagt

SEQ ID NO: 1588157 - DNA, 15 bp, Homo sapiens
catgaaggtgtagta

SEQ ID NO: 1588158 - DNA, 15 bp, Homo sapiens
atgaaggtgtagtag

SEQ ID NO: 1588159 - DNA, 15 bp, Homo sapiens
tgaaggtgtagtagt

SEQ ID NO: 1588160 - DNA, 15 bp, Homo sapiens
gaaggtgtagtagtc

SEQ ID NO: 1588161 - DNA, 15 bp, Homo sapiens
aaggtgtagtagtca

SEQ ID NO: 1588162 - DNA, 15 bp, Homo sapiens
aggtgtagtagtcaa

SEQ ID NO: 1588163 - DNA, 15 bp, Homo sapiens
ggtgtagtagtcaag

SEQ ID NO: 1588164 - DNA, 15 bp, Homo sapiens
gtgtagtagtcaagg

SEQ ID NO: 1588165 - DNA, 15 bp, Homo sapiens
tgtagtagtcaaggt

SEQ ID NO: 1588166 - DNA, 15 bp, Homo sapiens
gtagtagtcaaggtt

SEQ ID NO: 1588167 - DNA, 15 bp, Homo sapiens
tagtagtcaaggttg

SEQ ID NO: 1588168 - DNA, 15 bp, Homo sapiens
agtagtcaaggttgg

SEQ ID NO: 1588169 - DNA, 15 bp, Homo sapiens
gtagtcaaggttggt

SEQ ID NO: 1588170 - DNA, 15 bp, Homo sapiens
tagtcaaggttggtc

SEQ ID NO: 1588171 - DNA, 15 bp, Homo sapiens
agtcaaggttggtcc

SEQ ID NO: 1588172 - DNA, 15 bp, Homo sapiens
gtcaaggttggtccc

SEQ ID NO: 1588173 - DNA, 15 bp, Homo sapiens
tcaaggttggtccct

SEQ ID NO: 1588174 - DNA, 15 bp, Homo sapiens
caaggttggtccctt

SEQ ID NO: 1588175 - DNA, 15 bp, Homo sapiens
aaggttggtcccttg

SEQ ID NO: 1588176 - DNA, 15 bp, Homo sapiens
aggttggtcccttga

SEQ ID NO: 1588177 - DNA, 15 bp, Homo sapiens
ggttggtcccttgaa

SEQ ID NO: 1588178 - DNA, 15 bp, Homo sapiens
gttggtcccttgaaa

SEQ ID NO: 1588179 - DNA, 15 bp, Homo sapiens
ttggtcccttgaaac

SEQ ID NO: 1588180 - DNA, 15 bp, Homo sapiens
tggtcccttgaaacc

SEQ ID NO: 1588181 - DNA, 15 bp, Homo sapiens
ggtcccttgaaacca

SEQ ID NO: 1588182 - DNA, 15 bp, Homo sapiens
gtcccttgaaaccac

SEQ ID NO: 1588183 - DNA, 15 bp, Homo sapiens
tcccttgaaaccaca

SEQ ID NO: 1588184 - DNA, 15 bp, Homo sapiens
cccttgaaaccacaa

SEQ ID NO: 1588185 - DNA, 15 bp, Homo sapiens
ccttgaaaccacaaa

SEQ ID NO: 1588186 - DNA, 15 bp, Homo sapiens
cttgaaaccacaaat

SEQ ID NO: 1588187 - DNA, 15 bp, Homo sapiens
ttgaaaccacaaatt

SEQ ID NO: 1588188 - DNA, 15 bp, Homo sapiens
tgaaaccacaaattt

SEQ ID NO: 1588189 - DNA, 15 bp, Homo sapiens
gaaaccacaaatttt

SEQ ID NO: 1588190 - DNA, 15 bp, Homo sapiens
aaaccacaaattttg

SEQ ID NO: 1588191 - DNA, 15 bp, Homo sapiens
aaccacaaattttgt

SEQ ID NO: 1588192 - DNA, 15 bp, Homo sapiens
accacaaattttgtg

SEQ ID NO: 1588193 - DNA, 15 bp, Homo sapiens
ccacaaattttgtga

SEQ ID NO: 1588194 - DNA, 15 bp, Homo sapiens
cacaaattttgtgaa

SEQ ID NO: 1588195 - DNA, 15 bp, Homo sapiens
acaaattttgtgaaa

SEQ ID NO: 1588196 - DNA, 15 bp, Homo sapiens
caaattttgtgaaaa

SEQ ID NO: 1588197 - DNA, 15 bp, Homo sapiens
aaattttgtgaaaaa

SEQ ID NO: 1588198 - DNA, 15 bp, Homo sapiens
aattttgtgaaaaaa

SEQ ID NO: 1588199 - DNA, 15 bp, Homo sapiens
attttgtgaaaaaaa

SEQ ID NO: 1588200 - DNA, 15 bp, Homo sapiens
ttttgtgaaaaaaaa

SEQ ID NO: 1588201 - DNA, 15 bp, Homo sapiens
tttgtgaaaaaaaat

SEQ ID NO: 1588202 - DNA, 15 bp, Homo sapiens
ttgtgaaaaaaaatt

SEQ ID NO: 1588203 - DNA, 15 bp, Homo sapiens
tgtgaaaaaaaatta

SEQ ID NO: 1588204 - DNA, 15 bp, Homo sapiens
gtgaaaaaaaattaa

SEQ ID NO: 1588205 - DNA, 15 bp, Homo sapiens
tgaaaaaaaattaag

SEQ ID NO: 1588206 - DNA, 15 bp, Homo sapiens
gaaaaaaaattaaga

SEQ ID NO: 1588207 - DNA, 15 bp, Homo sapiens
aaaattaagaaaatt

SEQ ID NO: 1588208 - DNA, 15 bp, Homo sapiens
aaattaagaaaattg

SEQ ID NO: 1588209 - DNA, 15 bp, Homo sapiens
aattaagaaaattga

SEQ ID NO: 1588210 - DNA, 15 bp, Homo sapiens
attaagaaaattgaa

SEQ ID NO: 1588211 - DNA, 15 bp, Homo sapiens
ttaagaaaattgaat

SEQ ID NO: 1588212 - DNA, 15 bp, Homo sapiens
taagaaaattgaata

SEQ ID NO: 1588213 - DNA, 15 bp, Homo sapiens
aagaaaattgaataa

SEQ ID NO: 1588214 - DNA, 15 bp, Homo sapiens
agaaaattgaataat

SEQ ID NO: 1588215 - DNA, 15 bp, Homo sapiens
gaaaattgaataatt

SEQ ID NO: 1588216 - DNA, 15 bp, Homo sapiens
aaaattgaataattt

SEQ ID NO: 1588217 - DNA, 15 bp, Homo sapiens
aaattgaataatttc

SEQ ID NO: 1588218 - DNA, 15 bp, Homo sapiens
aattgaataatttcc

SEQ ID NO: 1588219 - DNA, 15 bp, Homo sapiens
attgaataatttcct

SEQ ID NO: 1588220 - DNA, 15 bp, Homo sapiens
ttgaataatttcctc

SEQ ID NO: 1588221 - DNA, 15 bp, Homo sapiens
tgaataatttcctca

SEQ ID NO: 1588222 - DNA, 15 bp, Homo sapiens
gaataatttcctcag

SEQ ID NO: 1588223 - DNA, 15 bp, Homo sapiens
aataatttcctcagc

SEQ ID NO: 1588224 - DNA, 15 bp, Homo sapiens
ataatttcctcagca

SEQ ID NO: 1588225 - DNA, 15 bp, Homo sapiens
taatttcctcagcaa

SEQ ID NO: 1588226 - DNA, 15 bp, Homo sapiens
aatttcctcagcaaa

SEQ ID NO: 1588227 - DNA, 15 bp, Homo sapiens
atttcctcagcaaat

SEQ ID NO: 1588228 - DNA, 15 bp, Homo sapiens
tttcctcagcaaata

SEQ ID NO: 1588229 - DNA, 15 bp, Homo sapiens
ttcctcagcaaatac

SEQ ID NO: 1588230 - DNA, 15 bp, Homo sapiens
tcctcagcaaataca

SEQ ID NO: 1588231 - DNA, 15 bp, Homo sapiens
cctcagcaaatacat

SEQ ID NO: 1588232 - DNA, 15 bp, Homo sapiens
ctcagcaaatacata

SEQ ID NO: 1588233 - DNA, 15 bp, Homo sapiens
tcagcaaatacatat

SEQ ID NO: 1588234 - DNA, 15 bp, Homo sapiens
cagcaaatacatatt

SEQ ID NO: 1588235 - DNA, 15 bp, Homo sapiens
agcaaatacatattg

SEQ ID NO: 1588236 - DNA, 15 bp, Homo sapiens
gcaaatacatattga

SEQ ID NO: 1588237 - DNA, 15 bp, Homo sapiens
caaatacatattgat

SEQ ID NO: 1588238 - DNA, 15 bp, Homo sapiens
aaatacatattgatc

SEQ ID NO: 1588239 - DNA, 15 bp, Homo sapiens
aatacatattgatca

SEQ ID NO: 1588240 - DNA, 15 bp, Homo sapiens
atacatattgatcat

SEQ ID NO: 1588241 - DNA, 15 bp, Homo sapiens
tacatattgatcatc

SEQ ID NO: 1588242 - DNA, 15 bp, Homo sapiens
acatattgatcatct

SEQ ID NO: 1588243 - DNA, 15 bp, Homo sapiens
catattgatcatctg

SEQ ID NO: 1588244 - DNA, 15 bp, Homo sapiens
atattgatcatctgt

SEQ ID NO: 1588245 - DNA, 15 bp, Homo sapiens
tattgatcatctgtt

SEQ ID NO: 1588246 - DNA, 15 bp, Homo sapiens
attgatcatctgtta

SEQ ID NO: 1588247 - DNA, 15 bp, Homo sapiens
ttgatcatctgttat

SEQ ID NO: 1588248 - DNA, 15 bp, Homo sapiens
tgatcatctgttata

SEQ ID NO: 1588249 - DNA, 15 bp, Homo sapiens
gatcatctgttatac

SEQ ID NO: 1588250 - DNA, 15 bp, Homo sapiens
atcatctgttataca

SEQ ID NO: 1588251 - DNA, 15 bp, Homo sapiens
tcatctgttatacag

SEQ ID NO: 1588252 - DNA, 15 bp, Homo sapiens
catctgttatacagc

SEQ ID NO: 1588253 - DNA, 15 bp, Homo sapiens
atctgttatacagcc

SEQ ID NO: 1588254 - DNA, 15 bp, Homo sapiens
tctgttatacagcca

SEQ ID NO: 1588255 - DNA, 15 bp, Homo sapiens
ctgttatacagccat

SEQ ID NO: 1588256 - DNA, 15 bp, Homo sapiens
tgttatacagccatg

SEQ ID NO: 1588257 - DNA, 15 bp, Homo sapiens
gttatacagccatga

SEQ ID NO: 1588258 - DNA, 15 bp, Homo sapiens
ttatacagccatgag

SEQ ID NO: 1588259 - DNA, 15 bp, Homo sapiens
tatacagccatgaga

SEQ ID NO: 1588260 - DNA, 15 bp, Homo sapiens
atacagccatgagaa

SEQ ID NO: 1588261 - DNA, 15 bp, Homo sapiens
tacagccatgagaag

SEQ ID NO: 1588262 - DNA, 15 bp, Homo sapiens
acagccatgagaagt

SEQ ID NO: 1588263 - DNA, 15 bp, Homo sapiens
cagccatgagaagtg

SEQ ID NO: 1588264 - DNA, 15 bp, Homo sapiens
agccatgagaagtgg

SEQ ID NO: 1588265 - DNA, 15 bp, Homo sapiens
gccatgagaagtggt

SEQ ID NO: 1588266 - DNA, 15 bp, Homo sapiens
ccatgagaagtggtt

SEQ ID NO: 1588267 - DNA, 15 bp, Homo sapiens
catgagaagtggttc

SEQ ID NO: 1588268 - DNA, 15 bp, Homo sapiens
atgagaagtggttct

SEQ ID NO: 1588269 - DNA, 15 bp, Homo sapiens
tgagaagtggttctg

SEQ ID NO: 1588270 - DNA, 15 bp, Homo sapiens
gagaagtggttctgt

SEQ ID NO: 1588271 - DNA, 15 bp, Homo sapiens
agaagtggttctgtt

SEQ ID NO: 1588272 - DNA, 15 bp, Homo sapiens
gaagtggttctgttg

SEQ ID NO: 1588273 - DNA, 15 bp, Homo sapiens
aagtggttctgttgc

SEQ ID NO: 1588274 - DNA, 15 bp, Homo sapiens
agtggttctgttgca

SEQ ID NO: 1588275 - DNA, 15 bp, Homo sapiens
gtggttctgttgcac

SEQ ID NO: 1588276 - DNA, 15 bp, Homo sapiens
tggttctgttgcaca

SEQ ID NO: 1588277 - DNA, 15 bp, Homo sapiens
ggttctgttgcacac

SEQ ID NO: 1588278 - DNA, 15 bp, Homo sapiens
gttctgttgcacacg

SEQ ID NO: 1588279 - DNA, 15 bp, Homo sapiens
ttctgttgcacacgt

SEQ ID NO: 1588280 - DNA, 15 bp, Homo sapiens
tctgttgcacacgtt

SEQ ID NO: 1588281 - DNA, 15 bp, Homo sapiens
ctgttgcacacgttt

SEQ ID NO: 1588282 - DNA, 15 bp, Homo sapiens
tgttgcacacgttta

SEQ ID NO: 1588283 - DNA, 15 bp, Homo sapiens
gttgcacacgtttat

SEQ ID NO: 1588284 - DNA, 15 bp, Homo sapiens
ttgcacacgtttatt

SEQ ID NO: 1588285 - DNA, 15 bp, Homo sapiens
tgcacacgtttattt

SEQ ID NO: 1588286 - DNA, 15 bp, Homo sapiens
gcacacgtttatttt

SEQ ID NO: 1588287 - DNA, 15 bp, Homo sapiens
cacacgtttatttta

SEQ ID NO: 1588288 - DNA, 15 bp, Homo sapiens
acacgtttattttat

SEQ ID NO: 1588289 - DNA, 15 bp, Homo sapiens
cacgtttattttatc

SEQ ID NO: 1588290 - DNA, 15 bp, Homo sapiens
acgtttattttatca

SEQ ID NO: 1588291 - DNA, 15 bp, Homo sapiens
cgtttattttatcag

SEQ ID NO: 1588292 - DNA, 15 bp, Homo sapiens
gtttattttatcaga

SEQ ID NO: 1588293 - DNA, 15 bp, Homo sapiens
tttattttatcagat

SEQ ID NO: 1588294 - DNA, 15 bp, Homo sapiens
ttattttatcagatc

SEQ ID NO: 1588295 - DNA, 15 bp, Homo sapiens
tattttatcagatcc

SEQ ID NO: 1588296 - DNA, 15 bp, Homo sapiens
attttatcagatcct

SEQ ID NO: 1588297 - DNA, 15 bp, Homo sapiens
ttttatcagatccta

SEQ ID NO: 1588298 - DNA, 15 bp, Homo sapiens
tttatcagatcctaa

SEQ ID NO: 1588299 - DNA, 15 bp, Homo sapiens
ttatcagatcctaat

SEQ ID NO: 1588300 - DNA, 15 bp, Homo sapiens
tatcagatcctaatc

SEQ ID NO: 1588301 - DNA, 15 bp, Homo sapiens
atcagatcctaatcc

SEQ ID NO: 1588302 - DNA, 15 bp, Homo sapiens
tcagatcctaatccc

SEQ ID NO: 1588303 - DNA, 15 bp, Homo sapiens
cagatcctaatccca

SEQ ID NO: 1588304 - DNA, 15 bp, Homo sapiens
agatcctaatcccaa

SEQ ID NO: 1588305 - DNA, 15 bp, Homo sapiens
gatcctaatcccaaa

SEQ ID NO: 1588306 - DNA, 15 bp, Homo sapiens
atcctaatcccaaac

SEQ ID NO: 1588307 - DNA, 15 bp, Homo sapiens
tcctaatcccaaacc

SEQ ID NO: 1588308 - DNA, 15 bp, Homo sapiens
cctaatcccaaacca

SEQ ID NO: 1588309 - DNA, 15 bp, Homo sapiens
ctaatcccaaaccag

SEQ ID NO: 1588310 - DNA, 15 bp, Homo sapiens
taatcccaaaccagg

SEQ ID NO: 1588311 - DNA, 15 bp, Homo sapiens
aatcccaaaccaggc

SEQ ID NO: 1588312 - DNA, 15 bp, Homo sapiens
atcccaaaccaggca

SEQ ID NO: 1588313 - DNA, 15 bp, Homo sapiens
tcccaaaccaggcat

SEQ ID NO: 1588314 - DNA, 15 bp, Homo sapiens
cccaaaccaggcata

SEQ ID NO: 1588315 - DNA, 15 bp, Homo sapiens
ccaaaccaggcataa

SEQ ID NO: 1588316 - DNA, 15 bp, Homo sapiens
caaaccaggcataaa

SEQ ID NO: 1588317 - DNA, 15 bp, Homo sapiens
aaaccaggcataaaa

SEQ ID NO: 1588318 - DNA, 15 bp, Homo sapiens
aaccaggcataaaat

SEQ ID NO: 1588319 - DNA, 15 bp, Homo sapiens
accaggcataaaatg

SEQ ID NO: 1588320 - DNA, 15 bp, Homo sapiens
ccaggcataaaatgg

SEQ ID NO: 1588321 - DNA, 15 bp, Homo sapiens
caggcataaaatgga

SEQ ID NO: 1588322 - DNA, 15 bp, Homo sapiens
aggcataaaatggaa

SEQ ID NO: 1588323 - DNA, 15 bp, Homo sapiens
ggcataaaatggaaa

SEQ ID NO: 1588324 - DNA, 15 bp, Homo sapiens
gcataaaatggaaac

SEQ ID NO: 1588325 - DNA, 15 bp, Homo sapiens
cataaaatggaaacc

SEQ ID NO: 1588326 - DNA, 15 bp, Homo sapiens
ataaaatggaaacca

SEQ ID NO: 1588327 - DNA, 15 bp, Homo sapiens
taaaatggaaaccat

SEQ ID NO: 1588328 - DNA, 15 bp, Homo sapiens
aaaatggaaaccatg

SEQ ID NO: 1588329 - DNA, 15 bp, Homo sapiens
aaatggaaaccatga

SEQ ID NO: 1588330 - DNA, 15 bp, Homo sapiens
aatggaaaccatgaa

SEQ ID NO: 1588331 - DNA, 15 bp, Homo sapiens
atggaaaccatgaag

SEQ ID NO: 1588332 - DNA, 15 bp, Homo sapiens
tggaaaccatgaaga

SEQ ID NO: 1588333 - DNA, 15 bp, Homo sapiens
ggaaaccatgaagat

SEQ ID NO: 1588334 - DNA, 15 bp, Homo sapiens
gaaaccatgaagata

SEQ ID NO: 1588335 - DNA, 15 bp, Homo sapiens
aaaccatgaagatag

SEQ ID NO: 1588336 - DNA, 15 bp, Homo sapiens
aaccatgaagatagg

SEQ ID NO: 1588337 - DNA, 15 bp, Homo sapiens
accatgaagatagga

SEQ ID NO: 1588338 - DNA, 15 bp, Homo sapiens
ccatgaagataggat

SEQ ID NO: 1588339 - DNA, 15 bp, Homo sapiens
catgaagataggatg

SEQ ID NO: 1588340 - DNA, 15 bp, Homo sapiens
atgaagataggatga

SEQ ID NO: 1588341 - DNA, 15 bp, Homo sapiens
tgaagataggatgaa

SEQ ID NO: 1588342 - DNA, 15 bp, Homo sapiens
gaagataggatgaaa

SEQ ID NO: 1588343 - DNA, 15 bp, Homo sapiens
aagataggatgaaat

SEQ ID NO: 1588344 - DNA, 15 bp, Homo sapiens
agataggatgaaata

SEQ ID NO: 1588345 - DNA, 15 bp, Homo sapiens
gataggatgaaataa

SEQ ID NO: 1588346 - DNA, 15 bp, Homo sapiens
ataggatgaaataac

SEQ ID NO: 1588347 - DNA, 15 bp, Homo sapiens
taggatgaaataact

SEQ ID NO: 1588348 - DNA, 15 bp, Homo sapiens
aggatgaaataactt

SEQ ID NO: 1588349 - DNA, 15 bp, Homo sapiens
ggatgaaataacttc

SEQ ID NO: 1588350 - DNA, 15 bp, Homo sapiens
gatgaaataacttct

SEQ ID NO: 1588351 - DNA, 15 bp, Homo sapiens
atgaaataacttctg

SEQ ID NO: 1588352 - DNA, 15 bp, Homo sapiens
tgaaataacttctga

SEQ ID NO: 1588353 - DNA, 15 bp, Homo sapiens
gaaataacttctgaa

SEQ ID NO: 1588354 - DNA, 15 bp, Homo sapiens
aaataacttctgaat

SEQ ID NO: 1588355 - DNA, 15 bp, Homo sapiens
aataacttctgaatg

SEQ ID NO: 1588356 - DNA, 15 bp, Homo sapiens
ataacttctgaatgt

SEQ ID NO: 1588357 - DNA, 15 bp, Homo sapiens
taacttctgaatgtt

SEQ ID NO: 1588358 - DNA, 15 bp, Homo sapiens
aacttctgaatgttt

SEQ ID NO: 1588359 - DNA, 15 bp, Homo sapiens
acttctgaatgtttg

SEQ ID NO: 1588360 - DNA, 15 bp, Homo sapiens
cttctgaatgtttga

SEQ ID NO: 1588361 - DNA, 15 bp, Homo sapiens
ttctgaatgtttgaa

SEQ ID NO: 1588362 - DNA, 15 bp, Homo sapiens
tctgaatgtttgaat

SEQ ID NO: 1588363 - DNA, 15 bp, Homo sapiens
ctgaatgtttgaatg

SEQ ID NO: 1588364 - DNA, 15 bp, Homo sapiens
tgaatgtttgaatgt

SEQ ID NO: 1588365 - DNA, 15 bp, Homo sapiens
gaatgtttgaatgtt

SEQ ID NO: 1588366 - DNA, 15 bp, Homo sapiens
aatgtttgaatgttt

SEQ ID NO: 1588367 - DNA, 15 bp, Homo sapiens
atgtttgaatgtttg

SEQ ID NO: 1588368 - DNA, 15 bp, Homo sapiens
tgtttgaatgtttga

SEQ ID NO: 1588369 - DNA, 15 bp, Homo sapiens
gtttgaatgtttgaa

SEQ ID NO: 1588370 - DNA, 15 bp, Homo sapiens
tttgaatgtttgaaa

SEQ ID NO: 1588371 - DNA, 15 bp, Homo sapiens
ttgaatgtttgaaaa

SEQ ID NO: 1588372 - DNA, 15 bp, Homo sapiens
tgaatgtttgaaaat

SEQ ID NO: 1588373 - DNA, 15 bp, Homo sapiens
gaatgtttgaaaata

SEQ ID NO: 1588374 - DNA, 15 bp, Homo sapiens
aatgtttgaaaatag

SEQ ID NO: 1588375 - DNA, 15 bp, Homo sapiens
atgtttgaaaatagt

SEQ ID NO: 1588376 - DNA, 15 bp, Homo sapiens
tgtttgaaaatagtg

SEQ ID NO: 1588377 - DNA, 15 bp, Homo sapiens
gtttgaaaatagtgt

SEQ ID NO: 1588378 - DNA, 15 bp, Homo sapiens
tttgaaaatagtgta

SEQ ID NO: 1588379 - DNA, 15 bp, Homo sapiens
ttgaaaatagtgtac

SEQ ID NO: 1588380 - DNA, 15 bp, Homo sapiens
tgaaaatagtgtact

SEQ ID NO: 1588381 - DNA, 15 bp, Homo sapiens
gaaaatagtgtactt

SEQ ID NO: 1588382 - DNA, 15 bp, Homo sapiens
aaaatagtgtactta

SEQ ID NO: 1588383 - DNA, 15 bp, Homo sapiens
aaatagtgtacttaa

SEQ ID NO: 1588384 - DNA, 15 bp, Homo sapiens
aatagtgtacttaaa

SEQ ID NO: 1588385 - DNA, 15 bp, Homo sapiens
atagtgtacttaaaa

SEQ ID NO: 1588386 - DNA, 15 bp, Homo sapiens
tagtgtacttaaaaa

SEQ ID NO: 1588387 - DNA, 15 bp, Homo sapiens
agtgtacttaaaaat

SEQ ID NO: 1588388 - DNA, 15 bp, Homo sapiens
gtgtacttaaaaata

SEQ ID NO: 1588389 - DNA, 15 bp, Homo sapiens
tgtacttaaaaatac

SEQ ID NO: 1588390 - DNA, 15 bp, Homo sapiens
gtacttaaaaatacc

SEQ ID NO: 1588391 - DNA, 15 bp, Homo sapiens
tacttaaaaatacca

SEQ ID NO: 1588392 - DNA, 15 bp, Homo sapiens
acttaaaaataccag

SEQ ID NO: 1588393 - DNA, 15 bp, Homo sapiens
cttaaaaataccagg

SEQ ID NO: 1588394 - DNA, 15 bp, Homo sapiens
ttaaaaataccaggt

SEQ ID NO: 1588395 - DNA, 15 bp, Homo sapiens
taaaaataccaggtg

SEQ ID NO: 1588396 - DNA, 15 bp, Homo sapiens
aaaaataccaggtgg

SEQ ID NO: 1588397 - DNA, 15 bp, Homo sapiens
aaaataccaggtggt

SEQ ID NO: 1588398 - DNA, 15 bp, Homo sapiens
aaataccaggtggtt

SEQ ID NO: 1588399 - DNA, 15 bp, Homo sapiens
aataccaggtggttt

SEQ ID NO: 1588400 - DNA, 15 bp, Homo sapiens
ataccaggtggtttt

SEQ ID NO: 1588401 - DNA, 15 bp, Homo sapiens
taccaggtggttttt

SEQ ID NO: 1588402 - DNA, 15 bp, Homo sapiens
accaggtggtttttg

SEQ ID NO: 1588403 - DNA, 15 bp, Homo sapiens
ccaggtggtttttgt

SEQ ID NO: 1588404 - DNA, 15 bp, Homo sapiens
caggtggtttttgtt

SEQ ID NO: 1588405 - DNA, 15 bp, Homo sapiens
aggtggtttttgttt

SEQ ID NO: 1588406 - DNA, 15 bp, Homo sapiens
ggtggtttttgtttg

SEQ ID NO: 1588407 - DNA, 15 bp, Homo sapiens
gtggtttttgtttgt

SEQ ID NO: 1588408 - DNA, 15 bp, Homo sapiens
tggtttttgtttgtt

SEQ ID NO: 1588409 - DNA, 15 bp, Homo sapiens
gtttttgtttgtttt

SEQ ID NO: 1588410 - DNA, 15 bp, Homo sapiens
ttgtttgttttttgt

SEQ ID NO: 1588411 - DNA, 15 bp, Homo sapiens
tgtttgttttttgtt

SEQ ID NO: 1588412 - DNA, 15 bp, Homo sapiens
tttttgtttttttct

SEQ ID NO: 1588413 - DNA, 15 bp, Homo sapiens
ttttgtttttttctt

SEQ ID NO: 1588414 - DNA, 15 bp, Homo sapiens
tttgtttttttcttt

SEQ ID NO: 1588415 - DNA, 15 bp, Homo sapiens
ttgtttttttctttt

SEQ ID NO: 1588416 - DNA, 15 bp, Homo sapiens
tgtttttttcttttt

SEQ ID NO: 1588417 - DNA, 15 bp, Homo sapiens
ggagtgtagtggtgc

SEQ ID NO: 1588418 - DNA, 15 bp, Homo sapiens
gagtgtagtggtgca

SEQ ID NO: 1588419 - DNA, 15 bp, Homo sapiens
agtgtagtggtgcaa

SEQ ID NO: 1588420 - DNA, 15 bp, Homo sapiens
gtgtagtggtgcaat

SEQ ID NO: 1588421 - DNA, 15 bp, Homo sapiens
tgtagtggtgcaatc

SEQ ID NO: 1588422 - DNA, 15 bp, Homo sapiens
gtagtggtgcaatct

SEQ ID NO: 1588423 - DNA, 15 bp, Homo sapiens
tagtggtgcaatctc

SEQ ID NO: 1588424 - DNA, 15 bp, Homo sapiens
gtggtgcaatctcat

SEQ ID NO: 1588425 - DNA, 15 bp, Homo sapiens
tggtgcaatctcatc

SEQ ID NO: 1588426 - DNA, 15 bp, Homo sapiens
ggtgcaatctcatct

SEQ ID NO: 1588427 - DNA, 15 bp, Homo sapiens
gtgcaatctcatctc

SEQ ID NO: 1588428 - DNA, 15 bp, Homo sapiens
tgcaatctcatctca

SEQ ID NO: 1588429 - DNA, 15 bp, Homo sapiens
gcaatctcatctcat

SEQ ID NO: 1588430 - DNA, 15 bp, Homo sapiens
caatctcatctcatt

SEQ ID NO: 1588431 - DNA, 15 bp, Homo sapiens
aatctcatctcattg

SEQ ID NO: 1588432 - DNA, 15 bp, Homo sapiens
atctcatctcattgc

SEQ ID NO: 1588433 - DNA, 15 bp, Homo sapiens
tctcatctcattgca

SEQ ID NO: 1588434 - DNA, 15 bp, Homo sapiens
ctcatctcattgcag

SEQ ID NO: 1588435 - DNA, 15 bp, Homo sapiens
tcatctcattgcagt

SEQ ID NO: 1588436 - DNA, 15 bp, Homo sapiens
catctcattgcagtc

SEQ ID NO: 1588437 - DNA, 15 bp, Homo sapiens
atctcattgcagtct

SEQ ID NO: 1588438 - DNA, 15 bp, Homo sapiens
tctcattgcagtctt

SEQ ID NO: 1588439 - DNA, 15 bp, Homo sapiens
ctcattgcagtcttg

SEQ ID NO: 1588440 - DNA, 15 bp, Homo sapiens
tcattgcagtcttga

SEQ ID NO: 1588441 - DNA, 15 bp, Homo sapiens
cattgcagtcttgac

SEQ ID NO: 1588442 - DNA, 15 bp, Homo sapiens
attgcagtcttgacc

SEQ ID NO: 1588443 - DNA, 15 bp, Homo sapiens
ttgcagtcttgacct

SEQ ID NO: 1588444 - DNA, 15 bp, Homo sapiens
tgcagtcttgacctc

SEQ ID NO: 1588445 - DNA, 15 bp, Homo sapiens
gcagtcttgacctcc

SEQ ID NO: 1588446 - DNA, 15 bp, Homo sapiens
cagtcttgacctccc

SEQ ID NO: 1588447 - DNA, 15 bp, Homo sapiens
agtcttgacctccca

SEQ ID NO: 1588448 - DNA, 15 bp, Homo sapiens
gtcttgacctcccag

SEQ ID NO: 1588449 - DNA, 15 bp, Homo sapiens
tcttgacctcccagg

SEQ ID NO: 1588450 - DNA, 15 bp, Homo sapiens
cttgacctcccaggc

SEQ ID NO: 1588451 - DNA, 15 bp, Homo sapiens
ttgacctcccaggct

SEQ ID NO: 1588452 - DNA, 15 bp, Homo sapiens
tgacctcccaggctc

SEQ ID NO: 1588453 - DNA, 15 bp, Homo sapiens
gacctcccaggctca

SEQ ID NO: 1588454 - DNA, 15 bp, Homo sapiens
acctcccaggctcag

SEQ ID NO: 1588455 - DNA, 15 bp, Homo sapiens
cctcccaggctcagg

SEQ ID NO: 1588456 - DNA, 15 bp, Homo sapiens
ctcccaggctcaggt

SEQ ID NO: 1588457 - DNA, 15 bp, Homo sapiens
tcccaggctcaggtt

SEQ ID NO: 1588458 - DNA, 15 bp, Homo sapiens
cccaggctcaggtta

SEQ ID NO: 1588459 - DNA, 15 bp, Homo sapiens
ccaggctcaggttat

SEQ ID NO: 1588460 - DNA, 15 bp, Homo sapiens
caggctcaggttatc

SEQ ID NO: 1588461 - DNA, 15 bp, Homo sapiens
aggctcaggttatct

SEQ ID NO: 1588462 - DNA, 15 bp, Homo sapiens
ggctcaggttatctc

SEQ ID NO: 1588463 - DNA, 15 bp, Homo sapiens
gctcaggttatctcc

SEQ ID NO: 1588464 - DNA, 15 bp, Homo sapiens
ctcaggttatctccc

SEQ ID NO: 1588465 - DNA, 15 bp, Homo sapiens
tcaggttatctccca

SEQ ID NO: 1588466 - DNA, 15 bp, Homo sapiens
caggttatctcccac

SEQ ID NO: 1588467 - DNA, 15 bp, Homo sapiens
aggttatctcccacc

SEQ ID NO: 1588468 - DNA, 15 bp, Homo sapiens
ggttatctcccacct

SEQ ID NO: 1588469 - DNA, 15 bp, Homo sapiens
gttatctcccacctc

SEQ ID NO: 1588470 - DNA, 15 bp, Homo sapiens
ttatctcccacctca

SEQ ID NO: 1588471 - DNA, 15 bp, Homo sapiens
tatctcccacctcag

SEQ ID NO: 1588472 - DNA, 15 bp, Homo sapiens
atctcccacctcagc

SEQ ID NO: 1588473 - DNA, 15 bp, Homo sapiens
ggactacaggcacat

SEQ ID NO: 1588474 - DNA, 15 bp, Homo sapiens
gactacaggcacatg

SEQ ID NO: 1588475 - DNA, 15 bp, Homo sapiens
actacaggcacatgc

SEQ ID NO: 1588476 - DNA, 15 bp, Homo sapiens
ctacaggcacatgcc

SEQ ID NO: 1588477 - DNA, 15 bp, Homo sapiens
acatgccaccacgcc

SEQ ID NO: 1588478 - DNA, 15 bp, Homo sapiens
catgccaccacgccc

SEQ ID NO: 1588479 - DNA, 15 bp, Homo sapiens
atgccaccacgccca

SEQ ID NO: 1588480 - DNA, 15 bp, Homo sapiens
gacggggtttcaccc

SEQ ID NO: 1588481 - DNA, 15 bp, Homo sapiens
acggggtttcaccct

SEQ ID NO: 1588482 - DNA, 15 bp, Homo sapiens
cggggtttcaccctg

SEQ ID NO: 1588483 - DNA, 15 bp, Homo sapiens
ggggtttcaccctgt

SEQ ID NO: 1588484 - DNA, 15 bp, Homo sapiens
gggtttcaccctgtt

SEQ ID NO: 1588485 - DNA, 15 bp, Homo sapiens
ggtttcaccctgttg

SEQ ID NO: 1588486 - DNA, 15 bp, Homo sapiens
gtttcaccctgttgc

SEQ ID NO: 1588487 - DNA, 15 bp, Homo sapiens
tttcaccctgttgcc

SEQ ID NO: 1588488 - DNA, 15 bp, Homo sapiens
ttcaccctgttgccc

SEQ ID NO: 1588489 - DNA, 15 bp, Homo sapiens
tcaccctgttgccca

SEQ ID NO: 1588490 - DNA, 15 bp, Homo sapiens
caccctgttgcccag

SEQ ID NO: 1588491 - DNA, 15 bp, Homo sapiens
accctgttgcccagg

SEQ ID NO: 1588492 - DNA, 15 bp, Homo sapiens
gcccaggctggtcta

SEQ ID NO: 1588493 - DNA, 15 bp, Homo sapiens
cccaggctggtctag

SEQ ID NO: 1588494 - DNA, 15 bp, Homo sapiens
gtctagaactcctgg

SEQ ID NO: 1588495 - DNA, 15 bp, Homo sapiens
tctagaactcctggg

SEQ ID NO: 1588496 - DNA, 15 bp, Homo sapiens
ctagaactcctgggc

SEQ ID NO: 1588497 - DNA, 15 bp, Homo sapiens
tagaactcctgggct

SEQ ID NO: 1588498 - DNA, 15 bp, Homo sapiens
agaactcctgggctt

SEQ ID NO: 1588499 - DNA, 15 bp, Homo sapiens
gggcttaagcgatcc

SEQ ID NO: 1588500 - DNA, 15 bp, Homo sapiens
ggcttaagcgatcct

SEQ ID NO: 1588501 - DNA, 15 bp, Homo sapiens
gcttaagcgatcctc

SEQ ID NO: 1588502 - DNA, 15 bp, Homo sapiens
cttaagcgatcctcc

SEQ ID NO: 1588503 - DNA, 15 bp, Homo sapiens
ttaagcgatcctccc

SEQ ID NO: 1588504 - DNA, 15 bp, Homo sapiens
taagcgatcctccca

SEQ ID NO: 1588505 - DNA, 15 bp, Homo sapiens
caccatgcctggcag

SEQ ID NO: 1588506 - DNA, 15 bp, Homo sapiens
accatgcctggcaga

SEQ ID NO: 1588507 - DNA, 15 bp, Homo sapiens
ccatgcctggcagaa

SEQ ID NO: 1588508 - DNA, 15 bp, Homo sapiens
catgcctggcagaaa

SEQ ID NO: 1588509 - DNA, 15 bp, Homo sapiens
atgcctggcagaaaa

SEQ ID NO: 1588510 - DNA, 15 bp, Homo sapiens
tgcctggcagaaaat

SEQ ID NO: 1588511 - DNA, 15 bp, Homo sapiens
gcctggcagaaaata

SEQ ID NO: 1588512 - DNA, 15 bp, Homo sapiens
cctggcagaaaatac

SEQ ID NO: 1588513 - DNA, 15 bp, Homo sapiens
ctggcagaaaatacc

SEQ ID NO: 1588514 - DNA, 15 bp, Homo sapiens
tggcagaaaatacca

SEQ ID NO: 1588515 - DNA, 15 bp, Homo sapiens
ggcagaaaataccag

SEQ ID NO: 1588516 - DNA, 15 bp, Homo sapiens
gcagaaaataccagg

SEQ ID NO: 1588517 - DNA, 15 bp, Homo sapiens
cagaaaataccaggt

SEQ ID NO: 1588518 - DNA, 15 bp, Homo sapiens
agaaaataccaggtt

SEQ ID NO: 1588519 - DNA, 15 bp, Homo sapiens
gaaaataccaggttt

SEQ ID NO: 1588520 - DNA, 15 bp, Homo sapiens
aaaataccaggtttt

SEQ ID NO: 1588521 - DNA, 15 bp, Homo sapiens
aaataccaggttttt

SEQ ID NO: 1588522 - DNA, 15 bp, Homo sapiens
aataccaggttttta

SEQ ID NO: 1588523 - DNA, 15 bp, Homo sapiens
ataccaggtttttaa

SEQ ID NO: 1588524 - DNA, 15 bp, Homo sapiens
taccaggtttttaag

SEQ ID NO: 1588525 - DNA, 15 bp, Homo sapiens
accaggtttttaagt

SEQ ID NO: 1588526 - DNA, 15 bp, Homo sapiens
ccaggtttttaagta

SEQ ID NO: 1588527 - DNA, 15 bp, Homo sapiens
caggtttttaagtat

SEQ ID NO: 1588528 - DNA, 15 bp, Homo sapiens
aggtttttaagtatc

SEQ ID NO: 1588529 - DNA, 15 bp, Homo sapiens
ggtttttaagtatca

SEQ ID NO: 1588530 - DNA, 15 bp, Homo sapiens
gtttttaagtatcag

SEQ ID NO: 1588531 - DNA, 15 bp, Homo sapiens
tttttaagtatcagc

SEQ ID NO: 1588532 - DNA, 15 bp, Homo sapiens
ttttaagtatcagca

SEQ ID NO: 1588533 - DNA, 15 bp, Homo sapiens
tttaagtatcagcac

SEQ ID NO: 1588534 - DNA, 15 bp, Homo sapiens
ttaagtatcagcact

SEQ ID NO: 1588535 - DNA, 15 bp, Homo sapiens
taagtatcagcactt

SEQ ID NO: 1588536 - DNA, 15 bp, Homo sapiens
aagtatcagcactta

SEQ ID NO: 1588537 - DNA, 15 bp, Homo sapiens
agtatcagcacttac

SEQ ID NO: 1588538 - DNA, 15 bp, Homo sapiens
gtatcagcacttact

SEQ ID NO: 1588539 - DNA, 15 bp, Homo sapiens
tatcagcacttactc

SEQ ID NO: 1588540 - DNA, 15 bp, Homo sapiens
atcagcacttactct

SEQ ID NO: 1588541 - DNA, 15 bp, Homo sapiens
tcagcacttactctt

SEQ ID NO: 1588542 - DNA, 15 bp, Homo sapiens
cagcacttactcttc

SEQ ID NO: 1588543 - DNA, 15 bp, Homo sapiens
agcacttactcttca

SEQ ID NO: 1588544 - DNA, 15 bp, Homo sapiens
gcacttactcttcaa

SEQ ID NO: 1588545 - DNA, 15 bp, Homo sapiens
cacttactcttcaat

SEQ ID NO: 1588546 - DNA, 15 bp, Homo sapiens
acttactcttcaatc

SEQ ID NO: 1588547 - DNA, 15 bp, Homo sapiens
cttactcttcaatct

SEQ ID NO: 1588548 - DNA, 15 bp, Homo sapiens
ttactcttcaatctt

SEQ ID NO: 1588549 - DNA, 15 bp, Homo sapiens
tactcttcaatcttt

SEQ ID NO: 1588550 - DNA, 15 bp, Homo sapiens
actcttcaatctttt

SEQ ID NO: 1588551 - DNA, 15 bp, Homo sapiens
ctcttcaatcttttc

SEQ ID NO: 1588552 - DNA, 15 bp, Homo sapiens
tcttcaatcttttct

SEQ ID NO: 1588553 - DNA, 15 bp, Homo sapiens
cttcaatcttttcta

SEQ ID NO: 1588554 - DNA, 15 bp, Homo sapiens
ttcaatcttttctat

SEQ ID NO: 1588555 - DNA, 15 bp, Homo sapiens
tcaatcttttctatt

SEQ ID NO: 1588556 - DNA, 15 bp, Homo sapiens
caatcttttctatta

SEQ ID NO: 1588557 - DNA, 15 bp, Homo sapiens
aatcttttctattac

SEQ ID NO: 1588558 - DNA, 15 bp, Homo sapiens
atcttttctattact

SEQ ID NO: 1588559 - DNA, 15 bp, Homo sapiens
tcttttctattacta

SEQ ID NO: 1588560 - DNA, 15 bp, Homo sapiens
cttttctattactat

SEQ ID NO: 1588561 - DNA, 15 bp, Homo sapiens
ttttctattactatg

SEQ ID NO: 1588562 - DNA, 15 bp, Homo sapiens
tttctattactatgt

SEQ ID NO: 1588563 - DNA, 15 bp, Homo sapiens
ttctattactatgtt

SEQ ID NO: 1588564 - DNA, 15 bp, Homo sapiens
tctattactatgttg

SEQ ID NO: 1588565 - DNA, 15 bp, Homo sapiens
ctattactatgttgt

SEQ ID NO: 1588566 - DNA, 15 bp, Homo sapiens
tattactatgttgtg

SEQ ID NO: 1588567 - DNA, 15 bp, Homo sapiens
attactatgttgtgc

SEQ ID NO: 1588568 - DNA, 15 bp, Homo sapiens
ttactatgttgtgct

SEQ ID NO: 1588569 - DNA, 15 bp, Homo sapiens
tactatgttgtgcta

SEQ ID NO: 1588570 - DNA, 15 bp, Homo sapiens
actatgttgtgctaa

SEQ ID NO: 1588571 - DNA, 15 bp, Homo sapiens
ctatgttgtgctaaa

SEQ ID NO: 1588572 - DNA, 15 bp, Homo sapiens
tatgttgtgctaaat

SEQ ID NO: 1588573 - DNA, 15 bp, Homo sapiens
atgttgtgctaaatg

SEQ ID NO: 1588574 - DNA, 15 bp, Homo sapiens
tgttgtgctaaatgg

SEQ ID NO: 1588575 - DNA, 15 bp, Homo sapiens
gttgtgctaaatggt

SEQ ID NO: 1588576 - DNA, 15 bp, Homo sapiens
ttgtgctaaatggta

SEQ ID NO: 1588577 - DNA, 15 bp, Homo sapiens
tgtgctaaatggtat

SEQ ID NO: 1588578 - DNA, 15 bp, Homo sapiens
gtgctaaatggtatt

SEQ ID NO: 1588579 - DNA, 15 bp, Homo sapiens
tgctaaatggtattt

SEQ ID NO: 1588580 - DNA, 15 bp, Homo sapiens
gctaaatggtatttt

SEQ ID NO: 1588581 - DNA, 15 bp, Homo sapiens
ctaaatggtattttt

SEQ ID NO: 1588582 - DNA, 15 bp, Homo sapiens
taaatggtatttttt

SEQ ID NO: 1588583 - DNA, 15 bp, Homo sapiens
aaatggtatttttta

SEQ ID NO: 1588584 - DNA, 15 bp, Homo sapiens
aatggtattttttat

SEQ ID NO: 1588585 - DNA, 15 bp, Homo sapiens
atggtattttttatt

SEQ ID NO: 1588586 - DNA, 15 bp, Homo sapiens
tggtattttttattt

SEQ ID NO: 1588587 - DNA, 15 bp, Homo sapiens
ggtattttttattta

SEQ ID NO: 1588588 - DNA, 15 bp, Homo sapiens
gtattttttatttaa

SEQ ID NO: 1588589 - DNA, 15 bp, Homo sapiens
tattttttatttaat

SEQ ID NO: 1588590 - DNA, 15 bp, Homo sapiens
attttttatttaatt

SEQ ID NO: 1588591 - DNA, 15 bp, Homo sapiens
ttttttatttaatta

SEQ ID NO: 1588592 - DNA, 15 bp, Homo sapiens
tttttatttaattag

SEQ ID NO: 1588593 - DNA, 15 bp, Homo sapiens
ttttatttaattaga

SEQ ID NO: 1588594 - DNA, 15 bp, Homo sapiens
tttatttaattagag

SEQ ID NO: 1588595 - DNA, 15 bp, Homo sapiens
ttatttaattagagc

SEQ ID NO: 1588596 - DNA, 15 bp, Homo sapiens
tatttaattagagca

SEQ ID NO: 1588597 - DNA, 15 bp, Homo sapiens
atttaattagagcaa

SEQ ID NO: 1588598 - DNA, 15 bp, Homo sapiens
tttaattagagcaat

SEQ ID NO: 1588599 - DNA, 15 bp, Homo sapiens
ttaattagagcaatg

SEQ ID NO: 1588600 - DNA, 15 bp, Homo sapiens
taattagagcaatgc

SEQ ID NO: 1588601 - DNA, 15 bp, Homo sapiens
aattagagcaatgct

SEQ ID NO: 1588602 - DNA, 15 bp, Homo sapiens
attagagcaatgctg

SEQ ID NO: 1588603 - DNA, 15 bp, Homo sapiens
ttagagcaatgctgt

SEQ ID NO: 1588604 - DNA, 15 bp, Homo sapiens
tagagcaatgctgtt

SEQ ID NO: 1588605 - DNA, 15 bp, Homo sapiens
agagcaatgctgttc

SEQ ID NO: 1588606 - DNA, 15 bp, Homo sapiens
gagcaatgctgttca

SEQ ID NO: 1588607 - DNA, 15 bp, Homo sapiens
agcaatgctgttcaa

SEQ ID NO: 1588608 - DNA, 15 bp, Homo sapiens
gcaatgctgttcaat

SEQ ID NO: 1588609 - DNA, 15 bp, Homo sapiens
caatgctgttcaata

SEQ ID NO: 1588610 - DNA, 15 bp, Homo sapiens
aatgctgttcaatag

SEQ ID NO: 1588611 - DNA, 15 bp, Homo sapiens
atgctgttcaataga

SEQ ID NO: 1588612 - DNA, 15 bp, Homo sapiens
tgctgttcaatagaa

SEQ ID NO: 1588613 - DNA, 15 bp, Homo sapiens
gctgttcaatagaac

SEQ ID NO: 1588614 - DNA, 15 bp, Homo sapiens
ctgttcaatagaact

SEQ ID NO: 1588615 - DNA, 15 bp, Homo sapiens
tgttcaatagaactt

SEQ ID NO: 1588616 - DNA, 15 bp, Homo sapiens
gttcaatagaacttt

SEQ ID NO: 1588617 - DNA, 15 bp, Homo sapiens
ttcaatagaactttc

SEQ ID NO: 1588618 - DNA, 15 bp, Homo sapiens
tcaatagaactttct

SEQ ID NO: 1588619 - DNA, 15 bp, Homo sapiens
caatagaactttctt

SEQ ID NO: 1588620 - DNA, 15 bp, Homo sapiens
aatagaactttcttt

SEQ ID NO: 1588621 - DNA, 15 bp, Homo sapiens
atagaactttctttg

SEQ ID NO: 1588622 - DNA, 15 bp, Homo sapiens
tagaactttctttga

SEQ ID NO: 1588623 - DNA, 15 bp, Homo sapiens
agaactttctttgag

SEQ ID NO: 1588624 - DNA, 15 bp, Homo sapiens
gaactttctttgagg

SEQ ID NO: 1588625 - DNA, 15 bp, Homo sapiens
aactttctttgagga

SEQ ID NO: 1588626 - DNA, 15 bp, Homo sapiens
actttctttgaggat

SEQ ID NO: 1588627 - DNA, 15 bp, Homo sapiens
ctttctttgaggatg

SEQ ID NO: 1588628 - DNA, 15 bp, Homo sapiens
tttctttgaggatgg

SEQ ID NO: 1588629 - DNA, 15 bp, Homo sapiens
ttctttgaggatgga

SEQ ID NO: 1588630 - DNA, 15 bp, Homo sapiens
tctttgaggatggaa

SEQ ID NO: 1588631 - DNA, 15 bp, Homo sapiens
ctttgaggatggaaa

SEQ ID NO: 1588632 - DNA, 15 bp, Homo sapiens
tttgaggatggaaat

SEQ ID NO: 1588633 - DNA, 15 bp, Homo sapiens
ttgaggatggaaatc

SEQ ID NO: 1588634 - DNA, 15 bp, Homo sapiens
tgaggatggaaatct

SEQ ID NO: 1588635 - DNA, 15 bp, Homo sapiens
gaggatggaaatctt

SEQ ID NO: 1588636 - DNA, 15 bp, Homo sapiens
aggatggaaatcttt

SEQ ID NO: 1588637 - DNA, 15 bp, Homo sapiens
ggatggaaatctttt

SEQ ID NO: 1588638 - DNA, 15 bp, Homo sapiens
gatggaaatctttta

SEQ ID NO: 1588639 - DNA, 15 bp, Homo sapiens
atggaaatcttttat

SEQ ID NO: 1588640 - DNA, 15 bp, Homo sapiens
tggaaatcttttatg

SEQ ID NO: 1588641 - DNA, 15 bp, Homo sapiens
ggaaatcttttatgt

SEQ ID NO: 1588642 - DNA, 15 bp, Homo sapiens
gaaatcttttatgtt

SEQ ID NO: 1588643 - DNA, 15 bp, Homo sapiens
aaatcttttatgttt

SEQ ID NO: 1588644 - DNA, 15 bp, Homo sapiens
aatcttttatgtttc

SEQ ID NO: 1588645 - DNA, 15 bp, Homo sapiens
atcttttatgtttct

SEQ ID NO: 1588646 - DNA, 15 bp, Homo sapiens
tcttttatgtttctg

SEQ ID NO: 1588647 - DNA, 15 bp, Homo sapiens
cttttatgtttctgc

SEQ ID NO: 1588648 - DNA, 15 bp, Homo sapiens
ttttatgtttctgct

SEQ ID NO: 1588649 - DNA, 15 bp, Homo sapiens
tttatgtttctgcta

SEQ ID NO: 1588650 - DNA, 15 bp, Homo sapiens
ttatgtttctgctat

SEQ ID NO: 1588651 - DNA, 15 bp, Homo sapiens
tatgtttctgctatg

SEQ ID NO: 1588652 - DNA, 15 bp, Homo sapiens
atgtttctgctatgt

SEQ ID NO: 1588653 - DNA, 15 bp, Homo sapiens
tgtttctgctatgtg

SEQ ID NO: 1588654 - DNA, 15 bp, Homo sapiens
gtttctgctatgtgg

SEQ ID NO: 1588655 - DNA, 15 bp, Homo sapiens
tttctgctatgtggt

SEQ ID NO: 1588656 - DNA, 15 bp, Homo sapiens
ttctgctatgtggta

SEQ ID NO: 1588657 - DNA, 15 bp, Homo sapiens
tctgctatgtggtac

SEQ ID NO: 1588658 - DNA, 15 bp, Homo sapiens
ctgctatgtggtaca

SEQ ID NO: 1588659 - DNA, 15 bp, Homo sapiens
tgctatgtggtacag

SEQ ID NO: 1588660 - DNA, 15 bp, Homo sapiens
gctatgtggtacaga

SEQ ID NO: 1588661 - DNA, 15 bp, Homo sapiens
ctatgtggtacagag

SEQ ID NO: 1588662 - DNA, 15 bp, Homo sapiens
tatgtggtacagagc

SEQ ID NO: 1588663 - DNA, 15 bp, Homo sapiens
atgtggtacagagcc

SEQ ID NO: 1588664 - DNA, 15 bp, Homo sapiens
tgtggtacagagcca

SEQ ID NO: 1588665 - DNA, 15 bp, Homo sapiens
gtggtacagagccac

SEQ ID NO: 1588666 - DNA, 15 bp, Homo sapiens
tggtacagagccact

SEQ ID NO: 1588667 - DNA, 15 bp, Homo sapiens
ggtacagagccacta

SEQ ID NO: 1588668 - DNA, 15 bp, Homo sapiens
gtacagagccactag

SEQ ID NO: 1588669 - DNA, 15 bp, Homo sapiens
tacagagccactagt

SEQ ID NO: 1588670 - DNA, 15 bp, Homo sapiens
acagagccactagtg

SEQ ID NO: 1588671 - DNA, 15 bp, Homo sapiens
cagagccactagtga

SEQ ID NO: 1588672 - DNA, 15 bp, Homo sapiens
agagccactagtgac

SEQ ID NO: 1588673 - DNA, 15 bp, Homo sapiens
gagccactagtgaca

SEQ ID NO: 1588674 - DNA, 15 bp, Homo sapiens
agccactagtgacat

SEQ ID NO: 1588675 - DNA, 15 bp, Homo sapiens
gccactagtgacatg

SEQ ID NO: 1588676 - DNA, 15 bp, Homo sapiens
ccactagtgacatgt

SEQ ID NO: 1588677 - DNA, 15 bp, Homo sapiens
cactagtgacatgtg

SEQ ID NO: 1588678 - DNA, 15 bp, Homo sapiens
actagtgacatgtgg

SEQ ID NO: 1588679 - DNA, 15 bp, Homo sapiens
ctagtgacatgtggc

SEQ ID NO: 1588680 - DNA, 15 bp, Homo sapiens
tagtgacatgtggct

SEQ ID NO: 1588681 - DNA, 15 bp, Homo sapiens
agtgacatgtggctt

SEQ ID NO: 1588682 - DNA, 15 bp, Homo sapiens
gtgacatgtggcttt

SEQ ID NO: 1588683 - DNA, 15 bp, Homo sapiens
tgacatgtggctttt

SEQ ID NO: 1588684 - DNA, 15 bp, Homo sapiens
gacatgtggcttttg

SEQ ID NO: 1588685 - DNA, 15 bp, Homo sapiens
acatgtggcttttga

SEQ ID NO: 1588686 - DNA, 15 bp, Homo sapiens
catgtggcttttgag

SEQ ID NO: 1588687 - DNA, 15 bp, Homo sapiens
atgtggcttttgagc

SEQ ID NO: 1588688 - DNA, 15 bp, Homo sapiens
tgtggcttttgagcg

SEQ ID NO: 1588689 - DNA, 15 bp, Homo sapiens
gtggcttttgagcgc

SEQ ID NO: 1588690 - DNA, 15 bp, Homo sapiens
tggcttttgagcgct

SEQ ID NO: 1588691 - DNA, 15 bp, Homo sapiens
ggcttttgagcgctt

SEQ ID NO: 1588692 - DNA, 15 bp, Homo sapiens
gcttttgagcgcttg

SEQ ID NO: 1588693 - DNA, 15 bp, Homo sapiens
cttttgagcgcttga

SEQ ID NO: 1588694 - DNA, 15 bp, Homo sapiens
ttttgagcgcttgac

SEQ ID NO: 1588695 - DNA, 15 bp, Homo sapiens
tttgagcgcttgaca

SEQ ID NO: 1588696 - DNA, 15 bp, Homo sapiens
ttgagcgcttgacac

SEQ ID NO: 1588697 - DNA, 15 bp, Homo sapiens
tgagcgcttgacaca

SEQ ID NO: 1588698 - DNA, 15 bp, Homo sapiens
gagcgcttgacacat

SEQ ID NO: 1588699 - DNA, 15 bp, Homo sapiens
agcgcttgacacatc

SEQ ID NO: 1588700 - DNA, 15 bp, Homo sapiens
gcgcttgacacatct

SEQ ID NO: 1588701 - DNA, 15 bp, Homo sapiens
cgcttgacacatctt

SEQ ID NO: 1588702 - DNA, 15 bp, Homo sapiens
gcttgacacatcttg

SEQ ID NO: 1588703 - DNA, 15 bp, Homo sapiens
cttgacacatcttgt

SEQ ID NO: 1588704 - DNA, 15 bp, Homo sapiens
ttgacacatcttgtg

SEQ ID NO: 1588705 - DNA, 15 bp, Homo sapiens
tgacacatcttgtgc

SEQ ID NO: 1588706 - DNA, 15 bp, Homo sapiens
gacacatcttgtgca

SEQ ID NO: 1588707 - DNA, 15 bp, Homo sapiens
acacatcttgtgcaa

SEQ ID NO: 1588708 - DNA, 15 bp, Homo sapiens
cacatcttgtgcaac

SEQ ID NO: 1588709 - DNA, 15 bp, Homo sapiens
acatcttgtgcaaca

SEQ ID NO: 1588710 - DNA, 15 bp, Homo sapiens
catcttgtgcaacac

SEQ ID NO: 1588711 - DNA, 15 bp, Homo sapiens
atcttgtgcaacaca

SEQ ID NO: 1588712 - DNA, 15 bp, Homo sapiens
tcttgtgcaacacag

SEQ ID NO: 1588713 - DNA, 15 bp, Homo sapiens
cttgtgcaacacagg

SEQ ID NO: 1588714 - DNA, 15 bp, Homo sapiens
ttgtgcaacacagga

SEQ ID NO: 1588715 - DNA, 15 bp, Homo sapiens
tgtgcaacacaggaa

SEQ ID NO: 1588716 - DNA, 15 bp, Homo sapiens
gtgcaacacaggaac

SEQ ID NO: 1588717 - DNA, 15 bp, Homo sapiens
tgcaacacaggaact

SEQ ID NO: 1588718 - DNA, 15 bp, Homo sapiens
gcaacacaggaactg

SEQ ID NO: 1588719 - DNA, 15 bp, Homo sapiens
caacacaggaactga

SEQ ID NO: 1588720 - DNA, 15 bp, Homo sapiens
aacacaggaactgaa

SEQ ID NO: 1588721 - DNA, 15 bp, Homo sapiens
acacaggaactgaat

SEQ ID NO: 1588722 - DNA, 15 bp, Homo sapiens
cacaggaactgaatt

SEQ ID NO: 1588723 - DNA, 15 bp, Homo sapiens
acaggaactgaattt

SEQ ID NO: 1588724 - DNA, 15 bp, Homo sapiens
caggaactgaatttt

SEQ ID NO: 1588725 - DNA, 15 bp, Homo sapiens
aggaactgaattttt

SEQ ID NO: 1588726 - DNA, 15 bp, Homo sapiens
ggaactgaattttta

SEQ ID NO: 1588727 - DNA, 15 bp, Homo sapiens
gaactgaatttttaa

SEQ ID NO: 1588728 - DNA, 15 bp, Homo sapiens
aactgaatttttaag

SEQ ID NO: 1588729 - DNA, 15 bp, Homo sapiens
actgaatttttaagt

SEQ ID NO: 1588730 - DNA, 15 bp, Homo sapiens
ctgaatttttaagta

SEQ ID NO: 1588731 - DNA, 15 bp, Homo sapiens
tgaatttttaagtaa

SEQ ID NO: 1588732 - DNA, 15 bp, Homo sapiens
gaatttttaagtaat

SEQ ID NO: 1588733 - DNA, 15 bp, Homo sapiens
aatttttaagtaatt

SEQ ID NO: 1588734 - DNA, 15 bp, Homo sapiens
atttttaagtaattt

SEQ ID NO: 1588735 - DNA, 15 bp, Homo sapiens
tttttaagtaattta

SEQ ID NO: 1588736 - DNA, 15 bp, Homo sapiens
ttttaagtaatttat

SEQ ID NO: 1588737 - DNA, 15 bp, Homo sapiens
tttaagtaatttata

SEQ ID NO: 1588738 - DNA, 15 bp, Homo sapiens
ttaagtaatttatat

SEQ ID NO: 1588739 - DNA, 15 bp, Homo sapiens
taagtaatttatatt

SEQ ID NO: 1588740 - DNA, 15 bp, Homo sapiens
aagtaatttatattg

SEQ ID NO: 1588741 - DNA, 15 bp, Homo sapiens
agtaatttatattgc

SEQ ID NO: 1588742 - DNA, 15 bp, Homo sapiens
gtaatttatattgcc

SEQ ID NO: 1588743 - DNA, 15 bp, Homo sapiens
taatttatattgcca

SEQ ID NO: 1588744 - DNA, 15 bp, Homo sapiens
aatttatattgccac

SEQ ID NO: 1588745 - DNA, 15 bp, Homo sapiens
atttatattgccaca

SEQ ID NO: 1588746 - DNA, 15 bp, Homo sapiens
tttatattgccacat

SEQ ID NO: 1588747 - DNA, 15 bp, Homo sapiens
ttatattgccacatg

SEQ ID NO: 1588748 - DNA, 15 bp, Homo sapiens
tatattgccacatgt

SEQ ID NO: 1588749 - DNA, 15 bp, Homo sapiens
atattgccacatgtg

SEQ ID NO: 1588750 - DNA, 15 bp, Homo sapiens
tattgccacatgtgg

SEQ ID NO: 1588751 - DNA, 15 bp, Homo sapiens
attgccacatgtggc

SEQ ID NO: 1588752 - DNA, 15 bp, Homo sapiens
ttgccacatgtggct

SEQ ID NO: 1588753 - DNA, 15 bp, Homo sapiens
tgccacatgtggcta

SEQ ID NO: 1588754 - DNA, 15 bp, Homo sapiens
gccacatgtggctac

SEQ ID NO: 1588755 - DNA, 15 bp, Homo sapiens
ccacatgtggctacc

SEQ ID NO: 1588756 - DNA, 15 bp, Homo sapiens
cacatgtggctaccg

SEQ ID NO: 1588757 - DNA, 15 bp, Homo sapiens
acatgtggctaccgt

SEQ ID NO: 1588758 - DNA, 15 bp, Homo sapiens
catgtggctaccgta

SEQ ID NO: 1588759 - DNA, 15 bp, Homo sapiens
atgtggctaccgtat

SEQ ID NO: 1588760 - DNA, 15 bp, Homo sapiens
tgtggctaccgtatg

SEQ ID NO: 1588761 - DNA, 15 bp, Homo sapiens
gtggctaccgtatgg

SEQ ID NO: 1588762 - DNA, 15 bp, Homo sapiens
tggctaccgtatggg

SEQ ID NO: 1588763 - DNA, 15 bp, Homo sapiens
ggctaccgtatggga

SEQ ID NO: 1588764 - DNA, 15 bp, Homo sapiens
gctaccgtatgggac

SEQ ID NO: 1588765 - DNA, 15 bp, Homo sapiens
ctaccgtatgggaca

SEQ ID NO: 1588766 - DNA, 15 bp, Homo sapiens
taccgtatgggacag

SEQ ID NO: 1588767 - DNA, 15 bp, Homo sapiens
accgtatgggacagt

SEQ ID NO: 1588768 - DNA, 15 bp, Homo sapiens
ccgtatgggacagtg

SEQ ID NO: 1588769 - DNA, 15 bp, Homo sapiens
cgtatgggacagtgt

SEQ ID NO: 1588770 - DNA, 15 bp, Homo sapiens
gtatgggacagtgta

SEQ ID NO: 1588771 - DNA, 15 bp, Homo sapiens
tatgggacagtgtag

SEQ ID NO: 1588772 - DNA, 15 bp, Homo sapiens
atgggacagtgtagt

SEQ ID NO: 1588773 - DNA, 15 bp, Homo sapiens
tgggacagtgtagta

SEQ ID NO: 1588774 - DNA, 15 bp, Homo sapiens
gggacagtgtagtac

SEQ ID NO: 1588775 - DNA, 15 bp, Homo sapiens
ggacagtgtagtact

SEQ ID NO: 1588776 - DNA, 15 bp, Homo sapiens
gacagtgtagtacta

SEQ ID NO: 1588777 - DNA, 15 bp, Homo sapiens
acagtgtagtactag

SEQ ID NO: 1588778 - DNA, 15 bp, Homo sapiens
cagtgtagtactaga

SEQ ID NO: 1588779 - DNA, 15 bp, Homo sapiens
agtgtagtactagat

SEQ ID NO: 1588780 - DNA, 15 bp, Homo sapiens
gtgtagtactagatg

SEQ ID NO: 1588781 - DNA, 15 bp, Homo sapiens
tgtagtactagatga

SEQ ID NO: 1588782 - DNA, 15 bp, Homo sapiens
gtagtactagatgat

SEQ ID NO: 1588783 - DNA, 15 bp, Homo sapiens
tagtactagatgatc

SEQ ID NO: 1588784 - DNA, 15 bp, Homo sapiens
tttgaaatgctgggt

SEQ ID NO: 1588785 - DNA, 15 bp, Homo sapiens
ttgaaatgctgggtt

SEQ ID NO: 1588786 - DNA, 15 bp, Homo sapiens
tgaaatgctgggttt

SEQ ID NO: 1588787 - DNA, 15 bp, Homo sapiens
gaaatgctgggtttt

SEQ ID NO: 1588788 - DNA, 15 bp, Homo sapiens
aaatgctgggtttta

SEQ ID NO: 1588789 - DNA, 15 bp, Homo sapiens
aatgctgggttttaa

SEQ ID NO: 1588790 - DNA, 15 bp, Homo sapiens
atgctgggttttaag

SEQ ID NO: 1588791 - DNA, 15 bp, Homo sapiens
tgctgggttttaagt

SEQ ID NO: 1588792 - DNA, 15 bp, Homo sapiens
gctgggttttaagtt

SEQ ID NO: 1588793 - DNA, 15 bp, Homo sapiens
ctgggttttaagtta

SEQ ID NO: 1588794 - DNA, 15 bp, Homo sapiens
tgggttttaagttag

SEQ ID NO: 1588795 - DNA, 15 bp, Homo sapiens
gggttttaagttagt

SEQ ID NO: 1588796 - DNA, 15 bp, Homo sapiens
ggttttaagttagtt

SEQ ID NO: 1588797 - DNA, 15 bp, Homo sapiens
gttttaagttagtta

SEQ ID NO: 1588798 - DNA, 15 bp, Homo sapiens
ttttaagttagttag

SEQ ID NO: 1588799 - DNA, 15 bp, Homo sapiens
tttaagttagttaga

SEQ ID NO: 1588800 - DNA, 15 bp, Homo sapiens
ttaagttagttagaa

SEQ ID NO: 1588801 - DNA, 15 bp, Homo sapiens
taagttagttagaat

SEQ ID NO: 1588802 - DNA, 15 bp, Homo sapiens
aagttagttagaata

SEQ ID NO: 1588803 - DNA, 15 bp, Homo sapiens
agttagttagaataa

SEQ ID NO: 1588804 - DNA, 15 bp, Homo sapiens
gttagttagaataag

SEQ ID NO: 1588805 - DNA, 15 bp, Homo sapiens
ttagttagaataagg

SEQ ID NO: 1588806 - DNA, 15 bp, Homo sapiens
tagttagaataaggg

SEQ ID NO: 1588807 - DNA, 15 bp, Homo sapiens
agttagaataaggga

SEQ ID NO: 1588808 - DNA, 15 bp, Homo sapiens
gttagaataagggat

SEQ ID NO: 1588809 - DNA, 15 bp, Homo sapiens
ttagaataagggatg

SEQ ID NO: 1588810 - DNA, 15 bp, Homo sapiens
tagaataagggatgt

SEQ ID NO: 1588811 - DNA, 15 bp, Homo sapiens
agaataagggatgtc

SEQ ID NO: 1588812 - DNA, 15 bp, Homo sapiens
gaataagggatgtct

SEQ ID NO: 1588813 - DNA, 15 bp, Homo sapiens
aataagggatgtctg

SEQ ID NO: 1588814 - DNA, 15 bp, Homo sapiens
ataagggatgtctgt

SEQ ID NO: 1588815 - DNA, 15 bp, Homo sapiens
taagggatgtctgta

SEQ ID NO: 1588816 - DNA, 15 bp, Homo sapiens
aagggatgtctgtaa

SEQ ID NO: 1588817 - DNA, 15 bp, Homo sapiens
agggatgtctgtaat

SEQ ID NO: 1588818 - DNA, 15 bp, Homo sapiens
gggatgtctgtaatt

SEQ ID NO: 1588819 - DNA, 15 bp, Homo sapiens
ggatgtctgtaattt

SEQ ID NO: 1588820 - DNA, 15 bp, Homo sapiens
gatgtctgtaatttc

SEQ ID NO: 1588821 - DNA, 15 bp, Homo sapiens
atgtctgtaatttcc

SEQ ID NO: 1588822 - DNA, 15 bp, Homo sapiens
tgtctgtaatttccc

SEQ ID NO: 1588823 - DNA, 15 bp, Homo sapiens
gtctgtaatttccct

SEQ ID NO: 1588824 - DNA, 15 bp, Homo sapiens
tctgtaatttcccta

SEQ ID NO: 1588825 - DNA, 15 bp, Homo sapiens
ctgtaatttccctaa

SEQ ID NO: 1588826 - DNA, 15 bp, Homo sapiens
tgtaatttccctaaa

SEQ ID NO: 1588827 - DNA, 15 bp, Homo sapiens
gtaatttccctaaat

SEQ ID NO: 1588828 - DNA, 15 bp, Homo sapiens
taatttccctaaatt

SEQ ID NO: 1588829 - DNA, 15 bp, Homo sapiens
aatttccctaaattg

SEQ ID NO: 1588830 - DNA, 15 bp, Homo sapiens
atttccctaaattga

SEQ ID NO: 1588831 - DNA, 15 bp, Homo sapiens
tttccctaaattgag

SEQ ID NO: 1588832 - DNA, 15 bp, Homo sapiens
ttccctaaattgaga

SEQ ID NO: 1588833 - DNA, 15 bp, Homo sapiens
tccctaaattgagaa

SEQ ID NO: 1588834 - DNA, 15 bp, Homo sapiens
ccctaaattgagaag

SEQ ID NO: 1588835 - DNA, 15 bp, Homo sapiens
cctaaattgagaagt

SEQ ID NO: 1588836 - DNA, 15 bp, Homo sapiens
ctaaattgagaagta

SEQ ID NO: 1588837 - DNA, 15 bp, Homo sapiens
taaattgagaagtaa

SEQ ID NO: 1588838 - DNA, 15 bp, Homo sapiens
aaattgagaagtaat

SEQ ID NO: 1588839 - DNA, 15 bp, Homo sapiens
aattgagaagtaata

SEQ ID NO: 1588840 - DNA, 15 bp, Homo sapiens
attgagaagtaatat

SEQ ID NO: 1588841 - DNA, 15 bp, Homo sapiens
ttgagaagtaatatg

SEQ ID NO: 1588842 - DNA, 15 bp, Homo sapiens
tgagaagtaatatgc

SEQ ID NO: 1588843 - DNA, 15 bp, Homo sapiens
gagaagtaatatgca

SEQ ID NO: 1588844 - DNA, 15 bp, Homo sapiens
agaagtaatatgcaa

SEQ ID NO: 1588845 - DNA, 15 bp, Homo sapiens
gaagtaatatgcaaa

SEQ ID NO: 1588846 - DNA, 15 bp, Homo sapiens
aagtaatatgcaaag

SEQ ID NO: 1588847 - DNA, 15 bp, Homo sapiens
agtaatatgcaaagg

SEQ ID NO: 1588848 - DNA, 15 bp, Homo sapiens
gtaatatgcaaaggt

SEQ ID NO: 1588849 - DNA, 15 bp, Homo sapiens
taatatgcaaaggtt

SEQ ID NO: 1588850 - DNA, 15 bp, Homo sapiens
aatatgcaaaggttg

SEQ ID NO: 1588851 - DNA, 15 bp, Homo sapiens
atatgcaaaggttga

SEQ ID NO: 1588852 - DNA, 15 bp, Homo sapiens
tatgcaaaggttgat

SEQ ID NO: 1588853 - DNA, 15 bp, Homo sapiens
atgcaaaggttgata

SEQ ID NO: 1588854 - DNA, 15 bp, Homo sapiens
tgcaaaggttgatat

SEQ ID NO: 1588855 - DNA, 15 bp, Homo sapiens
gcaaaggttgatatc

SEQ ID NO: 1588856 - DNA, 15 bp, Homo sapiens
caaaggttgatatca

SEQ ID NO: 1588857 - DNA, 15 bp, Homo sapiens
aaaggttgatatcag

SEQ ID NO: 1588858 - DNA, 15 bp, Homo sapiens
aaggttgatatcaga

SEQ ID NO: 1588859 - DNA, 15 bp, Homo sapiens
aggttgatatcagaa

SEQ ID NO: 1588860 - DNA, 15 bp, Homo sapiens
ggttgatatcagaag

SEQ ID NO: 1588861 - DNA, 15 bp, Homo sapiens
gttgatatcagaagt

SEQ ID NO: 1588862 - DNA, 15 bp, Homo sapiens
ttgatatcagaagtc

SEQ ID NO: 1588863 - DNA, 15 bp, Homo sapiens
tgatatcagaagtca

SEQ ID NO: 1588864 - DNA, 15 bp, Homo sapiens
gatatcagaagtcat

SEQ ID NO: 1588865 - DNA, 15 bp, Homo sapiens
atatcagaagtcata

SEQ ID NO: 1588866 - DNA, 15 bp, Homo sapiens
tatcagaagtcatat

SEQ ID NO: 1588867 - DNA, 15 bp, Homo sapiens
atcagaagtcatatg

SEQ ID NO: 1588868 - DNA, 15 bp, Homo sapiens
tcagaagtcatatgc

SEQ ID NO: 1588869 - DNA, 15 bp, Homo sapiens
cagaagtcatatgct

SEQ ID NO: 1588870 - DNA, 15 bp, Homo sapiens
agaagtcatatgctc

SEQ ID NO: 1588871 - DNA, 15 bp, Homo sapiens
gaagtcatatgctca

SEQ ID NO: 1588872 - DNA, 15 bp, Homo sapiens
aagtcatatgctcac

SEQ ID NO: 1588873 - DNA, 15 bp, Homo sapiens
agtcatatgctcacc

SEQ ID NO: 1588874 - DNA, 15 bp, Homo sapiens
gtcatatgctcacct

SEQ ID NO: 1588875 - DNA, 15 bp, Homo sapiens
tcatatgctcacctt

SEQ ID NO: 1588876 - DNA, 15 bp, Homo sapiens
catatgctcaccttg

SEQ ID NO: 1588877 - DNA, 15 bp, Homo sapiens
atatgctcaccttgc

SEQ ID NO: 1588878 - DNA, 15 bp, Homo sapiens
tatgctcaccttgca

SEQ ID NO: 1588879 - DNA, 15 bp, Homo sapiens
atgctcaccttgcaa

SEQ ID NO: 1588880 - DNA, 15 bp, Homo sapiens
tgctcaccttgcaac

SEQ ID NO: 1588881 - DNA, 15 bp, Homo sapiens
gctcaccttgcaaca

SEQ ID NO: 1588882 - DNA, 15 bp, Homo sapiens
ctcaccttgcaacac

SEQ ID NO: 1588883 - DNA, 15 bp, Homo sapiens
tcaccttgcaacacc

SEQ ID NO: 1588884 - DNA, 15 bp, Homo sapiens
caccttgcaacacca

SEQ ID NO: 1588885 - DNA, 15 bp, Homo sapiens
accttgcaacaccaa

SEQ ID NO: 1588886 - DNA, 15 bp, Homo sapiens
ccttgcaacaccaaa

SEQ ID NO: 1588887 - DNA, 15 bp, Homo sapiens
cttgcaacaccaaat

SEQ ID NO: 1588888 - DNA, 15 bp, Homo sapiens
ttgcaacaccaaata

SEQ ID NO: 1588889 - DNA, 15 bp, Homo sapiens
tgcaacaccaaataa

SEQ ID NO: 1588890 - DNA, 15 bp, Homo sapiens
gcaacaccaaataat

SEQ ID NO: 1588891 - DNA, 15 bp, Homo sapiens
caacaccaaataata

SEQ ID NO: 1588892 - DNA, 15 bp, Homo sapiens
aacaccaaataatac

SEQ ID NO: 1588893 - DNA, 15 bp, Homo sapiens
acaccaaataatact

SEQ ID NO: 1588894 - DNA, 15 bp, Homo sapiens
caccaaataatactg

SEQ ID NO: 1588895 - DNA, 15 bp, Homo sapiens
accaaataatactgg

SEQ ID NO: 1588896 - DNA, 15 bp, Homo sapiens
ccaaataatactggc

SEQ ID NO: 1588897 - DNA, 15 bp, Homo sapiens
caaataatactggcc

SEQ ID NO: 1588898 - DNA, 15 bp, Homo sapiens
aaataatactggccc

SEQ ID NO: 1588899 - DNA, 15 bp, Homo sapiens
aataatactggccca

SEQ ID NO: 1588900 - DNA, 15 bp, Homo sapiens
ataatactggcccat

SEQ ID NO: 1588901 - DNA, 15 bp, Homo sapiens
taatactggcccatt

SEQ ID NO: 1588902 - DNA, 15 bp, Homo sapiens
aatactggcccattt

SEQ ID NO: 1588903 - DNA, 15 bp, Homo sapiens
atactggcccatttg

SEQ ID NO: 1588904 - DNA, 15 bp, Homo sapiens
tactggcccatttgt

SEQ ID NO: 1588905 - DNA, 15 bp, Homo sapiens
actggcccatttgtg

SEQ ID NO: 1588906 - DNA, 15 bp, Homo sapiens
ctggcccatttgtga

SEQ ID NO: 1588907 - DNA, 15 bp, Homo sapiens
tggcccatttgtgat

SEQ ID NO: 1588908 - DNA, 15 bp, Homo sapiens
ggcccatttgtgatt

SEQ ID NO: 1588909 - DNA, 15 bp, Homo sapiens
gcccatttgtgattt

SEQ ID NO: 1588910 - DNA, 15 bp, Homo sapiens
cccatttgtgatttt

SEQ ID NO: 1588911 - DNA, 15 bp, Homo sapiens
ccatttgtgattttt

SEQ ID NO: 1588912 - DNA, 15 bp, Homo sapiens
catttgtgatttttg

SEQ ID NO: 1588913 - DNA, 15 bp, Homo sapiens
atttgtgatttttga

SEQ ID NO: 1588914 - DNA, 15 bp, Homo sapiens
tttgtgatttttgaa

SEQ ID NO: 1588915 - DNA, 15 bp, Homo sapiens
ttgtgatttttgaaa

SEQ ID NO: 1588916 - DNA, 15 bp, Homo sapiens
tgtgatttttgaaag

SEQ ID NO: 1588917 - DNA, 15 bp, Homo sapiens
gtgatttttgaaagt

SEQ ID NO: 1588918 - DNA, 15 bp, Homo sapiens
tgatttttgaaagta

SEQ ID NO: 1588919 - DNA, 15 bp, Homo sapiens
gatttttgaaagtaa

SEQ ID NO: 1588920 - DNA, 15 bp, Homo sapiens
atttttgaaagtaac

SEQ ID NO: 1588921 - DNA, 15 bp, Homo sapiens
tttttgaaagtaaca

SEQ ID NO: 1588922 - DNA, 15 bp, Homo sapiens
ttttgaaagtaacac

SEQ ID NO: 1588923 - DNA, 15 bp, Homo sapiens
tttgaaagtaacact

SEQ ID NO: 1588924 - DNA, 15 bp, Homo sapiens
ttgaaagtaacactc

SEQ ID NO: 1588925 - DNA, 15 bp, Homo sapiens
tgaaagtaacactcc

SEQ ID NO: 1588926 - DNA, 15 bp, Homo sapiens
gaaagtaacactcca

SEQ ID NO: 1588927 - DNA, 15 bp, Homo sapiens
aaagtaacactccat

SEQ ID NO: 1588928 - DNA, 15 bp, Homo sapiens
aagtaacactccata

SEQ ID NO: 1588929 - DNA, 15 bp, Homo sapiens
agtaacactccataa

SEQ ID NO: 1588930 - DNA, 15 bp, Homo sapiens
gtaacactccataat

SEQ ID NO: 1588931 - DNA, 15 bp, Homo sapiens
taacactccataata

SEQ ID NO: 1588932 - DNA, 15 bp, Homo sapiens
aacactccataataa

SEQ ID NO: 1588933 - DNA, 15 bp, Homo sapiens
acactccataataaa

SEQ ID NO: 1588934 - DNA, 15 bp, Homo sapiens
cactccataataaat

SEQ ID NO: 1588935 - DNA, 15 bp, Homo sapiens
actccataataaatg

SEQ ID NO: 1588936 - DNA, 15 bp, Homo sapiens
ctccataataaatgg

SEQ ID NO: 1588937 - DNA, 15 bp, Homo sapiens
tccataataaatgga

SEQ ID NO: 1588938 - DNA, 15 bp, Homo sapiens
ccataataaatggat

SEQ ID NO: 1588939 - DNA, 15 bp, Homo sapiens
cataataaatggatg

SEQ ID NO: 1588940 - DNA, 15 bp, Homo sapiens
ataataaatggatgt

SEQ ID NO: 1588941 - DNA, 15 bp, Homo sapiens
taataaatggatgta

SEQ ID NO: 1588942 - DNA, 15 bp, Homo sapiens
aataaatggatgtat

SEQ ID NO: 1588943 - DNA, 15 bp, Homo sapiens
ataaatggatgtata

SEQ ID NO: 1588944 - DNA, 15 bp, Homo sapiens
taaatggatgtatat

SEQ ID NO: 1588945 - DNA, 15 bp, Homo sapiens
aaatggatgtatata

SEQ ID NO: 1588946 - DNA, 15 bp, Homo sapiens
aatggatgtatatat

SEQ ID NO: 1588947 - DNA, 15 bp, Homo sapiens
atggatgtatatata

SEQ ID NO: 1588948 - DNA, 15 bp, Homo sapiens
tggatgtatatatag

SEQ ID NO: 1588949 - DNA, 15 bp, Homo sapiens
ggatgtatatataga

SEQ ID NO: 1588950 - DNA, 15 bp, Homo sapiens
gatgtatatatagaa

SEQ ID NO: 1588951 - DNA, 15 bp, Homo sapiens
atgtatatatagaag

SEQ ID NO: 1588952 - DNA, 15 bp, Homo sapiens
tgtatatatagaagc

SEQ ID NO: 1588953 - DNA, 15 bp, Homo sapiens
gtatatatagaagca

SEQ ID NO: 1588954 - DNA, 15 bp, Homo sapiens
tatatatagaagcat

SEQ ID NO: 1588955 - DNA, 15 bp, Homo sapiens
atatatagaagcata

SEQ ID NO: 1588956 - DNA, 15 bp, Homo sapiens
tatatagaagcataa

SEQ ID NO: 1588957 - DNA, 15 bp, Homo sapiens
atatagaagcataac

SEQ ID NO: 1588958 - DNA, 15 bp, Homo sapiens
tatagaagcataaca

SEQ ID NO: 1588959 - DNA, 15 bp, Homo sapiens
atagaagcataacaa

SEQ ID NO: 1588960 - DNA, 15 bp, Homo sapiens
tagaagcataacaaa

SEQ ID NO: 1588961 - DNA, 15 bp, Homo sapiens
agaagcataacaaaa

SEQ ID NO: 1588962 - DNA, 15 bp, Homo sapiens
gaagcataacaaaaa

SEQ ID NO: 1588963 - DNA, 15 bp, Homo sapiens
aagcataacaaaaat

SEQ ID NO: 1588964 - DNA, 15 bp, Homo sapiens
agcataacaaaaata

SEQ ID NO: 1588965 - DNA, 15 bp, Homo sapiens
gcataacaaaaatag

SEQ ID NO: 1588966 - DNA, 15 bp, Homo sapiens
cataacaaaaataga

SEQ ID NO: 1588967 - DNA, 15 bp, Homo sapiens
ataacaaaaatagaa

SEQ ID NO: 1588968 - DNA, 15 bp, Homo sapiens
taacaaaaatagaag

SEQ ID NO: 1588969 - DNA, 15 bp, Homo sapiens
aacaaaaatagaagc

SEQ ID NO: 1588970 - DNA, 15 bp, Homo sapiens
acaaaaatagaagca

SEQ ID NO: 1588971 - DNA, 15 bp, Homo sapiens
caaaaatagaagcac

SEQ ID NO: 1588972 - DNA, 15 bp, Homo sapiens
aaaaatagaagcaca

SEQ ID NO: 1588973 - DNA, 15 bp, Homo sapiens
aaaatagaagcacat

SEQ ID NO: 1588974 - DNA, 15 bp, Homo sapiens
aaatagaagcacata

SEQ ID NO: 1588975 - DNA, 15 bp, Homo sapiens
aatagaagcacataa

SEQ ID NO: 1588976 - DNA, 15 bp, Homo sapiens
atagaagcacataaa

SEQ ID NO: 1588977 - DNA, 15 bp, Homo sapiens
tagaagcacataaaa

SEQ ID NO: 1588978 - DNA, 15 bp, Homo sapiens
agaagcacataaaag

SEQ ID NO: 1588979 - DNA, 15 bp, Homo sapiens
gaagcacataaaagt

SEQ ID NO: 1588980 - DNA, 15 bp, Homo sapiens
aagcacataaaagtg

SEQ ID NO: 1588981 - DNA, 15 bp, Homo sapiens
agcacataaaagtga

SEQ ID NO: 1588982 - DNA, 15 bp, Homo sapiens
gcacataaaagtgaa

SEQ ID NO: 1588983 - DNA, 15 bp, Homo sapiens
cacataaaagtgaaa

SEQ ID NO: 1588984 - DNA, 15 bp, Homo sapiens
acataaaagtgaaaa

SEQ ID NO: 1588985 - DNA, 15 bp, Homo sapiens
cataaaagtgaaaag

SEQ ID NO: 1588986 - DNA, 15 bp, Homo sapiens
ataaaagtgaaaagt

SEQ ID NO: 1588987 - DNA, 15 bp, Homo sapiens
taaaagtgaaaagtc

SEQ ID NO: 1588988 - DNA, 15 bp, Homo sapiens
aaaagtgaaaagtct

SEQ ID NO: 1588989 - DNA, 15 bp, Homo sapiens
aaagtgaaaagtctc

SEQ ID NO: 1588990 - DNA, 15 bp, Homo sapiens
aagtgaaaagtctca

SEQ ID NO: 1588991 - DNA, 15 bp, Homo sapiens
agtgaaaagtctcat

SEQ ID NO: 1588992 - DNA, 15 bp, Homo sapiens
gtgaaaagtctcata

SEQ ID NO: 1588993 - DNA, 15 bp, Homo sapiens
tgaaaagtctcataa

SEQ ID NO: 1588994 - DNA, 15 bp, Homo sapiens
gaaaagtctcataaa

SEQ ID NO: 1588995 - DNA, 15 bp, Homo sapiens
aaaagtctcataaac

SEQ ID NO: 1588996 - DNA, 15 bp, Homo sapiens
aaagtctcataaacg

SEQ ID NO: 1588997 - DNA, 15 bp, Homo sapiens
aagtctcataaacgc

SEQ ID NO: 1588998 - DNA, 15 bp, Homo sapiens
agtctcataaacgcc

SEQ ID NO: 1588999 - DNA, 15 bp, Homo sapiens
gtctcataaacgcca

SEQ ID NO: 1589000 - DNA, 15 bp, Homo sapiens
tctcataaacgccat

SEQ ID NO: 1589001 - DNA, 15 bp, Homo sapiens
ctcataaacgccatt

SEQ ID NO: 1589002 - DNA, 15 bp, Homo sapiens
tcataaacgccattg

SEQ ID NO: 1589003 - DNA, 15 bp, Homo sapiens
cataaacgccattgt

SEQ ID NO: 1589004 - DNA, 15 bp, Homo sapiens
ataaacgccattgtc

SEQ ID NO: 1589005 - DNA, 15 bp, Homo sapiens
taaacgccattgtca

SEQ ID NO: 1589006 - DNA, 15 bp, Homo sapiens
aaacgccattgtcac

SEQ ID NO: 1589007 - DNA, 15 bp, Homo sapiens
aacgccattgtcact

SEQ ID NO: 1589008 - DNA, 15 bp, Homo sapiens
acgccattgtcacta

SEQ ID NO: 1589009 - DNA, 15 bp, Homo sapiens
cgccattgtcactac

SEQ ID NO: 1589010 - DNA, 15 bp, Homo sapiens
gccattgtcactact

SEQ ID NO: 1589011 - DNA, 15 bp, Homo sapiens
ccattgtcactactc

SEQ ID NO: 1589012 - DNA, 15 bp, Homo sapiens
cattgtcactactca

SEQ ID NO: 1589013 - DNA, 15 bp, Homo sapiens
attgtcactactcat

SEQ ID NO: 1589014 - DNA, 15 bp, Homo sapiens
ttgtcactactcatg

SEQ ID NO: 1589015 - DNA, 15 bp, Homo sapiens
tgtcactactcatgt

SEQ ID NO: 1589016 - DNA, 15 bp, Homo sapiens
gtcactactcatgta

SEQ ID NO: 1589017 - DNA, 15 bp, Homo sapiens
tcactactcatgtaa

SEQ ID NO: 1589018 - DNA, 15 bp, Homo sapiens
cactactcatgtaat

SEQ ID NO: 1589019 - DNA, 15 bp, Homo sapiens
actactcatgtaatt

SEQ ID NO: 1589020 - DNA, 15 bp, Homo sapiens
ctactcatgtaattg

SEQ ID NO: 1589021 - DNA, 15 bp, Homo sapiens
tactcatgtaattgc

SEQ ID NO: 1589022 - DNA, 15 bp, Homo sapiens
actcatgtaattgct

SEQ ID NO: 1589023 - DNA, 15 bp, Homo sapiens
ctcatgtaattgctg

SEQ ID NO: 1589024 - DNA, 15 bp, Homo sapiens
tcatgtaattgctgt

SEQ ID NO: 1589025 - DNA, 15 bp, Homo sapiens
catgtaattgctgtt

SEQ ID NO: 1589026 - DNA, 15 bp, Homo sapiens
atgtaattgctgtta

SEQ ID NO: 1589027 - DNA, 15 bp, Homo sapiens
tgtaattgctgttac

SEQ ID NO: 1589028 - DNA, 15 bp, Homo sapiens
gtaattgctgttaca

SEQ ID NO: 1589029 - DNA, 15 bp, Homo sapiens
taattgctgttacaa

SEQ ID NO: 1589030 - DNA, 15 bp, Homo sapiens
aattgctgttacaaa

SEQ ID NO: 1589031 - DNA, 15 bp, Homo sapiens
attgctgttacaaat

SEQ ID NO: 1589032 - DNA, 15 bp, Homo sapiens
ttgctgttacaaatt

SEQ ID NO: 1589033 - DNA, 15 bp, Homo sapiens
tgctgttacaaattt

SEQ ID NO: 1589034 - DNA, 15 bp, Homo sapiens
gctgttacaaatttg

SEQ ID NO: 1589035 - DNA, 15 bp, Homo sapiens
ctgttacaaatttgt

SEQ ID NO: 1589036 - DNA, 15 bp, Homo sapiens
tgttacaaatttgtt

SEQ ID NO: 1589037 - DNA, 15 bp, Homo sapiens
gttacaaatttgttt

SEQ ID NO: 1589038 - DNA, 15 bp, Homo sapiens
ttacaaatttgttta

SEQ ID NO: 1589039 - DNA, 15 bp, Homo sapiens
tacaaatttgtttaa

SEQ ID NO: 1589040 - DNA, 15 bp, Homo sapiens
acaaatttgtttaaa

SEQ ID NO: 1589041 - DNA, 15 bp, Homo sapiens
caaatttgtttaaat

SEQ ID NO: 1589042 - DNA, 15 bp, Homo sapiens
aaatttgtttaaatg

SEQ ID NO: 1589043 - DNA, 15 bp, Homo sapiens
aatttgtttaaatgt

SEQ ID NO: 1589044 - DNA, 15 bp, Homo sapiens
atttgtttaaatgtt

SEQ ID NO: 1589045 - DNA, 15 bp, Homo sapiens
tttgtttaaatgttg

SEQ ID NO: 1589046 - DNA, 15 bp, Homo sapiens
ttgtttaaatgttga

SEQ ID NO: 1589047 - DNA, 15 bp, Homo sapiens
tgtttaaatgttgaa

SEQ ID NO: 1589048 - DNA, 15 bp, Homo sapiens
gtttaaatgttgaat

SEQ ID NO: 1589049 - DNA, 15 bp, Homo sapiens
tttaaatgttgaata

SEQ ID NO: 1589050 - DNA, 15 bp, Homo sapiens
ttaaatgttgaataa

SEQ ID NO: 1589051 - DNA, 15 bp, Homo sapiens
taaatgttgaataaa

SEQ ID NO: 1589052 - DNA, 15 bp, Homo sapiens
aaatgttgaataaaa

SEQ ID NO: 1589053 - DNA, 15 bp, Homo sapiens
aatgttgaataaaaa

SEQ ID NO: 1589054 - DNA, 15 bp, Homo sapiens
atgttgaataaaaat

SEQ ID NO: 1589055 - DNA, 15 bp, Homo sapiens
tgttgaataaaaatg

SEQ ID NO: 1589056 - DNA, 15 bp, Homo sapiens
gttgaataaaaatgg

SEQ ID NO: 1589057 - DNA, 15 bp, Homo sapiens
ttgaataaaaatggt

SEQ ID NO: 1589058 - DNA, 15 bp, Homo sapiens
tgaataaaaatggtg

SEQ ID NO: 1589059 - DNA, 15 bp, Homo sapiens
gaataaaaatggtgt

SEQ ID NO: 1589060 - DNA, 15 bp, Homo sapiens
aataaaaatggtgtc

SEQ ID NO: 1589061 - DNA, 15 bp, Homo sapiens
ataaaaatggtgtca

SEQ ID NO: 1589062 - DNA, 15 bp, Homo sapiens
taaaaatggtgtcat

SEQ ID NO: 1589063 - DNA, 15 bp, Homo sapiens
aaaaatggtgtcata

SEQ ID NO: 1589064 - DNA, 15 bp, Homo sapiens
aaaatggtgtcatag

SEQ ID NO: 1589065 - DNA, 15 bp, Homo sapiens
aaatggtgtcatagg

SEQ ID NO: 1589066 - DNA, 15 bp, Homo sapiens
aatggtgtcataggc

SEQ ID NO: 1589067 - DNA, 15 bp, Homo sapiens
atggtgtcataggca

SEQ ID NO: 1589068 - DNA, 15 bp, Homo sapiens
tggtgtcataggcaa

SEQ ID NO: 1589069 - DNA, 15 bp, Homo sapiens
ggtgtcataggcaac

SEQ ID NO: 1589070 - DNA, 15 bp, Homo sapiens
gtgtcataggcaaca

SEQ ID NO: 1589071 - DNA, 15 bp, Homo sapiens
tgtcataggcaacac

SEQ ID NO: 1589072 - DNA, 15 bp, Homo sapiens
gtcataggcaacaca

SEQ ID NO: 1589073 - DNA, 15 bp, Homo sapiens
tcataggcaacacag

SEQ ID NO: 1589074 - DNA, 15 bp, Homo sapiens
cataggcaacacagt

SEQ ID NO: 1589075 - DNA, 15 bp, Homo sapiens
ataggcaacacagtg

SEQ ID NO: 1589076 - DNA, 15 bp, Homo sapiens
taggcaacacagtgt

SEQ ID NO: 1589077 - DNA, 15 bp, Homo sapiens
aggcaacacagtgtt

SEQ ID NO: 1589078 - DNA, 15 bp, Homo sapiens
ggcaacacagtgttc

SEQ ID NO: 1589079 - DNA, 15 bp, Homo sapiens
gcaacacagtgttcc

SEQ ID NO: 1589080 - DNA, 15 bp, Homo sapiens
caacacagtgttcca

SEQ ID NO: 1589081 - DNA, 15 bp, Homo sapiens
aacacagtgttccac

SEQ ID NO: 1589082 - DNA, 15 bp, Homo sapiens
acacagtgttccact

SEQ ID NO: 1589083 - DNA, 15 bp, Homo sapiens
cacagtgttccacta

SEQ ID NO: 1589084 - DNA, 15 bp, Homo sapiens
acagtgttccactac

SEQ ID NO: 1589085 - DNA, 15 bp, Homo sapiens
cagtgttccactact

SEQ ID NO: 1589086 - DNA, 15 bp, Homo sapiens
agtgttccactactt

SEQ ID NO: 1589087 - DNA, 15 bp, Homo sapiens
gtgttccactacttg

SEQ ID NO: 1589088 - DNA, 15 bp, Homo sapiens
tgttccactacttgg

SEQ ID NO: 1589089 - DNA, 15 bp, Homo sapiens
gttccactacttggt

SEQ ID NO: 1589090 - DNA, 15 bp, Homo sapiens
ttccactacttggtg

SEQ ID NO: 1589091 - DNA, 15 bp, Homo sapiens
tccactacttggtgt

SEQ ID NO: 1589092 - DNA, 15 bp, Homo sapiens
ccactacttggtgtt

SEQ ID NO: 1589093 - DNA, 15 bp, Homo sapiens
cactacttggtgttt

SEQ ID NO: 1589094 - DNA, 15 bp, Homo sapiens
actacttggtgtttt

SEQ ID NO: 1589095 - DNA, 15 bp, Homo sapiens
ctacttggtgttttt

SEQ ID NO: 1589096 - DNA, 15 bp, Homo sapiens
tacttggtgttttta

SEQ ID NO: 1589097 - DNA, 15 bp, Homo sapiens
acttggtgtttttaa

SEQ ID NO: 1589098 - DNA, 15 bp, Homo sapiens
cttggtgtttttaat

SEQ ID NO: 1589099 - DNA, 15 bp, Homo sapiens
ttggtgtttttaata

SEQ ID NO: 1589100 - DNA, 15 bp, Homo sapiens
tggtgtttttaatag

SEQ ID NO: 1589101 - DNA, 15 bp, Homo sapiens
ggtgtttttaatagc

SEQ ID NO: 1589102 - DNA, 15 bp, Homo sapiens
gtgtttttaatagca

SEQ ID NO: 1589103 - DNA, 15 bp, Homo sapiens
tgtttttaatagcat

SEQ ID NO: 1589104 - DNA, 15 bp, Homo sapiens
gtttttaatagcatt

SEQ ID NO: 1589105 - DNA, 15 bp, Homo sapiens
tttttaatagcatta

SEQ ID NO: 1589106 - DNA, 15 bp, Homo sapiens
ttttaatagcattat

SEQ ID NO: 1589107 - DNA, 15 bp, Homo sapiens
tttaatagcattatt

SEQ ID NO: 1589108 - DNA, 15 bp, Homo sapiens
ttaatagcattattc

SEQ ID NO: 1589109 - DNA, 15 bp, Homo sapiens
taatagcattattct

SEQ ID NO: 1589110 - DNA, 15 bp, Homo sapiens
aatagcattattctg

SEQ ID NO: 1589111 - DNA, 15 bp, Homo sapiens
atagcattattctgt

SEQ ID NO: 1589112 - DNA, 15 bp, Homo sapiens
tagcattattctgtc

SEQ ID NO: 1589113 - DNA, 15 bp, Homo sapiens
agcattattctgtct

SEQ ID NO: 1589114 - DNA, 15 bp, Homo sapiens
gcattattctgtctc

SEQ ID NO: 1589115 - DNA, 15 bp, Homo sapiens
cattattctgtctca

SEQ ID NO: 1589116 - DNA, 15 bp, Homo sapiens
attattctgtctcag

SEQ ID NO: 1589117 - DNA, 15 bp, Homo sapiens
ttattctgtctcagt

SEQ ID NO: 1589118 - DNA, 15 bp, Homo sapiens
tattctgtctcagtg

SEQ ID NO: 1589119 - DNA, 15 bp, Homo sapiens
attctgtctcagtgt

SEQ ID NO: 1589120 - DNA, 15 bp, Homo sapiens
ttctgtctcagtgtg

SEQ ID NO: 1589121 - DNA, 15 bp, Homo sapiens
tctgtctcagtgtgc

SEQ ID NO: 1589122 - DNA, 15 bp, Homo sapiens
ctgtctcagtgtgct

SEQ ID NO: 1589123 - DNA, 15 bp, Homo sapiens
tgtctcagtgtgctt

SEQ ID NO: 1589124 - DNA, 15 bp, Homo sapiens
gtctcagtgtgcttt

SEQ ID NO: 1589125 - DNA, 15 bp, Homo sapiens
tctcagtgtgctttg

SEQ ID NO: 1589126 - DNA, 15 bp, Homo sapiens
ctcagtgtgctttgg

SEQ ID NO: 1589127 - DNA, 15 bp, Homo sapiens
tcagtgtgctttgga

SEQ ID NO: 1589128 - DNA, 15 bp, Homo sapiens
cagtgtgctttggat

SEQ ID NO: 1589129 - DNA, 15 bp, Homo sapiens
agtgtgctttggatt

SEQ ID NO: 1589130 - DNA, 15 bp, Homo sapiens
gtgtgctttggatta

SEQ ID NO: 1589131 - DNA, 15 bp, Homo sapiens
tgtgctttggattat

SEQ ID NO: 1589132 - DNA, 15 bp, Homo sapiens
gtgctttggattatc

SEQ ID NO: 1589133 - DNA, 15 bp, Homo sapiens
tgctttggattatca

SEQ ID NO: 1589134 - DNA, 15 bp, Homo sapiens
gctttggattatcag

SEQ ID NO: 1589135 - DNA, 15 bp, Homo sapiens
ctttggattatcagg

SEQ ID NO: 1589136 - DNA, 15 bp, Homo sapiens
tttggattatcaggt

SEQ ID NO: 1589137 - DNA, 15 bp, Homo sapiens
ttggattatcaggtg

SEQ ID NO: 1589138 - DNA, 15 bp, Homo sapiens
tggattatcaggtgc

SEQ ID NO: 1589139 - DNA, 15 bp, Homo sapiens
ggattatcaggtgct

SEQ ID NO: 1589140 - DNA, 15 bp, Homo sapiens
gattatcaggtgctt

SEQ ID NO: 1589141 - DNA, 15 bp, Homo sapiens
attatcaggtgcttt

SEQ ID NO: 1589142 - DNA, 15 bp, Homo sapiens
ttatcaggtgctttt

SEQ ID NO: 1589143 - DNA, 15 bp, Homo sapiens
tatcaggtgcttttt

SEQ ID NO: 1589144 - DNA, 15 bp, Homo sapiens
atcaggtgcttttta

SEQ ID NO: 1589145 - DNA, 15 bp, Homo sapiens
tcaggtgctttttaa

SEQ ID NO: 1589146 - DNA, 15 bp, Homo sapiens
caggtgctttttaat

SEQ ID NO: 1589147 - DNA, 15 bp, Homo sapiens
aggtgctttttaata

SEQ ID NO: 1589148 - DNA, 15 bp, Homo sapiens
ggtgctttttaatag

SEQ ID NO: 1589149 - DNA, 15 bp, Homo sapiens
gtgctttttaatagt

SEQ ID NO: 1589150 - DNA, 15 bp, Homo sapiens
tgctttttaatagtt

SEQ ID NO: 1589151 - DNA, 15 bp, Homo sapiens
gctttttaatagttg

SEQ ID NO: 1589152 - DNA, 15 bp, Homo sapiens
ctttttaatagttgc

SEQ ID NO: 1589153 - DNA, 15 bp, Homo sapiens
tttttaatagttgca

SEQ ID NO: 1589154 - DNA, 15 bp, Homo sapiens
ttttaatagttgcat

SEQ ID NO: 1589155 - DNA, 15 bp, Homo sapiens
tttaatagttgcatg

SEQ ID NO: 1589156 - DNA, 15 bp, Homo sapiens
ttaatagttgcatgg

SEQ ID NO: 1589157 - DNA, 15 bp, Homo sapiens
taatagttgcatggt

SEQ ID NO: 1589158 - DNA, 15 bp, Homo sapiens
aatagttgcatggta

SEQ ID NO: 1589159 - DNA, 15 bp, Homo sapiens
atagttgcatggtat

SEQ ID NO: 1589160 - DNA, 15 bp, Homo sapiens
tagttgcatggtatt

SEQ ID NO: 1589161 - DNA, 15 bp, Homo sapiens
agttgcatggtatta

SEQ ID NO: 1589162 - DNA, 15 bp, Homo sapiens
gttgcatggtattac

SEQ ID NO: 1589163 - DNA, 15 bp, Homo sapiens
ttgcatggtattaca

SEQ ID NO: 1589164 - DNA, 15 bp, Homo sapiens
tgcatggtattacat

SEQ ID NO: 1589165 - DNA, 15 bp, Homo sapiens
gcatggtattacatt

SEQ ID NO: 1589166 - DNA, 15 bp, Homo sapiens
catggtattacattg

SEQ ID NO: 1589167 - DNA, 15 bp, Homo sapiens
atggtattacattgt

SEQ ID NO: 1589168 - DNA, 15 bp, Homo sapiens
tggtattacattgtg

SEQ ID NO: 1589169 - DNA, 15 bp, Homo sapiens
ggtattacattgtgt

SEQ ID NO: 1589170 - DNA, 15 bp, Homo sapiens
gtattacattgtgta

SEQ ID NO: 1589171 - DNA, 15 bp, Homo sapiens
tattacattgtgtag

SEQ ID NO: 1589172 - DNA, 15 bp, Homo sapiens
attacattgtgtaga

SEQ ID NO: 1589173 - DNA, 15 bp, Homo sapiens
ttacattgtgtagat

SEQ ID NO: 1589174 - DNA, 15 bp, Homo sapiens
tacattgtgtagatg

SEQ ID NO: 1589175 - DNA, 15 bp, Homo sapiens
acattgtgtagatga

SEQ ID NO: 1589176 - DNA, 15 bp, Homo sapiens
cattgtgtagatgaa

SEQ ID NO: 1589177 - DNA, 15 bp, Homo sapiens
attgtgtagatgaac

SEQ ID NO: 1589178 - DNA, 15 bp, Homo sapiens
ttgtgtagatgaact

SEQ ID NO: 1589179 - DNA, 15 bp, Homo sapiens
tgtgtagatgaactt

SEQ ID NO: 1589180 - DNA, 15 bp, Homo sapiens
gtgtagatgaacttg

SEQ ID NO: 1589181 - DNA, 15 bp, Homo sapiens
tgtagatgaacttga

SEQ ID NO: 1589182 - DNA, 15 bp, Homo sapiens
gtagatgaacttgat

SEQ ID NO: 1589183 - DNA, 15 bp, Homo sapiens
tagatgaacttgatt

SEQ ID NO: 1589184 - DNA, 15 bp, Homo sapiens
agatgaacttgatta

SEQ ID NO: 1589185 - DNA, 15 bp, Homo sapiens
gatgaacttgattaa

SEQ ID NO: 1589186 - DNA, 15 bp, Homo sapiens
atgaacttgattaat

SEQ ID NO: 1589187 - DNA, 15 bp, Homo sapiens
tgaacttgattaatt

SEQ ID NO: 1589188 - DNA, 15 bp, Homo sapiens
gaacttgattaattt

SEQ ID NO: 1589189 - DNA, 15 bp, Homo sapiens
aacttgattaattta

SEQ ID NO: 1589190 - DNA, 15 bp, Homo sapiens
acttgattaatttaa

SEQ ID NO: 1589191 - DNA, 15 bp, Homo sapiens
cttgattaatttaaa

SEQ ID NO: 1589192 - DNA, 15 bp, Homo sapiens
ttgattaatttaaat

SEQ ID NO: 1589193 - DNA, 15 bp, Homo sapiens
tgattaatttaaatg

SEQ ID NO: 1589194 - DNA, 15 bp, Homo sapiens
gattaatttaaatgg

SEQ ID NO: 1589195 - DNA, 15 bp, Homo sapiens
attaatttaaatggt

SEQ ID NO: 1589196 - DNA, 15 bp, Homo sapiens
ttaatttaaatggtt

SEQ ID NO: 1589197 - DNA, 15 bp, Homo sapiens
taatttaaatggttc

SEQ ID NO: 1589198 - DNA, 15 bp, Homo sapiens
aatttaaatggttcc

SEQ ID NO: 1589199 - DNA, 15 bp, Homo sapiens
atttaaatggttccc

SEQ ID NO: 1589200 - DNA, 15 bp, Homo sapiens
tttaaatggttccct

SEQ ID NO: 1589201 - DNA, 15 bp, Homo sapiens
ttaaatggttccctg

SEQ ID NO: 1589202 - DNA, 15 bp, Homo sapiens
taaatggttccctgt

SEQ ID NO: 1589203 - DNA, 15 bp, Homo sapiens
aaatggttccctgtt

SEQ ID NO: 1589204 - DNA, 15 bp, Homo sapiens
aatggttccctgtta

SEQ ID NO: 1589205 - DNA, 15 bp, Homo sapiens
atggttccctgttaa

SEQ ID NO: 1589206 - DNA, 15 bp, Homo sapiens
tggttccctgttaat

SEQ ID NO: 1589207 - DNA, 15 bp, Homo sapiens
ggttccctgttaatg

SEQ ID NO: 1589208 - DNA, 15 bp, Homo sapiens
gttccctgttaatgg

SEQ ID NO: 1589209 - DNA, 15 bp, Homo sapiens
ttccctgttaatgga

SEQ ID NO: 1589210 - DNA, 15 bp, Homo sapiens
tccctgttaatggac

SEQ ID NO: 1589211 - DNA, 15 bp, Homo sapiens
ccctgttaatggaca

SEQ ID NO: 1589212 - DNA, 15 bp, Homo sapiens
cctgttaatggacat

SEQ ID NO: 1589213 - DNA, 15 bp, Homo sapiens
ctgttaatggacatg

SEQ ID NO: 1589214 - DNA, 15 bp, Homo sapiens
tgttaatggacatgt

SEQ ID NO: 1589215 - DNA, 15 bp, Homo sapiens
gttaatggacatgtt

SEQ ID NO: 1589216 - DNA, 15 bp, Homo sapiens
ttaatggacatgttg

SEQ ID NO: 1589217 - DNA, 15 bp, Homo sapiens
taatggacatgttgg

SEQ ID NO: 1589218 - DNA, 15 bp, Homo sapiens
aatggacatgttggt

SEQ ID NO: 1589219 - DNA, 15 bp, Homo sapiens
atggacatgttggtt

SEQ ID NO: 1589220 - DNA, 15 bp, Homo sapiens
tggacatgttggttt

SEQ ID NO: 1589221 - DNA, 15 bp, Homo sapiens
ggacatgttggtttg

SEQ ID NO: 1589222 - DNA, 15 bp, Homo sapiens
gacatgttggtttgt

SEQ ID NO: 1589223 - DNA, 15 bp, Homo sapiens
acatgttggtttgtt

SEQ ID NO: 1589224 - DNA, 15 bp, Homo sapiens
catgttggtttgttt

SEQ ID NO: 1589225 - DNA, 15 bp, Homo sapiens
atgttggtttgtttt

SEQ ID NO: 1589226 - DNA, 15 bp, Homo sapiens
tgttggtttgttttt

SEQ ID NO: 1589227 - DNA, 15 bp, Homo sapiens
gttggtttgtttttg

SEQ ID NO: 1589228 - DNA, 15 bp, Homo sapiens
ttggtttgtttttgt

SEQ ID NO: 1589229 - DNA, 15 bp, Homo sapiens
tggtttgtttttgtg

SEQ ID NO: 1589230 - DNA, 15 bp, Homo sapiens
ggtttgtttttgtga

SEQ ID NO: 1589231 - DNA, 15 bp, Homo sapiens
gtttgtttttgtgaa

SEQ ID NO: 1589232 - DNA, 15 bp, Homo sapiens
tttgtttttgtgaac

SEQ ID NO: 1589233 - DNA, 15 bp, Homo sapiens
ttgtttttgtgaaca

SEQ ID NO: 1589234 - DNA, 15 bp, Homo sapiens
tgtttttgtgaacaa

SEQ ID NO: 1589235 - DNA, 15 bp, Homo sapiens
gtttttgtgaacaac

SEQ ID NO: 1589236 - DNA, 15 bp, Homo sapiens
tttttgtgaacaact

SEQ ID NO: 1589237 - DNA, 15 bp, Homo sapiens
ttttgtgaacaactg

SEQ ID NO: 1589238 - DNA, 15 bp, Homo sapiens
tttgtgaacaactga

SEQ ID NO: 1589239 - DNA, 15 bp, Homo sapiens
ttgtgaacaactgat

SEQ ID NO: 1589240 - DNA, 15 bp, Homo sapiens
tgtgaacaactgata

SEQ ID NO: 1589241 - DNA, 15 bp, Homo sapiens
gtgaacaactgatac

SEQ ID NO: 1589242 - DNA, 15 bp, Homo sapiens
tgaacaactgataca

SEQ ID NO: 1589243 - DNA, 15 bp, Homo sapiens
gaacaactgatacag

SEQ ID NO: 1589244 - DNA, 15 bp, Homo sapiens
aacaactgatacagt

SEQ ID NO: 1589245 - DNA, 15 bp, Homo sapiens
acaactgatacagtg

SEQ ID NO: 1589246 - DNA, 15 bp, Homo sapiens
caactgatacagtga

SEQ ID NO: 1589247 - DNA, 15 bp, Homo sapiens
aactgatacagtgaa

SEQ ID NO: 1589248 - DNA, 15 bp, Homo sapiens
actgatacagtgaac

SEQ ID NO: 1589249 - DNA, 15 bp, Homo sapiens
ctgatacagtgaaca

SEQ ID NO: 1589250 - DNA, 15 bp, Homo sapiens
tgatacagtgaacat

SEQ ID NO: 1589251 - DNA, 15 bp, Homo sapiens
gatacagtgaacatt

SEQ ID NO: 1589252 - DNA, 15 bp, Homo sapiens
atacagtgaacattt

SEQ ID NO: 1589253 - DNA, 15 bp, Homo sapiens
tacagtgaacattta

SEQ ID NO: 1589254 - DNA, 15 bp, Homo sapiens
acagtgaacatttat

SEQ ID NO: 1589255 - DNA, 15 bp, Homo sapiens
cagtgaacatttatt

SEQ ID NO: 1589256 - DNA, 15 bp, Homo sapiens
gaacatttatttttt

SEQ ID NO: 1589257 - DNA, 15 bp, Homo sapiens
aacatttatttttta

SEQ ID NO: 1589258 - DNA, 15 bp, Homo sapiens
acatttattttttaa

SEQ ID NO: 1589259 - DNA, 15 bp, Homo sapiens
catttattttttaaa

SEQ ID NO: 1589260 - DNA, 15 bp, Homo sapiens
atttattttttaaat

SEQ ID NO: 1589261 - DNA, 15 bp, Homo sapiens
tttattttttaaata

SEQ ID NO: 1589262 - DNA, 15 bp, Homo sapiens
ttattttttaaataa

SEQ ID NO: 1589263 - DNA, 15 bp, Homo sapiens
tattttttaaataaa

SEQ ID NO: 1589264 - DNA, 15 bp, Homo sapiens
attttttaaataaaa

SEQ ID NO: 1589265 - DNA, 15 bp, Homo sapiens
ttttttaaataaaaa

SEQ ID NO: 1589266 - DNA, 15 bp, Homo sapiens
tttttaaataaaaaa

SEQ ID NO: 1589267 - DNA, 15 bp, Homo sapiens
ttttaaataaaaaaa

SEQ ID NO: 1589268 - DNA, 15 bp, Homo sapiens
tttaaataaaaaaaa

SEQ ID NO: 1589269 - DNA, 15 bp, Homo sapiens
ttaaataaaaaaaag

SEQ ID NO: 1589270 - DNA, 15 bp, Homo sapiens
taaataaaaaaaaga

SEQ ID NO: 1589271 - DNA, 15 bp, Homo sapiens
aaataaaaaaaagag

SEQ ID NO: 1589272 - DNA, 15 bp, Homo sapiens
aataaaaaaaagaga

SEQ ID NO: 1589273 - DNA, 15 bp, Homo sapiens
ataaaaaaaagagag

SEQ ID NO: 1589274 - DNA, 15 bp, Homo sapiens
aaaaaaaagagagac

SEQ ID NO: 1589275 - DNA, 15 bp, Homo sapiens
aaaaaaagagagaca

SEQ ID NO: 1589276 - DNA, 15 bp, Homo sapiens
aaaaaagagagacag

SEQ ID NO: 1589277 - DNA, 15 bp, Homo sapiens
aaaaagagagacagg

SEQ ID NO: 1589278 - DNA, 15 bp, Homo sapiens
aaaagagagacaggg

SEQ ID NO: 1589279 - DNA, 15 bp, Homo sapiens
aaagagagacagggt

SEQ ID NO: 1589280 - DNA, 15 bp, Homo sapiens
aagagagacagggtc

SEQ ID NO: 1589281 - DNA, 15 bp, Homo sapiens
agagagacagggtct

SEQ ID NO: 1589282 - DNA, 15 bp, Homo sapiens
gagagacagggtctt

SEQ ID NO: 1589283 - DNA, 15 bp, Homo sapiens
gacagggtcttgctg

SEQ ID NO: 1589284 - DNA, 15 bp, Homo sapiens
acagggtcttgctgt

SEQ ID NO: 1589285 - DNA, 15 bp, Homo sapiens
cagggtcttgctgtg

SEQ ID NO: 1589286 - DNA, 15 bp, Homo sapiens
ggtcttgctgtgttt

SEQ ID NO: 1589287 - DNA, 15 bp, Homo sapiens
gtcttgctgtgtttc

SEQ ID NO: 1589288 - DNA, 15 bp, Homo sapiens
tcttgctgtgtttct

SEQ ID NO: 1589289 - DNA, 15 bp, Homo sapiens
cttgctgtgtttctc

SEQ ID NO: 1589290 - DNA, 15 bp, Homo sapiens
ttgctgtgtttctcg

SEQ ID NO: 1589291 - DNA, 15 bp, Homo sapiens
tgctgtgtttctcgg

SEQ ID NO: 1589292 - DNA, 15 bp, Homo sapiens
gctgtgtttctcggg

SEQ ID NO: 1589293 - DNA, 15 bp, Homo sapiens
ctgtgtttctcgggc

SEQ ID NO: 1589294 - DNA, 15 bp, Homo sapiens
tgtgtttctcgggct

SEQ ID NO: 1589295 - DNA, 15 bp, Homo sapiens
gtgtttctcgggctg

SEQ ID NO: 1589296 - DNA, 15 bp, Homo sapiens
tgtttctcgggctgg

SEQ ID NO: 1589297 - DNA, 15 bp, Homo sapiens
gtttctcgggctggc

SEQ ID NO: 1589298 - DNA, 15 bp, Homo sapiens
tttctcgggctggcc

SEQ ID NO: 1589299 - DNA, 15 bp, Homo sapiens
ttctcgggctggcct

SEQ ID NO: 1589300 - DNA, 15 bp, Homo sapiens
tctcgggctggcctt

SEQ ID NO: 1589301 - DNA, 15 bp, Homo sapiens
ctcgggctggccttg

SEQ ID NO: 1589302 - DNA, 15 bp, Homo sapiens
tcgggctggccttga

SEQ ID NO: 1589303 - DNA, 15 bp, Homo sapiens
cgggctggccttgaa

SEQ ID NO: 1589304 - DNA, 15 bp, Homo sapiens
gggctggccttgaac

SEQ ID NO: 1589305 - DNA, 15 bp, Homo sapiens
cttgaactcctgggg

SEQ ID NO: 1589306 - DNA, 15 bp, Homo sapiens
ttgaactcctggggt

SEQ ID NO: 1589307 - DNA, 15 bp, Homo sapiens
tgaactcctggggtc

SEQ ID NO: 1589308 - DNA, 15 bp, Homo sapiens
gaactcctggggtca

SEQ ID NO: 1589309 - DNA, 15 bp, Homo sapiens
aactcctggggtcaa

SEQ ID NO: 1589310 - DNA, 15 bp, Homo sapiens
actcctggggtcaag

SEQ ID NO: 1589311 - DNA, 15 bp, Homo sapiens
ctcctggggtcaagc

SEQ ID NO: 1589312 - DNA, 15 bp, Homo sapiens
tcctggggtcaagcg

SEQ ID NO: 1589313 - DNA, 15 bp, Homo sapiens
cctggggtcaagcga

SEQ ID NO: 1589314 - DNA, 15 bp, Homo sapiens
ctggggtcaagcgat

SEQ ID NO: 1589315 - DNA, 15 bp, Homo sapiens
tggggtcaagcgatc

SEQ ID NO: 1589316 - DNA, 15 bp, Homo sapiens
ggggtcaagcgatcg

SEQ ID NO: 1589317 - DNA, 15 bp, Homo sapiens
gggtcaagcgatcgt

SEQ ID NO: 1589318 - DNA, 15 bp, Homo sapiens
ggtcaagcgatcgtc

SEQ ID NO: 1589319 - DNA, 15 bp, Homo sapiens
gtcaagcgatcgtct

SEQ ID NO: 1589320 - DNA, 15 bp, Homo sapiens
tcaagcgatcgtctt

SEQ ID NO: 1589321 - DNA, 15 bp, Homo sapiens
caagcgatcgtcttg

SEQ ID NO: 1589322 - DNA, 15 bp, Homo sapiens
aagcgatcgtcttgc

SEQ ID NO: 1589323 - DNA, 15 bp, Homo sapiens
agcgatcgtcttgcc

SEQ ID NO: 1589324 - DNA, 15 bp, Homo sapiens
gcgatcgtcttgcct

SEQ ID NO: 1589325 - DNA, 15 bp, Homo sapiens
cgatcgtcttgcctc

SEQ ID NO: 1589326 - DNA, 15 bp, Homo sapiens
gatcgtcttgcctct

SEQ ID NO: 1589327 - DNA, 15 bp, Homo sapiens
atcgtcttgcctctg

SEQ ID NO: 1589328 - DNA, 15 bp, Homo sapiens
tcgtcttgcctctgc

SEQ ID NO: 1589329 - DNA, 15 bp, Homo sapiens
cgtcttgcctctgcc

SEQ ID NO: 1589330 - DNA, 15 bp, Homo sapiens
gtcttgcctctgcct

SEQ ID NO: 1589331 - DNA, 15 bp, Homo sapiens
tcttgcctctgcctc

SEQ ID NO: 1589332 - DNA, 15 bp, Homo sapiens
cttgcctctgcctcc

SEQ ID NO: 1589333 - DNA, 15 bp, Homo sapiens
ttgcctctgcctccc

SEQ ID NO: 1589334 - DNA, 15 bp, Homo sapiens
tgcctctgcctccct

SEQ ID NO: 1589335 - DNA, 15 bp, Homo sapiens
gcctctgcctccctg

SEQ ID NO: 1589336 - DNA, 15 bp, Homo sapiens
cctctgcctccctgg

SEQ ID NO: 1589337 - DNA, 15 bp, Homo sapiens
ctctgcctccctggg

SEQ ID NO: 1589338 - DNA, 15 bp, Homo sapiens
tctgcctccctggga

SEQ ID NO: 1589339 - DNA, 15 bp, Homo sapiens
ctgcctccctgggat

SEQ ID NO: 1589340 - DNA, 15 bp, Homo sapiens
tgcctccctgggatt

SEQ ID NO: 1589341 - DNA, 15 bp, Homo sapiens
gcctccctgggatta

SEQ ID NO: 1589342 - DNA, 15 bp, Homo sapiens
cctccctgggattac

SEQ ID NO: 1589343 - DNA, 15 bp, Homo sapiens
ctccctgggattaca

SEQ ID NO: 1589344 - DNA, 15 bp, Homo sapiens
tccctgggattacag

SEQ ID NO: 1589345 - DNA, 15 bp, Homo sapiens
ccctgggattacagg

SEQ ID NO: 1589346 - DNA, 15 bp, Homo sapiens
attacaggcatgaag

SEQ ID NO: 1589347 - DNA, 15 bp, Homo sapiens
ttacaggcatgaagc

SEQ ID NO: 1589348 - DNA, 15 bp, Homo sapiens
tacaggcatgaagcc

SEQ ID NO: 1589349 - DNA, 15 bp, Homo sapiens
acaggcatgaagcca

SEQ ID NO: 1589350 - DNA, 15 bp, Homo sapiens
caggcatgaagccac

SEQ ID NO: 1589351 - DNA, 15 bp, Homo sapiens
aggcatgaagccacc

SEQ ID NO: 1589352 - DNA, 15 bp, Homo sapiens
ggcatgaagccaccg

SEQ ID NO: 1589353 - DNA, 15 bp, Homo sapiens
gcatgaagccaccgc

SEQ ID NO: 1589354 - DNA, 15 bp, Homo sapiens
catgaagccaccgca

SEQ ID NO: 1589355 - DNA, 15 bp, Homo sapiens
atgaagccaccgcac

SEQ ID NO: 1589356 - DNA, 15 bp, Homo sapiens
tgaagccaccgcacc

SEQ ID NO: 1589357 - DNA, 15 bp, Homo sapiens
gaagccaccgcaccc

SEQ ID NO: 1589358 - DNA, 15 bp, Homo sapiens
aagccaccgcacccg

SEQ ID NO: 1589359 - DNA, 15 bp, Homo sapiens
accgcacccggccca

SEQ ID NO: 1589360 - DNA, 15 bp, Homo sapiens
ccgcacccggcccag

SEQ ID NO: 1589361 - DNA, 15 bp, Homo sapiens
cgcacccggcccagt

SEQ ID NO: 1589362 - DNA, 15 bp, Homo sapiens
gcacccggcccagtg

SEQ ID NO: 1589363 - DNA, 15 bp, Homo sapiens
cacccggcccagtga

SEQ ID NO: 1589364 - DNA, 15 bp, Homo sapiens
acccggcccagtgaa

SEQ ID NO: 1589365 - DNA, 15 bp, Homo sapiens
cccggcccagtgaac

SEQ ID NO: 1589366 - DNA, 15 bp, Homo sapiens
ccggcccagtgaaca

SEQ ID NO: 1589367 - DNA, 15 bp, Homo sapiens
cggcccagtgaacac

SEQ ID NO: 1589368 - DNA, 15 bp, Homo sapiens
ggcccagtgaacact

SEQ ID NO: 1589369 - DNA, 15 bp, Homo sapiens
gcccagtgaacactc

SEQ ID NO: 1589370 - DNA, 15 bp, Homo sapiens
cccagtgaacactct

SEQ ID NO: 1589371 - DNA, 15 bp, Homo sapiens
ccagtgaacactctt

SEQ ID NO: 1589372 - DNA, 15 bp, Homo sapiens
cagtgaacactcttg

SEQ ID NO: 1589373 - DNA, 15 bp, Homo sapiens
agtgaacactcttga

SEQ ID NO: 1589374 - DNA, 15 bp, Homo sapiens
gtgaacactcttgaa

SEQ ID NO: 1589375 - DNA, 15 bp, Homo sapiens
tgaacactcttgaat

SEQ ID NO: 1589376 - DNA, 15 bp, Homo sapiens
gaacactcttgaatg

SEQ ID NO: 1589377 - DNA, 15 bp, Homo sapiens
aacactcttgaatgt

SEQ ID NO: 1589378 - DNA, 15 bp, Homo sapiens
acactcttgaatgta

SEQ ID NO: 1589379 - DNA, 15 bp, Homo sapiens
cactcttgaatgtat

SEQ ID NO: 1589380 - DNA, 15 bp, Homo sapiens
actcttgaatgtatc

SEQ ID NO: 1589381 - DNA, 15 bp, Homo sapiens
ctcttgaatgtatct

SEQ ID NO: 1589382 - DNA, 15 bp, Homo sapiens
tcttgaatgtatctt

SEQ ID NO: 1589383 - DNA, 15 bp, Homo sapiens
cttgaatgtatcttt

SEQ ID NO: 1589384 - DNA, 15 bp, Homo sapiens
ttgaatgtatctttg

SEQ ID NO: 1589385 - DNA, 15 bp, Homo sapiens
tgaatgtatctttgt

SEQ ID NO: 1589386 - DNA, 15 bp, Homo sapiens
gaatgtatctttgta

SEQ ID NO: 1589387 - DNA, 15 bp, Homo sapiens
aatgtatctttgtat

SEQ ID NO: 1589388 - DNA, 15 bp, Homo sapiens
atgtatctttgtata

SEQ ID NO: 1589389 - DNA, 15 bp, Homo sapiens
tgtatctttgtatac

SEQ ID NO: 1589390 - DNA, 15 bp, Homo sapiens
gtatctttgtatact

SEQ ID NO: 1589391 - DNA, 15 bp, Homo sapiens
tatctttgtatactt

SEQ ID NO: 1589392 - DNA, 15 bp, Homo sapiens
atctttgtatacttg

SEQ ID NO: 1589393 - DNA, 15 bp, Homo sapiens
tctttgtatacttgt

SEQ ID NO: 1589394 - DNA, 15 bp, Homo sapiens
ctttgtatacttgtc

SEQ ID NO: 1589395 - DNA, 15 bp, Homo sapiens
ttgtatacttgtcag

SEQ ID NO: 1589396 - DNA, 15 bp, Homo sapiens
tgtatacttgtcagt

SEQ ID NO: 1589397 - DNA, 15 bp, Homo sapiens
gtatacttgtcagtg

SEQ ID NO: 1589398 - DNA, 15 bp, Homo sapiens
tatacttgtcagtgt

SEQ ID NO: 1589399 - DNA, 15 bp, Homo sapiens
atacttgtcagtgtt

SEQ ID NO: 1589400 - DNA, 15 bp, Homo sapiens
tacttgtcagtgttt

SEQ ID NO: 1589401 - DNA, 15 bp, Homo sapiens
acttgtcagtgtttt

SEQ ID NO: 1589402 - DNA, 15 bp, Homo sapiens
cttgtcagtgttttt

SEQ ID NO: 1589403 - DNA, 15 bp, Homo sapiens
ttgtcagtgtttttg

SEQ ID NO: 1589404 - DNA, 15 bp, Homo sapiens
tgtcagtgtttttgt

SEQ ID NO: 1589405 - DNA, 15 bp, Homo sapiens
gtcagtgtttttgta

SEQ ID NO: 1589406 - DNA, 15 bp, Homo sapiens
tcagtgtttttgtag

SEQ ID NO: 1589407 - DNA, 15 bp, Homo sapiens
cagtgtttttgtagc

SEQ ID NO: 1589408 - DNA, 15 bp, Homo sapiens
agtgtttttgtagca

SEQ ID NO: 1589409 - DNA, 15 bp, Homo sapiens
gtgtttttgtagcat

SEQ ID NO: 1589410 - DNA, 15 bp, Homo sapiens
tgtttttgtagcatt

SEQ ID NO: 1589411 - DNA, 15 bp, Homo sapiens
gtttttgtagcattg

SEQ ID NO: 1589412 - DNA, 15 bp, Homo sapiens
tttttgtagcattga

SEQ ID NO: 1589413 - DNA, 15 bp, Homo sapiens
ttttgtagcattgat

SEQ ID NO: 1589414 - DNA, 15 bp, Homo sapiens
tttgtagcattgatt

SEQ ID NO: 1589415 - DNA, 15 bp, Homo sapiens
ttgtagcattgattc

SEQ ID NO: 1589416 - DNA, 15 bp, Homo sapiens
tgtagcattgattcc

SEQ ID NO: 1589417 - DNA, 15 bp, Homo sapiens
gtagcattgattccc

SEQ ID NO: 1589418 - DNA, 15 bp, Homo sapiens
tagcattgattccca

SEQ ID NO: 1589419 - DNA, 15 bp, Homo sapiens
agcattgattcccag

SEQ ID NO: 1589420 - DNA, 15 bp, Homo sapiens
gcattgattcccaga

SEQ ID NO: 1589421 - DNA, 15 bp, Homo sapiens
cattgattcccagaa

SEQ ID NO: 1589422 - DNA, 15 bp, Homo sapiens
attgattcccagaag

SEQ ID NO: 1589423 - DNA, 15 bp, Homo sapiens
ttgattcccagaagt

SEQ ID NO: 1589424 - DNA, 15 bp, Homo sapiens
tgattcccagaagtg

SEQ ID NO: 1589425 - DNA, 15 bp, Homo sapiens
gattcccagaagtgg

SEQ ID NO: 1589426 - DNA, 15 bp, Homo sapiens
attcccagaagtggg

SEQ ID NO: 1589427 - DNA, 15 bp, Homo sapiens
ttcccagaagtggga

SEQ ID NO: 1589428 - DNA, 15 bp, Homo sapiens
tcccagaagtgggat

SEQ ID NO: 1589429 - DNA, 15 bp, Homo sapiens
cccagaagtgggatt

SEQ ID NO: 1589430 - DNA, 15 bp, Homo sapiens
ccagaagtgggatta

SEQ ID NO: 1589431 - DNA, 15 bp, Homo sapiens
cagaagtgggattac

SEQ ID NO: 1589432 - DNA, 15 bp, Homo sapiens
agaagtgggattact

SEQ ID NO: 1589433 - DNA, 15 bp, Homo sapiens
gaagtgggattactg

SEQ ID NO: 1589434 - DNA, 15 bp, Homo sapiens
aagtgggattactgg

SEQ ID NO: 1589435 - DNA, 15 bp, Homo sapiens
agtgggattactgga

SEQ ID NO: 1589436 - DNA, 15 bp, Homo sapiens
gtgggattactggat

SEQ ID NO: 1589437 - DNA, 15 bp, Homo sapiens
tgggattactggatt

SEQ ID NO: 1589438 - DNA, 15 bp, Homo sapiens
gggattactggatta

SEQ ID NO: 1589439 - DNA, 15 bp, Homo sapiens
ggattactggattaa

SEQ ID NO: 1589440 - DNA, 15 bp, Homo sapiens
gattactggattaag

SEQ ID NO: 1589441 - DNA, 15 bp, Homo sapiens
attactggattaagt

SEQ ID NO: 1589442 - DNA, 15 bp, Homo sapiens
ttactggattaagtg

SEQ ID NO: 1589443 - DNA, 15 bp, Homo sapiens
tactggattaagtga

SEQ ID NO: 1589444 - DNA, 15 bp, Homo sapiens
actggattaagtgac

SEQ ID NO: 1589445 - DNA, 15 bp, Homo sapiens
ctggattaagtgaca

SEQ ID NO: 1589446 - DNA, 15 bp, Homo sapiens
tggattaagtgacat

SEQ ID NO: 1589447 - DNA, 15 bp, Homo sapiens
ggattaagtgacatg

SEQ ID NO: 1589448 - DNA, 15 bp, Homo sapiens
gattaagtgacatgc

SEQ ID NO: 1589449 - DNA, 15 bp, Homo sapiens
attaagtgacatgca

SEQ ID NO: 1589450 - DNA, 15 bp, Homo sapiens
ttaagtgacatgcat

SEQ ID NO: 1589451 - DNA, 15 bp, Homo sapiens
taagtgacatgcatg

SEQ ID NO: 1589452 - DNA, 15 bp, Homo sapiens
aagtgacatgcatgt

SEQ ID NO: 1589453 - DNA, 15 bp, Homo sapiens
agtgacatgcatgtt

SEQ ID NO: 1589454 - DNA, 15 bp, Homo sapiens
gtgacatgcatgttt

SEQ ID NO: 1589455 - DNA, 15 bp, Homo sapiens
tgacatgcatgtttg

SEQ ID NO: 1589456 - DNA, 15 bp, Homo sapiens
gacatgcatgtttgc

SEQ ID NO: 1589457 - DNA, 15 bp, Homo sapiens
acatgcatgtttgca

SEQ ID NO: 1589458 - DNA, 15 bp, Homo sapiens
catgcatgtttgcaa

SEQ ID NO: 1589459 - DNA, 15 bp, Homo sapiens
atgcatgtttgcaat

SEQ ID NO: 1589460 - DNA, 15 bp, Homo sapiens
tgcatgtttgcaatt

SEQ ID NO: 1589461 - DNA, 15 bp, Homo sapiens
gcatgtttgcaattt

SEQ ID NO: 1589462 - DNA, 15 bp, Homo sapiens
catgtttgcaatttt

SEQ ID NO: 1589463 - DNA, 15 bp, Homo sapiens
atgtttgcaatttta

SEQ ID NO: 1589464 - DNA, 15 bp, Homo sapiens
tgtttgcaattttaa

SEQ ID NO: 1589465 - DNA, 15 bp, Homo sapiens
gtttgcaattttaac

SEQ ID NO: 1589466 - DNA, 15 bp, Homo sapiens
tttgcaattttaaca

SEQ ID NO: 1589467 - DNA, 15 bp, Homo sapiens
ttgcaattttaacag

SEQ ID NO: 1589468 - DNA, 15 bp, Homo sapiens
tgcaattttaacagg

SEQ ID NO: 1589469 - DNA, 15 bp, Homo sapiens
gcaattttaacaggt

SEQ ID NO: 1589470 - DNA, 15 bp, Homo sapiens
caattttaacaggta

SEQ ID NO: 1589471 - DNA, 15 bp, Homo sapiens
aattttaacaggtat

SEQ ID NO: 1589472 - DNA, 15 bp, Homo sapiens
attttaacaggtatt

SEQ ID NO: 1589473 - DNA, 15 bp, Homo sapiens
ttttaacaggtattg

SEQ ID NO: 1589474 - DNA, 15 bp, Homo sapiens
tttaacaggtattgc

SEQ ID NO: 1589475 - DNA, 15 bp, Homo sapiens
ttaacaggtattgct

SEQ ID NO: 1589476 - DNA, 15 bp, Homo sapiens
taacaggtattgcta

SEQ ID NO: 1589477 - DNA, 15 bp, Homo sapiens
aacaggtattgctat

SEQ ID NO: 1589478 - DNA, 15 bp, Homo sapiens
acaggtattgctatg

SEQ ID NO: 1589479 - DNA, 15 bp, Homo sapiens
caggtattgctatgt

SEQ ID NO: 1589480 - DNA, 15 bp, Homo sapiens
aggtattgctatgtc

SEQ ID NO: 1589481 - DNA, 15 bp, Homo sapiens
ggtattgctatgtca

SEQ ID NO: 1589482 - DNA, 15 bp, Homo sapiens
gtattgctatgtcat

SEQ ID NO: 1589483 - DNA, 15 bp, Homo sapiens
tattgctatgtcatt

SEQ ID NO: 1589484 - DNA, 15 bp, Homo sapiens
attgctatgtcattt

SEQ ID NO: 1589485 - DNA, 15 bp, Homo sapiens
ttgctatgtcatttt

SEQ ID NO: 1589486 - DNA, 15 bp, Homo sapiens
tgctatgtcattttc

SEQ ID NO: 1589487 - DNA, 15 bp, Homo sapiens
gctatgtcattttca

SEQ ID NO: 1589488 - DNA, 15 bp, Homo sapiens
ctatgtcattttcaa

SEQ ID NO: 1589489 - DNA, 15 bp, Homo sapiens
tatgtcattttcaaa

SEQ ID NO: 1589490 - DNA, 15 bp, Homo sapiens
atgtcattttcaaaa

SEQ ID NO: 1589491 - DNA, 15 bp, Homo sapiens
tgtcattttcaaaag

SEQ ID NO: 1589492 - DNA, 15 bp, Homo sapiens
gtcattttcaaaaga

SEQ ID NO: 1589493 - DNA, 15 bp, Homo sapiens
tcattttcaaaagaa

SEQ ID NO: 1589494 - DNA, 15 bp, Homo sapiens
cattttcaaaagaag

SEQ ID NO: 1589495 - DNA, 15 bp, Homo sapiens
attttcaaaagaagc

SEQ ID NO: 1589496 - DNA, 15 bp, Homo sapiens
ttttcaaaagaagct

SEQ ID NO: 1589497 - DNA, 15 bp, Homo sapiens
tttcaaaagaagcta

SEQ ID NO: 1589498 - DNA, 15 bp, Homo sapiens
ttcaaaagaagctat

SEQ ID NO: 1589499 - DNA, 15 bp, Homo sapiens
tcaaaagaagctatg

SEQ ID NO: 1589500 - DNA, 15 bp, Homo sapiens
caaaagaagctatgc

SEQ ID NO: 1589501 - DNA, 15 bp, Homo sapiens
aaaagaagctatgcc

SEQ ID NO: 1589502 - DNA, 15 bp, Homo sapiens
aaagaagctatgcca

SEQ ID NO: 1589503 - DNA, 15 bp, Homo sapiens
aagaagctatgccaa

SEQ ID NO: 1589504 - DNA, 15 bp, Homo sapiens
agaagctatgccaat

SEQ ID NO: 1589505 - DNA, 15 bp, Homo sapiens
gaagctatgccaatt

SEQ ID NO: 1589506 - DNA, 15 bp, Homo sapiens
aagctatgccaatta

SEQ ID NO: 1589507 - DNA, 15 bp, Homo sapiens
agctatgccaattaa

SEQ ID NO: 1589508 - DNA, 15 bp, Homo sapiens
gctatgccaattaat

SEQ ID NO: 1589509 - DNA, 15 bp, Homo sapiens
ctatgccaattaata

SEQ ID NO: 1589510 - DNA, 15 bp, Homo sapiens
tatgccaattaatac

SEQ ID NO: 1589511 - DNA, 15 bp, Homo sapiens
atgccaattaatact

SEQ ID NO: 1589512 - DNA, 15 bp, Homo sapiens
tgccaattaatactc

SEQ ID NO: 1589513 - DNA, 15 bp, Homo sapiens
gccaattaatactct

SEQ ID NO: 1589514 - DNA, 15 bp, Homo sapiens
ccaattaatactctc

SEQ ID NO: 1589515 - DNA, 15 bp, Homo sapiens
caattaatactctca

SEQ ID NO: 1589516 - DNA, 15 bp, Homo sapiens
aattaatactctcac

SEQ ID NO: 1589517 - DNA, 15 bp, Homo sapiens
attaatactctcacc

SEQ ID NO: 1589518 - DNA, 15 bp, Homo sapiens
ttaatactctcacca

SEQ ID NO: 1589519 - DNA, 15 bp, Homo sapiens
taatactctcaccaa

SEQ ID NO: 1589520 - DNA, 15 bp, Homo sapiens
aatactctcaccaac

SEQ ID NO: 1589521 - DNA, 15 bp, Homo sapiens
atactctcaccaaca

SEQ ID NO: 1589522 - DNA, 15 bp, Homo sapiens
tactctcaccaacaa

SEQ ID NO: 1589523 - DNA, 15 bp, Homo sapiens
actctcaccaacaag

SEQ ID NO: 1589524 - DNA, 15 bp, Homo sapiens
ctctcaccaacaaga

SEQ ID NO: 1589525 - DNA, 15 bp, Homo sapiens
tctcaccaacaagag

SEQ ID NO: 1589526 - DNA, 15 bp, Homo sapiens
ctcaccaacaagagt

SEQ ID NO: 1589527 - DNA, 15 bp, Homo sapiens
tcaccaacaagagtg

SEQ ID NO: 1589528 - DNA, 15 bp, Homo sapiens
caccaacaagagtgc

SEQ ID NO: 1589529 - DNA, 15 bp, Homo sapiens
accaacaagagtgct

SEQ ID NO: 1589530 - DNA, 15 bp, Homo sapiens
ccaacaagagtgctt

SEQ ID NO: 1589531 - DNA, 15 bp, Homo sapiens
caacaagagtgctta

SEQ ID NO: 1589532 - DNA, 15 bp, Homo sapiens
aacaagagtgcttat

SEQ ID NO: 1589533 - DNA, 15 bp, Homo sapiens
acaagagtgcttatt

SEQ ID NO: 1589534 - DNA, 15 bp, Homo sapiens
caagagtgcttattt

SEQ ID NO: 1589535 - DNA, 15 bp, Homo sapiens
aagagtgcttatttc

SEQ ID NO: 1589536 - DNA, 15 bp, Homo sapiens
agagtgcttatttcc

SEQ ID NO: 1589537 - DNA, 15 bp, Homo sapiens
gagtgcttatttccc

SEQ ID NO: 1589538 - DNA, 15 bp, Homo sapiens
agtgcttatttcccc

SEQ ID NO: 1589539 - DNA, 15 bp, Homo sapiens
gtgcttatttcccct

SEQ ID NO: 1589540 - DNA, 15 bp, Homo sapiens
tgcttatttcccctc

SEQ ID NO: 1589541 - DNA, 15 bp, Homo sapiens
gcttatttcccctca

SEQ ID NO: 1589542 - DNA, 15 bp, Homo sapiens
cttatttcccctcag

SEQ ID NO: 1589543 - DNA, 15 bp, Homo sapiens
ttatttcccctcagc

SEQ ID NO: 1589544 - DNA, 15 bp, Homo sapiens
tatttcccctcagca

SEQ ID NO: 1589545 - DNA, 15 bp, Homo sapiens
atttcccctcagcat

SEQ ID NO: 1589546 - DNA, 15 bp, Homo sapiens
tttcccctcagcata

SEQ ID NO: 1589547 - DNA, 15 bp, Homo sapiens
ttcccctcagcatat

SEQ ID NO: 1589548 - DNA, 15 bp, Homo sapiens
tcccctcagcatatt

SEQ ID NO: 1589549 - DNA, 15 bp, Homo sapiens
cccctcagcatatta

SEQ ID NO: 1589550 - DNA, 15 bp, Homo sapiens
ccctcagcatattat

SEQ ID NO: 1589551 - DNA, 15 bp, Homo sapiens
cctcagcatattatc

SEQ ID NO: 1589552 - DNA, 15 bp, Homo sapiens
ctcagcatattatca

SEQ ID NO: 1589553 - DNA, 15 bp, Homo sapiens
tcagcatattatcag

SEQ ID NO: 1589554 - DNA, 15 bp, Homo sapiens
cagcatattatcagg

SEQ ID NO: 1589555 - DNA, 15 bp, Homo sapiens
agcatattatcaggc

SEQ ID NO: 1589556 - DNA, 15 bp, Homo sapiens
gcatattatcaggct

SEQ ID NO: 1589557 - DNA, 15 bp, Homo sapiens
catattatcaggctt

SEQ ID NO: 1589558 - DNA, 15 bp, Homo sapiens
atattatcaggctta

SEQ ID NO: 1589559 - DNA, 15 bp, Homo sapiens
tattatcaggcttaa

SEQ ID NO: 1589560 - DNA, 15 bp, Homo sapiens
attatcaggcttaag

SEQ ID NO: 1589561 - DNA, 15 bp, Homo sapiens
ttatcaggcttaagt

SEQ ID NO: 1589562 - DNA, 15 bp, Homo sapiens
tatcaggcttaagtt

SEQ ID NO: 1589563 - DNA, 15 bp, Homo sapiens
atcaggcttaagttt

SEQ ID NO: 1589564 - DNA, 15 bp, Homo sapiens
tcaggcttaagtttt

SEQ ID NO: 1589565 - DNA, 15 bp, Homo sapiens
caggcttaagttttg

SEQ ID NO: 1589566 - DNA, 15 bp, Homo sapiens
aggcttaagttttgc

SEQ ID NO: 1589567 - DNA, 15 bp, Homo sapiens
ggcttaagttttgcc

SEQ ID NO: 1589568 - DNA, 15 bp, Homo sapiens
gcttaagttttgcca

SEQ ID NO: 1589569 - DNA, 15 bp, Homo sapiens
cttaagttttgccag

SEQ ID NO: 1589570 - DNA, 15 bp, Homo sapiens
ttaagttttgccagt

SEQ ID NO: 1589571 - DNA, 15 bp, Homo sapiens
taagttttgccagta

SEQ ID NO: 1589572 - DNA, 15 bp, Homo sapiens
aagttttgccagtat

SEQ ID NO: 1589573 - DNA, 15 bp, Homo sapiens
agttttgccagtatg

SEQ ID NO: 1589574 - DNA, 15 bp, Homo sapiens
gttttgccagtatgg

SEQ ID NO: 1589575 - DNA, 15 bp, Homo sapiens
ttttgccagtatggg

SEQ ID NO: 1589576 - DNA, 15 bp, Homo sapiens
tttgccagtatgggt

SEQ ID NO: 1589577 - DNA, 15 bp, Homo sapiens
ttgccagtatgggtg

SEQ ID NO: 1589578 - DNA, 15 bp, Homo sapiens
tgccagtatgggtgg

SEQ ID NO: 1589579 - DNA, 15 bp, Homo sapiens
gccagtatgggtggg

SEQ ID NO: 1589580 - DNA, 15 bp, Homo sapiens
ccagtatgggtggga

SEQ ID NO: 1589581 - DNA, 15 bp, Homo sapiens
cagtatgggtgggag

SEQ ID NO: 1589582 - DNA, 15 bp, Homo sapiens
agtatgggtgggaga

SEQ ID NO: 1589583 - DNA, 15 bp, Homo sapiens
gtatgggtgggagaa

SEQ ID NO: 1589584 - DNA, 15 bp, Homo sapiens
tatgggtgggagaac

SEQ ID NO: 1589585 - DNA, 15 bp, Homo sapiens
atgggtgggagaaca

SEQ ID NO: 1589586 - DNA, 15 bp, Homo sapiens
tgggtgggagaacag

SEQ ID NO: 1589587 - DNA, 15 bp, Homo sapiens
gggtgggagaacagt

SEQ ID NO: 1589588 - DNA, 15 bp, Homo sapiens
ggtgggagaacagta

SEQ ID NO: 1589589 - DNA, 15 bp, Homo sapiens
gtgggagaacagtag

SEQ ID NO: 1589590 - DNA, 15 bp, Homo sapiens
tgggagaacagtaga

SEQ ID NO: 1589591 - DNA, 15 bp, Homo sapiens
gggagaacagtagaa

SEQ ID NO: 1589592 - DNA, 15 bp, Homo sapiens
ggagaacagtagaat

SEQ ID NO: 1589593 - DNA, 15 bp, Homo sapiens
gagaacagtagaatc

SEQ ID NO: 1589594 - DNA, 15 bp, Homo sapiens
agaacagtagaatca

SEQ ID NO: 1589595 - DNA, 15 bp, Homo sapiens
gaacagtagaatcac

SEQ ID NO: 1589596 - DNA, 15 bp, Homo sapiens
aacagtagaatcaca

SEQ ID NO: 1589597 - DNA, 15 bp, Homo sapiens
acagtagaatcacat

SEQ ID NO: 1589598 - DNA, 15 bp, Homo sapiens
cagtagaatcacatt

SEQ ID NO: 1589599 - DNA, 15 bp, Homo sapiens
agtagaatcacattg

SEQ ID NO: 1589600 - DNA, 15 bp, Homo sapiens
gtagaatcacattgt

SEQ ID NO: 1589601 - DNA, 15 bp, Homo sapiens
tagaatcacattgtt

SEQ ID NO: 1589602 - DNA, 15 bp, Homo sapiens
agaatcacattgttt

SEQ ID NO: 1589603 - DNA, 15 bp, Homo sapiens
gaatcacattgtttt

SEQ ID NO: 1589604 - DNA, 15 bp, Homo sapiens
aatcacattgtttta

SEQ ID NO: 1589605 - DNA, 15 bp, Homo sapiens
atcacattgttttag

SEQ ID NO: 1589606 - DNA, 15 bp, Homo sapiens
tcacattgttttagt

SEQ ID NO: 1589607 - DNA, 15 bp, Homo sapiens
cacattgttttagtg

SEQ ID NO: 1589608 - DNA, 15 bp, Homo sapiens
acattgttttagtgt

SEQ ID NO: 1589609 - DNA, 15 bp, Homo sapiens
cattgttttagtgtt

SEQ ID NO: 1589610 - DNA, 15 bp, Homo sapiens
attgttttagtgttt

SEQ ID NO: 1589611 - DNA, 15 bp, Homo sapiens
ttgttttagtgtttg

SEQ ID NO: 1589612 - DNA, 15 bp, Homo sapiens
tgttttagtgtttgt

SEQ ID NO: 1589613 - DNA, 15 bp, Homo sapiens
gttttagtgtttgtt

SEQ ID NO: 1589614 - DNA, 15 bp, Homo sapiens
ttttagtgtttgttt

SEQ ID NO: 1589615 - DNA, 15 bp, Homo sapiens
tttagtgtttgtttc

SEQ ID NO: 1589616 - DNA, 15 bp, Homo sapiens
ttagtgtttgtttct

SEQ ID NO: 1589617 - DNA, 15 bp, Homo sapiens
tagtgtttgtttctc

SEQ ID NO: 1589618 - DNA, 15 bp, Homo sapiens
agtgtttgtttctca

SEQ ID NO: 1589619 - DNA, 15 bp, Homo sapiens
gtgtttgtttctcag

SEQ ID NO: 1589620 - DNA, 15 bp, Homo sapiens
tgtttgtttctcaga

SEQ ID NO: 1589621 - DNA, 15 bp, Homo sapiens
gtttgtttctcagat

SEQ ID NO: 1589622 - DNA, 15 bp, Homo sapiens
ttgtttctcagatag

SEQ ID NO: 1589623 - DNA, 15 bp, Homo sapiens
tgtttctcagataga

SEQ ID NO: 1589624 - DNA, 15 bp, Homo sapiens
gtttctcagatagat

SEQ ID NO: 1589625 - DNA, 15 bp, Homo sapiens
tttctcagatagata

SEQ ID NO: 1589626 - DNA, 15 bp, Homo sapiens
ttctcagatagatat

SEQ ID NO: 1589627 - DNA, 15 bp, Homo sapiens
tctcagatagatata

SEQ ID NO: 1589628 - DNA, 15 bp, Homo sapiens
ctcagatagatataa

SEQ ID NO: 1589629 - DNA, 15 bp, Homo sapiens
tcagatagatataat

SEQ ID NO: 1589630 - DNA, 15 bp, Homo sapiens
cagatagatataatt

SEQ ID NO: 1589631 - DNA, 15 bp, Homo sapiens
agatagatataattt

SEQ ID NO: 1589632 - DNA, 15 bp, Homo sapiens
gatagatataatttt

SEQ ID NO: 1589633 - DNA, 15 bp, Homo sapiens
atagatataatttta

SEQ ID NO: 1589634 - DNA, 15 bp, Homo sapiens
tagatataattttac

SEQ ID NO: 1589635 - DNA, 15 bp, Homo sapiens
agatataattttaca

SEQ ID NO: 1589636 - DNA, 15 bp, Homo sapiens
gatataattttacac

SEQ ID NO: 1589637 - DNA, 15 bp, Homo sapiens
atataattttacacc

SEQ ID NO: 1589638 - DNA, 15 bp, Homo sapiens
tataattttacacct

SEQ ID NO: 1589639 - DNA, 15 bp, Homo sapiens
ataattttacacctt

SEQ ID NO: 1589640 - DNA, 15 bp, Homo sapiens
taattttacacctta

SEQ ID NO: 1589641 - DNA, 15 bp, Homo sapiens
aattttacaccttat

SEQ ID NO: 1589642 - DNA, 15 bp, Homo sapiens
attttacaccttata

SEQ ID NO: 1589643 - DNA, 15 bp, Homo sapiens
ttttacaccttataa

SEQ ID NO: 1589644 - DNA, 15 bp, Homo sapiens
tttacaccttataac

SEQ ID NO: 1589645 - DNA, 15 bp, Homo sapiens
ttacaccttataacc

SEQ ID NO: 1589646 - DNA, 15 bp, Homo sapiens
tacaccttataacct

SEQ ID NO: 1589647 - DNA, 15 bp, Homo sapiens
acaccttataacctt

SEQ ID NO: 1589648 - DNA, 15 bp, Homo sapiens
caccttataaccttc

SEQ ID NO: 1589649 - DNA, 15 bp, Homo sapiens
accttataaccttct

SEQ ID NO: 1589650 - DNA, 15 bp, Homo sapiens
ccttataaccttctc

SEQ ID NO: 1589651 - DNA, 15 bp, Homo sapiens
cttataaccttctct

SEQ ID NO: 1589652 - DNA, 15 bp, Homo sapiens
ttataaccttctctt

SEQ ID NO: 1589653 - DNA, 15 bp, Homo sapiens
tataaccttctcttc

SEQ ID NO: 1589654 - DNA, 15 bp, Homo sapiens
ataaccttctcttct

SEQ ID NO: 1589655 - DNA, 15 bp, Homo sapiens
taaccttctcttcta

SEQ ID NO: 1589656 - DNA, 15 bp, Homo sapiens
aaccttctcttctat

SEQ ID NO: 1589657 - DNA, 15 bp, Homo sapiens
accttctcttctata

SEQ ID NO: 1589658 - DNA, 15 bp, Homo sapiens
ccttctcttctataa

SEQ ID NO: 1589659 - DNA, 15 bp, Homo sapiens
cttctcttctataaa

SEQ ID NO: 1589660 - DNA, 15 bp, Homo sapiens
ttctcttctataaat

SEQ ID NO: 1589661 - DNA, 15 bp, Homo sapiens
tctcttctataaatt

SEQ ID NO: 1589662 - DNA, 15 bp, Homo sapiens
ctcttctataaattg

SEQ ID NO: 1589663 - DNA, 15 bp, Homo sapiens
tcttctataaattgt

SEQ ID NO: 1589664 - DNA, 15 bp, Homo sapiens
cttctataaattgtc

SEQ ID NO: 1589665 - DNA, 15 bp, Homo sapiens
ttctataaattgtct

SEQ ID NO: 1589666 - DNA, 15 bp, Homo sapiens
tctataaattgtcta

SEQ ID NO: 1589667 - DNA, 15 bp, Homo sapiens
ctataaattgtctat

SEQ ID NO: 1589668 - DNA, 15 bp, Homo sapiens
tataaattgtctatt

SEQ ID NO: 1589669 - DNA, 15 bp, Homo sapiens
ataaattgtctattt

SEQ ID NO: 1589670 - DNA, 15 bp, Homo sapiens
taaattgtctatttg

SEQ ID NO: 1589671 - DNA, 15 bp, Homo sapiens
aaattgtctatttgt

SEQ ID NO: 1589672 - DNA, 15 bp, Homo sapiens
aattgtctatttgtg

SEQ ID NO: 1589673 - DNA, 15 bp, Homo sapiens
attgtctatttgtgt

SEQ ID NO: 1589674 - DNA, 15 bp, Homo sapiens
ttgtctatttgtgtt

SEQ ID NO: 1589675 - DNA, 15 bp, Homo sapiens
tgtctatttgtgttc

SEQ ID NO: 1589676 - DNA, 15 bp, Homo sapiens
gtctatttgtgttca

SEQ ID NO: 1589677 - DNA, 15 bp, Homo sapiens
tctatttgtgttcat

SEQ ID NO: 1589678 - DNA, 15 bp, Homo sapiens
ctatttgtgttcatt

SEQ ID NO: 1589679 - DNA, 15 bp, Homo sapiens
tatttgtgttcattc

SEQ ID NO: 1589680 - DNA, 15 bp, Homo sapiens
atttgtgttcattct

SEQ ID NO: 1589681 - DNA, 15 bp, Homo sapiens
tttgtgttcattctc

SEQ ID NO: 1589682 - DNA, 15 bp, Homo sapiens
ttgtgttcattctcc

SEQ ID NO: 1589683 - DNA, 15 bp, Homo sapiens
tgtgttcattctcca

SEQ ID NO: 1589684 - DNA, 15 bp, Homo sapiens
gtgttcattctccat

SEQ ID NO: 1589685 - DNA, 15 bp, Homo sapiens
tgttcattctccatt

SEQ ID NO: 1589686 - DNA, 15 bp, Homo sapiens
gttcattctccattt

SEQ ID NO: 1589687 - DNA, 15 bp, Homo sapiens
ttcattctccatttt

SEQ ID NO: 1589688 - DNA, 15 bp, Homo sapiens
tcattctccattttc

SEQ ID NO: 1589689 - DNA, 15 bp, Homo sapiens
cattctccattttcc

SEQ ID NO: 1589690 - DNA, 15 bp, Homo sapiens
attctccattttcct

SEQ ID NO: 1589691 - DNA, 15 bp, Homo sapiens
ttctccattttccta

SEQ ID NO: 1589692 - DNA, 15 bp, Homo sapiens
tctccattttcctat

SEQ ID NO: 1589693 - DNA, 15 bp, Homo sapiens
ctccattttcctatg

SEQ ID NO: 1589694 - DNA, 15 bp, Homo sapiens
tccattttcctatgg

SEQ ID NO: 1589695 - DNA, 15 bp, Homo sapiens
ccattttcctatggg

SEQ ID NO: 1589696 - DNA, 15 bp, Homo sapiens
cattttcctatgggt

SEQ ID NO: 1589697 - DNA, 15 bp, Homo sapiens
attttcctatgggtt

SEQ ID NO: 1589698 - DNA, 15 bp, Homo sapiens
ttttcctatgggttc

SEQ ID NO: 1589699 - DNA, 15 bp, Homo sapiens
tttcctatgggttct

SEQ ID NO: 1589700 - DNA, 15 bp, Homo sapiens
ttcctatgggttctt

SEQ ID NO: 1589701 - DNA, 15 bp, Homo sapiens
tcctatgggttctta

SEQ ID NO: 1589702 - DNA, 15 bp, Homo sapiens
cctatgggttcttat

SEQ ID NO: 1589703 - DNA, 15 bp, Homo sapiens
ctatgggttcttatt

SEQ ID NO: 1589704 - DNA, 15 bp, Homo sapiens
tatgggttcttattg

SEQ ID NO: 1589705 - DNA, 15 bp, Homo sapiens
atgggttcttattgt

SEQ ID NO: 1589706 - DNA, 15 bp, Homo sapiens
tgggttcttattgtt

SEQ ID NO: 1589707 - DNA, 15 bp, Homo sapiens
gggttcttattgttg

SEQ ID NO: 1589708 - DNA, 15 bp, Homo sapiens
ggttcttattgttgg

SEQ ID NO: 1589709 - DNA, 15 bp, Homo sapiens
gttcttattgttgga

SEQ ID NO: 1589710 - DNA, 15 bp, Homo sapiens
ttcttattgttggag

SEQ ID NO: 1589711 - DNA, 15 bp, Homo sapiens
tcttattgttggagc

SEQ ID NO: 1589712 - DNA, 15 bp, Homo sapiens
cttattgttggagcc

SEQ ID NO: 1589713 - DNA, 15 bp, Homo sapiens
ttattgttggagccc

SEQ ID NO: 1589714 - DNA, 15 bp, Homo sapiens
tattgttggagccca

SEQ ID NO: 1589715 - DNA, 15 bp, Homo sapiens
attgttggagcccaa

SEQ ID NO: 1589716 - DNA, 15 bp, Homo sapiens
ttgttggagcccaat

SEQ ID NO: 1589717 - DNA, 15 bp, Homo sapiens
tgttggagcccaata

SEQ ID NO: 1589718 - DNA, 15 bp, Homo sapiens
gttggagcccaatat

SEQ ID NO: 1589719 - DNA, 15 bp, Homo sapiens
ttggagcccaatata

SEQ ID NO: 1589720 - DNA, 15 bp, Homo sapiens
tggagcccaatatat

SEQ ID NO: 1589721 - DNA, 15 bp, Homo sapiens
ggagcccaatatata

SEQ ID NO: 1589722 - DNA, 15 bp, Homo sapiens
gagcccaatatataa

SEQ ID NO: 1589723 - DNA, 15 bp, Homo sapiens
agcccaatatataaa

SEQ ID NO: 1589724 - DNA, 15 bp, Homo sapiens
gcccaatatataaaa

SEQ ID NO: 1589725 - DNA, 15 bp, Homo sapiens
cccaatatataaaag

SEQ ID NO: 1589726 - DNA, 15 bp, Homo sapiens
ccaatatataaaagg

SEQ ID NO: 1589727 - DNA, 15 bp, Homo sapiens
caatatataaaaggg

SEQ ID NO: 1589728 - DNA, 15 bp, Homo sapiens
aatatataaaagggg

SEQ ID NO: 1589729 - DNA, 15 bp, Homo sapiens
atatataaaaggggg

SEQ ID NO: 1589730 - DNA, 15 bp, Homo sapiens
tatataaaagggggt

SEQ ID NO: 1589731 - DNA, 15 bp, Homo sapiens
atataaaagggggta

SEQ ID NO: 1589732 - DNA, 15 bp, Homo sapiens
tataaaagggggtat

SEQ ID NO: 1589733 - DNA, 15 bp, Homo sapiens
ataaaagggggtatt

SEQ ID NO: 1589734 - DNA, 15 bp, Homo sapiens
taaaagggggtattt

SEQ ID NO: 1589735 - DNA, 15 bp, Homo sapiens
aaaagggggtatttg

SEQ ID NO: 1589736 - DNA, 15 bp, Homo sapiens
aaagggggtatttgt

SEQ ID NO: 1589737 - DNA, 15 bp, Homo sapiens
aagggggtatttgtt

SEQ ID NO: 1589738 - DNA, 15 bp, Homo sapiens
agggggtatttgtta

SEQ ID NO: 1589739 - DNA, 15 bp, Homo sapiens
gggggtatttgttac

SEQ ID NO: 1589740 - DNA, 15 bp, Homo sapiens
ggggtatttgttaca

SEQ ID NO: 1589741 - DNA, 15 bp, Homo sapiens
gggtatttgttacag

SEQ ID NO: 1589742 - DNA, 15 bp, Homo sapiens
ggtatttgttacaga

SEQ ID NO: 1589743 - DNA, 15 bp, Homo sapiens
gtatttgttacagaa

SEQ ID NO: 1589744 - DNA, 15 bp, Homo sapiens
tatttgttacagaac

SEQ ID NO: 1589745 - DNA, 15 bp, Homo sapiens
atttgttacagaacc

SEQ ID NO: 1589746 - DNA, 15 bp, Homo sapiens
tttgttacagaacct

SEQ ID NO: 1589747 - DNA, 15 bp, Homo sapiens
ttgttacagaacctc

SEQ ID NO: 1589748 - DNA, 15 bp, Homo sapiens
tgttacagaacctct

SEQ ID NO: 1589749 - DNA, 15 bp, Homo sapiens
gttacagaacctctt

SEQ ID NO: 1589750 - DNA, 15 bp, Homo sapiens
ttacagaacctcttc

SEQ ID NO: 1589751 - DNA, 15 bp, Homo sapiens
tacagaacctcttca

SEQ ID NO: 1589752 - DNA, 15 bp, Homo sapiens
acagaacctcttcag

SEQ ID NO: 1589753 - DNA, 15 bp, Homo sapiens
cagaacctcttcagt

SEQ ID NO: 1589754 - DNA, 15 bp, Homo sapiens
agaacctcttcagtt

SEQ ID NO: 1589755 - DNA, 15 bp, Homo sapiens
gaacctcttcagttt

SEQ ID NO: 1589756 - DNA, 15 bp, Homo sapiens
aacctcttcagtttt

SEQ ID NO: 1589757 - DNA, 15 bp, Homo sapiens
acctcttcagttttg

SEQ ID NO: 1589758 - DNA, 15 bp, Homo sapiens
cctcttcagttttgg

SEQ ID NO: 1589759 - DNA, 15 bp, Homo sapiens
ctcttcagttttggt

SEQ ID NO: 1589760 - DNA, 15 bp, Homo sapiens
tcttcagttttggtt

SEQ ID NO: 1589761 - DNA, 15 bp, Homo sapiens
cttcagttttggttc

SEQ ID NO: 1589762 - DNA, 15 bp, Homo sapiens
ttcagttttggttca

SEQ ID NO: 1589763 - DNA, 15 bp, Homo sapiens
tcagttttggttcat

SEQ ID NO: 1589764 - DNA, 15 bp, Homo sapiens
cagttttggttcatg

SEQ ID NO: 1589765 - DNA, 15 bp, Homo sapiens
agttttggttcatgt

SEQ ID NO: 1589766 - DNA, 15 bp, Homo sapiens
gttttggttcatgtc

SEQ ID NO: 1589767 - DNA, 15 bp, Homo sapiens
ttttggttcatgtca

SEQ ID NO: 1589768 - DNA, 15 bp, Homo sapiens
tttggttcatgtcat

SEQ ID NO: 1589769 - DNA, 15 bp, Homo sapiens
ttggttcatgtcatg

SEQ ID NO: 1589770 - DNA, 15 bp, Homo sapiens
tggttcatgtcatgc

SEQ ID NO: 1589771 - DNA, 15 bp, Homo sapiens
ggttcatgtcatgcc

SEQ ID NO: 1589772 - DNA, 15 bp, Homo sapiens
gttcatgtcatgcct

SEQ ID NO: 1589773 - DNA, 15 bp, Homo sapiens
ttcatgtcatgcctg

SEQ ID NO: 1589774 - DNA, 15 bp, Homo sapiens
tcatgtcatgcctgg

SEQ ID NO: 1589775 - DNA, 15 bp, Homo sapiens
catgtcatgcctggg

SEQ ID NO: 1589776 - DNA, 15 bp, Homo sapiens
atgtcatgcctgggt

SEQ ID NO: 1589777 - DNA, 15 bp, Homo sapiens
tgtcatgcctgggtt

SEQ ID NO: 1589778 - DNA, 15 bp, Homo sapiens
gtcatgcctgggttt

SEQ ID NO: 1589779 - DNA, 15 bp, Homo sapiens
tcatgcctgggtttt

SEQ ID NO: 1589780 - DNA, 15 bp, Homo sapiens
catgcctgggttttt

SEQ ID NO: 1589781 - DNA, 15 bp, Homo sapiens
atgcctgggttttta

SEQ ID NO: 1589782 - DNA, 15 bp, Homo sapiens
tgcctgggtttttac

SEQ ID NO: 1589783 - DNA, 15 bp, Homo sapiens
gcctgggtttttacc

SEQ ID NO: 1589784 - DNA, 15 bp, Homo sapiens
cctgggtttttaccc

SEQ ID NO: 1589785 - DNA, 15 bp, Homo sapiens
ctgggtttttaccct

SEQ ID NO: 1589786 - DNA, 15 bp, Homo sapiens
tgggtttttaccctt

SEQ ID NO: 1589787 - DNA, 15 bp, Homo sapiens
gggtttttacccttt

SEQ ID NO: 1589788 - DNA, 15 bp, Homo sapiens
ggtttttaccctttc

SEQ ID NO: 1589789 - DNA, 15 bp, Homo sapiens
gtttttaccctttct

SEQ ID NO: 1589790 - DNA, 15 bp, Homo sapiens
tttttaccctttcta

SEQ ID NO: 1589791 - DNA, 15 bp, Homo sapiens
ttttaccctttctac

SEQ ID NO: 1589792 - DNA, 15 bp, Homo sapiens
tttaccctttctacg

SEQ ID NO: 1589793 - DNA, 15 bp, Homo sapiens
ttaccctttctacgg

SEQ ID NO: 1589794 - DNA, 15 bp, Homo sapiens
taccctttctacgga

SEQ ID NO: 1589795 - DNA, 15 bp, Homo sapiens
accctttctacggat

SEQ ID NO: 1589796 - DNA, 15 bp, Homo sapiens
ccctttctacggatg

SEQ ID NO: 1589797 - DNA, 15 bp, Homo sapiens
cctttctacggatgt

SEQ ID NO: 1589798 - DNA, 15 bp, Homo sapiens
ctttctacggatgtt

SEQ ID NO: 1589799 - DNA, 15 bp, Homo sapiens
tttctacggatgtta

SEQ ID NO: 1589800 - DNA, 15 bp, Homo sapiens
ttctacggatgttaa

SEQ ID NO: 1589801 - DNA, 15 bp, Homo sapiens
tctacggatgttaaa

SEQ ID NO: 1589802 - DNA, 15 bp, Homo sapiens
ctacggatgttaaaa

SEQ ID NO: 1589803 - DNA, 15 bp, Homo sapiens
tacggatgttaaaaa

SEQ ID NO: 1589804 - DNA, 15 bp, Homo sapiens
acggatgttaaaaaa

SEQ ID NO: 1589805 - DNA, 15 bp, Homo sapiens
cggatgttaaaaaaa

SEQ ID NO: 1589806 - DNA, 15 bp, Homo sapiens
ggatgttaaaaaaaa

SEQ ID NO: 1589807 - DNA, 15 bp, Homo sapiens
gatgttaaaaaaaat

SEQ ID NO: 1589808 - DNA, 15 bp, Homo sapiens
tgttaaaaaaaattc

SEQ ID NO: 1589809 - DNA, 15 bp, Homo sapiens
gttaaaaaaaattct

SEQ ID NO: 1589810 - DNA, 15 bp, Homo sapiens
ttaaaaaaaattctc

SEQ ID NO: 1589811 - DNA, 15 bp, Homo sapiens
taaaaaaaattctct

SEQ ID NO: 1589812 - DNA, 15 bp, Homo sapiens
aaaaaaaattctcta

SEQ ID NO: 1589813 - DNA, 15 bp, Homo sapiens
aaaaaaattctctat

SEQ ID NO: 1589814 - DNA, 15 bp, Homo sapiens
aaaaaattctctatt

SEQ ID NO: 1589815 - DNA, 15 bp, Homo sapiens
aaaaattctctattt

SEQ ID NO: 1589816 - DNA, 15 bp, Homo sapiens
aaaattctctatttt

SEQ ID NO: 1589817 - DNA, 15 bp, Homo sapiens
aaattctctattttc

SEQ ID NO: 1589818 - DNA, 15 bp, Homo sapiens
aattctctattttct

SEQ ID NO: 1589819 - DNA, 15 bp, Homo sapiens
attctctattttctt

SEQ ID NO: 1589820 - DNA, 15 bp, Homo sapiens
ttctctattttcttc

SEQ ID NO: 1589821 - DNA, 15 bp, Homo sapiens
tctctattttcttcc

SEQ ID NO: 1589822 - DNA, 15 bp, Homo sapiens
ctctattttcttcca

SEQ ID NO: 1589823 - DNA, 15 bp, Homo sapiens
tctattttcttccag

SEQ ID NO: 1589824 - DNA, 15 bp, Homo sapiens
ctattttcttccagt

SEQ ID NO: 1589825 - DNA, 15 bp, Homo sapiens
tattttcttccagtc

SEQ ID NO: 1589826 - DNA, 15 bp, Homo sapiens
attttcttccagtcc

SEQ ID NO: 1589827 - DNA, 15 bp, Homo sapiens
ttttcttccagtcca

SEQ ID NO: 1589828 - DNA, 15 bp, Homo sapiens
tttcttccagtccac

SEQ ID NO: 1589829 - DNA, 15 bp, Homo sapiens
ttcttccagtccact

SEQ ID NO: 1589830 - DNA, 15 bp, Homo sapiens
tcttccagtccactt

SEQ ID NO: 1589831 - DNA, 15 bp, Homo sapiens
cttccagtccactta

SEQ ID NO: 1589832 - DNA, 15 bp, Homo sapiens
ttccagtccacttat

SEQ ID NO: 1589833 - DNA, 15 bp, Homo sapiens
tccagtccacttatg

SEQ ID NO: 1589834 - DNA, 15 bp, Homo sapiens
ccagtccacttatgg

SEQ ID NO: 1589835 - DNA, 15 bp, Homo sapiens
cagtccacttatggc

SEQ ID NO: 1589836 - DNA, 15 bp, Homo sapiens
agtccacttatggct

SEQ ID NO: 1589837 - DNA, 15 bp, Homo sapiens
gtccacttatggctt

SEQ ID NO: 1589838 - DNA, 15 bp, Homo sapiens
tccacttatggcttt

SEQ ID NO: 1589839 - DNA, 15 bp, Homo sapiens
ccacttatggcttta

SEQ ID NO: 1589840 - DNA, 15 bp, Homo sapiens
cacttatggctttat

SEQ ID NO: 1589841 - DNA, 15 bp, Homo sapiens
acttatggctttatt

SEQ ID NO: 1589842 - DNA, 15 bp, Homo sapiens
cttatggctttattt

SEQ ID NO: 1589843 - DNA, 15 bp, Homo sapiens
ttatggctttatttt

SEQ ID NO: 1589844 - DNA, 15 bp, Homo sapiens
tatggctttattttt

SEQ ID NO: 1589845 - DNA, 15 bp, Homo sapiens
atggctttatttttt

SEQ ID NO: 1589846 - DNA, 15 bp, Homo sapiens
tggctttatttttta

SEQ ID NO: 1589847 - DNA, 15 bp, Homo sapiens
ggctttattttttac

SEQ ID NO: 1589848 - DNA, 15 bp, Homo sapiens
gctttattttttaca

SEQ ID NO: 1589849 - DNA, 15 bp, Homo sapiens
ctttattttttacat

SEQ ID NO: 1589850 - DNA, 15 bp, Homo sapiens
tttattttttacatt

SEQ ID NO: 1589851 - DNA, 15 bp, Homo sapiens
ttattttttacattt

SEQ ID NO: 1589852 - DNA, 15 bp, Homo sapiens
tattttttacattta

SEQ ID NO: 1589853 - DNA, 15 bp, Homo sapiens
attttttacatttag

SEQ ID NO: 1589854 - DNA, 15 bp, Homo sapiens
ttttttacatttaga

SEQ ID NO: 1589855 - DNA, 15 bp, Homo sapiens
tttttacatttagat

SEQ ID NO: 1589856 - DNA, 15 bp, Homo sapiens
ttttacatttagatt

SEQ ID NO: 1589857 - DNA, 15 bp, Homo sapiens
tttacatttagattt

SEQ ID NO: 1589858 - DNA, 15 bp, Homo sapiens
ttacatttagatttt

SEQ ID NO: 1589859 - DNA, 15 bp, Homo sapiens
tacatttagatttta

SEQ ID NO: 1589860 - DNA, 15 bp, Homo sapiens
acatttagattttaa

SEQ ID NO: 1589861 - DNA, 15 bp, Homo sapiens
catttagattttaat

SEQ ID NO: 1589862 - DNA, 15 bp, Homo sapiens
atttagattttaatc

SEQ ID NO: 1589863 - DNA, 15 bp, Homo sapiens
tttagattttaatcc

SEQ ID NO: 1589864 - DNA, 15 bp, Homo sapiens
ttagattttaatccg

SEQ ID NO: 1589865 - DNA, 15 bp, Homo sapiens
tagattttaatccgt

SEQ ID NO: 1589866 - DNA, 15 bp, Homo sapiens
agattttaatccgtc

SEQ ID NO: 1589867 - DNA, 15 bp, Homo sapiens
gattttaatccgtct

SEQ ID NO: 1589868 - DNA, 15 bp, Homo sapiens
attttaatccgtctg

SEQ ID NO: 1589869 - DNA, 15 bp, Homo sapiens
ttttaatccgtctgg

SEQ ID NO: 1589870 - DNA, 15 bp, Homo sapiens
tttaatccgtctgga

SEQ ID NO: 1589871 - DNA, 15 bp, Homo sapiens
ttaatccgtctggaa

SEQ ID NO: 1589872 - DNA, 15 bp, Homo sapiens
taatccgtctggaat

SEQ ID NO: 1589873 - DNA, 15 bp, Homo sapiens
aatccgtctggaatt

SEQ ID NO: 1589874 - DNA, 15 bp, Homo sapiens
atccgtctggaattt

SEQ ID NO: 1589875 - DNA, 15 bp, Homo sapiens
tccgtctggaattta

SEQ ID NO: 1589876 - DNA, 15 bp, Homo sapiens
ccgtctggaatttat

SEQ ID NO: 1589877 - DNA, 15 bp, Homo sapiens
cgtctggaatttatt

SEQ ID NO: 1589878 - DNA, 15 bp, Homo sapiens
gtctggaatttattt

SEQ ID NO: 1589879 - DNA, 15 bp, Homo sapiens
tctggaatttatttt

SEQ ID NO: 1589880 - DNA, 15 bp, Homo sapiens
ctggaatttattttt

SEQ ID NO: 1589881 - DNA, 15 bp, Homo sapiens
tggaatttatttttg

SEQ ID NO: 1589882 - DNA, 15 bp, Homo sapiens
ggaatttatttttgt

SEQ ID NO: 1589883 - DNA, 15 bp, Homo sapiens
gaatttatttttgtg

SEQ ID NO: 1589884 - DNA, 15 bp, Homo sapiens
aatttatttttgtgt

SEQ ID NO: 1589885 - DNA, 15 bp, Homo sapiens
ttatttttgtgtatg

SEQ ID NO: 1589886 - DNA, 15 bp, Homo sapiens
tatttttgtgtatgc

SEQ ID NO: 1589887 - DNA, 15 bp, Homo sapiens
atttttgtgtatgct

SEQ ID NO: 1589888 - DNA, 15 bp, Homo sapiens
tttttgtgtatgctg

SEQ ID NO: 1589889 - DNA, 15 bp, Homo sapiens
ttttgtgtatgctgt

SEQ ID NO: 1589890 - DNA, 15 bp, Homo sapiens
tttgtgtatgctgtg

SEQ ID NO: 1589891 - DNA, 15 bp, Homo sapiens
ttgtgtatgctgtga

SEQ ID NO: 1589892 - DNA, 15 bp, Homo sapiens
tgtgtatgctgtgag

SEQ ID NO: 1589893 - DNA, 15 bp, Homo sapiens
gtgtatgctgtgagg

SEQ ID NO: 1589894 - DNA, 15 bp, Homo sapiens
tgtatgctgtgaggt

SEQ ID NO: 1589895 - DNA, 15 bp, Homo sapiens
gtatgctgtgaggta

SEQ ID NO: 1589896 - DNA, 15 bp, Homo sapiens
tatgctgtgaggtag

SEQ ID NO: 1589897 - DNA, 15 bp, Homo sapiens
atgctgtgaggtagg

SEQ ID NO: 1589898 - DNA, 15 bp, Homo sapiens
tgctgtgaggtaggg

SEQ ID NO: 1589899 - DNA, 15 bp, Homo sapiens
gctgtgaggtaggga

SEQ ID NO: 1589900 - DNA, 15 bp, Homo sapiens
ctgtgaggtagggac

SEQ ID NO: 1589901 - DNA, 15 bp, Homo sapiens
tgtgaggtagggacc

SEQ ID NO: 1589902 - DNA, 15 bp, Homo sapiens
gtgaggtagggacca

SEQ ID NO: 1589903 - DNA, 15 bp, Homo sapiens
tgaggtagggaccat

SEQ ID NO: 1589904 - DNA, 15 bp, Homo sapiens
gaggtagggaccata

SEQ ID NO: 1589905 - DNA, 15 bp, Homo sapiens
aggtagggaccatac

SEQ ID NO: 1589906 - DNA, 15 bp, Homo sapiens
ggtagggaccatact

SEQ ID NO: 1589907 - DNA, 15 bp, Homo sapiens
gtagggaccatactt

SEQ ID NO: 1589908 - DNA, 15 bp, Homo sapiens
tagggaccatacttt

SEQ ID NO: 1589909 - DNA, 15 bp, Homo sapiens
agggaccatactttt

SEQ ID NO: 1589910 - DNA, 15 bp, Homo sapiens
gggaccatactttta

SEQ ID NO: 1589911 - DNA, 15 bp, Homo sapiens
ggaccatacttttat

SEQ ID NO: 1589912 - DNA, 15 bp, Homo sapiens
gaccatacttttatt

SEQ ID NO: 1589913 - DNA, 15 bp, Homo sapiens
accatacttttattt

SEQ ID NO: 1589914 - DNA, 15 bp, Homo sapiens
ccatacttttatttt

SEQ ID NO: 1589915 - DNA, 15 bp, Homo sapiens
catacttttattttt

SEQ ID NO: 1589916 - DNA, 15 bp, Homo sapiens
atacttttatttttt

SEQ ID NO: 1589917 - DNA, 15 bp, Homo sapiens
tacttttattttttc

SEQ ID NO: 1589918 - DNA, 15 bp, Homo sapiens
acttttattttttcc

SEQ ID NO: 1589919 - DNA, 15 bp, Homo sapiens
cttttattttttccc

SEQ ID NO: 1589920 - DNA, 15 bp, Homo sapiens
ttttattttttccca

SEQ ID NO: 1589921 - DNA, 15 bp, Homo sapiens
tttattttttcccaa

SEQ ID NO: 1589922 - DNA, 15 bp, Homo sapiens
ttattttttcccaaa

SEQ ID NO: 1589923 - DNA, 15 bp, Homo sapiens
tattttttcccaaat

SEQ ID NO: 1589924 - DNA, 15 bp, Homo sapiens
attttttcccaaatg

SEQ ID NO: 1589925 - DNA, 15 bp, Homo sapiens
ttttttcccaaatgg

SEQ ID NO: 1589926 - DNA, 15 bp, Homo sapiens
tttttcccaaatggg

SEQ ID NO: 1589927 - DNA, 15 bp, Homo sapiens
ttttcccaaatgggt

SEQ ID NO: 1589928 - DNA, 15 bp, Homo sapiens
tttcccaaatgggtt

SEQ ID NO: 1589929 - DNA, 15 bp, Homo sapiens
ttcccaaatgggtta

SEQ ID NO: 1589930 - DNA, 15 bp, Homo sapiens
tcccaaatgggttac

SEQ ID NO: 1589931 - DNA, 15 bp, Homo sapiens
cccaaatgggttact

SEQ ID NO: 1589932 - DNA, 15 bp, Homo sapiens
ccaaatgggttacta

SEQ ID NO: 1589933 - DNA, 15 bp, Homo sapiens
caaatgggttactag

SEQ ID NO: 1589934 - DNA, 15 bp, Homo sapiens
aaatgggttactagt

SEQ ID NO: 1589935 - DNA, 15 bp, Homo sapiens
aatgggttactagtt

SEQ ID NO: 1589936 - DNA, 15 bp, Homo sapiens
atgggttactagttg

SEQ ID NO: 1589937 - DNA, 15 bp, Homo sapiens
tgggttactagttgg

SEQ ID NO: 1589938 - DNA, 15 bp, Homo sapiens
gggttactagttggc

SEQ ID NO: 1589939 - DNA, 15 bp, Homo sapiens
ggttactagttggcc

SEQ ID NO: 1589940 - DNA, 15 bp, Homo sapiens
gttactagttggcca

SEQ ID NO: 1589941 - DNA, 15 bp, Homo sapiens
ttactagttggccaa

SEQ ID NO: 1589942 - DNA, 15 bp, Homo sapiens
tactagttggccaaa

SEQ ID NO: 1589943 - DNA, 15 bp, Homo sapiens
actagttggccaaac

SEQ ID NO: 1589944 - DNA, 15 bp, Homo sapiens
ctagttggccaaaca

SEQ ID NO: 1589945 - DNA, 15 bp, Homo sapiens
tagttggccaaacat

SEQ ID NO: 1589946 - DNA, 15 bp, Homo sapiens
agttggccaaacatc

SEQ ID NO: 1589947 - DNA, 15 bp, Homo sapiens
gttggccaaacatca

SEQ ID NO: 1589948 - DNA, 15 bp, Homo sapiens
ttggccaaacatcat

SEQ ID NO: 1589949 - DNA, 15 bp, Homo sapiens
tggccaaacatcatt

SEQ ID NO: 1589950 - DNA, 15 bp, Homo sapiens
ggccaaacatcattt

SEQ ID NO: 1589951 - DNA, 15 bp, Homo sapiens
gccaaacatcattta

SEQ ID NO: 1589952 - DNA, 15 bp, Homo sapiens
ccaaacatcatttat

SEQ ID NO: 1589953 - DNA, 15 bp, Homo sapiens
caaacatcatttatt

SEQ ID NO: 1589954 - DNA, 15 bp, Homo sapiens
aaacatcatttattg

SEQ ID NO: 1589955 - DNA, 15 bp, Homo sapiens
aacatcatttattga

SEQ ID NO: 1589956 - DNA, 15 bp, Homo sapiens
acatcatttattgaa

SEQ ID NO: 1589957 - DNA, 15 bp, Homo sapiens
catcatttattgaat

SEQ ID NO: 1589958 - DNA, 15 bp, Homo sapiens
atcatttattgaata

SEQ ID NO: 1589959 - DNA, 15 bp, Homo sapiens
tcatttattgaataa

SEQ ID NO: 1589960 - DNA, 15 bp, Homo sapiens
catttattgaataat

SEQ ID NO: 1589961 - DNA, 15 bp, Homo sapiens
atttattgaataatt

SEQ ID NO: 1589962 - DNA, 15 bp, Homo sapiens
tttattgaataattc

SEQ ID NO: 1589963 - DNA, 15 bp, Homo sapiens
ttattgaataattca

SEQ ID NO: 1589964 - DNA, 15 bp, Homo sapiens
tattgaataattcat

SEQ ID NO: 1589965 - DNA, 15 bp, Homo sapiens
attgaataattcatc

SEQ ID NO: 1589966 - DNA, 15 bp, Homo sapiens
ttgaataattcatct

SEQ ID NO: 1589967 - DNA, 15 bp, Homo sapiens
tgaataattcatctt

SEQ ID NO: 1589968 - DNA, 15 bp, Homo sapiens
gaataattcatcttt

SEQ ID NO: 1589969 - DNA, 15 bp, Homo sapiens
aataattcatctttt

SEQ ID NO: 1589970 - DNA, 15 bp, Homo sapiens
ataattcatcttttc

SEQ ID NO: 1589971 - DNA, 15 bp, Homo sapiens
taattcatcttttcc

SEQ ID NO: 1589972 - DNA, 15 bp, Homo sapiens
aattcatcttttccc

SEQ ID NO: 1589973 - DNA, 15 bp, Homo sapiens
attcatcttttccct

SEQ ID NO: 1589974 - DNA, 15 bp, Homo sapiens
ttcatcttttcccta

SEQ ID NO: 1589975 - DNA, 15 bp, Homo sapiens
tcatcttttccctac

SEQ ID NO: 1589976 - DNA, 15 bp, Homo sapiens
catcttttccctact

SEQ ID NO: 1589977 - DNA, 15 bp, Homo sapiens
atcttttccctactg

SEQ ID NO: 1589978 - DNA, 15 bp, Homo sapiens
tcttttccctactga

SEQ ID NO: 1589979 - DNA, 15 bp, Homo sapiens
cttttccctactgac

SEQ ID NO: 1589980 - DNA, 15 bp, Homo sapiens
ttttccctactgact

SEQ ID NO: 1589981 - DNA, 15 bp, Homo sapiens
tttccctactgactc

SEQ ID NO: 1589982 - DNA, 15 bp, Homo sapiens
ttccctactgactcg

SEQ ID NO: 1589983 - DNA, 15 bp, Homo sapiens
tccctactgactcga

SEQ ID NO: 1589984 - DNA, 15 bp, Homo sapiens
ccctactgactcgaa

SEQ ID NO: 1589985 - DNA, 15 bp, Homo sapiens
cctactgactcgaaa

SEQ ID NO: 1589986 - DNA, 15 bp, Homo sapiens
ctactgactcgaaat

SEQ ID NO: 1589987 - DNA, 15 bp, Homo sapiens
tactgactcgaaata

SEQ ID NO: 1589988 - DNA, 15 bp, Homo sapiens
actgactcgaaatac

SEQ ID NO: 1589989 - DNA, 15 bp, Homo sapiens
ctgactcgaaatacc

SEQ ID NO: 1589990 - DNA, 15 bp, Homo sapiens
tgactcgaaatacca

SEQ ID NO: 1589991 - DNA, 15 bp, Homo sapiens
gactcgaaataccat

SEQ ID NO: 1589992 - DNA, 15 bp, Homo sapiens
actcgaaataccatc

SEQ ID NO: 1589993 - DNA, 15 bp, Homo sapiens
ctcgaaataccatct

SEQ ID NO: 1589994 - DNA, 15 bp, Homo sapiens
tcgaaataccatctt

SEQ ID NO: 1589995 - DNA, 15 bp, Homo sapiens
cgaaataccatcttt

SEQ ID NO: 1589996 - DNA, 15 bp, Homo sapiens
gaaataccatcttta

SEQ ID NO: 1589997 - DNA, 15 bp, Homo sapiens
aaataccatctttat

SEQ ID NO: 1589998 - DNA, 15 bp, Homo sapiens
aataccatctttatt

SEQ ID NO: 1589999 - DNA, 15 bp, Homo sapiens
ataccatctttattg

SEQ ID NO: 1590000 - DNA, 15 bp, Homo sapiens
taccatctttattgt

SEQ ID NO: 1590001 - DNA, 15 bp, Homo sapiens
accatctttattgta

SEQ ID NO: 1590002 - DNA, 15 bp, Homo sapiens
ccatctttattgtat

SEQ ID NO: 1590003 - DNA, 15 bp, Homo sapiens
catctttattgtata

SEQ ID NO: 1590004 - DNA, 15 bp, Homo sapiens
atctttattgtatac

SEQ ID NO: 1590005 - DNA, 15 bp, Homo sapiens
tctttattgtatact

SEQ ID NO: 1590006 - DNA, 15 bp, Homo sapiens
ctttattgtatacta

SEQ ID NO: 1590007 - DNA, 15 bp, Homo sapiens
tttattgtatactaa

SEQ ID NO: 1590008 - DNA, 15 bp, Homo sapiens
ttattgtatactaaa

SEQ ID NO: 1590009 - DNA, 15 bp, Homo sapiens
tattgtatactaaat

SEQ ID NO: 1590010 - DNA, 15 bp, Homo sapiens
attgtatactaaatc

SEQ ID NO: 1590011 - DNA, 15 bp, Homo sapiens
ttgtatactaaatcc

SEQ ID NO: 1590012 - DNA, 15 bp, Homo sapiens
tgtatactaaatcct

SEQ ID NO: 1590013 - DNA, 15 bp, Homo sapiens
gtatactaaatcctc

SEQ ID NO: 1590014 - DNA, 15 bp, Homo sapiens
tatactaaatcctca

SEQ ID NO: 1590015 - DNA, 15 bp, Homo sapiens
atactaaatcctcat

SEQ ID NO: 1590016 - DNA, 15 bp, Homo sapiens
tactaaatcctcata

SEQ ID NO: 1590017 - DNA, 15 bp, Homo sapiens
actaaatcctcatat

SEQ ID NO: 1590018 - DNA, 15 bp, Homo sapiens
ctaaatcctcatata

SEQ ID NO: 1590019 - DNA, 15 bp, Homo sapiens
taaatcctcatatag

SEQ ID NO: 1590020 - DNA, 15 bp, Homo sapiens
aaatcctcatatagt

SEQ ID NO: 1590021 - DNA, 15 bp, Homo sapiens
aatcctcatatagtt

SEQ ID NO: 1590022 - DNA, 15 bp, Homo sapiens
atcctcatatagttc

SEQ ID NO: 1590023 - DNA, 15 bp, Homo sapiens
tcctcatatagttct

SEQ ID NO: 1590024 - DNA, 15 bp, Homo sapiens
cctcatatagttctg

SEQ ID NO: 1590025 - DNA, 15 bp, Homo sapiens
ctcatatagttctgg

SEQ ID NO: 1590026 - DNA, 15 bp, Homo sapiens
tcatatagttctggg

SEQ ID NO: 1590027 - DNA, 15 bp, Homo sapiens
catatagttctgggt

SEQ ID NO: 1590028 - DNA, 15 bp, Homo sapiens
atatagttctgggtc

SEQ ID NO: 1590029 - DNA, 15 bp, Homo sapiens
tatagttctgggtct

SEQ ID NO: 1590030 - DNA, 15 bp, Homo sapiens
atagttctgggtctg

SEQ ID NO: 1590031 - DNA, 15 bp, Homo sapiens
tagttctgggtctgt

SEQ ID NO: 1590032 - DNA, 15 bp, Homo sapiens
agttctgggtctgtt

SEQ ID NO: 1590033 - DNA, 15 bp, Homo sapiens
gttctgggtctgttt

SEQ ID NO: 1590034 - DNA, 15 bp, Homo sapiens
ttctgggtctgtttc

SEQ ID NO: 1590035 - DNA, 15 bp, Homo sapiens
tctgggtctgtttct

SEQ ID NO: 1590036 - DNA, 15 bp, Homo sapiens
ctgggtctgtttctg

SEQ ID NO: 1590037 - DNA, 15 bp, Homo sapiens
tgggtctgtttctgg

SEQ ID NO: 1590038 - DNA, 15 bp, Homo sapiens
gggtctgtttctggg

SEQ ID NO: 1590039 - DNA, 15 bp, Homo sapiens
ggtctgtttctgggc

SEQ ID NO: 1590040 - DNA, 15 bp, Homo sapiens
gtctgtttctgggct

SEQ ID NO: 1590041 - DNA, 15 bp, Homo sapiens
tctgtttctgggctc

SEQ ID NO: 1590042 - DNA, 15 bp, Homo sapiens
ctgtttctgggctct

SEQ ID NO: 1590043 - DNA, 15 bp, Homo sapiens
tgtttctgggctcta

SEQ ID NO: 1590044 - DNA, 15 bp, Homo sapiens
gtttctgggctctac

SEQ ID NO: 1590045 - DNA, 15 bp, Homo sapiens
tttctgggctctact

SEQ ID NO: 1590046 - DNA, 15 bp, Homo sapiens
ttctgggctctactt

SEQ ID NO: 1590047 - DNA, 15 bp, Homo sapiens
tctgggctctacttt

SEQ ID NO: 1590048 - DNA, 15 bp, Homo sapiens
ctgggctctactttg

SEQ ID NO: 1590049 - DNA, 15 bp, Homo sapiens
tgggctctactttgt

SEQ ID NO: 1590050 - DNA, 15 bp, Homo sapiens
gggctctactttgtt

SEQ ID NO: 1590051 - DNA, 15 bp, Homo sapiens
ggctctactttgttc

SEQ ID NO: 1590052 - DNA, 15 bp, Homo sapiens
gctctactttgttca

SEQ ID NO: 1590053 - DNA, 15 bp, Homo sapiens
ctctactttgttcat

SEQ ID NO: 1590054 - DNA, 15 bp, Homo sapiens
tctactttgttcatt

SEQ ID NO: 1590055 - DNA, 15 bp, Homo sapiens
ctactttgttcattt

SEQ ID NO: 1590056 - DNA, 15 bp, Homo sapiens
tactttgttcattta

SEQ ID NO: 1590057 - DNA, 15 bp, Homo sapiens
actttgttcatttac

SEQ ID NO: 1590058 - DNA, 15 bp, Homo sapiens
ctttgttcatttact

SEQ ID NO: 1590059 - DNA, 15 bp, Homo sapiens
tttgttcatttactg

SEQ ID NO: 1590060 - DNA, 15 bp, Homo sapiens
ttgttcatttactgt

SEQ ID NO: 1590061 - DNA, 15 bp, Homo sapiens
tgttcatttactgtg

SEQ ID NO: 1590062 - DNA, 15 bp, Homo sapiens
gttcatttactgtgc

SEQ ID NO: 1590063 - DNA, 15 bp, Homo sapiens
ttcatttactgtgct

SEQ ID NO: 1590064 - DNA, 15 bp, Homo sapiens
tcatttactgtgctg

SEQ ID NO: 1590065 - DNA, 15 bp, Homo sapiens
catttactgtgctgg

SEQ ID NO: 1590066 - DNA, 15 bp, Homo sapiens
atttactgtgctggt

SEQ ID NO: 1590067 - DNA, 15 bp, Homo sapiens
tttactgtgctggta

SEQ ID NO: 1590068 - DNA, 15 bp, Homo sapiens
ttactgtgctggtac

SEQ ID NO: 1590069 - DNA, 15 bp, Homo sapiens
tactgtgctggtact

SEQ ID NO: 1590070 - DNA, 15 bp, Homo sapiens
actgtgctggtactg

SEQ ID NO: 1590071 - DNA, 15 bp, Homo sapiens
ctgtgctggtactgc

SEQ ID NO: 1590072 - DNA, 15 bp, Homo sapiens
tgtgctggtactgca

SEQ ID NO: 1590073 - DNA, 15 bp, Homo sapiens
gtgctggtactgcac

SEQ ID NO: 1590074 - DNA, 15 bp, Homo sapiens
tgctggtactgcacc

SEQ ID NO: 1590075 - DNA, 15 bp, Homo sapiens
gctggtactgcaccg

SEQ ID NO: 1590076 - DNA, 15 bp, Homo sapiens
ctggtactgcaccgt

SEQ ID NO: 1590077 - DNA, 15 bp, Homo sapiens
tggtactgcaccgtt

SEQ ID NO: 1590078 - DNA, 15 bp, Homo sapiens
ggtactgcaccgttg

SEQ ID NO: 1590079 - DNA, 15 bp, Homo sapiens
gtactgcaccgttgt

SEQ ID NO: 1590080 - DNA, 15 bp, Homo sapiens
tactgcaccgttgta

SEQ ID NO: 1590081 - DNA, 15 bp, Homo sapiens
actgcaccgttgtaa

SEQ ID NO: 1590082 - DNA, 15 bp, Homo sapiens
ctgcaccgttgtaat

SEQ ID NO: 1590083 - DNA, 15 bp, Homo sapiens
tgcaccgttgtaatt

SEQ ID NO: 1590084 - DNA, 15 bp, Homo sapiens
gcaccgttgtaattg

SEQ ID NO: 1590085 - DNA, 15 bp, Homo sapiens
caccgttgtaattgc

SEQ ID NO: 1590086 - DNA, 15 bp, Homo sapiens
accgttgtaattgct

SEQ ID NO: 1590087 - DNA, 15 bp, Homo sapiens
ccgttgtaattgctg

SEQ ID NO: 1590088 - DNA, 15 bp, Homo sapiens
cgttgtaattgctgt

SEQ ID NO: 1590089 - DNA, 15 bp, Homo sapiens
gttgtaattgctgtg

SEQ ID NO: 1590090 - DNA, 15 bp, Homo sapiens
ttgtaattgctgtgg

SEQ ID NO: 1590091 - DNA, 15 bp, Homo sapiens
tgtaattgctgtggc

SEQ ID NO: 1590092 - DNA, 15 bp, Homo sapiens
gtaattgctgtggct

SEQ ID NO: 1590093 - DNA, 15 bp, Homo sapiens
taattgctgtggctt

SEQ ID NO: 1590094 - DNA, 15 bp, Homo sapiens
aattgctgtggcttt

SEQ ID NO: 1590095 - DNA, 15 bp, Homo sapiens
attgctgtggctttg

SEQ ID NO: 1590096 - DNA, 15 bp, Homo sapiens
ttgctgtggctttgt

SEQ ID NO: 1590097 - DNA, 15 bp, Homo sapiens
tgctgtggctttgtg

SEQ ID NO: 1590098 - DNA, 15 bp, Homo sapiens
gctgtggctttgtgg

SEQ ID NO: 1590099 - DNA, 15 bp, Homo sapiens
ctgtggctttgtggt

SEQ ID NO: 1590100 - DNA, 15 bp, Homo sapiens
tgtggctttgtggta

SEQ ID NO: 1590101 - DNA, 15 bp, Homo sapiens
gtggctttgtggtat

SEQ ID NO: 1590102 - DNA, 15 bp, Homo sapiens
tggctttgtggtatg

SEQ ID NO: 1590103 - DNA, 15 bp, Homo sapiens
ggctttgtggtatgg

SEQ ID NO: 1590104 - DNA, 15 bp, Homo sapiens
gctttgtggtatggt

SEQ ID NO: 1590105 - DNA, 15 bp, Homo sapiens
ctttgtggtatggta

SEQ ID NO: 1590106 - DNA, 15 bp, Homo sapiens
tttgtggtatggtat

SEQ ID NO: 1590107 - DNA, 15 bp, Homo sapiens
ttgtggtatggtatg

SEQ ID NO: 1590108 - DNA, 15 bp, Homo sapiens
tgtggtatggtatgg

SEQ ID NO: 1590109 - DNA, 15 bp, Homo sapiens
gtggtatggtatggc

SEQ ID NO: 1590110 - DNA, 15 bp, Homo sapiens
tggtatggtatggct

SEQ ID NO: 1590111 - DNA, 15 bp, Homo sapiens
ggtatggtatggctt

SEQ ID NO: 1590112 - DNA, 15 bp, Homo sapiens
gtatggtatggcttg

SEQ ID NO: 1590113 - DNA, 15 bp, Homo sapiens
tatggtatggcttgc

SEQ ID NO: 1590114 - DNA, 15 bp, Homo sapiens
atggtatggcttgct

SEQ ID NO: 1590115 - DNA, 15 bp, Homo sapiens
tggtatggcttgctc

SEQ ID NO: 1590116 - DNA, 15 bp, Homo sapiens
ggtatggcttgctct

SEQ ID NO: 1590117 - DNA, 15 bp, Homo sapiens
gtatggcttgctctc

SEQ ID NO: 1590118 - DNA, 15 bp, Homo sapiens
tatggcttgctctct

SEQ ID NO: 1590119 - DNA, 15 bp, Homo sapiens
atggcttgctctctg

SEQ ID NO: 1590120 - DNA, 15 bp, Homo sapiens
tggcttgctctctgc

SEQ ID NO: 1590121 - DNA, 15 bp, Homo sapiens
ggcttgctctctgct

SEQ ID NO: 1590122 - DNA, 15 bp, Homo sapiens
gcttgctctctgcta

SEQ ID NO: 1590123 - DNA, 15 bp, Homo sapiens
cttgctctctgctag

SEQ ID NO: 1590124 - DNA, 15 bp, Homo sapiens
ttgctctctgctagg

SEQ ID NO: 1590125 - DNA, 15 bp, Homo sapiens
tgctctctgctaggg

SEQ ID NO: 1590126 - DNA, 15 bp, Homo sapiens
gctctctgctagggc

SEQ ID NO: 1590127 - DNA, 15 bp, Homo sapiens
ctctctgctagggca

SEQ ID NO: 1590128 - DNA, 15 bp, Homo sapiens
tctctgctagggcaa

SEQ ID NO: 1590129 - DNA, 15 bp, Homo sapiens
ctctgctagggcaag

SEQ ID NO: 1590130 - DNA, 15 bp, Homo sapiens
tctgctagggcaagt

SEQ ID NO: 1590131 - DNA, 15 bp, Homo sapiens
ctgctagggcaagtc

SEQ ID NO: 1590132 - DNA, 15 bp, Homo sapiens
tgctagggcaagtcg

SEQ ID NO: 1590133 - DNA, 15 bp, Homo sapiens
gctagggcaagtcga

SEQ ID NO: 1590134 - DNA, 15 bp, Homo sapiens
ctagggcaagtcgaa

SEQ ID NO: 1590135 - DNA, 15 bp, Homo sapiens
tagggcaagtcgaag

SEQ ID NO: 1590136 - DNA, 15 bp, Homo sapiens
agggcaagtcgaagc

SEQ ID NO: 1590137 - DNA, 15 bp, Homo sapiens
gggcaagtcgaagct

SEQ ID NO: 1590138 - DNA, 15 bp, Homo sapiens
ggcaagtcgaagctc

SEQ ID NO: 1590139 - DNA, 15 bp, Homo sapiens
gcaagtcgaagctct

SEQ ID NO: 1590140 - DNA, 15 bp, Homo sapiens
caagtcgaagctctt

SEQ ID NO: 1590141 - DNA, 15 bp, Homo sapiens
aagtcgaagctcttt

SEQ ID NO: 1590142 - DNA, 15 bp, Homo sapiens
agtcgaagctctttt

SEQ ID NO: 1590143 - DNA, 15 bp, Homo sapiens
gtcgaagctcttttg

SEQ ID NO: 1590144 - DNA, 15 bp, Homo sapiens
tcgaagctcttttgt

SEQ ID NO: 1590145 - DNA, 15 bp, Homo sapiens
cgaagctcttttgtt

SEQ ID NO: 1590146 - DNA, 15 bp, Homo sapiens
gaagctcttttgttc

SEQ ID NO: 1590147 - DNA, 15 bp, Homo sapiens
aagctcttttgttca

SEQ ID NO: 1590148 - DNA, 15 bp, Homo sapiens
agctcttttgttcac

SEQ ID NO: 1590149 - DNA, 15 bp, Homo sapiens
gctcttttgttcacc

SEQ ID NO: 1590150 - DNA, 15 bp, Homo sapiens
ctcttttgttcacct

SEQ ID NO: 1590151 - DNA, 15 bp, Homo sapiens
tcttttgttcacctg

SEQ ID NO: 1590152 - DNA, 15 bp, Homo sapiens
cttttgttcacctgc

SEQ ID NO: 1590153 - DNA, 15 bp, Homo sapiens
ttttgttcacctgct

SEQ ID NO: 1590154 - DNA, 15 bp, Homo sapiens
tttgttcacctgctc

SEQ ID NO: 1590155 - DNA, 15 bp, Homo sapiens
ttgttcacctgctct

SEQ ID NO: 1590156 - DNA, 15 bp, Homo sapiens
tgttcacctgctctt

SEQ ID NO: 1590157 - DNA, 15 bp, Homo sapiens
gttcacctgctcttt

SEQ ID NO: 1590158 - DNA, 15 bp, Homo sapiens
ttcacctgctctttc

SEQ ID NO: 1590159 - DNA, 15 bp, Homo sapiens
tcacctgctctttca

SEQ ID NO: 1590160 - DNA, 15 bp, Homo sapiens
cacctgctctttcac

SEQ ID NO: 1590161 - DNA, 15 bp, Homo sapiens
acctgctctttcacc

SEQ ID NO: 1590162 - DNA, 15 bp, Homo sapiens
cctgctctttcaccc

SEQ ID NO: 1590163 - DNA, 15 bp, Homo sapiens
ctgctctttcaccca

SEQ ID NO: 1590164 - DNA, 15 bp, Homo sapiens
tgctctttcacccaa

SEQ ID NO: 1590165 - DNA, 15 bp, Homo sapiens
gctctttcacccaaa

SEQ ID NO: 1590166 - DNA, 15 bp, Homo sapiens
ctctttcacccaaat

SEQ ID NO: 1590167 - DNA, 15 bp, Homo sapiens
tctttcacccaaatt

SEQ ID NO: 1590168 - DNA, 15 bp, Homo sapiens
ctttcacccaaattt

SEQ ID NO: 1590169 - DNA, 15 bp, Homo sapiens
tttcacccaaatttt

SEQ ID NO: 1590170 - DNA, 15 bp, Homo sapiens
ttcacccaaattttc

SEQ ID NO: 1590171 - DNA, 15 bp, Homo sapiens
tcacccaaattttct

SEQ ID NO: 1590172 - DNA, 15 bp, Homo sapiens
cacccaaattttctg

SEQ ID NO: 1590173 - DNA, 15 bp, Homo sapiens
acccaaattttctgt

SEQ ID NO: 1590174 - DNA, 15 bp, Homo sapiens
cccaaattttctgtc

SEQ ID NO: 1590175 - DNA, 15 bp, Homo sapiens
ccaaattttctgtcc

SEQ ID NO: 1590176 - DNA, 15 bp, Homo sapiens
caaattttctgtcct

SEQ ID NO: 1590177 - DNA, 15 bp, Homo sapiens
aaattttctgtcctg

SEQ ID NO: 1590178 - DNA, 15 bp, Homo sapiens
aattttctgtcctga

SEQ ID NO: 1590179 - DNA, 15 bp, Homo sapiens
attttctgtcctgaa

SEQ ID NO: 1590180 - DNA, 15 bp, Homo sapiens
ttttctgtcctgaat

SEQ ID NO: 1590181 - DNA, 15 bp, Homo sapiens
tttctgtcctgaatc

SEQ ID NO: 1590182 - DNA, 15 bp, Homo sapiens
ttctgtcctgaatcc

SEQ ID NO: 1590183 - DNA, 15 bp, Homo sapiens
tctgtcctgaatcca

SEQ ID NO: 1590184 - DNA, 15 bp, Homo sapiens
ctgtcctgaatccag

SEQ ID NO: 1590185 - DNA, 15 bp, Homo sapiens
tgtcctgaatccagc

SEQ ID NO: 1590186 - DNA, 15 bp, Homo sapiens
gtcctgaatccagca

SEQ ID NO: 1590187 - DNA, 15 bp, Homo sapiens
tcctgaatccagcac

SEQ ID NO: 1590188 - DNA, 15 bp, Homo sapiens
cctgaatccagcaca

SEQ ID NO: 1590189 - DNA, 15 bp, Homo sapiens
ctgaatccagcacag

SEQ ID NO: 1590190 - DNA, 15 bp, Homo sapiens
tgaatccagcacagc

SEQ ID NO: 1590191 - DNA, 15 bp, Homo sapiens
gaatccagcacagcc

SEQ ID NO: 1590192 - DNA, 15 bp, Homo sapiens
aatccagcacagcca

SEQ ID NO: 1590193 - DNA, 15 bp, Homo sapiens
atccagcacagccaa

SEQ ID NO: 1590194 - DNA, 15 bp, Homo sapiens
tccagcacagccaaa

SEQ ID NO: 1590195 - DNA, 15 bp, Homo sapiens
ccagcacagccaaat

SEQ ID NO: 1590196 - DNA, 15 bp, Homo sapiens
cagcacagccaaatt

SEQ ID NO: 1590197 - DNA, 15 bp, Homo sapiens
agcacagccaaatta

SEQ ID NO: 1590198 - DNA, 15 bp, Homo sapiens
gcacagccaaattat

SEQ ID NO: 1590199 - DNA, 15 bp, Homo sapiens
cacagccaaattatg

SEQ ID NO: 1590200 - DNA, 15 bp, Homo sapiens
acagccaaattatgg

SEQ ID NO: 1590201 - DNA, 15 bp, Homo sapiens
cagccaaattatggt

SEQ ID NO: 1590202 - DNA, 15 bp, Homo sapiens
agccaaattatggtc

SEQ ID NO: 1590203 - DNA, 15 bp, Homo sapiens
gccaaattatggtca

SEQ ID NO: 1590204 - DNA, 15 bp, Homo sapiens
ccaaattatggtcat

SEQ ID NO: 1590205 - DNA, 15 bp, Homo sapiens
caaattatggtcatt

SEQ ID NO: 1590206 - DNA, 15 bp, Homo sapiens
aaattatggtcattg

SEQ ID NO: 1590207 - DNA, 15 bp, Homo sapiens
aattatggtcattgt

SEQ ID NO: 1590208 - DNA, 15 bp, Homo sapiens
attatggtcattgtc

SEQ ID NO: 1590209 - DNA, 15 bp, Homo sapiens
ttatggtcattgtca

SEQ ID NO: 1590210 - DNA, 15 bp, Homo sapiens
tatggtcattgtcac

SEQ ID NO: 1590211 - DNA, 15 bp, Homo sapiens
atggtcattgtcacc

SEQ ID NO: 1590212 - DNA, 15 bp, Homo sapiens
tggtcattgtcacca

SEQ ID NO: 1590213 - DNA, 15 bp, Homo sapiens
ggtcattgtcaccac

SEQ ID NO: 1590214 - DNA, 15 bp, Homo sapiens
gtcattgtcaccacc

SEQ ID NO: 1590215 - DNA, 15 bp, Homo sapiens
tcattgtcaccacca

SEQ ID NO: 1590216 - DNA, 15 bp, Homo sapiens
cattgtcaccaccaa

SEQ ID NO: 1590217 - DNA, 15 bp, Homo sapiens
attgtcaccaccaac

SEQ ID NO: 1590218 - DNA, 15 bp, Homo sapiens
ttgtcaccaccaact

SEQ ID NO: 1590219 - DNA, 15 bp, Homo sapiens
tgtcaccaccaacta

SEQ ID NO: 1590220 - DNA, 15 bp, Homo sapiens
gtcaccaccaactac

SEQ ID NO: 1590221 - DNA, 15 bp, Homo sapiens
tcaccaccaactaca

SEQ ID NO: 1590222 - DNA, 15 bp, Homo sapiens
caccaccaactacag

SEQ ID NO: 1590223 - DNA, 15 bp, Homo sapiens
accaccaactacagt

SEQ ID NO: 1590224 - DNA, 15 bp, Homo sapiens
ccaccaactacagtg

SEQ ID NO: 1590225 - DNA, 15 bp, Homo sapiens
caccaactacagtgg

SEQ ID NO: 1590226 - DNA, 15 bp, Homo sapiens
accaactacagtggg

SEQ ID NO: 1590227 - DNA, 15 bp, Homo sapiens
ccaactacagtgggt

SEQ ID NO: 1590228 - DNA, 15 bp, Homo sapiens
caactacagtgggtg

SEQ ID NO: 1590229 - DNA, 15 bp, Homo sapiens
aactacagtgggtgt

SEQ ID NO: 1590230 - DNA, 15 bp, Homo sapiens
actacagtgggtgtt

SEQ ID NO: 1590231 - DNA, 15 bp, Homo sapiens
ctacagtgggtgttg

SEQ ID NO: 1590232 - DNA, 15 bp, Homo sapiens
tacagtgggtgttga

SEQ ID NO: 1590233 - DNA, 15 bp, Homo sapiens
acagtgggtgttgag

SEQ ID NO: 1590234 - DNA, 15 bp, Homo sapiens
cagtgggtgttgagc

SEQ ID NO: 1590235 - DNA, 15 bp, Homo sapiens
agtgggtgttgagca

SEQ ID NO: 1590236 - DNA, 15 bp, Homo sapiens
gtgggtgttgagcat

SEQ ID NO: 1590237 - DNA, 15 bp, Homo sapiens
tgggtgttgagcatt

SEQ ID NO: 1590238 - DNA, 15 bp, Homo sapiens
gggtgttgagcattt

SEQ ID NO: 1590239 - DNA, 15 bp, Homo sapiens
ggtgttgagcatttc

SEQ ID NO: 1590240 - DNA, 15 bp, Homo sapiens
gtgttgagcatttcc

SEQ ID NO: 1590241 - DNA, 15 bp, Homo sapiens
tgttgagcatttccc

SEQ ID NO: 1590242 - DNA, 15 bp, Homo sapiens
gttgagcatttccca

SEQ ID NO: 1590243 - DNA, 15 bp, Homo sapiens
ttgagcatttcccat

SEQ ID NO: 1590244 - DNA, 15 bp, Homo sapiens
tgagcatttcccatt

SEQ ID NO: 1590245 - DNA, 15 bp, Homo sapiens
gagcatttcccattg

SEQ ID NO: 1590246 - DNA, 15 bp, Homo sapiens
agcatttcccattga

SEQ ID NO: 1590247 - DNA, 15 bp, Homo sapiens
gcatttcccattgaa

SEQ ID NO: 1590248 - DNA, 15 bp, Homo sapiens
catttcccattgaat

SEQ ID NO: 1590249 - DNA, 15 bp, Homo sapiens
atttcccattgaatc

SEQ ID NO: 1590250 - DNA, 15 bp, Homo sapiens
tttcccattgaatct

SEQ ID NO: 1590251 - DNA, 15 bp, Homo sapiens
ttcccattgaatctc

SEQ ID NO: 1590252 - DNA, 15 bp, Homo sapiens
tcccattgaatctcc

SEQ ID NO: 1590253 - DNA, 15 bp, Homo sapiens
cccattgaatctcct

SEQ ID NO: 1590254 - DNA, 15 bp, Homo sapiens
ccattgaatctcctg

SEQ ID NO: 1590255 - DNA, 15 bp, Homo sapiens
cattgaatctcctgt

SEQ ID NO: 1590256 - DNA, 15 bp, Homo sapiens
attgaatctcctgta

SEQ ID NO: 1590257 - DNA, 15 bp, Homo sapiens
ttgaatctcctgtaa

SEQ ID NO: 1590258 - DNA, 15 bp, Homo sapiens
tgaatctcctgtaag

SEQ ID NO: 1590259 - DNA, 15 bp, Homo sapiens
gaatctcctgtaagg

SEQ ID NO: 1590260 - DNA, 15 bp, Homo sapiens
aatctcctgtaaggg

SEQ ID NO: 1590261 - DNA, 15 bp, Homo sapiens
atctcctgtaagggt

SEQ ID NO: 1590262 - DNA, 15 bp, Homo sapiens
tctcctgtaagggtt

SEQ ID NO: 1590263 - DNA, 15 bp, Homo sapiens
ctcctgtaagggttt

SEQ ID NO: 1590264 - DNA, 15 bp, Homo sapiens
tcctgtaagggtttt

SEQ ID NO: 1590265 - DNA, 15 bp, Homo sapiens
cctgtaagggtttta

SEQ ID NO: 1590266 - DNA, 15 bp, Homo sapiens
ctgtaagggttttat

SEQ ID NO: 1590267 - DNA, 15 bp, Homo sapiens
tgtaagggttttatt

SEQ ID NO: 1590268 - DNA, 15 bp, Homo sapiens
gtaagggttttattg

SEQ ID NO: 1590269 - DNA, 15 bp, Homo sapiens
taagggttttattgg

SEQ ID NO: 1590270 - DNA, 15 bp, Homo sapiens
aagggttttattgga

SEQ ID NO: 1590271 - DNA, 15 bp, Homo sapiens
agggttttattggat

SEQ ID NO: 1590272 - DNA, 15 bp, Homo sapiens
gggttttattggatt

SEQ ID NO: 1590273 - DNA, 15 bp, Homo sapiens
ggttttattggattc

SEQ ID NO: 1590274 - DNA, 15 bp, Homo sapiens
gttttattggattct

SEQ ID NO: 1590275 - DNA, 15 bp, Homo sapiens
ttttattggattctg

SEQ ID NO: 1590276 - DNA, 15 bp, Homo sapiens
tttattggattctgt

SEQ ID NO: 1590277 - DNA, 15 bp, Homo sapiens
ttattggattctgtg

SEQ ID NO: 1590278 - DNA, 15 bp, Homo sapiens
tattggattctgtga

SEQ ID NO: 1590279 - DNA, 15 bp, Homo sapiens
attggattctgtgat

SEQ ID NO: 1590280 - DNA, 15 bp, Homo sapiens
ttggattctgtgata

SEQ ID NO: 1590281 - DNA, 15 bp, Homo sapiens
tggattctgtgatag

SEQ ID NO: 1590282 - DNA, 15 bp, Homo sapiens
ggattctgtgatagc

SEQ ID NO: 1590283 - DNA, 15 bp, Homo sapiens
gattctgtgatagca

SEQ ID NO: 1590284 - DNA, 15 bp, Homo sapiens
attctgtgatagcag

SEQ ID NO: 1590285 - DNA, 15 bp, Homo sapiens
ttctgtgatagcagt

SEQ ID NO: 1590286 - DNA, 15 bp, Homo sapiens
tctgtgatagcagta

SEQ ID NO: 1590287 - DNA, 15 bp, Homo sapiens
ctgtgatagcagtaa

SEQ ID NO: 1590288 - DNA, 15 bp, Homo sapiens
tgtgatagcagtaaa

SEQ ID NO: 1590289 - DNA, 15 bp, Homo sapiens
gtgatagcagtaaaa

SEQ ID NO: 1590290 - DNA, 15 bp, Homo sapiens
tgatagcagtaaaat

SEQ ID NO: 1590291 - DNA, 15 bp, Homo sapiens
gatagcagtaaaatg

SEQ ID NO: 1590292 - DNA, 15 bp, Homo sapiens
atagcagtaaaatgg

SEQ ID NO: 1590293 - DNA, 15 bp, Homo sapiens
tagcagtaaaatggg

SEQ ID NO: 1590294 - DNA, 15 bp, Homo sapiens
agcagtaaaatggga

SEQ ID NO: 1590295 - DNA, 15 bp, Homo sapiens
gcagtaaaatgggag

SEQ ID NO: 1590296 - DNA, 15 bp, Homo sapiens
cagtaaaatgggagc

SEQ ID NO: 1590297 - DNA, 15 bp, Homo sapiens
agtaaaatgggagcc

SEQ ID NO: 1590298 - DNA, 15 bp, Homo sapiens
gtaaaatgggagcct

SEQ ID NO: 1590299 - DNA, 15 bp, Homo sapiens
taaaatgggagccta

SEQ ID NO: 1590300 - DNA, 15 bp, Homo sapiens
aaaatgggagcctaa

SEQ ID NO: 1590301 - DNA, 15 bp, Homo sapiens
aaatgggagcctaag

SEQ ID NO: 1590302 - DNA, 15 bp, Homo sapiens
aatgggagcctaaga

SEQ ID NO: 1590303 - DNA, 15 bp, Homo sapiens
atgggagcctaagag

SEQ ID NO: 1590304 - DNA, 15 bp, Homo sapiens
tgggagcctaagagg

SEQ ID NO: 1590305 - DNA, 15 bp, Homo sapiens
gggagcctaagaggt

SEQ ID NO: 1590306 - DNA, 15 bp, Homo sapiens
ggagcctaagaggta

SEQ ID NO: 1590307 - DNA, 15 bp, Homo sapiens
gagcctaagaggtat

SEQ ID NO: 1590308 - DNA, 15 bp, Homo sapiens
agcctaagaggtatt

SEQ ID NO: 1590309 - DNA, 15 bp, Homo sapiens
gcctaagaggtattc

SEQ ID NO: 1590310 - DNA, 15 bp, Homo sapiens
cctaagaggtattcc

SEQ ID NO: 1590311 - DNA, 15 bp, Homo sapiens
ctaagaggtattcct

SEQ ID NO: 1590312 - DNA, 15 bp, Homo sapiens
taagaggtattcctt

SEQ ID NO: 1590313 - DNA, 15 bp, Homo sapiens
aagaggtattcctta

SEQ ID NO: 1590314 - DNA, 15 bp, Homo sapiens
agaggtattccttaa

SEQ ID NO: 1590315 - DNA, 15 bp, Homo sapiens
gaggtattccttaaa

SEQ ID NO: 1590316 - DNA, 15 bp, Homo sapiens
aggtattccttaaag

SEQ ID NO: 1590317 - DNA, 15 bp, Homo sapiens
ggtattccttaaagg

SEQ ID NO: 1590318 - DNA, 15 bp, Homo sapiens
gtattccttaaagga

SEQ ID NO: 1590319 - DNA, 15 bp, Homo sapiens
tattccttaaaggac

SEQ ID NO: 1590320 - DNA, 15 bp, Homo sapiens
attccttaaaggact

SEQ ID NO: 1590321 - DNA, 15 bp, Homo sapiens
ttccttaaaggacta

SEQ ID NO: 1590322 - DNA, 15 bp, Homo sapiens
tccttaaaggactac

SEQ ID NO: 1590323 - DNA, 15 bp, Homo sapiens
ccttaaaggactact

SEQ ID NO: 1590324 - DNA, 15 bp, Homo sapiens
cttaaaggactacta

SEQ ID NO: 1590325 - DNA, 15 bp, Homo sapiens
ttaaaggactactaa

SEQ ID NO: 1590326 - DNA, 15 bp, Homo sapiens
taaaggactactaat

SEQ ID NO: 1590327 - DNA, 15 bp, Homo sapiens
aaaggactactaatc

SEQ ID NO: 1590328 - DNA, 15 bp, Homo sapiens
aaggactactaatca

SEQ ID NO: 1590329 - DNA, 15 bp, Homo sapiens
aggactactaatcag

SEQ ID NO: 1590330 - DNA, 15 bp, Homo sapiens
ggactactaatcaga

SEQ ID NO: 1590331 - DNA, 15 bp, Homo sapiens
gactactaatcagac

SEQ ID NO: 1590332 - DNA, 15 bp, Homo sapiens
actactaatcagacc

SEQ ID NO: 1590333 - DNA, 15 bp, Homo sapiens
ctactaatcagacct

SEQ ID NO: 1590334 - DNA, 15 bp, Homo sapiens
tactaatcagacctg

SEQ ID NO: 1590335 - DNA, 15 bp, Homo sapiens
actaatcagacctgg

SEQ ID NO: 1590336 - DNA, 15 bp, Homo sapiens
ctaatcagacctggt

SEQ ID NO: 1590337 - DNA, 15 bp, Homo sapiens
taatcagacctggtt

SEQ ID NO: 1590338 - DNA, 15 bp, Homo sapiens
aatcagacctggttt

SEQ ID NO: 1590339 - DNA, 15 bp, Homo sapiens
atcagacctggtttc

SEQ ID NO: 1590340 - DNA, 15 bp, Homo sapiens
tcagacctggtttcc

SEQ ID NO: 1590341 - DNA, 15 bp, Homo sapiens
cagacctggtttccc

SEQ ID NO: 1590342 - DNA, 15 bp, Homo sapiens
agacctggtttccca

SEQ ID NO: 1590343 - DNA, 15 bp, Homo sapiens
gacctggtttcccag

SEQ ID NO: 1590344 - DNA, 15 bp, Homo sapiens
acctggtttcccaga

SEQ ID NO: 1590345 - DNA, 15 bp, Homo sapiens
cctggtttcccagat

SEQ ID NO: 1590346 - DNA, 15 bp, Homo sapiens
ctggtttcccagatg

SEQ ID NO: 1590347 - DNA, 15 bp, Homo sapiens
tggtttcccagatga

SEQ ID NO: 1590348 - DNA, 15 bp, Homo sapiens
ggtttcccagatgat

SEQ ID NO: 1590349 - DNA, 15 bp, Homo sapiens
gtttcccagatgatg

SEQ ID NO: 1590350 - DNA, 15 bp, Homo sapiens
tttcccagatgatgc

SEQ ID NO: 1590351 - DNA, 15 bp, Homo sapiens
ttcccagatgatgct

SEQ ID NO: 1590352 - DNA, 15 bp, Homo sapiens
tcccagatgatgctg

SEQ ID NO: 1590353 - DNA, 15 bp, Homo sapiens
cccagatgatgctga

SEQ ID NO: 1590354 - DNA, 15 bp, Homo sapiens
ccagatgatgctgaa

SEQ ID NO: 1590355 - DNA, 15 bp, Homo sapiens
cagatgatgctgaag

SEQ ID NO: 1590356 - DNA, 15 bp, Homo sapiens
agatgatgctgaaga

SEQ ID NO: 1590357 - DNA, 15 bp, Homo sapiens
gatgatgctgaagat

SEQ ID NO: 1590358 - DNA, 15 bp, Homo sapiens
atgatgctgaagatg

SEQ ID NO: 1590359 - DNA, 15 bp, Homo sapiens
tgatgctgaagatga

SEQ ID NO: 1590360 - DNA, 15 bp, Homo sapiens
gatgctgaagatgac

SEQ ID NO: 1590361 - DNA, 15 bp, Homo sapiens
atgctgaagatgacg

SEQ ID NO: 1590362 - DNA, 15 bp, Homo sapiens
tgctgaagatgacgg

SEQ ID NO: 1590363 - DNA, 15 bp, Homo sapiens
gctgaagatgacggg

SEQ ID NO: 1590364 - DNA, 15 bp, Homo sapiens
ctgaagatgacgggg

SEQ ID NO: 1590365 - DNA, 15 bp, Homo sapiens
tgaagatgacggggc

SEQ ID NO: 1590366 - DNA, 15 bp, Homo sapiens
gaagatgacggggcc

SEQ ID NO: 1590367 - DNA, 15 bp, Homo sapiens
aagatgacggggcct

SEQ ID NO: 1590368 - DNA, 15 bp, Homo sapiens
agatgacggggcctg

SEQ ID NO: 1590369 - DNA, 15 bp, Homo sapiens
gatgacggggcctgg

SEQ ID NO: 1590370 - DNA, 15 bp, Homo sapiens
atgacggggcctggg

SEQ ID NO: 1590371 - DNA, 15 bp, Homo sapiens
tgacggggcctgggc

SEQ ID NO: 1590372 - DNA, 15 bp, Homo sapiens
gacggggcctgggct

SEQ ID NO: 1590373 - DNA, 15 bp, Homo sapiens
acggggcctgggcta

SEQ ID NO: 1590374 - DNA, 15 bp, Homo sapiens
cggggcctgggctag

SEQ ID NO: 1590375 - DNA, 15 bp, Homo sapiens
ggggcctgggctaga

SEQ ID NO: 1590376 - DNA, 15 bp, Homo sapiens
gggcctgggctagac

SEQ ID NO: 1590377 - DNA, 15 bp, Homo sapiens
ggcctgggctagact

SEQ ID NO: 1590378 - DNA, 15 bp, Homo sapiens
gcctgggctagactt

SEQ ID NO: 1590379 - DNA, 15 bp, Homo sapiens
cctgggctagacttt

SEQ ID NO: 1590380 - DNA, 15 bp, Homo sapiens
ctgggctagactttt

SEQ ID NO: 1590381 - DNA, 15 bp, Homo sapiens
tgggctagacttttg

SEQ ID NO: 1590382 - DNA, 15 bp, Homo sapiens
gggctagacttttga

SEQ ID NO: 1590383 - DNA, 15 bp, Homo sapiens
ggctagacttttgag

SEQ ID NO: 1590384 - DNA, 15 bp, Homo sapiens
gctagacttttgagg

SEQ ID NO: 1590385 - DNA, 15 bp, Homo sapiens
ctagacttttgaggg

SEQ ID NO: 1590386 - DNA, 15 bp, Homo sapiens
tagacttttgaggga

SEQ ID NO: 1590387 - DNA, 15 bp, Homo sapiens
agacttttgagggac

SEQ ID NO: 1590388 - DNA, 15 bp, Homo sapiens
gacttttgagggaca

SEQ ID NO: 1590389 - DNA, 15 bp, Homo sapiens
acttttgagggacat

SEQ ID NO: 1590390 - DNA, 15 bp, Homo sapiens
cttttgagggacata

SEQ ID NO: 1590391 - DNA, 15 bp, Homo sapiens
ttttgagggacatat

SEQ ID NO: 1590392 - DNA, 15 bp, Homo sapiens
tttgagggacatatc

SEQ ID NO: 1590393 - DNA, 15 bp, Homo sapiens
ttgagggacatatcc

SEQ ID NO: 1590394 - DNA, 15 bp, Homo sapiens
tgagggacatatcct

SEQ ID NO: 1590395 - DNA, 15 bp, Homo sapiens
gagggacatatcctt

SEQ ID NO: 1590396 - DNA, 15 bp, Homo sapiens
agggacatatccttg

SEQ ID NO: 1590397 - DNA, 15 bp, Homo sapiens
gggacatatccttgg

SEQ ID NO: 1590398 - DNA, 15 bp, Homo sapiens
ggacatatccttggg

SEQ ID NO: 1590399 - DNA, 15 bp, Homo sapiens
gacatatccttgggg

SEQ ID NO: 1590400 - DNA, 15 bp, Homo sapiens
acatatccttggggt

SEQ ID NO: 1590401 - DNA, 15 bp, Homo sapiens
catatccttggggtt

SEQ ID NO: 1590402 - DNA, 15 bp, Homo sapiens
atatccttggggttg

SEQ ID NO: 1590403 - DNA, 15 bp, Homo sapiens
tatccttggggttgg

SEQ ID NO: 1590404 - DNA, 15 bp, Homo sapiens
atccttggggttggg

SEQ ID NO: 1590405 - DNA, 15 bp, Homo sapiens
tccttggggttgggt

SEQ ID NO: 1590406 - DNA, 15 bp, Homo sapiens
ccttggggttgggtg

SEQ ID NO: 1590407 - DNA, 15 bp, Homo sapiens
cttggggttgggtgt

SEQ ID NO: 1590408 - DNA, 15 bp, Homo sapiens
ttggggttgggtgtg

SEQ ID NO: 1590409 - DNA, 15 bp, Homo sapiens
tggggttgggtgtga

SEQ ID NO: 1590410 - DNA, 15 bp, Homo sapiens
ggggttgggtgtgat

SEQ ID NO: 1590411 - DNA, 15 bp, Homo sapiens
gggttgggtgtgata

SEQ ID NO: 1590412 - DNA, 15 bp, Homo sapiens
ggttgggtgtgatat

SEQ ID NO: 1590413 - DNA, 15 bp, Homo sapiens
gttgggtgtgatata

SEQ ID NO: 1590414 - DNA, 15 bp, Homo sapiens
ttgggtgtgatatag

SEQ ID NO: 1590415 - DNA, 15 bp, Homo sapiens
tgggtgtgatataga

SEQ ID NO: 1590416 - DNA, 15 bp, Homo sapiens
gggtgtgatatagac

SEQ ID NO: 1590417 - DNA, 15 bp, Homo sapiens
ggtgtgatatagacc

SEQ ID NO: 1590418 - DNA, 15 bp, Homo sapiens
gtgtgatatagacca

SEQ ID NO: 1590419 - DNA, 15 bp, Homo sapiens
tgtgatatagaccag

SEQ ID NO: 1590420 - DNA, 15 bp, Homo sapiens
gtgatatagaccagc

SEQ ID NO: 1590421 - DNA, 15 bp, Homo sapiens
tgatatagaccagcc

SEQ ID NO: 1590422 - DNA, 15 bp, Homo sapiens
gatatagaccagccc

SEQ ID NO: 1590423 - DNA, 15 bp, Homo sapiens
atatagaccagccct

SEQ ID NO: 1590424 - DNA, 15 bp, Homo sapiens
tatagaccagccctt

SEQ ID NO: 1590425 - DNA, 15 bp, Homo sapiens
atagaccagccctta

SEQ ID NO: 1590426 - DNA, 15 bp, Homo sapiens
tagaccagcccttac

SEQ ID NO: 1590427 - DNA, 15 bp, Homo sapiens
agaccagcccttaca

SEQ ID NO: 1590428 - DNA, 15 bp, Homo sapiens
gaccagcccttacaa

SEQ ID NO: 1590429 - DNA, 15 bp, Homo sapiens
accagcccttacaat

SEQ ID NO: 1590430 - DNA, 15 bp, Homo sapiens
ccagcccttacaatt

SEQ ID NO: 1590431 - DNA, 15 bp, Homo sapiens
cagcccttacaattt

SEQ ID NO: 1590432 - DNA, 15 bp, Homo sapiens
agcccttacaatttg

SEQ ID NO: 1590433 - DNA, 15 bp, Homo sapiens
gcccttacaatttgc

SEQ ID NO: 1590434 - DNA, 15 bp, Homo sapiens
cccttacaatttgct

SEQ ID NO: 1590435 - DNA, 15 bp, Homo sapiens
ccttacaatttgctt

SEQ ID NO: 1590436 - DNA, 15 bp, Homo sapiens
cttacaatttgcttg

SEQ ID NO: 1590437 - DNA, 15 bp, Homo sapiens
ttacaatttgcttga

SEQ ID NO: 1590438 - DNA, 15 bp, Homo sapiens
tacaatttgcttgac

SEQ ID NO: 1590439 - DNA, 15 bp, Homo sapiens
acaatttgcttgact

SEQ ID NO: 1590440 - DNA, 15 bp, Homo sapiens
caatttgcttgactc

SEQ ID NO: 1590441 - DNA, 15 bp, Homo sapiens
aatttgcttgactca

SEQ ID NO: 1590442 - DNA, 15 bp, Homo sapiens
atttgcttgactcat

SEQ ID NO: 1590443 - DNA, 15 bp, Homo sapiens
tttgcttgactcatg

SEQ ID NO: 1590444 - DNA, 15 bp, Homo sapiens
ttgcttgactcatgg

SEQ ID NO: 1590445 - DNA, 15 bp, Homo sapiens
tgcttgactcatggg

SEQ ID NO: 1590446 - DNA, 15 bp, Homo sapiens
gcttgactcatggga

SEQ ID NO: 1590447 - DNA, 15 bp, Homo sapiens
cttgactcatgggaa

SEQ ID NO: 1590448 - DNA, 15 bp, Homo sapiens
ttgactcatgggaat

SEQ ID NO: 1590449 - DNA, 15 bp, Homo sapiens
tgactcatgggaatc

SEQ ID NO: 1590450 - DNA, 15 bp, Homo sapiens
gactcatgggaatcg

SEQ ID NO: 1590451 - DNA, 15 bp, Homo sapiens
actcatgggaatcgt

SEQ ID NO: 1590452 - DNA, 15 bp, Homo sapiens
ctcatgggaatcgta

SEQ ID NO: 1590453 - DNA, 15 bp, Homo sapiens
tcatgggaatcgtac

SEQ ID NO: 1590454 - DNA, 15 bp, Homo sapiens
catgggaatcgtaca

SEQ ID NO: 1590455 - DNA, 15 bp, Homo sapiens
atgggaatcgtacag

SEQ ID NO: 1590456 - DNA, 15 bp, Homo sapiens
tgggaatcgtacagg

SEQ ID NO: 1590457 - DNA, 15 bp, Homo sapiens
gggaatcgtacaggg

SEQ ID NO: 1590458 - DNA, 15 bp, Homo sapiens
ggaatcgtacagggc

SEQ ID NO: 1590459 - DNA, 15 bp, Homo sapiens
gaatcgtacagggcc

SEQ ID NO: 1590460 - DNA, 15 bp, Homo sapiens
aatcgtacagggcca

SEQ ID NO: 1590461 - DNA, 15 bp, Homo sapiens
atcgtacagggccag

SEQ ID NO: 1590462 - DNA, 15 bp, Homo sapiens
tcgtacagggccaga

SEQ ID NO: 1590463 - DNA, 15 bp, Homo sapiens
cgtacagggccagaa

SEQ ID NO: 1590464 - DNA, 15 bp, Homo sapiens
gtacagggccagaac

SEQ ID NO: 1590465 - DNA, 15 bp, Homo sapiens
tacagggccagaacc

SEQ ID NO: 1590466 - DNA, 15 bp, Homo sapiens
acagggccagaacca

SEQ ID NO: 1590467 - DNA, 15 bp, Homo sapiens
cagggccagaaccag

SEQ ID NO: 1590468 - DNA, 15 bp, Homo sapiens
agggccagaaccaga

SEQ ID NO: 1590469 - DNA, 15 bp, Homo sapiens
gggccagaaccagac

SEQ ID NO: 1590470 - DNA, 15 bp, Homo sapiens
ggccagaaccagaca

SEQ ID NO: 1590471 - DNA, 15 bp, Homo sapiens
gccagaaccagacac

SEQ ID NO: 1590472 - DNA, 15 bp, Homo sapiens
ccagaaccagacacc

SEQ ID NO: 1590473 - DNA, 15 bp, Homo sapiens
cagaaccagacacct

SEQ ID NO: 1590474 - DNA, 15 bp, Homo sapiens
agaaccagacacctg

SEQ ID NO: 1590475 - DNA, 15 bp, Homo sapiens
gaaccagacacctgt

SEQ ID NO: 1590476 - DNA, 15 bp, Homo sapiens
aaccagacacctgtc

SEQ ID NO: 1590477 - DNA, 15 bp, Homo sapiens
accagacacctgtca

SEQ ID NO: 1590478 - DNA, 15 bp, Homo sapiens
ccagacacctgtcat

SEQ ID NO: 1590479 - DNA, 15 bp, Homo sapiens
cagacacctgtcatg

SEQ ID NO: 1590480 - DNA, 15 bp, Homo sapiens
agacacctgtcatgc

SEQ ID NO: 1590481 - DNA, 15 bp, Homo sapiens
gacacctgtcatgct

SEQ ID NO: 1590482 - DNA, 15 bp, Homo sapiens
acacctgtcatgcta

SEQ ID NO: 1590483 - DNA, 15 bp, Homo sapiens
cacctgtcatgctaa

SEQ ID NO: 1590484 - DNA, 15 bp, Homo sapiens
acctgtcatgctaat

SEQ ID NO: 1590485 - DNA, 15 bp, Homo sapiens
cctgtcatgctaata

SEQ ID NO: 1590486 - DNA, 15 bp, Homo sapiens
ctgtcatgctaataa

SEQ ID NO: 1590487 - DNA, 15 bp, Homo sapiens
tgtcatgctaataac

SEQ ID NO: 1590488 - DNA, 15 bp, Homo sapiens
gtcatgctaataact

SEQ ID NO: 1590489 - DNA, 15 bp, Homo sapiens
tcatgctaataactt

SEQ ID NO: 1590490 - DNA, 15 bp, Homo sapiens
catgctaataacttc

SEQ ID NO: 1590491 - DNA, 15 bp, Homo sapiens
atgctaataacttcc

SEQ ID NO: 1590492 - DNA, 15 bp, Homo sapiens
tgctaataacttccc

SEQ ID NO: 1590493 - DNA, 15 bp, Homo sapiens
gctaataacttccct

SEQ ID NO: 1590494 - DNA, 15 bp, Homo sapiens
ctaataacttccctc

SEQ ID NO: 1590495 - DNA, 15 bp, Homo sapiens
taataacttccctca

SEQ ID NO: 1590496 - DNA, 15 bp, Homo sapiens
aataacttccctcac

SEQ ID NO: 1590497 - DNA, 15 bp, Homo sapiens
ataacttccctcaca

SEQ ID NO: 1590498 - DNA, 15 bp, Homo sapiens
taacttccctcacaa

SEQ ID NO: 1590499 - DNA, 15 bp, Homo sapiens
aacttccctcacaat

SEQ ID NO: 1590500 - DNA, 15 bp, Homo sapiens
acttccctcacaatt

SEQ ID NO: 1590501 - DNA, 15 bp, Homo sapiens
cttccctcacaattc

SEQ ID NO: 1590502 - DNA, 15 bp, Homo sapiens
ttccctcacaattca

SEQ ID NO: 1590503 - DNA, 15 bp, Homo sapiens
tccctcacaattcag

SEQ ID NO: 1590504 - DNA, 15 bp, Homo sapiens
ccctcacaattcaga

SEQ ID NO: 1590505 - DNA, 15 bp, Homo sapiens
cctcacaattcagaa

SEQ ID NO: 1590506 - DNA, 15 bp, Homo sapiens
ctcacaattcagaaa

SEQ ID NO: 1590507 - DNA, 15 bp, Homo sapiens
tcacaattcagaaat

SEQ ID NO: 1590508 - DNA, 15 bp, Homo sapiens
cacaattcagaaatc

SEQ ID NO: 1590509 - DNA, 15 bp, Homo sapiens
acaattcagaaatca

SEQ ID NO: 1590510 - DNA, 15 bp, Homo sapiens
caattcagaaatcac

SEQ ID NO: 1590511 - DNA, 15 bp, Homo sapiens
aattcagaaatcact

SEQ ID NO: 1590512 - DNA, 15 bp, Homo sapiens
attcagaaatcactg

SEQ ID NO: 1590513 - DNA, 15 bp, Homo sapiens
ttcagaaatcactgt

SEQ ID NO: 1590514 - DNA, 15 bp, Homo sapiens
tcagaaatcactgtg

SEQ ID NO: 1590515 - DNA, 15 bp, Homo sapiens
cagaaatcactgtga

SEQ ID NO: 1590516 - DNA, 15 bp, Homo sapiens
agaaatcactgtgat

SEQ ID NO: 1590517 - DNA, 15 bp, Homo sapiens
gaaatcactgtgatt

SEQ ID NO: 1590518 - DNA, 15 bp, Homo sapiens
aaatcactgtgattg

SEQ ID NO: 1590519 - DNA, 15 bp, Homo sapiens
aatcactgtgattga

SEQ ID NO: 1590520 - DNA, 15 bp, Homo sapiens
atcactgtgattgaa

SEQ ID NO: 1590521 - DNA, 15 bp, Homo sapiens
tcactgtgattgaag

SEQ ID NO: 1590522 - DNA, 15 bp, Homo sapiens
cactgtgattgaaga

SEQ ID NO: 1590523 - DNA, 15 bp, Homo sapiens
actgtgattgaagat

SEQ ID NO: 1590524 - DNA, 15 bp, Homo sapiens
ctgtgattgaagatg

SEQ ID NO: 1590525 - DNA, 15 bp, Homo sapiens
tgtgattgaagatgg

SEQ ID NO: 1590526 - DNA, 15 bp, Homo sapiens
gtgattgaagatggg

SEQ ID NO: 1590527 - DNA, 15 bp, Homo sapiens
tgattgaagatgggt

SEQ ID NO: 1590528 - DNA, 15 bp, Homo sapiens
attgaagatgggtgg

SEQ ID NO: 1590529 - DNA, 15 bp, Homo sapiens
ttgaagatgggtggc

SEQ ID NO: 1590530 - DNA, 15 bp, Homo sapiens
tgaagatgggtggct

SEQ ID NO: 1590531 - DNA, 15 bp, Homo sapiens
gaagatgggtggctg

SEQ ID NO: 1590532 - DNA, 15 bp, Homo sapiens
aagatgggtggctgt

SEQ ID NO: 1590533 - DNA, 15 bp, Homo sapiens
agatgggtggctgtt

SEQ ID NO: 1590534 - DNA, 15 bp, Homo sapiens
gatgggtggctgtta

SEQ ID NO: 1590535 - DNA, 15 bp, Homo sapiens
atgggtggctgttat

SEQ ID NO: 1590536 - DNA, 15 bp, Homo sapiens
tgggtggctgttata

SEQ ID NO: 1590537 - DNA, 15 bp, Homo sapiens
gggtggctgttataa

SEQ ID NO: 1590538 - DNA, 15 bp, Homo sapiens
ggtggctgttataat

SEQ ID NO: 1590539 - DNA, 15 bp, Homo sapiens
gtggctgttataata

SEQ ID NO: 1590540 - DNA, 15 bp, Homo sapiens
tggctgttataatac

SEQ ID NO: 1590541 - DNA, 15 bp, Homo sapiens
ggctgttataatact

SEQ ID NO: 1590542 - DNA, 15 bp, Homo sapiens
gctgttataatacta

SEQ ID NO: 1590543 - DNA, 15 bp, Homo sapiens
ctgttataatactac

SEQ ID NO: 1590544 - DNA, 15 bp, Homo sapiens
tgttataatactacc

SEQ ID NO: 1590545 - DNA, 15 bp, Homo sapiens
gttataatactaccc

SEQ ID NO: 1590546 - DNA, 15 bp, Homo sapiens
ttataatactaccca

SEQ ID NO: 1590547 - DNA, 15 bp, Homo sapiens
tataatactacccac

SEQ ID NO: 1590548 - DNA, 15 bp, Homo sapiens
ataatactacccact

SEQ ID NO: 1590549 - DNA, 15 bp, Homo sapiens
taatactacccactt

SEQ ID NO: 1590550 - DNA, 15 bp, Homo sapiens
aatactacccactta

SEQ ID NO: 1590551 - DNA, 15 bp, Homo sapiens
atactacccacttaa

SEQ ID NO: 1590552 - DNA, 15 bp, Homo sapiens
tactacccacttaaa

SEQ ID NO: 1590553 - DNA, 15 bp, Homo sapiens
actacccacttaaaa

SEQ ID NO: 1590554 - DNA, 15 bp, Homo sapiens
ctacccacttaaaaa

SEQ ID NO: 1590555 - DNA, 15 bp, Homo sapiens
tacccacttaaaaat

SEQ ID NO: 1590556 - DNA, 15 bp, Homo sapiens
acccacttaaaaatg

SEQ ID NO: 1590557 - DNA, 15 bp, Homo sapiens
cccacttaaaaatgg

SEQ ID NO: 1590558 - DNA, 15 bp, Homo sapiens
ccacttaaaaatgga

SEQ ID NO: 1590559 - DNA, 15 bp, Homo sapiens
cacttaaaaatggat

SEQ ID NO: 1590560 - DNA, 15 bp, Homo sapiens
acttaaaaatggatg

SEQ ID NO: 1590561 - DNA, 15 bp, Homo sapiens
cttaaaaatggatgt

SEQ ID NO: 1590562 - DNA, 15 bp, Homo sapiens
ttaaaaatggatgta

SEQ ID NO: 1590563 - DNA, 15 bp, Homo sapiens
taaaaatggatgtaa

SEQ ID NO: 1590564 - DNA, 15 bp, Homo sapiens
aaaaatggatgtaac

SEQ ID NO: 1590565 - DNA, 15 bp, Homo sapiens
aaaatggatgtaacc

SEQ ID NO: 1590566 - DNA, 15 bp, Homo sapiens
aaatggatgtaaccc

SEQ ID NO: 1590567 - DNA, 15 bp, Homo sapiens
aatggatgtaaccca

SEQ ID NO: 1590568 - DNA, 15 bp, Homo sapiens
atggatgtaacccat

SEQ ID NO: 1590569 - DNA, 15 bp, Homo sapiens
tggatgtaacccatt

SEQ ID NO: 1590570 - DNA, 15 bp, Homo sapiens
ggatgtaacccattt

SEQ ID NO: 1590571 - DNA, 15 bp, Homo sapiens
gatgtaacccatttt

SEQ ID NO: 1590572 - DNA, 15 bp, Homo sapiens
atgtaacccattttt

SEQ ID NO: 1590573 - DNA, 15 bp, Homo sapiens
tgtaacccatttttt

SEQ ID NO: 1590574 - DNA, 15 bp, Homo sapiens
gtaacccatttttta

SEQ ID NO: 1590575 - DNA, 15 bp, Homo sapiens
taacccattttttag

SEQ ID NO: 1590576 - DNA, 15 bp, Homo sapiens
aacccattttttagg

SEQ ID NO: 1590577 - DNA, 15 bp, Homo sapiens
acccattttttagga

SEQ ID NO: 1590578 - DNA, 15 bp, Homo sapiens
cccattttttaggac

SEQ ID NO: 1590579 - DNA, 15 bp, Homo sapiens
ccattttttaggact

SEQ ID NO: 1590580 - DNA, 15 bp, Homo sapiens
cattttttaggactc

SEQ ID NO: 1590581 - DNA, 15 bp, Homo sapiens
attttttaggactct

SEQ ID NO: 1590582 - DNA, 15 bp, Homo sapiens
ttttttaggactctt

SEQ ID NO: 1590583 - DNA, 15 bp, Homo sapiens
tttttaggactctta

SEQ ID NO: 1590584 - DNA, 15 bp, Homo sapiens
ttttaggactcttaa

SEQ ID NO: 1590585 - DNA, 15 bp, Homo sapiens
tttaggactcttaaa

SEQ ID NO: 1590586 - DNA, 15 bp, Homo sapiens
ttaggactcttaaaa

SEQ ID NO: 1590587 - DNA, 15 bp, Homo sapiens
taggactcttaaaaa

SEQ ID NO: 1590588 - DNA, 15 bp, Homo sapiens
aggactcttaaaaac

SEQ ID NO: 1590589 - DNA, 15 bp, Homo sapiens
ggactcttaaaaaca

SEQ ID NO: 1590590 - DNA, 15 bp, Homo sapiens
gactcttaaaaacat

SEQ ID NO: 1590591 - DNA, 15 bp, Homo sapiens
actcttaaaaacatc

SEQ ID NO: 1590592 - DNA, 15 bp, Homo sapiens
ctcttaaaaacatca

SEQ ID NO: 1590593 - DNA, 15 bp, Homo sapiens
tcttaaaaacatcaa

SEQ ID NO: 1590594 - DNA, 15 bp, Homo sapiens
cttaaaaacatcaaa

SEQ ID NO: 1590595 - DNA, 15 bp, Homo sapiens
ttaaaaacatcaaat

SEQ ID NO: 1590596 - DNA, 15 bp, Homo sapiens
taaaaacatcaaatc

SEQ ID NO: 1590597 - DNA, 15 bp, Homo sapiens
aaaaacatcaaatca

SEQ ID NO: 1590598 - DNA, 15 bp, Homo sapiens
aaaacatcaaatcag

SEQ ID NO: 1590599 - DNA, 15 bp, Homo sapiens
aaacatcaaatcagt

SEQ ID NO: 1590600 - DNA, 15 bp, Homo sapiens
aacatcaaatcagta

SEQ ID NO: 1590601 - DNA, 15 bp, Homo sapiens
acatcaaatcagtaa

SEQ ID NO: 1590602 - DNA, 15 bp, Homo sapiens
catcaaatcagtaat

SEQ ID NO: 1590603 - DNA, 15 bp, Homo sapiens
atcaaatcagtaatg

SEQ ID NO: 1590604 - DNA, 15 bp, Homo sapiens
tcaaatcagtaatgg

SEQ ID NO: 1590605 - DNA, 15 bp, Homo sapiens
caaatcagtaatggc

SEQ ID NO: 1590606 - DNA, 15 bp, Homo sapiens
aaatcagtaatggcc

SEQ ID NO: 1590607 - DNA, 15 bp, Homo sapiens
aatcagtaatggccg

SEQ ID NO: 1590608 - DNA, 15 bp, Homo sapiens
atcagtaatggccga

SEQ ID NO: 1590609 - DNA, 15 bp, Homo sapiens
tcagtaatggccgat

SEQ ID NO: 1590610 - DNA, 15 bp, Homo sapiens
cagtaatggccgatt

SEQ ID NO: 1590611 - DNA, 15 bp, Homo sapiens
agtaatggccgatta

SEQ ID NO: 1590612 - DNA, 15 bp, Homo sapiens
gtaatggccgattag

SEQ ID NO: 1590613 - DNA, 15 bp, Homo sapiens
taatggccgattagg

SEQ ID NO: 1590614 - DNA, 15 bp, Homo sapiens
aatggccgattagga

SEQ ID NO: 1590615 - DNA, 15 bp, Homo sapiens
atggccgattaggac

SEQ ID NO: 1590616 - DNA, 15 bp, Homo sapiens
tggccgattaggact

SEQ ID NO: 1590617 - DNA, 15 bp, Homo sapiens
ggccgattaggactt

SEQ ID NO: 1590618 - DNA, 15 bp, Homo sapiens
gccgattaggacttt

SEQ ID NO: 1590619 - DNA, 15 bp, Homo sapiens
ccgattaggactttt

SEQ ID NO: 1590620 - DNA, 15 bp, Homo sapiens
cgattaggacttttt

SEQ ID NO: 1590621 - DNA, 15 bp, Homo sapiens
gattaggacttttta

SEQ ID NO: 1590622 - DNA, 15 bp, Homo sapiens
attaggactttttaa

SEQ ID NO: 1590623 - DNA, 15 bp, Homo sapiens
ttaggactttttaat

SEQ ID NO: 1590624 - DNA, 15 bp, Homo sapiens
taggactttttaatt

SEQ ID NO: 1590625 - DNA, 15 bp, Homo sapiens
aggactttttaattt

SEQ ID NO: 1590626 - DNA, 15 bp, Homo sapiens
ggactttttaatttt

SEQ ID NO: 1590627 - DNA, 15 bp, Homo sapiens
gactttttaattttt

SEQ ID NO: 1590628 - DNA, 15 bp, Homo sapiens
actttttaattttta

SEQ ID NO: 1590629 - DNA, 15 bp, Homo sapiens
ctttttaatttttac

SEQ ID NO: 1590630 - DNA, 15 bp, Homo sapiens
tttttaatttttact

SEQ ID NO: 1590631 - DNA, 15 bp, Homo sapiens
ttttaatttttacta

SEQ ID NO: 1590632 - DNA, 15 bp, Homo sapiens
tttaatttttactaa

SEQ ID NO: 1590633 - DNA, 15 bp, Homo sapiens
ttaatttttactaat

SEQ ID NO: 1590634 - DNA, 15 bp, Homo sapiens
taatttttactaatc

SEQ ID NO: 1590635 - DNA, 15 bp, Homo sapiens
aatttttactaatct

SEQ ID NO: 1590636 - DNA, 15 bp, Homo sapiens
atttttactaatctc

SEQ ID NO: 1590637 - DNA, 15 bp, Homo sapiens
tttttactaatctct

SEQ ID NO: 1590638 - DNA, 15 bp, Homo sapiens
ttttactaatctcta

SEQ ID NO: 1590639 - DNA, 15 bp, Homo sapiens
tttactaatctctac

SEQ ID NO: 1590640 - DNA, 15 bp, Homo sapiens
ttactaatctctact

SEQ ID NO: 1590641 - DNA, 15 bp, Homo sapiens
tactaatctctactt

SEQ ID NO: 1590642 - DNA, 15 bp, Homo sapiens
actaatctctacttg

SEQ ID NO: 1590643 - DNA, 15 bp, Homo sapiens
ctaatctctacttga

SEQ ID NO: 1590644 - DNA, 15 bp, Homo sapiens
taatctctacttgaa

SEQ ID NO: 1590645 - DNA, 15 bp, Homo sapiens
aatctctacttgaaa

SEQ ID NO: 1590646 - DNA, 15 bp, Homo sapiens
atctctacttgaaag

SEQ ID NO: 1590647 - DNA, 15 bp, Homo sapiens
tctctacttgaaagt

SEQ ID NO: 1590648 - DNA, 15 bp, Homo sapiens
ctctacttgaaagtt

SEQ ID NO: 1590649 - DNA, 15 bp, Homo sapiens
tctacttgaaagttt

SEQ ID NO: 1590650 - DNA, 15 bp, Homo sapiens
ctacttgaaagtttt

SEQ ID NO: 1590651 - DNA, 15 bp, Homo sapiens
tacttgaaagttttc

SEQ ID NO: 1590652 - DNA, 15 bp, Homo sapiens
acttgaaagttttct

SEQ ID NO: 1590653 - DNA, 15 bp, Homo sapiens
cttgaaagttttcta

SEQ ID NO: 1590654 - DNA, 15 bp, Homo sapiens
ttgaaagttttctag

SEQ ID NO: 1590655 - DNA, 15 bp, Homo sapiens
tgaaagttttctagt

SEQ ID NO: 1590656 - DNA, 15 bp, Homo sapiens
gaaagttttctagtc

SEQ ID NO: 1590657 - DNA, 15 bp, Homo sapiens
aaagttttctagtca

SEQ ID NO: 1590658 - DNA, 15 bp, Homo sapiens
aagttttctagtcat

SEQ ID NO: 1590659 - DNA, 15 bp, Homo sapiens
agttttctagtcatt

SEQ ID NO: 1590660 - DNA, 15 bp, Homo sapiens
gttttctagtcattc

SEQ ID NO: 1590661 - DNA, 15 bp, Homo sapiens
ttttctagtcattca

SEQ ID NO: 1590662 - DNA, 15 bp, Homo sapiens
tttctagtcattcat

SEQ ID NO: 1590663 - DNA, 15 bp, Homo sapiens
ttctagtcattcatt

SEQ ID NO: 1590664 - DNA, 15 bp, Homo sapiens
tctagtcattcattt

SEQ ID NO: 1590665 - DNA, 15 bp, Homo sapiens
ctagtcattcatttc

SEQ ID NO: 1590666 - DNA, 15 bp, Homo sapiens
tagtcattcatttca

SEQ ID NO: 1590667 - DNA, 15 bp, Homo sapiens
agtcattcatttcag

SEQ ID NO: 1590668 - DNA, 15 bp, Homo sapiens
gtcattcatttcagg

SEQ ID NO: 1590669 - DNA, 15 bp, Homo sapiens
tcattcatttcagga

SEQ ID NO: 1590670 - DNA, 15 bp, Homo sapiens
cattcatttcaggaa

SEQ ID NO: 1590671 - DNA, 15 bp, Homo sapiens
attcatttcaggaaa

SEQ ID NO: 1590672 - DNA, 15 bp, Homo sapiens
ttcatttcaggaaac

SEQ ID NO: 1590673 - DNA, 15 bp, Homo sapiens
tcatttcaggaaacc

SEQ ID NO: 1590674 - DNA, 15 bp, Homo sapiens
catttcaggaaacct

SEQ ID NO: 1590675 - DNA, 15 bp, Homo sapiens
atttcaggaaaccta

SEQ ID NO: 1590676 - DNA, 15 bp, Homo sapiens
tttcaggaaacctaa

SEQ ID NO: 1590677 - DNA, 15 bp, Homo sapiens
ttcaggaaacctaat

SEQ ID NO: 1590678 - DNA, 15 bp, Homo sapiens
tcaggaaacctaatt

SEQ ID NO: 1590679 - DNA, 15 bp, Homo sapiens
caggaaacctaattc

SEQ ID NO: 1590680 - DNA, 15 bp, Homo sapiens
aggaaacctaattct

SEQ ID NO: 1590681 - DNA, 15 bp, Homo sapiens
ggaaacctaattctt

SEQ ID NO: 1590682 - DNA, 15 bp, Homo sapiens
gaaacctaattctta

SEQ ID NO: 1590683 - DNA, 15 bp, Homo sapiens
aaacctaattcttat

SEQ ID NO: 1590684 - DNA, 15 bp, Homo sapiens
aacctaattcttata

SEQ ID NO: 1590685 - DNA, 15 bp, Homo sapiens
acctaattcttataa

SEQ ID NO: 1590686 - DNA, 15 bp, Homo sapiens
cctaattcttataat

SEQ ID NO: 1590687 - DNA, 15 bp, Homo sapiens
ctaattcttataatt

SEQ ID NO: 1590688 - DNA, 15 bp, Homo sapiens
taattcttataattc

SEQ ID NO: 1590689 - DNA, 15 bp, Homo sapiens
aattcttataattca

SEQ ID NO: 1590690 - DNA, 15 bp, Homo sapiens
attcttataattcat

SEQ ID NO: 1590691 - DNA, 15 bp, Homo sapiens
ttcttataattcata

SEQ ID NO: 1590692 - DNA, 15 bp, Homo sapiens
tcttataattcatat

SEQ ID NO: 1590693 - DNA, 15 bp, Homo sapiens
cttataattcatatc

SEQ ID NO: 1590694 - DNA, 15 bp, Homo sapiens
ttataattcatatca

SEQ ID NO: 1590695 - DNA, 15 bp, Homo sapiens
tataattcatatcat

SEQ ID NO: 1590696 - DNA, 15 bp, Homo sapiens
ataattcatatcatt

SEQ ID NO: 1590697 - DNA, 15 bp, Homo sapiens
taattcatatcattt

SEQ ID NO: 1590698 - DNA, 15 bp, Homo sapiens
aattcatatcattta

SEQ ID NO: 1590699 - DNA, 15 bp, Homo sapiens
attcatatcatttag

SEQ ID NO: 1590700 - DNA, 15 bp, Homo sapiens
ttcatatcatttaga

SEQ ID NO: 1590701 - DNA, 15 bp, Homo sapiens
tcatatcatttagaa

SEQ ID NO: 1590702 - DNA, 15 bp, Homo sapiens
catatcatttagaat

SEQ ID NO: 1590703 - DNA, 15 bp, Homo sapiens
atatcatttagaata

SEQ ID NO: 1590704 - DNA, 15 bp, Homo sapiens
tatcatttagaatat

SEQ ID NO: 1590705 - DNA, 15 bp, Homo sapiens
atcatttagaatatc

SEQ ID NO: 1590706 - DNA, 15 bp, Homo sapiens
tcatttagaatatca

SEQ ID NO: 1590707 - DNA, 15 bp, Homo sapiens
catttagaatatcat

SEQ ID NO: 1590708 - DNA, 15 bp, Homo sapiens
atttagaatatcata

SEQ ID NO: 1590709 - DNA, 15 bp, Homo sapiens
tttagaatatcataa

SEQ ID NO: 1590710 - DNA, 15 bp, Homo sapiens
ttagaatatcataat

SEQ ID NO: 1590711 - DNA, 15 bp, Homo sapiens
tagaatatcataatg

SEQ ID NO: 1590712 - DNA, 15 bp, Homo sapiens
agaatatcataatgc

SEQ ID NO: 1590713 - DNA, 15 bp, Homo sapiens
gaatatcataatgct

SEQ ID NO: 1590714 - DNA, 15 bp, Homo sapiens
aatatcataatgcta

SEQ ID NO: 1590715 - DNA, 15 bp, Homo sapiens
atatcataatgctat

SEQ ID NO: 1590716 - DNA, 15 bp, Homo sapiens
tatcataatgctatg

SEQ ID NO: 1590717 - DNA, 15 bp, Homo sapiens
atcataatgctatgg

SEQ ID NO: 1590718 - DNA, 15 bp, Homo sapiens
tcataatgctatgga

SEQ ID NO: 1590719 - DNA, 15 bp, Homo sapiens
cataatgctatggat

SEQ ID NO: 1590720 - DNA, 15 bp, Homo sapiens
ataatgctatggata

SEQ ID NO: 1590721 - DNA, 15 bp, Homo sapiens
taatgctatggatat

SEQ ID NO: 1590722 - DNA, 15 bp, Homo sapiens
aatgctatggatatt

SEQ ID NO: 1590723 - DNA, 15 bp, Homo sapiens
atgctatggatatta

SEQ ID NO: 1590724 - DNA, 15 bp, Homo sapiens
tgctatggatattag

SEQ ID NO: 1590725 - DNA, 15 bp, Homo sapiens
gctatggatattagc

SEQ ID NO: 1590726 - DNA, 15 bp, Homo sapiens
ctatggatattagct

SEQ ID NO: 1590727 - DNA, 15 bp, Homo sapiens
tatggatattagcta

SEQ ID NO: 1590728 - DNA, 15 bp, Homo sapiens
atggatattagctag

SEQ ID NO: 1590729 - DNA, 15 bp, Homo sapiens
tggatattagctagc

SEQ ID NO: 1590730 - DNA, 15 bp, Homo sapiens
ggatattagctagct

SEQ ID NO: 1590731 - DNA, 15 bp, Homo sapiens
gatattagctagcta

SEQ ID NO: 1590732 - DNA, 15 bp, Homo sapiens
atattagctagctaa

SEQ ID NO: 1590733 - DNA, 15 bp, Homo sapiens
tattagctagctaac

SEQ ID NO: 1590734 - DNA, 15 bp, Homo sapiens
attagctagctaact

SEQ ID NO: 1590735 - DNA, 15 bp, Homo sapiens
ttagctagctaactt

SEQ ID NO: 1590736 - DNA, 15 bp, Homo sapiens
tagctagctaacttc

SEQ ID NO: 1590737 - DNA, 15 bp, Homo sapiens
agctagctaacttct

SEQ ID NO: 1590738 - DNA, 15 bp, Homo sapiens
gctagctaacttctc

SEQ ID NO: 1590739 - DNA, 15 bp, Homo sapiens
ctagctaacttctca

SEQ ID NO: 1590740 - DNA, 15 bp, Homo sapiens
tagctaacttctcaa

SEQ ID NO: 1590741 - DNA, 15 bp, Homo sapiens
agctaacttctcaaa

SEQ ID NO: 1590742 - DNA, 15 bp, Homo sapiens
gctaacttctcaaat

SEQ ID NO: 1590743 - DNA, 15 bp, Homo sapiens
ctaacttctcaaatc

SEQ ID NO: 1590744 - DNA, 15 bp, Homo sapiens
taacttctcaaatct

SEQ ID NO: 1590745 - DNA, 15 bp, Homo sapiens
aacttctcaaatctt

SEQ ID NO: 1590746 - DNA, 15 bp, Homo sapiens
acttctcaaatcttc

SEQ ID NO: 1590747 - DNA, 15 bp, Homo sapiens
cttctcaaatcttct

SEQ ID NO: 1590748 - DNA, 15 bp, Homo sapiens
ttctcaaatcttcta

SEQ ID NO: 1590749 - DNA, 15 bp, Homo sapiens
tctcaaatcttctag

SEQ ID NO: 1590750 - DNA, 15 bp, Homo sapiens
ctcaaatcttctagt

SEQ ID NO: 1590751 - DNA, 15 bp, Homo sapiens
tcaaatcttctagtt

SEQ ID NO: 1590752 - DNA, 15 bp, Homo sapiens
caaatcttctagttc

SEQ ID NO: 1590753 - DNA, 15 bp, Homo sapiens
aaatcttctagttct

SEQ ID NO: 1590754 - DNA, 15 bp, Homo sapiens
aatcttctagttctc

SEQ ID NO: 1590755 - DNA, 15 bp, Homo sapiens
atcttctagttctca

SEQ ID NO: 1590756 - DNA, 15 bp, Homo sapiens
tcttctagttctcat

SEQ ID NO: 1590757 - DNA, 15 bp, Homo sapiens
cttctagttctcatt

SEQ ID NO: 1590758 - DNA, 15 bp, Homo sapiens
ttctagttctcattt

SEQ ID NO: 1590759 - DNA, 15 bp, Homo sapiens
tctagttctcattta

SEQ ID NO: 1590760 - DNA, 15 bp, Homo sapiens
ctagttctcatttaa

SEQ ID NO: 1590761 - DNA, 15 bp, Homo sapiens
tagttctcatttaat

SEQ ID NO: 1590762 - DNA, 15 bp, Homo sapiens
agttctcatttaatt

SEQ ID NO: 1590763 - DNA, 15 bp, Homo sapiens
gttctcatttaattt

SEQ ID NO: 1590764 - DNA, 15 bp, Homo sapiens
ttctcatttaatttg

SEQ ID NO: 1590765 - DNA, 15 bp, Homo sapiens
tctcatttaatttga

SEQ ID NO: 1590766 - DNA, 15 bp, Homo sapiens
ctcatttaatttgaa

SEQ ID NO: 1590767 - DNA, 15 bp, Homo sapiens
tcatttaatttgaag

SEQ ID NO: 1590768 - DNA, 15 bp, Homo sapiens
catttaatttgaagt

SEQ ID NO: 1590769 - DNA, 15 bp, Homo sapiens
atttaatttgaagtt

SEQ ID NO: 1590770 - DNA, 15 bp, Homo sapiens
tttaatttgaagttt

SEQ ID NO: 1590771 - DNA, 15 bp, Homo sapiens
ttaatttgaagtttg

SEQ ID NO: 1590772 - DNA, 15 bp, Homo sapiens
taatttgaagtttgt

SEQ ID NO: 1590773 - DNA, 15 bp, Homo sapiens
aatttgaagtttgtg

SEQ ID NO: 1590774 - DNA, 15 bp, Homo sapiens
atttgaagtttgtgt

SEQ ID NO: 1590775 - DNA, 15 bp, Homo sapiens
tttgaagtttgtgtg

SEQ ID NO: 1590776 - DNA, 15 bp, Homo sapiens
ttgaagtttgtgtgt

SEQ ID NO: 1590777 - DNA, 15 bp, Homo sapiens
tgaagtttgtgtgtg

SEQ ID NO: 1590778 - DNA, 15 bp, Homo sapiens
gaagtttgtgtgtgt

SEQ ID NO: 1590779 - DNA, 15 bp, Homo sapiens
aagtttgtgtgtgta

SEQ ID NO: 1590780 - DNA, 15 bp, Homo sapiens
agtttgtgtgtgtac

SEQ ID NO: 1590781 - DNA, 15 bp, Homo sapiens
gtttgtgtgtgtaca

SEQ ID NO: 1590782 - DNA, 15 bp, Homo sapiens
tttgtgtgtgtacat

SEQ ID NO: 1590783 - DNA, 15 bp, Homo sapiens
ttgtgtgtgtacata

SEQ ID NO: 1590784 - DNA, 15 bp, Homo sapiens
tgtgtgtgtacataa

SEQ ID NO: 1590785 - DNA, 15 bp, Homo sapiens
gtgtgtgtacataag

SEQ ID NO: 1590786 - DNA, 15 bp, Homo sapiens
tgtgtgtacataagg

SEQ ID NO: 1590787 - DNA, 15 bp, Homo sapiens
gtgtgtacataagga

SEQ ID NO: 1590788 - DNA, 15 bp, Homo sapiens
tgtgtacataaggat

SEQ ID NO: 1590789 - DNA, 15 bp, Homo sapiens
gtgtacataaggata

SEQ ID NO: 1590790 - DNA, 15 bp, Homo sapiens
tgtacataaggatat

SEQ ID NO: 1590791 - DNA, 15 bp, Homo sapiens
gtacataaggatata

SEQ ID NO: 1590792 - DNA, 15 bp, Homo sapiens
tacataaggatatac

SEQ ID NO: 1590793 - DNA, 15 bp, Homo sapiens
acataaggatataca

SEQ ID NO: 1590794 - DNA, 15 bp, Homo sapiens
cataaggatatacat

SEQ ID NO: 1590795 - DNA, 15 bp, Homo sapiens
ataaggatatacata

SEQ ID NO: 1590796 - DNA, 15 bp, Homo sapiens
taaggatatacatat

SEQ ID NO: 1590797 - DNA, 15 bp, Homo sapiens
aaggatatacatata

SEQ ID NO: 1590798 - DNA, 15 bp, Homo sapiens
aggatatacatatac

SEQ ID NO: 1590799 - DNA, 15 bp, Homo sapiens
ggatatacatataca

SEQ ID NO: 1590800 - DNA, 15 bp, Homo sapiens
gatatacatatacat

SEQ ID NO: 1590801 - DNA, 15 bp, Homo sapiens
tatacatatacatat

SEQ ID NO: 1590802 - DNA, 15 bp, Homo sapiens
atacatatacatatg

SEQ ID NO: 1590803 - DNA, 15 bp, Homo sapiens
tacatatacatatgt

SEQ ID NO: 1590804 - DNA, 15 bp, Homo sapiens
acatatacatatgtg

SEQ ID NO: 1590805 - DNA, 15 bp, Homo sapiens
catatacatatgtgt

SEQ ID NO: 1590806 - DNA, 15 bp, Homo sapiens
atatacatatgtgtg

SEQ ID NO: 1590807 - DNA, 15 bp, Homo sapiens
tatacatatgtgtgt

SEQ ID NO: 1590808 - DNA, 15 bp, Homo sapiens
atacatatgtgtgtg

SEQ ID NO: 1590809 - DNA, 15 bp, Homo sapiens
tacatatgtgtgtgt

SEQ ID NO: 1590810 - DNA, 15 bp, Homo sapiens
acatatgtgtgtgta

SEQ ID NO: 1590811 - DNA, 15 bp, Homo sapiens
catatgtgtgtgtag

SEQ ID NO: 1590812 - DNA, 15 bp, Homo sapiens
atatgtgtgtgtaga

SEQ ID NO: 1590813 - DNA, 15 bp, Homo sapiens
tatgtgtgtgtagat

SEQ ID NO: 1590814 - DNA, 15 bp, Homo sapiens
atgtgtgtgtagata

SEQ ID NO: 1590815 - DNA, 15 bp, Homo sapiens
tgtgtgtgtagatat

SEQ ID NO: 1590816 - DNA, 15 bp, Homo sapiens
gtgtgtgtagatata

SEQ ID NO: 1590817 - DNA, 15 bp, Homo sapiens
tgtgtgtagatatat

SEQ ID NO: 1590818 - DNA, 15 bp, Homo sapiens
gtgtgtagatatata

SEQ ID NO: 1590819 - DNA, 15 bp, Homo sapiens
tgtgtagatatatat

SEQ ID NO: 1590820 - DNA, 15 bp, Homo sapiens
gtgtagatatatata

SEQ ID NO: 1590821 - DNA, 15 bp, Homo sapiens
tgtagatatatatat

SEQ ID NO: 1590822 - DNA, 15 bp, Homo sapiens
gtagatatatatata

SEQ ID NO: 1590823 - DNA, 15 bp, Homo sapiens
tagatatatatatat

SEQ ID NO: 1590824 - DNA, 15 bp, Homo sapiens
atatatatatatagt

SEQ ID NO: 1590825 - DNA, 15 bp, Homo sapiens
tatatatatatagtt

SEQ ID NO: 1590826 - DNA, 15 bp, Homo sapiens
atatatatatagttt

SEQ ID NO: 1590827 - DNA, 15 bp, Homo sapiens
tatatatatagtttt

SEQ ID NO: 1590828 - DNA, 15 bp, Homo sapiens
atatatatagttttt

SEQ ID NO: 1590829 - DNA, 15 bp, Homo sapiens
tatatatagtttttt

SEQ ID NO: 1590830 - DNA, 15 bp, Homo sapiens
atatatagttttttt

SEQ ID NO: 1590831 - DNA, 15 bp, Homo sapiens
tatatagtttttttt

SEQ ID NO: 1590832 - DNA, 15 bp, Homo sapiens
atatagttttttttt

SEQ ID NO: 1590833 - DNA, 15 bp, Homo sapiens
tatagtttttttttt

SEQ ID NO: 1590834 - DNA, 15 bp, Homo sapiens
tttttttttttaact

SEQ ID NO: 1590835 - DNA, 15 bp, Homo sapiens
ttttttttttaacta

SEQ ID NO: 1590836 - DNA, 15 bp, Homo sapiens
ttttttttaactaga

SEQ ID NO: 1590837 - DNA, 15 bp, Homo sapiens
tttttttaactagaa

SEQ ID NO: 1590838 - DNA, 15 bp, Homo sapiens
ttttttaactagaat

SEQ ID NO: 1590839 - DNA, 15 bp, Homo sapiens
tttttaactagaatg

SEQ ID NO: 1590840 - DNA, 15 bp, Homo sapiens
ttttaactagaatga

SEQ ID NO: 1590841 - DNA, 15 bp, Homo sapiens
tttaactagaatgac

SEQ ID NO: 1590842 - DNA, 15 bp, Homo sapiens
ttaactagaatgacc

SEQ ID NO: 1590843 - DNA, 15 bp, Homo sapiens
taactagaatgacca

SEQ ID NO: 1590844 - DNA, 15 bp, Homo sapiens
aactagaatgaccag

SEQ ID NO: 1590845 - DNA, 15 bp, Homo sapiens
actagaatgaccagt

SEQ ID NO: 1590846 - DNA, 15 bp, Homo sapiens
ctagaatgaccagtc

SEQ ID NO: 1590847 - DNA, 15 bp, Homo sapiens
tagaatgaccagtca

SEQ ID NO: 1590848 - DNA, 15 bp, Homo sapiens
agaatgaccagtcaa

SEQ ID NO: 1590849 - DNA, 15 bp, Homo sapiens
gaatgaccagtcaac

SEQ ID NO: 1590850 - DNA, 15 bp, Homo sapiens
aatgaccagtcaaca

SEQ ID NO: 1590851 - DNA, 15 bp, Homo sapiens
atgaccagtcaacag

SEQ ID NO: 1590852 - DNA, 15 bp, Homo sapiens
tgaccagtcaacagg

SEQ ID NO: 1590853 - DNA, 15 bp, Homo sapiens
gaccagtcaacaggg

SEQ ID NO: 1590854 - DNA, 15 bp, Homo sapiens
accagtcaacagggg

SEQ ID NO: 1590855 - DNA, 15 bp, Homo sapiens
ccagtcaacagggga

SEQ ID NO: 1590856 - DNA, 15 bp, Homo sapiens
cagtcaacaggggac

SEQ ID NO: 1590857 - DNA, 15 bp, Homo sapiens
agtcaacaggggaca

SEQ ID NO: 1590858 - DNA, 15 bp, Homo sapiens
gtcaacaggggacat

SEQ ID NO: 1590859 - DNA, 15 bp, Homo sapiens
tcaacaggggacata

SEQ ID NO: 1590860 - DNA, 15 bp, Homo sapiens
caacaggggacataa

SEQ ID NO: 1590861 - DNA, 15 bp, Homo sapiens
aacaggggacataaa

SEQ ID NO: 1590862 - DNA, 15 bp, Homo sapiens
acaggggacataaaa

SEQ ID NO: 1590863 - DNA, 15 bp, Homo sapiens
caggggacataaaag

SEQ ID NO: 1590864 - DNA, 15 bp, Homo sapiens
aggggacataaaagt

SEQ ID NO: 1590865 - DNA, 15 bp, Homo sapiens
ggggacataaaagta

SEQ ID NO: 1590866 - DNA, 15 bp, Homo sapiens
gggacataaaagtaa

SEQ ID NO: 1590867 - DNA, 15 bp, Homo sapiens
ggacataaaagtaat

SEQ ID NO: 1590868 - DNA, 15 bp, Homo sapiens
gacataaaagtaatt

SEQ ID NO: 1590869 - DNA, 15 bp, Homo sapiens
acataaaagtaattg

SEQ ID NO: 1590870 - DNA, 15 bp, Homo sapiens
cataaaagtaattgg

SEQ ID NO: 1590871 - DNA, 15 bp, Homo sapiens
ataaaagtaattggt

SEQ ID NO: 1590872 - DNA, 15 bp, Homo sapiens
taaaagtaattggtg

SEQ ID NO: 1590873 - DNA, 15 bp, Homo sapiens
aaaagtaattggtgg

SEQ ID NO: 1590874 - DNA, 15 bp, Homo sapiens
aaagtaattggtgga

SEQ ID NO: 1590875 - DNA, 15 bp, Homo sapiens
aagtaattggtggag

SEQ ID NO: 1590876 - DNA, 15 bp, Homo sapiens
agtaattggtggaga

SEQ ID NO: 1590877 - DNA, 15 bp, Homo sapiens
gtaattggtggagat

SEQ ID NO: 1590878 - DNA, 15 bp, Homo sapiens
taattggtggagatg

SEQ ID NO: 1590879 - DNA, 15 bp, Homo sapiens
aattggtggagatga

SEQ ID NO: 1590880 - DNA, 15 bp, Homo sapiens
attggtggagatgat

SEQ ID NO: 1590881 - DNA, 15 bp, Homo sapiens
ttggtggagatgatc

SEQ ID NO: 1590882 - DNA, 15 bp, Homo sapiens
tggtggagatgatct

SEQ ID NO: 1590883 - DNA, 15 bp, Homo sapiens
ggtggagatgatctc

SEQ ID NO: 1590884 - DNA, 15 bp, Homo sapiens
gtggagatgatctct

SEQ ID NO: 1590885 - DNA, 15 bp, Homo sapiens
tggagatgatctctc

SEQ ID NO: 1590886 - DNA, 15 bp, Homo sapiens
ggagatgatctctca

SEQ ID NO: 1590887 - DNA, 15 bp, Homo sapiens
gagatgatctctcaa

SEQ ID NO: 1590888 - DNA, 15 bp, Homo sapiens
agatgatctctcaac

SEQ ID NO: 1590889 - DNA, 15 bp, Homo sapiens
gatgatctctcaact

SEQ ID NO: 1590890 - DNA, 15 bp, Homo sapiens
atgatctctcaactt

SEQ ID NO: 1590891 - DNA, 15 bp, Homo sapiens
tgatctctcaacttt

SEQ ID NO: 1590892 - DNA, 15 bp, Homo sapiens
gatctctcaacttta

SEQ ID NO: 1590893 - DNA, 15 bp, Homo sapiens
atctctcaactttaa

SEQ ID NO: 1590894 - DNA, 15 bp, Homo sapiens
tctctcaactttaac

SEQ ID NO: 1590895 - DNA, 15 bp, Homo sapiens
ctctcaactttaact

SEQ ID NO: 1590896 - DNA, 15 bp, Homo sapiens
tctcaactttaactg

SEQ ID NO: 1590897 - DNA, 15 bp, Homo sapiens
ctcaactttaactgg

SEQ ID NO: 1590898 - DNA, 15 bp, Homo sapiens
tcaactttaactgga

SEQ ID NO: 1590899 - DNA, 15 bp, Homo sapiens
caactttaactggaa

SEQ ID NO: 1590900 - DNA, 15 bp, Homo sapiens
aactttaactggaaa

SEQ ID NO: 1590901 - DNA, 15 bp, Homo sapiens
actttaactggaaag

SEQ ID NO: 1590902 - DNA, 15 bp, Homo sapiens
ctttaactggaaagg

SEQ ID NO: 1590903 - DNA, 15 bp, Homo sapiens
tttaactggaaaggt

SEQ ID NO: 1590904 - DNA, 15 bp, Homo sapiens
ttaactggaaaggta

SEQ ID NO: 1590905 - DNA, 15 bp, Homo sapiens
taactggaaaggtat

SEQ ID NO: 1590906 - DNA, 15 bp, Homo sapiens
aactggaaaggtatg

SEQ ID NO: 1590907 - DNA, 15 bp, Homo sapiens
actggaaaggtatgt

SEQ ID NO: 1590908 - DNA, 15 bp, Homo sapiens
ctggaaaggtatgta

SEQ ID NO: 1590909 - DNA, 15 bp, Homo sapiens
tggaaaggtatgtat

SEQ ID NO: 1590910 - DNA, 15 bp, Homo sapiens
ggaaaggtatgtatc

SEQ ID NO: 1590911 - DNA, 15 bp, Homo sapiens
gaaaggtatgtatct

SEQ ID NO: 1590912 - DNA, 15 bp, Homo sapiens
aaaggtatgtatctt

SEQ ID NO: 1590913 - DNA, 15 bp, Homo sapiens
aaggtatgtatcttg

SEQ ID NO: 1590914 - DNA, 15 bp, Homo sapiens
aggtatgtatcttga

SEQ ID NO: 1590915 - DNA, 15 bp, Homo sapiens
ggtatgtatcttgaa

SEQ ID NO: 1590916 - DNA, 15 bp, Homo sapiens
gtatgtatcttgaaa

SEQ ID NO: 1590917 - DNA, 15 bp, Homo sapiens
tatgtatcttgaaag

SEQ ID NO: 1590918 - DNA, 15 bp, Homo sapiens
atgtatcttgaaagg

SEQ ID NO: 1590919 - DNA, 15 bp, Homo sapiens
tgtatcttgaaaggg

SEQ ID NO: 1590920 - DNA, 15 bp, Homo sapiens
gtatcttgaaaggga

SEQ ID NO: 1590921 - DNA, 15 bp, Homo sapiens
tatcttgaaagggaa

SEQ ID NO: 1590922 - DNA, 15 bp, Homo sapiens
atcttgaaagggaag

SEQ ID NO: 1590923 - DNA, 15 bp, Homo sapiens
tcttgaaagggaaga

SEQ ID NO: 1590924 - DNA, 15 bp, Homo sapiens
cttgaaagggaagaa

SEQ ID NO: 1590925 - DNA, 15 bp, Homo sapiens
ttgaaagggaagaaa

SEQ ID NO: 1590926 - DNA, 15 bp, Homo sapiens
tgaaagggaagaaaa

SEQ ID NO: 1590927 - DNA, 15 bp, Homo sapiens
gaaagggaagaaaaa

SEQ ID NO: 1590928 - DNA, 15 bp, Homo sapiens
aaagggaagaaaaaa

SEQ ID NO: 1590929 - DNA, 15 bp, Homo sapiens
gggaagaaaaaaaag

SEQ ID NO: 1590930 - DNA, 15 bp, Homo sapiens
ggaagaaaaaaaagc

SEQ ID NO: 1590931 - DNA, 15 bp, Homo sapiens
gaagaaaaaaaagca

SEQ ID NO: 1590932 - DNA, 15 bp, Homo sapiens
aagaaaaaaaagcac

SEQ ID NO: 1590933 - DNA, 15 bp, Homo sapiens
agaaaaaaaagcact

SEQ ID NO: 1590934 - DNA, 15 bp, Homo sapiens
gaaaaaaaagcactt

SEQ ID NO: 1590935 - DNA, 15 bp, Homo sapiens
aaaaaaaagcacttc

SEQ ID NO: 1590936 - DNA, 15 bp, Homo sapiens
aaaaaaagcacttca

SEQ ID NO: 1590937 - DNA, 15 bp, Homo sapiens
aaaaaagcacttcat

SEQ ID NO: 1590938 - DNA, 15 bp, Homo sapiens
aaaaagcacttcata

SEQ ID NO: 1590939 - DNA, 15 bp, Homo sapiens
aaaagcacttcatac

SEQ ID NO: 1590940 - DNA, 15 bp, Homo sapiens
aaagcacttcatacc

SEQ ID NO: 1590941 - DNA, 15 bp, Homo sapiens
aagcacttcataccg

SEQ ID NO: 1590942 - DNA, 15 bp, Homo sapiens
agcacttcataccga

SEQ ID NO: 1590943 - DNA, 15 bp, Homo sapiens
gcacttcataccgag

SEQ ID NO: 1590944 - DNA, 15 bp, Homo sapiens
cacttcataccgagt

SEQ ID NO: 1590945 - DNA, 15 bp, Homo sapiens
acttcataccgagtc

SEQ ID NO: 1590946 - DNA, 15 bp, Homo sapiens
cttcataccgagtca

SEQ ID NO: 1590947 - DNA, 15 bp, Homo sapiens
ttcataccgagtcaa

SEQ ID NO: 1590948 - DNA, 15 bp, Homo sapiens
tcataccgagtcaat

SEQ ID NO: 1590949 - DNA, 15 bp, Homo sapiens
cataccgagtcaatt

SEQ ID NO: 1590950 - DNA, 15 bp, Homo sapiens
ataccgagtcaatta

SEQ ID NO: 1590951 - DNA, 15 bp, Homo sapiens
taccgagtcaattag

SEQ ID NO: 1590952 - DNA, 15 bp, Homo sapiens
accgagtcaattagt

SEQ ID NO: 1590953 - DNA, 15 bp, Homo sapiens
ccgagtcaattagta

SEQ ID NO: 1590954 - DNA, 15 bp, Homo sapiens
cgagtcaattagtaa

SEQ ID NO: 1590955 - DNA, 15 bp, Homo sapiens
gagtcaattagtaac

SEQ ID NO: 1590956 - DNA, 15 bp, Homo sapiens
agtcaattagtaaca

SEQ ID NO: 1590957 - DNA, 15 bp, Homo sapiens
gtcaattagtaacag

SEQ ID NO: 1590958 - DNA, 15 bp, Homo sapiens
tcaattagtaacagt

SEQ ID NO: 1590959 - DNA, 15 bp, Homo sapiens
caattagtaacagtg

SEQ ID NO: 1590960 - DNA, 15 bp, Homo sapiens
aattagtaacagtgt

SEQ ID NO: 1590961 - DNA, 15 bp, Homo sapiens
attagtaacagtgtg

SEQ ID NO: 1590962 - DNA, 15 bp, Homo sapiens
ttagtaacagtgtgc

SEQ ID NO: 1590963 - DNA, 15 bp, Homo sapiens
tagtaacagtgtgct

SEQ ID NO: 1590964 - DNA, 15 bp, Homo sapiens
agtaacagtgtgctt

SEQ ID NO: 1590965 - DNA, 15 bp, Homo sapiens
gtaacagtgtgcttt

SEQ ID NO: 1590966 - DNA, 15 bp, Homo sapiens
taacagtgtgctttc

SEQ ID NO: 1590967 - DNA, 15 bp, Homo sapiens
aacagtgtgctttca

SEQ ID NO: 1590968 - DNA, 15 bp, Homo sapiens
acagtgtgctttcaa

SEQ ID NO: 1590969 - DNA, 15 bp, Homo sapiens
cagtgtgctttcaat

SEQ ID NO: 1590970 - DNA, 15 bp, Homo sapiens
agtgtgctttcaatc

SEQ ID NO: 1590971 - DNA, 15 bp, Homo sapiens
gtgtgctttcaatca

SEQ ID NO: 1590972 - DNA, 15 bp, Homo sapiens
tgtgctttcaatcaa

SEQ ID NO: 1590973 - DNA, 15 bp, Homo sapiens
gtgctttcaatcaat

SEQ ID NO: 1590974 - DNA, 15 bp, Homo sapiens
tgctttcaatcaatc

SEQ ID NO: 1590975 - DNA, 15 bp, Homo sapiens
gctttcaatcaatca

SEQ ID NO: 1590976 - DNA, 15 bp, Homo sapiens
ctttcaatcaatcac

SEQ ID NO: 1590977 - DNA, 15 bp, Homo sapiens
tttcaatcaatcact

SEQ ID NO: 1590978 - DNA, 15 bp, Homo sapiens
ttcaatcaatcacta

SEQ ID NO: 1590979 - DNA, 15 bp, Homo sapiens
tcaatcaatcactaa

SEQ ID NO: 1590980 - DNA, 15 bp, Homo sapiens
caatcaatcactaag

SEQ ID NO: 1590981 - DNA, 15 bp, Homo sapiens
aatcaatcactaaga

SEQ ID NO: 1590982 - DNA, 15 bp, Homo sapiens
atcaatcactaagag

SEQ ID NO: 1590983 - DNA, 15 bp, Homo sapiens
tcaatcactaagaga

SEQ ID NO: 1590984 - DNA, 15 bp, Homo sapiens
caatcactaagagat

SEQ ID NO: 1590985 - DNA, 15 bp, Homo sapiens
aatcactaagagata

SEQ ID NO: 1590986 - DNA, 15 bp, Homo sapiens
atcactaagagataa

SEQ ID NO: 1590987 - DNA, 15 bp, Homo sapiens
tcactaagagataat

SEQ ID NO: 1590988 - DNA, 15 bp, Homo sapiens
cactaagagataatt

SEQ ID NO: 1590989 - DNA, 15 bp, Homo sapiens
actaagagataattt

SEQ ID NO: 1590990 - DNA, 15 bp, Homo sapiens
ctaagagataattta

SEQ ID NO: 1590991 - DNA, 15 bp, Homo sapiens
taagagataatttac

SEQ ID NO: 1590992 - DNA, 15 bp, Homo sapiens
aagagataatttaca

SEQ ID NO: 1590993 - DNA, 15 bp, Homo sapiens
agagataatttacat

SEQ ID NO: 1590994 - DNA, 15 bp, Homo sapiens
gagataatttacata

SEQ ID NO: 1590995 - DNA, 15 bp, Homo sapiens
agataatttacatag

SEQ ID NO: 1590996 - DNA, 15 bp, Homo sapiens
gataatttacatagt

SEQ ID NO: 1590997 - DNA, 15 bp, Homo sapiens
ataatttacatagta

SEQ ID NO: 1590998 - DNA, 15 bp, Homo sapiens
taatttacatagtat

SEQ ID NO: 1590999 - DNA, 15 bp, Homo sapiens
aatttacatagtata

SEQ ID NO: 1591000 - DNA, 15 bp, Homo sapiens
atttacatagtataa

SEQ ID NO: 1591001 - DNA, 15 bp, Homo sapiens
tttacatagtataac

SEQ ID NO: 1591002 - DNA, 15 bp, Homo sapiens
ttacatagtataact

SEQ ID NO: 1591003 - DNA, 15 bp, Homo sapiens
tacatagtataacta

SEQ ID NO: 1591004 - DNA, 15 bp, Homo sapiens
acatagtataactaa

SEQ ID NO: 1591005 - DNA, 15 bp, Homo sapiens
catagtataactaaa

SEQ ID NO: 1591006 - DNA, 15 bp, Homo sapiens
atagtataactaaat

SEQ ID NO: 1591007 - DNA, 15 bp, Homo sapiens
tagtataactaaatg

SEQ ID NO: 1591008 - DNA, 15 bp, Homo sapiens
agtataactaaatgg

SEQ ID NO: 1591009 - DNA, 15 bp, Homo sapiens
gtataactaaatggg

SEQ ID NO: 1591010 - DNA, 15 bp, Homo sapiens
tataactaaatgggt

SEQ ID NO: 1591011 - DNA, 15 bp, Homo sapiens
ataactaaatgggtt

SEQ ID NO: 1591012 - DNA, 15 bp, Homo sapiens
taactaaatgggtta

SEQ ID NO: 1591013 - DNA, 15 bp, Homo sapiens
aactaaatgggttat

SEQ ID NO: 1591014 - DNA, 15 bp, Homo sapiens
actaaatgggttatt

SEQ ID NO: 1591015 - DNA, 15 bp, Homo sapiens
ctaaatgggttattt

SEQ ID NO: 1591016 - DNA, 15 bp, Homo sapiens
taaatgggttattta

SEQ ID NO: 1591017 - DNA, 15 bp, Homo sapiens
aaatgggttatttaa

SEQ ID NO: 1591018 - DNA, 15 bp, Homo sapiens
aatgggttatttaac

SEQ ID NO: 1591019 - DNA, 15 bp, Homo sapiens
atgggttatttaacc

SEQ ID NO: 1591020 - DNA, 15 bp, Homo sapiens
tgggttatttaaccc

SEQ ID NO: 1591021 - DNA, 15 bp, Homo sapiens
gggttatttaaccct

SEQ ID NO: 1591022 - DNA, 15 bp, Homo sapiens
ggttatttaaccctt

SEQ ID NO: 1591023 - DNA, 15 bp, Homo sapiens
gttatttaacccttg

SEQ ID NO: 1591024 - DNA, 15 bp, Homo sapiens
ttatttaacccttgg

SEQ ID NO: 1591025 - DNA, 15 bp, Homo sapiens
tatttaacccttgga

SEQ ID NO: 1591026 - DNA, 15 bp, Homo sapiens
atttaacccttggaa

SEQ ID NO: 1591027 - DNA, 15 bp, Homo sapiens
tttaacccttggaag

SEQ ID NO: 1591028 - DNA, 15 bp, Homo sapiens
ttaacccttggaagc

SEQ ID NO: 1591029 - DNA, 15 bp, Homo sapiens
taacccttggaagca

SEQ ID NO: 1591030 - DNA, 15 bp, Homo sapiens
aacccttggaagcag

SEQ ID NO: 1591031 - DNA, 15 bp, Homo sapiens
acccttggaagcagt

SEQ ID NO: 1591032 - DNA, 15 bp, Homo sapiens
cccttggaagcagtc

SEQ ID NO: 1591033 - DNA, 15 bp, Homo sapiens
ccttggaagcagtct

SEQ ID NO: 1591034 - DNA, 15 bp, Homo sapiens
cttggaagcagtcta

SEQ ID NO: 1591035 - DNA, 15 bp, Homo sapiens
ttggaagcagtctag

SEQ ID NO: 1591036 - DNA, 15 bp, Homo sapiens
tggaagcagtctagg

SEQ ID NO: 1591037 - DNA, 15 bp, Homo sapiens
ggaagcagtctaggt

SEQ ID NO: 1591038 - DNA, 15 bp, Homo sapiens
gaagcagtctaggtt

SEQ ID NO: 1591039 - DNA, 15 bp, Homo sapiens
aagcagtctaggtta

SEQ ID NO: 1591040 - DNA, 15 bp, Homo sapiens
agcagtctaggttaa

SEQ ID NO: 1591041 - DNA, 15 bp, Homo sapiens
gcagtctaggttaat

SEQ ID NO: 1591042 - DNA, 15 bp, Homo sapiens
cagtctaggttaatt

SEQ ID NO: 1591043 - DNA, 15 bp, Homo sapiens
agtctaggttaatta

SEQ ID NO: 1591044 - DNA, 15 bp, Homo sapiens
gtctaggttaattat

SEQ ID NO: 1591045 - DNA, 15 bp, Homo sapiens
tctaggttaattatc

SEQ ID NO: 1591046 - DNA, 15 bp, Homo sapiens
ctaggttaattatcg

SEQ ID NO: 1591047 - DNA, 15 bp, Homo sapiens
taggttaattatcgt

SEQ ID NO: 1591048 - DNA, 15 bp, Homo sapiens
aggttaattatcgtt

SEQ ID NO: 1591049 - DNA, 15 bp, Homo sapiens
ggttaattatcgttc

SEQ ID NO: 1591050 - DNA, 15 bp, Homo sapiens
gttaattatcgttcc

SEQ ID NO: 1591051 - DNA, 15 bp, Homo sapiens
ttaattatcgttccc

SEQ ID NO: 1591052 - DNA, 15 bp, Homo sapiens
taattatcgttccct

SEQ ID NO: 1591053 - DNA, 15 bp, Homo sapiens
aattatcgttcccta

SEQ ID NO: 1591054 - DNA, 15 bp, Homo sapiens
attatcgttccctag

SEQ ID NO: 1591055 - DNA, 15 bp, Homo sapiens
ttatcgttccctagg

SEQ ID NO: 1591056 - DNA, 15 bp, Homo sapiens
tatcgttccctaggt

SEQ ID NO: 1591057 - DNA, 15 bp, Homo sapiens
atcgttccctaggtc

SEQ ID NO: 1591058 - DNA, 15 bp, Homo sapiens
tcgttccctaggtca

SEQ ID NO: 1591059 - DNA, 15 bp, Homo sapiens
cgttccctaggtcat

SEQ ID NO: 1591060 - DNA, 15 bp, Homo sapiens
gttccctaggtcatg

SEQ ID NO: 1591061 - DNA, 15 bp, Homo sapiens
ttccctaggtcatgt

SEQ ID NO: 1591062 - DNA, 15 bp, Homo sapiens
tccctaggtcatgta

SEQ ID NO: 1591063 - DNA, 15 bp, Homo sapiens
ccctaggtcatgtag

SEQ ID NO: 1591064 - DNA, 15 bp, Homo sapiens
cctaggtcatgtagt

SEQ ID NO: 1591065 - DNA, 15 bp, Homo sapiens
ctaggtcatgtagta

SEQ ID NO: 1591066 - DNA, 15 bp, Homo sapiens
taggtcatgtagtaa

SEQ ID NO: 1591067 - DNA, 15 bp, Homo sapiens
aggtcatgtagtaaa

SEQ ID NO: 1591068 - DNA, 15 bp, Homo sapiens
ggtcatgtagtaaaa

SEQ ID NO: 1591069 - DNA, 15 bp, Homo sapiens
gtcatgtagtaaaaa

SEQ ID NO: 1591070 - DNA, 15 bp, Homo sapiens
tcatgtagtaaaaag

SEQ ID NO: 1591071 - DNA, 15 bp, Homo sapiens
catgtagtaaaaaga

SEQ ID NO: 1591072 - DNA, 15 bp, Homo sapiens
atgtagtaaaaagac

SEQ ID NO: 1591073 - DNA, 15 bp, Homo sapiens
tgtagtaaaaagaca

SEQ ID NO: 1591074 - DNA, 15 bp, Homo sapiens
gtagtaaaaagacag

SEQ ID NO: 1591075 - DNA, 15 bp, Homo sapiens
tagtaaaaagacagt

SEQ ID NO: 1591076 - DNA, 15 bp, Homo sapiens
agtaaaaagacagta

SEQ ID NO: 1591077 - DNA, 15 bp, Homo sapiens
gtaaaaagacagtag

SEQ ID NO: 1591078 - DNA, 15 bp, Homo sapiens
taaaaagacagtaga

SEQ ID NO: 1591079 - DNA, 15 bp, Homo sapiens
aaaaagacagtagaa

SEQ ID NO: 1591080 - DNA, 15 bp, Homo sapiens
aaaagacagtagaat

SEQ ID NO: 1591081 - DNA, 15 bp, Homo sapiens
aaagacagtagaatc

SEQ ID NO: 1591082 - DNA, 15 bp, Homo sapiens
aagacagtagaatcc

SEQ ID NO: 1591083 - DNA, 15 bp, Homo sapiens
agacagtagaatcca

SEQ ID NO: 1591084 - DNA, 15 bp, Homo sapiens
gacagtagaatccaa

SEQ ID NO: 1591085 - DNA, 15 bp, Homo sapiens
acagtagaatccaac

SEQ ID NO: 1591086 - DNA, 15 bp, Homo sapiens
cagtagaatccaaca

SEQ ID NO: 1591087 - DNA, 15 bp, Homo sapiens
agtagaatccaacat

SEQ ID NO: 1591088 - DNA, 15 bp, Homo sapiens
gtagaatccaacatt

SEQ ID NO: 1591089 - DNA, 15 bp, Homo sapiens
tagaatccaacatta

SEQ ID NO: 1591090 - DNA, 15 bp, Homo sapiens
agaatccaacattaa

SEQ ID NO: 1591091 - DNA, 15 bp, Homo sapiens
gaatccaacattaac

SEQ ID NO: 1591092 - DNA, 15 bp, Homo sapiens
aatccaacattaacc

SEQ ID NO: 1591093 - DNA, 15 bp, Homo sapiens
atccaacattaacct

SEQ ID NO: 1591094 - DNA, 15 bp, Homo sapiens
tccaacattaacctt

SEQ ID NO: 1591095 - DNA, 15 bp, Homo sapiens
ccaacattaacctta

SEQ ID NO: 1591096 - DNA, 15 bp, Homo sapiens
caacattaaccttaa

SEQ ID NO: 1591097 - DNA, 15 bp, Homo sapiens
aacattaaccttaaa

SEQ ID NO: 1591098 - DNA, 15 bp, Homo sapiens
acattaaccttaaat

SEQ ID NO: 1591099 - DNA, 15 bp, Homo sapiens
cattaaccttaaatg

SEQ ID NO: 1591100 - DNA, 15 bp, Homo sapiens
attaaccttaaatgt

SEQ ID NO: 1591101 - DNA, 15 bp, Homo sapiens
ttaaccttaaatgtc

SEQ ID NO: 1591102 - DNA, 15 bp, Homo sapiens
taaccttaaatgtcc

SEQ ID NO: 1591103 - DNA, 15 bp, Homo sapiens
aaccttaaatgtcca

SEQ ID NO: 1591104 - DNA, 15 bp, Homo sapiens
accttaaatgtccat

SEQ ID NO: 1591105 - DNA, 15 bp, Homo sapiens
ccttaaatgtccata

SEQ ID NO: 1591106 - DNA, 15 bp, Homo sapiens
cttaaatgtccatat

SEQ ID NO: 1591107 - DNA, 15 bp, Homo sapiens
ttaaatgtccatatt

SEQ ID NO: 1591108 - DNA, 15 bp, Homo sapiens
taaatgtccatattg

SEQ ID NO: 1591109 - DNA, 15 bp, Homo sapiens
aaatgtccatattgt

SEQ ID NO: 1591110 - DNA, 15 bp, Homo sapiens
aatgtccatattgtc

SEQ ID NO: 1591111 - DNA, 15 bp, Homo sapiens
atgtccatattgtca

SEQ ID NO: 1591112 - DNA, 15 bp, Homo sapiens
tgtccatattgtcaa

SEQ ID NO: 1591113 - DNA, 15 bp, Homo sapiens
gtccatattgtcaag

SEQ ID NO: 1591114 - DNA, 15 bp, Homo sapiens
tccatattgtcaagt

SEQ ID NO: 1591115 - DNA, 15 bp, Homo sapiens
ccatattgtcaagta

SEQ ID NO: 1591116 - DNA, 15 bp, Homo sapiens
catattgtcaagtac

SEQ ID NO: 1591117 - DNA, 15 bp, Homo sapiens
atattgtcaagtact

SEQ ID NO: 1591118 - DNA, 15 bp, Homo sapiens
tattgtcaagtactg

SEQ ID NO: 1591119 - DNA, 15 bp, Homo sapiens
attgtcaagtactgc

SEQ ID NO: 1591120 - DNA, 15 bp, Homo sapiens
ttgtcaagtactgct

SEQ ID NO: 1591121 - DNA, 15 bp, Homo sapiens
tgtcaagtactgctg

SEQ ID NO: 1591122 - DNA, 15 bp, Homo sapiens
gtcaagtactgctgt

SEQ ID NO: 1591123 - DNA, 15 bp, Homo sapiens
tcaagtactgctgtc

SEQ ID NO: 1591124 - DNA, 15 bp, Homo sapiens
caagtactgctgtct

SEQ ID NO: 1591125 - DNA, 15 bp, Homo sapiens
aagtactgctgtctg

SEQ ID NO: 1591126 - DNA, 15 bp, Homo sapiens
agtactgctgtctgc

SEQ ID NO: 1591127 - DNA, 15 bp, Homo sapiens
gtactgctgtctgcc

SEQ ID NO: 1591128 - DNA, 15 bp, Homo sapiens
tactgctgtctgcct

SEQ ID NO: 1591129 - DNA, 15 bp, Homo sapiens
actgctgtctgcctc

SEQ ID NO: 1591130 - DNA, 15 bp, Homo sapiens
ctgctgtctgcctct

SEQ ID NO: 1591131 - DNA, 15 bp, Homo sapiens
tgctgtctgcctctg

SEQ ID NO: 1591132 - DNA, 15 bp, Homo sapiens
gctgtctgcctctgt

SEQ ID NO: 1591133 - DNA, 15 bp, Homo sapiens
ctgtctgcctctgtg

SEQ ID NO: 1591134 - DNA, 15 bp, Homo sapiens
tgtctgcctctgtgg

SEQ ID NO: 1591135 - DNA, 15 bp, Homo sapiens
gtctgcctctgtggg

SEQ ID NO: 1591136 - DNA, 15 bp, Homo sapiens
tctgcctctgtggga

SEQ ID NO: 1591137 - DNA, 15 bp, Homo sapiens
ctgcctctgtgggac

SEQ ID NO: 1591138 - DNA, 15 bp, Homo sapiens
tgcctctgtgggact

SEQ ID NO: 1591139 - DNA, 15 bp, Homo sapiens
gcctctgtgggactc

SEQ ID NO: 1591140 - DNA, 15 bp, Homo sapiens
cctctgtgggactct

SEQ ID NO: 1591141 - DNA, 15 bp, Homo sapiens
ctctgtgggactcta

SEQ ID NO: 1591142 - DNA, 15 bp, Homo sapiens
tctgtgggactctaa

SEQ ID NO: 1591143 - DNA, 15 bp, Homo sapiens
ctgtgggactctaat

SEQ ID NO: 1591144 - DNA, 15 bp, Homo sapiens
tgtgggactctaatt

SEQ ID NO: 1591145 - DNA, 15 bp, Homo sapiens
gtgggactctaattt

SEQ ID NO: 1591146 - DNA, 15 bp, Homo sapiens
tgggactctaatttg

SEQ ID NO: 1591147 - DNA, 15 bp, Homo sapiens
gggactctaatttgg

SEQ ID NO: 1591148 - DNA, 15 bp, Homo sapiens
ggactctaatttggg

SEQ ID NO: 1591149 - DNA, 15 bp, Homo sapiens
gactctaatttggga

SEQ ID NO: 1591150 - DNA, 15 bp, Homo sapiens
actctaatttgggat

SEQ ID NO: 1591151 - DNA, 15 bp, Homo sapiens
ctctaatttgggatc

SEQ ID NO: 1591152 - DNA, 15 bp, Homo sapiens
tctaatttgggatcc

SEQ ID NO: 1591153 - DNA, 15 bp, Homo sapiens
ctaatttgggatcct

SEQ ID NO: 1591154 - DNA, 15 bp, Homo sapiens
taatttgggatcctt

SEQ ID NO: 1591155 - DNA, 15 bp, Homo sapiens
aatttgggatccttc

SEQ ID NO: 1591156 - DNA, 15 bp, Homo sapiens
atttgggatccttca

SEQ ID NO: 1591157 - DNA, 15 bp, Homo sapiens
tttgggatccttcaa

SEQ ID NO: 1591158 - DNA, 15 bp, Homo sapiens
ttgggatccttcaaa

SEQ ID NO: 1591159 - DNA, 15 bp, Homo sapiens
tgggatccttcaaaa

SEQ ID NO: 1591160 - DNA, 15 bp, Homo sapiens
gggatccttcaaaaa

SEQ ID NO: 1591161 - DNA, 15 bp, Homo sapiens
ggatccttcaaaaaa

SEQ ID NO: 1591162 - DNA, 15 bp, Homo sapiens
gatccttcaaaaaac

SEQ ID NO: 1591163 - DNA, 15 bp, Homo sapiens
atccttcaaaaaaca

SEQ ID NO: 1591164 - DNA, 15 bp, Homo sapiens
tccttcaaaaaacat

SEQ ID NO: 1591165 - DNA, 15 bp, Homo sapiens
ccttcaaaaaacatt

SEQ ID NO: 1591166 - DNA, 15 bp, Homo sapiens
cttcaaaaaacattg

SEQ ID NO: 1591167 - DNA, 15 bp, Homo sapiens
ttcaaaaaacattga

SEQ ID NO: 1591168 - DNA, 15 bp, Homo sapiens
tcaaaaaacattgat

SEQ ID NO: 1591169 - DNA, 15 bp, Homo sapiens
caaaaaacattgatg

SEQ ID NO: 1591170 - DNA, 15 bp, Homo sapiens
aaaaaacattgatgg

SEQ ID NO: 1591171 - DNA, 15 bp, Homo sapiens
aaaaacattgatggg

SEQ ID NO: 1591172 - DNA, 15 bp, Homo sapiens
aaaacattgatgggg

SEQ ID NO: 1591173 - DNA, 15 bp, Homo sapiens
aaacattgatggggg

SEQ ID NO: 1591174 - DNA, 15 bp, Homo sapiens
aacattgatggggga

SEQ ID NO: 1591175 - DNA, 15 bp, Homo sapiens
acattgatgggggaa

SEQ ID NO: 1591176 - DNA, 15 bp, Homo sapiens
cattgatgggggaaa

SEQ ID NO: 1591177 - DNA, 15 bp, Homo sapiens
attgatgggggaaaa

SEQ ID NO: 1591178 - DNA, 15 bp, Homo sapiens
ttgatgggggaaaag

SEQ ID NO: 1591179 - DNA, 15 bp, Homo sapiens
tgatgggggaaaaga

SEQ ID NO: 1591180 - DNA, 15 bp, Homo sapiens
gatgggggaaaagat

SEQ ID NO: 1591181 - DNA, 15 bp, Homo sapiens
atgggggaaaagata

SEQ ID NO: 1591182 - DNA, 15 bp, Homo sapiens
tgggggaaaagatag

SEQ ID NO: 1591183 - DNA, 15 bp, Homo sapiens
gggggaaaagatagc

SEQ ID NO: 1591184 - DNA, 15 bp, Homo sapiens
ggggaaaagatagcc

SEQ ID NO: 1591185 - DNA, 15 bp, Homo sapiens
gggaaaagatagcct

SEQ ID NO: 1591186 - DNA, 15 bp, Homo sapiens
ggaaaagatagcctt

SEQ ID NO: 1591187 - DNA, 15 bp, Homo sapiens
gaaaagatagccttt

SEQ ID NO: 1591188 - DNA, 15 bp, Homo sapiens
aaaagatagccttta

SEQ ID NO: 1591189 - DNA, 15 bp, Homo sapiens
aaagatagcctttaa

SEQ ID NO: 1591190 - DNA, 15 bp, Homo sapiens
aagatagcctttaaa

SEQ ID NO: 1591191 - DNA, 15 bp, Homo sapiens
agatagcctttaaaa

SEQ ID NO: 1591192 - DNA, 15 bp, Homo sapiens
gatagcctttaaaaa

SEQ ID NO: 1591193 - DNA, 15 bp, Homo sapiens
atagcctttaaaaaa

SEQ ID NO: 1591194 - DNA, 15 bp, Homo sapiens
tagcctttaaaaaaa

SEQ ID NO: 1591195 - DNA, 15 bp, Homo sapiens
agcctttaaaaaaaa

SEQ ID NO: 1591196 - DNA, 15 bp, Homo sapiens
gcctttaaaaaaaaa

SEQ ID NO: 1591197 - DNA, 15 bp, Homo sapiens
cctttaaaaaaaaaa

SEQ ID NO: 1591198 - DNA, 15 bp, Homo sapiens
aaaaaaaaacaaacc

SEQ ID NO: 1591199 - DNA, 15 bp, Homo sapiens
aaaaaaaacaaacct

SEQ ID NO: 1591200 - DNA, 15 bp, Homo sapiens
aaaaaaacaaaccta

SEQ ID NO: 1591201 - DNA, 15 bp, Homo sapiens
aaaaaacaaacctat

SEQ ID NO: 1591202 - DNA, 15 bp, Homo sapiens
aaaaacaaacctatg

SEQ ID NO: 1591203 - DNA, 15 bp, Homo sapiens
aaaacaaacctatgt

SEQ ID NO: 1591204 - DNA, 15 bp, Homo sapiens
aaacaaacctatgtg

SEQ ID NO: 1591205 - DNA, 15 bp, Homo sapiens
aacaaacctatgtga

SEQ ID NO: 1591206 - DNA, 15 bp, Homo sapiens
acaaacctatgtgag

SEQ ID NO: 1591207 - DNA, 15 bp, Homo sapiens
caaacctatgtgagt

SEQ ID NO: 1591208 - DNA, 15 bp, Homo sapiens
aaacctatgtgagtc

SEQ ID NO: 1591209 - DNA, 15 bp, Homo sapiens
aacctatgtgagtct

SEQ ID NO: 1591210 - DNA, 15 bp, Homo sapiens
acctatgtgagtcta

SEQ ID NO: 1591211 - DNA, 15 bp, Homo sapiens
cctatgtgagtctat

SEQ ID NO: 1591212 - DNA, 15 bp, Homo sapiens
ctatgtgagtctatg

SEQ ID NO: 1591213 - DNA, 15 bp, Homo sapiens
tatgtgagtctatgt

SEQ ID NO: 1591214 - DNA, 15 bp, Homo sapiens
atgtgagtctatgtg

SEQ ID NO: 1591215 - DNA, 15 bp, Homo sapiens
tgtgagtctatgtga

SEQ ID NO: 1591216 - DNA, 15 bp, Homo sapiens
gtgagtctatgtgag

SEQ ID NO: 1591217 - DNA, 15 bp, Homo sapiens
tgagtctatgtgagg

SEQ ID NO: 1591218 - DNA, 15 bp, Homo sapiens
gagtctatgtgaggt

SEQ ID NO: 1591219 - DNA, 15 bp, Homo sapiens
agtctatgtgaggta

SEQ ID NO: 1591220 - DNA, 15 bp, Homo sapiens
gtctatgtgaggtag

SEQ ID NO: 1591221 - DNA, 15 bp, Homo sapiens
tctatgtgaggtaga

SEQ ID NO: 1591222 - DNA, 15 bp, Homo sapiens
ctatgtgaggtagac

SEQ ID NO: 1591223 - DNA, 15 bp, Homo sapiens
tatgtgaggtagact

SEQ ID NO: 1591224 - DNA, 15 bp, Homo sapiens
atgtgaggtagactc

SEQ ID NO: 1591225 - DNA, 15 bp, Homo sapiens
tgtgaggtagactca

SEQ ID NO: 1591226 - DNA, 15 bp, Homo sapiens
gtgaggtagactcac

SEQ ID NO: 1591227 - DNA, 15 bp, Homo sapiens
tgaggtagactcaca

SEQ ID NO: 1591228 - DNA, 15 bp, Homo sapiens
gaggtagactcacat

SEQ ID NO: 1591229 - DNA, 15 bp, Homo sapiens
aggtagactcacata

SEQ ID NO: 1591230 - DNA, 15 bp, Homo sapiens
ggtagactcacatag

SEQ ID NO: 1591231 - DNA, 15 bp, Homo sapiens
gtagactcacatagt

SEQ ID NO: 1591232 - DNA, 15 bp, Homo sapiens
tagactcacatagtt

SEQ ID NO: 1591233 - DNA, 15 bp, Homo sapiens
agactcacatagttt

SEQ ID NO: 1591234 - DNA, 15 bp, Homo sapiens
gactcacatagtttc

SEQ ID NO: 1591235 - DNA, 15 bp, Homo sapiens
actcacatagtttcc

SEQ ID NO: 1591236 - DNA, 15 bp, Homo sapiens
ctcacatagtttcct

SEQ ID NO: 1591237 - DNA, 15 bp, Homo sapiens
tcacatagtttccta

SEQ ID NO: 1591238 - DNA, 15 bp, Homo sapiens
cacatagtttcctaa

SEQ ID NO: 1591239 - DNA, 15 bp, Homo sapiens
acatagtttcctaaa

SEQ ID NO: 1591240 - DNA, 15 bp, Homo sapiens
catagtttcctaaaa

SEQ ID NO: 1591241 - DNA, 15 bp, Homo sapiens
atagtttcctaaaag

SEQ ID NO: 1591242 - DNA, 15 bp, Homo sapiens
tagtttcctaaaaga

SEQ ID NO: 1591243 - DNA, 15 bp, Homo sapiens
agtttcctaaaagat

SEQ ID NO: 1591244 - DNA, 15 bp, Homo sapiens
gtttcctaaaagata

SEQ ID NO: 1591245 - DNA, 15 bp, Homo sapiens
tttcctaaaagatag

SEQ ID NO: 1591246 - DNA, 15 bp, Homo sapiens
ttcctaaaagatagc

SEQ ID NO: 1591247 - DNA, 15 bp, Homo sapiens
tcctaaaagatagca

SEQ ID NO: 1591248 - DNA, 15 bp, Homo sapiens
cctaaaagatagcaa

SEQ ID NO: 1591249 - DNA, 15 bp, Homo sapiens
ctaaaagatagcaaa

SEQ ID NO: 1591250 - DNA, 15 bp, Homo sapiens
taaaagatagcaaag

SEQ ID NO: 1591251 - DNA, 15 bp, Homo sapiens
aaaagatagcaaagc

SEQ ID NO: 1591252 - DNA, 15 bp, Homo sapiens
aaagatagcaaagca

SEQ ID NO: 1591253 - DNA, 15 bp, Homo sapiens
aagatagcaaagcag

SEQ ID NO: 1591254 - DNA, 15 bp, Homo sapiens
agatagcaaagcagt

SEQ ID NO: 1591255 - DNA, 15 bp, Homo sapiens
gatagcaaagcagta

SEQ ID NO: 1591256 - DNA, 15 bp, Homo sapiens
atagcaaagcagtat

SEQ ID NO: 1591257 - DNA, 15 bp, Homo sapiens
tagcaaagcagtatt

SEQ ID NO: 1591258 - DNA, 15 bp, Homo sapiens
agcaaagcagtatta

SEQ ID NO: 1591259 - DNA, 15 bp, Homo sapiens
gcaaagcagtattat

SEQ ID NO: 1591260 - DNA, 15 bp, Homo sapiens
caaagcagtattatg

SEQ ID NO: 1591261 - DNA, 15 bp, Homo sapiens
aaagcagtattatgt

SEQ ID NO: 1591262 - DNA, 15 bp, Homo sapiens
aagcagtattatgta

SEQ ID NO: 1591263 - DNA, 15 bp, Homo sapiens
agcagtattatgtag

SEQ ID NO: 1591264 - DNA, 15 bp, Homo sapiens
gcagtattatgtagt

SEQ ID NO: 1591265 - DNA, 15 bp, Homo sapiens
cagtattatgtagtg

SEQ ID NO: 1591266 - DNA, 15 bp, Homo sapiens
agtattatgtagtgg

SEQ ID NO: 1591267 - DNA, 15 bp, Homo sapiens
gtattatgtagtggc

SEQ ID NO: 1591268 - DNA, 15 bp, Homo sapiens
tattatgtagtggct

SEQ ID NO: 1591269 - DNA, 15 bp, Homo sapiens
attatgtagtggctg

SEQ ID NO: 1591270 - DNA, 15 bp, Homo sapiens
ttatgtagtggctga

SEQ ID NO: 1591271 - DNA, 15 bp, Homo sapiens
tatgtagtggctgaa

SEQ ID NO: 1591272 - DNA, 15 bp, Homo sapiens
atgtagtggctgaaa

SEQ ID NO: 1591273 - DNA, 15 bp, Homo sapiens
tgtagtggctgaaag

SEQ ID NO: 1591274 - DNA, 15 bp, Homo sapiens
gtagtggctgaaagt

SEQ ID NO: 1591275 - DNA, 15 bp, Homo sapiens
tagtggctgaaagtg

SEQ ID NO: 1591276 - DNA, 15 bp, Homo sapiens
agtggctgaaagtgt

SEQ ID NO: 1591277 - DNA, 15 bp, Homo sapiens
gtggctgaaagtgtg

SEQ ID NO: 1591278 - DNA, 15 bp, Homo sapiens
tggctgaaagtgtga

SEQ ID NO: 1591279 - DNA, 15 bp, Homo sapiens
ggctgaaagtgtgag

SEQ ID NO: 1591280 - DNA, 15 bp, Homo sapiens
gctgaaagtgtgagt

SEQ ID NO: 1591281 - DNA, 15 bp, Homo sapiens
ctgaaagtgtgagtt

SEQ ID NO: 1591282 - DNA, 15 bp, Homo sapiens
tgaaagtgtgagttc

SEQ ID NO: 1591283 - DNA, 15 bp, Homo sapiens
gaaagtgtgagttcc

SEQ ID NO: 1591284 - DNA, 15 bp, Homo sapiens
aaagtgtgagttccg

SEQ ID NO: 1591285 - DNA, 15 bp, Homo sapiens
aagtgtgagttccgg

SEQ ID NO: 1591286 - DNA, 15 bp, Homo sapiens
agtgtgagttccgga

SEQ ID NO: 1591287 - DNA, 15 bp, Homo sapiens
gtgtgagttccggag

SEQ ID NO: 1591288 - DNA, 15 bp, Homo sapiens
tgtgagttccggagc

SEQ ID NO: 1591289 - DNA, 15 bp, Homo sapiens
gtgagttccggagcc

SEQ ID NO: 1591290 - DNA, 15 bp, Homo sapiens
tgagttccggagcct

SEQ ID NO: 1591291 - DNA, 15 bp, Homo sapiens
gagttccggagcctg

SEQ ID NO: 1591292 - DNA, 15 bp, Homo sapiens
agttccggagcctga

SEQ ID NO: 1591293 - DNA, 15 bp, Homo sapiens
gttccggagcctgac

SEQ ID NO: 1591294 - DNA, 15 bp, Homo sapiens
ttccggagcctgaca

SEQ ID NO: 1591295 - DNA, 15 bp, Homo sapiens
tccggagcctgacaa

SEQ ID NO: 1591296 - DNA, 15 bp, Homo sapiens
ccggagcctgacaac

SEQ ID NO: 1591297 - DNA, 15 bp, Homo sapiens
cggagcctgacaact

SEQ ID NO: 1591298 - DNA, 15 bp, Homo sapiens
ggagcctgacaactg

SEQ ID NO: 1591299 - DNA, 15 bp, Homo sapiens
gagcctgacaactga

SEQ ID NO: 1591300 - DNA, 15 bp, Homo sapiens
agcctgacaactgat

SEQ ID NO: 1591301 - DNA, 15 bp, Homo sapiens
gcctgacaactgatt

SEQ ID NO: 1591302 - DNA, 15 bp, Homo sapiens
cctgacaactgattc

SEQ ID NO: 1591303 - DNA, 15 bp, Homo sapiens
ctgacaactgattca

SEQ ID NO: 1591304 - DNA, 15 bp, Homo sapiens
tgacaactgattcaa

SEQ ID NO: 1591305 - DNA, 15 bp, Homo sapiens
gacaactgattcaaa

SEQ ID NO: 1591306 - DNA, 15 bp, Homo sapiens
acaactgattcaaag

SEQ ID NO: 1591307 - DNA, 15 bp, Homo sapiens
caactgattcaaagc

SEQ ID NO: 1591308 - DNA, 15 bp, Homo sapiens
aactgattcaaagca

SEQ ID NO: 1591309 - DNA, 15 bp, Homo sapiens
actgattcaaagcat

SEQ ID NO: 1591310 - DNA, 15 bp, Homo sapiens
ctgattcaaagcatg

SEQ ID NO: 1591311 - DNA, 15 bp, Homo sapiens
tgattcaaagcatgg

SEQ ID NO: 1591312 - DNA, 15 bp, Homo sapiens
gattcaaagcatggc

SEQ ID NO: 1591313 - DNA, 15 bp, Homo sapiens
attcaaagcatggct

SEQ ID NO: 1591314 - DNA, 15 bp, Homo sapiens
ttcaaagcatggctt

SEQ ID NO: 1591315 - DNA, 15 bp, Homo sapiens
tcaaagcatggctta

SEQ ID NO: 1591316 - DNA, 15 bp, Homo sapiens
caaagcatggcttag

SEQ ID NO: 1591317 - DNA, 15 bp, Homo sapiens
aaagcatggcttagt

SEQ ID NO: 1591318 - DNA, 15 bp, Homo sapiens
aagcatggcttagta

SEQ ID NO: 1591319 - DNA, 15 bp, Homo sapiens
agcatggcttagtac

SEQ ID NO: 1591320 - DNA, 15 bp, Homo sapiens
gcatggcttagtact

SEQ ID NO: 1591321 - DNA, 15 bp, Homo sapiens
catggcttagtactt

SEQ ID NO: 1591322 - DNA, 15 bp, Homo sapiens
atggcttagtacttc

SEQ ID NO: 1591323 - DNA, 15 bp, Homo sapiens
tggcttagtacttcc

SEQ ID NO: 1591324 - DNA, 15 bp, Homo sapiens
ggcttagtacttcct

SEQ ID NO: 1591325 - DNA, 15 bp, Homo sapiens
gcttagtacttccta

SEQ ID NO: 1591326 - DNA, 15 bp, Homo sapiens
cttagtacttcctaa

SEQ ID NO: 1591327 - DNA, 15 bp, Homo sapiens
ttagtacttcctaac

SEQ ID NO: 1591328 - DNA, 15 bp, Homo sapiens
tagtacttcctaact

SEQ ID NO: 1591329 - DNA, 15 bp, Homo sapiens
agtacttcctaactc

SEQ ID NO: 1591330 - DNA, 15 bp, Homo sapiens
gtacttcctaactct

SEQ ID NO: 1591331 - DNA, 15 bp, Homo sapiens
tacttcctaactctg

SEQ ID NO: 1591332 - DNA, 15 bp, Homo sapiens
acttcctaactctga

SEQ ID NO: 1591333 - DNA, 15 bp, Homo sapiens
cttcctaactctgac

SEQ ID NO: 1591334 - DNA, 15 bp, Homo sapiens
ttcctaactctgacc

SEQ ID NO: 1591335 - DNA, 15 bp, Homo sapiens
tcctaactctgacct

SEQ ID NO: 1591336 - DNA, 15 bp, Homo sapiens
cctaactctgacctt

SEQ ID NO: 1591337 - DNA, 15 bp, Homo sapiens
ctaactctgaccttg

SEQ ID NO: 1591338 - DNA, 15 bp, Homo sapiens
taactctgaccttgg

SEQ ID NO: 1591339 - DNA, 15 bp, Homo sapiens
aactctgaccttggg

SEQ ID NO: 1591340 - DNA, 15 bp, Homo sapiens
actctgaccttgggc

SEQ ID NO: 1591341 - DNA, 15 bp, Homo sapiens
ctctgaccttgggca

SEQ ID NO: 1591342 - DNA, 15 bp, Homo sapiens
tctgaccttgggcaa

SEQ ID NO: 1591343 - DNA, 15 bp, Homo sapiens
ctgaccttgggcaag

SEQ ID NO: 1591344 - DNA, 15 bp, Homo sapiens
accttgggcaagtta

SEQ ID NO: 1591345 - DNA, 15 bp, Homo sapiens
ccttgggcaagttac

SEQ ID NO: 1591346 - DNA, 15 bp, Homo sapiens
cttgggcaagttact

SEQ ID NO: 1591347 - DNA, 15 bp, Homo sapiens
ggcaagttacttaac

SEQ ID NO: 1591348 - DNA, 15 bp, Homo sapiens
gcaagttacttaacc

SEQ ID NO: 1591349 - DNA, 15 bp, Homo sapiens
agttacttaacctct

SEQ ID NO: 1591350 - DNA, 15 bp, Homo sapiens
gttacttaacctctc

SEQ ID NO: 1591351 - DNA, 15 bp, Homo sapiens
ttacttaacctctct

SEQ ID NO: 1591352 - DNA, 15 bp, Homo sapiens
tacttaacctctctg

SEQ ID NO: 1591353 - DNA, 15 bp, Homo sapiens
acttaacctctctgt

SEQ ID NO: 1591354 - DNA, 15 bp, Homo sapiens
cttaacctctctgtg

SEQ ID NO: 1591355 - DNA, 15 bp, Homo sapiens
ttaacctctctgtgt

SEQ ID NO: 1591356 - DNA, 15 bp, Homo sapiens
taacctctctgtgtc

SEQ ID NO: 1591357 - DNA, 15 bp, Homo sapiens
aacctctctgtgtcc

SEQ ID NO: 1591358 - DNA, 15 bp, Homo sapiens
acctctctgtgtccc

SEQ ID NO: 1591359 - DNA, 15 bp, Homo sapiens
cctctctgtgtccca

SEQ ID NO: 1591360 - DNA, 15 bp, Homo sapiens
ctctctgtgtcccat

SEQ ID NO: 1591361 - DNA, 15 bp, Homo sapiens
tctctgtgtcccata

SEQ ID NO: 1591362 - DNA, 15 bp, Homo sapiens
ctctgtgtcccatat

SEQ ID NO: 1591363 - DNA, 15 bp, Homo sapiens
tctgtgtcccatatg

SEQ ID NO: 1591364 - DNA, 15 bp, Homo sapiens
ctgtgtcccatatgt

SEQ ID NO: 1591365 - DNA, 15 bp, Homo sapiens
tgtgtcccatatgtg

SEQ ID NO: 1591366 - DNA, 15 bp, Homo sapiens
gtgtcccatatgtga

SEQ ID NO: 1591367 - DNA, 15 bp, Homo sapiens
tgtcccatatgtgat

SEQ ID NO: 1591368 - DNA, 15 bp, Homo sapiens
gtcccatatgtgatt

SEQ ID NO: 1591369 - DNA, 15 bp, Homo sapiens
tcccatatgtgatta

SEQ ID NO: 1591370 - DNA, 15 bp, Homo sapiens
cccatatgtgattag

SEQ ID NO: 1591371 - DNA, 15 bp, Homo sapiens
ccatatgtgattagg

SEQ ID NO: 1591372 - DNA, 15 bp, Homo sapiens
catatgtgattaggg

SEQ ID NO: 1591373 - DNA, 15 bp, Homo sapiens
atatgtgattagggt

SEQ ID NO: 1591374 - DNA, 15 bp, Homo sapiens
tatgtgattagggtg

SEQ ID NO: 1591375 - DNA, 15 bp, Homo sapiens
atgtgattagggtga

SEQ ID NO: 1591376 - DNA, 15 bp, Homo sapiens
tgtgattagggtgag

SEQ ID NO: 1591377 - DNA, 15 bp, Homo sapiens
gtgattagggtgagg

SEQ ID NO: 1591378 - DNA, 15 bp, Homo sapiens
tgattagggtgaggt

SEQ ID NO: 1591379 - DNA, 15 bp, Homo sapiens
gattagggtgaggtt

SEQ ID NO: 1591380 - DNA, 15 bp, Homo sapiens
attagggtgaggttg

SEQ ID NO: 1591381 - DNA, 15 bp, Homo sapiens
ttagggtgaggttga

SEQ ID NO: 1591382 - DNA, 15 bp, Homo sapiens
tagggtgaggttgat

SEQ ID NO: 1591383 - DNA, 15 bp, Homo sapiens
agggtgaggttgata

SEQ ID NO: 1591384 - DNA, 15 bp, Homo sapiens
gggtgaggttgataa

SEQ ID NO: 1591385 - DNA, 15 bp, Homo sapiens
ggtgaggttgataat

SEQ ID NO: 1591386 - DNA, 15 bp, Homo sapiens
gtgaggttgataata

SEQ ID NO: 1591387 - DNA, 15 bp, Homo sapiens
gaggttgataatagc

SEQ ID NO: 1591388 - DNA, 15 bp, Homo sapiens
aggttgataatagca

SEQ ID NO: 1591389 - DNA, 15 bp, Homo sapiens
ggttgataatagcag

SEQ ID NO: 1591390 - DNA, 15 bp, Homo sapiens
gttgataatagcagc

SEQ ID NO: 1591391 - DNA, 15 bp, Homo sapiens
ttgataatagcagcc

SEQ ID NO: 1591392 - DNA, 15 bp, Homo sapiens
tgataatagcagcca

SEQ ID NO: 1591393 - DNA, 15 bp, Homo sapiens
gataatagcagccat

SEQ ID NO: 1591394 - DNA, 15 bp, Homo sapiens
ataatagcagccata

SEQ ID NO: 1591395 - DNA, 15 bp, Homo sapiens
taatagcagccatag

SEQ ID NO: 1591396 - DNA, 15 bp, Homo sapiens
aatagcagccataga

SEQ ID NO: 1591397 - DNA, 15 bp, Homo sapiens
atagcagccatagag

SEQ ID NO: 1591398 - DNA, 15 bp, Homo sapiens
tagcagccatagagt

SEQ ID NO: 1591399 - DNA, 15 bp, Homo sapiens
agcagccatagagtt

SEQ ID NO: 1591400 - DNA, 15 bp, Homo sapiens
gcagccatagagtta

SEQ ID NO: 1591401 - DNA, 15 bp, Homo sapiens
cagccatagagttaa

SEQ ID NO: 1591402 - DNA, 15 bp, Homo sapiens
agccatagagttaag

SEQ ID NO: 1591403 - DNA, 15 bp, Homo sapiens
gccatagagttaaga

SEQ ID NO: 1591404 - DNA, 15 bp, Homo sapiens
ccatagagttaagag

SEQ ID NO: 1591405 - DNA, 15 bp, Homo sapiens
catagagttaagagg

SEQ ID NO: 1591406 - DNA, 15 bp, Homo sapiens
atagagttaagagga

SEQ ID NO: 1591407 - DNA, 15 bp, Homo sapiens
tagagttaagaggat

SEQ ID NO: 1591408 - DNA, 15 bp, Homo sapiens
agagttaagaggatt

SEQ ID NO: 1591409 - DNA, 15 bp, Homo sapiens
gagttaagaggatta

SEQ ID NO: 1591410 - DNA, 15 bp, Homo sapiens
agttaagaggattaa

SEQ ID NO: 1591411 - DNA, 15 bp, Homo sapiens
gttaagaggattaag

SEQ ID NO: 1591412 - DNA, 15 bp, Homo sapiens
ttaagaggattaagt

SEQ ID NO: 1591413 - DNA, 15 bp, Homo sapiens
taagaggattaagtg

SEQ ID NO: 1591414 - DNA, 15 bp, Homo sapiens
aagaggattaagtgc

SEQ ID NO: 1591415 - DNA, 15 bp, Homo sapiens
agaggattaagtgct

SEQ ID NO: 1591416 - DNA, 15 bp, Homo sapiens
gaggattaagtgcta

SEQ ID NO: 1591417 - DNA, 15 bp, Homo sapiens
aggattaagtgctat

SEQ ID NO: 1591418 - DNA, 15 bp, Homo sapiens
ggattaagtgctata

SEQ ID NO: 1591419 - DNA, 15 bp, Homo sapiens
gattaagtgctataa

SEQ ID NO: 1591420 - DNA, 15 bp, Homo sapiens
attaagtgctataat

SEQ ID NO: 1591421 - DNA, 15 bp, Homo sapiens
ttaagtgctataatg

SEQ ID NO: 1591422 - DNA, 15 bp, Homo sapiens
taagtgctataatgc

SEQ ID NO: 1591423 - DNA, 15 bp, Homo sapiens
aagtgctataatgca

SEQ ID NO: 1591424 - DNA, 15 bp, Homo sapiens
agtgctataatgcaa

SEQ ID NO: 1591425 - DNA, 15 bp, Homo sapiens
gtgctataatgcaag

SEQ ID NO: 1591426 - DNA, 15 bp, Homo sapiens
tgctataatgcaagt

SEQ ID NO: 1591427 - DNA, 15 bp, Homo sapiens
gctataatgcaagta

SEQ ID NO: 1591428 - DNA, 15 bp, Homo sapiens
ctataatgcaagtag

SEQ ID NO: 1591429 - DNA, 15 bp, Homo sapiens
tataatgcaagtaga

SEQ ID NO: 1591430 - DNA, 15 bp, Homo sapiens
ataatgcaagtagag

SEQ ID NO: 1591431 - DNA, 15 bp, Homo sapiens
taatgcaagtagagc

SEQ ID NO: 1591432 - DNA, 15 bp, Homo sapiens
aatgcaagtagagct

SEQ ID NO: 1591433 - DNA, 15 bp, Homo sapiens
atgcaagtagagctc

SEQ ID NO: 1591434 - DNA, 15 bp, Homo sapiens
tgcaagtagagctct

SEQ ID NO: 1591435 - DNA, 15 bp, Homo sapiens
gcaagtagagctctt

SEQ ID NO: 1591436 - DNA, 15 bp, Homo sapiens
caagtagagctctta

SEQ ID NO: 1591437 - DNA, 15 bp, Homo sapiens
aagtagagctcttac

SEQ ID NO: 1591438 - DNA, 15 bp, Homo sapiens
agtagagctcttaca

SEQ ID NO: 1591439 - DNA, 15 bp, Homo sapiens
gtagagctcttacaa

SEQ ID NO: 1591440 - DNA, 15 bp, Homo sapiens
tagagctcttacaac

SEQ ID NO: 1591441 - DNA, 15 bp, Homo sapiens
agagctcttacaaca

SEQ ID NO: 1591442 - DNA, 15 bp, Homo sapiens
gagctcttacaacag

SEQ ID NO: 1591443 - DNA, 15 bp, Homo sapiens
agctcttacaacagt

SEQ ID NO: 1591444 - DNA, 15 bp, Homo sapiens
gctcttacaacagtt

SEQ ID NO: 1591445 - DNA, 15 bp, Homo sapiens
ctcttacaacagttt

SEQ ID NO: 1591446 - DNA, 15 bp, Homo sapiens
tcttacaacagtttc

SEQ ID NO: 1591447 - DNA, 15 bp, Homo sapiens
cttacaacagtttct

SEQ ID NO: 1591448 - DNA, 15 bp, Homo sapiens
ttacaacagtttctg

SEQ ID NO: 1591449 - DNA, 15 bp, Homo sapiens
tacaacagtttctgg

SEQ ID NO: 1591450 - DNA, 15 bp, Homo sapiens
acaacagtttctggt

SEQ ID NO: 1591451 - DNA, 15 bp, Homo sapiens
caacagtttctggta

SEQ ID NO: 1591452 - DNA, 15 bp, Homo sapiens
aacagtttctggtaa

SEQ ID NO: 1591453 - DNA, 15 bp, Homo sapiens
acagtttctggtaaa

SEQ ID NO: 1591454 - DNA, 15 bp, Homo sapiens
cagtttctggtaaat

SEQ ID NO: 1591455 - DNA, 15 bp, Homo sapiens
agtttctggtaaatc

SEQ ID NO: 1591456 - DNA, 15 bp, Homo sapiens
gtttctggtaaatca

SEQ ID NO: 1591457 - DNA, 15 bp, Homo sapiens
tttctggtaaatcac

SEQ ID NO: 1591458 - DNA, 15 bp, Homo sapiens
ttctggtaaatcact

SEQ ID NO: 1591459 - DNA, 15 bp, Homo sapiens
tctggtaaatcactc

SEQ ID NO: 1591460 - DNA, 15 bp, Homo sapiens
ctggtaaatcactca

SEQ ID NO: 1591461 - DNA, 15 bp, Homo sapiens
tggtaaatcactcaa

SEQ ID NO: 1591462 - DNA, 15 bp, Homo sapiens
ggtaaatcactcaat

SEQ ID NO: 1591463 - DNA, 15 bp, Homo sapiens
gtaaatcactcaata

SEQ ID NO: 1591464 - DNA, 15 bp, Homo sapiens
taaatcactcaataa

SEQ ID NO: 1591465 - DNA, 15 bp, Homo sapiens
aaatcactcaataaa

SEQ ID NO: 1591466 - DNA, 15 bp, Homo sapiens
aatcactcaataaat

SEQ ID NO: 1591467 - DNA, 15 bp, Homo sapiens
atcactcaataaatt

SEQ ID NO: 1591468 - DNA, 15 bp, Homo sapiens
tcactcaataaattc

SEQ ID NO: 1591469 - DNA, 15 bp, Homo sapiens
cactcaataaattca

SEQ ID NO: 1591470 - DNA, 15 bp, Homo sapiens
actcaataaattcag

SEQ ID NO: 1591471 - DNA, 15 bp, Homo sapiens
ctcaataaattcaga

SEQ ID NO: 1591472 - DNA, 15 bp, Homo sapiens
tcaataaattcagac

SEQ ID NO: 1591473 - DNA, 15 bp, Homo sapiens
caataaattcagaca

SEQ ID NO: 1591474 - DNA, 15 bp, Homo sapiens
aataaattcagacat

SEQ ID NO: 1591475 - DNA, 15 bp, Homo sapiens
ataaattcagacata

SEQ ID NO: 1591476 - DNA, 15 bp, Homo sapiens
taaattcagacatac

SEQ ID NO: 1591477 - DNA, 15 bp, Homo sapiens
aaattcagacatact

SEQ ID NO: 1591478 - DNA, 15 bp, Homo sapiens
aattcagacatacta

SEQ ID NO: 1591479 - DNA, 15 bp, Homo sapiens
attcagacatactat

SEQ ID NO: 1591480 - DNA, 15 bp, Homo sapiens
ttcagacatactatt

SEQ ID NO: 1591481 - DNA, 15 bp, Homo sapiens
tcagacatactatta

SEQ ID NO: 1591482 - DNA, 15 bp, Homo sapiens
cagacatactattat

SEQ ID NO: 1591483 - DNA, 15 bp, Homo sapiens
agacatactattatt

SEQ ID NO: 1591484 - DNA, 15 bp, Homo sapiens
gacatactattattt

SEQ ID NO: 1591485 - DNA, 15 bp, Homo sapiens
acatactattatttt

SEQ ID NO: 1591486 - DNA, 15 bp, Homo sapiens
catactattatttta

SEQ ID NO: 1591487 - DNA, 15 bp, Homo sapiens
atactattattttaa

SEQ ID NO: 1591488 - DNA, 15 bp, Homo sapiens
tactattattttaag

SEQ ID NO: 1591489 - DNA, 15 bp, Homo sapiens
actattattttaaga

SEQ ID NO: 1591490 - DNA, 15 bp, Homo sapiens
ctattattttaagaa

SEQ ID NO: 1591491 - DNA, 15 bp, Homo sapiens
tattattttaagaaa

SEQ ID NO: 1591492 - DNA, 15 bp, Homo sapiens
attattttaagaaat

SEQ ID NO: 1591493 - DNA, 15 bp, Homo sapiens
ttattttaagaaatc

SEQ ID NO: 1591494 - DNA, 15 bp, Homo sapiens
tattttaagaaatct

SEQ ID NO: 1591495 - DNA, 15 bp, Homo sapiens
attttaagaaatctc

SEQ ID NO: 1591496 - DNA, 15 bp, Homo sapiens
ttttaagaaatctca

SEQ ID NO: 1591497 - DNA, 15 bp, Homo sapiens
ttaagaaatctcaaa

SEQ ID NO: 1591498 - DNA, 15 bp, Homo sapiens
taagaaatctcaaag

SEQ ID NO: 1591499 - DNA, 15 bp, Homo sapiens
aagaaatctcaaaga

SEQ ID NO: 1591500 - DNA, 15 bp, Homo sapiens
agaaatctcaaagag

SEQ ID NO: 1591501 - DNA, 15 bp, Homo sapiens
gaaatctcaaagagt

SEQ ID NO: 1591502 - DNA, 15 bp, Homo sapiens
aaatctcaaagagtt

SEQ ID NO: 1591503 - DNA, 15 bp, Homo sapiens
aatctcaaagagttt

SEQ ID NO: 1591504 - DNA, 15 bp, Homo sapiens
atctcaaagagtttt

SEQ ID NO: 1591505 - DNA, 15 bp, Homo sapiens
tctcaaagagttttc

SEQ ID NO: 1591506 - DNA, 15 bp, Homo sapiens
ctcaaagagttttct

SEQ ID NO: 1591507 - DNA, 15 bp, Homo sapiens
tcaaagagttttctt

SEQ ID NO: 1591508 - DNA, 15 bp, Homo sapiens
caaagagttttcttg

SEQ ID NO: 1591509 - DNA, 15 bp, Homo sapiens
aaagagttttcttgt

SEQ ID NO: 1591510 - DNA, 15 bp, Homo sapiens
aagagttttcttgta

SEQ ID NO: 1591511 - DNA, 15 bp, Homo sapiens
agagttttcttgtac

SEQ ID NO: 1591512 - DNA, 15 bp, Homo sapiens
gagttttcttgtacc

SEQ ID NO: 1591513 - DNA, 15 bp, Homo sapiens
agttttcttgtacct

SEQ ID NO: 1591514 - DNA, 15 bp, Homo sapiens
gttttcttgtacctt

SEQ ID NO: 1591515 - DNA, 15 bp, Homo sapiens
ttttcttgtacctta

SEQ ID NO: 1591516 - DNA, 15 bp, Homo sapiens
tttcttgtaccttaa

SEQ ID NO: 1591517 - DNA, 15 bp, Homo sapiens
ttcttgtaccttaaa

SEQ ID NO: 1591518 - DNA, 15 bp, Homo sapiens
tcttgtaccttaaaa

SEQ ID NO: 1591519 - DNA, 15 bp, Homo sapiens
cttgtaccttaaaat

SEQ ID NO: 1591520 - DNA, 15 bp, Homo sapiens
ttgtaccttaaaatt

SEQ ID NO: 1591521 - DNA, 15 bp, Homo sapiens
tgtaccttaaaattc

SEQ ID NO: 1591522 - DNA, 15 bp, Homo sapiens
gtaccttaaaattct

SEQ ID NO: 1591523 - DNA, 15 bp, Homo sapiens
taccttaaaattctc

SEQ ID NO: 1591524 - DNA, 15 bp, Homo sapiens
accttaaaattctcc

SEQ ID NO: 1591525 - DNA, 15 bp, Homo sapiens
ccttaaaattctcct

SEQ ID NO: 1591526 - DNA, 15 bp, Homo sapiens
cttaaaattctccta

SEQ ID NO: 1591527 - DNA, 15 bp, Homo sapiens
ttaaaattctcctag

SEQ ID NO: 1591528 - DNA, 15 bp, Homo sapiens
taaaattctcctagt

SEQ ID NO: 1591529 - DNA, 15 bp, Homo sapiens
aaaattctcctagtg

SEQ ID NO: 1591530 - DNA, 15 bp, Homo sapiens
aaattctcctagtgt

SEQ ID NO: 1591531 - DNA, 15 bp, Homo sapiens
aattctcctagtgtg

SEQ ID NO: 1591532 - DNA, 15 bp, Homo sapiens
attctcctagtgtga

SEQ ID NO: 1591533 - DNA, 15 bp, Homo sapiens
ttctcctagtgtgaa

SEQ ID NO: 1591534 - DNA, 15 bp, Homo sapiens
tctcctagtgtgaac

SEQ ID NO: 1591535 - DNA, 15 bp, Homo sapiens
ctcctagtgtgaacc

SEQ ID NO: 1591536 - DNA, 15 bp, Homo sapiens
tcctagtgtgaacca

SEQ ID NO: 1591537 - DNA, 15 bp, Homo sapiens
cctagtgtgaaccat

SEQ ID NO: 1591538 - DNA, 15 bp, Homo sapiens
ctagtgtgaaccatt

SEQ ID NO: 1591539 - DNA, 15 bp, Homo sapiens
tagtgtgaaccattg

SEQ ID NO: 1591540 - DNA, 15 bp, Homo sapiens
agtgtgaaccattgg

SEQ ID NO: 1591541 - DNA, 15 bp, Homo sapiens
gtgtgaaccattggt

SEQ ID NO: 1591542 - DNA, 15 bp, Homo sapiens
tgtgaaccattggtt

SEQ ID NO: 1591543 - DNA, 15 bp, Homo sapiens
gtgaaccattggttt

SEQ ID NO: 1591544 - DNA, 15 bp, Homo sapiens
tgaaccattggtttt

SEQ ID NO: 1591545 - DNA, 15 bp, Homo sapiens
gaaccattggttttg

SEQ ID NO: 1591546 - DNA, 15 bp, Homo sapiens
aaccattggttttgg

SEQ ID NO: 1591547 - DNA, 15 bp, Homo sapiens
accattggttttggt

SEQ ID NO: 1591548 - DNA, 15 bp, Homo sapiens
ccattggttttggta

SEQ ID NO: 1591549 - DNA, 15 bp, Homo sapiens
cattggttttggtat

SEQ ID NO: 1591550 - DNA, 15 bp, Homo sapiens
attggttttggtata

SEQ ID NO: 1591551 - DNA, 15 bp, Homo sapiens
ttggttttggtatat

SEQ ID NO: 1591552 - DNA, 15 bp, Homo sapiens
tggttttggtatatt

SEQ ID NO: 1591553 - DNA, 15 bp, Homo sapiens
ggttttggtatattg

SEQ ID NO: 1591554 - DNA, 15 bp, Homo sapiens
gttttggtatattgt

SEQ ID NO: 1591555 - DNA, 15 bp, Homo sapiens
ttttggtatattgtg

SEQ ID NO: 1591556 - DNA, 15 bp, Homo sapiens
tttggtatattgtgc

SEQ ID NO: 1591557 - DNA, 15 bp, Homo sapiens
ttggtatattgtgct

SEQ ID NO: 1591558 - DNA, 15 bp, Homo sapiens
tggtatattgtgctt

SEQ ID NO: 1591559 - DNA, 15 bp, Homo sapiens
ggtatattgtgcttc

SEQ ID NO: 1591560 - DNA, 15 bp, Homo sapiens
gtatattgtgcttcc

SEQ ID NO: 1591561 - DNA, 15 bp, Homo sapiens
tatattgtgcttcca

SEQ ID NO: 1591562 - DNA, 15 bp, Homo sapiens
atattgtgcttccat

SEQ ID NO: 1591563 - DNA, 15 bp, Homo sapiens
tattgtgcttccatg

SEQ ID NO: 1591564 - DNA, 15 bp, Homo sapiens
attgtgcttccatgt

SEQ ID NO: 1591565 - DNA, 15 bp, Homo sapiens
ttgtgcttccatgta

SEQ ID NO: 1591566 - DNA, 15 bp, Homo sapiens
tgtgcttccatgtag

SEQ ID NO: 1591567 - DNA, 15 bp, Homo sapiens
gtgcttccatgtagt

SEQ ID NO: 1591568 - DNA, 15 bp, Homo sapiens
tgcttccatgtagtt

SEQ ID NO: 1591569 - DNA, 15 bp, Homo sapiens
gcttccatgtagttt

SEQ ID NO: 1591570 - DNA, 15 bp, Homo sapiens
cttccatgtagttta

SEQ ID NO: 1591571 - DNA, 15 bp, Homo sapiens
ttccatgtagtttaa

SEQ ID NO: 1591572 - DNA, 15 bp, Homo sapiens
tccatgtagtttaat

SEQ ID NO: 1591573 - DNA, 15 bp, Homo sapiens
ccatgtagtttaata

SEQ ID NO: 1591574 - DNA, 15 bp, Homo sapiens
catgtagtttaatat

SEQ ID NO: 1591575 - DNA, 15 bp, Homo sapiens
atgtagtttaatatc

SEQ ID NO: 1591576 - DNA, 15 bp, Homo sapiens
tgtagtttaatatca

SEQ ID NO: 1591577 - DNA, 15 bp, Homo sapiens
gtagtttaatatcaa

SEQ ID NO: 1591578 - DNA, 15 bp, Homo sapiens
tagtttaatatcaag

SEQ ID NO: 1591579 - DNA, 15 bp, Homo sapiens
agtttaatatcaaga

SEQ ID NO: 1591580 - DNA, 15 bp, Homo sapiens
gtttaatatcaagat

SEQ ID NO: 1591581 - DNA, 15 bp, Homo sapiens
tttaatatcaagatg

SEQ ID NO: 1591582 - DNA, 15 bp, Homo sapiens
ttaatatcaagatgt

SEQ ID NO: 1591583 - DNA, 15 bp, Homo sapiens
taatatcaagatgtt

SEQ ID NO: 1591584 - DNA, 15 bp, Homo sapiens
aatatcaagatgttt

SEQ ID NO: 1591585 - DNA, 15 bp, Homo sapiens
atatcaagatgtttt

SEQ ID NO: 1591586 - DNA, 15 bp, Homo sapiens
tatcaagatgttttt

SEQ ID NO: 1591587 - DNA, 15 bp, Homo sapiens
atcaagatgttttta

SEQ ID NO: 1591588 - DNA, 15 bp, Homo sapiens
tcaagatgtttttag

SEQ ID NO: 1591589 - DNA, 15 bp, Homo sapiens
caagatgtttttaga

SEQ ID NO: 1591590 - DNA, 15 bp, Homo sapiens
aagatgtttttagat

SEQ ID NO: 1591591 - DNA, 15 bp, Homo sapiens
agatgtttttagatt

SEQ ID NO: 1591592 - DNA, 15 bp, Homo sapiens
gatgtttttagattt

SEQ ID NO: 1591593 - DNA, 15 bp, Homo sapiens
atgtttttagatttc

SEQ ID NO: 1591594 - DNA, 15 bp, Homo sapiens
tgtttttagatttcc

SEQ ID NO: 1591595 - DNA, 15 bp, Homo sapiens
gtttttagatttccc

SEQ ID NO: 1591596 - DNA, 15 bp, Homo sapiens
tttttagatttccct

SEQ ID NO: 1591597 - DNA, 15 bp, Homo sapiens
ttttagatttccctt

SEQ ID NO: 1591598 - DNA, 15 bp, Homo sapiens
tttagatttcccttt

SEQ ID NO: 1591599 - DNA, 15 bp, Homo sapiens
ttagatttccctttt

SEQ ID NO: 1591600 - DNA, 15 bp, Homo sapiens
tagatttccctttta

SEQ ID NO: 1591601 - DNA, 15 bp, Homo sapiens
agatttcccttttaa

SEQ ID NO: 1591602 - DNA, 15 bp, Homo sapiens
gatttcccttttaat

SEQ ID NO: 1591603 - DNA, 15 bp, Homo sapiens
atttcccttttaatt

SEQ ID NO: 1591604 - DNA, 15 bp, Homo sapiens
tttcccttttaattt

SEQ ID NO: 1591605 - DNA, 15 bp, Homo sapiens
ttcccttttaattta

SEQ ID NO: 1591606 - DNA, 15 bp, Homo sapiens
tcccttttaatttat

SEQ ID NO: 1591607 - DNA, 15 bp, Homo sapiens
cccttttaatttatt

SEQ ID NO: 1591608 - DNA, 15 bp, Homo sapiens
ccttttaatttattt

SEQ ID NO: 1591609 - DNA, 15 bp, Homo sapiens
cttttaatttatttg

SEQ ID NO: 1591610 - DNA, 15 bp, Homo sapiens
ttttaatttatttgt

SEQ ID NO: 1591611 - DNA, 15 bp, Homo sapiens
tttaatttatttgtt

SEQ ID NO: 1591612 - DNA, 15 bp, Homo sapiens
ttaatttatttgttg

SEQ ID NO: 1591613 - DNA, 15 bp, Homo sapiens
taatttatttgttga

SEQ ID NO: 1591614 - DNA, 15 bp, Homo sapiens
aatttatttgttgac

SEQ ID NO: 1591615 - DNA, 15 bp, Homo sapiens
atttatttgttgacc

SEQ ID NO: 1591616 - DNA, 15 bp, Homo sapiens
tttatttgttgaccc

SEQ ID NO: 1591617 - DNA, 15 bp, Homo sapiens
ttatttgttgaccca

SEQ ID NO: 1591618 - DNA, 15 bp, Homo sapiens
tatttgttgacccat

SEQ ID NO: 1591619 - DNA, 15 bp, Homo sapiens
atttgttgacccatt

SEQ ID NO: 1591620 - DNA, 15 bp, Homo sapiens
tttgttgacccattg

SEQ ID NO: 1591621 - DNA, 15 bp, Homo sapiens
ttgttgacccattgg

SEQ ID NO: 1591622 - DNA, 15 bp, Homo sapiens
tgttgacccattggt

SEQ ID NO: 1591623 - DNA, 15 bp, Homo sapiens
gttgacccattggtt

SEQ ID NO: 1591624 - DNA, 15 bp, Homo sapiens
ttgacccattggttg

SEQ ID NO: 1591625 - DNA, 15 bp, Homo sapiens
tgacccattggttgt

SEQ ID NO: 1591626 - DNA, 15 bp, Homo sapiens
gacccattggttgtt

SEQ ID NO: 1591627 - DNA, 15 bp, Homo sapiens
acccattggttgttc

SEQ ID NO: 1591628 - DNA, 15 bp, Homo sapiens
cccattggttgttca

SEQ ID NO: 1591629 - DNA, 15 bp, Homo sapiens
ccattggttgttcag

SEQ ID NO: 1591630 - DNA, 15 bp, Homo sapiens
cattggttgttcagg

SEQ ID NO: 1591631 - DNA, 15 bp, Homo sapiens
ttggttgttcaggag

SEQ ID NO: 1591632 - DNA, 15 bp, Homo sapiens
tggttgttcaggagc

SEQ ID NO: 1591633 - DNA, 15 bp, Homo sapiens
ggttgttcaggagca

SEQ ID NO: 1591634 - DNA, 15 bp, Homo sapiens
gttgttcaggagcat

SEQ ID NO: 1591635 - DNA, 15 bp, Homo sapiens
ttgttcaggagcatg

SEQ ID NO: 1591636 - DNA, 15 bp, Homo sapiens
tgttcaggagcatgc

SEQ ID NO: 1591637 - DNA, 15 bp, Homo sapiens
gttcaggagcatgct

SEQ ID NO: 1591638 - DNA, 15 bp, Homo sapiens
ttcaggagcatgctg

SEQ ID NO: 1591639 - DNA, 15 bp, Homo sapiens
tcaggagcatgctgt

SEQ ID NO: 1591640 - DNA, 15 bp, Homo sapiens
caggagcatgctgtt

SEQ ID NO: 1591641 - DNA, 15 bp, Homo sapiens
aggagcatgctgttt

SEQ ID NO: 1591642 - DNA, 15 bp, Homo sapiens
ggagcatgctgttta

SEQ ID NO: 1591643 - DNA, 15 bp, Homo sapiens
gagcatgctgtttac

SEQ ID NO: 1591644 - DNA, 15 bp, Homo sapiens
agcatgctgtttacc

SEQ ID NO: 1591645 - DNA, 15 bp, Homo sapiens
gcatgctgtttacct

SEQ ID NO: 1591646 - DNA, 15 bp, Homo sapiens
catgctgtttacctg

SEQ ID NO: 1591647 - DNA, 15 bp, Homo sapiens
atgctgtttacctga

SEQ ID NO: 1591648 - DNA, 15 bp, Homo sapiens
tgctgtttacctgaa

SEQ ID NO: 1591649 - DNA, 15 bp, Homo sapiens
gctgtttacctgaaa

SEQ ID NO: 1591650 - DNA, 15 bp, Homo sapiens
ctgtttacctgaaaa

SEQ ID NO: 1591651 - DNA, 15 bp, Homo sapiens
tgtttacctgaaaat

SEQ ID NO: 1591652 - DNA, 15 bp, Homo sapiens
gtttacctgaaaata

SEQ ID NO: 1591653 - DNA, 15 bp, Homo sapiens
tttacctgaaaataa

SEQ ID NO: 1591654 - DNA, 15 bp, Homo sapiens
ttacctgaaaataat

SEQ ID NO: 1591655 - DNA, 15 bp, Homo sapiens
tacctgaaaataatg

SEQ ID NO: 1591656 - DNA, 15 bp, Homo sapiens
acctgaaaataatgg

SEQ ID NO: 1591657 - DNA, 15 bp, Homo sapiens
cctgaaaataatgga

SEQ ID NO: 1591658 - DNA, 15 bp, Homo sapiens
ctgaaaataatggag

SEQ ID NO: 1591659 - DNA, 15 bp, Homo sapiens
tgaaaataatggaga

SEQ ID NO: 1591660 - DNA, 15 bp, Homo sapiens
gaaaataatggagat

SEQ ID NO: 1591661 - DNA, 15 bp, Homo sapiens
aaaataatggagata

SEQ ID NO: 1591662 - DNA, 15 bp, Homo sapiens
aaataatggagatat

SEQ ID NO: 1591663 - DNA, 15 bp, Homo sapiens
aataatggagatatt

SEQ ID NO: 1591664 - DNA, 15 bp, Homo sapiens
ataatggagatatta

SEQ ID NO: 1591665 - DNA, 15 bp, Homo sapiens
taatggagatattaa

SEQ ID NO: 1591666 - DNA, 15 bp, Homo sapiens
aatggagatattaag

SEQ ID NO: 1591667 - DNA, 15 bp, Homo sapiens
atggagatattaagg

SEQ ID NO: 1591668 - DNA, 15 bp, Homo sapiens
tggagatattaaggt

SEQ ID NO: 1591669 - DNA, 15 bp, Homo sapiens
ggagatattaaggta

SEQ ID NO: 1591670 - DNA, 15 bp, Homo sapiens
gagatattaaggtat

SEQ ID NO: 1591671 - DNA, 15 bp, Homo sapiens
agatattaaggtatt

SEQ ID NO: 1591672 - DNA, 15 bp, Homo sapiens
gatattaaggtattt

SEQ ID NO: 1591673 - DNA, 15 bp, Homo sapiens
atattaaggtatttg

SEQ ID NO: 1591674 - DNA, 15 bp, Homo sapiens
tattaaggtatttga

SEQ ID NO: 1591675 - DNA, 15 bp, Homo sapiens
attaaggtatttgaa

SEQ ID NO: 1591676 - DNA, 15 bp, Homo sapiens
ttaaggtatttgaat

SEQ ID NO: 1591677 - DNA, 15 bp, Homo sapiens
taaggtatttgaata

SEQ ID NO: 1591678 - DNA, 15 bp, Homo sapiens
aaggtatttgaatat

SEQ ID NO: 1591679 - DNA, 15 bp, Homo sapiens
aggtatttgaatatt

SEQ ID NO: 1591680 - DNA, 15 bp, Homo sapiens
ggtatttgaatattt

SEQ ID NO: 1591681 - DNA, 15 bp, Homo sapiens
gtatttgaatattta

SEQ ID NO: 1591682 - DNA, 15 bp, Homo sapiens
tatttgaatatttat

SEQ ID NO: 1591683 - DNA, 15 bp, Homo sapiens
atttgaatatttatc

SEQ ID NO: 1591684 - DNA, 15 bp, Homo sapiens
tttgaatatttatct

SEQ ID NO: 1591685 - DNA, 15 bp, Homo sapiens
ttgaatatttatctt

SEQ ID NO: 1591686 - DNA, 15 bp, Homo sapiens
tgaatatttatcttc

SEQ ID NO: 1591687 - DNA, 15 bp, Homo sapiens
gaatatttatcttct

SEQ ID NO: 1591688 - DNA, 15 bp, Homo sapiens
aatatttatcttcta

SEQ ID NO: 1591689 - DNA, 15 bp, Homo sapiens
atatttatcttctag

SEQ ID NO: 1591690 - DNA, 15 bp, Homo sapiens
tatttatcttctagt

SEQ ID NO: 1591691 - DNA, 15 bp, Homo sapiens
atttatcttctagta

SEQ ID NO: 1591692 - DNA, 15 bp, Homo sapiens
tttatcttctagtac

SEQ ID NO: 1591693 - DNA, 15 bp, Homo sapiens
ttatcttctagtaca

SEQ ID NO: 1591694 - DNA, 15 bp, Homo sapiens
tatcttctagtacat

SEQ ID NO: 1591695 - DNA, 15 bp, Homo sapiens
atcttctagtacatt

SEQ ID NO: 1591696 - DNA, 15 bp, Homo sapiens
tcttctagtacattg

SEQ ID NO: 1591697 - DNA, 15 bp, Homo sapiens
cttctagtacattga

SEQ ID NO: 1591698 - DNA, 15 bp, Homo sapiens
ttctagtacattgaa

SEQ ID NO: 1591699 - DNA, 15 bp, Homo sapiens
tctagtacattgaaa

SEQ ID NO: 1591700 - DNA, 15 bp, Homo sapiens
ctagtacattgaaaa

SEQ ID NO: 1591701 - DNA, 15 bp, Homo sapiens
tagtacattgaaaaa

SEQ ID NO: 1591702 - DNA, 15 bp, Homo sapiens
agtacattgaaaaac

SEQ ID NO: 1591703 - DNA, 15 bp, Homo sapiens
gtacattgaaaaact

SEQ ID NO: 1591704 - DNA, 15 bp, Homo sapiens
tacattgaaaaactt

SEQ ID NO: 1591705 - DNA, 15 bp, Homo sapiens
acattgaaaaacttt

SEQ ID NO: 1591706 - DNA, 15 bp, Homo sapiens
cattgaaaaactttt

SEQ ID NO: 1591707 - DNA, 15 bp, Homo sapiens
attgaaaaacttttt

SEQ ID NO: 1591708 - DNA, 15 bp, Homo sapiens
ttgaaaaactttttg

SEQ ID NO: 1591709 - DNA, 15 bp, Homo sapiens
tgaaaaactttttga

SEQ ID NO: 1591710 - DNA, 15 bp, Homo sapiens
gaaaaactttttgag

SEQ ID NO: 1591711 - DNA, 15 bp, Homo sapiens
aaaaactttttgaga

SEQ ID NO: 1591712 - DNA, 15 bp, Homo sapiens
aaaactttttgagag

SEQ ID NO: 1591713 - DNA, 15 bp, Homo sapiens
aaactttttgagagt

SEQ ID NO: 1591714 - DNA, 15 bp, Homo sapiens
aactttttgagagta

SEQ ID NO: 1591715 - DNA, 15 bp, Homo sapiens
actttttgagagtaa

SEQ ID NO: 1591716 - DNA, 15 bp, Homo sapiens
ctttttgagagtaac

SEQ ID NO: 1591717 - DNA, 15 bp, Homo sapiens
tttttgagagtaacc

SEQ ID NO: 1591718 - DNA, 15 bp, Homo sapiens
ttttgagagtaacca

SEQ ID NO: 1591719 - DNA, 15 bp, Homo sapiens
tttgagagtaaccaa

SEQ ID NO: 1591720 - DNA, 15 bp, Homo sapiens
ttgagagtaaccaat

SEQ ID NO: 1591721 - DNA, 15 bp, Homo sapiens
tgagagtaaccaata

SEQ ID NO: 1591722 - DNA, 15 bp, Homo sapiens
gagagtaaccaataa

SEQ ID NO: 1591723 - DNA, 15 bp, Homo sapiens
agagtaaccaataat

SEQ ID NO: 1591724 - DNA, 15 bp, Homo sapiens
gagtaaccaataata

SEQ ID NO: 1591725 - DNA, 15 bp, Homo sapiens
agtaaccaataataa

SEQ ID NO: 1591726 - DNA, 15 bp, Homo sapiens
gtaaccaataataaa

SEQ ID NO: 1591727 - DNA, 15 bp, Homo sapiens
taaccaataataaat

SEQ ID NO: 1591728 - DNA, 15 bp, Homo sapiens
aaccaataataaatg

SEQ ID NO: 1591729 - DNA, 15 bp, Homo sapiens
accaataataaatga

SEQ ID NO: 1591730 - DNA, 15 bp, Homo sapiens
ccaataataaatgat

SEQ ID NO: 1591731 - DNA, 15 bp, Homo sapiens
caataataaatgatg

SEQ ID NO: 1591732 - DNA, 15 bp, Homo sapiens
aataataaatgatgg

SEQ ID NO: 1591733 - DNA, 15 bp, Homo sapiens
ataataaatgatgga

SEQ ID NO: 1591734 - DNA, 15 bp, Homo sapiens
taataaatgatggaa

SEQ ID NO: 1591735 - DNA, 15 bp, Homo sapiens
aataaatgatggaat

SEQ ID NO: 1591736 - DNA, 15 bp, Homo sapiens
ataaatgatggaatg

SEQ ID NO: 1591737 - DNA, 15 bp, Homo sapiens
taaatgatggaatgc

SEQ ID NO: 1591738 - DNA, 15 bp, Homo sapiens
aaatgatggaatgct

SEQ ID NO: 1591739 - DNA, 15 bp, Homo sapiens
aatgatggaatgcta

SEQ ID NO: 1591740 - DNA, 15 bp, Homo sapiens
atgatggaatgctac

SEQ ID NO: 1591741 - DNA, 15 bp, Homo sapiens
tgatggaatgctact

SEQ ID NO: 1591742 - DNA, 15 bp, Homo sapiens
gatggaatgctactg

SEQ ID NO: 1591743 - DNA, 15 bp, Homo sapiens
atggaatgctactgc

SEQ ID NO: 1591744 - DNA, 15 bp, Homo sapiens
tggaatgctactgct

SEQ ID NO: 1591745 - DNA, 15 bp, Homo sapiens
ggaatgctactgctt

SEQ ID NO: 1591746 - DNA, 15 bp, Homo sapiens
gaatgctactgcttt

SEQ ID NO: 1591747 - DNA, 15 bp, Homo sapiens
aatgctactgctttt

SEQ ID NO: 1591748 - DNA, 15 bp, Homo sapiens
atgctactgcttttt

SEQ ID NO: 1591749 - DNA, 15 bp, Homo sapiens
tgctactgctttttt

SEQ ID NO: 1591750 - DNA, 15 bp, Homo sapiens
gctactgcttttttt

SEQ ID NO: 1591751 - DNA, 15 bp, Homo sapiens
ctactgctttttttt

SEQ ID NO: 1591752 - DNA, 15 bp, Homo sapiens
tactgcttttttttt

SEQ ID NO: 1591753 - DNA, 15 bp, Homo sapiens
actgctttttttttt

SEQ ID NO: 1591754 - DNA, 15 bp, Homo sapiens
tgctttttttttttg

SEQ ID NO: 1591755 - DNA, 15 bp, Homo sapiens
gctttttttttttga

SEQ ID NO: 1591756 - DNA, 15 bp, Homo sapiens
ctttttttttttgaa

SEQ ID NO: 1591757 - DNA, 15 bp, Homo sapiens
tttttttttttgaag

SEQ ID NO: 1591758 - DNA, 15 bp, Homo sapiens
ttttttttttgaagc

SEQ ID NO: 1591759 - DNA, 15 bp, Homo sapiens
tttttttttgaagct

SEQ ID NO: 1591760 - DNA, 15 bp, Homo sapiens
ttttttttgaagctg

SEQ ID NO: 1591761 - DNA, 15 bp, Homo sapiens
tttttttgaagctgc

SEQ ID NO: 1591762 - DNA, 15 bp, Homo sapiens
ttttttgaagctgcc

SEQ ID NO: 1591763 - DNA, 15 bp, Homo sapiens
tttttgaagctgcca

SEQ ID NO: 1591764 - DNA, 15 bp, Homo sapiens
ttttgaagctgccag

SEQ ID NO: 1591765 - DNA, 15 bp, Homo sapiens
tttgaagctgccagt

SEQ ID NO: 1591766 - DNA, 15 bp, Homo sapiens
ttgaagctgccagtt

SEQ ID NO: 1591767 - DNA, 15 bp, Homo sapiens
tgaagctgccagtta

SEQ ID NO: 1591768 - DNA, 15 bp, Homo sapiens
gaagctgccagttat

SEQ ID NO: 1591769 - DNA, 15 bp, Homo sapiens
aagctgccagttatt

SEQ ID NO: 1591770 - DNA, 15 bp, Homo sapiens
agctgccagttattg

SEQ ID NO: 1591771 - DNA, 15 bp, Homo sapiens
gctgccagttattgt

SEQ ID NO: 1591772 - DNA, 15 bp, Homo sapiens
ctgccagttattgtt

SEQ ID NO: 1591773 - DNA, 15 bp, Homo sapiens
tgccagttattgttt

SEQ ID NO: 1591774 - DNA, 15 bp, Homo sapiens
gccagttattgttta

SEQ ID NO: 1591775 - DNA, 15 bp, Homo sapiens
ccagttattgtttac

SEQ ID NO: 1591776 - DNA, 15 bp, Homo sapiens
cagttattgtttact

SEQ ID NO: 1591777 - DNA, 15 bp, Homo sapiens
agttattgtttactt

SEQ ID NO: 1591778 - DNA, 15 bp, Homo sapiens
gttattgtttactta

SEQ ID NO: 1591779 - DNA, 15 bp, Homo sapiens
ttattgtttacttac

SEQ ID NO: 1591780 - DNA, 15 bp, Homo sapiens
tattgtttacttaca

SEQ ID NO: 1591781 - DNA, 15 bp, Homo sapiens
attgtttacttacac

SEQ ID NO: 1591782 - DNA, 15 bp, Homo sapiens
ttgtttacttacact

SEQ ID NO: 1591783 - DNA, 15 bp, Homo sapiens
tgtttacttacacta

SEQ ID NO: 1591784 - DNA, 15 bp, Homo sapiens
gtttacttacactat

SEQ ID NO: 1591785 - DNA, 15 bp, Homo sapiens
tttacttacactatg

SEQ ID NO: 1591786 - DNA, 15 bp, Homo sapiens
ttacttacactatgc

SEQ ID NO: 1591787 - DNA, 15 bp, Homo sapiens
tacttacactatgcc

SEQ ID NO: 1591788 - DNA, 15 bp, Homo sapiens
acttacactatgcca

SEQ ID NO: 1591789 - DNA, 15 bp, Homo sapiens
cttacactatgccaa

SEQ ID NO: 1591790 - DNA, 15 bp, Homo sapiens
ttacactatgccaaa

SEQ ID NO: 1591791 - DNA, 15 bp, Homo sapiens
tacactatgccaaat

SEQ ID NO: 1591792 - DNA, 15 bp, Homo sapiens
acactatgccaaata

SEQ ID NO: 1591793 - DNA, 15 bp, Homo sapiens
cactatgccaaatat

SEQ ID NO: 1591794 - DNA, 15 bp, Homo sapiens
actatgccaaatata

SEQ ID NO: 1591795 - DNA, 15 bp, Homo sapiens
ctatgccaaatataa

SEQ ID NO: 1591796 - DNA, 15 bp, Homo sapiens
tatgccaaatataaa

SEQ ID NO: 1591797 - DNA, 15 bp, Homo sapiens
atgccaaatataaag

SEQ ID NO: 1591798 - DNA, 15 bp, Homo sapiens
tgccaaatataaagg

SEQ ID NO: 1591799 - DNA, 15 bp, Homo sapiens
gccaaatataaaggc

SEQ ID NO: 1591800 - DNA, 15 bp, Homo sapiens
ccaaatataaaggca

SEQ ID NO: 1591801 - DNA, 15 bp, Homo sapiens
aatataaaggcatta

SEQ ID NO: 1591802 - DNA, 15 bp, Homo sapiens
atataaaggcattaa

SEQ ID NO: 1591803 - DNA, 15 bp, Homo sapiens
tataaaggcattaat

SEQ ID NO: 1591804 - DNA, 15 bp, Homo sapiens
ataaaggcattaatc

SEQ ID NO: 1591805 - DNA, 15 bp, Homo sapiens
taaaggcattaatct

SEQ ID NO: 1591806 - DNA, 15 bp, Homo sapiens
aaaggcattaatctc

SEQ ID NO: 1591807 - DNA, 15 bp, Homo sapiens
aaggcattaatctca

SEQ ID NO: 1591808 - DNA, 15 bp, Homo sapiens
aggcattaatctcat

SEQ ID NO: 1591809 - DNA, 15 bp, Homo sapiens
ggcattaatctcata

SEQ ID NO: 1591810 - DNA, 15 bp, Homo sapiens
gcattaatctcataa

SEQ ID NO: 1591811 - DNA, 15 bp, Homo sapiens
cattaatctcataaa

SEQ ID NO: 1591812 - DNA, 15 bp, Homo sapiens
attaatctcataaaa

SEQ ID NO: 1591813 - DNA, 15 bp, Homo sapiens
ttaatctcataaaag

SEQ ID NO: 1591814 - DNA, 15 bp, Homo sapiens
taatctcataaaagt

SEQ ID NO: 1591815 - DNA, 15 bp, Homo sapiens
aatctcataaaagtt

SEQ ID NO: 1591816 - DNA, 15 bp, Homo sapiens
atctcataaaagttt

SEQ ID NO: 1591817 - DNA, 15 bp, Homo sapiens
tctcataaaagtttc

SEQ ID NO: 1591818 - DNA, 15 bp, Homo sapiens
ctcataaaagtttca

SEQ ID NO: 1591819 - DNA, 15 bp, Homo sapiens
tcataaaagtttcac

SEQ ID NO: 1591820 - DNA, 15 bp, Homo sapiens
cataaaagtttcaca

SEQ ID NO: 1591821 - DNA, 15 bp, Homo sapiens
ataaaagtttcacaa

SEQ ID NO: 1591822 - DNA, 15 bp, Homo sapiens
taaaagtttcacaac

SEQ ID NO: 1591823 - DNA, 15 bp, Homo sapiens
aaaagtttcacaaca

SEQ ID NO: 1591824 - DNA, 15 bp, Homo sapiens
aaagtttcacaacaa

SEQ ID NO: 1591825 - DNA, 15 bp, Homo sapiens
aagtttcacaacaat

SEQ ID NO: 1591826 - DNA, 15 bp, Homo sapiens
agtttcacaacaatc

SEQ ID NO: 1591827 - DNA, 15 bp, Homo sapiens
gtttcacaacaatcc

SEQ ID NO: 1591828 - DNA, 15 bp, Homo sapiens
tttcacaacaatcct

SEQ ID NO: 1591829 - DNA, 15 bp, Homo sapiens
ttcacaacaatcctg

SEQ ID NO: 1591830 - DNA, 15 bp, Homo sapiens
tcacaacaatcctgt

SEQ ID NO: 1591831 - DNA, 15 bp, Homo sapiens
cacaacaatcctgtg

SEQ ID NO: 1591832 - DNA, 15 bp, Homo sapiens
acaacaatcctgtga

SEQ ID NO: 1591833 - DNA, 15 bp, Homo sapiens
caacaatcctgtgag

SEQ ID NO: 1591834 - DNA, 15 bp, Homo sapiens
aacaatcctgtgagg

SEQ ID NO: 1591835 - DNA, 15 bp, Homo sapiens
acaatcctgtgaggg

SEQ ID NO: 1591836 - DNA, 15 bp, Homo sapiens
caatcctgtgaggga

SEQ ID NO: 1591837 - DNA, 15 bp, Homo sapiens
aatcctgtgagggag

SEQ ID NO: 1591838 - DNA, 15 bp, Homo sapiens
atcctgtgagggaga

SEQ ID NO: 1591839 - DNA, 15 bp, Homo sapiens
tcctgtgagggagac

SEQ ID NO: 1591840 - DNA, 15 bp, Homo sapiens
cctgtgagggagacg

SEQ ID NO: 1591841 - DNA, 15 bp, Homo sapiens
ctgtgagggagacga

SEQ ID NO: 1591842 - DNA, 15 bp, Homo sapiens
tgtgagggagacgat

SEQ ID NO: 1591843 - DNA, 15 bp, Homo sapiens
gtgagggagacgata

SEQ ID NO: 1591844 - DNA, 15 bp, Homo sapiens
tgagggagacgatat

SEQ ID NO: 1591845 - DNA, 15 bp, Homo sapiens
gagggagacgatatc

SEQ ID NO: 1591846 - DNA, 15 bp, Homo sapiens
agggagacgatatcc

SEQ ID NO: 1591847 - DNA, 15 bp, Homo sapiens
gggagacgatatccc

SEQ ID NO: 1591848 - DNA, 15 bp, Homo sapiens
ggagacgatatcccc

SEQ ID NO: 1591849 - DNA, 15 bp, Homo sapiens
gagacgatatcccca

SEQ ID NO: 1591850 - DNA, 15 bp, Homo sapiens
agacgatatccccat

SEQ ID NO: 1591851 - DNA, 15 bp, Homo sapiens
gacgatatccccatt

SEQ ID NO: 1591852 - DNA, 15 bp, Homo sapiens
acgatatccccattt

SEQ ID NO: 1591853 - DNA, 15 bp, Homo sapiens
cgatatccccatttt

SEQ ID NO: 1591854 - DNA, 15 bp, Homo sapiens
gatatccccatttta

SEQ ID NO: 1591855 - DNA, 15 bp, Homo sapiens
atatccccattttac

SEQ ID NO: 1591856 - DNA, 15 bp, Homo sapiens
tatccccattttaca

SEQ ID NO: 1591857 - DNA, 15 bp, Homo sapiens
atccccattttacaa

SEQ ID NO: 1591858 - DNA, 15 bp, Homo sapiens
tccccattttacaaa

SEQ ID NO: 1591859 - DNA, 15 bp, Homo sapiens
ccccattttacaaat

SEQ ID NO: 1591860 - DNA, 15 bp, Homo sapiens
cccattttacaaatc

SEQ ID NO: 1591861 - DNA, 15 bp, Homo sapiens
ccattttacaaatca

SEQ ID NO: 1591862 - DNA, 15 bp, Homo sapiens
cattttacaaatcag

SEQ ID NO: 1591863 - DNA, 15 bp, Homo sapiens
attttacaaatcagg

SEQ ID NO: 1591864 - DNA, 15 bp, Homo sapiens
ttttacaaatcagga

SEQ ID NO: 1591865 - DNA, 15 bp, Homo sapiens
tttacaaatcaggaa

SEQ ID NO: 1591866 - DNA, 15 bp, Homo sapiens
ttacaaatcaggaaa

SEQ ID NO: 1591867 - DNA, 15 bp, Homo sapiens
tacaaatcaggaaat

SEQ ID NO: 1591868 - DNA, 15 bp, Homo sapiens
acaaatcaggaaatt

SEQ ID NO: 1591869 - DNA, 15 bp, Homo sapiens
caaatcaggaaatta

SEQ ID NO: 1591870 - DNA, 15 bp, Homo sapiens
aaatcaggaaattaa

SEQ ID NO: 1591871 - DNA, 15 bp, Homo sapiens
aatcaggaaattaag

SEQ ID NO: 1591872 - DNA, 15 bp, Homo sapiens
atcaggaaattaaga

SEQ ID NO: 1591873 - DNA, 15 bp, Homo sapiens
tcaggaaattaagac

SEQ ID NO: 1591874 - DNA, 15 bp, Homo sapiens
caggaaattaagact

SEQ ID NO: 1591875 - DNA, 15 bp, Homo sapiens
aggaaattaagactt

SEQ ID NO: 1591876 - DNA, 15 bp, Homo sapiens
ggaaattaagactta

SEQ ID NO: 1591877 - DNA, 15 bp, Homo sapiens
gaaattaagacttaa

SEQ ID NO: 1591878 - DNA, 15 bp, Homo sapiens
aaattaagacttaat

SEQ ID NO: 1591879 - DNA, 15 bp, Homo sapiens
aattaagacttaata

SEQ ID NO: 1591880 - DNA, 15 bp, Homo sapiens
attaagacttaataa

SEQ ID NO: 1591881 - DNA, 15 bp, Homo sapiens
ttaagacttaataag

SEQ ID NO: 1591882 - DNA, 15 bp, Homo sapiens
taagacttaataagg

SEQ ID NO: 1591883 - DNA, 15 bp, Homo sapiens
aagacttaataaggt

SEQ ID NO: 1591884 - DNA, 15 bp, Homo sapiens
agacttaataaggtt

SEQ ID NO: 1591885 - DNA, 15 bp, Homo sapiens
gacttaataaggtta

SEQ ID NO: 1591886 - DNA, 15 bp, Homo sapiens
ttaataaggttaaaa

SEQ ID NO: 1591887 - DNA, 15 bp, Homo sapiens
taataaggttaaaag

SEQ ID NO: 1591888 - DNA, 15 bp, Homo sapiens
aataaggttaaaaga

SEQ ID NO: 1591889 - DNA, 15 bp, Homo sapiens
ataaggttaaaagac

SEQ ID NO: 1591890 - DNA, 15 bp, Homo sapiens
taaggttaaaagact

SEQ ID NO: 1591891 - DNA, 15 bp, Homo sapiens
aaggttaaaagactt

SEQ ID NO: 1591892 - DNA, 15 bp, Homo sapiens
aggttaaaagacttg

SEQ ID NO: 1591893 - DNA, 15 bp, Homo sapiens
ggttaaaagacttgc

SEQ ID NO: 1591894 - DNA, 15 bp, Homo sapiens
gttaaaagacttgcc

SEQ ID NO: 1591895 - DNA, 15 bp, Homo sapiens
ttaaaagacttgccc

SEQ ID NO: 1591896 - DNA, 15 bp, Homo sapiens
taaaagacttgccca

SEQ ID NO: 1591897 - DNA, 15 bp, Homo sapiens
aaaagacttgcccaa

SEQ ID NO: 1591898 - DNA, 15 bp, Homo sapiens
aaagacttgcccaaa

SEQ ID NO: 1591899 - DNA, 15 bp, Homo sapiens
aagacttgcccaaag

SEQ ID NO: 1591900 - DNA, 15 bp, Homo sapiens
agacttgcccaaagt

SEQ ID NO: 1591901 - DNA, 15 bp, Homo sapiens
gacttgcccaaagtc

SEQ ID NO: 1591902 - DNA, 15 bp, Homo sapiens
acttgcccaaagtca

SEQ ID NO: 1591903 - DNA, 15 bp, Homo sapiens
cttgcccaaagtcac

SEQ ID NO: 1591904 - DNA, 15 bp, Homo sapiens
ttgcccaaagtcaca

SEQ ID NO: 1591905 - DNA, 15 bp, Homo sapiens
tgcccaaagtcacag

SEQ ID NO: 1591906 - DNA, 15 bp, Homo sapiens
gcccaaagtcacaga

SEQ ID NO: 1591907 - DNA, 15 bp, Homo sapiens
cccaaagtcacagaa

SEQ ID NO: 1591908 - DNA, 15 bp, Homo sapiens
ccaaagtcacagaac

SEQ ID NO: 1591909 - DNA, 15 bp, Homo sapiens
caaagtcacagaacc

SEQ ID NO: 1591910 - DNA, 15 bp, Homo sapiens
aaagtcacagaacca

SEQ ID NO: 1591911 - DNA, 15 bp, Homo sapiens
aagtcacagaaccag

SEQ ID NO: 1591912 - DNA, 15 bp, Homo sapiens
agtcacagaaccagt

SEQ ID NO: 1591913 - DNA, 15 bp, Homo sapiens
gtcacagaaccagta

SEQ ID NO: 1591914 - DNA, 15 bp, Homo sapiens
tcacagaaccagtaa

SEQ ID NO: 1591915 - DNA, 15 bp, Homo sapiens
cacagaaccagtaag

SEQ ID NO: 1591916 - DNA, 15 bp, Homo sapiens
acagaaccagtaagt

SEQ ID NO: 1591917 - DNA, 15 bp, Homo sapiens
cagaaccagtaagtg

SEQ ID NO: 1591918 - DNA, 15 bp, Homo sapiens
agaaccagtaagtgg

SEQ ID NO: 1591919 - DNA, 15 bp, Homo sapiens
gaaccagtaagtggt

SEQ ID NO: 1591920 - DNA, 15 bp, Homo sapiens
aaccagtaagtggta

SEQ ID NO: 1591921 - DNA, 15 bp, Homo sapiens
accagtaagtggtag

SEQ ID NO: 1591922 - DNA, 15 bp, Homo sapiens
ccagtaagtggtaga

SEQ ID NO: 1591923 - DNA, 15 bp, Homo sapiens
cagtaagtggtagag

SEQ ID NO: 1591924 - DNA, 15 bp, Homo sapiens
agtaagtggtagagc

SEQ ID NO: 1591925 - DNA, 15 bp, Homo sapiens
gtaagtggtagagct

SEQ ID NO: 1591926 - DNA, 15 bp, Homo sapiens
taagtggtagagctt

SEQ ID NO: 1591927 - DNA, 15 bp, Homo sapiens
aagtggtagagcttg

SEQ ID NO: 1591928 - DNA, 15 bp, Homo sapiens
agtggtagagcttga

SEQ ID NO: 1591929 - DNA, 15 bp, Homo sapiens
gtggtagagcttgaa

SEQ ID NO: 1591930 - DNA, 15 bp, Homo sapiens
tggtagagcttgaat

SEQ ID NO: 1591931 - DNA, 15 bp, Homo sapiens
ggtagagcttgaatt

SEQ ID NO: 1591932 - DNA, 15 bp, Homo sapiens
gtagagcttgaattt

SEQ ID NO: 1591933 - DNA, 15 bp, Homo sapiens
tagagcttgaatttg

SEQ ID NO: 1591934 - DNA, 15 bp, Homo sapiens
agagcttgaatttga

SEQ ID NO: 1591935 - DNA, 15 bp, Homo sapiens
gagcttgaatttgaa

SEQ ID NO: 1591936 - DNA, 15 bp, Homo sapiens
agcttgaatttgaat

SEQ ID NO: 1591937 - DNA, 15 bp, Homo sapiens
gcttgaatttgaata

SEQ ID NO: 1591938 - DNA, 15 bp, Homo sapiens
cttgaatttgaatac

SEQ ID NO: 1591939 - DNA, 15 bp, Homo sapiens
ttgaatttgaataca

SEQ ID NO: 1591940 - DNA, 15 bp, Homo sapiens
taatgtcctcctcag

SEQ ID NO: 1591941 - DNA, 15 bp, Homo sapiens
aatgtcctcctcagc

SEQ ID NO: 1591942 - DNA, 15 bp, Homo sapiens
atgtcctcctcagca

SEQ ID NO: 1591943 - DNA, 15 bp, Homo sapiens
tgtcctcctcagcat

SEQ ID NO: 1591944 - DNA, 15 bp, Homo sapiens
gtcctcctcagcatc

SEQ ID NO: 1591945 - DNA, 15 bp, Homo sapiens
tcctcctcagcatct

SEQ ID NO: 1591946 - DNA, 15 bp, Homo sapiens
cctcctcagcatctt

SEQ ID NO: 1591947 - DNA, 15 bp, Homo sapiens
ctcctcagcatcttt

SEQ ID NO: 1591948 - DNA, 15 bp, Homo sapiens
tcctcagcatctttg

SEQ ID NO: 1591949 - DNA, 15 bp, Homo sapiens
cctcagcatctttgg

SEQ ID NO: 1591950 - DNA, 15 bp, Homo sapiens
ctcagcatctttgga

SEQ ID NO: 1591951 - DNA, 15 bp, Homo sapiens
tcagcatctttggaa

SEQ ID NO: 1591952 - DNA, 15 bp, Homo sapiens
cagcatctttggaaa

SEQ ID NO: 1591953 - DNA, 15 bp, Homo sapiens
agcatctttggaaaa

SEQ ID NO: 1591954 - DNA, 15 bp, Homo sapiens
gcatctttggaaaac

SEQ ID NO: 1591955 - DNA, 15 bp, Homo sapiens
catctttggaaaact

SEQ ID NO: 1591956 - DNA, 15 bp, Homo sapiens
atctttggaaaactt

SEQ ID NO: 1591957 - DNA, 15 bp, Homo sapiens
tctttggaaaacttc

SEQ ID NO: 1591958 - DNA, 15 bp, Homo sapiens
ctttggaaaacttca

SEQ ID NO: 1591959 - DNA, 15 bp, Homo sapiens
tttggaaaacttcag

SEQ ID NO: 1591960 - DNA, 15 bp, Homo sapiens
ttggaaaacttcaga

SEQ ID NO: 1591961 - DNA, 15 bp, Homo sapiens
tggaaaacttcagag

SEQ ID NO: 1591962 - DNA, 15 bp, Homo sapiens
ggaaaacttcagagg

SEQ ID NO: 1591963 - DNA, 15 bp, Homo sapiens
gaaaacttcagagga

SEQ ID NO: 1591964 - DNA, 15 bp, Homo sapiens
aaaacttcagaggag

SEQ ID NO: 1591965 - DNA, 15 bp, Homo sapiens
aaacttcagaggaga

SEQ ID NO: 1591966 - DNA, 15 bp, Homo sapiens
aacttcagaggagaa

SEQ ID NO: 1591967 - DNA, 15 bp, Homo sapiens
acttcagaggagaaa

SEQ ID NO: 1591968 - DNA, 15 bp, Homo sapiens
cttcagaggagaaat

SEQ ID NO: 1591969 - DNA, 15 bp, Homo sapiens
ttcagaggagaaatg

SEQ ID NO: 1591970 - DNA, 15 bp, Homo sapiens
tcagaggagaaatga

SEQ ID NO: 1591971 - DNA, 15 bp, Homo sapiens
cagaggagaaatgag

SEQ ID NO: 1591972 - DNA, 15 bp, Homo sapiens
agaggagaaatgagc

SEQ ID NO: 1591973 - DNA, 15 bp, Homo sapiens
gaggagaaatgagct

SEQ ID NO: 1591974 - DNA, 15 bp, Homo sapiens
aggagaaatgagctt

SEQ ID NO: 1591975 - DNA, 15 bp, Homo sapiens
ggagaaatgagcttt

SEQ ID NO: 1591976 - DNA, 15 bp, Homo sapiens
gagaaatgagctttg

SEQ ID NO: 1591977 - DNA, 15 bp, Homo sapiens
agaaatgagctttgc

SEQ ID NO: 1591978 - DNA, 15 bp, Homo sapiens
gaaatgagctttgcc

SEQ ID NO: 1591979 - DNA, 15 bp, Homo sapiens
aaatgagctttgccc

SEQ ID NO: 1591980 - DNA, 15 bp, Homo sapiens
aatgagctttgcccc

SEQ ID NO: 1591981 - DNA, 15 bp, Homo sapiens
atgagctttgcccct

SEQ ID NO: 1591982 - DNA, 15 bp, Homo sapiens
tgagctttgcccctc

SEQ ID NO: 1591983 - DNA, 15 bp, Homo sapiens
gagctttgcccctcc

SEQ ID NO: 1591984 - DNA, 15 bp, Homo sapiens
agctttgcccctcct

SEQ ID NO: 1591985 - DNA, 15 bp, Homo sapiens
gctttgcccctcctg

SEQ ID NO: 1591986 - DNA, 15 bp, Homo sapiens
ctttgcccctcctgt

SEQ ID NO: 1591987 - DNA, 15 bp, Homo sapiens
tttgcccctcctgtt

SEQ ID NO: 1591988 - DNA, 15 bp, Homo sapiens
ttgcccctcctgttc

SEQ ID NO: 1591989 - DNA, 15 bp, Homo sapiens
tgcccctcctgttca

SEQ ID NO: 1591990 - DNA, 15 bp, Homo sapiens
gcccctcctgttcat

SEQ ID NO: 1591991 - DNA, 15 bp, Homo sapiens
cccctcctgttcatt

SEQ ID NO: 1591992 - DNA, 15 bp, Homo sapiens
ccctcctgttcattt

SEQ ID NO: 1591993 - DNA, 15 bp, Homo sapiens
cctcctgttcatttc

SEQ ID NO: 1591994 - DNA, 15 bp, Homo sapiens
ctcctgttcatttca

SEQ ID NO: 1591995 - DNA, 15 bp, Homo sapiens
tcctgttcatttcat

SEQ ID NO: 1591996 - DNA, 15 bp, Homo sapiens
cctgttcatttcata

SEQ ID NO: 1591997 - DNA, 15 bp, Homo sapiens
ctgttcatttcatat

SEQ ID NO: 1591998 - DNA, 15 bp, Homo sapiens
tgttcatttcatata

SEQ ID NO: 1591999 - DNA, 15 bp, Homo sapiens
gttcatttcatatac

SEQ ID NO: 1592000 - DNA, 15 bp, Homo sapiens
ttcatttcatatacc

SEQ ID NO: 1592001 - DNA, 15 bp, Homo sapiens
tcatttcatatacca

SEQ ID NO: 1592002 - DNA, 15 bp, Homo sapiens
catttcatataccac

SEQ ID NO: 1592003 - DNA, 15 bp, Homo sapiens
atttcatataccact

SEQ ID NO: 1592004 - DNA, 15 bp, Homo sapiens
tttcatataccactg

SEQ ID NO: 1592005 - DNA, 15 bp, Homo sapiens
ttcatataccactgt

SEQ ID NO: 1592006 - DNA, 15 bp, Homo sapiens
tcatataccactgtt

SEQ ID NO: 1592007 - DNA, 15 bp, Homo sapiens
catataccactgtta

SEQ ID NO: 1592008 - DNA, 15 bp, Homo sapiens
atataccactgttag

SEQ ID NO: 1592009 - DNA, 15 bp, Homo sapiens
tatgggctagcctta

SEQ ID NO: 1592010 - DNA, 15 bp, Homo sapiens
atgggctagccttac

SEQ ID NO: 1592011 - DNA, 15 bp, Homo sapiens
tgggctagccttact

SEQ ID NO: 1592012 - DNA, 15 bp, Homo sapiens
gggctagccttactt

SEQ ID NO: 1592013 - DNA, 15 bp, Homo sapiens
ggctagccttacttc

SEQ ID NO: 1592014 - DNA, 15 bp, Homo sapiens
gctagccttacttca

SEQ ID NO: 1592015 - DNA, 15 bp, Homo sapiens
ctagccttacttcat

SEQ ID NO: 1592016 - DNA, 15 bp, Homo sapiens
tagccttacttcatt

SEQ ID NO: 1592017 - DNA, 15 bp, Homo sapiens
agccttacttcattc

SEQ ID NO: 1592018 - DNA, 15 bp, Homo sapiens
gccttacttcattct

SEQ ID NO: 1592019 - DNA, 15 bp, Homo sapiens
ccttacttcattctg

SEQ ID NO: 1592020 - DNA, 15 bp, Homo sapiens
cttacttcattctgt

SEQ ID NO: 1592021 - DNA, 15 bp, Homo sapiens
ttacttcattctgta

SEQ ID NO: 1592022 - DNA, 15 bp, Homo sapiens
tacttcattctgtac

SEQ ID NO: 1592023 - DNA, 15 bp, Homo sapiens
acttcattctgtact

SEQ ID NO: 1592024 - DNA, 15 bp, Homo sapiens
cttcattctgtactt

SEQ ID NO: 1592025 - DNA, 15 bp, Homo sapiens
ttcattctgtacttg

SEQ ID NO: 1592026 - DNA, 15 bp, Homo sapiens
tcattctgtacttgg

SEQ ID NO: 1592027 - DNA, 15 bp, Homo sapiens
cattctgtacttgga

SEQ ID NO: 1592028 - DNA, 15 bp, Homo sapiens
attctgtacttggac

SEQ ID NO: 1592029 - DNA, 15 bp, Homo sapiens
ttctgtacttggacc

SEQ ID NO: 1592030 - DNA, 15 bp, Homo sapiens
tctgtacttggacct

SEQ ID NO: 1592031 - DNA, 15 bp, Homo sapiens
ctgtacttggacctg

SEQ ID NO: 1592032 - DNA, 15 bp, Homo sapiens
tgtacttggacctgt

SEQ ID NO: 1592033 - DNA, 15 bp, Homo sapiens
gtacttggacctgtt

SEQ ID NO: 1592034 - DNA, 15 bp, Homo sapiens
tacttggacctgttt

SEQ ID NO: 1592035 - DNA, 15 bp, Homo sapiens
acttggacctgttta

SEQ ID NO: 1592036 - DNA, 15 bp, Homo sapiens
cttggacctgtttag

SEQ ID NO: 1592037 - DNA, 15 bp, Homo sapiens
ttggacctgtttagg

SEQ ID NO: 1592038 - DNA, 15 bp, Homo sapiens
tggacctgtttaggc

SEQ ID NO: 1592039 - DNA, 15 bp, Homo sapiens
ggacctgtttaggct

SEQ ID NO: 1592040 - DNA, 15 bp, Homo sapiens
gacctgtttaggctt

SEQ ID NO: 1592041 - DNA, 15 bp, Homo sapiens
acctgtttaggcttc

SEQ ID NO: 1592042 - DNA, 15 bp, Homo sapiens
cctgtttaggcttct

SEQ ID NO: 1592043 - DNA, 15 bp, Homo sapiens
ctgtttaggcttcta

SEQ ID NO: 1592044 - DNA, 15 bp, Homo sapiens
tgtttaggcttctaa

SEQ ID NO: 1592045 - DNA, 15 bp, Homo sapiens
gtttaggcttctaag

SEQ ID NO: 1592046 - DNA, 15 bp, Homo sapiens
tttaggcttctaaga

SEQ ID NO: 1592047 - DNA, 15 bp, Homo sapiens
ttaggcttctaagag

SEQ ID NO: 1592048 - DNA, 15 bp, Homo sapiens
taggcttctaagaga

SEQ ID NO: 1592049 - DNA, 15 bp, Homo sapiens
aggcttctaagagat

SEQ ID NO: 1592050 - DNA, 15 bp, Homo sapiens
ggcttctaagagatc

SEQ ID NO: 1592051 - DNA, 15 bp, Homo sapiens
gcttctaagagatct

SEQ ID NO: 1592052 - DNA, 15 bp, Homo sapiens
cttctaagagatctt

SEQ ID NO: 1592053 - DNA, 15 bp, Homo sapiens
ttctaagagatctta

SEQ ID NO: 1592054 - DNA, 15 bp, Homo sapiens
tctaagagatcttac

SEQ ID NO: 1592055 - DNA, 15 bp, Homo sapiens
ctaagagatcttacc

SEQ ID NO: 1592056 - DNA, 15 bp, Homo sapiens
taagagatcttacct

SEQ ID NO: 1592057 - DNA, 15 bp, Homo sapiens
aagagatcttacctc

SEQ ID NO: 1592058 - DNA, 15 bp, Homo sapiens
agagatcttacctcc

SEQ ID NO: 1592059 - DNA, 15 bp, Homo sapiens
gagatcttacctcca

SEQ ID NO: 1592060 - DNA, 15 bp, Homo sapiens
agatcttacctccaa

SEQ ID NO: 1592061 - DNA, 15 bp, Homo sapiens
gatcttacctccaac

SEQ ID NO: 1592062 - DNA, 15 bp, Homo sapiens
atcttacctccaaca

SEQ ID NO: 1592063 - DNA, 15 bp, Homo sapiens
tcttacctccaacaa

SEQ ID NO: 1592064 - DNA, 15 bp, Homo sapiens
cttacctccaacaat

SEQ ID NO: 1592065 - DNA, 15 bp, Homo sapiens
ttacctccaacaata

SEQ ID NO: 1592066 - DNA, 15 bp, Homo sapiens
tacctccaacaataa

SEQ ID NO: 1592067 - DNA, 15 bp, Homo sapiens
acctccaacaataaa

SEQ ID NO: 1592068 - DNA, 15 bp, Homo sapiens
cctccaacaataaac

SEQ ID NO: 1592069 - DNA, 15 bp, Homo sapiens
ctccaacaataaact

SEQ ID NO: 1592070 - DNA, 15 bp, Homo sapiens
tccaacaataaactg

SEQ ID NO: 1592071 - DNA, 15 bp, Homo sapiens
ccaacaataaactgc

SEQ ID NO: 1592072 - DNA, 15 bp, Homo sapiens
caacaataaactgct

SEQ ID NO: 1592073 - DNA, 15 bp, Homo sapiens
aacaataaactgctt

SEQ ID NO: 1592074 - DNA, 15 bp, Homo sapiens
acaataaactgcttt

SEQ ID NO: 1592075 - DNA, 15 bp, Homo sapiens
caataaactgctttg

SEQ ID NO: 1592076 - DNA, 15 bp, Homo sapiens
aataaactgctttga

SEQ ID NO: 1592077 - DNA, 15 bp, Homo sapiens
ataaactgctttgag

SEQ ID NO: 1592078 - DNA, 15 bp, Homo sapiens
taaactgctttgaga

SEQ ID NO: 1592079 - DNA, 15 bp, Homo sapiens
aaactgctttgagac

SEQ ID NO: 1592080 - DNA, 15 bp, Homo sapiens
aactgctttgagaca

SEQ ID NO: 1592081 - DNA, 15 bp, Homo sapiens
actgctttgagacat

SEQ ID NO: 1592082 - DNA, 15 bp, Homo sapiens
ctgctttgagacatg

SEQ ID NO: 1592083 - DNA, 15 bp, Homo sapiens
tgctttgagacatga

SEQ ID NO: 1592084 - DNA, 15 bp, Homo sapiens
gctttgagacatgaa

SEQ ID NO: 1592085 - DNA, 15 bp, Homo sapiens
ctttgagacatgaaa

SEQ ID NO: 1592086 - DNA, 15 bp, Homo sapiens
tttgagacatgaaaa

SEQ ID NO: 1592087 - DNA, 15 bp, Homo sapiens
ttgagacatgaaaag

SEQ ID NO: 1592088 - DNA, 15 bp, Homo sapiens
tgagacatgaaaagg

SEQ ID NO: 1592089 - DNA, 15 bp, Homo sapiens
gagacatgaaaaggt

SEQ ID NO: 1592090 - DNA, 15 bp, Homo sapiens
agacatgaaaaggtg

SEQ ID NO: 1592091 - DNA, 15 bp, Homo sapiens
gacatgaaaaggtgg

SEQ ID NO: 1592092 - DNA, 15 bp, Homo sapiens
acatgaaaaggtgga

SEQ ID NO: 1592093 - DNA, 15 bp, Homo sapiens
catgaaaaggtggaa

SEQ ID NO: 1592094 - DNA, 15 bp, Homo sapiens
atgaaaaggtggaag

SEQ ID NO: 1592095 - DNA, 15 bp, Homo sapiens
tgaaaaggtggaagc

SEQ ID NO: 1592096 - DNA, 15 bp, Homo sapiens
gaaaaggtggaagct

SEQ ID NO: 1592097 - DNA, 15 bp, Homo sapiens
aaaaggtggaagctt

SEQ ID NO: 1592098 - DNA, 15 bp, Homo sapiens
aaaggtggaagcttt

SEQ ID NO: 1592099 - DNA, 15 bp, Homo sapiens
aaggtggaagcttta

SEQ ID NO: 1592100 - DNA, 15 bp, Homo sapiens
aggtggaagctttac

SEQ ID NO: 1592101 - DNA, 15 bp, Homo sapiens
ggtggaagctttact

SEQ ID NO: 1592102 - DNA, 15 bp, Homo sapiens
gtggaagctttactt

SEQ ID NO: 1592103 - DNA, 15 bp, Homo sapiens
tggaagctttacttg

SEQ ID NO: 1592104 - DNA, 15 bp, Homo sapiens
ggaagctttacttgg

SEQ ID NO: 1592105 - DNA, 15 bp, Homo sapiens
gaagctttacttggt

SEQ ID NO: 1592106 - DNA, 15 bp, Homo sapiens
aagctttacttggtt

SEQ ID NO: 1592107 - DNA, 15 bp, Homo sapiens
agctttacttggtta

SEQ ID NO: 1592108 - DNA, 15 bp, Homo sapiens
gctttacttggttat

SEQ ID NO: 1592109 - DNA, 15 bp, Homo sapiens
ctttacttggttata

SEQ ID NO: 1592110 - DNA, 15 bp, Homo sapiens
tttacttggttataa

SEQ ID NO: 1592111 - DNA, 15 bp, Homo sapiens
ttacttggttataac

SEQ ID NO: 1592112 - DNA, 15 bp, Homo sapiens
tacttggttataact

SEQ ID NO: 1592113 - DNA, 15 bp, Homo sapiens
acttggttataactt

SEQ ID NO: 1592114 - DNA, 15 bp, Homo sapiens
cttggttataacttt

SEQ ID NO: 1592115 - DNA, 15 bp, Homo sapiens
ttggttataacttta

SEQ ID NO: 1592116 - DNA, 15 bp, Homo sapiens
tggttataactttac

SEQ ID NO: 1592117 - DNA, 15 bp, Homo sapiens
ggttataactttact

SEQ ID NO: 1592118 - DNA, 15 bp, Homo sapiens
gttataactttactt

SEQ ID NO: 1592119 - DNA, 15 bp, Homo sapiens
ttataactttacttt

SEQ ID NO: 1592120 - DNA, 15 bp, Homo sapiens
tataactttactttt

SEQ ID NO: 1592121 - DNA, 15 bp, Homo sapiens
ataactttactttta

SEQ ID NO: 1592122 - DNA, 15 bp, Homo sapiens
taactttacttttaa

SEQ ID NO: 1592123 - DNA, 15 bp, Homo sapiens
aactttacttttaat

SEQ ID NO: 1592124 - DNA, 15 bp, Homo sapiens
actttacttttaata

SEQ ID NO: 1592125 - DNA, 15 bp, Homo sapiens
ctttacttttaatac

SEQ ID NO: 1592126 - DNA, 15 bp, Homo sapiens
tttacttttaatacc

SEQ ID NO: 1592127 - DNA, 15 bp, Homo sapiens
ttacttttaatacct

SEQ ID NO: 1592128 - DNA, 15 bp, Homo sapiens
tacttttaataccta

SEQ ID NO: 1592129 - DNA, 15 bp, Homo sapiens
acttttaatacctag

SEQ ID NO: 1592130 - DNA, 15 bp, Homo sapiens
cttttaatacctaga

SEQ ID NO: 1592131 - DNA, 15 bp, Homo sapiens
ttttaatacctagaa

SEQ ID NO: 1592132 - DNA, 15 bp, Homo sapiens
tttaatacctagaac

SEQ ID NO: 1592133 - DNA, 15 bp, Homo sapiens
ttaatacctagaaca

SEQ ID NO: 1592134 - DNA, 15 bp, Homo sapiens
taatacctagaacag

SEQ ID NO: 1592135 - DNA, 15 bp, Homo sapiens
aatacctagaacagt

SEQ ID NO: 1592136 - DNA, 15 bp, Homo sapiens
atacctagaacagtg

SEQ ID NO: 1592137 - DNA, 15 bp, Homo sapiens
tacctagaacagtga

SEQ ID NO: 1592138 - DNA, 15 bp, Homo sapiens
acctagaacagtgag

SEQ ID NO: 1592139 - DNA, 15 bp, Homo sapiens
cctagaacagtgagt

SEQ ID NO: 1592140 - DNA, 15 bp, Homo sapiens
ctagaacagtgagtc

SEQ ID NO: 1592141 - DNA, 15 bp, Homo sapiens
tagaacagtgagtct

SEQ ID NO: 1592142 - DNA, 15 bp, Homo sapiens
agaacagtgagtctt

SEQ ID NO: 1592143 - DNA, 15 bp, Homo sapiens
gaacagtgagtcttc

SEQ ID NO: 1592144 - DNA, 15 bp, Homo sapiens
aacagtgagtcttca

SEQ ID NO: 1592145 - DNA, 15 bp, Homo sapiens
acagtgagtcttcaa

SEQ ID NO: 1592146 - DNA, 15 bp, Homo sapiens
cagtgagtcttcaaa

SEQ ID NO: 1592147 - DNA, 15 bp, Homo sapiens
agtgagtcttcaaac

SEQ ID NO: 1592148 - DNA, 15 bp, Homo sapiens
gtgagtcttcaaact

SEQ ID NO: 1592149 - DNA, 15 bp, Homo sapiens
tgagtcttcaaactt

SEQ ID NO: 1592150 - DNA, 15 bp, Homo sapiens
gagtcttcaaacttg

SEQ ID NO: 1592151 - DNA, 15 bp, Homo sapiens
agtcttcaaacttgt

SEQ ID NO: 1592152 - DNA, 15 bp, Homo sapiens
gtcttcaaacttgta

SEQ ID NO: 1592153 - DNA, 15 bp, Homo sapiens
tcttcaaacttgtat

SEQ ID NO: 1592154 - DNA, 15 bp, Homo sapiens
cttcaaacttgtatt

SEQ ID NO: 1592155 - DNA, 15 bp, Homo sapiens
tcaaacttgtatttg

SEQ ID NO: 1592156 - DNA, 15 bp, Homo sapiens
caaacttgtatttgc

SEQ ID NO: 1592157 - DNA, 15 bp, Homo sapiens
aaacttgtatttgca

SEQ ID NO: 1592158 - DNA, 15 bp, Homo sapiens
aacttgtatttgcat

SEQ ID NO: 1592159 - DNA, 15 bp, Homo sapiens
acttgtatttgcatg

SEQ ID NO: 1592160 - DNA, 15 bp, Homo sapiens
cttgtatttgcatgc

SEQ ID NO: 1592161 - DNA, 15 bp, Homo sapiens
ttgtatttgcatgcc

SEQ ID NO: 1592162 - DNA, 15 bp, Homo sapiens
tgtatttgcatgccc

SEQ ID NO: 1592163 - DNA, 15 bp, Homo sapiens
gtatttgcatgccca

SEQ ID NO: 1592164 - DNA, 15 bp, Homo sapiens
tatttgcatgcccaa

SEQ ID NO: 1592165 - DNA, 15 bp, Homo sapiens
atttgcatgcccaat

SEQ ID NO: 1592166 - DNA, 15 bp, Homo sapiens
tttgcatgcccaatt

SEQ ID NO: 1592167 - DNA, 15 bp, Homo sapiens
ttgcatgcccaattt

SEQ ID NO: 1592168 - DNA, 15 bp, Homo sapiens
tgcatgcccaattta

SEQ ID NO: 1592169 - DNA, 15 bp, Homo sapiens
gcatgcccaatttat

SEQ ID NO: 1592170 - DNA, 15 bp, Homo sapiens
catgcccaatttata

SEQ ID NO: 1592171 - DNA, 15 bp, Homo sapiens
atgcccaatttataa

SEQ ID NO: 1592172 - DNA, 15 bp, Homo sapiens
tgcccaatttataaa

SEQ ID NO: 1592173 - DNA, 15 bp, Homo sapiens
gcccaatttataaaa

SEQ ID NO: 1592174 - DNA, 15 bp, Homo sapiens
cccaatttataaaaa

SEQ ID NO: 1592175 - DNA, 15 bp, Homo sapiens
ccaatttataaaaag

SEQ ID NO: 1592176 - DNA, 15 bp, Homo sapiens
caatttataaaaagt

SEQ ID NO: 1592177 - DNA, 15 bp, Homo sapiens
aatttataaaaagtt

SEQ ID NO: 1592178 - DNA, 15 bp, Homo sapiens
atttataaaaagttt

SEQ ID NO: 1592179 - DNA, 15 bp, Homo sapiens
tttataaaaagtttc

SEQ ID NO: 1592180 - DNA, 15 bp, Homo sapiens
ttataaaaagtttcc

SEQ ID NO: 1592181 - DNA, 15 bp, Homo sapiens
tataaaaagtttcct

SEQ ID NO: 1592182 - DNA, 15 bp, Homo sapiens
ataaaaagtttcctg

SEQ ID NO: 1592183 - DNA, 15 bp, Homo sapiens
taaaaagtttcctga

SEQ ID NO: 1592184 - DNA, 15 bp, Homo sapiens
aaaaagtttcctgag

SEQ ID NO: 1592185 - DNA, 15 bp, Homo sapiens
aaaagtttcctgagc

SEQ ID NO: 1592186 - DNA, 15 bp, Homo sapiens
aaagtttcctgagca

SEQ ID NO: 1592187 - DNA, 15 bp, Homo sapiens
aagtttcctgagcat

SEQ ID NO: 1592188 - DNA, 15 bp, Homo sapiens
agtttcctgagcatt

SEQ ID NO: 1592189 - DNA, 15 bp, Homo sapiens
gtttcctgagcattt

SEQ ID NO: 1592190 - DNA, 15 bp, Homo sapiens
tttcctgagcattta

SEQ ID NO: 1592191 - DNA, 15 bp, Homo sapiens
ttcctgagcatttac

SEQ ID NO: 1592192 - DNA, 15 bp, Homo sapiens
tcctgagcatttacc

SEQ ID NO: 1592193 - DNA, 15 bp, Homo sapiens
cctgagcatttaccc

SEQ ID NO: 1592194 - DNA, 15 bp, Homo sapiens
ctgagcatttacccc

SEQ ID NO: 1592195 - DNA, 15 bp, Homo sapiens
tgagcatttacccct

SEQ ID NO: 1592196 - DNA, 15 bp, Homo sapiens
gagcatttaccccta

SEQ ID NO: 1592197 - DNA, 15 bp, Homo sapiens
agcatttacccctaa

SEQ ID NO: 1592198 - DNA, 15 bp, Homo sapiens
gcatttacccctaat

SEQ ID NO: 1592199 - DNA, 15 bp, Homo sapiens
catttacccctaata

SEQ ID NO: 1592200 - DNA, 15 bp, Homo sapiens
atttacccctaatat

SEQ ID NO: 1592201 - DNA, 15 bp, Homo sapiens
tttacccctaatata

SEQ ID NO: 1592202 - DNA, 15 bp, Homo sapiens
ttacccctaatatat

SEQ ID NO: 1592203 - DNA, 15 bp, Homo sapiens
tacccctaatatatg

SEQ ID NO: 1592204 - DNA, 15 bp, Homo sapiens
acccctaatatatgc

SEQ ID NO: 1592205 - DNA, 15 bp, Homo sapiens
cccctaatatatgca

SEQ ID NO: 1592206 - DNA, 15 bp, Homo sapiens
ccctaatatatgcat

SEQ ID NO: 1592207 - DNA, 15 bp, Homo sapiens
cctaatatatgcatt

SEQ ID NO: 1592208 - DNA, 15 bp, Homo sapiens
ctaatatatgcattt

SEQ ID NO: 1592209 - DNA, 15 bp, Homo sapiens
taatatatgcatttt

SEQ ID NO: 1592210 - DNA, 15 bp, Homo sapiens
aatatatgcatttta

SEQ ID NO: 1592211 - DNA, 15 bp, Homo sapiens
atatatgcattttaa

SEQ ID NO: 1592212 - DNA, 15 bp, Homo sapiens
tatatgcattttaaa

SEQ ID NO: 1592213 - DNA, 15 bp, Homo sapiens
atatgcattttaaat

SEQ ID NO: 1592214 - DNA, 15 bp, Homo sapiens
tatgcattttaaatt

SEQ ID NO: 1592215 - DNA, 15 bp, Homo sapiens
atgcattttaaatta

SEQ ID NO: 1592216 - DNA, 15 bp, Homo sapiens
tgcattttaaattat

SEQ ID NO: 1592217 - DNA, 15 bp, Homo sapiens
gcattttaaattata

SEQ ID NO: 1592218 - DNA, 15 bp, Homo sapiens
cattttaaattatat

SEQ ID NO: 1592219 - DNA, 15 bp, Homo sapiens
attttaaattatata

SEQ ID NO: 1592220 - DNA, 15 bp, Homo sapiens
ttttaaattatatat

SEQ ID NO: 1592221 - DNA, 15 bp, Homo sapiens
tttaaattatatatg

SEQ ID NO: 1592222 - DNA, 15 bp, Homo sapiens
ttaaattatatatga

SEQ ID NO: 1592223 - DNA, 15 bp, Homo sapiens
taaattatatatgat

SEQ ID NO: 1592224 - DNA, 15 bp, Homo sapiens
aaattatatatgatt

SEQ ID NO: 1592225 - DNA, 15 bp, Homo sapiens
aattatatatgattt

SEQ ID NO: 1592226 - DNA, 15 bp, Homo sapiens
attatatatgattta

SEQ ID NO: 1592227 - DNA, 15 bp, Homo sapiens
ttatatatgatttat

SEQ ID NO: 1592228 - DNA, 15 bp, Homo sapiens
tatatatgatttatg

SEQ ID NO: 1592229 - DNA, 15 bp, Homo sapiens
atatatgatttatgg

SEQ ID NO: 1592230 - DNA, 15 bp, Homo sapiens
tatatgatttatggt

SEQ ID NO: 1592231 - DNA, 15 bp, Homo sapiens
atatgatttatggta

SEQ ID NO: 1592232 - DNA, 15 bp, Homo sapiens
tatgatttatggtaa

SEQ ID NO: 1592233 - DNA, 15 bp, Homo sapiens
atgatttatggtaat

SEQ ID NO: 1592234 - DNA, 15 bp, Homo sapiens
tgatttatggtaata

SEQ ID NO: 1592235 - DNA, 15 bp, Homo sapiens
gatttatggtaataa

SEQ ID NO: 1592236 - DNA, 15 bp, Homo sapiens
atttatggtaataat

SEQ ID NO: 1592237 - DNA, 15 bp, Homo sapiens
tttatggtaataata

SEQ ID NO: 1592238 - DNA, 15 bp, Homo sapiens
ttatggtaataataa

SEQ ID NO: 1592239 - DNA, 15 bp, Homo sapiens
tatggtaataataat

SEQ ID NO: 1592240 - DNA, 15 bp, Homo sapiens
atggtaataataata

SEQ ID NO: 1592241 - DNA, 15 bp, Homo sapiens
tggtaataataatat

SEQ ID NO: 1592242 - DNA, 15 bp, Homo sapiens
ggtaataataatata

SEQ ID NO: 1592243 - DNA, 15 bp, Homo sapiens
gtaataataatatat

SEQ ID NO: 1592244 - DNA, 15 bp, Homo sapiens
taataataatatata

SEQ ID NO: 1592245 - DNA, 15 bp, Homo sapiens
aataataatatatat

SEQ ID NO: 1592246 - DNA, 15 bp, Homo sapiens
ataataatatatatg

SEQ ID NO: 1592247 - DNA, 15 bp, Homo sapiens
taataatatatatgt

SEQ ID NO: 1592248 - DNA, 15 bp, Homo sapiens
aataatatatatgtt

SEQ ID NO: 1592249 - DNA, 15 bp, Homo sapiens
ataatatatatgtta

SEQ ID NO: 1592250 - DNA, 15 bp, Homo sapiens
taatatatatgttac

SEQ ID NO: 1592251 - DNA, 15 bp, Homo sapiens
aatatatatgttaca

SEQ ID NO: 1592252 - DNA, 15 bp, Homo sapiens
atatatatgttacaa

SEQ ID NO: 1592253 - DNA, 15 bp, Homo sapiens
tatatatgttacaaa

SEQ ID NO: 1592254 - DNA, 15 bp, Homo sapiens
atatatgttacaaaa

SEQ ID NO: 1592255 - DNA, 15 bp, Homo sapiens
tatatgttacaaaat

SEQ ID NO: 1592256 - DNA, 15 bp, Homo sapiens
atatgttacaaaata

SEQ ID NO: 1592257 - DNA, 15 bp, Homo sapiens
tatgttacaaaatac

SEQ ID NO: 1592258 - DNA, 15 bp, Homo sapiens
atgttacaaaataca

SEQ ID NO: 1592259 - DNA, 15 bp, Homo sapiens
tgttacaaaatacat

SEQ ID NO: 1592260 - DNA, 15 bp, Homo sapiens
gttacaaaatacata

SEQ ID NO: 1592261 - DNA, 15 bp, Homo sapiens
ttacaaaatacatac

SEQ ID NO: 1592262 - DNA, 15 bp, Homo sapiens
tacaaaatacataca

SEQ ID NO: 1592263 - DNA, 15 bp, Homo sapiens
acaaaatacatacaa

SEQ ID NO: 1592264 - DNA, 15 bp, Homo sapiens
caaaatacatacaaa

SEQ ID NO: 1592265 - DNA, 15 bp, Homo sapiens
aaaatacatacaaaa

SEQ ID NO: 1592266 - DNA, 15 bp, Homo sapiens
aaatacatacaaaaa

SEQ ID NO: 1592267 - DNA, 15 bp, Homo sapiens
aatacatacaaaaat

SEQ ID NO: 1592268 - DNA, 15 bp, Homo sapiens
atacatacaaaaata

SEQ ID NO: 1592269 - DNA, 15 bp, Homo sapiens
tacatacaaaaatat

SEQ ID NO: 1592270 - DNA, 15 bp, Homo sapiens
acatacaaaaatata

SEQ ID NO: 1592271 - DNA, 15 bp, Homo sapiens
catacaaaaatatag

SEQ ID NO: 1592272 - DNA, 15 bp, Homo sapiens
atacaaaaatataga

SEQ ID NO: 1592273 - DNA, 15 bp, Homo sapiens
tacaaaaatatagat

SEQ ID NO: 1592274 - DNA, 15 bp, Homo sapiens
acaaaaatatagatt

SEQ ID NO: 1592275 - DNA, 15 bp, Homo sapiens
caaaaatatagatta

SEQ ID NO: 1592276 - DNA, 15 bp, Homo sapiens
aaaaatatagattaa

SEQ ID NO: 1592277 - DNA, 15 bp, Homo sapiens
aaaatatagattaaa

SEQ ID NO: 1592278 - DNA, 15 bp, Homo sapiens
aaatatagattaaac

SEQ ID NO: 1592279 - DNA, 15 bp, Homo sapiens
aatatagattaaaca

SEQ ID NO: 1592280 - DNA, 15 bp, Homo sapiens
atatagattaaacaa

SEQ ID NO: 1592281 - DNA, 15 bp, Homo sapiens
tatagattaaacaag

SEQ ID NO: 1592282 - DNA, 15 bp, Homo sapiens
atagattaaacaagg

SEQ ID NO: 1592283 - DNA, 15 bp, Homo sapiens
tagattaaacaaggt

SEQ ID NO: 1592284 - DNA, 15 bp, Homo sapiens
agattaaacaaggtg

SEQ ID NO: 1592285 - DNA, 15 bp, Homo sapiens
gattaaacaaggtga

SEQ ID NO: 1592286 - DNA, 15 bp, Homo sapiens
attaaacaaggtgag

SEQ ID NO: 1592287 - DNA, 15 bp, Homo sapiens
ttaaacaaggtgagg

SEQ ID NO: 1592288 - DNA, 15 bp, Homo sapiens
taaacaaggtgaggt

SEQ ID NO: 1592289 - DNA, 15 bp, Homo sapiens
aaacaaggtgaggta

SEQ ID NO: 1592290 - DNA, 15 bp, Homo sapiens
aacaaggtgaggtaa

SEQ ID NO: 1592291 - DNA, 15 bp, Homo sapiens
acaaggtgaggtaaa

SEQ ID NO: 1592292 - DNA, 15 bp, Homo sapiens
caaggtgaggtaaaa

SEQ ID NO: 1592293 - DNA, 15 bp, Homo sapiens
aaggtgaggtaaaaa

SEQ ID NO: 1592294 - DNA, 15 bp, Homo sapiens
aggtgaggtaaaaaa

SEQ ID NO: 1592295 - DNA, 15 bp, Homo sapiens
ggtgaggtaaaaaat

SEQ ID NO: 1592296 - DNA, 15 bp, Homo sapiens
gtgaggtaaaaaatt

SEQ ID NO: 1592297 - DNA, 15 bp, Homo sapiens
tgaggtaaaaaattt

SEQ ID NO: 1592298 - DNA, 15 bp, Homo sapiens
gaggtaaaaaattta

SEQ ID NO: 1592299 - DNA, 15 bp, Homo sapiens
aggtaaaaaatttaa

SEQ ID NO: 1592300 - DNA, 15 bp, Homo sapiens
ggtaaaaaatttaaa

SEQ ID NO: 1592301 - DNA, 15 bp, Homo sapiens
gtaaaaaatttaaaa

SEQ ID NO: 1592302 - DNA, 15 bp, Homo sapiens
taaaaaatttaaaag

SEQ ID NO: 1592303 - DNA, 15 bp, Homo sapiens
aaaaaatttaaaagt

SEQ ID NO: 1592304 - DNA, 15 bp, Homo sapiens
aaaaatttaaaagtt

SEQ ID NO: 1592305 - DNA, 15 bp, Homo sapiens
aaaatttaaaagttc

SEQ ID NO: 1592306 - DNA, 15 bp, Homo sapiens
aaatttaaaagttct

SEQ ID NO: 1592307 - DNA, 15 bp, Homo sapiens
aatttaaaagttcta

SEQ ID NO: 1592308 - DNA, 15 bp, Homo sapiens
atttaaaagttctaa

SEQ ID NO: 1592309 - DNA, 15 bp, Homo sapiens
tttaaaagttctaat

SEQ ID NO: 1592310 - DNA, 15 bp, Homo sapiens
ttaaaagttctaatc

SEQ ID NO: 1592311 - DNA, 15 bp, Homo sapiens
taaaagttctaatct

SEQ ID NO: 1592312 - DNA, 15 bp, Homo sapiens
aaaagttctaatctt

SEQ ID NO: 1592313 - DNA, 15 bp, Homo sapiens
aaagttctaatcttt

SEQ ID NO: 1592314 - DNA, 15 bp, Homo sapiens
aagttctaatctttc

SEQ ID NO: 1592315 - DNA, 15 bp, Homo sapiens
agttctaatctttct

SEQ ID NO: 1592316 - DNA, 15 bp, Homo sapiens
gttctaatctttctt

SEQ ID NO: 1592317 - DNA, 15 bp, Homo sapiens
ttctaatctttcttg

SEQ ID NO: 1592318 - DNA, 15 bp, Homo sapiens
tctaatctttcttgc

SEQ ID NO: 1592319 - DNA, 15 bp, Homo sapiens
ctaatctttcttgca

SEQ ID NO: 1592320 - DNA, 15 bp, Homo sapiens
taatctttcttgcaa

SEQ ID NO: 1592321 - DNA, 15 bp, Homo sapiens
aatctttcttgcaaa

SEQ ID NO: 1592322 - DNA, 15 bp, Homo sapiens
atctttcttgcaaac

SEQ ID NO: 1592323 - DNA, 15 bp, Homo sapiens
tctttcttgcaaacc

SEQ ID NO: 1592324 - DNA, 15 bp, Homo sapiens
ctttcttgcaaacca

SEQ ID NO: 1592325 - DNA, 15 bp, Homo sapiens
tttcttgcaaaccag

SEQ ID NO: 1592326 - DNA, 15 bp, Homo sapiens
ttcttgcaaaccagt

SEQ ID NO: 1592327 - DNA, 15 bp, Homo sapiens
tcttgcaaaccagtg

SEQ ID NO: 1592328 - DNA, 15 bp, Homo sapiens
cttgcaaaccagtgg

SEQ ID NO: 1592329 - DNA, 15 bp, Homo sapiens
ttgcaaaccagtgga

SEQ ID NO: 1592330 - DNA, 15 bp, Homo sapiens
tgcaaaccagtggat

SEQ ID NO: 1592331 - DNA, 15 bp, Homo sapiens
gcaaaccagtggatc

SEQ ID NO: 1592332 - DNA, 15 bp, Homo sapiens
caaaccagtggatct

SEQ ID NO: 1592333 - DNA, 15 bp, Homo sapiens
aaaccagtggatctt

SEQ ID NO: 1592334 - DNA, 15 bp, Homo sapiens
aaccagtggatcttt

SEQ ID NO: 1592335 - DNA, 15 bp, Homo sapiens
accagtggatctttt

SEQ ID NO: 1592336 - DNA, 15 bp, Homo sapiens
ccagtggatcttttg

SEQ ID NO: 1592337 - DNA, 15 bp, Homo sapiens
cagtggatcttttgt

SEQ ID NO: 1592338 - DNA, 15 bp, Homo sapiens
agtggatcttttgtg

SEQ ID NO: 1592339 - DNA, 15 bp, Homo sapiens
gtggatcttttgtgc

SEQ ID NO: 1592340 - DNA, 15 bp, Homo sapiens
tggatcttttgtgcc

SEQ ID NO: 1592341 - DNA, 15 bp, Homo sapiens
ggatcttttgtgcct

SEQ ID NO: 1592342 - DNA, 15 bp, Homo sapiens
gatcttttgtgcctt

SEQ ID NO: 1592343 - DNA, 15 bp, Homo sapiens
atcttttgtgcctta

SEQ ID NO: 1592344 - DNA, 15 bp, Homo sapiens
tcttttgtgccttac

SEQ ID NO: 1592345 - DNA, 15 bp, Homo sapiens
cttttgtgccttact

SEQ ID NO: 1592346 - DNA, 15 bp, Homo sapiens
ttttgtgccttactc

SEQ ID NO: 1592347 - DNA, 15 bp, Homo sapiens
tttgtgccttactct

SEQ ID NO: 1592348 - DNA, 15 bp, Homo sapiens
ttgtgccttactctg

SEQ ID NO: 1592349 - DNA, 15 bp, Homo sapiens
tgtgccttactctgg

SEQ ID NO: 1592350 - DNA, 15 bp, Homo sapiens
gtgccttactctggt

SEQ ID NO: 1592351 - DNA, 15 bp, Homo sapiens
tgccttactctggta

SEQ ID NO: 1592352 - DNA, 15 bp, Homo sapiens
gccttactctggtaa

SEQ ID NO: 1592353 - DNA, 15 bp, Homo sapiens
ccttactctggtaaa

SEQ ID NO: 1592354 - DNA, 15 bp, Homo sapiens
cttactctggtaaac

SEQ ID NO: 1592355 - DNA, 15 bp, Homo sapiens
ttactctggtaaaca

SEQ ID NO: 1592356 - DNA, 15 bp, Homo sapiens
tactctggtaaacac

SEQ ID NO: 1592357 - DNA, 15 bp, Homo sapiens
actctggtaaacact

SEQ ID NO: 1592358 - DNA, 15 bp, Homo sapiens
ctctggtaaacactg

SEQ ID NO: 1592359 - DNA, 15 bp, Homo sapiens
tctggtaaacactgt

SEQ ID NO: 1592360 - DNA, 15 bp, Homo sapiens
ctggtaaacactgtc

SEQ ID NO: 1592361 - DNA, 15 bp, Homo sapiens
tggtaaacactgtct

SEQ ID NO: 1592362 - DNA, 15 bp, Homo sapiens
ggtaaacactgtctt

SEQ ID NO: 1592363 - DNA, 15 bp, Homo sapiens
gtaaacactgtctta

SEQ ID NO: 1592364 - DNA, 15 bp, Homo sapiens
taaacactgtcttag

SEQ ID NO: 1592365 - DNA, 15 bp, Homo sapiens
aaacactgtcttaga

SEQ ID NO: 1592366 - DNA, 15 bp, Homo sapiens
aacactgtcttagaa

SEQ ID NO: 1592367 - DNA, 15 bp, Homo sapiens
acactgtcttagaag

SEQ ID NO: 1592368 - DNA, 15 bp, Homo sapiens
cactgtcttagaaga

SEQ ID NO: 1592369 - DNA, 15 bp, Homo sapiens
actgtcttagaagaa

SEQ ID NO: 1592370 - DNA, 15 bp, Homo sapiens
ctgtcttagaagaat

SEQ ID NO: 1592371 - DNA, 15 bp, Homo sapiens
tgtcttagaagaata

SEQ ID NO: 1592372 - DNA, 15 bp, Homo sapiens
gtcttagaagaatat

SEQ ID NO: 1592373 - DNA, 15 bp, Homo sapiens
tcttagaagaatata

SEQ ID NO: 1592374 - DNA, 15 bp, Homo sapiens
cttagaagaatatat

SEQ ID NO: 1592375 - DNA, 15 bp, Homo sapiens
ttagaagaatatata

SEQ ID NO: 1592376 - DNA, 15 bp, Homo sapiens
tagaagaatatatag

SEQ ID NO: 1592377 - DNA, 15 bp, Homo sapiens
agaagaatatataga

SEQ ID NO: 1592378 - DNA, 15 bp, Homo sapiens
gaagaatatatagaa

SEQ ID NO: 1592379 - DNA, 15 bp, Homo sapiens
aagaatatatagaac

SEQ ID NO: 1592380 - DNA, 15 bp, Homo sapiens
agaatatatagaaca

SEQ ID NO: 1592381 - DNA, 15 bp, Homo sapiens
gaatatatagaacat

SEQ ID NO: 1592382 - DNA, 15 bp, Homo sapiens
aatatatagaacatt

SEQ ID NO: 1592383 - DNA, 15 bp, Homo sapiens
atatatagaacatta

SEQ ID NO: 1592384 - DNA, 15 bp, Homo sapiens
tatatagaacattaa

SEQ ID NO: 1592385 - DNA, 15 bp, Homo sapiens
atatagaacattaaa

SEQ ID NO: 1592386 - DNA, 15 bp, Homo sapiens
tatagaacattaaaa

SEQ ID NO: 1592387 - DNA, 15 bp, Homo sapiens
atagaacattaaaat

SEQ ID NO: 1592388 - DNA, 15 bp, Homo sapiens
tagaacattaaaatc

SEQ ID NO: 1592389 - DNA, 15 bp, Homo sapiens
agaacattaaaatct

SEQ ID NO: 1592390 - DNA, 15 bp, Homo sapiens
gaacattaaaatctt

SEQ ID NO: 1592391 - DNA, 15 bp, Homo sapiens
aacattaaaatctta

SEQ ID NO: 1592392 - DNA, 15 bp, Homo sapiens
acattaaaatcttaa

SEQ ID NO: 1592393 - DNA, 15 bp, Homo sapiens
cattaaaatcttaat

SEQ ID NO: 1592394 - DNA, 15 bp, Homo sapiens
attaaaatcttaatg

SEQ ID NO: 1592395 - DNA, 15 bp, Homo sapiens
ttaaaatcttaatgc

SEQ ID NO: 1592396 - DNA, 15 bp, Homo sapiens
taaaatcttaatgct

SEQ ID NO: 1592397 - DNA, 15 bp, Homo sapiens
aaaatcttaatgcta

SEQ ID NO: 1592398 - DNA, 15 bp, Homo sapiens
aaatcttaatgctat

SEQ ID NO: 1592399 - DNA, 15 bp, Homo sapiens
aatcttaatgctata

SEQ ID NO: 1592400 - DNA, 15 bp, Homo sapiens
atcttaatgctatag

SEQ ID NO: 1592401 - DNA, 15 bp, Homo sapiens
tcttaatgctatagt

SEQ ID NO: 1592402 - DNA, 15 bp, Homo sapiens
cttaatgctatagtt

SEQ ID NO: 1592403 - DNA, 15 bp, Homo sapiens
ttaatgctatagtta

SEQ ID NO: 1592404 - DNA, 15 bp, Homo sapiens
taatgctatagttat

SEQ ID NO: 1592405 - DNA, 15 bp, Homo sapiens
aatgctatagttata

SEQ ID NO: 1592406 - DNA, 15 bp, Homo sapiens
atgctatagttatat

SEQ ID NO: 1592407 - DNA, 15 bp, Homo sapiens
tgctatagttatatg

SEQ ID NO: 1592408 - DNA, 15 bp, Homo sapiens
gctatagttatatga

SEQ ID NO: 1592409 - DNA, 15 bp, Homo sapiens
ctatagttatatgac

SEQ ID NO: 1592410 - DNA, 15 bp, Homo sapiens
tatagttatatgaca

SEQ ID NO: 1592411 - DNA, 15 bp, Homo sapiens
atagttatatgacag

SEQ ID NO: 1592412 - DNA, 15 bp, Homo sapiens
tagttatatgacaga

SEQ ID NO: 1592413 - DNA, 15 bp, Homo sapiens
agttatatgacagag

SEQ ID NO: 1592414 - DNA, 15 bp, Homo sapiens
gttatatgacagagt

SEQ ID NO: 1592415 - DNA, 15 bp, Homo sapiens
ttatatgacagagta

SEQ ID NO: 1592416 - DNA, 15 bp, Homo sapiens
tatatgacagagtat

SEQ ID NO: 1592417 - DNA, 15 bp, Homo sapiens
atatgacagagtatg

SEQ ID NO: 1592418 - DNA, 15 bp, Homo sapiens
tatgacagagtatga

SEQ ID NO: 1592419 - DNA, 15 bp, Homo sapiens
atgacagagtatgat

SEQ ID NO: 1592420 - DNA, 15 bp, Homo sapiens
tgacagagtatgatg

SEQ ID NO: 1592421 - DNA, 15 bp, Homo sapiens
gacagagtatgatga

SEQ ID NO: 1592422 - DNA, 15 bp, Homo sapiens
acagagtatgatgag

SEQ ID NO: 1592423 - DNA, 15 bp, Homo sapiens
cagagtatgatgaga

SEQ ID NO: 1592424 - DNA, 15 bp, Homo sapiens
agagtatgatgagag

SEQ ID NO: 1592425 - DNA, 15 bp, Homo sapiens
gagtatgatgagagc

SEQ ID NO: 1592426 - DNA, 15 bp, Homo sapiens
agtatgatgagagct

SEQ ID NO: 1592427 - DNA, 15 bp, Homo sapiens
gtatgatgagagcta

SEQ ID NO: 1592428 - DNA, 15 bp, Homo sapiens
tatgatgagagctac

SEQ ID NO: 1592429 - DNA, 15 bp, Homo sapiens
atgatgagagctaca

SEQ ID NO: 1592430 - DNA, 15 bp, Homo sapiens
tgatgagagctacag

SEQ ID NO: 1592431 - DNA, 15 bp, Homo sapiens
gatgagagctacaga

SEQ ID NO: 1592432 - DNA, 15 bp, Homo sapiens
atgagagctacagat

SEQ ID NO: 1592433 - DNA, 15 bp, Homo sapiens
tgagagctacagata

SEQ ID NO: 1592434 - DNA, 15 bp, Homo sapiens
gagagctacagataa

SEQ ID NO: 1592435 - DNA, 15 bp, Homo sapiens
agagctacagataaa

SEQ ID NO: 1592436 - DNA, 15 bp, Homo sapiens
gagctacagataaac

SEQ ID NO: 1592437 - DNA, 15 bp, Homo sapiens
agctacagataaaca

SEQ ID NO: 1592438 - DNA, 15 bp, Homo sapiens
gctacagataaacaa

SEQ ID NO: 1592439 - DNA, 15 bp, Homo sapiens
ctacagataaacaac

SEQ ID NO: 1592440 - DNA, 15 bp, Homo sapiens
tacagataaacaaca

SEQ ID NO: 1592441 - DNA, 15 bp, Homo sapiens
acagataaacaacac

SEQ ID NO: 1592442 - DNA, 15 bp, Homo sapiens
cagataaacaacaca

SEQ ID NO: 1592443 - DNA, 15 bp, Homo sapiens
agataaacaacacat

SEQ ID NO: 1592444 - DNA, 15 bp, Homo sapiens
gataaacaacacatc

SEQ ID NO: 1592445 - DNA, 15 bp, Homo sapiens
ataaacaacacatca

SEQ ID NO: 1592446 - DNA, 15 bp, Homo sapiens
taaacaacacatcat

SEQ ID NO: 1592447 - DNA, 15 bp, Homo sapiens
aaacaacacatcatg

SEQ ID NO: 1592448 - DNA, 15 bp, Homo sapiens
aacaacacatcatga

SEQ ID NO: 1592449 - DNA, 15 bp, Homo sapiens
acaacacatcatgaa

SEQ ID NO: 1592450 - DNA, 15 bp, Homo sapiens
caacacatcatgaat

SEQ ID NO: 1592451 - DNA, 15 bp, Homo sapiens
aacacatcatgaatc

SEQ ID NO: 1592452 - DNA, 15 bp, Homo sapiens
acacatcatgaatct

SEQ ID NO: 1592453 - DNA, 15 bp, Homo sapiens
cacatcatgaatctt

SEQ ID NO: 1592454 - DNA, 15 bp, Homo sapiens
acatcatgaatcttc

SEQ ID NO: 1592455 - DNA, 15 bp, Homo sapiens
catcatgaatcttct

SEQ ID NO: 1592456 - DNA, 15 bp, Homo sapiens
atcatgaatcttctt

SEQ ID NO: 1592457 - DNA, 15 bp, Homo sapiens
tcatgaatcttcttg

SEQ ID NO: 1592458 - DNA, 15 bp, Homo sapiens
catgaatcttcttgt

SEQ ID NO: 1592459 - DNA, 15 bp, Homo sapiens
atgaatcttcttgtg

SEQ ID NO: 1592460 - DNA, 15 bp, Homo sapiens
tgaatcttcttgtgg

SEQ ID NO: 1592461 - DNA, 15 bp, Homo sapiens
gaatcttcttgtggc

SEQ ID NO: 1592462 - DNA, 15 bp, Homo sapiens
aatcttcttgtggca

SEQ ID NO: 1592463 - DNA, 15 bp, Homo sapiens
atcttcttgtggcag

SEQ ID NO: 1592464 - DNA, 15 bp, Homo sapiens
tcttcttgtggcagt

SEQ ID NO: 1592465 - DNA, 15 bp, Homo sapiens
cttcttgtggcagtg

SEQ ID NO: 1592466 - DNA, 15 bp, Homo sapiens
ttcttgtggcagtgt

SEQ ID NO: 1592467 - DNA, 15 bp, Homo sapiens
tcttgtggcagtgtt

SEQ ID NO: 1592468 - DNA, 15 bp, Homo sapiens
cttgtggcagtgttt

SEQ ID NO: 1592469 - DNA, 15 bp, Homo sapiens
ttgtggcagtgttta

SEQ ID NO: 1592470 - DNA, 15 bp, Homo sapiens
tgtggcagtgtttat

SEQ ID NO: 1592471 - DNA, 15 bp, Homo sapiens
gtggcagtgtttata

SEQ ID NO: 1592472 - DNA, 15 bp, Homo sapiens
tggcagtgtttataa

SEQ ID NO: 1592473 - DNA, 15 bp, Homo sapiens
ggcagtgtttataac

SEQ ID NO: 1592474 - DNA, 15 bp, Homo sapiens
gcagtgtttataacc

SEQ ID NO: 1592475 - DNA, 15 bp, Homo sapiens
cagtgtttataacca

SEQ ID NO: 1592476 - DNA, 15 bp, Homo sapiens
agtgtttataaccat

SEQ ID NO: 1592477 - DNA, 15 bp, Homo sapiens
gtgtttataaccatt

SEQ ID NO: 1592478 - DNA, 15 bp, Homo sapiens
tgtttataaccatta

SEQ ID NO: 1592479 - DNA, 15 bp, Homo sapiens
gtttataaccattat

SEQ ID NO: 1592480 - DNA, 15 bp, Homo sapiens
tttataaccattatg

SEQ ID NO: 1592481 - DNA, 15 bp, Homo sapiens
ttataaccattatgt

SEQ ID NO: 1592482 - DNA, 15 bp, Homo sapiens
tataaccattatgtg

SEQ ID NO: 1592483 - DNA, 15 bp, Homo sapiens
ataaccattatgtga

SEQ ID NO: 1592484 - DNA, 15 bp, Homo sapiens
taaccattatgtgaa

SEQ ID NO: 1592485 - DNA, 15 bp, Homo sapiens
aaccattatgtgaaa

SEQ ID NO: 1592486 - DNA, 15 bp, Homo sapiens
accattatgtgaaat

SEQ ID NO: 1592487 - DNA, 15 bp, Homo sapiens
ccattatgtgaaatg

SEQ ID NO: 1592488 - DNA, 15 bp, Homo sapiens
cattatgtgaaatgc

SEQ ID NO: 1592489 - DNA, 15 bp, Homo sapiens
attatgtgaaatgct

SEQ ID NO: 1592490 - DNA, 15 bp, Homo sapiens
ttatgtgaaatgctg

SEQ ID NO: 1592491 - DNA, 15 bp, Homo sapiens
tatgtgaaatgctgc

SEQ ID NO: 1592492 - DNA, 15 bp, Homo sapiens
atgtgaaatgctgcc

SEQ ID NO: 1592493 - DNA, 15 bp, Homo sapiens
tgtgaaatgctgcct

SEQ ID NO: 1592494 - DNA, 15 bp, Homo sapiens
gtgaaatgctgcctc

SEQ ID NO: 1592495 - DNA, 15 bp, Homo sapiens
tgaaatgctgcctca

SEQ ID NO: 1592496 - DNA, 15 bp, Homo sapiens
gaaatgctgcctcat

SEQ ID NO: 1592497 - DNA, 15 bp, Homo sapiens
aaatgctgcctcatt

SEQ ID NO: 1592498 - DNA, 15 bp, Homo sapiens
aatgctgcctcattc

SEQ ID NO: 1592499 - DNA, 15 bp, Homo sapiens
atgctgcctcattct

SEQ ID NO: 1592500 - DNA, 15 bp, Homo sapiens
tgctgcctcattctt

SEQ ID NO: 1592501 - DNA, 15 bp, Homo sapiens
gctgcctcattctta

SEQ ID NO: 1592502 - DNA, 15 bp, Homo sapiens
ctgcctcattcttat

SEQ ID NO: 1592503 - DNA, 15 bp, Homo sapiens
tgcctcattcttata

SEQ ID NO: 1592504 - DNA, 15 bp, Homo sapiens
gcctcattcttataa

SEQ ID NO: 1592505 - DNA, 15 bp, Homo sapiens
cctcattcttataac

SEQ ID NO: 1592506 - DNA, 15 bp, Homo sapiens
ctcattcttataact

SEQ ID NO: 1592507 - DNA, 15 bp, Homo sapiens
tcattcttataacta

SEQ ID NO: 1592508 - DNA, 15 bp, Homo sapiens
cattcttataactag

SEQ ID NO: 1592509 - DNA, 15 bp, Homo sapiens
attcttataactagc

SEQ ID NO: 1592510 - DNA, 15 bp, Homo sapiens
ttcttataactagca

SEQ ID NO: 1592511 - DNA, 15 bp, Homo sapiens
tcttataactagcat

SEQ ID NO: 1592512 - DNA, 15 bp, Homo sapiens
cttataactagcata

SEQ ID NO: 1592513 - DNA, 15 bp, Homo sapiens
ttataactagcataa

SEQ ID NO: 1592514 - DNA, 15 bp, Homo sapiens
tataactagcataag

SEQ ID NO: 1592515 - DNA, 15 bp, Homo sapiens
ataactagcataaga

SEQ ID NO: 1592516 - DNA, 15 bp, Homo sapiens
taactagcataagaa

SEQ ID NO: 1592517 - DNA, 15 bp, Homo sapiens
aactagcataagaac

SEQ ID NO: 1592518 - DNA, 15 bp, Homo sapiens
actagcataagaaca

SEQ ID NO: 1592519 - DNA, 15 bp, Homo sapiens
ctagcataagaacag

SEQ ID NO: 1592520 - DNA, 15 bp, Homo sapiens
tagcataagaacaga

SEQ ID NO: 1592521 - DNA, 15 bp, Homo sapiens
agcataagaacagat

SEQ ID NO: 1592522 - DNA, 15 bp, Homo sapiens
gcataagaacagata

SEQ ID NO: 1592523 - DNA, 15 bp, Homo sapiens
cataagaacagatag

SEQ ID NO: 1592524 - DNA, 15 bp, Homo sapiens
ataagaacagatagg

SEQ ID NO: 1592525 - DNA, 15 bp, Homo sapiens
taagaacagatagga

SEQ ID NO: 1592526 - DNA, 15 bp, Homo sapiens
aagaacagataggac

SEQ ID NO: 1592527 - DNA, 15 bp, Homo sapiens
agaacagataggact

SEQ ID NO: 1592528 - DNA, 15 bp, Homo sapiens
gaacagataggactt

SEQ ID NO: 1592529 - DNA, 15 bp, Homo sapiens
aacagataggacttt

SEQ ID NO: 1592530 - DNA, 15 bp, Homo sapiens
acagataggactttc

SEQ ID NO: 1592531 - DNA, 15 bp, Homo sapiens
cagataggactttct

SEQ ID NO: 1592532 - DNA, 15 bp, Homo sapiens
agataggactttctc

SEQ ID NO: 1592533 - DNA, 15 bp, Homo sapiens
gataggactttctcg

SEQ ID NO: 1592534 - DNA, 15 bp, Homo sapiens
ataggactttctcga

SEQ ID NO: 1592535 - DNA, 15 bp, Homo sapiens
taggactttctcgat

SEQ ID NO: 1592536 - DNA, 15 bp, Homo sapiens
aggactttctcgatt

SEQ ID NO: 1592537 - DNA, 15 bp, Homo sapiens
ggactttctcgattt

SEQ ID NO: 1592538 - DNA, 15 bp, Homo sapiens
gactttctcgatttt

SEQ ID NO: 1592539 - DNA, 15 bp, Homo sapiens
actttctcgattttg

SEQ ID NO: 1592540 - DNA, 15 bp, Homo sapiens
ctttctcgattttga

SEQ ID NO: 1592541 - DNA, 15 bp, Homo sapiens
tttctcgattttgag

SEQ ID NO: 1592542 - DNA, 15 bp, Homo sapiens
ttctcgattttgagg

SEQ ID NO: 1592543 - DNA, 15 bp, Homo sapiens
tctcgattttgaggg

SEQ ID NO: 1592544 - DNA, 15 bp, Homo sapiens
ctcgattttgagggg

SEQ ID NO: 1592545 - DNA, 15 bp, Homo sapiens
tcgattttgaggggt

SEQ ID NO: 1592546 - DNA, 15 bp, Homo sapiens
cgattttgaggggta

SEQ ID NO: 1592547 - DNA, 15 bp, Homo sapiens
gattttgaggggtaa

SEQ ID NO: 1592548 - DNA, 15 bp, Homo sapiens
attttgaggggtaat

SEQ ID NO: 1592549 - DNA, 15 bp, Homo sapiens
ttttgaggggtaatt

SEQ ID NO: 1592550 - DNA, 15 bp, Homo sapiens
tttgaggggtaatta

SEQ ID NO: 1592551 - DNA, 15 bp, Homo sapiens
ttgaggggtaattat

SEQ ID NO: 1592552 - DNA, 15 bp, Homo sapiens
tgaggggtaattatt

SEQ ID NO: 1592553 - DNA, 15 bp, Homo sapiens
gaggggtaattatta

SEQ ID NO: 1592554 - DNA, 15 bp, Homo sapiens
aggggtaattattag

SEQ ID NO: 1592555 - DNA, 15 bp, Homo sapiens
ggggtaattattaga

SEQ ID NO: 1592556 - DNA, 15 bp, Homo sapiens
gggtaattattagat

SEQ ID NO: 1592557 - DNA, 15 bp, Homo sapiens
ggtaattattagatg

SEQ ID NO: 1592558 - DNA, 15 bp, Homo sapiens
gtaattattagatgg

SEQ ID NO: 1592559 - DNA, 15 bp, Homo sapiens
taattattagatggt

SEQ ID NO: 1592560 - DNA, 15 bp, Homo sapiens
aattattagatggta

SEQ ID NO: 1592561 - DNA, 15 bp, Homo sapiens
attattagatggtat

SEQ ID NO: 1592562 - DNA, 15 bp, Homo sapiens
ttattagatggtatt

SEQ ID NO: 1592563 - DNA, 15 bp, Homo sapiens
tattagatggtattt

SEQ ID NO: 1592564 - DNA, 15 bp, Homo sapiens
attagatggtatttt

SEQ ID NO: 1592565 - DNA, 15 bp, Homo sapiens
ttagatggtattttc

SEQ ID NO: 1592566 - DNA, 15 bp, Homo sapiens
tagatggtattttct

SEQ ID NO: 1592567 - DNA, 15 bp, Homo sapiens
agatggtattttctg

SEQ ID NO: 1592568 - DNA, 15 bp, Homo sapiens
gatggtattttctgt

SEQ ID NO: 1592569 - DNA, 15 bp, Homo sapiens
atggtattttctgtt

SEQ ID NO: 1592570 - DNA, 15 bp, Homo sapiens
tggtattttctgtta

SEQ ID NO: 1592571 - DNA, 15 bp, Homo sapiens
ggtattttctgttaa

SEQ ID NO: 1592572 - DNA, 15 bp, Homo sapiens
gtattttctgttaag

SEQ ID NO: 1592573 - DNA, 15 bp, Homo sapiens
tattttctgttaagg

SEQ ID NO: 1592574 - DNA, 15 bp, Homo sapiens
attttctgttaagga

SEQ ID NO: 1592575 - DNA, 15 bp, Homo sapiens
ttttctgttaaggac

SEQ ID NO: 1592576 - DNA, 15 bp, Homo sapiens
tttctgttaaggact

SEQ ID NO: 1592577 - DNA, 15 bp, Homo sapiens
ttctgttaaggactc

SEQ ID NO: 1592578 - DNA, 15 bp, Homo sapiens
tctgttaaggactct

SEQ ID NO: 1592579 - DNA, 15 bp, Homo sapiens
ctgttaaggactctt

SEQ ID NO: 1592580 - DNA, 15 bp, Homo sapiens
tgttaaggactcttc

SEQ ID NO: 1592581 - DNA, 15 bp, Homo sapiens
gttaaggactcttcc

SEQ ID NO: 1592582 - DNA, 15 bp, Homo sapiens
ttaaggactcttcca

SEQ ID NO: 1592583 - DNA, 15 bp, Homo sapiens
taaggactcttccag

SEQ ID NO: 1592584 - DNA, 15 bp, Homo sapiens
aaggactcttccagc

SEQ ID NO: 1592585 - DNA, 15 bp, Homo sapiens
aggactcttccagct

SEQ ID NO: 1592586 - DNA, 15 bp, Homo sapiens
ggactcttccagcta

SEQ ID NO: 1592587 - DNA, 15 bp, Homo sapiens
gactcttccagctat

SEQ ID NO: 1592588 - DNA, 15 bp, Homo sapiens
actcttccagctata

SEQ ID NO: 1592589 - DNA, 15 bp, Homo sapiens
ctcttccagctataa

SEQ ID NO: 1592590 - DNA, 15 bp, Homo sapiens
tcttccagctataaa

SEQ ID NO: 1592591 - DNA, 15 bp, Homo sapiens
cttccagctataaaa

SEQ ID NO: 1592592 - DNA, 15 bp, Homo sapiens
ttccagctataaaat

SEQ ID NO: 1592593 - DNA, 15 bp, Homo sapiens
tccagctataaaatt

SEQ ID NO: 1592594 - DNA, 15 bp, Homo sapiens
ccagctataaaattc

SEQ ID NO: 1592595 - DNA, 15 bp, Homo sapiens
cagctataaaattct

SEQ ID NO: 1592596 - DNA, 15 bp, Homo sapiens
agctataaaattctt

SEQ ID NO: 1592597 - DNA, 15 bp, Homo sapiens
gctataaaattctta

SEQ ID NO: 1592598 - DNA, 15 bp, Homo sapiens
ctataaaattcttaa

SEQ ID NO: 1592599 - DNA, 15 bp, Homo sapiens
tataaaattcttaaa

SEQ ID NO: 1592600 - DNA, 15 bp, Homo sapiens
ataaaattcttaaat

SEQ ID NO: 1592601 - DNA, 15 bp, Homo sapiens
taaaattcttaaatg

SEQ ID NO: 1592602 - DNA, 15 bp, Homo sapiens
aaaattcttaaatgt

SEQ ID NO: 1592603 - DNA, 15 bp, Homo sapiens
aaattcttaaatgta

SEQ ID NO: 1592604 - DNA, 15 bp, Homo sapiens
aattcttaaatgtag

SEQ ID NO: 1592605 - DNA, 15 bp, Homo sapiens
attcttaaatgtaga

SEQ ID NO: 1592606 - DNA, 15 bp, Homo sapiens
ttcttaaatgtagaa

SEQ ID NO: 1592607 - DNA, 15 bp, Homo sapiens
tcttaaatgtagaaa

SEQ ID NO: 1592608 - DNA, 15 bp, Homo sapiens
cttaaatgtagaaag

SEQ ID NO: 1592609 - DNA, 15 bp, Homo sapiens
ttaaatgtagaaagc

SEQ ID NO: 1592610 - DNA, 15 bp, Homo sapiens
taaatgtagaaagcg

SEQ ID NO: 1592611 - DNA, 15 bp, Homo sapiens
aaatgtagaaagcga

SEQ ID NO: 1592612 - DNA, 15 bp, Homo sapiens
aatgtagaaagcgaa

SEQ ID NO: 1592613 - DNA, 15 bp, Homo sapiens
atgtagaaagcgaag

SEQ ID NO: 1592614 - DNA, 15 bp, Homo sapiens
tgtagaaagcgaagt

SEQ ID NO: 1592615 - DNA, 15 bp, Homo sapiens
gtagaaagcgaagtg

SEQ ID NO: 1592616 - DNA, 15 bp, Homo sapiens
tagaaagcgaagtga

SEQ ID NO: 1592617 - DNA, 15 bp, Homo sapiens
agaaagcgaagtgag

SEQ ID NO: 1592618 - DNA, 15 bp, Homo sapiens
gaaagcgaagtgagg

SEQ ID NO: 1592619 - DNA, 15 bp, Homo sapiens
aaagcgaagtgaggg

SEQ ID NO: 1592620 - DNA, 15 bp, Homo sapiens
aagcgaagtgagggt

SEQ ID NO: 1592621 - DNA, 15 bp, Homo sapiens
agcgaagtgagggtt

SEQ ID NO: 1592622 - DNA, 15 bp, Homo sapiens
gcgaagtgagggttt

SEQ ID NO: 1592623 - DNA, 15 bp, Homo sapiens
cgaagtgagggttta

SEQ ID NO: 1592624 - DNA, 15 bp, Homo sapiens
gaagtgagggtttat

SEQ ID NO: 1592625 - DNA, 15 bp, Homo sapiens
aagtgagggtttatg

SEQ ID NO: 1592626 - DNA, 15 bp, Homo sapiens
agtgagggtttatgg

SEQ ID NO: 1592627 - DNA, 15 bp, Homo sapiens
gtgagggtttatggt

SEQ ID NO: 1592628 - DNA, 15 bp, Homo sapiens
tgagggtttatggtg

SEQ ID NO: 1592629 - DNA, 15 bp, Homo sapiens
gagggtttatggtga

SEQ ID NO: 1592630 - DNA, 15 bp, Homo sapiens
agggtttatggtgag

SEQ ID NO: 1592631 - DNA, 15 bp, Homo sapiens
gggtttatggtgaga

SEQ ID NO: 1592632 - DNA, 15 bp, Homo sapiens
ggtttatggtgagag

SEQ ID NO: 1592633 - DNA, 15 bp, Homo sapiens
gtttatggtgagagg

SEQ ID NO: 1592634 - DNA, 15 bp, Homo sapiens
tttatggtgagagga

SEQ ID NO: 1592635 - DNA, 15 bp, Homo sapiens
ttatggtgagaggaa

SEQ ID NO: 1592636 - DNA, 15 bp, Homo sapiens
tatggtgagaggaag

SEQ ID NO: 1592637 - DNA, 15 bp, Homo sapiens
atggtgagaggaagc

SEQ ID NO: 1592638 - DNA, 15 bp, Homo sapiens
tggtgagaggaagca

SEQ ID NO: 1592639 - DNA, 15 bp, Homo sapiens
ggtgagaggaagcat

SEQ ID NO: 1592640 - DNA, 15 bp, Homo sapiens
gtgagaggaagcatt

SEQ ID NO: 1592641 - DNA, 15 bp, Homo sapiens
tgagaggaagcattg

SEQ ID NO: 1592642 - DNA, 15 bp, Homo sapiens
gagaggaagcattgg

SEQ ID NO: 1592643 - DNA, 15 bp, Homo sapiens
agaggaagcattggt

SEQ ID NO: 1592644 - DNA, 15 bp, Homo sapiens
gaggaagcattggta

SEQ ID NO: 1592645 - DNA, 15 bp, Homo sapiens
aggaagcattggtat

SEQ ID NO: 1592646 - DNA, 15 bp, Homo sapiens
ggaagcattggtatc

SEQ ID NO: 1592647 - DNA, 15 bp, Homo sapiens
gaagcattggtatca

SEQ ID NO: 1592648 - DNA, 15 bp, Homo sapiens
aagcattggtatcat

SEQ ID NO: 1592649 - DNA, 15 bp, Homo sapiens
agcattggtatcatg

SEQ ID NO: 1592650 - DNA, 15 bp, Homo sapiens
gcattggtatcatgt

SEQ ID NO: 1592651 - DNA, 15 bp, Homo sapiens
cattggtatcatgtt

SEQ ID NO: 1592652 - DNA, 15 bp, Homo sapiens
attggtatcatgttt

SEQ ID NO: 1592653 - DNA, 15 bp, Homo sapiens
ttggtatcatgtttt

SEQ ID NO: 1592654 - DNA, 15 bp, Homo sapiens
tggtatcatgtttta

SEQ ID NO: 1592655 - DNA, 15 bp, Homo sapiens
ggtatcatgttttag

SEQ ID NO: 1592656 - DNA, 15 bp, Homo sapiens
gtatcatgttttagt

SEQ ID NO: 1592657 - DNA, 15 bp, Homo sapiens
tatcatgttttagtg

SEQ ID NO: 1592658 - DNA, 15 bp, Homo sapiens
atcatgttttagtgt

SEQ ID NO: 1592659 - DNA, 15 bp, Homo sapiens
tcatgttttagtgta

SEQ ID NO: 1592660 - DNA, 15 bp, Homo sapiens
catgttttagtgtag

SEQ ID NO: 1592661 - DNA, 15 bp, Homo sapiens
atgttttagtgtagt

SEQ ID NO: 1592662 - DNA, 15 bp, Homo sapiens
tgttttagtgtagtc

SEQ ID NO: 1592663 - DNA, 15 bp, Homo sapiens
gttttagtgtagtcc

SEQ ID NO: 1592664 - DNA, 15 bp, Homo sapiens
ttttagtgtagtcca

SEQ ID NO: 1592665 - DNA, 15 bp, Homo sapiens
tttagtgtagtccaa

SEQ ID NO: 1592666 - DNA, 15 bp, Homo sapiens
ttagtgtagtccaag

SEQ ID NO: 1592667 - DNA, 15 bp, Homo sapiens
tagtgtagtccaaga

SEQ ID NO: 1592668 - DNA, 15 bp, Homo sapiens
agtgtagtccaagaa

SEQ ID NO: 1592669 - DNA, 15 bp, Homo sapiens
gtgtagtccaagaat

SEQ ID NO: 1592670 - DNA, 15 bp, Homo sapiens
tgtagtccaagaata

SEQ ID NO: 1592671 - DNA, 15 bp, Homo sapiens
gtagtccaagaatat

SEQ ID NO: 1592672 - DNA, 15 bp, Homo sapiens
tagtccaagaatatg

SEQ ID NO: 1592673 - DNA, 15 bp, Homo sapiens
agtccaagaatatgg

SEQ ID NO: 1592674 - DNA, 15 bp, Homo sapiens
gtccaagaatatgga

SEQ ID NO: 1592675 - DNA, 15 bp, Homo sapiens
tccaagaatatggac

SEQ ID NO: 1592676 - DNA, 15 bp, Homo sapiens
ccaagaatatggaca

SEQ ID NO: 1592677 - DNA, 15 bp, Homo sapiens
caagaatatggacac

SEQ ID NO: 1592678 - DNA, 15 bp, Homo sapiens
aagaatatggacaca

SEQ ID NO: 1592679 - DNA, 15 bp, Homo sapiens
agaatatggacacat

SEQ ID NO: 1592680 - DNA, 15 bp, Homo sapiens
gaatatggacacatc

SEQ ID NO: 1592681 - DNA, 15 bp, Homo sapiens
aatatggacacatcc

SEQ ID NO: 1592682 - DNA, 15 bp, Homo sapiens
atatggacacatcca

SEQ ID NO: 1592683 - DNA, 15 bp, Homo sapiens
tatggacacatccag

SEQ ID NO: 1592684 - DNA, 15 bp, Homo sapiens
atggacacatccaga

SEQ ID NO: 1592685 - DNA, 15 bp, Homo sapiens
tggacacatccagaa

SEQ ID NO: 1592686 - DNA, 15 bp, Homo sapiens
ggacacatccagaaa

SEQ ID NO: 1592687 - DNA, 15 bp, Homo sapiens
gacacatccagaaaa

SEQ ID NO: 1592688 - DNA, 15 bp, Homo sapiens
acacatccagaaaat

SEQ ID NO: 1592689 - DNA, 15 bp, Homo sapiens
cacatccagaaaatg

SEQ ID NO: 1592690 - DNA, 15 bp, Homo sapiens
acatccagaaaatgc

SEQ ID NO: 1592691 - DNA, 15 bp, Homo sapiens
catccagaaaatgca

SEQ ID NO: 1592692 - DNA, 15 bp, Homo sapiens
atccagaaaatgcag

SEQ ID NO: 1592693 - DNA, 15 bp, Homo sapiens
tccagaaaatgcaga

SEQ ID NO: 1592694 - DNA, 15 bp, Homo sapiens
ccagaaaatgcagat

SEQ ID NO: 1592695 - DNA, 15 bp, Homo sapiens
cagaaaatgcagatc

SEQ ID NO: 1592696 - DNA, 15 bp, Homo sapiens
agaaaatgcagatca

SEQ ID NO: 1592697 - DNA, 15 bp, Homo sapiens
gaaaatgcagatcaa

SEQ ID NO: 1592698 - DNA, 15 bp, Homo sapiens
aaaatgcagatcaag

SEQ ID NO: 1592699 - DNA, 15 bp, Homo sapiens
aaatgcagatcaagt

SEQ ID NO: 1592700 - DNA, 15 bp, Homo sapiens
aatgcagatcaagtt

SEQ ID NO: 1592701 - DNA, 15 bp, Homo sapiens
atgcagatcaagttt

SEQ ID NO: 1592702 - DNA, 15 bp, Homo sapiens
tgcagatcaagttta

SEQ ID NO: 1592703 - DNA, 15 bp, Homo sapiens
gcagatcaagtttag

SEQ ID NO: 1592704 - DNA, 15 bp, Homo sapiens
cagatcaagtttagc

SEQ ID NO: 1592705 - DNA, 15 bp, Homo sapiens
agatcaagtttagcc

SEQ ID NO: 1592706 - DNA, 15 bp, Homo sapiens
gatcaagtttagcct

SEQ ID NO: 1592707 - DNA, 15 bp, Homo sapiens
atcaagtttagccta

SEQ ID NO: 1592708 - DNA, 15 bp, Homo sapiens
tcaagtttagcctaa

SEQ ID NO: 1592709 - DNA, 15 bp, Homo sapiens
caagtttagcctaat

SEQ ID NO: 1592710 - DNA, 15 bp, Homo sapiens
aagtttagcctaatg

SEQ ID NO: 1592711 - DNA, 15 bp, Homo sapiens
agtttagcctaatga

SEQ ID NO: 1592712 - DNA, 15 bp, Homo sapiens
gtttagcctaatgag

SEQ ID NO: 1592713 - DNA, 15 bp, Homo sapiens
tttagcctaatgaga

SEQ ID NO: 1592714 - DNA, 15 bp, Homo sapiens
ttagcctaatgagaa

SEQ ID NO: 1592715 - DNA, 15 bp, Homo sapiens
tagcctaatgagaaa

SEQ ID NO: 1592716 - DNA, 15 bp, Homo sapiens
agcctaatgagaaaa

SEQ ID NO: 1592717 - DNA, 15 bp, Homo sapiens
gcctaatgagaaaat

SEQ ID NO: 1592718 - DNA, 15 bp, Homo sapiens
cctaatgagaaaata

SEQ ID NO: 1592719 - DNA, 15 bp, Homo sapiens
ctaatgagaaaatat

SEQ ID NO: 1592720 - DNA, 15 bp, Homo sapiens
taatgagaaaatata

SEQ ID NO: 1592721 - DNA, 15 bp, Homo sapiens
aatgagaaaatatat

SEQ ID NO: 1592722 - DNA, 15 bp, Homo sapiens
atgagaaaatatatt

SEQ ID NO: 1592723 - DNA, 15 bp, Homo sapiens
tgagaaaatatattt

SEQ ID NO: 1592724 - DNA, 15 bp, Homo sapiens
gagaaaatatatttt

SEQ ID NO: 1592725 - DNA, 15 bp, Homo sapiens
agaaaatatattttg

SEQ ID NO: 1592726 - DNA, 15 bp, Homo sapiens
gaaaatatattttgg

SEQ ID NO: 1592727 - DNA, 15 bp, Homo sapiens
aaaatatattttgga

SEQ ID NO: 1592728 - DNA, 15 bp, Homo sapiens
atatattttggagtc

SEQ ID NO: 1592729 - DNA, 15 bp, Homo sapiens
tatattttggagtcc

SEQ ID NO: 1592730 - DNA, 15 bp, Homo sapiens
atattttggagtcca

SEQ ID NO: 1592731 - DNA, 15 bp, Homo sapiens
tattttggagtccat

SEQ ID NO: 1592732 - DNA, 15 bp, Homo sapiens
attttggagtccata

SEQ ID NO: 1592733 - DNA, 15 bp, Homo sapiens
ttttggagtccatat

SEQ ID NO: 1592734 - DNA, 15 bp, Homo sapiens
tttggagtccatatg

SEQ ID NO: 1592735 - DNA, 15 bp, Homo sapiens
ttggagtccatatgg

SEQ ID NO: 1592736 - DNA, 15 bp, Homo sapiens
tggagtccatatggt

SEQ ID NO: 1592737 - DNA, 15 bp, Homo sapiens
ggagtccatatggta

SEQ ID NO: 1592738 - DNA, 15 bp, Homo sapiens
gagtccatatggtaa

SEQ ID NO: 1592739 - DNA, 15 bp, Homo sapiens
agtccatatggtaaa

SEQ ID NO: 1592740 - DNA, 15 bp, Homo sapiens
gtccatatggtaaat

SEQ ID NO: 1592741 - DNA, 15 bp, Homo sapiens
tccatatggtaaatt

SEQ ID NO: 1592742 - DNA, 15 bp, Homo sapiens
ccatatggtaaatta

SEQ ID NO: 1592743 - DNA, 15 bp, Homo sapiens
catatggtaaattaa

SEQ ID NO: 1592744 - DNA, 15 bp, Homo sapiens
atatggtaaattaaa

SEQ ID NO: 1592745 - DNA, 15 bp, Homo sapiens
tatggtaaattaaat

SEQ ID NO: 1592746 - DNA, 15 bp, Homo sapiens
atggtaaattaaatt

SEQ ID NO: 1592747 - DNA, 15 bp, Homo sapiens
tggtaaattaaatta

SEQ ID NO: 1592748 - DNA, 15 bp, Homo sapiens
ggtaaattaaattat

SEQ ID NO: 1592749 - DNA, 15 bp, Homo sapiens
gtaaattaaattatg

SEQ ID NO: 1592750 - DNA, 15 bp, Homo sapiens
taaattaaattatgt

SEQ ID NO: 1592751 - DNA, 15 bp, Homo sapiens
aaattaaattatgtg

SEQ ID NO: 1592752 - DNA, 15 bp, Homo sapiens
aattaaattatgtga

SEQ ID NO: 1592753 - DNA, 15 bp, Homo sapiens
attaaattatgtgat

SEQ ID NO: 1592754 - DNA, 15 bp, Homo sapiens
ttaaattatgtgatt

SEQ ID NO: 1592755 - DNA, 15 bp, Homo sapiens
taaattatgtgattt

SEQ ID NO: 1592756 - DNA, 15 bp, Homo sapiens
aaattatgtgatttt

SEQ ID NO: 1592757 - DNA, 15 bp, Homo sapiens
aattatgtgattttt

SEQ ID NO: 1592758 - DNA, 15 bp, Homo sapiens
attatgtgatttttg

SEQ ID NO: 1592759 - DNA, 15 bp, Homo sapiens
ttatgtgatttttga

SEQ ID NO: 1592760 - DNA, 15 bp, Homo sapiens
tatgtgatttttgag

SEQ ID NO: 1592761 - DNA, 15 bp, Homo sapiens
atgtgatttttgagt

SEQ ID NO: 1592762 - DNA, 15 bp, Homo sapiens
tgtgatttttgagtt

SEQ ID NO: 1592763 - DNA, 15 bp, Homo sapiens
gtgatttttgagtta

SEQ ID NO: 1592764 - DNA, 15 bp, Homo sapiens
tgatttttgagttat

SEQ ID NO: 1592765 - DNA, 15 bp, Homo sapiens
gatttttgagttatt

SEQ ID NO: 1592766 - DNA, 15 bp, Homo sapiens
atttttgagttattg

SEQ ID NO: 1592767 - DNA, 15 bp, Homo sapiens
tttttgagttattgt

SEQ ID NO: 1592768 - DNA, 15 bp, Homo sapiens
ttttgagttattgta

SEQ ID NO: 1592769 - DNA, 15 bp, Homo sapiens
tttgagttattgtac

SEQ ID NO: 1592770 - DNA, 15 bp, Homo sapiens
ttgagttattgtaca

SEQ ID NO: 1592771 - DNA, 15 bp, Homo sapiens
tgagttattgtacaa

SEQ ID NO: 1592772 - DNA, 15 bp, Homo sapiens
gagttattgtacaaa

SEQ ID NO: 1592773 - DNA, 15 bp, Homo sapiens
agttattgtacaaat

SEQ ID NO: 1592774 - DNA, 15 bp, Homo sapiens
gttattgtacaaata

SEQ ID NO: 1592775 - DNA, 15 bp, Homo sapiens
ttattgtacaaatat

SEQ ID NO: 1592776 - DNA, 15 bp, Homo sapiens
tattgtacaaatata

SEQ ID NO: 1592777 - DNA, 15 bp, Homo sapiens
attgtacaaatataa

SEQ ID NO: 1592778 - DNA, 15 bp, Homo sapiens
ttgtacaaatataat

SEQ ID NO: 1592779 - DNA, 15 bp, Homo sapiens
tgtacaaatataatt

SEQ ID NO: 1592780 - DNA, 15 bp, Homo sapiens
gtacaaatataattc

SEQ ID NO: 1592781 - DNA, 15 bp, Homo sapiens
tacaaatataattct

SEQ ID NO: 1592782 - DNA, 15 bp, Homo sapiens
acaaatataattctt

SEQ ID NO: 1592783 - DNA, 15 bp, Homo sapiens
caaatataattctta

SEQ ID NO: 1592784 - DNA, 15 bp, Homo sapiens
aaatataattcttag

SEQ ID NO: 1592785 - DNA, 15 bp, Homo sapiens
aatataattcttaga

SEQ ID NO: 1592786 - DNA, 15 bp, Homo sapiens
atataattcttagaa

SEQ ID NO: 1592787 - DNA, 15 bp, Homo sapiens
tataattcttagaat

SEQ ID NO: 1592788 - DNA, 15 bp, Homo sapiens
ataattcttagaatg

SEQ ID NO: 1592789 - DNA, 15 bp, Homo sapiens
taattcttagaatgt

SEQ ID NO: 1592790 - DNA, 15 bp, Homo sapiens
aattcttagaatgtt

SEQ ID NO: 1592791 - DNA, 15 bp, Homo sapiens
attcttagaatgtta

SEQ ID NO: 1592792 - DNA, 15 bp, Homo sapiens
ttcttagaatgttag

SEQ ID NO: 1592793 - DNA, 15 bp, Homo sapiens
tcttagaatgttaga

SEQ ID NO: 1592794 - DNA, 15 bp, Homo sapiens
cttagaatgttagag

SEQ ID NO: 1592795 - DNA, 15 bp, Homo sapiens
ttagaatgttagagt

SEQ ID NO: 1592796 - DNA, 15 bp, Homo sapiens
tagaatgttagagtc

SEQ ID NO: 1592797 - DNA, 15 bp, Homo sapiens
agaatgttagagtca

SEQ ID NO: 1592798 - DNA, 15 bp, Homo sapiens
gaatgttagagtcag

SEQ ID NO: 1592799 - DNA, 15 bp, Homo sapiens
aatgttagagtcagg

SEQ ID NO: 1592800 - DNA, 15 bp, Homo sapiens
atgttagagtcagga

SEQ ID NO: 1592801 - DNA, 15 bp, Homo sapiens
tgttagagtcaggag

SEQ ID NO: 1592802 - DNA, 15 bp, Homo sapiens
gttagagtcaggaga

SEQ ID NO: 1592803 - DNA, 15 bp, Homo sapiens
ttagagtcaggagac

SEQ ID NO: 1592804 - DNA, 15 bp, Homo sapiens
tagagtcaggagact

SEQ ID NO: 1592805 - DNA, 15 bp, Homo sapiens
agagtcaggagacta

SEQ ID NO: 1592806 - DNA, 15 bp, Homo sapiens
gagtcaggagactat

SEQ ID NO: 1592807 - DNA, 15 bp, Homo sapiens
agtcaggagactata

SEQ ID NO: 1592808 - DNA, 15 bp, Homo sapiens
gtcaggagactataa

SEQ ID NO: 1592809 - DNA, 15 bp, Homo sapiens
tcaggagactataag

SEQ ID NO: 1592810 - DNA, 15 bp, Homo sapiens
caggagactataaga

SEQ ID NO: 1592811 - DNA, 15 bp, Homo sapiens
aggagactataagag

SEQ ID NO: 1592812 - DNA, 15 bp, Homo sapiens
ggagactataagaga

SEQ ID NO: 1592813 - DNA, 15 bp, Homo sapiens
gagactataagagac

SEQ ID NO: 1592814 - DNA, 15 bp, Homo sapiens
agactataagagacc

SEQ ID NO: 1592815 - DNA, 15 bp, Homo sapiens
gactataagagacca

SEQ ID NO: 1592816 - DNA, 15 bp, Homo sapiens
actataagagaccaa

SEQ ID NO: 1592817 - DNA, 15 bp, Homo sapiens
ctataagagaccaac

SEQ ID NO: 1592818 - DNA, 15 bp, Homo sapiens
tataagagaccaact

SEQ ID NO: 1592819 - DNA, 15 bp, Homo sapiens
ataagagaccaactg

SEQ ID NO: 1592820 - DNA, 15 bp, Homo sapiens
taagagaccaactgc

SEQ ID NO: 1592821 - DNA, 15 bp, Homo sapiens
aagagaccaactgct

SEQ ID NO: 1592822 - DNA, 15 bp, Homo sapiens
agagaccaactgctt

SEQ ID NO: 1592823 - DNA, 15 bp, Homo sapiens
gagaccaactgcttc

SEQ ID NO: 1592824 - DNA, 15 bp, Homo sapiens
agaccaactgcttca

SEQ ID NO: 1592825 - DNA, 15 bp, Homo sapiens
gaccaactgcttcaa

SEQ ID NO: 1592826 - DNA, 15 bp, Homo sapiens
accaactgcttcaag

SEQ ID NO: 1592827 - DNA, 15 bp, Homo sapiens
ccaactgcttcaagt

SEQ ID NO: 1592828 - DNA, 15 bp, Homo sapiens
caactgcttcaagtt

SEQ ID NO: 1592829 - DNA, 15 bp, Homo sapiens
aactgcttcaagttt

SEQ ID NO: 1592830 - DNA, 15 bp, Homo sapiens
actgcttcaagtttc

SEQ ID NO: 1592831 - DNA, 15 bp, Homo sapiens
ctgcttcaagtttca

SEQ ID NO: 1592832 - DNA, 15 bp, Homo sapiens
tgcttcaagtttcat

SEQ ID NO: 1592833 - DNA, 15 bp, Homo sapiens
gcttcaagtttcatt

SEQ ID NO: 1592834 - DNA, 15 bp, Homo sapiens
cttcaagtttcattt

SEQ ID NO: 1592835 - DNA, 15 bp, Homo sapiens
ttcaagtttcattta

SEQ ID NO: 1592836 - DNA, 15 bp, Homo sapiens
tcaagtttcatttaa

SEQ ID NO: 1592837 - DNA, 15 bp, Homo sapiens
caagtttcatttaac

SEQ ID NO: 1592838 - DNA, 15 bp, Homo sapiens
aagtttcatttaaca

SEQ ID NO: 1592839 - DNA, 15 bp, Homo sapiens
agtttcatttaacac

SEQ ID NO: 1592840 - DNA, 15 bp, Homo sapiens
gtttcatttaacaca

SEQ ID NO: 1592841 - DNA, 15 bp, Homo sapiens
tttcatttaacacat

SEQ ID NO: 1592842 - DNA, 15 bp, Homo sapiens
ttcatttaacacatg

SEQ ID NO: 1592843 - DNA, 15 bp, Homo sapiens
tcatttaacacatgg

SEQ ID NO: 1592844 - DNA, 15 bp, Homo sapiens
catttaacacatggg

SEQ ID NO: 1592845 - DNA, 15 bp, Homo sapiens
atttaacacatggga

SEQ ID NO: 1592846 - DNA, 15 bp, Homo sapiens
tttaacacatgggaa

SEQ ID NO: 1592847 - DNA, 15 bp, Homo sapiens
ttaacacatgggaaa

SEQ ID NO: 1592848 - DNA, 15 bp, Homo sapiens
taacacatgggaaac

SEQ ID NO: 1592849 - DNA, 15 bp, Homo sapiens
aacacatgggaaact

SEQ ID NO: 1592850 - DNA, 15 bp, Homo sapiens
acacatgggaaacta

SEQ ID NO: 1592851 - DNA, 15 bp, Homo sapiens
cacatgggaaactaa

SEQ ID NO: 1592852 - DNA, 15 bp, Homo sapiens
acatgggaaactaag

SEQ ID NO: 1592853 - DNA, 15 bp, Homo sapiens
catgggaaactaagg

SEQ ID NO: 1592854 - DNA, 15 bp, Homo sapiens
atgggaaactaaggc

SEQ ID NO: 1592855 - DNA, 15 bp, Homo sapiens
tgggaaactaaggcc

SEQ ID NO: 1592856 - DNA, 15 bp, Homo sapiens
gggaaactaaggcca

SEQ ID NO: 1592857 - DNA, 15 bp, Homo sapiens
ggaaactaaggccag

SEQ ID NO: 1592858 - DNA, 15 bp, Homo sapiens
gaaactaaggccaga

SEQ ID NO: 1592859 - DNA, 15 bp, Homo sapiens
aaactaaggccagag

SEQ ID NO: 1592860 - DNA, 15 bp, Homo sapiens
aactaaggccagaga

SEQ ID NO: 1592861 - DNA, 15 bp, Homo sapiens
actaaggccagagaa

SEQ ID NO: 1592862 - DNA, 15 bp, Homo sapiens
ctaaggccagagaaa

SEQ ID NO: 1592863 - DNA, 15 bp, Homo sapiens
taaggccagagaaat

SEQ ID NO: 1592864 - DNA, 15 bp, Homo sapiens
aaggccagagaaatt

SEQ ID NO: 1592865 - DNA, 15 bp, Homo sapiens
aggccagagaaattt

SEQ ID NO: 1592866 - DNA, 15 bp, Homo sapiens
ggccagagaaatttc

SEQ ID NO: 1592867 - DNA, 15 bp, Homo sapiens
gccagagaaatttca

SEQ ID NO: 1592868 - DNA, 15 bp, Homo sapiens
ccagagaaatttcaa

SEQ ID NO: 1592869 - DNA, 15 bp, Homo sapiens
cagagaaatttcaag

SEQ ID NO: 1592870 - DNA, 15 bp, Homo sapiens
agagaaatttcaaga

SEQ ID NO: 1592871 - DNA, 15 bp, Homo sapiens
gagaaatttcaagac

SEQ ID NO: 1592872 - DNA, 15 bp, Homo sapiens
agaaatttcaagact

SEQ ID NO: 1592873 - DNA, 15 bp, Homo sapiens
gaaatttcaagactt

SEQ ID NO: 1592874 - DNA, 15 bp, Homo sapiens
aaatttcaagacttg

SEQ ID NO: 1592875 - DNA, 15 bp, Homo sapiens
aatttcaagacttgc

SEQ ID NO: 1592876 - DNA, 15 bp, Homo sapiens
atttcaagacttgcc

SEQ ID NO: 1592877 - DNA, 15 bp, Homo sapiens
tttcaagacttgccc

SEQ ID NO: 1592878 - DNA, 15 bp, Homo sapiens
ttcaagacttgccca

SEQ ID NO: 1592879 - DNA, 15 bp, Homo sapiens
tcaagacttgcccaa

SEQ ID NO: 1592880 - DNA, 15 bp, Homo sapiens
caagacttgcccaag

SEQ ID NO: 1592881 - DNA, 15 bp, Homo sapiens
aagacttgcccaaga

SEQ ID NO: 1592882 - DNA, 15 bp, Homo sapiens
agacttgcccaagat

SEQ ID NO: 1592883 - DNA, 15 bp, Homo sapiens
gacttgcccaagatt

SEQ ID NO: 1592884 - DNA, 15 bp, Homo sapiens
cttgcccaagattag

SEQ ID NO: 1592885 - DNA, 15 bp, Homo sapiens
ttgcccaagattaga

SEQ ID NO: 1592886 - DNA, 15 bp, Homo sapiens
tgcccaagattagac

SEQ ID NO: 1592887 - DNA, 15 bp, Homo sapiens
gcccaagattagacc

SEQ ID NO: 1592888 - DNA, 15 bp, Homo sapiens
cccaagattagacct

SEQ ID NO: 1592889 - DNA, 15 bp, Homo sapiens
ccaagattagacctc

SEQ ID NO: 1592890 - DNA, 15 bp, Homo sapiens
caagattagacctct

SEQ ID NO: 1592891 - DNA, 15 bp, Homo sapiens
aagattagacctctt

SEQ ID NO: 1592892 - DNA, 15 bp, Homo sapiens
agattagacctcttg

SEQ ID NO: 1592893 - DNA, 15 bp, Homo sapiens
gattagacctcttgt

SEQ ID NO: 1592894 - DNA, 15 bp, Homo sapiens
attagacctcttgtt

SEQ ID NO: 1592895 - DNA, 15 bp, Homo sapiens
ttagacctcttgtta

SEQ ID NO: 1592896 - DNA, 15 bp, Homo sapiens
tagacctcttgttaa

SEQ ID NO: 1592897 - DNA, 15 bp, Homo sapiens
agacctcttgttaag

SEQ ID NO: 1592898 - DNA, 15 bp, Homo sapiens
gacctcttgttaagt

SEQ ID NO: 1592899 - DNA, 15 bp, Homo sapiens
acctcttgttaagta

SEQ ID NO: 1592900 - DNA, 15 bp, Homo sapiens
cctcttgttaagtaa

SEQ ID NO: 1592901 - DNA, 15 bp, Homo sapiens
ctcttgttaagtaat

SEQ ID NO: 1592902 - DNA, 15 bp, Homo sapiens
tcttgttaagtaatg

SEQ ID NO: 1592903 - DNA, 15 bp, Homo sapiens
cttgttaagtaatga

SEQ ID NO: 1592904 - DNA, 15 bp, Homo sapiens
ttgttaagtaatgaa

SEQ ID NO: 1592905 - DNA, 15 bp, Homo sapiens
tgttaagtaatgaaa

SEQ ID NO: 1592906 - DNA, 15 bp, Homo sapiens
gttaagtaatgaaag

SEQ ID NO: 1592907 - DNA, 15 bp, Homo sapiens
ttaagtaatgaaagt

SEQ ID NO: 1592908 - DNA, 15 bp, Homo sapiens
taagtaatgaaagtg

SEQ ID NO: 1592909 - DNA, 15 bp, Homo sapiens
aagtaatgaaagtgt

SEQ ID NO: 1592910 - DNA, 15 bp, Homo sapiens
agtaatgaaagtgtt

SEQ ID NO: 1592911 - DNA, 15 bp, Homo sapiens
gtaatgaaagtgttt

SEQ ID NO: 1592912 - DNA, 15 bp, Homo sapiens
taatgaaagtgtttt

SEQ ID NO: 1592913 - DNA, 15 bp, Homo sapiens
aatgaaagtgtttta

SEQ ID NO: 1592914 - DNA, 15 bp, Homo sapiens
atgaaagtgttttaa

SEQ ID NO: 1592915 - DNA, 15 bp, Homo sapiens
tgaaagtgttttaaa

SEQ ID NO: 1592916 - DNA, 15 bp, Homo sapiens
gaaagtgttttaaaa

SEQ ID NO: 1592917 - DNA, 15 bp, Homo sapiens
aaagtgttttaaaaa

SEQ ID NO: 1592918 - DNA, 15 bp, Homo sapiens
aagtgttttaaaaac

SEQ ID NO: 1592919 - DNA, 15 bp, Homo sapiens
agtgttttaaaaaca

SEQ ID NO: 1592920 - DNA, 15 bp, Homo sapiens
gtgttttaaaaacag

SEQ ID NO: 1592921 - DNA, 15 bp, Homo sapiens
tgttttaaaaacagg

SEQ ID NO: 1592922 - DNA, 15 bp, Homo sapiens
gttttaaaaacaggt

SEQ ID NO: 1592923 - DNA, 15 bp, Homo sapiens
ttttaaaaacaggtg

SEQ ID NO: 1592924 - DNA, 15 bp, Homo sapiens
tttaaaaacaggtgg

SEQ ID NO: 1592925 - DNA, 15 bp, Homo sapiens
ttaaaaacaggtggg

SEQ ID NO: 1592926 - DNA, 15 bp, Homo sapiens
taaaaacaggtgggt

SEQ ID NO: 1592927 - DNA, 15 bp, Homo sapiens
aaaaacaggtgggtc

SEQ ID NO: 1592928 - DNA, 15 bp, Homo sapiens
aaaacaggtgggtca

SEQ ID NO: 1592929 - DNA, 15 bp, Homo sapiens
aaacaggtgggtcaa

SEQ ID NO: 1592930 - DNA, 15 bp, Homo sapiens
aacaggtgggtcaaa

SEQ ID NO: 1592931 - DNA, 15 bp, Homo sapiens
acaggtgggtcaaat

SEQ ID NO: 1592932 - DNA, 15 bp, Homo sapiens
caggtgggtcaaatt

SEQ ID NO: 1592933 - DNA, 15 bp, Homo sapiens
aggtgggtcaaattc

SEQ ID NO: 1592934 - DNA, 15 bp, Homo sapiens
ggtgggtcaaattct

SEQ ID NO: 1592935 - DNA, 15 bp, Homo sapiens
gtgggtcaaattctg

SEQ ID NO: 1592936 - DNA, 15 bp, Homo sapiens
tgggtcaaattctgt

SEQ ID NO: 1592937 - DNA, 15 bp, Homo sapiens
gggtcaaattctgtt

SEQ ID NO: 1592938 - DNA, 15 bp, Homo sapiens
ggtcaaattctgttt

SEQ ID NO: 1592939 - DNA, 15 bp, Homo sapiens
gtcaaattctgtttt

SEQ ID NO: 1592940 - DNA, 15 bp, Homo sapiens
tcaaattctgttttt

SEQ ID NO: 1592941 - DNA, 15 bp, Homo sapiens
caaattctgttttta

SEQ ID NO: 1592942 - DNA, 15 bp, Homo sapiens
aaattctgtttttaa

SEQ ID NO: 1592943 - DNA, 15 bp, Homo sapiens
aattctgtttttaaa

SEQ ID NO: 1592944 - DNA, 15 bp, Homo sapiens
attctgtttttaaaa

SEQ ID NO: 1592945 - DNA, 15 bp, Homo sapiens
ttctgtttttaaaat

SEQ ID NO: 1592946 - DNA, 15 bp, Homo sapiens
tctgtttttaaaatt

SEQ ID NO: 1592947 - DNA, 15 bp, Homo sapiens
ctgtttttaaaattt

SEQ ID NO: 1592948 - DNA, 15 bp, Homo sapiens
tgtttttaaaatttc

SEQ ID NO: 1592949 - DNA, 15 bp, Homo sapiens
gtttttaaaatttcc

SEQ ID NO: 1592950 - DNA, 15 bp, Homo sapiens
tttttaaaatttcca

SEQ ID NO: 1592951 - DNA, 15 bp, Homo sapiens
ttttaaaatttccat

SEQ ID NO: 1592952 - DNA, 15 bp, Homo sapiens
tttaaaatttccatt

SEQ ID NO: 1592953 - DNA, 15 bp, Homo sapiens
ttaaaatttccatta

SEQ ID NO: 1592954 - DNA, 15 bp, Homo sapiens
taaaatttccattat

SEQ ID NO: 1592955 - DNA, 15 bp, Homo sapiens
aaaatttccattatg

SEQ ID NO: 1592956 - DNA, 15 bp, Homo sapiens
aaatttccattatga

SEQ ID NO: 1592957 - DNA, 15 bp, Homo sapiens
aatttccattatgat

SEQ ID NO: 1592958 - DNA, 15 bp, Homo sapiens
atttccattatgatg

SEQ ID NO: 1592959 - DNA, 15 bp, Homo sapiens
tttccattatgatga

SEQ ID NO: 1592960 - DNA, 15 bp, Homo sapiens
ttccattatgatgaa

SEQ ID NO: 1592961 - DNA, 15 bp, Homo sapiens
tccattatgatgaaa

SEQ ID NO: 1592962 - DNA, 15 bp, Homo sapiens
ccattatgatgaaaa

SEQ ID NO: 1592963 - DNA, 15 bp, Homo sapiens
cattatgatgaaaat

SEQ ID NO: 1592964 - DNA, 15 bp, Homo sapiens
attatgatgaaaatt

SEQ ID NO: 1592965 - DNA, 15 bp, Homo sapiens
ttatgatgaaaattt

SEQ ID NO: 1592966 - DNA, 15 bp, Homo sapiens
tatgatgaaaatttc

SEQ ID NO: 1592967 - DNA, 15 bp, Homo sapiens
atgatgaaaatttca

SEQ ID NO: 1592968 - DNA, 15 bp, Homo sapiens
tgatgaaaatttcag

SEQ ID NO: 1592969 - DNA, 15 bp, Homo sapiens
gatgaaaatttcagt

SEQ ID NO: 1592970 - DNA, 15 bp, Homo sapiens
atgaaaatttcagta

SEQ ID NO: 1592971 - DNA, 15 bp, Homo sapiens
tgaaaatttcagtat

SEQ ID NO: 1592972 - DNA, 15 bp, Homo sapiens
gaaaatttcagtatt

SEQ ID NO: 1592973 - DNA, 15 bp, Homo sapiens
aaaatttcagtatta

SEQ ID NO: 1592974 - DNA, 15 bp, Homo sapiens
aaatttcagtattac

SEQ ID NO: 1592975 - DNA, 15 bp, Homo sapiens
aatttcagtattaca

SEQ ID NO: 1592976 - DNA, 15 bp, Homo sapiens
atttcagtattacag

SEQ ID NO: 1592977 - DNA, 15 bp, Homo sapiens
tttcagtattacagg

SEQ ID NO: 1592978 - DNA, 15 bp, Homo sapiens
ttcagtattacaggc

SEQ ID NO: 1592979 - DNA, 15 bp, Homo sapiens
tcagtattacaggct

SEQ ID NO: 1592980 - DNA, 15 bp, Homo sapiens
cagtattacaggctt

SEQ ID NO: 1592981 - DNA, 15 bp, Homo sapiens
agtattacaggcttc

SEQ ID NO: 1592982 - DNA, 15 bp, Homo sapiens
gtattacaggcttcc

SEQ ID NO: 1592983 - DNA, 15 bp, Homo sapiens
tattacaggcttcca

SEQ ID NO: 1592984 - DNA, 15 bp, Homo sapiens
attacaggcttccaa

SEQ ID NO: 1592985 - DNA, 15 bp, Homo sapiens
ttacaggcttccaaa

SEQ ID NO: 1592986 - DNA, 15 bp, Homo sapiens
tacaggcttccaaat

SEQ ID NO: 1592987 - DNA, 15 bp, Homo sapiens
acaggcttccaaatc

SEQ ID NO: 1592988 - DNA, 15 bp, Homo sapiens
caggcttccaaatcc

SEQ ID NO: 1592989 - DNA, 15 bp, Homo sapiens
aggcttccaaatccc

SEQ ID NO: 1592990 - DNA, 15 bp, Homo sapiens
ggcttccaaatccca

SEQ ID NO: 1592991 - DNA, 15 bp, Homo sapiens
gcttccaaatcccag

SEQ ID NO: 1592992 - DNA, 15 bp, Homo sapiens
cttccaaatcccagc

SEQ ID NO: 1592993 - DNA, 15 bp, Homo sapiens
ttccaaatcccagca

SEQ ID NO: 1592994 - DNA, 15 bp, Homo sapiens
tccaaatcccagcag

SEQ ID NO: 1592995 - DNA, 15 bp, Homo sapiens
ccaaatcccagcaga

SEQ ID NO: 1592996 - DNA, 15 bp, Homo sapiens
caaatcccagcagat

SEQ ID NO: 1592997 - DNA, 15 bp, Homo sapiens
aaatcccagcagatg

SEQ ID NO: 1592998 - DNA, 15 bp, Homo sapiens
aatcccagcagatgg

SEQ ID NO: 1592999 - DNA, 15 bp, Homo sapiens
atcccagcagatggg

SEQ ID NO: 1593000 - DNA, 15 bp, Homo sapiens
tcccagcagatgggc

SEQ ID NO: 1593001 - DNA, 15 bp, Homo sapiens
cccagcagatgggcc

SEQ ID NO: 1593002 - DNA, 15 bp, Homo sapiens
ccagcagatgggcca

SEQ ID NO: 1593003 - DNA, 15 bp, Homo sapiens
cagcagatgggccac

SEQ ID NO: 1593004 - DNA, 15 bp, Homo sapiens
agcagatgggccact

SEQ ID NO: 1593005 - DNA, 15 bp, Homo sapiens
gcagatgggccactt

SEQ ID NO: 1593006 - DNA, 15 bp, Homo sapiens
cagatgggccacttg

SEQ ID NO: 1593007 - DNA, 15 bp, Homo sapiens
agatgggccacttgt

SEQ ID NO: 1593008 - DNA, 15 bp, Homo sapiens
gatgggccacttgtt

SEQ ID NO: 1593009 - DNA, 15 bp, Homo sapiens
atgggccacttgttt

SEQ ID NO: 1593010 - DNA, 15 bp, Homo sapiens
tgggccacttgttta

SEQ ID NO: 1593011 - DNA, 15 bp, Homo sapiens
gggccacttgtttaa

SEQ ID NO: 1593012 - DNA, 15 bp, Homo sapiens
ggccacttgtttaaa

SEQ ID NO: 1593013 - DNA, 15 bp, Homo sapiens
gccacttgtttaaag

SEQ ID NO: 1593014 - DNA, 15 bp, Homo sapiens
ccacttgtttaaagg

SEQ ID NO: 1593015 - DNA, 15 bp, Homo sapiens
cacttgtttaaagga

SEQ ID NO: 1593016 - DNA, 15 bp, Homo sapiens
acttgtttaaaggag

SEQ ID NO: 1593017 - DNA, 15 bp, Homo sapiens
cttgtttaaaggaga

SEQ ID NO: 1593018 - DNA, 15 bp, Homo sapiens
ttgtttaaaggagag

SEQ ID NO: 1593019 - DNA, 15 bp, Homo sapiens
tgtttaaaggagagt

SEQ ID NO: 1593020 - DNA, 15 bp, Homo sapiens
gtttaaaggagagtt

SEQ ID NO: 1593021 - DNA, 15 bp, Homo sapiens
tttaaaggagagttt

SEQ ID NO: 1593022 - DNA, 15 bp, Homo sapiens
ttaaaggagagtttg

SEQ ID NO: 1593023 - DNA, 15 bp, Homo sapiens
taaaggagagtttga

SEQ ID NO: 1593024 - DNA, 15 bp, Homo sapiens
aaaggagagtttgat

SEQ ID NO: 1593025 - DNA, 15 bp, Homo sapiens
aaggagagtttgata

SEQ ID NO: 1593026 - DNA, 15 bp, Homo sapiens
aggagagtttgatat

SEQ ID NO: 1593027 - DNA, 15 bp, Homo sapiens
ggagagtttgatata

SEQ ID NO: 1593028 - DNA, 15 bp, Homo sapiens
gagagtttgatataa

SEQ ID NO: 1593029 - DNA, 15 bp, Homo sapiens
agagtttgatataat

SEQ ID NO: 1593030 - DNA, 15 bp, Homo sapiens
gagtttgatataata

SEQ ID NO: 1593031 - DNA, 15 bp, Homo sapiens
agtttgatataataa

SEQ ID NO: 1593032 - DNA, 15 bp, Homo sapiens
gtttgatataataaa

SEQ ID NO: 1593033 - DNA, 15 bp, Homo sapiens
tttgatataataaag

SEQ ID NO: 1593034 - DNA, 15 bp, Homo sapiens
ttgatataataaagc

SEQ ID NO: 1593035 - DNA, 15 bp, Homo sapiens
tgatataataaagca

SEQ ID NO: 1593036 - DNA, 15 bp, Homo sapiens
gatataataaagcat

SEQ ID NO: 1593037 - DNA, 15 bp, Homo sapiens
atataataaagcatc

SEQ ID NO: 1593038 - DNA, 15 bp, Homo sapiens
tataataaagcatct

SEQ ID NO: 1593039 - DNA, 15 bp, Homo sapiens
ataataaagcatcta

SEQ ID NO: 1593040 - DNA, 15 bp, Homo sapiens
taataaagcatctaa

SEQ ID NO: 1593041 - DNA, 15 bp, Homo sapiens
aataaagcatctaaa

SEQ ID NO: 1593042 - DNA, 15 bp, Homo sapiens
ataaagcatctaaaa

SEQ ID NO: 1593043 - DNA, 15 bp, Homo sapiens
taaagcatctaaaaa

SEQ ID NO: 1593044 - DNA, 15 bp, Homo sapiens
aaagcatctaaaaac

SEQ ID NO: 1593045 - DNA, 15 bp, Homo sapiens
aagcatctaaaaaca

SEQ ID NO: 1593046 - DNA, 15 bp, Homo sapiens
agcatctaaaaacaa

SEQ ID NO: 1593047 - DNA, 15 bp, Homo sapiens
gcatctaaaaacaag

SEQ ID NO: 1593048 - DNA, 15 bp, Homo sapiens
catctaaaaacaaga

SEQ ID NO: 1593049 - DNA, 15 bp, Homo sapiens
atctaaaaacaagag

SEQ ID NO: 1593050 - DNA, 15 bp, Homo sapiens
tctaaaaacaagagt

SEQ ID NO: 1593051 - DNA, 15 bp, Homo sapiens
ctaaaaacaagagtt

SEQ ID NO: 1593052 - DNA, 15 bp, Homo sapiens
taaaaacaagagttt

SEQ ID NO: 1593053 - DNA, 15 bp, Homo sapiens
aaaaacaagagtttg

SEQ ID NO: 1593054 - DNA, 15 bp, Homo sapiens
aaaacaagagtttgg

SEQ ID NO: 1593055 - DNA, 15 bp, Homo sapiens
aaacaagagtttgga

SEQ ID NO: 1593056 - DNA, 15 bp, Homo sapiens
aacaagagtttggat

SEQ ID NO: 1593057 - DNA, 15 bp, Homo sapiens
acaagagtttggata

SEQ ID NO: 1593058 - DNA, 15 bp, Homo sapiens
caagagtttggataa

SEQ ID NO: 1593059 - DNA, 15 bp, Homo sapiens
aagagtttggataat

SEQ ID NO: 1593060 - DNA, 15 bp, Homo sapiens
agagtttggataatt

SEQ ID NO: 1593061 - DNA, 15 bp, Homo sapiens
gagtttggataattc

SEQ ID NO: 1593062 - DNA, 15 bp, Homo sapiens
agtttggataattcc

SEQ ID NO: 1593063 - DNA, 15 bp, Homo sapiens
gtttggataattcct

SEQ ID NO: 1593064 - DNA, 15 bp, Homo sapiens
tttggataattcctt

SEQ ID NO: 1593065 - DNA, 15 bp, Homo sapiens
ttggataattcctta

SEQ ID NO: 1593066 - DNA, 15 bp, Homo sapiens
tggataattccttag

SEQ ID NO: 1593067 - DNA, 15 bp, Homo sapiens
ggataattccttagg

SEQ ID NO: 1593068 - DNA, 15 bp, Homo sapiens
gataattccttaggg

SEQ ID NO: 1593069 - DNA, 15 bp, Homo sapiens
ataattccttagggt

SEQ ID NO: 1593070 - DNA, 15 bp, Homo sapiens
taattccttagggtt

SEQ ID NO: 1593071 - DNA, 15 bp, Homo sapiens
aattccttagggttg

SEQ ID NO: 1593072 - DNA, 15 bp, Homo sapiens
attccttagggttgt

SEQ ID NO: 1593073 - DNA, 15 bp, Homo sapiens
ttccttagggttgtt

SEQ ID NO: 1593074 - DNA, 15 bp, Homo sapiens
tccttagggttgtta

SEQ ID NO: 1593075 - DNA, 15 bp, Homo sapiens
ccttagggttgttat

SEQ ID NO: 1593076 - DNA, 15 bp, Homo sapiens
cttagggttgttatg

SEQ ID NO: 1593077 - DNA, 15 bp, Homo sapiens
ttagggttgttatga

SEQ ID NO: 1593078 - DNA, 15 bp, Homo sapiens
tagggttgttatgat

SEQ ID NO: 1593079 - DNA, 15 bp, Homo sapiens
agggttgttatgatg

SEQ ID NO: 1593080 - DNA, 15 bp, Homo sapiens
gggttgttatgatgt

SEQ ID NO: 1593081 - DNA, 15 bp, Homo sapiens
ggttgttatgatgtg

SEQ ID NO: 1593082 - DNA, 15 bp, Homo sapiens
gttgttatgatgtga

SEQ ID NO: 1593083 - DNA, 15 bp, Homo sapiens
ttgttatgatgtgat

SEQ ID NO: 1593084 - DNA, 15 bp, Homo sapiens
tgttatgatgtgatt

SEQ ID NO: 1593085 - DNA, 15 bp, Homo sapiens
gttatgatgtgattt

SEQ ID NO: 1593086 - DNA, 15 bp, Homo sapiens
ttatgatgtgatttg

SEQ ID NO: 1593087 - DNA, 15 bp, Homo sapiens
tatgatgtgatttga

SEQ ID NO: 1593088 - DNA, 15 bp, Homo sapiens
atgatgtgatttgac

SEQ ID NO: 1593089 - DNA, 15 bp, Homo sapiens
tgatgtgatttgact

SEQ ID NO: 1593090 - DNA, 15 bp, Homo sapiens
gatgtgatttgactt

SEQ ID NO: 1593091 - DNA, 15 bp, Homo sapiens
atgtgatttgactta

SEQ ID NO: 1593092 - DNA, 15 bp, Homo sapiens
tgtgatttgacttat

SEQ ID NO: 1593093 - DNA, 15 bp, Homo sapiens
gtgatttgacttata

SEQ ID NO: 1593094 - DNA, 15 bp, Homo sapiens
tgatttgacttataa

SEQ ID NO: 1593095 - DNA, 15 bp, Homo sapiens
gatttgacttataat

SEQ ID NO: 1593096 - DNA, 15 bp, Homo sapiens
atttgacttataatt

SEQ ID NO: 1593097 - DNA, 15 bp, Homo sapiens
tttgacttataattg

SEQ ID NO: 1593098 - DNA, 15 bp, Homo sapiens
ttgacttataattgg

SEQ ID NO: 1593099 - DNA, 15 bp, Homo sapiens
tgacttataattgga

SEQ ID NO: 1593100 - DNA, 15 bp, Homo sapiens
gacttataattggaa

SEQ ID NO: 1593101 - DNA, 15 bp, Homo sapiens
acttataattggaaa

SEQ ID NO: 1593102 - DNA, 15 bp, Homo sapiens
cttataattggaaat

SEQ ID NO: 1593103 - DNA, 15 bp, Homo sapiens
ttataattggaaata

SEQ ID NO: 1593104 - DNA, 15 bp, Homo sapiens
tataattggaaatac

SEQ ID NO: 1593105 - DNA, 15 bp, Homo sapiens
ataattggaaatacc

SEQ ID NO: 1593106 - DNA, 15 bp, Homo sapiens
taattggaaataccg

SEQ ID NO: 1593107 - DNA, 15 bp, Homo sapiens
aattggaaataccgt

SEQ ID NO: 1593108 - DNA, 15 bp, Homo sapiens
attggaaataccgtt

SEQ ID NO: 1593109 - DNA, 15 bp, Homo sapiens
ttggaaataccgttt

SEQ ID NO: 1593110 - DNA, 15 bp, Homo sapiens
tggaaataccgtttt

SEQ ID NO: 1593111 - DNA, 15 bp, Homo sapiens
ggaaataccgtttta

SEQ ID NO: 1593112 - DNA, 15 bp, Homo sapiens
gaaataccgttttat

SEQ ID NO: 1593113 - DNA, 15 bp, Homo sapiens
aaataccgttttatt

SEQ ID NO: 1593114 - DNA, 15 bp, Homo sapiens
aataccgttttattc

SEQ ID NO: 1593115 - DNA, 15 bp, Homo sapiens
ataccgttttattca

SEQ ID NO: 1593116 - DNA, 15 bp, Homo sapiens
taccgttttattcat

SEQ ID NO: 1593117 - DNA, 15 bp, Homo sapiens
accgttttattcatt

SEQ ID NO: 1593118 - DNA, 15 bp, Homo sapiens
ccgttttattcattg

SEQ ID NO: 1593119 - DNA, 15 bp, Homo sapiens
cgttttattcattgt

SEQ ID NO: 1593120 - DNA, 15 bp, Homo sapiens
gttttattcattgta

SEQ ID NO: 1593121 - DNA, 15 bp, Homo sapiens
ttttattcattgtac

SEQ ID NO: 1593122 - DNA, 15 bp, Homo sapiens
tttattcattgtact

SEQ ID NO: 1593123 - DNA, 15 bp, Homo sapiens
ttattcattgtactg

SEQ ID NO: 1593124 - DNA, 15 bp, Homo sapiens
tattcattgtactga

SEQ ID NO: 1593125 - DNA, 15 bp, Homo sapiens
attcattgtactgat

SEQ ID NO: 1593126 - DNA, 15 bp, Homo sapiens
ttcattgtactgatt

SEQ ID NO: 1593127 - DNA, 15 bp, Homo sapiens
tcattgtactgattt

SEQ ID NO: 1593128 - DNA, 15 bp, Homo sapiens
cattgtactgatttt

SEQ ID NO: 1593129 - DNA, 15 bp, Homo sapiens
attgtactgattttc

SEQ ID NO: 1593130 - DNA, 15 bp, Homo sapiens
ttgtactgattttca

SEQ ID NO: 1593131 - DNA, 15 bp, Homo sapiens
tgtactgattttcat

SEQ ID NO: 1593132 - DNA, 15 bp, Homo sapiens
gtactgattttcatt

SEQ ID NO: 1593133 - DNA, 15 bp, Homo sapiens
tactgattttcattt

SEQ ID NO: 1593134 - DNA, 15 bp, Homo sapiens
actgattttcatttc

SEQ ID NO: 1593135 - DNA, 15 bp, Homo sapiens
ctgattttcatttct

SEQ ID NO: 1593136 - DNA, 15 bp, Homo sapiens
tgattttcatttctc

SEQ ID NO: 1593137 - DNA, 15 bp, Homo sapiens
gattttcatttctct

SEQ ID NO: 1593138 - DNA, 15 bp, Homo sapiens
attttcatttctctt

SEQ ID NO: 1593139 - DNA, 15 bp, Homo sapiens
ttttcatttctcttt

SEQ ID NO: 1593140 - DNA, 15 bp, Homo sapiens
tttcatttctctttt

SEQ ID NO: 1593141 - DNA, 15 bp, Homo sapiens
ttcatttctcttttt

SEQ ID NO: 1593142 - DNA, 15 bp, Homo sapiens
tcatttctctttttc

SEQ ID NO: 1593143 - DNA, 15 bp, Homo sapiens
catttctctttttct

SEQ ID NO: 1593144 - DNA, 15 bp, Homo sapiens
atttctctttttctt

SEQ ID NO: 1593145 - DNA, 15 bp, Homo sapiens
tttctctttttcttc

SEQ ID NO: 1593146 - DNA, 15 bp, Homo sapiens
ttctctttttcttct

SEQ ID NO: 1593147 - DNA, 15 bp, Homo sapiens
tctctttttcttcta

SEQ ID NO: 1593148 - DNA, 15 bp, Homo sapiens
ctctttttcttctag

SEQ ID NO: 1593149 - DNA, 15 bp, Homo sapiens
tctttttcttctaga

SEQ ID NO: 1593150 - DNA, 15 bp, Homo sapiens
ctttttcttctagaa

SEQ ID NO: 1593151 - DNA, 15 bp, Homo sapiens
tttttcttctagaat

SEQ ID NO: 1593152 - DNA, 15 bp, Homo sapiens
ttttcttctagaatg

SEQ ID NO: 1593153 - DNA, 15 bp, Homo sapiens
tttcttctagaatgt

SEQ ID NO: 1593154 - DNA, 15 bp, Homo sapiens
ttcttctagaatgtc

SEQ ID NO: 1593155 - DNA, 15 bp, Homo sapiens
tcttctagaatgtct

SEQ ID NO: 1593156 - DNA, 15 bp, Homo sapiens
cttctagaatgtctt

SEQ ID NO: 1593157 - DNA, 15 bp, Homo sapiens
ttctagaatgtcttg

SEQ ID NO: 1593158 - DNA, 15 bp, Homo sapiens
tctagaatgtcttga

SEQ ID NO: 1593159 - DNA, 15 bp, Homo sapiens
ctagaatgtcttgat

SEQ ID NO: 1593160 - DNA, 15 bp, Homo sapiens
tagaatgtcttgatt

SEQ ID NO: 1593161 - DNA, 15 bp, Homo sapiens
agaatgtcttgattg

SEQ ID NO: 1593162 - DNA, 15 bp, Homo sapiens
gaatgtcttgattgt

SEQ ID NO: 1593163 - DNA, 15 bp, Homo sapiens
aatgtcttgattgtg

SEQ ID NO: 1593164 - DNA, 15 bp, Homo sapiens
atgtcttgattgtgg

SEQ ID NO: 1593165 - DNA, 15 bp, Homo sapiens
tgtcttgattgtgga

SEQ ID NO: 1593166 - DNA, 15 bp, Homo sapiens
gtcttgattgtggaa

SEQ ID NO: 1593167 - DNA, 15 bp, Homo sapiens
tcttgattgtggaag

SEQ ID NO: 1593168 - DNA, 15 bp, Homo sapiens
cttgattgtggaagt

SEQ ID NO: 1593169 - DNA, 15 bp, Homo sapiens
ttgattgtggaagta

SEQ ID NO: 1593170 - DNA, 15 bp, Homo sapiens
tgattgtggaagtaa

SEQ ID NO: 1593171 - DNA, 15 bp, Homo sapiens
gattgtggaagtaag

SEQ ID NO: 1593172 - DNA, 15 bp, Homo sapiens
attgtggaagtaagt

SEQ ID NO: 1593173 - DNA, 15 bp, Homo sapiens
ttgtggaagtaagtt

SEQ ID NO: 1593174 - DNA, 15 bp, Homo sapiens
tgtggaagtaagttc

SEQ ID NO: 1593175 - DNA, 15 bp, Homo sapiens
gtggaagtaagttca

SEQ ID NO: 1593176 - DNA, 15 bp, Homo sapiens
tggaagtaagttcac

SEQ ID NO: 1593177 - DNA, 15 bp, Homo sapiens
ggaagtaagttcaca

SEQ ID NO: 1593178 - DNA, 15 bp, Homo sapiens
gaagtaagttcacat

SEQ ID NO: 1593179 - DNA, 15 bp, Homo sapiens
aagtaagttcacatt

SEQ ID NO: 1593180 - DNA, 15 bp, Homo sapiens
agtaagttcacattt

SEQ ID NO: 1593181 - DNA, 15 bp, Homo sapiens
gtaagttcacattta

SEQ ID NO: 1593182 - DNA, 15 bp, Homo sapiens
taagttcacatttac

SEQ ID NO: 1593183 - DNA, 15 bp, Homo sapiens
aagttcacatttact

SEQ ID NO: 1593184 - DNA, 15 bp, Homo sapiens
agttcacatttactt

SEQ ID NO: 1593185 - DNA, 15 bp, Homo sapiens
gttcacatttacttt

SEQ ID NO: 1593186 - DNA, 15 bp, Homo sapiens
ttcacatttactttt

SEQ ID NO: 1593187 - DNA, 15 bp, Homo sapiens
tcacatttactttta

SEQ ID NO: 1593188 - DNA, 15 bp, Homo sapiens
cacatttacttttaa

SEQ ID NO: 1593189 - DNA, 15 bp, Homo sapiens
acatttacttttaat

SEQ ID NO: 1593190 - DNA, 15 bp, Homo sapiens
catttacttttaata

SEQ ID NO: 1593191 - DNA, 15 bp, Homo sapiens
atttacttttaatat

SEQ ID NO: 1593192 - DNA, 15 bp, Homo sapiens
tttacttttaatata

SEQ ID NO: 1593193 - DNA, 15 bp, Homo sapiens
ttacttttaatataa

SEQ ID NO: 1593194 - DNA, 15 bp, Homo sapiens
tacttttaatataac

SEQ ID NO: 1593195 - DNA, 15 bp, Homo sapiens
acttttaatataaca

SEQ ID NO: 1593196 - DNA, 15 bp, Homo sapiens
cttttaatataacat

SEQ ID NO: 1593197 - DNA, 15 bp, Homo sapiens
ttttaatataacatt

SEQ ID NO: 1593198 - DNA, 15 bp, Homo sapiens
tttaatataacattt

SEQ ID NO: 1593199 - DNA, 15 bp, Homo sapiens
ttaatataacattta

SEQ ID NO: 1593200 - DNA, 15 bp, Homo sapiens
taatataacatttat

SEQ ID NO: 1593201 - DNA, 15 bp, Homo sapiens
aatataacatttatg

SEQ ID NO: 1593202 - DNA, 15 bp, Homo sapiens
atataacatttatga

SEQ ID NO: 1593203 - DNA, 15 bp, Homo sapiens
tataacatttatgac

SEQ ID NO: 1593204 - DNA, 15 bp, Homo sapiens
ataacatttatgact

SEQ ID NO: 1593205 - DNA, 15 bp, Homo sapiens
taacatttatgactt

SEQ ID NO: 1593206 - DNA, 15 bp, Homo sapiens
aacatttatgacttt

SEQ ID NO: 1593207 - DNA, 15 bp, Homo sapiens
acatttatgactttt

SEQ ID NO: 1593208 - DNA, 15 bp, Homo sapiens
catttatgacttttc

SEQ ID NO: 1593209 - DNA, 15 bp, Homo sapiens
atttatgacttttct

SEQ ID NO: 1593210 - DNA, 15 bp, Homo sapiens
tttatgacttttcta

SEQ ID NO: 1593211 - DNA, 15 bp, Homo sapiens
ttatgacttttctaa

SEQ ID NO: 1593212 - DNA, 15 bp, Homo sapiens
tatgacttttctaac

SEQ ID NO: 1593213 - DNA, 15 bp, Homo sapiens
atgacttttctaact

SEQ ID NO: 1593214 - DNA, 15 bp, Homo sapiens
tgacttttctaactt

SEQ ID NO: 1593215 - DNA, 15 bp, Homo sapiens
gacttttctaactta

SEQ ID NO: 1593216 - DNA, 15 bp, Homo sapiens
acttttctaacttag

SEQ ID NO: 1593217 - DNA, 15 bp, Homo sapiens
cttttctaacttagt

SEQ ID NO: 1593218 - DNA, 15 bp, Homo sapiens
ttttctaacttagta

SEQ ID NO: 1593219 - DNA, 15 bp, Homo sapiens
tttctaacttagtat

SEQ ID NO: 1593220 - DNA, 15 bp, Homo sapiens
ttctaacttagtatg

SEQ ID NO: 1593221 - DNA, 15 bp, Homo sapiens
tctaacttagtatgc

SEQ ID NO: 1593222 - DNA, 15 bp, Homo sapiens
ctaacttagtatgca

SEQ ID NO: 1593223 - DNA, 15 bp, Homo sapiens
taacttagtatgcac

SEQ ID NO: 1593224 - DNA, 15 bp, Homo sapiens
aacttagtatgcacc

SEQ ID NO: 1593225 - DNA, 15 bp, Homo sapiens
acttagtatgcacca

SEQ ID NO: 1593226 - DNA, 15 bp, Homo sapiens
cttagtatgcaccat

SEQ ID NO: 1593227 - DNA, 15 bp, Homo sapiens
ttagtatgcaccatc

SEQ ID NO: 1593228 - DNA, 15 bp, Homo sapiens
tagtatgcaccatcc

SEQ ID NO: 1593229 - DNA, 15 bp, Homo sapiens
agtatgcaccatcct

SEQ ID NO: 1593230 - DNA, 15 bp, Homo sapiens
gtatgcaccatccta

SEQ ID NO: 1593231 - DNA, 15 bp, Homo sapiens
tatgcaccatcctaa

SEQ ID NO: 1593232 - DNA, 15 bp, Homo sapiens
atgcaccatcctaaa

SEQ ID NO: 1593233 - DNA, 15 bp, Homo sapiens
tgcaccatcctaaag

SEQ ID NO: 1593234 - DNA, 15 bp, Homo sapiens
gcaccatcctaaagg

SEQ ID NO: 1593235 - DNA, 15 bp, Homo sapiens
caccatcctaaaggt

SEQ ID NO: 1593236 - DNA, 15 bp, Homo sapiens
accatcctaaaggta

SEQ ID NO: 1593237 - DNA, 15 bp, Homo sapiens
ccatcctaaaggtaa

SEQ ID NO: 1593238 - DNA, 15 bp, Homo sapiens
catcctaaaggtaag

SEQ ID NO: 1593239 - DNA, 15 bp, Homo sapiens
atcctaaaggtaagc

SEQ ID NO: 1593240 - DNA, 15 bp, Homo sapiens
tcctaaaggtaagcc

SEQ ID NO: 1593241 - DNA, 15 bp, Homo sapiens
cctaaaggtaagcca

SEQ ID NO: 1593242 - DNA, 15 bp, Homo sapiens
ctaaaggtaagccag

SEQ ID NO: 1593243 - DNA, 15 bp, Homo sapiens
taaaggtaagccagg

SEQ ID NO: 1593244 - DNA, 15 bp, Homo sapiens
aaaggtaagccaggg

SEQ ID NO: 1593245 - DNA, 15 bp, Homo sapiens
aaggtaagccaggga

SEQ ID NO: 1593246 - DNA, 15 bp, Homo sapiens
aggtaagccagggag

SEQ ID NO: 1593247 - DNA, 15 bp, Homo sapiens
ggtaagccagggaga

SEQ ID NO: 1593248 - DNA, 15 bp, Homo sapiens
gtaagccagggagag

SEQ ID NO: 1593249 - DNA, 15 bp, Homo sapiens
taagccagggagaga

SEQ ID NO: 1593250 - DNA, 15 bp, Homo sapiens
aagccagggagagaa

SEQ ID NO: 1593251 - DNA, 15 bp, Homo sapiens
agccagggagagaaa

SEQ ID NO: 1593252 - DNA, 15 bp, Homo sapiens
gccagggagagaaat

SEQ ID NO: 1593253 - DNA, 15 bp, Homo sapiens
ccagggagagaaatt

SEQ ID NO: 1593254 - DNA, 15 bp, Homo sapiens
cagggagagaaattc

SEQ ID NO: 1593255 - DNA, 15 bp, Homo sapiens
agggagagaaattcc

SEQ ID NO: 1593256 - DNA, 15 bp, Homo sapiens
gggagagaaattcct

SEQ ID NO: 1593257 - DNA, 15 bp, Homo sapiens
ggagagaaattcctc

SEQ ID NO: 1593258 - DNA, 15 bp, Homo sapiens
gagagaaattcctct

SEQ ID NO: 1593259 - DNA, 15 bp, Homo sapiens
agagaaattcctctg

SEQ ID NO: 1593260 - DNA, 15 bp, Homo sapiens
gagaaattcctctgc

SEQ ID NO: 1593261 - DNA, 15 bp, Homo sapiens
agaaattcctctgca

SEQ ID NO: 1593262 - DNA, 15 bp, Homo sapiens
gaaattcctctgcat

SEQ ID NO: 1593263 - DNA, 15 bp, Homo sapiens
aaattcctctgcatc

SEQ ID NO: 1593264 - DNA, 15 bp, Homo sapiens
aattcctctgcatca

SEQ ID NO: 1593265 - DNA, 15 bp, Homo sapiens
attcctctgcatcag

SEQ ID NO: 1593266 - DNA, 15 bp, Homo sapiens
ttcctctgcatcagt

SEQ ID NO: 1593267 - DNA, 15 bp, Homo sapiens
tcctctgcatcagtt

SEQ ID NO: 1593268 - DNA, 15 bp, Homo sapiens
cctctgcatcagttt

SEQ ID NO: 1593269 - DNA, 15 bp, Homo sapiens
ctctgcatcagtttt

SEQ ID NO: 1593270 - DNA, 15 bp, Homo sapiens
tctgcatcagtttta

SEQ ID NO: 1593271 - DNA, 15 bp, Homo sapiens
ctgcatcagttttaa

SEQ ID NO: 1593272 - DNA, 15 bp, Homo sapiens
tgcatcagttttaat

SEQ ID NO: 1593273 - DNA, 15 bp, Homo sapiens
gcatcagttttaatg

SEQ ID NO: 1593274 - DNA, 15 bp, Homo sapiens
catcagttttaatgg

SEQ ID NO: 1593275 - DNA, 15 bp, Homo sapiens
atcagttttaatggt

SEQ ID NO: 1593276 - DNA, 15 bp, Homo sapiens
tcagttttaatggtg

SEQ ID NO: 1593277 - DNA, 15 bp, Homo sapiens
cagttttaatggtgg

SEQ ID NO: 1593278 - DNA, 15 bp, Homo sapiens
agttttaatggtggg

SEQ ID NO: 1593279 - DNA, 15 bp, Homo sapiens
gttttaatggtgggc

SEQ ID NO: 1593280 - DNA, 15 bp, Homo sapiens
ttttaatggtgggct

SEQ ID NO: 1593281 - DNA, 15 bp, Homo sapiens
tttaatggtgggctt

SEQ ID NO: 1593282 - DNA, 15 bp, Homo sapiens
ttaatggtgggcttg

SEQ ID NO: 1593283 - DNA, 15 bp, Homo sapiens
taatggtgggcttgt

SEQ ID NO: 1593284 - DNA, 15 bp, Homo sapiens
aatggtgggcttgtg

SEQ ID NO: 1593285 - DNA, 15 bp, Homo sapiens
atggtgggcttgtgt

SEQ ID NO: 1593286 - DNA, 15 bp, Homo sapiens
tggtgggcttgtgtt

SEQ ID NO: 1593287 - DNA, 15 bp, Homo sapiens
ggtgggcttgtgttc

SEQ ID NO: 1593288 - DNA, 15 bp, Homo sapiens
gtgggcttgtgttct

SEQ ID NO: 1593289 - DNA, 15 bp, Homo sapiens
tgggcttgtgttcta

SEQ ID NO: 1593290 - DNA, 15 bp, Homo sapiens
gggcttgtgttctaa

SEQ ID NO: 1593291 - DNA, 15 bp, Homo sapiens
ggcttgtgttctaaa

SEQ ID NO: 1593292 - DNA, 15 bp, Homo sapiens
gcttgtgttctaaag

SEQ ID NO: 1593293 - DNA, 15 bp, Homo sapiens
cttgtgttctaaagg

SEQ ID NO: 1593294 - DNA, 15 bp, Homo sapiens
ttgtgttctaaagga

SEQ ID NO: 1593295 - DNA, 15 bp, Homo sapiens
tgtgttctaaaggag

SEQ ID NO: 1593296 - DNA, 15 bp, Homo sapiens
gtgttctaaaggagt

SEQ ID NO: 1593297 - DNA, 15 bp, Homo sapiens
tgttctaaaggagtg

SEQ ID NO: 1593298 - DNA, 15 bp, Homo sapiens
gttctaaaggagtga

SEQ ID NO: 1593299 - DNA, 15 bp, Homo sapiens
ttctaaaggagtgag

SEQ ID NO: 1593300 - DNA, 15 bp, Homo sapiens
tctaaaggagtgaga

SEQ ID NO: 1593301 - DNA, 15 bp, Homo sapiens
ctaaaggagtgagat

SEQ ID NO: 1593302 - DNA, 15 bp, Homo sapiens
taaaggagtgagatt

SEQ ID NO: 1593303 - DNA, 15 bp, Homo sapiens
aaaggagtgagattg

SEQ ID NO: 1593304 - DNA, 15 bp, Homo sapiens
aaggagtgagattgg

SEQ ID NO: 1593305 - DNA, 15 bp, Homo sapiens
aggagtgagattggt

SEQ ID NO: 1593306 - DNA, 15 bp, Homo sapiens
ggagtgagattggtt

SEQ ID NO: 1593307 - DNA, 15 bp, Homo sapiens
gagtgagattggttt

SEQ ID NO: 1593308 - DNA, 15 bp, Homo sapiens
agtgagattggtttt

SEQ ID NO: 1593309 - DNA, 15 bp, Homo sapiens
gtgagattggttttt

SEQ ID NO: 1593310 - DNA, 15 bp, Homo sapiens
tgagattggtttttt

SEQ ID NO: 1593311 - DNA, 15 bp, Homo sapiens
gagattggttttttg

SEQ ID NO: 1593312 - DNA, 15 bp, Homo sapiens
agattggttttttgt

SEQ ID NO: 1593313 - DNA, 15 bp, Homo sapiens
gattggttttttgta

SEQ ID NO: 1593314 - DNA, 15 bp, Homo sapiens
attggttttttgtaa

SEQ ID NO: 1593315 - DNA, 15 bp, Homo sapiens
ttggttttttgtaaa

SEQ ID NO: 1593316 - DNA, 15 bp, Homo sapiens
tggttttttgtaaag

SEQ ID NO: 1593317 - DNA, 15 bp, Homo sapiens
ggttttttgtaaaga

SEQ ID NO: 1593318 - DNA, 15 bp, Homo sapiens
gttttttgtaaagac

SEQ ID NO: 1593319 - DNA, 15 bp, Homo sapiens
ttttttgtaaagact

SEQ ID NO: 1593320 - DNA, 15 bp, Homo sapiens
tttttgtaaagacta

SEQ ID NO: 1593321 - DNA, 15 bp, Homo sapiens
ttttgtaaagactac

SEQ ID NO: 1593322 - DNA, 15 bp, Homo sapiens
tttgtaaagactact

SEQ ID NO: 1593323 - DNA, 15 bp, Homo sapiens
ttgtaaagactactt

SEQ ID NO: 1593324 - DNA, 15 bp, Homo sapiens
tgtaaagactactta

SEQ ID NO: 1593325 - DNA, 15 bp, Homo sapiens
gtaaagactacttag

SEQ ID NO: 1593326 - DNA, 15 bp, Homo sapiens
taaagactacttagt

SEQ ID NO: 1593327 - DNA, 15 bp, Homo sapiens
aaagactacttagta

SEQ ID NO: 1593328 - DNA, 15 bp, Homo sapiens
aagactacttagtaa

SEQ ID NO: 1593329 - DNA, 15 bp, Homo sapiens
agactacttagtaat

SEQ ID NO: 1593330 - DNA, 15 bp, Homo sapiens
gactacttagtaatt

SEQ ID NO: 1593331 - DNA, 15 bp, Homo sapiens
actacttagtaattt

SEQ ID NO: 1593332 - DNA, 15 bp, Homo sapiens
ctacttagtaatttg

SEQ ID NO: 1593333 - DNA, 15 bp, Homo sapiens
tacttagtaatttgt

SEQ ID NO: 1593334 - DNA, 15 bp, Homo sapiens
acttagtaatttgtt

SEQ ID NO: 1593335 - DNA, 15 bp, Homo sapiens
cttagtaatttgttt

SEQ ID NO: 1593336 - DNA, 15 bp, Homo sapiens
ttagtaatttgtttt

SEQ ID NO: 1593337 - DNA, 15 bp, Homo sapiens
tagtaatttgttttt

SEQ ID NO: 1593338 - DNA, 15 bp, Homo sapiens
agtaatttgttttta

SEQ ID NO: 1593339 - DNA, 15 bp, Homo sapiens
gtaatttgtttttac

SEQ ID NO: 1593340 - DNA, 15 bp, Homo sapiens
taatttgtttttacc

SEQ ID NO: 1593341 - DNA, 15 bp, Homo sapiens
aatttgtttttacca

SEQ ID NO: 1593342 - DNA, 15 bp, Homo sapiens
atttgtttttaccaa

SEQ ID NO: 1593343 - DNA, 15 bp, Homo sapiens
tttgtttttaccaat

SEQ ID NO: 1593344 - DNA, 15 bp, Homo sapiens
ttgtttttaccaata

SEQ ID NO: 1593345 - DNA, 15 bp, Homo sapiens
tgtttttaccaataa

SEQ ID NO: 1593346 - DNA, 15 bp, Homo sapiens
gtttttaccaataat

SEQ ID NO: 1593347 - DNA, 15 bp, Homo sapiens
tttttaccaataatg

SEQ ID NO: 1593348 - DNA, 15 bp, Homo sapiens
ttttaccaataatgg

SEQ ID NO: 1593349 - DNA, 15 bp, Homo sapiens
tttaccaataatgga

SEQ ID NO: 1593350 - DNA, 15 bp, Homo sapiens
ttaccaataatggaa

SEQ ID NO: 1593351 - DNA, 15 bp, Homo sapiens
taccaataatggaat

SEQ ID NO: 1593352 - DNA, 15 bp, Homo sapiens
accaataatggaatg

SEQ ID NO: 1593353 - DNA, 15 bp, Homo sapiens
ccaataatggaatgg

SEQ ID NO: 1593354 - DNA, 15 bp, Homo sapiens
caataatggaatggt

SEQ ID NO: 1593355 - DNA, 15 bp, Homo sapiens
aataatggaatggta

SEQ ID NO: 1593356 - DNA, 15 bp, Homo sapiens
ataatggaatggtat

SEQ ID NO: 1593357 - DNA, 15 bp, Homo sapiens
taatggaatggtata

SEQ ID NO: 1593358 - DNA, 15 bp, Homo sapiens
aatggaatggtatac

SEQ ID NO: 1593359 - DNA, 15 bp, Homo sapiens
atggaatggtatact

SEQ ID NO: 1593360 - DNA, 15 bp, Homo sapiens
tggaatggtatactt

SEQ ID NO: 1593361 - DNA, 15 bp, Homo sapiens
ggaatggtatacttc

SEQ ID NO: 1593362 - DNA, 15 bp, Homo sapiens
gaatggtatacttcc

SEQ ID NO: 1593363 - DNA, 15 bp, Homo sapiens
aatggtatacttcct

SEQ ID NO: 1593364 - DNA, 15 bp, Homo sapiens
atggtatacttccta

SEQ ID NO: 1593365 - DNA, 15 bp, Homo sapiens
tggtatacttcctac

SEQ ID NO: 1593366 - DNA, 15 bp, Homo sapiens
ggtatacttcctacc

SEQ ID NO: 1593367 - DNA, 15 bp, Homo sapiens
gtatacttcctacct

SEQ ID NO: 1593368 - DNA, 15 bp, Homo sapiens
tatacttcctacctc

SEQ ID NO: 1593369 - DNA, 15 bp, Homo sapiens
atacttcctacctct

SEQ ID NO: 1593370 - DNA, 15 bp, Homo sapiens
tacttcctacctctc

SEQ ID NO: 1593371 - DNA, 15 bp, Homo sapiens
acttcctacctctct

SEQ ID NO: 1593372 - DNA, 15 bp, Homo sapiens
cttcctacctctctt

SEQ ID NO: 1593373 - DNA, 15 bp, Homo sapiens
ttcctacctctcttt

SEQ ID NO: 1593374 - DNA, 15 bp, Homo sapiens
tcctacctctctttt

SEQ ID NO: 1593375 - DNA, 15 bp, Homo sapiens
cctacctctcttttt

SEQ ID NO: 1593376 - DNA, 15 bp, Homo sapiens
ctacctctctttttt

SEQ ID NO: 1593377 - DNA, 15 bp, Homo sapiens
tacctctcttttttt

SEQ ID NO: 1593378 - DNA, 15 bp, Homo sapiens
acctctcttttttta

SEQ ID NO: 1593379 - DNA, 15 bp, Homo sapiens
cctctctttttttag

SEQ ID NO: 1593380 - DNA, 15 bp, Homo sapiens
ctctctttttttagt

SEQ ID NO: 1593381 - DNA, 15 bp, Homo sapiens
tctctttttttagtt

SEQ ID NO: 1593382 - DNA, 15 bp, Homo sapiens
ctctttttttagttt

SEQ ID NO: 1593383 - DNA, 15 bp, Homo sapiens
tctttttttagtttg

SEQ ID NO: 1593384 - DNA, 15 bp, Homo sapiens
ctttttttagtttga

SEQ ID NO: 1593385 - DNA, 15 bp, Homo sapiens
tttttttagtttgaa

SEQ ID NO: 1593386 - DNA, 15 bp, Homo sapiens
ttttttagtttgaag

SEQ ID NO: 1593387 - DNA, 15 bp, Homo sapiens
tttttagtttgaagt

SEQ ID NO: 1593388 - DNA, 15 bp, Homo sapiens
ttttagtttgaagta

SEQ ID NO: 1593389 - DNA, 15 bp, Homo sapiens
tttagtttgaagtat

SEQ ID NO: 1593390 - DNA, 15 bp, Homo sapiens
ttagtttgaagtatt

SEQ ID NO: 1593391 - DNA, 15 bp, Homo sapiens
tagtttgaagtattt

SEQ ID NO: 1593392 - DNA, 15 bp, Homo sapiens
agtttgaagtatttt

SEQ ID NO: 1593393 - DNA, 15 bp, Homo sapiens
gtttgaagtattttc

SEQ ID NO: 1593394 - DNA, 15 bp, Homo sapiens
tttgaagtattttct

SEQ ID NO: 1593395 - DNA, 15 bp, Homo sapiens
ttgaagtattttctt

SEQ ID NO: 1593396 - DNA, 15 bp, Homo sapiens
tgaagtattttcttt

SEQ ID NO: 1593397 - DNA, 15 bp, Homo sapiens
gaagtattttctttc

SEQ ID NO: 1593398 - DNA, 15 bp, Homo sapiens
aagtattttctttct

SEQ ID NO: 1593399 - DNA, 15 bp, Homo sapiens
agtattttctttcta

SEQ ID NO: 1593400 - DNA, 15 bp, Homo sapiens
gtattttctttctaa

SEQ ID NO: 1593401 - DNA, 15 bp, Homo sapiens
tattttctttctaaa

SEQ ID NO: 1593402 - DNA, 15 bp, Homo sapiens
attttctttctaaac

SEQ ID NO: 1593403 - DNA, 15 bp, Homo sapiens
ttttctttctaaaca

SEQ ID NO: 1593404 - DNA, 15 bp, Homo sapiens
tttctttctaaacat

SEQ ID NO: 1593405 - DNA, 15 bp, Homo sapiens
ttctttctaaacata

SEQ ID NO: 1593406 - DNA, 15 bp, Homo sapiens
tctttctaaacataa

SEQ ID NO: 1593407 - DNA, 15 bp, Homo sapiens
ctttctaaacataac

SEQ ID NO: 1593408 - DNA, 15 bp, Homo sapiens
tttctaaacataact

SEQ ID NO: 1593409 - DNA, 15 bp, Homo sapiens
ttctaaacataactc

SEQ ID NO: 1593410 - DNA, 15 bp, Homo sapiens
tctaaacataactct

SEQ ID NO: 1593411 - DNA, 15 bp, Homo sapiens
ctaaacataactctc

SEQ ID NO: 1593412 - DNA, 15 bp, Homo sapiens
taaacataactctct

SEQ ID NO: 1593413 - DNA, 15 bp, Homo sapiens
aaacataactctctc

SEQ ID NO: 1593414 - DNA, 15 bp, Homo sapiens
aacataactctctct

SEQ ID NO: 1593415 - DNA, 15 bp, Homo sapiens
acataactctctctc

SEQ ID NO: 1593416 - DNA, 15 bp, Homo sapiens
cataactctctctct

SEQ ID NO: 1593417 - DNA, 15 bp, Homo sapiens
ataactctctctctc

SEQ ID NO: 1593418 - DNA, 15 bp, Homo sapiens
taactctctctctct

SEQ ID NO: 1593419 - DNA, 15 bp, Homo sapiens
aactctctctctcta

SEQ ID NO: 1593420 - DNA, 15 bp, Homo sapiens
actctctctctctat

SEQ ID NO: 1593421 - DNA, 15 bp, Homo sapiens
ctctctctctattta

SEQ ID NO: 1593422 - DNA, 15 bp, Homo sapiens
tctctctctatttat

SEQ ID NO: 1593423 - DNA, 15 bp, Homo sapiens
ctctctctatttatc

SEQ ID NO: 1593424 - DNA, 15 bp, Homo sapiens
tctctctatttatct

SEQ ID NO: 1593425 - DNA, 15 bp, Homo sapiens
ctctctatttatcta

SEQ ID NO: 1593426 - DNA, 15 bp, Homo sapiens
tctctatttatctat

SEQ ID NO: 1593427 - DNA, 15 bp, Homo sapiens
ctctatttatctata

SEQ ID NO: 1593428 - DNA, 15 bp, Homo sapiens
tctatttatctatat

SEQ ID NO: 1593429 - DNA, 15 bp, Homo sapiens
ctatttatctatata

SEQ ID NO: 1593430 - DNA, 15 bp, Homo sapiens
tatttatctatatat

SEQ ID NO: 1593431 - DNA, 15 bp, Homo sapiens
atttatctatatata

SEQ ID NO: 1593432 - DNA, 15 bp, Homo sapiens
tttatctatatataa

SEQ ID NO: 1593433 - DNA, 15 bp, Homo sapiens
ttatctatatataat

SEQ ID NO: 1593434 - DNA, 15 bp, Homo sapiens
tatctatatataata

SEQ ID NO: 1593435 - DNA, 15 bp, Homo sapiens
atctatatataatat

SEQ ID NO: 1593436 - DNA, 15 bp, Homo sapiens
tctatatataatata

SEQ ID NO: 1593437 - DNA, 15 bp, Homo sapiens
ctatatataatatat

SEQ ID NO: 1593438 - DNA, 15 bp, Homo sapiens
atatataatatatac

SEQ ID NO: 1593439 - DNA, 15 bp, Homo sapiens
tatataatatataca

SEQ ID NO: 1593440 - DNA, 15 bp, Homo sapiens
atataatatatacat

SEQ ID NO: 1593441 - DNA, 15 bp, Homo sapiens
tataatatatacata

SEQ ID NO: 1593442 - DNA, 15 bp, Homo sapiens
ataatatatacatat

SEQ ID NO: 1593443 - DNA, 15 bp, Homo sapiens
taatatatacatata

SEQ ID NO: 1593444 - DNA, 15 bp, Homo sapiens
atatacatatatatc

SEQ ID NO: 1593445 - DNA, 15 bp, Homo sapiens
tatacatatatatct

SEQ ID NO: 1593446 - DNA, 15 bp, Homo sapiens
atacatatatatctt

SEQ ID NO: 1593447 - DNA, 15 bp, Homo sapiens
tacatatatatctta

SEQ ID NO: 1593448 - DNA, 15 bp, Homo sapiens
acatatatatcttat

SEQ ID NO: 1593449 - DNA, 15 bp, Homo sapiens
catatatatcttata

SEQ ID NO: 1593450 - DNA, 15 bp, Homo sapiens
atatatatcttatat

SEQ ID NO: 1593451 - DNA, 15 bp, Homo sapiens
tatatatcttatatt

SEQ ID NO: 1593452 - DNA, 15 bp, Homo sapiens
atatatcttatattt

SEQ ID NO: 1593453 - DNA, 15 bp, Homo sapiens
tatatcttatatttt

SEQ ID NO: 1593454 - DNA, 15 bp, Homo sapiens
atatcttatatttta

SEQ ID NO: 1593455 - DNA, 15 bp, Homo sapiens
tatcttatattttat

SEQ ID NO: 1593456 - DNA, 15 bp, Homo sapiens
atcttatattttatg

SEQ ID NO: 1593457 - DNA, 15 bp, Homo sapiens
tcttatattttatgt

SEQ ID NO: 1593458 - DNA, 15 bp, Homo sapiens
cttatattttatgta

SEQ ID NO: 1593459 - DNA, 15 bp, Homo sapiens
ttatattttatgtat

SEQ ID NO: 1593460 - DNA, 15 bp, Homo sapiens
tattttatgtatata

SEQ ID NO: 1593461 - DNA, 15 bp, Homo sapiens
attttatgtatatat

SEQ ID NO: 1593462 - DNA, 15 bp, Homo sapiens
ttttatgtatatata

SEQ ID NO: 1593463 - DNA, 15 bp, Homo sapiens
atatatatatatctt

SEQ ID NO: 1593464 - DNA, 15 bp, Homo sapiens
tatatatatatcttg

SEQ ID NO: 1593465 - DNA, 15 bp, Homo sapiens
atatatatatcttgc

SEQ ID NO: 1593466 - DNA, 15 bp, Homo sapiens
tatatatatcttgct

SEQ ID NO: 1593467 - DNA, 15 bp, Homo sapiens
atatatatcttgctt

SEQ ID NO: 1593468 - DNA, 15 bp, Homo sapiens
tatatatcttgctta

SEQ ID NO: 1593469 - DNA, 15 bp, Homo sapiens
atatatcttgcttag

SEQ ID NO: 1593470 - DNA, 15 bp, Homo sapiens
tatatcttgcttaga

SEQ ID NO: 1593471 - DNA, 15 bp, Homo sapiens
atatcttgcttagat

SEQ ID NO: 1593472 - DNA, 15 bp, Homo sapiens
tatcttgcttagatt

SEQ ID NO: 1593473 - DNA, 15 bp, Homo sapiens
atcttgcttagattt

SEQ ID NO: 1593474 - DNA, 15 bp, Homo sapiens
tcttgcttagatttt

SEQ ID NO: 1593475 - DNA, 15 bp, Homo sapiens
cttgcttagattttg

SEQ ID NO: 1593476 - DNA, 15 bp, Homo sapiens
ttgcttagattttgt

SEQ ID NO: 1593477 - DNA, 15 bp, Homo sapiens
tgcttagattttgtc

SEQ ID NO: 1593478 - DNA, 15 bp, Homo sapiens
gcttagattttgtct

SEQ ID NO: 1593479 - DNA, 15 bp, Homo sapiens
cttagattttgtctt

SEQ ID NO: 1593480 - DNA, 15 bp, Homo sapiens
ttagattttgtctta

SEQ ID NO: 1593481 - DNA, 15 bp, Homo sapiens
tagattttgtcttat

SEQ ID NO: 1593482 - DNA, 15 bp, Homo sapiens
agattttgtcttatg

SEQ ID NO: 1593483 - DNA, 15 bp, Homo sapiens
gattttgtcttatgt

SEQ ID NO: 1593484 - DNA, 15 bp, Homo sapiens
attttgtcttatgta

SEQ ID NO: 1593485 - DNA, 15 bp, Homo sapiens
ttttgtcttatgtaa

SEQ ID NO: 1593486 - DNA, 15 bp, Homo sapiens
tttgtcttatgtaat

SEQ ID NO: 1593487 - DNA, 15 bp, Homo sapiens
ttgtcttatgtaata

SEQ ID NO: 1593488 - DNA, 15 bp, Homo sapiens
tgtcttatgtaatat

SEQ ID NO: 1593489 - DNA, 15 bp, Homo sapiens
gtcttatgtaatatt

SEQ ID NO: 1593490 - DNA, 15 bp, Homo sapiens
tcttatgtaatattt

SEQ ID NO: 1593491 - DNA, 15 bp, Homo sapiens
cttatgtaatatttg

SEQ ID NO: 1593492 - DNA, 15 bp, Homo sapiens
ttatgtaatatttgg

SEQ ID NO: 1593493 - DNA, 15 bp, Homo sapiens
tatgtaatatttggt

SEQ ID NO: 1593494 - DNA, 15 bp, Homo sapiens
atgtaatatttggta

SEQ ID NO: 1593495 - DNA, 15 bp, Homo sapiens
tgtaatatttggtac

SEQ ID NO: 1593496 - DNA, 15 bp, Homo sapiens
taatatttggtacat

SEQ ID NO: 1593497 - DNA, 15 bp, Homo sapiens
aatatttggtacata

SEQ ID NO: 1593498 - DNA, 15 bp, Homo sapiens
atatttggtacataa

SEQ ID NO: 1593499 - DNA, 15 bp, Homo sapiens
tatttggtacataaa

SEQ ID NO: 1593500 - DNA, 15 bp, Homo sapiens
atttggtacataaaa

SEQ ID NO: 1593501 - DNA, 15 bp, Homo sapiens
tttggtacataaaaa

SEQ ID NO: 1593502 - DNA, 15 bp, Homo sapiens
ttggtacataaaaaa

SEQ ID NO: 1593503 - DNA, 15 bp, Homo sapiens
tggtacataaaaaat

SEQ ID NO: 1593504 - DNA, 15 bp, Homo sapiens
ggtacataaaaaata

SEQ ID NO: 1593505 - DNA, 15 bp, Homo sapiens
gtacataaaaaataa

SEQ ID NO: 1593506 - DNA, 15 bp, Homo sapiens
tacataaaaaataat

SEQ ID NO: 1593507 - DNA, 15 bp, Homo sapiens
acataaaaaataata

SEQ ID NO: 1593508 - DNA, 15 bp, Homo sapiens
cataaaaaataatat

SEQ ID NO: 1593509 - DNA, 15 bp, Homo sapiens
ataaaaaataatatt

SEQ ID NO: 1593510 - DNA, 15 bp, Homo sapiens
taaaaaataatattt

SEQ ID NO: 1593511 - DNA, 15 bp, Homo sapiens
aaaaaataatattta

SEQ ID NO: 1593512 - DNA, 15 bp, Homo sapiens
aaaaataatatttat

SEQ ID NO: 1593513 - DNA, 15 bp, Homo sapiens
aaaataatatttata

SEQ ID NO: 1593514 - DNA, 15 bp, Homo sapiens
aaataatatttataa

SEQ ID NO: 1593515 - DNA, 15 bp, Homo sapiens
aataatatttataat

SEQ ID NO: 1593516 - DNA, 15 bp, Homo sapiens
ataatatttataatt

SEQ ID NO: 1593517 - DNA, 15 bp, Homo sapiens
taatatttataattt

SEQ ID NO: 1593518 - DNA, 15 bp, Homo sapiens
aatatttataattta

SEQ ID NO: 1593519 - DNA, 15 bp, Homo sapiens
atatttataatttat

SEQ ID NO: 1593520 - DNA, 15 bp, Homo sapiens
tatttataatttata

SEQ ID NO: 1593521 - DNA, 15 bp, Homo sapiens
atttataatttatag

SEQ ID NO: 1593522 - DNA, 15 bp, Homo sapiens
ttataatttatagac

SEQ ID NO: 1593523 - DNA, 15 bp, Homo sapiens
tataatttatagact

SEQ ID NO: 1593524 - DNA, 15 bp, Homo sapiens
ataatttatagacta

SEQ ID NO: 1593525 - DNA, 15 bp, Homo sapiens
taatttatagactat

SEQ ID NO: 1593526 - DNA, 15 bp, Homo sapiens
aatttatagactatt

SEQ ID NO: 1593527 - DNA, 15 bp, Homo sapiens
atttatagactattt

SEQ ID NO: 1593528 - DNA, 15 bp, Homo sapiens
tttatagactatttt

SEQ ID NO: 1593529 - DNA, 15 bp, Homo sapiens
ttatagactattttc

SEQ ID NO: 1593530 - DNA, 15 bp, Homo sapiens
tatagactattttcc

SEQ ID NO: 1593531 - DNA, 15 bp, Homo sapiens
atagactattttcca

SEQ ID NO: 1593532 - DNA, 15 bp, Homo sapiens
tagactattttccat

SEQ ID NO: 1593533 - DNA, 15 bp, Homo sapiens
agactattttccatg

SEQ ID NO: 1593534 - DNA, 15 bp, Homo sapiens
gactattttccatgt

SEQ ID NO: 1593535 - DNA, 15 bp, Homo sapiens
actattttccatgtg

SEQ ID NO: 1593536 - DNA, 15 bp, Homo sapiens
ctattttccatgtgt

SEQ ID NO: 1593537 - DNA, 15 bp, Homo sapiens
tattttccatgtgtt

SEQ ID NO: 1593538 - DNA, 15 bp, Homo sapiens
attttccatgtgtta

SEQ ID NO: 1593539 - DNA, 15 bp, Homo sapiens
ttttccatgtgttat

SEQ ID NO: 1593540 - DNA, 15 bp, Homo sapiens
tttccatgtgttatt

SEQ ID NO: 1593541 - DNA, 15 bp, Homo sapiens
ttccatgtgttatta

SEQ ID NO: 1593542 - DNA, 15 bp, Homo sapiens
tccatgtgttattat

SEQ ID NO: 1593543 - DNA, 15 bp, Homo sapiens
ccatgtgttattatg

SEQ ID NO: 1593544 - DNA, 15 bp, Homo sapiens
catgtgttattatgt

SEQ ID NO: 1593545 - DNA, 15 bp, Homo sapiens
atgtgttattatgtg

SEQ ID NO: 1593546 - DNA, 15 bp, Homo sapiens
tgtgttattatgtgc

SEQ ID NO: 1593547 - DNA, 15 bp, Homo sapiens
gtgttattatgtgct

SEQ ID NO: 1593548 - DNA, 15 bp, Homo sapiens
tgttattatgtgcta

SEQ ID NO: 1593549 - DNA, 15 bp, Homo sapiens
gttattatgtgctaa

SEQ ID NO: 1593550 - DNA, 15 bp, Homo sapiens
ttattatgtgctaaa

SEQ ID NO: 1593551 - DNA, 15 bp, Homo sapiens
tattatgtgctaaag

SEQ ID NO: 1593552 - DNA, 15 bp, Homo sapiens
attatgtgctaaagt

SEQ ID NO: 1593553 - DNA, 15 bp, Homo sapiens
ttatgtgctaaagta

SEQ ID NO: 1593554 - DNA, 15 bp, Homo sapiens
tatgtgctaaagtat

SEQ ID NO: 1593555 - DNA, 15 bp, Homo sapiens
atgtgctaaagtatt

SEQ ID NO: 1593556 - DNA, 15 bp, Homo sapiens
tgtgctaaagtattt

SEQ ID NO: 1593557 - DNA, 15 bp, Homo sapiens
gtgctaaagtatttt

SEQ ID NO: 1593558 - DNA, 15 bp, Homo sapiens
tgctaaagtattttg

SEQ ID NO: 1593559 - DNA, 15 bp, Homo sapiens
gctaaagtattttgt

SEQ ID NO: 1593560 - DNA, 15 bp, Homo sapiens
ctaaagtattttgta

SEQ ID NO: 1593561 - DNA, 15 bp, Homo sapiens
taaagtattttgtat

SEQ ID NO: 1593562 - DNA, 15 bp, Homo sapiens
aaagtattttgtatc

SEQ ID NO: 1593563 - DNA, 15 bp, Homo sapiens
aagtattttgtatct

SEQ ID NO: 1593564 - DNA, 15 bp, Homo sapiens
agtattttgtatctt

SEQ ID NO: 1593565 - DNA, 15 bp, Homo sapiens
gtattttgtatctta

SEQ ID NO: 1593566 - DNA, 15 bp, Homo sapiens
tattttgtatcttag

SEQ ID NO: 1593567 - DNA, 15 bp, Homo sapiens
attttgtatcttagc

SEQ ID NO: 1593568 - DNA, 15 bp, Homo sapiens
ttttgtatcttagca

SEQ ID NO: 1593569 - DNA, 15 bp, Homo sapiens
tttgtatcttagcac

SEQ ID NO: 1593570 - DNA, 15 bp, Homo sapiens
ttgtatcttagcacc

SEQ ID NO: 1593571 - DNA, 15 bp, Homo sapiens
tgtatcttagcaccg

SEQ ID NO: 1593572 - DNA, 15 bp, Homo sapiens
gtatcttagcaccga

SEQ ID NO: 1593573 - DNA, 15 bp, Homo sapiens
tatcttagcaccgag

SEQ ID NO: 1593574 - DNA, 15 bp, Homo sapiens
atcttagcaccgaga

SEQ ID NO: 1593575 - DNA, 15 bp, Homo sapiens
tcttagcaccgagag

SEQ ID NO: 1593576 - DNA, 15 bp, Homo sapiens
cttagcaccgagagg

SEQ ID NO: 1593577 - DNA, 15 bp, Homo sapiens
ttagcaccgagaggc

SEQ ID NO: 1593578 - DNA, 15 bp, Homo sapiens
tagcaccgagaggct

SEQ ID NO: 1593579 - DNA, 15 bp, Homo sapiens
agcaccgagaggcta

SEQ ID NO: 1593580 - DNA, 15 bp, Homo sapiens
gcaccgagaggctaa

SEQ ID NO: 1593581 - DNA, 15 bp, Homo sapiens
caccgagaggctaag

SEQ ID NO: 1593582 - DNA, 15 bp, Homo sapiens
accgagaggctaagc

SEQ ID NO: 1593583 - DNA, 15 bp, Homo sapiens
ccgagaggctaagca

SEQ ID NO: 1593584 - DNA, 15 bp, Homo sapiens
cgagaggctaagcag

SEQ ID NO: 1593585 - DNA, 15 bp, Homo sapiens
gagaggctaagcagt

SEQ ID NO: 1593586 - DNA, 15 bp, Homo sapiens
agaggctaagcagtt

SEQ ID NO: 1593587 - DNA, 15 bp, Homo sapiens
gaggctaagcagttt

SEQ ID NO: 1593588 - DNA, 15 bp, Homo sapiens
aggctaagcagtttc

SEQ ID NO: 1593589 - DNA, 15 bp, Homo sapiens
ggctaagcagtttcc

SEQ ID NO: 1593590 - DNA, 15 bp, Homo sapiens
gctaagcagtttcct

SEQ ID NO: 1593591 - DNA, 15 bp, Homo sapiens
ctaagcagtttccta

SEQ ID NO: 1593592 - DNA, 15 bp, Homo sapiens
taagcagtttcctag

SEQ ID NO: 1593593 - DNA, 15 bp, Homo sapiens
aagcagtttcctagg

SEQ ID NO: 1593594 - DNA, 15 bp, Homo sapiens
agcagtttcctaggg

SEQ ID NO: 1593595 - DNA, 15 bp, Homo sapiens
gcagtttcctagggt

SEQ ID NO: 1593596 - DNA, 15 bp, Homo sapiens
cagtttcctagggtt

SEQ ID NO: 1593597 - DNA, 15 bp, Homo sapiens
agtttcctagggtta

SEQ ID NO: 1593598 - DNA, 15 bp, Homo sapiens
gtttcctagggttac

SEQ ID NO: 1593599 - DNA, 15 bp, Homo sapiens
tttcctagggttacc

SEQ ID NO: 1593600 - DNA, 15 bp, Homo sapiens
ttcctagggttacca

SEQ ID NO: 1593601 - DNA, 15 bp, Homo sapiens
tcctagggttaccag

SEQ ID NO: 1593602 - DNA, 15 bp, Homo sapiens
cctagggttaccagc

SEQ ID NO: 1593603 - DNA, 15 bp, Homo sapiens
ctagggttaccagct

SEQ ID NO: 1593604 - DNA, 15 bp, Homo sapiens
tagggttaccagcta

SEQ ID NO: 1593605 - DNA, 15 bp, Homo sapiens
agggttaccagctag

SEQ ID NO: 1593606 - DNA, 15 bp, Homo sapiens
gggttaccagctagt

SEQ ID NO: 1593607 - DNA, 15 bp, Homo sapiens
ggttaccagctagta

SEQ ID NO: 1593608 - DNA, 15 bp, Homo sapiens
gttaccagctagtaa

SEQ ID NO: 1593609 - DNA, 15 bp, Homo sapiens
ttaccagctagtaaa

SEQ ID NO: 1593610 - DNA, 15 bp, Homo sapiens
taccagctagtaaac

SEQ ID NO: 1593611 - DNA, 15 bp, Homo sapiens
accagctagtaaact

SEQ ID NO: 1593612 - DNA, 15 bp, Homo sapiens
ccagctagtaaacta

SEQ ID NO: 1593613 - DNA, 15 bp, Homo sapiens
cagctagtaaactaa

SEQ ID NO: 1593614 - DNA, 15 bp, Homo sapiens
agctagtaaactaag

SEQ ID NO: 1593615 - DNA, 15 bp, Homo sapiens
gctagtaaactaagg

SEQ ID NO: 1593616 - DNA, 15 bp, Homo sapiens
ctagtaaactaaggg

SEQ ID NO: 1593617 - DNA, 15 bp, Homo sapiens
tagtaaactaaggga

SEQ ID NO: 1593618 - DNA, 15 bp, Homo sapiens
agtaaactaagggaa

SEQ ID NO: 1593619 - DNA, 15 bp, Homo sapiens
gtaaactaagggaaa

SEQ ID NO: 1593620 - DNA, 15 bp, Homo sapiens
taaactaagggaaac

SEQ ID NO: 1593621 - DNA, 15 bp, Homo sapiens
aaactaagggaaacc

SEQ ID NO: 1593622 - DNA, 15 bp, Homo sapiens
aactaagggaaacct

SEQ ID NO: 1593623 - DNA, 15 bp, Homo sapiens
actaagggaaacctt

SEQ ID NO: 1593624 - DNA, 15 bp, Homo sapiens
ctaagggaaaccttt

SEQ ID NO: 1593625 - DNA, 15 bp, Homo sapiens
taagggaaaccttta

SEQ ID NO: 1593626 - DNA, 15 bp, Homo sapiens
aagggaaacctttac

SEQ ID NO: 1593627 - DNA, 15 bp, Homo sapiens
agggaaacctttact

SEQ ID NO: 1593628 - DNA, 15 bp, Homo sapiens
gggaaacctttactt

SEQ ID NO: 1593629 - DNA, 15 bp, Homo sapiens
ggaaacctttacttc

SEQ ID NO: 1593630 - DNA, 15 bp, Homo sapiens
gaaacctttacttcc

SEQ ID NO: 1593631 - DNA, 15 bp, Homo sapiens
aaacctttacttcct

SEQ ID NO: 1593632 - DNA, 15 bp, Homo sapiens
aacctttacttcctt

SEQ ID NO: 1593633 - DNA, 15 bp, Homo sapiens
acctttacttccttt

SEQ ID NO: 1593634 - DNA, 15 bp, Homo sapiens
cctttacttccttta

SEQ ID NO: 1593635 - DNA, 15 bp, Homo sapiens
ctttacttcctttag

SEQ ID NO: 1593636 - DNA, 15 bp, Homo sapiens
tttacttcctttagc

SEQ ID NO: 1593637 - DNA, 15 bp, Homo sapiens
ttacttcctttagct

SEQ ID NO: 1593638 - DNA, 15 bp, Homo sapiens
tacttcctttagctc

SEQ ID NO: 1593639 - DNA, 15 bp, Homo sapiens
acttcctttagctca

SEQ ID NO: 1593640 - DNA, 15 bp, Homo sapiens
cttcctttagctcag

SEQ ID NO: 1593641 - DNA, 15 bp, Homo sapiens
ttcctttagctcagt

SEQ ID NO: 1593642 - DNA, 15 bp, Homo sapiens
tcctttagctcagtg

SEQ ID NO: 1593643 - DNA, 15 bp, Homo sapiens
cctttagctcagtgg

SEQ ID NO: 1593644 - DNA, 15 bp, Homo sapiens
ctttagctcagtggt

SEQ ID NO: 1593645 - DNA, 15 bp, Homo sapiens
tttagctcagtggtt

SEQ ID NO: 1593646 - DNA, 15 bp, Homo sapiens
ttagctcagtggttc

SEQ ID NO: 1593647 - DNA, 15 bp, Homo sapiens
tagctcagtggttct

SEQ ID NO: 1593648 - DNA, 15 bp, Homo sapiens
agctcagtggttctc

SEQ ID NO: 1593649 - DNA, 15 bp, Homo sapiens
gctcagtggttctca

SEQ ID NO: 1593650 - DNA, 15 bp, Homo sapiens
ctcagtggttctcaa

SEQ ID NO: 1593651 - DNA, 15 bp, Homo sapiens
tcagtggttctcaaa

SEQ ID NO: 1593652 - DNA, 15 bp, Homo sapiens
cagtggttctcaaaa

SEQ ID NO: 1593653 - DNA, 15 bp, Homo sapiens
agtggttctcaaaat

SEQ ID NO: 1593654 - DNA, 15 bp, Homo sapiens
gtggttctcaaaatg

SEQ ID NO: 1593655 - DNA, 15 bp, Homo sapiens
tggttctcaaaatgt

SEQ ID NO: 1593656 - DNA, 15 bp, Homo sapiens
ggttctcaaaatgtg

SEQ ID NO: 1593657 - DNA, 15 bp, Homo sapiens
gttctcaaaatgtgg

SEQ ID NO: 1593658 - DNA, 15 bp, Homo sapiens
ttctcaaaatgtggt

SEQ ID NO: 1593659 - DNA, 15 bp, Homo sapiens
tctcaaaatgtggtt

SEQ ID NO: 1593660 - DNA, 15 bp, Homo sapiens
ctcaaaatgtggttc

SEQ ID NO: 1593661 - DNA, 15 bp, Homo sapiens
tcaaaatgtggttcc

SEQ ID NO: 1593662 - DNA, 15 bp, Homo sapiens
caaaatgtggttccc

SEQ ID NO: 1593663 - DNA, 15 bp, Homo sapiens
aaaatgtggttccct

SEQ ID NO: 1593664 - DNA, 15 bp, Homo sapiens
aaatgtggttcccta

SEQ ID NO: 1593665 - DNA, 15 bp, Homo sapiens
aatgtggttccctag

SEQ ID NO: 1593666 - DNA, 15 bp, Homo sapiens
atgtggttccctaga

SEQ ID NO: 1593667 - DNA, 15 bp, Homo sapiens
tgtggttccctagac

SEQ ID NO: 1593668 - DNA, 15 bp, Homo sapiens
gtggttccctagacc

SEQ ID NO: 1593669 - DNA, 15 bp, Homo sapiens
tggttccctagacca

SEQ ID NO: 1593670 - DNA, 15 bp, Homo sapiens
ggttccctagaccaa

SEQ ID NO: 1593671 - DNA, 15 bp, Homo sapiens
gttccctagaccaaa

SEQ ID NO: 1593672 - DNA, 15 bp, Homo sapiens
ttccctagaccaaaa

SEQ ID NO: 1593673 - DNA, 15 bp, Homo sapiens
tccctagaccaaaag

SEQ ID NO: 1593674 - DNA, 15 bp, Homo sapiens
ccctagaccaaaagt

SEQ ID NO: 1593675 - DNA, 15 bp, Homo sapiens
cctagaccaaaagta

SEQ ID NO: 1593676 - DNA, 15 bp, Homo sapiens
ttatcccatgtttaa

SEQ ID NO: 1593677 - DNA, 15 bp, Homo sapiens
tatcccatgtttaag

SEQ ID NO: 1593678 - DNA, 15 bp, Homo sapiens
atcccatgtttaagt

SEQ ID NO: 1593679 - DNA, 15 bp, Homo sapiens
tcccatgtttaagtc

SEQ ID NO: 1593680 - DNA, 15 bp, Homo sapiens
cccatgtttaagtca

SEQ ID NO: 1593681 - DNA, 15 bp, Homo sapiens
ccatgtttaagtcat

SEQ ID NO: 1593682 - DNA, 15 bp, Homo sapiens
catgtttaagtcatt

SEQ ID NO: 1593683 - DNA, 15 bp, Homo sapiens
atgtttaagtcattt

SEQ ID NO: 1593684 - DNA, 15 bp, Homo sapiens
tgtttaagtcattta

SEQ ID NO: 1593685 - DNA, 15 bp, Homo sapiens
gtttaagtcatttaa

SEQ ID NO: 1593686 - DNA, 15 bp, Homo sapiens
tttaagtcatttaag

SEQ ID NO: 1593687 - DNA, 15 bp, Homo sapiens
ttaagtcatttaaga

SEQ ID NO: 1593688 - DNA, 15 bp, Homo sapiens
taagtcatttaagac

SEQ ID NO: 1593689 - DNA, 15 bp, Homo sapiens
aagtcatttaagacc

SEQ ID NO: 1593690 - DNA, 15 bp, Homo sapiens
agtcatttaagaccc

SEQ ID NO: 1593691 - DNA, 15 bp, Homo sapiens
gtcatttaagaccca

SEQ ID NO: 1593692 - DNA, 15 bp, Homo sapiens
tcatttaagacccag

SEQ ID NO: 1593693 - DNA, 15 bp, Homo sapiens
catttaagacccagc

SEQ ID NO: 1593694 - DNA, 15 bp, Homo sapiens
atttaagacccagct

SEQ ID NO: 1593695 - DNA, 15 bp, Homo sapiens
tttaagacccagctc

SEQ ID NO: 1593696 - DNA, 15 bp, Homo sapiens
ttaagacccagctca

SEQ ID NO: 1593697 - DNA, 15 bp, Homo sapiens
taagacccagctcaa

SEQ ID NO: 1593698 - DNA, 15 bp, Homo sapiens
aagacccagctcaaa

SEQ ID NO: 1593699 - DNA, 15 bp, Homo sapiens
agacccagctcaaac

SEQ ID NO: 1593700 - DNA, 15 bp, Homo sapiens
gacccagctcaaacg

SEQ ID NO: 1593701 - DNA, 15 bp, Homo sapiens
acccagctcaaacgt

SEQ ID NO: 1593702 - DNA, 15 bp, Homo sapiens
cccagctcaaacgtc

SEQ ID NO: 1593703 - DNA, 15 bp, Homo sapiens
ccagctcaaacgtca

SEQ ID NO: 1593704 - DNA, 15 bp, Homo sapiens
cagctcaaacgtcac

SEQ ID NO: 1593705 - DNA, 15 bp, Homo sapiens
agctcaaacgtcacc

SEQ ID NO: 1593706 - DNA, 15 bp, Homo sapiens
gctcaaacgtcacct

SEQ ID NO: 1593707 - DNA, 15 bp, Homo sapiens
ctcaaacgtcacctc

SEQ ID NO: 1593708 - DNA, 15 bp, Homo sapiens
tcaaacgtcacctcc

SEQ ID NO: 1593709 - DNA, 15 bp, Homo sapiens
caaacgtcacctcca

SEQ ID NO: 1593710 - DNA, 15 bp, Homo sapiens
aaacgtcacctccac

SEQ ID NO: 1593711 - DNA, 15 bp, Homo sapiens
aacgtcacctccaca

SEQ ID NO: 1593712 - DNA, 15 bp, Homo sapiens
acgtcacctccacaa

SEQ ID NO: 1593713 - DNA, 15 bp, Homo sapiens
cgtcacctccacaaa

SEQ ID NO: 1593714 - DNA, 15 bp, Homo sapiens
gtcacctccacaaaa

SEQ ID NO: 1593715 - DNA, 15 bp, Homo sapiens
tcacctccacaaaac

SEQ ID NO: 1593716 - DNA, 15 bp, Homo sapiens
cacctccacaaaacc

SEQ ID NO: 1593717 - DNA, 15 bp, Homo sapiens
acctccacaaaacct

SEQ ID NO: 1593718 - DNA, 15 bp, Homo sapiens
cctccacaaaacctt

SEQ ID NO: 1593719 - DNA, 15 bp, Homo sapiens
ctccacaaaaccttc

SEQ ID NO: 1593720 - DNA, 15 bp, Homo sapiens
tccacaaaaccttcc

SEQ ID NO: 1593721 - DNA, 15 bp, Homo sapiens
ccacaaaaccttcct

SEQ ID NO: 1593722 - DNA, 15 bp, Homo sapiens
cacaaaaccttcctt

SEQ ID NO: 1593723 - DNA, 15 bp, Homo sapiens
acaaaaccttccttg

SEQ ID NO: 1593724 - DNA, 15 bp, Homo sapiens
caaaaccttccttga

SEQ ID NO: 1593725 - DNA, 15 bp, Homo sapiens
aaaaccttccttgat

SEQ ID NO: 1593726 - DNA, 15 bp, Homo sapiens
aaaccttccttgata

SEQ ID NO: 1593727 - DNA, 15 bp, Homo sapiens
aaccttccttgatac

SEQ ID NO: 1593728 - DNA, 15 bp, Homo sapiens
accttccttgatacc

SEQ ID NO: 1593729 - DNA, 15 bp, Homo sapiens
ccttccttgataccc

SEQ ID NO: 1593730 - DNA, 15 bp, Homo sapiens
cttccttgatacccc

SEQ ID NO: 1593731 - DNA, 15 bp, Homo sapiens
ttccttgatacccct

SEQ ID NO: 1593732 - DNA, 15 bp, Homo sapiens
tccttgatacccctt

SEQ ID NO: 1593733 - DNA, 15 bp, Homo sapiens
ccttgataccccttt

SEQ ID NO: 1593734 - DNA, 15 bp, Homo sapiens
cttgatacccctttc

SEQ ID NO: 1593735 - DNA, 15 bp, Homo sapiens
ttgatacccctttcc

SEQ ID NO: 1593736 - DNA, 15 bp, Homo sapiens
tgatacccctttcct

SEQ ID NO: 1593737 - DNA, 15 bp, Homo sapiens
gatacccctttcctc

SEQ ID NO: 1593738 - DNA, 15 bp, Homo sapiens
atacccctttcctct

SEQ ID NO: 1593739 - DNA, 15 bp, Homo sapiens
tacccctttcctctt

SEQ ID NO: 1593740 - DNA, 15 bp, Homo sapiens
acccctttcctcttc

SEQ ID NO: 1593741 - DNA, 15 bp, Homo sapiens
cccctttcctcttca

SEQ ID NO: 1593742 - DNA, 15 bp, Homo sapiens
ccctttcctcttcaa

SEQ ID NO: 1593743 - DNA, 15 bp, Homo sapiens
cctttcctcttcaat

SEQ ID NO: 1593744 - DNA, 15 bp, Homo sapiens
ctttcctcttcaatt

SEQ ID NO: 1593745 - DNA, 15 bp, Homo sapiens
tttcctcttcaattc

SEQ ID NO: 1593746 - DNA, 15 bp, Homo sapiens
ttcctcttcaattca

SEQ ID NO: 1593747 - DNA, 15 bp, Homo sapiens
tcctcttcaattcac

SEQ ID NO: 1593748 - DNA, 15 bp, Homo sapiens
cctcttcaattcact

SEQ ID NO: 1593749 - DNA, 15 bp, Homo sapiens
ctcttcaattcactt

SEQ ID NO: 1593750 - DNA, 15 bp, Homo sapiens
tcttcaattcacttg

SEQ ID NO: 1593751 - DNA, 15 bp, Homo sapiens
cttcaattcacttgg

SEQ ID NO: 1593752 - DNA, 15 bp, Homo sapiens
ttcaattcacttgga

SEQ ID NO: 1593753 - DNA, 15 bp, Homo sapiens
tcaattcacttggac

SEQ ID NO: 1593754 - DNA, 15 bp, Homo sapiens
caattcacttggacc

SEQ ID NO: 1593755 - DNA, 15 bp, Homo sapiens
aattcacttggacct

SEQ ID NO: 1593756 - DNA, 15 bp, Homo sapiens
attcacttggacctt

SEQ ID NO: 1593757 - DNA, 15 bp, Homo sapiens
ttcacttggaccttt

SEQ ID NO: 1593758 - DNA, 15 bp, Homo sapiens
tcacttggacctttt

SEQ ID NO: 1593759 - DNA, 15 bp, Homo sapiens
cacttggaccttttg

SEQ ID NO: 1593760 - DNA, 15 bp, Homo sapiens
acttggaccttttgc

SEQ ID NO: 1593761 - DNA, 15 bp, Homo sapiens
cttggaccttttgca

SEQ ID NO: 1593762 - DNA, 15 bp, Homo sapiens
ttggaccttttgcat

SEQ ID NO: 1593763 - DNA, 15 bp, Homo sapiens
tggaccttttgcatt

SEQ ID NO: 1593764 - DNA, 15 bp, Homo sapiens
ggaccttttgcattt

SEQ ID NO: 1593765 - DNA, 15 bp, Homo sapiens
gaccttttgcattta

SEQ ID NO: 1593766 - DNA, 15 bp, Homo sapiens
accttttgcatttaa

SEQ ID NO: 1593767 - DNA, 15 bp, Homo sapiens
ccttttgcatttaat

SEQ ID NO: 1593768 - DNA, 15 bp, Homo sapiens
cttttgcatttaatt

SEQ ID NO: 1593769 - DNA, 15 bp, Homo sapiens
ttttgcatttaattt

SEQ ID NO: 1593770 - DNA, 15 bp, Homo sapiens
tttgcatttaatttt

SEQ ID NO: 1593771 - DNA, 15 bp, Homo sapiens
ttgcatttaatttta

SEQ ID NO: 1593772 - DNA, 15 bp, Homo sapiens
tgcatttaattttaa

SEQ ID NO: 1593773 - DNA, 15 bp, Homo sapiens
gcatttaattttaat

SEQ ID NO: 1593774 - DNA, 15 bp, Homo sapiens
catttaattttaatt

SEQ ID NO: 1593775 - DNA, 15 bp, Homo sapiens
atttaattttaattt

SEQ ID NO: 1593776 - DNA, 15 bp, Homo sapiens
tttaattttaatttt

SEQ ID NO: 1593777 - DNA, 15 bp, Homo sapiens
ttaattttaattttt

SEQ ID NO: 1593778 - DNA, 15 bp, Homo sapiens
taattttaattttta

SEQ ID NO: 1593779 - DNA, 15 bp, Homo sapiens
aattttaatttttat

SEQ ID NO: 1593780 - DNA, 15 bp, Homo sapiens
attttaatttttatt

SEQ ID NO: 1593781 - DNA, 15 bp, Homo sapiens
tttttatttttttta

SEQ ID NO: 1593782 - DNA, 15 bp, Homo sapiens
ttttattttttttaa

SEQ ID NO: 1593783 - DNA, 15 bp, Homo sapiens
tttattttttttaag

SEQ ID NO: 1593784 - DNA, 15 bp, Homo sapiens
ttattttttttaaga

SEQ ID NO: 1593785 - DNA, 15 bp, Homo sapiens
tattttttttaagac

SEQ ID NO: 1593786 - DNA, 15 bp, Homo sapiens
attttttttaagaca

SEQ ID NO: 1593787 - DNA, 15 bp, Homo sapiens
tttttttaagacaga

SEQ ID NO: 1593788 - DNA, 15 bp, Homo sapiens
ttttttaagacagag

SEQ ID NO: 1593789 - DNA, 15 bp, Homo sapiens
tttttaagacagagt

SEQ ID NO: 1593790 - DNA, 15 bp, Homo sapiens
ttttaagacagagtc

SEQ ID NO: 1593791 - DNA, 15 bp, Homo sapiens
tttaagacagagtct

SEQ ID NO: 1593792 - DNA, 15 bp, Homo sapiens
ttaagacagagtctc

SEQ ID NO: 1593793 - DNA, 15 bp, Homo sapiens
taagacagagtctca

SEQ ID NO: 1593794 - DNA, 15 bp, Homo sapiens
aagacagagtctcac

SEQ ID NO: 1593795 - DNA, 15 bp, Homo sapiens
ctcactctgtcacca

SEQ ID NO: 1593796 - DNA, 15 bp, Homo sapiens
tcactctgtcaccag

SEQ ID NO: 1593797 - DNA, 15 bp, Homo sapiens
cactctgtcaccagg

SEQ ID NO: 1593798 - DNA, 15 bp, Homo sapiens
actctgtcaccaggc

SEQ ID NO: 1593799 - DNA, 15 bp, Homo sapiens
gagtgcagtggtatg

SEQ ID NO: 1593800 - DNA, 15 bp, Homo sapiens
agtgcagtggtatga

SEQ ID NO: 1593801 - DNA, 15 bp, Homo sapiens
gtgcagtggtatgat

SEQ ID NO: 1593802 - DNA, 15 bp, Homo sapiens
tgcagtggtatgatc

SEQ ID NO: 1593803 - DNA, 15 bp, Homo sapiens
gcagtggtatgatct

SEQ ID NO: 1593804 - DNA, 15 bp, Homo sapiens
cagtggtatgatctc

SEQ ID NO: 1593805 - DNA, 15 bp, Homo sapiens
agtggtatgatctca

SEQ ID NO: 1593806 - DNA, 15 bp, Homo sapiens
gtggtatgatctcag

SEQ ID NO: 1593807 - DNA, 15 bp, Homo sapiens
tggtatgatctcagc

SEQ ID NO: 1593808 - DNA, 15 bp, Homo sapiens
ggtatgatctcagct

SEQ ID NO: 1593809 - DNA, 15 bp, Homo sapiens
gtatgatctcagctc

SEQ ID NO: 1593810 - DNA, 15 bp, Homo sapiens
tatgatctcagctca

SEQ ID NO: 1593811 - DNA, 15 bp, Homo sapiens
atctcagctcactaa

SEQ ID NO: 1593812 - DNA, 15 bp, Homo sapiens
tctcagctcactaac

SEQ ID NO: 1593813 - DNA, 15 bp, Homo sapiens
ctcagctcactaact

SEQ ID NO: 1593814 - DNA, 15 bp, Homo sapiens
tcagctcactaacta

SEQ ID NO: 1593815 - DNA, 15 bp, Homo sapiens
cagctcactaactac

SEQ ID NO: 1593816 - DNA, 15 bp, Homo sapiens
agctcactaactact

SEQ ID NO: 1593817 - DNA, 15 bp, Homo sapiens
gctcactaactactc

SEQ ID NO: 1593818 - DNA, 15 bp, Homo sapiens
ctcactaactactct

SEQ ID NO: 1593819 - DNA, 15 bp, Homo sapiens
tcactaactactctg

SEQ ID NO: 1593820 - DNA, 15 bp, Homo sapiens
cactaactactctgc

SEQ ID NO: 1593821 - DNA, 15 bp, Homo sapiens
actaactactctgcc

SEQ ID NO: 1593822 - DNA, 15 bp, Homo sapiens
ctaactactctgcct

SEQ ID NO: 1593823 - DNA, 15 bp, Homo sapiens
taactactctgcctc

SEQ ID NO: 1593824 - DNA, 15 bp, Homo sapiens
aactactctgcctcc

SEQ ID NO: 1593825 - DNA, 15 bp, Homo sapiens
actactctgcctccc

SEQ ID NO: 1593826 - DNA, 15 bp, Homo sapiens
ctactctgcctccca

SEQ ID NO: 1593827 - DNA, 15 bp, Homo sapiens
tactctgcctcccag

SEQ ID NO: 1593828 - DNA, 15 bp, Homo sapiens
ttcaagcaattctca

SEQ ID NO: 1593829 - DNA, 15 bp, Homo sapiens
tcaagcaattctcat

SEQ ID NO: 1593830 - DNA, 15 bp, Homo sapiens
caagcaattctcatg

SEQ ID NO: 1593831 - DNA, 15 bp, Homo sapiens
aagcaattctcatgt

SEQ ID NO: 1593832 - DNA, 15 bp, Homo sapiens
agcaattctcatgtc

SEQ ID NO: 1593833 - DNA, 15 bp, Homo sapiens
gcaattctcatgtct

SEQ ID NO: 1593834 - DNA, 15 bp, Homo sapiens
caattctcatgtctc

SEQ ID NO: 1593835 - DNA, 15 bp, Homo sapiens
aattctcatgtctca

SEQ ID NO: 1593836 - DNA, 15 bp, Homo sapiens
gactacaggtgtgcg

SEQ ID NO: 1593837 - DNA, 15 bp, Homo sapiens
actacaggtgtgcgc

SEQ ID NO: 1593838 - DNA, 15 bp, Homo sapiens
ctacaggtgtgcgcc

SEQ ID NO: 1593839 - DNA, 15 bp, Homo sapiens
tacaggtgtgcgcca

SEQ ID NO: 1593840 - DNA, 15 bp, Homo sapiens
acaggtgtgcgccac

SEQ ID NO: 1593841 - DNA, 15 bp, Homo sapiens
caggtgtgcgccacc

SEQ ID NO: 1593842 - DNA, 15 bp, Homo sapiens
ggtgtgcgccaccat

SEQ ID NO: 1593843 - DNA, 15 bp, Homo sapiens
gtgtgcgccaccatg

SEQ ID NO: 1593844 - DNA, 15 bp, Homo sapiens
tgtgcgccaccatgc

SEQ ID NO: 1593845 - DNA, 15 bp, Homo sapiens
gtgcgccaccatgcc

SEQ ID NO: 1593846 - DNA, 15 bp, Homo sapiens
atgcctggctaattg

SEQ ID NO: 1593847 - DNA, 15 bp, Homo sapiens
tgcctggctaattgt

SEQ ID NO: 1593848 - DNA, 15 bp, Homo sapiens
gcctggctaattgtg

SEQ ID NO: 1593849 - DNA, 15 bp, Homo sapiens
cctggctaattgtgt

SEQ ID NO: 1593850 - DNA, 15 bp, Homo sapiens
ctggctaattgtgtg

SEQ ID NO: 1593851 - DNA, 15 bp, Homo sapiens
tggctaattgtgtgt

SEQ ID NO: 1593852 - DNA, 15 bp, Homo sapiens
ggctaattgtgtgtg

SEQ ID NO: 1593853 - DNA, 15 bp, Homo sapiens
gctaattgtgtgtgt

SEQ ID NO: 1593854 - DNA, 15 bp, Homo sapiens
ctaattgtgtgtgtg

SEQ ID NO: 1593855 - DNA, 15 bp, Homo sapiens
taattgtgtgtgtgt

SEQ ID NO: 1593856 - DNA, 15 bp, Homo sapiens
aattgtgtgtgtgtg

SEQ ID NO: 1593857 - DNA, 15 bp, Homo sapiens
attgtgtgtgtgtgt

SEQ ID NO: 1593858 - DNA, 15 bp, Homo sapiens
gtgtgtatgtatgta

SEQ ID NO: 1593859 - DNA, 15 bp, Homo sapiens
tgtgtatgtatgtat

SEQ ID NO: 1593860 - DNA, 15 bp, Homo sapiens
gtgtatgtatgtatg

SEQ ID NO: 1593861 - DNA, 15 bp, Homo sapiens
tgtatgtatgtatgt

SEQ ID NO: 1593862 - DNA, 15 bp, Homo sapiens
gtatgtatgtatgta

SEQ ID NO: 1593863 - DNA, 15 bp, Homo sapiens
tatgtatgtatgtat

SEQ ID NO: 1593864 - DNA, 15 bp, Homo sapiens
atgtatgtatgtata

SEQ ID NO: 1593865 - DNA, 15 bp, Homo sapiens
tgtatgtatgtatat

SEQ ID NO: 1593866 - DNA, 15 bp, Homo sapiens
gtatgtatgtatata

SEQ ID NO: 1593867 - DNA, 15 bp, Homo sapiens
tatgtatgtatatat

SEQ ID NO: 1593868 - DNA, 15 bp, Homo sapiens
atgtatgtatatatg

SEQ ID NO: 1593869 - DNA, 15 bp, Homo sapiens
tgtatgtatatatgt

SEQ ID NO: 1593870 - DNA, 15 bp, Homo sapiens
gtatgtatatatgtg

SEQ ID NO: 1593871 - DNA, 15 bp, Homo sapiens
tatgtatatatgtgt

SEQ ID NO: 1593872 - DNA, 15 bp, Homo sapiens
atgtatatatgtgtg

SEQ ID NO: 1593873 - DNA, 15 bp, Homo sapiens
tgtatatatgtgtgt

SEQ ID NO: 1593874 - DNA, 15 bp, Homo sapiens
gtatatatgtgtgtg

SEQ ID NO: 1593875 - DNA, 15 bp, Homo sapiens
atgtgtgtgtgtgta

SEQ ID NO: 1593876 - DNA, 15 bp, Homo sapiens
tatatacacacacat

SEQ ID NO: 1593877 - DNA, 15 bp, Homo sapiens
atatacacacacata

SEQ ID NO: 1593878 - DNA, 15 bp, Homo sapiens
tatacacacacatat

SEQ ID NO: 1593879 - DNA, 15 bp, Homo sapiens
atacacacacatata

SEQ ID NO: 1593880 - DNA, 15 bp, Homo sapiens
tacacacacatatat

SEQ ID NO: 1593881 - DNA, 15 bp, Homo sapiens
cacacacatatataa

SEQ ID NO: 1593882 - DNA, 15 bp, Homo sapiens
acacacatatataaa

SEQ ID NO: 1593883 - DNA, 15 bp, Homo sapiens
cacacatatataaat

SEQ ID NO: 1593884 - DNA, 15 bp, Homo sapiens
acacatatataaata

SEQ ID NO: 1593885 - DNA, 15 bp, Homo sapiens
cacatatataaatat

SEQ ID NO: 1593886 - DNA, 15 bp, Homo sapiens
acatatataaatata

SEQ ID NO: 1593887 - DNA, 15 bp, Homo sapiens
catatataaatatat

SEQ ID NO: 1593888 - DNA, 15 bp, Homo sapiens
atatataaatatata

SEQ ID NO: 1593889 - DNA, 15 bp, Homo sapiens
tatataaatatatat

SEQ ID NO: 1593890 - DNA, 15 bp, Homo sapiens
atataaatatatata

SEQ ID NO: 1593891 - DNA, 15 bp, Homo sapiens
tataaatatatatac

SEQ ID NO: 1593892 - DNA, 15 bp, Homo sapiens
atatatacacacata

SEQ ID NO: 1593893 - DNA, 15 bp, Homo sapiens
tatatacacacatat

SEQ ID NO: 1593894 - DNA, 15 bp, Homo sapiens
atatacacacatata

SEQ ID NO: 1593895 - DNA, 15 bp, Homo sapiens
tatacacacatatat

SEQ ID NO: 1593896 - DNA, 15 bp, Homo sapiens
atacacacatatata

SEQ ID NO: 1593897 - DNA, 15 bp, Homo sapiens
tacacacatatataa

SEQ ID NO: 1593898 - DNA, 15 bp, Homo sapiens
ttttttttttaagta

SEQ ID NO: 1593899 - DNA, 15 bp, Homo sapiens
tttttttttaagtag

SEQ ID NO: 1593900 - DNA, 15 bp, Homo sapiens
ttttttttaagtaga

SEQ ID NO: 1593901 - DNA, 15 bp, Homo sapiens
tttttttaagtagag

SEQ ID NO: 1593902 - DNA, 15 bp, Homo sapiens
ttttttaagtagaga

SEQ ID NO: 1593903 - DNA, 15 bp, Homo sapiens
tttttaagtagagat

SEQ ID NO: 1593904 - DNA, 15 bp, Homo sapiens
ttttaagtagagatg

SEQ ID NO: 1593905 - DNA, 15 bp, Homo sapiens
tttaagtagagatgg

SEQ ID NO: 1593906 - DNA, 15 bp, Homo sapiens
ttaagtagagatggg

SEQ ID NO: 1593907 - DNA, 15 bp, Homo sapiens
taagtagagatgggg

SEQ ID NO: 1593908 - DNA, 15 bp, Homo sapiens
aagtagagatggggt

SEQ ID NO: 1593909 - DNA, 15 bp, Homo sapiens
gagatggggttttgc

SEQ ID NO: 1593910 - DNA, 15 bp, Homo sapiens
atggggttttgccat

SEQ ID NO: 1593911 - DNA, 15 bp, Homo sapiens
tggggttttgccatg

SEQ ID NO: 1593912 - DNA, 15 bp, Homo sapiens
ggccaggctggtctg

SEQ ID NO: 1593913 - DNA, 15 bp, Homo sapiens
gccaggctggtctgg

SEQ ID NO: 1593914 - DNA, 15 bp, Homo sapiens
ccaggctggtctggc

SEQ ID NO: 1593915 - DNA, 15 bp, Homo sapiens
caggctggtctggcc

SEQ ID NO: 1593916 - DNA, 15 bp, Homo sapiens
aggctggtctggcct

SEQ ID NO: 1593917 - DNA, 15 bp, Homo sapiens
ggctggtctggcctc

SEQ ID NO: 1593918 - DNA, 15 bp, Homo sapiens
gctggtctggcctca

SEQ ID NO: 1593919 - DNA, 15 bp, Homo sapiens
ctggtctggcctcaa

SEQ ID NO: 1593920 - DNA, 15 bp, Homo sapiens
tggtctggcctcaag

SEQ ID NO: 1593921 - DNA, 15 bp, Homo sapiens
ggtctggcctcaagc

SEQ ID NO: 1593922 - DNA, 15 bp, Homo sapiens
gtctggcctcaagcc

SEQ ID NO: 1593923 - DNA, 15 bp, Homo sapiens
tctggcctcaagcca

SEQ ID NO: 1593924 - DNA, 15 bp, Homo sapiens
ctggcctcaagccat

SEQ ID NO: 1593925 - DNA, 15 bp, Homo sapiens
tggcctcaagccatc

SEQ ID NO: 1593926 - DNA, 15 bp, Homo sapiens
ggcctcaagccatcc

SEQ ID NO: 1593927 - DNA, 15 bp, Homo sapiens
gcctcaagccatcct

SEQ ID NO: 1593928 - DNA, 15 bp, Homo sapiens
cctcaagccatcctc

SEQ ID NO: 1593929 - DNA, 15 bp, Homo sapiens
catcctcccacctcg

SEQ ID NO: 1593930 - DNA, 15 bp, Homo sapiens
atcctcccacctcgg

SEQ ID NO: 1593931 - DNA, 15 bp, Homo sapiens
tcctcccacctcggc

SEQ ID NO: 1593932 - DNA, 15 bp, Homo sapiens
cctcccacctcggcc

SEQ ID NO: 1593933 - DNA, 15 bp, Homo sapiens
ctcccacctcggcct

SEQ ID NO: 1593934 - DNA, 15 bp, Homo sapiens
tcccacctcggcctc

SEQ ID NO: 1593935 - DNA, 15 bp, Homo sapiens
cccacctcggcctcg

SEQ ID NO: 1593936 - DNA, 15 bp, Homo sapiens
ccacctcggcctcgc

SEQ ID NO: 1593937 - DNA, 15 bp, Homo sapiens
cacctcggcctcgca

SEQ ID NO: 1593938 - DNA, 15 bp, Homo sapiens
acctcggcctcgcaa

SEQ ID NO: 1593939 - DNA, 15 bp, Homo sapiens
cctcggcctcgcaaa

SEQ ID NO: 1593940 - DNA, 15 bp, Homo sapiens
ctcggcctcgcaaag

SEQ ID NO: 1593941 - DNA, 15 bp, Homo sapiens
tcggcctcgcaaagt

SEQ ID NO: 1593942 - DNA, 15 bp, Homo sapiens
cggcctcgcaaagtg

SEQ ID NO: 1593943 - DNA, 15 bp, Homo sapiens
ggcctcgcaaagtgc

SEQ ID NO: 1593944 - DNA, 15 bp, Homo sapiens
gcctcgcaaagtgct

SEQ ID NO: 1593945 - DNA, 15 bp, Homo sapiens
cctcgcaaagtgctg

SEQ ID NO: 1593946 - DNA, 15 bp, Homo sapiens
ctcgcaaagtgctgg

SEQ ID NO: 1593947 - DNA, 15 bp, Homo sapiens
tcgcaaagtgctggt

SEQ ID NO: 1593948 - DNA, 15 bp, Homo sapiens
cgcaaagtgctggta

SEQ ID NO: 1593949 - DNA, 15 bp, Homo sapiens
gcaaagtgctggtat

SEQ ID NO: 1593950 - DNA, 15 bp, Homo sapiens
aagtgctggtattat

SEQ ID NO: 1593951 - DNA, 15 bp, Homo sapiens
agtgctggtattata

SEQ ID NO: 1593952 - DNA, 15 bp, Homo sapiens
gtgctggtattatag

SEQ ID NO: 1593953 - DNA, 15 bp, Homo sapiens
tgctggtattatagg

SEQ ID NO: 1593954 - DNA, 15 bp, Homo sapiens
gctggtattataggc

SEQ ID NO: 1593955 - DNA, 15 bp, Homo sapiens
ctggtattataggca

SEQ ID NO: 1593956 - DNA, 15 bp, Homo sapiens
tggtattataggcat

SEQ ID NO: 1593957 - DNA, 15 bp, Homo sapiens
ggtattataggcatg

SEQ ID NO: 1593958 - DNA, 15 bp, Homo sapiens
gtattataggcatga

SEQ ID NO: 1593959 - DNA, 15 bp, Homo sapiens
tattataggcatgag

SEQ ID NO: 1593960 - DNA, 15 bp, Homo sapiens
actgtgcctggcctg

SEQ ID NO: 1593961 - DNA, 15 bp, Homo sapiens
ctgtgcctggcctgc

SEQ ID NO: 1593962 - DNA, 15 bp, Homo sapiens
tgtgcctggcctgca

SEQ ID NO: 1593963 - DNA, 15 bp, Homo sapiens
gtgcctggcctgcat

SEQ ID NO: 1593964 - DNA, 15 bp, Homo sapiens
tgcctggcctgcatt

SEQ ID NO: 1593965 - DNA, 15 bp, Homo sapiens
gcctggcctgcattt

SEQ ID NO: 1593966 - DNA, 15 bp, Homo sapiens
cctggcctgcatttc

SEQ ID NO: 1593967 - DNA, 15 bp, Homo sapiens
ctggcctgcatttca

SEQ ID NO: 1593968 - DNA, 15 bp, Homo sapiens
tggcctgcatttcat

SEQ ID NO: 1593969 - DNA, 15 bp, Homo sapiens
ggcctgcatttcatt

SEQ ID NO: 1593970 - DNA, 15 bp, Homo sapiens
gcctgcatttcattt

SEQ ID NO: 1593971 - DNA, 15 bp, Homo sapiens
cctgcatttcatttt

SEQ ID NO: 1593972 - DNA, 15 bp, Homo sapiens
ctgcatttcatttta

SEQ ID NO: 1593973 - DNA, 15 bp, Homo sapiens
tgcatttcattttaa

SEQ ID NO: 1593974 - DNA, 15 bp, Homo sapiens
gcatttcattttaat

SEQ ID NO: 1593975 - DNA, 15 bp, Homo sapiens
catttcattttaatt

SEQ ID NO: 1593976 - DNA, 15 bp, Homo sapiens
atttcattttaatta

SEQ ID NO: 1593977 - DNA, 15 bp, Homo sapiens
tttcattttaattat

SEQ ID NO: 1593978 - DNA, 15 bp, Homo sapiens
ttcattttaattata

SEQ ID NO: 1593979 - DNA, 15 bp, Homo sapiens
tcattttaattataa

SEQ ID NO: 1593980 - DNA, 15 bp, Homo sapiens
cattttaattataaa

SEQ ID NO: 1593981 - DNA, 15 bp, Homo sapiens
attttaattataaaa

SEQ ID NO: 1593982 - DNA, 15 bp, Homo sapiens
ttttaattataaaat

SEQ ID NO: 1593983 - DNA, 15 bp, Homo sapiens
tttaattataaaata

SEQ ID NO: 1593984 - DNA, 15 bp, Homo sapiens
ttaattataaaatat

SEQ ID NO: 1593985 - DNA, 15 bp, Homo sapiens
taattataaaatatt

SEQ ID NO: 1593986 - DNA, 15 bp, Homo sapiens
aattataaaatattt

SEQ ID NO: 1593987 - DNA, 15 bp, Homo sapiens
attataaaatatttt

SEQ ID NO: 1593988 - DNA, 15 bp, Homo sapiens
ttataaaatattttg

SEQ ID NO: 1593989 - DNA, 15 bp, Homo sapiens
tataaaatattttga

SEQ ID NO: 1593990 - DNA, 15 bp, Homo sapiens
ataaaatattttgaa

SEQ ID NO: 1593991 - DNA, 15 bp, Homo sapiens
taaaatattttgaac

SEQ ID NO: 1593992 - DNA, 15 bp, Homo sapiens
aaaatattttgaact

SEQ ID NO: 1593993 - DNA, 15 bp, Homo sapiens
aaatattttgaactc

SEQ ID NO: 1593994 - DNA, 15 bp, Homo sapiens
aatattttgaactca

SEQ ID NO: 1593995 - DNA, 15 bp, Homo sapiens
atattttgaactcag

SEQ ID NO: 1593996 - DNA, 15 bp, Homo sapiens
tattttgaactcaga

SEQ ID NO: 1593997 - DNA, 15 bp, Homo sapiens
attttgaactcagaa

SEQ ID NO: 1593998 - DNA, 15 bp, Homo sapiens
ttttgaactcagaaa

SEQ ID NO: 1593999 - DNA, 15 bp, Homo sapiens
tttgaactcagaaaa

SEQ ID NO: 1594000 - DNA, 15 bp, Homo sapiens
ttgaactcagaaaaa

SEQ ID NO: 1594001 - DNA, 15 bp, Homo sapiens
tgaactcagaaaaaa

SEQ ID NO: 1594002 - DNA, 15 bp, Homo sapiens
gaactcagaaaaaag

SEQ ID NO: 1594003 - DNA, 15 bp, Homo sapiens
aactcagaaaaaagg

SEQ ID NO: 1594004 - DNA, 15 bp, Homo sapiens
actcagaaaaaaggg

SEQ ID NO: 1594005 - DNA, 15 bp, Homo sapiens
ctcagaaaaaagggt

SEQ ID NO: 1594006 - DNA, 15 bp, Homo sapiens
tcagaaaaaagggta

SEQ ID NO: 1594007 - DNA, 15 bp, Homo sapiens
cagaaaaaagggtat

SEQ ID NO: 1594008 - DNA, 15 bp, Homo sapiens
agaaaaaagggtatg

SEQ ID NO: 1594009 - DNA, 15 bp, Homo sapiens
gaaaaaagggtatgc

SEQ ID NO: 1594010 - DNA, 15 bp, Homo sapiens
aaaaaagggtatgct

SEQ ID NO: 1594011 - DNA, 15 bp, Homo sapiens
aaaaagggtatgctg

SEQ ID NO: 1594012 - DNA, 15 bp, Homo sapiens
aaaagggtatgctga

SEQ ID NO: 1594013 - DNA, 15 bp, Homo sapiens
aaagggtatgctgaa

SEQ ID NO: 1594014 - DNA, 15 bp, Homo sapiens
aagggtatgctgaat

SEQ ID NO: 1594015 - DNA, 15 bp, Homo sapiens
agggtatgctgaata

SEQ ID NO: 1594016 - DNA, 15 bp, Homo sapiens
gggtatgctgaatac

SEQ ID NO: 1594017 - DNA, 15 bp, Homo sapiens
ggtatgctgaatacc

SEQ ID NO: 1594018 - DNA, 15 bp, Homo sapiens
gtatgctgaatacct

SEQ ID NO: 1594019 - DNA, 15 bp, Homo sapiens
tatgctgaataccta

SEQ ID NO: 1594020 - DNA, 15 bp, Homo sapiens
atgctgaatacctac

SEQ ID NO: 1594021 - DNA, 15 bp, Homo sapiens
tgctgaatacctacg

SEQ ID NO: 1594022 - DNA, 15 bp, Homo sapiens
gctgaatacctacgt

SEQ ID NO: 1594023 - DNA, 15 bp, Homo sapiens
ctgaatacctacgta

SEQ ID NO: 1594024 - DNA, 15 bp, Homo sapiens
tgaatacctacgtac

SEQ ID NO: 1594025 - DNA, 15 bp, Homo sapiens
gaatacctacgtacc

SEQ ID NO: 1594026 - DNA, 15 bp, Homo sapiens
aatacctacgtaccc

SEQ ID NO: 1594027 - DNA, 15 bp, Homo sapiens
atacctacgtaccca

SEQ ID NO: 1594028 - DNA, 15 bp, Homo sapiens
tacctacgtacccac

SEQ ID NO: 1594029 - DNA, 15 bp, Homo sapiens
acctacgtacccaca

SEQ ID NO: 1594030 - DNA, 15 bp, Homo sapiens
cctacgtacccacaa

SEQ ID NO: 1594031 - DNA, 15 bp, Homo sapiens
ctacgtacccacaaa

SEQ ID NO: 1594032 - DNA, 15 bp, Homo sapiens
tacgtacccacaaaa

SEQ ID NO: 1594033 - DNA, 15 bp, Homo sapiens
acgtacccacaaaag

SEQ ID NO: 1594034 - DNA, 15 bp, Homo sapiens
cgtacccacaaaagt

SEQ ID NO: 1594035 - DNA, 15 bp, Homo sapiens
gtacccacaaaagta

SEQ ID NO: 1594036 - DNA, 15 bp, Homo sapiens
tacccacaaaagtat

SEQ ID NO: 1594037 - DNA, 15 bp, Homo sapiens
acccacaaaagtatt

SEQ ID NO: 1594038 - DNA, 15 bp, Homo sapiens
cccacaaaagtatta

SEQ ID NO: 1594039 - DNA, 15 bp, Homo sapiens
ccacaaaagtattaa

SEQ ID NO: 1594040 - DNA, 15 bp, Homo sapiens
cacaaaagtattaac

SEQ ID NO: 1594041 - DNA, 15 bp, Homo sapiens
acaaaagtattaaca

SEQ ID NO: 1594042 - DNA, 15 bp, Homo sapiens
caaaagtattaacat

SEQ ID NO: 1594043 - DNA, 15 bp, Homo sapiens
aaaagtattaacatt

SEQ ID NO: 1594044 - DNA, 15 bp, Homo sapiens
aaagtattaacattt

SEQ ID NO: 1594045 - DNA, 15 bp, Homo sapiens
aagtattaacatttt

SEQ ID NO: 1594046 - DNA, 15 bp, Homo sapiens
agtattaacattttg

SEQ ID NO: 1594047 - DNA, 15 bp, Homo sapiens
gtattaacattttgc

SEQ ID NO: 1594048 - DNA, 15 bp, Homo sapiens
tattaacattttgcc

SEQ ID NO: 1594049 - DNA, 15 bp, Homo sapiens
attaacattttgcca

SEQ ID NO: 1594050 - DNA, 15 bp, Homo sapiens
ttaacattttgccat

SEQ ID NO: 1594051 - DNA, 15 bp, Homo sapiens
taacattttgccata

SEQ ID NO: 1594052 - DNA, 15 bp, Homo sapiens
aacattttgccatat

SEQ ID NO: 1594053 - DNA, 15 bp, Homo sapiens
acattttgccatatt

SEQ ID NO: 1594054 - DNA, 15 bp, Homo sapiens
cattttgccatattt

SEQ ID NO: 1594055 - DNA, 15 bp, Homo sapiens
attttgccatatttg

SEQ ID NO: 1594056 - DNA, 15 bp, Homo sapiens
ttttgccatatttgc

SEQ ID NO: 1594057 - DNA, 15 bp, Homo sapiens
tttgccatatttgct

SEQ ID NO: 1594058 - DNA, 15 bp, Homo sapiens
ttgccatatttgctt

SEQ ID NO: 1594059 - DNA, 15 bp, Homo sapiens
tgccatatttgcttc

SEQ ID NO: 1594060 - DNA, 15 bp, Homo sapiens
gccatatttgcttct

SEQ ID NO: 1594061 - DNA, 15 bp, Homo sapiens
ccatatttgcttctg

SEQ ID NO: 1594062 - DNA, 15 bp, Homo sapiens
catatttgcttctga

SEQ ID NO: 1594063 - DNA, 15 bp, Homo sapiens
atatttgcttctgat

SEQ ID NO: 1594064 - DNA, 15 bp, Homo sapiens
tatttgcttctgatc

SEQ ID NO: 1594065 - DNA, 15 bp, Homo sapiens
atttgcttctgatct

SEQ ID NO: 1594066 - DNA, 15 bp, Homo sapiens
tttgcttctgatctt

SEQ ID NO: 1594067 - DNA, 15 bp, Homo sapiens
ttgcttctgatctta

SEQ ID NO: 1594068 - DNA, 15 bp, Homo sapiens
tgcttctgatcttat

SEQ ID NO: 1594069 - DNA, 15 bp, Homo sapiens
gcttctgatcttatt

SEQ ID NO: 1594070 - DNA, 15 bp, Homo sapiens
cttctgatcttattt

SEQ ID NO: 1594071 - DNA, 15 bp, Homo sapiens
ttctgatcttatttt

SEQ ID NO: 1594072 - DNA, 15 bp, Homo sapiens
tctgatcttattttt

SEQ ID NO: 1594073 - DNA, 15 bp, Homo sapiens
ctgatcttatttttt

SEQ ID NO: 1594074 - DNA, 15 bp, Homo sapiens
tgatcttattttttt

SEQ ID NO: 1594075 - DNA, 15 bp, Homo sapiens
gatcttatttttttt

SEQ ID NO: 1594076 - DNA, 15 bp, Homo sapiens
atcttattttttttg

SEQ ID NO: 1594077 - DNA, 15 bp, Homo sapiens
tcttattttttttga

SEQ ID NO: 1594078 - DNA, 15 bp, Homo sapiens
cttattttttttgag

SEQ ID NO: 1594079 - DNA, 15 bp, Homo sapiens
tattttttttgagaa

SEQ ID NO: 1594080 - DNA, 15 bp, Homo sapiens
attttttttgagaaa

SEQ ID NO: 1594081 - DNA, 15 bp, Homo sapiens
ttttttttgagaaat

SEQ ID NO: 1594082 - DNA, 15 bp, Homo sapiens
tttttttgagaaatt

SEQ ID NO: 1594083 - DNA, 15 bp, Homo sapiens
ttttttgagaaatta

SEQ ID NO: 1594084 - DNA, 15 bp, Homo sapiens
tttttgagaaattaa

SEQ ID NO: 1594085 - DNA, 15 bp, Homo sapiens
ttttgagaaattaaa

SEQ ID NO: 1594086 - DNA, 15 bp, Homo sapiens
tttgagaaattaaag

SEQ ID NO: 1594087 - DNA, 15 bp, Homo sapiens
ttgagaaattaaaga

SEQ ID NO: 1594088 - DNA, 15 bp, Homo sapiens
tgagaaattaaagat

SEQ ID NO: 1594089 - DNA, 15 bp, Homo sapiens
gagaaattaaagatc

SEQ ID NO: 1594090 - DNA, 15 bp, Homo sapiens
agaaattaaagatca

SEQ ID NO: 1594091 - DNA, 15 bp, Homo sapiens
gaaattaaagatcat

SEQ ID NO: 1594092 - DNA, 15 bp, Homo sapiens
aaattaaagatcata

SEQ ID NO: 1594093 - DNA, 15 bp, Homo sapiens
aattaaagatcataa

SEQ ID NO: 1594094 - DNA, 15 bp, Homo sapiens
attaaagatcataat

SEQ ID NO: 1594095 - DNA, 15 bp, Homo sapiens
ttaaagatcataata

SEQ ID NO: 1594096 - DNA, 15 bp, Homo sapiens
taaagatcataatac

SEQ ID NO: 1594097 - DNA, 15 bp, Homo sapiens
aaagatcataataca

SEQ ID NO: 1594098 - DNA, 15 bp, Homo sapiens
aagatcataatacaa

SEQ ID NO: 1594099 - DNA, 15 bp, Homo sapiens
agatcataatacaac

SEQ ID NO: 1594100 - DNA, 15 bp, Homo sapiens
gatcataatacaact

SEQ ID NO: 1594101 - DNA, 15 bp, Homo sapiens
atcataatacaacta

SEQ ID NO: 1594102 - DNA, 15 bp, Homo sapiens
tcataatacaactaa

SEQ ID NO: 1594103 - DNA, 15 bp, Homo sapiens
cataatacaactaaa

SEQ ID NO: 1594104 - DNA, 15 bp, Homo sapiens
ataatacaactaaag

SEQ ID NO: 1594105 - DNA, 15 bp, Homo sapiens
taatacaactaaagc

SEQ ID NO: 1594106 - DNA, 15 bp, Homo sapiens
aatacaactaaagcc

SEQ ID NO: 1594107 - DNA, 15 bp, Homo sapiens
atacaactaaagccc

SEQ ID NO: 1594108 - DNA, 15 bp, Homo sapiens
tacaactaaagcccc

SEQ ID NO: 1594109 - DNA, 15 bp, Homo sapiens
acaactaaagcccca

SEQ ID NO: 1594110 - DNA, 15 bp, Homo sapiens
caactaaagccccat

SEQ ID NO: 1594111 - DNA, 15 bp, Homo sapiens
aactaaagccccatt

SEQ ID NO: 1594112 - DNA, 15 bp, Homo sapiens
actaaagccccattt

SEQ ID NO: 1594113 - DNA, 15 bp, Homo sapiens
ctaaagccccatttc

SEQ ID NO: 1594114 - DNA, 15 bp, Homo sapiens
taaagccccatttct

SEQ ID NO: 1594115 - DNA, 15 bp, Homo sapiens
aaagccccatttctt

SEQ ID NO: 1594116 - DNA, 15 bp, Homo sapiens
aagccccatttcttt

SEQ ID NO: 1594117 - DNA, 15 bp, Homo sapiens
agccccatttctttc

SEQ ID NO: 1594118 - DNA, 15 bp, Homo sapiens
gccccatttctttcc

SEQ ID NO: 1594119 - DNA, 15 bp, Homo sapiens
ccccatttctttccc

SEQ ID NO: 1594120 - DNA, 15 bp, Homo sapiens
cccatttctttccct

SEQ ID NO: 1594121 - DNA, 15 bp, Homo sapiens
ccatttctttccctt

SEQ ID NO: 1594122 - DNA, 15 bp, Homo sapiens
catttctttcccttc

SEQ ID NO: 1594123 - DNA, 15 bp, Homo sapiens
atttctttcccttca

SEQ ID NO: 1594124 - DNA, 15 bp, Homo sapiens
tttctttcccttcat

SEQ ID NO: 1594125 - DNA, 15 bp, Homo sapiens
ttctttcccttcatt

SEQ ID NO: 1594126 - DNA, 15 bp, Homo sapiens
tctttcccttcattc

SEQ ID NO: 1594127 - DNA, 15 bp, Homo sapiens
ctttcccttcattcc

SEQ ID NO: 1594128 - DNA, 15 bp, Homo sapiens
tttcccttcattccc

SEQ ID NO: 1594129 - DNA, 15 bp, Homo sapiens
ttcccttcattccca

SEQ ID NO: 1594130 - DNA, 15 bp, Homo sapiens
tcccttcattcccag

SEQ ID NO: 1594131 - DNA, 15 bp, Homo sapiens
cccttcattcccaga

SEQ ID NO: 1594132 - DNA, 15 bp, Homo sapiens
ccttcattcccagaa

SEQ ID NO: 1594133 - DNA, 15 bp, Homo sapiens
cttcattcccagaag

SEQ ID NO: 1594134 - DNA, 15 bp, Homo sapiens
ttcattcccagaagt

SEQ ID NO: 1594135 - DNA, 15 bp, Homo sapiens
tcattcccagaagta

SEQ ID NO: 1594136 - DNA, 15 bp, Homo sapiens
cattcccagaagtat

SEQ ID NO: 1594137 - DNA, 15 bp, Homo sapiens
attcccagaagtatg

SEQ ID NO: 1594138 - DNA, 15 bp, Homo sapiens
ttcccagaagtatga

SEQ ID NO: 1594139 - DNA, 15 bp, Homo sapiens
tcccagaagtatgac

SEQ ID NO: 1594140 - DNA, 15 bp, Homo sapiens
cccagaagtatgaca

SEQ ID NO: 1594141 - DNA, 15 bp, Homo sapiens
ccagaagtatgacaa

SEQ ID NO: 1594142 - DNA, 15 bp, Homo sapiens
cagaagtatgacaat

SEQ ID NO: 1594143 - DNA, 15 bp, Homo sapiens
agaagtatgacaatt

SEQ ID NO: 1594144 - DNA, 15 bp, Homo sapiens
gaagtatgacaatta

SEQ ID NO: 1594145 - DNA, 15 bp, Homo sapiens
aagtatgacaattat

SEQ ID NO: 1594146 - DNA, 15 bp, Homo sapiens
agtatgacaattatc

SEQ ID NO: 1594147 - DNA, 15 bp, Homo sapiens
gtatgacaattatcc

SEQ ID NO: 1594148 - DNA, 15 bp, Homo sapiens
tatgacaattatcct

SEQ ID NO: 1594149 - DNA, 15 bp, Homo sapiens
atgacaattatcctt

SEQ ID NO: 1594150 - DNA, 15 bp, Homo sapiens
tgacaattatcctta

SEQ ID NO: 1594151 - DNA, 15 bp, Homo sapiens
gacaattatccttaa

SEQ ID NO: 1594152 - DNA, 15 bp, Homo sapiens
acaattatccttaaa

SEQ ID NO: 1594153 - DNA, 15 bp, Homo sapiens
caattatccttaaag

SEQ ID NO: 1594154 - DNA, 15 bp, Homo sapiens
aattatccttaaagt

SEQ ID NO: 1594155 - DNA, 15 bp, Homo sapiens
attatccttaaagtt

SEQ ID NO: 1594156 - DNA, 15 bp, Homo sapiens
ttatccttaaagttg

SEQ ID NO: 1594157 - DNA, 15 bp, Homo sapiens
tatccttaaagttga

SEQ ID NO: 1594158 - DNA, 15 bp, Homo sapiens
atccttaaagttgat

SEQ ID NO: 1594159 - DNA, 15 bp, Homo sapiens
tccttaaagttgata

SEQ ID NO: 1594160 - DNA, 15 bp, Homo sapiens
ccttaaagttgatat

SEQ ID NO: 1594161 - DNA, 15 bp, Homo sapiens
cttaaagttgatata

SEQ ID NO: 1594162 - DNA, 15 bp, Homo sapiens
ttaaagttgatatat

SEQ ID NO: 1594163 - DNA, 15 bp, Homo sapiens
taaagttgatatata

SEQ ID NO: 1594164 - DNA, 15 bp, Homo sapiens
aaagttgatatatat

SEQ ID NO: 1594165 - DNA, 15 bp, Homo sapiens
aagttgatatatatc

SEQ ID NO: 1594166 - DNA, 15 bp, Homo sapiens
agttgatatatatca

SEQ ID NO: 1594167 - DNA, 15 bp, Homo sapiens
gttgatatatatcat

SEQ ID NO: 1594168 - DNA, 15 bp, Homo sapiens
ttgatatatatcatt

SEQ ID NO: 1594169 - DNA, 15 bp, Homo sapiens
tgatatatatcattc

SEQ ID NO: 1594170 - DNA, 15 bp, Homo sapiens
gatatatatcattcc

SEQ ID NO: 1594171 - DNA, 15 bp, Homo sapiens
atatatatcattccc

SEQ ID NO: 1594172 - DNA, 15 bp, Homo sapiens
tatatatcattccca

SEQ ID NO: 1594173 - DNA, 15 bp, Homo sapiens
atatatcattcccat

SEQ ID NO: 1594174 - DNA, 15 bp, Homo sapiens
tatatcattcccatg

SEQ ID NO: 1594175 - DNA, 15 bp, Homo sapiens
atatcattcccatgc

SEQ ID NO: 1594176 - DNA, 15 bp, Homo sapiens
tatcattcccatgca

SEQ ID NO: 1594177 - DNA, 15 bp, Homo sapiens
atcattcccatgcat

SEQ ID NO: 1594178 - DNA, 15 bp, Homo sapiens
tcattcccatgcatg

SEQ ID NO: 1594179 - DNA, 15 bp, Homo sapiens
cattcccatgcatgt

SEQ ID NO: 1594180 - DNA, 15 bp, Homo sapiens
attcccatgcatgtt

SEQ ID NO: 1594181 - DNA, 15 bp, Homo sapiens
ttcccatgcatgttt

SEQ ID NO: 1594182 - DNA, 15 bp, Homo sapiens
tcccatgcatgtttt

SEQ ID NO: 1594183 - DNA, 15 bp, Homo sapiens
cccatgcatgttttt

SEQ ID NO: 1594184 - DNA, 15 bp, Homo sapiens
ccatgcatgtttttt

SEQ ID NO: 1594185 - DNA, 15 bp, Homo sapiens
catgcatgtttttta

SEQ ID NO: 1594186 - DNA, 15 bp, Homo sapiens
atgcatgttttttat

SEQ ID NO: 1594187 - DNA, 15 bp, Homo sapiens
tgcatgttttttata

SEQ ID NO: 1594188 - DNA, 15 bp, Homo sapiens
gcatgttttttatac

SEQ ID NO: 1594189 - DNA, 15 bp, Homo sapiens
catgttttttatact

SEQ ID NO: 1594190 - DNA, 15 bp, Homo sapiens
atgttttttatactt

SEQ ID NO: 1594191 - DNA, 15 bp, Homo sapiens
tgttttttatacttc

SEQ ID NO: 1594192 - DNA, 15 bp, Homo sapiens
gttttttatacttcc

SEQ ID NO: 1594193 - DNA, 15 bp, Homo sapiens
ttttttatacttccc

SEQ ID NO: 1594194 - DNA, 15 bp, Homo sapiens
tttttatacttccct

SEQ ID NO: 1594195 - DNA, 15 bp, Homo sapiens
ttttatacttcccta

SEQ ID NO: 1594196 - DNA, 15 bp, Homo sapiens
tttatacttccctag

SEQ ID NO: 1594197 - DNA, 15 bp, Homo sapiens
ttatacttccctagt

SEQ ID NO: 1594198 - DNA, 15 bp, Homo sapiens
tatacttccctagta

SEQ ID NO: 1594199 - DNA, 15 bp, Homo sapiens
atacttccctagtac

SEQ ID NO: 1594200 - DNA, 15 bp, Homo sapiens
tacttccctagtaca

SEQ ID NO: 1594201 - DNA, 15 bp, Homo sapiens
acttccctagtacaa

SEQ ID NO: 1594202 - DNA, 15 bp, Homo sapiens
cttccctagtacaag

SEQ ID NO: 1594203 - DNA, 15 bp, Homo sapiens
ttccctagtacaagt

SEQ ID NO: 1594204 - DNA, 15 bp, Homo sapiens
tccctagtacaagtt

SEQ ID NO: 1594205 - DNA, 15 bp, Homo sapiens
ccctagtacaagtta

SEQ ID NO: 1594206 - DNA, 15 bp, Homo sapiens
cctagtacaagttag

SEQ ID NO: 1594207 - DNA, 15 bp, Homo sapiens
ctagtacaagttagc

SEQ ID NO: 1594208 - DNA, 15 bp, Homo sapiens
tagtacaagttagct

SEQ ID NO: 1594209 - DNA, 15 bp, Homo sapiens
agtacaagttagctg

SEQ ID NO: 1594210 - DNA, 15 bp, Homo sapiens
gtacaagttagctgt

SEQ ID NO: 1594211 - DNA, 15 bp, Homo sapiens
tacaagttagctgta

SEQ ID NO: 1594212 - DNA, 15 bp, Homo sapiens
acaagttagctgtat

SEQ ID NO: 1594213 - DNA, 15 bp, Homo sapiens
caagttagctgtatc

SEQ ID NO: 1594214 - DNA, 15 bp, Homo sapiens
aagttagctgtatcc

SEQ ID NO: 1594215 - DNA, 15 bp, Homo sapiens
agttagctgtatcct

SEQ ID NO: 1594216 - DNA, 15 bp, Homo sapiens
gttagctgtatcctc

SEQ ID NO: 1594217 - DNA, 15 bp, Homo sapiens
ttagctgtatcctct

SEQ ID NO: 1594218 - DNA, 15 bp, Homo sapiens
tagctgtatcctctg

SEQ ID NO: 1594219 - DNA, 15 bp, Homo sapiens
agctgtatcctctgc

SEQ ID NO: 1594220 - DNA, 15 bp, Homo sapiens
gctgtatcctctgct

SEQ ID NO: 1594221 - DNA, 15 bp, Homo sapiens
ctgtatcctctgctc

SEQ ID NO: 1594222 - DNA, 15 bp, Homo sapiens
tgtatcctctgctca

SEQ ID NO: 1594223 - DNA, 15 bp, Homo sapiens
gtatcctctgctcag

SEQ ID NO: 1594224 - DNA, 15 bp, Homo sapiens
tatcctctgctcagg

SEQ ID NO: 1594225 - DNA, 15 bp, Homo sapiens
atcctctgctcaggg

SEQ ID NO: 1594226 - DNA, 15 bp, Homo sapiens
tcctctgctcagggg

SEQ ID NO: 1594227 - DNA, 15 bp, Homo sapiens
cctctgctcaggggc

SEQ ID NO: 1594228 - DNA, 15 bp, Homo sapiens
ctctgctcaggggct

SEQ ID NO: 1594229 - DNA, 15 bp, Homo sapiens
tctgctcaggggctc

SEQ ID NO: 1594230 - DNA, 15 bp, Homo sapiens
ctgctcaggggctca

SEQ ID NO: 1594231 - DNA, 15 bp, Homo sapiens
tgctcaggggctcat

SEQ ID NO: 1594232 - DNA, 15 bp, Homo sapiens
gctcaggggctcatc

SEQ ID NO: 1594233 - DNA, 15 bp, Homo sapiens
ctcaggggctcatca

SEQ ID NO: 1594234 - DNA, 15 bp, Homo sapiens
tcaggggctcatcaa

SEQ ID NO: 1594235 - DNA, 15 bp, Homo sapiens
caggggctcatcaag

SEQ ID NO: 1594236 - DNA, 15 bp, Homo sapiens
aggggctcatcaagc

SEQ ID NO: 1594237 - DNA, 15 bp, Homo sapiens
ggggctcatcaagct

SEQ ID NO: 1594238 - DNA, 15 bp, Homo sapiens
gggctcatcaagctg

SEQ ID NO: 1594239 - DNA, 15 bp, Homo sapiens
ggctcatcaagctga

SEQ ID NO: 1594240 - DNA, 15 bp, Homo sapiens
gctcatcaagctgaa

SEQ ID NO: 1594241 - DNA, 15 bp, Homo sapiens
ctcatcaagctgaat

SEQ ID NO: 1594242 - DNA, 15 bp, Homo sapiens
tcatcaagctgaatc

SEQ ID NO: 1594243 - DNA, 15 bp, Homo sapiens
catcaagctgaatca

SEQ ID NO: 1594244 - DNA, 15 bp, Homo sapiens
atcaagctgaatcaa

SEQ ID NO: 1594245 - DNA, 15 bp, Homo sapiens
tcaagctgaatcaag

SEQ ID NO: 1594246 - DNA, 15 bp, Homo sapiens
caagctgaatcaagg

SEQ ID NO: 1594247 - DNA, 15 bp, Homo sapiens
aagctgaatcaaggg

SEQ ID NO: 1594248 - DNA, 15 bp, Homo sapiens
agctgaatcaaggga

SEQ ID NO: 1594249 - DNA, 15 bp, Homo sapiens
gctgaatcaagggac

SEQ ID NO: 1594250 - DNA, 15 bp, Homo sapiens
ctgaatcaagggact

SEQ ID NO: 1594251 - DNA, 15 bp, Homo sapiens
tgaatcaagggactc

SEQ ID NO: 1594252 - DNA, 15 bp, Homo sapiens
gaatcaagggactca

SEQ ID NO: 1594253 - DNA, 15 bp, Homo sapiens
aatcaagggactcat

SEQ ID NO: 1594254 - DNA, 15 bp, Homo sapiens
atcaagggactcatg

SEQ ID NO: 1594255 - DNA, 15 bp, Homo sapiens
tcaagggactcatga

SEQ ID NO: 1594256 - DNA, 15 bp, Homo sapiens
caagggactcatgat

SEQ ID NO: 1594257 - DNA, 15 bp, Homo sapiens
aagggactcatgatc

SEQ ID NO: 1594258 - DNA, 15 bp, Homo sapiens
agggactcatgatcc

SEQ ID NO: 1594259 - DNA, 15 bp, Homo sapiens
gggactcatgatcct

SEQ ID NO: 1594260 - DNA, 15 bp, Homo sapiens
ggactcatgatcctc

SEQ ID NO: 1594261 - DNA, 15 bp, Homo sapiens
gactcatgatcctct

SEQ ID NO: 1594262 - DNA, 15 bp, Homo sapiens
actcatgatcctctt

SEQ ID NO: 1594263 - DNA, 15 bp, Homo sapiens
ctcatgatcctcttc

SEQ ID NO: 1594264 - DNA, 15 bp, Homo sapiens
tcatgatcctcttca

SEQ ID NO: 1594265 - DNA, 15 bp, Homo sapiens
catgatcctcttcaa

SEQ ID NO: 1594266 - DNA, 15 bp, Homo sapiens
atgatcctcttcaaa

SEQ ID NO: 1594267 - DNA, 15 bp, Homo sapiens
tgatcctcttcaaag

SEQ ID NO: 1594268 - DNA, 15 bp, Homo sapiens
gatcctcttcaaagt

SEQ ID NO: 1594269 - DNA, 15 bp, Homo sapiens
atcctcttcaaagtt

SEQ ID NO: 1594270 - DNA, 15 bp, Homo sapiens
tcctcttcaaagttc

SEQ ID NO: 1594271 - DNA, 15 bp, Homo sapiens
cctcttcaaagttcc

SEQ ID NO: 1594272 - DNA, 15 bp, Homo sapiens
ctcttcaaagttcct

SEQ ID NO: 1594273 - DNA, 15 bp, Homo sapiens
tcttcaaagttcctt

SEQ ID NO: 1594274 - DNA, 15 bp, Homo sapiens
cttcaaagttccttc

SEQ ID NO: 1594275 - DNA, 15 bp, Homo sapiens
ttcaaagttccttca

SEQ ID NO: 1594276 - DNA, 15 bp, Homo sapiens
tcaaagttccttcag

SEQ ID NO: 1594277 - DNA, 15 bp, Homo sapiens
caaagttccttcagg

SEQ ID NO: 1594278 - DNA, 15 bp, Homo sapiens
aaagttccttcaggt

SEQ ID NO: 1594279 - DNA, 15 bp, Homo sapiens
aagttccttcaggtt

SEQ ID NO: 1594280 - DNA, 15 bp, Homo sapiens
agttccttcaggttg

SEQ ID NO: 1594281 - DNA, 15 bp, Homo sapiens
gttccttcaggttgt

SEQ ID NO: 1594282 - DNA, 15 bp, Homo sapiens
ttccttcaggttgtt

SEQ ID NO: 1594283 - DNA, 15 bp, Homo sapiens
tccttcaggttgttg

SEQ ID NO: 1594284 - DNA, 15 bp, Homo sapiens
ccttcaggttgttgg

SEQ ID NO: 1594285 - DNA, 15 bp, Homo sapiens
cttcaggttgttggc

SEQ ID NO: 1594286 - DNA, 15 bp, Homo sapiens
ttcaggttgttggca

SEQ ID NO: 1594287 - DNA, 15 bp, Homo sapiens
tcaggttgttggcag

SEQ ID NO: 1594288 - DNA, 15 bp, Homo sapiens
caggttgttggcaga

SEQ ID NO: 1594289 - DNA, 15 bp, Homo sapiens
aggttgttggcagaa

SEQ ID NO: 1594290 - DNA, 15 bp, Homo sapiens
ggttgttggcagaat

SEQ ID NO: 1594291 - DNA, 15 bp, Homo sapiens
gttgttggcagaatt

SEQ ID NO: 1594292 - DNA, 15 bp, Homo sapiens
ttgttggcagaattt

SEQ ID NO: 1594293 - DNA, 15 bp, Homo sapiens
tgttggcagaattta

SEQ ID NO: 1594294 - DNA, 15 bp, Homo sapiens
gttggcagaatttag

SEQ ID NO: 1594295 - DNA, 15 bp, Homo sapiens
ttggcagaatttagt

SEQ ID NO: 1594296 - DNA, 15 bp, Homo sapiens
tggcagaatttagtt

SEQ ID NO: 1594297 - DNA, 15 bp, Homo sapiens
ggcagaatttagttc

SEQ ID NO: 1594298 - DNA, 15 bp, Homo sapiens
gcagaatttagttcc

SEQ ID NO: 1594299 - DNA, 15 bp, Homo sapiens
cagaatttagttcct

SEQ ID NO: 1594300 - DNA, 15 bp, Homo sapiens
agaatttagttcctt

SEQ ID NO: 1594301 - DNA, 15 bp, Homo sapiens
gaatttagttccttg

SEQ ID NO: 1594302 - DNA, 15 bp, Homo sapiens
aatttagttccttgt

SEQ ID NO: 1594303 - DNA, 15 bp, Homo sapiens
atttagttccttgtg

SEQ ID NO: 1594304 - DNA, 15 bp, Homo sapiens
tttagttccttgtga

SEQ ID NO: 1594305 - DNA, 15 bp, Homo sapiens
ttagttccttgtgat

SEQ ID NO: 1594306 - DNA, 15 bp, Homo sapiens
tagttccttgtgatt

SEQ ID NO: 1594307 - DNA, 15 bp, Homo sapiens
agttccttgtgattg

SEQ ID NO: 1594308 - DNA, 15 bp, Homo sapiens
gttccttgtgattgt

SEQ ID NO: 1594309 - DNA, 15 bp, Homo sapiens
ttccttgtgattgta

SEQ ID NO: 1594310 - DNA, 15 bp, Homo sapiens
tccttgtgattgtag

SEQ ID NO: 1594311 - DNA, 15 bp, Homo sapiens
ccttgtgattgtagg

SEQ ID NO: 1594312 - DNA, 15 bp, Homo sapiens
cttgtgattgtagga

SEQ ID NO: 1594313 - DNA, 15 bp, Homo sapiens
ttgtgattgtaggac

SEQ ID NO: 1594314 - DNA, 15 bp, Homo sapiens
tgtgattgtaggact

SEQ ID NO: 1594315 - DNA, 15 bp, Homo sapiens
gtgattgtaggactg

SEQ ID NO: 1594316 - DNA, 15 bp, Homo sapiens
tgattgtaggactga

SEQ ID NO: 1594317 - DNA, 15 bp, Homo sapiens
gattgtaggactgag

SEQ ID NO: 1594318 - DNA, 15 bp, Homo sapiens
attgtaggactgagg

SEQ ID NO: 1594319 - DNA, 15 bp, Homo sapiens
ttgtaggactgaggg

SEQ ID NO: 1594320 - DNA, 15 bp, Homo sapiens
tgtaggactgagggc

SEQ ID NO: 1594321 - DNA, 15 bp, Homo sapiens
gtaggactgagggcc

SEQ ID NO: 1594322 - DNA, 15 bp, Homo sapiens
taggactgagggccc

SEQ ID NO: 1594323 - DNA, 15 bp, Homo sapiens
aggactgagggcccg

SEQ ID NO: 1594324 - DNA, 15 bp, Homo sapiens
ggactgagggcccgt

SEQ ID NO: 1594325 - DNA, 15 bp, Homo sapiens
gactgagggcccgtt

SEQ ID NO: 1594326 - DNA, 15 bp, Homo sapiens
actgagggcccgttt

SEQ ID NO: 1594327 - DNA, 15 bp, Homo sapiens
ctgagggcccgtttt

SEQ ID NO: 1594328 - DNA, 15 bp, Homo sapiens
tgagggcccgttttc

SEQ ID NO: 1594329 - DNA, 15 bp, Homo sapiens
gagggcccgttttct

SEQ ID NO: 1594330 - DNA, 15 bp, Homo sapiens
agggcccgttttctc

SEQ ID NO: 1594331 - DNA, 15 bp, Homo sapiens
gggcccgttttctca

SEQ ID NO: 1594332 - DNA, 15 bp, Homo sapiens
ggcccgttttctcac

SEQ ID NO: 1594333 - DNA, 15 bp, Homo sapiens
gcccgttttctcact

SEQ ID NO: 1594334 - DNA, 15 bp, Homo sapiens
cccgttttctcactg

SEQ ID NO: 1594335 - DNA, 15 bp, Homo sapiens
ccgttttctcactgg

SEQ ID NO: 1594336 - DNA, 15 bp, Homo sapiens
cgttttctcactggc

SEQ ID NO: 1594337 - DNA, 15 bp, Homo sapiens
gttttctcactggct

SEQ ID NO: 1594338 - DNA, 15 bp, Homo sapiens
ttttctcactggctg

SEQ ID NO: 1594339 - DNA, 15 bp, Homo sapiens
tttctcactggctgc

SEQ ID NO: 1594340 - DNA, 15 bp, Homo sapiens
ttctcactggctgct

SEQ ID NO: 1594341 - DNA, 15 bp, Homo sapiens
tctcactggctgctg

SEQ ID NO: 1594342 - DNA, 15 bp, Homo sapiens
tcactggctgctggc

SEQ ID NO: 1594343 - DNA, 15 bp, Homo sapiens
cactggctgctggcc

SEQ ID NO: 1594344 - DNA, 15 bp, Homo sapiens
actggctgctggcca

SEQ ID NO: 1594345 - DNA, 15 bp, Homo sapiens
ctggctgctggccag

SEQ ID NO: 1594346 - DNA, 15 bp, Homo sapiens
tggctgctggccagg

SEQ ID NO: 1594347 - DNA, 15 bp, Homo sapiens
ggctgctggccaggg

SEQ ID NO: 1594348 - DNA, 15 bp, Homo sapiens
gctgctggccagggg

SEQ ID NO: 1594349 - DNA, 15 bp, Homo sapiens
ctgctggccaggggt

SEQ ID NO: 1594350 - DNA, 15 bp, Homo sapiens
tgctggccaggggtt

SEQ ID NO: 1594351 - DNA, 15 bp, Homo sapiens
gctggccaggggttg

SEQ ID NO: 1594352 - DNA, 15 bp, Homo sapiens
ctggccaggggttgc

SEQ ID NO: 1594353 - DNA, 15 bp, Homo sapiens
tggccaggggttgct

SEQ ID NO: 1594354 - DNA, 15 bp, Homo sapiens
ggccaggggttgctc

SEQ ID NO: 1594355 - DNA, 15 bp, Homo sapiens
gccaggggttgctcc

SEQ ID NO: 1594356 - DNA, 15 bp, Homo sapiens
ccaggggttgctccc

SEQ ID NO: 1594357 - DNA, 15 bp, Homo sapiens
caggggttgctccca

SEQ ID NO: 1594358 - DNA, 15 bp, Homo sapiens
aggggttgctcccag

SEQ ID NO: 1594359 - DNA, 15 bp, Homo sapiens
ggggttgctcccaga

SEQ ID NO: 1594360 - DNA, 15 bp, Homo sapiens
gggttgctcccagat

SEQ ID NO: 1594361 - DNA, 15 bp, Homo sapiens
ggttgctcccagata

SEQ ID NO: 1594362 - DNA, 15 bp, Homo sapiens
gttgctcccagatat

SEQ ID NO: 1594363 - DNA, 15 bp, Homo sapiens
ttgctcccagatatt

SEQ ID NO: 1594364 - DNA, 15 bp, Homo sapiens
tgctcccagatattt

SEQ ID NO: 1594365 - DNA, 15 bp, Homo sapiens
gctcccagatattta

SEQ ID NO: 1594366 - DNA, 15 bp, Homo sapiens
ctcccagatatttaa

SEQ ID NO: 1594367 - DNA, 15 bp, Homo sapiens
tcccagatatttaaa

SEQ ID NO: 1594368 - DNA, 15 bp, Homo sapiens
cccagatatttaaag

SEQ ID NO: 1594369 - DNA, 15 bp, Homo sapiens
ccagatatttaaagg

SEQ ID NO: 1594370 - DNA, 15 bp, Homo sapiens
cagatatttaaaggc

SEQ ID NO: 1594371 - DNA, 15 bp, Homo sapiens
agatatttaaaggct

SEQ ID NO: 1594372 - DNA, 15 bp, Homo sapiens
gatatttaaaggctc

SEQ ID NO: 1594373 - DNA, 15 bp, Homo sapiens
atatttaaaggctca

SEQ ID NO: 1594374 - DNA, 15 bp, Homo sapiens
tatttaaaggctcat

SEQ ID NO: 1594375 - DNA, 15 bp, Homo sapiens
atttaaaggctcatg

SEQ ID NO: 1594376 - DNA, 15 bp, Homo sapiens
tttaaaggctcatgc

SEQ ID NO: 1594377 - DNA, 15 bp, Homo sapiens
ttaaaggctcatgcc

SEQ ID NO: 1594378 - DNA, 15 bp, Homo sapiens
taaaggctcatgccc

SEQ ID NO: 1594379 - DNA, 15 bp, Homo sapiens
aaaggctcatgccct

SEQ ID NO: 1594380 - DNA, 15 bp, Homo sapiens
aaggctcatgcccta

SEQ ID NO: 1594381 - DNA, 15 bp, Homo sapiens
aggctcatgccctag

SEQ ID NO: 1594382 - DNA, 15 bp, Homo sapiens
ggctcatgccctagc

SEQ ID NO: 1594383 - DNA, 15 bp, Homo sapiens
gctcatgccctagcc

SEQ ID NO: 1594384 - DNA, 15 bp, Homo sapiens
ctcatgccctagccc

SEQ ID NO: 1594385 - DNA, 15 bp, Homo sapiens
tcatgccctagccca

SEQ ID NO: 1594386 - DNA, 15 bp, Homo sapiens
catgccctagcccat

SEQ ID NO: 1594387 - DNA, 15 bp, Homo sapiens
atgccctagcccatg

SEQ ID NO: 1594388 - DNA, 15 bp, Homo sapiens
tgccctagcccatga

SEQ ID NO: 1594389 - DNA, 15 bp, Homo sapiens
gccctagcccatgac

SEQ ID NO: 1594390 - DNA, 15 bp, Homo sapiens
ccctagcccatgaca

SEQ ID NO: 1594391 - DNA, 15 bp, Homo sapiens
cctagcccatgacag

SEQ ID NO: 1594392 - DNA, 15 bp, Homo sapiens
ctagcccatgacagt

SEQ ID NO: 1594393 - DNA, 15 bp, Homo sapiens
tagcccatgacagtc

SEQ ID NO: 1594394 - DNA, 15 bp, Homo sapiens
agcccatgacagtct

SEQ ID NO: 1594395 - DNA, 15 bp, Homo sapiens
gcccatgacagtctc

SEQ ID NO: 1594396 - DNA, 15 bp, Homo sapiens
cccatgacagtctca

SEQ ID NO: 1594397 - DNA, 15 bp, Homo sapiens
ccatgacagtctcac

SEQ ID NO: 1594398 - DNA, 15 bp, Homo sapiens
catgacagtctcaca

SEQ ID NO: 1594399 - DNA, 15 bp, Homo sapiens
atgacagtctcacaa

SEQ ID NO: 1594400 - DNA, 15 bp, Homo sapiens
tgacagtctcacaac

SEQ ID NO: 1594401 - DNA, 15 bp, Homo sapiens
gacagtctcacaaca

SEQ ID NO: 1594402 - DNA, 15 bp, Homo sapiens
acagtctcacaacat

SEQ ID NO: 1594403 - DNA, 15 bp, Homo sapiens
cagtctcacaacatg

SEQ ID NO: 1594404 - DNA, 15 bp, Homo sapiens
agtctcacaacatgg

SEQ ID NO: 1594405 - DNA, 15 bp, Homo sapiens
gtctcacaacatggc

SEQ ID NO: 1594406 - DNA, 15 bp, Homo sapiens
tctcacaacatggca

SEQ ID NO: 1594407 - DNA, 15 bp, Homo sapiens
ctcacaacatggcag

SEQ ID NO: 1594408 - DNA, 15 bp, Homo sapiens
tcacaacatggcagc

SEQ ID NO: 1594409 - DNA, 15 bp, Homo sapiens
cacaacatggcagct

SEQ ID NO: 1594410 - DNA, 15 bp, Homo sapiens
acaacatggcagctg

SEQ ID NO: 1594411 - DNA, 15 bp, Homo sapiens
caacatggcagctga

SEQ ID NO: 1594412 - DNA, 15 bp, Homo sapiens
aacatggcagctgac

SEQ ID NO: 1594413 - DNA, 15 bp, Homo sapiens
acatggcagctgact

SEQ ID NO: 1594414 - DNA, 15 bp, Homo sapiens
catggcagctgactt

SEQ ID NO: 1594415 - DNA, 15 bp, Homo sapiens
atggcagctgacttc

SEQ ID NO: 1594416 - DNA, 15 bp, Homo sapiens
tggcagctgacttct

SEQ ID NO: 1594417 - DNA, 15 bp, Homo sapiens
ggcagctgacttctt

SEQ ID NO: 1594418 - DNA, 15 bp, Homo sapiens
gcagctgacttcttc

SEQ ID NO: 1594419 - DNA, 15 bp, Homo sapiens
cagctgacttcttca

SEQ ID NO: 1594420 - DNA, 15 bp, Homo sapiens
agctgacttcttcaa

SEQ ID NO: 1594421 - DNA, 15 bp, Homo sapiens
gctgacttcttcaaa

SEQ ID NO: 1594422 - DNA, 15 bp, Homo sapiens
ctgacttcttcaaaa

SEQ ID NO: 1594423 - DNA, 15 bp, Homo sapiens
tgacttcttcaaaac

SEQ ID NO: 1594424 - DNA, 15 bp, Homo sapiens
gacttcttcaaaacc

SEQ ID NO: 1594425 - DNA, 15 bp, Homo sapiens
acttcttcaaaacca

SEQ ID NO: 1594426 - DNA, 15 bp, Homo sapiens
cttcttcaaaaccag

SEQ ID NO: 1594427 - DNA, 15 bp, Homo sapiens
ttcttcaaaaccagc

SEQ ID NO: 1594428 - DNA, 15 bp, Homo sapiens
tcttcaaaaccagca

SEQ ID NO: 1594429 - DNA, 15 bp, Homo sapiens
cttcaaaaccagcag

SEQ ID NO: 1594430 - DNA, 15 bp, Homo sapiens
ttcaaaaccagcagg

SEQ ID NO: 1594431 - DNA, 15 bp, Homo sapiens
tcaaaaccagcagga

SEQ ID NO: 1594432 - DNA, 15 bp, Homo sapiens
caaaaccagcaggag

SEQ ID NO: 1594433 - DNA, 15 bp, Homo sapiens
aaaaccagcaggaga

SEQ ID NO: 1594434 - DNA, 15 bp, Homo sapiens
aaaccagcaggagaa

SEQ ID NO: 1594435 - DNA, 15 bp, Homo sapiens
aaccagcaggagaat

SEQ ID NO: 1594436 - DNA, 15 bp, Homo sapiens
accagcaggagaatc

SEQ ID NO: 1594437 - DNA, 15 bp, Homo sapiens
ccagcaggagaatct

SEQ ID NO: 1594438 - DNA, 15 bp, Homo sapiens
cagcaggagaatctt

SEQ ID NO: 1594439 - DNA, 15 bp, Homo sapiens
agcaggagaatcttg

SEQ ID NO: 1594440 - DNA, 15 bp, Homo sapiens
gcaggagaatcttgc

SEQ ID NO: 1594441 - DNA, 15 bp, Homo sapiens
caggagaatcttgct

SEQ ID NO: 1594442 - DNA, 15 bp, Homo sapiens
aggagaatcttgctc

SEQ ID NO: 1594443 - DNA, 15 bp, Homo sapiens
ggagaatcttgctct

SEQ ID NO: 1594444 - DNA, 15 bp, Homo sapiens
gagaatcttgctcta

SEQ ID NO: 1594445 - DNA, 15 bp, Homo sapiens
agaatcttgctctag

SEQ ID NO: 1594446 - DNA, 15 bp, Homo sapiens
gaatcttgctctagt

SEQ ID NO: 1594447 - DNA, 15 bp, Homo sapiens
aatcttgctctagtc

SEQ ID NO: 1594448 - DNA, 15 bp, Homo sapiens
atcttgctctagtct

SEQ ID NO: 1594449 - DNA, 15 bp, Homo sapiens
tcttgctctagtcta

SEQ ID NO: 1594450 - DNA, 15 bp, Homo sapiens
cttgctctagtctac

SEQ ID NO: 1594451 - DNA, 15 bp, Homo sapiens
ttgctctagtctacc

SEQ ID NO: 1594452 - DNA, 15 bp, Homo sapiens
tgctctagtctacca

SEQ ID NO: 1594453 - DNA, 15 bp, Homo sapiens
gctctagtctaccac

SEQ ID NO: 1594454 - DNA, 15 bp, Homo sapiens
ctctagtctaccaca

SEQ ID NO: 1594455 - DNA, 15 bp, Homo sapiens
tctagtctaccacat

SEQ ID NO: 1594456 - DNA, 15 bp, Homo sapiens
ctagtctaccacata

SEQ ID NO: 1594457 - DNA, 15 bp, Homo sapiens
tagtctaccacataa

SEQ ID NO: 1594458 - DNA, 15 bp, Homo sapiens
agtctaccacataac

SEQ ID NO: 1594459 - DNA, 15 bp, Homo sapiens
gtctaccacataacc

SEQ ID NO: 1594460 - DNA, 15 bp, Homo sapiens
tctaccacataacct

SEQ ID NO: 1594461 - DNA, 15 bp, Homo sapiens
ctaccacataaccta

SEQ ID NO: 1594462 - DNA, 15 bp, Homo sapiens
taccacataacctaa

SEQ ID NO: 1594463 - DNA, 15 bp, Homo sapiens
accacataacctaat

SEQ ID NO: 1594464 - DNA, 15 bp, Homo sapiens
ccacataacctaatc

SEQ ID NO: 1594465 - DNA, 15 bp, Homo sapiens
cacataacctaatca

SEQ ID NO: 1594466 - DNA, 15 bp, Homo sapiens
acataacctaatcac

SEQ ID NO: 1594467 - DNA, 15 bp, Homo sapiens
cataacctaatcaca

SEQ ID NO: 1594468 - DNA, 15 bp, Homo sapiens
ataacctaatcacag

SEQ ID NO: 1594469 - DNA, 15 bp, Homo sapiens
taacctaatcacagg

SEQ ID NO: 1594470 - DNA, 15 bp, Homo sapiens
aacctaatcacagga

SEQ ID NO: 1594471 - DNA, 15 bp, Homo sapiens
acctaatcacaggag

SEQ ID NO: 1594472 - DNA, 15 bp, Homo sapiens
cctaatcacaggagc

SEQ ID NO: 1594473 - DNA, 15 bp, Homo sapiens
ctaatcacaggagcg

SEQ ID NO: 1594474 - DNA, 15 bp, Homo sapiens
taatcacaggagcgg

SEQ ID NO: 1594475 - DNA, 15 bp, Homo sapiens
aatcacaggagcggc

SEQ ID NO: 1594476 - DNA, 15 bp, Homo sapiens
atcacaggagcggct

SEQ ID NO: 1594477 - DNA, 15 bp, Homo sapiens
tcacaggagcggcta

SEQ ID NO: 1594478 - DNA, 15 bp, Homo sapiens
cacaggagcggctat

SEQ ID NO: 1594479 - DNA, 15 bp, Homo sapiens
acaggagcggctatc

SEQ ID NO: 1594480 - DNA, 15 bp, Homo sapiens
caggagcggctatcc

SEQ ID NO: 1594481 - DNA, 15 bp, Homo sapiens
aggagcggctatccc

SEQ ID NO: 1594482 - DNA, 15 bp, Homo sapiens
ggagcggctatcccg

SEQ ID NO: 1594483 - DNA, 15 bp, Homo sapiens
gagcggctatcccgt

SEQ ID NO: 1594484 - DNA, 15 bp, Homo sapiens
agcggctatcccgtt

SEQ ID NO: 1594485 - DNA, 15 bp, Homo sapiens
gcggctatcccgtta

SEQ ID NO: 1594486 - DNA, 15 bp, Homo sapiens
cggctatcccgttat

SEQ ID NO: 1594487 - DNA, 15 bp, Homo sapiens
ggctatcccgttatt

SEQ ID NO: 1594488 - DNA, 15 bp, Homo sapiens
gctatcccgttattt

SEQ ID NO: 1594489 - DNA, 15 bp, Homo sapiens
ctatcccgttatttt

SEQ ID NO: 1594490 - DNA, 15 bp, Homo sapiens
tatcccgttattttc

SEQ ID NO: 1594491 - DNA, 15 bp, Homo sapiens
atcccgttattttca

SEQ ID NO: 1594492 - DNA, 15 bp, Homo sapiens
tcccgttattttcac

SEQ ID NO: 1594493 - DNA, 15 bp, Homo sapiens
cccgttattttcaca

SEQ ID NO: 1594494 - DNA, 15 bp, Homo sapiens
ccgttattttcacag

SEQ ID NO: 1594495 - DNA, 15 bp, Homo sapiens
cgttattttcacaga

SEQ ID NO: 1594496 - DNA, 15 bp, Homo sapiens
gttattttcacagat

SEQ ID NO: 1594497 - DNA, 15 bp, Homo sapiens
ttattttcacagatc

SEQ ID NO: 1594498 - DNA, 15 bp, Homo sapiens
tattttcacagatcc

SEQ ID NO: 1594499 - DNA, 15 bp, Homo sapiens
attttcacagatcct

SEQ ID NO: 1594500 - DNA, 15 bp, Homo sapiens
ttttcacagatcctg

SEQ ID NO: 1594501 - DNA, 15 bp, Homo sapiens
tttcacagatcctgg

SEQ ID NO: 1594502 - DNA, 15 bp, Homo sapiens
ttcacagatcctggt

SEQ ID NO: 1594503 - DNA, 15 bp, Homo sapiens
tcacagatcctggtc

SEQ ID NO: 1594504 - DNA, 15 bp, Homo sapiens
cacagatcctggtca

SEQ ID NO: 1594505 - DNA, 15 bp, Homo sapiens
acagatcctggtcac

SEQ ID NO: 1594506 - DNA, 15 bp, Homo sapiens
cagatcctggtcaca

SEQ ID NO: 1594507 - DNA, 15 bp, Homo sapiens
agatcctggtcacat

SEQ ID NO: 1594508 - DNA, 15 bp, Homo sapiens
gatcctggtcacatt

SEQ ID NO: 1594509 - DNA, 15 bp, Homo sapiens
atcctggtcacattc

SEQ ID NO: 1594510 - DNA, 15 bp, Homo sapiens
tcctggtcacattca

SEQ ID NO: 1594511 - DNA, 15 bp, Homo sapiens
cctggtcacattcaa

SEQ ID NO: 1594512 - DNA, 15 bp, Homo sapiens
ctggtcacattcaag

SEQ ID NO: 1594513 - DNA, 15 bp, Homo sapiens
tggtcacattcaagg

SEQ ID NO: 1594514 - DNA, 15 bp, Homo sapiens
ggtcacattcaaggg

SEQ ID NO: 1594515 - DNA, 15 bp, Homo sapiens
gtcacattcaagggg

SEQ ID NO: 1594516 - DNA, 15 bp, Homo sapiens
tcacattcaagggga

SEQ ID NO: 1594517 - DNA, 15 bp, Homo sapiens
cacattcaaggggag

SEQ ID NO: 1594518 - DNA, 15 bp, Homo sapiens
acattcaaggggagg

SEQ ID NO: 1594519 - DNA, 15 bp, Homo sapiens
cattcaaggggaggg

SEQ ID NO: 1594520 - DNA, 15 bp, Homo sapiens
attcaaggggaggga

SEQ ID NO: 1594521 - DNA, 15 bp, Homo sapiens
ttcaaggggagggaa

SEQ ID NO: 1594522 - DNA, 15 bp, Homo sapiens
tcaaggggagggaac

SEQ ID NO: 1594523 - DNA, 15 bp, Homo sapiens
caaggggagggaacc

SEQ ID NO: 1594524 - DNA, 15 bp, Homo sapiens
aaggggagggaaccc

SEQ ID NO: 1594525 - DNA, 15 bp, Homo sapiens
aggggagggaaccct

SEQ ID NO: 1594526 - DNA, 15 bp, Homo sapiens
ggggagggaaccctt

SEQ ID NO: 1594527 - DNA, 15 bp, Homo sapiens
gggagggaacccttc

SEQ ID NO: 1594528 - DNA, 15 bp, Homo sapiens
ggagggaacccttct

SEQ ID NO: 1594529 - DNA, 15 bp, Homo sapiens
gagggaacccttctg

SEQ ID NO: 1594530 - DNA, 15 bp, Homo sapiens
agggaacccttctgt

SEQ ID NO: 1594531 - DNA, 15 bp, Homo sapiens
gggaacccttctgtg

SEQ ID NO: 1594532 - DNA, 15 bp, Homo sapiens
ggaacccttctgtgt

SEQ ID NO: 1594533 - DNA, 15 bp, Homo sapiens
gaacccttctgtgtg

SEQ ID NO: 1594534 - DNA, 15 bp, Homo sapiens
aacccttctgtgtgt

SEQ ID NO: 1594535 - DNA, 15 bp, Homo sapiens
acccttctgtgtgtg

SEQ ID NO: 1594536 - DNA, 15 bp, Homo sapiens
cccttctgtgtgtgt

SEQ ID NO: 1594537 - DNA, 15 bp, Homo sapiens
ccttctgtgtgtgta

SEQ ID NO: 1594538 - DNA, 15 bp, Homo sapiens
cttctgtgtgtgtac

SEQ ID NO: 1594539 - DNA, 15 bp, Homo sapiens
ttctgtgtgtgtaca

SEQ ID NO: 1594540 - DNA, 15 bp, Homo sapiens
tctgtgtgtgtacac

SEQ ID NO: 1594541 - DNA, 15 bp, Homo sapiens
ctgtgtgtgtacacc

SEQ ID NO: 1594542 - DNA, 15 bp, Homo sapiens
tgtgtgtgtacacca

SEQ ID NO: 1594543 - DNA, 15 bp, Homo sapiens
gtgtgtgtacaccag

SEQ ID NO: 1594544 - DNA, 15 bp, Homo sapiens
tgtgtgtacaccagg

SEQ ID NO: 1594545 - DNA, 15 bp, Homo sapiens
gtgtgtacaccagga

SEQ ID NO: 1594546 - DNA, 15 bp, Homo sapiens
tgtgtacaccaggag

SEQ ID NO: 1594547 - DNA, 15 bp, Homo sapiens
gtgtacaccaggagg

SEQ ID NO: 1594548 - DNA, 15 bp, Homo sapiens
tgtacaccaggaggc

SEQ ID NO: 1594549 - DNA, 15 bp, Homo sapiens
gtacaccaggaggca

SEQ ID NO: 1594550 - DNA, 15 bp, Homo sapiens
tacaccaggaggcag

SEQ ID NO: 1594551 - DNA, 15 bp, Homo sapiens
acaccaggaggcagg

SEQ ID NO: 1594552 - DNA, 15 bp, Homo sapiens
caccaggaggcagga

SEQ ID NO: 1594553 - DNA, 15 bp, Homo sapiens
accaggaggcaggaa

SEQ ID NO: 1594554 - DNA, 15 bp, Homo sapiens
ccaggaggcaggaat

SEQ ID NO: 1594555 - DNA, 15 bp, Homo sapiens
caggaggcaggaatt

SEQ ID NO: 1594556 - DNA, 15 bp, Homo sapiens
aggaggcaggaattt

SEQ ID NO: 1594557 - DNA, 15 bp, Homo sapiens
ggaggcaggaatttt

SEQ ID NO: 1594558 - DNA, 15 bp, Homo sapiens
gaggcaggaattttt

SEQ ID NO: 1594559 - DNA, 15 bp, Homo sapiens
aggcaggaatttttt

SEQ ID NO: 1594560 - DNA, 15 bp, Homo sapiens
ggcaggaattttttt

SEQ ID NO: 1594561 - DNA, 15 bp, Homo sapiens
gcaggaatttttttt

SEQ ID NO: 1594562 - DNA, 15 bp, Homo sapiens
aattttttttttctt

SEQ ID NO: 1594563 - DNA, 15 bp, Homo sapiens
tctttttcttttttg

SEQ ID NO: 1594564 - DNA, 15 bp, Homo sapiens
ctttttcttttttgt

SEQ ID NO: 1594565 - DNA, 15 bp, Homo sapiens
ttttcttttttgtta

SEQ ID NO: 1594566 - DNA, 15 bp, Homo sapiens
tttcttttttgttaa

SEQ ID NO: 1594567 - DNA, 15 bp, Homo sapiens
ttcttttttgttaaa

SEQ ID NO: 1594568 - DNA, 15 bp, Homo sapiens
tcttttttgttaaaa

SEQ ID NO: 1594569 - DNA, 15 bp, Homo sapiens
cttttttgttaaaaa

SEQ ID NO: 1594570 - DNA, 15 bp, Homo sapiens
ttttttgttaaaaag

SEQ ID NO: 1594571 - DNA, 15 bp, Homo sapiens
tttttgttaaaaagt

SEQ ID NO: 1594572 - DNA, 15 bp, Homo sapiens
ttttgttaaaaagtc

SEQ ID NO: 1594573 - DNA, 15 bp, Homo sapiens
tttgttaaaaagtct

SEQ ID NO: 1594574 - DNA, 15 bp, Homo sapiens
ttgttaaaaagtctt

SEQ ID NO: 1594575 - DNA, 15 bp, Homo sapiens
tgttaaaaagtctta

SEQ ID NO: 1594576 - DNA, 15 bp, Homo sapiens
gttaaaaagtcttaa

SEQ ID NO: 1594577 - DNA, 15 bp, Homo sapiens
ttaaaaagtcttaaa

SEQ ID NO: 1594578 - DNA, 15 bp, Homo sapiens
taaaaagtcttaaag

SEQ ID NO: 1594579 - DNA, 15 bp, Homo sapiens
aaaaagtcttaaagt

SEQ ID NO: 1594580 - DNA, 15 bp, Homo sapiens
aaaagtcttaaagtc

SEQ ID NO: 1594581 - DNA, 15 bp, Homo sapiens
aaagtcttaaagtct

SEQ ID NO: 1594582 - DNA, 15 bp, Homo sapiens
aagtcttaaagtctt

SEQ ID NO: 1594583 - DNA, 15 bp, Homo sapiens
agtcttaaagtcttt

SEQ ID NO: 1594584 - DNA, 15 bp, Homo sapiens
gtcttaaagtctttt

SEQ ID NO: 1594585 - DNA, 15 bp, Homo sapiens
tcttaaagtctttta

SEQ ID NO: 1594586 - DNA, 15 bp, Homo sapiens
cttaaagtcttttat

SEQ ID NO: 1594587 - DNA, 15 bp, Homo sapiens
ttaaagtcttttatc

SEQ ID NO: 1594588 - DNA, 15 bp, Homo sapiens
taaagtcttttatcc

SEQ ID NO: 1594589 - DNA, 15 bp, Homo sapiens
aaagtcttttatccc

SEQ ID NO: 1594590 - DNA, 15 bp, Homo sapiens
aagtcttttatccct

SEQ ID NO: 1594591 - DNA, 15 bp, Homo sapiens
agtcttttatcccta

SEQ ID NO: 1594592 - DNA, 15 bp, Homo sapiens
gtcttttatccctaa

SEQ ID NO: 1594593 - DNA, 15 bp, Homo sapiens
tcttttatccctaaa

SEQ ID NO: 1594594 - DNA, 15 bp, Homo sapiens
cttttatccctaaag

SEQ ID NO: 1594595 - DNA, 15 bp, Homo sapiens
ttttatccctaaagg

SEQ ID NO: 1594596 - DNA, 15 bp, Homo sapiens
tttatccctaaagga

SEQ ID NO: 1594597 - DNA, 15 bp, Homo sapiens
ttatccctaaaggag

SEQ ID NO: 1594598 - DNA, 15 bp, Homo sapiens
tatccctaaaggagg

SEQ ID NO: 1594599 - DNA, 15 bp, Homo sapiens
atccctaaaggaggc

SEQ ID NO: 1594600 - DNA, 15 bp, Homo sapiens
tccctaaaggaggca

SEQ ID NO: 1594601 - DNA, 15 bp, Homo sapiens
ccctaaaggaggcag

SEQ ID NO: 1594602 - DNA, 15 bp, Homo sapiens
cctaaaggaggcagg

SEQ ID NO: 1594603 - DNA, 15 bp, Homo sapiens
ctaaaggaggcagga

SEQ ID NO: 1594604 - DNA, 15 bp, Homo sapiens
taaaggaggcaggaa

SEQ ID NO: 1594605 - DNA, 15 bp, Homo sapiens
aaaggaggcaggaat

SEQ ID NO: 1594606 - DNA, 15 bp, Homo sapiens
aaggaggcaggaatt

SEQ ID NO: 1594607 - DNA, 15 bp, Homo sapiens
gaggcaggaattttg

SEQ ID NO: 1594608 - DNA, 15 bp, Homo sapiens
aggcaggaattttga

SEQ ID NO: 1594609 - DNA, 15 bp, Homo sapiens
ggcaggaattttgag

SEQ ID NO: 1594610 - DNA, 15 bp, Homo sapiens
gcaggaattttgaga

SEQ ID NO: 1594611 - DNA, 15 bp, Homo sapiens
caggaattttgagag

SEQ ID NO: 1594612 - DNA, 15 bp, Homo sapiens
aggaattttgagagc

SEQ ID NO: 1594613 - DNA, 15 bp, Homo sapiens
ggaattttgagagcc

SEQ ID NO: 1594614 - DNA, 15 bp, Homo sapiens
gaattttgagagcca

SEQ ID NO: 1594615 - DNA, 15 bp, Homo sapiens
aattttgagagccat

SEQ ID NO: 1594616 - DNA, 15 bp, Homo sapiens
attttgagagccatc

SEQ ID NO: 1594617 - DNA, 15 bp, Homo sapiens
ttttgagagccatca

SEQ ID NO: 1594618 - DNA, 15 bp, Homo sapiens
tttgagagccatcag

SEQ ID NO: 1594619 - DNA, 15 bp, Homo sapiens
ttgagagccatcaga

SEQ ID NO: 1594620 - DNA, 15 bp, Homo sapiens
tgagagccatcagaa

SEQ ID NO: 1594621 - DNA, 15 bp, Homo sapiens
gagagccatcagaat

SEQ ID NO: 1594622 - DNA, 15 bp, Homo sapiens
agagccatcagaatt

SEQ ID NO: 1594623 - DNA, 15 bp, Homo sapiens
gagccatcagaattc

SEQ ID NO: 1594624 - DNA, 15 bp, Homo sapiens
agccatcagaattct

SEQ ID NO: 1594625 - DNA, 15 bp, Homo sapiens
gccatcagaattctg

SEQ ID NO: 1594626 - DNA, 15 bp, Homo sapiens
ccatcagaattctgc

SEQ ID NO: 1594627 - DNA, 15 bp, Homo sapiens
catcagaattctgcc

SEQ ID NO: 1594628 - DNA, 15 bp, Homo sapiens
atcagaattctgcct

SEQ ID NO: 1594629 - DNA, 15 bp, Homo sapiens
tcagaattctgccta

SEQ ID NO: 1594630 - DNA, 15 bp, Homo sapiens
cagaattctgcctac

SEQ ID NO: 1594631 - DNA, 15 bp, Homo sapiens
agaattctgcctacc

SEQ ID NO: 1594632 - DNA, 15 bp, Homo sapiens
gaattctgcctacca

SEQ ID NO: 1594633 - DNA, 15 bp, Homo sapiens
aattctgcctaccac

SEQ ID NO: 1594634 - DNA, 15 bp, Homo sapiens
attctgcctaccaca

SEQ ID NO: 1594635 - DNA, 15 bp, Homo sapiens
ttctgcctaccacag

SEQ ID NO: 1594636 - DNA, 15 bp, Homo sapiens
tctgcctaccacagc

SEQ ID NO: 1594637 - DNA, 15 bp, Homo sapiens
ctgcctaccacagcc

SEQ ID NO: 1594638 - DNA, 15 bp, Homo sapiens
tgcctaccacagccc

SEQ ID NO: 1594639 - DNA, 15 bp, Homo sapiens
gcctaccacagccca

SEQ ID NO: 1594640 - DNA, 15 bp, Homo sapiens
cctaccacagcccag

SEQ ID NO: 1594641 - DNA, 15 bp, Homo sapiens
ctaccacagcccaga

SEQ ID NO: 1594642 - DNA, 15 bp, Homo sapiens
taccacagcccagaa

SEQ ID NO: 1594643 - DNA, 15 bp, Homo sapiens
accacagcccagaaa

SEQ ID NO: 1594644 - DNA, 15 bp, Homo sapiens
ccacagcccagaaat

SEQ ID NO: 1594645 - DNA, 15 bp, Homo sapiens
cacagcccagaaatc

SEQ ID NO: 1594646 - DNA, 15 bp, Homo sapiens
acagcccagaaatct

SEQ ID NO: 1594647 - DNA, 15 bp, Homo sapiens
cagcccagaaatctg

SEQ ID NO: 1594648 - DNA, 15 bp, Homo sapiens
agcccagaaatctgc

SEQ ID NO: 1594649 - DNA, 15 bp, Homo sapiens
gcccagaaatctgca

SEQ ID NO: 1594650 - DNA, 15 bp, Homo sapiens
cccagaaatctgcat

SEQ ID NO: 1594651 - DNA, 15 bp, Homo sapiens
ccagaaatctgcatt

SEQ ID NO: 1594652 - DNA, 15 bp, Homo sapiens
cagaaatctgcattt

SEQ ID NO: 1594653 - DNA, 15 bp, Homo sapiens
agaaatctgcatttt

SEQ ID NO: 1594654 - DNA, 15 bp, Homo sapiens
gaaatctgcattttt

SEQ ID NO: 1594655 - DNA, 15 bp, Homo sapiens
aaatctgcatttttc

SEQ ID NO: 1594656 - DNA, 15 bp, Homo sapiens
aatctgcatttttca

SEQ ID NO: 1594657 - DNA, 15 bp, Homo sapiens
atctgcatttttcac

SEQ ID NO: 1594658 - DNA, 15 bp, Homo sapiens
tctgcatttttcaca

SEQ ID NO: 1594659 - DNA, 15 bp, Homo sapiens
ctgcatttttcacaa

SEQ ID NO: 1594660 - DNA, 15 bp, Homo sapiens
tgcatttttcacaag

SEQ ID NO: 1594661 - DNA, 15 bp, Homo sapiens
gcatttttcacaagt

SEQ ID NO: 1594662 - DNA, 15 bp, Homo sapiens
catttttcacaagtc

SEQ ID NO: 1594663 - DNA, 15 bp, Homo sapiens
atttttcacaagtct

SEQ ID NO: 1594664 - DNA, 15 bp, Homo sapiens
tttttcacaagtctc

SEQ ID NO: 1594665 - DNA, 15 bp, Homo sapiens
ttttcacaagtctcc

SEQ ID NO: 1594666 - DNA, 15 bp, Homo sapiens
tttcacaagtctcca

SEQ ID NO: 1594667 - DNA, 15 bp, Homo sapiens
ttcacaagtctccag

SEQ ID NO: 1594668 - DNA, 15 bp, Homo sapiens
tcacaagtctccagc

SEQ ID NO: 1594669 - DNA, 15 bp, Homo sapiens
cacaagtctccagcc

SEQ ID NO: 1594670 - DNA, 15 bp, Homo sapiens
acaagtctccagcca

SEQ ID NO: 1594671 - DNA, 15 bp, Homo sapiens
caagtctccagccat

SEQ ID NO: 1594672 - DNA, 15 bp, Homo sapiens
aagtctccagccatg

SEQ ID NO: 1594673 - DNA, 15 bp, Homo sapiens
agtctccagccatga

SEQ ID NO: 1594674 - DNA, 15 bp, Homo sapiens
gtctccagccatgat

SEQ ID NO: 1594675 - DNA, 15 bp, Homo sapiens
tctccagccatgatg

SEQ ID NO: 1594676 - DNA, 15 bp, Homo sapiens
ctccagccatgatgt

SEQ ID NO: 1594677 - DNA, 15 bp, Homo sapiens
tccagccatgatgtt

SEQ ID NO: 1594678 - DNA, 15 bp, Homo sapiens
ccagccatgatgttt

SEQ ID NO: 1594679 - DNA, 15 bp, Homo sapiens
cagccatgatgtttc

SEQ ID NO: 1594680 - DNA, 15 bp, Homo sapiens
agccatgatgtttct

SEQ ID NO: 1594681 - DNA, 15 bp, Homo sapiens
gccatgatgtttctg

SEQ ID NO: 1594682 - DNA, 15 bp, Homo sapiens
ccatgatgtttctga

SEQ ID NO: 1594683 - DNA, 15 bp, Homo sapiens
catgatgtttctgat

SEQ ID NO: 1594684 - DNA, 15 bp, Homo sapiens
atgatgtttctgatg

SEQ ID NO: 1594685 - DNA, 15 bp, Homo sapiens
tgatgtttctgatgg

SEQ ID NO: 1594686 - DNA, 15 bp, Homo sapiens
gatgtttctgatggc

SEQ ID NO: 1594687 - DNA, 15 bp, Homo sapiens
atgtttctgatggct

SEQ ID NO: 1594688 - DNA, 15 bp, Homo sapiens
tgtttctgatggctc

SEQ ID NO: 1594689 - DNA, 15 bp, Homo sapiens
gtttctgatggctca

SEQ ID NO: 1594690 - DNA, 15 bp, Homo sapiens
tttctgatggctcac

SEQ ID NO: 1594691 - DNA, 15 bp, Homo sapiens
ttctgatggctcaca

SEQ ID NO: 1594692 - DNA, 15 bp, Homo sapiens
tctgatggctcacac

SEQ ID NO: 1594693 - DNA, 15 bp, Homo sapiens
ctgatggctcacact

SEQ ID NO: 1594694 - DNA, 15 bp, Homo sapiens
tgatggctcacactg

SEQ ID NO: 1594695 - DNA, 15 bp, Homo sapiens
gatggctcacactgc

SEQ ID NO: 1594696 - DNA, 15 bp, Homo sapiens
atggctcacactgct

SEQ ID NO: 1594697 - DNA, 15 bp, Homo sapiens
tggctcacactgctt

SEQ ID NO: 1594698 - DNA, 15 bp, Homo sapiens
ggctcacactgcttt

SEQ ID NO: 1594699 - DNA, 15 bp, Homo sapiens
gctcacactgcttta

SEQ ID NO: 1594700 - DNA, 15 bp, Homo sapiens
ctcacactgctttat

SEQ ID NO: 1594701 - DNA, 15 bp, Homo sapiens
tcacactgctttatt

SEQ ID NO: 1594702 - DNA, 15 bp, Homo sapiens
cacactgctttattc

SEQ ID NO: 1594703 - DNA, 15 bp, Homo sapiens
acactgctttattcc

SEQ ID NO: 1594704 - DNA, 15 bp, Homo sapiens
cactgctttattcca

SEQ ID NO: 1594705 - DNA, 15 bp, Homo sapiens
actgctttattccat

SEQ ID NO: 1594706 - DNA, 15 bp, Homo sapiens
ctgctttattccatt

SEQ ID NO: 1594707 - DNA, 15 bp, Homo sapiens
tgctttattccattt

SEQ ID NO: 1594708 - DNA, 15 bp, Homo sapiens
gctttattccatttt

SEQ ID NO: 1594709 - DNA, 15 bp, Homo sapiens
ctttattccattttt

SEQ ID NO: 1594710 - DNA, 15 bp, Homo sapiens
tttattccattttta

SEQ ID NO: 1594711 - DNA, 15 bp, Homo sapiens
ttattccatttttaa

SEQ ID NO: 1594712 - DNA, 15 bp, Homo sapiens
tattccatttttaaa

SEQ ID NO: 1594713 - DNA, 15 bp, Homo sapiens
attccatttttaaag

SEQ ID NO: 1594714 - DNA, 15 bp, Homo sapiens
ttccatttttaaaga

SEQ ID NO: 1594715 - DNA, 15 bp, Homo sapiens
tccatttttaaagag

SEQ ID NO: 1594716 - DNA, 15 bp, Homo sapiens
ccatttttaaagagt

SEQ ID NO: 1594717 - DNA, 15 bp, Homo sapiens
catttttaaagagta

SEQ ID NO: 1594718 - DNA, 15 bp, Homo sapiens
atttttaaagagtat

SEQ ID NO: 1594719 - DNA, 15 bp, Homo sapiens
tttttaaagagtatt

SEQ ID NO: 1594720 - DNA, 15 bp, Homo sapiens
ttttaaagagtattt

SEQ ID NO: 1594721 - DNA, 15 bp, Homo sapiens
tttaaagagtatttt

SEQ ID NO: 1594722 - DNA, 15 bp, Homo sapiens
ttaaagagtattttt

SEQ ID NO: 1594723 - DNA, 15 bp, Homo sapiens
taaagagtattttta

SEQ ID NO: 1594724 - DNA, 15 bp, Homo sapiens
aaagagtatttttat

SEQ ID NO: 1594725 - DNA, 15 bp, Homo sapiens
aagagtatttttatt

SEQ ID NO: 1594726 - DNA, 15 bp, Homo sapiens
agagtatttttattg

SEQ ID NO: 1594727 - DNA, 15 bp, Homo sapiens
gagtatttttattga

SEQ ID NO: 1594728 - DNA, 15 bp, Homo sapiens
agtatttttattgaa

SEQ ID NO: 1594729 - DNA, 15 bp, Homo sapiens
gtatttttattgaaa

SEQ ID NO: 1594730 - DNA, 15 bp, Homo sapiens
tatttttattgaaaa

SEQ ID NO: 1594731 - DNA, 15 bp, Homo sapiens
atttttattgaaaag

SEQ ID NO: 1594732 - DNA, 15 bp, Homo sapiens
tttttattgaaaagc

SEQ ID NO: 1594733 - DNA, 15 bp, Homo sapiens
ttttattgaaaagca

SEQ ID NO: 1594734 - DNA, 15 bp, Homo sapiens
tttattgaaaagcat

SEQ ID NO: 1594735 - DNA, 15 bp, Homo sapiens
ttattgaaaagcatt

SEQ ID NO: 1594736 - DNA, 15 bp, Homo sapiens
tattgaaaagcatta

SEQ ID NO: 1594737 - DNA, 15 bp, Homo sapiens
attgaaaagcattag

SEQ ID NO: 1594738 - DNA, 15 bp, Homo sapiens
ttgaaaagcattagg

SEQ ID NO: 1594739 - DNA, 15 bp, Homo sapiens
tgaaaagcattaggg

SEQ ID NO: 1594740 - DNA, 15 bp, Homo sapiens
gaaaagcattagggt

SEQ ID NO: 1594741 - DNA, 15 bp, Homo sapiens
aaaagcattagggtt

SEQ ID NO: 1594742 - DNA, 15 bp, Homo sapiens
aaagcattagggtta

SEQ ID NO: 1594743 - DNA, 15 bp, Homo sapiens
aagcattagggttat

SEQ ID NO: 1594744 - DNA, 15 bp, Homo sapiens
agcattagggttatg

SEQ ID NO: 1594745 - DNA, 15 bp, Homo sapiens
gcattagggttatgg

SEQ ID NO: 1594746 - DNA, 15 bp, Homo sapiens
cattagggttatggt

SEQ ID NO: 1594747 - DNA, 15 bp, Homo sapiens
attagggttatggtt

SEQ ID NO: 1594748 - DNA, 15 bp, Homo sapiens
ttagggttatggttt

SEQ ID NO: 1594749 - DNA, 15 bp, Homo sapiens
tagggttatggttta

SEQ ID NO: 1594750 - DNA, 15 bp, Homo sapiens
agggttatggtttaa

SEQ ID NO: 1594751 - DNA, 15 bp, Homo sapiens
gggttatggtttaaa

SEQ ID NO: 1594752 - DNA, 15 bp, Homo sapiens
ggttatggtttaaaa

SEQ ID NO: 1594753 - DNA, 15 bp, Homo sapiens
gttatggtttaaaaa

SEQ ID NO: 1594754 - DNA, 15 bp, Homo sapiens
ttatggtttaaaaaa

SEQ ID NO: 1594755 - DNA, 15 bp, Homo sapiens
tatggtttaaaaaat

SEQ ID NO: 1594756 - DNA, 15 bp, Homo sapiens
atggtttaaaaaata

SEQ ID NO: 1594757 - DNA, 15 bp, Homo sapiens
tggtttaaaaaatat

SEQ ID NO: 1594758 - DNA, 15 bp, Homo sapiens
ggtttaaaaaatatt

SEQ ID NO: 1594759 - DNA, 15 bp, Homo sapiens
gtttaaaaaatattt

SEQ ID NO: 1594760 - DNA, 15 bp, Homo sapiens
ttaaaaaatattttc

SEQ ID NO: 1594761 - DNA, 15 bp, Homo sapiens
taaaaaatattttcc

SEQ ID NO: 1594762 - DNA, 15 bp, Homo sapiens
aaaaaatattttccc

SEQ ID NO: 1594763 - DNA, 15 bp, Homo sapiens
aaaaatattttccct

SEQ ID NO: 1594764 - DNA, 15 bp, Homo sapiens
aaaatattttcccta

SEQ ID NO: 1594765 - DNA, 15 bp, Homo sapiens
aaatattttccctaa

SEQ ID NO: 1594766 - DNA, 15 bp, Homo sapiens
aatattttccctaac

SEQ ID NO: 1594767 - DNA, 15 bp, Homo sapiens
atattttccctaaca

SEQ ID NO: 1594768 - DNA, 15 bp, Homo sapiens
tattttccctaacaa

SEQ ID NO: 1594769 - DNA, 15 bp, Homo sapiens
attttccctaacaaa

SEQ ID NO: 1594770 - DNA, 15 bp, Homo sapiens
ttttccctaacaaag

SEQ ID NO: 1594771 - DNA, 15 bp, Homo sapiens
tttccctaacaaaga

SEQ ID NO: 1594772 - DNA, 15 bp, Homo sapiens
ttccctaacaaagat

SEQ ID NO: 1594773 - DNA, 15 bp, Homo sapiens
tccctaacaaagatg

SEQ ID NO: 1594774 - DNA, 15 bp, Homo sapiens
ccctaacaaagatgg

SEQ ID NO: 1594775 - DNA, 15 bp, Homo sapiens
cctaacaaagatggg

SEQ ID NO: 1594776 - DNA, 15 bp, Homo sapiens
ctaacaaagatgggt

SEQ ID NO: 1594777 - DNA, 15 bp, Homo sapiens
taacaaagatgggtt

SEQ ID NO: 1594778 - DNA, 15 bp, Homo sapiens
aacaaagatgggttt

SEQ ID NO: 1594779 - DNA, 15 bp, Homo sapiens
acaaagatgggtttg

SEQ ID NO: 1594780 - DNA, 15 bp, Homo sapiens
caaagatgggtttgt

SEQ ID NO: 1594781 - DNA, 15 bp, Homo sapiens
aaagatgggtttgtt

SEQ ID NO: 1594782 - DNA, 15 bp, Homo sapiens
aagatgggtttgttt

SEQ ID NO: 1594783 - DNA, 15 bp, Homo sapiens
agatgggtttgttta

SEQ ID NO: 1594784 - DNA, 15 bp, Homo sapiens
gatgggtttgtttag

SEQ ID NO: 1594785 - DNA, 15 bp, Homo sapiens
atgggtttgtttaga

SEQ ID NO: 1594786 - DNA, 15 bp, Homo sapiens
tgggtttgtttagag

SEQ ID NO: 1594787 - DNA, 15 bp, Homo sapiens
gggtttgtttagagt

SEQ ID NO: 1594788 - DNA, 15 bp, Homo sapiens
ggtttgtttagagtc

SEQ ID NO: 1594789 - DNA, 15 bp, Homo sapiens
gtttgtttagagtcc

SEQ ID NO: 1594790 - DNA, 15 bp, Homo sapiens
tttgtttagagtcct

SEQ ID NO: 1594791 - DNA, 15 bp, Homo sapiens
ttgtttagagtccta

SEQ ID NO: 1594792 - DNA, 15 bp, Homo sapiens
tgtttagagtcctac

SEQ ID NO: 1594793 - DNA, 15 bp, Homo sapiens
gtttagagtcctact

SEQ ID NO: 1594794 - DNA, 15 bp, Homo sapiens
tttagagtcctactt

SEQ ID NO: 1594795 - DNA, 15 bp, Homo sapiens
ttagagtcctacttt

SEQ ID NO: 1594796 - DNA, 15 bp, Homo sapiens
tagagtcctactttt

SEQ ID NO: 1594797 - DNA, 15 bp, Homo sapiens
agagtcctacttttg

SEQ ID NO: 1594798 - DNA, 15 bp, Homo sapiens
gagtcctacttttga

SEQ ID NO: 1594799 - DNA, 15 bp, Homo sapiens
agtcctacttttgac

SEQ ID NO: 1594800 - DNA, 15 bp, Homo sapiens
gtcctacttttgact

SEQ ID NO: 1594801 - DNA, 15 bp, Homo sapiens
tcctacttttgacta

SEQ ID NO: 1594802 - DNA, 15 bp, Homo sapiens
cctacttttgactaa

SEQ ID NO: 1594803 - DNA, 15 bp, Homo sapiens
ctacttttgactaaa

SEQ ID NO: 1594804 - DNA, 15 bp, Homo sapiens
tacttttgactaaat

SEQ ID NO: 1594805 - DNA, 15 bp, Homo sapiens
acttttgactaaata

SEQ ID NO: 1594806 - DNA, 15 bp, Homo sapiens
cttttgactaaatag

SEQ ID NO: 1594807 - DNA, 15 bp, Homo sapiens
ttttgactaaatagc

SEQ ID NO: 1594808 - DNA, 15 bp, Homo sapiens
tttgactaaatagct

SEQ ID NO: 1594809 - DNA, 15 bp, Homo sapiens
ttgactaaatagctg

SEQ ID NO: 1594810 - DNA, 15 bp, Homo sapiens
tgactaaatagctga

SEQ ID NO: 1594811 - DNA, 15 bp, Homo sapiens
gactaaatagctgag

SEQ ID NO: 1594812 - DNA, 15 bp, Homo sapiens
actaaatagctgaga

SEQ ID NO: 1594813 - DNA, 15 bp, Homo sapiens
ctaaatagctgagat

SEQ ID NO: 1594814 - DNA, 15 bp, Homo sapiens
taaatagctgagatt

SEQ ID NO: 1594815 - DNA, 15 bp, Homo sapiens
aaatagctgagattc

SEQ ID NO: 1594816 - DNA, 15 bp, Homo sapiens
aatagctgagattca

SEQ ID NO: 1594817 - DNA, 15 bp, Homo sapiens
atagctgagattcac

SEQ ID NO: 1594818 - DNA, 15 bp, Homo sapiens
tagctgagattcact

SEQ ID NO: 1594819 - DNA, 15 bp, Homo sapiens
agctgagattcactt

SEQ ID NO: 1594820 - DNA, 15 bp, Homo sapiens
gctgagattcacttt

SEQ ID NO: 1594821 - DNA, 15 bp, Homo sapiens
ctgagattcactttt

SEQ ID NO: 1594822 - DNA, 15 bp, Homo sapiens
tgagattcactttta

SEQ ID NO: 1594823 - DNA, 15 bp, Homo sapiens
gagattcacttttat

SEQ ID NO: 1594824 - DNA, 15 bp, Homo sapiens
agattcacttttatg

SEQ ID NO: 1594825 - DNA, 15 bp, Homo sapiens
gattcacttttatgt

SEQ ID NO: 1594826 - DNA, 15 bp, Homo sapiens
attcacttttatgta

SEQ ID NO: 1594827 - DNA, 15 bp, Homo sapiens
ttcacttttatgtaa

SEQ ID NO: 1594828 - DNA, 15 bp, Homo sapiens
tcacttttatgtaaa

SEQ ID NO: 1594829 - DNA, 15 bp, Homo sapiens
cacttttatgtaaag

SEQ ID NO: 1594830 - DNA, 15 bp, Homo sapiens
acttttatgtaaagt

SEQ ID NO: 1594831 - DNA, 15 bp, Homo sapiens
cttttatgtaaagtc

SEQ ID NO: 1594832 - DNA, 15 bp, Homo sapiens
ttttatgtaaagtca

SEQ ID NO: 1594833 - DNA, 15 bp, Homo sapiens
tttatgtaaagtcat

SEQ ID NO: 1594834 - DNA, 15 bp, Homo sapiens
ttatgtaaagtcatt

SEQ ID NO: 1594835 - DNA, 15 bp, Homo sapiens
tatgtaaagtcattt

SEQ ID NO: 1594836 - DNA, 15 bp, Homo sapiens
atgtaaagtcatttt

SEQ ID NO: 1594837 - DNA, 15 bp, Homo sapiens
tgtaaagtcatttta

SEQ ID NO: 1594838 - DNA, 15 bp, Homo sapiens
gtaaagtcattttat

SEQ ID NO: 1594839 - DNA, 15 bp, Homo sapiens
taaagtcattttata

SEQ ID NO: 1594840 - DNA, 15 bp, Homo sapiens
aaagtcattttatag

SEQ ID NO: 1594841 - DNA, 15 bp, Homo sapiens
aagtcattttatagc

SEQ ID NO: 1594842 - DNA, 15 bp, Homo sapiens
agtcattttatagcg

SEQ ID NO: 1594843 - DNA, 15 bp, Homo sapiens
gtcattttatagcgt

SEQ ID NO: 1594844 - DNA, 15 bp, Homo sapiens
tcattttatagcgtt

SEQ ID NO: 1594845 - DNA, 15 bp, Homo sapiens
cattttatagcgtta

SEQ ID NO: 1594846 - DNA, 15 bp, Homo sapiens
attttatagcgttat

SEQ ID NO: 1594847 - DNA, 15 bp, Homo sapiens
ttttatagcgttatt

SEQ ID NO: 1594848 - DNA, 15 bp, Homo sapiens
tttatagcgttatta

SEQ ID NO: 1594849 - DNA, 15 bp, Homo sapiens
ttatagcgttattaa

SEQ ID NO: 1594850 - DNA, 15 bp, Homo sapiens
tatagcgttattaat

SEQ ID NO: 1594851 - DNA, 15 bp, Homo sapiens
atagcgttattaatt

SEQ ID NO: 1594852 - DNA, 15 bp, Homo sapiens
tagcgttattaattt

SEQ ID NO: 1594853 - DNA, 15 bp, Homo sapiens
agcgttattaatttg

SEQ ID NO: 1594854 - DNA, 15 bp, Homo sapiens
gcgttattaatttgg

SEQ ID NO: 1594855 - DNA, 15 bp, Homo sapiens
cgttattaatttggg

SEQ ID NO: 1594856 - DNA, 15 bp, Homo sapiens
gttattaatttgggt

SEQ ID NO: 1594857 - DNA, 15 bp, Homo sapiens
ttattaatttgggtg

SEQ ID NO: 1594858 - DNA, 15 bp, Homo sapiens
tattaatttgggtgc

SEQ ID NO: 1594859 - DNA, 15 bp, Homo sapiens
attaatttgggtgcc

SEQ ID NO: 1594860 - DNA, 15 bp, Homo sapiens
ttaatttgggtgcct

SEQ ID NO: 1594861 - DNA, 15 bp, Homo sapiens
taatttgggtgcctt

SEQ ID NO: 1594862 - DNA, 15 bp, Homo sapiens
aatttgggtgccttt

SEQ ID NO: 1594863 - DNA, 15 bp, Homo sapiens
atttgggtgccttta

SEQ ID NO: 1594864 - DNA, 15 bp, Homo sapiens
tttgggtgcctttaa

SEQ ID NO: 1594865 - DNA, 15 bp, Homo sapiens
ttgggtgcctttaaa

SEQ ID NO: 1594866 - DNA, 15 bp, Homo sapiens
tgggtgcctttaaaa

SEQ ID NO: 1594867 - DNA, 15 bp, Homo sapiens
gggtgcctttaaaaa

SEQ ID NO: 1594868 - DNA, 15 bp, Homo sapiens
ggtgcctttaaaaat

SEQ ID NO: 1594869 - DNA, 15 bp, Homo sapiens
gtgcctttaaaaata

SEQ ID NO: 1594870 - DNA, 15 bp, Homo sapiens
tgcctttaaaaatag

SEQ ID NO: 1594871 - DNA, 15 bp, Homo sapiens
gcctttaaaaatagt

SEQ ID NO: 1594872 - DNA, 15 bp, Homo sapiens
cctttaaaaatagta

SEQ ID NO: 1594873 - DNA, 15 bp, Homo sapiens
ctttaaaaatagtat

SEQ ID NO: 1594874 - DNA, 15 bp, Homo sapiens
tttaaaaatagtata

SEQ ID NO: 1594875 - DNA, 15 bp, Homo sapiens
ttaaaaatagtataa

SEQ ID NO: 1594876 - DNA, 15 bp, Homo sapiens
taaaaatagtataaa

SEQ ID NO: 1594877 - DNA, 15 bp, Homo sapiens
aaaaatagtataaag

SEQ ID NO: 1594878 - DNA, 15 bp, Homo sapiens
aaaatagtataaagc

SEQ ID NO: 1594879 - DNA, 15 bp, Homo sapiens
aaatagtataaagca

SEQ ID NO: 1594880 - DNA, 15 bp, Homo sapiens
aatagtataaagcat

SEQ ID NO: 1594881 - DNA, 15 bp, Homo sapiens
atagtataaagcatg

SEQ ID NO: 1594882 - DNA, 15 bp, Homo sapiens
tagtataaagcatgt

SEQ ID NO: 1594883 - DNA, 15 bp, Homo sapiens
agtataaagcatgtt

SEQ ID NO: 1594884 - DNA, 15 bp, Homo sapiens
gtataaagcatgttt

SEQ ID NO: 1594885 - DNA, 15 bp, Homo sapiens
tataaagcatgtttc

SEQ ID NO: 1594886 - DNA, 15 bp, Homo sapiens
ataaagcatgtttct

SEQ ID NO: 1594887 - DNA, 15 bp, Homo sapiens
taaagcatgtttctc

SEQ ID NO: 1594888 - DNA, 15 bp, Homo sapiens
aaagcatgtttctcg

SEQ ID NO: 1594889 - DNA, 15 bp, Homo sapiens
aagcatgtttctcga

SEQ ID NO: 1594890 - DNA, 15 bp, Homo sapiens
agcatgtttctcgag

SEQ ID NO: 1594891 - DNA, 15 bp, Homo sapiens
gcatgtttctcgagt

SEQ ID NO: 1594892 - DNA, 15 bp, Homo sapiens
catgtttctcgagtg

SEQ ID NO: 1594893 - DNA, 15 bp, Homo sapiens
atgtttctcgagtgt

SEQ ID NO: 1594894 - DNA, 15 bp, Homo sapiens
tgtttctcgagtgta

SEQ ID NO: 1594895 - DNA, 15 bp, Homo sapiens
gtttctcgagtgtag

SEQ ID NO: 1594896 - DNA, 15 bp, Homo sapiens
tttctcgagtgtagt

SEQ ID NO: 1594897 - DNA, 15 bp, Homo sapiens
ttctcgagtgtagtc

SEQ ID NO: 1594898 - DNA, 15 bp, Homo sapiens
tctcgagtgtagtct

SEQ ID NO: 1594899 - DNA, 15 bp, Homo sapiens
ctcgagtgtagtctg

SEQ ID NO: 1594900 - DNA, 15 bp, Homo sapiens
tcgagtgtagtctgt

SEQ ID NO: 1594901 - DNA, 15 bp, Homo sapiens
cgagtgtagtctgtt

SEQ ID NO: 1594902 - DNA, 15 bp, Homo sapiens
gagtgtagtctgtta

SEQ ID NO: 1594903 - DNA, 15 bp, Homo sapiens
agtgtagtctgttag

SEQ ID NO: 1594904 - DNA, 15 bp, Homo sapiens
gtgtagtctgttagc

SEQ ID NO: 1594905 - DNA, 15 bp, Homo sapiens
tgtagtctgttagcc

SEQ ID NO: 1594906 - DNA, 15 bp, Homo sapiens
gtagtctgttagcca

SEQ ID NO: 1594907 - DNA, 15 bp, Homo sapiens
tagtctgttagccac

SEQ ID NO: 1594908 - DNA, 15 bp, Homo sapiens
agtctgttagccacc

SEQ ID NO: 1594909 - DNA, 15 bp, Homo sapiens
gtctgttagccacct

SEQ ID NO: 1594910 - DNA, 15 bp, Homo sapiens
tctgttagccaccta

SEQ ID NO: 1594911 - DNA, 15 bp, Homo sapiens
ctgttagccacctat

SEQ ID NO: 1594912 - DNA, 15 bp, Homo sapiens
tgttagccacctata

SEQ ID NO: 1594913 - DNA, 15 bp, Homo sapiens
gttagccacctatat

SEQ ID NO: 1594914 - DNA, 15 bp, Homo sapiens
ttagccacctatatt

SEQ ID NO: 1594915 - DNA, 15 bp, Homo sapiens
tagccacctatattg

SEQ ID NO: 1594916 - DNA, 15 bp, Homo sapiens
agccacctatattgg

SEQ ID NO: 1594917 - DNA, 15 bp, Homo sapiens
gccacctatattgga

SEQ ID NO: 1594918 - DNA, 15 bp, Homo sapiens
ccacctatattggag

SEQ ID NO: 1594919 - DNA, 15 bp, Homo sapiens
cacctatattggaga

SEQ ID NO: 1594920 - DNA, 15 bp, Homo sapiens
acctatattggagag

SEQ ID NO: 1594921 - DNA, 15 bp, Homo sapiens
cctatattggagagt

SEQ ID NO: 1594922 - DNA, 15 bp, Homo sapiens
ctatattggagagtt

SEQ ID NO: 1594923 - DNA, 15 bp, Homo sapiens
tatattggagagttg

SEQ ID NO: 1594924 - DNA, 15 bp, Homo sapiens
atattggagagttgg

SEQ ID NO: 1594925 - DNA, 15 bp, Homo sapiens
tattggagagttggg

SEQ ID NO: 1594926 - DNA, 15 bp, Homo sapiens
attggagagttggga

SEQ ID NO: 1594927 - DNA, 15 bp, Homo sapiens
ttggagagttgggag

SEQ ID NO: 1594928 - DNA, 15 bp, Homo sapiens
tggagagttgggagg

SEQ ID NO: 1594929 - DNA, 15 bp, Homo sapiens
ggagagttgggagga

SEQ ID NO: 1594930 - DNA, 15 bp, Homo sapiens
gagagttgggaggag

SEQ ID NO: 1594931 - DNA, 15 bp, Homo sapiens
agagttgggaggaga

SEQ ID NO: 1594932 - DNA, 15 bp, Homo sapiens
gagttgggaggagag

SEQ ID NO: 1594933 - DNA, 15 bp, Homo sapiens
agttgggaggagaga

SEQ ID NO: 1594934 - DNA, 15 bp, Homo sapiens
gttgggaggagagag

SEQ ID NO: 1594935 - DNA, 15 bp, Homo sapiens
ttgggaggagagagt

SEQ ID NO: 1594936 - DNA, 15 bp, Homo sapiens
tgggaggagagagtc

SEQ ID NO: 1594937 - DNA, 15 bp, Homo sapiens
gggaggagagagtct

SEQ ID NO: 1594938 - DNA, 15 bp, Homo sapiens
ggaggagagagtctc

SEQ ID NO: 1594939 - DNA, 15 bp, Homo sapiens
gaggagagagtctct

SEQ ID NO: 1594940 - DNA, 15 bp, Homo sapiens
aggagagagtctcta

SEQ ID NO: 1594941 - DNA, 15 bp, Homo sapiens
ggagagagtctctat

SEQ ID NO: 1594942 - DNA, 15 bp, Homo sapiens
gagagagtctctatc

SEQ ID NO: 1594943 - DNA, 15 bp, Homo sapiens
agagagtctctatct

SEQ ID NO: 1594944 - DNA, 15 bp, Homo sapiens
gagagtctctatctt

SEQ ID NO: 1594945 - DNA, 15 bp, Homo sapiens
agagtctctatcttg

SEQ ID NO: 1594946 - DNA, 15 bp, Homo sapiens
gagtctctatcttga

SEQ ID NO: 1594947 - DNA, 15 bp, Homo sapiens
agtctctatcttgaa

SEQ ID NO: 1594948 - DNA, 15 bp, Homo sapiens
gtctctatcttgaat

SEQ ID NO: 1594949 - DNA, 15 bp, Homo sapiens
tctctatcttgaatt

SEQ ID NO: 1594950 - DNA, 15 bp, Homo sapiens
ctctatcttgaattt

SEQ ID NO: 1594951 - DNA, 15 bp, Homo sapiens
tctatcttgaattta

SEQ ID NO: 1594952 - DNA, 15 bp, Homo sapiens
ctatcttgaatttat

SEQ ID NO: 1594953 - DNA, 15 bp, Homo sapiens
tatcttgaatttatg

SEQ ID NO: 1594954 - DNA, 15 bp, Homo sapiens
atcttgaatttatgg

SEQ ID NO: 1594955 - DNA, 15 bp, Homo sapiens
tcttgaatttatggg

SEQ ID NO: 1594956 - DNA, 15 bp, Homo sapiens
cttgaatttatggga

SEQ ID NO: 1594957 - DNA, 15 bp, Homo sapiens
ttgaatttatgggaa

SEQ ID NO: 1594958 - DNA, 15 bp, Homo sapiens
tgaatttatgggaaa

SEQ ID NO: 1594959 - DNA, 15 bp, Homo sapiens
gaatttatgggaaaa

SEQ ID NO: 1594960 - DNA, 15 bp, Homo sapiens
aatttatgggaaaaa

SEQ ID NO: 1594961 - DNA, 15 bp, Homo sapiens
atttatgggaaaaat

SEQ ID NO: 1594962 - DNA, 15 bp, Homo sapiens
tttatgggaaaaatt

SEQ ID NO: 1594963 - DNA, 15 bp, Homo sapiens
ttatgggaaaaattc

SEQ ID NO: 1594964 - DNA, 15 bp, Homo sapiens
tatgggaaaaattct

SEQ ID NO: 1594965 - DNA, 15 bp, Homo sapiens
atgggaaaaattcta

SEQ ID NO: 1594966 - DNA, 15 bp, Homo sapiens
tgggaaaaattctaa

SEQ ID NO: 1594967 - DNA, 15 bp, Homo sapiens
gggaaaaattctaaa

SEQ ID NO: 1594968 - DNA, 15 bp, Homo sapiens
ggaaaaattctaaaa

SEQ ID NO: 1594969 - DNA, 15 bp, Homo sapiens
gaaaaattctaaaat

SEQ ID NO: 1594970 - DNA, 15 bp, Homo sapiens
aaaaattctaaaata

SEQ ID NO: 1594971 - DNA, 15 bp, Homo sapiens
aaaattctaaaatac

SEQ ID NO: 1594972 - DNA, 15 bp, Homo sapiens
aaattctaaaatact

SEQ ID NO: 1594973 - DNA, 15 bp, Homo sapiens
aattctaaaatactt

SEQ ID NO: 1594974 - DNA, 15 bp, Homo sapiens
attctaaaatacttt

SEQ ID NO: 1594975 - DNA, 15 bp, Homo sapiens
ttctaaaatactttt

SEQ ID NO: 1594976 - DNA, 15 bp, Homo sapiens
tctaaaatacttttt

SEQ ID NO: 1594977 - DNA, 15 bp, Homo sapiens
ctaaaatacttttta

SEQ ID NO: 1594978 - DNA, 15 bp, Homo sapiens
taaaatactttttat

SEQ ID NO: 1594979 - DNA, 15 bp, Homo sapiens
aaaatactttttata

SEQ ID NO: 1594980 - DNA, 15 bp, Homo sapiens
aaatactttttataa

SEQ ID NO: 1594981 - DNA, 15 bp, Homo sapiens
aatactttttataat

SEQ ID NO: 1594982 - DNA, 15 bp, Homo sapiens
atactttttataatg

SEQ ID NO: 1594983 - DNA, 15 bp, Homo sapiens
tactttttataatga

SEQ ID NO: 1594984 - DNA, 15 bp, Homo sapiens
actttttataatgaa

SEQ ID NO: 1594985 - DNA, 15 bp, Homo sapiens
ctttttataatgaag

SEQ ID NO: 1594986 - DNA, 15 bp, Homo sapiens
tttttataatgaagg

SEQ ID NO: 1594987 - DNA, 15 bp, Homo sapiens
ttttataatgaagga

SEQ ID NO: 1594988 - DNA, 15 bp, Homo sapiens
tttataatgaaggac

SEQ ID NO: 1594989 - DNA, 15 bp, Homo sapiens
ttataatgaaggaca

SEQ ID NO: 1594990 - DNA, 15 bp, Homo sapiens
tataatgaaggacaa

SEQ ID NO: 1594991 - DNA, 15 bp, Homo sapiens
ataatgaaggacaac

SEQ ID NO: 1594992 - DNA, 15 bp, Homo sapiens
taatgaaggacaaca

SEQ ID NO: 1594993 - DNA, 15 bp, Homo sapiens
aatgaaggacaacat

SEQ ID NO: 1594994 - DNA, 15 bp, Homo sapiens
atgaaggacaacatc

SEQ ID NO: 1594995 - DNA, 15 bp, Homo sapiens
tgaaggacaacatca

SEQ ID NO: 1594996 - DNA, 15 bp, Homo sapiens
gaaggacaacatcat

SEQ ID NO: 1594997 - DNA, 15 bp, Homo sapiens
aaggacaacatcata

SEQ ID NO: 1594998 - DNA, 15 bp, Homo sapiens
aggacaacatcataa

SEQ ID NO: 1594999 - DNA, 15 bp, Homo sapiens
ggacaacatcataac

SEQ ID NO: 1595000 - DNA, 15 bp, Homo sapiens
gacaacatcataact

SEQ ID NO: 1595001 - DNA, 15 bp, Homo sapiens
acaacatcataactc

SEQ ID NO: 1595002 - DNA, 15 bp, Homo sapiens
caacatcataactcc

SEQ ID NO: 1595003 - DNA, 15 bp, Homo sapiens
aacatcataactccc

SEQ ID NO: 1595004 - DNA, 15 bp, Homo sapiens
acatcataactccct

SEQ ID NO: 1595005 - DNA, 15 bp, Homo sapiens
catcataactcccta

SEQ ID NO: 1595006 - DNA, 15 bp, Homo sapiens
atcataactccctaa

SEQ ID NO: 1595007 - DNA, 15 bp, Homo sapiens
tcataactccctaat

SEQ ID NO: 1595008 - DNA, 15 bp, Homo sapiens
cataactccctaata

SEQ ID NO: 1595009 - DNA, 15 bp, Homo sapiens
ataactccctaataa

SEQ ID NO: 1595010 - DNA, 15 bp, Homo sapiens
taactccctaataaa

SEQ ID NO: 1595011 - DNA, 15 bp, Homo sapiens
aactccctaataaaa

SEQ ID NO: 1595012 - DNA, 15 bp, Homo sapiens
actccctaataaaat

SEQ ID NO: 1595013 - DNA, 15 bp, Homo sapiens
ctccctaataaaatg

SEQ ID NO: 1595014 - DNA, 15 bp, Homo sapiens
tccctaataaaatgt

SEQ ID NO: 1595015 - DNA, 15 bp, Homo sapiens
ccctaataaaatgtg

SEQ ID NO: 1595016 - DNA, 15 bp, Homo sapiens
cctaataaaatgtgc

SEQ ID NO: 1595017 - DNA, 15 bp, Homo sapiens
ctaataaaatgtgca

SEQ ID NO: 1595018 - DNA, 15 bp, Homo sapiens
taataaaatgtgcat

SEQ ID NO: 1595019 - DNA, 15 bp, Homo sapiens
aataaaatgtgcatg

SEQ ID NO: 1595020 - DNA, 15 bp, Homo sapiens
ataaaatgtgcatgt

SEQ ID NO: 1595021 - DNA, 15 bp, Homo sapiens
taaaatgtgcatgta

SEQ ID NO: 1595022 - DNA, 15 bp, Homo sapiens
aaaatgtgcatgtat

SEQ ID NO: 1595023 - DNA, 15 bp, Homo sapiens
aaatgtgcatgtata

SEQ ID NO: 1595024 - DNA, 15 bp, Homo sapiens
aatgtgcatgtatat

SEQ ID NO: 1595025 - DNA, 15 bp, Homo sapiens
atgtgcatgtatata

SEQ ID NO: 1595026 - DNA, 15 bp, Homo sapiens
tgtgcatgtatatat

SEQ ID NO: 1595027 - DNA, 15 bp, Homo sapiens
gtgcatgtatatatt

SEQ ID NO: 1595028 - DNA, 15 bp, Homo sapiens
tgcatgtatatattc

SEQ ID NO: 1595029 - DNA, 15 bp, Homo sapiens
gcatgtatatattca

SEQ ID NO: 1595030 - DNA, 15 bp, Homo sapiens
catgtatatattcaa

SEQ ID NO: 1595031 - DNA, 15 bp, Homo sapiens
atgtatatattcaaa

SEQ ID NO: 1595032 - DNA, 15 bp, Homo sapiens
tgtatatattcaaat

SEQ ID NO: 1595033 - DNA, 15 bp, Homo sapiens
gtatatattcaaatt

SEQ ID NO: 1595034 - DNA, 15 bp, Homo sapiens
tatatattcaaattt

SEQ ID NO: 1595035 - DNA, 15 bp, Homo sapiens
atatattcaaatttg

SEQ ID NO: 1595036 - DNA, 15 bp, Homo sapiens
tatattcaaatttgc

SEQ ID NO: 1595037 - DNA, 15 bp, Homo sapiens
atattcaaatttgct

SEQ ID NO: 1595038 - DNA, 15 bp, Homo sapiens
tattcaaatttgctg

SEQ ID NO: 1595039 - DNA, 15 bp, Homo sapiens
attcaaatttgctgt

SEQ ID NO: 1595040 - DNA, 15 bp, Homo sapiens
ttcaaatttgctgtc

SEQ ID NO: 1595041 - DNA, 15 bp, Homo sapiens
tcaaatttgctgtca

SEQ ID NO: 1595042 - DNA, 15 bp, Homo sapiens
caaatttgctgtcat

SEQ ID NO: 1595043 - DNA, 15 bp, Homo sapiens
aaatttgctgtcatt

SEQ ID NO: 1595044 - DNA, 15 bp, Homo sapiens
aatttgctgtcattg

SEQ ID NO: 1595045 - DNA, 15 bp, Homo sapiens
atttgctgtcattga

SEQ ID NO: 1595046 - DNA, 15 bp, Homo sapiens
tttgctgtcattgat

SEQ ID NO: 1595047 - DNA, 15 bp, Homo sapiens
ttgctgtcattgatc

SEQ ID NO: 1595048 - DNA, 15 bp, Homo sapiens
tgctgtcattgatcc

SEQ ID NO: 1595049 - DNA, 15 bp, Homo sapiens
gctgtcattgatcct

SEQ ID NO: 1595050 - DNA, 15 bp, Homo sapiens
ctgtcattgatcctg

SEQ ID NO: 1595051 - DNA, 15 bp, Homo sapiens
tgtcattgatcctgc

SEQ ID NO: 1595052 - DNA, 15 bp, Homo sapiens
gtcattgatcctgca

SEQ ID NO: 1595053 - DNA, 15 bp, Homo sapiens
tcattgatcctgcac

SEQ ID NO: 1595054 - DNA, 15 bp, Homo sapiens
cattgatcctgcacc

SEQ ID NO: 1595055 - DNA, 15 bp, Homo sapiens
attgatcctgcacct

SEQ ID NO: 1595056 - DNA, 15 bp, Homo sapiens
ttgatcctgcaccta

SEQ ID NO: 1595057 - DNA, 15 bp, Homo sapiens
tgatcctgcacctac

SEQ ID NO: 1595058 - DNA, 15 bp, Homo sapiens
gatcctgcacctaca

SEQ ID NO: 1595059 - DNA, 15 bp, Homo sapiens
atcctgcacctacaa

SEQ ID NO: 1595060 - DNA, 15 bp, Homo sapiens
tcctgcacctacaaa

SEQ ID NO: 1595061 - DNA, 15 bp, Homo sapiens
cctgcacctacaaaa

SEQ ID NO: 1595062 - DNA, 15 bp, Homo sapiens
ctgcacctacaaaat

SEQ ID NO: 1595063 - DNA, 15 bp, Homo sapiens
tgcacctacaaaatc

SEQ ID NO: 1595064 - DNA, 15 bp, Homo sapiens
gcacctacaaaatcc

SEQ ID NO: 1595065 - DNA, 15 bp, Homo sapiens
cacctacaaaatcca

SEQ ID NO: 1595066 - DNA, 15 bp, Homo sapiens
acctacaaaatccag

SEQ ID NO: 1595067 - DNA, 15 bp, Homo sapiens
cctacaaaatccagt

SEQ ID NO: 1595068 - DNA, 15 bp, Homo sapiens
ctacaaaatccagtc

SEQ ID NO: 1595069 - DNA, 15 bp, Homo sapiens
tacaaaatccagtcc

SEQ ID NO: 1595070 - DNA, 15 bp, Homo sapiens
acaaaatccagtcct

SEQ ID NO: 1595071 - DNA, 15 bp, Homo sapiens
caaaatccagtcctg

SEQ ID NO: 1595072 - DNA, 15 bp, Homo sapiens
aaaatccagtcctgg

SEQ ID NO: 1595073 - DNA, 15 bp, Homo sapiens
aaatccagtcctggg

SEQ ID NO: 1595074 - DNA, 15 bp, Homo sapiens
aatccagtcctgggg

SEQ ID NO: 1595075 - DNA, 15 bp, Homo sapiens
atccagtcctggggg

SEQ ID NO: 1595076 - DNA, 15 bp, Homo sapiens
tccagtcctgggggc

SEQ ID NO: 1595077 - DNA, 15 bp, Homo sapiens
ccagtcctgggggct

SEQ ID NO: 1595078 - DNA, 15 bp, Homo sapiens
cagtcctgggggctg

SEQ ID NO: 1595079 - DNA, 15 bp, Homo sapiens
agtcctgggggctgg

SEQ ID NO: 1595080 - DNA, 15 bp, Homo sapiens
gtcctgggggctggc

SEQ ID NO: 1595081 - DNA, 15 bp, Homo sapiens
tcctgggggctggca

SEQ ID NO: 1595082 - DNA, 15 bp, Homo sapiens
cctgggggctggcat

SEQ ID NO: 1595083 - DNA, 15 bp, Homo sapiens
ctgggggctggcatt

SEQ ID NO: 1595084 - DNA, 15 bp, Homo sapiens
tgggggctggcattc

SEQ ID NO: 1595085 - DNA, 15 bp, Homo sapiens
gggggctggcattct

SEQ ID NO: 1595086 - DNA, 15 bp, Homo sapiens
ggggctggcattctt

SEQ ID NO: 1595087 - DNA, 15 bp, Homo sapiens
gggctggcattctta

SEQ ID NO: 1595088 - DNA, 15 bp, Homo sapiens
ggctggcattcttac

SEQ ID NO: 1595089 - DNA, 15 bp, Homo sapiens
gctggcattcttact

SEQ ID NO: 1595090 - DNA, 15 bp, Homo sapiens
ctggcattcttactg

SEQ ID NO: 1595091 - DNA, 15 bp, Homo sapiens
tggcattcttactgc

SEQ ID NO: 1595092 - DNA, 15 bp, Homo sapiens
ggcattcttactgct

SEQ ID NO: 1595093 - DNA, 15 bp, Homo sapiens
gcattcttactgctt

SEQ ID NO: 1595094 - DNA, 15 bp, Homo sapiens
cattcttactgcttg

SEQ ID NO: 1595095 - DNA, 15 bp, Homo sapiens
attcttactgcttgc

SEQ ID NO: 1595096 - DNA, 15 bp, Homo sapiens
ttcttactgcttgct

SEQ ID NO: 1595097 - DNA, 15 bp, Homo sapiens
tcttactgcttgctg

SEQ ID NO: 1595098 - DNA, 15 bp, Homo sapiens
cttactgcttgctga

SEQ ID NO: 1595099 - DNA, 15 bp, Homo sapiens
ttactgcttgctgag

SEQ ID NO: 1595100 - DNA, 15 bp, Homo sapiens
tactgcttgctgagg

SEQ ID NO: 1595101 - DNA, 15 bp, Homo sapiens
actgcttgctgaggg

SEQ ID NO: 1595102 - DNA, 15 bp, Homo sapiens
ctgcttgctgagggc

SEQ ID NO: 1595103 - DNA, 15 bp, Homo sapiens
tgcttgctgagggcc

SEQ ID NO: 1595104 - DNA, 15 bp, Homo sapiens
gcttgctgagggcca

SEQ ID NO: 1595105 - DNA, 15 bp, Homo sapiens
cttgctgagggccag

SEQ ID NO: 1595106 - DNA, 15 bp, Homo sapiens
ttgctgagggccaga

SEQ ID NO: 1595107 - DNA, 15 bp, Homo sapiens
tgctgagggccagat

SEQ ID NO: 1595108 - DNA, 15 bp, Homo sapiens
gctgagggccagatg

SEQ ID NO: 1595109 - DNA, 15 bp, Homo sapiens
ctgagggccagatga

SEQ ID NO: 1595110 - DNA, 15 bp, Homo sapiens
tgagggccagatgat

SEQ ID NO: 1595111 - DNA, 15 bp, Homo sapiens
gagggccagatgata

SEQ ID NO: 1595112 - DNA, 15 bp, Homo sapiens
agggccagatgatat

SEQ ID NO: 1595113 - DNA, 15 bp, Homo sapiens
gggccagatgatata

SEQ ID NO: 1595114 - DNA, 15 bp, Homo sapiens
ggccagatgatatag

SEQ ID NO: 1595115 - DNA, 15 bp, Homo sapiens
gccagatgatataga

SEQ ID NO: 1595116 - DNA, 15 bp, Homo sapiens
ccagatgatatagat

SEQ ID NO: 1595117 - DNA, 15 bp, Homo sapiens
cagatgatatagatt

SEQ ID NO: 1595118 - DNA, 15 bp, Homo sapiens
agatgatatagattc

SEQ ID NO: 1595119 - DNA, 15 bp, Homo sapiens
gatgatatagattcc

SEQ ID NO: 1595120 - DNA, 15 bp, Homo sapiens
atgatatagattcca

SEQ ID NO: 1595121 - DNA, 15 bp, Homo sapiens
tgatatagattccag

SEQ ID NO: 1595122 - DNA, 15 bp, Homo sapiens
gatatagattccaga

SEQ ID NO: 1595123 - DNA, 15 bp, Homo sapiens
atatagattccagaa

SEQ ID NO: 1595124 - DNA, 15 bp, Homo sapiens
tatagattccagaat

SEQ ID NO: 1595125 - DNA, 15 bp, Homo sapiens
atagattccagaata

SEQ ID NO: 1595126 - DNA, 15 bp, Homo sapiens
tagattccagaatat

SEQ ID NO: 1595127 - DNA, 15 bp, Homo sapiens
agattccagaatatc

SEQ ID NO: 1595128 - DNA, 15 bp, Homo sapiens
gattccagaatatct

SEQ ID NO: 1595129 - DNA, 15 bp, Homo sapiens
attccagaatatctc

SEQ ID NO: 1595130 - DNA, 15 bp, Homo sapiens
ttccagaatatctcc

SEQ ID NO: 1595131 - DNA, 15 bp, Homo sapiens
tccagaatatctcca

SEQ ID NO: 1595132 - DNA, 15 bp, Homo sapiens
ccagaatatctccat

SEQ ID NO: 1595133 - DNA, 15 bp, Homo sapiens
cagaatatctccatg

SEQ ID NO: 1595134 - DNA, 15 bp, Homo sapiens
agaatatctccatgt

SEQ ID NO: 1595135 - DNA, 15 bp, Homo sapiens
gaatatctccatgta

SEQ ID NO: 1595136 - DNA, 15 bp, Homo sapiens
aatatctccatgtag

SEQ ID NO: 1595137 - DNA, 15 bp, Homo sapiens
atatctccatgtaga

SEQ ID NO: 1595138 - DNA, 15 bp, Homo sapiens
tatctccatgtagat

SEQ ID NO: 1595139 - DNA, 15 bp, Homo sapiens
atctccatgtagatt

SEQ ID NO: 1595140 - DNA, 15 bp, Homo sapiens
tctccatgtagattt

SEQ ID NO: 1595141 - DNA, 15 bp, Homo sapiens
ctccatgtagatttt

SEQ ID NO: 1595142 - DNA, 15 bp, Homo sapiens
tccatgtagattttg

SEQ ID NO: 1595143 - DNA, 15 bp, Homo sapiens
ccatgtagattttgg

SEQ ID NO: 1595144 - DNA, 15 bp, Homo sapiens
catgtagattttggt

SEQ ID NO: 1595145 - DNA, 15 bp, Homo sapiens
atgtagattttggtg

SEQ ID NO: 1595146 - DNA, 15 bp, Homo sapiens
tgtagattttggtga

SEQ ID NO: 1595147 - DNA, 15 bp, Homo sapiens
gtagattttggtgag

SEQ ID NO: 1595148 - DNA, 15 bp, Homo sapiens
tagattttggtgaga

SEQ ID NO: 1595149 - DNA, 15 bp, Homo sapiens
agattttggtgagaa

SEQ ID NO: 1595150 - DNA, 15 bp, Homo sapiens
gattttggtgagaat

SEQ ID NO: 1595151 - DNA, 15 bp, Homo sapiens
attttggtgagaatt

SEQ ID NO: 1595152 - DNA, 15 bp, Homo sapiens
ttttggtgagaatta

SEQ ID NO: 1595153 - DNA, 15 bp, Homo sapiens
tttggtgagaattac

SEQ ID NO: 1595154 - DNA, 15 bp, Homo sapiens
ttggtgagaattact

SEQ ID NO: 1595155 - DNA, 15 bp, Homo sapiens
tggtgagaattactg

SEQ ID NO: 1595156 - DNA, 15 bp, Homo sapiens
ggtgagaattactgt

SEQ ID NO: 1595157 - DNA, 15 bp, Homo sapiens
gtgagaattactgtg

SEQ ID NO: 1595158 - DNA, 15 bp, Homo sapiens
tgagaattactgtgc

SEQ ID NO: 1595159 - DNA, 15 bp, Homo sapiens
gagaattactgtgct

SEQ ID NO: 1595160 - DNA, 15 bp, Homo sapiens
agaattactgtgctg

SEQ ID NO: 1595161 - DNA, 15 bp, Homo sapiens
gaattactgtgctga

SEQ ID NO: 1595162 - DNA, 15 bp, Homo sapiens
aattactgtgctgaa

SEQ ID NO: 1595163 - DNA, 15 bp, Homo sapiens
attactgtgctgaaa

SEQ ID NO: 1595164 - DNA, 15 bp, Homo sapiens
ttactgtgctgaaaa

SEQ ID NO: 1595165 - DNA, 15 bp, Homo sapiens
tactgtgctgaaaag

SEQ ID NO: 1595166 - DNA, 15 bp, Homo sapiens
actgtgctgaaaaga

SEQ ID NO: 1595167 - DNA, 15 bp, Homo sapiens
ctgtgctgaaaagaa

SEQ ID NO: 1595168 - DNA, 15 bp, Homo sapiens
tgtgctgaaaagaat

SEQ ID NO: 1595169 - DNA, 15 bp, Homo sapiens
gtgctgaaaagaatg

SEQ ID NO: 1595170 - DNA, 15 bp, Homo sapiens
tgctgaaaagaatga

SEQ ID NO: 1595171 - DNA, 15 bp, Homo sapiens
gctgaaaagaatgac

SEQ ID NO: 1595172 - DNA, 15 bp, Homo sapiens
ctgaaaagaatgaca

SEQ ID NO: 1595173 - DNA, 15 bp, Homo sapiens
tgaaaagaatgacag

SEQ ID NO: 1595174 - DNA, 15 bp, Homo sapiens
gaaaagaatgacagt

SEQ ID NO: 1595175 - DNA, 15 bp, Homo sapiens
aaaagaatgacagta

SEQ ID NO: 1595176 - DNA, 15 bp, Homo sapiens
aaagaatgacagtat

SEQ ID NO: 1595177 - DNA, 15 bp, Homo sapiens
aagaatgacagtatt

SEQ ID NO: 1595178 - DNA, 15 bp, Homo sapiens
agaatgacagtattg

SEQ ID NO: 1595179 - DNA, 15 bp, Homo sapiens
gaatgacagtattgc

SEQ ID NO: 1595180 - DNA, 15 bp, Homo sapiens
aatgacagtattgca

SEQ ID NO: 1595181 - DNA, 15 bp, Homo sapiens
atgacagtattgcag

SEQ ID NO: 1595182 - DNA, 15 bp, Homo sapiens
tgacagtattgcagt

SEQ ID NO: 1595183 - DNA, 15 bp, Homo sapiens
gacagtattgcagtt

SEQ ID NO: 1595184 - DNA, 15 bp, Homo sapiens
acagtattgcagtta

SEQ ID NO: 1595185 - DNA, 15 bp, Homo sapiens
cagtattgcagttat

SEQ ID NO: 1595186 - DNA, 15 bp, Homo sapiens
agtattgcagttata

SEQ ID NO: 1595187 - DNA, 15 bp, Homo sapiens
gtattgcagttatac

SEQ ID NO: 1595188 - DNA, 15 bp, Homo sapiens
tattgcagttataca

SEQ ID NO: 1595189 - DNA, 15 bp, Homo sapiens
attgcagttatacat

SEQ ID NO: 1595190 - DNA, 15 bp, Homo sapiens
ttgcagttatacatg

SEQ ID NO: 1595191 - DNA, 15 bp, Homo sapiens
tgcagttatacatgg

SEQ ID NO: 1595192 - DNA, 15 bp, Homo sapiens
gcagttatacatggg

SEQ ID NO: 1595193 - DNA, 15 bp, Homo sapiens
cagttatacatgggg

SEQ ID NO: 1595194 - DNA, 15 bp, Homo sapiens
agttatacatggggg

SEQ ID NO: 1595195 - DNA, 15 bp, Homo sapiens
gttatacatgggggt

SEQ ID NO: 1595196 - DNA, 15 bp, Homo sapiens
ttatacatgggggtt

SEQ ID NO: 1595197 - DNA, 15 bp, Homo sapiens
tatacatgggggttt

SEQ ID NO: 1595198 - DNA, 15 bp, Homo sapiens
atacatgggggtttt

SEQ ID NO: 1595199 - DNA, 15 bp, Homo sapiens
tacatgggggttttg

SEQ ID NO: 1595200 - DNA, 15 bp, Homo sapiens
acatgggggttttgg

SEQ ID NO: 1595201 - DNA, 15 bp, Homo sapiens
catgggggttttggt

SEQ ID NO: 1595202 - DNA, 15 bp, Homo sapiens
atgggggttttggta

SEQ ID NO: 1595203 - DNA, 15 bp, Homo sapiens
tgggggttttggtac

SEQ ID NO: 1595204 - DNA, 15 bp, Homo sapiens
gggggttttggtact

SEQ ID NO: 1595205 - DNA, 15 bp, Homo sapiens
ggggttttggtactt

SEQ ID NO: 1595206 - DNA, 15 bp, Homo sapiens
gggttttggtacttt

SEQ ID NO: 1595207 - DNA, 15 bp, Homo sapiens
ggttttggtacttta

SEQ ID NO: 1595208 - DNA, 15 bp, Homo sapiens
gttttggtactttat

SEQ ID NO: 1595209 - DNA, 15 bp, Homo sapiens
ttttggtactttata

SEQ ID NO: 1595210 - DNA, 15 bp, Homo sapiens
tttggtactttatat

SEQ ID NO: 1595211 - DNA, 15 bp, Homo sapiens
ttggtactttatatt

SEQ ID NO: 1595212 - DNA, 15 bp, Homo sapiens
tggtactttatattg

SEQ ID NO: 1595213 - DNA, 15 bp, Homo sapiens
ggtactttatattgt

SEQ ID NO: 1595214 - DNA, 15 bp, Homo sapiens
gtactttatattgtg

SEQ ID NO: 1595215 - DNA, 15 bp, Homo sapiens
tactttatattgtga

SEQ ID NO: 1595216 - DNA, 15 bp, Homo sapiens
actttatattgtgac

SEQ ID NO: 1595217 - DNA, 15 bp, Homo sapiens
ctttatattgtgact

SEQ ID NO: 1595218 - DNA, 15 bp, Homo sapiens
tttatattgtgactc

SEQ ID NO: 1595219 - DNA, 15 bp, Homo sapiens
ttatattgtgactct

SEQ ID NO: 1595220 - DNA, 15 bp, Homo sapiens
tatattgtgactctg

SEQ ID NO: 1595221 - DNA, 15 bp, Homo sapiens
atattgtgactctga

SEQ ID NO: 1595222 - DNA, 15 bp, Homo sapiens
tattgtgactctgaa

SEQ ID NO: 1595223 - DNA, 15 bp, Homo sapiens
attgtgactctgaat

SEQ ID NO: 1595224 - DNA, 15 bp, Homo sapiens
ttgtgactctgaatt

SEQ ID NO: 1595225 - DNA, 15 bp, Homo sapiens
tgtgactctgaattt

SEQ ID NO: 1595226 - DNA, 15 bp, Homo sapiens
gtgactctgaattta

SEQ ID NO: 1595227 - DNA, 15 bp, Homo sapiens
tgactctgaatttaa

SEQ ID NO: 1595228 - DNA, 15 bp, Homo sapiens
gactctgaatttaaa

SEQ ID NO: 1595229 - DNA, 15 bp, Homo sapiens
actctgaatttaaag

SEQ ID NO: 1595230 - DNA, 15 bp, Homo sapiens
ctctgaatttaaagc

SEQ ID NO: 1595231 - DNA, 15 bp, Homo sapiens
tctgaatttaaagct

SEQ ID NO: 1595232 - DNA, 15 bp, Homo sapiens
ctgaatttaaagcta

SEQ ID NO: 1595233 - DNA, 15 bp, Homo sapiens
tgaatttaaagctat

SEQ ID NO: 1595234 - DNA, 15 bp, Homo sapiens
gaatttaaagctatg

SEQ ID NO: 1595235 - DNA, 15 bp, Homo sapiens
aatttaaagctatgc

SEQ ID NO: 1595236 - DNA, 15 bp, Homo sapiens
atttaaagctatgca

SEQ ID NO: 1595237 - DNA, 15 bp, Homo sapiens
tttaaagctatgcaa

SEQ ID NO: 1595238 - DNA, 15 bp, Homo sapiens
ttaaagctatgcaat

SEQ ID NO: 1595239 - DNA, 15 bp, Homo sapiens
taaagctatgcaatg

SEQ ID NO: 1595240 - DNA, 15 bp, Homo sapiens
aaagctatgcaatgt

SEQ ID NO: 1595241 - DNA, 15 bp, Homo sapiens
aagctatgcaatgtc

SEQ ID NO: 1595242 - DNA, 15 bp, Homo sapiens
agctatgcaatgtct

SEQ ID NO: 1595243 - DNA, 15 bp, Homo sapiens
gctatgcaatgtctt

SEQ ID NO: 1595244 - DNA, 15 bp, Homo sapiens
ctatgcaatgtcttc

SEQ ID NO: 1595245 - DNA, 15 bp, Homo sapiens
tatgcaatgtcttct

SEQ ID NO: 1595246 - DNA, 15 bp, Homo sapiens
atgcaatgtcttctt

SEQ ID NO: 1595247 - DNA, 15 bp, Homo sapiens
tgcaatgtcttcttt

SEQ ID NO: 1595248 - DNA, 15 bp, Homo sapiens
gcaatgtcttctttt

SEQ ID NO: 1595249 - DNA, 15 bp, Homo sapiens
caatgtcttcttttt

SEQ ID NO: 1595250 - DNA, 15 bp, Homo sapiens
aatgtcttctttttt

SEQ ID NO: 1595251 - DNA, 15 bp, Homo sapiens
atgtcttcttttttg

SEQ ID NO: 1595252 - DNA, 15 bp, Homo sapiens
tgtcttcttttttga

SEQ ID NO: 1595253 - DNA, 15 bp, Homo sapiens
gtcttcttttttgaa

SEQ ID NO: 1595254 - DNA, 15 bp, Homo sapiens
tcttcttttttgaaa

SEQ ID NO: 1595255 - DNA, 15 bp, Homo sapiens
cttcttttttgaaag

SEQ ID NO: 1595256 - DNA, 15 bp, Homo sapiens
ttcttttttgaaagg

SEQ ID NO: 1595257 - DNA, 15 bp, Homo sapiens
tcttttttgaaagga

SEQ ID NO: 1595258 - DNA, 15 bp, Homo sapiens
cttttttgaaaggat

SEQ ID NO: 1595259 - DNA, 15 bp, Homo sapiens
ttttttgaaaggata

SEQ ID NO: 1595260 - DNA, 15 bp, Homo sapiens
tttttgaaaggatat

SEQ ID NO: 1595261 - DNA, 15 bp, Homo sapiens
ttttgaaaggatata

SEQ ID NO: 1595262 - DNA, 15 bp, Homo sapiens
tttgaaaggatataa

SEQ ID NO: 1595263 - DNA, 15 bp, Homo sapiens
ttgaaaggatataat

SEQ ID NO: 1595264 - DNA, 15 bp, Homo sapiens
tgaaaggatataatt

SEQ ID NO: 1595265 - DNA, 15 bp, Homo sapiens
gaaaggatataattg

SEQ ID NO: 1595266 - DNA, 15 bp, Homo sapiens
aaaggatataattga

SEQ ID NO: 1595267 - DNA, 15 bp, Homo sapiens
aaggatataattgac

SEQ ID NO: 1595268 - DNA, 15 bp, Homo sapiens
aggatataattgaca

SEQ ID NO: 1595269 - DNA, 15 bp, Homo sapiens
ggatataattgacac

SEQ ID NO: 1595270 - DNA, 15 bp, Homo sapiens
gatataattgacact

SEQ ID NO: 1595271 - DNA, 15 bp, Homo sapiens
atataattgacactg

SEQ ID NO: 1595272 - DNA, 15 bp, Homo sapiens
tataattgacactgg

SEQ ID NO: 1595273 - DNA, 15 bp, Homo sapiens
ataattgacactggc

SEQ ID NO: 1595274 - DNA, 15 bp, Homo sapiens
taattgacactggca

SEQ ID NO: 1595275 - DNA, 15 bp, Homo sapiens
aattgacactggcaa

SEQ ID NO: 1595276 - DNA, 15 bp, Homo sapiens
attgacactggcaaa

SEQ ID NO: 1595277 - DNA, 15 bp, Homo sapiens
ttgacactggcaaaa

SEQ ID NO: 1595278 - DNA, 15 bp, Homo sapiens
tgacactggcaaaac

SEQ ID NO: 1595279 - DNA, 15 bp, Homo sapiens
gacactggcaaaaca

SEQ ID NO: 1595280 - DNA, 15 bp, Homo sapiens
acactggcaaaacaa

SEQ ID NO: 1595281 - DNA, 15 bp, Homo sapiens
cactggcaaaacaat

SEQ ID NO: 1595282 - DNA, 15 bp, Homo sapiens
actggcaaaacaatg

SEQ ID NO: 1595283 - DNA, 15 bp, Homo sapiens
ctggcaaaacaatgc

SEQ ID NO: 1595284 - DNA, 15 bp, Homo sapiens
tggcaaaacaatgca

SEQ ID NO: 1595285 - DNA, 15 bp, Homo sapiens
ggcaaaacaatgcag

SEQ ID NO: 1595286 - DNA, 15 bp, Homo sapiens
gcaaaacaatgcaga

SEQ ID NO: 1595287 - DNA, 15 bp, Homo sapiens
caaaacaatgcagac

SEQ ID NO: 1595288 - DNA, 15 bp, Homo sapiens
aaaacaatgcagact

SEQ ID NO: 1595289 - DNA, 15 bp, Homo sapiens
aaacaatgcagactt

SEQ ID NO: 1595290 - DNA, 15 bp, Homo sapiens
aacaatgcagacttt

SEQ ID NO: 1595291 - DNA, 15 bp, Homo sapiens
acaatgcagactttg

SEQ ID NO: 1595292 - DNA, 15 bp, Homo sapiens
caatgcagactttgc

SEQ ID NO: 1595293 - DNA, 15 bp, Homo sapiens
aatgcagactttgct

SEQ ID NO: 1595294 - DNA, 15 bp, Homo sapiens
atgcagactttgctt

SEQ ID NO: 1595295 - DNA, 15 bp, Homo sapiens
tgcagactttgcttt

SEQ ID NO: 1595296 - DNA, 15 bp, Homo sapiens
gcagactttgctttc

SEQ ID NO: 1595297 - DNA, 15 bp, Homo sapiens
cagactttgctttcc

SEQ ID NO: 1595298 - DNA, 15 bp, Homo sapiens
agactttgctttcct

SEQ ID NO: 1595299 - DNA, 15 bp, Homo sapiens
gactttgctttcctt

SEQ ID NO: 1595300 - DNA, 15 bp, Homo sapiens
actttgctttccttg

SEQ ID NO: 1595301 - DNA, 15 bp, Homo sapiens
ctttgctttccttgg

SEQ ID NO: 1595302 - DNA, 15 bp, Homo sapiens
tttgctttccttggt

SEQ ID NO: 1595303 - DNA, 15 bp, Homo sapiens
ttgctttccttggtc

SEQ ID NO: 1595304 - DNA, 15 bp, Homo sapiens
tgctttccttggtca

SEQ ID NO: 1595305 - DNA, 15 bp, Homo sapiens
gctttccttggtcag

SEQ ID NO: 1595306 - DNA, 15 bp, Homo sapiens
ctttccttggtcagg

SEQ ID NO: 1595307 - DNA, 15 bp, Homo sapiens
tttccttggtcaggc

SEQ ID NO: 1595308 - DNA, 15 bp, Homo sapiens
ttccttggtcaggca

SEQ ID NO: 1595309 - DNA, 15 bp, Homo sapiens
tccttggtcaggcag

SEQ ID NO: 1595310 - DNA, 15 bp, Homo sapiens
ccttggtcaggcagt

SEQ ID NO: 1595311 - DNA, 15 bp, Homo sapiens
cttggtcaggcagta

SEQ ID NO: 1595312 - DNA, 15 bp, Homo sapiens
ttggtcaggcagtat

SEQ ID NO: 1595313 - DNA, 15 bp, Homo sapiens
tggtcaggcagtata

SEQ ID NO: 1595314 - DNA, 15 bp, Homo sapiens
ggtcaggcagtataa

SEQ ID NO: 1595315 - DNA, 15 bp, Homo sapiens
gtcaggcagtataat

SEQ ID NO: 1595316 - DNA, 15 bp, Homo sapiens
tcaggcagtataatc

SEQ ID NO: 1595317 - DNA, 15 bp, Homo sapiens
caggcagtataatcc

SEQ ID NO: 1595318 - DNA, 15 bp, Homo sapiens
aggcagtataatcca

SEQ ID NO: 1595319 - DNA, 15 bp, Homo sapiens
ggcagtataatccaa

SEQ ID NO: 1595320 - DNA, 15 bp, Homo sapiens
gcagtataatccaaa

SEQ ID NO: 1595321 - DNA, 15 bp, Homo sapiens
cagtataatccaaag

SEQ ID NO: 1595322 - DNA, 15 bp, Homo sapiens
agtataatccaaaga

SEQ ID NO: 1595323 - DNA, 15 bp, Homo sapiens
gtataatccaaagat

SEQ ID NO: 1595324 - DNA, 15 bp, Homo sapiens
tataatccaaagatg

SEQ ID NO: 1595325 - DNA, 15 bp, Homo sapiens
ataatccaaagatgg

SEQ ID NO: 1595326 - DNA, 15 bp, Homo sapiens
taatccaaagatggt

SEQ ID NO: 1595327 - DNA, 15 bp, Homo sapiens
aatccaaagatggtc

SEQ ID NO: 1595328 - DNA, 15 bp, Homo sapiens
atccaaagatggtca

SEQ ID NO: 1595329 - DNA, 15 bp, Homo sapiens
tccaaagatggtcaa

SEQ ID NO: 1595330 - DNA, 15 bp, Homo sapiens
ccaaagatggtcaag

SEQ ID NO: 1595331 - DNA, 15 bp, Homo sapiens
caaagatggtcaagg

SEQ ID NO: 1595332 - DNA, 15 bp, Homo sapiens
aaagatggtcaaggt

SEQ ID NO: 1595333 - DNA, 15 bp, Homo sapiens
aagatggtcaaggtc

SEQ ID NO: 1595334 - DNA, 15 bp, Homo sapiens
agatggtcaaggtcg

SEQ ID NO: 1595335 - DNA, 15 bp, Homo sapiens
gatggtcaaggtcgc

SEQ ID NO: 1595336 - DNA, 15 bp, Homo sapiens
atggtcaaggtcgca

SEQ ID NO: 1595337 - DNA, 15 bp, Homo sapiens
tggtcaaggtcgcaa

SEQ ID NO: 1595338 - DNA, 15 bp, Homo sapiens
ggtcaaggtcgcaag

SEQ ID NO: 1595339 - DNA, 15 bp, Homo sapiens
gtcaaggtcgcaagg

SEQ ID NO: 1595340 - DNA, 15 bp, Homo sapiens
tcaaggtcgcaaggt

SEQ ID NO: 1595341 - DNA, 15 bp, Homo sapiens
caaggtcgcaaggta

SEQ ID NO: 1595342 - DNA, 15 bp, Homo sapiens
aaggtcgcaaggtat

SEQ ID NO: 1595343 - DNA, 15 bp, Homo sapiens
aggtcgcaaggtatg

SEQ ID NO: 1595344 - DNA, 15 bp, Homo sapiens
ggtcgcaaggtatgt

SEQ ID NO: 1595345 - DNA, 15 bp, Homo sapiens
gtcgcaaggtatgta

SEQ ID NO: 1595346 - DNA, 15 bp, Homo sapiens
tcgcaaggtatgtat

SEQ ID NO: 1595347 - DNA, 15 bp, Homo sapiens
cgcaaggtatgtatg

SEQ ID NO: 1595348 - DNA, 15 bp, Homo sapiens
gcaaggtatgtatga

SEQ ID NO: 1595349 - DNA, 15 bp, Homo sapiens
caaggtatgtatgac

SEQ ID NO: 1595350 - DNA, 15 bp, Homo sapiens
aaggtatgtatgaca

SEQ ID NO: 1595351 - DNA, 15 bp, Homo sapiens
aggtatgtatgacat

SEQ ID NO: 1595352 - DNA, 15 bp, Homo sapiens
ggtatgtatgacatt

SEQ ID NO: 1595353 - DNA, 15 bp, Homo sapiens
gtatgtatgacattt

SEQ ID NO: 1595354 - DNA, 15 bp, Homo sapiens
tatgtatgacatttt

SEQ ID NO: 1595355 - DNA, 15 bp, Homo sapiens
atgtatgacattttg

SEQ ID NO: 1595356 - DNA, 15 bp, Homo sapiens
tgtatgacattttga

SEQ ID NO: 1595357 - DNA, 15 bp, Homo sapiens
gtatgacattttgac

SEQ ID NO: 1595358 - DNA, 15 bp, Homo sapiens
tatgacattttgaca

SEQ ID NO: 1595359 - DNA, 15 bp, Homo sapiens
atgacattttgacac

SEQ ID NO: 1595360 - DNA, 15 bp, Homo sapiens
tgacattttgacaca

SEQ ID NO: 1595361 - DNA, 15 bp, Homo sapiens
gacattttgacacag

SEQ ID NO: 1595362 - DNA, 15 bp, Homo sapiens
acattttgacacaga

SEQ ID NO: 1595363 - DNA, 15 bp, Homo sapiens
cattttgacacagaa

SEQ ID NO: 1595364 - DNA, 15 bp, Homo sapiens
attttgacacagaat

SEQ ID NO: 1595365 - DNA, 15 bp, Homo sapiens
ttttgacacagaata

SEQ ID NO: 1595366 - DNA, 15 bp, Homo sapiens
tttgacacagaatat

SEQ ID NO: 1595367 - DNA, 15 bp, Homo sapiens
cacagaatattttcc

SEQ ID NO: 1595368 - DNA, 15 bp, Homo sapiens
acagaatattttcct

SEQ ID NO: 1595369 - DNA, 15 bp, Homo sapiens
cagaatattttcctc

SEQ ID NO: 1595370 - DNA, 15 bp, Homo sapiens
agaatattttcctca

SEQ ID NO: 1595371 - DNA, 15 bp, Homo sapiens
gaatattttcctcat

SEQ ID NO: 1595372 - DNA, 15 bp, Homo sapiens
aatattttcctcatt

SEQ ID NO: 1595373 - DNA, 15 bp, Homo sapiens
atattttcctcattt

SEQ ID NO: 1595374 - DNA, 15 bp, Homo sapiens
tattttcctcatttg

SEQ ID NO: 1595375 - DNA, 15 bp, Homo sapiens
attttcctcatttga

SEQ ID NO: 1595376 - DNA, 15 bp, Homo sapiens
ttttcctcatttgaa

SEQ ID NO: 1595377 - DNA, 15 bp, Homo sapiens
tttcctcatttgaag

SEQ ID NO: 1595378 - DNA, 15 bp, Homo sapiens
ttcctcatttgaagg

SEQ ID NO: 1595379 - DNA, 15 bp, Homo sapiens
tcctcatttgaaggg

SEQ ID NO: 1595380 - DNA, 15 bp, Homo sapiens
cctcatttgaagggg

SEQ ID NO: 1595381 - DNA, 15 bp, Homo sapiens
ctcatttgaaggggg

SEQ ID NO: 1595382 - DNA, 15 bp, Homo sapiens
tcatttgaaggggga

SEQ ID NO: 1595383 - DNA, 15 bp, Homo sapiens
catttgaagggggat

SEQ ID NO: 1595384 - DNA, 15 bp, Homo sapiens
atttgaagggggatt

SEQ ID NO: 1595385 - DNA, 15 bp, Homo sapiens
tttgaagggggatta

SEQ ID NO: 1595386 - DNA, 15 bp, Homo sapiens
ttgaagggggattaa

SEQ ID NO: 1595387 - DNA, 15 bp, Homo sapiens
tgaagggggattaag

SEQ ID NO: 1595388 - DNA, 15 bp, Homo sapiens
gaagggggattaagt

SEQ ID NO: 1595389 - DNA, 15 bp, Homo sapiens
aagggggattaagtg

SEQ ID NO: 1595390 - DNA, 15 bp, Homo sapiens
agggggattaagtga

SEQ ID NO: 1595391 - DNA, 15 bp, Homo sapiens
gggggattaagtgat

SEQ ID NO: 1595392 - DNA, 15 bp, Homo sapiens
ggggattaagtgatt

SEQ ID NO: 1595393 - DNA, 15 bp, Homo sapiens
gggattaagtgattg

SEQ ID NO: 1595394 - DNA, 15 bp, Homo sapiens
ggattaagtgattgc

SEQ ID NO: 1595395 - DNA, 15 bp, Homo sapiens
gattaagtgattgct

SEQ ID NO: 1595396 - DNA, 15 bp, Homo sapiens
attaagtgattgctt

SEQ ID NO: 1595397 - DNA, 15 bp, Homo sapiens
ttaagtgattgcttc

SEQ ID NO: 1595398 - DNA, 15 bp, Homo sapiens
taagtgattgcttct

SEQ ID NO: 1595399 - DNA, 15 bp, Homo sapiens
aagtgattgcttctt

SEQ ID NO: 1595400 - DNA, 15 bp, Homo sapiens
agtgattgcttcttt

SEQ ID NO: 1595401 - DNA, 15 bp, Homo sapiens
gtgattgcttctttt

SEQ ID NO: 1595402 - DNA, 15 bp, Homo sapiens
tgattgcttcttttt

SEQ ID NO: 1595403 - DNA, 15 bp, Homo sapiens
gattgcttcttttta

SEQ ID NO: 1595404 - DNA, 15 bp, Homo sapiens
attgcttctttttaa

SEQ ID NO: 1595405 - DNA, 15 bp, Homo sapiens
ttgcttctttttaag

SEQ ID NO: 1595406 - DNA, 15 bp, Homo sapiens
tgcttctttttaagg

SEQ ID NO: 1595407 - DNA, 15 bp, Homo sapiens
gcttctttttaagga

SEQ ID NO: 1595408 - DNA, 15 bp, Homo sapiens
cttctttttaaggat

SEQ ID NO: 1595409 - DNA, 15 bp, Homo sapiens
ttctttttaaggata

SEQ ID NO: 1595410 - DNA, 15 bp, Homo sapiens
tctttttaaggataa

SEQ ID NO: 1595411 - DNA, 15 bp, Homo sapiens
ctttttaaggataaa

SEQ ID NO: 1595412 - DNA, 15 bp, Homo sapiens
tttttaaggataaat

SEQ ID NO: 1595413 - DNA, 15 bp, Homo sapiens
ttttaaggataaatg

SEQ ID NO: 1595414 - DNA, 15 bp, Homo sapiens
tttaaggataaatgt

SEQ ID NO: 1595415 - DNA, 15 bp, Homo sapiens
ttaaggataaatgtt

SEQ ID NO: 1595416 - DNA, 15 bp, Homo sapiens
taaggataaatgttt

SEQ ID NO: 1595417 - DNA, 15 bp, Homo sapiens
aaggataaatgtttt

SEQ ID NO: 1595418 - DNA, 15 bp, Homo sapiens
aggataaatgttttc

SEQ ID NO: 1595419 - DNA, 15 bp, Homo sapiens
ggataaatgttttca

SEQ ID NO: 1595420 - DNA, 15 bp, Homo sapiens
gataaatgttttcaa

SEQ ID NO: 1595421 - DNA, 15 bp, Homo sapiens
ataaatgttttcaac

SEQ ID NO: 1595422 - DNA, 15 bp, Homo sapiens
taaatgttttcaact

SEQ ID NO: 1595423 - DNA, 15 bp, Homo sapiens
aaatgttttcaactg

SEQ ID NO: 1595424 - DNA, 15 bp, Homo sapiens
aatgttttcaactgt

SEQ ID NO: 1595425 - DNA, 15 bp, Homo sapiens
atgttttcaactgtc

SEQ ID NO: 1595426 - DNA, 15 bp, Homo sapiens
tgttttcaactgtca

SEQ ID NO: 1595427 - DNA, 15 bp, Homo sapiens
gttttcaactgtcat

SEQ ID NO: 1595428 - DNA, 15 bp, Homo sapiens
ttttcaactgtcatt

SEQ ID NO: 1595429 - DNA, 15 bp, Homo sapiens
tttcaactgtcattt

SEQ ID NO: 1595430 - DNA, 15 bp, Homo sapiens
ttcaactgtcatttt

SEQ ID NO: 1595431 - DNA, 15 bp, Homo sapiens
tcaactgtcatttta

SEQ ID NO: 1595432 - DNA, 15 bp, Homo sapiens
caactgtcattttat

SEQ ID NO: 1595433 - DNA, 15 bp, Homo sapiens
aactgtcattttatc

SEQ ID NO: 1595434 - DNA, 15 bp, Homo sapiens
actgtcattttatct

SEQ ID NO: 1595435 - DNA, 15 bp, Homo sapiens
ctgtcattttatctt

SEQ ID NO: 1595436 - DNA, 15 bp, Homo sapiens
tgtcattttatcttc

SEQ ID NO: 1595437 - DNA, 15 bp, Homo sapiens
gtcattttatcttcg

SEQ ID NO: 1595438 - DNA, 15 bp, Homo sapiens
tcattttatcttcga

SEQ ID NO: 1595439 - DNA, 15 bp, Homo sapiens
cattttatcttcgaa

SEQ ID NO: 1595440 - DNA, 15 bp, Homo sapiens
attttatcttcgaaa

SEQ ID NO: 1595441 - DNA, 15 bp, Homo sapiens
ttttatcttcgaaaa

SEQ ID NO: 1595442 - DNA, 15 bp, Homo sapiens
tttatcttcgaaaag

SEQ ID NO: 1595443 - DNA, 15 bp, Homo sapiens
ttatcttcgaaaagt

SEQ ID NO: 1595444 - DNA, 15 bp, Homo sapiens
tatcttcgaaaagta

SEQ ID NO: 1595445 - DNA, 15 bp, Homo sapiens
atcttcgaaaagtaa

SEQ ID NO: 1595446 - DNA, 15 bp, Homo sapiens
tcttcgaaaagtaat

SEQ ID NO: 1595447 - DNA, 15 bp, Homo sapiens
cttcgaaaagtaatg

SEQ ID NO: 1595448 - DNA, 15 bp, Homo sapiens
ttcgaaaagtaatgt

SEQ ID NO: 1595449 - DNA, 15 bp, Homo sapiens
tcgaaaagtaatgta

SEQ ID NO: 1595450 - DNA, 15 bp, Homo sapiens
cgaaaagtaatgtaa

SEQ ID NO: 1595451 - DNA, 15 bp, Homo sapiens
gaaaagtaatgtaat

SEQ ID NO: 1595452 - DNA, 15 bp, Homo sapiens
aaaagtaatgtaatc

SEQ ID NO: 1595453 - DNA, 15 bp, Homo sapiens
aaagtaatgtaatct

SEQ ID NO: 1595454 - DNA, 15 bp, Homo sapiens
aagtaatgtaatctc

SEQ ID NO: 1595455 - DNA, 15 bp, Homo sapiens
agtaatgtaatctca

SEQ ID NO: 1595456 - DNA, 15 bp, Homo sapiens
gtaatgtaatctcat

SEQ ID NO: 1595457 - DNA, 15 bp, Homo sapiens
taatgtaatctcata

SEQ ID NO: 1595458 - DNA, 15 bp, Homo sapiens
aatgtaatctcatat

SEQ ID NO: 1595459 - DNA, 15 bp, Homo sapiens
atgtaatctcatata

SEQ ID NO: 1595460 - DNA, 15 bp, Homo sapiens
tgtaatctcatataa

SEQ ID NO: 1595461 - DNA, 15 bp, Homo sapiens
gtaatctcatataag

SEQ ID NO: 1595462 - DNA, 15 bp, Homo sapiens
taatctcatataaga

SEQ ID NO: 1595463 - DNA, 15 bp, Homo sapiens
aatctcatataagac

SEQ ID NO: 1595464 - DNA, 15 bp, Homo sapiens
atctcatataagact

SEQ ID NO: 1595465 - DNA, 15 bp, Homo sapiens
tctcatataagactt

SEQ ID NO: 1595466 - DNA, 15 bp, Homo sapiens
ctcatataagactta

SEQ ID NO: 1595467 - DNA, 15 bp, Homo sapiens
tcatataagacttaa

SEQ ID NO: 1595468 - DNA, 15 bp, Homo sapiens
catataagacttaag

SEQ ID NO: 1595469 - DNA, 15 bp, Homo sapiens
atataagacttaaga

SEQ ID NO: 1595470 - DNA, 15 bp, Homo sapiens
tataagacttaagat

SEQ ID NO: 1595471 - DNA, 15 bp, Homo sapiens
ataagacttaagata

SEQ ID NO: 1595472 - DNA, 15 bp, Homo sapiens
taagacttaagatat

SEQ ID NO: 1595473 - DNA, 15 bp, Homo sapiens
aagacttaagatata

SEQ ID NO: 1595474 - DNA, 15 bp, Homo sapiens
agacttaagatataa

SEQ ID NO: 1595475 - DNA, 15 bp, Homo sapiens
gacttaagatataat

SEQ ID NO: 1595476 - DNA, 15 bp, Homo sapiens
acttaagatataatc

SEQ ID NO: 1595477 - DNA, 15 bp, Homo sapiens
cttaagatataatcc

SEQ ID NO: 1595478 - DNA, 15 bp, Homo sapiens
ttaagatataatcct

SEQ ID NO: 1595479 - DNA, 15 bp, Homo sapiens
taagatataatcctt

SEQ ID NO: 1595480 - DNA, 15 bp, Homo sapiens
aagatataatccttt

SEQ ID NO: 1595481 - DNA, 15 bp, Homo sapiens
agatataatcctttt

SEQ ID NO: 1595482 - DNA, 15 bp, Homo sapiens
gatataatcctttta

SEQ ID NO: 1595483 - DNA, 15 bp, Homo sapiens
atataatccttttaa

SEQ ID NO: 1595484 - DNA, 15 bp, Homo sapiens
tataatccttttaaa

SEQ ID NO: 1595485 - DNA, 15 bp, Homo sapiens
ataatccttttaaat

SEQ ID NO: 1595486 - DNA, 15 bp, Homo sapiens
taatccttttaaata

SEQ ID NO: 1595487 - DNA, 15 bp, Homo sapiens
aatccttttaaataa

SEQ ID NO: 1595488 - DNA, 15 bp, Homo sapiens
atccttttaaataat

SEQ ID NO: 1595489 - DNA, 15 bp, Homo sapiens
tccttttaaataatt

SEQ ID NO: 1595490 - DNA, 15 bp, Homo sapiens
ccttttaaataattt

SEQ ID NO: 1595491 - DNA, 15 bp, Homo sapiens
cttttaaataatttt

SEQ ID NO: 1595492 - DNA, 15 bp, Homo sapiens
ttttaaataattttg

SEQ ID NO: 1595493 - DNA, 15 bp, Homo sapiens
tttaaataattttgt

SEQ ID NO: 1595494 - DNA, 15 bp, Homo sapiens
ttaaataattttgtc

SEQ ID NO: 1595495 - DNA, 15 bp, Homo sapiens
taaataattttgtca

SEQ ID NO: 1595496 - DNA, 15 bp, Homo sapiens
aaataattttgtcat

SEQ ID NO: 1595497 - DNA, 15 bp, Homo sapiens
aataattttgtcatg

SEQ ID NO: 1595498 - DNA, 15 bp, Homo sapiens
ataattttgtcatgt

SEQ ID NO: 1595499 - DNA, 15 bp, Homo sapiens
taattttgtcatgtg

SEQ ID NO: 1595500 - DNA, 15 bp, Homo sapiens
aattttgtcatgtgt

SEQ ID NO: 1595501 - DNA, 15 bp, Homo sapiens
attttgtcatgtgtt

SEQ ID NO: 1595502 - DNA, 15 bp, Homo sapiens
ttttgtcatgtgtta

SEQ ID NO: 1595503 - DNA, 15 bp, Homo sapiens
tttgtcatgtgttaa

SEQ ID NO: 1595504 - DNA, 15 bp, Homo sapiens
ttgtcatgtgttaat

SEQ ID NO: 1595505 - DNA, 15 bp, Homo sapiens
tgtcatgtgttaata

SEQ ID NO: 1595506 - DNA, 15 bp, Homo sapiens
gtcatgtgttaataa

SEQ ID NO: 1595507 - DNA, 15 bp, Homo sapiens
tcatgtgttaataaa

SEQ ID NO: 1595508 - DNA, 15 bp, Homo sapiens
catgtgttaataaag

SEQ ID NO: 1595509 - DNA, 15 bp, Homo sapiens
atgtgttaataaagc

SEQ ID NO: 1595510 - DNA, 15 bp, Homo sapiens
tgtgttaataaagct

SEQ ID NO: 1595511 - DNA, 15 bp, Homo sapiens
gtgttaataaagctc

SEQ ID NO: 1595512 - DNA, 15 bp, Homo sapiens
tgttaataaagctca

SEQ ID NO: 1595513 - DNA, 15 bp, Homo sapiens
gttaataaagctcat

SEQ ID NO: 1595514 - DNA, 15 bp, Homo sapiens
ttaataaagctcata

SEQ ID NO: 1595515 - DNA, 15 bp, Homo sapiens
taataaagctcataa

SEQ ID NO: 1595516 - DNA, 15 bp, Homo sapiens
aataaagctcataat

SEQ ID NO: 1595517 - DNA, 15 bp, Homo sapiens
ataaagctcataatt

SEQ ID NO: 1595518 - DNA, 15 bp, Homo sapiens
taaagctcataatta

SEQ ID NO: 1595519 - DNA, 15 bp, Homo sapiens
aaagctcataattac

SEQ ID NO: 1595520 - DNA, 15 bp, Homo sapiens
aagctcataattaca

SEQ ID NO: 1595521 - DNA, 15 bp, Homo sapiens
agctcataattacag

SEQ ID NO: 1595522 - DNA, 15 bp, Homo sapiens
gctcataattacagt

SEQ ID NO: 1595523 - DNA, 15 bp, Homo sapiens
ctcataattacagtc

SEQ ID NO: 1595524 - DNA, 15 bp, Homo sapiens
tcataattacagtca

SEQ ID NO: 1595525 - DNA, 15 bp, Homo sapiens
cataattacagtcac

SEQ ID NO: 1595526 - DNA, 15 bp, Homo sapiens
ataattacagtcact

SEQ ID NO: 1595527 - DNA, 15 bp, Homo sapiens
taattacagtcactt

SEQ ID NO: 1595528 - DNA, 15 bp, Homo sapiens
aattacagtcacttc

SEQ ID NO: 1595529 - DNA, 15 bp, Homo sapiens
attacagtcacttcc

SEQ ID NO: 1595530 - DNA, 15 bp, Homo sapiens
ttacagtcacttcct

SEQ ID NO: 1595531 - DNA, 15 bp, Homo sapiens
tacagtcacttcctt

SEQ ID NO: 1595532 - DNA, 15 bp, Homo sapiens
acagtcacttccttg

SEQ ID NO: 1595533 - DNA, 15 bp, Homo sapiens
cagtcacttccttgc

SEQ ID NO: 1595534 - DNA, 15 bp, Homo sapiens
agtcacttccttgcc

SEQ ID NO: 1595535 - DNA, 15 bp, Homo sapiens
gtcacttccttgcct

SEQ ID NO: 1595536 - DNA, 15 bp, Homo sapiens
tcacttccttgccta

SEQ ID NO: 1595537 - DNA, 15 bp, Homo sapiens
cacttccttgcctaa

SEQ ID NO: 1595538 - DNA, 15 bp, Homo sapiens
acttccttgcctaat

SEQ ID NO: 1595539 - DNA, 15 bp, Homo sapiens
cttccttgcctaata

SEQ ID NO: 1595540 - DNA, 15 bp, Homo sapiens
ttccttgcctaatat

SEQ ID NO: 1595541 - DNA, 15 bp, Homo sapiens
tccttgcctaatatt

SEQ ID NO: 1595542 - DNA, 15 bp, Homo sapiens
ccttgcctaatatta

SEQ ID NO: 1595543 - DNA, 15 bp, Homo sapiens
cttgcctaatattaa

SEQ ID NO: 1595544 - DNA, 15 bp, Homo sapiens
ttgcctaatattaac

SEQ ID NO: 1595545 - DNA, 15 bp, Homo sapiens
tgcctaatattaaca

SEQ ID NO: 1595546 - DNA, 15 bp, Homo sapiens
gcctaatattaacat

SEQ ID NO: 1595547 - DNA, 15 bp, Homo sapiens
cctaatattaacatt

SEQ ID NO: 1595548 - DNA, 15 bp, Homo sapiens
ctaatattaacattt

SEQ ID NO: 1595549 - DNA, 15 bp, Homo sapiens
taatattaacatttg

SEQ ID NO: 1595550 - DNA, 15 bp, Homo sapiens
aatattaacatttgg

SEQ ID NO: 1595551 - DNA, 15 bp, Homo sapiens
atattaacatttggt

SEQ ID NO: 1595552 - DNA, 15 bp, Homo sapiens
tattaacatttggtt

SEQ ID NO: 1595553 - DNA, 15 bp, Homo sapiens
attaacatttggttt

SEQ ID NO: 1595554 - DNA, 15 bp, Homo sapiens
ttaacatttggtttt

SEQ ID NO: 1595555 - DNA, 15 bp, Homo sapiens
taacatttggttttt

SEQ ID NO: 1595556 - DNA, 15 bp, Homo sapiens
aacatttggtttttc

SEQ ID NO: 1595557 - DNA, 15 bp, Homo sapiens
acatttggtttttca

SEQ ID NO: 1595558 - DNA, 15 bp, Homo sapiens
catttggtttttcag

SEQ ID NO: 1595559 - DNA, 15 bp, Homo sapiens
atttggtttttcagc

SEQ ID NO: 1595560 - DNA, 15 bp, Homo sapiens
tttggtttttcagca

SEQ ID NO: 1595561 - DNA, 15 bp, Homo sapiens
ttggtttttcagcat

SEQ ID NO: 1595562 - DNA, 15 bp, Homo sapiens
tggtttttcagcatg

SEQ ID NO: 1595563 - DNA, 15 bp, Homo sapiens
ggtttttcagcatgc

SEQ ID NO: 1595564 - DNA, 15 bp, Homo sapiens
gtttttcagcatgct

SEQ ID NO: 1595565 - DNA, 15 bp, Homo sapiens
tttttcagcatgcta

SEQ ID NO: 1595566 - DNA, 15 bp, Homo sapiens
ttttcagcatgctaa

SEQ ID NO: 1595567 - DNA, 15 bp, Homo sapiens
tttcagcatgctaat

SEQ ID NO: 1595568 - DNA, 15 bp, Homo sapiens
ttcagcatgctaatt

SEQ ID NO: 1595569 - DNA, 15 bp, Homo sapiens
tcagcatgctaatta

SEQ ID NO: 1595570 - DNA, 15 bp, Homo sapiens
cagcatgctaattat

SEQ ID NO: 1595571 - DNA, 15 bp, Homo sapiens
agcatgctaattata

SEQ ID NO: 1595572 - DNA, 15 bp, Homo sapiens
gcatgctaattatat

SEQ ID NO: 1595573 - DNA, 15 bp, Homo sapiens
catgctaattatatc

SEQ ID NO: 1595574 - DNA, 15 bp, Homo sapiens
atgctaattatatca

SEQ ID NO: 1595575 - DNA, 15 bp, Homo sapiens
tgctaattatatcag

SEQ ID NO: 1595576 - DNA, 15 bp, Homo sapiens
gctaattatatcagt

SEQ ID NO: 1595577 - DNA, 15 bp, Homo sapiens
ctaattatatcagtt

SEQ ID NO: 1595578 - DNA, 15 bp, Homo sapiens
taattatatcagttt

SEQ ID NO: 1595579 - DNA, 15 bp, Homo sapiens
aattatatcagtttg

SEQ ID NO: 1595580 - DNA, 15 bp, Homo sapiens
attatatcagtttgt

SEQ ID NO: 1595581 - DNA, 15 bp, Homo sapiens
ttatatcagtttgtc

SEQ ID NO: 1595582 - DNA, 15 bp, Homo sapiens
tatatcagtttgtcc

SEQ ID NO: 1595583 - DNA, 15 bp, Homo sapiens
atatcagtttgtcct

SEQ ID NO: 1595584 - DNA, 15 bp, Homo sapiens
tatcagtttgtcctg

SEQ ID NO: 1595585 - DNA, 15 bp, Homo sapiens
atcagtttgtcctga

SEQ ID NO: 1595586 - DNA, 15 bp, Homo sapiens
tcagtttgtcctgaa

SEQ ID NO: 1595587 - DNA, 15 bp, Homo sapiens
cagtttgtcctgaat

SEQ ID NO: 1595588 - DNA, 15 bp, Homo sapiens
agtttgtcctgaata

SEQ ID NO: 1595589 - DNA, 15 bp, Homo sapiens
gtttgtcctgaatag

SEQ ID NO: 1595590 - DNA, 15 bp, Homo sapiens
tttgtcctgaatagc

SEQ ID NO: 1595591 - DNA, 15 bp, Homo sapiens
ttgtcctgaatagca

SEQ ID NO: 1595592 - DNA, 15 bp, Homo sapiens
tgtcctgaatagcat

SEQ ID NO: 1595593 - DNA, 15 bp, Homo sapiens
gtcctgaatagcatg

SEQ ID NO: 1595594 - DNA, 15 bp, Homo sapiens
tcctgaatagcatgg

SEQ ID NO: 1595595 - DNA, 15 bp, Homo sapiens
cctgaatagcatggc

SEQ ID NO: 1595596 - DNA, 15 bp, Homo sapiens
ctgaatagcatggca

SEQ ID NO: 1595597 - DNA, 15 bp, Homo sapiens
tgaatagcatggcag

SEQ ID NO: 1595598 - DNA, 15 bp, Homo sapiens
gaatagcatggcaga

SEQ ID NO: 1595599 - DNA, 15 bp, Homo sapiens
aatagcatggcagag

SEQ ID NO: 1595600 - DNA, 15 bp, Homo sapiens
atagcatggcagagg

SEQ ID NO: 1595601 - DNA, 15 bp, Homo sapiens
tagcatggcagagga

SEQ ID NO: 1595602 - DNA, 15 bp, Homo sapiens
agcatggcagaggat

SEQ ID NO: 1595603 - DNA, 15 bp, Homo sapiens
gcatggcagaggatt

SEQ ID NO: 1595604 - DNA, 15 bp, Homo sapiens
catggcagaggattt

SEQ ID NO: 1595605 - DNA, 15 bp, Homo sapiens
atggcagaggatttt

SEQ ID NO: 1595606 - DNA, 15 bp, Homo sapiens
tggcagaggattttg

SEQ ID NO: 1595607 - DNA, 15 bp, Homo sapiens
ggcagaggattttgg

SEQ ID NO: 1595608 - DNA, 15 bp, Homo sapiens
gcagaggattttggg

SEQ ID NO: 1595609 - DNA, 15 bp, Homo sapiens
cagaggattttgggc

SEQ ID NO: 1595610 - DNA, 15 bp, Homo sapiens
agaggattttgggcc

SEQ ID NO: 1595611 - DNA, 15 bp, Homo sapiens
gaggattttgggccc

SEQ ID NO: 1595612 - DNA, 15 bp, Homo sapiens
aggattttgggcccc

SEQ ID NO: 1595613 - DNA, 15 bp, Homo sapiens
ggattttgggccccc

SEQ ID NO: 1595614 - DNA, 15 bp, Homo sapiens
gattttgggccccct

SEQ ID NO: 1595615 - DNA, 15 bp, Homo sapiens
attttgggccccctt

SEQ ID NO: 1595616 - DNA, 15 bp, Homo sapiens
ttttgggcccccttg

SEQ ID NO: 1595617 - DNA, 15 bp, Homo sapiens
tttgggcccccttgc

SEQ ID NO: 1595618 - DNA, 15 bp, Homo sapiens
ttgggcccccttgca

SEQ ID NO: 1595619 - DNA, 15 bp, Homo sapiens
tgggcccccttgcaa

SEQ ID NO: 1595620 - DNA, 15 bp, Homo sapiens
gggcccccttgcaaa

SEQ ID NO: 1595621 - DNA, 15 bp, Homo sapiens
ggcccccttgcaaaa

SEQ ID NO: 1595622 - DNA, 15 bp, Homo sapiens
gcccccttgcaaaat

SEQ ID NO: 1595623 - DNA, 15 bp, Homo sapiens
cccccttgcaaaatt

SEQ ID NO: 1595624 - DNA, 15 bp, Homo sapiens
ccccttgcaaaatta

SEQ ID NO: 1595625 - DNA, 15 bp, Homo sapiens
cccttgcaaaattaa

SEQ ID NO: 1595626 - DNA, 15 bp, Homo sapiens
ccttgcaaaattaag

SEQ ID NO: 1595627 - DNA, 15 bp, Homo sapiens
cttgcaaaattaaga

SEQ ID NO: 1595628 - DNA, 15 bp, Homo sapiens
ttgcaaaattaagaa

SEQ ID NO: 1595629 - DNA, 15 bp, Homo sapiens
tgcaaaattaagaat

SEQ ID NO: 1595630 - DNA, 15 bp, Homo sapiens
gcaaaattaagaata

SEQ ID NO: 1595631 - DNA, 15 bp, Homo sapiens
caaaattaagaataa

SEQ ID NO: 1595632 - DNA, 15 bp, Homo sapiens
aaaattaagaataag

SEQ ID NO: 1595633 - DNA, 15 bp, Homo sapiens
aaattaagaataagg

SEQ ID NO: 1595634 - DNA, 15 bp, Homo sapiens
aattaagaataagga

SEQ ID NO: 1595635 - DNA, 15 bp, Homo sapiens
attaagaataaggat

SEQ ID NO: 1595636 - DNA, 15 bp, Homo sapiens
ttaagaataaggatt

SEQ ID NO: 1595637 - DNA, 15 bp, Homo sapiens
taagaataaggattc

SEQ ID NO: 1595638 - DNA, 15 bp, Homo sapiens
aagaataaggattcc

SEQ ID NO: 1595639 - DNA, 15 bp, Homo sapiens
agaataaggattcca

SEQ ID NO: 1595640 - DNA, 15 bp, Homo sapiens
gaataaggattccaa

SEQ ID NO: 1595641 - DNA, 15 bp, Homo sapiens
aataaggattccaaa

SEQ ID NO: 1595642 - DNA, 15 bp, Homo sapiens
ataaggattccaaag

SEQ ID NO: 1595643 - DNA, 15 bp, Homo sapiens
taaggattccaaagc

SEQ ID NO: 1595644 - DNA, 15 bp, Homo sapiens
aaggattccaaagcg

SEQ ID NO: 1595645 - DNA, 15 bp, Homo sapiens
aggattccaaagcgg

SEQ ID NO: 1595646 - DNA, 15 bp, Homo sapiens
ggattccaaagcggg

SEQ ID NO: 1595647 - DNA, 15 bp, Homo sapiens
gattccaaagcgggt

SEQ ID NO: 1595648 - DNA, 15 bp, Homo sapiens
attccaaagcgggtg

SEQ ID NO: 1595649 - DNA, 15 bp, Homo sapiens
ttccaaagcgggtga

SEQ ID NO: 1595650 - DNA, 15 bp, Homo sapiens
tccaaagcgggtgag

SEQ ID NO: 1595651 - DNA, 15 bp, Homo sapiens
ccaaagcgggtgagg

SEQ ID NO: 1595652 - DNA, 15 bp, Homo sapiens
caaagcgggtgagga

SEQ ID NO: 1595653 - DNA, 15 bp, Homo sapiens
aaagcgggtgaggaa

SEQ ID NO: 1595654 - DNA, 15 bp, Homo sapiens
aagcgggtgaggaag

SEQ ID NO: 1595655 - DNA, 15 bp, Homo sapiens
agcgggtgaggaagt

SEQ ID NO: 1595656 - DNA, 15 bp, Homo sapiens
gcgggtgaggaagtg

SEQ ID NO: 1595657 - DNA, 15 bp, Homo sapiens
cgggtgaggaagtga

SEQ ID NO: 1595658 - DNA, 15 bp, Homo sapiens
gggtgaggaagtgat

SEQ ID NO: 1595659 - DNA, 15 bp, Homo sapiens
ggtgaggaagtgata

SEQ ID NO: 1595660 - DNA, 15 bp, Homo sapiens
gtgaggaagtgatag

SEQ ID NO: 1595661 - DNA, 15 bp, Homo sapiens
tgaggaagtgatagg

SEQ ID NO: 1595662 - DNA, 15 bp, Homo sapiens
gaggaagtgatagga

SEQ ID NO: 1595663 - DNA, 15 bp, Homo sapiens
aggaagtgataggaa

SEQ ID NO: 1595664 - DNA, 15 bp, Homo sapiens
ggaagtgataggaag

SEQ ID NO: 1595665 - DNA, 15 bp, Homo sapiens
gaagtgataggaagg

SEQ ID NO: 1595666 - DNA, 15 bp, Homo sapiens
aagtgataggaaggg

SEQ ID NO: 1595667 - DNA, 15 bp, Homo sapiens
agtgataggaagggg

SEQ ID NO: 1595668 - DNA, 15 bp, Homo sapiens
gtgataggaaggggt

SEQ ID NO: 1595669 - DNA, 15 bp, Homo sapiens
tgataggaaggggtg

SEQ ID NO: 1595670 - DNA, 15 bp, Homo sapiens
gataggaaggggtgg

SEQ ID NO: 1595671 - DNA, 15 bp, Homo sapiens
ataggaaggggtggg

SEQ ID NO: 1595672 - DNA, 15 bp, Homo sapiens
taggaaggggtgggc

SEQ ID NO: 1595673 - DNA, 15 bp, Homo sapiens
aggaaggggtgggcc

SEQ ID NO: 1595674 - DNA, 15 bp, Homo sapiens
ggaaggggtgggccc

SEQ ID NO: 1595675 - DNA, 15 bp, Homo sapiens
gaaggggtgggccct

SEQ ID NO: 1595676 - DNA, 15 bp, Homo sapiens
aaggggtgggccctg

SEQ ID NO: 1595677 - DNA, 15 bp, Homo sapiens
aggggtgggccctga

SEQ ID NO: 1595678 - DNA, 15 bp, Homo sapiens
ggggtgggccctgaa

SEQ ID NO: 1595679 - DNA, 15 bp, Homo sapiens
gggtgggccctgaag

SEQ ID NO: 1595680 - DNA, 15 bp, Homo sapiens
ggtgggccctgaaga

SEQ ID NO: 1595681 - DNA, 15 bp, Homo sapiens
gtgggccctgaagat

SEQ ID NO: 1595682 - DNA, 15 bp, Homo sapiens
tgggccctgaagatc

SEQ ID NO: 1595683 - DNA, 15 bp, Homo sapiens
gggccctgaagatct

SEQ ID NO: 1595684 - DNA, 15 bp, Homo sapiens
ggccctgaagatctg

SEQ ID NO: 1595685 - DNA, 15 bp, Homo sapiens
gccctgaagatctgg

SEQ ID NO: 1595686 - DNA, 15 bp, Homo sapiens
ccctgaagatctgga

SEQ ID NO: 1595687 - DNA, 15 bp, Homo sapiens
cctgaagatctggac

SEQ ID NO: 1595688 - DNA, 15 bp, Homo sapiens
ctgaagatctggacc

SEQ ID NO: 1595689 - DNA, 15 bp, Homo sapiens
tgaagatctggacct

SEQ ID NO: 1595690 - DNA, 15 bp, Homo sapiens
gaagatctggacctc

SEQ ID NO: 1595691 - DNA, 15 bp, Homo sapiens
aagatctggacctcc

SEQ ID NO: 1595692 - DNA, 15 bp, Homo sapiens
agatctggacctcct

SEQ ID NO: 1595693 - DNA, 15 bp, Homo sapiens
gatctggacctcctg

SEQ ID NO: 1595694 - DNA, 15 bp, Homo sapiens
atctggacctcctgg

SEQ ID NO: 1595695 - DNA, 15 bp, Homo sapiens
tctggacctcctgga

SEQ ID NO: 1595696 - DNA, 15 bp, Homo sapiens
ctggacctcctggaa

SEQ ID NO: 1595697 - DNA, 15 bp, Homo sapiens
tggacctcctggaat

SEQ ID NO: 1595698 - DNA, 15 bp, Homo sapiens
ggacctcctggaatt

SEQ ID NO: 1595699 - DNA, 15 bp, Homo sapiens
gacctcctggaattg

SEQ ID NO: 1595700 - DNA, 15 bp, Homo sapiens
acctcctggaattga

SEQ ID NO: 1595701 - DNA, 15 bp, Homo sapiens
cctcctggaattgag

SEQ ID NO: 1595702 - DNA, 15 bp, Homo sapiens
ctcctggaattgagt

SEQ ID NO: 1595703 - DNA, 15 bp, Homo sapiens
tcctggaattgagtg

SEQ ID NO: 1595704 - DNA, 15 bp, Homo sapiens
cctggaattgagtga

SEQ ID NO: 1595705 - DNA, 15 bp, Homo sapiens
ctggaattgagtgat

SEQ ID NO: 1595706 - DNA, 15 bp, Homo sapiens
tggaattgagtgatg

SEQ ID NO: 1595707 - DNA, 15 bp, Homo sapiens
ggaattgagtgatga

SEQ ID NO: 1595708 - DNA, 15 bp, Homo sapiens
gaattgagtgatgaa

SEQ ID NO: 1595709 - DNA, 15 bp, Homo sapiens
aattgagtgatgaat

SEQ ID NO: 1595710 - DNA, 15 bp, Homo sapiens
attgagtgatgaatg

SEQ ID NO: 1595711 - DNA, 15 bp, Homo sapiens
ttgagtgatgaatgc

SEQ ID NO: 1595712 - DNA, 15 bp, Homo sapiens
tgagtgatgaatgct

SEQ ID NO: 1595713 - DNA, 15 bp, Homo sapiens
gagtgatgaatgctg

SEQ ID NO: 1595714 - DNA, 15 bp, Homo sapiens
agtgatgaatgctgc

SEQ ID NO: 1595715 - DNA, 15 bp, Homo sapiens
gtgatgaatgctgca

SEQ ID NO: 1595716 - DNA, 15 bp, Homo sapiens
tgatgaatgctgcat

SEQ ID NO: 1595717 - DNA, 15 bp, Homo sapiens
gatgaatgctgcatc

SEQ ID NO: 1595718 - DNA, 15 bp, Homo sapiens
atgaatgctgcatct

SEQ ID NO: 1595719 - DNA, 15 bp, Homo sapiens
tgaatgctgcatctt

SEQ ID NO: 1595720 - DNA, 15 bp, Homo sapiens
gaatgctgcatcttc

SEQ ID NO: 1595721 - DNA, 15 bp, Homo sapiens
aatgctgcatcttct

SEQ ID NO: 1595722 - DNA, 15 bp, Homo sapiens
atgctgcatcttctt

SEQ ID NO: 1595723 - DNA, 15 bp, Homo sapiens
tgctgcatcttcttt

SEQ ID NO: 1595724 - DNA, 15 bp, Homo sapiens
gctgcatcttctttg

SEQ ID NO: 1595725 - DNA, 15 bp, Homo sapiens
ctgcatcttctttgt

SEQ ID NO: 1595726 - DNA, 15 bp, Homo sapiens
tgcatcttctttgtg

SEQ ID NO: 1595727 - DNA, 15 bp, Homo sapiens
gcatcttctttgtgt

SEQ ID NO: 1595728 - DNA, 15 bp, Homo sapiens
catcttctttgtgtc

SEQ ID NO: 1595729 - DNA, 15 bp, Homo sapiens
atcttctttgtgtct

SEQ ID NO: 1595730 - DNA, 15 bp, Homo sapiens
tcttctttgtgtctg

SEQ ID NO: 1595731 - DNA, 15 bp, Homo sapiens
cttctttgtgtctgt

SEQ ID NO: 1595732 - DNA, 15 bp, Homo sapiens
ttctttgtgtctgta

SEQ ID NO: 1595733 - DNA, 15 bp, Homo sapiens
tctttgtgtctgtag

SEQ ID NO: 1595734 - DNA, 15 bp, Homo sapiens
ctttgtgtctgtagt

SEQ ID NO: 1595735 - DNA, 15 bp, Homo sapiens
tttgtgtctgtagtg

SEQ ID NO: 1595736 - DNA, 15 bp, Homo sapiens
ttgtgtctgtagtga

SEQ ID NO: 1595737 - DNA, 15 bp, Homo sapiens
tgtgtctgtagtgaa

SEQ ID NO: 1595738 - DNA, 15 bp, Homo sapiens
gtgtctgtagtgaaa

SEQ ID NO: 1595739 - DNA, 15 bp, Homo sapiens
tgtctgtagtgaaat

SEQ ID NO: 1595740 - DNA, 15 bp, Homo sapiens
gtctgtagtgaaatt

SEQ ID NO: 1595741 - DNA, 15 bp, Homo sapiens
tctgtagtgaaattt

SEQ ID NO: 1595742 - DNA, 15 bp, Homo sapiens
ctgtagtgaaatttt

SEQ ID NO: 1595743 - DNA, 15 bp, Homo sapiens
tgtagtgaaatttta

SEQ ID NO: 1595744 - DNA, 15 bp, Homo sapiens
gtagtgaaattttat

SEQ ID NO: 1595745 - DNA, 15 bp, Homo sapiens
tagtgaaattttata

SEQ ID NO: 1595746 - DNA, 15 bp, Homo sapiens
agtgaaattttataa

SEQ ID NO: 1595747 - DNA, 15 bp, Homo sapiens
gtgaaattttataat

SEQ ID NO: 1595748 - DNA, 15 bp, Homo sapiens
tgaaattttataatg

SEQ ID NO: 1595749 - DNA, 15 bp, Homo sapiens
gaaattttataatgc

SEQ ID NO: 1595750 - DNA, 15 bp, Homo sapiens
aaattttataatgcc

SEQ ID NO: 1595751 - DNA, 15 bp, Homo sapiens
aattttataatgcct

SEQ ID NO: 1595752 - DNA, 15 bp, Homo sapiens
attttataatgcctg

SEQ ID NO: 1595753 - DNA, 15 bp, Homo sapiens
ttttataatgcctgc

SEQ ID NO: 1595754 - DNA, 15 bp, Homo sapiens
tttataatgcctgct

SEQ ID NO: 1595755 - DNA, 15 bp, Homo sapiens
ttataatgcctgctt

SEQ ID NO: 1595756 - DNA, 15 bp, Homo sapiens
tataatgcctgcttc

SEQ ID NO: 1595757 - DNA, 15 bp, Homo sapiens
ataatgcctgcttcc

SEQ ID NO: 1595758 - DNA, 15 bp, Homo sapiens
taatgcctgcttcct

SEQ ID NO: 1595759 - DNA, 15 bp, Homo sapiens
aatgcctgcttcctt

SEQ ID NO: 1595760 - DNA, 15 bp, Homo sapiens
atgcctgcttccttt

SEQ ID NO: 1595761 - DNA, 15 bp, Homo sapiens
tgcctgcttcctttt

SEQ ID NO: 1595762 - DNA, 15 bp, Homo sapiens
gcctgcttccttttt

SEQ ID NO: 1595763 - DNA, 15 bp, Homo sapiens
cctgcttcctttttt

SEQ ID NO: 1595764 - DNA, 15 bp, Homo sapiens
ctgcttcctttttta

SEQ ID NO: 1595765 - DNA, 15 bp, Homo sapiens
tgcttccttttttat

SEQ ID NO: 1595766 - DNA, 15 bp, Homo sapiens
gcttccttttttatt

SEQ ID NO: 1595767 - DNA, 15 bp, Homo sapiens
cttccttttttatta

SEQ ID NO: 1595768 - DNA, 15 bp, Homo sapiens
ttccttttttattaa

SEQ ID NO: 1595769 - DNA, 15 bp, Homo sapiens
tccttttttattaag

SEQ ID NO: 1595770 - DNA, 15 bp, Homo sapiens
ccttttttattaagt

SEQ ID NO: 1595771 - DNA, 15 bp, Homo sapiens
cttttttattaagtc

SEQ ID NO: 1595772 - DNA, 15 bp, Homo sapiens
ttttttattaagtcg

SEQ ID NO: 1595773 - DNA, 15 bp, Homo sapiens
tttttattaagtcgg

SEQ ID NO: 1595774 - DNA, 15 bp, Homo sapiens
ttttattaagtcggc

SEQ ID NO: 1595775 - DNA, 15 bp, Homo sapiens
tttattaagtcggcc

SEQ ID NO: 1595776 - DNA, 15 bp, Homo sapiens
ttattaagtcggcct

SEQ ID NO: 1595777 - DNA, 15 bp, Homo sapiens
tattaagtcggcctc

SEQ ID NO: 1595778 - DNA, 15 bp, Homo sapiens
attaagtcggcctca

SEQ ID NO: 1595779 - DNA, 15 bp, Homo sapiens
ttaagtcggcctcac

SEQ ID NO: 1595780 - DNA, 15 bp, Homo sapiens
taagtcggcctcacc

SEQ ID NO: 1595781 - DNA, 15 bp, Homo sapiens
aagtcggcctcacct

SEQ ID NO: 1595782 - DNA, 15 bp, Homo sapiens
agtcggcctcacctc

SEQ ID NO: 1595783 - DNA, 15 bp, Homo sapiens
gtcggcctcacctcc

SEQ ID NO: 1595784 - DNA, 15 bp, Homo sapiens
tcggcctcacctcct

SEQ ID NO: 1595785 - DNA, 15 bp, Homo sapiens
cggcctcacctcctc

SEQ ID NO: 1595786 - DNA, 15 bp, Homo sapiens
ggcctcacctcctca

SEQ ID NO: 1595787 - DNA, 15 bp, Homo sapiens
gcctcacctcctcac

SEQ ID NO: 1595788 - DNA, 15 bp, Homo sapiens
cctcacctcctcacc

SEQ ID NO: 1595789 - DNA, 15 bp, Homo sapiens
ctcacctcctcacct

SEQ ID NO: 1595790 - DNA, 15 bp, Homo sapiens
tcacctcctcacctt

SEQ ID NO: 1595791 - DNA, 15 bp, Homo sapiens
cacctcctcacctta

SEQ ID NO: 1595792 - DNA, 15 bp, Homo sapiens
acctcctcaccttac

SEQ ID NO: 1595793 - DNA, 15 bp, Homo sapiens
cctcctcaccttacc

SEQ ID NO: 1595794 - DNA, 15 bp, Homo sapiens
ctcctcaccttacct

SEQ ID NO: 1595795 - DNA, 15 bp, Homo sapiens
tcctcaccttaccta

SEQ ID NO: 1595796 - DNA, 15 bp, Homo sapiens
cctcaccttacctat

SEQ ID NO: 1595797 - DNA, 15 bp, Homo sapiens
ctcaccttacctatg

SEQ ID NO: 1595798 - DNA, 15 bp, Homo sapiens
tcaccttacctatgc

SEQ ID NO: 1595799 - DNA, 15 bp, Homo sapiens
caccttacctatgct

SEQ ID NO: 1595800 - DNA, 15 bp, Homo sapiens
accttacctatgctg

SEQ ID NO: 1595801 - DNA, 15 bp, Homo sapiens
ccttacctatgctgt

SEQ ID NO: 1595802 - DNA, 15 bp, Homo sapiens
cttacctatgctgtt

SEQ ID NO: 1595803 - DNA, 15 bp, Homo sapiens
ttacctatgctgttt

SEQ ID NO: 1595804 - DNA, 15 bp, Homo sapiens
tacctatgctgtttt

SEQ ID NO: 1595805 - DNA, 15 bp, Homo sapiens
acctatgctgtttta

SEQ ID NO: 1595806 - DNA, 15 bp, Homo sapiens
cctatgctgttttac

SEQ ID NO: 1595807 - DNA, 15 bp, Homo sapiens
ctatgctgttttact

SEQ ID NO: 1595808 - DNA, 15 bp, Homo sapiens
tatgctgttttactt

SEQ ID NO: 1595809 - DNA, 15 bp, Homo sapiens
atgctgttttacttt

SEQ ID NO: 1595810 - DNA, 15 bp, Homo sapiens
tgctgttttactttt

SEQ ID NO: 1595811 - DNA, 15 bp, Homo sapiens
gctgttttacttttg

SEQ ID NO: 1595812 - DNA, 15 bp, Homo sapiens
ctgttttacttttgc

SEQ ID NO: 1595813 - DNA, 15 bp, Homo sapiens
tgttttacttttgct

SEQ ID NO: 1595814 - DNA, 15 bp, Homo sapiens
gttttacttttgctt

SEQ ID NO: 1595815 - DNA, 15 bp, Homo sapiens
ttttacttttgcttt

SEQ ID NO: 1595816 - DNA, 15 bp, Homo sapiens
tttacttttgctttt

SEQ ID NO: 1595817 - DNA, 15 bp, Homo sapiens
ttacttttgctttta

SEQ ID NO: 1595818 - DNA, 15 bp, Homo sapiens
tacttttgcttttat

SEQ ID NO: 1595819 - DNA, 15 bp, Homo sapiens
acttttgcttttata

SEQ ID NO: 1595820 - DNA, 15 bp, Homo sapiens
cttttgcttttatag

SEQ ID NO: 1595821 - DNA, 15 bp, Homo sapiens
ttttgcttttatagt

SEQ ID NO: 1595822 - DNA, 15 bp, Homo sapiens
tttgcttttatagtt

SEQ ID NO: 1595823 - DNA, 15 bp, Homo sapiens
ttgcttttatagttc

SEQ ID NO: 1595824 - DNA, 15 bp, Homo sapiens
tgcttttatagttct

SEQ ID NO: 1595825 - DNA, 15 bp, Homo sapiens
gcttttatagttcta

SEQ ID NO: 1595826 - DNA, 15 bp, Homo sapiens
cttttatagttctac

SEQ ID NO: 1595827 - DNA, 15 bp, Homo sapiens
ttttatagttctacc

SEQ ID NO: 1595828 - DNA, 15 bp, Homo sapiens
tttatagttctacct

SEQ ID NO: 1595829 - DNA, 15 bp, Homo sapiens
ttatagttctacctg

SEQ ID NO: 1595830 - DNA, 15 bp, Homo sapiens
tatagttctacctgt

SEQ ID NO: 1595831 - DNA, 15 bp, Homo sapiens
atagttctacctgtg

SEQ ID NO: 1595832 - DNA, 15 bp, Homo sapiens
tagttctacctgtgt

SEQ ID NO: 1595833 - DNA, 15 bp, Homo sapiens
agttctacctgtgtt

SEQ ID NO: 1595834 - DNA, 15 bp, Homo sapiens
gttctacctgtgttt

SEQ ID NO: 1595835 - DNA, 15 bp, Homo sapiens
ttctacctgtgttta

SEQ ID NO: 1595836 - DNA, 15 bp, Homo sapiens
tctacctgtgtttat

SEQ ID NO: 1595837 - DNA, 15 bp, Homo sapiens
ctacctgtgtttatt

SEQ ID NO: 1595838 - DNA, 15 bp, Homo sapiens
tacctgtgtttattt

SEQ ID NO: 1595839 - DNA, 15 bp, Homo sapiens
acctgtgtttatttc

SEQ ID NO: 1595840 - DNA, 15 bp, Homo sapiens
cctgtgtttatttct

SEQ ID NO: 1595841 - DNA, 15 bp, Homo sapiens
ctgtgtttatttctc

SEQ ID NO: 1595842 - DNA, 15 bp, Homo sapiens
tgtgtttatttctca

SEQ ID NO: 1595843 - DNA, 15 bp, Homo sapiens
gtgtttatttctcat

SEQ ID NO: 1595844 - DNA, 15 bp, Homo sapiens
tgtttatttctcatt

SEQ ID NO: 1595845 - DNA, 15 bp, Homo sapiens
gtttatttctcattt

SEQ ID NO: 1595846 - DNA, 15 bp, Homo sapiens
tttatttctcatttt

SEQ ID NO: 1595847 - DNA, 15 bp, Homo sapiens
ttatttctcattttc

SEQ ID NO: 1595848 - DNA, 15 bp, Homo sapiens
tatttctcattttcg

SEQ ID NO: 1595849 - DNA, 15 bp, Homo sapiens
atttctcattttcgt

SEQ ID NO: 1595850 - DNA, 15 bp, Homo sapiens
tttctcattttcgtt

SEQ ID NO: 1595851 - DNA, 15 bp, Homo sapiens
ttctcattttcgttt

SEQ ID NO: 1595852 - DNA, 15 bp, Homo sapiens
tctcattttcgtttc

SEQ ID NO: 1595853 - DNA, 15 bp, Homo sapiens
ctcattttcgtttca

SEQ ID NO: 1595854 - DNA, 15 bp, Homo sapiens
tcattttcgtttcat

SEQ ID NO: 1595855 - DNA, 15 bp, Homo sapiens
cattttcgtttcatc

SEQ ID NO: 1595856 - DNA, 15 bp, Homo sapiens
attttcgtttcatct

SEQ ID NO: 1595857 - DNA, 15 bp, Homo sapiens
ttttcgtttcatctc

SEQ ID NO: 1595858 - DNA, 15 bp, Homo sapiens
tttcgtttcatctct

SEQ ID NO: 1595859 - DNA, 15 bp, Homo sapiens
ttcgtttcatctctc

SEQ ID NO: 1595860 - DNA, 15 bp, Homo sapiens
tcgtttcatctctca

SEQ ID NO: 1595861 - DNA, 15 bp, Homo sapiens
cgtttcatctctcaa

SEQ ID NO: 1595862 - DNA, 15 bp, Homo sapiens
gtttcatctctcaac

SEQ ID NO: 1595863 - DNA, 15 bp, Homo sapiens
tttcatctctcaaca

SEQ ID NO: 1595864 - DNA, 15 bp, Homo sapiens
ttcatctctcaacaa

SEQ ID NO: 1595865 - DNA, 15 bp, Homo sapiens
tcatctctcaacaac

SEQ ID NO: 1595866 - DNA, 15 bp, Homo sapiens
catctctcaacaact

SEQ ID NO: 1595867 - DNA, 15 bp, Homo sapiens
atctctcaacaactc

SEQ ID NO: 1595868 - DNA, 15 bp, Homo sapiens
tctctcaacaactct

SEQ ID NO: 1595869 - DNA, 15 bp, Homo sapiens
ctctcaacaactctg

SEQ ID NO: 1595870 - DNA, 15 bp, Homo sapiens
tctcaacaactctgg

SEQ ID NO: 1595871 - DNA, 15 bp, Homo sapiens
ctcaacaactctggg

SEQ ID NO: 1595872 - DNA, 15 bp, Homo sapiens
tcaacaactctgggg

SEQ ID NO: 1595873 - DNA, 15 bp, Homo sapiens
caacaactctggggt

SEQ ID NO: 1595874 - DNA, 15 bp, Homo sapiens
aacaactctggggtg

SEQ ID NO: 1595875 - DNA, 15 bp, Homo sapiens
acaactctggggtgg

SEQ ID NO: 1595876 - DNA, 15 bp, Homo sapiens
caactctggggtggc

SEQ ID NO: 1595877 - DNA, 15 bp, Homo sapiens
aactctggggtggca

SEQ ID NO: 1595878 - DNA, 15 bp, Homo sapiens
actctggggtggcat

SEQ ID NO: 1595879 - DNA, 15 bp, Homo sapiens
ctctggggtggcatt

SEQ ID NO: 1595880 - DNA, 15 bp, Homo sapiens
tctggggtggcatta

SEQ ID NO: 1595881 - DNA, 15 bp, Homo sapiens
ctggggtggcattat

SEQ ID NO: 1595882 - DNA, 15 bp, Homo sapiens
tggggtggcattatt

SEQ ID NO: 1595883 - DNA, 15 bp, Homo sapiens
ggggtggcattatta

SEQ ID NO: 1595884 - DNA, 15 bp, Homo sapiens
gggtggcattattat

SEQ ID NO: 1595885 - DNA, 15 bp, Homo sapiens
ggtggcattattatt

SEQ ID NO: 1595886 - DNA, 15 bp, Homo sapiens
gtggcattattattc

SEQ ID NO: 1595887 - DNA, 15 bp, Homo sapiens
tggcattattattcc

SEQ ID NO: 1595888 - DNA, 15 bp, Homo sapiens
ggcattattattccc

SEQ ID NO: 1595889 - DNA, 15 bp, Homo sapiens
gcattattattccca

SEQ ID NO: 1595890 - DNA, 15 bp, Homo sapiens
cattattattcccac

SEQ ID NO: 1595891 - DNA, 15 bp, Homo sapiens
attattattcccact

SEQ ID NO: 1595892 - DNA, 15 bp, Homo sapiens
ttattattcccactt

SEQ ID NO: 1595893 - DNA, 15 bp, Homo sapiens
tattattcccacttt

SEQ ID NO: 1595894 - DNA, 15 bp, Homo sapiens
attattcccactttt

SEQ ID NO: 1595895 - DNA, 15 bp, Homo sapiens
ttattcccacttttc

SEQ ID NO: 1595896 - DNA, 15 bp, Homo sapiens
tattcccacttttca

SEQ ID NO: 1595897 - DNA, 15 bp, Homo sapiens
attcccacttttcag

SEQ ID NO: 1595898 - DNA, 15 bp, Homo sapiens
ttcccacttttcaga

SEQ ID NO: 1595899 - DNA, 15 bp, Homo sapiens
tcccacttttcagat

SEQ ID NO: 1595900 - DNA, 15 bp, Homo sapiens
cccacttttcagata

SEQ ID NO: 1595901 - DNA, 15 bp, Homo sapiens
ccacttttcagataa

SEQ ID NO: 1595902 - DNA, 15 bp, Homo sapiens
cacttttcagataag

SEQ ID NO: 1595903 - DNA, 15 bp, Homo sapiens
acttttcagataagg

SEQ ID NO: 1595904 - DNA, 15 bp, Homo sapiens
cttttcagataaggt

SEQ ID NO: 1595905 - DNA, 15 bp, Homo sapiens
ttttcagataaggtt

SEQ ID NO: 1595906 - DNA, 15 bp, Homo sapiens
tttcagataaggtta

SEQ ID NO: 1595907 - DNA, 15 bp, Homo sapiens
ttcagataaggttac

SEQ ID NO: 1595908 - DNA, 15 bp, Homo sapiens
tcagataaggttact

SEQ ID NO: 1595909 - DNA, 15 bp, Homo sapiens
cagataaggttactg

SEQ ID NO: 1595910 - DNA, 15 bp, Homo sapiens
agataaggttactga

SEQ ID NO: 1595911 - DNA, 15 bp, Homo sapiens
gataaggttactgag

SEQ ID NO: 1595912 - DNA, 15 bp, Homo sapiens
ataaggttactgagg

SEQ ID NO: 1595913 - DNA, 15 bp, Homo sapiens
taaggttactgaggc

SEQ ID NO: 1595914 - DNA, 15 bp, Homo sapiens
aaggttactgaggca

SEQ ID NO: 1595915 - DNA, 15 bp, Homo sapiens
aggttactgaggcat

SEQ ID NO: 1595916 - DNA, 15 bp, Homo sapiens
ggttactgaggcata

SEQ ID NO: 1595917 - DNA, 15 bp, Homo sapiens
gttactgaggcatag

SEQ ID NO: 1595918 - DNA, 15 bp, Homo sapiens
ttactgaggcatagg

SEQ ID NO: 1595919 - DNA, 15 bp, Homo sapiens
tactgaggcataggg

SEQ ID NO: 1595920 - DNA, 15 bp, Homo sapiens
actgaggcataggga

SEQ ID NO: 1595921 - DNA, 15 bp, Homo sapiens
ctgaggcatagggaa

SEQ ID NO: 1595922 - DNA, 15 bp, Homo sapiens
tgaggcatagggaat

SEQ ID NO: 1595923 - DNA, 15 bp, Homo sapiens
gaggcatagggaatt

SEQ ID NO: 1595924 - DNA, 15 bp, Homo sapiens
aggcatagggaattg

SEQ ID NO: 1595925 - DNA, 15 bp, Homo sapiens
ggcatagggaattgt

SEQ ID NO: 1595926 - DNA, 15 bp, Homo sapiens
gcatagggaattgtc

SEQ ID NO: 1595927 - DNA, 15 bp, Homo sapiens
catagggaattgtcc

SEQ ID NO: 1595928 - DNA, 15 bp, Homo sapiens
atagggaattgtcca

SEQ ID NO: 1595929 - DNA, 15 bp, Homo sapiens
tagggaattgtccaa

SEQ ID NO: 1595930 - DNA, 15 bp, Homo sapiens
agggaattgtccaaa

SEQ ID NO: 1595931 - DNA, 15 bp, Homo sapiens
gggaattgtccaaag

SEQ ID NO: 1595932 - DNA, 15 bp, Homo sapiens
ggaattgtccaaagg

SEQ ID NO: 1595933 - DNA, 15 bp, Homo sapiens
gaattgtccaaaggt

SEQ ID NO: 1595934 - DNA, 15 bp, Homo sapiens
aattgtccaaaggta

SEQ ID NO: 1595935 - DNA, 15 bp, Homo sapiens
attgtccaaaggtac

SEQ ID NO: 1595936 - DNA, 15 bp, Homo sapiens
ttgtccaaaggtaca

SEQ ID NO: 1595937 - DNA, 15 bp, Homo sapiens
tgtccaaaggtacag

SEQ ID NO: 1595938 - DNA, 15 bp, Homo sapiens
gtccaaaggtacaga

SEQ ID NO: 1595939 - DNA, 15 bp, Homo sapiens
tccaaaggtacagag

SEQ ID NO: 1595940 - DNA, 15 bp, Homo sapiens
ccaaaggtacagagc

SEQ ID NO: 1595941 - DNA, 15 bp, Homo sapiens
caaaggtacagagct

SEQ ID NO: 1595942 - DNA, 15 bp, Homo sapiens
aaaggtacagagcta

SEQ ID NO: 1595943 - DNA, 15 bp, Homo sapiens
aaggtacagagctag

SEQ ID NO: 1595944 - DNA, 15 bp, Homo sapiens
aggtacagagctagt

SEQ ID NO: 1595945 - DNA, 15 bp, Homo sapiens
ggtacagagctagtc

SEQ ID NO: 1595946 - DNA, 15 bp, Homo sapiens
gtacagagctagtcc

SEQ ID NO: 1595947 - DNA, 15 bp, Homo sapiens
tacagagctagtccg

SEQ ID NO: 1595948 - DNA, 15 bp, Homo sapiens
acagagctagtccgc

SEQ ID NO: 1595949 - DNA, 15 bp, Homo sapiens
cagagctagtccgct

SEQ ID NO: 1595950 - DNA, 15 bp, Homo sapiens
agagctagtccgcta

SEQ ID NO: 1595951 - DNA, 15 bp, Homo sapiens
gagctagtccgctat

SEQ ID NO: 1595952 - DNA, 15 bp, Homo sapiens
agctagtccgctata

SEQ ID NO: 1595953 - DNA, 15 bp, Homo sapiens
gctagtccgctatag

SEQ ID NO: 1595954 - DNA, 15 bp, Homo sapiens
ctagtccgctataga

SEQ ID NO: 1595955 - DNA, 15 bp, Homo sapiens
tagtccgctatagag

SEQ ID NO: 1595956 - DNA, 15 bp, Homo sapiens
agtccgctatagaga

SEQ ID NO: 1595957 - DNA, 15 bp, Homo sapiens
gtccgctatagagat

SEQ ID NO: 1595958 - DNA, 15 bp, Homo sapiens
tccgctatagagatg

SEQ ID NO: 1595959 - DNA, 15 bp, Homo sapiens
ccgctatagagatga

SEQ ID NO: 1595960 - DNA, 15 bp, Homo sapiens
cgctatagagatgag

SEQ ID NO: 1595961 - DNA, 15 bp, Homo sapiens
gctatagagatgaga

SEQ ID NO: 1595962 - DNA, 15 bp, Homo sapiens
ctatagagatgagat

SEQ ID NO: 1595963 - DNA, 15 bp, Homo sapiens
tatagagatgagatt

SEQ ID NO: 1595964 - DNA, 15 bp, Homo sapiens
atagagatgagattt

SEQ ID NO: 1595965 - DNA, 15 bp, Homo sapiens
tagagatgagatttg

SEQ ID NO: 1595966 - DNA, 15 bp, Homo sapiens
agagatgagatttga

SEQ ID NO: 1595967 - DNA, 15 bp, Homo sapiens
gagatgagatttgaa

SEQ ID NO: 1595968 - DNA, 15 bp, Homo sapiens
agatgagatttgaac

SEQ ID NO: 1595969 - DNA, 15 bp, Homo sapiens
gatgagatttgaacc

SEQ ID NO: 1595970 - DNA, 15 bp, Homo sapiens
gatttgaacccaggg

SEQ ID NO: 1595971 - DNA, 15 bp, Homo sapiens
atttgaacccaggga

SEQ ID NO: 1595972 - DNA, 15 bp, Homo sapiens
tttgaacccagggaa

SEQ ID NO: 1595973 - DNA, 15 bp, Homo sapiens
ttgaacccagggaac

SEQ ID NO: 1595974 - DNA, 15 bp, Homo sapiens
tgaacccagggaacc

SEQ ID NO: 1595975 - DNA, 15 bp, Homo sapiens
gaacccagggaacct

SEQ ID NO: 1595976 - DNA, 15 bp, Homo sapiens
aacccagggaacctg

SEQ ID NO: 1595977 - DNA, 15 bp, Homo sapiens
acccagggaacctgg

SEQ ID NO: 1595978 - DNA, 15 bp, Homo sapiens
cccagggaacctggc

SEQ ID NO: 1595979 - DNA, 15 bp, Homo sapiens
ccagggaacctggct

SEQ ID NO: 1595980 - DNA, 15 bp, Homo sapiens
cagggaacctggctc

SEQ ID NO: 1595981 - DNA, 15 bp, Homo sapiens
agggaacctggctca

SEQ ID NO: 1595982 - DNA, 15 bp, Homo sapiens
gggaacctggctcac

SEQ ID NO: 1595983 - DNA, 15 bp, Homo sapiens
ggaacctggctcaca

SEQ ID NO: 1595984 - DNA, 15 bp, Homo sapiens
gaacctggctcacag

SEQ ID NO: 1595985 - DNA, 15 bp, Homo sapiens
aacctggctcacagt

SEQ ID NO: 1595986 - DNA, 15 bp, Homo sapiens
acctggctcacagtt

SEQ ID NO: 1595987 - DNA, 15 bp, Homo sapiens
cctggctcacagttt

SEQ ID NO: 1595988 - DNA, 15 bp, Homo sapiens
ctggctcacagttta

SEQ ID NO: 1595989 - DNA, 15 bp, Homo sapiens
tggctcacagtttat

SEQ ID NO: 1595990 - DNA, 15 bp, Homo sapiens
ggctcacagtttatg

SEQ ID NO: 1595991 - DNA, 15 bp, Homo sapiens
gctcacagtttatgc

SEQ ID NO: 1595992 - DNA, 15 bp, Homo sapiens
ctcacagtttatgct

SEQ ID NO: 1595993 - DNA, 15 bp, Homo sapiens
tcacagtttatgctt

SEQ ID NO: 1595994 - DNA, 15 bp, Homo sapiens
cacagtttatgcttt

SEQ ID NO: 1595995 - DNA, 15 bp, Homo sapiens
acagtttatgctttt

SEQ ID NO: 1595996 - DNA, 15 bp, Homo sapiens
cagtttatgcttttg

SEQ ID NO: 1595997 - DNA, 15 bp, Homo sapiens
agtttatgcttttgc

SEQ ID NO: 1595998 - DNA, 15 bp, Homo sapiens
gtttatgcttttgct

SEQ ID NO: 1595999 - DNA, 15 bp, Homo sapiens
tttatgcttttgcta

SEQ ID NO: 1596000 - DNA, 15 bp, Homo sapiens
ttatgcttttgctac

SEQ ID NO: 1596001 - DNA, 15 bp, Homo sapiens
tatgcttttgctacc

SEQ ID NO: 1596002 - DNA, 15 bp, Homo sapiens
atgcttttgctacct

SEQ ID NO: 1596003 - DNA, 15 bp, Homo sapiens
tgcttttgctacctt

SEQ ID NO: 1596004 - DNA, 15 bp, Homo sapiens
gcttttgctacctta

SEQ ID NO: 1596005 - DNA, 15 bp, Homo sapiens
cttttgctaccttaa

SEQ ID NO: 1596006 - DNA, 15 bp, Homo sapiens
ttttgctaccttaag

SEQ ID NO: 1596007 - DNA, 15 bp, Homo sapiens
tttgctaccttaagt

SEQ ID NO: 1596008 - DNA, 15 bp, Homo sapiens
ttgctaccttaagtt

SEQ ID NO: 1596009 - DNA, 15 bp, Homo sapiens
tgctaccttaagttt

SEQ ID NO: 1596010 - DNA, 15 bp, Homo sapiens
gctaccttaagtttt

SEQ ID NO: 1596011 - DNA, 15 bp, Homo sapiens
ctaccttaagttttt

SEQ ID NO: 1596012 - DNA, 15 bp, Homo sapiens
taccttaagttttta

SEQ ID NO: 1596013 - DNA, 15 bp, Homo sapiens
accttaagtttttaa

SEQ ID NO: 1596014 - DNA, 15 bp, Homo sapiens
ccttaagtttttaat

SEQ ID NO: 1596015 - DNA, 15 bp, Homo sapiens
cttaagtttttaata

SEQ ID NO: 1596016 - DNA, 15 bp, Homo sapiens
ttaagtttttaatag

SEQ ID NO: 1596017 - DNA, 15 bp, Homo sapiens
taagtttttaataga

SEQ ID NO: 1596018 - DNA, 15 bp, Homo sapiens
aagtttttaatagag

SEQ ID NO: 1596019 - DNA, 15 bp, Homo sapiens
agtttttaatagagt

SEQ ID NO: 1596020 - DNA, 15 bp, Homo sapiens
gtttttaatagagtg

SEQ ID NO: 1596021 - DNA, 15 bp, Homo sapiens
tttttaatagagtga

SEQ ID NO: 1596022 - DNA, 15 bp, Homo sapiens
ttttaatagagtgac

SEQ ID NO: 1596023 - DNA, 15 bp, Homo sapiens
tttaatagagtgaca

SEQ ID NO: 1596024 - DNA, 15 bp, Homo sapiens
ttaatagagtgacat

SEQ ID NO: 1596025 - DNA, 15 bp, Homo sapiens
taatagagtgacatc

SEQ ID NO: 1596026 - DNA, 15 bp, Homo sapiens
aatagagtgacatca

SEQ ID NO: 1596027 - DNA, 15 bp, Homo sapiens
atagagtgacatcaa

SEQ ID NO: 1596028 - DNA, 15 bp, Homo sapiens
tagagtgacatcaaa

SEQ ID NO: 1596029 - DNA, 15 bp, Homo sapiens
agagtgacatcaaac

SEQ ID NO: 1596030 - DNA, 15 bp, Homo sapiens
gagtgacatcaaaca

SEQ ID NO: 1596031 - DNA, 15 bp, Homo sapiens
agtgacatcaaacaa

SEQ ID NO: 1596032 - DNA, 15 bp, Homo sapiens
gtgacatcaaacaaa

SEQ ID NO: 1596033 - DNA, 15 bp, Homo sapiens
tgacatcaaacaaac

SEQ ID NO: 1596034 - DNA, 15 bp, Homo sapiens
gacatcaaacaaaca

SEQ ID NO: 1596035 - DNA, 15 bp, Homo sapiens
acatcaaacaaacat

SEQ ID NO: 1596036 - DNA, 15 bp, Homo sapiens
catcaaacaaacatt

SEQ ID NO: 1596037 - DNA, 15 bp, Homo sapiens
atcaaacaaacattt

SEQ ID NO: 1596038 - DNA, 15 bp, Homo sapiens
tcaaacaaacattta

SEQ ID NO: 1596039 - DNA, 15 bp, Homo sapiens
caaacaaacatttaa

SEQ ID NO: 1596040 - DNA, 15 bp, Homo sapiens
aaacaaacatttaag

SEQ ID NO: 1596041 - DNA, 15 bp, Homo sapiens
aacaaacatttaaga

SEQ ID NO: 1596042 - DNA, 15 bp, Homo sapiens
acaaacatttaagaa

SEQ ID NO: 1596043 - DNA, 15 bp, Homo sapiens
caaacatttaagaat

SEQ ID NO: 1596044 - DNA, 15 bp, Homo sapiens
aaacatttaagaata

SEQ ID NO: 1596045 - DNA, 15 bp, Homo sapiens
aacatttaagaatat

SEQ ID NO: 1596046 - DNA, 15 bp, Homo sapiens
acatttaagaatatg

SEQ ID NO: 1596047 - DNA, 15 bp, Homo sapiens
catttaagaatatgt

SEQ ID NO: 1596048 - DNA, 15 bp, Homo sapiens
atttaagaatatgtt

SEQ ID NO: 1596049 - DNA, 15 bp, Homo sapiens
tttaagaatatgttt

SEQ ID NO: 1596050 - DNA, 15 bp, Homo sapiens
ttaagaatatgtttt

SEQ ID NO: 1596051 - DNA, 15 bp, Homo sapiens
taagaatatgttttt

SEQ ID NO: 1596052 - DNA, 15 bp, Homo sapiens
aagaatatgtttttc

SEQ ID NO: 1596053 - DNA, 15 bp, Homo sapiens
agaatatgtttttct

SEQ ID NO: 1596054 - DNA, 15 bp, Homo sapiens
gaatatgtttttctt

SEQ ID NO: 1596055 - DNA, 15 bp, Homo sapiens
aatatgtttttcttt

SEQ ID NO: 1596056 - DNA, 15 bp, Homo sapiens
atatgtttttctttt

SEQ ID NO: 1596057 - DNA, 15 bp, Homo sapiens
tatgtttttcttttc

SEQ ID NO: 1596058 - DNA, 15 bp, Homo sapiens
atgtttttcttttcc

SEQ ID NO: 1596059 - DNA, 15 bp, Homo sapiens
tgtttttcttttcct

SEQ ID NO: 1596060 - DNA, 15 bp, Homo sapiens
gtttttcttttcctt

SEQ ID NO: 1596061 - DNA, 15 bp, Homo sapiens
tttttcttttccttt

SEQ ID NO: 1596062 - DNA, 15 bp, Homo sapiens
tttcttttcctttta

SEQ ID NO: 1596063 - DNA, 15 bp, Homo sapiens
ttcttttccttttat

SEQ ID NO: 1596064 - DNA, 15 bp, Homo sapiens
tcttttccttttata

SEQ ID NO: 1596065 - DNA, 15 bp, Homo sapiens
cttttccttttataa

SEQ ID NO: 1596066 - DNA, 15 bp, Homo sapiens
ttttccttttataat

SEQ ID NO: 1596067 - DNA, 15 bp, Homo sapiens
tttccttttataatt

SEQ ID NO: 1596068 - DNA, 15 bp, Homo sapiens
ttccttttataattt

SEQ ID NO: 1596069 - DNA, 15 bp, Homo sapiens
tccttttataatttc

SEQ ID NO: 1596070 - DNA, 15 bp, Homo sapiens
ccttttataatttca

SEQ ID NO: 1596071 - DNA, 15 bp, Homo sapiens
cttttataatttcat

SEQ ID NO: 1596072 - DNA, 15 bp, Homo sapiens
ttttataatttcatt

SEQ ID NO: 1596073 - DNA, 15 bp, Homo sapiens
tttataatttcatta

SEQ ID NO: 1596074 - DNA, 15 bp, Homo sapiens
ttataatttcattaa

SEQ ID NO: 1596075 - DNA, 15 bp, Homo sapiens
tataatttcattaaa

SEQ ID NO: 1596076 - DNA, 15 bp, Homo sapiens
ataatttcattaaaa

SEQ ID NO: 1596077 - DNA, 15 bp, Homo sapiens
taatttcattaaaaa

SEQ ID NO: 1596078 - DNA, 15 bp, Homo sapiens
aatttcattaaaaac

SEQ ID NO: 1596079 - DNA, 15 bp, Homo sapiens
atttcattaaaaaca

SEQ ID NO: 1596080 - DNA, 15 bp, Homo sapiens
tttcattaaaaacat

SEQ ID NO: 1596081 - DNA, 15 bp, Homo sapiens
ttcattaaaaacatt

SEQ ID NO: 1596082 - DNA, 15 bp, Homo sapiens
tcattaaaaacatta

SEQ ID NO: 1596083 - DNA, 15 bp, Homo sapiens
cattaaaaacattaa

SEQ ID NO: 1596084 - DNA, 15 bp, Homo sapiens
attaaaaacattaag

SEQ ID NO: 1596085 - DNA, 15 bp, Homo sapiens
ttaaaaacattaagt

SEQ ID NO: 1596086 - DNA, 15 bp, Homo sapiens
taaaaacattaagtc

SEQ ID NO: 1596087 - DNA, 15 bp, Homo sapiens
aaaaacattaagtct

SEQ ID NO: 1596088 - DNA, 15 bp, Homo sapiens
aaaacattaagtctc

SEQ ID NO: 1596089 - DNA, 15 bp, Homo sapiens
aaacattaagtctct

SEQ ID NO: 1596090 - DNA, 15 bp, Homo sapiens
aacattaagtctctg

SEQ ID NO: 1596091 - DNA, 15 bp, Homo sapiens
acattaagtctctga

SEQ ID NO: 1596092 - DNA, 15 bp, Homo sapiens
cattaagtctctgat

SEQ ID NO: 1596093 - DNA, 15 bp, Homo sapiens
attaagtctctgatc

SEQ ID NO: 1596094 - DNA, 15 bp, Homo sapiens
ttaagtctctgatca

SEQ ID NO: 1596095 - DNA, 15 bp, Homo sapiens
taagtctctgatcag

SEQ ID NO: 1596096 - DNA, 15 bp, Homo sapiens
aagtctctgatcagt

SEQ ID NO: 1596097 - DNA, 15 bp, Homo sapiens
agtctctgatcagtc

SEQ ID NO: 1596098 - DNA, 15 bp, Homo sapiens
gtctctgatcagtct

SEQ ID NO: 1596099 - DNA, 15 bp, Homo sapiens
tctctgatcagtctg

SEQ ID NO: 1596100 - DNA, 15 bp, Homo sapiens
ctctgatcagtctgc

SEQ ID NO: 1596101 - DNA, 15 bp, Homo sapiens
tctgatcagtctgca

SEQ ID NO: 1596102 - DNA, 15 bp, Homo sapiens
ctgatcagtctgcag

SEQ ID NO: 1596103 - DNA, 15 bp, Homo sapiens
tgatcagtctgcagt

SEQ ID NO: 1596104 - DNA, 15 bp, Homo sapiens
gatcagtctgcagtt

SEQ ID NO: 1596105 - DNA, 15 bp, Homo sapiens
atcagtctgcagttt

SEQ ID NO: 1596106 - DNA, 15 bp, Homo sapiens
tcagtctgcagtttt

SEQ ID NO: 1596107 - DNA, 15 bp, Homo sapiens
cagtctgcagttttt

SEQ ID NO: 1596108 - DNA, 15 bp, Homo sapiens
agtctgcagttttta

SEQ ID NO: 1596109 - DNA, 15 bp, Homo sapiens
gtctgcagtttttat

SEQ ID NO: 1596110 - DNA, 15 bp, Homo sapiens
tctgcagtttttatg

SEQ ID NO: 1596111 - DNA, 15 bp, Homo sapiens
ctgcagtttttatgt

SEQ ID NO: 1596112 - DNA, 15 bp, Homo sapiens
tgcagtttttatgta

SEQ ID NO: 1596113 - DNA, 15 bp, Homo sapiens
gcagtttttatgtag

SEQ ID NO: 1596114 - DNA, 15 bp, Homo sapiens
cagtttttatgtagg

SEQ ID NO: 1596115 - DNA, 15 bp, Homo sapiens
agtttttatgtaggg

SEQ ID NO: 1596116 - DNA, 15 bp, Homo sapiens
gtttttatgtagggg

SEQ ID NO: 1596117 - DNA, 15 bp, Homo sapiens
tttttatgtaggggt

SEQ ID NO: 1596118 - DNA, 15 bp, Homo sapiens
ttttatgtaggggtc

SEQ ID NO: 1596119 - DNA, 15 bp, Homo sapiens
tttatgtaggggtca

SEQ ID NO: 1596120 - DNA, 15 bp, Homo sapiens
ttatgtaggggtcag

SEQ ID NO: 1596121 - DNA, 15 bp, Homo sapiens
tatgtaggggtcagg

SEQ ID NO: 1596122 - DNA, 15 bp, Homo sapiens
atgtaggggtcaggt

SEQ ID NO: 1596123 - DNA, 15 bp, Homo sapiens
tgtaggggtcaggta

SEQ ID NO: 1596124 - DNA, 15 bp, Homo sapiens
gtaggggtcaggtaa

SEQ ID NO: 1596125 - DNA, 15 bp, Homo sapiens
taggggtcaggtaat

SEQ ID NO: 1596126 - DNA, 15 bp, Homo sapiens
aggggtcaggtaatg

SEQ ID NO: 1596127 - DNA, 15 bp, Homo sapiens
ggggtcaggtaatgt

SEQ ID NO: 1596128 - DNA, 15 bp, Homo sapiens
gggtcaggtaatgtt

SEQ ID NO: 1596129 - DNA, 15 bp, Homo sapiens
ggtcaggtaatgttc

SEQ ID NO: 1596130 - DNA, 15 bp, Homo sapiens
gtcaggtaatgttct

SEQ ID NO: 1596131 - DNA, 15 bp, Homo sapiens
tcaggtaatgttcta

SEQ ID NO: 1596132 - DNA, 15 bp, Homo sapiens
caggtaatgttctaa

SEQ ID NO: 1596133 - DNA, 15 bp, Homo sapiens
aggtaatgttctaac

SEQ ID NO: 1596134 - DNA, 15 bp, Homo sapiens
ggtaatgttctaact

SEQ ID NO: 1596135 - DNA, 15 bp, Homo sapiens
gtaatgttctaactt

SEQ ID NO: 1596136 - DNA, 15 bp, Homo sapiens
taatgttctaacttc

SEQ ID NO: 1596137 - DNA, 15 bp, Homo sapiens
aatgttctaacttct

SEQ ID NO: 1596138 - DNA, 15 bp, Homo sapiens
atgttctaacttctg

SEQ ID NO: 1596139 - DNA, 15 bp, Homo sapiens
tgttctaacttctgc

SEQ ID NO: 1596140 - DNA, 15 bp, Homo sapiens
gttctaacttctgct

SEQ ID NO: 1596141 - DNA, 15 bp, Homo sapiens
ttctaacttctgctt

SEQ ID NO: 1596142 - DNA, 15 bp, Homo sapiens
tctaacttctgcttt

SEQ ID NO: 1596143 - DNA, 15 bp, Homo sapiens
ctaacttctgctttt

SEQ ID NO: 1596144 - DNA, 15 bp, Homo sapiens
taacttctgcttttt

SEQ ID NO: 1596145 - DNA, 15 bp, Homo sapiens
acttctgctttttcc

SEQ ID NO: 1596146 - DNA, 15 bp, Homo sapiens
cttctgctttttcct

SEQ ID NO: 1596147 - DNA, 15 bp, Homo sapiens
ttctgctttttccta

SEQ ID NO: 1596148 - DNA, 15 bp, Homo sapiens
tctgctttttcctaa

SEQ ID NO: 1596149 - DNA, 15 bp, Homo sapiens
ctgctttttcctaag

SEQ ID NO: 1596150 - DNA, 15 bp, Homo sapiens
tgctttttcctaagt

SEQ ID NO: 1596151 - DNA, 15 bp, Homo sapiens
gctttttcctaagtg

SEQ ID NO: 1596152 - DNA, 15 bp, Homo sapiens
ctttttcctaagtga

SEQ ID NO: 1596153 - DNA, 15 bp, Homo sapiens
tttttcctaagtgat

SEQ ID NO: 1596154 - DNA, 15 bp, Homo sapiens
ttttcctaagtgatt

SEQ ID NO: 1596155 - DNA, 15 bp, Homo sapiens
tttcctaagtgatta

SEQ ID NO: 1596156 - DNA, 15 bp, Homo sapiens
ttcctaagtgattaa

SEQ ID NO: 1596157 - DNA, 15 bp, Homo sapiens
tcctaagtgattaac

SEQ ID NO: 1596158 - DNA, 15 bp, Homo sapiens
cctaagtgattaaca

SEQ ID NO: 1596159 - DNA, 15 bp, Homo sapiens
ctaagtgattaacag

SEQ ID NO: 1596160 - DNA, 15 bp, Homo sapiens
taagtgattaacagg

SEQ ID NO: 1596161 - DNA, 15 bp, Homo sapiens
aagtgattaacaggt

SEQ ID NO: 1596162 - DNA, 15 bp, Homo sapiens
agtgattaacaggtt

SEQ ID NO: 1596163 - DNA, 15 bp, Homo sapiens
gtgattaacaggttt

SEQ ID NO: 1596164 - DNA, 15 bp, Homo sapiens
tgattaacaggtttt

SEQ ID NO: 1596165 - DNA, 15 bp, Homo sapiens
gattaacaggttttt

SEQ ID NO: 1596166 - DNA, 15 bp, Homo sapiens
attaacaggttttta

SEQ ID NO: 1596167 - DNA, 15 bp, Homo sapiens
ttaacaggtttttat

SEQ ID NO: 1596168 - DNA, 15 bp, Homo sapiens
taacaggtttttata

SEQ ID NO: 1596169 - DNA, 15 bp, Homo sapiens
aacaggtttttataa

SEQ ID NO: 1596170 - DNA, 15 bp, Homo sapiens
acaggtttttataag

SEQ ID NO: 1596171 - DNA, 15 bp, Homo sapiens
caggtttttataagc

SEQ ID NO: 1596172 - DNA, 15 bp, Homo sapiens
aggtttttataagcc

SEQ ID NO: 1596173 - DNA, 15 bp, Homo sapiens
ggtttttataagccc

SEQ ID NO: 1596174 - DNA, 15 bp, Homo sapiens
gtttttataagccct

SEQ ID NO: 1596175 - DNA, 15 bp, Homo sapiens
tttttataagccctt

SEQ ID NO: 1596176 - DNA, 15 bp, Homo sapiens
ttttataagcccttt

SEQ ID NO: 1596177 - DNA, 15 bp, Homo sapiens
tttataagccctttt

SEQ ID NO: 1596178 - DNA, 15 bp, Homo sapiens
ttataagcccttttg

SEQ ID NO: 1596179 - DNA, 15 bp, Homo sapiens
tataagcccttttga

SEQ ID NO: 1596180 - DNA, 15 bp, Homo sapiens
ataagcccttttgaa

SEQ ID NO: 1596181 - DNA, 15 bp, Homo sapiens
taagcccttttgaaa

SEQ ID NO: 1596182 - DNA, 15 bp, Homo sapiens
aagcccttttgaaaa

SEQ ID NO: 1596183 - DNA, 15 bp, Homo sapiens
agcccttttgaaaaa

SEQ ID NO: 1596184 - DNA, 15 bp, Homo sapiens
gcccttttgaaaaaa

SEQ ID NO: 1596185 - DNA, 15 bp, Homo sapiens
cccttttgaaaaaat

SEQ ID NO: 1596186 - DNA, 15 bp, Homo sapiens
ccttttgaaaaaatc

SEQ ID NO: 1596187 - DNA, 15 bp, Homo sapiens
cttttgaaaaaatca

SEQ ID NO: 1596188 - DNA, 15 bp, Homo sapiens
ttttgaaaaaatcac

SEQ ID NO: 1596189 - DNA, 15 bp, Homo sapiens
tttgaaaaaatcacg

SEQ ID NO: 1596190 - DNA, 15 bp, Homo sapiens
ttgaaaaaatcacgg

SEQ ID NO: 1596191 - DNA, 15 bp, Homo sapiens
tgaaaaaatcacggt

SEQ ID NO: 1596192 - DNA, 15 bp, Homo sapiens
gaaaaaatcacggta

SEQ ID NO: 1596193 - DNA, 15 bp, Homo sapiens
aaaaaatcacggtat

SEQ ID NO: 1596194 - DNA, 15 bp, Homo sapiens
aaaaatcacggtatc

SEQ ID NO: 1596195 - DNA, 15 bp, Homo sapiens
aaaatcacggtatct

SEQ ID NO: 1596196 - DNA, 15 bp, Homo sapiens
aaatcacggtatctg

SEQ ID NO: 1596197 - DNA, 15 bp, Homo sapiens
aatcacggtatctgt

SEQ ID NO: 1596198 - DNA, 15 bp, Homo sapiens
atcacggtatctgtc

SEQ ID NO: 1596199 - DNA, 15 bp, Homo sapiens
tcacggtatctgtcg

SEQ ID NO: 1596200 - DNA, 15 bp, Homo sapiens
cacggtatctgtcga

SEQ ID NO: 1596201 - DNA, 15 bp, Homo sapiens
acggtatctgtcgag

SEQ ID NO: 1596202 - DNA, 15 bp, Homo sapiens
cggtatctgtcgagc

SEQ ID NO: 1596203 - DNA, 15 bp, Homo sapiens
ggtatctgtcgagca

SEQ ID NO: 1596204 - DNA, 15 bp, Homo sapiens
gtatctgtcgagcat

SEQ ID NO: 1596205 - DNA, 15 bp, Homo sapiens
tatctgtcgagcatc

SEQ ID NO: 1596206 - DNA, 15 bp, Homo sapiens
atctgtcgagcatct

SEQ ID NO: 1596207 - DNA, 15 bp, Homo sapiens
tctgtcgagcatctt

SEQ ID NO: 1596208 - DNA, 15 bp, Homo sapiens
ctgtcgagcatcttt

SEQ ID NO: 1596209 - DNA, 15 bp, Homo sapiens
tgtcgagcatctttg

SEQ ID NO: 1596210 - DNA, 15 bp, Homo sapiens
gtcgagcatctttga

SEQ ID NO: 1596211 - DNA, 15 bp, Homo sapiens
tcgagcatctttgaa

SEQ ID NO: 1596212 - DNA, 15 bp, Homo sapiens
cgagcatctttgaat

SEQ ID NO: 1596213 - DNA, 15 bp, Homo sapiens
gagcatctttgaatc

SEQ ID NO: 1596214 - DNA, 15 bp, Homo sapiens
agcatctttgaatca

SEQ ID NO: 1596215 - DNA, 15 bp, Homo sapiens
gcatctttgaatcag

SEQ ID NO: 1596216 - DNA, 15 bp, Homo sapiens
catctttgaatcaga

SEQ ID NO: 1596217 - DNA, 15 bp, Homo sapiens
atctttgaatcagag

SEQ ID NO: 1596218 - DNA, 15 bp, Homo sapiens
tctttgaatcagagt

SEQ ID NO: 1596219 - DNA, 15 bp, Homo sapiens
ctttgaatcagagta

SEQ ID NO: 1596220 - DNA, 15 bp, Homo sapiens
tttgaatcagagtaa

SEQ ID NO: 1596221 - DNA, 15 bp, Homo sapiens
ttgaatcagagtaag

SEQ ID NO: 1596222 - DNA, 15 bp, Homo sapiens
tgaatcagagtaagc

SEQ ID NO: 1596223 - DNA, 15 bp, Homo sapiens
gaatcagagtaagcc

SEQ ID NO: 1596224 - DNA, 15 bp, Homo sapiens
aatcagagtaagcct

SEQ ID NO: 1596225 - DNA, 15 bp, Homo sapiens
atcagagtaagcctt

SEQ ID NO: 1596226 - DNA, 15 bp, Homo sapiens
tcagagtaagccttc

SEQ ID NO: 1596227 - DNA, 15 bp, Homo sapiens
cagagtaagccttct

SEQ ID NO: 1596228 - DNA, 15 bp, Homo sapiens
agagtaagccttcta

SEQ ID NO: 1596229 - DNA, 15 bp, Homo sapiens
gagtaagccttctag

SEQ ID NO: 1596230 - DNA, 15 bp, Homo sapiens
agtaagccttctagt

SEQ ID NO: 1596231 - DNA, 15 bp, Homo sapiens
gtaagccttctagtg

SEQ ID NO: 1596232 - DNA, 15 bp, Homo sapiens
taagccttctagtga

SEQ ID NO: 1596233 - DNA, 15 bp, Homo sapiens
aagccttctagtgag

SEQ ID NO: 1596234 - DNA, 15 bp, Homo sapiens
agccttctagtgagt

SEQ ID NO: 1596235 - DNA, 15 bp, Homo sapiens
gccttctagtgagtc

SEQ ID NO: 1596236 - DNA, 15 bp, Homo sapiens
ccttctagtgagtca

SEQ ID NO: 1596237 - DNA, 15 bp, Homo sapiens
cttctagtgagtcat

SEQ ID NO: 1596238 - DNA, 15 bp, Homo sapiens
ttctagtgagtcata

SEQ ID NO: 1596239 - DNA, 15 bp, Homo sapiens
tctagtgagtcatat

SEQ ID NO: 1596240 - DNA, 15 bp, Homo sapiens
ctagtgagtcatatg

SEQ ID NO: 1596241 - DNA, 15 bp, Homo sapiens
tagtgagtcatatgt

SEQ ID NO: 1596242 - DNA, 15 bp, Homo sapiens
agtgagtcatatgtc

SEQ ID NO: 1596243 - DNA, 15 bp, Homo sapiens
gtgagtcatatgtca

SEQ ID NO: 1596244 - DNA, 15 bp, Homo sapiens
tgagtcatatgtcag

SEQ ID NO: 1596245 - DNA, 15 bp, Homo sapiens
gagtcatatgtcagc

SEQ ID NO: 1596246 - DNA, 15 bp, Homo sapiens
agtcatatgtcagca

SEQ ID NO: 1596247 - DNA, 15 bp, Homo sapiens
gtcatatgtcagcag

SEQ ID NO: 1596248 - DNA, 15 bp, Homo sapiens
tcatatgtcagcagt

SEQ ID NO: 1596249 - DNA, 15 bp, Homo sapiens
catatgtcagcagtt

SEQ ID NO: 1596250 - DNA, 15 bp, Homo sapiens
atatgtcagcagttt

SEQ ID NO: 1596251 - DNA, 15 bp, Homo sapiens
tatgtcagcagtttg

SEQ ID NO: 1596252 - DNA, 15 bp, Homo sapiens
atgtcagcagtttga

SEQ ID NO: 1596253 - DNA, 15 bp, Homo sapiens
tgtcagcagtttgac

SEQ ID NO: 1596254 - DNA, 15 bp, Homo sapiens
gtcagcagtttgact

SEQ ID NO: 1596255 - DNA, 15 bp, Homo sapiens
tcagcagtttgactg

SEQ ID NO: 1596256 - DNA, 15 bp, Homo sapiens
cagcagtttgactgt

SEQ ID NO: 1596257 - DNA, 15 bp, Homo sapiens
agcagtttgactgta

SEQ ID NO: 1596258 - DNA, 15 bp, Homo sapiens
gcagtttgactgtat

SEQ ID NO: 1596259 - DNA, 15 bp, Homo sapiens
cagtttgactgtatg

SEQ ID NO: 1596260 - DNA, 15 bp, Homo sapiens
agtttgactgtatgg

SEQ ID NO: 1596261 - DNA, 15 bp, Homo sapiens
gtttgactgtatggg

SEQ ID NO: 1596262 - DNA, 15 bp, Homo sapiens
tttgactgtatgggc

SEQ ID NO: 1596263 - DNA, 15 bp, Homo sapiens
ttgactgtatgggct

SEQ ID NO: 1596264 - DNA, 15 bp, Homo sapiens
tgactgtatgggctt

SEQ ID NO: 1596265 - DNA, 15 bp, Homo sapiens
gactgtatgggcttt

SEQ ID NO: 1596266 - DNA, 15 bp, Homo sapiens
actgtatgggctttt

SEQ ID NO: 1596267 - DNA, 15 bp, Homo sapiens
ctgtatgggcttttc

SEQ ID NO: 1596268 - DNA, 15 bp, Homo sapiens
tgtatgggcttttct

SEQ ID NO: 1596269 - DNA, 15 bp, Homo sapiens
gtatgggcttttcta

SEQ ID NO: 1596270 - DNA, 15 bp, Homo sapiens
tatgggcttttctaa

SEQ ID NO: 1596271 - DNA, 15 bp, Homo sapiens
atgggcttttctaat

SEQ ID NO: 1596272 - DNA, 15 bp, Homo sapiens
tgggcttttctaata

SEQ ID NO: 1596273 - DNA, 15 bp, Homo sapiens
gggcttttctaatat

SEQ ID NO: 1596274 - DNA, 15 bp, Homo sapiens
ggcttttctaatatc

SEQ ID NO: 1596275 - DNA, 15 bp, Homo sapiens
gcttttctaatatcc

SEQ ID NO: 1596276 - DNA, 15 bp, Homo sapiens
cttttctaatatcca

SEQ ID NO: 1596277 - DNA, 15 bp, Homo sapiens
ttttctaatatccag

SEQ ID NO: 1596278 - DNA, 15 bp, Homo sapiens
tttctaatatccagt

SEQ ID NO: 1596279 - DNA, 15 bp, Homo sapiens
ttctaatatccagtt

SEQ ID NO: 1596280 - DNA, 15 bp, Homo sapiens
tctaatatccagttc

SEQ ID NO: 1596281 - DNA, 15 bp, Homo sapiens
ctaatatccagttca

SEQ ID NO: 1596282 - DNA, 15 bp, Homo sapiens
taatatccagttcaa

SEQ ID NO: 1596283 - DNA, 15 bp, Homo sapiens
aatatccagttcaag

SEQ ID NO: 1596284 - DNA, 15 bp, Homo sapiens
atatccagttcaagt

SEQ ID NO: 1596285 - DNA, 15 bp, Homo sapiens
tatccagttcaagtg

SEQ ID NO: 1596286 - DNA, 15 bp, Homo sapiens
atccagttcaagtgt

SEQ ID NO: 1596287 - DNA, 15 bp, Homo sapiens
tccagttcaagtgtt

SEQ ID NO: 1596288 - DNA, 15 bp, Homo sapiens
ccagttcaagtgttt

SEQ ID NO: 1596289 - DNA, 15 bp, Homo sapiens
cagttcaagtgttta

SEQ ID NO: 1596290 - DNA, 15 bp, Homo sapiens
agttcaagtgtttat

SEQ ID NO: 1596291 - DNA, 15 bp, Homo sapiens
gttcaagtgtttatc

SEQ ID NO: 1596292 - DNA, 15 bp, Homo sapiens
ttcaagtgtttatca

SEQ ID NO: 1596293 - DNA, 15 bp, Homo sapiens
tcaagtgtttatcag

SEQ ID NO: 1596294 - DNA, 15 bp, Homo sapiens
caagtgtttatcagt

SEQ ID NO: 1596295 - DNA, 15 bp, Homo sapiens
aagtgtttatcagtg

SEQ ID NO: 1596296 - DNA, 15 bp, Homo sapiens
agtgtttatcagtga

SEQ ID NO: 1596297 - DNA, 15 bp, Homo sapiens
gtgtttatcagtgag

SEQ ID NO: 1596298 - DNA, 15 bp, Homo sapiens
tgtttatcagtgagt

SEQ ID NO: 1596299 - DNA, 15 bp, Homo sapiens
gtttatcagtgagtt

SEQ ID NO: 1596300 - DNA, 15 bp, Homo sapiens
tttatcagtgagttt

SEQ ID NO: 1596301 - DNA, 15 bp, Homo sapiens
ttatcagtgagtttt

SEQ ID NO: 1596302 - DNA, 15 bp, Homo sapiens
tatcagtgagttttt

SEQ ID NO: 1596303 - DNA, 15 bp, Homo sapiens
atcagtgagtttttc

SEQ ID NO: 1596304 - DNA, 15 bp, Homo sapiens
tcagtgagtttttct

SEQ ID NO: 1596305 - DNA, 15 bp, Homo sapiens
cagtgagtttttctt

SEQ ID NO: 1596306 - DNA, 15 bp, Homo sapiens
agtgagtttttcttt

SEQ ID NO: 1596307 - DNA, 15 bp, Homo sapiens
gtgagtttttctttt

SEQ ID NO: 1596308 - DNA, 15 bp, Homo sapiens
tgagtttttctttta

SEQ ID NO: 1596309 - DNA, 15 bp, Homo sapiens
gagtttttcttttaa

SEQ ID NO: 1596310 - DNA, 15 bp, Homo sapiens
agtttttcttttaaa

SEQ ID NO: 1596311 - DNA, 15 bp, Homo sapiens
gtttttcttttaaat

SEQ ID NO: 1596312 - DNA, 15 bp, Homo sapiens
tttttcttttaaata

SEQ ID NO: 1596313 - DNA, 15 bp, Homo sapiens
ttttcttttaaatag

SEQ ID NO: 1596314 - DNA, 15 bp, Homo sapiens
tttcttttaaataga

SEQ ID NO: 1596315 - DNA, 15 bp, Homo sapiens
ttcttttaaatagat

SEQ ID NO: 1596316 - DNA, 15 bp, Homo sapiens
tcttttaaatagatt

SEQ ID NO: 1596317 - DNA, 15 bp, Homo sapiens
cttttaaatagattt

SEQ ID NO: 1596318 - DNA, 15 bp, Homo sapiens
ttttaaatagatttg

SEQ ID NO: 1596319 - DNA, 15 bp, Homo sapiens
tttaaatagatttgg

SEQ ID NO: 1596320 - DNA, 15 bp, Homo sapiens
ttaaatagatttggg

SEQ ID NO: 1596321 - DNA, 15 bp, Homo sapiens
taaatagatttggga

SEQ ID NO: 1596322 - DNA, 15 bp, Homo sapiens
aaatagatttgggac

SEQ ID NO: 1596323 - DNA, 15 bp, Homo sapiens
aatagatttgggaca

SEQ ID NO: 1596324 - DNA, 15 bp, Homo sapiens
atagatttgggacag

SEQ ID NO: 1596325 - DNA, 15 bp, Homo sapiens
tagatttgggacagg

SEQ ID NO: 1596326 - DNA, 15 bp, Homo sapiens
agatttgggacaggt

SEQ ID NO: 1596327 - DNA, 15 bp, Homo sapiens
gatttgggacaggta

SEQ ID NO: 1596328 - DNA, 15 bp, Homo sapiens
atttgggacaggtac

SEQ ID NO: 1596329 - DNA, 15 bp, Homo sapiens
tttgggacaggtact

SEQ ID NO: 1596330 - DNA, 15 bp, Homo sapiens
ttgggacaggtacta

SEQ ID NO: 1596331 - DNA, 15 bp, Homo sapiens
tgggacaggtactat

SEQ ID NO: 1596332 - DNA, 15 bp, Homo sapiens
gggacaggtactatg

SEQ ID NO: 1596333 - DNA, 15 bp, Homo sapiens
ggacaggtactatga

SEQ ID NO: 1596334 - DNA, 15 bp, Homo sapiens
gacaggtactatgag

SEQ ID NO: 1596335 - DNA, 15 bp, Homo sapiens
acaggtactatgaga

SEQ ID NO: 1596336 - DNA, 15 bp, Homo sapiens
caggtactatgagag

SEQ ID NO: 1596337 - DNA, 15 bp, Homo sapiens
aggtactatgagagt

SEQ ID NO: 1596338 - DNA, 15 bp, Homo sapiens
ggtactatgagagta

SEQ ID NO: 1596339 - DNA, 15 bp, Homo sapiens
gtactatgagagtat

SEQ ID NO: 1596340 - DNA, 15 bp, Homo sapiens
tactatgagagtata

SEQ ID NO: 1596341 - DNA, 15 bp, Homo sapiens
actatgagagtatat

SEQ ID NO: 1596342 - DNA, 15 bp, Homo sapiens
ctatgagagtatata

SEQ ID NO: 1596343 - DNA, 15 bp, Homo sapiens
tatgagagtatataa

SEQ ID NO: 1596344 - DNA, 15 bp, Homo sapiens
atgagagtatataag

SEQ ID NO: 1596345 - DNA, 15 bp, Homo sapiens
tgagagtatataagt

SEQ ID NO: 1596346 - DNA, 15 bp, Homo sapiens
gagagtatataagtg

SEQ ID NO: 1596347 - DNA, 15 bp, Homo sapiens
agagtatataagtga

SEQ ID NO: 1596348 - DNA, 15 bp, Homo sapiens
gagtatataagtgat

SEQ ID NO: 1596349 - DNA, 15 bp, Homo sapiens
agtatataagtgata

SEQ ID NO: 1596350 - DNA, 15 bp, Homo sapiens
gtatataagtgatac

SEQ ID NO: 1596351 - DNA, 15 bp, Homo sapiens
tatataagtgatacg

SEQ ID NO: 1596352 - DNA, 15 bp, Homo sapiens
atataagtgatacgt

SEQ ID NO: 1596353 - DNA, 15 bp, Homo sapiens
tataagtgatacgtt

SEQ ID NO: 1596354 - DNA, 15 bp, Homo sapiens
ataagtgatacgtta

SEQ ID NO: 1596355 - DNA, 15 bp, Homo sapiens
taagtgatacgttat

SEQ ID NO: 1596356 - DNA, 15 bp, Homo sapiens
aagtgatacgttata

SEQ ID NO: 1596357 - DNA, 15 bp, Homo sapiens
agtgatacgttatag

SEQ ID NO: 1596358 - DNA, 15 bp, Homo sapiens
gtgatacgttatagg

SEQ ID NO: 1596359 - DNA, 15 bp, Homo sapiens
tgatacgttatagga

SEQ ID NO: 1596360 - DNA, 15 bp, Homo sapiens
gatacgttataggac

SEQ ID NO: 1596361 - DNA, 15 bp, Homo sapiens
atacgttataggaca

SEQ ID NO: 1596362 - DNA, 15 bp, Homo sapiens
tacgttataggacac

SEQ ID NO: 1596363 - DNA, 15 bp, Homo sapiens
acgttataggacact

SEQ ID NO: 1596364 - DNA, 15 bp, Homo sapiens
cgttataggacacta

SEQ ID NO: 1596365 - DNA, 15 bp, Homo sapiens
gttataggacactaa

SEQ ID NO: 1596366 - DNA, 15 bp, Homo sapiens
ttataggacactaac

SEQ ID NO: 1596367 - DNA, 15 bp, Homo sapiens
tataggacactaact

SEQ ID NO: 1596368 - DNA, 15 bp, Homo sapiens
ataggacactaacta

SEQ ID NO: 1596369 - DNA, 15 bp, Homo sapiens
taggacactaactag

SEQ ID NO: 1596370 - DNA, 15 bp, Homo sapiens
aggacactaactagt

SEQ ID NO: 1596371 - DNA, 15 bp, Homo sapiens
ggacactaactagta

SEQ ID NO: 1596372 - DNA, 15 bp, Homo sapiens
gacactaactagtat

SEQ ID NO: 1596373 - DNA, 15 bp, Homo sapiens
acactaactagtatc

SEQ ID NO: 1596374 - DNA, 15 bp, Homo sapiens
cactaactagtatcc

SEQ ID NO: 1596375 - DNA, 15 bp, Homo sapiens
actaactagtatcct

SEQ ID NO: 1596376 - DNA, 15 bp, Homo sapiens
ctaactagtatccta

SEQ ID NO: 1596377 - DNA, 15 bp, Homo sapiens
taactagtatcctat

SEQ ID NO: 1596378 - DNA, 15 bp, Homo sapiens
aactagtatcctatg

SEQ ID NO: 1596379 - DNA, 15 bp, Homo sapiens
actagtatcctatga

SEQ ID NO: 1596380 - DNA, 15 bp, Homo sapiens
ctagtatcctatgaa

SEQ ID NO: 1596381 - DNA, 15 bp, Homo sapiens
tagtatcctatgaaa

SEQ ID NO: 1596382 - DNA, 15 bp, Homo sapiens
agtatcctatgaaat

SEQ ID NO: 1596383 - DNA, 15 bp, Homo sapiens
gtatcctatgaaatg

SEQ ID NO: 1596384 - DNA, 15 bp, Homo sapiens
tatcctatgaaatgg

SEQ ID NO: 1596385 - DNA, 15 bp, Homo sapiens
atcctatgaaatggc

SEQ ID NO: 1596386 - DNA, 15 bp, Homo sapiens
tcctatgaaatggca

SEQ ID NO: 1596387 - DNA, 15 bp, Homo sapiens
cctatgaaatggcaa

SEQ ID NO: 1596388 - DNA, 15 bp, Homo sapiens
ctatgaaatggcaaa

SEQ ID NO: 1596389 - DNA, 15 bp, Homo sapiens
tatgaaatggcaaaa

SEQ ID NO: 1596390 - DNA, 15 bp, Homo sapiens
atgaaatggcaaaaa

SEQ ID NO: 1596391 - DNA, 15 bp, Homo sapiens
tgaaatggcaaaaac

SEQ ID NO: 1596392 - DNA, 15 bp, Homo sapiens
gaaatggcaaaaact

SEQ ID NO: 1596393 - DNA, 15 bp, Homo sapiens
aaatggcaaaaactg

SEQ ID NO: 1596394 - DNA, 15 bp, Homo sapiens
aatggcaaaaactgc

SEQ ID NO: 1596395 - DNA, 15 bp, Homo sapiens
atggcaaaaactgca

SEQ ID NO: 1596396 - DNA, 15 bp, Homo sapiens
tggcaaaaactgcaa

SEQ ID NO: 1596397 - DNA, 15 bp, Homo sapiens
ggcaaaaactgcaat

SEQ ID NO: 1596398 - DNA, 15 bp, Homo sapiens
gcaaaaactgcaatc

SEQ ID NO: 1596399 - DNA, 15 bp, Homo sapiens
caaaaactgcaatca

SEQ ID NO: 1596400 - DNA, 15 bp, Homo sapiens
aaaaactgcaatcac

SEQ ID NO: 1596401 - DNA, 15 bp, Homo sapiens
aaaactgcaatcact

SEQ ID NO: 1596402 - DNA, 15 bp, Homo sapiens
aaactgcaatcactt

SEQ ID NO: 1596403 - DNA, 15 bp, Homo sapiens
aactgcaatcacttt

SEQ ID NO: 1596404 - DNA, 15 bp, Homo sapiens
actgcaatcactttt

SEQ ID NO: 1596405 - DNA, 15 bp, Homo sapiens
ctgcaatcacttttg

SEQ ID NO: 1596406 - DNA, 15 bp, Homo sapiens
tgcaatcacttttgc

SEQ ID NO: 1596407 - DNA, 15 bp, Homo sapiens
gcaatcacttttgca

SEQ ID NO: 1596408 - DNA, 15 bp, Homo sapiens
caatcacttttgcac

SEQ ID NO: 1596409 - DNA, 15 bp, Homo sapiens
aatcacttttgcacc

SEQ ID NO: 1596410 - DNA, 15 bp, Homo sapiens
atcacttttgcacca

SEQ ID NO: 1596411 - DNA, 15 bp, Homo sapiens
tcacttttgcaccaa

SEQ ID NO: 1596412 - DNA, 15 bp, Homo sapiens
cacttttgcaccaac

SEQ ID NO: 1596413 - DNA, 15 bp, Homo sapiens
acttttgcaccaacc

SEQ ID NO: 1596414 - DNA, 15 bp, Homo sapiens
cttttgcaccaacca

SEQ ID NO: 1596415 - DNA, 15 bp, Homo sapiens
ttttgcaccaaccaa

SEQ ID NO: 1596416 - DNA, 15 bp, Homo sapiens
tttgcaccaaccaaa

SEQ ID NO: 1596417 - DNA, 15 bp, Homo sapiens
ttgcaccaaccaaat

SEQ ID NO: 1596418 - DNA, 15 bp, Homo sapiens
tgcaccaaccaaata

SEQ ID NO: 1596419 - DNA, 15 bp, Homo sapiens
gcaccaaccaaatag

SEQ ID NO: 1596420 - DNA, 15 bp, Homo sapiens
caccaaccaaataga

SEQ ID NO: 1596421 - DNA, 15 bp, Homo sapiens
accaaccaaatagaa

SEQ ID NO: 1596422 - DNA, 15 bp, Homo sapiens
ccaaccaaatagaaa

SEQ ID NO: 1596423 - DNA, 15 bp, Homo sapiens
caaccaaatagaaac

SEQ ID NO: 1596424 - DNA, 15 bp, Homo sapiens
aaccaaatagaaact

SEQ ID NO: 1596425 - DNA, 15 bp, Homo sapiens
accaaatagaaacta

SEQ ID NO: 1596426 - DNA, 15 bp, Homo sapiens
ccaaatagaaactaa

SEQ ID NO: 1596427 - DNA, 15 bp, Homo sapiens
caaatagaaactaat

SEQ ID NO: 1596428 - DNA, 15 bp, Homo sapiens
aaatagaaactaatc

SEQ ID NO: 1596429 - DNA, 15 bp, Homo sapiens
aatagaaactaatca

SEQ ID NO: 1596430 - DNA, 15 bp, Homo sapiens
atagaaactaatcag

SEQ ID NO: 1596431 - DNA, 15 bp, Homo sapiens
tagaaactaatcagt

SEQ ID NO: 1596432 - DNA, 15 bp, Homo sapiens
agaaactaatcagtg

SEQ ID NO: 1596433 - DNA, 15 bp, Homo sapiens
gaaactaatcagtgc

SEQ ID NO: 1596434 - DNA, 15 bp, Homo sapiens
aaactaatcagtgca

SEQ ID NO: 1596435 - DNA, 15 bp, Homo sapiens
aactaatcagtgcac

SEQ ID NO: 1596436 - DNA, 15 bp, Homo sapiens
actaatcagtgcact

SEQ ID NO: 1596437 - DNA, 15 bp, Homo sapiens
ctaatcagtgcactt

SEQ ID NO: 1596438 - DNA, 15 bp, Homo sapiens
taatcagtgcacttg

SEQ ID NO: 1596439 - DNA, 15 bp, Homo sapiens
aatcagtgcacttgc

SEQ ID NO: 1596440 - DNA, 15 bp, Homo sapiens
atcagtgcacttgct

SEQ ID NO: 1596441 - DNA, 15 bp, Homo sapiens
tcagtgcacttgctt

SEQ ID NO: 1596442 - DNA, 15 bp, Homo sapiens
cagtgcacttgctta

SEQ ID NO: 1596443 - DNA, 15 bp, Homo sapiens
agtgcacttgcttat

SEQ ID NO: 1596444 - DNA, 15 bp, Homo sapiens
gtgcacttgcttatt

SEQ ID NO: 1596445 - DNA, 15 bp, Homo sapiens
tgcacttgcttattt

SEQ ID NO: 1596446 - DNA, 15 bp, Homo sapiens
gcacttgcttatttt

SEQ ID NO: 1596447 - DNA, 15 bp, Homo sapiens
cacttgcttattttt

SEQ ID NO: 1596448 - DNA, 15 bp, Homo sapiens
acttgcttatttttc

SEQ ID NO: 1596449 - DNA, 15 bp, Homo sapiens
cttgcttatttttct

SEQ ID NO: 1596450 - DNA, 15 bp, Homo sapiens
ttgcttatttttcta

SEQ ID NO: 1596451 - DNA, 15 bp, Homo sapiens
tgcttatttttctac

SEQ ID NO: 1596452 - DNA, 15 bp, Homo sapiens
gcttatttttctaca

SEQ ID NO: 1596453 - DNA, 15 bp, Homo sapiens
cttatttttctacat

SEQ ID NO: 1596454 - DNA, 15 bp, Homo sapiens
ttatttttctacatg

SEQ ID NO: 1596455 - DNA, 15 bp, Homo sapiens
tatttttctacatgc

SEQ ID NO: 1596456 - DNA, 15 bp, Homo sapiens
atttttctacatgct

SEQ ID NO: 1596457 - DNA, 15 bp, Homo sapiens
tttttctacatgctc

SEQ ID NO: 1596458 - DNA, 15 bp, Homo sapiens
ttttctacatgctct

SEQ ID NO: 1596459 - DNA, 15 bp, Homo sapiens
tttctacatgctctt

SEQ ID NO: 1596460 - DNA, 15 bp, Homo sapiens
ttctacatgctcttt

SEQ ID NO: 1596461 - DNA, 15 bp, Homo sapiens
tctacatgctcttta

SEQ ID NO: 1596462 - DNA, 15 bp, Homo sapiens
ctacatgctctttag

SEQ ID NO: 1596463 - DNA, 15 bp, Homo sapiens
tacatgctctttagg

SEQ ID NO: 1596464 - DNA, 15 bp, Homo sapiens
acatgctctttaggg

SEQ ID NO: 1596465 - DNA, 15 bp, Homo sapiens
catgctctttagggt

SEQ ID NO: 1596466 - DNA, 15 bp, Homo sapiens
atgctctttagggtt

SEQ ID NO: 1596467 - DNA, 15 bp, Homo sapiens
tgctctttagggttt

SEQ ID NO: 1596468 - DNA, 15 bp, Homo sapiens
gctctttagggtttt

SEQ ID NO: 1596469 - DNA, 15 bp, Homo sapiens
ctctttagggtttta

SEQ ID NO: 1596470 - DNA, 15 bp, Homo sapiens
tctttagggttttaa

SEQ ID NO: 1596471 - DNA, 15 bp, Homo sapiens
ctttagggttttaaa

SEQ ID NO: 1596472 - DNA, 15 bp, Homo sapiens
tttagggttttaaat

SEQ ID NO: 1596473 - DNA, 15 bp, Homo sapiens
ttagggttttaaatg

SEQ ID NO: 1596474 - DNA, 15 bp, Homo sapiens
tagggttttaaatgt

SEQ ID NO: 1596475 - DNA, 15 bp, Homo sapiens
agggttttaaatgtc

SEQ ID NO: 1596476 - DNA, 15 bp, Homo sapiens
gggttttaaatgtca

SEQ ID NO: 1596477 - DNA, 15 bp, Homo sapiens
ggttttaaatgtcaa

SEQ ID NO: 1596478 - DNA, 15 bp, Homo sapiens
gttttaaatgtcaac

SEQ ID NO: 1596479 - DNA, 15 bp, Homo sapiens
ttttaaatgtcaacc

SEQ ID NO: 1596480 - DNA, 15 bp, Homo sapiens
tttaaatgtcaacct

SEQ ID NO: 1596481 - DNA, 15 bp, Homo sapiens
ttaaatgtcaaccta

SEQ ID NO: 1596482 - DNA, 15 bp, Homo sapiens
taaatgtcaacctac

SEQ ID NO: 1596483 - DNA, 15 bp, Homo sapiens
aaatgtcaacctact

SEQ ID NO: 1596484 - DNA, 15 bp, Homo sapiens
aatgtcaacctactg

SEQ ID NO: 1596485 - DNA, 15 bp, Homo sapiens
atgtcaacctactgt

SEQ ID NO: 1596486 - DNA, 15 bp, Homo sapiens
tgtcaacctactgtg

SEQ ID NO: 1596487 - DNA, 15 bp, Homo sapiens
gtcaacctactgtgg

SEQ ID NO: 1596488 - DNA, 15 bp, Homo sapiens
tcaacctactgtggc

SEQ ID NO: 1596489 - DNA, 15 bp, Homo sapiens
caacctactgtggca

SEQ ID NO: 1596490 - DNA, 15 bp, Homo sapiens
aacctactgtggcat

SEQ ID NO: 1596491 - DNA, 15 bp, Homo sapiens
acctactgtggcata

SEQ ID NO: 1596492 - DNA, 15 bp, Homo sapiens
cctactgtggcatag

SEQ ID NO: 1596493 - DNA, 15 bp, Homo sapiens
ctactgtggcataga

SEQ ID NO: 1596494 - DNA, 15 bp, Homo sapiens
tactgtggcatagac

SEQ ID NO: 1596495 - DNA, 15 bp, Homo sapiens
actgtggcatagact

SEQ ID NO: 1596496 - DNA, 15 bp, Homo sapiens
ctgtggcatagactt

SEQ ID NO: 1596497 - DNA, 15 bp, Homo sapiens
tgtggcatagacttt

SEQ ID NO: 1596498 - DNA, 15 bp, Homo sapiens
gtggcatagacttta

SEQ ID NO: 1596499 - DNA, 15 bp, Homo sapiens
tggcatagactttaa

SEQ ID NO: 1596500 - DNA, 15 bp, Homo sapiens
ggcatagactttaat

SEQ ID NO: 1596501 - DNA, 15 bp, Homo sapiens
gcatagactttaatc

SEQ ID NO: 1596502 - DNA, 15 bp, Homo sapiens
catagactttaatcc

SEQ ID NO: 1596503 - DNA, 15 bp, Homo sapiens
atagactttaatcct

SEQ ID NO: 1596504 - DNA, 15 bp, Homo sapiens
tagactttaatcctc

SEQ ID NO: 1596505 - DNA, 15 bp, Homo sapiens
agactttaatcctct

SEQ ID NO: 1596506 - DNA, 15 bp, Homo sapiens
gactttaatcctctg

SEQ ID NO: 1596507 - DNA, 15 bp, Homo sapiens
actttaatcctctgg

SEQ ID NO: 1596508 - DNA, 15 bp, Homo sapiens
ctttaatcctctggg

SEQ ID NO: 1596509 - DNA, 15 bp, Homo sapiens
tttaatcctctgggt

SEQ ID NO: 1596510 - DNA, 15 bp, Homo sapiens
ttaatcctctgggta

SEQ ID NO: 1596511 - DNA, 15 bp, Homo sapiens
taatcctctgggtat

SEQ ID NO: 1596512 - DNA, 15 bp, Homo sapiens
aatcctctgggtatt

SEQ ID NO: 1596513 - DNA, 15 bp, Homo sapiens
atcctctgggtattc

SEQ ID NO: 1596514 - DNA, 15 bp, Homo sapiens
tcctctgggtattct

SEQ ID NO: 1596515 - DNA, 15 bp, Homo sapiens
cctctgggtattctt

SEQ ID NO: 1596516 - DNA, 15 bp, Homo sapiens
ctctgggtattcttt

SEQ ID NO: 1596517 - DNA, 15 bp, Homo sapiens
tctgggtattctttt

SEQ ID NO: 1596518 - DNA, 15 bp, Homo sapiens
ctgggtattcttttg

SEQ ID NO: 1596519 - DNA, 15 bp, Homo sapiens
tgggtattcttttgt

SEQ ID NO: 1596520 - DNA, 15 bp, Homo sapiens
gggtattcttttgtt

SEQ ID NO: 1596521 - DNA, 15 bp, Homo sapiens
ggtattcttttgttg

SEQ ID NO: 1596522 - DNA, 15 bp, Homo sapiens
gtattcttttgttgt

SEQ ID NO: 1596523 - DNA, 15 bp, Homo sapiens
tattcttttgttgtt

SEQ ID NO: 1596524 - DNA, 15 bp, Homo sapiens
attcttttgttgttc

SEQ ID NO: 1596525 - DNA, 15 bp, Homo sapiens
ttcttttgttgttct

SEQ ID NO: 1596526 - DNA, 15 bp, Homo sapiens
tcttttgttgttctt

SEQ ID NO: 1596527 - DNA, 15 bp, Homo sapiens
cttttgttgttcttt

SEQ ID NO: 1596528 - DNA, 15 bp, Homo sapiens
ttttgttgttctttc

SEQ ID NO: 1596529 - DNA, 15 bp, Homo sapiens
tttgttgttctttcc

SEQ ID NO: 1596530 - DNA, 15 bp, Homo sapiens
ttgttgttctttcct

SEQ ID NO: 1596531 - DNA, 15 bp, Homo sapiens
tgttgttctttcctg

SEQ ID NO: 1596532 - DNA, 15 bp, Homo sapiens
gttgttctttcctgg

SEQ ID NO: 1596533 - DNA, 15 bp, Homo sapiens
ttgttctttcctggt

SEQ ID NO: 1596534 - DNA, 15 bp, Homo sapiens
tgttctttcctggta

SEQ ID NO: 1596535 - DNA, 15 bp, Homo sapiens
gttctttcctggtat

SEQ ID NO: 1596536 - DNA, 15 bp, Homo sapiens
ttctttcctggtata

SEQ ID NO: 1596537 - DNA, 15 bp, Homo sapiens
tctttcctggtatat

SEQ ID NO: 1596538 - DNA, 15 bp, Homo sapiens
ctttcctggtatatg

SEQ ID NO: 1596539 - DNA, 15 bp, Homo sapiens
tttcctggtatatgc

SEQ ID NO: 1596540 - DNA, 15 bp, Homo sapiens
ttcctggtatatgct

SEQ ID NO: 1596541 - DNA, 15 bp, Homo sapiens
tcctggtatatgctg

SEQ ID NO: 1596542 - DNA, 15 bp, Homo sapiens
cctggtatatgctgt

SEQ ID NO: 1596543 - DNA, 15 bp, Homo sapiens
ctggtatatgctgtg

SEQ ID NO: 1596544 - DNA, 15 bp, Homo sapiens
tggtatatgctgtgg

SEQ ID NO: 1596545 - DNA, 15 bp, Homo sapiens
ggtatatgctgtgga

SEQ ID NO: 1596546 - DNA, 15 bp, Homo sapiens
gtatatgctgtggaa

SEQ ID NO: 1596547 - DNA, 15 bp, Homo sapiens
tatatgctgtggaat

SEQ ID NO: 1596548 - DNA, 15 bp, Homo sapiens
atatgctgtggaatt

SEQ ID NO: 1596549 - DNA, 15 bp, Homo sapiens
tatgctgtggaattg

SEQ ID NO: 1596550 - DNA, 15 bp, Homo sapiens
atgctgtggaattga

SEQ ID NO: 1596551 - DNA, 15 bp, Homo sapiens
tgctgtggaattgag

SEQ ID NO: 1596552 - DNA, 15 bp, Homo sapiens
gctgtggaattgaga

SEQ ID NO: 1596553 - DNA, 15 bp, Homo sapiens
ctgtggaattgagat

SEQ ID NO: 1596554 - DNA, 15 bp, Homo sapiens
tgtggaattgagata

SEQ ID NO: 1596555 - DNA, 15 bp, Homo sapiens
gtggaattgagatag

SEQ ID NO: 1596556 - DNA, 15 bp, Homo sapiens
tggaattgagataga

SEQ ID NO: 1596557 - DNA, 15 bp, Homo sapiens
ggaattgagatagac

SEQ ID NO: 1596558 - DNA, 15 bp, Homo sapiens
gaattgagatagact

SEQ ID NO: 1596559 - DNA, 15 bp, Homo sapiens
aattgagatagactg

SEQ ID NO: 1596560 - DNA, 15 bp, Homo sapiens
attgagatagactgg

SEQ ID NO: 1596561 - DNA, 15 bp, Homo sapiens
ttgagatagactggt

SEQ ID NO: 1596562 - DNA, 15 bp, Homo sapiens
tgagatagactggtt

SEQ ID NO: 1596563 - DNA, 15 bp, Homo sapiens
gagatagactggttc

SEQ ID NO: 1596564 - DNA, 15 bp, Homo sapiens
agatagactggttcg

SEQ ID NO: 1596565 - DNA, 15 bp, Homo sapiens
gatagactggttcgt

SEQ ID NO: 1596566 - DNA, 15 bp, Homo sapiens
atagactggttcgtg

SEQ ID NO: 1596567 - DNA, 15 bp, Homo sapiens
tagactggttcgtga

SEQ ID NO: 1596568 - DNA, 15 bp, Homo sapiens
agactggttcgtgag

SEQ ID NO: 1596569 - DNA, 15 bp, Homo sapiens
gactggttcgtgagc

SEQ ID NO: 1596570 - DNA, 15 bp, Homo sapiens
actggttcgtgagcg

SEQ ID NO: 1596571 - DNA, 15 bp, Homo sapiens
ctggttcgtgagcga

SEQ ID NO: 1596572 - DNA, 15 bp, Homo sapiens
tggttcgtgagcgag

SEQ ID NO: 1596573 - DNA, 15 bp, Homo sapiens
ggttcgtgagcgaga

SEQ ID NO: 1596574 - DNA, 15 bp, Homo sapiens
gttcgtgagcgagag

SEQ ID NO: 1596575 - DNA, 15 bp, Homo sapiens
ttcgtgagcgagaga

SEQ ID NO: 1596576 - DNA, 15 bp, Homo sapiens
tcgtgagcgagagat

SEQ ID NO: 1596577 - DNA, 15 bp, Homo sapiens
cgtgagcgagagatt

SEQ ID NO: 1596578 - DNA, 15 bp, Homo sapiens
gtgagcgagagattt

SEQ ID NO: 1596579 - DNA, 15 bp, Homo sapiens
tgagcgagagatttt

SEQ ID NO: 1596580 - DNA, 15 bp, Homo sapiens
gagcgagagattttg

SEQ ID NO: 1596581 - DNA, 15 bp, Homo sapiens
agcgagagattttgt

SEQ ID NO: 1596582 - DNA, 15 bp, Homo sapiens
gcgagagattttgtg

SEQ ID NO: 1596583 - DNA, 15 bp, Homo sapiens
cgagagattttgtgt

SEQ ID NO: 1596584 - DNA, 15 bp, Homo sapiens
gagagattttgtgtt

SEQ ID NO: 1596585 - DNA, 15 bp, Homo sapiens
agagattttgtgttg

SEQ ID NO: 1596586 - DNA, 15 bp, Homo sapiens
gagattttgtgttgc

SEQ ID NO: 1596587 - DNA, 15 bp, Homo sapiens
agattttgtgttgcc

SEQ ID NO: 1596588 - DNA, 15 bp, Homo sapiens
gattttgtgttgcca

SEQ ID NO: 1596589 - DNA, 15 bp, Homo sapiens
attttgtgttgccac

SEQ ID NO: 1596590 - DNA, 15 bp, Homo sapiens
ttttgtgttgccaca

SEQ ID NO: 1596591 - DNA, 15 bp, Homo sapiens
tttgtgttgccacag

SEQ ID NO: 1596592 - DNA, 15 bp, Homo sapiens
ttgtgttgccacagg

SEQ ID NO: 1596593 - DNA, 15 bp, Homo sapiens
tgtgttgccacaggt

SEQ ID NO: 1596594 - DNA, 15 bp, Homo sapiens
gtgttgccacaggta

SEQ ID NO: 1596595 - DNA, 15 bp, Homo sapiens
tgttgccacaggtag

SEQ ID NO: 1596596 - DNA, 15 bp, Homo sapiens
gttgccacaggtagg

SEQ ID NO: 1596597 - DNA, 15 bp, Homo sapiens
ttgccacaggtagga

SEQ ID NO: 1596598 - DNA, 15 bp, Homo sapiens
tgccacaggtaggac

SEQ ID NO: 1596599 - DNA, 15 bp, Homo sapiens
gccacaggtaggaca

SEQ ID NO: 1596600 - DNA, 15 bp, Homo sapiens
ccacaggtaggacat

SEQ ID NO: 1596601 - DNA, 15 bp, Homo sapiens
cacaggtaggacatg

SEQ ID NO: 1596602 - DNA, 15 bp, Homo sapiens
acaggtaggacatgc

SEQ ID NO: 1596603 - DNA, 15 bp, Homo sapiens
caggtaggacatgct

SEQ ID NO: 1596604 - DNA, 15 bp, Homo sapiens
aggtaggacatgctc

SEQ ID NO: 1596605 - DNA, 15 bp, Homo sapiens
ggtaggacatgctca

SEQ ID NO: 1596606 - DNA, 15 bp, Homo sapiens
gtaggacatgctcaa

SEQ ID NO: 1596607 - DNA, 15 bp, Homo sapiens
taggacatgctcaaa

SEQ ID NO: 1596608 - DNA, 15 bp, Homo sapiens
aggacatgctcaaac

SEQ ID NO: 1596609 - DNA, 15 bp, Homo sapiens
ggacatgctcaaaca

SEQ ID NO: 1596610 - DNA, 15 bp, Homo sapiens
gacatgctcaaacaa

SEQ ID NO: 1596611 - DNA, 15 bp, Homo sapiens
acatgctcaaacaat

SEQ ID NO: 1596612 - DNA, 15 bp, Homo sapiens
catgctcaaacaata

SEQ ID NO: 1596613 - DNA, 15 bp, Homo sapiens
atgctcaaacaatac

SEQ ID NO: 1596614 - DNA, 15 bp, Homo sapiens
tgctcaaacaatact

SEQ ID NO: 1596615 - DNA, 15 bp, Homo sapiens
gctcaaacaatactt

SEQ ID NO: 1596616 - DNA, 15 bp, Homo sapiens
ctcaaacaatacttg

SEQ ID NO: 1596617 - DNA, 15 bp, Homo sapiens
tcaaacaatacttgg

SEQ ID NO: 1596618 - DNA, 15 bp, Homo sapiens
caaacaatacttggg

SEQ ID NO: 1596619 - DNA, 15 bp, Homo sapiens
aaacaatacttgggt

SEQ ID NO: 1596620 - DNA, 15 bp, Homo sapiens
aacaatacttgggtc

SEQ ID NO: 1596621 - DNA, 15 bp, Homo sapiens
acaatacttgggtca

SEQ ID NO: 1596622 - DNA, 15 bp, Homo sapiens
caatacttgggtcat

SEQ ID NO: 1596623 - DNA, 15 bp, Homo sapiens
aatacttgggtcatt

SEQ ID NO: 1596624 - DNA, 15 bp, Homo sapiens
atacttgggtcattt

SEQ ID NO: 1596625 - DNA, 15 bp, Homo sapiens
tacttgggtcatttc

SEQ ID NO: 1596626 - DNA, 15 bp, Homo sapiens
acttgggtcatttct

SEQ ID NO: 1596627 - DNA, 15 bp, Homo sapiens
cttgggtcatttctt

SEQ ID NO: 1596628 - DNA, 15 bp, Homo sapiens
ttgggtcatttcttg

SEQ ID NO: 1596629 - DNA, 15 bp, Homo sapiens
tgggtcatttcttga

SEQ ID NO: 1596630 - DNA, 15 bp, Homo sapiens
gggtcatttcttgac

SEQ ID NO: 1596631 - DNA, 15 bp, Homo sapiens
ggtcatttcttgacc

SEQ ID NO: 1596632 - DNA, 15 bp, Homo sapiens
gtcatttcttgaccc

SEQ ID NO: 1596633 - DNA, 15 bp, Homo sapiens
tcatttcttgaccca

SEQ ID NO: 1596634 - DNA, 15 bp, Homo sapiens
catttcttgacccaa

SEQ ID NO: 1596635 - DNA, 15 bp, Homo sapiens
atttcttgacccaag

SEQ ID NO: 1596636 - DNA, 15 bp, Homo sapiens
tttcttgacccaagt

SEQ ID NO: 1596637 - DNA, 15 bp, Homo sapiens
ttcttgacccaagtc

SEQ ID NO: 1596638 - DNA, 15 bp, Homo sapiens
tcttgacccaagtca

SEQ ID NO: 1596639 - DNA, 15 bp, Homo sapiens
cttgacccaagtcat

SEQ ID NO: 1596640 - DNA, 15 bp, Homo sapiens
ttgacccaagtcatc

SEQ ID NO: 1596641 - DNA, 15 bp, Homo sapiens
tgacccaagtcatct

SEQ ID NO: 1596642 - DNA, 15 bp, Homo sapiens
gacccaagtcatcta

SEQ ID NO: 1596643 - DNA, 15 bp, Homo sapiens
acccaagtcatctat

SEQ ID NO: 1596644 - DNA, 15 bp, Homo sapiens
cccaagtcatctatt

SEQ ID NO: 1596645 - DNA, 15 bp, Homo sapiens
ccaagtcatctattc

SEQ ID NO: 1596646 - DNA, 15 bp, Homo sapiens
caagtcatctattca

SEQ ID NO: 1596647 - DNA, 15 bp, Homo sapiens
aagtcatctattcac

SEQ ID NO: 1596648 - DNA, 15 bp, Homo sapiens
agtcatctattcacc

SEQ ID NO: 1596649 - DNA, 15 bp, Homo sapiens
gtcatctattcacca

SEQ ID NO: 1596650 - DNA, 15 bp, Homo sapiens
tcatctattcaccat

SEQ ID NO: 1596651 - DNA, 15 bp, Homo sapiens
catctattcaccata

SEQ ID NO: 1596652 - DNA, 15 bp, Homo sapiens
atctattcaccatag

SEQ ID NO: 1596653 - DNA, 15 bp, Homo sapiens
tctattcaccatagt

SEQ ID NO: 1596654 - DNA, 15 bp, Homo sapiens
ctattcaccatagtt

SEQ ID NO: 1596655 - DNA, 15 bp, Homo sapiens
tattcaccatagttt

SEQ ID NO: 1596656 - DNA, 15 bp, Homo sapiens
attcaccatagtttt

SEQ ID NO: 1596657 - DNA, 15 bp, Homo sapiens
ttcaccatagttttg

SEQ ID NO: 1596658 - DNA, 15 bp, Homo sapiens
tcaccatagttttgt

SEQ ID NO: 1596659 - DNA, 15 bp, Homo sapiens
caccatagttttgta

SEQ ID NO: 1596660 - DNA, 15 bp, Homo sapiens
accatagttttgtag

SEQ ID NO: 1596661 - DNA, 15 bp, Homo sapiens
ccatagttttgtagc

SEQ ID NO: 1596662 - DNA, 15 bp, Homo sapiens
catagttttgtagca

SEQ ID NO: 1596663 - DNA, 15 bp, Homo sapiens
atagttttgtagcac

SEQ ID NO: 1596664 - DNA, 15 bp, Homo sapiens
tagttttgtagcacc

SEQ ID NO: 1596665 - DNA, 15 bp, Homo sapiens
agttttgtagcaccg

SEQ ID NO: 1596666 - DNA, 15 bp, Homo sapiens
gttttgtagcaccga

SEQ ID NO: 1596667 - DNA, 15 bp, Homo sapiens
ttttgtagcaccgat

SEQ ID NO: 1596668 - DNA, 15 bp, Homo sapiens
tttgtagcaccgatc

SEQ ID NO: 1596669 - DNA, 15 bp, Homo sapiens
ttgtagcaccgatct

SEQ ID NO: 1596670 - DNA, 15 bp, Homo sapiens
tgtagcaccgatctt

SEQ ID NO: 1596671 - DNA, 15 bp, Homo sapiens
gtagcaccgatcttg

SEQ ID NO: 1596672 - DNA, 15 bp, Homo sapiens
tagcaccgatcttgc

SEQ ID NO: 1596673 - DNA, 15 bp, Homo sapiens
agcaccgatcttgca

SEQ ID NO: 1596674 - DNA, 15 bp, Homo sapiens
gcaccgatcttgcat

SEQ ID NO: 1596675 - DNA, 15 bp, Homo sapiens
caccgatcttgcata

SEQ ID NO: 1596676 - DNA, 15 bp, Homo sapiens
accgatcttgcatac

SEQ ID NO: 1596677 - DNA, 15 bp, Homo sapiens
ccgatcttgcataca

SEQ ID NO: 1596678 - DNA, 15 bp, Homo sapiens
cgatcttgcatacat

SEQ ID NO: 1596679 - DNA, 15 bp, Homo sapiens
gatcttgcatacatt

SEQ ID NO: 1596680 - DNA, 15 bp, Homo sapiens
atcttgcatacattt

SEQ ID NO: 1596681 - DNA, 15 bp, Homo sapiens
tcttgcatacatttc

SEQ ID NO: 1596682 - DNA, 15 bp, Homo sapiens
cttgcatacatttca

SEQ ID NO: 1596683 - DNA, 15 bp, Homo sapiens
ttgcatacatttcat

SEQ ID NO: 1596684 - DNA, 15 bp, Homo sapiens
tgcatacatttcatg

SEQ ID NO: 1596685 - DNA, 15 bp, Homo sapiens
gcatacatttcatgt

SEQ ID NO: 1596686 - DNA, 15 bp, Homo sapiens
catacatttcatgta

SEQ ID NO: 1596687 - DNA, 15 bp, Homo sapiens
atacatttcatgtat

SEQ ID NO: 1596688 - DNA, 15 bp, Homo sapiens
tacatttcatgtatc

SEQ ID NO: 1596689 - DNA, 15 bp, Homo sapiens
acatttcatgtatct

SEQ ID NO: 1596690 - DNA, 15 bp, Homo sapiens
catttcatgtatctt

SEQ ID NO: 1596691 - DNA, 15 bp, Homo sapiens
atttcatgtatcttc

SEQ ID NO: 1596692 - DNA, 15 bp, Homo sapiens
tttcatgtatcttct

SEQ ID NO: 1596693 - DNA, 15 bp, Homo sapiens
ttcatgtatcttctt

SEQ ID NO: 1596694 - DNA, 15 bp, Homo sapiens
tcatgtatcttcttt

SEQ ID NO: 1596695 - DNA, 15 bp, Homo sapiens
catgtatcttctttg

SEQ ID NO: 1596696 - DNA, 15 bp, Homo sapiens
atgtatcttctttga

SEQ ID NO: 1596697 - DNA, 15 bp, Homo sapiens
tgtatcttctttgaa

SEQ ID NO: 1596698 - DNA, 15 bp, Homo sapiens
gtatcttctttgaac

SEQ ID NO: 1596699 - DNA, 15 bp, Homo sapiens
tatcttctttgaacc

SEQ ID NO: 1596700 - DNA, 15 bp, Homo sapiens
atcttctttgaaccc

SEQ ID NO: 1596701 - DNA, 15 bp, Homo sapiens
tcttctttgaacccc

SEQ ID NO: 1596702 - DNA, 15 bp, Homo sapiens
cttctttgaacccca

SEQ ID NO: 1596703 - DNA, 15 bp, Homo sapiens
ttctttgaaccccac

SEQ ID NO: 1596704 - DNA, 15 bp, Homo sapiens
tctttgaaccccacg

SEQ ID NO: 1596705 - DNA, 15 bp, Homo sapiens
ctttgaaccccacgt

SEQ ID NO: 1596706 - DNA, 15 bp, Homo sapiens
tttgaaccccacgtc

SEQ ID NO: 1596707 - DNA, 15 bp, Homo sapiens
ttgaaccccacgtca

SEQ ID NO: 1596708 - DNA, 15 bp, Homo sapiens
tgaaccccacgtcag

SEQ ID NO: 1596709 - DNA, 15 bp, Homo sapiens
gaaccccacgtcagt

SEQ ID NO: 1596710 - DNA, 15 bp, Homo sapiens
aaccccacgtcagtg

SEQ ID NO: 1596711 - DNA, 15 bp, Homo sapiens
accccacgtcagtgc

SEQ ID NO: 1596712 - DNA, 15 bp, Homo sapiens
ccccacgtcagtgct

SEQ ID NO: 1596713 - DNA, 15 bp, Homo sapiens
cccacgtcagtgctg

SEQ ID NO: 1596714 - DNA, 15 bp, Homo sapiens
ccacgtcagtgctgc

SEQ ID NO: 1596715 - DNA, 15 bp, Homo sapiens
cacgtcagtgctgct

SEQ ID NO: 1596716 - DNA, 15 bp, Homo sapiens
acgtcagtgctgctt

SEQ ID NO: 1596717 - DNA, 15 bp, Homo sapiens
cgtcagtgctgctta

SEQ ID NO: 1596718 - DNA, 15 bp, Homo sapiens
gtcagtgctgcttat

SEQ ID NO: 1596719 - DNA, 15 bp, Homo sapiens
tcagtgctgcttata

SEQ ID NO: 1596720 - DNA, 15 bp, Homo sapiens
cagtgctgcttatat

SEQ ID NO: 1596721 - DNA, 15 bp, Homo sapiens
agtgctgcttatatg

SEQ ID NO: 1596722 - DNA, 15 bp, Homo sapiens
gtgctgcttatatga

SEQ ID NO: 1596723 - DNA, 15 bp, Homo sapiens
tgctgcttatatgat

SEQ ID NO: 1596724 - DNA, 15 bp, Homo sapiens
gctgcttatatgata

SEQ ID NO: 1596725 - DNA, 15 bp, Homo sapiens
ctgcttatatgatac

SEQ ID NO: 1596726 - DNA, 15 bp, Homo sapiens
tgcttatatgatact

SEQ ID NO: 1596727 - DNA, 15 bp, Homo sapiens
gcttatatgatactc

SEQ ID NO: 1596728 - DNA, 15 bp, Homo sapiens
cttatatgatactca

SEQ ID NO: 1596729 - DNA, 15 bp, Homo sapiens
ttatatgatactcag

SEQ ID NO: 1596730 - DNA, 15 bp, Homo sapiens
tatatgatactcaga

SEQ ID NO: 1596731 - DNA, 15 bp, Homo sapiens
atatgatactcagaa

SEQ ID NO: 1596732 - DNA, 15 bp, Homo sapiens
tatgatactcagaaa

SEQ ID NO: 1596733 - DNA, 15 bp, Homo sapiens
atgatactcagaaat

SEQ ID NO: 1596734 - DNA, 15 bp, Homo sapiens
tgatactcagaaatt

SEQ ID NO: 1596735 - DNA, 15 bp, Homo sapiens
gatactcagaaatta

SEQ ID NO: 1596736 - DNA, 15 bp, Homo sapiens
atactcagaaattaa

SEQ ID NO: 1596737 - DNA, 15 bp, Homo sapiens
tactcagaaattaaa

SEQ ID NO: 1596738 - DNA, 15 bp, Homo sapiens
actcagaaattaaac

SEQ ID NO: 1596739 - DNA, 15 bp, Homo sapiens
ctcagaaattaaaca

SEQ ID NO: 1596740 - DNA, 15 bp, Homo sapiens
tcagaaattaaacac

SEQ ID NO: 1596741 - DNA, 15 bp, Homo sapiens
cagaaattaaacact

SEQ ID NO: 1596742 - DNA, 15 bp, Homo sapiens
agaaattaaacacta

SEQ ID NO: 1596743 - DNA, 15 bp, Homo sapiens
gaaattaaacactaa

SEQ ID NO: 1596744 - DNA, 15 bp, Homo sapiens
aaattaaacactaag

SEQ ID NO: 1596745 - DNA, 15 bp, Homo sapiens
aattaaacactaagg

SEQ ID NO: 1596746 - DNA, 15 bp, Homo sapiens
attaaacactaagga

SEQ ID NO: 1596747 - DNA, 15 bp, Homo sapiens
ttaaacactaaggaa

SEQ ID NO: 1596748 - DNA, 15 bp, Homo sapiens
taaacactaaggaat

SEQ ID NO: 1596749 - DNA, 15 bp, Homo sapiens
aaacactaaggaata

SEQ ID NO: 1596750 - DNA, 15 bp, Homo sapiens
aacactaaggaataa

SEQ ID NO: 1596751 - DNA, 15 bp, Homo sapiens
acactaaggaataag

SEQ ID NO: 1596752 - DNA, 15 bp, Homo sapiens
cactaaggaataaga

SEQ ID NO: 1596753 - DNA, 15 bp, Homo sapiens
actaaggaataagat

SEQ ID NO: 1596754 - DNA, 15 bp, Homo sapiens
ctaaggaataagatt

SEQ ID NO: 1596755 - DNA, 15 bp, Homo sapiens
taaggaataagattt

SEQ ID NO: 1596756 - DNA, 15 bp, Homo sapiens
aaggaataagatttt

SEQ ID NO: 1596757 - DNA, 15 bp, Homo sapiens
aggaataagattttc

SEQ ID NO: 1596758 - DNA, 15 bp, Homo sapiens
ggaataagattttca

SEQ ID NO: 1596759 - DNA, 15 bp, Homo sapiens
gaataagattttcag

SEQ ID NO: 1596760 - DNA, 15 bp, Homo sapiens
aataagattttcagg

SEQ ID NO: 1596761 - DNA, 15 bp, Homo sapiens
ataagattttcaggt

SEQ ID NO: 1596762 - DNA, 15 bp, Homo sapiens
taagattttcaggta

SEQ ID NO: 1596763 - DNA, 15 bp, Homo sapiens
aagattttcaggtag

SEQ ID NO: 1596764 - DNA, 15 bp, Homo sapiens
agattttcaggtagg

SEQ ID NO: 1596765 - DNA, 15 bp, Homo sapiens
gattttcaggtagga

SEQ ID NO: 1596766 - DNA, 15 bp, Homo sapiens
attttcaggtaggat

SEQ ID NO: 1596767 - DNA, 15 bp, Homo sapiens
ttttcaggtaggatt

SEQ ID NO: 1596768 - DNA, 15 bp, Homo sapiens
tttcaggtaggattg

SEQ ID NO: 1596769 - DNA, 15 bp, Homo sapiens
ttcaggtaggattga

SEQ ID NO: 1596770 - DNA, 15 bp, Homo sapiens
tcaggtaggattgag

SEQ ID NO: 1596771 - DNA, 15 bp, Homo sapiens
caggtaggattgagt

SEQ ID NO: 1596772 - DNA, 15 bp, Homo sapiens
aggtaggattgagtt

SEQ ID NO: 1596773 - DNA, 15 bp, Homo sapiens
ggtaggattgagttt

SEQ ID NO: 1596774 - DNA, 15 bp, Homo sapiens
gtaggattgagtttt

SEQ ID NO: 1596775 - DNA, 15 bp, Homo sapiens
taggattgagttttg

SEQ ID NO: 1596776 - DNA, 15 bp, Homo sapiens
aggattgagttttgg

SEQ ID NO: 1596777 - DNA, 15 bp, Homo sapiens
ggattgagttttgga

SEQ ID NO: 1596778 - DNA, 15 bp, Homo sapiens
gattgagttttggag

SEQ ID NO: 1596779 - DNA, 15 bp, Homo sapiens
attgagttttggagg

SEQ ID NO: 1596780 - DNA, 15 bp, Homo sapiens
ttgagttttggaggg

SEQ ID NO: 1596781 - DNA, 15 bp, Homo sapiens
tgagttttggagggt

SEQ ID NO: 1596782 - DNA, 15 bp, Homo sapiens
gagttttggagggtc

SEQ ID NO: 1596783 - DNA, 15 bp, Homo sapiens
agttttggagggtca

SEQ ID NO: 1596784 - DNA, 15 bp, Homo sapiens
gttttggagggtcac

SEQ ID NO: 1596785 - DNA, 15 bp, Homo sapiens
ttttggagggtcaca

SEQ ID NO: 1596786 - DNA, 15 bp, Homo sapiens
tttggagggtcacaa

SEQ ID NO: 1596787 - DNA, 15 bp, Homo sapiens
ttggagggtcacaaa

SEQ ID NO: 1596788 - DNA, 15 bp, Homo sapiens
tggagggtcacaaat

SEQ ID NO: 1596789 - DNA, 15 bp, Homo sapiens
ggagggtcacaaatc

SEQ ID NO: 1596790 - DNA, 15 bp, Homo sapiens
gagggtcacaaatct

SEQ ID NO: 1596791 - DNA, 15 bp, Homo sapiens
agggtcacaaatctt

SEQ ID NO: 1596792 - DNA, 15 bp, Homo sapiens
gggtcacaaatcttg

SEQ ID NO: 1596793 - DNA, 15 bp, Homo sapiens
ggtcacaaatcttgt

SEQ ID NO: 1596794 - DNA, 15 bp, Homo sapiens
gtcacaaatcttgta

SEQ ID NO: 1596795 - DNA, 15 bp, Homo sapiens
tcacaaatcttgtaa

SEQ ID NO: 1596796 - DNA, 15 bp, Homo sapiens
cacaaatcttgtaat

SEQ ID NO: 1596797 - DNA, 15 bp, Homo sapiens
acaaatcttgtaatg

SEQ ID NO: 1596798 - DNA, 15 bp, Homo sapiens
caaatcttgtaatgt

SEQ ID NO: 1596799 - DNA, 15 bp, Homo sapiens
aaatcttgtaatgtc

SEQ ID NO: 1596800 - DNA, 15 bp, Homo sapiens
aatcttgtaatgtct

SEQ ID NO: 1596801 - DNA, 15 bp, Homo sapiens
atcttgtaatgtcta

SEQ ID NO: 1596802 - DNA, 15 bp, Homo sapiens
tcttgtaatgtctaa

SEQ ID NO: 1596803 - DNA, 15 bp, Homo sapiens
cttgtaatgtctaat

SEQ ID NO: 1596804 - DNA, 15 bp, Homo sapiens
ttgtaatgtctaata

SEQ ID NO: 1596805 - DNA, 15 bp, Homo sapiens
tgtaatgtctaatat

SEQ ID NO: 1596806 - DNA, 15 bp, Homo sapiens
gtaatgtctaatatt

SEQ ID NO: 1596807 - DNA, 15 bp, Homo sapiens
taatgtctaatattt

SEQ ID NO: 1596808 - DNA, 15 bp, Homo sapiens
aatgtctaatatttc

SEQ ID NO: 1596809 - DNA, 15 bp, Homo sapiens
atgtctaatatttcc

SEQ ID NO: 1596810 - DNA, 15 bp, Homo sapiens
tgtctaatatttcca

SEQ ID NO: 1596811 - DNA, 15 bp, Homo sapiens
gtctaatatttccac

SEQ ID NO: 1596812 - DNA, 15 bp, Homo sapiens
tctaatatttccact

SEQ ID NO: 1596813 - DNA, 15 bp, Homo sapiens
ctaatatttccactc

SEQ ID NO: 1596814 - DNA, 15 bp, Homo sapiens
taatatttccactct

SEQ ID NO: 1596815 - DNA, 15 bp, Homo sapiens
aatatttccactctc

SEQ ID NO: 1596816 - DNA, 15 bp, Homo sapiens
atatttccactctcc

SEQ ID NO: 1596817 - DNA, 15 bp, Homo sapiens
tatttccactctccc

SEQ ID NO: 1596818 - DNA, 15 bp, Homo sapiens
atttccactctccct

SEQ ID NO: 1596819 - DNA, 15 bp, Homo sapiens
tttccactctccctg

SEQ ID NO: 1596820 - DNA, 15 bp, Homo sapiens
ttccactctccctgc

SEQ ID NO: 1596821 - DNA, 15 bp, Homo sapiens
tccactctccctgct

SEQ ID NO: 1596822 - DNA, 15 bp, Homo sapiens
ccactctccctgctg

SEQ ID NO: 1596823 - DNA, 15 bp, Homo sapiens
cactctccctgctga

SEQ ID NO: 1596824 - DNA, 15 bp, Homo sapiens
actctccctgctgag

SEQ ID NO: 1596825 - DNA, 15 bp, Homo sapiens
ctctccctgctgaga

SEQ ID NO: 1596826 - DNA, 15 bp, Homo sapiens
tctccctgctgagaa

SEQ ID NO: 1596827 - DNA, 15 bp, Homo sapiens
ctccctgctgagaat

SEQ ID NO: 1596828 - DNA, 15 bp, Homo sapiens
tccctgctgagaatt

SEQ ID NO: 1596829 - DNA, 15 bp, Homo sapiens
ccctgctgagaatta

SEQ ID NO: 1596830 - DNA, 15 bp, Homo sapiens
cctgctgagaattag

SEQ ID NO: 1596831 - DNA, 15 bp, Homo sapiens
ctgctgagaattagt

SEQ ID NO: 1596832 - DNA, 15 bp, Homo sapiens
tgctgagaattagtt

SEQ ID NO: 1596833 - DNA, 15 bp, Homo sapiens
gctgagaattagttt

SEQ ID NO: 1596834 - DNA, 15 bp, Homo sapiens
ctgagaattagtttt

SEQ ID NO: 1596835 - DNA, 15 bp, Homo sapiens
tgagaattagttttg

SEQ ID NO: 1596836 - DNA, 15 bp, Homo sapiens
gagaattagttttgg

SEQ ID NO: 1596837 - DNA, 15 bp, Homo sapiens
agaattagttttggc

SEQ ID NO: 1596838 - DNA, 15 bp, Homo sapiens
gaattagttttggct

SEQ ID NO: 1596839 - DNA, 15 bp, Homo sapiens
aattagttttggctt

SEQ ID NO: 1596840 - DNA, 15 bp, Homo sapiens
attagttttggcttc

SEQ ID NO: 1596841 - DNA, 15 bp, Homo sapiens
ttagttttggcttcc

SEQ ID NO: 1596842 - DNA, 15 bp, Homo sapiens
tagttttggcttcct

SEQ ID NO: 1596843 - DNA, 15 bp, Homo sapiens
agttttggcttcctt

SEQ ID NO: 1596844 - DNA, 15 bp, Homo sapiens
gttttggcttccttg

SEQ ID NO: 1596845 - DNA, 15 bp, Homo sapiens
ttttggcttccttgg

SEQ ID NO: 1596846 - DNA, 15 bp, Homo sapiens
tttggcttccttgga

SEQ ID NO: 1596847 - DNA, 15 bp, Homo sapiens
ttggcttccttggag

SEQ ID NO: 1596848 - DNA, 15 bp, Homo sapiens
tggcttccttggagg

SEQ ID NO: 1596849 - DNA, 15 bp, Homo sapiens
ggcttccttggaggt

SEQ ID NO: 1596850 - DNA, 15 bp, Homo sapiens
gcttccttggaggtg

SEQ ID NO: 1596851 - DNA, 15 bp, Homo sapiens
cttccttggaggtga

SEQ ID NO: 1596852 - DNA, 15 bp, Homo sapiens
ttccttggaggtgat

SEQ ID NO: 1596853 - DNA, 15 bp, Homo sapiens
tccttggaggtgata

SEQ ID NO: 1596854 - DNA, 15 bp, Homo sapiens
ccttggaggtgatat

SEQ ID NO: 1596855 - DNA, 15 bp, Homo sapiens
cttggaggtgatatc

SEQ ID NO: 1596856 - DNA, 15 bp, Homo sapiens
ttggaggtgatatcg

SEQ ID NO: 1596857 - DNA, 15 bp, Homo sapiens
tggaggtgatatcgc

SEQ ID NO: 1596858 - DNA, 15 bp, Homo sapiens
ggaggtgatatcgcc

SEQ ID NO: 1596859 - DNA, 15 bp, Homo sapiens
gaggtgatatcgcct

SEQ ID NO: 1596860 - DNA, 15 bp, Homo sapiens
aggtgatatcgcctc

SEQ ID NO: 1596861 - DNA, 15 bp, Homo sapiens
ggtgatatcgcctct

SEQ ID NO: 1596862 - DNA, 15 bp, Homo sapiens
gtgatatcgcctctg

SEQ ID NO: 1596863 - DNA, 15 bp, Homo sapiens
tgatatcgcctctgt

SEQ ID NO: 1596864 - DNA, 15 bp, Homo sapiens
gatatcgcctctgtt

SEQ ID NO: 1596865 - DNA, 15 bp, Homo sapiens
atatcgcctctgttg

SEQ ID NO: 1596866 - DNA, 15 bp, Homo sapiens
tatcgcctctgttga

SEQ ID NO: 1596867 - DNA, 15 bp, Homo sapiens
atcgcctctgttgag

SEQ ID NO: 1596868 - DNA, 15 bp, Homo sapiens
tcgcctctgttgagt

SEQ ID NO: 1596869 - DNA, 15 bp, Homo sapiens
cgcctctgttgagta

SEQ ID NO: 1596870 - DNA, 15 bp, Homo sapiens
gcctctgttgagtat

SEQ ID NO: 1596871 - DNA, 15 bp, Homo sapiens
cctctgttgagtata

SEQ ID NO: 1596872 - DNA, 15 bp, Homo sapiens
ctctgttgagtataa

SEQ ID NO: 1596873 - DNA, 15 bp, Homo sapiens
tctgttgagtataag

SEQ ID NO: 1596874 - DNA, 15 bp, Homo sapiens
ctgttgagtataagt

SEQ ID NO: 1596875 - DNA, 15 bp, Homo sapiens
tgttgagtataagtg

SEQ ID NO: 1596876 - DNA, 15 bp, Homo sapiens
gttgagtataagtgg

SEQ ID NO: 1596877 - DNA, 15 bp, Homo sapiens
ttgagtataagtggc

SEQ ID NO: 1596878 - DNA, 15 bp, Homo sapiens
tgagtataagtggcc

SEQ ID NO: 1596879 - DNA, 15 bp, Homo sapiens
gagtataagtggcct

SEQ ID NO: 1596880 - DNA, 15 bp, Homo sapiens
agtataagtggccta

SEQ ID NO: 1596881 - DNA, 15 bp, Homo sapiens
gtataagtggcctac

SEQ ID NO: 1596882 - DNA, 15 bp, Homo sapiens
tataagtggcctact

SEQ ID NO: 1596883 - DNA, 15 bp, Homo sapiens
ataagtggcctactg

SEQ ID NO: 1596884 - DNA, 15 bp, Homo sapiens
taagtggcctactgt

SEQ ID NO: 1596885 - DNA, 15 bp, Homo sapiens
aagtggcctactgtg

SEQ ID NO: 1596886 - DNA, 15 bp, Homo sapiens
agtggcctactgtga

SEQ ID NO: 1596887 - DNA, 15 bp, Homo sapiens
gtggcctactgtgat

SEQ ID NO: 1596888 - DNA, 15 bp, Homo sapiens
tggcctactgtgatc

SEQ ID NO: 1596889 - DNA, 15 bp, Homo sapiens
ggcctactgtgatca

SEQ ID NO: 1596890 - DNA, 15 bp, Homo sapiens
gcctactgtgatcac

SEQ ID NO: 1596891 - DNA, 15 bp, Homo sapiens
cctactgtgatcaca

SEQ ID NO: 1596892 - DNA, 15 bp, Homo sapiens
ctactgtgatcacac

SEQ ID NO: 1596893 - DNA, 15 bp, Homo sapiens
tactgtgatcacacc

SEQ ID NO: 1596894 - DNA, 15 bp, Homo sapiens
actgtgatcacacca

SEQ ID NO: 1596895 - DNA, 15 bp, Homo sapiens
ctgtgatcacaccac

SEQ ID NO: 1596896 - DNA, 15 bp, Homo sapiens
tgtgatcacaccact

SEQ ID NO: 1596897 - DNA, 15 bp, Homo sapiens
gtgatcacaccactg

SEQ ID NO: 1596898 - DNA, 15 bp, Homo sapiens
gagaccctgtctcag

SEQ ID NO: 1596899 - DNA, 15 bp, Homo sapiens
agaccctgtctcaga

SEQ ID NO: 1596900 - DNA, 15 bp, Homo sapiens
gaccctgtctcagaa

SEQ ID NO: 1596901 - DNA, 15 bp, Homo sapiens
accctgtctcagaaa

SEQ ID NO: 1596902 - DNA, 15 bp, Homo sapiens
ccctgtctcagaaaa

SEQ ID NO: 1596903 - DNA, 15 bp, Homo sapiens
cctgtctcagaaaaa

SEQ ID NO: 1596904 - DNA, 15 bp, Homo sapiens
gtctcagaaaaaaaa

SEQ ID NO: 1596905 - DNA, 15 bp, Homo sapiens
tctcagaaaaaaaaa

SEQ ID NO: 1596906 - DNA, 15 bp, Homo sapiens
ctcagaaaaaaaaaa

SEQ ID NO: 1596907 - DNA, 15 bp, Homo sapiens
tcagaaaaaaaaaaa

SEQ ID NO: 1596908 - DNA, 15 bp, Homo sapiens
aaaaaaaaaagaatg

SEQ ID NO: 1596909 - DNA, 15 bp, Homo sapiens
aaaaaaaaagaatgc

SEQ ID NO: 1596910 - DNA, 15 bp, Homo sapiens
aaaaaaaagaatgca

SEQ ID NO: 1596911 - DNA, 15 bp, Homo sapiens
aaaaaaagaatgcat

SEQ ID NO: 1596912 - DNA, 15 bp, Homo sapiens
aaaaaagaatgcatg

SEQ ID NO: 1596913 - DNA, 15 bp, Homo sapiens
aaaaagaatgcatgg

SEQ ID NO: 1596914 - DNA, 15 bp, Homo sapiens
aaaagaatgcatggc

SEQ ID NO: 1596915 - DNA, 15 bp, Homo sapiens
aaagaatgcatggcc

SEQ ID NO: 1596916 - DNA, 15 bp, Homo sapiens
aagaatgcatggcct

SEQ ID NO: 1596917 - DNA, 15 bp, Homo sapiens
agaatgcatggccta

SEQ ID NO: 1596918 - DNA, 15 bp, Homo sapiens
gaatgcatggcctag

SEQ ID NO: 1596919 - DNA, 15 bp, Homo sapiens
aatgcatggcctaga

SEQ ID NO: 1596920 - DNA, 15 bp, Homo sapiens
atgcatggcctagat

SEQ ID NO: 1596921 - DNA, 15 bp, Homo sapiens
tgcatggcctagatg

SEQ ID NO: 1596922 - DNA, 15 bp, Homo sapiens
gcatggcctagatga

SEQ ID NO: 1596923 - DNA, 15 bp, Homo sapiens
catggcctagatgac

SEQ ID NO: 1596924 - DNA, 15 bp, Homo sapiens
atggcctagatgact

SEQ ID NO: 1596925 - DNA, 15 bp, Homo sapiens
tggcctagatgactt

SEQ ID NO: 1596926 - DNA, 15 bp, Homo sapiens
ggcctagatgacttc

SEQ ID NO: 1596927 - DNA, 15 bp, Homo sapiens
gcctagatgacttct

SEQ ID NO: 1596928 - DNA, 15 bp, Homo sapiens
cctagatgacttcta

SEQ ID NO: 1596929 - DNA, 15 bp, Homo sapiens
ctagatgacttctaa

SEQ ID NO: 1596930 - DNA, 15 bp, Homo sapiens
tagatgacttctaag

SEQ ID NO: 1596931 - DNA, 15 bp, Homo sapiens
agatgacttctaagg

SEQ ID NO: 1596932 - DNA, 15 bp, Homo sapiens
gatgacttctaaggt

SEQ ID NO: 1596933 - DNA, 15 bp, Homo sapiens
atgacttctaaggtt

SEQ ID NO: 1596934 - DNA, 15 bp, Homo sapiens
tgacttctaaggttt

SEQ ID NO: 1596935 - DNA, 15 bp, Homo sapiens
gacttctaaggtttt

SEQ ID NO: 1596936 - DNA, 15 bp, Homo sapiens
acttctaaggttttt

SEQ ID NO: 1596937 - DNA, 15 bp, Homo sapiens
cttctaaggtttttc

SEQ ID NO: 1596938 - DNA, 15 bp, Homo sapiens
ttctaaggtttttcc

SEQ ID NO: 1596939 - DNA, 15 bp, Homo sapiens
tctaaggtttttccc

SEQ ID NO: 1596940 - DNA, 15 bp, Homo sapiens
ctaaggtttttccca

SEQ ID NO: 1596941 - DNA, 15 bp, Homo sapiens
taaggtttttcccac

SEQ ID NO: 1596942 - DNA, 15 bp, Homo sapiens
aaggtttttcccacc

SEQ ID NO: 1596943 - DNA, 15 bp, Homo sapiens
aggtttttcccaccc

SEQ ID NO: 1596944 - DNA, 15 bp, Homo sapiens
ggtttttcccaccca

SEQ ID NO: 1596945 - DNA, 15 bp, Homo sapiens
gtttttcccacccag

SEQ ID NO: 1596946 - DNA, 15 bp, Homo sapiens
tttttcccacccagt

SEQ ID NO: 1596947 - DNA, 15 bp, Homo sapiens
ttttcccacccagtt

SEQ ID NO: 1596948 - DNA, 15 bp, Homo sapiens
tttcccacccagttc

SEQ ID NO: 1596949 - DNA, 15 bp, Homo sapiens
ttcccacccagttcc

SEQ ID NO: 1596950 - DNA, 15 bp, Homo sapiens
tcccacccagttcca

SEQ ID NO: 1596951 - DNA, 15 bp, Homo sapiens
cccacccagttccag

SEQ ID NO: 1596952 - DNA, 15 bp, Homo sapiens
ccacccagttccagt

SEQ ID NO: 1596953 - DNA, 15 bp, Homo sapiens
cacccagttccagtt

SEQ ID NO: 1596954 - DNA, 15 bp, Homo sapiens
acccagttccagttt

SEQ ID NO: 1596955 - DNA, 15 bp, Homo sapiens
cccagttccagtttt

SEQ ID NO: 1596956 - DNA, 15 bp, Homo sapiens
ccagttccagttttc

SEQ ID NO: 1596957 - DNA, 15 bp, Homo sapiens
cagttccagttttca

SEQ ID NO: 1596958 - DNA, 15 bp, Homo sapiens
agttccagttttcat

SEQ ID NO: 1596959 - DNA, 15 bp, Homo sapiens
gttccagttttcatg

SEQ ID NO: 1596960 - DNA, 15 bp, Homo sapiens
ttccagttttcatgt

SEQ ID NO: 1596961 - DNA, 15 bp, Homo sapiens
tccagttttcatgtt

SEQ ID NO: 1596962 - DNA, 15 bp, Homo sapiens
ccagttttcatgttc

SEQ ID NO: 1596963 - DNA, 15 bp, Homo sapiens
cagttttcatgttct

SEQ ID NO: 1596964 - DNA, 15 bp, Homo sapiens
agttttcatgttcta

SEQ ID NO: 1596965 - DNA, 15 bp, Homo sapiens
gttttcatgttctag

SEQ ID NO: 1596966 - DNA, 15 bp, Homo sapiens
ttttcatgttctagg

SEQ ID NO: 1596967 - DNA, 15 bp, Homo sapiens
tttcatgttctaggc

SEQ ID NO: 1596968 - DNA, 15 bp, Homo sapiens
ttcatgttctaggca

SEQ ID NO: 1596969 - DNA, 15 bp, Homo sapiens
tcatgttctaggcag

SEQ ID NO: 1596970 - DNA, 15 bp, Homo sapiens
catgttctaggcaga

SEQ ID NO: 1596971 - DNA, 15 bp, Homo sapiens
atgttctaggcagag

SEQ ID NO: 1596972 - DNA, 15 bp, Homo sapiens
tgttctaggcagagc

SEQ ID NO: 1596973 - DNA, 15 bp, Homo sapiens
gttctaggcagagca

SEQ ID NO: 1596974 - DNA, 15 bp, Homo sapiens
ttctaggcagagcag

SEQ ID NO: 1596975 - DNA, 15 bp, Homo sapiens
tctaggcagagcagt

SEQ ID NO: 1596976 - DNA, 15 bp, Homo sapiens
ctaggcagagcagta

SEQ ID NO: 1596977 - DNA, 15 bp, Homo sapiens
taggcagagcagtaa

SEQ ID NO: 1596978 - DNA, 15 bp, Homo sapiens
aggcagagcagtaaa

SEQ ID NO: 1596979 - DNA, 15 bp, Homo sapiens
ggcagagcagtaaag

SEQ ID NO: 1596980 - DNA, 15 bp, Homo sapiens
gcagagcagtaaagt

SEQ ID NO: 1596981 - DNA, 15 bp, Homo sapiens
cagagcagtaaagtg

SEQ ID NO: 1596982 - DNA, 15 bp, Homo sapiens
agagcagtaaagtga

SEQ ID NO: 1596983 - DNA, 15 bp, Homo sapiens
gagcagtaaagtgag

SEQ ID NO: 1596984 - DNA, 15 bp, Homo sapiens
agcagtaaagtgaga

SEQ ID NO: 1596985 - DNA, 15 bp, Homo sapiens
gcagtaaagtgagaa

SEQ ID NO: 1596986 - DNA, 15 bp, Homo sapiens
cagtaaagtgagaaa

SEQ ID NO: 1596987 - DNA, 15 bp, Homo sapiens
agtaaagtgagaaac

SEQ ID NO: 1596988 - DNA, 15 bp, Homo sapiens
gtaaagtgagaaaca

SEQ ID NO: 1596989 - DNA, 15 bp, Homo sapiens
taaagtgagaaacac

SEQ ID NO: 1596990 - DNA, 15 bp, Homo sapiens
aaagtgagaaacaca

SEQ ID NO: 1596991 - DNA, 15 bp, Homo sapiens
aagtgagaaacacat

SEQ ID NO: 1596992 - DNA, 15 bp, Homo sapiens
agtgagaaacacatg

SEQ ID NO: 1596993 - DNA, 15 bp, Homo sapiens
gtgagaaacacatgg

SEQ ID NO: 1596994 - DNA, 15 bp, Homo sapiens
tgagaaacacatgga

SEQ ID NO: 1596995 - DNA, 15 bp, Homo sapiens
gagaaacacatggac

SEQ ID NO: 1596996 - DNA, 15 bp, Homo sapiens
agaaacacatggact

SEQ ID NO: 1596997 - DNA, 15 bp, Homo sapiens
gaaacacatggactt

SEQ ID NO: 1596998 - DNA, 15 bp, Homo sapiens
aaacacatggacttg

SEQ ID NO: 1596999 - DNA, 15 bp, Homo sapiens
aacacatggacttgg

SEQ ID NO: 1597000 - DNA, 15 bp, Homo sapiens
acacatggacttggg

SEQ ID NO: 1597001 - DNA, 15 bp, Homo sapiens
cacatggacttggga

SEQ ID NO: 1597002 - DNA, 15 bp, Homo sapiens
acatggacttgggag

SEQ ID NO: 1597003 - DNA, 15 bp, Homo sapiens
catggacttgggagt

SEQ ID NO: 1597004 - DNA, 15 bp, Homo sapiens
atggacttgggagtt

SEQ ID NO: 1597005 - DNA, 15 bp, Homo sapiens
tggacttgggagttt

SEQ ID NO: 1597006 - DNA, 15 bp, Homo sapiens
ggacttgggagttta

SEQ ID NO: 1597007 - DNA, 15 bp, Homo sapiens
gacttgggagtttag

SEQ ID NO: 1597008 - DNA, 15 bp, Homo sapiens
acttgggagtttagt

SEQ ID NO: 1597009 - DNA, 15 bp, Homo sapiens
cttgggagtttagtc

SEQ ID NO: 1597010 - DNA, 15 bp, Homo sapiens
ttgggagtttagtct

SEQ ID NO: 1597011 - DNA, 15 bp, Homo sapiens
tgggagtttagtctc

SEQ ID NO: 1597012 - DNA, 15 bp, Homo sapiens
gggagtttagtctcg

SEQ ID NO: 1597013 - DNA, 15 bp, Homo sapiens
ggagtttagtctcgc

SEQ ID NO: 1597014 - DNA, 15 bp, Homo sapiens
gagtttagtctcgca

SEQ ID NO: 1597015 - DNA, 15 bp, Homo sapiens
agtttagtctcgcat

SEQ ID NO: 1597016 - DNA, 15 bp, Homo sapiens
gtttagtctcgcatt

SEQ ID NO: 1597017 - DNA, 15 bp, Homo sapiens
tttagtctcgcattt

SEQ ID NO: 1597018 - DNA, 15 bp, Homo sapiens
ttagtctcgcatttc

SEQ ID NO: 1597019 - DNA, 15 bp, Homo sapiens
tagtctcgcatttca

SEQ ID NO: 1597020 - DNA, 15 bp, Homo sapiens
agtctcgcatttcac

SEQ ID NO: 1597021 - DNA, 15 bp, Homo sapiens
gtctcgcatttcact

SEQ ID NO: 1597022 - DNA, 15 bp, Homo sapiens
tctcgcatttcactg

SEQ ID NO: 1597023 - DNA, 15 bp, Homo sapiens
ctcgcatttcactgc

SEQ ID NO: 1597024 - DNA, 15 bp, Homo sapiens
tcgcatttcactgcc

SEQ ID NO: 1597025 - DNA, 15 bp, Homo sapiens
cgcatttcactgcca

SEQ ID NO: 1597026 - DNA, 15 bp, Homo sapiens
gcatttcactgccac

SEQ ID NO: 1597027 - DNA, 15 bp, Homo sapiens
catttcactgccact

SEQ ID NO: 1597028 - DNA, 15 bp, Homo sapiens
atttcactgccactt

SEQ ID NO: 1597029 - DNA, 15 bp, Homo sapiens
tttcactgccactta

SEQ ID NO: 1597030 - DNA, 15 bp, Homo sapiens
ttcactgccacttaa

SEQ ID NO: 1597031 - DNA, 15 bp, Homo sapiens
tcactgccacttaat

SEQ ID NO: 1597032 - DNA, 15 bp, Homo sapiens
cactgccacttaatc

SEQ ID NO: 1597033 - DNA, 15 bp, Homo sapiens
actgccacttaatct

SEQ ID NO: 1597034 - DNA, 15 bp, Homo sapiens
ctgccacttaatctg

SEQ ID NO: 1597035 - DNA, 15 bp, Homo sapiens
tgccacttaatctga

SEQ ID NO: 1597036 - DNA, 15 bp, Homo sapiens
gccacttaatctgag

SEQ ID NO: 1597037 - DNA, 15 bp, Homo sapiens
ccacttaatctgagc

SEQ ID NO: 1597038 - DNA, 15 bp, Homo sapiens
cacttaatctgagcg

SEQ ID NO: 1597039 - DNA, 15 bp, Homo sapiens
acttaatctgagcga

SEQ ID NO: 1597040 - DNA, 15 bp, Homo sapiens
cttaatctgagcgac

SEQ ID NO: 1597041 - DNA, 15 bp, Homo sapiens
ttaatctgagcgact

SEQ ID NO: 1597042 - DNA, 15 bp, Homo sapiens
taatctgagcgacta

SEQ ID NO: 1597043 - DNA, 15 bp, Homo sapiens
aatctgagcgactat

SEQ ID NO: 1597044 - DNA, 15 bp, Homo sapiens
atctgagcgactatt

SEQ ID NO: 1597045 - DNA, 15 bp, Homo sapiens
tctgagcgactattc

SEQ ID NO: 1597046 - DNA, 15 bp, Homo sapiens
ctgagcgactattcc

SEQ ID NO: 1597047 - DNA, 15 bp, Homo sapiens
tgagcgactattcca

SEQ ID NO: 1597048 - DNA, 15 bp, Homo sapiens
gagcgactattccat

SEQ ID NO: 1597049 - DNA, 15 bp, Homo sapiens
agcgactattccata

SEQ ID NO: 1597050 - DNA, 15 bp, Homo sapiens
gcgactattccatat

SEQ ID NO: 1597051 - DNA, 15 bp, Homo sapiens
cgactattccatatt

SEQ ID NO: 1597052 - DNA, 15 bp, Homo sapiens
gactattccatattt

SEQ ID NO: 1597053 - DNA, 15 bp, Homo sapiens
actattccatattta

SEQ ID NO: 1597054 - DNA, 15 bp, Homo sapiens
ctattccatatttaa

SEQ ID NO: 1597055 - DNA, 15 bp, Homo sapiens
tattccatatttaat

SEQ ID NO: 1597056 - DNA, 15 bp, Homo sapiens
attccatatttaatc

SEQ ID NO: 1597057 - DNA, 15 bp, Homo sapiens
ttccatatttaatct

SEQ ID NO: 1597058 - DNA, 15 bp, Homo sapiens
tccatatttaatctc

SEQ ID NO: 1597059 - DNA, 15 bp, Homo sapiens
ccatatttaatctct

SEQ ID NO: 1597060 - DNA, 15 bp, Homo sapiens
catatttaatctctc

SEQ ID NO: 1597061 - DNA, 15 bp, Homo sapiens
atatttaatctctct

SEQ ID NO: 1597062 - DNA, 15 bp, Homo sapiens
atttaatctctctga

SEQ ID NO: 1597063 - DNA, 15 bp, Homo sapiens
tttaatctctctgaa

SEQ ID NO: 1597064 - DNA, 15 bp, Homo sapiens
ttaatctctctgaat

SEQ ID NO: 1597065 - DNA, 15 bp, Homo sapiens
taatctctctgaatg

SEQ ID NO: 1597066 - DNA, 15 bp, Homo sapiens
aatctctctgaatgt

SEQ ID NO: 1597067 - DNA, 15 bp, Homo sapiens
atctctctgaatgta

SEQ ID NO: 1597068 - DNA, 15 bp, Homo sapiens
tctctctgaatgtat

SEQ ID NO: 1597069 - DNA, 15 bp, Homo sapiens
ctctctgaatgtatt

SEQ ID NO: 1597070 - DNA, 15 bp, Homo sapiens
tctctgaatgtattt

SEQ ID NO: 1597071 - DNA, 15 bp, Homo sapiens
ctctgaatgtattta

SEQ ID NO: 1597072 - DNA, 15 bp, Homo sapiens
tctgaatgtatttac

SEQ ID NO: 1597073 - DNA, 15 bp, Homo sapiens
ctgaatgtatttact

SEQ ID NO: 1597074 - DNA, 15 bp, Homo sapiens
tgaatgtatttactc

SEQ ID NO: 1597075 - DNA, 15 bp, Homo sapiens
gaatgtatttactca

SEQ ID NO: 1597076 - DNA, 15 bp, Homo sapiens
aatgtatttactcat

SEQ ID NO: 1597077 - DNA, 15 bp, Homo sapiens
atgtatttactcatc

SEQ ID NO: 1597078 - DNA, 15 bp, Homo sapiens
tgtatttactcatct

SEQ ID NO: 1597079 - DNA, 15 bp, Homo sapiens
gtatttactcatctt

SEQ ID NO: 1597080 - DNA, 15 bp, Homo sapiens
tatttactcatcttt

SEQ ID NO: 1597081 - DNA, 15 bp, Homo sapiens
atttactcatcttta

SEQ ID NO: 1597082 - DNA, 15 bp, Homo sapiens
tttactcatctttaa

SEQ ID NO: 1597083 - DNA, 15 bp, Homo sapiens
ttactcatctttaaa

SEQ ID NO: 1597084 - DNA, 15 bp, Homo sapiens
tactcatctttaaag

SEQ ID NO: 1597085 - DNA, 15 bp, Homo sapiens
actcatctttaaagg

SEQ ID NO: 1597086 - DNA, 15 bp, Homo sapiens
ctcatctttaaaggg

SEQ ID NO: 1597087 - DNA, 15 bp, Homo sapiens
tcatctttaaagggg

SEQ ID NO: 1597088 - DNA, 15 bp, Homo sapiens
catctttaaagggga

SEQ ID NO: 1597089 - DNA, 15 bp, Homo sapiens
atctttaaaggggaa

SEQ ID NO: 1597090 - DNA, 15 bp, Homo sapiens
tctttaaaggggaat

SEQ ID NO: 1597091 - DNA, 15 bp, Homo sapiens
ctttaaaggggaatg

SEQ ID NO: 1597092 - DNA, 15 bp, Homo sapiens
tttaaaggggaatga

SEQ ID NO: 1597093 - DNA, 15 bp, Homo sapiens
ttaaaggggaatgat

SEQ ID NO: 1597094 - DNA, 15 bp, Homo sapiens
taaaggggaatgatt

SEQ ID NO: 1597095 - DNA, 15 bp, Homo sapiens
aaaggggaatgatta

SEQ ID NO: 1597096 - DNA, 15 bp, Homo sapiens
aaggggaatgattat

SEQ ID NO: 1597097 - DNA, 15 bp, Homo sapiens
aggggaatgattatt

SEQ ID NO: 1597098 - DNA, 15 bp, Homo sapiens
ggggaatgattatta

SEQ ID NO: 1597099 - DNA, 15 bp, Homo sapiens
gggaatgattattaa

SEQ ID NO: 1597100 - DNA, 15 bp, Homo sapiens
ggaatgattattaac

SEQ ID NO: 1597101 - DNA, 15 bp, Homo sapiens
gaatgattattaaca

SEQ ID NO: 1597102 - DNA, 15 bp, Homo sapiens
aatgattattaacat

SEQ ID NO: 1597103 - DNA, 15 bp, Homo sapiens
atgattattaacatc

SEQ ID NO: 1597104 - DNA, 15 bp, Homo sapiens
tgattattaacatct

SEQ ID NO: 1597105 - DNA, 15 bp, Homo sapiens
gattattaacatctt

SEQ ID NO: 1597106 - DNA, 15 bp, Homo sapiens
attattaacatcttt

SEQ ID NO: 1597107 - DNA, 15 bp, Homo sapiens
ttattaacatctttt

SEQ ID NO: 1597108 - DNA, 15 bp, Homo sapiens
tattaacatcttttt

SEQ ID NO: 1597109 - DNA, 15 bp, Homo sapiens
attaacatctttttc

SEQ ID NO: 1597110 - DNA, 15 bp, Homo sapiens
ttaacatctttttct

SEQ ID NO: 1597111 - DNA, 15 bp, Homo sapiens
taacatctttttctc

SEQ ID NO: 1597112 - DNA, 15 bp, Homo sapiens
aacatctttttctca

SEQ ID NO: 1597113 - DNA, 15 bp, Homo sapiens
acatctttttctcag

SEQ ID NO: 1597114 - DNA, 15 bp, Homo sapiens
catctttttctcagg

SEQ ID NO: 1597115 - DNA, 15 bp, Homo sapiens
atctttttctcaggg

SEQ ID NO: 1597116 - DNA, 15 bp, Homo sapiens
tctttttctcaggga

SEQ ID NO: 1597117 - DNA, 15 bp, Homo sapiens
ctttttctcagggaa

SEQ ID NO: 1597118 - DNA, 15 bp, Homo sapiens
tttttctcagggaaa

SEQ ID NO: 1597119 - DNA, 15 bp, Homo sapiens
ttttctcagggaaac

SEQ ID NO: 1597120 - DNA, 15 bp, Homo sapiens
tttctcagggaaact

SEQ ID NO: 1597121 - DNA, 15 bp, Homo sapiens
ttctcagggaaacta

SEQ ID NO: 1597122 - DNA, 15 bp, Homo sapiens
tctcagggaaactat

SEQ ID NO: 1597123 - DNA, 15 bp, Homo sapiens
ctcagggaaactata

SEQ ID NO: 1597124 - DNA, 15 bp, Homo sapiens
tcagggaaactatat

SEQ ID NO: 1597125 - DNA, 15 bp, Homo sapiens
cagggaaactatatg

SEQ ID NO: 1597126 - DNA, 15 bp, Homo sapiens
agggaaactatatga

SEQ ID NO: 1597127 - DNA, 15 bp, Homo sapiens
gggaaactatatgag

SEQ ID NO: 1597128 - DNA, 15 bp, Homo sapiens
ggaaactatatgagt

SEQ ID NO: 1597129 - DNA, 15 bp, Homo sapiens
gaaactatatgagtc

SEQ ID NO: 1597130 - DNA, 15 bp, Homo sapiens
aaactatatgagtca

SEQ ID NO: 1597131 - DNA, 15 bp, Homo sapiens
aactatatgagtcaa

SEQ ID NO: 1597132 - DNA, 15 bp, Homo sapiens
actatatgagtcaag

SEQ ID NO: 1597133 - DNA, 15 bp, Homo sapiens
ctatatgagtcaagg

SEQ ID NO: 1597134 - DNA, 15 bp, Homo sapiens
tatatgagtcaagga

SEQ ID NO: 1597135 - DNA, 15 bp, Homo sapiens
atatgagtcaaggag

SEQ ID NO: 1597136 - DNA, 15 bp, Homo sapiens
tatgagtcaaggaga

SEQ ID NO: 1597137 - DNA, 15 bp, Homo sapiens
atgagtcaaggagat

SEQ ID NO: 1597138 - DNA, 15 bp, Homo sapiens
tgagtcaaggagata

SEQ ID NO: 1597139 - DNA, 15 bp, Homo sapiens
gagtcaaggagataa

SEQ ID NO: 1597140 - DNA, 15 bp, Homo sapiens
agtcaaggagataat

SEQ ID NO: 1597141 - DNA, 15 bp, Homo sapiens
gtcaaggagataata

SEQ ID NO: 1597142 - DNA, 15 bp, Homo sapiens
tcaaggagataatat

SEQ ID NO: 1597143 - DNA, 15 bp, Homo sapiens
caaggagataatata

SEQ ID NO: 1597144 - DNA, 15 bp, Homo sapiens
aaggagataatatat

SEQ ID NO: 1597145 - DNA, 15 bp, Homo sapiens
aggagataatatatt

SEQ ID NO: 1597146 - DNA, 15 bp, Homo sapiens
ggagataatatattt

SEQ ID NO: 1597147 - DNA, 15 bp, Homo sapiens
gagataatatatttg

SEQ ID NO: 1597148 - DNA, 15 bp, Homo sapiens
agataatatatttga

SEQ ID NO: 1597149 - DNA, 15 bp, Homo sapiens
gataatatatttgaa

SEQ ID NO: 1597150 - DNA, 15 bp, Homo sapiens
ataatatatttgaaa

SEQ ID NO: 1597151 - DNA, 15 bp, Homo sapiens
taatatatttgaaaa

SEQ ID NO: 1597152 - DNA, 15 bp, Homo sapiens
aatatatttgaaaat

SEQ ID NO: 1597153 - DNA, 15 bp, Homo sapiens
atatatttgaaaatc

SEQ ID NO: 1597154 - DNA, 15 bp, Homo sapiens
tatatttgaaaatct

SEQ ID NO: 1597155 - DNA, 15 bp, Homo sapiens
atatttgaaaatctt

SEQ ID NO: 1597156 - DNA, 15 bp, Homo sapiens
tatttgaaaatcttt

SEQ ID NO: 1597157 - DNA, 15 bp, Homo sapiens
atttgaaaatctttt

SEQ ID NO: 1597158 - DNA, 15 bp, Homo sapiens
tttgaaaatcttttt

SEQ ID NO: 1597159 - DNA, 15 bp, Homo sapiens
ttgaaaatcttttta

SEQ ID NO: 1597160 - DNA, 15 bp, Homo sapiens
tgaaaatctttttaa

SEQ ID NO: 1597161 - DNA, 15 bp, Homo sapiens
gaaaatctttttaac

SEQ ID NO: 1597162 - DNA, 15 bp, Homo sapiens
aaaatctttttaact

SEQ ID NO: 1597163 - DNA, 15 bp, Homo sapiens
aaatctttttaactg

SEQ ID NO: 1597164 - DNA, 15 bp, Homo sapiens
aatctttttaactgc

SEQ ID NO: 1597165 - DNA, 15 bp, Homo sapiens
atctttttaactgca

SEQ ID NO: 1597166 - DNA, 15 bp, Homo sapiens
tctttttaactgcaa

SEQ ID NO: 1597167 - DNA, 15 bp, Homo sapiens
ctttttaactgcaaa

SEQ ID NO: 1597168 - DNA, 15 bp, Homo sapiens
tttttaactgcaaag

SEQ ID NO: 1597169 - DNA, 15 bp, Homo sapiens
ttttaactgcaaagc

SEQ ID NO: 1597170 - DNA, 15 bp, Homo sapiens
tttaactgcaaagcg

SEQ ID NO: 1597171 - DNA, 15 bp, Homo sapiens
ttaactgcaaagcgc

SEQ ID NO: 1597172 - DNA, 15 bp, Homo sapiens
taactgcaaagcgct

SEQ ID NO: 1597173 - DNA, 15 bp, Homo sapiens
aactgcaaagcgctg

SEQ ID NO: 1597174 - DNA, 15 bp, Homo sapiens
actgcaaagcgctgt

SEQ ID NO: 1597175 - DNA, 15 bp, Homo sapiens
ctgcaaagcgctgtt

SEQ ID NO: 1597176 - DNA, 15 bp, Homo sapiens
tgcaaagcgctgttt

SEQ ID NO: 1597177 - DNA, 15 bp, Homo sapiens
gcaaagcgctgtttc

SEQ ID NO: 1597178 - DNA, 15 bp, Homo sapiens
caaagcgctgtttca

SEQ ID NO: 1597179 - DNA, 15 bp, Homo sapiens
aaagcgctgtttcac

SEQ ID NO: 1597180 - DNA, 15 bp, Homo sapiens
aagcgctgtttcact

SEQ ID NO: 1597181 - DNA, 15 bp, Homo sapiens
agcgctgtttcactg

SEQ ID NO: 1597182 - DNA, 15 bp, Homo sapiens
gcgctgtttcactgt

SEQ ID NO: 1597183 - DNA, 15 bp, Homo sapiens
cgctgtttcactgtt

SEQ ID NO: 1597184 - DNA, 15 bp, Homo sapiens
gctgtttcactgttg

SEQ ID NO: 1597185 - DNA, 15 bp, Homo sapiens
ctgtttcactgttgg

SEQ ID NO: 1597186 - DNA, 15 bp, Homo sapiens
tgtttcactgttggt

SEQ ID NO: 1597187 - DNA, 15 bp, Homo sapiens
gtttcactgttggtt

SEQ ID NO: 1597188 - DNA, 15 bp, Homo sapiens
tttcactgttggtta

SEQ ID NO: 1597189 - DNA, 15 bp, Homo sapiens
ttcactgttggttat

SEQ ID NO: 1597190 - DNA, 15 bp, Homo sapiens
tcactgttggttata

SEQ ID NO: 1597191 - DNA, 15 bp, Homo sapiens
cactgttggttataa

SEQ ID NO: 1597192 - DNA, 15 bp, Homo sapiens
actgttggttataat

SEQ ID NO: 1597193 - DNA, 15 bp, Homo sapiens
ctgttggttataatg

SEQ ID NO: 1597194 - DNA, 15 bp, Homo sapiens
tgttggttataatgt

SEQ ID NO: 1597195 - DNA, 15 bp, Homo sapiens
gttggttataatgtg

SEQ ID NO: 1597196 - DNA, 15 bp, Homo sapiens
ttggttataatgtga

SEQ ID NO: 1597197 - DNA, 15 bp, Homo sapiens
tggttataatgtgat

SEQ ID NO: 1597198 - DNA, 15 bp, Homo sapiens
ggttataatgtgatt

SEQ ID NO: 1597199 - DNA, 15 bp, Homo sapiens
gttataatgtgattg

SEQ ID NO: 1597200 - DNA, 15 bp, Homo sapiens
ttataatgtgattga

SEQ ID NO: 1597201 - DNA, 15 bp, Homo sapiens
tataatgtgattgat

SEQ ID NO: 1597202 - DNA, 15 bp, Homo sapiens
ataatgtgattgatc

SEQ ID NO: 1597203 - DNA, 15 bp, Homo sapiens
taatgtgattgatct

SEQ ID NO: 1597204 - DNA, 15 bp, Homo sapiens
aatgtgattgatctc

SEQ ID NO: 1597205 - DNA, 15 bp, Homo sapiens
atgtgattgatctca

SEQ ID NO: 1597206 - DNA, 15 bp, Homo sapiens
tgtgattgatctcat

SEQ ID NO: 1597207 - DNA, 15 bp, Homo sapiens
gtgattgatctcatt

SEQ ID NO: 1597208 - DNA, 15 bp, Homo sapiens
tgattgatctcattg

SEQ ID NO: 1597209 - DNA, 15 bp, Homo sapiens
gattgatctcattgt

SEQ ID NO: 1597210 - DNA, 15 bp, Homo sapiens
attgatctcattgta

SEQ ID NO: 1597211 - DNA, 15 bp, Homo sapiens
ttgatctcattgtag

SEQ ID NO: 1597212 - DNA, 15 bp, Homo sapiens
tgatctcattgtagt

SEQ ID NO: 1597213 - DNA, 15 bp, Homo sapiens
gatctcattgtagtg

SEQ ID NO: 1597214 - DNA, 15 bp, Homo sapiens
atctcattgtagtga

SEQ ID NO: 1597215 - DNA, 15 bp, Homo sapiens
tctcattgtagtgag

SEQ ID NO: 1597216 - DNA, 15 bp, Homo sapiens
ctcattgtagtgagc

SEQ ID NO: 1597217 - DNA, 15 bp, Homo sapiens
tcattgtagtgagca

SEQ ID NO: 1597218 - DNA, 15 bp, Homo sapiens
cattgtagtgagcag

SEQ ID NO: 1597219 - DNA, 15 bp, Homo sapiens
attgtagtgagcagc

SEQ ID NO: 1597220 - DNA, 15 bp, Homo sapiens
ttgtagtgagcagct

SEQ ID NO: 1597221 - DNA, 15 bp, Homo sapiens
tgtagtgagcagctg

SEQ ID NO: 1597222 - DNA, 15 bp, Homo sapiens
gtagtgagcagctgc

SEQ ID NO: 1597223 - DNA, 15 bp, Homo sapiens
tagtgagcagctgct

SEQ ID NO: 1597224 - DNA, 15 bp, Homo sapiens
agtgagcagctgctt

SEQ ID NO: 1597225 - DNA, 15 bp, Homo sapiens
gtgagcagctgctta

SEQ ID NO: 1597226 - DNA, 15 bp, Homo sapiens
tgagcagctgcttaa

SEQ ID NO: 1597227 - DNA, 15 bp, Homo sapiens
gagcagctgcttaat

SEQ ID NO: 1597228 - DNA, 15 bp, Homo sapiens
agcagctgcttaatt

SEQ ID NO: 1597229 - DNA, 15 bp, Homo sapiens
gcagctgcttaattg

SEQ ID NO: 1597230 - DNA, 15 bp, Homo sapiens
cagctgcttaattgc

SEQ ID NO: 1597231 - DNA, 15 bp, Homo sapiens
agctgcttaattgcg

SEQ ID NO: 1597232 - DNA, 15 bp, Homo sapiens
gctgcttaattgcgt

SEQ ID NO: 1597233 - DNA, 15 bp, Homo sapiens
ctgcttaattgcgtt

SEQ ID NO: 1597234 - DNA, 15 bp, Homo sapiens
tgcttaattgcgttt

SEQ ID NO: 1597235 - DNA, 15 bp, Homo sapiens
gcttaattgcgtttt

SEQ ID NO: 1597236 - DNA, 15 bp, Homo sapiens
cttaattgcgtttta

SEQ ID NO: 1597237 - DNA, 15 bp, Homo sapiens
ttaattgcgttttag

SEQ ID NO: 1597238 - DNA, 15 bp, Homo sapiens
taattgcgttttaga

SEQ ID NO: 1597239 - DNA, 15 bp, Homo sapiens
aattgcgttttagaa

SEQ ID NO: 1597240 - DNA, 15 bp, Homo sapiens
attgcgttttagaat

SEQ ID NO: 1597241 - DNA, 15 bp, Homo sapiens
ttgcgttttagaatg

SEQ ID NO: 1597242 - DNA, 15 bp, Homo sapiens
tgcgttttagaatgt

SEQ ID NO: 1597243 - DNA, 15 bp, Homo sapiens
gcgttttagaatgta

SEQ ID NO: 1597244 - DNA, 15 bp, Homo sapiens
cgttttagaatgtag

SEQ ID NO: 1597245 - DNA, 15 bp, Homo sapiens
gttttagaatgtagg

SEQ ID NO: 1597246 - DNA, 15 bp, Homo sapiens
ttttagaatgtaggg

SEQ ID NO: 1597247 - DNA, 15 bp, Homo sapiens
tttagaatgtaggga

SEQ ID NO: 1597248 - DNA, 15 bp, Homo sapiens
ttagaatgtagggaa

SEQ ID NO: 1597249 - DNA, 15 bp, Homo sapiens
tagaatgtagggaag

SEQ ID NO: 1597250 - DNA, 15 bp, Homo sapiens
agaatgtagggaaga

SEQ ID NO: 1597251 - DNA, 15 bp, Homo sapiens
gaatgtagggaagat

SEQ ID NO: 1597252 - DNA, 15 bp, Homo sapiens
aatgtagggaagata

SEQ ID NO: 1597253 - DNA, 15 bp, Homo sapiens
atgtagggaagatag

SEQ ID NO: 1597254 - DNA, 15 bp, Homo sapiens
tgtagggaagatagt

SEQ ID NO: 1597255 - DNA, 15 bp, Homo sapiens
gtagggaagatagta

SEQ ID NO: 1597256 - DNA, 15 bp, Homo sapiens
tagggaagatagtaa

SEQ ID NO: 1597257 - DNA, 15 bp, Homo sapiens
agggaagatagtaat

SEQ ID NO: 1597258 - DNA, 15 bp, Homo sapiens
gggaagatagtaata

SEQ ID NO: 1597259 - DNA, 15 bp, Homo sapiens
ggaagatagtaatat

SEQ ID NO: 1597260 - DNA, 15 bp, Homo sapiens
gaagatagtaatatt

SEQ ID NO: 1597261 - DNA, 15 bp, Homo sapiens
aagatagtaatattt

SEQ ID NO: 1597262 - DNA, 15 bp, Homo sapiens
agatagtaatatttt

SEQ ID NO: 1597263 - DNA, 15 bp, Homo sapiens
gatagtaatattttt

SEQ ID NO: 1597264 - DNA, 15 bp, Homo sapiens
atagtaatatttttc

SEQ ID NO: 1597265 - DNA, 15 bp, Homo sapiens
tagtaatatttttca

SEQ ID NO: 1597266 - DNA, 15 bp, Homo sapiens
agtaatatttttcac

SEQ ID NO: 1597267 - DNA, 15 bp, Homo sapiens
gtaatatttttcaca

SEQ ID NO: 1597268 - DNA, 15 bp, Homo sapiens
taatatttttcacat

SEQ ID NO: 1597269 - DNA, 15 bp, Homo sapiens
aatatttttcacatt

SEQ ID NO: 1597270 - DNA, 15 bp, Homo sapiens
atatttttcacatta

SEQ ID NO: 1597271 - DNA, 15 bp, Homo sapiens
tatttttcacattat

SEQ ID NO: 1597272 - DNA, 15 bp, Homo sapiens
atttttcacattata

SEQ ID NO: 1597273 - DNA, 15 bp, Homo sapiens
tttttcacattatat

SEQ ID NO: 1597274 - DNA, 15 bp, Homo sapiens
ttttcacattatata

SEQ ID NO: 1597275 - DNA, 15 bp, Homo sapiens
tttcacattatatat

SEQ ID NO: 1597276 - DNA, 15 bp, Homo sapiens
ttcacattatatatg

SEQ ID NO: 1597277 - DNA, 15 bp, Homo sapiens
tcacattatatatgt

SEQ ID NO: 1597278 - DNA, 15 bp, Homo sapiens
cacattatatatgta

SEQ ID NO: 1597279 - DNA, 15 bp, Homo sapiens
acattatatatgtag

SEQ ID NO: 1597280 - DNA, 15 bp, Homo sapiens
cattatatatgtagc

SEQ ID NO: 1597281 - DNA, 15 bp, Homo sapiens
attatatatgtagct

SEQ ID NO: 1597282 - DNA, 15 bp, Homo sapiens
ttatatatgtagctg

SEQ ID NO: 1597283 - DNA, 15 bp, Homo sapiens
tatatatgtagctgg

SEQ ID NO: 1597284 - DNA, 15 bp, Homo sapiens
atatatgtagctggt

SEQ ID NO: 1597285 - DNA, 15 bp, Homo sapiens
tatatgtagctggtt

SEQ ID NO: 1597286 - DNA, 15 bp, Homo sapiens
atatgtagctggttc

SEQ ID NO: 1597287 - DNA, 15 bp, Homo sapiens
tatgtagctggttct

SEQ ID NO: 1597288 - DNA, 15 bp, Homo sapiens
atgtagctggttctg

SEQ ID NO: 1597289 - DNA, 15 bp, Homo sapiens
tgtagctggttctgg

SEQ ID NO: 1597290 - DNA, 15 bp, Homo sapiens
gtagctggttctgga

SEQ ID NO: 1597291 - DNA, 15 bp, Homo sapiens
tagctggttctggaa

SEQ ID NO: 1597292 - DNA, 15 bp, Homo sapiens
agctggttctggaac

SEQ ID NO: 1597293 - DNA, 15 bp, Homo sapiens
gctggttctggaact

SEQ ID NO: 1597294 - DNA, 15 bp, Homo sapiens
ctggttctggaactg

SEQ ID NO: 1597295 - DNA, 15 bp, Homo sapiens
tggttctggaactgt

SEQ ID NO: 1597296 - DNA, 15 bp, Homo sapiens
ggttctggaactgta

SEQ ID NO: 1597297 - DNA, 15 bp, Homo sapiens
gttctggaactgtaa

SEQ ID NO: 1597298 - DNA, 15 bp, Homo sapiens
ttctggaactgtaaa

SEQ ID NO: 1597299 - DNA, 15 bp, Homo sapiens
tctggaactgtaaac

SEQ ID NO: 1597300 - DNA, 15 bp, Homo sapiens
ctggaactgtaaaca

SEQ ID NO: 1597301 - DNA, 15 bp, Homo sapiens
tggaactgtaaacat

SEQ ID NO: 1597302 - DNA, 15 bp, Homo sapiens
ggaactgtaaacata

SEQ ID NO: 1597303 - DNA, 15 bp, Homo sapiens
gaactgtaaacatac

SEQ ID NO: 1597304 - DNA, 15 bp, Homo sapiens
aactgtaaacatact

SEQ ID NO: 1597305 - DNA, 15 bp, Homo sapiens
actgtaaacatactc

SEQ ID NO: 1597306 - DNA, 15 bp, Homo sapiens
ctgtaaacatactcc

SEQ ID NO: 1597307 - DNA, 15 bp, Homo sapiens
tgtaaacatactcct

SEQ ID NO: 1597308 - DNA, 15 bp, Homo sapiens
gtaaacatactcctt

SEQ ID NO: 1597309 - DNA, 15 bp, Homo sapiens
taaacatactccttt

SEQ ID NO: 1597310 - DNA, 15 bp, Homo sapiens
aaacatactcctttt

SEQ ID NO: 1597311 - DNA, 15 bp, Homo sapiens
aacatactccttttt

SEQ ID NO: 1597312 - DNA, 15 bp, Homo sapiens
acatactcctttttt

SEQ ID NO: 1597313 - DNA, 15 bp, Homo sapiens
catactcctttttta

SEQ ID NO: 1597314 - DNA, 15 bp, Homo sapiens
atactccttttttat

SEQ ID NO: 1597315 - DNA, 15 bp, Homo sapiens
tactccttttttatg

SEQ ID NO: 1597316 - DNA, 15 bp, Homo sapiens
actccttttttatgg

SEQ ID NO: 1597317 - DNA, 15 bp, Homo sapiens
ctccttttttatgga

SEQ ID NO: 1597318 - DNA, 15 bp, Homo sapiens
tccttttttatggag

SEQ ID NO: 1597319 - DNA, 15 bp, Homo sapiens
ccttttttatggaga

SEQ ID NO: 1597320 - DNA, 15 bp, Homo sapiens
cttttttatggagat

SEQ ID NO: 1597321 - DNA, 15 bp, Homo sapiens
ttttttatggagatc

SEQ ID NO: 1597322 - DNA, 15 bp, Homo sapiens
tttttatggagatct

SEQ ID NO: 1597323 - DNA, 15 bp, Homo sapiens
ttttatggagatctg

SEQ ID NO: 1597324 - DNA, 15 bp, Homo sapiens
tttatggagatctga

SEQ ID NO: 1597325 - DNA, 15 bp, Homo sapiens
ttatggagatctgag

SEQ ID NO: 1597326 - DNA, 15 bp, Homo sapiens
tatggagatctgagt

SEQ ID NO: 1597327 - DNA, 15 bp, Homo sapiens
atggagatctgagtc

SEQ ID NO: 1597328 - DNA, 15 bp, Homo sapiens
tggagatctgagtca

SEQ ID NO: 1597329 - DNA, 15 bp, Homo sapiens
ggagatctgagtcac

SEQ ID NO: 1597330 - DNA, 15 bp, Homo sapiens
gagatctgagtcacg

SEQ ID NO: 1597331 - DNA, 15 bp, Homo sapiens
agatctgagtcacgt

SEQ ID NO: 1597332 - DNA, 15 bp, Homo sapiens
gatctgagtcacgta

SEQ ID NO: 1597333 - DNA, 15 bp, Homo sapiens
atctgagtcacgtac

SEQ ID NO: 1597334 - DNA, 15 bp, Homo sapiens
tctgagtcacgtacc

SEQ ID NO: 1597335 - DNA, 15 bp, Homo sapiens
ctgagtcacgtacca

SEQ ID NO: 1597336 - DNA, 15 bp, Homo sapiens
tgagtcacgtaccat

SEQ ID NO: 1597337 - DNA, 15 bp, Homo sapiens
gagtcacgtaccata

SEQ ID NO: 1597338 - DNA, 15 bp, Homo sapiens
agtcacgtaccataa

SEQ ID NO: 1597339 - DNA, 15 bp, Homo sapiens
gtcacgtaccataaa

SEQ ID NO: 1597340 - DNA, 15 bp, Homo sapiens
tcacgtaccataaaa

SEQ ID NO: 1597341 - DNA, 15 bp, Homo sapiens
cacgtaccataaaat

SEQ ID NO: 1597342 - DNA, 15 bp, Homo sapiens
acgtaccataaaatt

SEQ ID NO: 1597343 - DNA, 15 bp, Homo sapiens
cgtaccataaaattc

SEQ ID NO: 1597344 - DNA, 15 bp, Homo sapiens
gtaccataaaattca

SEQ ID NO: 1597345 - DNA, 15 bp, Homo sapiens
taccataaaattcac

SEQ ID NO: 1597346 - DNA, 15 bp, Homo sapiens
accataaaattcact

SEQ ID NO: 1597347 - DNA, 15 bp, Homo sapiens
ccataaaattcactc

SEQ ID NO: 1597348 - DNA, 15 bp, Homo sapiens
cataaaattcactct

SEQ ID NO: 1597349 - DNA, 15 bp, Homo sapiens
ataaaattcactctt

SEQ ID NO: 1597350 - DNA, 15 bp, Homo sapiens
taaaattcactcttt

SEQ ID NO: 1597351 - DNA, 15 bp, Homo sapiens
aaaattcactctttt

SEQ ID NO: 1597352 - DNA, 15 bp, Homo sapiens
aaattcactctttta

SEQ ID NO: 1597353 - DNA, 15 bp, Homo sapiens
aattcactcttttaa

SEQ ID NO: 1597354 - DNA, 15 bp, Homo sapiens
attcactcttttaaa

SEQ ID NO: 1597355 - DNA, 15 bp, Homo sapiens
ttcactcttttaaag

SEQ ID NO: 1597356 - DNA, 15 bp, Homo sapiens
tcactcttttaaagt

SEQ ID NO: 1597357 - DNA, 15 bp, Homo sapiens
cactcttttaaagtt

SEQ ID NO: 1597358 - DNA, 15 bp, Homo sapiens
actcttttaaagttg

SEQ ID NO: 1597359 - DNA, 15 bp, Homo sapiens
ctcttttaaagttgt

SEQ ID NO: 1597360 - DNA, 15 bp, Homo sapiens
tcttttaaagttgta

SEQ ID NO: 1597361 - DNA, 15 bp, Homo sapiens
cttttaaagttgtac

SEQ ID NO: 1597362 - DNA, 15 bp, Homo sapiens
ttttaaagttgtaca

SEQ ID NO: 1597363 - DNA, 15 bp, Homo sapiens
tttaaagttgtacaa

SEQ ID NO: 1597364 - DNA, 15 bp, Homo sapiens
ttaaagttgtacaat

SEQ ID NO: 1597365 - DNA, 15 bp, Homo sapiens
taaagttgtacaatc

SEQ ID NO: 1597366 - DNA, 15 bp, Homo sapiens
aaagttgtacaatcc

SEQ ID NO: 1597367 - DNA, 15 bp, Homo sapiens
aagttgtacaatcca

SEQ ID NO: 1597368 - DNA, 15 bp, Homo sapiens
agttgtacaatccag

SEQ ID NO: 1597369 - DNA, 15 bp, Homo sapiens
gttgtacaatccagt

SEQ ID NO: 1597370 - DNA, 15 bp, Homo sapiens
ttgtacaatccagtg

SEQ ID NO: 1597371 - DNA, 15 bp, Homo sapiens
tgtacaatccagtgg

SEQ ID NO: 1597372 - DNA, 15 bp, Homo sapiens
gtacaatccagtggt

SEQ ID NO: 1597373 - DNA, 15 bp, Homo sapiens
tacaatccagtggtt

SEQ ID NO: 1597374 - DNA, 15 bp, Homo sapiens
acaatccagtggttt

SEQ ID NO: 1597375 - DNA, 15 bp, Homo sapiens
caatccagtggtttt

SEQ ID NO: 1597376 - DNA, 15 bp, Homo sapiens
aatccagtggttttt

SEQ ID NO: 1597377 - DNA, 15 bp, Homo sapiens
atccagtggtttttg

SEQ ID NO: 1597378 - DNA, 15 bp, Homo sapiens
tccagtggtttttga

SEQ ID NO: 1597379 - DNA, 15 bp, Homo sapiens
ccagtggtttttgat

SEQ ID NO: 1597380 - DNA, 15 bp, Homo sapiens
cagtggtttttgata

SEQ ID NO: 1597381 - DNA, 15 bp, Homo sapiens
agtggtttttgatat

SEQ ID NO: 1597382 - DNA, 15 bp, Homo sapiens
gtggtttttgatata

SEQ ID NO: 1597383 - DNA, 15 bp, Homo sapiens
tggtttttgatatat

SEQ ID NO: 1597384 - DNA, 15 bp, Homo sapiens
tgtccttcaggttcc

SEQ ID NO: 1597385 - DNA, 15 bp, Homo sapiens
gtccttcaggttcca

SEQ ID NO: 1597386 - DNA, 15 bp, Homo sapiens
tccttcaggttccag

SEQ ID NO: 1597387 - DNA, 15 bp, Homo sapiens
ccttcaggttccagg

SEQ ID NO: 1597388 - DNA, 15 bp, Homo sapiens
cttcaggttccaggt

SEQ ID NO: 1597389 - DNA, 15 bp, Homo sapiens
ttcaggttccaggtg

SEQ ID NO: 1597390 - DNA, 15 bp, Homo sapiens
tcaggttccaggtga

SEQ ID NO: 1597391 - DNA, 15 bp, Homo sapiens
caggttccaggtgat

SEQ ID NO: 1597392 - DNA, 15 bp, Homo sapiens
aggttccaggtgatc

SEQ ID NO: 1597393 - DNA, 15 bp, Homo sapiens
ggttccaggtgatca

SEQ ID NO: 1597394 - DNA, 15 bp, Homo sapiens
gttccaggtgatcaa

SEQ ID NO: 1597395 - DNA, 15 bp, Homo sapiens
ttccaggtgatcaac

SEQ ID NO: 1597396 - DNA, 15 bp, Homo sapiens
tccaggtgatcaacc

SEQ ID NO: 1597397 - DNA, 15 bp, Homo sapiens
ccaggtgatcaacca

SEQ ID NO: 1597398 - DNA, 15 bp, Homo sapiens
caggtgatcaaccaa

SEQ ID NO: 1597399 - DNA, 15 bp, Homo sapiens
aggtgatcaaccaag

SEQ ID NO: 1597400 - DNA, 15 bp, Homo sapiens
ggtgatcaaccaagt

SEQ ID NO: 1597401 - DNA, 15 bp, Homo sapiens
gtgatcaaccaagtg

SEQ ID NO: 1597402 - DNA, 15 bp, Homo sapiens
tgatcaaccaagtgc

SEQ ID NO: 1597403 - DNA, 15 bp, Homo sapiens
gatcaaccaagtgcc

SEQ ID NO: 1597404 - DNA, 15 bp, Homo sapiens
atcaaccaagtgcct

SEQ ID NO: 1597405 - DNA, 15 bp, Homo sapiens
tcaaccaagtgcctt

SEQ ID NO: 1597406 - DNA, 15 bp, Homo sapiens
caaccaagtgccttg

SEQ ID NO: 1597407 - DNA, 15 bp, Homo sapiens
aaccaagtgccttgt

SEQ ID NO: 1597408 - DNA, 15 bp, Homo sapiens
accaagtgccttgtc

SEQ ID NO: 1597409 - DNA, 15 bp, Homo sapiens
ccaagtgccttgtct

SEQ ID NO: 1597410 - DNA, 15 bp, Homo sapiens
caagtgccttgtctg

SEQ ID NO: 1597411 - DNA, 15 bp, Homo sapiens
aagtgccttgtctgt

SEQ ID NO: 1597412 - DNA, 15 bp, Homo sapiens
agtgccttgtctgta

SEQ ID NO: 1597413 - DNA, 15 bp, Homo sapiens
gtgccttgtctgtag

SEQ ID NO: 1597414 - DNA, 15 bp, Homo sapiens
tgccttgtctgtagt

SEQ ID NO: 1597415 - DNA, 15 bp, Homo sapiens
gccttgtctgtagtg

SEQ ID NO: 1597416 - DNA, 15 bp, Homo sapiens
ccttgtctgtagtgt

SEQ ID NO: 1597417 - DNA, 15 bp, Homo sapiens
cttgtctgtagtgtc

SEQ ID NO: 1597418 - DNA, 15 bp, Homo sapiens
ttgtctgtagtgtca

SEQ ID NO: 1597419 - DNA, 15 bp, Homo sapiens
tgtctgtagtgtcaa

SEQ ID NO: 1597420 - DNA, 15 bp, Homo sapiens
gtctgtagtgtcaac

SEQ ID NO: 1597421 - DNA, 15 bp, Homo sapiens
tctgtagtgtcaact

SEQ ID NO: 1597422 - DNA, 15 bp, Homo sapiens
ctgtagtgtcaactc

SEQ ID NO: 1597423 - DNA, 15 bp, Homo sapiens
tgtagtgtcaactca

SEQ ID NO: 1597424 - DNA, 15 bp, Homo sapiens
gtagtgtcaactcat

SEQ ID NO: 1597425 - DNA, 15 bp, Homo sapiens
tagtgtcaactcatt

SEQ ID NO: 1597426 - DNA, 15 bp, Homo sapiens
agtgtcaactcattg

SEQ ID NO: 1597427 - DNA, 15 bp, Homo sapiens
gtgtcaactcattgc

SEQ ID NO: 1597428 - DNA, 15 bp, Homo sapiens
tgtcaactcattgct

SEQ ID NO: 1597429 - DNA, 15 bp, Homo sapiens
gtcaactcattgctg

SEQ ID NO: 1597430 - DNA, 15 bp, Homo sapiens
tcaactcattgctgc

SEQ ID NO: 1597431 - DNA, 15 bp, Homo sapiens
caactcattgctgcc

SEQ ID NO: 1597432 - DNA, 15 bp, Homo sapiens
aactcattgctgccc

SEQ ID NO: 1597433 - DNA, 15 bp, Homo sapiens
actcattgctgcccc

SEQ ID NO: 1597434 - DNA, 15 bp, Homo sapiens
ctcattgctgcccct

SEQ ID NO: 1597435 - DNA, 15 bp, Homo sapiens
tcattgctgcccctt

SEQ ID NO: 1597436 - DNA, 15 bp, Homo sapiens
cattgctgccccttc

SEQ ID NO: 1597437 - DNA, 15 bp, Homo sapiens
attgctgccccttcc

SEQ ID NO: 1597438 - DNA, 15 bp, Homo sapiens
ttgctgccccttcct

SEQ ID NO: 1597439 - DNA, 15 bp, Homo sapiens
tgctgccccttccta

SEQ ID NO: 1597440 - DNA, 15 bp, Homo sapiens
gctgccccttcctag

SEQ ID NO: 1597441 - DNA, 15 bp, Homo sapiens
ctgccccttcctagt

SEQ ID NO: 1597442 - DNA, 15 bp, Homo sapiens
tgccccttcctagta

SEQ ID NO: 1597443 - DNA, 15 bp, Homo sapiens
gccccttcctagtaa

SEQ ID NO: 1597444 - DNA, 15 bp, Homo sapiens
ccccttcctagtaat

SEQ ID NO: 1597445 - DNA, 15 bp, Homo sapiens
cccttcctagtaatc

SEQ ID NO: 1597446 - DNA, 15 bp, Homo sapiens
ccttcctagtaatcc

SEQ ID NO: 1597447 - DNA, 15 bp, Homo sapiens
cttcctagtaatccc

SEQ ID NO: 1597448 - DNA, 15 bp, Homo sapiens
ttcctagtaatcccc

SEQ ID NO: 1597449 - DNA, 15 bp, Homo sapiens
tcctagtaatcccca

SEQ ID NO: 1597450 - DNA, 15 bp, Homo sapiens
cctagtaatccccat

SEQ ID NO: 1597451 - DNA, 15 bp, Homo sapiens
ctagtaatccccata

SEQ ID NO: 1597452 - DNA, 15 bp, Homo sapiens
tagtaatccccataa

SEQ ID NO: 1597453 - DNA, 15 bp, Homo sapiens
agtaatccccataat

SEQ ID NO: 1597454 - DNA, 15 bp, Homo sapiens
gtaatccccataatt

SEQ ID NO: 1597455 - DNA, 15 bp, Homo sapiens
taatccccataattt

SEQ ID NO: 1597456 - DNA, 15 bp, Homo sapiens
aatccccataattta

SEQ ID NO: 1597457 - DNA, 15 bp, Homo sapiens
atccccataatttag

SEQ ID NO: 1597458 - DNA, 15 bp, Homo sapiens
tccccataatttagc

SEQ ID NO: 1597459 - DNA, 15 bp, Homo sapiens
ccccataatttagct

SEQ ID NO: 1597460 - DNA, 15 bp, Homo sapiens
cccataatttagctc

SEQ ID NO: 1597461 - DNA, 15 bp, Homo sapiens
ccataatttagctct

SEQ ID NO: 1597462 - DNA, 15 bp, Homo sapiens
cataatttagctctc

SEQ ID NO: 1597463 - DNA, 15 bp, Homo sapiens
ataatttagctctcc

SEQ ID NO: 1597464 - DNA, 15 bp, Homo sapiens
taatttagctctcca

SEQ ID NO: 1597465 - DNA, 15 bp, Homo sapiens
aatttagctctccat

SEQ ID NO: 1597466 - DNA, 15 bp, Homo sapiens
atttagctctccatt

SEQ ID NO: 1597467 - DNA, 15 bp, Homo sapiens
tttagctctccattt

SEQ ID NO: 1597468 - DNA, 15 bp, Homo sapiens
ttagctctccatttc

SEQ ID NO: 1597469 - DNA, 15 bp, Homo sapiens
tagctctccatttca

SEQ ID NO: 1597470 - DNA, 15 bp, Homo sapiens
agctctccatttcat

SEQ ID NO: 1597471 - DNA, 15 bp, Homo sapiens
gctctccatttcata

SEQ ID NO: 1597472 - DNA, 15 bp, Homo sapiens
ctctccatttcatag

SEQ ID NO: 1597473 - DNA, 15 bp, Homo sapiens
tctccatttcatagt

SEQ ID NO: 1597474 - DNA, 15 bp, Homo sapiens
ctccatttcatagtc

SEQ ID NO: 1597475 - DNA, 15 bp, Homo sapiens
tccatttcatagtct

SEQ ID NO: 1597476 - DNA, 15 bp, Homo sapiens
ccatttcatagtctt

SEQ ID NO: 1597477 - DNA, 15 bp, Homo sapiens
catttcatagtcttt

SEQ ID NO: 1597478 - DNA, 15 bp, Homo sapiens
atttcatagtctttc

SEQ ID NO: 1597479 - DNA, 15 bp, Homo sapiens
tttcatagtctttcc

SEQ ID NO: 1597480 - DNA, 15 bp, Homo sapiens
ttcatagtctttcct

SEQ ID NO: 1597481 - DNA, 15 bp, Homo sapiens
tcatagtctttcctt

SEQ ID NO: 1597482 - DNA, 15 bp, Homo sapiens
catagtctttccttg

SEQ ID NO: 1597483 - DNA, 15 bp, Homo sapiens
atagtctttccttgg

SEQ ID NO: 1597484 - DNA, 15 bp, Homo sapiens
tagtctttccttggg

SEQ ID NO: 1597485 - DNA, 15 bp, Homo sapiens
agtctttccttgggt

SEQ ID NO: 1597486 - DNA, 15 bp, Homo sapiens
gtctttccttgggtg

SEQ ID NO: 1597487 - DNA, 15 bp, Homo sapiens
tctttccttgggtgt

SEQ ID NO: 1597488 - DNA, 15 bp, Homo sapiens
ctttccttgggtgtg

SEQ ID NO: 1597489 - DNA, 15 bp, Homo sapiens
tttccttgggtgtgt

SEQ ID NO: 1597490 - DNA, 15 bp, Homo sapiens
ttccttgggtgtgtt

SEQ ID NO: 1597491 - DNA, 15 bp, Homo sapiens
tccttgggtgtgtta

SEQ ID NO: 1597492 - DNA, 15 bp, Homo sapiens
ccttgggtgtgttaa

SEQ ID NO: 1597493 - DNA, 15 bp, Homo sapiens
cttgggtgtgttaaa

SEQ ID NO: 1597494 - DNA, 15 bp, Homo sapiens
ttgggtgtgttaaaa

SEQ ID NO: 1597495 - DNA, 15 bp, Homo sapiens
tgggtgtgttaaaag

SEQ ID NO: 1597496 - DNA, 15 bp, Homo sapiens
gggtgtgttaaaagt

SEQ ID NO: 1597497 - DNA, 15 bp, Homo sapiens
ggtgtgttaaaagtg

SEQ ID NO: 1597498 - DNA, 15 bp, Homo sapiens
gtgtgttaaaagtga

SEQ ID NO: 1597499 - DNA, 15 bp, Homo sapiens
tgtgttaaaagtgac

SEQ ID NO: 1597500 - DNA, 15 bp, Homo sapiens
gtgttaaaagtgacc

SEQ ID NO: 1597501 - DNA, 15 bp, Homo sapiens
tgttaaaagtgacca

SEQ ID NO: 1597502 - DNA, 15 bp, Homo sapiens
gttaaaagtgaccat

SEQ ID NO: 1597503 - DNA, 15 bp, Homo sapiens
ttaaaagtgaccatg

SEQ ID NO: 1597504 - DNA, 15 bp, Homo sapiens
taaaagtgaccatgg

SEQ ID NO: 1597505 - DNA, 15 bp, Homo sapiens
aaaagtgaccatggt

SEQ ID NO: 1597506 - DNA, 15 bp, Homo sapiens
aaagtgaccatggta

SEQ ID NO: 1597507 - DNA, 15 bp, Homo sapiens
aagtgaccatggtac

SEQ ID NO: 1597508 - DNA, 15 bp, Homo sapiens
agtgaccatggtaca

SEQ ID NO: 1597509 - DNA, 15 bp, Homo sapiens
gtgaccatggtacac

SEQ ID NO: 1597510 - DNA, 15 bp, Homo sapiens
tgaccatggtacact

SEQ ID NO: 1597511 - DNA, 15 bp, Homo sapiens
gaccatggtacactc

SEQ ID NO: 1597512 - DNA, 15 bp, Homo sapiens
accatggtacactca

SEQ ID NO: 1597513 - DNA, 15 bp, Homo sapiens
ccatggtacactcag

SEQ ID NO: 1597514 - DNA, 15 bp, Homo sapiens
catggtacactcagc

SEQ ID NO: 1597515 - DNA, 15 bp, Homo sapiens
atggtacactcagca

SEQ ID NO: 1597516 - DNA, 15 bp, Homo sapiens
tggtacactcagcac

SEQ ID NO: 1597517 - DNA, 15 bp, Homo sapiens
ggtacactcagcacg

SEQ ID NO: 1597518 - DNA, 15 bp, Homo sapiens
gtacactcagcacgg

SEQ ID NO: 1597519 - DNA, 15 bp, Homo sapiens
tacactcagcacgga

SEQ ID NO: 1597520 - DNA, 15 bp, Homo sapiens
acactcagcacggat

SEQ ID NO: 1597521 - DNA, 15 bp, Homo sapiens
cactcagcacggatg

SEQ ID NO: 1597522 - DNA, 15 bp, Homo sapiens
actcagcacggatga

SEQ ID NO: 1597523 - DNA, 15 bp, Homo sapiens
ctcagcacggatgaa

SEQ ID NO: 1597524 - DNA, 15 bp, Homo sapiens
tcagcacggatgaaa

SEQ ID NO: 1597525 - DNA, 15 bp, Homo sapiens
cagcacggatgaaat

SEQ ID NO: 1597526 - DNA, 15 bp, Homo sapiens
agcacggatgaaatg

SEQ ID NO: 1597527 - DNA, 15 bp, Homo sapiens
gcacggatgaaatga

SEQ ID NO: 1597528 - DNA, 15 bp, Homo sapiens
cacggatgaaatgaa

SEQ ID NO: 1597529 - DNA, 15 bp, Homo sapiens
acggatgaaatgaaa

SEQ ID NO: 1597530 - DNA, 15 bp, Homo sapiens
cggatgaaatgaaac

SEQ ID NO: 1597531 - DNA, 15 bp, Homo sapiens
ggatgaaatgaaaca

SEQ ID NO: 1597532 - DNA, 15 bp, Homo sapiens
gatgaaatgaaacag

SEQ ID NO: 1597533 - DNA, 15 bp, Homo sapiens
atgaaatgaaacagt

SEQ ID NO: 1597534 - DNA, 15 bp, Homo sapiens
tgaaatgaaacagtg

SEQ ID NO: 1597535 - DNA, 15 bp, Homo sapiens
gaaatgaaacagtgt

SEQ ID NO: 1597536 - DNA, 15 bp, Homo sapiens
aaatgaaacagtgtt

SEQ ID NO: 1597537 - DNA, 15 bp, Homo sapiens
aatgaaacagtgttt

SEQ ID NO: 1597538 - DNA, 15 bp, Homo sapiens
atgaaacagtgttta

SEQ ID NO: 1597539 - DNA, 15 bp, Homo sapiens
tgaaacagtgtttag

SEQ ID NO: 1597540 - DNA, 15 bp, Homo sapiens
gaaacagtgtttaga

SEQ ID NO: 1597541 - DNA, 15 bp, Homo sapiens
aaacagtgtttagaa

SEQ ID NO: 1597542 - DNA, 15 bp, Homo sapiens
aacagtgtttagaaa

SEQ ID NO: 1597543 - DNA, 15 bp, Homo sapiens
acagtgtttagaaac

SEQ ID NO: 1597544 - DNA, 15 bp, Homo sapiens
cagtgtttagaaacg

SEQ ID NO: 1597545 - DNA, 15 bp, Homo sapiens
agtgtttagaaacgt

SEQ ID NO: 1597546 - DNA, 15 bp, Homo sapiens
gtgtttagaaacgtc

SEQ ID NO: 1597547 - DNA, 15 bp, Homo sapiens
tgtttagaaacgtca

SEQ ID NO: 1597548 - DNA, 15 bp, Homo sapiens
gtttagaaacgtcag

SEQ ID NO: 1597549 - DNA, 15 bp, Homo sapiens
tttagaaacgtcagt

SEQ ID NO: 1597550 - DNA, 15 bp, Homo sapiens
ttagaaacgtcagtc

SEQ ID NO: 1597551 - DNA, 15 bp, Homo sapiens
tagaaacgtcagtct

SEQ ID NO: 1597552 - DNA, 15 bp, Homo sapiens
agaaacgtcagtctt

SEQ ID NO: 1597553 - DNA, 15 bp, Homo sapiens
gaaacgtcagtcttc

SEQ ID NO: 1597554 - DNA, 15 bp, Homo sapiens
aaacgtcagtcttct

SEQ ID NO: 1597555 - DNA, 15 bp, Homo sapiens
aacgtcagtcttctc

SEQ ID NO: 1597556 - DNA, 15 bp, Homo sapiens
acgtcagtcttctct

SEQ ID NO: 1597557 - DNA, 15 bp, Homo sapiens
cgtcagtcttctctt

SEQ ID NO: 1597558 - DNA, 15 bp, Homo sapiens
gtcagtcttctcttt

SEQ ID NO: 1597559 - DNA, 15 bp, Homo sapiens
tcagtcttctctttt

SEQ ID NO: 1597560 - DNA, 15 bp, Homo sapiens
cagtcttctcttttg

SEQ ID NO: 1597561 - DNA, 15 bp, Homo sapiens
agtcttctcttttgt

SEQ ID NO: 1597562 - DNA, 15 bp, Homo sapiens
gtcttctcttttgta

SEQ ID NO: 1597563 - DNA, 15 bp, Homo sapiens
tcttctcttttgtaa

SEQ ID NO: 1597564 - DNA, 15 bp, Homo sapiens
cttctcttttgtaat

SEQ ID NO: 1597565 - DNA, 15 bp, Homo sapiens
ttctcttttgtaatg

SEQ ID NO: 1597566 - DNA, 15 bp, Homo sapiens
tctcttttgtaatgc

SEQ ID NO: 1597567 - DNA, 15 bp, Homo sapiens
ctcttttgtaatgcc

SEQ ID NO: 1597568 - DNA, 15 bp, Homo sapiens
tcttttgtaatgccc

SEQ ID NO: 1597569 - DNA, 15 bp, Homo sapiens
cttttgtaatgccct

SEQ ID NO: 1597570 - DNA, 15 bp, Homo sapiens
ttttgtaatgccctg

SEQ ID NO: 1597571 - DNA, 15 bp, Homo sapiens
tttgtaatgccctgt

SEQ ID NO: 1597572 - DNA, 15 bp, Homo sapiens
ttgtaatgccctgta

SEQ ID NO: 1597573 - DNA, 15 bp, Homo sapiens
tgtaatgccctgtag

SEQ ID NO: 1597574 - DNA, 15 bp, Homo sapiens
gtaatgccctgtagt

SEQ ID NO: 1597575 - DNA, 15 bp, Homo sapiens
taatgccctgtagtc

SEQ ID NO: 1597576 - DNA, 15 bp, Homo sapiens
aatgccctgtagtct

SEQ ID NO: 1597577 - DNA, 15 bp, Homo sapiens
atgccctgtagtctc

SEQ ID NO: 1597578 - DNA, 15 bp, Homo sapiens
tgccctgtagtctct

SEQ ID NO: 1597579 - DNA, 15 bp, Homo sapiens
gccctgtagtctctc

SEQ ID NO: 1597580 - DNA, 15 bp, Homo sapiens
ccctgtagtctctct

SEQ ID NO: 1597581 - DNA, 15 bp, Homo sapiens
cctgtagtctctctg

SEQ ID NO: 1597582 - DNA, 15 bp, Homo sapiens
ctgtagtctctctgt

SEQ ID NO: 1597583 - DNA, 15 bp, Homo sapiens
tgtagtctctctgta

SEQ ID NO: 1597584 - DNA, 15 bp, Homo sapiens
gtagtctctctgtat

SEQ ID NO: 1597585 - DNA, 15 bp, Homo sapiens
tagtctctctgtatg

SEQ ID NO: 1597586 - DNA, 15 bp, Homo sapiens
agtctctctgtatgt

SEQ ID NO: 1597587 - DNA, 15 bp, Homo sapiens
gtctctctgtatgtt

SEQ ID NO: 1597588 - DNA, 15 bp, Homo sapiens
tctctctgtatgtta

SEQ ID NO: 1597589 - DNA, 15 bp, Homo sapiens
ctctctgtatgttat

SEQ ID NO: 1597590 - DNA, 15 bp, Homo sapiens
tctctgtatgttata

SEQ ID NO: 1597591 - DNA, 15 bp, Homo sapiens
ctctgtatgttatat

SEQ ID NO: 1597592 - DNA, 15 bp, Homo sapiens
tctgtatgttatatg

SEQ ID NO: 1597593 - DNA, 15 bp, Homo sapiens
ctgtatgttatatgt

SEQ ID NO: 1597594 - DNA, 15 bp, Homo sapiens
tgtatgttatatgtc

SEQ ID NO: 1597595 - DNA, 15 bp, Homo sapiens
gtatgttatatgtca

SEQ ID NO: 1597596 - DNA, 15 bp, Homo sapiens
tatgttatatgtcac

SEQ ID NO: 1597597 - DNA, 15 bp, Homo sapiens
atgttatatgtcaca

SEQ ID NO: 1597598 - DNA, 15 bp, Homo sapiens
tgttatatgtcacat

SEQ ID NO: 1597599 - DNA, 15 bp, Homo sapiens
gttatatgtcacatt

SEQ ID NO: 1597600 - DNA, 15 bp, Homo sapiens
ttatatgtcacattt

SEQ ID NO: 1597601 - DNA, 15 bp, Homo sapiens
tatatgtcacatttt

SEQ ID NO: 1597602 - DNA, 15 bp, Homo sapiens
atatgtcacattttg

SEQ ID NO: 1597603 - DNA, 15 bp, Homo sapiens
tatgtcacattttgt

SEQ ID NO: 1597604 - DNA, 15 bp, Homo sapiens
atgtcacattttgta

SEQ ID NO: 1597605 - DNA, 15 bp, Homo sapiens
tgtcacattttgtaa

SEQ ID NO: 1597606 - DNA, 15 bp, Homo sapiens
gtcacattttgtaat

SEQ ID NO: 1597607 - DNA, 15 bp, Homo sapiens
tcacattttgtaatt

SEQ ID NO: 1597608 - DNA, 15 bp, Homo sapiens
cacattttgtaatta

SEQ ID NO: 1597609 - DNA, 15 bp, Homo sapiens
acattttgtaattaa

SEQ ID NO: 1597610 - DNA, 15 bp, Homo sapiens
cattttgtaattaac

SEQ ID NO: 1597611 - DNA, 15 bp, Homo sapiens
attttgtaattaaca

SEQ ID NO: 1597612 - DNA, 15 bp, Homo sapiens
ttttgtaattaacag

SEQ ID NO: 1597613 - DNA, 15 bp, Homo sapiens
tttgtaattaacagc

SEQ ID NO: 1597614 - DNA, 15 bp, Homo sapiens
ttgtaattaacagct

SEQ ID NO: 1597615 - DNA, 15 bp, Homo sapiens
tgtaattaacagctt

SEQ ID NO: 1597616 - DNA, 15 bp, Homo sapiens
gtaattaacagcttg

SEQ ID NO: 1597617 - DNA, 15 bp, Homo sapiens
taattaacagcttgc

SEQ ID NO: 1597618 - DNA, 15 bp, Homo sapiens
aattaacagcttgct

SEQ ID NO: 1597619 - DNA, 15 bp, Homo sapiens
attaacagcttgctg

SEQ ID NO: 1597620 - DNA, 15 bp, Homo sapiens
ttaacagcttgctgg

SEQ ID NO: 1597621 - DNA, 15 bp, Homo sapiens
taacagcttgctggt

SEQ ID NO: 1597622 - DNA, 15 bp, Homo sapiens
aacagcttgctggtg

SEQ ID NO: 1597623 - DNA, 15 bp, Homo sapiens
acagcttgctggtga

SEQ ID NO: 1597624 - DNA, 15 bp, Homo sapiens
cagcttgctggtgaa

SEQ ID NO: 1597625 - DNA, 15 bp, Homo sapiens
agcttgctggtgaaa

SEQ ID NO: 1597626 - DNA, 15 bp, Homo sapiens
gcttgctggtgaaaa

SEQ ID NO: 1597627 - DNA, 15 bp, Homo sapiens
cttgctggtgaaaag

SEQ ID NO: 1597628 - DNA, 15 bp, Homo sapiens
ttgctggtgaaaagg

SEQ ID NO: 1597629 - DNA, 15 bp, Homo sapiens
tgctggtgaaaagga

SEQ ID NO: 1597630 - DNA, 15 bp, Homo sapiens
gctggtgaaaaggac

SEQ ID NO: 1597631 - DNA, 15 bp, Homo sapiens
ctggtgaaaaggacc

SEQ ID NO: 1597632 - DNA, 15 bp, Homo sapiens
tggtgaaaaggaccc

SEQ ID NO: 1597633 - DNA, 15 bp, Homo sapiens
ggtgaaaaggacccc

SEQ ID NO: 1597634 - DNA, 15 bp, Homo sapiens
gtgaaaaggacccca

SEQ ID NO: 1597635 - DNA, 15 bp, Homo sapiens
tgaaaaggaccccac

SEQ ID NO: 1597636 - DNA, 15 bp, Homo sapiens
gaaaaggaccccacg

SEQ ID NO: 1597637 - DNA, 15 bp, Homo sapiens
aaaaggaccccacga

SEQ ID NO: 1597638 - DNA, 15 bp, Homo sapiens
aaaggaccccacgaa

SEQ ID NO: 1597639 - DNA, 15 bp, Homo sapiens
aaggaccccacgaag

SEQ ID NO: 1597640 - DNA, 15 bp, Homo sapiens
aggaccccacgaagt

SEQ ID NO: 1597641 - DNA, 15 bp, Homo sapiens
ggaccccacgaagtg

SEQ ID NO: 1597642 - DNA, 15 bp, Homo sapiens
gaccccacgaagtgt

SEQ ID NO: 1597643 - DNA, 15 bp, Homo sapiens
accccacgaagtgtt

SEQ ID NO: 1597644 - DNA, 15 bp, Homo sapiens
ccccacgaagtgttg

SEQ ID NO: 1597645 - DNA, 15 bp, Homo sapiens
cccacgaagtgttgg

SEQ ID NO: 1597646 - DNA, 15 bp, Homo sapiens
ccacgaagtgttgga

SEQ ID NO: 1597647 - DNA, 15 bp, Homo sapiens
cacgaagtgttggat

SEQ ID NO: 1597648 - DNA, 15 bp, Homo sapiens
acgaagtgttggata

SEQ ID NO: 1597649 - DNA, 15 bp, Homo sapiens
cgaagtgttggatat

SEQ ID NO: 1597650 - DNA, 15 bp, Homo sapiens
gaagtgttggatata

SEQ ID NO: 1597651 - DNA, 15 bp, Homo sapiens
aagtgttggatataa

SEQ ID NO: 1597652 - DNA, 15 bp, Homo sapiens
agtgttggatataag

SEQ ID NO: 1597653 - DNA, 15 bp, Homo sapiens
gtgttggatataagc

SEQ ID NO: 1597654 - DNA, 15 bp, Homo sapiens
tgttggatataagcc

SEQ ID NO: 1597655 - DNA, 15 bp, Homo sapiens
gttggatataagcca

SEQ ID NO: 1597656 - DNA, 15 bp, Homo sapiens
ttggatataagccag

SEQ ID NO: 1597657 - DNA, 15 bp, Homo sapiens
tggatataagccaga

SEQ ID NO: 1597658 - DNA, 15 bp, Homo sapiens
ggatataagccagac

SEQ ID NO: 1597659 - DNA, 15 bp, Homo sapiens
gatataagccagact

SEQ ID NO: 1597660 - DNA, 15 bp, Homo sapiens
atataagccagactg

SEQ ID NO: 1597661 - DNA, 15 bp, Homo sapiens
tataagccagactgt

SEQ ID NO: 1597662 - DNA, 15 bp, Homo sapiens
ataagccagactgta

SEQ ID NO: 1597663 - DNA, 15 bp, Homo sapiens
taagccagactgtaa

SEQ ID NO: 1597664 - DNA, 15 bp, Homo sapiens
aagccagactgtaag

SEQ ID NO: 1597665 - DNA, 15 bp, Homo sapiens
agccagactgtaagt

SEQ ID NO: 1597666 - DNA, 15 bp, Homo sapiens
gccagactgtaagtg

SEQ ID NO: 1597667 - DNA, 15 bp, Homo sapiens
ccagactgtaagtga

SEQ ID NO: 1597668 - DNA, 15 bp, Homo sapiens
cagactgtaagtgaa

SEQ ID NO: 1597669 - DNA, 15 bp, Homo sapiens
agactgtaagtgaat

SEQ ID NO: 1597670 - DNA, 15 bp, Homo sapiens
gactgtaagtgaatt

SEQ ID NO: 1597671 - DNA, 15 bp, Homo sapiens
actgtaagtgaatta

SEQ ID NO: 1597672 - DNA, 15 bp, Homo sapiens
ctgtaagtgaattac

SEQ ID NO: 1597673 - DNA, 15 bp, Homo sapiens
tgtaagtgaattact

SEQ ID NO: 1597674 - DNA, 15 bp, Homo sapiens
gtaagtgaattactt

SEQ ID NO: 1597675 - DNA, 15 bp, Homo sapiens
taagtgaattacttt

SEQ ID NO: 1597676 - DNA, 15 bp, Homo sapiens
aagtgaattactttt

SEQ ID NO: 1597677 - DNA, 15 bp, Homo sapiens
agtgaattacttttt

SEQ ID NO: 1597678 - DNA, 15 bp, Homo sapiens
gtgaattactttttt

SEQ ID NO: 1597679 - DNA, 15 bp, Homo sapiens
tgaattacttttttt

SEQ ID NO: 1597680 - DNA, 15 bp, Homo sapiens
gaattactttttttg

SEQ ID NO: 1597681 - DNA, 15 bp, Homo sapiens
aattactttttttgt

SEQ ID NO: 1597682 - DNA, 15 bp, Homo sapiens
attactttttttgtc

SEQ ID NO: 1597683 - DNA, 15 bp, Homo sapiens
ttactttttttgtca

SEQ ID NO: 1597684 - DNA, 15 bp, Homo sapiens
tactttttttgtcaa

SEQ ID NO: 1597685 - DNA, 15 bp, Homo sapiens
actttttttgtcaat

SEQ ID NO: 1597686 - DNA, 15 bp, Homo sapiens
ctttttttgtcaatc

SEQ ID NO: 1597687 - DNA, 15 bp, Homo sapiens
tttttttgtcaatca

SEQ ID NO: 1597688 - DNA, 15 bp, Homo sapiens
ttttttgtcaatcat

SEQ ID NO: 1597689 - DNA, 15 bp, Homo sapiens
tttttgtcaatcatt

SEQ ID NO: 1597690 - DNA, 15 bp, Homo sapiens
ttttgtcaatcattt

SEQ ID NO: 1597691 - DNA, 15 bp, Homo sapiens
tttgtcaatcattta

SEQ ID NO: 1597692 - DNA, 15 bp, Homo sapiens
ttgtcaatcatttaa

SEQ ID NO: 1597693 - DNA, 15 bp, Homo sapiens
tgtcaatcatttaac

SEQ ID NO: 1597694 - DNA, 15 bp, Homo sapiens
gtcaatcatttaacc

SEQ ID NO: 1597695 - DNA, 15 bp, Homo sapiens
tcaatcatttaacca

SEQ ID NO: 1597696 - DNA, 15 bp, Homo sapiens
caatcatttaaccat

SEQ ID NO: 1597697 - DNA, 15 bp, Homo sapiens
aatcatttaaccatc

SEQ ID NO: 1597698 - DNA, 15 bp, Homo sapiens
atcatttaaccatct

SEQ ID NO: 1597699 - DNA, 15 bp, Homo sapiens
tcatttaaccatctt

SEQ ID NO: 1597700 - DNA, 15 bp, Homo sapiens
catttaaccatcttt

SEQ ID NO: 1597701 - DNA, 15 bp, Homo sapiens
atttaaccatcttta

SEQ ID NO: 1597702 - DNA, 15 bp, Homo sapiens
tttaaccatctttaa

SEQ ID NO: 1597703 - DNA, 15 bp, Homo sapiens
ttaaccatctttaac

SEQ ID NO: 1597704 - DNA, 15 bp, Homo sapiens
taaccatctttaacc

SEQ ID NO: 1597705 - DNA, 15 bp, Homo sapiens
aaccatctttaacct

SEQ ID NO: 1597706 - DNA, 15 bp, Homo sapiens
accatctttaaccta

SEQ ID NO: 1597707 - DNA, 15 bp, Homo sapiens
ccatctttaacctaa

SEQ ID NO: 1597708 - DNA, 15 bp, Homo sapiens
catctttaacctaaa

SEQ ID NO: 1597709 - DNA, 15 bp, Homo sapiens
atctttaacctaaaa

SEQ ID NO: 1597710 - DNA, 15 bp, Homo sapiens
tctttaacctaaaag

SEQ ID NO: 1597711 - DNA, 15 bp, Homo sapiens
ctttaacctaaaaga

SEQ ID NO: 1597712 - DNA, 15 bp, Homo sapiens
tttaacctaaaagag

SEQ ID NO: 1597713 - DNA, 15 bp, Homo sapiens
ttaacctaaaagagt

SEQ ID NO: 1597714 - DNA, 15 bp, Homo sapiens
taacctaaaagagtt

SEQ ID NO: 1597715 - DNA, 15 bp, Homo sapiens
aacctaaaagagttt

SEQ ID NO: 1597716 - DNA, 15 bp, Homo sapiens
acctaaaagagtttt

SEQ ID NO: 1597717 - DNA, 15 bp, Homo sapiens
cctaaaagagtttta

SEQ ID NO: 1597718 - DNA, 15 bp, Homo sapiens
ctaaaagagttttat

SEQ ID NO: 1597719 - DNA, 15 bp, Homo sapiens
taaaagagttttatg

SEQ ID NO: 1597720 - DNA, 15 bp, Homo sapiens
aaaagagttttatgt

SEQ ID NO: 1597721 - DNA, 15 bp, Homo sapiens
aaagagttttatgtg

SEQ ID NO: 1597722 - DNA, 15 bp, Homo sapiens
aagagttttatgtga

SEQ ID NO: 1597723 - DNA, 15 bp, Homo sapiens
agagttttatgtgaa

SEQ ID NO: 1597724 - DNA, 15 bp, Homo sapiens
gagttttatgtgaaa

SEQ ID NO: 1597725 - DNA, 15 bp, Homo sapiens
agttttatgtgaaat

SEQ ID NO: 1597726 - DNA, 15 bp, Homo sapiens
gttttatgtgaaatg

SEQ ID NO: 1597727 - DNA, 15 bp, Homo sapiens
ttttatgtgaaatgg

SEQ ID NO: 1597728 - DNA, 15 bp, Homo sapiens
tttatgtgaaatggc

SEQ ID NO: 1597729 - DNA, 15 bp, Homo sapiens
ttatgtgaaatggct

SEQ ID NO: 1597730 - DNA, 15 bp, Homo sapiens
tatgtgaaatggctt

SEQ ID NO: 1597731 - DNA, 15 bp, Homo sapiens
atgtgaaatggctta

SEQ ID NO: 1597732 - DNA, 15 bp, Homo sapiens
tgtgaaatggcttat

SEQ ID NO: 1597733 - DNA, 15 bp, Homo sapiens
gtgaaatggcttata

SEQ ID NO: 1597734 - DNA, 15 bp, Homo sapiens
tgaaatggcttataa

SEQ ID NO: 1597735 - DNA, 15 bp, Homo sapiens
gaaatggcttataat

SEQ ID NO: 1597736 - DNA, 15 bp, Homo sapiens
aaatggcttataatt

SEQ ID NO: 1597737 - DNA, 15 bp, Homo sapiens
aatggcttataattg

SEQ ID NO: 1597738 - DNA, 15 bp, Homo sapiens
atggcttataattgc

SEQ ID NO: 1597739 - DNA, 15 bp, Homo sapiens
tggcttataattgct

SEQ ID NO: 1597740 - DNA, 15 bp, Homo sapiens
ggcttataattgctt

SEQ ID NO: 1597741 - DNA, 15 bp, Homo sapiens
gcttataattgctta

SEQ ID NO: 1597742 - DNA, 15 bp, Homo sapiens
cttataattgcttag

SEQ ID NO: 1597743 - DNA, 15 bp, Homo sapiens
ttataattgcttaga

SEQ ID NO: 1597744 - DNA, 15 bp, Homo sapiens
tataattgcttagag

SEQ ID NO: 1597745 - DNA, 15 bp, Homo sapiens
ataattgcttagaga

SEQ ID NO: 1597746 - DNA, 15 bp, Homo sapiens
taattgcttagagaa

SEQ ID NO: 1597747 - DNA, 15 bp, Homo sapiens
aattgcttagagaat

SEQ ID NO: 1597748 - DNA, 15 bp, Homo sapiens
attgcttagagaata

SEQ ID NO: 1597749 - DNA, 15 bp, Homo sapiens
ttgcttagagaatat

SEQ ID NO: 1597750 - DNA, 15 bp, Homo sapiens
tgcttagagaatatt

SEQ ID NO: 1597751 - DNA, 15 bp, Homo sapiens
gcttagagaatattt

SEQ ID NO: 1597752 - DNA, 15 bp, Homo sapiens
cttagagaatatttg

SEQ ID NO: 1597753 - DNA, 15 bp, Homo sapiens
ttagagaatatttgt

SEQ ID NO: 1597754 - DNA, 15 bp, Homo sapiens
tagagaatatttgta

SEQ ID NO: 1597755 - DNA, 15 bp, Homo sapiens
agagaatatttgtag

SEQ ID NO: 1597756 - DNA, 15 bp, Homo sapiens
gagaatatttgtaga

SEQ ID NO: 1597757 - DNA, 15 bp, Homo sapiens
agaatatttgtagag

SEQ ID NO: 1597758 - DNA, 15 bp, Homo sapiens
gaatatttgtagaga

SEQ ID NO: 1597759 - DNA, 15 bp, Homo sapiens
aatatttgtagagag

SEQ ID NO: 1597760 - DNA, 15 bp, Homo sapiens
atatttgtagagagg

SEQ ID NO: 1597761 - DNA, 15 bp, Homo sapiens
tatttgtagagaggc

SEQ ID NO: 1597762 - DNA, 15 bp, Homo sapiens
atttgtagagaggca

SEQ ID NO: 1597763 - DNA, 15 bp, Homo sapiens
tttgtagagaggcac

SEQ ID NO: 1597764 - DNA, 15 bp, Homo sapiens
ttgtagagaggcaca

SEQ ID NO: 1597765 - DNA, 15 bp, Homo sapiens
tgtagagaggcacat

SEQ ID NO: 1597766 - DNA, 15 bp, Homo sapiens
gtagagaggcacatt

SEQ ID NO: 1597767 - DNA, 15 bp, Homo sapiens
tagagaggcacattt

SEQ ID NO: 1597768 - DNA, 15 bp, Homo sapiens
agagaggcacatttg

SEQ ID NO: 1597769 - DNA, 15 bp, Homo sapiens
gagaggcacatttgc

SEQ ID NO: 1597770 - DNA, 15 bp, Homo sapiens
agaggcacatttgcc

SEQ ID NO: 1597771 - DNA, 15 bp, Homo sapiens
gaggcacatttgcca

SEQ ID NO: 1597772 - DNA, 15 bp, Homo sapiens
aggcacatttgccag

SEQ ID NO: 1597773 - DNA, 15 bp, Homo sapiens
ggcacatttgccagt

SEQ ID NO: 1597774 - DNA, 15 bp, Homo sapiens
gcacatttgccagta

SEQ ID NO: 1597775 - DNA, 15 bp, Homo sapiens
cacatttgccagtat

SEQ ID NO: 1597776 - DNA, 15 bp, Homo sapiens
acatttgccagtatt

SEQ ID NO: 1597777 - DNA, 15 bp, Homo sapiens
catttgccagtatta

SEQ ID NO: 1597778 - DNA, 15 bp, Homo sapiens
atttgccagtattag

SEQ ID NO: 1597779 - DNA, 15 bp, Homo sapiens
tttgccagtattaga

SEQ ID NO: 1597780 - DNA, 15 bp, Homo sapiens
ttgccagtattagat

SEQ ID NO: 1597781 - DNA, 15 bp, Homo sapiens
tgccagtattagatt

SEQ ID NO: 1597782 - DNA, 15 bp, Homo sapiens
gccagtattagattt

SEQ ID NO: 1597783 - DNA, 15 bp, Homo sapiens
ccagtattagattta

SEQ ID NO: 1597784 - DNA, 15 bp, Homo sapiens
cagtattagatttaa

SEQ ID NO: 1597785 - DNA, 15 bp, Homo sapiens
agtattagatttaaa

SEQ ID NO: 1597786 - DNA, 15 bp, Homo sapiens
gtattagatttaaaa

SEQ ID NO: 1597787 - DNA, 15 bp, Homo sapiens
tattagatttaaaag

SEQ ID NO: 1597788 - DNA, 15 bp, Homo sapiens
attagatttaaaagt

SEQ ID NO: 1597789 - DNA, 15 bp, Homo sapiens
ttagatttaaaagtg

SEQ ID NO: 1597790 - DNA, 15 bp, Homo sapiens
tagatttaaaagtga

SEQ ID NO: 1597791 - DNA, 15 bp, Homo sapiens
agatttaaaagtgat

SEQ ID NO: 1597792 - DNA, 15 bp, Homo sapiens
gatttaaaagtgatg

SEQ ID NO: 1597793 - DNA, 15 bp, Homo sapiens
atttaaaagtgatgt

SEQ ID NO: 1597794 - DNA, 15 bp, Homo sapiens
tttaaaagtgatgtt

SEQ ID NO: 1597795 - DNA, 15 bp, Homo sapiens
ttaaaagtgatgttt

SEQ ID NO: 1597796 - DNA, 15 bp, Homo sapiens
taaaagtgatgtttt

SEQ ID NO: 1597797 - DNA, 15 bp, Homo sapiens
aaaagtgatgttttc

SEQ ID NO: 1597798 - DNA, 15 bp, Homo sapiens
aaagtgatgttttct

SEQ ID NO: 1597799 - DNA, 15 bp, Homo sapiens
aagtgatgttttctt

SEQ ID NO: 1597800 - DNA, 15 bp, Homo sapiens
agtgatgttttcttt

SEQ ID NO: 1597801 - DNA, 15 bp, Homo sapiens
gtgatgttttcttta

SEQ ID NO: 1597802 - DNA, 15 bp, Homo sapiens
tgatgttttctttat

SEQ ID NO: 1597803 - DNA, 15 bp, Homo sapiens
gatgttttctttatc

SEQ ID NO: 1597804 - DNA, 15 bp, Homo sapiens
atgttttctttatct

SEQ ID NO: 1597805 - DNA, 15 bp, Homo sapiens
tgttttctttatcta

SEQ ID NO: 1597806 - DNA, 15 bp, Homo sapiens
gttttctttatctaa

SEQ ID NO: 1597807 - DNA, 15 bp, Homo sapiens
ttttctttatctaaa

SEQ ID NO: 1597808 - DNA, 15 bp, Homo sapiens
tttctttatctaaat

SEQ ID NO: 1597809 - DNA, 15 bp, Homo sapiens
ttctttatctaaatg

SEQ ID NO: 1597810 - DNA, 15 bp, Homo sapiens
tctttatctaaatga

SEQ ID NO: 1597811 - DNA, 15 bp, Homo sapiens
ctttatctaaatgat

SEQ ID NO: 1597812 - DNA, 15 bp, Homo sapiens
tttatctaaatgatg

SEQ ID NO: 1597813 - DNA, 15 bp, Homo sapiens
ttatctaaatgatga

SEQ ID NO: 1597814 - DNA, 15 bp, Homo sapiens
tatctaaatgatgaa

SEQ ID NO: 1597815 - DNA, 15 bp, Homo sapiens
atctaaatgatgaat

SEQ ID NO: 1597816 - DNA, 15 bp, Homo sapiens
tctaaatgatgaatt

SEQ ID NO: 1597817 - DNA, 15 bp, Homo sapiens
ctaaatgatgaatta

SEQ ID NO: 1597818 - DNA, 15 bp, Homo sapiens
taaatgatgaattat

SEQ ID NO: 1597819 - DNA, 15 bp, Homo sapiens
aaatgatgaattatg

SEQ ID NO: 1597820 - DNA, 15 bp, Homo sapiens
aatgatgaattatga

SEQ ID NO: 1597821 - DNA, 15 bp, Homo sapiens
atgatgaattatgat

SEQ ID NO: 1597822 - DNA, 15 bp, Homo sapiens
tgatgaattatgatt

SEQ ID NO: 1597823 - DNA, 15 bp, Homo sapiens
gatgaattatgattc

SEQ ID NO: 1597824 - DNA, 15 bp, Homo sapiens
atgaattatgattct

SEQ ID NO: 1597825 - DNA, 15 bp, Homo sapiens
tgaattatgattctt

SEQ ID NO: 1597826 - DNA, 15 bp, Homo sapiens
gaattatgattcttt

SEQ ID NO: 1597827 - DNA, 15 bp, Homo sapiens
aattatgattctttt

SEQ ID NO: 1597828 - DNA, 15 bp, Homo sapiens
attatgattcttttt

SEQ ID NO: 1597829 - DNA, 15 bp, Homo sapiens
ttatgattcttttta

SEQ ID NO: 1597830 - DNA, 15 bp, Homo sapiens
tgattctttttagtt

SEQ ID NO: 1597831 - DNA, 15 bp, Homo sapiens
gattctttttagttg

SEQ ID NO: 1597832 - DNA, 15 bp, Homo sapiens
attctttttagttgt

SEQ ID NO: 1597833 - DNA, 15 bp, Homo sapiens
ttctttttagttgtt

SEQ ID NO: 1597834 - DNA, 15 bp, Homo sapiens
tctttttagttgttg

SEQ ID NO: 1597835 - DNA, 15 bp, Homo sapiens
ctttttagttgttgg

SEQ ID NO: 1597836 - DNA, 15 bp, Homo sapiens
tttttagttgttgga

SEQ ID NO: 1597837 - DNA, 15 bp, Homo sapiens
ttttagttgttggat

SEQ ID NO: 1597838 - DNA, 15 bp, Homo sapiens
tttagttgttggatt

SEQ ID NO: 1597839 - DNA, 15 bp, Homo sapiens
ttagttgttggattt

SEQ ID NO: 1597840 - DNA, 15 bp, Homo sapiens
tagttgttggatttg

SEQ ID NO: 1597841 - DNA, 15 bp, Homo sapiens
agttgttggatttga

SEQ ID NO: 1597842 - DNA, 15 bp, Homo sapiens
gttgttggatttgaa

SEQ ID NO: 1597843 - DNA, 15 bp, Homo sapiens
ttgttggatttgaaa

SEQ ID NO: 1597844 - DNA, 15 bp, Homo sapiens
tgttggatttgaaat

SEQ ID NO: 1597845 - DNA, 15 bp, Homo sapiens
gttggatttgaaatt

SEQ ID NO: 1597846 - DNA, 15 bp, Homo sapiens
ttggatttgaaattc

SEQ ID NO: 1597847 - DNA, 15 bp, Homo sapiens
tggatttgaaattcc

SEQ ID NO: 1597848 - DNA, 15 bp, Homo sapiens
ggatttgaaattcca

SEQ ID NO: 1597849 - DNA, 15 bp, Homo sapiens
gatttgaaattccag

SEQ ID NO: 1597850 - DNA, 15 bp, Homo sapiens
atttgaaattccaga

SEQ ID NO: 1597851 - DNA, 15 bp, Homo sapiens
tttgaaattccagac

SEQ ID NO: 1597852 - DNA, 15 bp, Homo sapiens
ttgaaattccagaca

SEQ ID NO: 1597853 - DNA, 15 bp, Homo sapiens
tgaaattccagacaa

SEQ ID NO: 1597854 - DNA, 15 bp, Homo sapiens
gaaattccagacaag

SEQ ID NO: 1597855 - DNA, 15 bp, Homo sapiens
aaattccagacaagt

SEQ ID NO: 1597856 - DNA, 15 bp, Homo sapiens
aattccagacaagtt

SEQ ID NO: 1597857 - DNA, 15 bp, Homo sapiens
attccagacaagttt

SEQ ID NO: 1597858 - DNA, 15 bp, Homo sapiens
ttccagacaagtttg

SEQ ID NO: 1597859 - DNA, 15 bp, Homo sapiens
tccagacaagtttgt

SEQ ID NO: 1597860 - DNA, 15 bp, Homo sapiens
ccagacaagtttgtt

SEQ ID NO: 1597861 - DNA, 15 bp, Homo sapiens
cagacaagtttgttg

SEQ ID NO: 1597862 - DNA, 15 bp, Homo sapiens
agacaagtttgttgt

SEQ ID NO: 1597863 - DNA, 15 bp, Homo sapiens
gacaagtttgttgta

SEQ ID NO: 1597864 - DNA, 15 bp, Homo sapiens
acaagtttgttgtag

SEQ ID NO: 1597865 - DNA, 15 bp, Homo sapiens
caagtttgttgtagg

SEQ ID NO: 1597866 - DNA, 15 bp, Homo sapiens
aagtttgttgtagga

SEQ ID NO: 1597867 - DNA, 15 bp, Homo sapiens
agtttgttgtaggat

SEQ ID NO: 1597868 - DNA, 15 bp, Homo sapiens
gtttgttgtaggata

SEQ ID NO: 1597869 - DNA, 15 bp, Homo sapiens
tttgttgtaggatat

SEQ ID NO: 1597870 - DNA, 15 bp, Homo sapiens
ttgttgtaggatatg

SEQ ID NO: 1597871 - DNA, 15 bp, Homo sapiens
tgttgtaggatatgc

SEQ ID NO: 1597872 - DNA, 15 bp, Homo sapiens
gttgtaggatatgcc

SEQ ID NO: 1597873 - DNA, 15 bp, Homo sapiens
ttgtaggatatgccc

SEQ ID NO: 1597874 - DNA, 15 bp, Homo sapiens
tgtaggatatgccct

SEQ ID NO: 1597875 - DNA, 15 bp, Homo sapiens
gtaggatatgccctt

SEQ ID NO: 1597876 - DNA, 15 bp, Homo sapiens
taggatatgcccttg

SEQ ID NO: 1597877 - DNA, 15 bp, Homo sapiens
aggatatgcccttga

SEQ ID NO: 1597878 - DNA, 15 bp, Homo sapiens
ggatatgcccttgac

SEQ ID NO: 1597879 - DNA, 15 bp, Homo sapiens
gatatgcccttgact

SEQ ID NO: 1597880 - DNA, 15 bp, Homo sapiens
atatgcccttgacta

SEQ ID NO: 1597881 - DNA, 15 bp, Homo sapiens
tatgcccttgactat

SEQ ID NO: 1597882 - DNA, 15 bp, Homo sapiens
atgcccttgactata

SEQ ID NO: 1597883 - DNA, 15 bp, Homo sapiens
tgcccttgactataa

SEQ ID NO: 1597884 - DNA, 15 bp, Homo sapiens
gcccttgactataat

SEQ ID NO: 1597885 - DNA, 15 bp, Homo sapiens
cccttgactataatg

SEQ ID NO: 1597886 - DNA, 15 bp, Homo sapiens
ccttgactataatga

SEQ ID NO: 1597887 - DNA, 15 bp, Homo sapiens
cttgactataatgaa

SEQ ID NO: 1597888 - DNA, 15 bp, Homo sapiens
ttgactataatgaat

SEQ ID NO: 1597889 - DNA, 15 bp, Homo sapiens
tgactataatgaata

SEQ ID NO: 1597890 - DNA, 15 bp, Homo sapiens
gactataatgaatac

SEQ ID NO: 1597891 - DNA, 15 bp, Homo sapiens
actataatgaatact

SEQ ID NO: 1597892 - DNA, 15 bp, Homo sapiens
ctataatgaatactt

SEQ ID NO: 1597893 - DNA, 15 bp, Homo sapiens
tataatgaatacttc

SEQ ID NO: 1597894 - DNA, 15 bp, Homo sapiens
ataatgaatacttca

SEQ ID NO: 1597895 - DNA, 15 bp, Homo sapiens
taatgaatacttcag

SEQ ID NO: 1597896 - DNA, 15 bp, Homo sapiens
aatgaatacttcagg

SEQ ID NO: 1597897 - DNA, 15 bp, Homo sapiens
atgaatacttcaggg

SEQ ID NO: 1597898 - DNA, 15 bp, Homo sapiens
tgaatacttcaggga

SEQ ID NO: 1597899 - DNA, 15 bp, Homo sapiens
gaatacttcagggat

SEQ ID NO: 1597900 - DNA, 15 bp, Homo sapiens
aatacttcagggatt

SEQ ID NO: 1597901 - DNA, 15 bp, Homo sapiens
atacttcagggattt

SEQ ID NO: 1597902 - DNA, 15 bp, Homo sapiens
tacttcagggatttg

SEQ ID NO: 1597903 - DNA, 15 bp, Homo sapiens
acttcagggatttga

SEQ ID NO: 1597904 - DNA, 15 bp, Homo sapiens
cttcagggatttgaa

SEQ ID NO: 1597905 - DNA, 15 bp, Homo sapiens
ttcagggatttgaat

SEQ ID NO: 1597906 - DNA, 15 bp, Homo sapiens
tcagggatttgaatg

SEQ ID NO: 1597907 - DNA, 15 bp, Homo sapiens
cagggatttgaatgt

SEQ ID NO: 1597908 - DNA, 15 bp, Homo sapiens
agggatttgaatgta

SEQ ID NO: 1597909 - DNA, 15 bp, Homo sapiens
gggatttgaatgtaa

SEQ ID NO: 1597910 - DNA, 15 bp, Homo sapiens
ggatttgaatgtaag

SEQ ID NO: 1597911 - DNA, 15 bp, Homo sapiens
gatttgaatgtaagt

SEQ ID NO: 1597912 - DNA, 15 bp, Homo sapiens
atttgaatgtaagta

SEQ ID NO: 1597913 - DNA, 15 bp, Homo sapiens
tttgaatgtaagtaa

SEQ ID NO: 1597914 - DNA, 15 bp, Homo sapiens
ttgaatgtaagtaat

SEQ ID NO: 1597915 - DNA, 15 bp, Homo sapiens
tgaatgtaagtaatt

SEQ ID NO: 1597916 - DNA, 15 bp, Homo sapiens
gaatgtaagtaattg

SEQ ID NO: 1597917 - DNA, 15 bp, Homo sapiens
aatgtaagtaattgc

SEQ ID NO: 1597918 - DNA, 15 bp, Homo sapiens
atgtaagtaattgct

SEQ ID NO: 1597919 - DNA, 15 bp, Homo sapiens
tgtaagtaattgctt

SEQ ID NO: 1597920 - DNA, 15 bp, Homo sapiens
gtaagtaattgcttc

SEQ ID NO: 1597921 - DNA, 15 bp, Homo sapiens
taagtaattgcttct

SEQ ID NO: 1597922 - DNA, 15 bp, Homo sapiens
aagtaattgcttctt

SEQ ID NO: 1597923 - DNA, 15 bp, Homo sapiens
agtaattgcttcttt

SEQ ID NO: 1597924 - DNA, 15 bp, Homo sapiens
gtaattgcttctttt

SEQ ID NO: 1597925 - DNA, 15 bp, Homo sapiens
taattgcttcttttt

SEQ ID NO: 1597926 - DNA, 15 bp, Homo sapiens
aattgcttctttttc

SEQ ID NO: 1597927 - DNA, 15 bp, Homo sapiens
attgcttctttttct

SEQ ID NO: 1597928 - DNA, 15 bp, Homo sapiens
ttgcttctttttctc

SEQ ID NO: 1597929 - DNA, 15 bp, Homo sapiens
tgcttctttttctca

SEQ ID NO: 1597930 - DNA, 15 bp, Homo sapiens
gcttctttttctcac

SEQ ID NO: 1597931 - DNA, 15 bp, Homo sapiens
cttctttttctcact

SEQ ID NO: 1597932 - DNA, 15 bp, Homo sapiens
ttctttttctcactc

SEQ ID NO: 1597933 - DNA, 15 bp, Homo sapiens
tctttttctcactca

SEQ ID NO: 1597934 - DNA, 15 bp, Homo sapiens
ctttttctcactcat

SEQ ID NO: 1597935 - DNA, 15 bp, Homo sapiens
tttttctcactcatt

SEQ ID NO: 1597936 - DNA, 15 bp, Homo sapiens
ttttctcactcattt

SEQ ID NO: 1597937 - DNA, 15 bp, Homo sapiens
tttctcactcatttt

SEQ ID NO: 1597938 - DNA, 15 bp, Homo sapiens
ttctcactcattttt

SEQ ID NO: 1597939 - DNA, 15 bp, Homo sapiens
tctcactcatttttc

SEQ ID NO: 1597940 - DNA, 15 bp, Homo sapiens
ctcactcatttttca

SEQ ID NO: 1597941 - DNA, 15 bp, Homo sapiens
tcactcatttttcaa

SEQ ID NO: 1597942 - DNA, 15 bp, Homo sapiens
cactcatttttcaaa

SEQ ID NO: 1597943 - DNA, 15 bp, Homo sapiens
actcatttttcaaaa

SEQ ID NO: 1597944 - DNA, 15 bp, Homo sapiens
ctcatttttcaaaac

SEQ ID NO: 1597945 - DNA, 15 bp, Homo sapiens
tcatttttcaaaaca

SEQ ID NO: 1597946 - DNA, 15 bp, Homo sapiens
catttttcaaaacac

SEQ ID NO: 1597947 - DNA, 15 bp, Homo sapiens
atttttcaaaacacg

SEQ ID NO: 1597948 - DNA, 15 bp, Homo sapiens
tttttcaaaacacgc

SEQ ID NO: 1597949 - DNA, 15 bp, Homo sapiens
ttttcaaaacacgca

SEQ ID NO: 1597950 - DNA, 15 bp, Homo sapiens
tttcaaaacacgcat

SEQ ID NO: 1597951 - DNA, 15 bp, Homo sapiens
ttcaaaacacgcata

SEQ ID NO: 1597952 - DNA, 15 bp, Homo sapiens
tcaaaacacgcataa

SEQ ID NO: 1597953 - DNA, 15 bp, Homo sapiens
caaaacacgcataaa

SEQ ID NO: 1597954 - DNA, 15 bp, Homo sapiens
aaaacacgcataaaa

SEQ ID NO: 1597955 - DNA, 15 bp, Homo sapiens
aaacacgcataaaaa

SEQ ID NO: 1597956 - DNA, 15 bp, Homo sapiens
aacacgcataaaaat

SEQ ID NO: 1597957 - DNA, 15 bp, Homo sapiens
acacgcataaaaatt

SEQ ID NO: 1597958 - DNA, 15 bp, Homo sapiens
cacgcataaaaattt

SEQ ID NO: 1597959 - DNA, 15 bp, Homo sapiens
acgcataaaaattta

SEQ ID NO: 1597960 - DNA, 15 bp, Homo sapiens
cgcataaaaatttag

SEQ ID NO: 1597961 - DNA, 15 bp, Homo sapiens
gcataaaaatttagg

SEQ ID NO: 1597962 - DNA, 15 bp, Homo sapiens
cataaaaatttagga

SEQ ID NO: 1597963 - DNA, 15 bp, Homo sapiens
ataaaaatttaggaa

SEQ ID NO: 1597964 - DNA, 15 bp, Homo sapiens
taaaaatttaggaaa

SEQ ID NO: 1597965 - DNA, 15 bp, Homo sapiens
aaaaatttaggaaag

SEQ ID NO: 1597966 - DNA, 15 bp, Homo sapiens
aaaatttaggaaaga

SEQ ID NO: 1597967 - DNA, 15 bp, Homo sapiens
aaatttaggaaagag

SEQ ID NO: 1597968 - DNA, 15 bp, Homo sapiens
aatttaggaaagaga

SEQ ID NO: 1597969 - DNA, 15 bp, Homo sapiens
atttaggaaagagaa

SEQ ID NO: 1597970 - DNA, 15 bp, Homo sapiens
tttaggaaagagaat

SEQ ID NO: 1597971 - DNA, 15 bp, Homo sapiens
ttaggaaagagaatt

SEQ ID NO: 1597972 - DNA, 15 bp, Homo sapiens
taggaaagagaattg

SEQ ID NO: 1597973 - DNA, 15 bp, Homo sapiens
aggaaagagaattgt

SEQ ID NO: 1597974 - DNA, 15 bp, Homo sapiens
ggaaagagaattgtt

SEQ ID NO: 1597975 - DNA, 15 bp, Homo sapiens
gaaagagaattgttt

SEQ ID NO: 1597976 - DNA, 15 bp, Homo sapiens
aaagagaattgtttt

SEQ ID NO: 1597977 - DNA, 15 bp, Homo sapiens
aagagaattgttttc

SEQ ID NO: 1597978 - DNA, 15 bp, Homo sapiens
agagaattgttttct

SEQ ID NO: 1597979 - DNA, 15 bp, Homo sapiens
gagaattgttttctc

SEQ ID NO: 1597980 - DNA, 15 bp, Homo sapiens
agaattgttttctcc

SEQ ID NO: 1597981 - DNA, 15 bp, Homo sapiens
gaattgttttctcct

SEQ ID NO: 1597982 - DNA, 15 bp, Homo sapiens
aattgttttctcctt

SEQ ID NO: 1597983 - DNA, 15 bp, Homo sapiens
attgttttctccttc

SEQ ID NO: 1597984 - DNA, 15 bp, Homo sapiens
ttgttttctccttcc

SEQ ID NO: 1597985 - DNA, 15 bp, Homo sapiens
tgttttctccttcca

SEQ ID NO: 1597986 - DNA, 15 bp, Homo sapiens
gttttctccttccag

SEQ ID NO: 1597987 - DNA, 15 bp, Homo sapiens
ttttctccttccagc

SEQ ID NO: 1597988 - DNA, 15 bp, Homo sapiens
tttctccttccagca

SEQ ID NO: 1597989 - DNA, 15 bp, Homo sapiens
ttctccttccagcac

SEQ ID NO: 1597990 - DNA, 15 bp, Homo sapiens
tctccttccagcacc

SEQ ID NO: 1597991 - DNA, 15 bp, Homo sapiens
ctccttccagcacct

SEQ ID NO: 1597992 - DNA, 15 bp, Homo sapiens
tccttccagcacctc

SEQ ID NO: 1597993 - DNA, 15 bp, Homo sapiens
ccttccagcacctca

SEQ ID NO: 1597994 - DNA, 15 bp, Homo sapiens
cttccagcacctcat

SEQ ID NO: 1597995 - DNA, 15 bp, Homo sapiens
ttccagcacctcata

SEQ ID NO: 1597996 - DNA, 15 bp, Homo sapiens
tccagcacctcataa

SEQ ID NO: 1597997 - DNA, 15 bp, Homo sapiens
ccagcacctcataat

SEQ ID NO: 1597998 - DNA, 15 bp, Homo sapiens
cagcacctcataatt

SEQ ID NO: 1597999 - DNA, 15 bp, Homo sapiens
agcacctcataattt

SEQ ID NO: 1598000 - DNA, 15 bp, Homo sapiens
gcacctcataatttg

SEQ ID NO: 1598001 - DNA, 15 bp, Homo sapiens
cacctcataatttga

SEQ ID NO: 1598002 - DNA, 15 bp, Homo sapiens
acctcataatttgaa

SEQ ID NO: 1598003 - DNA, 15 bp, Homo sapiens
cctcataatttgaac

SEQ ID NO: 1598004 - DNA, 15 bp, Homo sapiens
ctcataatttgaaca

SEQ ID NO: 1598005 - DNA, 15 bp, Homo sapiens
tcataatttgaacag

SEQ ID NO: 1598006 - DNA, 15 bp, Homo sapiens
cataatttgaacaga

SEQ ID NO: 1598007 - DNA, 15 bp, Homo sapiens
ataatttgaacagac

SEQ ID NO: 1598008 - DNA, 15 bp, Homo sapiens
taatttgaacagact

SEQ ID NO: 1598009 - DNA, 15 bp, Homo sapiens
aatttgaacagactg

SEQ ID NO: 1598010 - DNA, 15 bp, Homo sapiens
atttgaacagactga

SEQ ID NO: 1598011 - DNA, 15 bp, Homo sapiens
tttgaacagactgat

SEQ ID NO: 1598012 - DNA, 15 bp, Homo sapiens
ttgaacagactgatg

SEQ ID NO: 1598013 - DNA, 15 bp, Homo sapiens
tgaacagactgatgg

SEQ ID NO: 1598014 - DNA, 15 bp, Homo sapiens
aacagactgatggtt

SEQ ID NO: 1598015 - DNA, 15 bp, Homo sapiens
acagactgatggttc

SEQ ID NO: 1598016 - DNA, 15 bp, Homo sapiens
cagactgatggttcc

SEQ ID NO: 1598017 - DNA, 15 bp, Homo sapiens
agactgatggttccc

SEQ ID NO: 1598018 - DNA, 15 bp, Homo sapiens
gactgatggttccca

SEQ ID NO: 1598019 - DNA, 15 bp, Homo sapiens
actgatggttcccat

SEQ ID NO: 1598020 - DNA, 15 bp, Homo sapiens
ctgatggttcccatt

SEQ ID NO: 1598021 - DNA, 15 bp, Homo sapiens
tgatggttcccatta

SEQ ID NO: 1598022 - DNA, 15 bp, Homo sapiens
gatggttcccattag

SEQ ID NO: 1598023 - DNA, 15 bp, Homo sapiens
atggttcccattagt

SEQ ID NO: 1598024 - DNA, 15 bp, Homo sapiens
tggttcccattagtc

SEQ ID NO: 1598025 - DNA, 15 bp, Homo sapiens
ggttcccattagtca

SEQ ID NO: 1598026 - DNA, 15 bp, Homo sapiens
gttcccattagtcac

SEQ ID NO: 1598027 - DNA, 15 bp, Homo sapiens
ttcccattagtcaca

SEQ ID NO: 1598028 - DNA, 15 bp, Homo sapiens
tcccattagtcacat

SEQ ID NO: 1598029 - DNA, 15 bp, Homo sapiens
cccattagtcacata

SEQ ID NO: 1598030 - DNA, 15 bp, Homo sapiens
ccattagtcacataa

SEQ ID NO: 1598031 - DNA, 15 bp, Homo sapiens
cattagtcacataaa

SEQ ID NO: 1598032 - DNA, 15 bp, Homo sapiens
attagtcacataaag

SEQ ID NO: 1598033 - DNA, 15 bp, Homo sapiens
ttagtcacataaagc

SEQ ID NO: 1598034 - DNA, 15 bp, Homo sapiens
tagtcacataaagct

SEQ ID NO: 1598035 - DNA, 15 bp, Homo sapiens
agtcacataaagctg

SEQ ID NO: 1598036 - DNA, 15 bp, Homo sapiens
gtcacataaagctgt

SEQ ID NO: 1598037 - DNA, 15 bp, Homo sapiens
tcacataaagctgta

SEQ ID NO: 1598038 - DNA, 15 bp, Homo sapiens
cacataaagctgtag

SEQ ID NO: 1598039 - DNA, 15 bp, Homo sapiens
acataaagctgtagt

SEQ ID NO: 1598040 - DNA, 15 bp, Homo sapiens
cataaagctgtagtc

SEQ ID NO: 1598041 - DNA, 15 bp, Homo sapiens
ataaagctgtagtct

SEQ ID NO: 1598042 - DNA, 15 bp, Homo sapiens
taaagctgtagtcta

SEQ ID NO: 1598043 - DNA, 15 bp, Homo sapiens
aaagctgtagtctag

SEQ ID NO: 1598044 - DNA, 15 bp, Homo sapiens
aagctgtagtctagt

SEQ ID NO: 1598045 - DNA, 15 bp, Homo sapiens
agctgtagtctagta

SEQ ID NO: 1598046 - DNA, 15 bp, Homo sapiens
gctgtagtctagtac

SEQ ID NO: 1598047 - DNA, 15 bp, Homo sapiens
ctgtagtctagtaca

SEQ ID NO: 1598048 - DNA, 15 bp, Homo sapiens
tgtagtctagtacag

SEQ ID NO: 1598049 - DNA, 15 bp, Homo sapiens
gtagtctagtacaga

SEQ ID NO: 1598050 - DNA, 15 bp, Homo sapiens
tagtctagtacagac

SEQ ID NO: 1598051 - DNA, 15 bp, Homo sapiens
agtctagtacagacg

SEQ ID NO: 1598052 - DNA, 15 bp, Homo sapiens
gtctagtacagacgt

SEQ ID NO: 1598053 - DNA, 15 bp, Homo sapiens
tctagtacagacgtc

SEQ ID NO: 1598054 - DNA, 15 bp, Homo sapiens
ctagtacagacgtcc

SEQ ID NO: 1598055 - DNA, 15 bp, Homo sapiens
tagtacagacgtcct

SEQ ID NO: 1598056 - DNA, 15 bp, Homo sapiens
agtacagacgtcctt

SEQ ID NO: 1598057 - DNA, 15 bp, Homo sapiens
gtacagacgtcctta

SEQ ID NO: 1598058 - DNA, 15 bp, Homo sapiens
tacagacgtccttag

SEQ ID NO: 1598059 - DNA, 15 bp, Homo sapiens
acagacgtccttaga

SEQ ID NO: 1598060 - DNA, 15 bp, Homo sapiens
cagacgtccttagaa

SEQ ID NO: 1598061 - DNA, 15 bp, Homo sapiens
agacgtccttagaac

SEQ ID NO: 1598062 - DNA, 15 bp, Homo sapiens
gacgtccttagaact

SEQ ID NO: 1598063 - DNA, 15 bp, Homo sapiens
acgtccttagaactg

SEQ ID NO: 1598064 - DNA, 15 bp, Homo sapiens
cgtccttagaactgg

SEQ ID NO: 1598065 - DNA, 15 bp, Homo sapiens
gtccttagaactgga

SEQ ID NO: 1598066 - DNA, 15 bp, Homo sapiens
tccttagaactggaa

SEQ ID NO: 1598067 - DNA, 15 bp, Homo sapiens
ccttagaactggaac

SEQ ID NO: 1598068 - DNA, 15 bp, Homo sapiens
cttagaactggaacc

SEQ ID NO: 1598069 - DNA, 15 bp, Homo sapiens
ttagaactggaacct

SEQ ID NO: 1598070 - DNA, 15 bp, Homo sapiens
tagaactggaacctg

SEQ ID NO: 1598071 - DNA, 15 bp, Homo sapiens
agaactggaacctgg

SEQ ID NO: 1598072 - DNA, 15 bp, Homo sapiens
gaactggaacctggc

SEQ ID NO: 1598073 - DNA, 15 bp, Homo sapiens
aactggaacctggcc

SEQ ID NO: 1598074 - DNA, 15 bp, Homo sapiens
actggaacctggcca

SEQ ID NO: 1598075 - DNA, 15 bp, Homo sapiens
ctggaacctggccag

SEQ ID NO: 1598076 - DNA, 15 bp, Homo sapiens
tggaacctggccagg

SEQ ID NO: 1598077 - DNA, 15 bp, Homo sapiens
ggaacctggccaggc

SEQ ID NO: 1598078 - DNA, 15 bp, Homo sapiens
gaacctggccaggct

SEQ ID NO: 1598079 - DNA, 15 bp, Homo sapiens
aacctggccaggcta

SEQ ID NO: 1598080 - DNA, 15 bp, Homo sapiens
acctggccaggctag

SEQ ID NO: 1598081 - DNA, 15 bp, Homo sapiens
cctggccaggctagg

SEQ ID NO: 1598082 - DNA, 15 bp, Homo sapiens
ctggccaggctaggg

SEQ ID NO: 1598083 - DNA, 15 bp, Homo sapiens
tggccaggctagggt

SEQ ID NO: 1598084 - DNA, 15 bp, Homo sapiens
ggccaggctagggtg

SEQ ID NO: 1598085 - DNA, 15 bp, Homo sapiens
gccaggctagggtga

SEQ ID NO: 1598086 - DNA, 15 bp, Homo sapiens
ccaggctagggtgac

SEQ ID NO: 1598087 - DNA, 15 bp, Homo sapiens
caggctagggtgaca

SEQ ID NO: 1598088 - DNA, 15 bp, Homo sapiens
aggctagggtgacac

SEQ ID NO: 1598089 - DNA, 15 bp, Homo sapiens
ggctagggtgacact

SEQ ID NO: 1598090 - DNA, 15 bp, Homo sapiens
gctagggtgacactt

SEQ ID NO: 1598091 - DNA, 15 bp, Homo sapiens
ctagggtgacacttc

SEQ ID NO: 1598092 - DNA, 15 bp, Homo sapiens
tagggtgacacttct

SEQ ID NO: 1598093 - DNA, 15 bp, Homo sapiens
agggtgacacttctt

SEQ ID NO: 1598094 - DNA, 15 bp, Homo sapiens
gggtgacacttcttg

SEQ ID NO: 1598095 - DNA, 15 bp, Homo sapiens
ggtgacacttcttgt

SEQ ID NO: 1598096 - DNA, 15 bp, Homo sapiens
gtgacacttcttgtt

SEQ ID NO: 1598097 - DNA, 15 bp, Homo sapiens
tgacacttcttgttg

SEQ ID NO: 1598098 - DNA, 15 bp, Homo sapiens
gacacttcttgttgg

SEQ ID NO: 1598099 - DNA, 15 bp, Homo sapiens
acacttcttgttggc

SEQ ID NO: 1598100 - DNA, 15 bp, Homo sapiens
cacttcttgttggct

SEQ ID NO: 1598101 - DNA, 15 bp, Homo sapiens
acttcttgttggctg

SEQ ID NO: 1598102 - DNA, 15 bp, Homo sapiens
cttcttgttggctga

SEQ ID NO: 1598103 - DNA, 15 bp, Homo sapiens
ttcttgttggctgaa

SEQ ID NO: 1598104 - DNA, 15 bp, Homo sapiens
tcttgttggctgaaa

SEQ ID NO: 1598105 - DNA, 15 bp, Homo sapiens
cttgttggctgaaat

SEQ ID NO: 1598106 - DNA, 15 bp, Homo sapiens
ttgttggctgaaata

SEQ ID NO: 1598107 - DNA, 15 bp, Homo sapiens
tgttggctgaaatag

SEQ ID NO: 1598108 - DNA, 15 bp, Homo sapiens
gttggctgaaatagt

SEQ ID NO: 1598109 - DNA, 15 bp, Homo sapiens
ttggctgaaatagtt

SEQ ID NO: 1598110 - DNA, 15 bp, Homo sapiens
tggctgaaatagttg

SEQ ID NO: 1598111 - DNA, 15 bp, Homo sapiens
ggctgaaatagttga

SEQ ID NO: 1598112 - DNA, 15 bp, Homo sapiens
gctgaaatagttgaa

SEQ ID NO: 1598113 - DNA, 15 bp, Homo sapiens
ctgaaatagttgaac

SEQ ID NO: 1598114 - DNA, 15 bp, Homo sapiens
tgaaatagttgaaca

SEQ ID NO: 1598115 - DNA, 15 bp, Homo sapiens
gaaatagttgaacag

SEQ ID NO: 1598116 - DNA, 15 bp, Homo sapiens
aaatagttgaacagc

SEQ ID NO: 1598117 - DNA, 15 bp, Homo sapiens
aatagttgaacagct

SEQ ID NO: 1598118 - DNA, 15 bp, Homo sapiens
atagttgaacagctt

SEQ ID NO: 1598119 - DNA, 15 bp, Homo sapiens
tagttgaacagcttt

SEQ ID NO: 1598120 - DNA, 15 bp, Homo sapiens
agttgaacagcttta

SEQ ID NO: 1598121 - DNA, 15 bp, Homo sapiens
gttgaacagctttaa

SEQ ID NO: 1598122 - DNA, 15 bp, Homo sapiens
ttgaacagctttaat

SEQ ID NO: 1598123 - DNA, 15 bp, Homo sapiens
tgaacagctttaata

SEQ ID NO: 1598124 - DNA, 15 bp, Homo sapiens
gaacagctttaatat

SEQ ID NO: 1598125 - DNA, 15 bp, Homo sapiens
aacagctttaatata

SEQ ID NO: 1598126 - DNA, 15 bp, Homo sapiens
acagctttaatatac

SEQ ID NO: 1598127 - DNA, 15 bp, Homo sapiens
cagctttaatataca

SEQ ID NO: 1598128 - DNA, 15 bp, Homo sapiens
agctttaatatacaa

SEQ ID NO: 1598129 - DNA, 15 bp, Homo sapiens
gctttaatatacaat

SEQ ID NO: 1598130 - DNA, 15 bp, Homo sapiens
ctttaatatacaata

SEQ ID NO: 1598131 - DNA, 15 bp, Homo sapiens
tttaatatacaataa

SEQ ID NO: 1598132 - DNA, 15 bp, Homo sapiens
ttaatatacaataat

SEQ ID NO: 1598133 - DNA, 15 bp, Homo sapiens
taatatacaataatt

SEQ ID NO: 1598134 - DNA, 15 bp, Homo sapiens
aatatacaataattg

SEQ ID NO: 1598135 - DNA, 15 bp, Homo sapiens
atatacaataattgt

SEQ ID NO: 1598136 - DNA, 15 bp, Homo sapiens
tatacaataattgtt

SEQ ID NO: 1598137 - DNA, 15 bp, Homo sapiens
atacaataattgttg

SEQ ID NO: 1598138 - DNA, 15 bp, Homo sapiens
tacaataattgttgc

SEQ ID NO: 1598139 - DNA, 15 bp, Homo sapiens
acaataattgttgca

SEQ ID NO: 1598140 - DNA, 15 bp, Homo sapiens
caataattgttgcat

SEQ ID NO: 1598141 - DNA, 15 bp, Homo sapiens
aataattgttgcatt

SEQ ID NO: 1598142 - DNA, 15 bp, Homo sapiens
ataattgttgcatta

SEQ ID NO: 1598143 - DNA, 15 bp, Homo sapiens
taattgttgcattat

SEQ ID NO: 1598144 - DNA, 15 bp, Homo sapiens
aattgttgcattatt

SEQ ID NO: 1598145 - DNA, 15 bp, Homo sapiens
attgttgcattatta

SEQ ID NO: 1598146 - DNA, 15 bp, Homo sapiens
ttgttgcattattat

SEQ ID NO: 1598147 - DNA, 15 bp, Homo sapiens
tgttgcattattatt

SEQ ID NO: 1598148 - DNA, 15 bp, Homo sapiens
gttgcattattattt

SEQ ID NO: 1598149 - DNA, 15 bp, Homo sapiens
ttgcattattatttc

SEQ ID NO: 1598150 - DNA, 15 bp, Homo sapiens
tgcattattatttca

SEQ ID NO: 1598151 - DNA, 15 bp, Homo sapiens
gcattattatttcag

SEQ ID NO: 1598152 - DNA, 15 bp, Homo sapiens
cattattatttcaga

SEQ ID NO: 1598153 - DNA, 15 bp, Homo sapiens
attattatttcagat

SEQ ID NO: 1598154 - DNA, 15 bp, Homo sapiens
ttattatttcagatg

SEQ ID NO: 1598155 - DNA, 15 bp, Homo sapiens
tattatttcagatga

SEQ ID NO: 1598156 - DNA, 15 bp, Homo sapiens
attatttcagatgat

SEQ ID NO: 1598157 - DNA, 15 bp, Homo sapiens
ttatttcagatgata

SEQ ID NO: 1598158 - DNA, 15 bp, Homo sapiens
tatttcagatgataa

SEQ ID NO: 1598159 - DNA, 15 bp, Homo sapiens
atttcagatgataaa

SEQ ID NO: 1598160 - DNA, 15 bp, Homo sapiens
tttcagatgataaat

SEQ ID NO: 1598161 - DNA, 15 bp, Homo sapiens
ttcagatgataaatg

SEQ ID NO: 1598162 - DNA, 15 bp, Homo sapiens
tcagatgataaatgt

SEQ ID NO: 1598163 - DNA, 15 bp, Homo sapiens
cagatgataaatgtg

SEQ ID NO: 1598164 - DNA, 15 bp, Homo sapiens
agatgataaatgtgg

SEQ ID NO: 1598165 - DNA, 15 bp, Homo sapiens
gatgataaatgtggt

SEQ ID NO: 1598166 - DNA, 15 bp, Homo sapiens
atgataaatgtggtc

SEQ ID NO: 1598167 - DNA, 15 bp, Homo sapiens
tgataaatgtggtca

SEQ ID NO: 1598168 - DNA, 15 bp, Homo sapiens
gataaatgtggtcat

SEQ ID NO: 1598169 - DNA, 15 bp, Homo sapiens
ataaatgtggtcata

SEQ ID NO: 1598170 - DNA, 15 bp, Homo sapiens
taaatgtggtcataa

SEQ ID NO: 1598171 - DNA, 15 bp, Homo sapiens
aaatgtggtcataag

SEQ ID NO: 1598172 - DNA, 15 bp, Homo sapiens
aatgtggtcataagt

SEQ ID NO: 1598173 - DNA, 15 bp, Homo sapiens
atgtggtcataagta

SEQ ID NO: 1598174 - DNA, 15 bp, Homo sapiens
tgtggtcataagtaa

SEQ ID NO: 1598175 - DNA, 15 bp, Homo sapiens
gtggtcataagtaag

SEQ ID NO: 1598176 - DNA, 15 bp, Homo sapiens
tggtcataagtaaga

SEQ ID NO: 1598177 - DNA, 15 bp, Homo sapiens
ggtcataagtaagaa

SEQ ID NO: 1598178 - DNA, 15 bp, Homo sapiens
gtcataagtaagaaa

SEQ ID NO: 1598179 - DNA, 15 bp, Homo sapiens
tcataagtaagaaat

SEQ ID NO: 1598180 - DNA, 15 bp, Homo sapiens
cataagtaagaaata

SEQ ID NO: 1598181 - DNA, 15 bp, Homo sapiens
ataagtaagaaataa

SEQ ID NO: 1598182 - DNA, 15 bp, Homo sapiens
taagtaagaaataaa

SEQ ID NO: 1598183 - DNA, 15 bp, Homo sapiens
aagtaagaaataaat

SEQ ID NO: 1598184 - DNA, 15 bp, Homo sapiens
agtaagaaataaatg

SEQ ID NO: 1598185 - DNA, 15 bp, Homo sapiens
gtaagaaataaatga

SEQ ID NO: 1598186 - DNA, 15 bp, Homo sapiens
taagaaataaatgat

SEQ ID NO: 1598187 - DNA, 15 bp, Homo sapiens
aagaaataaatgatc

SEQ ID NO: 1598188 - DNA, 15 bp, Homo sapiens
agaaataaatgatcg

SEQ ID NO: 1598189 - DNA, 15 bp, Homo sapiens
gaaataaatgatcga

SEQ ID NO: 1598190 - DNA, 15 bp, Homo sapiens
aaataaatgatcgag

SEQ ID NO: 1598191 - DNA, 15 bp, Homo sapiens
aataaatgatcgagt

SEQ ID NO: 1598192 - DNA, 15 bp, Homo sapiens
ataaatgatcgagtt

SEQ ID NO: 1598193 - DNA, 15 bp, Homo sapiens
taaatgatcgagttt

SEQ ID NO: 1598194 - DNA, 15 bp, Homo sapiens
aaatgatcgagttta

SEQ ID NO: 1598195 - DNA, 15 bp, Homo sapiens
aatgatcgagtttag

SEQ ID NO: 1598196 - DNA, 15 bp, Homo sapiens
atgatcgagtttagt

SEQ ID NO: 1598197 - DNA, 15 bp, Homo sapiens
tgatcgagtttagtc

SEQ ID NO: 1598198 - DNA, 15 bp, Homo sapiens
gatcgagtttagtct

SEQ ID NO: 1598199 - DNA, 15 bp, Homo sapiens
atcgagtttagtctt

SEQ ID NO: 1598200 - DNA, 15 bp, Homo sapiens
tcgagtttagtcttt

SEQ ID NO: 1598201 - DNA, 15 bp, Homo sapiens
cgagtttagtctttt

SEQ ID NO: 1598202 - DNA, 15 bp, Homo sapiens
gagtttagtctttta

SEQ ID NO: 1598203 - DNA, 15 bp, Homo sapiens
agtttagtcttttaa

SEQ ID NO: 1598204 - DNA, 15 bp, Homo sapiens
gtttagtcttttaat

SEQ ID NO: 1598205 - DNA, 15 bp, Homo sapiens
tttagtcttttaatt

SEQ ID NO: 1598206 - DNA, 15 bp, Homo sapiens
ttagtcttttaattc

SEQ ID NO: 1598207 - DNA, 15 bp, Homo sapiens
tagtcttttaattca

SEQ ID NO: 1598208 - DNA, 15 bp, Homo sapiens
agtcttttaattcac

SEQ ID NO: 1598209 - DNA, 15 bp, Homo sapiens
gtcttttaattcact

SEQ ID NO: 1598210 - DNA, 15 bp, Homo sapiens
tcttttaattcactg

SEQ ID NO: 1598211 - DNA, 15 bp, Homo sapiens
cttttaattcactgt

SEQ ID NO: 1598212 - DNA, 15 bp, Homo sapiens
ttttaattcactgtc

SEQ ID NO: 1598213 - DNA, 15 bp, Homo sapiens
tttaattcactgtcc

SEQ ID NO: 1598214 - DNA, 15 bp, Homo sapiens
ttaattcactgtcct

SEQ ID NO: 1598215 - DNA, 15 bp, Homo sapiens
taattcactgtcctt

SEQ ID NO: 1598216 - DNA, 15 bp, Homo sapiens
aattcactgtccttt

SEQ ID NO: 1598217 - DNA, 15 bp, Homo sapiens
attcactgtcctttg

SEQ ID NO: 1598218 - DNA, 15 bp, Homo sapiens
ttcactgtcctttga

SEQ ID NO: 1598219 - DNA, 15 bp, Homo sapiens
tcactgtcctttgaa

SEQ ID NO: 1598220 - DNA, 15 bp, Homo sapiens
cactgtcctttgaat

SEQ ID NO: 1598221 - DNA, 15 bp, Homo sapiens
actgtcctttgaata

SEQ ID NO: 1598222 - DNA, 15 bp, Homo sapiens
ctgtcctttgaatac

SEQ ID NO: 1598223 - DNA, 15 bp, Homo sapiens
tgtcctttgaatacc

SEQ ID NO: 1598224 - DNA, 15 bp, Homo sapiens
gtcctttgaatacct

SEQ ID NO: 1598225 - DNA, 15 bp, Homo sapiens
tcctttgaatacctg

SEQ ID NO: 1598226 - DNA, 15 bp, Homo sapiens
cctttgaatacctgc

SEQ ID NO: 1598227 - DNA, 15 bp, Homo sapiens
ctttgaatacctgcc

SEQ ID NO: 1598228 - DNA, 15 bp, Homo sapiens
tttgaatacctgcct

SEQ ID NO: 1598229 - DNA, 15 bp, Homo sapiens
ttgaatacctgcctc

SEQ ID NO: 1598230 - DNA, 15 bp, Homo sapiens
tgaatacctgcctct

SEQ ID NO: 1598231 - DNA, 15 bp, Homo sapiens
gaatacctgcctctt

SEQ ID NO: 1598232 - DNA, 15 bp, Homo sapiens
aatacctgcctctta

SEQ ID NO: 1598233 - DNA, 15 bp, Homo sapiens
atacctgcctcttac

SEQ ID NO: 1598234 - DNA, 15 bp, Homo sapiens
tacctgcctcttact

SEQ ID NO: 1598235 - DNA, 15 bp, Homo sapiens
acctgcctcttactc

SEQ ID NO: 1598236 - DNA, 15 bp, Homo sapiens
cctgcctcttactct

SEQ ID NO: 1598237 - DNA, 15 bp, Homo sapiens
ctgcctcttactctg

SEQ ID NO: 1598238 - DNA, 15 bp, Homo sapiens
tgcctcttactctgg

SEQ ID NO: 1598239 - DNA, 15 bp, Homo sapiens
gcctcttactctgga

SEQ ID NO: 1598240 - DNA, 15 bp, Homo sapiens
cctcttactctggag

SEQ ID NO: 1598241 - DNA, 15 bp, Homo sapiens
ctcttactctggagg

SEQ ID NO: 1598242 - DNA, 15 bp, Homo sapiens
tcttactctggaggc

SEQ ID NO: 1598243 - DNA, 15 bp, Homo sapiens
cttactctggaggca

SEQ ID NO: 1598244 - DNA, 15 bp, Homo sapiens
ttactctggaggcag

SEQ ID NO: 1598245 - DNA, 15 bp, Homo sapiens
tactctggaggcaga

SEQ ID NO: 1598246 - DNA, 15 bp, Homo sapiens
actctggaggcagaa

SEQ ID NO: 1598247 - DNA, 15 bp, Homo sapiens
ctctggaggcagaag

SEQ ID NO: 1598248 - DNA, 15 bp, Homo sapiens
tctggaggcagaagt

SEQ ID NO: 1598249 - DNA, 15 bp, Homo sapiens
ctggaggcagaagtc

SEQ ID NO: 1598250 - DNA, 15 bp, Homo sapiens
tggaggcagaagtcc

SEQ ID NO: 1598251 - DNA, 15 bp, Homo sapiens
ggaggcagaagtccc

SEQ ID NO: 1598252 - DNA, 15 bp, Homo sapiens
gaggcagaagtccca

SEQ ID NO: 1598253 - DNA, 15 bp, Homo sapiens
aggcagaagtcccat

SEQ ID NO: 1598254 - DNA, 15 bp, Homo sapiens
ggcagaagtcccatg

SEQ ID NO: 1598255 - DNA, 15 bp, Homo sapiens
gcagaagtcccatgg

SEQ ID NO: 1598256 - DNA, 15 bp, Homo sapiens
cagaagtcccatgga

SEQ ID NO: 1598257 - DNA, 15 bp, Homo sapiens
agaagtcccatggat

SEQ ID NO: 1598258 - DNA, 15 bp, Homo sapiens
gaagtcccatggatg

SEQ ID NO: 1598259 - DNA, 15 bp, Homo sapiens
aagtcccatggatgt

SEQ ID NO: 1598260 - DNA, 15 bp, Homo sapiens
agtcccatggatgtg

SEQ ID NO: 1598261 - DNA, 15 bp, Homo sapiens
gtcccatggatgtgt

SEQ ID NO: 1598262 - DNA, 15 bp, Homo sapiens
tcccatggatgtgtt

SEQ ID NO: 1598263 - DNA, 15 bp, Homo sapiens
cccatggatgtgttt

SEQ ID NO: 1598264 - DNA, 15 bp, Homo sapiens
ccatggatgtgttta

SEQ ID NO: 1598265 - DNA, 15 bp, Homo sapiens
catggatgtgtttat

SEQ ID NO: 1598266 - DNA, 15 bp, Homo sapiens
atggatgtgtttatg

SEQ ID NO: 1598267 - DNA, 15 bp, Homo sapiens
tggatgtgtttatga

SEQ ID NO: 1598268 - DNA, 15 bp, Homo sapiens
ggatgtgtttatgaa

SEQ ID NO: 1598269 - DNA, 15 bp, Homo sapiens
gatgtgtttatgaac

SEQ ID NO: 1598270 - DNA, 15 bp, Homo sapiens
atgtgtttatgaaca

SEQ ID NO: 1598271 - DNA, 15 bp, Homo sapiens
tgtgtttatgaacat

SEQ ID NO: 1598272 - DNA, 15 bp, Homo sapiens
gtgtttatgaacatg

SEQ ID NO: 1598273 - DNA, 15 bp, Homo sapiens
tgtttatgaacatgg

SEQ ID NO: 1598274 - DNA, 15 bp, Homo sapiens
gtttatgaacatggt

SEQ ID NO: 1598275 - DNA, 15 bp, Homo sapiens
tttatgaacatggtt

SEQ ID NO: 1598276 - DNA, 15 bp, Homo sapiens
ttatgaacatggttg

SEQ ID NO: 1598277 - DNA, 15 bp, Homo sapiens
tatgaacatggttga

SEQ ID NO: 1598278 - DNA, 15 bp, Homo sapiens
atgaacatggttgag

SEQ ID NO: 1598279 - DNA, 15 bp, Homo sapiens
tgaacatggttgagg

SEQ ID NO: 1598280 - DNA, 15 bp, Homo sapiens
gaacatggttgagga

SEQ ID NO: 1598281 - DNA, 15 bp, Homo sapiens
aacatggttgaggaa

SEQ ID NO: 1598282 - DNA, 15 bp, Homo sapiens
acatggttgaggaag

SEQ ID NO: 1598283 - DNA, 15 bp, Homo sapiens
catggttgaggaaga

SEQ ID NO: 1598284 - DNA, 15 bp, Homo sapiens
atggttgaggaagat

SEQ ID NO: 1598285 - DNA, 15 bp, Homo sapiens
tggttgaggaagatt

SEQ ID NO: 1598286 - DNA, 15 bp, Homo sapiens
ggttgaggaagattt

SEQ ID NO: 1598287 - DNA, 15 bp, Homo sapiens
gttgaggaagattta

SEQ ID NO: 1598288 - DNA, 15 bp, Homo sapiens
ttgaggaagatttag

SEQ ID NO: 1598289 - DNA, 15 bp, Homo sapiens
tgaggaagatttagg

SEQ ID NO: 1598290 - DNA, 15 bp, Homo sapiens
gaggaagatttagga

SEQ ID NO: 1598291 - DNA, 15 bp, Homo sapiens
aggaagatttaggaa

SEQ ID NO: 1598292 - DNA, 15 bp, Homo sapiens
ggaagatttaggaag

SEQ ID NO: 1598293 - DNA, 15 bp, Homo sapiens
gaagatttaggaaga

SEQ ID NO: 1598294 - DNA, 15 bp, Homo sapiens
aagatttaggaagac

SEQ ID NO: 1598295 - DNA, 15 bp, Homo sapiens
agatttaggaagact

SEQ ID NO: 1598296 - DNA, 15 bp, Homo sapiens
gatttaggaagactg

SEQ ID NO: 1598297 - DNA, 15 bp, Homo sapiens
atttaggaagactgc

SEQ ID NO: 1598298 - DNA, 15 bp, Homo sapiens
tttaggaagactgca

SEQ ID NO: 1598299 - DNA, 15 bp, Homo sapiens
ttaggaagactgcaa

SEQ ID NO: 1598300 - DNA, 15 bp, Homo sapiens
taggaagactgcaac

SEQ ID NO: 1598301 - DNA, 15 bp, Homo sapiens
aggaagactgcaaca

SEQ ID NO: 1598302 - DNA, 15 bp, Homo sapiens
ggaagactgcaacag

SEQ ID NO: 1598303 - DNA, 15 bp, Homo sapiens
gaagactgcaacagt

SEQ ID NO: 1598304 - DNA, 15 bp, Homo sapiens
aagactgcaacagta

SEQ ID NO: 1598305 - DNA, 15 bp, Homo sapiens
agactgcaacagtac

SEQ ID NO: 1598306 - DNA, 15 bp, Homo sapiens
gactgcaacagtaca

SEQ ID NO: 1598307 - DNA, 15 bp, Homo sapiens
actgcaacagtacac

SEQ ID NO: 1598308 - DNA, 15 bp, Homo sapiens
ctgcaacagtacact

SEQ ID NO: 1598309 - DNA, 15 bp, Homo sapiens
tgcaacagtacacta

SEQ ID NO: 1598310 - DNA, 15 bp, Homo sapiens
gcaacagtacactac

SEQ ID NO: 1598311 - DNA, 15 bp, Homo sapiens
caacagtacactacc

SEQ ID NO: 1598312 - DNA, 15 bp, Homo sapiens
aacagtacactacct

SEQ ID NO: 1598313 - DNA, 15 bp, Homo sapiens
acagtacactaccta

SEQ ID NO: 1598314 - DNA, 15 bp, Homo sapiens
cagtacactacctaa

SEQ ID NO: 1598315 - DNA, 15 bp, Homo sapiens
agtacactacctaaa

SEQ ID NO: 1598316 - DNA, 15 bp, Homo sapiens
gtacactacctaaag

SEQ ID NO: 1598317 - DNA, 15 bp, Homo sapiens
tacactacctaaagc

SEQ ID NO: 1598318 - DNA, 15 bp, Homo sapiens
acactacctaaagca

SEQ ID NO: 1598319 - DNA, 15 bp, Homo sapiens
cactacctaaagcag

SEQ ID NO: 1598320 - DNA, 15 bp, Homo sapiens
actacctaaagcagg

SEQ ID NO: 1598321 - DNA, 15 bp, Homo sapiens
ctacctaaagcaggt

SEQ ID NO: 1598322 - DNA, 15 bp, Homo sapiens
tacctaaagcaggtt

SEQ ID NO: 1598323 - DNA, 15 bp, Homo sapiens
acctaaagcaggttt

SEQ ID NO: 1598324 - DNA, 15 bp, Homo sapiens
cctaaagcaggtttt

SEQ ID NO: 1598325 - DNA, 15 bp, Homo sapiens
ctaaagcaggttttt

SEQ ID NO: 1598326 - DNA, 15 bp, Homo sapiens
taaagcaggtttttt

SEQ ID NO: 1598327 - DNA, 15 bp, Homo sapiens
aaagcaggtttttta

SEQ ID NO: 1598328 - DNA, 15 bp, Homo sapiens
aagcaggttttttac

SEQ ID NO: 1598329 - DNA, 15 bp, Homo sapiens
agcaggttttttact

SEQ ID NO: 1598330 - DNA, 15 bp, Homo sapiens
gcaggttttttactc

SEQ ID NO: 1598331 - DNA, 15 bp, Homo sapiens
caggttttttactcc

SEQ ID NO: 1598332 - DNA, 15 bp, Homo sapiens
aggttttttactcca

SEQ ID NO: 1598333 - DNA, 15 bp, Homo sapiens
ggttttttactccat

SEQ ID NO: 1598334 - DNA, 15 bp, Homo sapiens
gttttttactccatc

SEQ ID NO: 1598335 - DNA, 15 bp, Homo sapiens
ttttttactccatct

SEQ ID NO: 1598336 - DNA, 15 bp, Homo sapiens
tttttactccatctt

SEQ ID NO: 1598337 - DNA, 15 bp, Homo sapiens
ttttactccatcttt

SEQ ID NO: 1598338 - DNA, 15 bp, Homo sapiens
tttactccatctttt

SEQ ID NO: 1598339 - DNA, 15 bp, Homo sapiens
ttactccatcttttt

SEQ ID NO: 1598340 - DNA, 15 bp, Homo sapiens
tactccatctttttt

SEQ ID NO: 1598341 - DNA, 15 bp, Homo sapiens
actccatcttttttt

SEQ ID NO: 1598342 - DNA, 15 bp, Homo sapiens
ctccatctttttttg

SEQ ID NO: 1598343 - DNA, 15 bp, Homo sapiens
tccatctttttttgc

SEQ ID NO: 1598344 - DNA, 15 bp, Homo sapiens
ccatctttttttgcc

SEQ ID NO: 1598345 - DNA, 15 bp, Homo sapiens
catctttttttgcca

SEQ ID NO: 1598346 - DNA, 15 bp, Homo sapiens
atctttttttgccac

SEQ ID NO: 1598347 - DNA, 15 bp, Homo sapiens
tctttttttgccacg

SEQ ID NO: 1598348 - DNA, 15 bp, Homo sapiens
ctttttttgccacgt

SEQ ID NO: 1598349 - DNA, 15 bp, Homo sapiens
tttttttgccacgta

SEQ ID NO: 1598350 - DNA, 15 bp, Homo sapiens
ttttttgccacgtac

SEQ ID NO: 1598351 - DNA, 15 bp, Homo sapiens
tttttgccacgtaca

SEQ ID NO: 1598352 - DNA, 15 bp, Homo sapiens
ttttgccacgtacac

SEQ ID NO: 1598353 - DNA, 15 bp, Homo sapiens
tttgccacgtacact

SEQ ID NO: 1598354 - DNA, 15 bp, Homo sapiens
ttgccacgtacactg

SEQ ID NO: 1598355 - DNA, 15 bp, Homo sapiens
tgccacgtacactgg

SEQ ID NO: 1598356 - DNA, 15 bp, Homo sapiens
gccacgtacactggc

SEQ ID NO: 1598357 - DNA, 15 bp, Homo sapiens
ccacgtacactggcc

SEQ ID NO: 1598358 - DNA, 15 bp, Homo sapiens
cacgtacactggcct

SEQ ID NO: 1598359 - DNA, 15 bp, Homo sapiens
acgtacactggcctc

SEQ ID NO: 1598360 - DNA, 15 bp, Homo sapiens
cgtacactggcctcc

SEQ ID NO: 1598361 - DNA, 15 bp, Homo sapiens
gtacactggcctccc

SEQ ID NO: 1598362 - DNA, 15 bp, Homo sapiens
tacactggcctccca

SEQ ID NO: 1598363 - DNA, 15 bp, Homo sapiens
acactggcctcccac

SEQ ID NO: 1598364 - DNA, 15 bp, Homo sapiens
cactggcctcccact

SEQ ID NO: 1598365 - DNA, 15 bp, Homo sapiens
actggcctcccactt

SEQ ID NO: 1598366 - DNA, 15 bp, Homo sapiens
ctggcctcccacttt

SEQ ID NO: 1598367 - DNA, 15 bp, Homo sapiens
tggcctcccactttg

SEQ ID NO: 1598368 - DNA, 15 bp, Homo sapiens
ggcctcccactttga

SEQ ID NO: 1598369 - DNA, 15 bp, Homo sapiens
gcctcccactttgat

SEQ ID NO: 1598370 - DNA, 15 bp, Homo sapiens
cctcccactttgata

SEQ ID NO: 1598371 - DNA, 15 bp, Homo sapiens
ctcccactttgatat

SEQ ID NO: 1598372 - DNA, 15 bp, Homo sapiens
tcccactttgatatg

SEQ ID NO: 1598373 - DNA, 15 bp, Homo sapiens
cccactttgatatgc

SEQ ID NO: 1598374 - DNA, 15 bp, Homo sapiens
ccactttgatatgct

SEQ ID NO: 1598375 - DNA, 15 bp, Homo sapiens
cactttgatatgctt

SEQ ID NO: 1598376 - DNA, 15 bp, Homo sapiens
actttgatatgcttg

SEQ ID NO: 1598377 - DNA, 15 bp, Homo sapiens
ctttgatatgcttga

SEQ ID NO: 1598378 - DNA, 15 bp, Homo sapiens
tttgatatgcttgaa

SEQ ID NO: 1598379 - DNA, 15 bp, Homo sapiens
ttgatatgcttgaaa

SEQ ID NO: 1598380 - DNA, 15 bp, Homo sapiens
tgatatgcttgaaat

SEQ ID NO: 1598381 - DNA, 15 bp, Homo sapiens
gatatgcttgaaatt

SEQ ID NO: 1598382 - DNA, 15 bp, Homo sapiens
atatgcttgaaatta

SEQ ID NO: 1598383 - DNA, 15 bp, Homo sapiens
tatgcttgaaattat

SEQ ID NO: 1598384 - DNA, 15 bp, Homo sapiens
atgcttgaaattatc

SEQ ID NO: 1598385 - DNA, 15 bp, Homo sapiens
tgcttgaaattatct

SEQ ID NO: 1598386 - DNA, 15 bp, Homo sapiens
gcttgaaattatctc

SEQ ID NO: 1598387 - DNA, 15 bp, Homo sapiens
cttgaaattatctcc

SEQ ID NO: 1598388 - DNA, 15 bp, Homo sapiens
ttgaaattatctcct

SEQ ID NO: 1598389 - DNA, 15 bp, Homo sapiens
tgaaattatctcctt

SEQ ID NO: 1598390 - DNA, 15 bp, Homo sapiens
gaaattatctccttg

SEQ ID NO: 1598391 - DNA, 15 bp, Homo sapiens
aaattatctccttga

SEQ ID NO: 1598392 - DNA, 15 bp, Homo sapiens
aattatctccttgat

SEQ ID NO: 1598393 - DNA, 15 bp, Homo sapiens
attatctccttgatt

SEQ ID NO: 1598394 - DNA, 15 bp, Homo sapiens
ttatctccttgattt

SEQ ID NO: 1598395 - DNA, 15 bp, Homo sapiens
tatctccttgatttg

SEQ ID NO: 1598396 - DNA, 15 bp, Homo sapiens
atctccttgatttgt

SEQ ID NO: 1598397 - DNA, 15 bp, Homo sapiens
tctccttgatttgtc

SEQ ID NO: 1598398 - DNA, 15 bp, Homo sapiens
ctccttgatttgtct

SEQ ID NO: 1598399 - DNA, 15 bp, Homo sapiens
tccttgatttgtctt

SEQ ID NO: 1598400 - DNA, 15 bp, Homo sapiens
ccttgatttgtcttt

SEQ ID NO: 1598401 - DNA, 15 bp, Homo sapiens
cttgatttgtctttc

SEQ ID NO: 1598402 - DNA, 15 bp, Homo sapiens
ttgatttgtctttca

SEQ ID NO: 1598403 - DNA, 15 bp, Homo sapiens
tgatttgtctttcaa

SEQ ID NO: 1598404 - DNA, 15 bp, Homo sapiens
gatttgtctttcaaa

SEQ ID NO: 1598405 - DNA, 15 bp, Homo sapiens
atttgtctttcaaaa

SEQ ID NO: 1598406 - DNA, 15 bp, Homo sapiens
tttgtctttcaaaac

SEQ ID NO: 1598407 - DNA, 15 bp, Homo sapiens
ttgtctttcaaaact

SEQ ID NO: 1598408 - DNA, 15 bp, Homo sapiens
tgtctttcaaaacta

SEQ ID NO: 1598409 - DNA, 15 bp, Homo sapiens
gtctttcaaaactac

SEQ ID NO: 1598410 - DNA, 15 bp, Homo sapiens
tctttcaaaactaca

SEQ ID NO: 1598411 - DNA, 15 bp, Homo sapiens
ctttcaaaactacat

SEQ ID NO: 1598412 - DNA, 15 bp, Homo sapiens
tttcaaaactacata

SEQ ID NO: 1598413 - DNA, 15 bp, Homo sapiens
ttcaaaactacatat

SEQ ID NO: 1598414 - DNA, 15 bp, Homo sapiens
tcaaaactacatatt

SEQ ID NO: 1598415 - DNA, 15 bp, Homo sapiens
caaaactacatattg

SEQ ID NO: 1598416 - DNA, 15 bp, Homo sapiens
aaaactacatattga

SEQ ID NO: 1598417 - DNA, 15 bp, Homo sapiens
aaactacatattgag

SEQ ID NO: 1598418 - DNA, 15 bp, Homo sapiens
aactacatattgagg

SEQ ID NO: 1598419 - DNA, 15 bp, Homo sapiens
actacatattgaggc

SEQ ID NO: 1598420 - DNA, 15 bp, Homo sapiens
ctacatattgaggct

SEQ ID NO: 1598421 - DNA, 15 bp, Homo sapiens
tacatattgaggctg

SEQ ID NO: 1598422 - DNA, 15 bp, Homo sapiens
acatattgaggctgg

SEQ ID NO: 1598423 - DNA, 15 bp, Homo sapiens
catattgaggctggt

SEQ ID NO: 1598424 - DNA, 15 bp, Homo sapiens
atattgaggctggtt

SEQ ID NO: 1598425 - DNA, 15 bp, Homo sapiens
tattgaggctggttg

SEQ ID NO: 1598426 - DNA, 15 bp, Homo sapiens
attgaggctggttgc

SEQ ID NO: 1598427 - DNA, 15 bp, Homo sapiens
ttgaggctggttgcg

SEQ ID NO: 1598428 - DNA, 15 bp, Homo sapiens
tgaggctggttgcgg

SEQ ID NO: 1598429 - DNA, 15 bp, Homo sapiens
gaggctggttgcggt

SEQ ID NO: 1598430 - DNA, 15 bp, Homo sapiens
aggctggttgcggtg

SEQ ID NO: 1598431 - DNA, 15 bp, Homo sapiens
ggctggttgcggtgg

SEQ ID NO: 1598432 - DNA, 15 bp, Homo sapiens
gctggttgcggtggc

SEQ ID NO: 1598433 - DNA, 15 bp, Homo sapiens
ctggttgcggtggct

SEQ ID NO: 1598434 - DNA, 15 bp, Homo sapiens
tggttgcggtggctc

SEQ ID NO: 1598435 - DNA, 15 bp, Homo sapiens
ggttgcggtggctca

SEQ ID NO: 1598436 - DNA, 15 bp, Homo sapiens
gttgcggtggctcac

SEQ ID NO: 1598437 - DNA, 15 bp, Homo sapiens
ttgcggtggctcaca

SEQ ID NO: 1598438 - DNA, 15 bp, Homo sapiens
tttgggaggccaagc

SEQ ID NO: 1598439 - DNA, 15 bp, Homo sapiens
ttgggaggccaagcc

SEQ ID NO: 1598440 - DNA, 15 bp, Homo sapiens
tgggaggccaagccg

SEQ ID NO: 1598441 - DNA, 15 bp, Homo sapiens
gggaggccaagccgg

SEQ ID NO: 1598442 - DNA, 15 bp, Homo sapiens
ggaggccaagccgga

SEQ ID NO: 1598443 - DNA, 15 bp, Homo sapiens
gaggccaagccggac

SEQ ID NO: 1598444 - DNA, 15 bp, Homo sapiens
aggccaagccggaca

SEQ ID NO: 1598445 - DNA, 15 bp, Homo sapiens
ggccaagccggacag

SEQ ID NO: 1598446 - DNA, 15 bp, Homo sapiens
gccaagccggacaga

SEQ ID NO: 1598447 - DNA, 15 bp, Homo sapiens
ccaagccggacagat

SEQ ID NO: 1598448 - DNA, 15 bp, Homo sapiens
caagccggacagatc

SEQ ID NO: 1598449 - DNA, 15 bp, Homo sapiens
aagccggacagatca

SEQ ID NO: 1598450 - DNA, 15 bp, Homo sapiens
agccggacagatcac

SEQ ID NO: 1598451 - DNA, 15 bp, Homo sapiens
gccggacagatcact

SEQ ID NO: 1598452 - DNA, 15 bp, Homo sapiens
ccggacagatcactt

SEQ ID NO: 1598453 - DNA, 15 bp, Homo sapiens
cggacagatcacttg

SEQ ID NO: 1598454 - DNA, 15 bp, Homo sapiens
ggacagatcacttga

SEQ ID NO: 1598455 - DNA, 15 bp, Homo sapiens
gacagatcacttgag

SEQ ID NO: 1598456 - DNA, 15 bp, Homo sapiens
acagatcacttgagg

SEQ ID NO: 1598457 - DNA, 15 bp, Homo sapiens
gagaccagcctggca

SEQ ID NO: 1598458 - DNA, 15 bp, Homo sapiens
agaccagcctggcaa

SEQ ID NO: 1598459 - DNA, 15 bp, Homo sapiens
gaccagcctggcaaa

SEQ ID NO: 1598460 - DNA, 15 bp, Homo sapiens
accagcctggcaaac

SEQ ID NO: 1598461 - DNA, 15 bp, Homo sapiens
ccagcctggcaaaca

SEQ ID NO: 1598462 - DNA, 15 bp, Homo sapiens
cagcctggcaaacat

SEQ ID NO: 1598463 - DNA, 15 bp, Homo sapiens
agcctggcaaacatg

SEQ ID NO: 1598464 - DNA, 15 bp, Homo sapiens
gcctggcaaacatga

SEQ ID NO: 1598465 - DNA, 15 bp, Homo sapiens
cctggcaaacatgat

SEQ ID NO: 1598466 - DNA, 15 bp, Homo sapiens
ctggcaaacatgatg

SEQ ID NO: 1598467 - DNA, 15 bp, Homo sapiens
tggcaaacatgatga

SEQ ID NO: 1598468 - DNA, 15 bp, Homo sapiens
ggcaaacatgatgaa

SEQ ID NO: 1598469 - DNA, 15 bp, Homo sapiens
gcaaacatgatgaaa

SEQ ID NO: 1598470 - DNA, 15 bp, Homo sapiens
caaacatgatgaaac

SEQ ID NO: 1598471 - DNA, 15 bp, Homo sapiens
aaacatgatgaaacc

SEQ ID NO: 1598472 - DNA, 15 bp, Homo sapiens
catgatgaaacccca

SEQ ID NO: 1598473 - DNA, 15 bp, Homo sapiens
atgatgaaaccccac

SEQ ID NO: 1598474 - DNA, 15 bp, Homo sapiens
tgatgaaaccccacc

SEQ ID NO: 1598475 - DNA, 15 bp, Homo sapiens
gatgaaaccccacct

SEQ ID NO: 1598476 - DNA, 15 bp, Homo sapiens
atgaaaccccacctt

SEQ ID NO: 1598477 - DNA, 15 bp, Homo sapiens
tgaaaccccaccttt

SEQ ID NO: 1598478 - DNA, 15 bp, Homo sapiens
gaaaccccaccttta

SEQ ID NO: 1598479 - DNA, 15 bp, Homo sapiens
aaaccccacctttac

SEQ ID NO: 1598480 - DNA, 15 bp, Homo sapiens
aaccccacctttact

SEQ ID NO: 1598481 - DNA, 15 bp, Homo sapiens
accccacctttacta

SEQ ID NO: 1598482 - DNA, 15 bp, Homo sapiens
ccccacctttactaa

SEQ ID NO: 1598483 - DNA, 15 bp, Homo sapiens
cccacctttactaaa

SEQ ID NO: 1598484 - DNA, 15 bp, Homo sapiens
ccacctttactaaaa

SEQ ID NO: 1598485 - DNA, 15 bp, Homo sapiens
cacctttactaaaaa

SEQ ID NO: 1598486 - DNA, 15 bp, Homo sapiens
acctttactaaaaat

SEQ ID NO: 1598487 - DNA, 15 bp, Homo sapiens
cctttactaaaaata

SEQ ID NO: 1598488 - DNA, 15 bp, Homo sapiens
aattagccaggcgta

SEQ ID NO: 1598489 - DNA, 15 bp, Homo sapiens
attagccaggcgtag

SEQ ID NO: 1598490 - DNA, 15 bp, Homo sapiens
ttagccaggcgtagt

SEQ ID NO: 1598491 - DNA, 15 bp, Homo sapiens
tagccaggcgtagtg

SEQ ID NO: 1598492 - DNA, 15 bp, Homo sapiens
agccaggcgtagtgg

SEQ ID NO: 1598493 - DNA, 15 bp, Homo sapiens
gccaggcgtagtggt

SEQ ID NO: 1598494 - DNA, 15 bp, Homo sapiens
ccaggcgtagtggtg

SEQ ID NO: 1598495 - DNA, 15 bp, Homo sapiens
caggcgtagtggtgt

SEQ ID NO: 1598496 - DNA, 15 bp, Homo sapiens
aggcgtagtggtgtg

SEQ ID NO: 1598497 - DNA, 15 bp, Homo sapiens
ggcgtagtggtgtgt

SEQ ID NO: 1598498 - DNA, 15 bp, Homo sapiens
gcgtagtggtgtgtg

SEQ ID NO: 1598499 - DNA, 15 bp, Homo sapiens
cgtagtggtgtgtgc

SEQ ID NO: 1598500 - DNA, 15 bp, Homo sapiens
gtagtggtgtgtgcc

SEQ ID NO: 1598501 - DNA, 15 bp, Homo sapiens
tagtggtgtgtgcct

SEQ ID NO: 1598502 - DNA, 15 bp, Homo sapiens
agtggtgtgtgcctg

SEQ ID NO: 1598503 - DNA, 15 bp, Homo sapiens
gtggtgtgtgcctgt

SEQ ID NO: 1598504 - DNA, 15 bp, Homo sapiens
tggtgtgtgcctgta

SEQ ID NO: 1598505 - DNA, 15 bp, Homo sapiens
ggtgtgtgcctgtaa

SEQ ID NO: 1598506 - DNA, 15 bp, Homo sapiens
gtgtgtgcctgtaac

SEQ ID NO: 1598507 - DNA, 15 bp, Homo sapiens
tgtgtgcctgtaacc

SEQ ID NO: 1598508 - DNA, 15 bp, Homo sapiens
gtgtgcctgtaaccc

SEQ ID NO: 1598509 - DNA, 15 bp, Homo sapiens
tgtgcctgtaaccca

SEQ ID NO: 1598510 - DNA, 15 bp, Homo sapiens
gtgcctgtaacccag

SEQ ID NO: 1598511 - DNA, 15 bp, Homo sapiens
tgcctgtaacccagc

SEQ ID NO: 1598512 - DNA, 15 bp, Homo sapiens
gcctgtaacccagct

SEQ ID NO: 1598513 - DNA, 15 bp, Homo sapiens
cctgtaacccagcta

SEQ ID NO: 1598514 - DNA, 15 bp, Homo sapiens
ctgtaacccagctac

SEQ ID NO: 1598515 - DNA, 15 bp, Homo sapiens
tgtaacccagctacc

SEQ ID NO: 1598516 - DNA, 15 bp, Homo sapiens
gtaacccagctacct

SEQ ID NO: 1598517 - DNA, 15 bp, Homo sapiens
taacccagctacctg

SEQ ID NO: 1598518 - DNA, 15 bp, Homo sapiens
aacccagctacctgg

SEQ ID NO: 1598519 - DNA, 15 bp, Homo sapiens
acccagctacctggg

SEQ ID NO: 1598520 - DNA, 15 bp, Homo sapiens
cccagctacctggga

SEQ ID NO: 1598521 - DNA, 15 bp, Homo sapiens
ccagctacctgggag

SEQ ID NO: 1598522 - DNA, 15 bp, Homo sapiens
cagctacctgggagg

SEQ ID NO: 1598523 - DNA, 15 bp, Homo sapiens
agctacctgggaggc

SEQ ID NO: 1598524 - DNA, 15 bp, Homo sapiens
gctacctgggaggct

SEQ ID NO: 1598525 - DNA, 15 bp, Homo sapiens
ggagaatcactggaa

SEQ ID NO: 1598526 - DNA, 15 bp, Homo sapiens
gagaatcactggaac

SEQ ID NO: 1598527 - DNA, 15 bp, Homo sapiens
agaatcactggaacc

SEQ ID NO: 1598528 - DNA, 15 bp, Homo sapiens
gaatcactggaaccc

SEQ ID NO: 1598529 - DNA, 15 bp, Homo sapiens
aatcactggaacccg

SEQ ID NO: 1598530 - DNA, 15 bp, Homo sapiens
atcactggaacccgg

SEQ ID NO: 1598531 - DNA, 15 bp, Homo sapiens
tcactggaacccggg

SEQ ID NO: 1598532 - DNA, 15 bp, Homo sapiens
cactggaacccggga

SEQ ID NO: 1598533 - DNA, 15 bp, Homo sapiens
actggaacccgggag

SEQ ID NO: 1598534 - DNA, 15 bp, Homo sapiens
ggaacccgggaggca

SEQ ID NO: 1598535 - DNA, 15 bp, Homo sapiens
gggaggcagaggcta

SEQ ID NO: 1598536 - DNA, 15 bp, Homo sapiens
ggaggcagaggctac

SEQ ID NO: 1598537 - DNA, 15 bp, Homo sapiens
gaggcagaggctaca

SEQ ID NO: 1598538 - DNA, 15 bp, Homo sapiens
aggcagaggctacag

SEQ ID NO: 1598539 - DNA, 15 bp, Homo sapiens
ggcagaggctacagt

SEQ ID NO: 1598540 - DNA, 15 bp, Homo sapiens
gcagaggctacagtg

SEQ ID NO: 1598541 - DNA, 15 bp, Homo sapiens
cagaggctacagtga

SEQ ID NO: 1598542 - DNA, 15 bp, Homo sapiens
agaggctacagtgag

SEQ ID NO: 1598543 - DNA, 15 bp, Homo sapiens
gaggctacagtgagc

SEQ ID NO: 1598544 - DNA, 15 bp, Homo sapiens
aggctacagtgagcc

SEQ ID NO: 1598545 - DNA, 15 bp, Homo sapiens
ggctacagtgagcca

SEQ ID NO: 1598546 - DNA, 15 bp, Homo sapiens
gctacagtgagccaa

SEQ ID NO: 1598547 - DNA, 15 bp, Homo sapiens
ctacagtgagccaac

SEQ ID NO: 1598548 - DNA, 15 bp, Homo sapiens
tacagtgagccaaca

SEQ ID NO: 1598549 - DNA, 15 bp, Homo sapiens
acagtgagccaacat

SEQ ID NO: 1598550 - DNA, 15 bp, Homo sapiens
cagtgagccaacatc

SEQ ID NO: 1598551 - DNA, 15 bp, Homo sapiens
agtgagccaacatca

SEQ ID NO: 1598552 - DNA, 15 bp, Homo sapiens
gtgagccaacatcac

SEQ ID NO: 1598553 - DNA, 15 bp, Homo sapiens
tgagccaacatcacg

SEQ ID NO: 1598554 - DNA, 15 bp, Homo sapiens
gagccaacatcacgc

SEQ ID NO: 1598555 - DNA, 15 bp, Homo sapiens
agccaacatcacgcc

SEQ ID NO: 1598556 - DNA, 15 bp, Homo sapiens
gccaacatcacgcca

SEQ ID NO: 1598557 - DNA, 15 bp, Homo sapiens
ccaacatcacgccac

SEQ ID NO: 1598558 - DNA, 15 bp, Homo sapiens
caacatcacgccact

SEQ ID NO: 1598559 - DNA, 15 bp, Homo sapiens
aacatcacgccactg

SEQ ID NO: 1598560 - DNA, 15 bp, Homo sapiens
acatcacgccactgc

SEQ ID NO: 1598561 - DNA, 15 bp, Homo sapiens
catcacgccactgca

SEQ ID NO: 1598562 - DNA, 15 bp, Homo sapiens
actctgtctcaaaac

SEQ ID NO: 1598563 - DNA, 15 bp, Homo sapiens
ctctgtctcaaaaca

SEQ ID NO: 1598564 - DNA, 15 bp, Homo sapiens
tctgtctcaaaacaa

SEQ ID NO: 1598565 - DNA, 15 bp, Homo sapiens
gtctcaaaacaaaac

SEQ ID NO: 1598566 - DNA, 15 bp, Homo sapiens
aacaaaacaaaaaac

SEQ ID NO: 1598567 - DNA, 15 bp, Homo sapiens
acaaaacaaaaaaca

SEQ ID NO: 1598568 - DNA, 15 bp, Homo sapiens
caaaacaaaaaacaa

SEQ ID NO: 1598569 - DNA, 15 bp, Homo sapiens
aaacaaaaaacaaaa

SEQ ID NO: 1598570 - DNA, 15 bp, Homo sapiens
aacaaaaaacaaaaa

SEQ ID NO: 1598571 - DNA, 15 bp, Homo sapiens
acaaaaaacaaaaaa

SEQ ID NO: 1598572 - DNA, 15 bp, Homo sapiens
caaaaaacaaaaaac

SEQ ID NO: 1598573 - DNA, 15 bp, Homo sapiens
aaaaaacaaaaaact

SEQ ID NO: 1598574 - DNA, 15 bp, Homo sapiens
aaaaacaaaaaacta

SEQ ID NO: 1598575 - DNA, 15 bp, Homo sapiens
aaaacaaaaaactac

SEQ ID NO: 1598576 - DNA, 15 bp, Homo sapiens
aaacaaaaaactacg

SEQ ID NO: 1598577 - DNA, 15 bp, Homo sapiens
aacaaaaaactacgt

SEQ ID NO: 1598578 - DNA, 15 bp, Homo sapiens
acaaaaaactacgta

SEQ ID NO: 1598579 - DNA, 15 bp, Homo sapiens
caaaaaactacgtat

SEQ ID NO: 1598580 - DNA, 15 bp, Homo sapiens
aaaaaactacgtatt

SEQ ID NO: 1598581 - DNA, 15 bp, Homo sapiens
aaaaactacgtatta

SEQ ID NO: 1598582 - DNA, 15 bp, Homo sapiens
aaaactacgtattaa

SEQ ID NO: 1598583 - DNA, 15 bp, Homo sapiens
aaactacgtattaag

SEQ ID NO: 1598584 - DNA, 15 bp, Homo sapiens
aactacgtattaaga

SEQ ID NO: 1598585 - DNA, 15 bp, Homo sapiens
actacgtattaagac

SEQ ID NO: 1598586 - DNA, 15 bp, Homo sapiens
ctacgtattaagaca

SEQ ID NO: 1598587 - DNA, 15 bp, Homo sapiens
tacgtattaagacaa

SEQ ID NO: 1598588 - DNA, 15 bp, Homo sapiens
acgtattaagacaag

SEQ ID NO: 1598589 - DNA, 15 bp, Homo sapiens
cgtattaagacaaga

SEQ ID NO: 1598590 - DNA, 15 bp, Homo sapiens
gtattaagacaagaa

SEQ ID NO: 1598591 - DNA, 15 bp, Homo sapiens
tattaagacaagaaa

SEQ ID NO: 1598592 - DNA, 15 bp, Homo sapiens
attaagacaagaaac

SEQ ID NO: 1598593 - DNA, 15 bp, Homo sapiens
ttaagacaagaaaca

SEQ ID NO: 1598594 - DNA, 15 bp, Homo sapiens
taagacaagaaacag

SEQ ID NO: 1598595 - DNA, 15 bp, Homo sapiens
aagacaagaaacaga

SEQ ID NO: 1598596 - DNA, 15 bp, Homo sapiens
agacaagaaacagac

SEQ ID NO: 1598597 - DNA, 15 bp, Homo sapiens
gacaagaaacagact

SEQ ID NO: 1598598 - DNA, 15 bp, Homo sapiens
acaagaaacagactg

SEQ ID NO: 1598599 - DNA, 15 bp, Homo sapiens
caagaaacagactgg

SEQ ID NO: 1598600 - DNA, 15 bp, Homo sapiens
aagaaacagactggg

SEQ ID NO: 1598601 - DNA, 15 bp, Homo sapiens
agaaacagactgggc

SEQ ID NO: 1598602 - DNA, 15 bp, Homo sapiens
gaaacagactgggcg

SEQ ID NO: 1598603 - DNA, 15 bp, Homo sapiens
aaacagactgggcgc

SEQ ID NO: 1598604 - DNA, 15 bp, Homo sapiens
aacagactgggcgcg

SEQ ID NO: 1598605 - DNA, 15 bp, Homo sapiens
acagactgggcgcgg

SEQ ID NO: 1598606 - DNA, 15 bp, Homo sapiens
cagactgggcgcggt

SEQ ID NO: 1598607 - DNA, 15 bp, Homo sapiens
agactgggcgcggtg

SEQ ID NO: 1598608 - DNA, 15 bp, Homo sapiens
gactgggcgcggtgg

SEQ ID NO: 1598609 - DNA, 15 bp, Homo sapiens
actgggcgcggtggc

SEQ ID NO: 1598610 - DNA, 15 bp, Homo sapiens
ggcgggcggatcaca

SEQ ID NO: 1598611 - DNA, 15 bp, Homo sapiens
gcgggcggatcacaa

SEQ ID NO: 1598612 - DNA, 15 bp, Homo sapiens
cgggcggatcacaag

SEQ ID NO: 1598613 - DNA, 15 bp, Homo sapiens
tctactaaaaaatag

SEQ ID NO: 1598614 - DNA, 15 bp, Homo sapiens
ctactaaaaaataga

SEQ ID NO: 1598615 - DNA, 15 bp, Homo sapiens
tactaaaaaatagaa

SEQ ID NO: 1598616 - DNA, 15 bp, Homo sapiens
actaaaaaatagaaa

SEQ ID NO: 1598617 - DNA, 15 bp, Homo sapiens
ctaaaaaatagaaaa

SEQ ID NO: 1598618 - DNA, 15 bp, Homo sapiens
taaaaaatagaaaaa

SEQ ID NO: 1598619 - DNA, 15 bp, Homo sapiens
aaatagaaaaaatta

SEQ ID NO: 1598620 - DNA, 15 bp, Homo sapiens
aatagaaaaaattag

SEQ ID NO: 1598621 - DNA, 15 bp, Homo sapiens
atagaaaaaattagc

SEQ ID NO: 1598622 - DNA, 15 bp, Homo sapiens
tagaaaaaattagct

SEQ ID NO: 1598623 - DNA, 15 bp, Homo sapiens
agaaaaaattagctg

SEQ ID NO: 1598624 - DNA, 15 bp, Homo sapiens
gaaaaaattagctgg

SEQ ID NO: 1598625 - DNA, 15 bp, Homo sapiens
aaaaattagctgggg

SEQ ID NO: 1598626 - DNA, 15 bp, Homo sapiens
aaaattagctggggt

SEQ ID NO: 1598627 - DNA, 15 bp, Homo sapiens
aaattagctggggtg

SEQ ID NO: 1598628 - DNA, 15 bp, Homo sapiens
aattagctggggtgg

SEQ ID NO: 1598629 - DNA, 15 bp, Homo sapiens
attagctggggtggt

SEQ ID NO: 1598630 - DNA, 15 bp, Homo sapiens
ttagctggggtggtg

SEQ ID NO: 1598631 - DNA, 15 bp, Homo sapiens
tagctggggtggtgg

SEQ ID NO: 1598632 - DNA, 15 bp, Homo sapiens
agctggggtggtggc

SEQ ID NO: 1598633 - DNA, 15 bp, Homo sapiens
gctggggtggtggcg

SEQ ID NO: 1598634 - DNA, 15 bp, Homo sapiens
ctggggtggtggcgg

SEQ ID NO: 1598635 - DNA, 15 bp, Homo sapiens
tggggtggtggcggg

SEQ ID NO: 1598636 - DNA, 15 bp, Homo sapiens
ggggtggtggcgggc

SEQ ID NO: 1598637 - DNA, 15 bp, Homo sapiens
gggtggtggcgggcg

SEQ ID NO: 1598638 - DNA, 15 bp, Homo sapiens
ggtggcgggcgccta

SEQ ID NO: 1598639 - DNA, 15 bp, Homo sapiens
gtggcgggcgcctat

SEQ ID NO: 1598640 - DNA, 15 bp, Homo sapiens
tggcgggcgcctata

SEQ ID NO: 1598641 - DNA, 15 bp, Homo sapiens
ggcgggcgcctatag

SEQ ID NO: 1598642 - DNA, 15 bp, Homo sapiens
gcgggcgcctatagt

SEQ ID NO: 1598643 - DNA, 15 bp, Homo sapiens
cgggcgcctatagtc

SEQ ID NO: 1598644 - DNA, 15 bp, Homo sapiens
gggcgcctatagtct

SEQ ID NO: 1598645 - DNA, 15 bp, Homo sapiens
ggcgcctatagtctc

SEQ ID NO: 1598646 - DNA, 15 bp, Homo sapiens
gcgcctatagtctca

SEQ ID NO: 1598647 - DNA, 15 bp, Homo sapiens
cgcctatagtctcag

SEQ ID NO: 1598648 - DNA, 15 bp, Homo sapiens
gcctatagtctcagc

SEQ ID NO: 1598649 - DNA, 15 bp, Homo sapiens
cctatagtctcagct

SEQ ID NO: 1598650 - DNA, 15 bp, Homo sapiens
ctatagtctcagcta

SEQ ID NO: 1598651 - DNA, 15 bp, Homo sapiens
tatagtctcagctac

SEQ ID NO: 1598652 - DNA, 15 bp, Homo sapiens
atagtctcagctact

SEQ ID NO: 1598653 - DNA, 15 bp, Homo sapiens
agcttgcagtgagca

SEQ ID NO: 1598654 - DNA, 15 bp, Homo sapiens
gcttgcagtgagcag

SEQ ID NO: 1598655 - DNA, 15 bp, Homo sapiens
cttgcagtgagcaga

SEQ ID NO: 1598656 - DNA, 15 bp, Homo sapiens
cagtgagcagagatc

SEQ ID NO: 1598657 - DNA, 15 bp, Homo sapiens
agtgagcagagatcg

SEQ ID NO: 1598658 - DNA, 15 bp, Homo sapiens
gtgagcagagatcgt

SEQ ID NO: 1598659 - DNA, 15 bp, Homo sapiens
tgagcagagatcgtg

SEQ ID NO: 1598660 - DNA, 15 bp, Homo sapiens
gagcagagatcgtgc

SEQ ID NO: 1598661 - DNA, 15 bp, Homo sapiens
agcagagatcgtgcc

SEQ ID NO: 1598662 - DNA, 15 bp, Homo sapiens
gcagagatcgtgcca

SEQ ID NO: 1598663 - DNA, 15 bp, Homo sapiens
cagagatcgtgccac

SEQ ID NO: 1598664 - DNA, 15 bp, Homo sapiens
agagatcgtgccact

SEQ ID NO: 1598665 - DNA, 15 bp, Homo sapiens
cactccagtctgggt

SEQ ID NO: 1598666 - DNA, 15 bp, Homo sapiens
actccagtctgggtg

SEQ ID NO: 1598667 - DNA, 15 bp, Homo sapiens
ctccagtctgggtga

SEQ ID NO: 1598668 - DNA, 15 bp, Homo sapiens
tccagtctgggtgac

SEQ ID NO: 1598669 - DNA, 15 bp, Homo sapiens
ccagtctgggtgaca

SEQ ID NO: 1598670 - DNA, 15 bp, Homo sapiens
cagtctgggtgacag

SEQ ID NO: 1598671 - DNA, 15 bp, Homo sapiens
agtctgggtgacaga

SEQ ID NO: 1598672 - DNA, 15 bp, Homo sapiens
gtctgggtgacagag

SEQ ID NO: 1598673 - DNA, 15 bp, Homo sapiens
tctgggtgacagagc

SEQ ID NO: 1598674 - DNA, 15 bp, Homo sapiens
ctcaaaaaaaaaaac

SEQ ID NO: 1598675 - DNA, 15 bp, Homo sapiens
tcaaaaaaaaaaaca

SEQ ID NO: 1598676 - DNA, 15 bp, Homo sapiens
caaaaaaaaaaacaa

SEQ ID NO: 1598677 - DNA, 15 bp, Homo sapiens
aaaaaaaacaaaaac

SEQ ID NO: 1598678 - DNA, 15 bp, Homo sapiens
aaaacaaaaacaaga

SEQ ID NO: 1598679 - DNA, 15 bp, Homo sapiens
aaacaaaaacaagaa

SEQ ID NO: 1598680 - DNA, 15 bp, Homo sapiens
aacaaaaacaagaaa

SEQ ID NO: 1598681 - DNA, 15 bp, Homo sapiens
acaaaaacaagaaac

SEQ ID NO: 1598682 - DNA, 15 bp, Homo sapiens
caaaaacaagaaaca

SEQ ID NO: 1598683 - DNA, 15 bp, Homo sapiens
aaaaacaagaaacaa

SEQ ID NO: 1598684 - DNA, 15 bp, Homo sapiens
aaaacaagaaacaaa

SEQ ID NO: 1598685 - DNA, 15 bp, Homo sapiens
aaacaagaaacaaat

SEQ ID NO: 1598686 - DNA, 15 bp, Homo sapiens
aacaagaaacaaatt

SEQ ID NO: 1598687 - DNA, 15 bp, Homo sapiens
acaagaaacaaatta

SEQ ID NO: 1598688 - DNA, 15 bp, Homo sapiens
caagaaacaaattaa

SEQ ID NO: 1598689 - DNA, 15 bp, Homo sapiens
aagaaacaaattaaa

SEQ ID NO: 1598690 - DNA, 15 bp, Homo sapiens
agaaacaaattaaac

SEQ ID NO: 1598691 - DNA, 15 bp, Homo sapiens
gaaacaaattaaact

SEQ ID NO: 1598692 - DNA, 15 bp, Homo sapiens
aaacaaattaaacta

SEQ ID NO: 1598693 - DNA, 15 bp, Homo sapiens
aacaaattaaactaa

SEQ ID NO: 1598694 - DNA, 15 bp, Homo sapiens
acaaattaaactaat

SEQ ID NO: 1598695 - DNA, 15 bp, Homo sapiens
caaattaaactaatg

SEQ ID NO: 1598696 - DNA, 15 bp, Homo sapiens
aaattaaactaatgt

SEQ ID NO: 1598697 - DNA, 15 bp, Homo sapiens
aattaaactaatgtg

SEQ ID NO: 1598698 - DNA, 15 bp, Homo sapiens
attaaactaatgtga

SEQ ID NO: 1598699 - DNA, 15 bp, Homo sapiens
ttaaactaatgtgat

SEQ ID NO: 1598700 - DNA, 15 bp, Homo sapiens
taaactaatgtgata

SEQ ID NO: 1598701 - DNA, 15 bp, Homo sapiens
aaactaatgtgatag

SEQ ID NO: 1598702 - DNA, 15 bp, Homo sapiens
aactaatgtgataga

SEQ ID NO: 1598703 - DNA, 15 bp, Homo sapiens
actaatgtgatagac

SEQ ID NO: 1598704 - DNA, 15 bp, Homo sapiens
ctaatgtgatagact

SEQ ID NO: 1598705 - DNA, 15 bp, Homo sapiens
taatgtgatagacta

SEQ ID NO: 1598706 - DNA, 15 bp, Homo sapiens
aatgtgatagactac

SEQ ID NO: 1598707 - DNA, 15 bp, Homo sapiens
atgtgatagactact

SEQ ID NO: 1598708 - DNA, 15 bp, Homo sapiens
tgtgatagactactg

SEQ ID NO: 1598709 - DNA, 15 bp, Homo sapiens
gtgatagactactgc

SEQ ID NO: 1598710 - DNA, 15 bp, Homo sapiens
tgatagactactgct

SEQ ID NO: 1598711 - DNA, 15 bp, Homo sapiens
gatagactactgctt

SEQ ID NO: 1598712 - DNA, 15 bp, Homo sapiens
atagactactgcttt

SEQ ID NO: 1598713 - DNA, 15 bp, Homo sapiens
tagactactgctttg

SEQ ID NO: 1598714 - DNA, 15 bp, Homo sapiens
agactactgctttgt

SEQ ID NO: 1598715 - DNA, 15 bp, Homo sapiens
gactactgctttgtt

SEQ ID NO: 1598716 - DNA, 15 bp, Homo sapiens
actactgctttgttt

SEQ ID NO: 1598717 - DNA, 15 bp, Homo sapiens
ctactgctttgtttt

SEQ ID NO: 1598718 - DNA, 15 bp, Homo sapiens
tactgctttgttttc

SEQ ID NO: 1598719 - DNA, 15 bp, Homo sapiens
actgctttgttttca

SEQ ID NO: 1598720 - DNA, 15 bp, Homo sapiens
ctgctttgttttcaa

SEQ ID NO: 1598721 - DNA, 15 bp, Homo sapiens
tgctttgttttcaaa

SEQ ID NO: 1598722 - DNA, 15 bp, Homo sapiens
gctttgttttcaaaa

SEQ ID NO: 1598723 - DNA, 15 bp, Homo sapiens
ctttgttttcaaaag

SEQ ID NO: 1598724 - DNA, 15 bp, Homo sapiens
tttgttttcaaaaga

SEQ ID NO: 1598725 - DNA, 15 bp, Homo sapiens
ttgttttcaaaagat

SEQ ID NO: 1598726 - DNA, 15 bp, Homo sapiens
tgttttcaaaagata

SEQ ID NO: 1598727 - DNA, 15 bp, Homo sapiens
gttttcaaaagatac

SEQ ID NO: 1598728 - DNA, 15 bp, Homo sapiens
ttttcaaaagataca

SEQ ID NO: 1598729 - DNA, 15 bp, Homo sapiens
tttcaaaagatacac

SEQ ID NO: 1598730 - DNA, 15 bp, Homo sapiens
ttcaaaagatacact

SEQ ID NO: 1598731 - DNA, 15 bp, Homo sapiens
tcaaaagatacactc

SEQ ID NO: 1598732 - DNA, 15 bp, Homo sapiens
caaaagatacactcc

SEQ ID NO: 1598733 - DNA, 15 bp, Homo sapiens
aaaagatacactccc

SEQ ID NO: 1598734 - DNA, 15 bp, Homo sapiens
aaagatacactcccc

SEQ ID NO: 1598735 - DNA, 15 bp, Homo sapiens
aagatacactcccca

SEQ ID NO: 1598736 - DNA, 15 bp, Homo sapiens
agatacactccccaa

SEQ ID NO: 1598737 - DNA, 15 bp, Homo sapiens
gatacactccccaaa

SEQ ID NO: 1598738 - DNA, 15 bp, Homo sapiens
atacactccccaaaa

SEQ ID NO: 1598739 - DNA, 15 bp, Homo sapiens
tacactccccaaaag

SEQ ID NO: 1598740 - DNA, 15 bp, Homo sapiens
acactccccaaaagt

SEQ ID NO: 1598741 - DNA, 15 bp, Homo sapiens
cactccccaaaagtt

SEQ ID NO: 1598742 - DNA, 15 bp, Homo sapiens
actccccaaaagtta

SEQ ID NO: 1598743 - DNA, 15 bp, Homo sapiens
ctccccaaaagttac

SEQ ID NO: 1598744 - DNA, 15 bp, Homo sapiens
tccccaaaagttact

SEQ ID NO: 1598745 - DNA, 15 bp, Homo sapiens
ccccaaaagttactg

SEQ ID NO: 1598746 - DNA, 15 bp, Homo sapiens
cccaaaagttactga

SEQ ID NO: 1598747 - DNA, 15 bp, Homo sapiens
ccaaaagttactgat

SEQ ID NO: 1598748 - DNA, 15 bp, Homo sapiens
caaaagttactgatc

SEQ ID NO: 1598749 - DNA, 15 bp, Homo sapiens
aaaagttactgatct

SEQ ID NO: 1598750 - DNA, 15 bp, Homo sapiens
aaagttactgatcta

SEQ ID NO: 1598751 - DNA, 15 bp, Homo sapiens
aagttactgatctaa

SEQ ID NO: 1598752 - DNA, 15 bp, Homo sapiens
agttactgatctaaa

SEQ ID NO: 1598753 - DNA, 15 bp, Homo sapiens
gttactgatctaaaa

SEQ ID NO: 1598754 - DNA, 15 bp, Homo sapiens
ttactgatctaaaat

SEQ ID NO: 1598755 - DNA, 15 bp, Homo sapiens
tactgatctaaaata

SEQ ID NO: 1598756 - DNA, 15 bp, Homo sapiens
actgatctaaaatac

SEQ ID NO: 1598757 - DNA, 15 bp, Homo sapiens
ctgatctaaaataca

SEQ ID NO: 1598758 - DNA, 15 bp, Homo sapiens
tgatctaaaatacag

SEQ ID NO: 1598759 - DNA, 15 bp, Homo sapiens
gatctaaaatacagt

SEQ ID NO: 1598760 - DNA, 15 bp, Homo sapiens
atctaaaatacagta

SEQ ID NO: 1598761 - DNA, 15 bp, Homo sapiens
tctaaaatacagtag

SEQ ID NO: 1598762 - DNA, 15 bp, Homo sapiens
ctaaaatacagtagt

SEQ ID NO: 1598763 - DNA, 15 bp, Homo sapiens
taaaatacagtagta

SEQ ID NO: 1598764 - DNA, 15 bp, Homo sapiens
aaaatacagtagtac

SEQ ID NO: 1598765 - DNA, 15 bp, Homo sapiens
aaatacagtagtact

SEQ ID NO: 1598766 - DNA, 15 bp, Homo sapiens
aatacagtagtacta

SEQ ID NO: 1598767 - DNA, 15 bp, Homo sapiens
atacagtagtactat

SEQ ID NO: 1598768 - DNA, 15 bp, Homo sapiens
tacagtagtactatc

SEQ ID NO: 1598769 - DNA, 15 bp, Homo sapiens
acagtagtactatct

SEQ ID NO: 1598770 - DNA, 15 bp, Homo sapiens
cagtagtactatctc

SEQ ID NO: 1598771 - DNA, 15 bp, Homo sapiens
agtagtactatctct

SEQ ID NO: 1598772 - DNA, 15 bp, Homo sapiens
gtagtactatctctg

SEQ ID NO: 1598773 - DNA, 15 bp, Homo sapiens
tagtactatctctgt

SEQ ID NO: 1598774 - DNA, 15 bp, Homo sapiens
agtactatctctgtt

SEQ ID NO: 1598775 - DNA, 15 bp, Homo sapiens
gtactatctctgttt

SEQ ID NO: 1598776 - DNA, 15 bp, Homo sapiens
tactatctctgttta

SEQ ID NO: 1598777 - DNA, 15 bp, Homo sapiens
actatctctgtttag

SEQ ID NO: 1598778 - DNA, 15 bp, Homo sapiens
ctatctctgtttagt

SEQ ID NO: 1598779 - DNA, 15 bp, Homo sapiens
tatctctgtttagta

SEQ ID NO: 1598780 - DNA, 15 bp, Homo sapiens
atctctgtttagtaa

SEQ ID NO: 1598781 - DNA, 15 bp, Homo sapiens
tctctgtttagtaag

SEQ ID NO: 1598782 - DNA, 15 bp, Homo sapiens
ctctgtttagtaaga

SEQ ID NO: 1598783 - DNA, 15 bp, Homo sapiens
tctgtttagtaagaa

SEQ ID NO: 1598784 - DNA, 15 bp, Homo sapiens
ctgtttagtaagaac

SEQ ID NO: 1598785 - DNA, 15 bp, Homo sapiens
tgtttagtaagaacc

SEQ ID NO: 1598786 - DNA, 15 bp, Homo sapiens
gtttagtaagaaccc

SEQ ID NO: 1598787 - DNA, 15 bp, Homo sapiens
tttagtaagaaccct

SEQ ID NO: 1598788 - DNA, 15 bp, Homo sapiens
ttagtaagaaccctg

SEQ ID NO: 1598789 - DNA, 15 bp, Homo sapiens
tagtaagaaccctga

SEQ ID NO: 1598790 - DNA, 15 bp, Homo sapiens
agtaagaaccctgac

SEQ ID NO: 1598791 - DNA, 15 bp, Homo sapiens
gtaagaaccctgaca

SEQ ID NO: 1598792 - DNA, 15 bp, Homo sapiens
taagaaccctgacaa

SEQ ID NO: 1598793 - DNA, 15 bp, Homo sapiens
aagaaccctgacaac

SEQ ID NO: 1598794 - DNA, 15 bp, Homo sapiens
agaaccctgacaact

SEQ ID NO: 1598795 - DNA, 15 bp, Homo sapiens
gaaccctgacaacta

SEQ ID NO: 1598796 - DNA, 15 bp, Homo sapiens
aaccctgacaactaa

SEQ ID NO: 1598797 - DNA, 15 bp, Homo sapiens
accctgacaactaat

SEQ ID NO: 1598798 - DNA, 15 bp, Homo sapiens
ccctgacaactaata

SEQ ID NO: 1598799 - DNA, 15 bp, Homo sapiens
cctgacaactaatag

SEQ ID NO: 1598800 - DNA, 15 bp, Homo sapiens
ctgacaactaatagt

SEQ ID NO: 1598801 - DNA, 15 bp, Homo sapiens
tgacaactaatagtg

SEQ ID NO: 1598802 - DNA, 15 bp, Homo sapiens
gacaactaatagtgt

SEQ ID NO: 1598803 - DNA, 15 bp, Homo sapiens
acaactaatagtgtt

SEQ ID NO: 1598804 - DNA, 15 bp, Homo sapiens
caactaatagtgttc

SEQ ID NO: 1598805 - DNA, 15 bp, Homo sapiens
aactaatagtgttct

SEQ ID NO: 1598806 - DNA, 15 bp, Homo sapiens
actaatagtgttctt

SEQ ID NO: 1598807 - DNA, 15 bp, Homo sapiens
ctaatagtgttctta

SEQ ID NO: 1598808 - DNA, 15 bp, Homo sapiens
taatagtgttcttat

SEQ ID NO: 1598809 - DNA, 15 bp, Homo sapiens
aatagtgttcttata

SEQ ID NO: 1598810 - DNA, 15 bp, Homo sapiens
atagtgttcttatat

SEQ ID NO: 1598811 - DNA, 15 bp, Homo sapiens
tagtgttcttatatg

SEQ ID NO: 1598812 - DNA, 15 bp, Homo sapiens
agtgttcttatatgt

SEQ ID NO: 1598813 - DNA, 15 bp, Homo sapiens
gtgttcttatatgta

SEQ ID NO: 1598814 - DNA, 15 bp, Homo sapiens
tgttcttatatgtaa

SEQ ID NO: 1598815 - DNA, 15 bp, Homo sapiens
gttcttatatgtaaa

SEQ ID NO: 1598816 - DNA, 15 bp, Homo sapiens
ttcttatatgtaaaa

SEQ ID NO: 1598817 - DNA, 15 bp, Homo sapiens
tcttatatgtaaaat

SEQ ID NO: 1598818 - DNA, 15 bp, Homo sapiens
cttatatgtaaaatg

SEQ ID NO: 1598819 - DNA, 15 bp, Homo sapiens
ttatatgtaaaatgc

SEQ ID NO: 1598820 - DNA, 15 bp, Homo sapiens
tatatgtaaaatgct

SEQ ID NO: 1598821 - DNA, 15 bp, Homo sapiens
atatgtaaaatgcta

SEQ ID NO: 1598822 - DNA, 15 bp, Homo sapiens
tatgtaaaatgctat

SEQ ID NO: 1598823 - DNA, 15 bp, Homo sapiens
atgtaaaatgctatt

SEQ ID NO: 1598824 - DNA, 15 bp, Homo sapiens
tgtaaaatgctattc

SEQ ID NO: 1598825 - DNA, 15 bp, Homo sapiens
gtaaaatgctattct

SEQ ID NO: 1598826 - DNA, 15 bp, Homo sapiens
taaaatgctattctt

SEQ ID NO: 1598827 - DNA, 15 bp, Homo sapiens
aaaatgctattcttg

SEQ ID NO: 1598828 - DNA, 15 bp, Homo sapiens
aaatgctattcttgc

SEQ ID NO: 1598829 - DNA, 15 bp, Homo sapiens
aatgctattcttgcc

SEQ ID NO: 1598830 - DNA, 15 bp, Homo sapiens
atgctattcttgcct

SEQ ID NO: 1598831 - DNA, 15 bp, Homo sapiens
tgctattcttgcctt

SEQ ID NO: 1598832 - DNA, 15 bp, Homo sapiens
gctattcttgccttt

SEQ ID NO: 1598833 - DNA, 15 bp, Homo sapiens
ctattcttgcctttc

SEQ ID NO: 1598834 - DNA, 15 bp, Homo sapiens
tattcttgcctttca

SEQ ID NO: 1598835 - DNA, 15 bp, Homo sapiens
attcttgcctttcat

SEQ ID NO: 1598836 - DNA, 15 bp, Homo sapiens
ttcttgcctttcatt

SEQ ID NO: 1598837 - DNA, 15 bp, Homo sapiens
tcttgcctttcattt

SEQ ID NO: 1598838 - DNA, 15 bp, Homo sapiens
cttgcctttcatttc

SEQ ID NO: 1598839 - DNA, 15 bp, Homo sapiens
ttgcctttcatttca

SEQ ID NO: 1598840 - DNA, 15 bp, Homo sapiens
tgcctttcatttcag

SEQ ID NO: 1598841 - DNA, 15 bp, Homo sapiens
gcctttcatttcaga

SEQ ID NO: 1598842 - DNA, 15 bp, Homo sapiens
cctttcatttcagaa

SEQ ID NO: 1598843 - DNA, 15 bp, Homo sapiens
ctttcatttcagaat

SEQ ID NO: 1598844 - DNA, 15 bp, Homo sapiens
tttcatttcagaata

SEQ ID NO: 1598845 - DNA, 15 bp, Homo sapiens
ttcatttcagaatat

SEQ ID NO: 1598846 - DNA, 15 bp, Homo sapiens
tcatttcagaatata

SEQ ID NO: 1598847 - DNA, 15 bp, Homo sapiens
catttcagaatatac

SEQ ID NO: 1598848 - DNA, 15 bp, Homo sapiens
atttcagaatatact

SEQ ID NO: 1598849 - DNA, 15 bp, Homo sapiens
tttcagaatatactt

SEQ ID NO: 1598850 - DNA, 15 bp, Homo sapiens
ttcagaatatacttt

SEQ ID NO: 1598851 - DNA, 15 bp, Homo sapiens
tcagaatatactttt

SEQ ID NO: 1598852 - DNA, 15 bp, Homo sapiens
cagaatatacttttt

SEQ ID NO: 1598853 - DNA, 15 bp, Homo sapiens
agaatatacttttta

SEQ ID NO: 1598854 - DNA, 15 bp, Homo sapiens
gaatatactttttaa

SEQ ID NO: 1598855 - DNA, 15 bp, Homo sapiens
aatatactttttaaa

SEQ ID NO: 1598856 - DNA, 15 bp, Homo sapiens
atatactttttaaat

SEQ ID NO: 1598857 - DNA, 15 bp, Homo sapiens
tatactttttaaatg

SEQ ID NO: 1598858 - DNA, 15 bp, Homo sapiens
atactttttaaatgt

SEQ ID NO: 1598859 - DNA, 15 bp, Homo sapiens
tactttttaaatgtg

SEQ ID NO: 1598860 - DNA, 15 bp, Homo sapiens
actttttaaatgtga

SEQ ID NO: 1598861 - DNA, 15 bp, Homo sapiens
ctttttaaatgtgaa

SEQ ID NO: 1598862 - DNA, 15 bp, Homo sapiens
tttttaaatgtgaat

SEQ ID NO: 1598863 - DNA, 15 bp, Homo sapiens
ttttaaatgtgaatt

SEQ ID NO: 1598864 - DNA, 15 bp, Homo sapiens
tttaaatgtgaattt

SEQ ID NO: 1598865 - DNA, 15 bp, Homo sapiens
ttaaatgtgaatttc

SEQ ID NO: 1598866 - DNA, 15 bp, Homo sapiens
taaatgtgaatttct

SEQ ID NO: 1598867 - DNA, 15 bp, Homo sapiens
aaatgtgaatttctg

SEQ ID NO: 1598868 - DNA, 15 bp, Homo sapiens
aatgtgaatttctgg

SEQ ID NO: 1598869 - DNA, 15 bp, Homo sapiens
atgtgaatttctgga

SEQ ID NO: 1598870 - DNA, 15 bp, Homo sapiens
tgtgaatttctggat

SEQ ID NO: 1598871 - DNA, 15 bp, Homo sapiens
gtgaatttctggatt

SEQ ID NO: 1598872 - DNA, 15 bp, Homo sapiens
tgaatttctggattt

SEQ ID NO: 1598873 - DNA, 15 bp, Homo sapiens
gaatttctggatttt

SEQ ID NO: 1598874 - DNA, 15 bp, Homo sapiens
aatttctggattttt

SEQ ID NO: 1598875 - DNA, 15 bp, Homo sapiens
atttctggatttttt

SEQ ID NO: 1598876 - DNA, 15 bp, Homo sapiens
tttctggattttttt

SEQ ID NO: 1598877 - DNA, 15 bp, Homo sapiens
ttctggatttttttt

SEQ ID NO: 1598878 - DNA, 15 bp, Homo sapiens
tctggattttttttt

SEQ ID NO: 1598879 - DNA, 15 bp, Homo sapiens
ctggattttttttta

SEQ ID NO: 1598880 - DNA, 15 bp, Homo sapiens
tggatttttttttat

SEQ ID NO: 1598881 - DNA, 15 bp, Homo sapiens
ggatttttttttata

SEQ ID NO: 1598882 - DNA, 15 bp, Homo sapiens
gatttttttttatag

SEQ ID NO: 1598883 - DNA, 15 bp, Homo sapiens
atttttttttatagc

SEQ ID NO: 1598884 - DNA, 15 bp, Homo sapiens
tttttttttatagca

SEQ ID NO: 1598885 - DNA, 15 bp, Homo sapiens
ttttttttatagcat

SEQ ID NO: 1598886 - DNA, 15 bp, Homo sapiens
tttttttatagcatg

SEQ ID NO: 1598887 - DNA, 15 bp, Homo sapiens
ttttttatagcatgt

SEQ ID NO: 1598888 - DNA, 15 bp, Homo sapiens
tttttatagcatgtt

SEQ ID NO: 1598889 - DNA, 15 bp, Homo sapiens
ttttatagcatgttt

SEQ ID NO: 1598890 - DNA, 15 bp, Homo sapiens
tttatagcatgtttg

SEQ ID NO: 1598891 - DNA, 15 bp, Homo sapiens
ttatagcatgtttgt

SEQ ID NO: 1598892 - DNA, 15 bp, Homo sapiens
tatagcatgtttgtg

SEQ ID NO: 1598893 - DNA, 15 bp, Homo sapiens
atagcatgtttgtgt

SEQ ID NO: 1598894 - DNA, 15 bp, Homo sapiens
tagcatgtttgtgtc

SEQ ID NO: 1598895 - DNA, 15 bp, Homo sapiens
agcatgtttgtgtca

SEQ ID NO: 1598896 - DNA, 15 bp, Homo sapiens
gcatgtttgtgtcat

SEQ ID NO: 1598897 - DNA, 15 bp, Homo sapiens
catgtttgtgtcatt

SEQ ID NO: 1598898 - DNA, 15 bp, Homo sapiens
atgtttgtgtcatta

SEQ ID NO: 1598899 - DNA, 15 bp, Homo sapiens
tgtttgtgtcattag

SEQ ID NO: 1598900 - DNA, 15 bp, Homo sapiens
gtttgtgtcattagt

SEQ ID NO: 1598901 - DNA, 15 bp, Homo sapiens
tttgtgtcattagtg

SEQ ID NO: 1598902 - DNA, 15 bp, Homo sapiens
ttgtgtcattagtga

SEQ ID NO: 1598903 - DNA, 15 bp, Homo sapiens
tgtgtcattagtgaa

SEQ ID NO: 1598904 - DNA, 15 bp, Homo sapiens
gtgtcattagtgaaa

SEQ ID NO: 1598905 - DNA, 15 bp, Homo sapiens
tgtcattagtgaaac

SEQ ID NO: 1598906 - DNA, 15 bp, Homo sapiens
gtcattagtgaaact

SEQ ID NO: 1598907 - DNA, 15 bp, Homo sapiens
tcattagtgaaactg

SEQ ID NO: 1598908 - DNA, 15 bp, Homo sapiens
cattagtgaaactgg

SEQ ID NO: 1598909 - DNA, 15 bp, Homo sapiens
attagtgaaactgga

SEQ ID NO: 1598910 - DNA, 15 bp, Homo sapiens
ttagtgaaactggaa

SEQ ID NO: 1598911 - DNA, 15 bp, Homo sapiens
tagtgaaactggaaa

SEQ ID NO: 1598912 - DNA, 15 bp, Homo sapiens
agtgaaactggaaaa

SEQ ID NO: 1598913 - DNA, 15 bp, Homo sapiens
gtgaaactggaaaag

SEQ ID NO: 1598914 - DNA, 15 bp, Homo sapiens
tgaaactggaaaagc

SEQ ID NO: 1598915 - DNA, 15 bp, Homo sapiens
gaaactggaaaagca

SEQ ID NO: 1598916 - DNA, 15 bp, Homo sapiens
aaactggaaaagcaa

SEQ ID NO: 1598917 - DNA, 15 bp, Homo sapiens
aactggaaaagcaaa

SEQ ID NO: 1598918 - DNA, 15 bp, Homo sapiens
actggaaaagcaaaa

SEQ ID NO: 1598919 - DNA, 15 bp, Homo sapiens
ctggaaaagcaaaat

SEQ ID NO: 1598920 - DNA, 15 bp, Homo sapiens
tggaaaagcaaaata

SEQ ID NO: 1598921 - DNA, 15 bp, Homo sapiens
ggaaaagcaaaatac

SEQ ID NO: 1598922 - DNA, 15 bp, Homo sapiens
gaaaagcaaaataca

SEQ ID NO: 1598923 - DNA, 15 bp, Homo sapiens
aaaagcaaaatacaa

SEQ ID NO: 1598924 - DNA, 15 bp, Homo sapiens
aaagcaaaatacaaa

SEQ ID NO: 1598925 - DNA, 15 bp, Homo sapiens
aagcaaaatacaaag

SEQ ID NO: 1598926 - DNA, 15 bp, Homo sapiens
agcaaaatacaaagc

SEQ ID NO: 1598927 - DNA, 15 bp, Homo sapiens
gcaaaatacaaagcc

SEQ ID NO: 1598928 - DNA, 15 bp, Homo sapiens
caaaatacaaagcct

SEQ ID NO: 1598929 - DNA, 15 bp, Homo sapiens
aaaatacaaagccta

SEQ ID NO: 1598930 - DNA, 15 bp, Homo sapiens
aaatacaaagcctaa

SEQ ID NO: 1598931 - DNA, 15 bp, Homo sapiens
aatacaaagcctaag

SEQ ID NO: 1598932 - DNA, 15 bp, Homo sapiens
atacaaagcctaaga

SEQ ID NO: 1598933 - DNA, 15 bp, Homo sapiens
tacaaagcctaagat

SEQ ID NO: 1598934 - DNA, 15 bp, Homo sapiens
acaaagcctaagatg

SEQ ID NO: 1598935 - DNA, 15 bp, Homo sapiens
caaagcctaagatga

SEQ ID NO: 1598936 - DNA, 15 bp, Homo sapiens
aaagcctaagatgag

SEQ ID NO: 1598937 - DNA, 15 bp, Homo sapiens
aagcctaagatgaga

SEQ ID NO: 1598938 - DNA, 15 bp, Homo sapiens
agcctaagatgagag

SEQ ID NO: 1598939 - DNA, 15 bp, Homo sapiens
gcctaagatgagagt

SEQ ID NO: 1598940 - DNA, 15 bp, Homo sapiens
cctaagatgagagtt

SEQ ID NO: 1598941 - DNA, 15 bp, Homo sapiens
ctaagatgagagttc

SEQ ID NO: 1598942 - DNA, 15 bp, Homo sapiens
taagatgagagttca

SEQ ID NO: 1598943 - DNA, 15 bp, Homo sapiens
aagatgagagttcaa

SEQ ID NO: 1598944 - DNA, 15 bp, Homo sapiens
agatgagagttcaag

SEQ ID NO: 1598945 - DNA, 15 bp, Homo sapiens
gatgagagttcaagt

SEQ ID NO: 1598946 - DNA, 15 bp, Homo sapiens
atgagagttcaagtt

SEQ ID NO: 1598947 - DNA, 15 bp, Homo sapiens
tgagagttcaagttg

SEQ ID NO: 1598948 - DNA, 15 bp, Homo sapiens
gagagttcaagttga

SEQ ID NO: 1598949 - DNA, 15 bp, Homo sapiens
agagttcaagttgag

SEQ ID NO: 1598950 - DNA, 15 bp, Homo sapiens
gagttcaagttgagt

SEQ ID NO: 1598951 - DNA, 15 bp, Homo sapiens
agttcaagttgagtt

SEQ ID NO: 1598952 - DNA, 15 bp, Homo sapiens
gttcaagttgagttt

SEQ ID NO: 1598953 - DNA, 15 bp, Homo sapiens
ttcaagttgagtttg

SEQ ID NO: 1598954 - DNA, 15 bp, Homo sapiens
tcaagttgagtttgg

SEQ ID NO: 1598955 - DNA, 15 bp, Homo sapiens
caagttgagtttgga

SEQ ID NO: 1598956 - DNA, 15 bp, Homo sapiens
aagttgagtttggaa

SEQ ID NO: 1598957 - DNA, 15 bp, Homo sapiens
agttgagtttggaaa

SEQ ID NO: 1598958 - DNA, 15 bp, Homo sapiens
gttgagtttggaaac

SEQ ID NO: 1598959 - DNA, 15 bp, Homo sapiens
ttgagtttggaaaca

SEQ ID NO: 1598960 - DNA, 15 bp, Homo sapiens
tgagtttggaaacat

SEQ ID NO: 1598961 - DNA, 15 bp, Homo sapiens
gagtttggaaacatc

SEQ ID NO: 1598962 - DNA, 15 bp, Homo sapiens
agtttggaaacatct

SEQ ID NO: 1598963 - DNA, 15 bp, Homo sapiens
gtttggaaacatctg

SEQ ID NO: 1598964 - DNA, 15 bp, Homo sapiens
tttggaaacatctgg

SEQ ID NO: 1598965 - DNA, 15 bp, Homo sapiens
ttggaaacatctgga

SEQ ID NO: 1598966 - DNA, 15 bp, Homo sapiens
tggaaacatctggag

SEQ ID NO: 1598967 - DNA, 15 bp, Homo sapiens
ggaaacatctggagt

SEQ ID NO: 1598968 - DNA, 15 bp, Homo sapiens
gaaacatctggagtc

SEQ ID NO: 1598969 - DNA, 15 bp, Homo sapiens
aaacatctggagtcc

SEQ ID NO: 1598970 - DNA, 15 bp, Homo sapiens
aacatctggagtcct

SEQ ID NO: 1598971 - DNA, 15 bp, Homo sapiens
acatctggagtccta

SEQ ID NO: 1598972 - DNA, 15 bp, Homo sapiens
catctggagtcctat

SEQ ID NO: 1598973 - DNA, 15 bp, Homo sapiens
atctggagtcctatt

SEQ ID NO: 1598974 - DNA, 15 bp, Homo sapiens
tctggagtcctattg

SEQ ID NO: 1598975 - DNA, 15 bp, Homo sapiens
ctggagtcctattga

SEQ ID NO: 1598976 - DNA, 15 bp, Homo sapiens
tggagtcctattgac

SEQ ID NO: 1598977 - DNA, 15 bp, Homo sapiens
ggagtcctattgaca

SEQ ID NO: 1598978 - DNA, 15 bp, Homo sapiens
gagtcctattgacat

SEQ ID NO: 1598979 - DNA, 15 bp, Homo sapiens
agtcctattgacatc

SEQ ID NO: 1598980 - DNA, 15 bp, Homo sapiens
gtcctattgacatcg

SEQ ID NO: 1598981 - DNA, 15 bp, Homo sapiens
tcctattgacatcgc

SEQ ID NO: 1598982 - DNA, 15 bp, Homo sapiens
tcttctaagaatttt

SEQ ID NO: 1598983 - DNA, 15 bp, Homo sapiens
cttctaagaatttta

SEQ ID NO: 1598984 - DNA, 15 bp, Homo sapiens
ttctaagaattttat

SEQ ID NO: 1598985 - DNA, 15 bp, Homo sapiens
tctaagaattttatc

SEQ ID NO: 1598986 - DNA, 15 bp, Homo sapiens
ctaagaattttatct

SEQ ID NO: 1598987 - DNA, 15 bp, Homo sapiens
taagaattttatctg

SEQ ID NO: 1598988 - DNA, 15 bp, Homo sapiens
aagaattttatctgt

SEQ ID NO: 1598989 - DNA, 15 bp, Homo sapiens
agaattttatctgtt

SEQ ID NO: 1598990 - DNA, 15 bp, Homo sapiens
gaattttatctgttt

SEQ ID NO: 1598991 - DNA, 15 bp, Homo sapiens
aattttatctgtttt

SEQ ID NO: 1598992 - DNA, 15 bp, Homo sapiens
attttatctgttttg

SEQ ID NO: 1598993 - DNA, 15 bp, Homo sapiens
ttttatctgttttgt

SEQ ID NO: 1598994 - DNA, 15 bp, Homo sapiens
tttatctgttttgta

SEQ ID NO: 1598995 - DNA, 15 bp, Homo sapiens
ttatctgttttgtac

SEQ ID NO: 1598996 - DNA, 15 bp, Homo sapiens
tatctgttttgtact

SEQ ID NO: 1598997 - DNA, 15 bp, Homo sapiens
atctgttttgtactt

SEQ ID NO: 1598998 - DNA, 15 bp, Homo sapiens
tctgttttgtacttt

SEQ ID NO: 1598999 - DNA, 15 bp, Homo sapiens
ctgttttgtacttta

SEQ ID NO: 1599000 - DNA, 15 bp, Homo sapiens
tgttttgtactttag

SEQ ID NO: 1599001 - DNA, 15 bp, Homo sapiens
gttttgtactttaga

SEQ ID NO: 1599002 - DNA, 15 bp, Homo sapiens
ttttgtactttagaa

SEQ ID NO: 1599003 - DNA, 15 bp, Homo sapiens
tttgtactttagaaa

SEQ ID NO: 1599004 - DNA, 15 bp, Homo sapiens
ttgtactttagaaat

SEQ ID NO: 1599005 - DNA, 15 bp, Homo sapiens
tgtactttagaaatg

SEQ ID NO: 1599006 - DNA, 15 bp, Homo sapiens
gtactttagaaatgt

SEQ ID NO: 1599007 - DNA, 15 bp, Homo sapiens
tactttagaaatgtc

SEQ ID NO: 1599008 - DNA, 15 bp, Homo sapiens
actttagaaatgtca

SEQ ID NO: 1599009 - DNA, 15 bp, Homo sapiens
ctttagaaatgtcag

SEQ ID NO: 1599010 - DNA, 15 bp, Homo sapiens
tttagaaatgtcagt

SEQ ID NO: 1599011 - DNA, 15 bp, Homo sapiens
ttagaaatgtcagtt

SEQ ID NO: 1599012 - DNA, 15 bp, Homo sapiens
tagaaatgtcagttg

SEQ ID NO: 1599013 - DNA, 15 bp, Homo sapiens
agaaatgtcagttgc

SEQ ID NO: 1599014 - DNA, 15 bp, Homo sapiens
gaaatgtcagttgct

SEQ ID NO: 1599015 - DNA, 15 bp, Homo sapiens
aaatgtcagttgctg

SEQ ID NO: 1599016 - DNA, 15 bp, Homo sapiens
aatgtcagttgctgc

SEQ ID NO: 1599017 - DNA, 15 bp, Homo sapiens
atgtcagttgctgca

SEQ ID NO: 1599018 - DNA, 15 bp, Homo sapiens
tgtcagttgctgcat

SEQ ID NO: 1599019 - DNA, 15 bp, Homo sapiens
gtcagttgctgcatt

SEQ ID NO: 1599020 - DNA, 15 bp, Homo sapiens
tcagttgctgcattc

SEQ ID NO: 1599021 - DNA, 15 bp, Homo sapiens
cagttgctgcattcc

SEQ ID NO: 1599022 - DNA, 15 bp, Homo sapiens
agttgctgcattcct

SEQ ID NO: 1599023 - DNA, 15 bp, Homo sapiens
gttgctgcattccta

SEQ ID NO: 1599024 - DNA, 15 bp, Homo sapiens
ttgctgcattcctaa

SEQ ID NO: 1599025 - DNA, 15 bp, Homo sapiens
tgctgcattcctaaa

SEQ ID NO: 1599026 - DNA, 15 bp, Homo sapiens
gctgcattcctaaac

SEQ ID NO: 1599027 - DNA, 15 bp, Homo sapiens
ctgcattcctaaact

SEQ ID NO: 1599028 - DNA, 15 bp, Homo sapiens
tgcattcctaaactg

SEQ ID NO: 1599029 - DNA, 15 bp, Homo sapiens
gcattcctaaactgt

SEQ ID NO: 1599030 - DNA, 15 bp, Homo sapiens
cattcctaaactgtt

SEQ ID NO: 1599031 - DNA, 15 bp, Homo sapiens
attcctaaactgttt

SEQ ID NO: 1599032 - DNA, 15 bp, Homo sapiens
ttcctaaactgttta

SEQ ID NO: 1599033 - DNA, 15 bp, Homo sapiens
tcctaaactgtttat

SEQ ID NO: 1599034 - DNA, 15 bp, Homo sapiens
cctaaactgtttatt

SEQ ID NO: 1599035 - DNA, 15 bp, Homo sapiens
ctaaactgtttattt

SEQ ID NO: 1599036 - DNA, 15 bp, Homo sapiens
taaactgtttatttg

SEQ ID NO: 1599037 - DNA, 15 bp, Homo sapiens
aaactgtttatttgc

SEQ ID NO: 1599038 - DNA, 15 bp, Homo sapiens
aactgtttatttgca

SEQ ID NO: 1599039 - DNA, 15 bp, Homo sapiens
actgtttatttgcac

SEQ ID NO: 1599040 - DNA, 15 bp, Homo sapiens
ctgtttatttgcact

SEQ ID NO: 1599041 - DNA, 15 bp, Homo sapiens
tgtttatttgcacta

SEQ ID NO: 1599042 - DNA, 15 bp, Homo sapiens
gtttatttgcactat

SEQ ID NO: 1599043 - DNA, 15 bp, Homo sapiens
tttatttgcactatg

SEQ ID NO: 1599044 - DNA, 15 bp, Homo sapiens
ttatttgcactatga

SEQ ID NO: 1599045 - DNA, 15 bp, Homo sapiens
tatttgcactatgag

SEQ ID NO: 1599046 - DNA, 15 bp, Homo sapiens
atttgcactatgagc

SEQ ID NO: 1599047 - DNA, 15 bp, Homo sapiens
tttgcactatgagcc

SEQ ID NO: 1599048 - DNA, 15 bp, Homo sapiens
ttgcactatgagcct

SEQ ID NO: 1599049 - DNA, 15 bp, Homo sapiens
tgcactatgagccta

SEQ ID NO: 1599050 - DNA, 15 bp, Homo sapiens
gcactatgagcctat

SEQ ID NO: 1599051 - DNA, 15 bp, Homo sapiens
cactatgagcctata

SEQ ID NO: 1599052 - DNA, 15 bp, Homo sapiens
actatgagcctatag

SEQ ID NO: 1599053 - DNA, 15 bp, Homo sapiens
ctatgagcctataga

SEQ ID NO: 1599054 - DNA, 15 bp, Homo sapiens
tatgagcctatagac

SEQ ID NO: 1599055 - DNA, 15 bp, Homo sapiens
atgagcctatagact

SEQ ID NO: 1599056 - DNA, 15 bp, Homo sapiens
tgagcctatagacta

SEQ ID NO: 1599057 - DNA, 15 bp, Homo sapiens
gagcctatagactat

SEQ ID NO: 1599058 - DNA, 15 bp, Homo sapiens
agcctatagactatc

SEQ ID NO: 1599059 - DNA, 15 bp, Homo sapiens
gcctatagactatca

SEQ ID NO: 1599060 - DNA, 15 bp, Homo sapiens
cctatagactatcag

SEQ ID NO: 1599061 - DNA, 15 bp, Homo sapiens
ctatagactatcagt

SEQ ID NO: 1599062 - DNA, 15 bp, Homo sapiens
tatagactatcagtt

SEQ ID NO: 1599063 - DNA, 15 bp, Homo sapiens
atagactatcagttc

SEQ ID NO: 1599064 - DNA, 15 bp, Homo sapiens
tagactatcagttcc

SEQ ID NO: 1599065 - DNA, 15 bp, Homo sapiens
agactatcagttccc

SEQ ID NO: 1599066 - DNA, 15 bp, Homo sapiens
gactatcagttccct

SEQ ID NO: 1599067 - DNA, 15 bp, Homo sapiens
actatcagttccctt

SEQ ID NO: 1599068 - DNA, 15 bp, Homo sapiens
ctatcagttcccttt

SEQ ID NO: 1599069 - DNA, 15 bp, Homo sapiens
tatcagttccctttg

SEQ ID NO: 1599070 - DNA, 15 bp, Homo sapiens
atcagttccctttgg

SEQ ID NO: 1599071 - DNA, 15 bp, Homo sapiens
tcagttccctttggg

SEQ ID NO: 1599072 - DNA, 15 bp, Homo sapiens
cagttccctttgggc

SEQ ID NO: 1599073 - DNA, 15 bp, Homo sapiens
agttccctttgggcg

SEQ ID NO: 1599074 - DNA, 15 bp, Homo sapiens
gttccctttgggcgg

SEQ ID NO: 1599075 - DNA, 15 bp, Homo sapiens
ttccctttgggcgga

SEQ ID NO: 1599076 - DNA, 15 bp, Homo sapiens
tccctttgggcggat

SEQ ID NO: 1599077 - DNA, 15 bp, Homo sapiens
ccctttgggcggatt

SEQ ID NO: 1599078 - DNA, 15 bp, Homo sapiens
cctttgggcggattg

SEQ ID NO: 1599079 - DNA, 15 bp, Homo sapiens
ctttgggcggattgt

SEQ ID NO: 1599080 - DNA, 15 bp, Homo sapiens
tttgggcggattgtt

SEQ ID NO: 1599081 - DNA, 15 bp, Homo sapiens
ttgggcggattgttg

SEQ ID NO: 1599082 - DNA, 15 bp, Homo sapiens
tgggcggattgttgt

SEQ ID NO: 1599083 - DNA, 15 bp, Homo sapiens
gggcggattgttgtt

SEQ ID NO: 1599084 - DNA, 15 bp, Homo sapiens
ggcggattgttgttt

SEQ ID NO: 1599085 - DNA, 15 bp, Homo sapiens
gcggattgttgttta

SEQ ID NO: 1599086 - DNA, 15 bp, Homo sapiens
cggattgttgtttaa

SEQ ID NO: 1599087 - DNA, 15 bp, Homo sapiens
ggattgttgtttaac

SEQ ID NO: 1599088 - DNA, 15 bp, Homo sapiens
gattgttgtttaact

SEQ ID NO: 1599089 - DNA, 15 bp, Homo sapiens
attgttgtttaactt

SEQ ID NO: 1599090 - DNA, 15 bp, Homo sapiens
ttgttgtttaacttg

SEQ ID NO: 1599091 - DNA, 15 bp, Homo sapiens
tgttgtttaacttgt

SEQ ID NO: 1599092 - DNA, 15 bp, Homo sapiens
gttgtttaacttgta

SEQ ID NO: 1599093 - DNA, 15 bp, Homo sapiens
ttgtttaacttgtaa

SEQ ID NO: 1599094 - DNA, 15 bp, Homo sapiens
tgtttaacttgtaaa

SEQ ID NO: 1599095 - DNA, 15 bp, Homo sapiens
gtttaacttgtaaat

SEQ ID NO: 1599096 - DNA, 15 bp, Homo sapiens
tttaacttgtaaatg

SEQ ID NO: 1599097 - DNA, 15 bp, Homo sapiens
ttaacttgtaaatga

SEQ ID NO: 1599098 - DNA, 15 bp, Homo sapiens
taacttgtaaatgaa

SEQ ID NO: 1599099 - DNA, 15 bp, Homo sapiens
aacttgtaaatgaaa

SEQ ID NO: 1599100 - DNA, 15 bp, Homo sapiens
acttgtaaatgaaaa

SEQ ID NO: 1599101 - DNA, 15 bp, Homo sapiens
cttgtaaatgaaaaa

SEQ ID NO: 1599102 - DNA, 15 bp, Homo sapiens
ttgtaaatgaaaaaa

SEQ ID NO: 1599103 - DNA, 15 bp, Homo sapiens
tgtaaatgaaaaaat

SEQ ID NO: 1599104 - DNA, 15 bp, Homo sapiens
gtaaatgaaaaaatt

SEQ ID NO: 1599105 - DNA, 15 bp, Homo sapiens
taaatgaaaaaattc

SEQ ID NO: 1599106 - DNA, 15 bp, Homo sapiens
aaatgaaaaaattct

SEQ ID NO: 1599107 - DNA, 15 bp, Homo sapiens
aatgaaaaaattctc

SEQ ID NO: 1599108 - DNA, 15 bp, Homo sapiens
atgaaaaaattctct

SEQ ID NO: 1599109 - DNA, 15 bp, Homo sapiens
tgaaaaaattctctt

SEQ ID NO: 1599110 - DNA, 15 bp, Homo sapiens
gaaaaaattctctta

SEQ ID NO: 1599111 - DNA, 15 bp, Homo sapiens
aaaaaattctcttaa

SEQ ID NO: 1599112 - DNA, 15 bp, Homo sapiens
aaaaattctcttaaa

SEQ ID NO: 1599113 - DNA, 15 bp, Homo sapiens
aaaattctcttaaac

SEQ ID NO: 1599114 - DNA, 15 bp, Homo sapiens
aaattctcttaaacc

SEQ ID NO: 1599115 - DNA, 15 bp, Homo sapiens
aattctcttaaacca

SEQ ID NO: 1599116 - DNA, 15 bp, Homo sapiens
attctcttaaaccac

SEQ ID NO: 1599117 - DNA, 15 bp, Homo sapiens
ttctcttaaaccaca

SEQ ID NO: 1599118 - DNA, 15 bp, Homo sapiens
tctcttaaaccacag

SEQ ID NO: 1599119 - DNA, 15 bp, Homo sapiens
ctcttaaaccacagc

SEQ ID NO: 1599120 - DNA, 15 bp, Homo sapiens
tcttaaaccacagca

SEQ ID NO: 1599121 - DNA, 15 bp, Homo sapiens
cttaaaccacagcac

SEQ ID NO: 1599122 - DNA, 15 bp, Homo sapiens
ttaaaccacagcact

SEQ ID NO: 1599123 - DNA, 15 bp, Homo sapiens
taaaccacagcacta

SEQ ID NO: 1599124 - DNA, 15 bp, Homo sapiens
aaaccacagcactat

SEQ ID NO: 1599125 - DNA, 15 bp, Homo sapiens
aaccacagcactatt

SEQ ID NO: 1599126 - DNA, 15 bp, Homo sapiens
accacagcactattg

SEQ ID NO: 1599127 - DNA, 15 bp, Homo sapiens
ccacagcactattga

SEQ ID NO: 1599128 - DNA, 15 bp, Homo sapiens
cacagcactattgag

SEQ ID NO: 1599129 - DNA, 15 bp, Homo sapiens
acagcactattgagt

SEQ ID NO: 1599130 - DNA, 15 bp, Homo sapiens
cagcactattgagtg

SEQ ID NO: 1599131 - DNA, 15 bp, Homo sapiens
agcactattgagtga

SEQ ID NO: 1599132 - DNA, 15 bp, Homo sapiens
gcactattgagtgaa

SEQ ID NO: 1599133 - DNA, 15 bp, Homo sapiens
cactattgagtgaaa

SEQ ID NO: 1599134 - DNA, 15 bp, Homo sapiens
actattgagtgaaac

SEQ ID NO: 1599135 - DNA, 15 bp, Homo sapiens
ctattgagtgaaaca

SEQ ID NO: 1599136 - DNA, 15 bp, Homo sapiens
tattgagtgaaacat

SEQ ID NO: 1599137 - DNA, 15 bp, Homo sapiens
attgagtgaaacatt

SEQ ID NO: 1599138 - DNA, 15 bp, Homo sapiens
ttgagtgaaacattg

SEQ ID NO: 1599139 - DNA, 15 bp, Homo sapiens
tgagtgaaacattga

SEQ ID NO: 1599140 - DNA, 15 bp, Homo sapiens
gagtgaaacattgaa

SEQ ID NO: 1599141 - DNA, 15 bp, Homo sapiens
agtgaaacattgaac

SEQ ID NO: 1599142 - DNA, 15 bp, Homo sapiens
gtgaaacattgaact

SEQ ID NO: 1599143 - DNA, 15 bp, Homo sapiens
tgaaacattgaactc

SEQ ID NO: 1599144 - DNA, 15 bp, Homo sapiens
gaaacattgaactca

SEQ ID NO: 1599145 - DNA, 15 bp, Homo sapiens
aaacattgaactcat

SEQ ID NO: 1599146 - DNA, 15 bp, Homo sapiens
aacattgaactcata

SEQ ID NO: 1599147 - DNA, 15 bp, Homo sapiens
acattgaactcatat

SEQ ID NO: 1599148 - DNA, 15 bp, Homo sapiens
cattgaactcatatc

SEQ ID NO: 1599149 - DNA, 15 bp, Homo sapiens
attgaactcatatct

SEQ ID NO: 1599150 - DNA, 15 bp, Homo sapiens
ttgaactcatatctg

SEQ ID NO: 1599151 - DNA, 15 bp, Homo sapiens
tgaactcatatctgt

SEQ ID NO: 1599152 - DNA, 15 bp, Homo sapiens
gaactcatatctgta

SEQ ID NO: 1599153 - DNA, 15 bp, Homo sapiens
aactcatatctgtaa

SEQ ID NO: 1599154 - DNA, 15 bp, Homo sapiens
actcatatctgtaag

SEQ ID NO: 1599155 - DNA, 15 bp, Homo sapiens
ctcatatctgtaaga

SEQ ID NO: 1599156 - DNA, 15 bp, Homo sapiens
tcatatctgtaagaa

SEQ ID NO: 1599157 - DNA, 15 bp, Homo sapiens
catatctgtaagaaa

SEQ ID NO: 1599158 - DNA, 15 bp, Homo sapiens
atatctgtaagaaat

SEQ ID NO: 1599159 - DNA, 15 bp, Homo sapiens
tatctgtaagaaata

SEQ ID NO: 1599160 - DNA, 15 bp, Homo sapiens
atctgtaagaaataa

SEQ ID NO: 1599161 - DNA, 15 bp, Homo sapiens
tctgtaagaaataaa

SEQ ID NO: 1599162 - DNA, 15 bp, Homo sapiens
ctgtaagaaataaag

SEQ ID NO: 1599163 - DNA, 15 bp, Homo sapiens
tgtaagaaataaaga

SEQ ID NO: 1599164 - DNA, 15 bp, Homo sapiens
gtaagaaataaagag

SEQ ID NO: 1599165 - DNA, 15 bp, Homo sapiens
taagaaataaagaga

SEQ ID NO: 1599166 - DNA, 15 bp, Homo sapiens
aagaaataaagagaa

SEQ ID NO: 1599167 - DNA, 15 bp, Homo sapiens
agaaataaagagaag

SEQ ID NO: 1599168 - DNA, 15 bp, Homo sapiens
gaaataaagagaaga

SEQ ID NO: 1599169 - DNA, 15 bp, Homo sapiens
aaataaagagaagat

SEQ ID NO: 1599170 - DNA, 15 bp, Homo sapiens
aataaagagaagata

SEQ ID NO: 1599171 - DNA, 15 bp, Homo sapiens
ataaagagaagatat

SEQ ID NO: 1599172 - DNA, 15 bp, Homo sapiens
taaagagaagatata

SEQ ID NO: 1599173 - DNA, 15 bp, Homo sapiens
aaagagaagatatat

SEQ ID NO: 1599174 - DNA, 15 bp, Homo sapiens
aagagaagatatatt

SEQ ID NO: 1599175 - DNA, 15 bp, Homo sapiens
agagaagatatatta

SEQ ID NO: 1599176 - DNA, 15 bp, Homo sapiens
gagaagatatattag

SEQ ID NO: 1599177 - DNA, 15 bp, Homo sapiens
agaagatatattagt

SEQ ID NO: 1599178 - DNA, 15 bp, Homo sapiens
gaagatatattagtt

SEQ ID NO: 1599179 - DNA, 15 bp, Homo sapiens
aagatatattagttt

SEQ ID NO: 1599180 - DNA, 15 bp, Homo sapiens
agatatattagtttt

SEQ ID NO: 1599181 - DNA, 15 bp, Homo sapiens
gatatattagttttt

SEQ ID NO: 1599182 - DNA, 15 bp, Homo sapiens
atatattagtttttt

SEQ ID NO: 1599183 - DNA, 15 bp, Homo sapiens
tatattagtttttta

SEQ ID NO: 1599184 - DNA, 15 bp, Homo sapiens
atattagttttttaa

SEQ ID NO: 1599185 - DNA, 15 bp, Homo sapiens
tattagttttttaat

SEQ ID NO: 1599186 - DNA, 15 bp, Homo sapiens
attagttttttaatt

SEQ ID NO: 1599187 - DNA, 15 bp, Homo sapiens
ttagttttttaattg

SEQ ID NO: 1599188 - DNA, 15 bp, Homo sapiens
tagttttttaattgg

SEQ ID NO: 1599189 - DNA, 15 bp, Homo sapiens
agttttttaattggt

SEQ ID NO: 1599190 - DNA, 15 bp, Homo sapiens
gttttttaattggta

SEQ ID NO: 1599191 - DNA, 15 bp, Homo sapiens
ttttttaattggtat

SEQ ID NO: 1599192 - DNA, 15 bp, Homo sapiens
tttttaattggtatt

SEQ ID NO: 1599193 - DNA, 15 bp, Homo sapiens
ttttaattggtattt

SEQ ID NO: 1599194 - DNA, 15 bp, Homo sapiens
tttaattggtatttt

SEQ ID NO: 1599195 - DNA, 15 bp, Homo sapiens
ttaattggtatttta

SEQ ID NO: 1599196 - DNA, 15 bp, Homo sapiens
taattggtattttaa

SEQ ID NO: 1599197 - DNA, 15 bp, Homo sapiens
aattggtattttaat

SEQ ID NO: 1599198 - DNA, 15 bp, Homo sapiens
attggtattttaatt

SEQ ID NO: 1599199 - DNA, 15 bp, Homo sapiens
ttggtattttaattt

SEQ ID NO: 1599200 - DNA, 15 bp, Homo sapiens
tggtattttaatttt

SEQ ID NO: 1599201 - DNA, 15 bp, Homo sapiens
ggtattttaattttt

SEQ ID NO: 1599202 - DNA, 15 bp, Homo sapiens
gtattttaattttta

SEQ ID NO: 1599203 - DNA, 15 bp, Homo sapiens
tattttaatttttat

SEQ ID NO: 1599204 - DNA, 15 bp, Homo sapiens
attttaatttttata

SEQ ID NO: 1599205 - DNA, 15 bp, Homo sapiens
ttttaatttttatat

SEQ ID NO: 1599206 - DNA, 15 bp, Homo sapiens
tttaatttttatata

SEQ ID NO: 1599207 - DNA, 15 bp, Homo sapiens
ttaatttttatatat

SEQ ID NO: 1599208 - DNA, 15 bp, Homo sapiens
taatttttatatatg

SEQ ID NO: 1599209 - DNA, 15 bp, Homo sapiens
aatttttatatatgc

SEQ ID NO: 1599210 - DNA, 15 bp, Homo sapiens
atttttatatatgca

SEQ ID NO: 1599211 - DNA, 15 bp, Homo sapiens
tttttatatatgcag

SEQ ID NO: 1599212 - DNA, 15 bp, Homo sapiens
ttttatatatgcagg

SEQ ID NO: 1599213 - DNA, 15 bp, Homo sapiens
tttatatatgcagga

SEQ ID NO: 1599214 - DNA, 15 bp, Homo sapiens
ttatatatgcaggaa

SEQ ID NO: 1599215 - DNA, 15 bp, Homo sapiens
tatatatgcaggaaa

SEQ ID NO: 1599216 - DNA, 15 bp, Homo sapiens
atatatgcaggaaag

SEQ ID NO: 1599217 - DNA, 15 bp, Homo sapiens
tatatgcaggaaaga

SEQ ID NO: 1599218 - DNA, 15 bp, Homo sapiens
atatgcaggaaagaa

SEQ ID NO: 1599219 - DNA, 15 bp, Homo sapiens
tatgcaggaaagaat

SEQ ID NO: 1599220 - DNA, 15 bp, Homo sapiens
atgcaggaaagaata

SEQ ID NO: 1599221 - DNA, 15 bp, Homo sapiens
tgcaggaaagaatag

SEQ ID NO: 1599222 - DNA, 15 bp, Homo sapiens
gcaggaaagaataga

SEQ ID NO: 1599223 - DNA, 15 bp, Homo sapiens
caggaaagaatagaa

SEQ ID NO: 1599224 - DNA, 15 bp, Homo sapiens
aggaaagaatagaag

SEQ ID NO: 1599225 - DNA, 15 bp, Homo sapiens
ggaaagaatagaagt

SEQ ID NO: 1599226 - DNA, 15 bp, Homo sapiens
gaaagaatagaagtg

SEQ ID NO: 1599227 - DNA, 15 bp, Homo sapiens
aaagaatagaagtga

SEQ ID NO: 1599228 - DNA, 15 bp, Homo sapiens
aagaatagaagtgat

SEQ ID NO: 1599229 - DNA, 15 bp, Homo sapiens
agaatagaagtgatt

SEQ ID NO: 1599230 - DNA, 15 bp, Homo sapiens
gaatagaagtgattg

SEQ ID NO: 1599231 - DNA, 15 bp, Homo sapiens
aatagaagtgattga

SEQ ID NO: 1599232 - DNA, 15 bp, Homo sapiens
atagaagtgattgaa

SEQ ID NO: 1599233 - DNA, 15 bp, Homo sapiens
tagaagtgattgaat

SEQ ID NO: 1599234 - DNA, 15 bp, Homo sapiens
agaagtgattgaata

SEQ ID NO: 1599235 - DNA, 15 bp, Homo sapiens
gaagtgattgaatat

SEQ ID NO: 1599236 - DNA, 15 bp, Homo sapiens
aagtgattgaatatt

SEQ ID NO: 1599237 - DNA, 15 bp, Homo sapiens
agtgattgaatattg

SEQ ID NO: 1599238 - DNA, 15 bp, Homo sapiens
gtgattgaatattgt

SEQ ID NO: 1599239 - DNA, 15 bp, Homo sapiens
tgattgaatattgtt

SEQ ID NO: 1599240 - DNA, 15 bp, Homo sapiens
gattgaatattgtta

SEQ ID NO: 1599241 - DNA, 15 bp, Homo sapiens
attgaatattgttaa

SEQ ID NO: 1599242 - DNA, 15 bp, Homo sapiens
ttgaatattgttaat

SEQ ID NO: 1599243 - DNA, 15 bp, Homo sapiens
tgaatattgttaatt

SEQ ID NO: 1599244 - DNA, 15 bp, Homo sapiens
gaatattgttaatta

SEQ ID NO: 1599245 - DNA, 15 bp, Homo sapiens
aatattgttaattat

SEQ ID NO: 1599246 - DNA, 15 bp, Homo sapiens
atattgttaattata

SEQ ID NO: 1599247 - DNA, 15 bp, Homo sapiens
tattgttaattatac

SEQ ID NO: 1599248 - DNA, 15 bp, Homo sapiens
attgttaattatacc

SEQ ID NO: 1599249 - DNA, 15 bp, Homo sapiens
ttgttaattatacca

SEQ ID NO: 1599250 - DNA, 15 bp, Homo sapiens
tgttaattataccac

SEQ ID NO: 1599251 - DNA, 15 bp, Homo sapiens
gttaattataccacc

SEQ ID NO: 1599252 - DNA, 15 bp, Homo sapiens
ttaattataccaccg

SEQ ID NO: 1599253 - DNA, 15 bp, Homo sapiens
taattataccaccgt

SEQ ID NO: 1599254 - DNA, 15 bp, Homo sapiens
aattataccaccgtg

SEQ ID NO: 1599255 - DNA, 15 bp, Homo sapiens
attataccaccgtgt

SEQ ID NO: 1599256 - DNA, 15 bp, Homo sapiens
ttataccaccgtgtg

SEQ ID NO: 1599257 - DNA, 15 bp, Homo sapiens
tataccaccgtgtgt

SEQ ID NO: 1599258 - DNA, 15 bp, Homo sapiens
ataccaccgtgtgtt

SEQ ID NO: 1599259 - DNA, 15 bp, Homo sapiens
taccaccgtgtgtta

SEQ ID NO: 1599260 - DNA, 15 bp, Homo sapiens
accaccgtgtgttag

SEQ ID NO: 1599261 - DNA, 15 bp, Homo sapiens
ccaccgtgtgttaga

SEQ ID NO: 1599262 - DNA, 15 bp, Homo sapiens
caccgtgtgttagaa

SEQ ID NO: 1599263 - DNA, 15 bp, Homo sapiens
accgtgtgttagaaa

SEQ ID NO: 1599264 - DNA, 15 bp, Homo sapiens
ccgtgtgttagaaaa

SEQ ID NO: 1599265 - DNA, 15 bp, Homo sapiens
cgtgtgttagaaaag

SEQ ID NO: 1599266 - DNA, 15 bp, Homo sapiens
gtgtgttagaaaagt

SEQ ID NO: 1599267 - DNA, 15 bp, Homo sapiens
tgtgttagaaaagta

SEQ ID NO: 1599268 - DNA, 15 bp, Homo sapiens
gtgttagaaaagtaa

SEQ ID NO: 1599269 - DNA, 15 bp, Homo sapiens
tgttagaaaagtaag

SEQ ID NO: 1599270 - DNA, 15 bp, Homo sapiens
gttagaaaagtaaga

SEQ ID NO: 1599271 - DNA, 15 bp, Homo sapiens
ttagaaaagtaagaa

SEQ ID NO: 1599272 - DNA, 15 bp, Homo sapiens
tagaaaagtaagaag

SEQ ID NO: 1599273 - DNA, 15 bp, Homo sapiens
agaaaagtaagaagc

SEQ ID NO: 1599274 - DNA, 15 bp, Homo sapiens
gaaaagtaagaagca

SEQ ID NO: 1599275 - DNA, 15 bp, Homo sapiens
aaaagtaagaagcag

SEQ ID NO: 1599276 - DNA, 15 bp, Homo sapiens
aaagtaagaagcagt

SEQ ID NO: 1599277 - DNA, 15 bp, Homo sapiens
aagtaagaagcagtc

SEQ ID NO: 1599278 - DNA, 15 bp, Homo sapiens
agtaagaagcagtca

SEQ ID NO: 1599279 - DNA, 15 bp, Homo sapiens
gtaagaagcagtcaa

SEQ ID NO: 1599280 - DNA, 15 bp, Homo sapiens
taagaagcagtcaat

SEQ ID NO: 1599281 - DNA, 15 bp, Homo sapiens
aagaagcagtcaatt

SEQ ID NO: 1599282 - DNA, 15 bp, Homo sapiens
agaagcagtcaattt

SEQ ID NO: 1599283 - DNA, 15 bp, Homo sapiens
gaagcagtcaatttt

SEQ ID NO: 1599284 - DNA, 15 bp, Homo sapiens
aagcagtcaattttc

SEQ ID NO: 1599285 - DNA, 15 bp, Homo sapiens
agcagtcaattttca

SEQ ID NO: 1599286 - DNA, 15 bp, Homo sapiens
gcagtcaattttcac

SEQ ID NO: 1599287 - DNA, 15 bp, Homo sapiens
cagtcaattttcaca

SEQ ID NO: 1599288 - DNA, 15 bp, Homo sapiens
agtcaattttcacat

SEQ ID NO: 1599289 - DNA, 15 bp, Homo sapiens
gtcaattttcacatc

SEQ ID NO: 1599290 - DNA, 15 bp, Homo sapiens
tcaattttcacatca

SEQ ID NO: 1599291 - DNA, 15 bp, Homo sapiens
caattttcacatcaa

SEQ ID NO: 1599292 - DNA, 15 bp, Homo sapiens
aattttcacatcaaa

SEQ ID NO: 1599293 - DNA, 15 bp, Homo sapiens
attttcacatcaaag

SEQ ID NO: 1599294 - DNA, 15 bp, Homo sapiens
ttttcacatcaaaga

SEQ ID NO: 1599295 - DNA, 15 bp, Homo sapiens
tttcacatcaaagac

SEQ ID NO: 1599296 - DNA, 15 bp, Homo sapiens
ttcacatcaaagaca

SEQ ID NO: 1599297 - DNA, 15 bp, Homo sapiens
tcacatcaaagacag

SEQ ID NO: 1599298 - DNA, 15 bp, Homo sapiens
cacatcaaagacagc

SEQ ID NO: 1599299 - DNA, 15 bp, Homo sapiens
acatcaaagacagca

SEQ ID NO: 1599300 - DNA, 15 bp, Homo sapiens
catcaaagacagcat

SEQ ID NO: 1599301 - DNA, 15 bp, Homo sapiens
atcaaagacagcatc

SEQ ID NO: 1599302 - DNA, 15 bp, Homo sapiens
tcaaagacagcatct

SEQ ID NO: 1599303 - DNA, 15 bp, Homo sapiens
caaagacagcatcta

SEQ ID NO: 1599304 - DNA, 15 bp, Homo sapiens
aaagacagcatctaa

SEQ ID NO: 1599305 - DNA, 15 bp, Homo sapiens
aagacagcatctaag

SEQ ID NO: 1599306 - DNA, 15 bp, Homo sapiens
agacagcatctaaga

SEQ ID NO: 1599307 - DNA, 15 bp, Homo sapiens
gacagcatctaagaa

SEQ ID NO: 1599308 - DNA, 15 bp, Homo sapiens
acagcatctaagaag

SEQ ID NO: 1599309 - DNA, 15 bp, Homo sapiens
cagcatctaagaagt

SEQ ID NO: 1599310 - DNA, 15 bp, Homo sapiens
agcatctaagaagtt

SEQ ID NO: 1599311 - DNA, 15 bp, Homo sapiens
gcatctaagaagttt

SEQ ID NO: 1599312 - DNA, 15 bp, Homo sapiens
catctaagaagtttt

SEQ ID NO: 1599313 - DNA, 15 bp, Homo sapiens
atctaagaagttttg

SEQ ID NO: 1599314 - DNA, 15 bp, Homo sapiens
tctaagaagttttgt

SEQ ID NO: 1599315 - DNA, 15 bp, Homo sapiens
ctaagaagttttgtt

SEQ ID NO: 1599316 - DNA, 15 bp, Homo sapiens
taagaagttttgttc

SEQ ID NO: 1599317 - DNA, 15 bp, Homo sapiens
aagaagttttgttct

SEQ ID NO: 1599318 - DNA, 15 bp, Homo sapiens
agaagttttgttctg

SEQ ID NO: 1599319 - DNA, 15 bp, Homo sapiens
gaagttttgttctgt

SEQ ID NO: 1599320 - DNA, 15 bp, Homo sapiens
aagttttgttctgtc

SEQ ID NO: 1599321 - DNA, 15 bp, Homo sapiens
agttttgttctgtcc

SEQ ID NO: 1599322 - DNA, 15 bp, Homo sapiens
gttttgttctgtcct

SEQ ID NO: 1599323 - DNA, 15 bp, Homo sapiens
ttttgttctgtcctg

SEQ ID NO: 1599324 - DNA, 15 bp, Homo sapiens
tttgttctgtcctgg

SEQ ID NO: 1599325 - DNA, 15 bp, Homo sapiens
ttgttctgtcctgga

SEQ ID NO: 1599326 - DNA, 15 bp, Homo sapiens
tgttctgtcctggaa

SEQ ID NO: 1599327 - DNA, 15 bp, Homo sapiens
gttctgtcctggaat

SEQ ID NO: 1599328 - DNA, 15 bp, Homo sapiens
ttctgtcctggaatt

SEQ ID NO: 1599329 - DNA, 15 bp, Homo sapiens
tctgtcctggaatta

SEQ ID NO: 1599330 - DNA, 15 bp, Homo sapiens
ctgtcctggaattat

SEQ ID NO: 1599331 - DNA, 15 bp, Homo sapiens
tgtcctggaattatt

SEQ ID NO: 1599332 - DNA, 15 bp, Homo sapiens
gtcctggaattattt

SEQ ID NO: 1599333 - DNA, 15 bp, Homo sapiens
tcctggaattatttt

SEQ ID NO: 1599334 - DNA, 15 bp, Homo sapiens
cctggaattatttta

SEQ ID NO: 1599335 - DNA, 15 bp, Homo sapiens
ctggaattattttag

SEQ ID NO: 1599336 - DNA, 15 bp, Homo sapiens
tggaattattttagt

SEQ ID NO: 1599337 - DNA, 15 bp, Homo sapiens
ggaattattttagta

SEQ ID NO: 1599338 - DNA, 15 bp, Homo sapiens
gaattattttagtag

SEQ ID NO: 1599339 - DNA, 15 bp, Homo sapiens
aattattttagtagt

SEQ ID NO: 1599340 - DNA, 15 bp, Homo sapiens
attattttagtagtg

SEQ ID NO: 1599341 - DNA, 15 bp, Homo sapiens
ttattttagtagtgt

SEQ ID NO: 1599342 - DNA, 15 bp, Homo sapiens
tattttagtagtgtt

SEQ ID NO: 1599343 - DNA, 15 bp, Homo sapiens
attttagtagtgttt

SEQ ID NO: 1599344 - DNA, 15 bp, Homo sapiens
ttttagtagtgtttc

SEQ ID NO: 1599345 - DNA, 15 bp, Homo sapiens
tttagtagtgtttca

SEQ ID NO: 1599346 - DNA, 15 bp, Homo sapiens
ttagtagtgtttcag

SEQ ID NO: 1599347 - DNA, 15 bp, Homo sapiens
tagtagtgtttcagt

SEQ ID NO: 1599348 - DNA, 15 bp, Homo sapiens
agtagtgtttcagta

SEQ ID NO: 1599349 - DNA, 15 bp, Homo sapiens
gtagtgtttcagtaa

SEQ ID NO: 1599350 - DNA, 15 bp, Homo sapiens
tagtgtttcagtaat

SEQ ID NO: 1599351 - DNA, 15 bp, Homo sapiens
agtgtttcagtaatg

SEQ ID NO: 1599352 - DNA, 15 bp, Homo sapiens
gtgtttcagtaatgt

SEQ ID NO: 1599353 - DNA, 15 bp, Homo sapiens
tgtttcagtaatgtt

SEQ ID NO: 1599354 - DNA, 15 bp, Homo sapiens
gtttcagtaatgttg

SEQ ID NO: 1599355 - DNA, 15 bp, Homo sapiens
tttcagtaatgttga

SEQ ID NO: 1599356 - DNA, 15 bp, Homo sapiens
ttcagtaatgttgac

SEQ ID NO: 1599357 - DNA, 15 bp, Homo sapiens
tcagtaatgttgact

SEQ ID NO: 1599358 - DNA, 15 bp, Homo sapiens
cagtaatgttgactg

SEQ ID NO: 1599359 - DNA, 15 bp, Homo sapiens
agtaatgttgactgt

SEQ ID NO: 1599360 - DNA, 15 bp, Homo sapiens
gtaatgttgactgta

SEQ ID NO: 1599361 - DNA, 15 bp, Homo sapiens
taatgttgactgtat

SEQ ID NO: 1599362 - DNA, 15 bp, Homo sapiens
aatgttgactgtatt

SEQ ID NO: 1599363 - DNA, 15 bp, Homo sapiens
atgttgactgtattt

SEQ ID NO: 1599364 - DNA, 15 bp, Homo sapiens
tgttgactgtatttt

SEQ ID NO: 1599365 - DNA, 15 bp, Homo sapiens
gttgactgtattttc

SEQ ID NO: 1599366 - DNA, 15 bp, Homo sapiens
ttgactgtattttcc

SEQ ID NO: 1599367 - DNA, 15 bp, Homo sapiens
tgactgtattttcca

SEQ ID NO: 1599368 - DNA, 15 bp, Homo sapiens
gactgtattttccaa

SEQ ID NO: 1599369 - DNA, 15 bp, Homo sapiens
actgtattttccaac

SEQ ID NO: 1599370 - DNA, 15 bp, Homo sapiens
ctgtattttccaact

SEQ ID NO: 1599371 - DNA, 15 bp, Homo sapiens
tgtattttccaactt

SEQ ID NO: 1599372 - DNA, 15 bp, Homo sapiens
gtattttccaacttg

SEQ ID NO: 1599373 - DNA, 15 bp, Homo sapiens
tattttccaacttgt

SEQ ID NO: 1599374 - DNA, 15 bp, Homo sapiens
attttccaacttgtt

SEQ ID NO: 1599375 - DNA, 15 bp, Homo sapiens
ttttccaacttgttc

SEQ ID NO: 1599376 - DNA, 15 bp, Homo sapiens
tttccaacttgttca

SEQ ID NO: 1599377 - DNA, 15 bp, Homo sapiens
ttccaacttgttcaa

SEQ ID NO: 1599378 - DNA, 15 bp, Homo sapiens
tccaacttgttcaaa

SEQ ID NO: 1599379 - DNA, 15 bp, Homo sapiens
ccaacttgttcaaat

SEQ ID NO: 1599380 - DNA, 15 bp, Homo sapiens
caacttgttcaaatt

SEQ ID NO: 1599381 - DNA, 15 bp, Homo sapiens
aacttgttcaaatta

SEQ ID NO: 1599382 - DNA, 15 bp, Homo sapiens
acttgttcaaattat

SEQ ID NO: 1599383 - DNA, 15 bp, Homo sapiens
cttgttcaaattatt

SEQ ID NO: 1599384 - DNA, 15 bp, Homo sapiens
ttgttcaaattatta

SEQ ID NO: 1599385 - DNA, 15 bp, Homo sapiens
tgttcaaattattac

SEQ ID NO: 1599386 - DNA, 15 bp, Homo sapiens
gttcaaattattacc

SEQ ID NO: 1599387 - DNA, 15 bp, Homo sapiens
ttcaaattattacca

SEQ ID NO: 1599388 - DNA, 15 bp, Homo sapiens
tcaaattattaccag

SEQ ID NO: 1599389 - DNA, 15 bp, Homo sapiens
caaattattaccagt

SEQ ID NO: 1599390 - DNA, 15 bp, Homo sapiens
aaattattaccagtg

SEQ ID NO: 1599391 - DNA, 15 bp, Homo sapiens
aattattaccagtga

SEQ ID NO: 1599392 - DNA, 15 bp, Homo sapiens
attattaccagtgaa

SEQ ID NO: 1599393 - DNA, 15 bp, Homo sapiens
ttattaccagtgaat

SEQ ID NO: 1599394 - DNA, 15 bp, Homo sapiens
tattaccagtgaatc

SEQ ID NO: 1599395 - DNA, 15 bp, Homo sapiens
attaccagtgaatct

SEQ ID NO: 1599396 - DNA, 15 bp, Homo sapiens
ttaccagtgaatctt

SEQ ID NO: 1599397 - DNA, 15 bp, Homo sapiens
taccagtgaatcttt

SEQ ID NO: 1599398 - DNA, 15 bp, Homo sapiens
accagtgaatctttg

SEQ ID NO: 1599399 - DNA, 15 bp, Homo sapiens
ccagtgaatctttgt

SEQ ID NO: 1599400 - DNA, 15 bp, Homo sapiens
cagtgaatctttgtc

SEQ ID NO: 1599401 - DNA, 15 bp, Homo sapiens
agtgaatctttgtca

SEQ ID NO: 1599402 - DNA, 15 bp, Homo sapiens
gtgaatctttgtcag

SEQ ID NO: 1599403 - DNA, 15 bp, Homo sapiens
tgaatctttgtcagc

SEQ ID NO: 1599404 - DNA, 15 bp, Homo sapiens
gaatctttgtcagca

SEQ ID NO: 1599405 - DNA, 15 bp, Homo sapiens
aatctttgtcagcag

SEQ ID NO: 1599406 - DNA, 15 bp, Homo sapiens
atctttgtcagcagt

SEQ ID NO: 1599407 - DNA, 15 bp, Homo sapiens
tctttgtcagcagtt

SEQ ID NO: 1599408 - DNA, 15 bp, Homo sapiens
ctttgtcagcagttc

SEQ ID NO: 1599409 - DNA, 15 bp, Homo sapiens
tttgtcagcagttcc

SEQ ID NO: 1599410 - DNA, 15 bp, Homo sapiens
ttgtcagcagttccc

SEQ ID NO: 1599411 - DNA, 15 bp, Homo sapiens
tgtcagcagttccct

SEQ ID NO: 1599412 - DNA, 15 bp, Homo sapiens
gtcagcagttccctt

SEQ ID NO: 1599413 - DNA, 15 bp, Homo sapiens
tcagcagttcccttt

SEQ ID NO: 1599414 - DNA, 15 bp, Homo sapiens
cagcagttccctttt

SEQ ID NO: 1599415 - DNA, 15 bp, Homo sapiens
agcagttccctttta

SEQ ID NO: 1599416 - DNA, 15 bp, Homo sapiens
gcagttcccttttaa

SEQ ID NO: 1599417 - DNA, 15 bp, Homo sapiens
cagttcccttttaaa

SEQ ID NO: 1599418 - DNA, 15 bp, Homo sapiens
agttcccttttaaat

SEQ ID NO: 1599419 - DNA, 15 bp, Homo sapiens
gttcccttttaaatg

SEQ ID NO: 1599420 - DNA, 15 bp, Homo sapiens
ttcccttttaaatgc

SEQ ID NO: 1599421 - DNA, 15 bp, Homo sapiens
tcccttttaaatgca

SEQ ID NO: 1599422 - DNA, 15 bp, Homo sapiens
cccttttaaatgcaa

SEQ ID NO: 1599423 - DNA, 15 bp, Homo sapiens
ccttttaaatgcaaa

SEQ ID NO: 1599424 - DNA, 15 bp, Homo sapiens
cttttaaatgcaaat

SEQ ID NO: 1599425 - DNA, 15 bp, Homo sapiens
ttttaaatgcaaatc

SEQ ID NO: 1599426 - DNA, 15 bp, Homo sapiens
tttaaatgcaaatca

SEQ ID NO: 1599427 - DNA, 15 bp, Homo sapiens
ttaaatgcaaatcaa

SEQ ID NO: 1599428 - DNA, 15 bp, Homo sapiens
taaatgcaaatcaat

SEQ ID NO: 1599429 - DNA, 15 bp, Homo sapiens
aaatgcaaatcaata

SEQ ID NO: 1599430 - DNA, 15 bp, Homo sapiens
aatgcaaatcaataa

SEQ ID NO: 1599431 - DNA, 15 bp, Homo sapiens
atgcaaatcaataaa

SEQ ID NO: 1599432 - DNA, 15 bp, Homo sapiens
tgcaaatcaataaat

SEQ ID NO: 1599433 - DNA, 15 bp, Homo sapiens
gcaaatcaataaatt

SEQ ID NO: 1599434 - DNA, 15 bp, Homo sapiens
caaatcaataaattc

SEQ ID NO: 1599435 - DNA, 15 bp, Homo sapiens
aaatcaataaattcc

SEQ ID NO: 1599436 - DNA, 15 bp, Homo sapiens
aatcaataaattccc

SEQ ID NO: 1599437 - DNA, 15 bp, Homo sapiens
atcaataaattccca

SEQ ID NO: 1599438 - DNA, 15 bp, Homo sapiens
tcaataaattcccaa

SEQ ID NO: 1599439 - DNA, 15 bp, Homo sapiens
caataaattcccaaa

SEQ ID NO: 1599440 - DNA, 15 bp, Homo sapiens
aataaattcccaaaa

SEQ ID NO: 1599441 - DNA, 15 bp, Homo sapiens
ataaattcccaaaaa

SEQ ID NO: 1599442 - DNA, 15 bp, Homo sapiens
taaattcccaaaaat

SEQ ID NO: 1599443 - DNA, 15 bp, Homo sapiens
aaattcccaaaaatt

SEQ ID NO: 1599444 - DNA, 15 bp, Homo sapiens
aattcccaaaaattt

SEQ ID NO: 1599445 - DNA, 15 bp, Homo sapiens
attcccaaaaattta

SEQ ID NO: 1599446 - DNA, 15 bp, Homo sapiens
ttcccaaaaatttaa

SEQ ID NO: 1599447 - DNA, 15 bp, Homo sapiens
tcccaaaaatttaac

SEQ ID NO: 1599448 - DNA, 15 bp, Homo sapiens
cccaaaaatttaact

SEQ ID NO: 1599449 - DNA, 15 bp, Homo sapiens
ccaaaaatttaactg

SEQ ID NO: 1599450 - DNA, 15 bp, Homo sapiens
caaaaatttaactgc

SEQ ID NO: 1599451 - DNA, 15 bp, Homo sapiens
aaaaatttaactgct

SEQ ID NO: 1599452 - DNA, 15 bp, Homo sapiens
aaaatttaactgctt

SEQ ID NO: 1599453 - DNA, 15 bp, Homo sapiens
aaatttaactgcttt

SEQ ID NO: 1599454 - DNA, 15 bp, Homo sapiens
aatttaactgcttta

SEQ ID NO: 1599455 - DNA, 15 bp, Homo sapiens
atttaactgctttat

SEQ ID NO: 1599456 - DNA, 15 bp, Homo sapiens
tttaactgctttatg

SEQ ID NO: 1599457 - DNA, 15 bp, Homo sapiens
ttaactgctttatga

SEQ ID NO: 1599458 - DNA, 15 bp, Homo sapiens
taactgctttatgaa

SEQ ID NO: 1599459 - DNA, 15 bp, Homo sapiens
aactgctttatgaat

SEQ ID NO: 1599460 - DNA, 15 bp, Homo sapiens
actgctttatgaatt

SEQ ID NO: 1599461 - DNA, 15 bp, Homo sapiens
ctgctttatgaattc

SEQ ID NO: 1599462 - DNA, 15 bp, Homo sapiens
tgctttatgaattca

SEQ ID NO: 1599463 - DNA, 15 bp, Homo sapiens
gctttatgaattcaa

SEQ ID NO: 1599464 - DNA, 15 bp, Homo sapiens
ctttatgaattcaat

SEQ ID NO: 1599465 - DNA, 15 bp, Homo sapiens
tttatgaattcaatt

SEQ ID NO: 1599466 - DNA, 15 bp, Homo sapiens
ttatgaattcaattt

SEQ ID NO: 1599467 - DNA, 15 bp, Homo sapiens
tatgaattcaattta

SEQ ID NO: 1599468 - DNA, 15 bp, Homo sapiens
atgaattcaatttaa

SEQ ID NO: 1599469 - DNA, 15 bp, Homo sapiens
tgaattcaatttaaa

SEQ ID NO: 1599470 - DNA, 15 bp, Homo sapiens
aattcaatttaaaaa

SEQ ID NO: 1599471 - DNA, 15 bp, Homo sapiens
attcaatttaaaaat

SEQ ID NO: 1599472 - DNA, 15 bp, Homo sapiens
ttcaatttaaaaatc

SEQ ID NO: 1599473 - DNA, 15 bp, Homo sapiens
tcaatttaaaaatcc

SEQ ID NO: 1599474 - DNA, 15 bp, Homo sapiens
caatttaaaaatcct

SEQ ID NO: 1599475 - DNA, 15 bp, Homo sapiens
aatttaaaaatcctt

SEQ ID NO: 1599476 - DNA, 15 bp, Homo sapiens
atttaaaaatcctta

SEQ ID NO: 1599477 - DNA, 15 bp, Homo sapiens
tttaaaaatccttaa

SEQ ID NO: 1599478 - DNA, 15 bp, Homo sapiens
ttaaaaatccttaaa

SEQ ID NO: 1599479 - DNA, 15 bp, Homo sapiens
taaaaatccttaaaa

SEQ ID NO: 1599480 - DNA, 15 bp, Homo sapiens
aaaaatccttaaaat

SEQ ID NO: 1599481 - DNA, 15 bp, Homo sapiens
aaaatccttaaaata

SEQ ID NO: 1599482 - DNA, 15 bp, Homo sapiens
aaatccttaaaataa

SEQ ID NO: 1599483 - DNA, 15 bp, Homo sapiens
aatccttaaaataag

SEQ ID NO: 1599484 - DNA, 15 bp, Homo sapiens
atccttaaaataagt

SEQ ID NO: 1599485 - DNA, 15 bp, Homo sapiens
tccttaaaataagtc

SEQ ID NO: 1599486 - DNA, 15 bp, Homo sapiens
ccttaaaataagtcc

SEQ ID NO: 1599487 - DNA, 15 bp, Homo sapiens
cttaaaataagtcct

SEQ ID NO: 1599488 - DNA, 15 bp, Homo sapiens
ttaaaataagtcctg

SEQ ID NO: 1599489 - DNA, 15 bp, Homo sapiens
taaaataagtcctgt

SEQ ID NO: 1599490 - DNA, 15 bp, Homo sapiens
aaaataagtcctgtc

SEQ ID NO: 1599491 - DNA, 15 bp, Homo sapiens
aaataagtcctgtct

SEQ ID NO: 1599492 - DNA, 15 bp, Homo sapiens
aataagtcctgtctc

SEQ ID NO: 1599493 - DNA, 15 bp, Homo sapiens
ataagtcctgtctct

SEQ ID NO: 1599494 - DNA, 15 bp, Homo sapiens
taagtcctgtctctt

SEQ ID NO: 1599495 - DNA, 15 bp, Homo sapiens
aagtcctgtctcttt

SEQ ID NO: 1599496 - DNA, 15 bp, Homo sapiens
agtcctgtctcttta

SEQ ID NO: 1599497 - DNA, 15 bp, Homo sapiens
gtcctgtctctttaa

SEQ ID NO: 1599498 - DNA, 15 bp, Homo sapiens
tcctgtctctttaaa

SEQ ID NO: 1599499 - DNA, 15 bp, Homo sapiens
cctgtctctttaaaa

SEQ ID NO: 1599500 - DNA, 15 bp, Homo sapiens
ctgtctctttaaaaa

SEQ ID NO: 1599501 - DNA, 15 bp, Homo sapiens
tgtctctttaaaaaa

SEQ ID NO: 1599502 - DNA, 15 bp, Homo sapiens
gtctctttaaaaaaa

SEQ ID NO: 1599503 - DNA, 15 bp, Homo sapiens
tctctttaaaaaaac

SEQ ID NO: 1599504 - DNA, 15 bp, Homo sapiens
ctctttaaaaaaacc

SEQ ID NO: 1599505 - DNA, 15 bp, Homo sapiens
tctttaaaaaaacct

SEQ ID NO: 1599506 - DNA, 15 bp, Homo sapiens
ctttaaaaaaaccta

SEQ ID NO: 1599507 - DNA, 15 bp, Homo sapiens
tttaaaaaaacctat

SEQ ID NO: 1599508 - DNA, 15 bp, Homo sapiens
ttaaaaaaacctatg

SEQ ID NO: 1599509 - DNA, 15 bp, Homo sapiens
taaaaaaacctatgc

SEQ ID NO: 1599510 - DNA, 15 bp, Homo sapiens
aaaaaaacctatgca

SEQ ID NO: 1599511 - DNA, 15 bp, Homo sapiens
aaaaaacctatgcat

SEQ ID NO: 1599512 - DNA, 15 bp, Homo sapiens
aaaaacctatgcata

SEQ ID NO: 1599513 - DNA, 15 bp, Homo sapiens
aaaacctatgcatag

SEQ ID NO: 1599514 - DNA, 15 bp, Homo sapiens
aaacctatgcatagt

SEQ ID NO: 1599515 - DNA, 15 bp, Homo sapiens
aacctatgcatagtt

SEQ ID NO: 1599516 - DNA, 15 bp, Homo sapiens
acctatgcatagtta

SEQ ID NO: 1599517 - DNA, 15 bp, Homo sapiens
cctatgcatagttat

SEQ ID NO: 1599518 - DNA, 15 bp, Homo sapiens
ctatgcatagttatc

SEQ ID NO: 1599519 - DNA, 15 bp, Homo sapiens
tatgcatagttatca

SEQ ID NO: 1599520 - DNA, 15 bp, Homo sapiens
atgcatagttatcat

SEQ ID NO: 1599521 - DNA, 15 bp, Homo sapiens
tgcatagttatcatt

SEQ ID NO: 1599522 - DNA, 15 bp, Homo sapiens
gcatagttatcattt

SEQ ID NO: 1599523 - DNA, 15 bp, Homo sapiens
catagttatcatttc

SEQ ID NO: 1599524 - DNA, 15 bp, Homo sapiens
atagttatcatttct

SEQ ID NO: 1599525 - DNA, 15 bp, Homo sapiens
tagttatcatttctc

SEQ ID NO: 1599526 - DNA, 15 bp, Homo sapiens
agttatcatttctct

SEQ ID NO: 1599527 - DNA, 15 bp, Homo sapiens
gttatcatttctcta

SEQ ID NO: 1599528 - DNA, 15 bp, Homo sapiens
ttatcatttctctac

SEQ ID NO: 1599529 - DNA, 15 bp, Homo sapiens
tatcatttctctaca

SEQ ID NO: 1599530 - DNA, 15 bp, Homo sapiens
atcatttctctacaa

SEQ ID NO: 1599531 - DNA, 15 bp, Homo sapiens
tcatttctctacaaa

SEQ ID NO: 1599532 - DNA, 15 bp, Homo sapiens
catttctctacaaat

SEQ ID NO: 1599533 - DNA, 15 bp, Homo sapiens
atttctctacaaatt

SEQ ID NO: 1599534 - DNA, 15 bp, Homo sapiens
tttctctacaaatta

SEQ ID NO: 1599535 - DNA, 15 bp, Homo sapiens
ttctctacaaattaa

SEQ ID NO: 1599536 - DNA, 15 bp, Homo sapiens
tctctacaaattaac

SEQ ID NO: 1599537 - DNA, 15 bp, Homo sapiens
ctctacaaattaacc

SEQ ID NO: 1599538 - DNA, 15 bp, Homo sapiens
tctacaaattaacct

SEQ ID NO: 1599539 - DNA, 15 bp, Homo sapiens
ctacaaattaaccta

SEQ ID NO: 1599540 - DNA, 15 bp, Homo sapiens
tacaaattaacctag

SEQ ID NO: 1599541 - DNA, 15 bp, Homo sapiens
acaaattaacctagt

SEQ ID NO: 1599542 - DNA, 15 bp, Homo sapiens
caaattaacctagtt

SEQ ID NO: 1599543 - DNA, 15 bp, Homo sapiens
aaattaacctagttt

SEQ ID NO: 1599544 - DNA, 15 bp, Homo sapiens
aattaacctagttta

SEQ ID NO: 1599545 - DNA, 15 bp, Homo sapiens
attaacctagtttag

SEQ ID NO: 1599546 - DNA, 15 bp, Homo sapiens
ttaacctagtttagt

SEQ ID NO: 1599547 - DNA, 15 bp, Homo sapiens
taacctagtttagtt

SEQ ID NO: 1599548 - DNA, 15 bp, Homo sapiens
aacctagtttagttt

SEQ ID NO: 1599549 - DNA, 15 bp, Homo sapiens
acctagtttagtttt

SEQ ID NO: 1599550 - DNA, 15 bp, Homo sapiens
cctagtttagttttc

SEQ ID NO: 1599551 - DNA, 15 bp, Homo sapiens
ctagtttagttttct

SEQ ID NO: 1599552 - DNA, 15 bp, Homo sapiens
tagtttagttttctg

SEQ ID NO: 1599553 - DNA, 15 bp, Homo sapiens
agtttagttttctgt

SEQ ID NO: 1599554 - DNA, 15 bp, Homo sapiens
gtttagttttctgtt

SEQ ID NO: 1599555 - DNA, 15 bp, Homo sapiens
tttagttttctgttg

SEQ ID NO: 1599556 - DNA, 15 bp, Homo sapiens
ttagttttctgttgg

SEQ ID NO: 1599557 - DNA, 15 bp, Homo sapiens
tagttttctgttggt

SEQ ID NO: 1599558 - DNA, 15 bp, Homo sapiens
agttttctgttggtt

SEQ ID NO: 1599559 - DNA, 15 bp, Homo sapiens
gttttctgttggttc

SEQ ID NO: 1599560 - DNA, 15 bp, Homo sapiens
ttttctgttggttcc

SEQ ID NO: 1599561 - DNA, 15 bp, Homo sapiens
tttctgttggttcca

SEQ ID NO: 1599562 - DNA, 15 bp, Homo sapiens
ttctgttggttccat

SEQ ID NO: 1599563 - DNA, 15 bp, Homo sapiens
tctgttggttccatt

SEQ ID NO: 1599564 - DNA, 15 bp, Homo sapiens
ctgttggttccattt

SEQ ID NO: 1599565 - DNA, 15 bp, Homo sapiens
tgttggttccatttt

SEQ ID NO: 1599566 - DNA, 15 bp, Homo sapiens
gttggttccattttc

SEQ ID NO: 1599567 - DNA, 15 bp, Homo sapiens
ttggttccattttcc

SEQ ID NO: 1599568 - DNA, 15 bp, Homo sapiens
tggttccattttcct

SEQ ID NO: 1599569 - DNA, 15 bp, Homo sapiens
ggttccattttcctt

SEQ ID NO: 1599570 - DNA, 15 bp, Homo sapiens
gttccattttccttg

SEQ ID NO: 1599571 - DNA, 15 bp, Homo sapiens
ttccattttccttgt

SEQ ID NO: 1599572 - DNA, 15 bp, Homo sapiens
tccattttccttgtt

SEQ ID NO: 1599573 - DNA, 15 bp, Homo sapiens
ccattttccttgttt

SEQ ID NO: 1599574 - DNA, 15 bp, Homo sapiens
cattttccttgtttg

SEQ ID NO: 1599575 - DNA, 15 bp, Homo sapiens
attttccttgtttgt

SEQ ID NO: 1599576 - DNA, 15 bp, Homo sapiens
ttttccttgtttgtt

SEQ ID NO: 1599577 - DNA, 15 bp, Homo sapiens
tttccttgtttgtta

SEQ ID NO: 1599578 - DNA, 15 bp, Homo sapiens
ttccttgtttgttaa

SEQ ID NO: 1599579 - DNA, 15 bp, Homo sapiens
tccttgtttgttaag

SEQ ID NO: 1599580 - DNA, 15 bp, Homo sapiens
ccttgtttgttaagt

SEQ ID NO: 1599581 - DNA, 15 bp, Homo sapiens
cttgtttgttaagtt

SEQ ID NO: 1599582 - DNA, 15 bp, Homo sapiens
ttgtttgttaagttt

SEQ ID NO: 1599583 - DNA, 15 bp, Homo sapiens
tgtttgttaagtttt

SEQ ID NO: 1599584 - DNA, 15 bp, Homo sapiens
gtttgttaagtttta

SEQ ID NO: 1599585 - DNA, 15 bp, Homo sapiens
tttgttaagttttag

SEQ ID NO: 1599586 - DNA, 15 bp, Homo sapiens
ttgttaagttttagt

SEQ ID NO: 1599587 - DNA, 15 bp, Homo sapiens
tgttaagttttagta

SEQ ID NO: 1599588 - DNA, 15 bp, Homo sapiens
gttaagttttagtag

SEQ ID NO: 1599589 - DNA, 15 bp, Homo sapiens
ttaagttttagtagc

SEQ ID NO: 1599590 - DNA, 15 bp, Homo sapiens
taagttttagtagct

SEQ ID NO: 1599591 - DNA, 15 bp, Homo sapiens
aagttttagtagcta

SEQ ID NO: 1599592 - DNA, 15 bp, Homo sapiens
ttttagtagctagtt

SEQ ID NO: 1599593 - DNA, 15 bp, Homo sapiens
tttagtagctagttt

SEQ ID NO: 1599594 - DNA, 15 bp, Homo sapiens
ttagtagctagttta

SEQ ID NO: 1599595 - DNA, 15 bp, Homo sapiens
tagtagctagtttaa

SEQ ID NO: 1599596 - DNA, 15 bp, Homo sapiens
agtagctagtttaat

SEQ ID NO: 1599597 - DNA, 15 bp, Homo sapiens
gtagctagtttaatt

SEQ ID NO: 1599598 - DNA, 15 bp, Homo sapiens
tagctagtttaattg

SEQ ID NO: 1599599 - DNA, 15 bp, Homo sapiens
agctagtttaattgt

SEQ ID NO: 1599600 - DNA, 15 bp, Homo sapiens
gctagtttaattgta

SEQ ID NO: 1599601 - DNA, 15 bp, Homo sapiens
ctagtttaattgtaa

SEQ ID NO: 1599602 - DNA, 15 bp, Homo sapiens
tagtttaattgtaat

SEQ ID NO: 1599603 - DNA, 15 bp, Homo sapiens
agtttaattgtaatc

SEQ ID NO: 1599604 - DNA, 15 bp, Homo sapiens
gtttaattgtaatct

SEQ ID NO: 1599605 - DNA, 15 bp, Homo sapiens
tttaattgtaatctc

SEQ ID NO: 1599606 - DNA, 15 bp, Homo sapiens
ttaattgtaatctca

SEQ ID NO: 1599607 - DNA, 15 bp, Homo sapiens
taattgtaatctcaa

SEQ ID NO: 1599608 - DNA, 15 bp, Homo sapiens
aattgtaatctcaat

SEQ ID NO: 1599609 - DNA, 15 bp, Homo sapiens
attgtaatctcaatg

SEQ ID NO: 1599610 - DNA, 15 bp, Homo sapiens
ttgtaatctcaatga

SEQ ID NO: 1599611 - DNA, 15 bp, Homo sapiens
tgtaatctcaatgat

SEQ ID NO: 1599612 - DNA, 15 bp, Homo sapiens
gtaatctcaatgatt

SEQ ID NO: 1599613 - DNA, 15 bp, Homo sapiens
taatctcaatgatta

SEQ ID NO: 1599614 - DNA, 15 bp, Homo sapiens
aatctcaatgattat

SEQ ID NO: 1599615 - DNA, 15 bp, Homo sapiens
atctcaatgattatg

SEQ ID NO: 1599616 - DNA, 15 bp, Homo sapiens
tctcaatgattatgt

SEQ ID NO: 1599617 - DNA, 15 bp, Homo sapiens
ctcaatgattatgtg

SEQ ID NO: 1599618 - DNA, 15 bp, Homo sapiens
tcaatgattatgtgg

SEQ ID NO: 1599619 - DNA, 15 bp, Homo sapiens
caatgattatgtggt

SEQ ID NO: 1599620 - DNA, 15 bp, Homo sapiens
aatgattatgtggta

SEQ ID NO: 1599621 - DNA, 15 bp, Homo sapiens
atgattatgtggtag

SEQ ID NO: 1599622 - DNA, 15 bp, Homo sapiens
tgattatgtggtaga

SEQ ID NO: 1599623 - DNA, 15 bp, Homo sapiens
gattatgtggtagaa

SEQ ID NO: 1599624 - DNA, 15 bp, Homo sapiens
attatgtggtagaat

SEQ ID NO: 1599625 - DNA, 15 bp, Homo sapiens
ttatgtggtagaatg

SEQ ID NO: 1599626 - DNA, 15 bp, Homo sapiens
tatgtggtagaatgg

SEQ ID NO: 1599627 - DNA, 15 bp, Homo sapiens
atgtggtagaatggg

SEQ ID NO: 1599628 - DNA, 15 bp, Homo sapiens
tgtggtagaatgggt

SEQ ID NO: 1599629 - DNA, 15 bp, Homo sapiens
gtggtagaatgggtt

SEQ ID NO: 1599630 - DNA, 15 bp, Homo sapiens
tggtagaatgggttg

SEQ ID NO: 1599631 - DNA, 15 bp, Homo sapiens
ggtagaatgggttgg

SEQ ID NO: 1599632 - DNA, 15 bp, Homo sapiens
gtagaatgggttggc

SEQ ID NO: 1599633 - DNA, 15 bp, Homo sapiens
tagaatgggttggcg

SEQ ID NO: 1599634 - DNA, 15 bp, Homo sapiens
agaatgggttggcgg

SEQ ID NO: 1599635 - DNA, 15 bp, Homo sapiens
gaatgggttggcgga

SEQ ID NO: 1599636 - DNA, 15 bp, Homo sapiens
aatgggttggcggag

SEQ ID NO: 1599637 - DNA, 15 bp, Homo sapiens
atgggttggcggagc

SEQ ID NO: 1599638 - DNA, 15 bp, Homo sapiens
tgggttggcggagct

SEQ ID NO: 1599639 - DNA, 15 bp, Homo sapiens
gggttggcggagcta

SEQ ID NO: 1599640 - DNA, 15 bp, Homo sapiens
ggttggcggagctac

SEQ ID NO: 1599641 - DNA, 15 bp, Homo sapiens
gttggcggagctaca

SEQ ID NO: 1599642 - DNA, 15 bp, Homo sapiens
ttggcggagctacaa

SEQ ID NO: 1599643 - DNA, 15 bp, Homo sapiens
tggcggagctacaaa

SEQ ID NO: 1599644 - DNA, 15 bp, Homo sapiens
ggcggagctacaaaa

SEQ ID NO: 1599645 - DNA, 15 bp, Homo sapiens
gcggagctacaaaaa

SEQ ID NO: 1599646 - DNA, 15 bp, Homo sapiens
cggagctacaaaaat

SEQ ID NO: 1599647 - DNA, 15 bp, Homo sapiens
ggagctacaaaaatt

SEQ ID NO: 1599648 - DNA, 15 bp, Homo sapiens
gagctacaaaaattc

SEQ ID NO: 1599649 - DNA, 15 bp, Homo sapiens
agctacaaaaattcc

SEQ ID NO: 1599650 - DNA, 15 bp, Homo sapiens
gctacaaaaattcct

SEQ ID NO: 1599651 - DNA, 15 bp, Homo sapiens
ctacaaaaattccta

SEQ ID NO: 1599652 - DNA, 15 bp, Homo sapiens
tacaaaaattcctag

SEQ ID NO: 1599653 - DNA, 15 bp, Homo sapiens
acaaaaattcctagc

SEQ ID NO: 1599654 - DNA, 15 bp, Homo sapiens
caaaaattcctagct

SEQ ID NO: 1599655 - DNA, 15 bp, Homo sapiens
aaaaattcctagcta

SEQ ID NO: 1599656 - DNA, 15 bp, Homo sapiens
aaaattcctagctac

SEQ ID NO: 1599657 - DNA, 15 bp, Homo sapiens
aaattcctagctact

SEQ ID NO: 1599658 - DNA, 15 bp, Homo sapiens
aattcctagctactt

SEQ ID NO: 1599659 - DNA, 15 bp, Homo sapiens
attcctagctacttc

SEQ ID NO: 1599660 - DNA, 15 bp, Homo sapiens
ttcctagctacttca

SEQ ID NO: 1599661 - DNA, 15 bp, Homo sapiens
tcctagctacttcag

SEQ ID NO: 1599662 - DNA, 15 bp, Homo sapiens
cctagctacttcaga

SEQ ID NO: 1599663 - DNA, 15 bp, Homo sapiens
ctagctacttcagag

SEQ ID NO: 1599664 - DNA, 15 bp, Homo sapiens
tagctacttcagaga

SEQ ID NO: 1599665 - DNA, 15 bp, Homo sapiens
agctacttcagagac

SEQ ID NO: 1599666 - DNA, 15 bp, Homo sapiens
gctacttcagagaca

SEQ ID NO: 1599667 - DNA, 15 bp, Homo sapiens
ctacttcagagacat

SEQ ID NO: 1599668 - DNA, 15 bp, Homo sapiens
tacttcagagacatt

SEQ ID NO: 1599669 - DNA, 15 bp, Homo sapiens
acttcagagacatta

SEQ ID NO: 1599670 - DNA, 15 bp, Homo sapiens
cttcagagacattaa

SEQ ID NO: 1599671 - DNA, 15 bp, Homo sapiens
ttcagagacattaaa

SEQ ID NO: 1599672 - DNA, 15 bp, Homo sapiens
tcagagacattaaat

SEQ ID NO: 1599673 - DNA, 15 bp, Homo sapiens
cagagacattaaatt

SEQ ID NO: 1599674 - DNA, 15 bp, Homo sapiens
agagacattaaattt

SEQ ID NO: 1599675 - DNA, 15 bp, Homo sapiens
gagacattaaatttc

SEQ ID NO: 1599676 - DNA, 15 bp, Homo sapiens
agacattaaatttca

SEQ ID NO: 1599677 - DNA, 15 bp, Homo sapiens
gacattaaatttcag

SEQ ID NO: 1599678 - DNA, 15 bp, Homo sapiens
acattaaatttcaga

SEQ ID NO: 1599679 - DNA, 15 bp, Homo sapiens
cattaaatttcagac

SEQ ID NO: 1599680 - DNA, 15 bp, Homo sapiens
attaaatttcagaca

SEQ ID NO: 1599681 - DNA, 15 bp, Homo sapiens
ttaaatttcagacac

SEQ ID NO: 1599682 - DNA, 15 bp, Homo sapiens
taaatttcagacaca

SEQ ID NO: 1599683 - DNA, 15 bp, Homo sapiens
aaatttcagacacat

SEQ ID NO: 1599684 - DNA, 15 bp, Homo sapiens
aatttcagacacatg

SEQ ID NO: 1599685 - DNA, 15 bp, Homo sapiens
atttcagacacatgg

SEQ ID NO: 1599686 - DNA, 15 bp, Homo sapiens
tttcagacacatggt

SEQ ID NO: 1599687 - DNA, 15 bp, Homo sapiens
ttcagacacatggta

SEQ ID NO: 1599688 - DNA, 15 bp, Homo sapiens
tcagacacatggtac

SEQ ID NO: 1599689 - DNA, 15 bp, Homo sapiens
cagacacatggtaca

SEQ ID NO: 1599690 - DNA, 15 bp, Homo sapiens
agacacatggtacac

SEQ ID NO: 1599691 - DNA, 15 bp, Homo sapiens
gacacatggtacact

SEQ ID NO: 1599692 - DNA, 15 bp, Homo sapiens
acacatggtacactt

SEQ ID NO: 1599693 - DNA, 15 bp, Homo sapiens
cacatggtacacttt

SEQ ID NO: 1599694 - DNA, 15 bp, Homo sapiens
acatggtacacttta

SEQ ID NO: 1599695 - DNA, 15 bp, Homo sapiens
catggtacactttat

SEQ ID NO: 1599696 - DNA, 15 bp, Homo sapiens
tggtacactttatat

SEQ ID NO: 1599697 - DNA, 15 bp, Homo sapiens
ggtacactttatatt

SEQ ID NO: 1599698 - DNA, 15 bp, Homo sapiens
gtacactttatatta

SEQ ID NO: 1599699 - DNA, 15 bp, Homo sapiens
tacactttatattac

SEQ ID NO: 1599700 - DNA, 15 bp, Homo sapiens
acactttatattaca

SEQ ID NO: 1599701 - DNA, 15 bp, Homo sapiens
cactttatattacat

SEQ ID NO: 1599702 - DNA, 15 bp, Homo sapiens
actttatattacatt

SEQ ID NO: 1599703 - DNA, 15 bp, Homo sapiens
ctttatattacattt

SEQ ID NO: 1599704 - DNA, 15 bp, Homo sapiens
tttatattacatttt

SEQ ID NO: 1599705 - DNA, 15 bp, Homo sapiens
ttatattacatttta

SEQ ID NO: 1599706 - DNA, 15 bp, Homo sapiens
tatattacattttac

SEQ ID NO: 1599707 - DNA, 15 bp, Homo sapiens
atattacattttact

SEQ ID NO: 1599708 - DNA, 15 bp, Homo sapiens
tattacattttacta

SEQ ID NO: 1599709 - DNA, 15 bp, Homo sapiens
attacattttactat

SEQ ID NO: 1599710 - DNA, 15 bp, Homo sapiens
ttacattttactatg

SEQ ID NO: 1599711 - DNA, 15 bp, Homo sapiens
tacattttactatgc

SEQ ID NO: 1599712 - DNA, 15 bp, Homo sapiens
acattttactatgct

SEQ ID NO: 1599713 - DNA, 15 bp, Homo sapiens
cattttactatgcta

SEQ ID NO: 1599714 - DNA, 15 bp, Homo sapiens
attttactatgctaa

SEQ ID NO: 1599715 - DNA, 15 bp, Homo sapiens
ttttactatgctaaa

SEQ ID NO: 1599716 - DNA, 15 bp, Homo sapiens
tttactatgctaaaa

SEQ ID NO: 1599717 - DNA, 15 bp, Homo sapiens
ttactatgctaaaat

SEQ ID NO: 1599718 - DNA, 15 bp, Homo sapiens
tactatgctaaaata

SEQ ID NO: 1599719 - DNA, 15 bp, Homo sapiens
actatgctaaaataa

SEQ ID NO: 1599720 - DNA, 15 bp, Homo sapiens
ctatgctaaaataac

SEQ ID NO: 1599721 - DNA, 15 bp, Homo sapiens
tatgctaaaataaca

SEQ ID NO: 1599722 - DNA, 15 bp, Homo sapiens
atgctaaaataacac

SEQ ID NO: 1599723 - DNA, 15 bp, Homo sapiens
tgctaaaataacacg

SEQ ID NO: 1599724 - DNA, 15 bp, Homo sapiens
gctaaaataacacgg

SEQ ID NO: 1599725 - DNA, 15 bp, Homo sapiens
ctaaaataacacggc

SEQ ID NO: 1599726 - DNA, 15 bp, Homo sapiens
taaaataacacggct

SEQ ID NO: 1599727 - DNA, 15 bp, Homo sapiens
aaaataacacggctt

SEQ ID NO: 1599728 - DNA, 15 bp, Homo sapiens
aaataacacggcttt

SEQ ID NO: 1599729 - DNA, 15 bp, Homo sapiens
aataacacggctttc

SEQ ID NO: 1599730 - DNA, 15 bp, Homo sapiens
ataacacggctttct

SEQ ID NO: 1599731 - DNA, 15 bp, Homo sapiens
taacacggctttctt

SEQ ID NO: 1599732 - DNA, 15 bp, Homo sapiens
aacacggctttcttt

SEQ ID NO: 1599733 - DNA, 15 bp, Homo sapiens
acacggctttctttt

SEQ ID NO: 1599734 - DNA, 15 bp, Homo sapiens
cacggctttcttttg

SEQ ID NO: 1599735 - DNA, 15 bp, Homo sapiens
acggctttcttttgg

SEQ ID NO: 1599736 - DNA, 15 bp, Homo sapiens
cggctttcttttgga

SEQ ID NO: 1599737 - DNA, 15 bp, Homo sapiens
ggctttcttttggaa

SEQ ID NO: 1599738 - DNA, 15 bp, Homo sapiens
gctttcttttggaat

SEQ ID NO: 1599739 - DNA, 15 bp, Homo sapiens
ctttcttttggaatt

SEQ ID NO: 1599740 - DNA, 15 bp, Homo sapiens
tttcttttggaattc

SEQ ID NO: 1599741 - DNA, 15 bp, Homo sapiens
ttcttttggaattct

SEQ ID NO: 1599742 - DNA, 15 bp, Homo sapiens
tcttttggaattctg

SEQ ID NO: 1599743 - DNA, 15 bp, Homo sapiens
cttttggaattctgt

SEQ ID NO: 1599744 - DNA, 15 bp, Homo sapiens
ttttggaattctgtt

SEQ ID NO: 1599745 - DNA, 15 bp, Homo sapiens
tttggaattctgttc

SEQ ID NO: 1599746 - DNA, 15 bp, Homo sapiens
ttggaattctgttca

SEQ ID NO: 1599747 - DNA, 15 bp, Homo sapiens
tggaattctgttcag

SEQ ID NO: 1599748 - DNA, 15 bp, Homo sapiens
ggaattctgttcagt

SEQ ID NO: 1599749 - DNA, 15 bp, Homo sapiens
gaattctgttcagtt

SEQ ID NO: 1599750 - DNA, 15 bp, Homo sapiens
aattctgttcagttt

SEQ ID NO: 1599751 - DNA, 15 bp, Homo sapiens
attctgttcagtttt

SEQ ID NO: 1599752 - DNA, 15 bp, Homo sapiens
ttctgttcagttttt

SEQ ID NO: 1599753 - DNA, 15 bp, Homo sapiens
tctgttcagtttttc

SEQ ID NO: 1599754 - DNA, 15 bp, Homo sapiens
ctgttcagtttttca

SEQ ID NO: 1599755 - DNA, 15 bp, Homo sapiens
tgttcagtttttcag

SEQ ID NO: 1599756 - DNA, 15 bp, Homo sapiens
gttcagtttttcaga

SEQ ID NO: 1599757 - DNA, 15 bp, Homo sapiens
ttcagtttttcagat

SEQ ID NO: 1599758 - DNA, 15 bp, Homo sapiens
tcagtttttcagatt

SEQ ID NO: 1599759 - DNA, 15 bp, Homo sapiens
cagtttttcagattg

SEQ ID NO: 1599760 - DNA, 15 bp, Homo sapiens
agtttttcagattgt

SEQ ID NO: 1599761 - DNA, 15 bp, Homo sapiens
gtttttcagattgta

SEQ ID NO: 1599762 - DNA, 15 bp, Homo sapiens
tttttcagattgtaa

SEQ ID NO: 1599763 - DNA, 15 bp, Homo sapiens
ttttcagattgtaat

SEQ ID NO: 1599764 - DNA, 15 bp, Homo sapiens
tttcagattgtaatc

SEQ ID NO: 1599765 - DNA, 15 bp, Homo sapiens
ttcagattgtaatct

SEQ ID NO: 1599766 - DNA, 15 bp, Homo sapiens
tcagattgtaatctc

SEQ ID NO: 1599767 - DNA, 15 bp, Homo sapiens
cagattgtaatctca

SEQ ID NO: 1599768 - DNA, 15 bp, Homo sapiens
agattgtaatctcag

SEQ ID NO: 1599769 - DNA, 15 bp, Homo sapiens
gattgtaatctcagc

SEQ ID NO: 1599770 - DNA, 15 bp, Homo sapiens
attgtaatctcagct

SEQ ID NO: 1599771 - DNA, 15 bp, Homo sapiens
ttgtaatctcagcta

SEQ ID NO: 1599772 - DNA, 15 bp, Homo sapiens
gtaatctcagctaca

SEQ ID NO: 1599773 - DNA, 15 bp, Homo sapiens
taatctcagctacat

SEQ ID NO: 1599774 - DNA, 15 bp, Homo sapiens
aatctcagctacatc

SEQ ID NO: 1599775 - DNA, 15 bp, Homo sapiens
atctcagctacatct

SEQ ID NO: 1599776 - DNA, 15 bp, Homo sapiens
tctcagctacatctc

SEQ ID NO: 1599777 - DNA, 15 bp, Homo sapiens
ctcagctacatctca

SEQ ID NO: 1599778 - DNA, 15 bp, Homo sapiens
tcagctacatctcaa

SEQ ID NO: 1599779 - DNA, 15 bp, Homo sapiens
cagctacatctcaac

SEQ ID NO: 1599780 - DNA, 15 bp, Homo sapiens
agctacatctcaaca

SEQ ID NO: 1599781 - DNA, 15 bp, Homo sapiens
gctacatctcaacag

SEQ ID NO: 1599782 - DNA, 15 bp, Homo sapiens
ctacatctcaacaga

SEQ ID NO: 1599783 - DNA, 15 bp, Homo sapiens
tacatctcaacagat

SEQ ID NO: 1599784 - DNA, 15 bp, Homo sapiens
acatctcaacagatt

SEQ ID NO: 1599785 - DNA, 15 bp, Homo sapiens
catctcaacagattg

SEQ ID NO: 1599786 - DNA, 15 bp, Homo sapiens
atctcaacagattgt

SEQ ID NO: 1599787 - DNA, 15 bp, Homo sapiens
tctcaacagattgtt

SEQ ID NO: 1599788 - DNA, 15 bp, Homo sapiens
ctcaacagattgttc

SEQ ID NO: 1599789 - DNA, 15 bp, Homo sapiens
tcaacagattgttct

SEQ ID NO: 1599790 - DNA, 15 bp, Homo sapiens
caacagattgttctc

SEQ ID NO: 1599791 - DNA, 15 bp, Homo sapiens
aacagattgttctca

SEQ ID NO: 1599792 - DNA, 15 bp, Homo sapiens
acagattgttctcag

SEQ ID NO: 1599793 - DNA, 15 bp, Homo sapiens
cagattgttctcaga

SEQ ID NO: 1599794 - DNA, 15 bp, Homo sapiens
agattgttctcagat

SEQ ID NO: 1599795 - DNA, 15 bp, Homo sapiens
gattgttctcagata

SEQ ID NO: 1599796 - DNA, 15 bp, Homo sapiens
attgttctcagatat

SEQ ID NO: 1599797 - DNA, 15 bp, Homo sapiens
ttgttctcagatatg

SEQ ID NO: 1599798 - DNA, 15 bp, Homo sapiens
tgttctcagatatgt

SEQ ID NO: 1599799 - DNA, 15 bp, Homo sapiens
gttctcagatatgtc

SEQ ID NO: 1599800 - DNA, 15 bp, Homo sapiens
ttctcagatatgtcc

SEQ ID NO: 1599801 - DNA, 15 bp, Homo sapiens
tctcagatatgtcct

SEQ ID NO: 1599802 - DNA, 15 bp, Homo sapiens
ctcagatatgtccta

SEQ ID NO: 1599803 - DNA, 15 bp, Homo sapiens
tcagatatgtcctat

SEQ ID NO: 1599804 - DNA, 15 bp, Homo sapiens
cagatatgtcctatt

SEQ ID NO: 1599805 - DNA, 15 bp, Homo sapiens
agatatgtcctatta

SEQ ID NO: 1599806 - DNA, 15 bp, Homo sapiens
gatatgtcctattac

SEQ ID NO: 1599807 - DNA, 15 bp, Homo sapiens
atatgtcctattacc

SEQ ID NO: 1599808 - DNA, 15 bp, Homo sapiens
tatgtcctattacct

SEQ ID NO: 1599809 - DNA, 15 bp, Homo sapiens
atgtcctattacctt

SEQ ID NO: 1599810 - DNA, 15 bp, Homo sapiens
tgtcctattaccttc

SEQ ID NO: 1599811 - DNA, 15 bp, Homo sapiens
gtcctattaccttct

SEQ ID NO: 1599812 - DNA, 15 bp, Homo sapiens
tcctattaccttctt

SEQ ID NO: 1599813 - DNA, 15 bp, Homo sapiens
cctattaccttcttt

SEQ ID NO: 1599814 - DNA, 15 bp, Homo sapiens
ctattaccttctttg

SEQ ID NO: 1599815 - DNA, 15 bp, Homo sapiens
tattaccttctttgt

SEQ ID NO: 1599816 - DNA, 15 bp, Homo sapiens
attaccttctttgtg

SEQ ID NO: 1599817 - DNA, 15 bp, Homo sapiens
ttaccttctttgtgt

SEQ ID NO: 1599818 - DNA, 15 bp, Homo sapiens
taccttctttgtgta

SEQ ID NO: 1599819 - DNA, 15 bp, Homo sapiens
accttctttgtgtag

SEQ ID NO: 1599820 - DNA, 15 bp, Homo sapiens
ccttctttgtgtaga

SEQ ID NO: 1599821 - DNA, 15 bp, Homo sapiens
cttctttgtgtagat

SEQ ID NO: 1599822 - DNA, 15 bp, Homo sapiens
ttctttgtgtagata

SEQ ID NO: 1599823 - DNA, 15 bp, Homo sapiens
tctttgtgtagatag

SEQ ID NO: 1599824 - DNA, 15 bp, Homo sapiens
ctttgtgtagatagt

SEQ ID NO: 1599825 - DNA, 15 bp, Homo sapiens
tttgtgtagatagtg

SEQ ID NO: 1599826 - DNA, 15 bp, Homo sapiens
ttgtgtagatagtgc

SEQ ID NO: 1599827 - DNA, 15 bp, Homo sapiens
tgtgtagatagtgct

SEQ ID NO: 1599828 - DNA, 15 bp, Homo sapiens
gtgtagatagtgctt

SEQ ID NO: 1599829 - DNA, 15 bp, Homo sapiens
tgtagatagtgcttt

SEQ ID NO: 1599830 - DNA, 15 bp, Homo sapiens
gtagatagtgcttta

SEQ ID NO: 1599831 - DNA, 15 bp, Homo sapiens
tagatagtgctttat

SEQ ID NO: 1599832 - DNA, 15 bp, Homo sapiens
agatagtgctttatt

SEQ ID NO: 1599833 - DNA, 15 bp, Homo sapiens
gatagtgctttattg

SEQ ID NO: 1599834 - DNA, 15 bp, Homo sapiens
atagtgctttattga

SEQ ID NO: 1599835 - DNA, 15 bp, Homo sapiens
tagtgctttattgac

SEQ ID NO: 1599836 - DNA, 15 bp, Homo sapiens
agtgctttattgact

SEQ ID NO: 1599837 - DNA, 15 bp, Homo sapiens
gtgctttattgacta

SEQ ID NO: 1599838 - DNA, 15 bp, Homo sapiens
tgctttattgactaa

SEQ ID NO: 1599839 - DNA, 15 bp, Homo sapiens
gctttattgactaag

SEQ ID NO: 1599840 - DNA, 15 bp, Homo sapiens
ctttattgactaaga

SEQ ID NO: 1599841 - DNA, 15 bp, Homo sapiens
tttattgactaagaa

SEQ ID NO: 1599842 - DNA, 15 bp, Homo sapiens
ttattgactaagaac

SEQ ID NO: 1599843 - DNA, 15 bp, Homo sapiens
tattgactaagaaca

SEQ ID NO: 1599844 - DNA, 15 bp, Homo sapiens
attgactaagaacaa

SEQ ID NO: 1599845 - DNA, 15 bp, Homo sapiens
ttgactaagaacaat

SEQ ID NO: 1599846 - DNA, 15 bp, Homo sapiens
tgactaagaacaatg

SEQ ID NO: 1599847 - DNA, 15 bp, Homo sapiens
gactaagaacaatga

SEQ ID NO: 1599848 - DNA, 15 bp, Homo sapiens
actaagaacaatgac

SEQ ID NO: 1599849 - DNA, 15 bp, Homo sapiens
ctaagaacaatgaca

SEQ ID NO: 1599850 - DNA, 15 bp, Homo sapiens
taagaacaatgacaa

SEQ ID NO: 1599851 - DNA, 15 bp, Homo sapiens
aagaacaatgacaac

SEQ ID NO: 1599852 - DNA, 15 bp, Homo sapiens
agaacaatgacaaca

SEQ ID NO: 1599853 - DNA, 15 bp, Homo sapiens
gaacaatgacaacaa

SEQ ID NO: 1599854 - DNA, 15 bp, Homo sapiens
aacaatgacaacaac

SEQ ID NO: 1599855 - DNA, 15 bp, Homo sapiens
acaatgacaacaaca

SEQ ID NO: 1599856 - DNA, 15 bp, Homo sapiens
caatgacaacaacac

SEQ ID NO: 1599857 - DNA, 15 bp, Homo sapiens
aatgacaacaacacc

SEQ ID NO: 1599858 - DNA, 15 bp, Homo sapiens
atgacaacaacacct

SEQ ID NO: 1599859 - DNA, 15 bp, Homo sapiens
tgacaacaacacctt

SEQ ID NO: 1599860 - DNA, 15 bp, Homo sapiens
gacaacaacaccttt

SEQ ID NO: 1599861 - DNA, 15 bp, Homo sapiens
acaacaacacctttt

SEQ ID NO: 1599862 - DNA, 15 bp, Homo sapiens
caacaacaccttttg

SEQ ID NO: 1599863 - DNA, 15 bp, Homo sapiens
aacaacaccttttgt

SEQ ID NO: 1599864 - DNA, 15 bp, Homo sapiens
acaacaccttttgtt

SEQ ID NO: 1599865 - DNA, 15 bp, Homo sapiens
caacaccttttgttt

SEQ ID NO: 1599866 - DNA, 15 bp, Homo sapiens
aacaccttttgtttt

SEQ ID NO: 1599867 - DNA, 15 bp, Homo sapiens
acaccttttgttttc

SEQ ID NO: 1599868 - DNA, 15 bp, Homo sapiens
caccttttgttttct

SEQ ID NO: 1599869 - DNA, 15 bp, Homo sapiens
accttttgttttctg

SEQ ID NO: 1599870 - DNA, 15 bp, Homo sapiens
ccttttgttttctgg

SEQ ID NO: 1599871 - DNA, 15 bp, Homo sapiens
cttttgttttctggg

SEQ ID NO: 1599872 - DNA, 15 bp, Homo sapiens
ttttgttttctggga

SEQ ID NO: 1599873 - DNA, 15 bp, Homo sapiens
tttgttttctgggaa

SEQ ID NO: 1599874 - DNA, 15 bp, Homo sapiens
ttgttttctgggaat

SEQ ID NO: 1599875 - DNA, 15 bp, Homo sapiens
tgttttctgggaata

SEQ ID NO: 1599876 - DNA, 15 bp, Homo sapiens
gttttctgggaatag

SEQ ID NO: 1599877 - DNA, 15 bp, Homo sapiens
ttttctgggaatagg

SEQ ID NO: 1599878 - DNA, 15 bp, Homo sapiens
tttctgggaatagga

SEQ ID NO: 1599879 - DNA, 15 bp, Homo sapiens
ttctgggaataggag

SEQ ID NO: 1599880 - DNA, 15 bp, Homo sapiens
tctgggaataggaga

SEQ ID NO: 1599881 - DNA, 15 bp, Homo sapiens
ctgggaataggagaa

SEQ ID NO: 1599882 - DNA, 15 bp, Homo sapiens
tgggaataggagaaa

SEQ ID NO: 1599883 - DNA, 15 bp, Homo sapiens
gggaataggagaaaa

SEQ ID NO: 1599884 - DNA, 15 bp, Homo sapiens
ggaataggagaaaag

SEQ ID NO: 1599885 - DNA, 15 bp, Homo sapiens
gaataggagaaaagt

SEQ ID NO: 1599886 - DNA, 15 bp, Homo sapiens
aataggagaaaagtt

SEQ ID NO: 1599887 - DNA, 15 bp, Homo sapiens
ataggagaaaagttt

SEQ ID NO: 1599888 - DNA, 15 bp, Homo sapiens
taggagaaaagtttt

SEQ ID NO: 1599889 - DNA, 15 bp, Homo sapiens
aggagaaaagtttta

SEQ ID NO: 1599890 - DNA, 15 bp, Homo sapiens
ggagaaaagttttaa

SEQ ID NO: 1599891 - DNA, 15 bp, Homo sapiens
gagaaaagttttaag

SEQ ID NO: 1599892 - DNA, 15 bp, Homo sapiens
agaaaagttttaagc

SEQ ID NO: 1599893 - DNA, 15 bp, Homo sapiens
gaaaagttttaagcc

SEQ ID NO: 1599894 - DNA, 15 bp, Homo sapiens
aaaagttttaagcca

SEQ ID NO: 1599895 - DNA, 15 bp, Homo sapiens
aaagttttaagccaa

SEQ ID NO: 1599896 - DNA, 15 bp, Homo sapiens
aagttttaagccaaa

SEQ ID NO: 1599897 - DNA, 15 bp, Homo sapiens
agttttaagccaaaa

SEQ ID NO: 1599898 - DNA, 15 bp, Homo sapiens
gttttaagccaaaac

SEQ ID NO: 1599899 - DNA, 15 bp, Homo sapiens
ttttaagccaaaact

SEQ ID NO: 1599900 - DNA, 15 bp, Homo sapiens
tttaagccaaaactc

SEQ ID NO: 1599901 - DNA, 15 bp, Homo sapiens
ttaagccaaaactct

SEQ ID NO: 1599902 - DNA, 15 bp, Homo sapiens
taagccaaaactctt

SEQ ID NO: 1599903 - DNA, 15 bp, Homo sapiens
aagccaaaactctta

SEQ ID NO: 1599904 - DNA, 15 bp, Homo sapiens
agccaaaactcttaa

SEQ ID NO: 1599905 - DNA, 15 bp, Homo sapiens
gccaaaactcttaat

SEQ ID NO: 1599906 - DNA, 15 bp, Homo sapiens
ccaaaactcttaatt

SEQ ID NO: 1599907 - DNA, 15 bp, Homo sapiens
caaaactcttaattg

SEQ ID NO: 1599908 - DNA, 15 bp, Homo sapiens
aaaactcttaattgc

SEQ ID NO: 1599909 - DNA, 15 bp, Homo sapiens
aaactcttaattgct

SEQ ID NO: 1599910 - DNA, 15 bp, Homo sapiens
aactcttaattgctt

SEQ ID NO: 1599911 - DNA, 15 bp, Homo sapiens
actcttaattgctta

SEQ ID NO: 1599912 - DNA, 15 bp, Homo sapiens
ctcttaattgcttat

SEQ ID NO: 1599913 - DNA, 15 bp, Homo sapiens
tcttaattgcttatc

SEQ ID NO: 1599914 - DNA, 15 bp, Homo sapiens
cttaattgcttatct

SEQ ID NO: 1599915 - DNA, 15 bp, Homo sapiens
ttaattgcttatctg

SEQ ID NO: 1599916 - DNA, 15 bp, Homo sapiens
taattgcttatctgc

SEQ ID NO: 1599917 - DNA, 15 bp, Homo sapiens
aattgcttatctgct

SEQ ID NO: 1599918 - DNA, 15 bp, Homo sapiens
attgcttatctgctc

SEQ ID NO: 1599919 - DNA, 15 bp, Homo sapiens
ttgcttatctgctcc

SEQ ID NO: 1599920 - DNA, 15 bp, Homo sapiens
tgcttatctgctcca

SEQ ID NO: 1599921 - DNA, 15 bp, Homo sapiens
gcttatctgctccac

SEQ ID NO: 1599922 - DNA, 15 bp, Homo sapiens
cttatctgctccacg

SEQ ID NO: 1599923 - DNA, 15 bp, Homo sapiens
ttatctgctccacgt

SEQ ID NO: 1599924 - DNA, 15 bp, Homo sapiens
tatctgctccacgtg

SEQ ID NO: 1599925 - DNA, 15 bp, Homo sapiens
atctgctccacgtga

SEQ ID NO: 1599926 - DNA, 15 bp, Homo sapiens
tctgctccacgtgag

SEQ ID NO: 1599927 - DNA, 15 bp, Homo sapiens
ctgctccacgtgagg

SEQ ID NO: 1599928 - DNA, 15 bp, Homo sapiens
tgctccacgtgaggt

SEQ ID NO: 1599929 - DNA, 15 bp, Homo sapiens
gctccacgtgaggta

SEQ ID NO: 1599930 - DNA, 15 bp, Homo sapiens
ctccacgtgaggtat

SEQ ID NO: 1599931 - DNA, 15 bp, Homo sapiens
tccacgtgaggtatg

SEQ ID NO: 1599932 - DNA, 15 bp, Homo sapiens
ccacgtgaggtatga

SEQ ID NO: 1599933 - DNA, 15 bp, Homo sapiens
cacgtgaggtatgaa

SEQ ID NO: 1599934 - DNA, 15 bp, Homo sapiens
acgtgaggtatgaac

SEQ ID NO: 1599935 - DNA, 15 bp, Homo sapiens
cgtgaggtatgaact

SEQ ID NO: 1599936 - DNA, 15 bp, Homo sapiens
gtgaggtatgaacta

SEQ ID NO: 1599937 - DNA, 15 bp, Homo sapiens
tgaggtatgaactat

SEQ ID NO: 1599938 - DNA, 15 bp, Homo sapiens
gaggtatgaactatc

SEQ ID NO: 1599939 - DNA, 15 bp, Homo sapiens
aggtatgaactatca

SEQ ID NO: 1599940 - DNA, 15 bp, Homo sapiens
ggtatgaactatcaa

SEQ ID NO: 1599941 - DNA, 15 bp, Homo sapiens
gtatgaactatcaaa

SEQ ID NO: 1599942 - DNA, 15 bp, Homo sapiens
tatgaactatcaaac

SEQ ID NO: 1599943 - DNA, 15 bp, Homo sapiens
atgaactatcaaact

SEQ ID NO: 1599944 - DNA, 15 bp, Homo sapiens
tgaactatcaaactt

SEQ ID NO: 1599945 - DNA, 15 bp, Homo sapiens
gaactatcaaactta

SEQ ID NO: 1599946 - DNA, 15 bp, Homo sapiens
aactatcaaacttag

SEQ ID NO: 1599947 - DNA, 15 bp, Homo sapiens
actatcaaacttagg

SEQ ID NO: 1599948 - DNA, 15 bp, Homo sapiens
ctatcaaacttagga

SEQ ID NO: 1599949 - DNA, 15 bp, Homo sapiens
tatcaaacttaggag

SEQ ID NO: 1599950 - DNA, 15 bp, Homo sapiens
atcaaacttaggagc

SEQ ID NO: 1599951 - DNA, 15 bp, Homo sapiens
tcaaacttaggagcc

SEQ ID NO: 1599952 - DNA, 15 bp, Homo sapiens
caaacttaggagcca

SEQ ID NO: 1599953 - DNA, 15 bp, Homo sapiens
aaacttaggagccat

SEQ ID NO: 1599954 - DNA, 15 bp, Homo sapiens
aacttaggagccatc

SEQ ID NO: 1599955 - DNA, 15 bp, Homo sapiens
acttaggagccatct

SEQ ID NO: 1599956 - DNA, 15 bp, Homo sapiens
cttaggagccatcta

SEQ ID NO: 1599957 - DNA, 15 bp, Homo sapiens
ttaggagccatctag

SEQ ID NO: 1599958 - DNA, 15 bp, Homo sapiens
taggagccatctagc

SEQ ID NO: 1599959 - DNA, 15 bp, Homo sapiens
aggagccatctagct

SEQ ID NO: 1599960 - DNA, 15 bp, Homo sapiens
ggagccatctagctt

SEQ ID NO: 1599961 - DNA, 15 bp, Homo sapiens
gagccatctagctta

SEQ ID NO: 1599962 - DNA, 15 bp, Homo sapiens
agccatctagcttac

SEQ ID NO: 1599963 - DNA, 15 bp, Homo sapiens
gccatctagcttaca

SEQ ID NO: 1599964 - DNA, 15 bp, Homo sapiens
ccatctagcttacac

SEQ ID NO: 1599965 - DNA, 15 bp, Homo sapiens
catctagcttacacg

SEQ ID NO: 1599966 - DNA, 15 bp, Homo sapiens
atctagcttacacgt

SEQ ID NO: 1599967 - DNA, 15 bp, Homo sapiens
tctagcttacacgtg

SEQ ID NO: 1599968 - DNA, 15 bp, Homo sapiens
ctagcttacacgtgt

SEQ ID NO: 1599969 - DNA, 15 bp, Homo sapiens
tagcttacacgtgtt

SEQ ID NO: 1599970 - DNA, 15 bp, Homo sapiens
agcttacacgtgttc

SEQ ID NO: 1599971 - DNA, 15 bp, Homo sapiens
gcttacacgtgttcc

SEQ ID NO: 1599972 - DNA, 15 bp, Homo sapiens
cttacacgtgttcct

SEQ ID NO: 1599973 - DNA, 15 bp, Homo sapiens
ttacacgtgttcctt

SEQ ID NO: 1599974 - DNA, 15 bp, Homo sapiens
tacacgtgttcctta

SEQ ID NO: 1599975 - DNA, 15 bp, Homo sapiens
acacgtgttccttaa

SEQ ID NO: 1599976 - DNA, 15 bp, Homo sapiens
cacgtgttccttaaa

SEQ ID NO: 1599977 - DNA, 15 bp, Homo sapiens
acgtgttccttaaaa

SEQ ID NO: 1599978 - DNA, 15 bp, Homo sapiens
cgtgttccttaaaaa

SEQ ID NO: 1599979 - DNA, 15 bp, Homo sapiens
gtgttccttaaaaag

SEQ ID NO: 1599980 - DNA, 15 bp, Homo sapiens
tgttccttaaaaagt

SEQ ID NO: 1599981 - DNA, 15 bp, Homo sapiens
gttccttaaaaagtt

SEQ ID NO: 1599982 - DNA, 15 bp, Homo sapiens
ttccttaaaaagttt

SEQ ID NO: 1599983 - DNA, 15 bp, Homo sapiens
tccttaaaaagtttg

SEQ ID NO: 1599984 - DNA, 15 bp, Homo sapiens
ccttaaaaagtttgc

SEQ ID NO: 1599985 - DNA, 15 bp, Homo sapiens
cttaaaaagtttgct

SEQ ID NO: 1599986 - DNA, 15 bp, Homo sapiens
ttaaaaagtttgctg

SEQ ID NO: 1599987 - DNA, 15 bp, Homo sapiens
taaaaagtttgctgt

SEQ ID NO: 1599988 - DNA, 15 bp, Homo sapiens
aaaaagtttgctgta

SEQ ID NO: 1599989 - DNA, 15 bp, Homo sapiens
aaaagtttgctgtag

SEQ ID NO: 1599990 - DNA, 15 bp, Homo sapiens
aaagtttgctgtagg

SEQ ID NO: 1599991 - DNA, 15 bp, Homo sapiens
aagtttgctgtaggc

SEQ ID NO: 1599992 - DNA, 15 bp, Homo sapiens
agtttgctgtaggcc

SEQ ID NO: 1599993 - DNA, 15 bp, Homo sapiens
gtttgctgtaggccg

SEQ ID NO: 1599994 - DNA, 15 bp, Homo sapiens
tttgctgtaggccgg

SEQ ID NO: 1599995 - DNA, 15 bp, Homo sapiens
ttgctgtaggccggg

SEQ ID NO: 1599996 - DNA, 15 bp, Homo sapiens
tgctgtaggccgggc

SEQ ID NO: 1599997 - DNA, 15 bp, Homo sapiens
gctgtaggccgggca

SEQ ID NO: 1599998 - DNA, 15 bp, Homo sapiens
ctgtaggccgggcac

SEQ ID NO: 1599999 - DNA, 15 bp, Homo sapiens
tgtaggccgggcaca

SEQ ID NO: 1600000 - DNA, 15 bp, Homo sapiens
gtaggccgggcacag

SEQ ID NO: 1600001 - DNA, 15 bp, Homo sapiens
taggccgggcacagt

SEQ ID NO: 1600002 - DNA, 15 bp, Homo sapiens
aggccgggcacagtg

SEQ ID NO: 1600003 - DNA, 15 bp, Homo sapiens
gggcacagtggctcg

SEQ ID NO: 1600004 - DNA, 15 bp, Homo sapiens
ggcacagtggctcgt

SEQ ID NO: 1600005 - DNA, 15 bp, Homo sapiens
gcacagtggctcgta

SEQ ID NO: 1600006 - DNA, 15 bp, Homo sapiens
cacagtggctcgtac

SEQ ID NO: 1600007 - DNA, 15 bp, Homo sapiens
acagtggctcgtacc

SEQ ID NO: 1600008 - DNA, 15 bp, Homo sapiens
cagtggctcgtacct

SEQ ID NO: 1600009 - DNA, 15 bp, Homo sapiens
agtggctcgtacctg

SEQ ID NO: 1600010 - DNA, 15 bp, Homo sapiens
gtggctcgtacctgt

SEQ ID NO: 1600011 - DNA, 15 bp, Homo sapiens
tggctcgtacctgta

SEQ ID NO: 1600012 - DNA, 15 bp, Homo sapiens
ggctcgtacctgtag

SEQ ID NO: 1600013 - DNA, 15 bp, Homo sapiens
gctcgtacctgtagt

SEQ ID NO: 1600014 - DNA, 15 bp, Homo sapiens
ctcgtacctgtagtc

SEQ ID NO: 1600015 - DNA, 15 bp, Homo sapiens
tcgtacctgtagtcc

SEQ ID NO: 1600016 - DNA, 15 bp, Homo sapiens
cgtacctgtagtccc

SEQ ID NO: 1600017 - DNA, 15 bp, Homo sapiens
tacctgtagtcccag

SEQ ID NO: 1600018 - DNA, 15 bp, Homo sapiens
cctgtagtcccagca

SEQ ID NO: 1600019 - DNA, 15 bp, Homo sapiens
agtcccagcactttt

SEQ ID NO: 1600020 - DNA, 15 bp, Homo sapiens
gtcccagcacttttg

SEQ ID NO: 1600021 - DNA, 15 bp, Homo sapiens
ccagcacttttggga

SEQ ID NO: 1600022 - DNA, 15 bp, Homo sapiens
cagcacttttgggag

SEQ ID NO: 1600023 - DNA, 15 bp, Homo sapiens
agcacttttgggagc

SEQ ID NO: 1600024 - DNA, 15 bp, Homo sapiens
gcacttttgggagcc

SEQ ID NO: 1600025 - DNA, 15 bp, Homo sapiens
cacttttgggagccc

SEQ ID NO: 1600026 - DNA, 15 bp, Homo sapiens
acttttgggagccca

SEQ ID NO: 1600027 - DNA, 15 bp, Homo sapiens
cttttgggagcccag

SEQ ID NO: 1600028 - DNA, 15 bp, Homo sapiens
ttttgggagcccagg

SEQ ID NO: 1600029 - DNA, 15 bp, Homo sapiens
tttgggagcccaggg

SEQ ID NO: 1600030 - DNA, 15 bp, Homo sapiens
ttgggagcccagggt

SEQ ID NO: 1600031 - DNA, 15 bp, Homo sapiens
tgggagcccagggtg

SEQ ID NO: 1600032 - DNA, 15 bp, Homo sapiens
gggagcccagggtgg

SEQ ID NO: 1600033 - DNA, 15 bp, Homo sapiens
ggagcccagggtggg

SEQ ID NO: 1600034 - DNA, 15 bp, Homo sapiens
gagcccagggtgggg

SEQ ID NO: 1600035 - DNA, 15 bp, Homo sapiens
agcccagggtggggg

SEQ ID NO: 1600036 - DNA, 15 bp, Homo sapiens
gcccagggtggggga

SEQ ID NO: 1600037 - DNA, 15 bp, Homo sapiens
cccagggtgggggat

SEQ ID NO: 1600038 - DNA, 15 bp, Homo sapiens
ccagggtgggggatc

SEQ ID NO: 1600039 - DNA, 15 bp, Homo sapiens
cagggtgggggatca

SEQ ID NO: 1600040 - DNA, 15 bp, Homo sapiens
agggtgggggatcac

SEQ ID NO: 1600041 - DNA, 15 bp, Homo sapiens
gggtgggggatcact

SEQ ID NO: 1600042 - DNA, 15 bp, Homo sapiens
ggtgggggatcactt

SEQ ID NO: 1600043 - DNA, 15 bp, Homo sapiens
gtgggggatcacttg

SEQ ID NO: 1600044 - DNA, 15 bp, Homo sapiens
tgggggatcacttga

SEQ ID NO: 1600045 - DNA, 15 bp, Homo sapiens
gggggatcacttgag

SEQ ID NO: 1600046 - DNA, 15 bp, Homo sapiens
ggggatcacttgagc

SEQ ID NO: 1600047 - DNA, 15 bp, Homo sapiens
gggatcacttgagct

SEQ ID NO: 1600048 - DNA, 15 bp, Homo sapiens
atcacttgagctcag

SEQ ID NO: 1600049 - DNA, 15 bp, Homo sapiens
tcacttgagctcagg

SEQ ID NO: 1600050 - DNA, 15 bp, Homo sapiens
cacttgagctcagga

SEQ ID NO: 1600051 - DNA, 15 bp, Homo sapiens
acttgagctcaggag

SEQ ID NO: 1600052 - DNA, 15 bp, Homo sapiens
cttgagctcaggagt

SEQ ID NO: 1600053 - DNA, 15 bp, Homo sapiens
ttgagctcaggagtt

SEQ ID NO: 1600054 - DNA, 15 bp, Homo sapiens
gagctcaggagttca

SEQ ID NO: 1600055 - DNA, 15 bp, Homo sapiens
ctcaggagttcaaga

SEQ ID NO: 1600056 - DNA, 15 bp, Homo sapiens
ctgggcaacatggca

SEQ ID NO: 1600057 - DNA, 15 bp, Homo sapiens
tgggcaacatggcaa

SEQ ID NO: 1600058 - DNA, 15 bp, Homo sapiens
gggcaacatggcaaa

SEQ ID NO: 1600059 - DNA, 15 bp, Homo sapiens
ggcaacatggcaaaa

SEQ ID NO: 1600060 - DNA, 15 bp, Homo sapiens
gcaacatggcaaaac

SEQ ID NO: 1600061 - DNA, 15 bp, Homo sapiens
caacatggcaaaacg

SEQ ID NO: 1600062 - DNA, 15 bp, Homo sapiens
aacatggcaaaacgc

SEQ ID NO: 1600063 - DNA, 15 bp, Homo sapiens
acatggcaaaacgcc

SEQ ID NO: 1600064 - DNA, 15 bp, Homo sapiens
catggcaaaacgcca

SEQ ID NO: 1600065 - DNA, 15 bp, Homo sapiens
atggcaaaacgccat

SEQ ID NO: 1600066 - DNA, 15 bp, Homo sapiens
tggcaaaacgccatc

SEQ ID NO: 1600067 - DNA, 15 bp, Homo sapiens
ggcaaaacgccatct

SEQ ID NO: 1600068 - DNA, 15 bp, Homo sapiens
gcaaaacgccatctc

SEQ ID NO: 1600069 - DNA, 15 bp, Homo sapiens
caaaacgccatctct

SEQ ID NO: 1600070 - DNA, 15 bp, Homo sapiens
aaaacgccatctcta

SEQ ID NO: 1600071 - DNA, 15 bp, Homo sapiens
aaacgccatctctac

SEQ ID NO: 1600072 - DNA, 15 bp, Homo sapiens
aacgccatctctaca

SEQ ID NO: 1600073 - DNA, 15 bp, Homo sapiens
acgccatctctacaa

SEQ ID NO: 1600074 - DNA, 15 bp, Homo sapiens
cgccatctctacaaa

SEQ ID NO: 1600075 - DNA, 15 bp, Homo sapiens
gccatctctacaaaa

SEQ ID NO: 1600076 - DNA, 15 bp, Homo sapiens
catctctacaaaaat

SEQ ID NO: 1600077 - DNA, 15 bp, Homo sapiens
atctctacaaaaata

SEQ ID NO: 1600078 - DNA, 15 bp, Homo sapiens
aaaaaaaaaaaaacg

SEQ ID NO: 1600079 - DNA, 15 bp, Homo sapiens
aaaaaaaaaaaacgc

SEQ ID NO: 1600080 - DNA, 15 bp, Homo sapiens
aaaaaaaaaaacgct

SEQ ID NO: 1600081 - DNA, 15 bp, Homo sapiens
aaaaaaaaaacgctg

SEQ ID NO: 1600082 - DNA, 15 bp, Homo sapiens
aaaaaaaaacgctgg

SEQ ID NO: 1600083 - DNA, 15 bp, Homo sapiens
aaaaaaaacgctggg

SEQ ID NO: 1600084 - DNA, 15 bp, Homo sapiens
aaaaaaacgctgggt

SEQ ID NO: 1600085 - DNA, 15 bp, Homo sapiens
aaaaaacgctgggtg

SEQ ID NO: 1600086 - DNA, 15 bp, Homo sapiens
aaaaacgctgggtgt

SEQ ID NO: 1600087 - DNA, 15 bp, Homo sapiens
aaaacgctgggtgtg

SEQ ID NO: 1600088 - DNA, 15 bp, Homo sapiens
aaacgctgggtgtgg

SEQ ID NO: 1600089 - DNA, 15 bp, Homo sapiens
aacgctgggtgtggt

SEQ ID NO: 1600090 - DNA, 15 bp, Homo sapiens
acgctgggtgtggtg

SEQ ID NO: 1600091 - DNA, 15 bp, Homo sapiens
cgctgggtgtggtgg

SEQ ID NO: 1600092 - DNA, 15 bp, Homo sapiens
tgggtgtggtggcgc

SEQ ID NO: 1600093 - DNA, 15 bp, Homo sapiens
ggtgtggtggcgcac

SEQ ID NO: 1600094 - DNA, 15 bp, Homo sapiens
gtgtggtggcgcaca

SEQ ID NO: 1600095 - DNA, 15 bp, Homo sapiens
tgtggtggcgcacaa

SEQ ID NO: 1600096 - DNA, 15 bp, Homo sapiens
gtggtggcgcacaac

SEQ ID NO: 1600097 - DNA, 15 bp, Homo sapiens
tggtggcgcacaact

SEQ ID NO: 1600098 - DNA, 15 bp, Homo sapiens
ggtggcgcacaactg

SEQ ID NO: 1600099 - DNA, 15 bp, Homo sapiens
gtggcgcacaactgt

SEQ ID NO: 1600100 - DNA, 15 bp, Homo sapiens
tggcgcacaactgta

SEQ ID NO: 1600101 - DNA, 15 bp, Homo sapiens
ggcgcacaactgtag

SEQ ID NO: 1600102 - DNA, 15 bp, Homo sapiens
gcgcacaactgtagt

SEQ ID NO: 1600103 - DNA, 15 bp, Homo sapiens
cgcacaactgtagtc

SEQ ID NO: 1600104 - DNA, 15 bp, Homo sapiens
gcacaactgtagtcc

SEQ ID NO: 1600105 - DNA, 15 bp, Homo sapiens
aggattgcttgagct

SEQ ID NO: 1600106 - DNA, 15 bp, Homo sapiens
ggattgcttgagctt

SEQ ID NO: 1600107 - DNA, 15 bp, Homo sapiens
gattgcttgagcttg

SEQ ID NO: 1600108 - DNA, 15 bp, Homo sapiens
attgcttgagcttgg

SEQ ID NO: 1600109 - DNA, 15 bp, Homo sapiens
ttgcttgagcttggg

SEQ ID NO: 1600110 - DNA, 15 bp, Homo sapiens
tgcttgagcttggga

SEQ ID NO: 1600111 - DNA, 15 bp, Homo sapiens
gcttgagcttgggag

SEQ ID NO: 1600112 - DNA, 15 bp, Homo sapiens
cttgagcttgggagg

SEQ ID NO: 1600113 - DNA, 15 bp, Homo sapiens
ttgagcttgggaggt

SEQ ID NO: 1600114 - DNA, 15 bp, Homo sapiens
tgagcttgggaggtg

SEQ ID NO: 1600115 - DNA, 15 bp, Homo sapiens
gagcttgggaggtga

SEQ ID NO: 1600116 - DNA, 15 bp, Homo sapiens
agcttgggaggtgaa

SEQ ID NO: 1600117 - DNA, 15 bp, Homo sapiens
gcttgggaggtgaag

SEQ ID NO: 1600118 - DNA, 15 bp, Homo sapiens
cttgggaggtgaagg

SEQ ID NO: 1600119 - DNA, 15 bp, Homo sapiens
ttgggaggtgaaggc

SEQ ID NO: 1600120 - DNA, 15 bp, Homo sapiens
tgggaggtgaaggct

SEQ ID NO: 1600121 - DNA, 15 bp, Homo sapiens
gggaggtgaaggctg

SEQ ID NO: 1600122 - DNA, 15 bp, Homo sapiens
ggaggtgaaggctgc

SEQ ID NO: 1600123 - DNA, 15 bp, Homo sapiens
gaggtgaaggctgca

SEQ ID NO: 1600124 - DNA, 15 bp, Homo sapiens
aggtgaaggctgcag

SEQ ID NO: 1600125 - DNA, 15 bp, Homo sapiens
ggtgaaggctgcagt

SEQ ID NO: 1600126 - DNA, 15 bp, Homo sapiens
ggctgcagtgagcct

SEQ ID NO: 1600127 - DNA, 15 bp, Homo sapiens
gctgcagtgagcctt

SEQ ID NO: 1600128 - DNA, 15 bp, Homo sapiens
ctgcagtgagccttg

SEQ ID NO: 1600129 - DNA, 15 bp, Homo sapiens
tgcagtgagccttga

SEQ ID NO: 1600130 - DNA, 15 bp, Homo sapiens
gcagtgagccttgac

SEQ ID NO: 1600131 - DNA, 15 bp, Homo sapiens
cagtgagccttgaca

SEQ ID NO: 1600132 - DNA, 15 bp, Homo sapiens
agtgagccttgacag

SEQ ID NO: 1600133 - DNA, 15 bp, Homo sapiens
gtgagccttgacagt

SEQ ID NO: 1600134 - DNA, 15 bp, Homo sapiens
tgagccttgacagtg

SEQ ID NO: 1600135 - DNA, 15 bp, Homo sapiens
gagccttgacagtgc

SEQ ID NO: 1600136 - DNA, 15 bp, Homo sapiens
agccttgacagtgcc

SEQ ID NO: 1600137 - DNA, 15 bp, Homo sapiens
gccttgacagtgcca

SEQ ID NO: 1600138 - DNA, 15 bp, Homo sapiens
ccttgacagtgccac

SEQ ID NO: 1600139 - DNA, 15 bp, Homo sapiens
cttgacagtgccact

SEQ ID NO: 1600140 - DNA, 15 bp, Homo sapiens
ttgacagtgccacta

SEQ ID NO: 1600141 - DNA, 15 bp, Homo sapiens
tgacagtgccactac

SEQ ID NO: 1600142 - DNA, 15 bp, Homo sapiens
gacagtgccactaca

SEQ ID NO: 1600143 - DNA, 15 bp, Homo sapiens
acagtgccactacac

SEQ ID NO: 1600144 - DNA, 15 bp, Homo sapiens
cagtgccactacact

SEQ ID NO: 1600145 - DNA, 15 bp, Homo sapiens
agtgccactacactc

SEQ ID NO: 1600146 - DNA, 15 bp, Homo sapiens
gtgccactacactcc

SEQ ID NO: 1600147 - DNA, 15 bp, Homo sapiens
tgccactacactcca

SEQ ID NO: 1600148 - DNA, 15 bp, Homo sapiens
gccactacactccag

SEQ ID NO: 1600149 - DNA, 15 bp, Homo sapiens
acactccagcctgga

SEQ ID NO: 1600150 - DNA, 15 bp, Homo sapiens
gtctcaaaaaaaaga

SEQ ID NO: 1600151 - DNA, 15 bp, Homo sapiens
tctcaaaaaaaagag

SEQ ID NO: 1600152 - DNA, 15 bp, Homo sapiens
ctcaaaaaaaagagt

SEQ ID NO: 1600153 - DNA, 15 bp, Homo sapiens
tcaaaaaaaagagtt

SEQ ID NO: 1600154 - DNA, 15 bp, Homo sapiens
caaaaaaaagagttt

SEQ ID NO: 1600155 - DNA, 15 bp, Homo sapiens
aaaaaaaagagtttg

SEQ ID NO: 1600156 - DNA, 15 bp, Homo sapiens
aaaaaaagagtttgc

SEQ ID NO: 1600157 - DNA, 15 bp, Homo sapiens
aaaaaagagtttgct

SEQ ID NO: 1600158 - DNA, 15 bp, Homo sapiens
aaaaagagtttgctg

SEQ ID NO: 1600159 - DNA, 15 bp, Homo sapiens
aaaagagtttgctgt

SEQ ID NO: 1600160 - DNA, 15 bp, Homo sapiens
aaagagtttgctgta

SEQ ID NO: 1600161 - DNA, 15 bp, Homo sapiens
aagagtttgctgtaa

SEQ ID NO: 1600162 - DNA, 15 bp, Homo sapiens
agagtttgctgtaat

SEQ ID NO: 1600163 - DNA, 15 bp, Homo sapiens
gagtttgctgtaatt

SEQ ID NO: 1600164 - DNA, 15 bp, Homo sapiens
agtttgctgtaattc

SEQ ID NO: 1600165 - DNA, 15 bp, Homo sapiens
gtttgctgtaattcc

SEQ ID NO: 1600166 - DNA, 15 bp, Homo sapiens
tttgctgtaattccc

SEQ ID NO: 1600167 - DNA, 15 bp, Homo sapiens
ttgctgtaattccca

SEQ ID NO: 1600168 - DNA, 15 bp, Homo sapiens
tgctgtaattcccag

SEQ ID NO: 1600169 - DNA, 15 bp, Homo sapiens
gctgtaattcccagc

SEQ ID NO: 1600170 - DNA, 15 bp, Homo sapiens
ctgtaattcccagca

SEQ ID NO: 1600171 - DNA, 15 bp, Homo sapiens
tgtaattcccagcaa

SEQ ID NO: 1600172 - DNA, 15 bp, Homo sapiens
gtaattcccagcaac

SEQ ID NO: 1600173 - DNA, 15 bp, Homo sapiens
taattcccagcaaca

SEQ ID NO: 1600174 - DNA, 15 bp, Homo sapiens
aattcccagcaacaa

SEQ ID NO: 1600175 - DNA, 15 bp, Homo sapiens
attcccagcaacaaa

SEQ ID NO: 1600176 - DNA, 15 bp, Homo sapiens
ttcccagcaacaaag

SEQ ID NO: 1600177 - DNA, 15 bp, Homo sapiens
tcccagcaacaaagt

SEQ ID NO: 1600178 - DNA, 15 bp, Homo sapiens
cccagcaacaaagta

SEQ ID NO: 1600179 - DNA, 15 bp, Homo sapiens
ccagcaacaaagtag

SEQ ID NO: 1600180 - DNA, 15 bp, Homo sapiens
cagcaacaaagtagg

SEQ ID NO: 1600181 - DNA, 15 bp, Homo sapiens
agcaacaaagtagga

SEQ ID NO: 1600182 - DNA, 15 bp, Homo sapiens
gcaacaaagtaggag

SEQ ID NO: 1600183 - DNA, 15 bp, Homo sapiens
caacaaagtaggaga

SEQ ID NO: 1600184 - DNA, 15 bp, Homo sapiens
aacaaagtaggagac

SEQ ID NO: 1600185 - DNA, 15 bp, Homo sapiens
acaaagtaggagact

SEQ ID NO: 1600186 - DNA, 15 bp, Homo sapiens
caaagtaggagactc

SEQ ID NO: 1600187 - DNA, 15 bp, Homo sapiens
aaagtaggagactca

SEQ ID NO: 1600188 - DNA, 15 bp, Homo sapiens
aagtaggagactcaa

SEQ ID NO: 1600189 - DNA, 15 bp, Homo sapiens
agtaggagactcaaa

SEQ ID NO: 1600190 - DNA, 15 bp, Homo sapiens
gtaggagactcaaac

SEQ ID NO: 1600191 - DNA, 15 bp, Homo sapiens
taggagactcaaact

SEQ ID NO: 1600192 - DNA, 15 bp, Homo sapiens
aggagactcaaacta

SEQ ID NO: 1600193 - DNA, 15 bp, Homo sapiens
ggagactcaaactaa

SEQ ID NO: 1600194 - DNA, 15 bp, Homo sapiens
gagactcaaactaaa

SEQ ID NO: 1600195 - DNA, 15 bp, Homo sapiens
agactcaaactaaat

SEQ ID NO: 1600196 - DNA, 15 bp, Homo sapiens
gactcaaactaaata

SEQ ID NO: 1600197 - DNA, 15 bp, Homo sapiens
actcaaactaaataa

SEQ ID NO: 1600198 - DNA, 15 bp, Homo sapiens
ctcaaactaaataat

SEQ ID NO: 1600199 - DNA, 15 bp, Homo sapiens
tcaaactaaataatt

SEQ ID NO: 1600200 - DNA, 15 bp, Homo sapiens
caaactaaataattt

SEQ ID NO: 1600201 - DNA, 15 bp, Homo sapiens
aaactaaataatttt

SEQ ID NO: 1600202 - DNA, 15 bp, Homo sapiens
aactaaataattttc

SEQ ID NO: 1600203 - DNA, 15 bp, Homo sapiens
actaaataattttct

SEQ ID NO: 1600204 - DNA, 15 bp, Homo sapiens
ctaaataattttcta

SEQ ID NO: 1600205 - DNA, 15 bp, Homo sapiens
taaataattttctat

SEQ ID NO: 1600206 - DNA, 15 bp, Homo sapiens
aaataattttctata

SEQ ID NO: 1600207 - DNA, 15 bp, Homo sapiens
aataattttctatag

SEQ ID NO: 1600208 - DNA, 15 bp, Homo sapiens
ataattttctatagt

SEQ ID NO: 1600209 - DNA, 15 bp, Homo sapiens
taattttctatagtc

SEQ ID NO: 1600210 - DNA, 15 bp, Homo sapiens
aattttctatagtcc

SEQ ID NO: 1600211 - DNA, 15 bp, Homo sapiens
attttctatagtcct

SEQ ID NO: 1600212 - DNA, 15 bp, Homo sapiens
ttttctatagtccta

SEQ ID NO: 1600213 - DNA, 15 bp, Homo sapiens
tttctatagtcctag

SEQ ID NO: 1600214 - DNA, 15 bp, Homo sapiens
ttctatagtcctaga

SEQ ID NO: 1600215 - DNA, 15 bp, Homo sapiens
tctatagtcctagaa

SEQ ID NO: 1600216 - DNA, 15 bp, Homo sapiens
ctatagtcctagaac

SEQ ID NO: 1600217 - DNA, 15 bp, Homo sapiens
tatagtcctagaact

SEQ ID NO: 1600218 - DNA, 15 bp, Homo sapiens
atagtcctagaactt

SEQ ID NO: 1600219 - DNA, 15 bp, Homo sapiens
tagtcctagaacttc

SEQ ID NO: 1600220 - DNA, 15 bp, Homo sapiens
agtcctagaacttct

SEQ ID NO: 1600221 - DNA, 15 bp, Homo sapiens
gtcctagaacttctt

SEQ ID NO: 1600222 - DNA, 15 bp, Homo sapiens
tcctagaacttctta

SEQ ID NO: 1600223 - DNA, 15 bp, Homo sapiens
cctagaacttcttag

SEQ ID NO: 1600224 - DNA, 15 bp, Homo sapiens
ctagaacttcttagt

SEQ ID NO: 1600225 - DNA, 15 bp, Homo sapiens
tagaacttcttagtt

SEQ ID NO: 1600226 - DNA, 15 bp, Homo sapiens
agaacttcttagttt

SEQ ID NO: 1600227 - DNA, 15 bp, Homo sapiens
gaacttcttagttta

SEQ ID NO: 1600228 - DNA, 15 bp, Homo sapiens
aacttcttagtttac

SEQ ID NO: 1600229 - DNA, 15 bp, Homo sapiens
acttcttagtttaca

SEQ ID NO: 1600230 - DNA, 15 bp, Homo sapiens
cttcttagtttacaa

SEQ ID NO: 1600231 - DNA, 15 bp, Homo sapiens
ttcttagtttacaaa

SEQ ID NO: 1600232 - DNA, 15 bp, Homo sapiens
tcttagtttacaaaa

SEQ ID NO: 1600233 - DNA, 15 bp, Homo sapiens
cttagtttacaaaac

SEQ ID NO: 1600234 - DNA, 15 bp, Homo sapiens
ttagtttacaaaaca

SEQ ID NO: 1600235 - DNA, 15 bp, Homo sapiens
tagtttacaaaacat

SEQ ID NO: 1600236 - DNA, 15 bp, Homo sapiens
tttacaaaacatttt

SEQ ID NO: 1600237 - DNA, 15 bp, Homo sapiens
ttacaaaacattttt

SEQ ID NO: 1600238 - DNA, 15 bp, Homo sapiens
tacaaaacattttta

SEQ ID NO: 1600239 - DNA, 15 bp, Homo sapiens
acaaaacatttttac

SEQ ID NO: 1600240 - DNA, 15 bp, Homo sapiens
caaaacatttttact

SEQ ID NO: 1600241 - DNA, 15 bp, Homo sapiens
aaaacatttttactt

SEQ ID NO: 1600242 - DNA, 15 bp, Homo sapiens
aaacatttttacttc

SEQ ID NO: 1600243 - DNA, 15 bp, Homo sapiens
aacatttttacttct

SEQ ID NO: 1600244 - DNA, 15 bp, Homo sapiens
acatttttacttctg

SEQ ID NO: 1600245 - DNA, 15 bp, Homo sapiens
catttttacttctgt

SEQ ID NO: 1600246 - DNA, 15 bp, Homo sapiens
atttttacttctgtt

SEQ ID NO: 1600247 - DNA, 15 bp, Homo sapiens
tttttacttctgtta

SEQ ID NO: 1600248 - DNA, 15 bp, Homo sapiens
ttttacttctgttat

SEQ ID NO: 1600249 - DNA, 15 bp, Homo sapiens
tttacttctgttatc

SEQ ID NO: 1600250 - DNA, 15 bp, Homo sapiens
ttacttctgttatct

SEQ ID NO: 1600251 - DNA, 15 bp, Homo sapiens
tacttctgttatctc

SEQ ID NO: 1600252 - DNA, 15 bp, Homo sapiens
acttctgttatctca

SEQ ID NO: 1600253 - DNA, 15 bp, Homo sapiens
cttctgttatctcat

SEQ ID NO: 1600254 - DNA, 15 bp, Homo sapiens
ttctgttatctcatt

SEQ ID NO: 1600255 - DNA, 15 bp, Homo sapiens
tctgttatctcattt

SEQ ID NO: 1600256 - DNA, 15 bp, Homo sapiens
ctgttatctcatttg

SEQ ID NO: 1600257 - DNA, 15 bp, Homo sapiens
tgttatctcatttga

SEQ ID NO: 1600258 - DNA, 15 bp, Homo sapiens
gttatctcatttgat

SEQ ID NO: 1600259 - DNA, 15 bp, Homo sapiens
ttatctcatttgatc

SEQ ID NO: 1600260 - DNA, 15 bp, Homo sapiens
tatctcatttgatct

SEQ ID NO: 1600261 - DNA, 15 bp, Homo sapiens
atctcatttgatctt

SEQ ID NO: 1600262 - DNA, 15 bp, Homo sapiens
tctcatttgatcttc

SEQ ID NO: 1600263 - DNA, 15 bp, Homo sapiens
ctcatttgatcttca

SEQ ID NO: 1600264 - DNA, 15 bp, Homo sapiens
tcatttgatcttcat

SEQ ID NO: 1600265 - DNA, 15 bp, Homo sapiens
catttgatcttcata

SEQ ID NO: 1600266 - DNA, 15 bp, Homo sapiens
atttgatcttcatac

SEQ ID NO: 1600267 - DNA, 15 bp, Homo sapiens
tttgatcttcatacc

SEQ ID NO: 1600268 - DNA, 15 bp, Homo sapiens
ttgatcttcataccc

SEQ ID NO: 1600269 - DNA, 15 bp, Homo sapiens
tgatcttcataccca

SEQ ID NO: 1600270 - DNA, 15 bp, Homo sapiens
gatcttcatacccat

SEQ ID NO: 1600271 - DNA, 15 bp, Homo sapiens
atcttcatacccatg

SEQ ID NO: 1600272 - DNA, 15 bp, Homo sapiens
tcttcatacccatgt

SEQ ID NO: 1600273 - DNA, 15 bp, Homo sapiens
cttcatacccatgta

SEQ ID NO: 1600274 - DNA, 15 bp, Homo sapiens
ttcatacccatgtaa

SEQ ID NO: 1600275 - DNA, 15 bp, Homo sapiens
tcatacccatgtaag

SEQ ID NO: 1600276 - DNA, 15 bp, Homo sapiens
catacccatgtaagg

SEQ ID NO: 1600277 - DNA, 15 bp, Homo sapiens
atacccatgtaaggt

SEQ ID NO: 1600278 - DNA, 15 bp, Homo sapiens
tacccatgtaaggtt

SEQ ID NO: 1600279 - DNA, 15 bp, Homo sapiens
acccatgtaaggttg

SEQ ID NO: 1600280 - DNA, 15 bp, Homo sapiens
cccatgtaaggttga

SEQ ID NO: 1600281 - DNA, 15 bp, Homo sapiens
ccatgtaaggttgag

SEQ ID NO: 1600282 - DNA, 15 bp, Homo sapiens
catgtaaggttgagg

SEQ ID NO: 1600283 - DNA, 15 bp, Homo sapiens
atgtaaggttgaggt

SEQ ID NO: 1600284 - DNA, 15 bp, Homo sapiens
tgtaaggttgaggta

SEQ ID NO: 1600285 - DNA, 15 bp, Homo sapiens
gtaaggttgaggtag

SEQ ID NO: 1600286 - DNA, 15 bp, Homo sapiens
taaggttgaggtaga

SEQ ID NO: 1600287 - DNA, 15 bp, Homo sapiens
aaggttgaggtagat

SEQ ID NO: 1600288 - DNA, 15 bp, Homo sapiens
aggttgaggtagatg

SEQ ID NO: 1600289 - DNA, 15 bp, Homo sapiens
ggttgaggtagatgt

SEQ ID NO: 1600290 - DNA, 15 bp, Homo sapiens
gttgaggtagatgtt

SEQ ID NO: 1600291 - DNA, 15 bp, Homo sapiens
ttgaggtagatgtta

SEQ ID NO: 1600292 - DNA, 15 bp, Homo sapiens
tgaggtagatgttac

SEQ ID NO: 1600293 - DNA, 15 bp, Homo sapiens
gaggtagatgttacc

SEQ ID NO: 1600294 - DNA, 15 bp, Homo sapiens
aggtagatgttacca

SEQ ID NO: 1600295 - DNA, 15 bp, Homo sapiens
ggtagatgttaccac

SEQ ID NO: 1600296 - DNA, 15 bp, Homo sapiens
gtagatgttaccaca

SEQ ID NO: 1600297 - DNA, 15 bp, Homo sapiens
tagatgttaccacat

SEQ ID NO: 1600298 - DNA, 15 bp, Homo sapiens
agatgttaccacatg

SEQ ID NO: 1600299 - DNA, 15 bp, Homo sapiens
gatgttaccacatgt

SEQ ID NO: 1600300 - DNA, 15 bp, Homo sapiens
atgttaccacatgtg

SEQ ID NO: 1600301 - DNA, 15 bp, Homo sapiens
tgttaccacatgtga

SEQ ID NO: 1600302 - DNA, 15 bp, Homo sapiens
gttaccacatgtgag

SEQ ID NO: 1600303 - DNA, 15 bp, Homo sapiens
ttaccacatgtgagt

SEQ ID NO: 1600304 - DNA, 15 bp, Homo sapiens
taccacatgtgagtg

SEQ ID NO: 1600305 - DNA, 15 bp, Homo sapiens
accacatgtgagtgc

SEQ ID NO: 1600306 - DNA, 15 bp, Homo sapiens
ccacatgtgagtgca

SEQ ID NO: 1600307 - DNA, 15 bp, Homo sapiens
cacatgtgagtgcaa

SEQ ID NO: 1600308 - DNA, 15 bp, Homo sapiens
acatgtgagtgcaat

SEQ ID NO: 1600309 - DNA, 15 bp, Homo sapiens
catgtgagtgcaata

SEQ ID NO: 1600310 - DNA, 15 bp, Homo sapiens
atgtgagtgcaatat

SEQ ID NO: 1600311 - DNA, 15 bp, Homo sapiens
tgtgagtgcaatatc

SEQ ID NO: 1600312 - DNA, 15 bp, Homo sapiens
gtgagtgcaatatcc

SEQ ID NO: 1600313 - DNA, 15 bp, Homo sapiens
tgagtgcaatatcca

SEQ ID NO: 1600314 - DNA, 15 bp, Homo sapiens
gagtgcaatatccag

SEQ ID NO: 1600315 - DNA, 15 bp, Homo sapiens
agtgcaatatccaga

SEQ ID NO: 1600316 - DNA, 15 bp, Homo sapiens
gtgcaatatccagaa

SEQ ID NO: 1600317 - DNA, 15 bp, Homo sapiens
tgcaatatccagaac

SEQ ID NO: 1600318 - DNA, 15 bp, Homo sapiens
gcaatatccagaact

SEQ ID NO: 1600319 - DNA, 15 bp, Homo sapiens
caatatccagaactc

SEQ ID NO: 1600320 - DNA, 15 bp, Homo sapiens
aatatccagaactcc

SEQ ID NO: 1600321 - DNA, 15 bp, Homo sapiens
atatccagaactcct

SEQ ID NO: 1600322 - DNA, 15 bp, Homo sapiens
tatccagaactcctg

SEQ ID NO: 1600323 - DNA, 15 bp, Homo sapiens
atccagaactcctga

SEQ ID NO: 1600324 - DNA, 15 bp, Homo sapiens
tccagaactcctgaa

SEQ ID NO: 1600325 - DNA, 15 bp, Homo sapiens
ccagaactcctgaat

SEQ ID NO: 1600326 - DNA, 15 bp, Homo sapiens
cagaactcctgaatc

SEQ ID NO: 1600327 - DNA, 15 bp, Homo sapiens
agaactcctgaatcc

SEQ ID NO: 1600328 - DNA, 15 bp, Homo sapiens
gaactcctgaatccc

SEQ ID NO: 1600329 - DNA, 15 bp, Homo sapiens
aactcctgaatcccc

SEQ ID NO: 1600330 - DNA, 15 bp, Homo sapiens
actcctgaatcccct

SEQ ID NO: 1600331 - DNA, 15 bp, Homo sapiens
ctcctgaatcccctt

SEQ ID NO: 1600332 - DNA, 15 bp, Homo sapiens
tcctgaatccccttc

SEQ ID NO: 1600333 - DNA, 15 bp, Homo sapiens
cctgaatccccttct

SEQ ID NO: 1600334 - DNA, 15 bp, Homo sapiens
ctgaatccccttctt

SEQ ID NO: 1600335 - DNA, 15 bp, Homo sapiens
tgaatccccttcttc

SEQ ID NO: 1600336 - DNA, 15 bp, Homo sapiens
gaatccccttcttcc

SEQ ID NO: 1600337 - DNA, 15 bp, Homo sapiens
aatccccttcttccc

SEQ ID NO: 1600338 - DNA, 15 bp, Homo sapiens
atccccttcttcccc

SEQ ID NO: 1600339 - DNA, 15 bp, Homo sapiens
tccccttcttcccct

SEQ ID NO: 1600340 - DNA, 15 bp, Homo sapiens
ccccttcttccccta

SEQ ID NO: 1600341 - DNA, 15 bp, Homo sapiens
cccttcttcccctaa

SEQ ID NO: 1600342 - DNA, 15 bp, Homo sapiens
ccttcttcccctaaa

SEQ ID NO: 1600343 - DNA, 15 bp, Homo sapiens
cttcttcccctaaaa

SEQ ID NO: 1600344 - DNA, 15 bp, Homo sapiens
ttcttcccctaaaat

SEQ ID NO: 1600345 - DNA, 15 bp, Homo sapiens
tcttcccctaaaatg

SEQ ID NO: 1600346 - DNA, 15 bp, Homo sapiens
cttcccctaaaatgt

SEQ ID NO: 1600347 - DNA, 15 bp, Homo sapiens
ttcccctaaaatgtc

SEQ ID NO: 1600348 - DNA, 15 bp, Homo sapiens
tcccctaaaatgtca

SEQ ID NO: 1600349 - DNA, 15 bp, Homo sapiens
cccctaaaatgtcag

SEQ ID NO: 1600350 - DNA, 15 bp, Homo sapiens
ccctaaaatgtcagc

SEQ ID NO: 1600351 - DNA, 15 bp, Homo sapiens
cctaaaatgtcagcc

SEQ ID NO: 1600352 - DNA, 15 bp, Homo sapiens
ctaaaatgtcagccc

SEQ ID NO: 1600353 - DNA, 15 bp, Homo sapiens
taaaatgtcagcccg

SEQ ID NO: 1600354 - DNA, 15 bp, Homo sapiens
aaaatgtcagcccgc

SEQ ID NO: 1600355 - DNA, 15 bp, Homo sapiens
aaatgtcagcccgct

SEQ ID NO: 1600356 - DNA, 15 bp, Homo sapiens
aatgtcagcccgctg

SEQ ID NO: 1600357 - DNA, 15 bp, Homo sapiens
atgtcagcccgctga

SEQ ID NO: 1600358 - DNA, 15 bp, Homo sapiens
tgtcagcccgctgag

SEQ ID NO: 1600359 - DNA, 15 bp, Homo sapiens
gtcagcccgctgagg

SEQ ID NO: 1600360 - DNA, 15 bp, Homo sapiens
tcagcccgctgaggt

SEQ ID NO: 1600361 - DNA, 15 bp, Homo sapiens
cagcccgctgaggtc

SEQ ID NO: 1600362 - DNA, 15 bp, Homo sapiens
agcccgctgaggtcc

SEQ ID NO: 1600363 - DNA, 15 bp, Homo sapiens
gcccgctgaggtcca

SEQ ID NO: 1600364 - DNA, 15 bp, Homo sapiens
cccgctgaggtccac

SEQ ID NO: 1600365 - DNA, 15 bp, Homo sapiens
ccgctgaggtccact

SEQ ID NO: 1600366 - DNA, 15 bp, Homo sapiens
cgctgaggtccactt

SEQ ID NO: 1600367 - DNA, 15 bp, Homo sapiens
gctgaggtccacttg

SEQ ID NO: 1600368 - DNA, 15 bp, Homo sapiens
ctgaggtccacttgg

SEQ ID NO: 1600369 - DNA, 15 bp, Homo sapiens
tgaggtccacttggc

SEQ ID NO: 1600370 - DNA, 15 bp, Homo sapiens
gaggtccacttggct

SEQ ID NO: 1600371 - DNA, 15 bp, Homo sapiens
aggtccacttggcta

SEQ ID NO: 1600372 - DNA, 15 bp, Homo sapiens
ggtccacttggctac

SEQ ID NO: 1600373 - DNA, 15 bp, Homo sapiens
gtccacttggctacc

SEQ ID NO: 1600374 - DNA, 15 bp, Homo sapiens
tccacttggctaccc

SEQ ID NO: 1600375 - DNA, 15 bp, Homo sapiens
ccacttggctaccct

SEQ ID NO: 1600376 - DNA, 15 bp, Homo sapiens
cacttggctaccctc

SEQ ID NO: 1600377 - DNA, 15 bp, Homo sapiens
acttggctaccctct

SEQ ID NO: 1600378 - DNA, 15 bp, Homo sapiens
cttggctaccctctt

SEQ ID NO: 1600379 - DNA, 15 bp, Homo sapiens
ttggctaccctcttg

SEQ ID NO: 1600380 - DNA, 15 bp, Homo sapiens
tggctaccctcttga

SEQ ID NO: 1600381 - DNA, 15 bp, Homo sapiens
ggctaccctcttgaa

SEQ ID NO: 1600382 - DNA, 15 bp, Homo sapiens
gctaccctcttgaat

SEQ ID NO: 1600383 - DNA, 15 bp, Homo sapiens
ctaccctcttgaata

SEQ ID NO: 1600384 - DNA, 15 bp, Homo sapiens
taccctcttgaatac

SEQ ID NO: 1600385 - DNA, 15 bp, Homo sapiens
accctcttgaatact

SEQ ID NO: 1600386 - DNA, 15 bp, Homo sapiens
ccctcttgaatactg

SEQ ID NO: 1600387 - DNA, 15 bp, Homo sapiens
cctcttgaatactgc

SEQ ID NO: 1600388 - DNA, 15 bp, Homo sapiens
ctcttgaatactgca

SEQ ID NO: 1600389 - DNA, 15 bp, Homo sapiens
tcttgaatactgcat

SEQ ID NO: 1600390 - DNA, 15 bp, Homo sapiens
cttgaatactgcatc

SEQ ID NO: 1600391 - DNA, 15 bp, Homo sapiens
ttgaatactgcatcc

SEQ ID NO: 1600392 - DNA, 15 bp, Homo sapiens
tgaatactgcatcca

SEQ ID NO: 1600393 - DNA, 15 bp, Homo sapiens
gaatactgcatccag

SEQ ID NO: 1600394 - DNA, 15 bp, Homo sapiens
aatactgcatccagc

SEQ ID NO: 1600395 - DNA, 15 bp, Homo sapiens
atactgcatccagct

SEQ ID NO: 1600396 - DNA, 15 bp, Homo sapiens
tactgcatccagctt

SEQ ID NO: 1600397 - DNA, 15 bp, Homo sapiens
actgcatccagcttc

SEQ ID NO: 1600398 - DNA, 15 bp, Homo sapiens
ctgcatccagcttcc

SEQ ID NO: 1600399 - DNA, 15 bp, Homo sapiens
tgcatccagcttccc

SEQ ID NO: 1600400 - DNA, 15 bp, Homo sapiens
gcatccagcttccca

SEQ ID NO: 1600401 - DNA, 15 bp, Homo sapiens
catccagcttcccac

SEQ ID NO: 1600402 - DNA, 15 bp, Homo sapiens
atccagcttcccact

SEQ ID NO: 1600403 - DNA, 15 bp, Homo sapiens
tccagcttcccactg

SEQ ID NO: 1600404 - DNA, 15 bp, Homo sapiens
ccagcttcccactgc

SEQ ID NO: 1600405 - DNA, 15 bp, Homo sapiens
cagcttcccactgct

SEQ ID NO: 1600406 - DNA, 15 bp, Homo sapiens
agcttcccactgctg

SEQ ID NO: 1600407 - DNA, 15 bp, Homo sapiens
gcttcccactgctga

SEQ ID NO: 1600408 - DNA, 15 bp, Homo sapiens
cttcccactgctgaa

SEQ ID NO: 1600409 - DNA, 15 bp, Homo sapiens
ttcccactgctgaac

SEQ ID NO: 1600410 - DNA, 15 bp, Homo sapiens
tcccactgctgaacc

SEQ ID NO: 1600411 - DNA, 15 bp, Homo sapiens
cccactgctgaacct

SEQ ID NO: 1600412 - DNA, 15 bp, Homo sapiens
ccactgctgaacctc

SEQ ID NO: 1600413 - DNA, 15 bp, Homo sapiens
cactgctgaacctct

SEQ ID NO: 1600414 - DNA, 15 bp, Homo sapiens
actgctgaacctctt

SEQ ID NO: 1600415 - DNA, 15 bp, Homo sapiens
ctgctgaacctcttt

SEQ ID NO: 1600416 - DNA, 15 bp, Homo sapiens
tgctgaacctcttta

SEQ ID NO: 1600417 - DNA, 15 bp, Homo sapiens
gctgaacctctttac

SEQ ID NO: 1600418 - DNA, 15 bp, Homo sapiens
ctgaacctctttact

SEQ ID NO: 1600419 - DNA, 15 bp, Homo sapiens
tgaacctctttactc

SEQ ID NO: 1600420 - DNA, 15 bp, Homo sapiens
gaacctctttactct

SEQ ID NO: 1600421 - DNA, 15 bp, Homo sapiens
aacctctttactctt

SEQ ID NO: 1600422 - DNA, 15 bp, Homo sapiens
acctctttactcttt

SEQ ID NO: 1600423 - DNA, 15 bp, Homo sapiens
cctctttactctttt

SEQ ID NO: 1600424 - DNA, 15 bp, Homo sapiens
ctctttactcttttt

SEQ ID NO: 1600425 - DNA, 15 bp, Homo sapiens
tctttactctttttt

SEQ ID NO: 1600426 - DNA, 15 bp, Homo sapiens
ctttactcttttttt

SEQ ID NO: 1600427 - DNA, 15 bp, Homo sapiens
tttactctttttttt

SEQ ID NO: 1600428 - DNA, 15 bp, Homo sapiens
ttactcttttttttt

SEQ ID NO: 1600429 - DNA, 15 bp, Homo sapiens
tactctttttttttc

SEQ ID NO: 1600430 - DNA, 15 bp, Homo sapiens
actctttttttttca

SEQ ID NO: 1600431 - DNA, 15 bp, Homo sapiens
ctctttttttttcag

SEQ ID NO: 1600432 - DNA, 15 bp, Homo sapiens
tctttttttttcagt

SEQ ID NO: 1600433 - DNA, 15 bp, Homo sapiens
ctttttttttcagtt

SEQ ID NO: 1600434 - DNA, 15 bp, Homo sapiens
tttttttttcagttg

SEQ ID NO: 1600435 - DNA, 15 bp, Homo sapiens
ttttttttcagttgc

SEQ ID NO: 1600436 - DNA, 15 bp, Homo sapiens
tttttttcagttgca

SEQ ID NO: 1600437 - DNA, 15 bp, Homo sapiens
ttttttcagttgcac

SEQ ID NO: 1600438 - DNA, 15 bp, Homo sapiens
tttttcagttgcact

SEQ ID NO: 1600439 - DNA, 15 bp, Homo sapiens
ttttcagttgcactt

SEQ ID NO: 1600440 - DNA, 15 bp, Homo sapiens
tttcagttgcactta

SEQ ID NO: 1600441 - DNA, 15 bp, Homo sapiens
ttcagttgcacttac

SEQ ID NO: 1600442 - DNA, 15 bp, Homo sapiens
tcagttgcacttacc

SEQ ID NO: 1600443 - DNA, 15 bp, Homo sapiens
cagttgcacttacca

SEQ ID NO: 1600444 - DNA, 15 bp, Homo sapiens
agttgcacttaccac

SEQ ID NO: 1600445 - DNA, 15 bp, Homo sapiens
gttgcacttaccacc

SEQ ID NO: 1600446 - DNA, 15 bp, Homo sapiens
ttgcacttaccacct

SEQ ID NO: 1600447 - DNA, 15 bp, Homo sapiens
tgcacttaccacctt

SEQ ID NO: 1600448 - DNA, 15 bp, Homo sapiens
gcacttaccaccttc

SEQ ID NO: 1600449 - DNA, 15 bp, Homo sapiens
cacttaccaccttct

SEQ ID NO: 1600450 - DNA, 15 bp, Homo sapiens
acttaccaccttcta

SEQ ID NO: 1600451 - DNA, 15 bp, Homo sapiens
cttaccaccttctag

SEQ ID NO: 1600452 - DNA, 15 bp, Homo sapiens
ttaccaccttctagt

SEQ ID NO: 1600453 - DNA, 15 bp, Homo sapiens
taccaccttctagta

SEQ ID NO: 1600454 - DNA, 15 bp, Homo sapiens
accaccttctagtaa

SEQ ID NO: 1600455 - DNA, 15 bp, Homo sapiens
ccaccttctagtaag

SEQ ID NO: 1600456 - DNA, 15 bp, Homo sapiens
caccttctagtaagt

SEQ ID NO: 1600457 - DNA, 15 bp, Homo sapiens
accttctagtaagtt

SEQ ID NO: 1600458 - DNA, 15 bp, Homo sapiens
ccttctagtaagttg

SEQ ID NO: 1600459 - DNA, 15 bp, Homo sapiens
cttctagtaagttga

SEQ ID NO: 1600460 - DNA, 15 bp, Homo sapiens
ttctagtaagttgaa

SEQ ID NO: 1600461 - DNA, 15 bp, Homo sapiens
tctagtaagttgaac

SEQ ID NO: 1600462 - DNA, 15 bp, Homo sapiens
ctagtaagttgaacc

SEQ ID NO: 1600463 - DNA, 15 bp, Homo sapiens
tagtaagttgaacca

SEQ ID NO: 1600464 - DNA, 15 bp, Homo sapiens
agtaagttgaaccat

SEQ ID NO: 1600465 - DNA, 15 bp, Homo sapiens
gtaagttgaaccata

SEQ ID NO: 1600466 - DNA, 15 bp, Homo sapiens
taagttgaaccatat

SEQ ID NO: 1600467 - DNA, 15 bp, Homo sapiens
aagttgaaccatatg

SEQ ID NO: 1600468 - DNA, 15 bp, Homo sapiens
agttgaaccatatga

SEQ ID NO: 1600469 - DNA, 15 bp, Homo sapiens
gttgaaccatatgaa

SEQ ID NO: 1600470 - DNA, 15 bp, Homo sapiens
ttgaaccatatgaaa

SEQ ID NO: 1600471 - DNA, 15 bp, Homo sapiens
tgaaccatatgaaat

SEQ ID NO: 1600472 - DNA, 15 bp, Homo sapiens
gaaccatatgaaatt

SEQ ID NO: 1600473 - DNA, 15 bp, Homo sapiens
aaccatatgaaatta

SEQ ID NO: 1600474 - DNA, 15 bp, Homo sapiens
accatatgaaattac

SEQ ID NO: 1600475 - DNA, 15 bp, Homo sapiens
ccatatgaaattacc

SEQ ID NO: 1600476 - DNA, 15 bp, Homo sapiens
catatgaaattacca

SEQ ID NO: 1600477 - DNA, 15 bp, Homo sapiens
atatgaaattaccat

SEQ ID NO: 1600478 - DNA, 15 bp, Homo sapiens
tatgaaattaccatt

SEQ ID NO: 1600479 - DNA, 15 bp, Homo sapiens
atgaaattaccattt

SEQ ID NO: 1600480 - DNA, 15 bp, Homo sapiens
tgaaattaccatttt

SEQ ID NO: 1600481 - DNA, 15 bp, Homo sapiens
gaaattaccattttt

SEQ ID NO: 1600482 - DNA, 15 bp, Homo sapiens
aaattaccatttttg

SEQ ID NO: 1600483 - DNA, 15 bp, Homo sapiens
aattaccatttttgc

SEQ ID NO: 1600484 - DNA, 15 bp, Homo sapiens
attaccatttttgca

SEQ ID NO: 1600485 - DNA, 15 bp, Homo sapiens
ttaccatttttgcag

SEQ ID NO: 1600486 - DNA, 15 bp, Homo sapiens
taccatttttgcagg

SEQ ID NO: 1600487 - DNA, 15 bp, Homo sapiens
accatttttgcaggt

SEQ ID NO: 1600488 - DNA, 15 bp, Homo sapiens
ccatttttgcaggta

SEQ ID NO: 1600489 - DNA, 15 bp, Homo sapiens
catttttgcaggtaa

SEQ ID NO: 1600490 - DNA, 15 bp, Homo sapiens
atttttgcaggtaaa

SEQ ID NO: 1600491 - DNA, 15 bp, Homo sapiens
tttttgcaggtaaaa

SEQ ID NO: 1600492 - DNA, 15 bp, Homo sapiens
ttttgcaggtaaaaa

SEQ ID NO: 1600493 - DNA, 15 bp, Homo sapiens
tttgcaggtaaaaaa

SEQ ID NO: 1600494 - DNA, 15 bp, Homo sapiens
ttgcaggtaaaaaat

SEQ ID NO: 1600495 - DNA, 15 bp, Homo sapiens
tgcaggtaaaaaatg

SEQ ID NO: 1600496 - DNA, 15 bp, Homo sapiens
gcaggtaaaaaatgg

SEQ ID NO: 1600497 - DNA, 15 bp, Homo sapiens
caggtaaaaaatggc

SEQ ID NO: 1600498 - DNA, 15 bp, Homo sapiens
aggtaaaaaatggcc

SEQ ID NO: 1600499 - DNA, 15 bp, Homo sapiens
ggtaaaaaatggccg

SEQ ID NO: 1600500 - DNA, 15 bp, Homo sapiens
gtaaaaaatggccgg

SEQ ID NO: 1600501 - DNA, 15 bp, Homo sapiens
taaaaaatggccggt

SEQ ID NO: 1600502 - DNA, 15 bp, Homo sapiens
aaaaaatggccggtg

SEQ ID NO: 1600503 - DNA, 15 bp, Homo sapiens
aaaaatggccggtga

SEQ ID NO: 1600504 - DNA, 15 bp, Homo sapiens
aaaatggccggtgat

SEQ ID NO: 1600505 - DNA, 15 bp, Homo sapiens
aaatggccggtgata

SEQ ID NO: 1600506 - DNA, 15 bp, Homo sapiens
aatggccggtgatag

SEQ ID NO: 1600507 - DNA, 15 bp, Homo sapiens
atggccggtgatagg

SEQ ID NO: 1600508 - DNA, 15 bp, Homo sapiens
tggccggtgataggc

SEQ ID NO: 1600509 - DNA, 15 bp, Homo sapiens
ggccggtgataggca

SEQ ID NO: 1600510 - DNA, 15 bp, Homo sapiens
gccggtgataggcag

SEQ ID NO: 1600511 - DNA, 15 bp, Homo sapiens
ccggtgataggcagt

SEQ ID NO: 1600512 - DNA, 15 bp, Homo sapiens
cggtgataggcagtt

SEQ ID NO: 1600513 - DNA, 15 bp, Homo sapiens
ggtgataggcagttt

SEQ ID NO: 1600514 - DNA, 15 bp, Homo sapiens
gtgataggcagtttg

SEQ ID NO: 1600515 - DNA, 15 bp, Homo sapiens
tgataggcagtttgg

SEQ ID NO: 1600516 - DNA, 15 bp, Homo sapiens
gataggcagtttggc

SEQ ID NO: 1600517 - DNA, 15 bp, Homo sapiens
ataggcagtttggcg

SEQ ID NO: 1600518 - DNA, 15 bp, Homo sapiens
taggcagtttggcgt

SEQ ID NO: 1600519 - DNA, 15 bp, Homo sapiens
aggcagtttggcgtc

SEQ ID NO: 1600520 - DNA, 15 bp, Homo sapiens
ggcagtttggcgtcg

SEQ ID NO: 1600521 - DNA, 15 bp, Homo sapiens
gcagtttggcgtcgt

SEQ ID NO: 1600522 - DNA, 15 bp, Homo sapiens
cagtttggcgtcgta

SEQ ID NO: 1600523 - DNA, 15 bp, Homo sapiens
agtttggcgtcgtat

SEQ ID NO: 1600524 - DNA, 15 bp, Homo sapiens
gtttggcgtcgtata

SEQ ID NO: 1600525 - DNA, 15 bp, Homo sapiens
tttggcgtcgtataa

SEQ ID NO: 1600526 - DNA, 15 bp, Homo sapiens
ttggcgtcgtataac

SEQ ID NO: 1600527 - DNA, 15 bp, Homo sapiens
tggcgtcgtataacc

SEQ ID NO: 1600528 - DNA, 15 bp, Homo sapiens
ggcgtcgtataaccc

SEQ ID NO: 1600529 - DNA, 15 bp, Homo sapiens
gcgtcgtataaccca

SEQ ID NO: 1600530 - DNA, 15 bp, Homo sapiens
cgtcgtataacccaa

SEQ ID NO: 1600531 - DNA, 15 bp, Homo sapiens
gtcgtataacccaat

SEQ ID NO: 1600532 - DNA, 15 bp, Homo sapiens
tcgtataacccaata

SEQ ID NO: 1600533 - DNA, 15 bp, Homo sapiens
cgtataacccaataa

SEQ ID NO: 1600534 - DNA, 15 bp, Homo sapiens
gtataacccaataac

SEQ ID NO: 1600535 - DNA, 15 bp, Homo sapiens
tataacccaataaca

SEQ ID NO: 1600536 - DNA, 15 bp, Homo sapiens
ataacccaataacat

SEQ ID NO: 1600537 - DNA, 15 bp, Homo sapiens
taacccaataacatg

SEQ ID NO: 1600538 - DNA, 15 bp, Homo sapiens
aacccaataacatgt

SEQ ID NO: 1600539 - DNA, 15 bp, Homo sapiens
acccaataacatgtt

SEQ ID NO: 1600540 - DNA, 15 bp, Homo sapiens
cccaataacatgtta

SEQ ID NO: 1600541 - DNA, 15 bp, Homo sapiens
ccaataacatgttat

SEQ ID NO: 1600542 - DNA, 15 bp, Homo sapiens
caataacatgttata

SEQ ID NO: 1600543 - DNA, 15 bp, Homo sapiens
aataacatgttatat

SEQ ID NO: 1600544 - DNA, 15 bp, Homo sapiens
ataacatgttatata

SEQ ID NO: 1600545 - DNA, 15 bp, Homo sapiens
taacatgttatataa

SEQ ID NO: 1600546 - DNA, 15 bp, Homo sapiens
aacatgttatataat

SEQ ID NO: 1600547 - DNA, 15 bp, Homo sapiens
acatgttatataatt

SEQ ID NO: 1600548 - DNA, 15 bp, Homo sapiens
catgttatataattt

SEQ ID NO: 1600549 - DNA, 15 bp, Homo sapiens
atgttatataattta

SEQ ID NO: 1600550 - DNA, 15 bp, Homo sapiens
tgttatataatttac

SEQ ID NO: 1600551 - DNA, 15 bp, Homo sapiens
gttatataatttacc

SEQ ID NO: 1600552 - DNA, 15 bp, Homo sapiens
ttatataatttaccc

SEQ ID NO: 1600553 - DNA, 15 bp, Homo sapiens
tatataatttaccca

SEQ ID NO: 1600554 - DNA, 15 bp, Homo sapiens
atataatttacccac

SEQ ID NO: 1600555 - DNA, 15 bp, Homo sapiens
tataatttacccaca

SEQ ID NO: 1600556 - DNA, 15 bp, Homo sapiens
ataatttacccacaa

SEQ ID NO: 1600557 - DNA, 15 bp, Homo sapiens
taatttacccacaag

SEQ ID NO: 1600558 - DNA, 15 bp, Homo sapiens
aatttacccacaagt

SEQ ID NO: 1600559 - DNA, 15 bp, Homo sapiens
atttacccacaagtg

SEQ ID NO: 1600560 - DNA, 15 bp, Homo sapiens
tttacccacaagtgg

SEQ ID NO: 1600561 - DNA, 15 bp, Homo sapiens
ttacccacaagtggt

SEQ ID NO: 1600562 - DNA, 15 bp, Homo sapiens
tacccacaagtggtg

SEQ ID NO: 1600563 - DNA, 15 bp, Homo sapiens
acccacaagtggtgg

SEQ ID NO: 1600564 - DNA, 15 bp, Homo sapiens
cccacaagtggtggg

SEQ ID NO: 1600565 - DNA, 15 bp, Homo sapiens
ccacaagtggtgggt

SEQ ID NO: 1600566 - DNA, 15 bp, Homo sapiens
cacaagtggtgggtt

SEQ ID NO: 1600567 - DNA, 15 bp, Homo sapiens
acaagtggtgggttg

SEQ ID NO: 1600568 - DNA, 15 bp, Homo sapiens
caagtggtgggttgc

SEQ ID NO: 1600569 - DNA, 15 bp, Homo sapiens
aagtggtgggttgct

SEQ ID NO: 1600570 - DNA, 15 bp, Homo sapiens
agtggtgggttgcta

SEQ ID NO: 1600571 - DNA, 15 bp, Homo sapiens
gtggtgggttgctat

SEQ ID NO: 1600572 - DNA, 15 bp, Homo sapiens
tggtgggttgctatg

SEQ ID NO: 1600573 - DNA, 15 bp, Homo sapiens
ggtgggttgctatgt

SEQ ID NO: 1600574 - DNA, 15 bp, Homo sapiens
gtgggttgctatgtc

SEQ ID NO: 1600575 - DNA, 15 bp, Homo sapiens
tgggttgctatgtcc

SEQ ID NO: 1600576 - DNA, 15 bp, Homo sapiens
gggttgctatgtcct

SEQ ID NO: 1600577 - DNA, 15 bp, Homo sapiens
ggttgctatgtcctg

SEQ ID NO: 1600578 - DNA, 15 bp, Homo sapiens
gttgctatgtcctgg

SEQ ID NO: 1600579 - DNA, 15 bp, Homo sapiens
ttgctatgtcctgga

SEQ ID NO: 1600580 - DNA, 15 bp, Homo sapiens
tgctatgtcctggag

SEQ ID NO: 1600581 - DNA, 15 bp, Homo sapiens
gctatgtcctggagg

SEQ ID NO: 1600582 - DNA, 15 bp, Homo sapiens
ctatgtcctggagga

SEQ ID NO: 1600583 - DNA, 15 bp, Homo sapiens
tatgtcctggaggag

SEQ ID NO: 1600584 - DNA, 15 bp, Homo sapiens
atgtcctggaggagt

SEQ ID NO: 1600585 - DNA, 15 bp, Homo sapiens
tgtcctggaggagtc

SEQ ID NO: 1600586 - DNA, 15 bp, Homo sapiens
gtcctggaggagtca

SEQ ID NO: 1600587 - DNA, 15 bp, Homo sapiens
tcctggaggagtcag

SEQ ID NO: 1600588 - DNA, 15 bp, Homo sapiens
cctggaggagtcagc

SEQ ID NO: 1600589 - DNA, 15 bp, Homo sapiens
ctggaggagtcagct

SEQ ID NO: 1600590 - DNA, 15 bp, Homo sapiens
tggaggagtcagctt

SEQ ID NO: 1600591 - DNA, 15 bp, Homo sapiens
ggaggagtcagcttc

SEQ ID NO: 1600592 - DNA, 15 bp, Homo sapiens
gaggagtcagcttca

SEQ ID NO: 1600593 - DNA, 15 bp, Homo sapiens
aggagtcagcttcag

SEQ ID NO: 1600594 - DNA, 15 bp, Homo sapiens
ggagtcagcttcaga

SEQ ID NO: 1600595 - DNA, 15 bp, Homo sapiens
gagtcagcttcagac

SEQ ID NO: 1600596 - DNA, 15 bp, Homo sapiens
agtcagcttcagact

SEQ ID NO: 1600597 - DNA, 15 bp, Homo sapiens
gtcagcttcagactc

SEQ ID NO: 1600598 - DNA, 15 bp, Homo sapiens
tcagcttcagactct

SEQ ID NO: 1600599 - DNA, 15 bp, Homo sapiens
cagcttcagactcta

SEQ ID NO: 1600600 - DNA, 15 bp, Homo sapiens
agcttcagactctag

SEQ ID NO: 1600601 - DNA, 15 bp, Homo sapiens
gcttcagactctagc

SEQ ID NO: 1600602 - DNA, 15 bp, Homo sapiens
cttcagactctagct

SEQ ID NO: 1600603 - DNA, 15 bp, Homo sapiens
ttcagactctagcta

SEQ ID NO: 1600604 - DNA, 15 bp, Homo sapiens
tcagactctagctaa

SEQ ID NO: 1600605 - DNA, 15 bp, Homo sapiens
cagactctagctaaa

SEQ ID NO: 1600606 - DNA, 15 bp, Homo sapiens
agactctagctaaat

SEQ ID NO: 1600607 - DNA, 15 bp, Homo sapiens
gactctagctaaatg

SEQ ID NO: 1600608 - DNA, 15 bp, Homo sapiens
actctagctaaatga

SEQ ID NO: 1600609 - DNA, 15 bp, Homo sapiens
ctctagctaaatgat

SEQ ID NO: 1600610 - DNA, 15 bp, Homo sapiens
tctagctaaatgatt

SEQ ID NO: 1600611 - DNA, 15 bp, Homo sapiens
ctagctaaatgattg

SEQ ID NO: 1600612 - DNA, 15 bp, Homo sapiens
tagctaaatgattgt

SEQ ID NO: 1600613 - DNA, 15 bp, Homo sapiens
agctaaatgattgta

SEQ ID NO: 1600614 - DNA, 15 bp, Homo sapiens
gctaaatgattgtat

SEQ ID NO: 1600615 - DNA, 15 bp, Homo sapiens
ctaaatgattgtata

SEQ ID NO: 1600616 - DNA, 15 bp, Homo sapiens
taaatgattgtataa

SEQ ID NO: 1600617 - DNA, 15 bp, Homo sapiens
aaatgattgtataac

SEQ ID NO: 1600618 - DNA, 15 bp, Homo sapiens
aatgattgtataacc

SEQ ID NO: 1600619 - DNA, 15 bp, Homo sapiens
atgattgtataacct

SEQ ID NO: 1600620 - DNA, 15 bp, Homo sapiens
tgattgtataacctt

SEQ ID NO: 1600621 - DNA, 15 bp, Homo sapiens
gattgtataaccttg

SEQ ID NO: 1600622 - DNA, 15 bp, Homo sapiens
attgtataaccttgc

SEQ ID NO: 1600623 - DNA, 15 bp, Homo sapiens
ttgtataaccttgca

SEQ ID NO: 1600624 - DNA, 15 bp, Homo sapiens
tgtataaccttgcag

SEQ ID NO: 1600625 - DNA, 15 bp, Homo sapiens
gtataaccttgcagc

SEQ ID NO: 1600626 - DNA, 15 bp, Homo sapiens
tataaccttgcagct

SEQ ID NO: 1600627 - DNA, 15 bp, Homo sapiens
ataaccttgcagctc

SEQ ID NO: 1600628 - DNA, 15 bp, Homo sapiens
taaccttgcagctct

SEQ ID NO: 1600629 - DNA, 15 bp, Homo sapiens
aaccttgcagctctc

SEQ ID NO: 1600630 - DNA, 15 bp, Homo sapiens
accttgcagctctcc

SEQ ID NO: 1600631 - DNA, 15 bp, Homo sapiens
ccttgcagctctccc

SEQ ID NO: 1600632 - DNA, 15 bp, Homo sapiens
cttgcagctctcccc

SEQ ID NO: 1600633 - DNA, 15 bp, Homo sapiens
ttgcagctctcccct

SEQ ID NO: 1600634 - DNA, 15 bp, Homo sapiens
tgcagctctccccta

SEQ ID NO: 1600635 - DNA, 15 bp, Homo sapiens
gcagctctcccctaa

SEQ ID NO: 1600636 - DNA, 15 bp, Homo sapiens
cagctctcccctaag

SEQ ID NO: 1600637 - DNA, 15 bp, Homo sapiens
agctctcccctaagt

SEQ ID NO: 1600638 - DNA, 15 bp, Homo sapiens
gctctcccctaagtg

SEQ ID NO: 1600639 - DNA, 15 bp, Homo sapiens
ctctcccctaagtga

SEQ ID NO: 1600640 - DNA, 15 bp, Homo sapiens
tctcccctaagtgag

SEQ ID NO: 1600641 - DNA, 15 bp, Homo sapiens
ctcccctaagtgagg

SEQ ID NO: 1600642 - DNA, 15 bp, Homo sapiens
tcccctaagtgagga

SEQ ID NO: 1600643 - DNA, 15 bp, Homo sapiens
cccctaagtgaggag

SEQ ID NO: 1600644 - DNA, 15 bp, Homo sapiens
ccctaagtgaggagg

SEQ ID NO: 1600645 - DNA, 15 bp, Homo sapiens
cctaagtgaggaggc

SEQ ID NO: 1600646 - DNA, 15 bp, Homo sapiens
ctaagtgaggaggca

SEQ ID NO: 1600647 - DNA, 15 bp, Homo sapiens
taagtgaggaggcaa

SEQ ID NO: 1600648 - DNA, 15 bp, Homo sapiens
aagtgaggaggcaat

SEQ ID NO: 1600649 - DNA, 15 bp, Homo sapiens
agtgaggaggcaatg

SEQ ID NO: 1600650 - DNA, 15 bp, Homo sapiens
gtgaggaggcaatgt

SEQ ID NO: 1600651 - DNA, 15 bp, Homo sapiens
tgaggaggcaatgtt

SEQ ID NO: 1600652 - DNA, 15 bp, Homo sapiens
gaggaggcaatgttg

SEQ ID NO: 1600653 - DNA, 15 bp, Homo sapiens
aggaggcaatgttga

SEQ ID NO: 1600654 - DNA, 15 bp, Homo sapiens
ggaggcaatgttgaa

SEQ ID NO: 1600655 - DNA, 15 bp, Homo sapiens
gaggcaatgttgaaa

SEQ ID NO: 1600656 - DNA, 15 bp, Homo sapiens
aggcaatgttgaaag

SEQ ID NO: 1600657 - DNA, 15 bp, Homo sapiens
ggcaatgttgaaagt

SEQ ID NO: 1600658 - DNA, 15 bp, Homo sapiens
gcaatgttgaaagtc

SEQ ID NO: 1600659 - DNA, 15 bp, Homo sapiens
caatgttgaaagtcc

SEQ ID NO: 1600660 - DNA, 15 bp, Homo sapiens
aatgttgaaagtccc

SEQ ID NO: 1600661 - DNA, 15 bp, Homo sapiens
atgttgaaagtccca

SEQ ID NO: 1600662 - DNA, 15 bp, Homo sapiens
tgttgaaagtcccat

SEQ ID NO: 1600663 - DNA, 15 bp, Homo sapiens
gttgaaagtcccatg

SEQ ID NO: 1600664 - DNA, 15 bp, Homo sapiens
ttgaaagtcccatgt

SEQ ID NO: 1600665 - DNA, 15 bp, Homo sapiens
tgaaagtcccatgtc

SEQ ID NO: 1600666 - DNA, 15 bp, Homo sapiens
gaaagtcccatgtct

SEQ ID NO: 1600667 - DNA, 15 bp, Homo sapiens
aaagtcccatgtctt

SEQ ID NO: 1600668 - DNA, 15 bp, Homo sapiens
aagtcccatgtctta

SEQ ID NO: 1600669 - DNA, 15 bp, Homo sapiens
agtcccatgtcttat

SEQ ID NO: 1600670 - DNA, 15 bp, Homo sapiens
gtcccatgtcttatc

SEQ ID NO: 1600671 - DNA, 15 bp, Homo sapiens
tcccatgtcttatca

SEQ ID NO: 1600672 - DNA, 15 bp, Homo sapiens
cccatgtcttatcag

SEQ ID NO: 1600673 - DNA, 15 bp, Homo sapiens
ccatgtcttatcaga

SEQ ID NO: 1600674 - DNA, 15 bp, Homo sapiens
catgtcttatcagaa

SEQ ID NO: 1600675 - DNA, 15 bp, Homo sapiens
atgtcttatcagaac

SEQ ID NO: 1600676 - DNA, 15 bp, Homo sapiens
tgtcttatcagaacc

SEQ ID NO: 1600677 - DNA, 15 bp, Homo sapiens
gtcttatcagaacca

SEQ ID NO: 1600678 - DNA, 15 bp, Homo sapiens
tcttatcagaaccag

SEQ ID NO: 1600679 - DNA, 15 bp, Homo sapiens
cttatcagaaccagg

SEQ ID NO: 1600680 - DNA, 15 bp, Homo sapiens
ttatcagaaccaggg

SEQ ID NO: 1600681 - DNA, 15 bp, Homo sapiens
tatcagaaccaggga

SEQ ID NO: 1600682 - DNA, 15 bp, Homo sapiens
atcagaaccagggag

SEQ ID NO: 1600683 - DNA, 15 bp, Homo sapiens
tcagaaccagggagg

SEQ ID NO: 1600684 - DNA, 15 bp, Homo sapiens
cagaaccagggaggc

SEQ ID NO: 1600685 - DNA, 15 bp, Homo sapiens
agaaccagggaggca

SEQ ID NO: 1600686 - DNA, 15 bp, Homo sapiens
accagggaggcagat

SEQ ID NO: 1600687 - DNA, 15 bp, Homo sapiens
ccagggaggcagatg

SEQ ID NO: 1600688 - DNA, 15 bp, Homo sapiens
cagggaggcagatga

SEQ ID NO: 1600689 - DNA, 15 bp, Homo sapiens
agggaggcagatgag

SEQ ID NO: 1600690 - DNA, 15 bp, Homo sapiens
gggaggcagatgaga

SEQ ID NO: 1600691 - DNA, 15 bp, Homo sapiens
ggaggcagatgagaa

SEQ ID NO: 1600692 - DNA, 15 bp, Homo sapiens
gaggcagatgagaaa

SEQ ID NO: 1600693 - DNA, 15 bp, Homo sapiens
aggcagatgagaaac

SEQ ID NO: 1600694 - DNA, 15 bp, Homo sapiens
ggcagatgagaaact

SEQ ID NO: 1600695 - DNA, 15 bp, Homo sapiens
gcagatgagaaactg

SEQ ID NO: 1600696 - DNA, 15 bp, Homo sapiens
cagatgagaaactgc

SEQ ID NO: 1600697 - DNA, 15 bp, Homo sapiens
agatgagaaactgcc

SEQ ID NO: 1600698 - DNA, 15 bp, Homo sapiens
gatgagaaactgcct

SEQ ID NO: 1600699 - DNA, 15 bp, Homo sapiens
atgagaaactgcctt

SEQ ID NO: 1600700 - DNA, 15 bp, Homo sapiens
tgagaaactgcctta

SEQ ID NO: 1600701 - DNA, 15 bp, Homo sapiens
gagaaactgccttat

SEQ ID NO: 1600702 - DNA, 15 bp, Homo sapiens
agaaactgccttatg

SEQ ID NO: 1600703 - DNA, 15 bp, Homo sapiens
gaaactgccttatgg

SEQ ID NO: 1600704 - DNA, 15 bp, Homo sapiens
aaactgccttatggc

SEQ ID NO: 1600705 - DNA, 15 bp, Homo sapiens
aactgccttatggca

SEQ ID NO: 1600706 - DNA, 15 bp, Homo sapiens
actgccttatggcag

SEQ ID NO: 1600707 - DNA, 15 bp, Homo sapiens
ctgccttatggcagc

SEQ ID NO: 1600708 - DNA, 15 bp, Homo sapiens
tgccttatggcagct

SEQ ID NO: 1600709 - DNA, 15 bp, Homo sapiens
gccttatggcagctc

SEQ ID NO: 1600710 - DNA, 15 bp, Homo sapiens
ccttatggcagctcc

SEQ ID NO: 1600711 - DNA, 15 bp, Homo sapiens
cttatggcagctccc

SEQ ID NO: 1600712 - DNA, 15 bp, Homo sapiens
ttatggcagctccca

SEQ ID NO: 1600713 - DNA, 15 bp, Homo sapiens
tatggcagctcccac

SEQ ID NO: 1600714 - DNA, 15 bp, Homo sapiens
atggcagctcccaca

SEQ ID NO: 1600715 - DNA, 15 bp, Homo sapiens
tggcagctcccacaa

SEQ ID NO: 1600716 - DNA, 15 bp, Homo sapiens
ggcagctcccacaac

SEQ ID NO: 1600717 - DNA, 15 bp, Homo sapiens
gcagctcccacaaca

SEQ ID NO: 1600718 - DNA, 15 bp, Homo sapiens
cagctcccacaacat

SEQ ID NO: 1600719 - DNA, 15 bp, Homo sapiens
agctcccacaacata

SEQ ID NO: 1600720 - DNA, 15 bp, Homo sapiens
gctcccacaacatag

SEQ ID NO: 1600721 - DNA, 15 bp, Homo sapiens
ctcccacaacatagg

SEQ ID NO: 1600722 - DNA, 15 bp, Homo sapiens
tcccacaacataggg

SEQ ID NO: 1600723 - DNA, 15 bp, Homo sapiens
cccacaacataggga

SEQ ID NO: 1600724 - DNA, 15 bp, Homo sapiens
ccacaacatagggag

SEQ ID NO: 1600725 - DNA, 15 bp, Homo sapiens
cacaacatagggagg

SEQ ID NO: 1600726 - DNA, 15 bp, Homo sapiens
acaacatagggaggt

SEQ ID NO: 1600727 - DNA, 15 bp, Homo sapiens
caacatagggaggtg

SEQ ID NO: 1600728 - DNA, 15 bp, Homo sapiens
aacatagggaggtgg

SEQ ID NO: 1600729 - DNA, 15 bp, Homo sapiens
acatagggaggtggg

SEQ ID NO: 1600730 - DNA, 15 bp, Homo sapiens
catagggaggtgggt

SEQ ID NO: 1600731 - DNA, 15 bp, Homo sapiens
atagggaggtgggtg

SEQ ID NO: 1600732 - DNA, 15 bp, Homo sapiens
tagggaggtgggtga

SEQ ID NO: 1600733 - DNA, 15 bp, Homo sapiens
agggaggtgggtgac

SEQ ID NO: 1600734 - DNA, 15 bp, Homo sapiens
gggaggtgggtgaca

SEQ ID NO: 1600735 - DNA, 15 bp, Homo sapiens
ggaggtgggtgacaa

SEQ ID NO: 1600736 - DNA, 15 bp, Homo sapiens
gaggtgggtgacaaa

SEQ ID NO: 1600737 - DNA, 15 bp, Homo sapiens
aggtgggtgacaaat

SEQ ID NO: 1600738 - DNA, 15 bp, Homo sapiens
ggtgggtgacaaatg

SEQ ID NO: 1600739 - DNA, 15 bp, Homo sapiens
gtgggtgacaaatgg

SEQ ID NO: 1600740 - DNA, 15 bp, Homo sapiens
tgggtgacaaatggc

SEQ ID NO: 1600741 - DNA, 15 bp, Homo sapiens
gggtgacaaatggcc

SEQ ID NO: 1600742 - DNA, 15 bp, Homo sapiens
ggtgacaaatggcct

SEQ ID NO: 1600743 - DNA, 15 bp, Homo sapiens
gtgacaaatggcctt

SEQ ID NO: 1600744 - DNA, 15 bp, Homo sapiens
tgacaaatggccttg

SEQ ID NO: 1600745 - DNA, 15 bp, Homo sapiens
gacaaatggccttgg

SEQ ID NO: 1600746 - DNA, 15 bp, Homo sapiens
acaaatggccttggg

SEQ ID NO: 1600747 - DNA, 15 bp, Homo sapiens
caaatggccttggga

SEQ ID NO: 1600748 - DNA, 15 bp, Homo sapiens
aaatggccttgggac

SEQ ID NO: 1600749 - DNA, 15 bp, Homo sapiens
aatggccttgggaca

SEQ ID NO: 1600750 - DNA, 15 bp, Homo sapiens
atggccttgggacag

SEQ ID NO: 1600751 - DNA, 15 bp, Homo sapiens
tggccttgggacagc

SEQ ID NO: 1600752 - DNA, 15 bp, Homo sapiens
ggccttgggacagct

SEQ ID NO: 1600753 - DNA, 15 bp, Homo sapiens
gccttgggacagctt

SEQ ID NO: 1600754 - DNA, 15 bp, Homo sapiens
ccttgggacagcttc

SEQ ID NO: 1600755 - DNA, 15 bp, Homo sapiens
cttgggacagcttct

SEQ ID NO: 1600756 - DNA, 15 bp, Homo sapiens
ttgggacagcttctt

SEQ ID NO: 1600757 - DNA, 15 bp, Homo sapiens
tgggacagcttcttc

SEQ ID NO: 1600758 - DNA, 15 bp, Homo sapiens
gggacagcttcttcc

SEQ ID NO: 1600759 - DNA, 15 bp, Homo sapiens
ggacagcttcttccc

SEQ ID NO: 1600760 - DNA, 15 bp, Homo sapiens
gacagcttcttccca

SEQ ID NO: 1600761 - DNA, 15 bp, Homo sapiens
acagcttcttcccaa

SEQ ID NO: 1600762 - DNA, 15 bp, Homo sapiens
cagcttcttcccaag

SEQ ID NO: 1600763 - DNA, 15 bp, Homo sapiens
agcttcttcccaaga

SEQ ID NO: 1600764 - DNA, 15 bp, Homo sapiens
gcttcttcccaagac

SEQ ID NO: 1600765 - DNA, 15 bp, Homo sapiens
cttcttcccaagact

SEQ ID NO: 1600766 - DNA, 15 bp, Homo sapiens
ttcttcccaagactg

SEQ ID NO: 1600767 - DNA, 15 bp, Homo sapiens
tcttcccaagactgg

SEQ ID NO: 1600768 - DNA, 15 bp, Homo sapiens
cttcccaagactggt

SEQ ID NO: 1600769 - DNA, 15 bp, Homo sapiens
ttcccaagactggtt

SEQ ID NO: 1600770 - DNA, 15 bp, Homo sapiens
tcccaagactggtta

SEQ ID NO: 1600771 - DNA, 15 bp, Homo sapiens
cccaagactggttat

SEQ ID NO: 1600772 - DNA, 15 bp, Homo sapiens
ccaagactggttatg

SEQ ID NO: 1600773 - DNA, 15 bp, Homo sapiens
caagactggttatgt

SEQ ID NO: 1600774 - DNA, 15 bp, Homo sapiens
aagactggttatgtt

SEQ ID NO: 1600775 - DNA, 15 bp, Homo sapiens
agactggttatgtta

SEQ ID NO: 1600776 - DNA, 15 bp, Homo sapiens
gactggttatgttac

SEQ ID NO: 1600777 - DNA, 15 bp, Homo sapiens
actggttatgttaca

SEQ ID NO: 1600778 - DNA, 15 bp, Homo sapiens
ctggttatgttacag

SEQ ID NO: 1600779 - DNA, 15 bp, Homo sapiens
tggttatgttacagt

SEQ ID NO: 1600780 - DNA, 15 bp, Homo sapiens
ggttatgttacagtg

SEQ ID NO: 1600781 - DNA, 15 bp, Homo sapiens
gttatgttacagtgt

SEQ ID NO: 1600782 - DNA, 15 bp, Homo sapiens
ttatgttacagtgtt

SEQ ID NO: 1600783 - DNA, 15 bp, Homo sapiens
tatgttacagtgttc

SEQ ID NO: 1600784 - DNA, 15 bp, Homo sapiens
atgttacagtgttcc

SEQ ID NO: 1600785 - DNA, 15 bp, Homo sapiens
tgttacagtgttcct

SEQ ID NO: 1600786 - DNA, 15 bp, Homo sapiens
gttacagtgttcctg

SEQ ID NO: 1600787 - DNA, 15 bp, Homo sapiens
ttacagtgttcctgg

SEQ ID NO: 1600788 - DNA, 15 bp, Homo sapiens
tacagtgttcctggg

SEQ ID NO: 1600789 - DNA, 15 bp, Homo sapiens
acagtgttcctggga

SEQ ID NO: 1600790 - DNA, 15 bp, Homo sapiens
cagtgttcctgggag

SEQ ID NO: 1600791 - DNA, 15 bp, Homo sapiens
agtgttcctgggagg

SEQ ID NO: 1600792 - DNA, 15 bp, Homo sapiens
gtgttcctgggagga

SEQ ID NO: 1600793 - DNA, 15 bp, Homo sapiens
tgttcctgggaggat

SEQ ID NO: 1600794 - DNA, 15 bp, Homo sapiens
gttcctgggaggatc

SEQ ID NO: 1600795 - DNA, 15 bp, Homo sapiens
ttcctgggaggatca

SEQ ID NO: 1600796 - DNA, 15 bp, Homo sapiens
tcctgggaggatcac

SEQ ID NO: 1600797 - DNA, 15 bp, Homo sapiens
cctgggaggatcaca

SEQ ID NO: 1600798 - DNA, 15 bp, Homo sapiens
ctgggaggatcacat

SEQ ID NO: 1600799 - DNA, 15 bp, Homo sapiens
tgggaggatcacatg

SEQ ID NO: 1600800 - DNA, 15 bp, Homo sapiens
gggaggatcacatgg

SEQ ID NO: 1600801 - DNA, 15 bp, Homo sapiens
ggaggatcacatggc

SEQ ID NO: 1600802 - DNA, 15 bp, Homo sapiens
gaggatcacatggca

SEQ ID NO: 1600803 - DNA, 15 bp, Homo sapiens
aggatcacatggcat

SEQ ID NO: 1600804 - DNA, 15 bp, Homo sapiens
ggatcacatggcatt

SEQ ID NO: 1600805 - DNA, 15 bp, Homo sapiens
gatcacatggcattc

SEQ ID NO: 1600806 - DNA, 15 bp, Homo sapiens
atcacatggcattcc

SEQ ID NO: 1600807 - DNA, 15 bp, Homo sapiens
tcacatggcattcct

SEQ ID NO: 1600808 - DNA, 15 bp, Homo sapiens
cacatggcattcctc

SEQ ID NO: 1600809 - DNA, 15 bp, Homo sapiens
acatggcattcctcc

SEQ ID NO: 1600810 - DNA, 15 bp, Homo sapiens
catggcattcctcca

SEQ ID NO: 1600811 - DNA, 15 bp, Homo sapiens
atggcattcctccaa

SEQ ID NO: 1600812 - DNA, 15 bp, Homo sapiens
tggcattcctccaag

SEQ ID NO: 1600813 - DNA, 15 bp, Homo sapiens
ggcattcctccaaga

SEQ ID NO: 1600814 - DNA, 15 bp, Homo sapiens
gcattcctccaagat

SEQ ID NO: 1600815 - DNA, 15 bp, Homo sapiens
cattcctccaagatg

SEQ ID NO: 1600816 - DNA, 15 bp, Homo sapiens
attcctccaagatgg

SEQ ID NO: 1600817 - DNA, 15 bp, Homo sapiens
ttcctccaagatggg

SEQ ID NO: 1600818 - DNA, 15 bp, Homo sapiens
tcctccaagatgggt

SEQ ID NO: 1600819 - DNA, 15 bp, Homo sapiens
cctccaagatgggtc

SEQ ID NO: 1600820 - DNA, 15 bp, Homo sapiens
ctccaagatgggtca

SEQ ID NO: 1600821 - DNA, 15 bp, Homo sapiens
tccaagatgggtcag

SEQ ID NO: 1600822 - DNA, 15 bp, Homo sapiens
ccaagatgggtcaga

SEQ ID NO: 1600823 - DNA, 15 bp, Homo sapiens
caagatgggtcagac

SEQ ID NO: 1600824 - DNA, 15 bp, Homo sapiens
aagatgggtcagact

SEQ ID NO: 1600825 - DNA, 15 bp, Homo sapiens
agatgggtcagactg

SEQ ID NO: 1600826 - DNA, 15 bp, Homo sapiens
gatgggtcagactgc

SEQ ID NO: 1600827 - DNA, 15 bp, Homo sapiens
atgggtcagactgct

SEQ ID NO: 1600828 - DNA, 15 bp, Homo sapiens
tgggtcagactgctg

SEQ ID NO: 1600829 - DNA, 15 bp, Homo sapiens
gggtcagactgctgt

SEQ ID NO: 1600830 - DNA, 15 bp, Homo sapiens
ggtcagactgctgtt

SEQ ID NO: 1600831 - DNA, 15 bp, Homo sapiens
gtcagactgctgttg

SEQ ID NO: 1600832 - DNA, 15 bp, Homo sapiens
tcagactgctgttgg

SEQ ID NO: 1600833 - DNA, 15 bp, Homo sapiens
cagactgctgttggc

SEQ ID NO: 1600834 - DNA, 15 bp, Homo sapiens
agactgctgttggcc

SEQ ID NO: 1600835 - DNA, 15 bp, Homo sapiens
gactgctgttggcct

SEQ ID NO: 1600836 - DNA, 15 bp, Homo sapiens
actgctgttggcctt

SEQ ID NO: 1600837 - DNA, 15 bp, Homo sapiens
ctgctgttggccttg

SEQ ID NO: 1600838 - DNA, 15 bp, Homo sapiens
tgctgttggccttgt

SEQ ID NO: 1600839 - DNA, 15 bp, Homo sapiens
gctgttggccttgtc

SEQ ID NO: 1600840 - DNA, 15 bp, Homo sapiens
ctgttggccttgtct

SEQ ID NO: 1600841 - DNA, 15 bp, Homo sapiens
tgttggccttgtctg

SEQ ID NO: 1600842 - DNA, 15 bp, Homo sapiens
gttggccttgtctgt

SEQ ID NO: 1600843 - DNA, 15 bp, Homo sapiens
ttggccttgtctgtg

SEQ ID NO: 1600844 - DNA, 15 bp, Homo sapiens
tggccttgtctgtgt

SEQ ID NO: 1600845 - DNA, 15 bp, Homo sapiens
ggccttgtctgtgtg

SEQ ID NO: 1600846 - DNA, 15 bp, Homo sapiens
gccttgtctgtgtgg

SEQ ID NO: 1600847 - DNA, 15 bp, Homo sapiens
ccttgtctgtgtggc

SEQ ID NO: 1600848 - DNA, 15 bp, Homo sapiens
cttgtctgtgtggcg

SEQ ID NO: 1600849 - DNA, 15 bp, Homo sapiens
ttgtctgtgtggcgt

SEQ ID NO: 1600850 - DNA, 15 bp, Homo sapiens
tgtctgtgtggcgta

SEQ ID NO: 1600851 - DNA, 15 bp, Homo sapiens
gtctgtgtggcgtat

SEQ ID NO: 1600852 - DNA, 15 bp, Homo sapiens
tctgtgtggcgtatg

SEQ ID NO: 1600853 - DNA, 15 bp, Homo sapiens
ctgtgtggcgtatgt

SEQ ID NO: 1600854 - DNA, 15 bp, Homo sapiens
tgtgtggcgtatgtg

SEQ ID NO: 1600855 - DNA, 15 bp, Homo sapiens
gtgtggcgtatgtga

SEQ ID NO: 1600856 - DNA, 15 bp, Homo sapiens
tgtggcgtatgtgaa

SEQ ID NO: 1600857 - DNA, 15 bp, Homo sapiens
gtggcgtatgtgaag

SEQ ID NO: 1600858 - DNA, 15 bp, Homo sapiens
tggcgtatgtgaaga

SEQ ID NO: 1600859 - DNA, 15 bp, Homo sapiens
ggcgtatgtgaagac

SEQ ID NO: 1600860 - DNA, 15 bp, Homo sapiens
gcgtatgtgaagaca

SEQ ID NO: 1600861 - DNA, 15 bp, Homo sapiens
cgtatgtgaagacat

SEQ ID NO: 1600862 - DNA, 15 bp, Homo sapiens
gtatgtgaagacatt

SEQ ID NO: 1600863 - DNA, 15 bp, Homo sapiens
tatgtgaagacattc

SEQ ID NO: 1600864 - DNA, 15 bp, Homo sapiens
atgtgaagacattca

SEQ ID NO: 1600865 - DNA, 15 bp, Homo sapiens
tgtgaagacattcat

SEQ ID NO: 1600866 - DNA, 15 bp, Homo sapiens
gtgaagacattcatg

SEQ ID NO: 1600867 - DNA, 15 bp, Homo sapiens
tgaagacattcatgg

SEQ ID NO: 1600868 - DNA, 15 bp, Homo sapiens
gaagacattcatggc

SEQ ID NO: 1600869 - DNA, 15 bp, Homo sapiens
aagacattcatggca

SEQ ID NO: 1600870 - DNA, 15 bp, Homo sapiens
agacattcatggcag

SEQ ID NO: 1600871 - DNA, 15 bp, Homo sapiens
gacattcatggcaga

SEQ ID NO: 1600872 - DNA, 15 bp, Homo sapiens
acattcatggcagag

SEQ ID NO: 1600873 - DNA, 15 bp, Homo sapiens
cattcatggcagagc

SEQ ID NO: 1600874 - DNA, 15 bp, Homo sapiens
attcatggcagagct

SEQ ID NO: 1600875 - DNA, 15 bp, Homo sapiens
ttcatggcagagctg

SEQ ID NO: 1600876 - DNA, 15 bp, Homo sapiens
tcatggcagagctgt

SEQ ID NO: 1600877 - DNA, 15 bp, Homo sapiens
catggcagagctgtt

SEQ ID NO: 1600878 - DNA, 15 bp, Homo sapiens
atggcagagctgttc

SEQ ID NO: 1600879 - DNA, 15 bp, Homo sapiens
tggcagagctgttcc

SEQ ID NO: 1600880 - DNA, 15 bp, Homo sapiens
ggcagagctgttccc

SEQ ID NO: 1600881 - DNA, 15 bp, Homo sapiens
gcagagctgttccct

SEQ ID NO: 1600882 - DNA, 15 bp, Homo sapiens
cagagctgttccctt

SEQ ID NO: 1600883 - DNA, 15 bp, Homo sapiens
agagctgttccctta

SEQ ID NO: 1600884 - DNA, 15 bp, Homo sapiens
gagctgttcccttag

SEQ ID NO: 1600885 - DNA, 15 bp, Homo sapiens
ctgttcccttagaag

SEQ ID NO: 1600886 - DNA, 15 bp, Homo sapiens
tgttcccttagaagc

SEQ ID NO: 1600887 - DNA, 15 bp, Homo sapiens
gttcccttagaagca

SEQ ID NO: 1600888 - DNA, 15 bp, Homo sapiens
ttcccttagaagcat

SEQ ID NO: 1600889 - DNA, 15 bp, Homo sapiens
tcccttagaagcatc

SEQ ID NO: 1600890 - DNA, 15 bp, Homo sapiens
cccttagaagcatct

SEQ ID NO: 1600891 - DNA, 15 bp, Homo sapiens
ccttagaagcatcta

SEQ ID NO: 1600892 - DNA, 15 bp, Homo sapiens
cttagaagcatctac

SEQ ID NO: 1600893 - DNA, 15 bp, Homo sapiens
ttagaagcatctact

SEQ ID NO: 1600894 - DNA, 15 bp, Homo sapiens
tagaagcatctacta

SEQ ID NO: 1600895 - DNA, 15 bp, Homo sapiens
agaagcatctactaa

SEQ ID NO: 1600896 - DNA, 15 bp, Homo sapiens
gaagcatctactaaa

SEQ ID NO: 1600897 - DNA, 15 bp, Homo sapiens
aagcatctactaaat

SEQ ID NO: 1600898 - DNA, 15 bp, Homo sapiens
agcatctactaaatt

SEQ ID NO: 1600899 - DNA, 15 bp, Homo sapiens
gcatctactaaattg

SEQ ID NO: 1600900 - DNA, 15 bp, Homo sapiens
catctactaaattga

SEQ ID NO: 1600901 - DNA, 15 bp, Homo sapiens
atctactaaattgat

SEQ ID NO: 1600902 - DNA, 15 bp, Homo sapiens
tctactaaattgatc

SEQ ID NO: 1600903 - DNA, 15 bp, Homo sapiens
ctactaaattgatct

SEQ ID NO: 1600904 - DNA, 15 bp, Homo sapiens
tactaaattgatctt

SEQ ID NO: 1600905 - DNA, 15 bp, Homo sapiens
actaaattgatcttt

SEQ ID NO: 1600906 - DNA, 15 bp, Homo sapiens
ctaaattgatctttt

SEQ ID NO: 1600907 - DNA, 15 bp, Homo sapiens
taaattgatcttttc

SEQ ID NO: 1600908 - DNA, 15 bp, Homo sapiens
aaattgatcttttcc

SEQ ID NO: 1600909 - DNA, 15 bp, Homo sapiens
aattgatcttttcct

SEQ ID NO: 1600910 - DNA, 15 bp, Homo sapiens
attgatcttttcctt

SEQ ID NO: 1600911 - DNA, 15 bp, Homo sapiens
ttgatcttttccttt

SEQ ID NO: 1600912 - DNA, 15 bp, Homo sapiens
tgatcttttcctttc

SEQ ID NO: 1600913 - DNA, 15 bp, Homo sapiens
gatcttttcctttct

SEQ ID NO: 1600914 - DNA, 15 bp, Homo sapiens
atcttttcctttctt

SEQ ID NO: 1600915 - DNA, 15 bp, Homo sapiens
tcttttcctttctta

SEQ ID NO: 1600916 - DNA, 15 bp, Homo sapiens
cttttcctttcttac

SEQ ID NO: 1600917 - DNA, 15 bp, Homo sapiens
ttttcctttcttact

SEQ ID NO: 1600918 - DNA, 15 bp, Homo sapiens
tttcctttcttactt

SEQ ID NO: 1600919 - DNA, 15 bp, Homo sapiens
ttcctttcttactta

SEQ ID NO: 1600920 - DNA, 15 bp, Homo sapiens
tcctttcttacttac

SEQ ID NO: 1600921 - DNA, 15 bp, Homo sapiens
cctttcttacttact

SEQ ID NO: 1600922 - DNA, 15 bp, Homo sapiens
ctttcttacttactg

SEQ ID NO: 1600923 - DNA, 15 bp, Homo sapiens
tttcttacttactgt

SEQ ID NO: 1600924 - DNA, 15 bp, Homo sapiens
ttcttacttactgtc

SEQ ID NO: 1600925 - DNA, 15 bp, Homo sapiens
tcttacttactgtct

SEQ ID NO: 1600926 - DNA, 15 bp, Homo sapiens
cttacttactgtctg

SEQ ID NO: 1600927 - DNA, 15 bp, Homo sapiens
ttacttactgtctgt

SEQ ID NO: 1600928 - DNA, 15 bp, Homo sapiens
tacttactgtctgtc

SEQ ID NO: 1600929 - DNA, 15 bp, Homo sapiens
acttactgtctgtct

SEQ ID NO: 1600930 - DNA, 15 bp, Homo sapiens
cttactgtctgtctc

SEQ ID NO: 1600931 - DNA, 15 bp, Homo sapiens
ttactgtctgtctcc

SEQ ID NO: 1600932 - DNA, 15 bp, Homo sapiens
tactgtctgtctccc

SEQ ID NO: 1600933 - DNA, 15 bp, Homo sapiens
actgtctgtctccct

SEQ ID NO: 1600934 - DNA, 15 bp, Homo sapiens
ctgtctgtctccctt

SEQ ID NO: 1600935 - DNA, 15 bp, Homo sapiens
tgtctgtctccctta

SEQ ID NO: 1600936 - DNA, 15 bp, Homo sapiens
gtctgtctcccttag

SEQ ID NO: 1600937 - DNA, 15 bp, Homo sapiens
tctgtctcccttagt

SEQ ID NO: 1600938 - DNA, 15 bp, Homo sapiens
ctgtctcccttagta

SEQ ID NO: 1600939 - DNA, 15 bp, Homo sapiens
tgtctcccttagtag

SEQ ID NO: 1600940 - DNA, 15 bp, Homo sapiens
gtctcccttagtagg

SEQ ID NO: 1600941 - DNA, 15 bp, Homo sapiens
tctcccttagtaggc

SEQ ID NO: 1600942 - DNA, 15 bp, Homo sapiens
ctcccttagtaggct

SEQ ID NO: 1600943 - DNA, 15 bp, Homo sapiens
tcccttagtaggctg

SEQ ID NO: 1600944 - DNA, 15 bp, Homo sapiens
cccttagtaggctgt

SEQ ID NO: 1600945 - DNA, 15 bp, Homo sapiens
ccttagtaggctgtc

SEQ ID NO: 1600946 - DNA, 15 bp, Homo sapiens
cttagtaggctgtca

SEQ ID NO: 1600947 - DNA, 15 bp, Homo sapiens
ttagtaggctgtcag

SEQ ID NO: 1600948 - DNA, 15 bp, Homo sapiens
tagtaggctgtcagc

SEQ ID NO: 1600949 - DNA, 15 bp, Homo sapiens
agtaggctgtcagct

SEQ ID NO: 1600950 - DNA, 15 bp, Homo sapiens
gtaggctgtcagctc

SEQ ID NO: 1600951 - DNA, 15 bp, Homo sapiens
taggctgtcagctcc

SEQ ID NO: 1600952 - DNA, 15 bp, Homo sapiens
aggctgtcagctccg

SEQ ID NO: 1600953 - DNA, 15 bp, Homo sapiens
ggctgtcagctccgt

SEQ ID NO: 1600954 - DNA, 15 bp, Homo sapiens
gctgtcagctccgtg

SEQ ID NO: 1600955 - DNA, 15 bp, Homo sapiens
ctgtcagctccgtga

SEQ ID NO: 1600956 - DNA, 15 bp, Homo sapiens
tgtcagctccgtgag

SEQ ID NO: 1600957 - DNA, 15 bp, Homo sapiens
gtcagctccgtgagt

SEQ ID NO: 1600958 - DNA, 15 bp, Homo sapiens
tcagctccgtgagtg

SEQ ID NO: 1600959 - DNA, 15 bp, Homo sapiens
cagctccgtgagtgc

SEQ ID NO: 1600960 - DNA, 15 bp, Homo sapiens
agctccgtgagtgca

SEQ ID NO: 1600961 - DNA, 15 bp, Homo sapiens
gctccgtgagtgcag

SEQ ID NO: 1600962 - DNA, 15 bp, Homo sapiens
ctccgtgagtgcagg

SEQ ID NO: 1600963 - DNA, 15 bp, Homo sapiens
tccgtgagtgcagga

SEQ ID NO: 1600964 - DNA, 15 bp, Homo sapiens
ccgtgagtgcaggac

SEQ ID NO: 1600965 - DNA, 15 bp, Homo sapiens
cgtgagtgcaggacc

SEQ ID NO: 1600966 - DNA, 15 bp, Homo sapiens
gtgagtgcaggacct

SEQ ID NO: 1600967 - DNA, 15 bp, Homo sapiens
tgagtgcaggacctt

SEQ ID NO: 1600968 - DNA, 15 bp, Homo sapiens
gagtgcaggaccttg

SEQ ID NO: 1600969 - DNA, 15 bp, Homo sapiens
agtgcaggaccttgc

SEQ ID NO: 1600970 - DNA, 15 bp, Homo sapiens
gtgcaggaccttgcc

SEQ ID NO: 1600971 - DNA, 15 bp, Homo sapiens
tgcaggaccttgcca

SEQ ID NO: 1600972 - DNA, 15 bp, Homo sapiens
gcaggaccttgccag

SEQ ID NO: 1600973 - DNA, 15 bp, Homo sapiens
caggaccttgccagt

SEQ ID NO: 1600974 - DNA, 15 bp, Homo sapiens
aggaccttgccagtc

SEQ ID NO: 1600975 - DNA, 15 bp, Homo sapiens
ggaccttgccagtcc

SEQ ID NO: 1600976 - DNA, 15 bp, Homo sapiens
gaccttgccagtcct

SEQ ID NO: 1600977 - DNA, 15 bp, Homo sapiens
accttgccagtcctg

SEQ ID NO: 1600978 - DNA, 15 bp, Homo sapiens
ccttgccagtcctgg

SEQ ID NO: 1600979 - DNA, 15 bp, Homo sapiens
cttgccagtcctggt

SEQ ID NO: 1600980 - DNA, 15 bp, Homo sapiens
ttgccagtcctggtc

SEQ ID NO: 1600981 - DNA, 15 bp, Homo sapiens
tgccagtcctggtca

SEQ ID NO: 1600982 - DNA, 15 bp, Homo sapiens
gccagtcctggtcac

SEQ ID NO: 1600983 - DNA, 15 bp, Homo sapiens
ccagtcctggtcact

SEQ ID NO: 1600984 - DNA, 15 bp, Homo sapiens
cagtcctggtcactg

SEQ ID NO: 1600985 - DNA, 15 bp, Homo sapiens
agtcctggtcactgc

SEQ ID NO: 1600986 - DNA, 15 bp, Homo sapiens
gtcctggtcactgct

SEQ ID NO: 1600987 - DNA, 15 bp, Homo sapiens
tcctggtcactgcta

SEQ ID NO: 1600988 - DNA, 15 bp, Homo sapiens
cctggtcactgctat

SEQ ID NO: 1600989 - DNA, 15 bp, Homo sapiens
ctggtcactgctata

SEQ ID NO: 1600990 - DNA, 15 bp, Homo sapiens
tggtcactgctatat

SEQ ID NO: 1600991 - DNA, 15 bp, Homo sapiens
ggtcactgctatatc

SEQ ID NO: 1600992 - DNA, 15 bp, Homo sapiens
gtcactgctatatcc

SEQ ID NO: 1600993 - DNA, 15 bp, Homo sapiens
tcactgctatatccc

SEQ ID NO: 1600994 - DNA, 15 bp, Homo sapiens
cactgctatatcccc

SEQ ID NO: 1600995 - DNA, 15 bp, Homo sapiens
actgctatatcccca

SEQ ID NO: 1600996 - DNA, 15 bp, Homo sapiens
ctgctatatccccag

SEQ ID NO: 1600997 - DNA, 15 bp, Homo sapiens
tgctatatccccagc

SEQ ID NO: 1600998 - DNA, 15 bp, Homo sapiens
gctatatccccagca

SEQ ID NO: 1600999 - DNA, 15 bp, Homo sapiens
ctatatccccagcac

SEQ ID NO: 1601000 - DNA, 15 bp, Homo sapiens
tatatccccagcacc

SEQ ID NO: 1601001 - DNA, 15 bp, Homo sapiens
atatccccagcacct

SEQ ID NO: 1601002 - DNA, 15 bp, Homo sapiens
tatccccagcaccta

SEQ ID NO: 1601003 - DNA, 15 bp, Homo sapiens
atccccagcacctac

SEQ ID NO: 1601004 - DNA, 15 bp, Homo sapiens
tccccagcacctaca

SEQ ID NO: 1601005 - DNA, 15 bp, Homo sapiens
ccccagcacctacaa

SEQ ID NO: 1601006 - DNA, 15 bp, Homo sapiens
cccagcacctacaag

SEQ ID NO: 1601007 - DNA, 15 bp, Homo sapiens
ccagcacctacaaga

SEQ ID NO: 1601008 - DNA, 15 bp, Homo sapiens
cagcacctacaagag

SEQ ID NO: 1601009 - DNA, 15 bp, Homo sapiens
agcacctacaagagt

SEQ ID NO: 1601010 - DNA, 15 bp, Homo sapiens
gcacctacaagagtg

SEQ ID NO: 1601011 - DNA, 15 bp, Homo sapiens
cacctacaagagtgc

SEQ ID NO: 1601012 - DNA, 15 bp, Homo sapiens
acctacaagagtgcc

SEQ ID NO: 1601013 - DNA, 15 bp, Homo sapiens
cctacaagagtgcct

SEQ ID NO: 1601014 - DNA, 15 bp, Homo sapiens
ctacaagagtgcctg

SEQ ID NO: 1601015 - DNA, 15 bp, Homo sapiens
tacaagagtgcctgg

SEQ ID NO: 1601016 - DNA, 15 bp, Homo sapiens
acaagagtgcctgga

SEQ ID NO: 1601017 - DNA, 15 bp, Homo sapiens
caagagtgcctggaa

SEQ ID NO: 1601018 - DNA, 15 bp, Homo sapiens
aagagtgcctggaaa

SEQ ID NO: 1601019 - DNA, 15 bp, Homo sapiens
agagtgcctggaaaa

SEQ ID NO: 1601020 - DNA, 15 bp, Homo sapiens
gagtgcctggaaaat

SEQ ID NO: 1601021 - DNA, 15 bp, Homo sapiens
agtgcctggaaaatt

SEQ ID NO: 1601022 - DNA, 15 bp, Homo sapiens
gtgcctggaaaattg

SEQ ID NO: 1601023 - DNA, 15 bp, Homo sapiens
tgcctggaaaattgt

SEQ ID NO: 1601024 - DNA, 15 bp, Homo sapiens
gcctggaaaattgta

SEQ ID NO: 1601025 - DNA, 15 bp, Homo sapiens
cctggaaaattgtag

SEQ ID NO: 1601026 - DNA, 15 bp, Homo sapiens
ctggaaaattgtagt

SEQ ID NO: 1601027 - DNA, 15 bp, Homo sapiens
tggaaaattgtagtg

SEQ ID NO: 1601028 - DNA, 15 bp, Homo sapiens
ggaaaattgtagtgc

SEQ ID NO: 1601029 - DNA, 15 bp, Homo sapiens
gaaaattgtagtgct

SEQ ID NO: 1601030 - DNA, 15 bp, Homo sapiens
aaaattgtagtgctc

SEQ ID NO: 1601031 - DNA, 15 bp, Homo sapiens
aaattgtagtgctca

SEQ ID NO: 1601032 - DNA, 15 bp, Homo sapiens
aattgtagtgctcaa

SEQ ID NO: 1601033 - DNA, 15 bp, Homo sapiens
attgtagtgctcaat

SEQ ID NO: 1601034 - DNA, 15 bp, Homo sapiens
ttgtagtgctcaata

SEQ ID NO: 1601035 - DNA, 15 bp, Homo sapiens
tgtagtgctcaataa

SEQ ID NO: 1601036 - DNA, 15 bp, Homo sapiens
gtagtgctcaataaa

SEQ ID NO: 1601037 - DNA, 15 bp, Homo sapiens
tagtgctcaataaat

SEQ ID NO: 1601038 - DNA, 15 bp, Homo sapiens
agtgctcaataaata

SEQ ID NO: 1601039 - DNA, 15 bp, Homo sapiens
ctcaataaatatttg

SEQ ID NO: 1601040 - DNA, 15 bp, Homo sapiens
tcaataaatatttgt

SEQ ID NO: 1601041 - DNA, 15 bp, Homo sapiens
caataaatatttgtt

SEQ ID NO: 1601042 - DNA, 15 bp, Homo sapiens
aataaatatttgttg

SEQ ID NO: 1601043 - DNA, 15 bp, Homo sapiens
ataaatatttgttgg

SEQ ID NO: 1601044 - DNA, 15 bp, Homo sapiens
taaatatttgttgga

SEQ ID NO: 1601045 - DNA, 15 bp, Homo sapiens
aaatatttgttggat

SEQ ID NO: 1601046 - DNA, 15 bp, Homo sapiens
aatatttgttggata

SEQ ID NO: 1601047 - DNA, 15 bp, Homo sapiens
atatttgttggataa

SEQ ID NO: 1601048 - DNA, 15 bp, Homo sapiens
tatttgttggataaa

SEQ ID NO: 1601049 - DNA, 15 bp, Homo sapiens
atttgttggataaat

SEQ ID NO: 1601050 - DNA, 15 bp, Homo sapiens
tttgttggataaatg

SEQ ID NO: 1601051 - DNA, 15 bp, Homo sapiens
ttgttggataaatga

SEQ ID NO: 1601052 - DNA, 15 bp, Homo sapiens
tgttggataaatgat

SEQ ID NO: 1601053 - DNA, 15 bp, Homo sapiens
gttggataaatgata

SEQ ID NO: 1601054 - DNA, 15 bp, Homo sapiens
ttggataaatgatag

SEQ ID NO: 1601055 - DNA, 15 bp, Homo sapiens
tggataaatgataga

SEQ ID NO: 1601056 - DNA, 15 bp, Homo sapiens
ggataaatgatagaa

SEQ ID NO: 1601057 - DNA, 15 bp, Homo sapiens
gataaatgatagaat

SEQ ID NO: 1601058 - DNA, 15 bp, Homo sapiens
ataaatgatagaatg

SEQ ID NO: 1601059 - DNA, 15 bp, Homo sapiens
taaatgatagaatga

SEQ ID NO: 1601060 - DNA, 15 bp, Homo sapiens
aaatgatagaatgat

SEQ ID NO: 1601061 - DNA, 15 bp, Homo sapiens
aatgatagaatgata

SEQ ID NO: 1601062 - DNA, 15 bp, Homo sapiens
atgatagaatgatag

SEQ ID NO: 1601063 - DNA, 15 bp, Homo sapiens
tgatagaatgatagg

SEQ ID NO: 1601064 - DNA, 15 bp, Homo sapiens
gatagaatgatagga

SEQ ID NO: 1601065 - DNA, 15 bp, Homo sapiens
atagaatgataggaa

SEQ ID NO: 1601066 - DNA, 15 bp, Homo sapiens
tagaatgataggaag

SEQ ID NO: 1601067 - DNA, 15 bp, Homo sapiens
agaatgataggaagt

SEQ ID NO: 1601068 - DNA, 15 bp, Homo sapiens
gaatgataggaagtt

SEQ ID NO: 1601069 - DNA, 15 bp, Homo sapiens
aatgataggaagtta

SEQ ID NO: 1601070 - DNA, 15 bp, Homo sapiens
atgataggaagttaa

SEQ ID NO: 1601071 - DNA, 15 bp, Homo sapiens
tgataggaagttaaa

SEQ ID NO: 1601072 - DNA, 15 bp, Homo sapiens
gataggaagttaaaa

SEQ ID NO: 1601073 - DNA, 15 bp, Homo sapiens
ataggaagttaaaaa

SEQ ID NO: 1601074 - DNA, 15 bp, Homo sapiens
taggaagttaaaaag

SEQ ID NO: 1601075 - DNA, 15 bp, Homo sapiens
aggaagttaaaaagc

SEQ ID NO: 1601076 - DNA, 15 bp, Homo sapiens
ggaagttaaaaagca

SEQ ID NO: 1601077 - DNA, 15 bp, Homo sapiens
gaagttaaaaagcaa

SEQ ID NO: 1601078 - DNA, 15 bp, Homo sapiens
aagttaaaaagcaat

SEQ ID NO: 1601079 - DNA, 15 bp, Homo sapiens
agttaaaaagcaatt

SEQ ID NO: 1601080 - DNA, 15 bp, Homo sapiens
gttaaaaagcaatta

SEQ ID NO: 1601081 - DNA, 15 bp, Homo sapiens
ttaaaaagcaattaa

SEQ ID NO: 1601082 - DNA, 15 bp, Homo sapiens
taaaaagcaattaaa

SEQ ID NO: 1601083 - DNA, 15 bp, Homo sapiens
aaaaagcaattaaaa

SEQ ID NO: 1601084 - DNA, 15 bp, Homo sapiens
aaaagcaattaaaat

SEQ ID NO: 1601085 - DNA, 15 bp, Homo sapiens
aaagcaattaaaata

SEQ ID NO: 1601086 - DNA, 15 bp, Homo sapiens
aagcaattaaaatac

SEQ ID NO: 1601087 - DNA, 15 bp, Homo sapiens
agcaattaaaatact

SEQ ID NO: 1601088 - DNA, 15 bp, Homo sapiens
gcaattaaaatactt

SEQ ID NO: 1601089 - DNA, 15 bp, Homo sapiens
caattaaaatacttg

SEQ ID NO: 1601090 - DNA, 15 bp, Homo sapiens
aattaaaatacttga

SEQ ID NO: 1601091 - DNA, 15 bp, Homo sapiens
attaaaatacttgaa

SEQ ID NO: 1601092 - DNA, 15 bp, Homo sapiens
ttaaaatacttgaaa

SEQ ID NO: 1601093 - DNA, 15 bp, Homo sapiens
taaaatacttgaaaa

SEQ ID NO: 1601094 - DNA, 15 bp, Homo sapiens
aaaatacttgaaaag

SEQ ID NO: 1601095 - DNA, 15 bp, Homo sapiens
aaatacttgaaaaga

SEQ ID NO: 1601096 - DNA, 15 bp, Homo sapiens
aatacttgaaaagaa

SEQ ID NO: 1601097 - DNA, 15 bp, Homo sapiens
atacttgaaaagaag

SEQ ID NO: 1601098 - DNA, 15 bp, Homo sapiens
tacttgaaaagaagc

SEQ ID NO: 1601099 - DNA, 15 bp, Homo sapiens
acttgaaaagaagca

SEQ ID NO: 1601100 - DNA, 15 bp, Homo sapiens
cttgaaaagaagcaa

SEQ ID NO: 1601101 - DNA, 15 bp, Homo sapiens
ttgaaaagaagcaaa

SEQ ID NO: 1601102 - DNA, 15 bp, Homo sapiens
tgaaaagaagcaaaa

SEQ ID NO: 1601103 - DNA, 15 bp, Homo sapiens
gaaaagaagcaaaac

SEQ ID NO: 1601104 - DNA, 15 bp, Homo sapiens
aaaagaagcaaaaca

SEQ ID NO: 1601105 - DNA, 15 bp, Homo sapiens
aaagaagcaaaacat

SEQ ID NO: 1601106 - DNA, 15 bp, Homo sapiens
aagaagcaaaacatt

SEQ ID NO: 1601107 - DNA, 15 bp, Homo sapiens
agaagcaaaacattt

SEQ ID NO: 1601108 - DNA, 15 bp, Homo sapiens
gaagcaaaacatttt

SEQ ID NO: 1601109 - DNA, 15 bp, Homo sapiens
aagcaaaacattttt

SEQ ID NO: 1601110 - DNA, 15 bp, Homo sapiens
agcaaaacatttttc

SEQ ID NO: 1601111 - DNA, 15 bp, Homo sapiens
gcaaaacatttttca

SEQ ID NO: 1601112 - DNA, 15 bp, Homo sapiens
caaaacatttttcat

SEQ ID NO: 1601113 - DNA, 15 bp, Homo sapiens
aaaacatttttcatg

SEQ ID NO: 1601114 - DNA, 15 bp, Homo sapiens
aaacatttttcatgt

SEQ ID NO: 1601115 - DNA, 15 bp, Homo sapiens
aacatttttcatgtt

SEQ ID NO: 1601116 - DNA, 15 bp, Homo sapiens
acatttttcatgtta

SEQ ID NO: 1601117 - DNA, 15 bp, Homo sapiens
catttttcatgttaa

SEQ ID NO: 1601118 - DNA, 15 bp, Homo sapiens
atttttcatgttaag

SEQ ID NO: 1601119 - DNA, 15 bp, Homo sapiens
tttttcatgttaagc

SEQ ID NO: 1601120 - DNA, 15 bp, Homo sapiens
ttttcatgttaagca

SEQ ID NO: 1601121 - DNA, 15 bp, Homo sapiens
tttcatgttaagcaa

SEQ ID NO: 1601122 - DNA, 15 bp, Homo sapiens
ttcatgttaagcaaa

SEQ ID NO: 1601123 - DNA, 15 bp, Homo sapiens
tcatgttaagcaaaa

SEQ ID NO: 1601124 - DNA, 15 bp, Homo sapiens
catgttaagcaaaaa

SEQ ID NO: 1601125 - DNA, 15 bp, Homo sapiens
atgttaagcaaaaaa

SEQ ID NO: 1601126 - DNA, 15 bp, Homo sapiens
tgttaagcaaaaaaa

SEQ ID NO: 1601127 - DNA, 15 bp, Homo sapiens
gttaagcaaaaaaaa

SEQ ID NO: 1601128 - DNA, 15 bp, Homo sapiens
ttaagcaaaaaaaaa

SEQ ID NO: 1601129 - DNA, 15 bp, Homo sapiens
taagcaaaaaaaaaa

SEQ ID NO: 1601130 - DNA, 15 bp, Homo sapiens
aagcaaaaaaaaaaa

SEQ ID NO: 1601131 - DNA, 15 bp, Homo sapiens
agcaaaaaaaaaaaa

SEQ ID NO: 1601132 - DNA, 15 bp, Homo sapiens
aaaaaaaaaacttat

SEQ ID NO: 1601133 - DNA, 15 bp, Homo sapiens
aaaaaaaaacttatt

SEQ ID NO: 1601134 - DNA, 15 bp, Homo sapiens
aaaaaaaacttatta

SEQ ID NO: 1601135 - DNA, 15 bp, Homo sapiens
aaaaaaacttattaa

SEQ ID NO: 1601136 - DNA, 15 bp, Homo sapiens
aaaaaacttattaag

SEQ ID NO: 1601137 - DNA, 15 bp, Homo sapiens
aaaaacttattaagg

SEQ ID NO: 1601138 - DNA, 15 bp, Homo sapiens
aaaacttattaagga

SEQ ID NO: 1601139 - DNA, 15 bp, Homo sapiens
aaacttattaaggat

SEQ ID NO: 1601140 - DNA, 15 bp, Homo sapiens
aacttattaaggata

SEQ ID NO: 1601141 - DNA, 15 bp, Homo sapiens
acttattaaggatag

SEQ ID NO: 1601142 - DNA, 15 bp, Homo sapiens
cttattaaggatagc

SEQ ID NO: 1601143 - DNA, 15 bp, Homo sapiens
ttattaaggatagct

SEQ ID NO: 1601144 - DNA, 15 bp, Homo sapiens
tattaaggatagcta

SEQ ID NO: 1601145 - DNA, 15 bp, Homo sapiens
attaaggatagctaa

SEQ ID NO: 1601146 - DNA, 15 bp, Homo sapiens
ttaaggatagctaac

SEQ ID NO: 1601147 - DNA, 15 bp, Homo sapiens
taaggatagctaaca

SEQ ID NO: 1601148 - DNA, 15 bp, Homo sapiens
aaggatagctaacat

SEQ ID NO: 1601149 - DNA, 15 bp, Homo sapiens
aggatagctaacatg

SEQ ID NO: 1601150 - DNA, 15 bp, Homo sapiens
ggatagctaacatgt

SEQ ID NO: 1601151 - DNA, 15 bp, Homo sapiens
gatagctaacatgta

SEQ ID NO: 1601152 - DNA, 15 bp, Homo sapiens
atagctaacatgtat

SEQ ID NO: 1601153 - DNA, 15 bp, Homo sapiens
tagctaacatgtatt

SEQ ID NO: 1601154 - DNA, 15 bp, Homo sapiens
agctaacatgtattg

SEQ ID NO: 1601155 - DNA, 15 bp, Homo sapiens
gctaacatgtattga

SEQ ID NO: 1601156 - DNA, 15 bp, Homo sapiens
ctaacatgtattgaa

SEQ ID NO: 1601157 - DNA, 15 bp, Homo sapiens
taacatgtattgaat

SEQ ID NO: 1601158 - DNA, 15 bp, Homo sapiens
aacatgtattgaatt

SEQ ID NO: 1601159 - DNA, 15 bp, Homo sapiens
acatgtattgaattc

SEQ ID NO: 1601160 - DNA, 15 bp, Homo sapiens
catgtattgaattct

SEQ ID NO: 1601161 - DNA, 15 bp, Homo sapiens
atgtattgaattcta

SEQ ID NO: 1601162 - DNA, 15 bp, Homo sapiens
tgtattgaattctat

SEQ ID NO: 1601163 - DNA, 15 bp, Homo sapiens
gtattgaattctata

SEQ ID NO: 1601164 - DNA, 15 bp, Homo sapiens
tattgaattctatat

SEQ ID NO: 1601165 - DNA, 15 bp, Homo sapiens
attgaattctatatg

SEQ ID NO: 1601166 - DNA, 15 bp, Homo sapiens
ttgaattctatatgc

SEQ ID NO: 1601167 - DNA, 15 bp, Homo sapiens
tgaattctatatgca

SEQ ID NO: 1601168 - DNA, 15 bp, Homo sapiens
gaattctatatgcaa

SEQ ID NO: 1601169 - DNA, 15 bp, Homo sapiens
aattctatatgcaat

SEQ ID NO: 1601170 - DNA, 15 bp, Homo sapiens
attctatatgcaatg

SEQ ID NO: 1601171 - DNA, 15 bp, Homo sapiens
ttctatatgcaatgg

SEQ ID NO: 1601172 - DNA, 15 bp, Homo sapiens
tctatatgcaatgga

SEQ ID NO: 1601173 - DNA, 15 bp, Homo sapiens
ctatatgcaatggaa

SEQ ID NO: 1601174 - DNA, 15 bp, Homo sapiens
tatatgcaatggaat

SEQ ID NO: 1601175 - DNA, 15 bp, Homo sapiens
atatgcaatggaatg

SEQ ID NO: 1601176 - DNA, 15 bp, Homo sapiens
tatgcaatggaatga

SEQ ID NO: 1601177 - DNA, 15 bp, Homo sapiens
atgcaatggaatgat

SEQ ID NO: 1601178 - DNA, 15 bp, Homo sapiens
tgcaatggaatgata

SEQ ID NO: 1601179 - DNA, 15 bp, Homo sapiens
gcaatggaatgatac

SEQ ID NO: 1601180 - DNA, 15 bp, Homo sapiens
caatggaatgatact

SEQ ID NO: 1601181 - DNA, 15 bp, Homo sapiens
aatggaatgatactt

SEQ ID NO: 1601182 - DNA, 15 bp, Homo sapiens
atggaatgatactta

SEQ ID NO: 1601183 - DNA, 15 bp, Homo sapiens
tggaatgatacttag

SEQ ID NO: 1601184 - DNA, 15 bp, Homo sapiens
ggaatgatacttagc

SEQ ID NO: 1601185 - DNA, 15 bp, Homo sapiens
gaatgatacttagcg

SEQ ID NO: 1601186 - DNA, 15 bp, Homo sapiens
aatgatacttagcgc

SEQ ID NO: 1601187 - DNA, 15 bp, Homo sapiens
atgatacttagcgcc

SEQ ID NO: 1601188 - DNA, 15 bp, Homo sapiens
tgatacttagcgcct

SEQ ID NO: 1601189 - DNA, 15 bp, Homo sapiens
gatacttagcgcctt

SEQ ID NO: 1601190 - DNA, 15 bp, Homo sapiens
atacttagcgccttt

SEQ ID NO: 1601191 - DNA, 15 bp, Homo sapiens
tacttagcgcctttg

SEQ ID NO: 1601192 - DNA, 15 bp, Homo sapiens
acttagcgcctttga

SEQ ID NO: 1601193 - DNA, 15 bp, Homo sapiens
cttagcgcctttgaa

SEQ ID NO: 1601194 - DNA, 15 bp, Homo sapiens
ttagcgcctttgaat

SEQ ID NO: 1601195 - DNA, 15 bp, Homo sapiens
tagcgcctttgaatc

SEQ ID NO: 1601196 - DNA, 15 bp, Homo sapiens
agcgcctttgaatcc

SEQ ID NO: 1601197 - DNA, 15 bp, Homo sapiens
gcgcctttgaatcct

SEQ ID NO: 1601198 - DNA, 15 bp, Homo sapiens
cgcctttgaatcctt

SEQ ID NO: 1601199 - DNA, 15 bp, Homo sapiens
gcctttgaatcctta

SEQ ID NO: 1601200 - DNA, 15 bp, Homo sapiens
cctttgaatccttat

SEQ ID NO: 1601201 - DNA, 15 bp, Homo sapiens
ctttgaatccttatg

SEQ ID NO: 1601202 - DNA, 15 bp, Homo sapiens
tttgaatccttatga

SEQ ID NO: 1601203 - DNA, 15 bp, Homo sapiens
ttgaatccttatgat

SEQ ID NO: 1601204 - DNA, 15 bp, Homo sapiens
tgaatccttatgata

SEQ ID NO: 1601205 - DNA, 15 bp, Homo sapiens
gaatccttatgataa

SEQ ID NO: 1601206 - DNA, 15 bp, Homo sapiens
aatccttatgataac

SEQ ID NO: 1601207 - DNA, 15 bp, Homo sapiens
atccttatgataacc

SEQ ID NO: 1601208 - DNA, 15 bp, Homo sapiens
tccttatgataaccc

SEQ ID NO: 1601209 - DNA, 15 bp, Homo sapiens
ccttatgataaccct

SEQ ID NO: 1601210 - DNA, 15 bp, Homo sapiens
cttatgataacccta

SEQ ID NO: 1601211 - DNA, 15 bp, Homo sapiens
ttatgataaccctat

SEQ ID NO: 1601212 - DNA, 15 bp, Homo sapiens
tatgataaccctata

SEQ ID NO: 1601213 - DNA, 15 bp, Homo sapiens
atgataaccctataa

SEQ ID NO: 1601214 - DNA, 15 bp, Homo sapiens
tgataaccctataag

SEQ ID NO: 1601215 - DNA, 15 bp, Homo sapiens
gataaccctataagg

SEQ ID NO: 1601216 - DNA, 15 bp, Homo sapiens
ataaccctataaggt

SEQ ID NO: 1601217 - DNA, 15 bp, Homo sapiens
taaccctataaggta

SEQ ID NO: 1601218 - DNA, 15 bp, Homo sapiens
aaccctataaggtag

SEQ ID NO: 1601219 - DNA, 15 bp, Homo sapiens
accctataaggtagg

SEQ ID NO: 1601220 - DNA, 15 bp, Homo sapiens
ccctataaggtaggt

SEQ ID NO: 1601221 - DNA, 15 bp, Homo sapiens
cctataaggtaggtt

SEQ ID NO: 1601222 - DNA, 15 bp, Homo sapiens
ctataaggtaggttg

SEQ ID NO: 1601223 - DNA, 15 bp, Homo sapiens
tataaggtaggttgt

SEQ ID NO: 1601224 - DNA, 15 bp, Homo sapiens
ataaggtaggttgtt

SEQ ID NO: 1601225 - DNA, 15 bp, Homo sapiens
taaggtaggttgttt

SEQ ID NO: 1601226 - DNA, 15 bp, Homo sapiens
aaggtaggttgtttg

SEQ ID NO: 1601227 - DNA, 15 bp, Homo sapiens
aggtaggttgtttgg

SEQ ID NO: 1601228 - DNA, 15 bp, Homo sapiens
ggtaggttgtttggg

SEQ ID NO: 1601229 - DNA, 15 bp, Homo sapiens
gtaggttgtttgggt

SEQ ID NO: 1601230 - DNA, 15 bp, Homo sapiens
taggttgtttgggtt

SEQ ID NO: 1601231 - DNA, 15 bp, Homo sapiens
aggttgtttgggttt

SEQ ID NO: 1601232 - DNA, 15 bp, Homo sapiens
ggttgtttgggtttt

SEQ ID NO: 1601233 - DNA, 15 bp, Homo sapiens
gttgtttgggttttt

SEQ ID NO: 1601234 - DNA, 15 bp, Homo sapiens
ttgtttgggtttttt

SEQ ID NO: 1601235 - DNA, 15 bp, Homo sapiens
tgtttgggttttttt

SEQ ID NO: 1601236 - DNA, 15 bp, Homo sapiens
gtttgggttttttta

SEQ ID NO: 1601237 - DNA, 15 bp, Homo sapiens
tttgggtttttttaa

SEQ ID NO: 1601238 - DNA, 15 bp, Homo sapiens
ttgggtttttttaat

SEQ ID NO: 1601239 - DNA, 15 bp, Homo sapiens
tgggtttttttaatt

SEQ ID NO: 1601240 - DNA, 15 bp, Homo sapiens
gggtttttttaattg

SEQ ID NO: 1601241 - DNA, 15 bp, Homo sapiens
ggtttttttaattgt

SEQ ID NO: 1601242 - DNA, 15 bp, Homo sapiens
gtttttttaattgtc

SEQ ID NO: 1601243 - DNA, 15 bp, Homo sapiens
tttttttaattgtcc

SEQ ID NO: 1601244 - DNA, 15 bp, Homo sapiens
ttttttaattgtccc

SEQ ID NO: 1601245 - DNA, 15 bp, Homo sapiens
tttttaattgtccca

SEQ ID NO: 1601246 - DNA, 15 bp, Homo sapiens
ttttaattgtcccaa

SEQ ID NO: 1601247 - DNA, 15 bp, Homo sapiens
tttaattgtcccaac

SEQ ID NO: 1601248 - DNA, 15 bp, Homo sapiens
ttaattgtcccaact

SEQ ID NO: 1601249 - DNA, 15 bp, Homo sapiens
taattgtcccaactt

SEQ ID NO: 1601250 - DNA, 15 bp, Homo sapiens
aattgtcccaacttt

SEQ ID NO: 1601251 - DNA, 15 bp, Homo sapiens
attgtcccaacttta

SEQ ID NO: 1601252 - DNA, 15 bp, Homo sapiens
ttgtcccaactttac

SEQ ID NO: 1601253 - DNA, 15 bp, Homo sapiens
tgtcccaactttaca

SEQ ID NO: 1601254 - DNA, 15 bp, Homo sapiens
gtcccaactttacag

SEQ ID NO: 1601255 - DNA, 15 bp, Homo sapiens
tcccaactttacaga

SEQ ID NO: 1601256 - DNA, 15 bp, Homo sapiens
cccaactttacagat

SEQ ID NO: 1601257 - DNA, 15 bp, Homo sapiens
ccaactttacagatg

SEQ ID NO: 1601258 - DNA, 15 bp, Homo sapiens
caactttacagatga

SEQ ID NO: 1601259 - DNA, 15 bp, Homo sapiens
aactttacagatgaa

SEQ ID NO: 1601260 - DNA, 15 bp, Homo sapiens
actttacagatgaag

SEQ ID NO: 1601261 - DNA, 15 bp, Homo sapiens
ctttacagatgaaga

SEQ ID NO: 1601262 - DNA, 15 bp, Homo sapiens
ttacagatgaagaag

SEQ ID NO: 1601263 - DNA, 15 bp, Homo sapiens
tacagatgaagaagt

SEQ ID NO: 1601264 - DNA, 15 bp, Homo sapiens
acagatgaagaagtg

SEQ ID NO: 1601265 - DNA, 15 bp, Homo sapiens
cagatgaagaagtgc

SEQ ID NO: 1601266 - DNA, 15 bp, Homo sapiens
agatgaagaagtgca

SEQ ID NO: 1601267 - DNA, 15 bp, Homo sapiens
gatgaagaagtgcag

SEQ ID NO: 1601268 - DNA, 15 bp, Homo sapiens
atgaagaagtgcagg

SEQ ID NO: 1601269 - DNA, 15 bp, Homo sapiens
tgaagaagtgcaggt

SEQ ID NO: 1601270 - DNA, 15 bp, Homo sapiens
gaagaagtgcaggtc

SEQ ID NO: 1601271 - DNA, 15 bp, Homo sapiens
aagaagtgcaggtcc

SEQ ID NO: 1601272 - DNA, 15 bp, Homo sapiens
agaagtgcaggtcca

SEQ ID NO: 1601273 - DNA, 15 bp, Homo sapiens
gaagtgcaggtccag

SEQ ID NO: 1601274 - DNA, 15 bp, Homo sapiens
aagtgcaggtccaga

SEQ ID NO: 1601275 - DNA, 15 bp, Homo sapiens
agtgcaggtccagag

SEQ ID NO: 1601276 - DNA, 15 bp, Homo sapiens
gtgcaggtccagaga

SEQ ID NO: 1601277 - DNA, 15 bp, Homo sapiens
tgcaggtccagagag

SEQ ID NO: 1601278 - DNA, 15 bp, Homo sapiens
gcaggtccagagagg

SEQ ID NO: 1601279 - DNA, 15 bp, Homo sapiens
caggtccagagaggt

SEQ ID NO: 1601280 - DNA, 15 bp, Homo sapiens
aggtccagagaggtc

SEQ ID NO: 1601281 - DNA, 15 bp, Homo sapiens
ggtccagagaggtca

SEQ ID NO: 1601282 - DNA, 15 bp, Homo sapiens
gtccagagaggtcac

SEQ ID NO: 1601283 - DNA, 15 bp, Homo sapiens
tccagagaggtcaca

SEQ ID NO: 1601284 - DNA, 15 bp, Homo sapiens
ccagagaggtcacat

SEQ ID NO: 1601285 - DNA, 15 bp, Homo sapiens
cagagaggtcacata

SEQ ID NO: 1601286 - DNA, 15 bp, Homo sapiens
agagaggtcacataa

SEQ ID NO: 1601287 - DNA, 15 bp, Homo sapiens
gagaggtcacataat

SEQ ID NO: 1601288 - DNA, 15 bp, Homo sapiens
agaggtcacataatt

SEQ ID NO: 1601289 - DNA, 15 bp, Homo sapiens
gaggtcacataattt

SEQ ID NO: 1601290 - DNA, 15 bp, Homo sapiens
aggtcacataatttg

SEQ ID NO: 1601291 - DNA, 15 bp, Homo sapiens
ggtcacataatttgc

SEQ ID NO: 1601292 - DNA, 15 bp, Homo sapiens
gtcacataatttgcc

SEQ ID NO: 1601293 - DNA, 15 bp, Homo sapiens
tcacataatttgccc

SEQ ID NO: 1601294 - DNA, 15 bp, Homo sapiens
cacataatttgccca

SEQ ID NO: 1601295 - DNA, 15 bp, Homo sapiens
acataatttgcccag

SEQ ID NO: 1601296 - DNA, 15 bp, Homo sapiens
cataatttgcccagg

SEQ ID NO: 1601297 - DNA, 15 bp, Homo sapiens
ataatttgcccagga

SEQ ID NO: 1601298 - DNA, 15 bp, Homo sapiens
taatttgcccaggat

SEQ ID NO: 1601299 - DNA, 15 bp, Homo sapiens
aatttgcccaggatc

SEQ ID NO: 1601300 - DNA, 15 bp, Homo sapiens
atttgcccaggatca

SEQ ID NO: 1601301 - DNA, 15 bp, Homo sapiens
tttgcccaggatcac

SEQ ID NO: 1601302 - DNA, 15 bp, Homo sapiens
ttgcccaggatcaca

SEQ ID NO: 1601303 - DNA, 15 bp, Homo sapiens
tgcccaggatcacac

SEQ ID NO: 1601304 - DNA, 15 bp, Homo sapiens
gcccaggatcacaca

SEQ ID NO: 1601305 - DNA, 15 bp, Homo sapiens
cccaggatcacacag

SEQ ID NO: 1601306 - DNA, 15 bp, Homo sapiens
ccaggatcacacagc

SEQ ID NO: 1601307 - DNA, 15 bp, Homo sapiens
caggatcacacagct

SEQ ID NO: 1601308 - DNA, 15 bp, Homo sapiens
aggatcacacagcta

SEQ ID NO: 1601309 - DNA, 15 bp, Homo sapiens
ggatcacacagctag

SEQ ID NO: 1601310 - DNA, 15 bp, Homo sapiens
gatcacacagctagt

SEQ ID NO: 1601311 - DNA, 15 bp, Homo sapiens
atcacacagctagta

SEQ ID NO: 1601312 - DNA, 15 bp, Homo sapiens
tcacacagctagtaa

SEQ ID NO: 1601313 - DNA, 15 bp, Homo sapiens
cacacagctagtaag

SEQ ID NO: 1601314 - DNA, 15 bp, Homo sapiens
acacagctagtaagt

SEQ ID NO: 1601315 - DNA, 15 bp, Homo sapiens
cacagctagtaagta

SEQ ID NO: 1601316 - DNA, 15 bp, Homo sapiens
acagctagtaagtag

SEQ ID NO: 1601317 - DNA, 15 bp, Homo sapiens
cagctagtaagtagc

SEQ ID NO: 1601318 - DNA, 15 bp, Homo sapiens
agctagtaagtagca

SEQ ID NO: 1601319 - DNA, 15 bp, Homo sapiens
gctagtaagtagcag

SEQ ID NO: 1601320 - DNA, 15 bp, Homo sapiens
ctagtaagtagcaga

SEQ ID NO: 1601321 - DNA, 15 bp, Homo sapiens
tagtaagtagcagat

SEQ ID NO: 1601322 - DNA, 15 bp, Homo sapiens
agtaagtagcagatg

SEQ ID NO: 1601323 - DNA, 15 bp, Homo sapiens
gtaagtagcagatga

SEQ ID NO: 1601324 - DNA, 15 bp, Homo sapiens
taagtagcagatgag

SEQ ID NO: 1601325 - DNA, 15 bp, Homo sapiens
aagtagcagatgagg

SEQ ID NO: 1601326 - DNA, 15 bp, Homo sapiens
agtagcagatgagga

SEQ ID NO: 1601327 - DNA, 15 bp, Homo sapiens
gtagcagatgaggaa

SEQ ID NO: 1601328 - DNA, 15 bp, Homo sapiens
tagcagatgaggaat

SEQ ID NO: 1601329 - DNA, 15 bp, Homo sapiens
agcagatgaggaatt

SEQ ID NO: 1601330 - DNA, 15 bp, Homo sapiens
gcagatgaggaattt

SEQ ID NO: 1601331 - DNA, 15 bp, Homo sapiens
cagatgaggaatttg

SEQ ID NO: 1601332 - DNA, 15 bp, Homo sapiens
agatgaggaatttga

SEQ ID NO: 1601333 - DNA, 15 bp, Homo sapiens
gatgaggaatttgaa

SEQ ID NO: 1601334 - DNA, 15 bp, Homo sapiens
atgaggaatttgaac

SEQ ID NO: 1601335 - DNA, 15 bp, Homo sapiens
tgaggaatttgaacc

SEQ ID NO: 1601336 - DNA, 15 bp, Homo sapiens
gaggaatttgaaccc

SEQ ID NO: 1601337 - DNA, 15 bp, Homo sapiens
aggaatttgaaccca

SEQ ID NO: 1601338 - DNA, 15 bp, Homo sapiens
ggaatttgaacccag

SEQ ID NO: 1601339 - DNA, 15 bp, Homo sapiens
gaatttgaacccagg

SEQ ID NO: 1601340 - DNA, 15 bp, Homo sapiens
aatttgaacccaggc

SEQ ID NO: 1601341 - DNA, 15 bp, Homo sapiens
atttgaacccaggca

SEQ ID NO: 1601342 - DNA, 15 bp, Homo sapiens
tttgaacccaggcag

SEQ ID NO: 1601343 - DNA, 15 bp, Homo sapiens
ttgaacccaggcagt

SEQ ID NO: 1601344 - DNA, 15 bp, Homo sapiens
tgaacccaggcagtt

SEQ ID NO: 1601345 - DNA, 15 bp, Homo sapiens
gaacccaggcagttg

SEQ ID NO: 1601346 - DNA, 15 bp, Homo sapiens
aacccaggcagttgt

SEQ ID NO: 1601347 - DNA, 15 bp, Homo sapiens
acccaggcagttgta

SEQ ID NO: 1601348 - DNA, 15 bp, Homo sapiens
cccaggcagttgtat

SEQ ID NO: 1601349 - DNA, 15 bp, Homo sapiens
ccaggcagttgtatt

SEQ ID NO: 1601350 - DNA, 15 bp, Homo sapiens
caggcagttgtattc

SEQ ID NO: 1601351 - DNA, 15 bp, Homo sapiens
aggcagttgtattcc

SEQ ID NO: 1601352 - DNA, 15 bp, Homo sapiens
ggcagttgtattcca

SEQ ID NO: 1601353 - DNA, 15 bp, Homo sapiens
gcagttgtattccac

SEQ ID NO: 1601354 - DNA, 15 bp, Homo sapiens
cagttgtattccacc

SEQ ID NO: 1601355 - DNA, 15 bp, Homo sapiens
agttgtattccacca

SEQ ID NO: 1601356 - DNA, 15 bp, Homo sapiens
gttgtattccaccat

SEQ ID NO: 1601357 - DNA, 15 bp, Homo sapiens
ttgtattccaccatc

SEQ ID NO: 1601358 - DNA, 15 bp, Homo sapiens
tgtattccaccatct

SEQ ID NO: 1601359 - DNA, 15 bp, Homo sapiens
gtattccaccatctg

SEQ ID NO: 1601360 - DNA, 15 bp, Homo sapiens
tattccaccatctgc

SEQ ID NO: 1601361 - DNA, 15 bp, Homo sapiens
attccaccatctgcc

SEQ ID NO: 1601362 - DNA, 15 bp, Homo sapiens
ttccaccatctgccc

SEQ ID NO: 1601363 - DNA, 15 bp, Homo sapiens
tccaccatctgccct

SEQ ID NO: 1601364 - DNA, 15 bp, Homo sapiens
ccaccatctgccctc

SEQ ID NO: 1601365 - DNA, 15 bp, Homo sapiens
caccatctgccctct

SEQ ID NO: 1601366 - DNA, 15 bp, Homo sapiens
accatctgccctctt

SEQ ID NO: 1601367 - DNA, 15 bp, Homo sapiens
ccatctgccctctta

SEQ ID NO: 1601368 - DNA, 15 bp, Homo sapiens
catctgccctcttag

SEQ ID NO: 1601369 - DNA, 15 bp, Homo sapiens
atctgccctcttagt

SEQ ID NO: 1601370 - DNA, 15 bp, Homo sapiens
tctgccctcttagtt

SEQ ID NO: 1601371 - DNA, 15 bp, Homo sapiens
ctgccctcttagttc

SEQ ID NO: 1601372 - DNA, 15 bp, Homo sapiens
tgccctcttagttca

SEQ ID NO: 1601373 - DNA, 15 bp, Homo sapiens
gccctcttagttcat

SEQ ID NO: 1601374 - DNA, 15 bp, Homo sapiens
ccctcttagttcatt

SEQ ID NO: 1601375 - DNA, 15 bp, Homo sapiens
cctcttagttcattg

SEQ ID NO: 1601376 - DNA, 15 bp, Homo sapiens
ctcttagttcattgc

SEQ ID NO: 1601377 - DNA, 15 bp, Homo sapiens
tcttagttcattgcc

SEQ ID NO: 1601378 - DNA, 15 bp, Homo sapiens
cttagttcattgcca

SEQ ID NO: 1601379 - DNA, 15 bp, Homo sapiens
ttagttcattgccac

SEQ ID NO: 1601380 - DNA, 15 bp, Homo sapiens
tagttcattgccact

SEQ ID NO: 1601381 - DNA, 15 bp, Homo sapiens
agttcattgccactt

SEQ ID NO: 1601382 - DNA, 15 bp, Homo sapiens
gttcattgccactta

SEQ ID NO: 1601383 - DNA, 15 bp, Homo sapiens
ttcattgccacttaa

SEQ ID NO: 1601384 - DNA, 15 bp, Homo sapiens
tcattgccacttaac

SEQ ID NO: 1601385 - DNA, 15 bp, Homo sapiens
cattgccacttaacc

SEQ ID NO: 1601386 - DNA, 15 bp, Homo sapiens
attgccacttaacct

SEQ ID NO: 1601387 - DNA, 15 bp, Homo sapiens
ttgccacttaaccta

SEQ ID NO: 1601388 - DNA, 15 bp, Homo sapiens
tgccacttaacctat

SEQ ID NO: 1601389 - DNA, 15 bp, Homo sapiens
gccacttaacctata

SEQ ID NO: 1601390 - DNA, 15 bp, Homo sapiens
ccacttaacctataa

SEQ ID NO: 1601391 - DNA, 15 bp, Homo sapiens
cacttaacctataat

SEQ ID NO: 1601392 - DNA, 15 bp, Homo sapiens
acttaacctataatg

SEQ ID NO: 1601393 - DNA, 15 bp, Homo sapiens
cttaacctataatgc

SEQ ID NO: 1601394 - DNA, 15 bp, Homo sapiens
ttaacctataatgcc

SEQ ID NO: 1601395 - DNA, 15 bp, Homo sapiens
taacctataatgccc

SEQ ID NO: 1601396 - DNA, 15 bp, Homo sapiens
aacctataatgccca

SEQ ID NO: 1601397 - DNA, 15 bp, Homo sapiens
acctataatgcccag

SEQ ID NO: 1601398 - DNA, 15 bp, Homo sapiens
cctataatgcccagc

SEQ ID NO: 1601399 - DNA, 15 bp, Homo sapiens
ctataatgcccagct

SEQ ID NO: 1601400 - DNA, 15 bp, Homo sapiens
tataatgcccagctc

SEQ ID NO: 1601401 - DNA, 15 bp, Homo sapiens
ataatgcccagctct

SEQ ID NO: 1601402 - DNA, 15 bp, Homo sapiens
taatgcccagctctt

SEQ ID NO: 1601403 - DNA, 15 bp, Homo sapiens
aatgcccagctcttg

SEQ ID NO: 1601404 - DNA, 15 bp, Homo sapiens
atgcccagctcttgt

SEQ ID NO: 1601405 - DNA, 15 bp, Homo sapiens
tgcccagctcttgtg

SEQ ID NO: 1601406 - DNA, 15 bp, Homo sapiens
gcccagctcttgtgt

SEQ ID NO: 1601407 - DNA, 15 bp, Homo sapiens
cccagctcttgtgta

SEQ ID NO: 1601408 - DNA, 15 bp, Homo sapiens
ccagctcttgtgtag

SEQ ID NO: 1601409 - DNA, 15 bp, Homo sapiens
cagctcttgtgtaga

SEQ ID NO: 1601410 - DNA, 15 bp, Homo sapiens
agctcttgtgtagaa

SEQ ID NO: 1601411 - DNA, 15 bp, Homo sapiens
gctcttgtgtagaaa

SEQ ID NO: 1601412 - DNA, 15 bp, Homo sapiens
ctcttgtgtagaaat

SEQ ID NO: 1601413 - DNA, 15 bp, Homo sapiens
tcttgtgtagaaatt

SEQ ID NO: 1601414 - DNA, 15 bp, Homo sapiens
cttgtgtagaaatta

SEQ ID NO: 1601415 - DNA, 15 bp, Homo sapiens
ttgtgtagaaattaa

SEQ ID NO: 1601416 - DNA, 15 bp, Homo sapiens
tgtgtagaaattaat

SEQ ID NO: 1601417 - DNA, 15 bp, Homo sapiens
gtgtagaaattaata

SEQ ID NO: 1601418 - DNA, 15 bp, Homo sapiens
tgtagaaattaatac

SEQ ID NO: 1601419 - DNA, 15 bp, Homo sapiens
gtagaaattaataca

SEQ ID NO: 1601420 - DNA, 15 bp, Homo sapiens
tagaaattaatacac

SEQ ID NO: 1601421 - DNA, 15 bp, Homo sapiens
agaaattaatacact

SEQ ID NO: 1601422 - DNA, 15 bp, Homo sapiens
gaaattaatacactg

SEQ ID NO: 1601423 - DNA, 15 bp, Homo sapiens
aaattaatacactga

SEQ ID NO: 1601424 - DNA, 15 bp, Homo sapiens
aattaatacactgat

SEQ ID NO: 1601425 - DNA, 15 bp, Homo sapiens
attaatacactgata

SEQ ID NO: 1601426 - DNA, 15 bp, Homo sapiens
ttaatacactgataa

SEQ ID NO: 1601427 - DNA, 15 bp, Homo sapiens
taatacactgataac

SEQ ID NO: 1601428 - DNA, 15 bp, Homo sapiens
aatacactgataaca

SEQ ID NO: 1601429 - DNA, 15 bp, Homo sapiens
atacactgataacat

SEQ ID NO: 1601430 - DNA, 15 bp, Homo sapiens
tacactgataacata

SEQ ID NO: 1601431 - DNA, 15 bp, Homo sapiens
acactgataacatag

SEQ ID NO: 1601432 - DNA, 15 bp, Homo sapiens
cactgataacataga

SEQ ID NO: 1601433 - DNA, 15 bp, Homo sapiens
actgataacatagag

SEQ ID NO: 1601434 - DNA, 15 bp, Homo sapiens
ctgataacatagagg

SEQ ID NO: 1601435 - DNA, 15 bp, Homo sapiens
tgataacatagagga

SEQ ID NO: 1601436 - DNA, 15 bp, Homo sapiens
gataacatagaggaa

SEQ ID NO: 1601437 - DNA, 15 bp, Homo sapiens
ataacatagaggaaa

SEQ ID NO: 1601438 - DNA, 15 bp, Homo sapiens
taacatagaggaaaa

SEQ ID NO: 1601439 - DNA, 15 bp, Homo sapiens
aacatagaggaaaac

SEQ ID NO: 1601440 - DNA, 15 bp, Homo sapiens
acatagaggaaaaca

SEQ ID NO: 1601441 - DNA, 15 bp, Homo sapiens
catagaggaaaacat

SEQ ID NO: 1601442 - DNA, 15 bp, Homo sapiens
atagaggaaaacatt

SEQ ID NO: 1601443 - DNA, 15 bp, Homo sapiens
tagaggaaaacatta

SEQ ID NO: 1601444 - DNA, 15 bp, Homo sapiens
agaggaaaacattaa

SEQ ID NO: 1601445 - DNA, 15 bp, Homo sapiens
gaggaaaacattaag

SEQ ID NO: 1601446 - DNA, 15 bp, Homo sapiens
aggaaaacattaagc

SEQ ID NO: 1601447 - DNA, 15 bp, Homo sapiens
ggaaaacattaagct

SEQ ID NO: 1601448 - DNA, 15 bp, Homo sapiens
gaaaacattaagctc

SEQ ID NO: 1601449 - DNA, 15 bp, Homo sapiens
aaaacattaagctca

SEQ ID NO: 1601450 - DNA, 15 bp, Homo sapiens
aaacattaagctcat

SEQ ID NO: 1601451 - DNA, 15 bp, Homo sapiens
aacattaagctcatt

SEQ ID NO: 1601452 - DNA, 15 bp, Homo sapiens
acattaagctcattg

SEQ ID NO: 1601453 - DNA, 15 bp, Homo sapiens
cattaagctcattga

SEQ ID NO: 1601454 - DNA, 15 bp, Homo sapiens
attaagctcattgaa

SEQ ID NO: 1601455 - DNA, 15 bp, Homo sapiens
ttaagctcattgaat

SEQ ID NO: 1601456 - DNA, 15 bp, Homo sapiens
taagctcattgaatg

SEQ ID NO: 1601457 - DNA, 15 bp, Homo sapiens
aagctcattgaatgt

SEQ ID NO: 1601458 - DNA, 15 bp, Homo sapiens
agctcattgaatgta

SEQ ID NO: 1601459 - DNA, 15 bp, Homo sapiens
gctcattgaatgtaa

SEQ ID NO: 1601460 - DNA, 15 bp, Homo sapiens
ctcattgaatgtaat

SEQ ID NO: 1601461 - DNA, 15 bp, Homo sapiens
tcattgaatgtaata

SEQ ID NO: 1601462 - DNA, 15 bp, Homo sapiens
cattgaatgtaataa

SEQ ID NO: 1601463 - DNA, 15 bp, Homo sapiens
attgaatgtaataag

SEQ ID NO: 1601464 - DNA, 15 bp, Homo sapiens
ttgaatgtaataagt

SEQ ID NO: 1601465 - DNA, 15 bp, Homo sapiens
tgaatgtaataagtc

SEQ ID NO: 1601466 - DNA, 15 bp, Homo sapiens
gaatgtaataagtcc

SEQ ID NO: 1601467 - DNA, 15 bp, Homo sapiens
aatgtaataagtcca

SEQ ID NO: 1601468 - DNA, 15 bp, Homo sapiens
atgtaataagtccag

SEQ ID NO: 1601469 - DNA, 15 bp, Homo sapiens
tgtaataagtccaga

SEQ ID NO: 1601470 - DNA, 15 bp, Homo sapiens
gtaataagtccagat

SEQ ID NO: 1601471 - DNA, 15 bp, Homo sapiens
taataagtccagatg

SEQ ID NO: 1601472 - DNA, 15 bp, Homo sapiens
aataagtccagatga

SEQ ID NO: 1601473 - DNA, 15 bp, Homo sapiens
ataagtccagatgac

SEQ ID NO: 1601474 - DNA, 15 bp, Homo sapiens
taagtccagatgact

SEQ ID NO: 1601475 - DNA, 15 bp, Homo sapiens
aagtccagatgactt

SEQ ID NO: 1601476 - DNA, 15 bp, Homo sapiens
agtccagatgacttg

SEQ ID NO: 1601477 - DNA, 15 bp, Homo sapiens
gtccagatgacttgt

SEQ ID NO: 1601478 - DNA, 15 bp, Homo sapiens
tccagatgacttgta

SEQ ID NO: 1601479 - DNA, 15 bp, Homo sapiens
ccagatgacttgtac

SEQ ID NO: 1601480 - DNA, 15 bp, Homo sapiens
cagatgacttgtaca

SEQ ID NO: 1601481 - DNA, 15 bp, Homo sapiens
agatgacttgtacat

SEQ ID NO: 1601482 - DNA, 15 bp, Homo sapiens
gatgacttgtacatt

SEQ ID NO: 1601483 - DNA, 15 bp, Homo sapiens
atgacttgtacatta

SEQ ID NO: 1601484 - DNA, 15 bp, Homo sapiens
tgacttgtacattaa

SEQ ID NO: 1601485 - DNA, 15 bp, Homo sapiens
gacttgtacattaaa

SEQ ID NO: 1601486 - DNA, 15 bp, Homo sapiens
acttgtacattaaac

SEQ ID NO: 1601487 - DNA, 15 bp, Homo sapiens
cttgtacattaaaca

SEQ ID NO: 1601488 - DNA, 15 bp, Homo sapiens
ttgtacattaaacac

SEQ ID NO: 1601489 - DNA, 15 bp, Homo sapiens
tgtacattaaacaca

SEQ ID NO: 1601490 - DNA, 15 bp, Homo sapiens
gtacattaaacacag

SEQ ID NO: 1601491 - DNA, 15 bp, Homo sapiens
tacattaaacacagc

SEQ ID NO: 1601492 - DNA, 15 bp, Homo sapiens
acattaaacacagct

SEQ ID NO: 1601493 - DNA, 15 bp, Homo sapiens
cattaaacacagctt

SEQ ID NO: 1601494 - DNA, 15 bp, Homo sapiens
attaaacacagcttt

SEQ ID NO: 1601495 - DNA, 15 bp, Homo sapiens
ttaaacacagctttt

SEQ ID NO: 1601496 - DNA, 15 bp, Homo sapiens
taaacacagcttttt

SEQ ID NO: 1601497 - DNA, 15 bp, Homo sapiens
aaacacagctttttg

SEQ ID NO: 1601498 - DNA, 15 bp, Homo sapiens
aacacagctttttga

SEQ ID NO: 1601499 - DNA, 15 bp, Homo sapiens
acacagctttttgag

SEQ ID NO: 1601500 - DNA, 15 bp, Homo sapiens
cacagctttttgagg

SEQ ID NO: 1601501 - DNA, 15 bp, Homo sapiens
acagctttttgaggt

SEQ ID NO: 1601502 - DNA, 15 bp, Homo sapiens
cagctttttgaggtc

SEQ ID NO: 1601503 - DNA, 15 bp, Homo sapiens
agctttttgaggtca

SEQ ID NO: 1601504 - DNA, 15 bp, Homo sapiens
gctttttgaggtcac

SEQ ID NO: 1601505 - DNA, 15 bp, Homo sapiens
ctttttgaggtcaca

SEQ ID NO: 1601506 - DNA, 15 bp, Homo sapiens
tttttgaggtcacag

SEQ ID NO: 1601507 - DNA, 15 bp, Homo sapiens
ttttgaggtcacagc

SEQ ID NO: 1601508 - DNA, 15 bp, Homo sapiens
tttgaggtcacagct

SEQ ID NO: 1601509 - DNA, 15 bp, Homo sapiens
ttgaggtcacagctg

SEQ ID NO: 1601510 - DNA, 15 bp, Homo sapiens
tgaggtcacagctga

SEQ ID NO: 1601511 - DNA, 15 bp, Homo sapiens
gaggtcacagctgat

SEQ ID NO: 1601512 - DNA, 15 bp, Homo sapiens
aggtcacagctgatc

SEQ ID NO: 1601513 - DNA, 15 bp, Homo sapiens
ggtcacagctgatct

SEQ ID NO: 1601514 - DNA, 15 bp, Homo sapiens
gtcacagctgatctc

SEQ ID NO: 1601515 - DNA, 15 bp, Homo sapiens
tcacagctgatctct

SEQ ID NO: 1601516 - DNA, 15 bp, Homo sapiens
cacagctgatctcta

SEQ ID NO: 1601517 - DNA, 15 bp, Homo sapiens
acagctgatctctaa

SEQ ID NO: 1601518 - DNA, 15 bp, Homo sapiens
cagctgatctctaag

SEQ ID NO: 1601519 - DNA, 15 bp, Homo sapiens
agctgatctctaaga

SEQ ID NO: 1601520 - DNA, 15 bp, Homo sapiens
gctgatctctaagaa

SEQ ID NO: 1601521 - DNA, 15 bp, Homo sapiens
ctgatctctaagaat

SEQ ID NO: 1601522 - DNA, 15 bp, Homo sapiens
tgatctctaagaatg

SEQ ID NO: 1601523 - DNA, 15 bp, Homo sapiens
gatctctaagaatgt

SEQ ID NO: 1601524 - DNA, 15 bp, Homo sapiens
atctctaagaatgta

SEQ ID NO: 1601525 - DNA, 15 bp, Homo sapiens
tctctaagaatgtaa

SEQ ID NO: 1601526 - DNA, 15 bp, Homo sapiens
ctctaagaatgtaaa

SEQ ID NO: 1601527 - DNA, 15 bp, Homo sapiens
tctaagaatgtaaac

SEQ ID NO: 1601528 - DNA, 15 bp, Homo sapiens
ctaagaatgtaaact

SEQ ID NO: 1601529 - DNA, 15 bp, Homo sapiens
taagaatgtaaactg

SEQ ID NO: 1601530 - DNA, 15 bp, Homo sapiens
aagaatgtaaactga

SEQ ID NO: 1601531 - DNA, 15 bp, Homo sapiens
agaatgtaaactgat

SEQ ID NO: 1601532 - DNA, 15 bp, Homo sapiens
gaatgtaaactgatt

SEQ ID NO: 1601533 - DNA, 15 bp, Homo sapiens
aatgtaaactgattt

SEQ ID NO: 1601534 - DNA, 15 bp, Homo sapiens
atgtaaactgatttc

SEQ ID NO: 1601535 - DNA, 15 bp, Homo sapiens
tgtaaactgatttcc

SEQ ID NO: 1601536 - DNA, 15 bp, Homo sapiens
gtaaactgatttcct

SEQ ID NO: 1601537 - DNA, 15 bp, Homo sapiens
taaactgatttcctc

SEQ ID NO: 1601538 - DNA, 15 bp, Homo sapiens
aaactgatttcctct

SEQ ID NO: 1601539 - DNA, 15 bp, Homo sapiens
aactgatttcctctg

SEQ ID NO: 1601540 - DNA, 15 bp, Homo sapiens
actgatttcctctgg

SEQ ID NO: 1601541 - DNA, 15 bp, Homo sapiens
ctgatttcctctggc

SEQ ID NO: 1601542 - DNA, 15 bp, Homo sapiens
tgatttcctctggca

SEQ ID NO: 1601543 - DNA, 15 bp, Homo sapiens
gatttcctctggcac

SEQ ID NO: 1601544 - DNA, 15 bp, Homo sapiens
atttcctctggcact

SEQ ID NO: 1601545 - DNA, 15 bp, Homo sapiens
tttcctctggcacta

SEQ ID NO: 1601546 - DNA, 15 bp, Homo sapiens
ttcctctggcactaa

SEQ ID NO: 1601547 - DNA, 15 bp, Homo sapiens
tcctctggcactaaa

SEQ ID NO: 1601548 - DNA, 15 bp, Homo sapiens
cctctggcactaaaa

SEQ ID NO: 1601549 - DNA, 15 bp, Homo sapiens
ctctggcactaaaaa

SEQ ID NO: 1601550 - DNA, 15 bp, Homo sapiens
tctggcactaaaaag

SEQ ID NO: 1601551 - DNA, 15 bp, Homo sapiens
ctggcactaaaaagc

SEQ ID NO: 1601552 - DNA, 15 bp, Homo sapiens
tggcactaaaaagca

SEQ ID NO: 1601553 - DNA, 15 bp, Homo sapiens
ggcactaaaaagcat

SEQ ID NO: 1601554 - DNA, 15 bp, Homo sapiens
gcactaaaaagcatt

SEQ ID NO: 1601555 - DNA, 15 bp, Homo sapiens
cactaaaaagcattt

SEQ ID NO: 1601556 - DNA, 15 bp, Homo sapiens
actaaaaagcatttt

SEQ ID NO: 1601557 - DNA, 15 bp, Homo sapiens
ctaaaaagcattttc

SEQ ID NO: 1601558 - DNA, 15 bp, Homo sapiens
taaaaagcattttca

SEQ ID NO: 1601559 - DNA, 15 bp, Homo sapiens
aaaaagcattttcaa

SEQ ID NO: 1601560 - DNA, 15 bp, Homo sapiens
aaaagcattttcaaa

SEQ ID NO: 1601561 - DNA, 15 bp, Homo sapiens
aaagcattttcaaag

SEQ ID NO: 1601562 - DNA, 15 bp, Homo sapiens
aagcattttcaaaga

SEQ ID NO: 1601563 - DNA, 15 bp, Homo sapiens
agcattttcaaagac

SEQ ID NO: 1601564 - DNA, 15 bp, Homo sapiens
gcattttcaaagact

SEQ ID NO: 1601565 - DNA, 15 bp, Homo sapiens
cattttcaaagactg

SEQ ID NO: 1601566 - DNA, 15 bp, Homo sapiens
attttcaaagactgt

SEQ ID NO: 1601567 - DNA, 15 bp, Homo sapiens
ttttcaaagactgtt

SEQ ID NO: 1601568 - DNA, 15 bp, Homo sapiens
tttcaaagactgtta

SEQ ID NO: 1601569 - DNA, 15 bp, Homo sapiens
ttcaaagactgttaa

SEQ ID NO: 1601570 - DNA, 15 bp, Homo sapiens
tcaaagactgttaag

SEQ ID NO: 1601571 - DNA, 15 bp, Homo sapiens
caaagactgttaaga

SEQ ID NO: 1601572 - DNA, 15 bp, Homo sapiens
aaagactgttaagag

SEQ ID NO: 1601573 - DNA, 15 bp, Homo sapiens
aagactgttaagaga

SEQ ID NO: 1601574 - DNA, 15 bp, Homo sapiens
agactgttaagagag

SEQ ID NO: 1601575 - DNA, 15 bp, Homo sapiens
gactgttaagagagt

SEQ ID NO: 1601576 - DNA, 15 bp, Homo sapiens
actgttaagagagtt

SEQ ID NO: 1601577 - DNA, 15 bp, Homo sapiens
ctgttaagagagttt

SEQ ID NO: 1601578 - DNA, 15 bp, Homo sapiens
tgttaagagagtttc

SEQ ID NO: 1601579 - DNA, 15 bp, Homo sapiens
gttaagagagtttct

SEQ ID NO: 1601580 - DNA, 15 bp, Homo sapiens
ttaagagagtttctc

SEQ ID NO: 1601581 - DNA, 15 bp, Homo sapiens
taagagagtttctcc

SEQ ID NO: 1601582 - DNA, 15 bp, Homo sapiens
aagagagtttctcca

SEQ ID NO: 1601583 - DNA, 15 bp, Homo sapiens
agagagtttctccaa

SEQ ID NO: 1601584 - DNA, 15 bp, Homo sapiens
gagagtttctccaac

SEQ ID NO: 1601585 - DNA, 15 bp, Homo sapiens
agagtttctccaaca

SEQ ID NO: 1601586 - DNA, 15 bp, Homo sapiens
gagtttctccaacat

SEQ ID NO: 1601587 - DNA, 15 bp, Homo sapiens
agtttctccaacatt

SEQ ID NO: 1601588 - DNA, 15 bp, Homo sapiens
gtttctccaacattc

SEQ ID NO: 1601589 - DNA, 15 bp, Homo sapiens
tttctccaacattct

SEQ ID NO: 1601590 - DNA, 15 bp, Homo sapiens
ttctccaacattctc

SEQ ID NO: 1601591 - DNA, 15 bp, Homo sapiens
tctccaacattctct

SEQ ID NO: 1601592 - DNA, 15 bp, Homo sapiens
ctccaacattctctt

SEQ ID NO: 1601593 - DNA, 15 bp, Homo sapiens
tccaacattctcttc

SEQ ID NO: 1601594 - DNA, 15 bp, Homo sapiens
ccaacattctcttca

SEQ ID NO: 1601595 - DNA, 15 bp, Homo sapiens
caacattctcttcag

SEQ ID NO: 1601596 - DNA, 15 bp, Homo sapiens
aacattctcttcaga

SEQ ID NO: 1601597 - DNA, 15 bp, Homo sapiens
acattctcttcagat

SEQ ID NO: 1601598 - DNA, 15 bp, Homo sapiens
cattctcttcagatt

SEQ ID NO: 1601599 - DNA, 15 bp, Homo sapiens
attctcttcagattt

SEQ ID NO: 1601600 - DNA, 15 bp, Homo sapiens
ttctcttcagatttt

SEQ ID NO: 1601601 - DNA, 15 bp, Homo sapiens
tctcttcagattttt

SEQ ID NO: 1601602 - DNA, 15 bp, Homo sapiens
ctcttcagatttttc

SEQ ID NO: 1601603 - DNA, 15 bp, Homo sapiens
tcttcagatttttct

SEQ ID NO: 1601604 - DNA, 15 bp, Homo sapiens
cttcagatttttctg

SEQ ID NO: 1601605 - DNA, 15 bp, Homo sapiens
ttcagatttttctgc

SEQ ID NO: 1601606 - DNA, 15 bp, Homo sapiens
tcagatttttctgct

SEQ ID NO: 1601607 - DNA, 15 bp, Homo sapiens
cagatttttctgctg

SEQ ID NO: 1601608 - DNA, 15 bp, Homo sapiens
agatttttctgctgg

SEQ ID NO: 1601609 - DNA, 15 bp, Homo sapiens
gatttttctgctggc

SEQ ID NO: 1601610 - DNA, 15 bp, Homo sapiens
atttttctgctggct

SEQ ID NO: 1601611 - DNA, 15 bp, Homo sapiens
tttttctgctggctt

SEQ ID NO: 1601612 - DNA, 15 bp, Homo sapiens
ttttctgctggctta

SEQ ID NO: 1601613 - DNA, 15 bp, Homo sapiens
tttctgctggcttat

SEQ ID NO: 1601614 - DNA, 15 bp, Homo sapiens
ttctgctggcttatt

SEQ ID NO: 1601615 - DNA, 15 bp, Homo sapiens
tctgctggcttattt

SEQ ID NO: 1601616 - DNA, 15 bp, Homo sapiens
ctgctggcttatttt

SEQ ID NO: 1601617 - DNA, 15 bp, Homo sapiens
tgctggcttatttta

SEQ ID NO: 1601618 - DNA, 15 bp, Homo sapiens
gctggcttattttat

SEQ ID NO: 1601619 - DNA, 15 bp, Homo sapiens
ctggcttattttatg

SEQ ID NO: 1601620 - DNA, 15 bp, Homo sapiens
tggcttattttatga

SEQ ID NO: 1601621 - DNA, 15 bp, Homo sapiens
ggcttattttatgat

SEQ ID NO: 1601622 - DNA, 15 bp, Homo sapiens
gcttattttatgatt

SEQ ID NO: 1601623 - DNA, 15 bp, Homo sapiens
cttattttatgattc

SEQ ID NO: 1601624 - DNA, 15 bp, Homo sapiens
ttattttatgattct

SEQ ID NO: 1601625 - DNA, 15 bp, Homo sapiens
tattttatgattctg

SEQ ID NO: 1601626 - DNA, 15 bp, Homo sapiens
attttatgattctgt

SEQ ID NO: 1601627 - DNA, 15 bp, Homo sapiens
ttttatgattctgtg

SEQ ID NO: 1601628 - DNA, 15 bp, Homo sapiens
tttatgattctgtgg

SEQ ID NO: 1601629 - DNA, 15 bp, Homo sapiens
ttatgattctgtgga

SEQ ID NO: 1601630 - DNA, 15 bp, Homo sapiens
tatgattctgtggac

SEQ ID NO: 1601631 - DNA, 15 bp, Homo sapiens
atgattctgtggaca

SEQ ID NO: 1601632 - DNA, 15 bp, Homo sapiens
tgattctgtggacag

SEQ ID NO: 1601633 - DNA, 15 bp, Homo sapiens
gattctgtggacagc

SEQ ID NO: 1601634 - DNA, 15 bp, Homo sapiens
attctgtggacagct

SEQ ID NO: 1601635 - DNA, 15 bp, Homo sapiens
ttctgtggacagctt

SEQ ID NO: 1601636 - DNA, 15 bp, Homo sapiens
tctgtggacagcttc

SEQ ID NO: 1601637 - DNA, 15 bp, Homo sapiens
ctgtggacagcttca

SEQ ID NO: 1601638 - DNA, 15 bp, Homo sapiens
tgtggacagcttcag

SEQ ID NO: 1601639 - DNA, 15 bp, Homo sapiens
gtggacagcttcaga

SEQ ID NO: 1601640 - DNA, 15 bp, Homo sapiens
tggacagcttcagac

SEQ ID NO: 1601641 - DNA, 15 bp, Homo sapiens
ggacagcttcagaca

SEQ ID NO: 1601642 - DNA, 15 bp, Homo sapiens
gacagcttcagacaa

SEQ ID NO: 1601643 - DNA, 15 bp, Homo sapiens
acagcttcagacaaa

SEQ ID NO: 1601644 - DNA, 15 bp, Homo sapiens
cagcttcagacaaaa

SEQ ID NO: 1601645 - DNA, 15 bp, Homo sapiens
agcttcagacaaaat

SEQ ID NO: 1601646 - DNA, 15 bp, Homo sapiens
gcttcagacaaaata

SEQ ID NO: 1601647 - DNA, 15 bp, Homo sapiens
cttcagacaaaataa

SEQ ID NO: 1601648 - DNA, 15 bp, Homo sapiens
ttcagacaaaataac

SEQ ID NO: 1601649 - DNA, 15 bp, Homo sapiens
tcagacaaaataact

SEQ ID NO: 1601650 - DNA, 15 bp, Homo sapiens
cagacaaaataactt

SEQ ID NO: 1601651 - DNA, 15 bp, Homo sapiens
agacaaaataacttt

SEQ ID NO: 1601652 - DNA, 15 bp, Homo sapiens
gacaaaataactttc

SEQ ID NO: 1601653 - DNA, 15 bp, Homo sapiens
acaaaataactttct

SEQ ID NO: 1601654 - DNA, 15 bp, Homo sapiens
caaaataactttctg

SEQ ID NO: 1601655 - DNA, 15 bp, Homo sapiens
aaaataactttctgg

SEQ ID NO: 1601656 - DNA, 15 bp, Homo sapiens
aaataactttctggt

SEQ ID NO: 1601657 - DNA, 15 bp, Homo sapiens
aataactttctggta

SEQ ID NO: 1601658 - DNA, 15 bp, Homo sapiens
ataactttctggtat

SEQ ID NO: 1601659 - DNA, 15 bp, Homo sapiens
taactttctggtatg

SEQ ID NO: 1601660 - DNA, 15 bp, Homo sapiens
aactttctggtatga

SEQ ID NO: 1601661 - DNA, 15 bp, Homo sapiens
actttctggtatgaa

SEQ ID NO: 1601662 - DNA, 15 bp, Homo sapiens
ctttctggtatgaag

SEQ ID NO: 1601663 - DNA, 15 bp, Homo sapiens
tttctggtatgaagg

SEQ ID NO: 1601664 - DNA, 15 bp, Homo sapiens
ttctggtatgaagga

SEQ ID NO: 1601665 - DNA, 15 bp, Homo sapiens
tctggtatgaaggat

SEQ ID NO: 1601666 - DNA, 15 bp, Homo sapiens
ctggtatgaaggatt

SEQ ID NO: 1601667 - DNA, 15 bp, Homo sapiens
tggtatgaaggattg

SEQ ID NO: 1601668 - DNA, 15 bp, Homo sapiens
ggtatgaaggattgt

SEQ ID NO: 1601669 - DNA, 15 bp, Homo sapiens
gtatgaaggattgtg

SEQ ID NO: 1601670 - DNA, 15 bp, Homo sapiens
tatgaaggattgtgt

SEQ ID NO: 1601671 - DNA, 15 bp, Homo sapiens
atgaaggattgtgtt

SEQ ID NO: 1601672 - DNA, 15 bp, Homo sapiens
tgaaggattgtgttt

SEQ ID NO: 1601673 - DNA, 15 bp, Homo sapiens
gaaggattgtgttta

SEQ ID NO: 1601674 - DNA, 15 bp, Homo sapiens
aaggattgtgtttac

SEQ ID NO: 1601675 - DNA, 15 bp, Homo sapiens
aggattgtgtttact

SEQ ID NO: 1601676 - DNA, 15 bp, Homo sapiens
ggattgtgtttactc

SEQ ID NO: 1601677 - DNA, 15 bp, Homo sapiens
gattgtgtttactct

SEQ ID NO: 1601678 - DNA, 15 bp, Homo sapiens
attgtgtttactctg

SEQ ID NO: 1601679 - DNA, 15 bp, Homo sapiens
ttgtgtttactctgc

SEQ ID NO: 1601680 - DNA, 15 bp, Homo sapiens
tgtgtttactctgct

SEQ ID NO: 1601681 - DNA, 15 bp, Homo sapiens
gtgtttactctgctt

SEQ ID NO: 1601682 - DNA, 15 bp, Homo sapiens
tgtttactctgcttt

SEQ ID NO: 1601683 - DNA, 15 bp, Homo sapiens
gtttactctgctttt

SEQ ID NO: 1601684 - DNA, 15 bp, Homo sapiens
tttactctgcttttt

SEQ ID NO: 1601685 - DNA, 15 bp, Homo sapiens
ttactctgctttttt

SEQ ID NO: 1601686 - DNA, 15 bp, Homo sapiens
tactctgcttttttt

SEQ ID NO: 1601687 - DNA, 15 bp, Homo sapiens
actctgctttttttt

SEQ ID NO: 1601688 - DNA, 15 bp, Homo sapiens
ctctgcttttttttt

SEQ ID NO: 1601689 - DNA, 15 bp, Homo sapiens
tctgctttttttttt

SEQ ID NO: 1601690 - DNA, 15 bp, Homo sapiens
ctgcttttttttttg

SEQ ID NO: 1601691 - DNA, 15 bp, Homo sapiens
tgcttttttttttgt

SEQ ID NO: 1601692 - DNA, 15 bp, Homo sapiens
gcttttttttttgtt

SEQ ID NO: 1601693 - DNA, 15 bp, Homo sapiens
cttttttttttgttg

SEQ ID NO: 1601694 - DNA, 15 bp, Homo sapiens
ttttttttttgttgt

SEQ ID NO: 1601695 - DNA, 15 bp, Homo sapiens
tttgttgttttttgg

SEQ ID NO: 1601696 - DNA, 15 bp, Homo sapiens
ttgttgttttttggg

SEQ ID NO: 1601697 - DNA, 15 bp, Homo sapiens
tgttgttttttgggt

SEQ ID NO: 1601698 - DNA, 15 bp, Homo sapiens
gttgttttttgggtt

SEQ ID NO: 1601699 - DNA, 15 bp, Homo sapiens
ttgttttttgggttt

SEQ ID NO: 1601700 - DNA, 15 bp, Homo sapiens
tgttttttgggtttt

SEQ ID NO: 1601701 - DNA, 15 bp, Homo sapiens
gttttttgggttttt

SEQ ID NO: 1601702 - DNA, 15 bp, Homo sapiens
ttttttgggtttttt

SEQ ID NO: 1601703 - DNA, 15 bp, Homo sapiens
tttttgggttttttg

SEQ ID NO: 1601704 - DNA, 15 bp, Homo sapiens
ttttgggttttttgt

SEQ ID NO: 1601705 - DNA, 15 bp, Homo sapiens
tttgggttttttgtt

SEQ ID NO: 1601706 - DNA, 15 bp, Homo sapiens
ttgggttttttgttt

SEQ ID NO: 1601707 - DNA, 15 bp, Homo sapiens
tgggttttttgtttt

SEQ ID NO: 1601708 - DNA, 15 bp, Homo sapiens
gggttttttgttttg

SEQ ID NO: 1601709 - DNA, 15 bp, Homo sapiens
tgtttttgagacagt

SEQ ID NO: 1601710 - DNA, 15 bp, Homo sapiens
gtttttgagacagtg

SEQ ID NO: 1601711 - DNA, 15 bp, Homo sapiens
tttttgagacagtgc

SEQ ID NO: 1601712 - DNA, 15 bp, Homo sapiens
ttttgagacagtgcc

SEQ ID NO: 1601713 - DNA, 15 bp, Homo sapiens
tttgagacagtgcct

SEQ ID NO: 1601714 - DNA, 15 bp, Homo sapiens
ttgagacagtgcctt

SEQ ID NO: 1601715 - DNA, 15 bp, Homo sapiens
tgagacagtgccttg

SEQ ID NO: 1601716 - DNA, 15 bp, Homo sapiens
gagacagtgccttgc

SEQ ID NO: 1601717 - DNA, 15 bp, Homo sapiens
agacagtgccttgct

SEQ ID NO: 1601718 - DNA, 15 bp, Homo sapiens
gacagtgccttgctc

SEQ ID NO: 1601719 - DNA, 15 bp, Homo sapiens
acagtgccttgctct

SEQ ID NO: 1601720 - DNA, 15 bp, Homo sapiens
cagtgccttgctctg

SEQ ID NO: 1601721 - DNA, 15 bp, Homo sapiens
agtgccttgctctgc

SEQ ID NO: 1601722 - DNA, 15 bp, Homo sapiens
gtgccttgctctgct

SEQ ID NO: 1601723 - DNA, 15 bp, Homo sapiens
tgccttgctctgctg

SEQ ID NO: 1601724 - DNA, 15 bp, Homo sapiens
gccttgctctgctgc

SEQ ID NO: 1601725 - DNA, 15 bp, Homo sapiens
ccttgctctgctgct

SEQ ID NO: 1601726 - DNA, 15 bp, Homo sapiens
cttgctctgctgctg

SEQ ID NO: 1601727 - DNA, 15 bp, Homo sapiens
ttgctctgctgctgc

SEQ ID NO: 1601728 - DNA, 15 bp, Homo sapiens
tgctctgctgctgcc

SEQ ID NO: 1601729 - DNA, 15 bp, Homo sapiens
gctctgctgctgccc

SEQ ID NO: 1601730 - DNA, 15 bp, Homo sapiens
ctctgctgctgccca

SEQ ID NO: 1601731 - DNA, 15 bp, Homo sapiens
tctgctgctgcccag

SEQ ID NO: 1601732 - DNA, 15 bp, Homo sapiens
ctgctgctgcccagg

SEQ ID NO: 1601733 - DNA, 15 bp, Homo sapiens
tgctgctgcccaggc

SEQ ID NO: 1601734 - DNA, 15 bp, Homo sapiens
gctgctgcccaggct

SEQ ID NO: 1601735 - DNA, 15 bp, Homo sapiens
tgctgcccaggctga

SEQ ID NO: 1601736 - DNA, 15 bp, Homo sapiens
gctgcccaggctgag

SEQ ID NO: 1601737 - DNA, 15 bp, Homo sapiens
ctgcccaggctgagt

SEQ ID NO: 1601738 - DNA, 15 bp, Homo sapiens
tgcccaggctgagtg

SEQ ID NO: 1601739 - DNA, 15 bp, Homo sapiens
gcccaggctgagtgc

SEQ ID NO: 1601740 - DNA, 15 bp, Homo sapiens
ccaggctgagtgcaa

SEQ ID NO: 1601741 - DNA, 15 bp, Homo sapiens
caggctgagtgcaat

SEQ ID NO: 1601742 - DNA, 15 bp, Homo sapiens
aggctgagtgcaatg

SEQ ID NO: 1601743 - DNA, 15 bp, Homo sapiens
ggctgagtgcaatgg

SEQ ID NO: 1601744 - DNA, 15 bp, Homo sapiens
gctgagtgcaatggc

SEQ ID NO: 1601745 - DNA, 15 bp, Homo sapiens
ctgagtgcaatggca

SEQ ID NO: 1601746 - DNA, 15 bp, Homo sapiens
tgagtgcaatggcat

SEQ ID NO: 1601747 - DNA, 15 bp, Homo sapiens
caatggcatgatctc

SEQ ID NO: 1601748 - DNA, 15 bp, Homo sapiens
aatggcatgatctcg

SEQ ID NO: 1601749 - DNA, 15 bp, Homo sapiens
atggcatgatctcgg

SEQ ID NO: 1601750 - DNA, 15 bp, Homo sapiens
aacctctgcctccct

SEQ ID NO: 1601751 - DNA, 15 bp, Homo sapiens
acctctgcctccctg

SEQ ID NO: 1601752 - DNA, 15 bp, Homo sapiens
tctgcctccctgggc

SEQ ID NO: 1601753 - DNA, 15 bp, Homo sapiens
ctgcctccctgggct

SEQ ID NO: 1601754 - DNA, 15 bp, Homo sapiens
tgcctccctgggctc

SEQ ID NO: 1601755 - DNA, 15 bp, Homo sapiens
gcctccctgggctca

SEQ ID NO: 1601756 - DNA, 15 bp, Homo sapiens
cctccctgggctcag

SEQ ID NO: 1601757 - DNA, 15 bp, Homo sapiens
ctccctgggctcagg

SEQ ID NO: 1601758 - DNA, 15 bp, Homo sapiens
ccctgggctcaggcc

SEQ ID NO: 1601759 - DNA, 15 bp, Homo sapiens
cctgggctcaggcca

SEQ ID NO: 1601760 - DNA, 15 bp, Homo sapiens
ctgggctcaggccag

SEQ ID NO: 1601761 - DNA, 15 bp, Homo sapiens
tgggctcaggccagg

SEQ ID NO: 1601762 - DNA, 15 bp, Homo sapiens
gggctcaggccaggt

SEQ ID NO: 1601763 - DNA, 15 bp, Homo sapiens
ggctcaggccaggtg

SEQ ID NO: 1601764 - DNA, 15 bp, Homo sapiens
gctcaggccaggtgt

SEQ ID NO: 1601765 - DNA, 15 bp, Homo sapiens
ctcaggccaggtgta

SEQ ID NO: 1601766 - DNA, 15 bp, Homo sapiens
tcaggccaggtgtat

SEQ ID NO: 1601767 - DNA, 15 bp, Homo sapiens
caggccaggtgtatg

SEQ ID NO: 1601768 - DNA, 15 bp, Homo sapiens
aggccaggtgtatgc

SEQ ID NO: 1601769 - DNA, 15 bp, Homo sapiens
ggccaggtgtatgct

SEQ ID NO: 1601770 - DNA, 15 bp, Homo sapiens
gccaggtgtatgcta

SEQ ID NO: 1601771 - DNA, 15 bp, Homo sapiens
ccaggtgtatgctac

SEQ ID NO: 1601772 - DNA, 15 bp, Homo sapiens
caggtgtatgctacc

SEQ ID NO: 1601773 - DNA, 15 bp, Homo sapiens
aggtgtatgctacca

SEQ ID NO: 1601774 - DNA, 15 bp, Homo sapiens
ggtgtatgctaccac

SEQ ID NO: 1601775 - DNA, 15 bp, Homo sapiens
gtgtatgctaccact

SEQ ID NO: 1601776 - DNA, 15 bp, Homo sapiens
tgtatgctaccactc

SEQ ID NO: 1601777 - DNA, 15 bp, Homo sapiens
gtatgctaccactct

SEQ ID NO: 1601778 - DNA, 15 bp, Homo sapiens
tatgctaccactctc

SEQ ID NO: 1601779 - DNA, 15 bp, Homo sapiens
atgctaccactctca

SEQ ID NO: 1601780 - DNA, 15 bp, Homo sapiens
tgctaccactctcag

SEQ ID NO: 1601781 - DNA, 15 bp, Homo sapiens
gctaccactctcagc

SEQ ID NO: 1601782 - DNA, 15 bp, Homo sapiens
ctaccactctcagct

SEQ ID NO: 1601783 - DNA, 15 bp, Homo sapiens
taccactctcagcta

SEQ ID NO: 1601784 - DNA, 15 bp, Homo sapiens
accactctcagctaa

SEQ ID NO: 1601785 - DNA, 15 bp, Homo sapiens
ccactctcagctaat

SEQ ID NO: 1601786 - DNA, 15 bp, Homo sapiens
cactctcagctaatt

SEQ ID NO: 1601787 - DNA, 15 bp, Homo sapiens
actctcagctaattt

SEQ ID NO: 1601788 - DNA, 15 bp, Homo sapiens
ctctcagctaatttt

SEQ ID NO: 1601789 - DNA, 15 bp, Homo sapiens
tctcagctaattttt

SEQ ID NO: 1601790 - DNA, 15 bp, Homo sapiens
ctcagctaattttta

SEQ ID NO: 1601791 - DNA, 15 bp, Homo sapiens
tcagctaatttttaa

SEQ ID NO: 1601792 - DNA, 15 bp, Homo sapiens
cagctaatttttaat

SEQ ID NO: 1601793 - DNA, 15 bp, Homo sapiens
agctaatttttaatt

SEQ ID NO: 1601794 - DNA, 15 bp, Homo sapiens
ctaatttttaattta

SEQ ID NO: 1601795 - DNA, 15 bp, Homo sapiens
taatttttaatttat

SEQ ID NO: 1601796 - DNA, 15 bp, Homo sapiens
aatttttaatttatt

SEQ ID NO: 1601797 - DNA, 15 bp, Homo sapiens
atttttaatttattt

SEQ ID NO: 1601798 - DNA, 15 bp, Homo sapiens
tttttaatttatttt

SEQ ID NO: 1601799 - DNA, 15 bp, Homo sapiens
ttttaatttattttt

SEQ ID NO: 1601800 - DNA, 15 bp, Homo sapiens
tttaatttatttttt

SEQ ID NO: 1601801 - DNA, 15 bp, Homo sapiens
ttaatttattttttt

SEQ ID NO: 1601802 - DNA, 15 bp, Homo sapiens
aatttatttttttag

SEQ ID NO: 1601803 - DNA, 15 bp, Homo sapiens
tttatttttttagag

SEQ ID NO: 1601804 - DNA, 15 bp, Homo sapiens
ttatttttttagaga

SEQ ID NO: 1601805 - DNA, 15 bp, Homo sapiens
tatttttttagagat

SEQ ID NO: 1601806 - DNA, 15 bp, Homo sapiens
atttttttagagata

SEQ ID NO: 1601807 - DNA, 15 bp, Homo sapiens
tttttttagagatac

SEQ ID NO: 1601808 - DNA, 15 bp, Homo sapiens
ttttttagagatacg

SEQ ID NO: 1601809 - DNA, 15 bp, Homo sapiens
tttttagagatacgg

SEQ ID NO: 1601810 - DNA, 15 bp, Homo sapiens
ttttagagatacggt

SEQ ID NO: 1601811 - DNA, 15 bp, Homo sapiens
tttagagatacggtc

SEQ ID NO: 1601812 - DNA, 15 bp, Homo sapiens
ttagagatacggtcc

SEQ ID NO: 1601813 - DNA, 15 bp, Homo sapiens
tagagatacggtccc

SEQ ID NO: 1601814 - DNA, 15 bp, Homo sapiens
agagatacggtccca

SEQ ID NO: 1601815 - DNA, 15 bp, Homo sapiens
gagatacggtcccac

SEQ ID NO: 1601816 - DNA, 15 bp, Homo sapiens
agatacggtcccact

SEQ ID NO: 1601817 - DNA, 15 bp, Homo sapiens
gatacggtcccactc

SEQ ID NO: 1601818 - DNA, 15 bp, Homo sapiens
atacggtcccactct

SEQ ID NO: 1601819 - DNA, 15 bp, Homo sapiens
tacggtcccactctg

SEQ ID NO: 1601820 - DNA, 15 bp, Homo sapiens
acggtcccactctgt

SEQ ID NO: 1601821 - DNA, 15 bp, Homo sapiens
cggtcccactctgtt

SEQ ID NO: 1601822 - DNA, 15 bp, Homo sapiens
ggtcccactctgttt

SEQ ID NO: 1601823 - DNA, 15 bp, Homo sapiens
gtcccactctgtttc

SEQ ID NO: 1601824 - DNA, 15 bp, Homo sapiens
tcccactctgtttcc

SEQ ID NO: 1601825 - DNA, 15 bp, Homo sapiens
cccactctgtttccc

SEQ ID NO: 1601826 - DNA, 15 bp, Homo sapiens
ccactctgtttccca

SEQ ID NO: 1601827 - DNA, 15 bp, Homo sapiens
cactctgtttcccag

SEQ ID NO: 1601828 - DNA, 15 bp, Homo sapiens
actctgtttcccagg

SEQ ID NO: 1601829 - DNA, 15 bp, Homo sapiens
ccaggctggtctcag

SEQ ID NO: 1601830 - DNA, 15 bp, Homo sapiens
caggctggtctcaga

SEQ ID NO: 1601831 - DNA, 15 bp, Homo sapiens
aggctggtctcagaa

SEQ ID NO: 1601832 - DNA, 15 bp, Homo sapiens
ggctggtctcagaac

SEQ ID NO: 1601833 - DNA, 15 bp, Homo sapiens
gctggtctcagaact

SEQ ID NO: 1601834 - DNA, 15 bp, Homo sapiens
ctggtctcagaactc

SEQ ID NO: 1601835 - DNA, 15 bp, Homo sapiens
tggtctcagaactcc

SEQ ID NO: 1601836 - DNA, 15 bp, Homo sapiens
ggtctcagaactcct

SEQ ID NO: 1601837 - DNA, 15 bp, Homo sapiens
gtctcagaactcctg

SEQ ID NO: 1601838 - DNA, 15 bp, Homo sapiens
tctcagaactcctgg

SEQ ID NO: 1601839 - DNA, 15 bp, Homo sapiens
ctcagaactcctggg

SEQ ID NO: 1601840 - DNA, 15 bp, Homo sapiens
tcagaactcctgggc

SEQ ID NO: 1601841 - DNA, 15 bp, Homo sapiens
cagaactcctgggct

SEQ ID NO: 1601842 - DNA, 15 bp, Homo sapiens
agaactcctgggctc

SEQ ID NO: 1601843 - DNA, 15 bp, Homo sapiens
actcctgggctcaga

SEQ ID NO: 1601844 - DNA, 15 bp, Homo sapiens
ctcctgggctcagac

SEQ ID NO: 1601845 - DNA, 15 bp, Homo sapiens
tcctgggctcagaca

SEQ ID NO: 1601846 - DNA, 15 bp, Homo sapiens
cctgggctcagacag

SEQ ID NO: 1601847 - DNA, 15 bp, Homo sapiens
ctgggctcagacagt

SEQ ID NO: 1601848 - DNA, 15 bp, Homo sapiens
tgggctcagacagtc

SEQ ID NO: 1601849 - DNA, 15 bp, Homo sapiens
gggctcagacagtcc

SEQ ID NO: 1601850 - DNA, 15 bp, Homo sapiens
ggctcagacagtccc

SEQ ID NO: 1601851 - DNA, 15 bp, Homo sapiens
gctcagacagtcccc

SEQ ID NO: 1601852 - DNA, 15 bp, Homo sapiens
ctcagacagtccccc

SEQ ID NO: 1601853 - DNA, 15 bp, Homo sapiens
tcagacagtcccccg

SEQ ID NO: 1601854 - DNA, 15 bp, Homo sapiens
cagacagtcccccgc

SEQ ID NO: 1601855 - DNA, 15 bp, Homo sapiens
agacagtcccccgcc

SEQ ID NO: 1601856 - DNA, 15 bp, Homo sapiens
gacagtcccccgcca

SEQ ID NO: 1601857 - DNA, 15 bp, Homo sapiens
acagtcccccgccat

SEQ ID NO: 1601858 - DNA, 15 bp, Homo sapiens
cagtcccccgccatg

SEQ ID NO: 1601859 - DNA, 15 bp, Homo sapiens
agtcccccgccatgg

SEQ ID NO: 1601860 - DNA, 15 bp, Homo sapiens
gtcccccgccatggc

SEQ ID NO: 1601861 - DNA, 15 bp, Homo sapiens
tcccccgccatggcc

SEQ ID NO: 1601862 - DNA, 15 bp, Homo sapiens
cccccgccatggcct

SEQ ID NO: 1601863 - DNA, 15 bp, Homo sapiens
ccccgccatggcctc

SEQ ID NO: 1601864 - DNA, 15 bp, Homo sapiens
cccgccatggcctcc

SEQ ID NO: 1601865 - DNA, 15 bp, Homo sapiens
cgccatggcctccca

SEQ ID NO: 1601866 - DNA, 15 bp, Homo sapiens
gccatggcctcccac

SEQ ID NO: 1601867 - DNA, 15 bp, Homo sapiens
ccatggcctcccaca

SEQ ID NO: 1601868 - DNA, 15 bp, Homo sapiens
catggcctcccacag

SEQ ID NO: 1601869 - DNA, 15 bp, Homo sapiens
atggcctcccacagt

SEQ ID NO: 1601870 - DNA, 15 bp, Homo sapiens
ggcctcccacagtgc

SEQ ID NO: 1601871 - DNA, 15 bp, Homo sapiens
atcagccaccatgct

SEQ ID NO: 1601872 - DNA, 15 bp, Homo sapiens
tcagccaccatgctc

SEQ ID NO: 1601873 - DNA, 15 bp, Homo sapiens
cagccaccatgctca

SEQ ID NO: 1601874 - DNA, 15 bp, Homo sapiens
agccaccatgctcag

SEQ ID NO: 1601875 - DNA, 15 bp, Homo sapiens
gccaccatgctcagc

SEQ ID NO: 1601876 - DNA, 15 bp, Homo sapiens
ccaccatgctcagct

SEQ ID NO: 1601877 - DNA, 15 bp, Homo sapiens
caccatgctcagctt

SEQ ID NO: 1601878 - DNA, 15 bp, Homo sapiens
accatgctcagcttg

SEQ ID NO: 1601879 - DNA, 15 bp, Homo sapiens
ccatgctcagcttgt

SEQ ID NO: 1601880 - DNA, 15 bp, Homo sapiens
catgctcagcttgtt

SEQ ID NO: 1601881 - DNA, 15 bp, Homo sapiens
atgctcagcttgttc

SEQ ID NO: 1601882 - DNA, 15 bp, Homo sapiens
tgctcagcttgttct

SEQ ID NO: 1601883 - DNA, 15 bp, Homo sapiens
gctcagcttgttctg

SEQ ID NO: 1601884 - DNA, 15 bp, Homo sapiens
ctcagcttgttctgc

SEQ ID NO: 1601885 - DNA, 15 bp, Homo sapiens
tcagcttgttctgcc

SEQ ID NO: 1601886 - DNA, 15 bp, Homo sapiens
cagcttgttctgcca

SEQ ID NO: 1601887 - DNA, 15 bp, Homo sapiens
agcttgttctgccat

SEQ ID NO: 1601888 - DNA, 15 bp, Homo sapiens
gcttgttctgccatt

SEQ ID NO: 1601889 - DNA, 15 bp, Homo sapiens
cttgttctgccattt

SEQ ID NO: 1601890 - DNA, 15 bp, Homo sapiens
ttgttctgccatttt

SEQ ID NO: 1601891 - DNA, 15 bp, Homo sapiens
tgttctgccattttc

SEQ ID NO: 1601892 - DNA, 15 bp, Homo sapiens
gttctgccattttca

SEQ ID NO: 1601893 - DNA, 15 bp, Homo sapiens
ttctgccattttcaa

SEQ ID NO: 1601894 - DNA, 15 bp, Homo sapiens
tctgccattttcaaa

SEQ ID NO: 1601895 - DNA, 15 bp, Homo sapiens
ctgccattttcaaat

SEQ ID NO: 1601896 - DNA, 15 bp, Homo sapiens
tgccattttcaaatg

SEQ ID NO: 1601897 - DNA, 15 bp, Homo sapiens
gccattttcaaatgt

SEQ ID NO: 1601898 - DNA, 15 bp, Homo sapiens
ccattttcaaatgtg

SEQ ID NO: 1601899 - DNA, 15 bp, Homo sapiens
cattttcaaatgtga

SEQ ID NO: 1601900 - DNA, 15 bp, Homo sapiens
attttcaaatgtgaa

SEQ ID NO: 1601901 - DNA, 15 bp, Homo sapiens
ttttcaaatgtgaat

SEQ ID NO: 1601902 - DNA, 15 bp, Homo sapiens
tttcaaatgtgaatt

SEQ ID NO: 1601903 - DNA, 15 bp, Homo sapiens
ttcaaatgtgaattt

SEQ ID NO: 1601904 - DNA, 15 bp, Homo sapiens
tcaaatgtgaatttt

SEQ ID NO: 1601905 - DNA, 15 bp, Homo sapiens
caaatgtgaatttta

SEQ ID NO: 1601906 - DNA, 15 bp, Homo sapiens
aaatgtgaattttat

SEQ ID NO: 1601907 - DNA, 15 bp, Homo sapiens
aatgtgaattttata

SEQ ID NO: 1601908 - DNA, 15 bp, Homo sapiens
atgtgaattttatag

SEQ ID NO: 1601909 - DNA, 15 bp, Homo sapiens
tgtgaattttataga

SEQ ID NO: 1601910 - DNA, 15 bp, Homo sapiens
gtgaattttatagac

SEQ ID NO: 1601911 - DNA, 15 bp, Homo sapiens
tgaattttatagaca

SEQ ID NO: 1601912 - DNA, 15 bp, Homo sapiens
gaattttatagacac

SEQ ID NO: 1601913 - DNA, 15 bp, Homo sapiens
aattttatagacact

SEQ ID NO: 1601914 - DNA, 15 bp, Homo sapiens
attttatagacactt

SEQ ID NO: 1601915 - DNA, 15 bp, Homo sapiens
ttttatagacacttt

SEQ ID NO: 1601916 - DNA, 15 bp, Homo sapiens
tttatagacacttta

SEQ ID NO: 1601917 - DNA, 15 bp, Homo sapiens
ttatagacactttaa

SEQ ID NO: 1601918 - DNA, 15 bp, Homo sapiens
tatagacactttaaa

SEQ ID NO: 1601919 - DNA, 15 bp, Homo sapiens
atagacactttaaac

SEQ ID NO: 1601920 - DNA, 15 bp, Homo sapiens
tagacactttaaacc

SEQ ID NO: 1601921 - DNA, 15 bp, Homo sapiens
agacactttaaacca

SEQ ID NO: 1601922 - DNA, 15 bp, Homo sapiens
gacactttaaaccac

SEQ ID NO: 1601923 - DNA, 15 bp, Homo sapiens
acactttaaaccact

SEQ ID NO: 1601924 - DNA, 15 bp, Homo sapiens
cactttaaaccactt

SEQ ID NO: 1601925 - DNA, 15 bp, Homo sapiens
actttaaaccacttg

SEQ ID NO: 1601926 - DNA, 15 bp, Homo sapiens
ctttaaaccacttga

SEQ ID NO: 1601927 - DNA, 15 bp, Homo sapiens
tttaaaccacttgaa

SEQ ID NO: 1601928 - DNA, 15 bp, Homo sapiens
ttaaaccacttgaaa

SEQ ID NO: 1601929 - DNA, 15 bp, Homo sapiens
taaaccacttgaaag

SEQ ID NO: 1601930 - DNA, 15 bp, Homo sapiens
aaaccacttgaaaga

SEQ ID NO: 1601931 - DNA, 15 bp, Homo sapiens
aaccacttgaaagag

SEQ ID NO: 1601932 - DNA, 15 bp, Homo sapiens
accacttgaaagagt

SEQ ID NO: 1601933 - DNA, 15 bp, Homo sapiens
ccacttgaaagagtg

SEQ ID NO: 1601934 - DNA, 15 bp, Homo sapiens
cacttgaaagagtga

SEQ ID NO: 1601935 - DNA, 15 bp, Homo sapiens
acttgaaagagtgat

SEQ ID NO: 1601936 - DNA, 15 bp, Homo sapiens
cttgaaagagtgatg

SEQ ID NO: 1601937 - DNA, 15 bp, Homo sapiens
ttgaaagagtgatga

SEQ ID NO: 1601938 - DNA, 15 bp, Homo sapiens
tgaaagagtgatgat

SEQ ID NO: 1601939 - DNA, 15 bp, Homo sapiens
gaaagagtgatgatg

SEQ ID NO: 1601940 - DNA, 15 bp, Homo sapiens
aaagagtgatgatgt

SEQ ID NO: 1601941 - DNA, 15 bp, Homo sapiens
aagagtgatgatgtt

SEQ ID NO: 1601942 - DNA, 15 bp, Homo sapiens
agagtgatgatgttt

SEQ ID NO: 1601943 - DNA, 15 bp, Homo sapiens
gagtgatgatgtttt

SEQ ID NO: 1601944 - DNA, 15 bp, Homo sapiens
agtgatgatgtttta

SEQ ID NO: 1601945 - DNA, 15 bp, Homo sapiens
gtgatgatgttttaa

SEQ ID NO: 1601946 - DNA, 15 bp, Homo sapiens
tgatgatgttttaat

SEQ ID NO: 1601947 - DNA, 15 bp, Homo sapiens
gatgatgttttaatg

SEQ ID NO: 1601948 - DNA, 15 bp, Homo sapiens
atgatgttttaatga

SEQ ID NO: 1601949 - DNA, 15 bp, Homo sapiens
tgatgttttaatgat

SEQ ID NO: 1601950 - DNA, 15 bp, Homo sapiens
gatgttttaatgatt

SEQ ID NO: 1601951 - DNA, 15 bp, Homo sapiens
atgttttaatgattt

SEQ ID NO: 1601952 - DNA, 15 bp, Homo sapiens
tgttttaatgatttt

SEQ ID NO: 1601953 - DNA, 15 bp, Homo sapiens
gttttaatgattttc

SEQ ID NO: 1601954 - DNA, 15 bp, Homo sapiens
ttttaatgattttca

SEQ ID NO: 1601955 - DNA, 15 bp, Homo sapiens
tttaatgattttcat

SEQ ID NO: 1601956 - DNA, 15 bp, Homo sapiens
ttaatgattttcatt

SEQ ID NO: 1601957 - DNA, 15 bp, Homo sapiens
taatgattttcatta

SEQ ID NO: 1601958 - DNA, 15 bp, Homo sapiens
aatgattttcattat

SEQ ID NO: 1601959 - DNA, 15 bp, Homo sapiens
atgattttcattatt

SEQ ID NO: 1601960 - DNA, 15 bp, Homo sapiens
tgattttcattatta

SEQ ID NO: 1601961 - DNA, 15 bp, Homo sapiens
gattttcattattat

SEQ ID NO: 1601962 - DNA, 15 bp, Homo sapiens
attttcattattatt

SEQ ID NO: 1601963 - DNA, 15 bp, Homo sapiens
ttttcattattattt

SEQ ID NO: 1601964 - DNA, 15 bp, Homo sapiens
tttcattattatttg

SEQ ID NO: 1601965 - DNA, 15 bp, Homo sapiens
ttcattattatttgc

SEQ ID NO: 1601966 - DNA, 15 bp, Homo sapiens
tcattattatttgca

SEQ ID NO: 1601967 - DNA, 15 bp, Homo sapiens
cattattatttgcaa

SEQ ID NO: 1601968 - DNA, 15 bp, Homo sapiens
attattatttgcaac

SEQ ID NO: 1601969 - DNA, 15 bp, Homo sapiens
ttattatttgcaact

SEQ ID NO: 1601970 - DNA, 15 bp, Homo sapiens
tattatttgcaactt

SEQ ID NO: 1601971 - DNA, 15 bp, Homo sapiens
attatttgcaacttc

SEQ ID NO: 1601972 - DNA, 15 bp, Homo sapiens
ttatttgcaacttca

SEQ ID NO: 1601973 - DNA, 15 bp, Homo sapiens
tatttgcaacttcaa

SEQ ID NO: 1601974 - DNA, 15 bp, Homo sapiens
atttgcaacttcaag

SEQ ID NO: 1601975 - DNA, 15 bp, Homo sapiens
tttgcaacttcaagc

SEQ ID NO: 1601976 - DNA, 15 bp, Homo sapiens
ttgcaacttcaagca

SEQ ID NO: 1601977 - DNA, 15 bp, Homo sapiens
tgcaacttcaagcat

SEQ ID NO: 1601978 - DNA, 15 bp, Homo sapiens
gcaacttcaagcatt

SEQ ID NO: 1601979 - DNA, 15 bp, Homo sapiens
caacttcaagcatta

SEQ ID NO: 1601980 - DNA, 15 bp, Homo sapiens
aacttcaagcattaa

SEQ ID NO: 1601981 - DNA, 15 bp, Homo sapiens
acttcaagcattaaa

SEQ ID NO: 1601982 - DNA, 15 bp, Homo sapiens
cttcaagcattaaac

SEQ ID NO: 1601983 - DNA, 15 bp, Homo sapiens
ttcaagcattaaaca

SEQ ID NO: 1601984 - DNA, 15 bp, Homo sapiens
tcaagcattaaacac

SEQ ID NO: 1601985 - DNA, 15 bp, Homo sapiens
caagcattaaacact

SEQ ID NO: 1601986 - DNA, 15 bp, Homo sapiens
aagcattaaacactg

SEQ ID NO: 1601987 - DNA, 15 bp, Homo sapiens
agcattaaacactgc

SEQ ID NO: 1601988 - DNA, 15 bp, Homo sapiens
gcattaaacactgcc

SEQ ID NO: 1601989 - DNA, 15 bp, Homo sapiens
cattaaacactgcca

SEQ ID NO: 1601990 - DNA, 15 bp, Homo sapiens
attaaacactgccaa

SEQ ID NO: 1601991 - DNA, 15 bp, Homo sapiens
ttaaacactgccaaa

SEQ ID NO: 1601992 - DNA, 15 bp, Homo sapiens
taaacactgccaaat

SEQ ID NO: 1601993 - DNA, 15 bp, Homo sapiens
aaacactgccaaatt

SEQ ID NO: 1601994 - DNA, 15 bp, Homo sapiens
aacactgccaaatta

SEQ ID NO: 1601995 - DNA, 15 bp, Homo sapiens
acactgccaaattaa

SEQ ID NO: 1601996 - DNA, 15 bp, Homo sapiens
cactgccaaattaag

SEQ ID NO: 1601997 - DNA, 15 bp, Homo sapiens
actgccaaattaagt

SEQ ID NO: 1601998 - DNA, 15 bp, Homo sapiens
ctgccaaattaagtt

SEQ ID NO: 1601999 - DNA, 15 bp, Homo sapiens
tgccaaattaagttt

SEQ ID NO: 1602000 - DNA, 15 bp, Homo sapiens
gccaaattaagtttc

SEQ ID NO: 1602001 - DNA, 15 bp, Homo sapiens
ccaaattaagtttca

SEQ ID NO: 1602002 - DNA, 15 bp, Homo sapiens
caaattaagtttcaa

SEQ ID NO: 1602003 - DNA, 15 bp, Homo sapiens
aaattaagtttcaag

SEQ ID NO: 1602004 - DNA, 15 bp, Homo sapiens
aattaagtttcaagt

SEQ ID NO: 1602005 - DNA, 15 bp, Homo sapiens
attaagtttcaagtt

SEQ ID NO: 1602006 - DNA, 15 bp, Homo sapiens
ttaagtttcaagttt

SEQ ID NO: 1602007 - DNA, 15 bp, Homo sapiens
taagtttcaagtttt

SEQ ID NO: 1602008 - DNA, 15 bp, Homo sapiens
aagtttcaagttttc

SEQ ID NO: 1602009 - DNA, 15 bp, Homo sapiens
agtttcaagttttct

SEQ ID NO: 1602010 - DNA, 15 bp, Homo sapiens
gtttcaagttttctc

SEQ ID NO: 1602011 - DNA, 15 bp, Homo sapiens
tttcaagttttctct

SEQ ID NO: 1602012 - DNA, 15 bp, Homo sapiens
ttcaagttttctctt

SEQ ID NO: 1602013 - DNA, 15 bp, Homo sapiens
caagttttctcttta

SEQ ID NO: 1602014 - DNA, 15 bp, Homo sapiens
aagttttctctttac

SEQ ID NO: 1602015 - DNA, 15 bp, Homo sapiens
agttttctctttaca

SEQ ID NO: 1602016 - DNA, 15 bp, Homo sapiens
gttttctctttacac

SEQ ID NO: 1602017 - DNA, 15 bp, Homo sapiens
ttttctctttacaca

SEQ ID NO: 1602018 - DNA, 15 bp, Homo sapiens
tttctctttacacaa

SEQ ID NO: 1602019 - DNA, 15 bp, Homo sapiens
ttctctttacacaat

SEQ ID NO: 1602020 - DNA, 15 bp, Homo sapiens
tctctttacacaata

SEQ ID NO: 1602021 - DNA, 15 bp, Homo sapiens
ctctttacacaatat

SEQ ID NO: 1602022 - DNA, 15 bp, Homo sapiens
tctttacacaatatg

SEQ ID NO: 1602023 - DNA, 15 bp, Homo sapiens
ctttacacaatatgg

SEQ ID NO: 1602024 - DNA, 15 bp, Homo sapiens
tttacacaatatgga

SEQ ID NO: 1602025 - DNA, 15 bp, Homo sapiens
ttacacaatatggat

SEQ ID NO: 1602026 - DNA, 15 bp, Homo sapiens
tacacaatatggatg

SEQ ID NO: 1602027 - DNA, 15 bp, Homo sapiens
acacaatatggatgt

SEQ ID NO: 1602028 - DNA, 15 bp, Homo sapiens
cacaatatggatgta

SEQ ID NO: 1602029 - DNA, 15 bp, Homo sapiens
acaatatggatgtac

SEQ ID NO: 1602030 - DNA, 15 bp, Homo sapiens
caatatggatgtact

SEQ ID NO: 1602031 - DNA, 15 bp, Homo sapiens
aatatggatgtactt

SEQ ID NO: 1602032 - DNA, 15 bp, Homo sapiens
atatggatgtacttc

SEQ ID NO: 1602033 - DNA, 15 bp, Homo sapiens
tatggatgtacttca

SEQ ID NO: 1602034 - DNA, 15 bp, Homo sapiens
atggatgtacttcat

SEQ ID NO: 1602035 - DNA, 15 bp, Homo sapiens
tggatgtacttcata

SEQ ID NO: 1602036 - DNA, 15 bp, Homo sapiens
ggatgtacttcataa

SEQ ID NO: 1602037 - DNA, 15 bp, Homo sapiens
gatgtacttcataat

SEQ ID NO: 1602038 - DNA, 15 bp, Homo sapiens
atgtacttcataatg

SEQ ID NO: 1602039 - DNA, 15 bp, Homo sapiens
tgtacttcataatgg

SEQ ID NO: 1602040 - DNA, 15 bp, Homo sapiens
gtacttcataatgga

SEQ ID NO: 1602041 - DNA, 15 bp, Homo sapiens
tacttcataatggac

SEQ ID NO: 1602042 - DNA, 15 bp, Homo sapiens
acttcataatggact

SEQ ID NO: 1602043 - DNA, 15 bp, Homo sapiens
cttcataatggactt

SEQ ID NO: 1602044 - DNA, 15 bp, Homo sapiens
ttcataatggacttc

SEQ ID NO: 1602045 - DNA, 15 bp, Homo sapiens
tcataatggacttcc

SEQ ID NO: 1602046 - DNA, 15 bp, Homo sapiens
cataatggacttcct

SEQ ID NO: 1602047 - DNA, 15 bp, Homo sapiens
ataatggacttcctc

SEQ ID NO: 1602048 - DNA, 15 bp, Homo sapiens
taatggacttcctca

SEQ ID NO: 1602049 - DNA, 15 bp, Homo sapiens
aatggacttcctcat

SEQ ID NO: 1602050 - DNA, 15 bp, Homo sapiens
atggacttcctcatc

SEQ ID NO: 1602051 - DNA, 15 bp, Homo sapiens
tggacttcctcatca

SEQ ID NO: 1602052 - DNA, 15 bp, Homo sapiens
ggacttcctcatcat

SEQ ID NO: 1602053 - DNA, 15 bp, Homo sapiens
gacttcctcatcatg

SEQ ID NO: 1602054 - DNA, 15 bp, Homo sapiens
acttcctcatcatga

SEQ ID NO: 1602055 - DNA, 15 bp, Homo sapiens
cttcctcatcatgat

SEQ ID NO: 1602056 - DNA, 15 bp, Homo sapiens
ttcctcatcatgatt

SEQ ID NO: 1602057 - DNA, 15 bp, Homo sapiens
tcctcatcatgatta

SEQ ID NO: 1602058 - DNA, 15 bp, Homo sapiens
cctcatcatgattaa

SEQ ID NO: 1602059 - DNA, 15 bp, Homo sapiens
ctcatcatgattaat

SEQ ID NO: 1602060 - DNA, 15 bp, Homo sapiens
tcatcatgattaatg

SEQ ID NO: 1602061 - DNA, 15 bp, Homo sapiens
catcatgattaatga

SEQ ID NO: 1602062 - DNA, 15 bp, Homo sapiens
atcatgattaatgag

SEQ ID NO: 1602063 - DNA, 15 bp, Homo sapiens
tcatgattaatgagt

SEQ ID NO: 1602064 - DNA, 15 bp, Homo sapiens
catgattaatgagtg

SEQ ID NO: 1602065 - DNA, 15 bp, Homo sapiens
atgattaatgagtga

SEQ ID NO: 1602066 - DNA, 15 bp, Homo sapiens
tgattaatgagtgaa

SEQ ID NO: 1602067 - DNA, 15 bp, Homo sapiens
gattaatgagtgaag

SEQ ID NO: 1602068 - DNA, 15 bp, Homo sapiens
attaatgagtgaagt

SEQ ID NO: 1602069 - DNA, 15 bp, Homo sapiens
ttaatgagtgaagtg

SEQ ID NO: 1602070 - DNA, 15 bp, Homo sapiens
taatgagtgaagtga

SEQ ID NO: 1602071 - DNA, 15 bp, Homo sapiens
aatgagtgaagtgac

SEQ ID NO: 1602072 - DNA, 15 bp, Homo sapiens
atgagtgaagtgaca

SEQ ID NO: 1602073 - DNA, 15 bp, Homo sapiens
tgagtgaagtgacat

SEQ ID NO: 1602074 - DNA, 15 bp, Homo sapiens
gagtgaagtgacatt

SEQ ID NO: 1602075 - DNA, 15 bp, Homo sapiens
agtgaagtgacattc

SEQ ID NO: 1602076 - DNA, 15 bp, Homo sapiens
gtgaagtgacattca

SEQ ID NO: 1602077 - DNA, 15 bp, Homo sapiens
tgaagtgacattcaa

SEQ ID NO: 1602078 - DNA, 15 bp, Homo sapiens
gaagtgacattcaaa

SEQ ID NO: 1602079 - DNA, 15 bp, Homo sapiens
aagtgacattcaaac

SEQ ID NO: 1602080 - DNA, 15 bp, Homo sapiens
agtgacattcaaact

SEQ ID NO: 1602081 - DNA, 15 bp, Homo sapiens
gtgacattcaaactt

SEQ ID NO: 1602082 - DNA, 15 bp, Homo sapiens
tgacattcaaacttg

SEQ ID NO: 1602083 - DNA, 15 bp, Homo sapiens
gacattcaaacttgg

SEQ ID NO: 1602084 - DNA, 15 bp, Homo sapiens
acattcaaacttggt

SEQ ID NO: 1602085 - DNA, 15 bp, Homo sapiens
cattcaaacttggta

SEQ ID NO: 1602086 - DNA, 15 bp, Homo sapiens
attcaaacttggtag

SEQ ID NO: 1602087 - DNA, 15 bp, Homo sapiens
ttcaaacttggtagc

SEQ ID NO: 1602088 - DNA, 15 bp, Homo sapiens
tcaaacttggtagct

SEQ ID NO: 1602089 - DNA, 15 bp, Homo sapiens
caaacttggtagctt

SEQ ID NO: 1602090 - DNA, 15 bp, Homo sapiens
aaacttggtagcttt

SEQ ID NO: 1602091 - DNA, 15 bp, Homo sapiens
aacttggtagctttt

SEQ ID NO: 1602092 - DNA, 15 bp, Homo sapiens
acttggtagcttttc

SEQ ID NO: 1602093 - DNA, 15 bp, Homo sapiens
cttggtagcttttca

SEQ ID NO: 1602094 - DNA, 15 bp, Homo sapiens
ttggtagcttttcag

SEQ ID NO: 1602095 - DNA, 15 bp, Homo sapiens
tggtagcttttcagt

SEQ ID NO: 1602096 - DNA, 15 bp, Homo sapiens
ggtagcttttcagta

SEQ ID NO: 1602097 - DNA, 15 bp, Homo sapiens
gtagcttttcagtag

SEQ ID NO: 1602098 - DNA, 15 bp, Homo sapiens
tagcttttcagtaga

SEQ ID NO: 1602099 - DNA, 15 bp, Homo sapiens
agcttttcagtagaa

SEQ ID NO: 1602100 - DNA, 15 bp, Homo sapiens
gcttttcagtagaac

SEQ ID NO: 1602101 - DNA, 15 bp, Homo sapiens
cttttcagtagaact

SEQ ID NO: 1602102 - DNA, 15 bp, Homo sapiens
ttttcagtagaactt

SEQ ID NO: 1602103 - DNA, 15 bp, Homo sapiens
tttcagtagaacttc

SEQ ID NO: 1602104 - DNA, 15 bp, Homo sapiens
ttcagtagaacttcc

SEQ ID NO: 1602105 - DNA, 15 bp, Homo sapiens
tcagtagaacttcct

SEQ ID NO: 1602106 - DNA, 15 bp, Homo sapiens
cagtagaacttcctt

SEQ ID NO: 1602107 - DNA, 15 bp, Homo sapiens
agtagaacttccttt

SEQ ID NO: 1602108 - DNA, 15 bp, Homo sapiens
gtagaacttcctttc

SEQ ID NO: 1602109 - DNA, 15 bp, Homo sapiens
tagaacttcctttcc

SEQ ID NO: 1602110 - DNA, 15 bp, Homo sapiens
agaacttcctttccc

SEQ ID NO: 1602111 - DNA, 15 bp, Homo sapiens
gaacttcctttccca

SEQ ID NO: 1602112 - DNA, 15 bp, Homo sapiens
aacttcctttcccaa

SEQ ID NO: 1602113 - DNA, 15 bp, Homo sapiens
acttcctttcccaac

SEQ ID NO: 1602114 - DNA, 15 bp, Homo sapiens
cttcctttcccaaca

SEQ ID NO: 1602115 - DNA, 15 bp, Homo sapiens
ttcctttcccaacat

SEQ ID NO: 1602116 - DNA, 15 bp, Homo sapiens
tcctttcccaacatt

SEQ ID NO: 1602117 - DNA, 15 bp, Homo sapiens
cctttcccaacattt

SEQ ID NO: 1602118 - DNA, 15 bp, Homo sapiens
ctttcccaacatttt

SEQ ID NO: 1602119 - DNA, 15 bp, Homo sapiens
tttcccaacattttt

SEQ ID NO: 1602120 - DNA, 15 bp, Homo sapiens
ttcccaacatttttt

SEQ ID NO: 1602121 - DNA, 15 bp, Homo sapiens
tcccaacattttttc

SEQ ID NO: 1602122 - DNA, 15 bp, Homo sapiens
cccaacattttttct

SEQ ID NO: 1602123 - DNA, 15 bp, Homo sapiens
ccaacattttttctg

SEQ ID NO: 1602124 - DNA, 15 bp, Homo sapiens
caacattttttctgt

SEQ ID NO: 1602125 - DNA, 15 bp, Homo sapiens
aacattttttctgtt

SEQ ID NO: 1602126 - DNA, 15 bp, Homo sapiens
acattttttctgttc

SEQ ID NO: 1602127 - DNA, 15 bp, Homo sapiens
cattttttctgttcc

SEQ ID NO: 1602128 - DNA, 15 bp, Homo sapiens
attttttctgttcct

SEQ ID NO: 1602129 - DNA, 15 bp, Homo sapiens
ttttttctgttcctt

SEQ ID NO: 1602130 - DNA, 15 bp, Homo sapiens
tttttctgttccttt

SEQ ID NO: 1602131 - DNA, 15 bp, Homo sapiens
ttttctgttccttta

SEQ ID NO: 1602132 - DNA, 15 bp, Homo sapiens
tttctgttcctttaa

SEQ ID NO: 1602133 - DNA, 15 bp, Homo sapiens
ttctgttcctttaat

SEQ ID NO: 1602134 - DNA, 15 bp, Homo sapiens
tctgttcctttaatt

SEQ ID NO: 1602135 - DNA, 15 bp, Homo sapiens
ctgttcctttaatta

SEQ ID NO: 1602136 - DNA, 15 bp, Homo sapiens
tgttcctttaattat

SEQ ID NO: 1602137 - DNA, 15 bp, Homo sapiens
gttcctttaattatg

SEQ ID NO: 1602138 - DNA, 15 bp, Homo sapiens
ttcctttaattatgg

SEQ ID NO: 1602139 - DNA, 15 bp, Homo sapiens
tcctttaattatggc

SEQ ID NO: 1602140 - DNA, 15 bp, Homo sapiens
cctttaattatggca

SEQ ID NO: 1602141 - DNA, 15 bp, Homo sapiens
ctttaattatggcaa

SEQ ID NO: 1602142 - DNA, 15 bp, Homo sapiens
tttaattatggcaat

SEQ ID NO: 1602143 - DNA, 15 bp, Homo sapiens
ttaattatggcaata

SEQ ID NO: 1602144 - DNA, 15 bp, Homo sapiens
taattatggcaatat

SEQ ID NO: 1602145 - DNA, 15 bp, Homo sapiens
aattatggcaatatc

SEQ ID NO: 1602146 - DNA, 15 bp, Homo sapiens
attatggcaatatct

SEQ ID NO: 1602147 - DNA, 15 bp, Homo sapiens
ttatggcaatatctg

SEQ ID NO: 1602148 - DNA, 15 bp, Homo sapiens
tatggcaatatctga

SEQ ID NO: 1602149 - DNA, 15 bp, Homo sapiens
atggcaatatctgag

SEQ ID NO: 1602150 - DNA, 15 bp, Homo sapiens
tggcaatatctgaga

SEQ ID NO: 1602151 - DNA, 15 bp, Homo sapiens
ggcaatatctgagag

SEQ ID NO: 1602152 - DNA, 15 bp, Homo sapiens
gcaatatctgagagc

SEQ ID NO: 1602153 - DNA, 15 bp, Homo sapiens
caatatctgagagct

SEQ ID NO: 1602154 - DNA, 15 bp, Homo sapiens
aatatctgagagctc

SEQ ID NO: 1602155 - DNA, 15 bp, Homo sapiens
atatctgagagctct

SEQ ID NO: 1602156 - DNA, 15 bp, Homo sapiens
tatctgagagctctg

SEQ ID NO: 1602157 - DNA, 15 bp, Homo sapiens
atctgagagctctga

SEQ ID NO: 1602158 - DNA, 15 bp, Homo sapiens
tctgagagctctgaa

SEQ ID NO: 1602159 - DNA, 15 bp, Homo sapiens
ctgagagctctgaac

SEQ ID NO: 1602160 - DNA, 15 bp, Homo sapiens
tgagagctctgaaca

SEQ ID NO: 1602161 - DNA, 15 bp, Homo sapiens
gagagctctgaacat

SEQ ID NO: 1602162 - DNA, 15 bp, Homo sapiens
agagctctgaacata

SEQ ID NO: 1602163 - DNA, 15 bp, Homo sapiens
gagctctgaacataa

SEQ ID NO: 1602164 - DNA, 15 bp, Homo sapiens
agctctgaacataag

SEQ ID NO: 1602165 - DNA, 15 bp, Homo sapiens
gctctgaacataagt

SEQ ID NO: 1602166 - DNA, 15 bp, Homo sapiens
ctctgaacataagtc

SEQ ID NO: 1602167 - DNA, 15 bp, Homo sapiens
tctgaacataagtca

SEQ ID NO: 1602168 - DNA, 15 bp, Homo sapiens
ctgaacataagtcaa

SEQ ID NO: 1602169 - DNA, 15 bp, Homo sapiens
tgaacataagtcaaa

SEQ ID NO: 1602170 - DNA, 15 bp, Homo sapiens
gaacataagtcaaag

SEQ ID NO: 1602171 - DNA, 15 bp, Homo sapiens
aacataagtcaaagg

SEQ ID NO: 1602172 - DNA, 15 bp, Homo sapiens
acataagtcaaaggt

SEQ ID NO: 1602173 - DNA, 15 bp, Homo sapiens
cataagtcaaaggtt

SEQ ID NO: 1602174 - DNA, 15 bp, Homo sapiens
ataagtcaaaggttt

SEQ ID NO: 1602175 - DNA, 15 bp, Homo sapiens
taagtcaaaggtttg

SEQ ID NO: 1602176 - DNA, 15 bp, Homo sapiens
aagtcaaaggtttga

SEQ ID NO: 1602177 - DNA, 15 bp, Homo sapiens
agtcaaaggtttgat

SEQ ID NO: 1602178 - DNA, 15 bp, Homo sapiens
gtcaaaggtttgatt

SEQ ID NO: 1602179 - DNA, 15 bp, Homo sapiens
tcaaaggtttgatta

SEQ ID NO: 1602180 - DNA, 15 bp, Homo sapiens
caaaggtttgattat

SEQ ID NO: 1602181 - DNA, 15 bp, Homo sapiens
aaaggtttgattatt

SEQ ID NO: 1602182 - DNA, 15 bp, Homo sapiens
aaggtttgattattt

SEQ ID NO: 1602183 - DNA, 15 bp, Homo sapiens
aggtttgattatttt

SEQ ID NO: 1602184 - DNA, 15 bp, Homo sapiens
ggtttgattattttt

SEQ ID NO: 1602185 - DNA, 15 bp, Homo sapiens
gtttgattatttttc

SEQ ID NO: 1602186 - DNA, 15 bp, Homo sapiens
tttgattatttttca

SEQ ID NO: 1602187 - DNA, 15 bp, Homo sapiens
ttgattatttttcat

SEQ ID NO: 1602188 - DNA, 15 bp, Homo sapiens
tgattatttttcatg

SEQ ID NO: 1602189 - DNA, 15 bp, Homo sapiens
gattatttttcatgt

SEQ ID NO: 1602190 - DNA, 15 bp, Homo sapiens
attatttttcatgtg

SEQ ID NO: 1602191 - DNA, 15 bp, Homo sapiens
ttatttttcatgtgg

SEQ ID NO: 1602192 - DNA, 15 bp, Homo sapiens
tatttttcatgtggc

SEQ ID NO: 1602193 - DNA, 15 bp, Homo sapiens
atttttcatgtggct

SEQ ID NO: 1602194 - DNA, 15 bp, Homo sapiens
tttttcatgtggctt

SEQ ID NO: 1602195 - DNA, 15 bp, Homo sapiens
ttttcatgtggcttc

SEQ ID NO: 1602196 - DNA, 15 bp, Homo sapiens
tttcatgtggcttcc

SEQ ID NO: 1602197 - DNA, 15 bp, Homo sapiens
ttcatgtggcttcct

SEQ ID NO: 1602198 - DNA, 15 bp, Homo sapiens
tcatgtggcttcctc

SEQ ID NO: 1602199 - DNA, 15 bp, Homo sapiens
catgtggcttcctct

SEQ ID NO: 1602200 - DNA, 15 bp, Homo sapiens
atgtggcttcctctg

SEQ ID NO: 1602201 - DNA, 15 bp, Homo sapiens
tgtggcttcctctgc

SEQ ID NO: 1602202 - DNA, 15 bp, Homo sapiens
gtggcttcctctgct

SEQ ID NO: 1602203 - DNA, 15 bp, Homo sapiens
tggcttcctctgctt

SEQ ID NO: 1602204 - DNA, 15 bp, Homo sapiens
ggcttcctctgcttg

SEQ ID NO: 1602205 - DNA, 15 bp, Homo sapiens
gcttcctctgcttgg

SEQ ID NO: 1602206 - DNA, 15 bp, Homo sapiens
cttcctctgcttgga

SEQ ID NO: 1602207 - DNA, 15 bp, Homo sapiens
ttcctctgcttggaa

SEQ ID NO: 1602208 - DNA, 15 bp, Homo sapiens
tcctctgcttggaac

SEQ ID NO: 1602209 - DNA, 15 bp, Homo sapiens
cctctgcttggaact

SEQ ID NO: 1602210 - DNA, 15 bp, Homo sapiens
ctctgcttggaactt

SEQ ID NO: 1602211 - DNA, 15 bp, Homo sapiens
tctgcttggaacttt

SEQ ID NO: 1602212 - DNA, 15 bp, Homo sapiens
ctgcttggaactttc

SEQ ID NO: 1602213 - DNA, 15 bp, Homo sapiens
tgcttggaactttct

SEQ ID NO: 1602214 - DNA, 15 bp, Homo sapiens
gcttggaactttctg

SEQ ID NO: 1602215 - DNA, 15 bp, Homo sapiens
cttggaactttctgc

SEQ ID NO: 1602216 - DNA, 15 bp, Homo sapiens
ttggaactttctgcc

SEQ ID NO: 1602217 - DNA, 15 bp, Homo sapiens
tggaactttctgccc

SEQ ID NO: 1602218 - DNA, 15 bp, Homo sapiens
ggaactttctgcccc

SEQ ID NO: 1602219 - DNA, 15 bp, Homo sapiens
gaactttctgccccg

SEQ ID NO: 1602220 - DNA, 15 bp, Homo sapiens
aactttctgccccgc

SEQ ID NO: 1602221 - DNA, 15 bp, Homo sapiens
actttctgccccgca

SEQ ID NO: 1602222 - DNA, 15 bp, Homo sapiens
ctttctgccccgcat

SEQ ID NO: 1602223 - DNA, 15 bp, Homo sapiens
tttctgccccgcatc

SEQ ID NO: 1602224 - DNA, 15 bp, Homo sapiens
ttctgccccgcatct

SEQ ID NO: 1602225 - DNA, 15 bp, Homo sapiens
tctgccccgcatctt

SEQ ID NO: 1602226 - DNA, 15 bp, Homo sapiens
ctgccccgcatcttc

SEQ ID NO: 1602227 - DNA, 15 bp, Homo sapiens
tgccccgcatcttcc

SEQ ID NO: 1602228 - DNA, 15 bp, Homo sapiens
gccccgcatcttccc

SEQ ID NO: 1602229 - DNA, 15 bp, Homo sapiens
ccccgcatcttcccg

SEQ ID NO: 1602230 - DNA, 15 bp, Homo sapiens
cccgcatcttcccgt

SEQ ID NO: 1602231 - DNA, 15 bp, Homo sapiens
ccgcatcttcccgtt

SEQ ID NO: 1602232 - DNA, 15 bp, Homo sapiens
cgcatcttcccgttg

SEQ ID NO: 1602233 - DNA, 15 bp, Homo sapiens
gcatcttcccgttgc

SEQ ID NO: 1602234 - DNA, 15 bp, Homo sapiens
catcttcccgttgcc

SEQ ID NO: 1602235 - DNA, 15 bp, Homo sapiens
atcttcccgttgccc

SEQ ID NO: 1602236 - DNA, 15 bp, Homo sapiens
tcttcccgttgcccc

SEQ ID NO: 1602237 - DNA, 15 bp, Homo sapiens
cttcccgttgccccc

SEQ ID NO: 1602238 - DNA, 15 bp, Homo sapiens
ttcccgttgccccct

SEQ ID NO: 1602239 - DNA, 15 bp, Homo sapiens
tcccgttgccccctg

SEQ ID NO: 1602240 - DNA, 15 bp, Homo sapiens
cccgttgccccctgt

SEQ ID NO: 1602241 - DNA, 15 bp, Homo sapiens
ccgttgccccctgtg

SEQ ID NO: 1602242 - DNA, 15 bp, Homo sapiens
cgttgccccctgtgt

SEQ ID NO: 1602243 - DNA, 15 bp, Homo sapiens
gttgccccctgtgtc

SEQ ID NO: 1602244 - DNA, 15 bp, Homo sapiens
ttgccccctgtgtcc

SEQ ID NO: 1602245 - DNA, 15 bp, Homo sapiens
tgccccctgtgtcct

SEQ ID NO: 1602246 - DNA, 15 bp, Homo sapiens
gccccctgtgtcctc

SEQ ID NO: 1602247 - DNA, 15 bp, Homo sapiens
ccccctgtgtcctct

SEQ ID NO: 1602248 - DNA, 15 bp, Homo sapiens
cccctgtgtcctctt

SEQ ID NO: 1602249 - DNA, 15 bp, Homo sapiens
ccctgtgtcctcttg

SEQ ID NO: 1602250 - DNA, 15 bp, Homo sapiens
cctgtgtcctcttgt

SEQ ID NO: 1602251 - DNA, 15 bp, Homo sapiens
ctgtgtcctcttgtc

SEQ ID NO: 1602252 - DNA, 15 bp, Homo sapiens
tgtgtcctcttgtca

SEQ ID NO: 1602253 - DNA, 15 bp, Homo sapiens
gtgtcctcttgtcat

SEQ ID NO: 1602254 - DNA, 15 bp, Homo sapiens
tgtcctcttgtcatg

SEQ ID NO: 1602255 - DNA, 15 bp, Homo sapiens
gtcctcttgtcatgc

SEQ ID NO: 1602256 - DNA, 15 bp, Homo sapiens
tcctcttgtcatgcc

SEQ ID NO: 1602257 - DNA, 15 bp, Homo sapiens
cctcttgtcatgccc

SEQ ID NO: 1602258 - DNA, 15 bp, Homo sapiens
ctcttgtcatgcccc

SEQ ID NO: 1602259 - DNA, 15 bp, Homo sapiens
tcttgtcatgcccct

SEQ ID NO: 1602260 - DNA, 15 bp, Homo sapiens
cttgtcatgccccta

SEQ ID NO: 1602261 - DNA, 15 bp, Homo sapiens
ttgtcatgcccctac

SEQ ID NO: 1602262 - DNA, 15 bp, Homo sapiens
tgtcatgcccctacc

SEQ ID NO: 1602263 - DNA, 15 bp, Homo sapiens
gtcatgcccctaccc

SEQ ID NO: 1602264 - DNA, 15 bp, Homo sapiens
tcatgcccctaccct

SEQ ID NO: 1602265 - DNA, 15 bp, Homo sapiens
catgcccctaccctt

SEQ ID NO: 1602266 - DNA, 15 bp, Homo sapiens
atgcccctacccttt

SEQ ID NO: 1602267 - DNA, 15 bp, Homo sapiens
tgcccctaccctttt

SEQ ID NO: 1602268 - DNA, 15 bp, Homo sapiens
gcccctacccttttt

SEQ ID NO: 1602269 - DNA, 15 bp, Homo sapiens
cccctaccctttttt

SEQ ID NO: 1602270 - DNA, 15 bp, Homo sapiens
ccctacccttttttg

SEQ ID NO: 1602271 - DNA, 15 bp, Homo sapiens
cctacccttttttga

SEQ ID NO: 1602272 - DNA, 15 bp, Homo sapiens
ctacccttttttgag

SEQ ID NO: 1602273 - DNA, 15 bp, Homo sapiens
tacccttttttgagt

SEQ ID NO: 1602274 - DNA, 15 bp, Homo sapiens
acccttttttgagtg

SEQ ID NO: 1602275 - DNA, 15 bp, Homo sapiens
cccttttttgagtgt

SEQ ID NO: 1602276 - DNA, 15 bp, Homo sapiens
ccttttttgagtgtg

SEQ ID NO: 1602277 - DNA, 15 bp, Homo sapiens
cttttttgagtgtgt

SEQ ID NO: 1602278 - DNA, 15 bp, Homo sapiens
ttttttgagtgtgtc

SEQ ID NO: 1602279 - DNA, 15 bp, Homo sapiens
tttttgagtgtgtct

SEQ ID NO: 1602280 - DNA, 15 bp, Homo sapiens
ttttgagtgtgtcta

SEQ ID NO: 1602281 - DNA, 15 bp, Homo sapiens
tttgagtgtgtctat

SEQ ID NO: 1602282 - DNA, 15 bp, Homo sapiens
ttgagtgtgtctatt

SEQ ID NO: 1602283 - DNA, 15 bp, Homo sapiens
tgagtgtgtctattt

SEQ ID NO: 1602284 - DNA, 15 bp, Homo sapiens
gagtgtgtctatttt

SEQ ID NO: 1602285 - DNA, 15 bp, Homo sapiens
agtgtgtctattttc

SEQ ID NO: 1602286 - DNA, 15 bp, Homo sapiens
gtgtgtctattttct

SEQ ID NO: 1602287 - DNA, 15 bp, Homo sapiens
tgtgtctattttctg

SEQ ID NO: 1602288 - DNA, 15 bp, Homo sapiens
gtgtctattttctgg

SEQ ID NO: 1602289 - DNA, 15 bp, Homo sapiens
tgtctattttctggc

SEQ ID NO: 1602290 - DNA, 15 bp, Homo sapiens
gtctattttctggca

SEQ ID NO: 1602291 - DNA, 15 bp, Homo sapiens
tctattttctggcac

SEQ ID NO: 1602292 - DNA, 15 bp, Homo sapiens
ctattttctggcact

SEQ ID NO: 1602293 - DNA, 15 bp, Homo sapiens
tattttctggcacta

SEQ ID NO: 1602294 - DNA, 15 bp, Homo sapiens
attttctggcactac

SEQ ID NO: 1602295 - DNA, 15 bp, Homo sapiens
ttttctggcactaca

SEQ ID NO: 1602296 - DNA, 15 bp, Homo sapiens
tttctggcactacaa

SEQ ID NO: 1602297 - DNA, 15 bp, Homo sapiens
ttctggcactacaag

SEQ ID NO: 1602298 - DNA, 15 bp, Homo sapiens
tctggcactacaaga

SEQ ID NO: 1602299 - DNA, 15 bp, Homo sapiens
ctggcactacaagac

SEQ ID NO: 1602300 - DNA, 15 bp, Homo sapiens
tggcactacaagaca

SEQ ID NO: 1602301 - DNA, 15 bp, Homo sapiens
ggcactacaagacat

SEQ ID NO: 1602302 - DNA, 15 bp, Homo sapiens
gcactacaagacata

SEQ ID NO: 1602303 - DNA, 15 bp, Homo sapiens
cactacaagacataa

SEQ ID NO: 1602304 - DNA, 15 bp, Homo sapiens
actacaagacataac

SEQ ID NO: 1602305 - DNA, 15 bp, Homo sapiens
ctacaagacataaca

SEQ ID NO: 1602306 - DNA, 15 bp, Homo sapiens
tacaagacataacag

SEQ ID NO: 1602307 - DNA, 15 bp, Homo sapiens
acaagacataacagg

SEQ ID NO: 1602308 - DNA, 15 bp, Homo sapiens
caagacataacaggc

SEQ ID NO: 1602309 - DNA, 15 bp, Homo sapiens
aagacataacaggct

SEQ ID NO: 1602310 - DNA, 15 bp, Homo sapiens
agacataacaggctc

SEQ ID NO: 1602311 - DNA, 15 bp, Homo sapiens
gacataacaggctca

SEQ ID NO: 1602312 - DNA, 15 bp, Homo sapiens
acataacaggctcat

SEQ ID NO: 1602313 - DNA, 15 bp, Homo sapiens
cataacaggctcatc

SEQ ID NO: 1602314 - DNA, 15 bp, Homo sapiens
ataacaggctcatct

SEQ ID NO: 1602315 - DNA, 15 bp, Homo sapiens
taacaggctcatctt

SEQ ID NO: 1602316 - DNA, 15 bp, Homo sapiens
aacaggctcatcttg

SEQ ID NO: 1602317 - DNA, 15 bp, Homo sapiens
acaggctcatcttgt

SEQ ID NO: 1602318 - DNA, 15 bp, Homo sapiens
caggctcatcttgtg

SEQ ID NO: 1602319 - DNA, 15 bp, Homo sapiens
aggctcatcttgtgt

SEQ ID NO: 1602320 - DNA, 15 bp, Homo sapiens
ggctcatcttgtgtt

SEQ ID NO: 1602321 - DNA, 15 bp, Homo sapiens
gctcatcttgtgttt

SEQ ID NO: 1602322 - DNA, 15 bp, Homo sapiens
ctcatcttgtgtttt

SEQ ID NO: 1602323 - DNA, 15 bp, Homo sapiens
tcatcttgtgttttc

SEQ ID NO: 1602324 - DNA, 15 bp, Homo sapiens
catcttgtgttttcc

SEQ ID NO: 1602325 - DNA, 15 bp, Homo sapiens
atcttgtgttttccc

SEQ ID NO: 1602326 - DNA, 15 bp, Homo sapiens
tcttgtgttttccct

SEQ ID NO: 1602327 - DNA, 15 bp, Homo sapiens
cttgtgttttcccta

SEQ ID NO: 1602328 - DNA, 15 bp, Homo sapiens
ttgtgttttccctac

SEQ ID NO: 1602329 - DNA, 15 bp, Homo sapiens
tgtgttttccctacc

SEQ ID NO: 1602330 - DNA, 15 bp, Homo sapiens
gtgttttccctaccc

SEQ ID NO: 1602331 - DNA, 15 bp, Homo sapiens
tgttttccctaccct

SEQ ID NO: 1602332 - DNA, 15 bp, Homo sapiens
gttttccctaccctg

SEQ ID NO: 1602333 - DNA, 15 bp, Homo sapiens
ttttccctaccctga

SEQ ID NO: 1602334 - DNA, 15 bp, Homo sapiens
tttccctaccctgac

SEQ ID NO: 1602335 - DNA, 15 bp, Homo sapiens
ttccctaccctgacc

SEQ ID NO: 1602336 - DNA, 15 bp, Homo sapiens
tccctaccctgaccc

SEQ ID NO: 1602337 - DNA, 15 bp, Homo sapiens
ccctaccctgaccca

SEQ ID NO: 1602338 - DNA, 15 bp, Homo sapiens
cctaccctgacccag

SEQ ID NO: 1602339 - DNA, 15 bp, Homo sapiens
ctaccctgacccaga

SEQ ID NO: 1602340 - DNA, 15 bp, Homo sapiens
taccctgacccagaa

SEQ ID NO: 1602341 - DNA, 15 bp, Homo sapiens
accctgacccagaat

SEQ ID NO: 1602342 - DNA, 15 bp, Homo sapiens
ccctgacccagaatc

SEQ ID NO: 1602343 - DNA, 15 bp, Homo sapiens
cctgacccagaatca

SEQ ID NO: 1602344 - DNA, 15 bp, Homo sapiens
ctgacccagaatcag

SEQ ID NO: 1602345 - DNA, 15 bp, Homo sapiens
tgacccagaatcagc

SEQ ID NO: 1602346 - DNA, 15 bp, Homo sapiens
gacccagaatcagcc

SEQ ID NO: 1602347 - DNA, 15 bp, Homo sapiens
acccagaatcagcca

SEQ ID NO: 1602348 - DNA, 15 bp, Homo sapiens
cccagaatcagccat

SEQ ID NO: 1602349 - DNA, 15 bp, Homo sapiens
ccagaatcagccatt

SEQ ID NO: 1602350 - DNA, 15 bp, Homo sapiens
cagaatcagccatta

SEQ ID NO: 1602351 - DNA, 15 bp, Homo sapiens
agaatcagccattac

SEQ ID NO: 1602352 - DNA, 15 bp, Homo sapiens
gaatcagccattact

SEQ ID NO: 1602353 - DNA, 15 bp, Homo sapiens
aatcagccattactt

SEQ ID NO: 1602354 - DNA, 15 bp, Homo sapiens
atcagccattacttc

SEQ ID NO: 1602355 - DNA, 15 bp, Homo sapiens
tcagccattacttca

SEQ ID NO: 1602356 - DNA, 15 bp, Homo sapiens
cagccattacttcaa

SEQ ID NO: 1602357 - DNA, 15 bp, Homo sapiens
agccattacttcaag

SEQ ID NO: 1602358 - DNA, 15 bp, Homo sapiens
gccattacttcaagg

SEQ ID NO: 1602359 - DNA, 15 bp, Homo sapiens
ccattacttcaagga

SEQ ID NO: 1602360 - DNA, 15 bp, Homo sapiens
cattacttcaaggag

SEQ ID NO: 1602361 - DNA, 15 bp, Homo sapiens
attacttcaaggagc

SEQ ID NO: 1602362 - DNA, 15 bp, Homo sapiens
ttacttcaaggagcc

SEQ ID NO: 1602363 - DNA, 15 bp, Homo sapiens
tacttcaaggagccc

SEQ ID NO: 1602364 - DNA, 15 bp, Homo sapiens
acttcaaggagccct

SEQ ID NO: 1602365 - DNA, 15 bp, Homo sapiens
cttcaaggagccctg

SEQ ID NO: 1602366 - DNA, 15 bp, Homo sapiens
ttcaaggagccctgg

SEQ ID NO: 1602367 - DNA, 15 bp, Homo sapiens
tcaaggagccctggt

SEQ ID NO: 1602368 - DNA, 15 bp, Homo sapiens
caaggagccctggtt

SEQ ID NO: 1602369 - DNA, 15 bp, Homo sapiens
aaggagccctggttc

SEQ ID NO: 1602370 - DNA, 15 bp, Homo sapiens
aggagccctggttcc

SEQ ID NO: 1602371 - DNA, 15 bp, Homo sapiens
ggagccctggttcca

SEQ ID NO: 1602372 - DNA, 15 bp, Homo sapiens
gagccctggttccat

SEQ ID NO: 1602373 - DNA, 15 bp, Homo sapiens
agccctggttccatt

SEQ ID NO: 1602374 - DNA, 15 bp, Homo sapiens
gccctggttccatta

SEQ ID NO: 1602375 - DNA, 15 bp, Homo sapiens
ccctggttccattat

SEQ ID NO: 1602376 - DNA, 15 bp, Homo sapiens
cctggttccattatt

SEQ ID NO: 1602377 - DNA, 15 bp, Homo sapiens
ctggttccattattg

SEQ ID NO: 1602378 - DNA, 15 bp, Homo sapiens
tggttccattattgg

SEQ ID NO: 1602379 - DNA, 15 bp, Homo sapiens
ggttccattattgga

SEQ ID NO: 1602380 - DNA, 15 bp, Homo sapiens
gttccattattggag

SEQ ID NO: 1602381 - DNA, 15 bp, Homo sapiens
ttccattattggaga

SEQ ID NO: 1602382 - DNA, 15 bp, Homo sapiens
tccattattggagaa

SEQ ID NO: 1602383 - DNA, 15 bp, Homo sapiens
ccattattggagaat

SEQ ID NO: 1602384 - DNA, 15 bp, Homo sapiens
cattattggagaata

SEQ ID NO: 1602385 - DNA, 15 bp, Homo sapiens
attattggagaatac

SEQ ID NO: 1602386 - DNA, 15 bp, Homo sapiens
ttattggagaatact

SEQ ID NO: 1602387 - DNA, 15 bp, Homo sapiens
tattggagaatacta

SEQ ID NO: 1602388 - DNA, 15 bp, Homo sapiens
attggagaatactat

SEQ ID NO: 1602389 - DNA, 15 bp, Homo sapiens
ttggagaatactatt

SEQ ID NO: 1602390 - DNA, 15 bp, Homo sapiens
tggagaatactatta

SEQ ID NO: 1602391 - DNA, 15 bp, Homo sapiens
ggagaatactattag

SEQ ID NO: 1602392 - DNA, 15 bp, Homo sapiens
gagaatactattaga

SEQ ID NO: 1602393 - DNA, 15 bp, Homo sapiens
agaatactattagaa

SEQ ID NO: 1602394 - DNA, 15 bp, Homo sapiens
gaatactattagaaa

SEQ ID NO: 1602395 - DNA, 15 bp, Homo sapiens
aatactattagaaac

SEQ ID NO: 1602396 - DNA, 15 bp, Homo sapiens
atactattagaaacc

SEQ ID NO: 1602397 - DNA, 15 bp, Homo sapiens
tactattagaaacca

SEQ ID NO: 1602398 - DNA, 15 bp, Homo sapiens
actattagaaaccag

SEQ ID NO: 1602399 - DNA, 15 bp, Homo sapiens
ctattagaaaccagg

SEQ ID NO: 1602400 - DNA, 15 bp, Homo sapiens
tattagaaaccagga

SEQ ID NO: 1602401 - DNA, 15 bp, Homo sapiens
attagaaaccaggat

SEQ ID NO: 1602402 - DNA, 15 bp, Homo sapiens
ttagaaaccaggatc

SEQ ID NO: 1602403 - DNA, 15 bp, Homo sapiens
tagaaaccaggatct

SEQ ID NO: 1602404 - DNA, 15 bp, Homo sapiens
agaaaccaggatctg

SEQ ID NO: 1602405 - DNA, 15 bp, Homo sapiens
gaaaccaggatctgg

SEQ ID NO: 1602406 - DNA, 15 bp, Homo sapiens
aaaccaggatctggt

SEQ ID NO: 1602407 - DNA, 15 bp, Homo sapiens
aaccaggatctggtg

SEQ ID NO: 1602408 - DNA, 15 bp, Homo sapiens
accaggatctggtgc

SEQ ID NO: 1602409 - DNA, 15 bp, Homo sapiens
ccaggatctggtgct

SEQ ID NO: 1602410 - DNA, 15 bp, Homo sapiens
caggatctggtgcta

SEQ ID NO: 1602411 - DNA, 15 bp, Homo sapiens
aggatctggtgctag

SEQ ID NO: 1602412 - DNA, 15 bp, Homo sapiens
ggatctggtgctagg

SEQ ID NO: 1602413 - DNA, 15 bp, Homo sapiens
gatctggtgctaggc

SEQ ID NO: 1602414 - DNA, 15 bp, Homo sapiens
atctggtgctaggca

SEQ ID NO: 1602415 - DNA, 15 bp, Homo sapiens
tctggtgctaggcat

SEQ ID NO: 1602416 - DNA, 15 bp, Homo sapiens
ctggtgctaggcatg

SEQ ID NO: 1602417 - DNA, 15 bp, Homo sapiens
tggtgctaggcatgc

SEQ ID NO: 1602418 - DNA, 15 bp, Homo sapiens
ggtgctaggcatgct

SEQ ID NO: 1602419 - DNA, 15 bp, Homo sapiens
gtgctaggcatgctc

SEQ ID NO: 1602420 - DNA, 15 bp, Homo sapiens
tgctaggcatgctca

SEQ ID NO: 1602421 - DNA, 15 bp, Homo sapiens
gctaggcatgctcat

SEQ ID NO: 1602422 - DNA, 15 bp, Homo sapiens
ctaggcatgctcatt

SEQ ID NO: 1602423 - DNA, 15 bp, Homo sapiens
taggcatgctcattt

SEQ ID NO: 1602424 - DNA, 15 bp, Homo sapiens
aggcatgctcatttc

SEQ ID NO: 1602425 - DNA, 15 bp, Homo sapiens
ggcatgctcatttct

SEQ ID NO: 1602426 - DNA, 15 bp, Homo sapiens
gcatgctcatttcta

SEQ ID NO: 1602427 - DNA, 15 bp, Homo sapiens
catgctcatttctat

SEQ ID NO: 1602428 - DNA, 15 bp, Homo sapiens
atgctcatttctatt

SEQ ID NO: 1602429 - DNA, 15 bp, Homo sapiens
tgctcatttctattg

SEQ ID NO: 1602430 - DNA, 15 bp, Homo sapiens
gctcatttctattgg

SEQ ID NO: 1602431 - DNA, 15 bp, Homo sapiens
ctcatttctattgga

SEQ ID NO: 1602432 - DNA, 15 bp, Homo sapiens
tcatttctattggag

SEQ ID NO: 1602433 - DNA, 15 bp, Homo sapiens
catttctattggagt

SEQ ID NO: 1602434 - DNA, 15 bp, Homo sapiens
atttctattggagtg

SEQ ID NO: 1602435 - DNA, 15 bp, Homo sapiens
tttctattggagtgt

SEQ ID NO: 1602436 - DNA, 15 bp, Homo sapiens
ttctattggagtgtc

SEQ ID NO: 1602437 - DNA, 15 bp, Homo sapiens
tctattggagtgtca

SEQ ID NO: 1602438 - DNA, 15 bp, Homo sapiens
ctattggagtgtcat

SEQ ID NO: 1602439 - DNA, 15 bp, Homo sapiens
tattggagtgtcata

SEQ ID NO: 1602440 - DNA, 15 bp, Homo sapiens
attggagtgtcatac

SEQ ID NO: 1602441 - DNA, 15 bp, Homo sapiens
ttggagtgtcataca

SEQ ID NO: 1602442 - DNA, 15 bp, Homo sapiens
tggagtgtcatacaa

SEQ ID NO: 1602443 - DNA, 15 bp, Homo sapiens
ggagtgtcatacaaa

SEQ ID NO: 1602444 - DNA, 15 bp, Homo sapiens
gagtgtcatacaaac

SEQ ID NO: 1602445 - DNA, 15 bp, Homo sapiens
agtgtcatacaaaca

SEQ ID NO: 1602446 - DNA, 15 bp, Homo sapiens
gtgtcatacaaacaa

SEQ ID NO: 1602447 - DNA, 15 bp, Homo sapiens
tgtcatacaaacaat

SEQ ID NO: 1602448 - DNA, 15 bp, Homo sapiens
gtcatacaaacaatt

SEQ ID NO: 1602449 - DNA, 15 bp, Homo sapiens
tcatacaaacaattt

SEQ ID NO: 1602450 - DNA, 15 bp, Homo sapiens
catacaaacaatttg

SEQ ID NO: 1602451 - DNA, 15 bp, Homo sapiens
atacaaacaatttgt

SEQ ID NO: 1602452 - DNA, 15 bp, Homo sapiens
tacaaacaatttgta

SEQ ID NO: 1602453 - DNA, 15 bp, Homo sapiens
acaaacaatttgtaa

SEQ ID NO: 1602454 - DNA, 15 bp, Homo sapiens
caaacaatttgtaaa

SEQ ID NO: 1602455 - DNA, 15 bp, Homo sapiens
aaacaatttgtaaat

SEQ ID NO: 1602456 - DNA, 15 bp, Homo sapiens
aacaatttgtaaatt

SEQ ID NO: 1602457 - DNA, 15 bp, Homo sapiens
acaatttgtaaattg

SEQ ID NO: 1602458 - DNA, 15 bp, Homo sapiens
caatttgtaaattgt

SEQ ID NO: 1602459 - DNA, 15 bp, Homo sapiens
aatttgtaaattgtt

SEQ ID NO: 1602460 - DNA, 15 bp, Homo sapiens
atttgtaaattgttt

SEQ ID NO: 1602461 - DNA, 15 bp, Homo sapiens
tttgtaaattgtttg

SEQ ID NO: 1602462 - DNA, 15 bp, Homo sapiens
ttgtaaattgtttgt

SEQ ID NO: 1602463 - DNA, 15 bp, Homo sapiens
tgtaaattgtttgta

SEQ ID NO: 1602464 - DNA, 15 bp, Homo sapiens
gtaaattgtttgtag

SEQ ID NO: 1602465 - DNA, 15 bp, Homo sapiens
taaattgtttgtagg

SEQ ID NO: 1602466 - DNA, 15 bp, Homo sapiens
aaattgtttgtaggt

SEQ ID NO: 1602467 - DNA, 15 bp, Homo sapiens
aattgtttgtaggtc

SEQ ID NO: 1602468 - DNA, 15 bp, Homo sapiens
attgtttgtaggtcc

SEQ ID NO: 1602469 - DNA, 15 bp, Homo sapiens
ttgtttgtaggtcct

SEQ ID NO: 1602470 - DNA, 15 bp, Homo sapiens
tgtttgtaggtcctc

SEQ ID NO: 1602471 - DNA, 15 bp, Homo sapiens
gtttgtaggtcctcc

SEQ ID NO: 1602472 - DNA, 15 bp, Homo sapiens
tttgtaggtcctccc

SEQ ID NO: 1602473 - DNA, 15 bp, Homo sapiens
ttgtaggtcctccca

SEQ ID NO: 1602474 - DNA, 15 bp, Homo sapiens
tgtaggtcctcccag

SEQ ID NO: 1602475 - DNA, 15 bp, Homo sapiens
gtaggtcctcccagt

SEQ ID NO: 1602476 - DNA, 15 bp, Homo sapiens
taggtcctcccagtg

SEQ ID NO: 1602477 - DNA, 15 bp, Homo sapiens
aggtcctcccagtgg

SEQ ID NO: 1602478 - DNA, 15 bp, Homo sapiens
ggtcctcccagtgga

SEQ ID NO: 1602479 - DNA, 15 bp, Homo sapiens
gtcctcccagtggat

SEQ ID NO: 1602480 - DNA, 15 bp, Homo sapiens
tcctcccagtggata

SEQ ID NO: 1602481 - DNA, 15 bp, Homo sapiens
cctcccagtggatag

SEQ ID NO: 1602482 - DNA, 15 bp, Homo sapiens
ctcccagtggatagg

SEQ ID NO: 1602483 - DNA, 15 bp, Homo sapiens
tcccagtggatagga

SEQ ID NO: 1602484 - DNA, 15 bp, Homo sapiens
cccagtggataggat

SEQ ID NO: 1602485 - DNA, 15 bp, Homo sapiens
ccagtggataggatt

SEQ ID NO: 1602486 - DNA, 15 bp, Homo sapiens
cagtggataggatta

SEQ ID NO: 1602487 - DNA, 15 bp, Homo sapiens
agtggataggattag

SEQ ID NO: 1602488 - DNA, 15 bp, Homo sapiens
gtggataggattagg

SEQ ID NO: 1602489 - DNA, 15 bp, Homo sapiens
tggataggattagga

SEQ ID NO: 1602490 - DNA, 15 bp, Homo sapiens
ggataggattaggaa

SEQ ID NO: 1602491 - DNA, 15 bp, Homo sapiens
gataggattaggaaa

SEQ ID NO: 1602492 - DNA, 15 bp, Homo sapiens
ataggattaggaaat

SEQ ID NO: 1602493 - DNA, 15 bp, Homo sapiens
taggattaggaaata

SEQ ID NO: 1602494 - DNA, 15 bp, Homo sapiens
aggattaggaaataa

SEQ ID NO: 1602495 - DNA, 15 bp, Homo sapiens
ggattaggaaataaa

SEQ ID NO: 1602496 - DNA, 15 bp, Homo sapiens
gattaggaaataaaa

SEQ ID NO: 1602497 - DNA, 15 bp, Homo sapiens
attaggaaataaaac

SEQ ID NO: 1602498 - DNA, 15 bp, Homo sapiens
ttaggaaataaaaca

SEQ ID NO: 1602499 - DNA, 15 bp, Homo sapiens
taggaaataaaacat

SEQ ID NO: 1602500 - DNA, 15 bp, Homo sapiens
aggaaataaaacatg

SEQ ID NO: 1602501 - DNA, 15 bp, Homo sapiens
ggaaataaaacatgc

SEQ ID NO: 1602502 - DNA, 15 bp, Homo sapiens
gaaataaaacatgca

SEQ ID NO: 1602503 - DNA, 15 bp, Homo sapiens
aaataaaacatgcat

SEQ ID NO: 1602504 - DNA, 15 bp, Homo sapiens
aataaaacatgcata

SEQ ID NO: 1602505 - DNA, 15 bp, Homo sapiens
ataaaacatgcatac

SEQ ID NO: 1602506 - DNA, 15 bp, Homo sapiens
taaaacatgcatact

SEQ ID NO: 1602507 - DNA, 15 bp, Homo sapiens
aaaacatgcatacta

SEQ ID NO: 1602508 - DNA, 15 bp, Homo sapiens
aaacatgcatactaa

SEQ ID NO: 1602509 - DNA, 15 bp, Homo sapiens
aacatgcatactaac

SEQ ID NO: 1602510 - DNA, 15 bp, Homo sapiens
acatgcatactaacc

SEQ ID NO: 1602511 - DNA, 15 bp, Homo sapiens
catgcatactaacca

SEQ ID NO: 1602512 - DNA, 15 bp, Homo sapiens
atgcatactaaccat

SEQ ID NO: 1602513 - DNA, 15 bp, Homo sapiens
tgcatactaaccatg

SEQ ID NO: 1602514 - DNA, 15 bp, Homo sapiens
gcatactaaccatgc

SEQ ID NO: 1602515 - DNA, 15 bp, Homo sapiens
catactaaccatgca

SEQ ID NO: 1602516 - DNA, 15 bp, Homo sapiens
atactaaccatgcat

SEQ ID NO: 1602517 - DNA, 15 bp, Homo sapiens
tactaaccatgcata

SEQ ID NO: 1602518 - DNA, 15 bp, Homo sapiens
actaaccatgcatac

SEQ ID NO: 1602519 - DNA, 15 bp, Homo sapiens
ctaaccatgcataca

SEQ ID NO: 1602520 - DNA, 15 bp, Homo sapiens
taaccatgcatacac

SEQ ID NO: 1602521 - DNA, 15 bp, Homo sapiens
aaccatgcatacaca

SEQ ID NO: 1602522 - DNA, 15 bp, Homo sapiens
accatgcatacacac

SEQ ID NO: 1602523 - DNA, 15 bp, Homo sapiens
ccatgcatacacaca

SEQ ID NO: 1602524 - DNA, 15 bp, Homo sapiens
catgcatacacacac

SEQ ID NO: 1602525 - DNA, 15 bp, Homo sapiens
atgcatacacacaca

SEQ ID NO: 1602526 - DNA, 15 bp, Homo sapiens
tgcatacacacacat

SEQ ID NO: 1602527 - DNA, 15 bp, Homo sapiens
gcatacacacacatc

SEQ ID NO: 1602528 - DNA, 15 bp, Homo sapiens
catacacacacatct

SEQ ID NO: 1602529 - DNA, 15 bp, Homo sapiens
atacacacacatcta

SEQ ID NO: 1602530 - DNA, 15 bp, Homo sapiens
tacacacacatctac

SEQ ID NO: 1602531 - DNA, 15 bp, Homo sapiens
acacacacatctacg

SEQ ID NO: 1602532 - DNA, 15 bp, Homo sapiens
cacacacatctacgt

SEQ ID NO: 1602533 - DNA, 15 bp, Homo sapiens
acacacatctacgtc

SEQ ID NO: 1602534 - DNA, 15 bp, Homo sapiens
cacacatctacgtct

SEQ ID NO: 1602535 - DNA, 15 bp, Homo sapiens
acacatctacgtcta

SEQ ID NO: 1602536 - DNA, 15 bp, Homo sapiens
cacatctacgtctat

SEQ ID NO: 1602537 - DNA, 15 bp, Homo sapiens
acatctacgtctatt

SEQ ID NO: 1602538 - DNA, 15 bp, Homo sapiens
catctacgtctattt

SEQ ID NO: 1602539 - DNA, 15 bp, Homo sapiens
atctacgtctatttc

SEQ ID NO: 1602540 - DNA, 15 bp, Homo sapiens
tctacgtctatttct

SEQ ID NO: 1602541 - DNA, 15 bp, Homo sapiens
ctacgtctatttctg

SEQ ID NO: 1602542 - DNA, 15 bp, Homo sapiens
tacgtctatttctgt

SEQ ID NO: 1602543 - DNA, 15 bp, Homo sapiens
acgtctatttctgta

SEQ ID NO: 1602544 - DNA, 15 bp, Homo sapiens
cgtctatttctgtat

SEQ ID NO: 1602545 - DNA, 15 bp, Homo sapiens
gtctatttctgtatc

SEQ ID NO: 1602546 - DNA, 15 bp, Homo sapiens
tctatttctgtatct

SEQ ID NO: 1602547 - DNA, 15 bp, Homo sapiens
ctatttctgtatctg

SEQ ID NO: 1602548 - DNA, 15 bp, Homo sapiens
tatttctgtatctgt

SEQ ID NO: 1602549 - DNA, 15 bp, Homo sapiens
atttctgtatctgtc

SEQ ID NO: 1602550 - DNA, 15 bp, Homo sapiens
tttctgtatctgtct

SEQ ID NO: 1602551 - DNA, 15 bp, Homo sapiens
ttctgtatctgtctg

SEQ ID NO: 1602552 - DNA, 15 bp, Homo sapiens
tctgtatctgtctgt

SEQ ID NO: 1602553 - DNA, 15 bp, Homo sapiens
ctgtatctgtctgta

SEQ ID NO: 1602554 - DNA, 15 bp, Homo sapiens
tgtatctgtctgtat

SEQ ID NO: 1602555 - DNA, 15 bp, Homo sapiens
gtatctgtctgtata

SEQ ID NO: 1602556 - DNA, 15 bp, Homo sapiens
tatctgtctgtatac

SEQ ID NO: 1602557 - DNA, 15 bp, Homo sapiens
atctgtctgtataca

SEQ ID NO: 1602558 - DNA, 15 bp, Homo sapiens
tctgtctgtatacat

SEQ ID NO: 1602559 - DNA, 15 bp, Homo sapiens
ctgtctgtatacata

SEQ ID NO: 1602560 - DNA, 15 bp, Homo sapiens
tgtctgtatacatat

SEQ ID NO: 1602561 - DNA, 15 bp, Homo sapiens
gtctgtatacatatt

SEQ ID NO: 1602562 - DNA, 15 bp, Homo sapiens
tctgtatacatatta

SEQ ID NO: 1602563 - DNA, 15 bp, Homo sapiens
ctgtatacatattaa

SEQ ID NO: 1602564 - DNA, 15 bp, Homo sapiens
tgtatacatattaaa

SEQ ID NO: 1602565 - DNA, 15 bp, Homo sapiens
gtatacatattaaaa

SEQ ID NO: 1602566 - DNA, 15 bp, Homo sapiens
tatacatattaaaat

SEQ ID NO: 1602567 - DNA, 15 bp, Homo sapiens
atacatattaaaata

SEQ ID NO: 1602568 - DNA, 15 bp, Homo sapiens
tacatattaaaataa

SEQ ID NO: 1602569 - DNA, 15 bp, Homo sapiens
acatattaaaataaa

SEQ ID NO: 1602570 - DNA, 15 bp, Homo sapiens
catattaaaataaac

SEQ ID NO: 1602571 - DNA, 15 bp, Homo sapiens
atattaaaataaaca

SEQ ID NO: 1602572 - DNA, 15 bp, Homo sapiens
tattaaaataaacat

SEQ ID NO: 1602573 - DNA, 15 bp, Homo sapiens
attaaaataaacatg

SEQ ID NO: 1602574 - DNA, 15 bp, Homo sapiens
ttaaaataaacatgg

SEQ ID NO: 1602575 - DNA, 15 bp, Homo sapiens
taaaataaacatggg

SEQ ID NO: 1602576 - DNA, 15 bp, Homo sapiens
aaaataaacatgggt

SEQ ID NO: 1602577 - DNA, 15 bp, Homo sapiens
aaataaacatgggtt

SEQ ID NO: 1602578 - DNA, 15 bp, Homo sapiens
aataaacatgggttg

SEQ ID NO: 1602579 - DNA, 15 bp, Homo sapiens
ataaacatgggttga

SEQ ID NO: 1602580 - DNA, 15 bp, Homo sapiens
taaacatgggttgat

SEQ ID NO: 1602581 - DNA, 15 bp, Homo sapiens
aaacatgggttgata

SEQ ID NO: 1602582 - DNA, 15 bp, Homo sapiens
aacatgggttgataa

SEQ ID NO: 1602583 - DNA, 15 bp, Homo sapiens
acatgggttgataac

SEQ ID NO: 1602584 - DNA, 15 bp, Homo sapiens
catgggttgataact

SEQ ID NO: 1602585 - DNA, 15 bp, Homo sapiens
atgggttgataacta

SEQ ID NO: 1602586 - DNA, 15 bp, Homo sapiens
tgggttgataactaa

SEQ ID NO: 1602587 - DNA, 15 bp, Homo sapiens
gggttgataactaat

SEQ ID NO: 1602588 - DNA, 15 bp, Homo sapiens
ggttgataactaatg

SEQ ID NO: 1602589 - DNA, 15 bp, Homo sapiens
gttgataactaatgt

SEQ ID NO: 1602590 - DNA, 15 bp, Homo sapiens
ttgataactaatgtt

SEQ ID NO: 1602591 - DNA, 15 bp, Homo sapiens
tgataactaatgttt

SEQ ID NO: 1602592 - DNA, 15 bp, Homo sapiens
gataactaatgtttc

SEQ ID NO: 1602593 - DNA, 15 bp, Homo sapiens
ataactaatgtttct

SEQ ID NO: 1602594 - DNA, 15 bp, Homo sapiens
taactaatgtttctg

SEQ ID NO: 1602595 - DNA, 15 bp, Homo sapiens
aactaatgtttctgc

SEQ ID NO: 1602596 - DNA, 15 bp, Homo sapiens
actaatgtttctgct

SEQ ID NO: 1602597 - DNA, 15 bp, Homo sapiens
ctaatgtttctgctg

SEQ ID NO: 1602598 - DNA, 15 bp, Homo sapiens
taatgtttctgctgt

SEQ ID NO: 1602599 - DNA, 15 bp, Homo sapiens
aatgtttctgctgta

SEQ ID NO: 1602600 - DNA, 15 bp, Homo sapiens
atgtttctgctgtaa

SEQ ID NO: 1602601 - DNA, 15 bp, Homo sapiens
tgtttctgctgtaat

SEQ ID NO: 1602602 - DNA, 15 bp, Homo sapiens
gtttctgctgtaatc

SEQ ID NO: 1602603 - DNA, 15 bp, Homo sapiens
tttctgctgtaatcc

SEQ ID NO: 1602604 - DNA, 15 bp, Homo sapiens
ttctgctgtaatcca

SEQ ID NO: 1602605 - DNA, 15 bp, Homo sapiens
tctgctgtaatccac

SEQ ID NO: 1602606 - DNA, 15 bp, Homo sapiens
ctgctgtaatccaca

SEQ ID NO: 1602607 - DNA, 15 bp, Homo sapiens
tgctgtaatccacag

SEQ ID NO: 1602608 - DNA, 15 bp, Homo sapiens
gctgtaatccacagc

SEQ ID NO: 1602609 - DNA, 15 bp, Homo sapiens
ctgtaatccacagcc

SEQ ID NO: 1602610 - DNA, 15 bp, Homo sapiens
tgtaatccacagcct

SEQ ID NO: 1602611 - DNA, 15 bp, Homo sapiens
gtaatccacagcctt

SEQ ID NO: 1602612 - DNA, 15 bp, Homo sapiens
taatccacagccttc

SEQ ID NO: 1602613 - DNA, 15 bp, Homo sapiens
aatccacagccttca

SEQ ID NO: 1602614 - DNA, 15 bp, Homo sapiens
atccacagccttcat

SEQ ID NO: 1602615 - DNA, 15 bp, Homo sapiens
tccacagccttcatc

SEQ ID NO: 1602616 - DNA, 15 bp, Homo sapiens
ccacagccttcatcc

SEQ ID NO: 1602617 - DNA, 15 bp, Homo sapiens
cacagccttcatcct

SEQ ID NO: 1602618 - DNA, 15 bp, Homo sapiens
acagccttcatccta

SEQ ID NO: 1602619 - DNA, 15 bp, Homo sapiens
cagccttcatcctag

SEQ ID NO: 1602620 - DNA, 15 bp, Homo sapiens
agccttcatcctagc

SEQ ID NO: 1602621 - DNA, 15 bp, Homo sapiens
gccttcatcctagcc

SEQ ID NO: 1602622 - DNA, 15 bp, Homo sapiens
ccttcatcctagcct

SEQ ID NO: 1602623 - DNA, 15 bp, Homo sapiens
cttcatcctagcctg

SEQ ID NO: 1602624 - DNA, 15 bp, Homo sapiens
ttcatcctagcctgc

SEQ ID NO: 1602625 - DNA, 15 bp, Homo sapiens
tcatcctagcctgcc

SEQ ID NO: 1602626 - DNA, 15 bp, Homo sapiens
catcctagcctgcca

SEQ ID NO: 1602627 - DNA, 15 bp, Homo sapiens
atcctagcctgccac

SEQ ID NO: 1602628 - DNA, 15 bp, Homo sapiens
tcctagcctgccact

SEQ ID NO: 1602629 - DNA, 15 bp, Homo sapiens
cctagcctgccactc

SEQ ID NO: 1602630 - DNA, 15 bp, Homo sapiens
ctagcctgccactct

SEQ ID NO: 1602631 - DNA, 15 bp, Homo sapiens
tagcctgccactctt

SEQ ID NO: 1602632 - DNA, 15 bp, Homo sapiens
agcctgccactcttc

SEQ ID NO: 1602633 - DNA, 15 bp, Homo sapiens
gcctgccactcttct

SEQ ID NO: 1602634 - DNA, 15 bp, Homo sapiens
cctgccactcttctt

SEQ ID NO: 1602635 - DNA, 15 bp, Homo sapiens
ctgccactcttcttc

SEQ ID NO: 1602636 - DNA, 15 bp, Homo sapiens
tgccactcttcttct

SEQ ID NO: 1602637 - DNA, 15 bp, Homo sapiens
gccactcttcttctt

SEQ ID NO: 1602638 - DNA, 15 bp, Homo sapiens
ccactcttcttcttt

SEQ ID NO: 1602639 - DNA, 15 bp, Homo sapiens
cactcttcttctttt

SEQ ID NO: 1602640 - DNA, 15 bp, Homo sapiens
actcttcttcttttt

SEQ ID NO: 1602641 - DNA, 15 bp, Homo sapiens
ctcttcttcttttta

SEQ ID NO: 1602642 - DNA, 15 bp, Homo sapiens
tcttcttctttttag

SEQ ID NO: 1602643 - DNA, 15 bp, Homo sapiens
cttcttctttttagc

SEQ ID NO: 1602644 - DNA, 15 bp, Homo sapiens
ttcttctttttagct

SEQ ID NO: 1602645 - DNA, 15 bp, Homo sapiens
tcttctttttagctt

SEQ ID NO: 1602646 - DNA, 15 bp, Homo sapiens
cttctttttagcttt

SEQ ID NO: 1602647 - DNA, 15 bp, Homo sapiens
ttctttttagctttt

SEQ ID NO: 1602648 - DNA, 15 bp, Homo sapiens
tctttttagcttttt

SEQ ID NO: 1602649 - DNA, 15 bp, Homo sapiens
ctttttagctttttc

SEQ ID NO: 1602650 - DNA, 15 bp, Homo sapiens
tttttagctttttca

SEQ ID NO: 1602651 - DNA, 15 bp, Homo sapiens
ttttagctttttcaa

SEQ ID NO: 1602652 - DNA, 15 bp, Homo sapiens
tttagctttttcaac

SEQ ID NO: 1602653 - DNA, 15 bp, Homo sapiens
ttagctttttcaaca

SEQ ID NO: 1602654 - DNA, 15 bp, Homo sapiens
tagctttttcaacag

SEQ ID NO: 1602655 - DNA, 15 bp, Homo sapiens
agctttttcaacagt

SEQ ID NO: 1602656 - DNA, 15 bp, Homo sapiens
gctttttcaacagtg

SEQ ID NO: 1602657 - DNA, 15 bp, Homo sapiens
ctttttcaacagtgg

SEQ ID NO: 1602658 - DNA, 15 bp, Homo sapiens
tttttcaacagtggg

SEQ ID NO: 1602659 - DNA, 15 bp, Homo sapiens
ttttcaacagtggga

SEQ ID NO: 1602660 - DNA, 15 bp, Homo sapiens
tttcaacagtgggaa

SEQ ID NO: 1602661 - DNA, 15 bp, Homo sapiens
ttcaacagtgggaaa

SEQ ID NO: 1602662 - DNA, 15 bp, Homo sapiens
tcaacagtgggaaat

SEQ ID NO: 1602663 - DNA, 15 bp, Homo sapiens
caacagtgggaaatg

SEQ ID NO: 1602664 - DNA, 15 bp, Homo sapiens
aacagtgggaaatgt

SEQ ID NO: 1602665 - DNA, 15 bp, Homo sapiens
acagtgggaaatgtg

SEQ ID NO: 1602666 - DNA, 15 bp, Homo sapiens
cagtgggaaatgtgg

SEQ ID NO: 1602667 - DNA, 15 bp, Homo sapiens
agtgggaaatgtggc

SEQ ID NO: 1602668 - DNA, 15 bp, Homo sapiens
gtgggaaatgtggct

SEQ ID NO: 1602669 - DNA, 15 bp, Homo sapiens
tgggaaatgtggctc

SEQ ID NO: 1602670 - DNA, 15 bp, Homo sapiens
gggaaatgtggctct

SEQ ID NO: 1602671 - DNA, 15 bp, Homo sapiens
ggaaatgtggctctt

SEQ ID NO: 1602672 - DNA, 15 bp, Homo sapiens
gaaatgtggctcttg

SEQ ID NO: 1602673 - DNA, 15 bp, Homo sapiens
aaatgtggctcttgt

SEQ ID NO: 1602674 - DNA, 15 bp, Homo sapiens
aatgtggctcttgtt

SEQ ID NO: 1602675 - DNA, 15 bp, Homo sapiens
atgtggctcttgtta

SEQ ID NO: 1602676 - DNA, 15 bp, Homo sapiens
tgtggctcttgttat

SEQ ID NO: 1602677 - DNA, 15 bp, Homo sapiens
gtggctcttgttatg

SEQ ID NO: 1602678 - DNA, 15 bp, Homo sapiens
tggctcttgttatgt

SEQ ID NO: 1602679 - DNA, 15 bp, Homo sapiens
ggctcttgttatgta

SEQ ID NO: 1602680 - DNA, 15 bp, Homo sapiens
gctcttgttatgtac

SEQ ID NO: 1602681 - DNA, 15 bp, Homo sapiens
ctcttgttatgtaca

SEQ ID NO: 1602682 - DNA, 15 bp, Homo sapiens
tcttgttatgtacac

SEQ ID NO: 1602683 - DNA, 15 bp, Homo sapiens
cttgttatgtacact

SEQ ID NO: 1602684 - DNA, 15 bp, Homo sapiens
ttgttatgtacactt

SEQ ID NO: 1602685 - DNA, 15 bp, Homo sapiens
tgttatgtacacttt

SEQ ID NO: 1602686 - DNA, 15 bp, Homo sapiens
gttatgtacacttta

SEQ ID NO: 1602687 - DNA, 15 bp, Homo sapiens
ttatgtacactttat

SEQ ID NO: 1602688 - DNA, 15 bp, Homo sapiens
tatgtacactttatt

SEQ ID NO: 1602689 - DNA, 15 bp, Homo sapiens
atgtacactttattc

SEQ ID NO: 1602690 - DNA, 15 bp, Homo sapiens
tgtacactttattca

SEQ ID NO: 1602691 - DNA, 15 bp, Homo sapiens
gtacactttattcac

SEQ ID NO: 1602692 - DNA, 15 bp, Homo sapiens
tacactttattcact

SEQ ID NO: 1602693 - DNA, 15 bp, Homo sapiens
acactttattcactt

SEQ ID NO: 1602694 - DNA, 15 bp, Homo sapiens
cactttattcactta

SEQ ID NO: 1602695 - DNA, 15 bp, Homo sapiens
actttattcacttat

SEQ ID NO: 1602696 - DNA, 15 bp, Homo sapiens
ctttattcacttatt

SEQ ID NO: 1602697 - DNA, 15 bp, Homo sapiens
tttattcacttattt

SEQ ID NO: 1602698 - DNA, 15 bp, Homo sapiens
ttattcacttatttg

SEQ ID NO: 1602699 - DNA, 15 bp, Homo sapiens
tattcacttatttgt

SEQ ID NO: 1602700 - DNA, 15 bp, Homo sapiens
attcacttatttgtt

SEQ ID NO: 1602701 - DNA, 15 bp, Homo sapiens
ttcacttatttgttt

SEQ ID NO: 1602702 - DNA, 15 bp, Homo sapiens
tcacttatttgtttg

SEQ ID NO: 1602703 - DNA, 15 bp, Homo sapiens
cacttatttgtttga

SEQ ID NO: 1602704 - DNA, 15 bp, Homo sapiens
acttatttgtttgac

SEQ ID NO: 1602705 - DNA, 15 bp, Homo sapiens
cttatttgtttgacc

SEQ ID NO: 1602706 - DNA, 15 bp, Homo sapiens
ttatttgtttgaccc

SEQ ID NO: 1602707 - DNA, 15 bp, Homo sapiens
tatttgtttgaccct

SEQ ID NO: 1602708 - DNA, 15 bp, Homo sapiens
atttgtttgacccta

SEQ ID NO: 1602709 - DNA, 15 bp, Homo sapiens
tttgtttgaccctag

SEQ ID NO: 1602710 - DNA, 15 bp, Homo sapiens
ttgtttgaccctagt

SEQ ID NO: 1602711 - DNA, 15 bp, Homo sapiens
tgtttgaccctagta

SEQ ID NO: 1602712 - DNA, 15 bp, Homo sapiens
gtttgaccctagtat

SEQ ID NO: 1602713 - DNA, 15 bp, Homo sapiens
tttgaccctagtatc

SEQ ID NO: 1602714 - DNA, 15 bp, Homo sapiens
ttgaccctagtatca

SEQ ID NO: 1602715 - DNA, 15 bp, Homo sapiens
tgaccctagtatcat

SEQ ID NO: 1602716 - DNA, 15 bp, Homo sapiens
gaccctagtatcata

SEQ ID NO: 1602717 - DNA, 15 bp, Homo sapiens
accctagtatcataa

SEQ ID NO: 1602718 - DNA, 15 bp, Homo sapiens
ccctagtatcataaa

SEQ ID NO: 1602719 - DNA, 15 bp, Homo sapiens
cctagtatcataaag

SEQ ID NO: 1602720 - DNA, 15 bp, Homo sapiens
ctagtatcataaagt

SEQ ID NO: 1602721 - DNA, 15 bp, Homo sapiens
tagtatcataaagta

SEQ ID NO: 1602722 - DNA, 15 bp, Homo sapiens
agtatcataaagtag

SEQ ID NO: 1602723 - DNA, 15 bp, Homo sapiens
gtatcataaagtagt

SEQ ID NO: 1602724 - DNA, 15 bp, Homo sapiens
tatcataaagtagtt

SEQ ID NO: 1602725 - DNA, 15 bp, Homo sapiens
atcataaagtagttc

SEQ ID NO: 1602726 - DNA, 15 bp, Homo sapiens
tcataaagtagttcc

SEQ ID NO: 1602727 - DNA, 15 bp, Homo sapiens
cataaagtagttccg

SEQ ID NO: 1602728 - DNA, 15 bp, Homo sapiens
ataaagtagttccgt

SEQ ID NO: 1602729 - DNA, 15 bp, Homo sapiens
taaagtagttccgta

SEQ ID NO: 1602730 - DNA, 15 bp, Homo sapiens
aaagtagttccgtat

SEQ ID NO: 1602731 - DNA, 15 bp, Homo sapiens
aagtagttccgtatg

SEQ ID NO: 1602732 - DNA, 15 bp, Homo sapiens
agtagttccgtatgc

SEQ ID NO: 1602733 - DNA, 15 bp, Homo sapiens
gtagttccgtatgcc

SEQ ID NO: 1602734 - DNA, 15 bp, Homo sapiens
tagttccgtatgcct

SEQ ID NO: 1602735 - DNA, 15 bp, Homo sapiens
agttccgtatgcctg

SEQ ID NO: 1602736 - DNA, 15 bp, Homo sapiens
gttccgtatgcctgt

SEQ ID NO: 1602737 - DNA, 15 bp, Homo sapiens
ttccgtatgcctgta

SEQ ID NO: 1602738 - DNA, 15 bp, Homo sapiens
tccgtatgcctgtaa

SEQ ID NO: 1602739 - DNA, 15 bp, Homo sapiens
ccgtatgcctgtaac

SEQ ID NO: 1602740 - DNA, 15 bp, Homo sapiens
cgtatgcctgtaaca

SEQ ID NO: 1602741 - DNA, 15 bp, Homo sapiens
gtatgcctgtaacag

SEQ ID NO: 1602742 - DNA, 15 bp, Homo sapiens
tatgcctgtaacaga

SEQ ID NO: 1602743 - DNA, 15 bp, Homo sapiens
atgcctgtaacagat

SEQ ID NO: 1602744 - DNA, 15 bp, Homo sapiens
tgcctgtaacagatc

SEQ ID NO: 1602745 - DNA, 15 bp, Homo sapiens
gcctgtaacagatcg

SEQ ID NO: 1602746 - DNA, 15 bp, Homo sapiens
cctgtaacagatcga

SEQ ID NO: 1602747 - DNA, 15 bp, Homo sapiens
ctgtaacagatcgac

SEQ ID NO: 1602748 - DNA, 15 bp, Homo sapiens
tgtaacagatcgact

SEQ ID NO: 1602749 - DNA, 15 bp, Homo sapiens
gtaacagatcgacta

SEQ ID NO: 1602750 - DNA, 15 bp, Homo sapiens
taacagatcgactaa

SEQ ID NO: 1602751 - DNA, 15 bp, Homo sapiens
aacagatcgactaac

SEQ ID NO: 1602752 - DNA, 15 bp, Homo sapiens
acagatcgactaact

SEQ ID NO: 1602753 - DNA, 15 bp, Homo sapiens
cagatcgactaacta

SEQ ID NO: 1602754 - DNA, 15 bp, Homo sapiens
agatcgactaactag

SEQ ID NO: 1602755 - DNA, 15 bp, Homo sapiens
gatcgactaactaga

SEQ ID NO: 1602756 - DNA, 15 bp, Homo sapiens
atcgactaactagag

SEQ ID NO: 1602757 - DNA, 15 bp, Homo sapiens
tcgactaactagagt

SEQ ID NO: 1602758 - DNA, 15 bp, Homo sapiens
cgactaactagagtc

SEQ ID NO: 1602759 - DNA, 15 bp, Homo sapiens
gactaactagagtcc

SEQ ID NO: 1602760 - DNA, 15 bp, Homo sapiens
actaactagagtcca

SEQ ID NO: 1602761 - DNA, 15 bp, Homo sapiens
ctaactagagtccat

SEQ ID NO: 1602762 - DNA, 15 bp, Homo sapiens
taactagagtccatt

SEQ ID NO: 1602763 - DNA, 15 bp, Homo sapiens
aactagagtccatta

SEQ ID NO: 1602764 - DNA, 15 bp, Homo sapiens
actagagtccattat

SEQ ID NO: 1602765 - DNA, 15 bp, Homo sapiens
ctagagtccattatt

SEQ ID NO: 1602766 - DNA, 15 bp, Homo sapiens
tagagtccattattt

SEQ ID NO: 1602767 - DNA, 15 bp, Homo sapiens
agagtccattatttg

SEQ ID NO: 1602768 - DNA, 15 bp, Homo sapiens
gagtccattatttgc

SEQ ID NO: 1602769 - DNA, 15 bp, Homo sapiens
agtccattatttgcg

SEQ ID NO: 1602770 - DNA, 15 bp, Homo sapiens
gtccattatttgcgg

SEQ ID NO: 1602771 - DNA, 15 bp, Homo sapiens
tccattatttgcgga

SEQ ID NO: 1602772 - DNA, 15 bp, Homo sapiens
ccattatttgcggaa

SEQ ID NO: 1602773 - DNA, 15 bp, Homo sapiens
cattatttgcggaaa

SEQ ID NO: 1602774 - DNA, 15 bp, Homo sapiens
attatttgcggaaag

SEQ ID NO: 1602775 - DNA, 15 bp, Homo sapiens
ttatttgcggaaaga

SEQ ID NO: 1602776 - DNA, 15 bp, Homo sapiens
tagagatggggttta

SEQ ID NO: 1602777 - DNA, 15 bp, Homo sapiens
agagatggggtttac

SEQ ID NO: 1602778 - DNA, 15 bp, Homo sapiens
gagatggggtttaca

SEQ ID NO: 1602779 - DNA, 15 bp, Homo sapiens
agatggggtttacac

SEQ ID NO: 1602780 - DNA, 15 bp, Homo sapiens
gatggggtttacacc

SEQ ID NO: 1602781 - DNA, 15 bp, Homo sapiens
atggggtttacaccc

SEQ ID NO: 1602782 - DNA, 15 bp, Homo sapiens
tggggtttacaccct

SEQ ID NO: 1602783 - DNA, 15 bp, Homo sapiens
ggggtttacaccctg

SEQ ID NO: 1602784 - DNA, 15 bp, Homo sapiens
gggtttacaccctgt

SEQ ID NO: 1602785 - DNA, 15 bp, Homo sapiens
ggtttacaccctgtt

SEQ ID NO: 1602786 - DNA, 15 bp, Homo sapiens
gtttacaccctgtta

SEQ ID NO: 1602787 - DNA, 15 bp, Homo sapiens
tttacaccctgttag

SEQ ID NO: 1602788 - DNA, 15 bp, Homo sapiens
ttacaccctgttagc

SEQ ID NO: 1602789 - DNA, 15 bp, Homo sapiens
tacaccctgttagcc

SEQ ID NO: 1602790 - DNA, 15 bp, Homo sapiens
acaccctgttagcca

SEQ ID NO: 1602791 - DNA, 15 bp, Homo sapiens
caccctgttagccag

SEQ ID NO: 1602792 - DNA, 15 bp, Homo sapiens
accctgttagccagg

SEQ ID NO: 1602793 - DNA, 15 bp, Homo sapiens
ccctgttagccagga

SEQ ID NO: 1602794 - DNA, 15 bp, Homo sapiens
cctgttagccaggat

SEQ ID NO: 1602795 - DNA, 15 bp, Homo sapiens
ctgttagccaggatg

SEQ ID NO: 1602796 - DNA, 15 bp, Homo sapiens
aggatggtctcaatt

SEQ ID NO: 1602797 - DNA, 15 bp, Homo sapiens
ggatggtctcaattt

SEQ ID NO: 1602798 - DNA, 15 bp, Homo sapiens
gatggtctcaatttc

SEQ ID NO: 1602799 - DNA, 15 bp, Homo sapiens
atggtctcaatttct

SEQ ID NO: 1602800 - DNA, 15 bp, Homo sapiens
tggtctcaatttctt

SEQ ID NO: 1602801 - DNA, 15 bp, Homo sapiens
ggtctcaatttcttg

SEQ ID NO: 1602802 - DNA, 15 bp, Homo sapiens
gtctcaatttcttga

SEQ ID NO: 1602803 - DNA, 15 bp, Homo sapiens
tctcaatttcttgac

SEQ ID NO: 1602804 - DNA, 15 bp, Homo sapiens
ctcaatttcttgacc

SEQ ID NO: 1602805 - DNA, 15 bp, Homo sapiens
tcaatttcttgacct

SEQ ID NO: 1602806 - DNA, 15 bp, Homo sapiens
caatttcttgacctc

SEQ ID NO: 1602807 - DNA, 15 bp, Homo sapiens
aatttcttgacctcg

SEQ ID NO: 1602808 - DNA, 15 bp, Homo sapiens
atttcttgacctcgt

SEQ ID NO: 1602809 - DNA, 15 bp, Homo sapiens
tttcttgacctcgtg

SEQ ID NO: 1602810 - DNA, 15 bp, Homo sapiens
ttcttgacctcgtga

SEQ ID NO: 1602811 - DNA, 15 bp, Homo sapiens
tgacctcgtgatccc

SEQ ID NO: 1602812 - DNA, 15 bp, Homo sapiens
gacctcgtgatccca

SEQ ID NO: 1602813 - DNA, 15 bp, Homo sapiens
acctcgtgatcccat

SEQ ID NO: 1602814 - DNA, 15 bp, Homo sapiens
cctcgtgatcccatc

SEQ ID NO: 1602815 - DNA, 15 bp, Homo sapiens
ctcgtgatcccatcc

SEQ ID NO: 1602816 - DNA, 15 bp, Homo sapiens
tcgtgatcccatccg

SEQ ID NO: 1602817 - DNA, 15 bp, Homo sapiens
cgtgatcccatccgc

SEQ ID NO: 1602818 - DNA, 15 bp, Homo sapiens
gtgatcccatccgcg

SEQ ID NO: 1602819 - DNA, 15 bp, Homo sapiens
tgatcccatccgcgt

SEQ ID NO: 1602820 - DNA, 15 bp, Homo sapiens
gatcccatccgcgtt

SEQ ID NO: 1602821 - DNA, 15 bp, Homo sapiens
atcccatccgcgttg

SEQ ID NO: 1602822 - DNA, 15 bp, Homo sapiens
tcccatccgcgttgg

SEQ ID NO: 1602823 - DNA, 15 bp, Homo sapiens
cccatccgcgttggc

SEQ ID NO: 1602824 - DNA, 15 bp, Homo sapiens
ccatccgcgttggcc

SEQ ID NO: 1602825 - DNA, 15 bp, Homo sapiens
catccgcgttggcct

SEQ ID NO: 1602826 - DNA, 15 bp, Homo sapiens
atccgcgttggcctt

SEQ ID NO: 1602827 - DNA, 15 bp, Homo sapiens
tccgcgttggccttc

SEQ ID NO: 1602828 - DNA, 15 bp, Homo sapiens
ccgcgttggccttcc

SEQ ID NO: 1602829 - DNA, 15 bp, Homo sapiens
cgcgttggccttcca

SEQ ID NO: 1602830 - DNA, 15 bp, Homo sapiens
gcgttggccttccaa

SEQ ID NO: 1602831 - DNA, 15 bp, Homo sapiens
cgttggccttccaaa

SEQ ID NO: 1602832 - DNA, 15 bp, Homo sapiens
gttggccttccaaag

SEQ ID NO: 1602833 - DNA, 15 bp, Homo sapiens
ttggccttccaaagt

SEQ ID NO: 1602834 - DNA, 15 bp, Homo sapiens
agtgctgggattacc

SEQ ID NO: 1602835 - DNA, 15 bp, Homo sapiens
gtgctgggattacca

SEQ ID NO: 1602836 - DNA, 15 bp, Homo sapiens
tgctgggattaccag

SEQ ID NO: 1602837 - DNA, 15 bp, Homo sapiens
gctgggattaccagc

SEQ ID NO: 1602838 - DNA, 15 bp, Homo sapiens
ctgggattaccagca

SEQ ID NO: 1602839 - DNA, 15 bp, Homo sapiens
tgggattaccagcat

SEQ ID NO: 1602840 - DNA, 15 bp, Homo sapiens
gggattaccagcatg

SEQ ID NO: 1602841 - DNA, 15 bp, Homo sapiens
ggattaccagcatga

SEQ ID NO: 1602842 - DNA, 15 bp, Homo sapiens
gattaccagcatgag

SEQ ID NO: 1602843 - DNA, 15 bp, Homo sapiens
attaccagcatgagc

SEQ ID NO: 1602844 - DNA, 15 bp, Homo sapiens
ttaccagcatgagcc

SEQ ID NO: 1602845 - DNA, 15 bp, Homo sapiens
taccagcatgagcca

SEQ ID NO: 1602846 - DNA, 15 bp, Homo sapiens
accagcatgagccac

SEQ ID NO: 1602847 - DNA, 15 bp, Homo sapiens
ccagcatgagccacc

SEQ ID NO: 1602848 - DNA, 15 bp, Homo sapiens
cagcatgagccaccg

SEQ ID NO: 1602849 - DNA, 15 bp, Homo sapiens
agcatgagccaccgt

SEQ ID NO: 1602850 - DNA, 15 bp, Homo sapiens
ccaccgtgcccggct

SEQ ID NO: 1602851 - DNA, 15 bp, Homo sapiens
caccgtgcccggctg

SEQ ID NO: 1602852 - DNA, 15 bp, Homo sapiens
accgtgcccggctgg

SEQ ID NO: 1602853 - DNA, 15 bp, Homo sapiens
ccgtgcccggctggg

SEQ ID NO: 1602854 - DNA, 15 bp, Homo sapiens
cgtgcccggctggga

SEQ ID NO: 1602855 - DNA, 15 bp, Homo sapiens
gtgcccggctgggag

SEQ ID NO: 1602856 - DNA, 15 bp, Homo sapiens
tgcccggctgggaga

SEQ ID NO: 1602857 - DNA, 15 bp, Homo sapiens
gcccggctgggagaa

SEQ ID NO: 1602858 - DNA, 15 bp, Homo sapiens
cccggctgggagaag

SEQ ID NO: 1602859 - DNA, 15 bp, Homo sapiens
ccggctgggagaaga

SEQ ID NO: 1602860 - DNA, 15 bp, Homo sapiens
cggctgggagaagac

SEQ ID NO: 1602861 - DNA, 15 bp, Homo sapiens
ggctgggagaagacc

SEQ ID NO: 1602862 - DNA, 15 bp, Homo sapiens
gctgggagaagacct

SEQ ID NO: 1602863 - DNA, 15 bp, Homo sapiens
ctgggagaagacctt

SEQ ID NO: 1602864 - DNA, 15 bp, Homo sapiens
tgggagaagaccttt

SEQ ID NO: 1602865 - DNA, 15 bp, Homo sapiens
gggagaagacctttc

SEQ ID NO: 1602866 - DNA, 15 bp, Homo sapiens
ggagaagacctttct

SEQ ID NO: 1602867 - DNA, 15 bp, Homo sapiens
gagaagacctttcta

SEQ ID NO: 1602868 - DNA, 15 bp, Homo sapiens
agaagacctttctaa

SEQ ID NO: 1602869 - DNA, 15 bp, Homo sapiens
gaagacctttctaag

SEQ ID NO: 1602870 - DNA, 15 bp, Homo sapiens
aagacctttctaagc

SEQ ID NO: 1602871 - DNA, 15 bp, Homo sapiens
agacctttctaagca

SEQ ID NO: 1602872 - DNA, 15 bp, Homo sapiens
gacctttctaagcat

SEQ ID NO: 1602873 - DNA, 15 bp, Homo sapiens
acctttctaagcatg

SEQ ID NO: 1602874 - DNA, 15 bp, Homo sapiens
cctttctaagcatga

SEQ ID NO: 1602875 - DNA, 15 bp, Homo sapiens
ctttctaagcatgat

SEQ ID NO: 1602876 - DNA, 15 bp, Homo sapiens
tttctaagcatgata

SEQ ID NO: 1602877 - DNA, 15 bp, Homo sapiens
ttctaagcatgatac

SEQ ID NO: 1602878 - DNA, 15 bp, Homo sapiens
tctaagcatgatacc

SEQ ID NO: 1602879 - DNA, 15 bp, Homo sapiens
ctaagcatgatacca

SEQ ID NO: 1602880 - DNA, 15 bp, Homo sapiens
taagcatgataccaa

SEQ ID NO: 1602881 - DNA, 15 bp, Homo sapiens
aagcatgataccaaa

SEQ ID NO: 1602882 - DNA, 15 bp, Homo sapiens
agcatgataccaaag

SEQ ID NO: 1602883 - DNA, 15 bp, Homo sapiens
gcatgataccaaagg

SEQ ID NO: 1602884 - DNA, 15 bp, Homo sapiens
catgataccaaaggc

SEQ ID NO: 1602885 - DNA, 15 bp, Homo sapiens
atgataccaaaggca

SEQ ID NO: 1602886 - DNA, 15 bp, Homo sapiens
tgataccaaaggcag

SEQ ID NO: 1602887 - DNA, 15 bp, Homo sapiens
gataccaaaggcaga

SEQ ID NO: 1602888 - DNA, 15 bp, Homo sapiens
ataccaaaggcagag

SEQ ID NO: 1602889 - DNA, 15 bp, Homo sapiens
taccaaaggcagaga

SEQ ID NO: 1602890 - DNA, 15 bp, Homo sapiens
accaaaggcagagac

SEQ ID NO: 1602891 - DNA, 15 bp, Homo sapiens
ccaaaggcagagaca

SEQ ID NO: 1602892 - DNA, 15 bp, Homo sapiens
caaaggcagagacaa

SEQ ID NO: 1602893 - DNA, 15 bp, Homo sapiens
aaaggcagagacaat

SEQ ID NO: 1602894 - DNA, 15 bp, Homo sapiens
aaggcagagacaata

SEQ ID NO: 1602895 - DNA, 15 bp, Homo sapiens
aggcagagacaataa

SEQ ID NO: 1602896 - DNA, 15 bp, Homo sapiens
ggcagagacaataaa

SEQ ID NO: 1602897 - DNA, 15 bp, Homo sapiens
gcagagacaataaag

SEQ ID NO: 1602898 - DNA, 15 bp, Homo sapiens
cagagacaataaagg

SEQ ID NO: 1602899 - DNA, 15 bp, Homo sapiens
agagacaataaaggc

SEQ ID NO: 1602900 - DNA, 15 bp, Homo sapiens
gagacaataaaggca

SEQ ID NO: 1602901 - DNA, 15 bp, Homo sapiens
agacaataaaggcaa

SEQ ID NO: 1602902 - DNA, 15 bp, Homo sapiens
gacaataaaggcaaa

SEQ ID NO: 1602903 - DNA, 15 bp, Homo sapiens
acaataaaggcaaag

SEQ ID NO: 1602904 - DNA, 15 bp, Homo sapiens
caataaaggcaaaga

SEQ ID NO: 1602905 - DNA, 15 bp, Homo sapiens
aataaaggcaaagaa

SEQ ID NO: 1602906 - DNA, 15 bp, Homo sapiens
ataaaggcaaagaat

SEQ ID NO: 1602907 - DNA, 15 bp, Homo sapiens
taaaggcaaagaatt

SEQ ID NO: 1602908 - DNA, 15 bp, Homo sapiens
aaaggcaaagaattg

SEQ ID NO: 1602909 - DNA, 15 bp, Homo sapiens
aaggcaaagaattga

SEQ ID NO: 1602910 - DNA, 15 bp, Homo sapiens
aggcaaagaattgac

SEQ ID NO: 1602911 - DNA, 15 bp, Homo sapiens
ggcaaagaattgaca

SEQ ID NO: 1602912 - DNA, 15 bp, Homo sapiens
gcaaagaattgacag

SEQ ID NO: 1602913 - DNA, 15 bp, Homo sapiens
caaagaattgacaga

SEQ ID NO: 1602914 - DNA, 15 bp, Homo sapiens
aaagaattgacagaa

SEQ ID NO: 1602915 - DNA, 15 bp, Homo sapiens
aagaattgacagaat

SEQ ID NO: 1602916 - DNA, 15 bp, Homo sapiens
agaattgacagaatt

SEQ ID NO: 1602917 - DNA, 15 bp, Homo sapiens
gaattgacagaattc

SEQ ID NO: 1602918 - DNA, 15 bp, Homo sapiens
aattgacagaattca

SEQ ID NO: 1602919 - DNA, 15 bp, Homo sapiens
attgacagaattcac

SEQ ID NO: 1602920 - DNA, 15 bp, Homo sapiens
ttgacagaattcact

SEQ ID NO: 1602921 - DNA, 15 bp, Homo sapiens
tgacagaattcacta

SEQ ID NO: 1602922 - DNA, 15 bp, Homo sapiens
gacagaattcactat

SEQ ID NO: 1602923 - DNA, 15 bp, Homo sapiens
acagaattcactatc

SEQ ID NO: 1602924 - DNA, 15 bp, Homo sapiens
cagaattcactatcc

SEQ ID NO: 1602925 - DNA, 15 bp, Homo sapiens
agaattcactatccg

SEQ ID NO: 1602926 - DNA, 15 bp, Homo sapiens
gaattcactatccga

SEQ ID NO: 1602927 - DNA, 15 bp, Homo sapiens
aattcactatccgat

SEQ ID NO: 1602928 - DNA, 15 bp, Homo sapiens
attcactatccgata

SEQ ID NO: 1602929 - DNA, 15 bp, Homo sapiens
ttcactatccgataa

SEQ ID NO: 1602930 - DNA, 15 bp, Homo sapiens
tcactatccgataaa

SEQ ID NO: 1602931 - DNA, 15 bp, Homo sapiens
cactatccgataaaa

SEQ ID NO: 1602932 - DNA, 15 bp, Homo sapiens
actatccgataaaaa

SEQ ID NO: 1602933 - DNA, 15 bp, Homo sapiens
ctatccgataaaaat

SEQ ID NO: 1602934 - DNA, 15 bp, Homo sapiens
tatccgataaaaatc

SEQ ID NO: 1602935 - DNA, 15 bp, Homo sapiens
atccgataaaaatca

SEQ ID NO: 1602936 - DNA, 15 bp, Homo sapiens
tccgataaaaatcac

SEQ ID NO: 1602937 - DNA, 15 bp, Homo sapiens
ccgataaaaatcact

SEQ ID NO: 1602938 - DNA, 15 bp, Homo sapiens
cgataaaaatcactt

SEQ ID NO: 1602939 - DNA, 15 bp, Homo sapiens
gataaaaatcacttc

SEQ ID NO: 1602940 - DNA, 15 bp, Homo sapiens
ataaaaatcacttct

SEQ ID NO: 1602941 - DNA, 15 bp, Homo sapiens
taaaaatcacttctg

SEQ ID NO: 1602942 - DNA, 15 bp, Homo sapiens
aaaaatcacttctgt

SEQ ID NO: 1602943 - DNA, 15 bp, Homo sapiens
aaaatcacttctgtg

SEQ ID NO: 1602944 - DNA, 15 bp, Homo sapiens
aaatcacttctgtgg

SEQ ID NO: 1602945 - DNA, 15 bp, Homo sapiens
aatcacttctgtggc

SEQ ID NO: 1602946 - DNA, 15 bp, Homo sapiens
atcacttctgtggcc

SEQ ID NO: 1602947 - DNA, 15 bp, Homo sapiens
tcacttctgtggccg

SEQ ID NO: 1602948 - DNA, 15 bp, Homo sapiens
cacttctgtggccgg

SEQ ID NO: 1602949 - DNA, 15 bp, Homo sapiens
acttctgtggccggg

SEQ ID NO: 1602950 - DNA, 15 bp, Homo sapiens
cttctgtggccgggc

SEQ ID NO: 1602951 - DNA, 15 bp, Homo sapiens
ttctgtggccgggcg

SEQ ID NO: 1602952 - DNA, 15 bp, Homo sapiens
tctgtggccgggcgc

SEQ ID NO: 1602953 - DNA, 15 bp, Homo sapiens
ctgtggccgggcgcg

SEQ ID NO: 1602954 - DNA, 15 bp, Homo sapiens
tgtggccgggcgcgg

SEQ ID NO: 1602955 - DNA, 15 bp, Homo sapiens
gtggccgggcgcggt

SEQ ID NO: 1602956 - DNA, 15 bp, Homo sapiens
cgcggtggctcacac

SEQ ID NO: 1602957 - DNA, 15 bp, Homo sapiens
taatcccagcactgg

SEQ ID NO: 1602958 - DNA, 15 bp, Homo sapiens
aatcccagcactggg

SEQ ID NO: 1602959 - DNA, 15 bp, Homo sapiens
atcccagcactggga

SEQ ID NO: 1602960 - DNA, 15 bp, Homo sapiens
tcccagcactgggaa

SEQ ID NO: 1602961 - DNA, 15 bp, Homo sapiens
cccagcactgggaag

SEQ ID NO: 1602962 - DNA, 15 bp, Homo sapiens
ccagcactgggaagc

SEQ ID NO: 1602963 - DNA, 15 bp, Homo sapiens
cagcactgggaagcc

SEQ ID NO: 1602964 - DNA, 15 bp, Homo sapiens
agcactgggaagccg

SEQ ID NO: 1602965 - DNA, 15 bp, Homo sapiens
gcactgggaagccga

SEQ ID NO: 1602966 - DNA, 15 bp, Homo sapiens
cactgggaagccgag

SEQ ID NO: 1602967 - DNA, 15 bp, Homo sapiens
actgggaagccgagg

SEQ ID NO: 1602968 - DNA, 15 bp, Homo sapiens
ctgggaagccgaggt

SEQ ID NO: 1602969 - DNA, 15 bp, Homo sapiens
tgggaagccgaggtg

SEQ ID NO: 1602970 - DNA, 15 bp, Homo sapiens
gggaagccgaggtgg

SEQ ID NO: 1602971 - DNA, 15 bp, Homo sapiens
ggaagccgaggtggg

SEQ ID NO: 1602972 - DNA, 15 bp, Homo sapiens
gaagccgaggtgggc

SEQ ID NO: 1602973 - DNA, 15 bp, Homo sapiens
aagccgaggtgggcg

SEQ ID NO: 1602974 - DNA, 15 bp, Homo sapiens
agccgaggtgggcgg

SEQ ID NO: 1602975 - DNA, 15 bp, Homo sapiens
cgaggtgggcggatt

SEQ ID NO: 1602976 - DNA, 15 bp, Homo sapiens
gaggtgggcggattg

SEQ ID NO: 1602977 - DNA, 15 bp, Homo sapiens
aggtgggcggattgc

SEQ ID NO: 1602978 - DNA, 15 bp, Homo sapiens
ggtgggcggattgct

SEQ ID NO: 1602979 - DNA, 15 bp, Homo sapiens
gtgggcggattgctt

SEQ ID NO: 1602980 - DNA, 15 bp, Homo sapiens
tgggcggattgcttg

SEQ ID NO: 1602981 - DNA, 15 bp, Homo sapiens
gggcggattgcttga

SEQ ID NO: 1602982 - DNA, 15 bp, Homo sapiens
ggcggattgcttgag

SEQ ID NO: 1602983 - DNA, 15 bp, Homo sapiens
gcggattgcttgagg

SEQ ID NO: 1602984 - DNA, 15 bp, Homo sapiens
cggattgcttgaggc

SEQ ID NO: 1602985 - DNA, 15 bp, Homo sapiens
ggattgcttgaggcc

SEQ ID NO: 1602986 - DNA, 15 bp, Homo sapiens
attgcttgaggccag

SEQ ID NO: 1602987 - DNA, 15 bp, Homo sapiens
ttgcttgaggccagg

SEQ ID NO: 1602988 - DNA, 15 bp, Homo sapiens
gccaacatggcaaac

SEQ ID NO: 1602989 - DNA, 15 bp, Homo sapiens
ccaacatggcaaacc

SEQ ID NO: 1602990 - DNA, 15 bp, Homo sapiens
caacatggcaaacct

SEQ ID NO: 1602991 - DNA, 15 bp, Homo sapiens
aacatggcaaacctc

SEQ ID NO: 1602992 - DNA, 15 bp, Homo sapiens
acatggcaaacctcc

SEQ ID NO: 1602993 - DNA, 15 bp, Homo sapiens
catggcaaacctcct

SEQ ID NO: 1602994 - DNA, 15 bp, Homo sapiens
atggcaaacctcctg

SEQ ID NO: 1602995 - DNA, 15 bp, Homo sapiens
tggcaaacctcctgt

SEQ ID NO: 1602996 - DNA, 15 bp, Homo sapiens
ggcaaacctcctgtc

SEQ ID NO: 1602997 - DNA, 15 bp, Homo sapiens
gcaaacctcctgtct

SEQ ID NO: 1602998 - DNA, 15 bp, Homo sapiens
caaacctcctgtctc

SEQ ID NO: 1602999 - DNA, 15 bp, Homo sapiens
aaacctcctgtctct

SEQ ID NO: 1603000 - DNA, 15 bp, Homo sapiens
aacctcctgtctcta

SEQ ID NO: 1603001 - DNA, 15 bp, Homo sapiens
acctcctgtctctac

SEQ ID NO: 1603002 - DNA, 15 bp, Homo sapiens
cctcctgtctctact

SEQ ID NO: 1603003 - DNA, 15 bp, Homo sapiens
ctcctgtctctacta

SEQ ID NO: 1603004 - DNA, 15 bp, Homo sapiens
acaaaaaattagcta

SEQ ID NO: 1603005 - DNA, 15 bp, Homo sapiens
caaaaaattagctag

SEQ ID NO: 1603006 - DNA, 15 bp, Homo sapiens
aaaaaattagctagg

SEQ ID NO: 1603007 - DNA, 15 bp, Homo sapiens
ctaggcatggtggca

SEQ ID NO: 1603008 - DNA, 15 bp, Homo sapiens
taggcatggtggcat

SEQ ID NO: 1603009 - DNA, 15 bp, Homo sapiens
ggcatggtggcatgc

SEQ ID NO: 1603010 - DNA, 15 bp, Homo sapiens
gcatggtggcatgcc

SEQ ID NO: 1603011 - DNA, 15 bp, Homo sapiens
catggtggcatgcct

SEQ ID NO: 1603012 - DNA, 15 bp, Homo sapiens
atggtggcatgcctg

SEQ ID NO: 1603013 - DNA, 15 bp, Homo sapiens
tggtggcatgcctgt

SEQ ID NO: 1603014 - DNA, 15 bp, Homo sapiens
ggtggcatgcctgta

SEQ ID NO: 1603015 - DNA, 15 bp, Homo sapiens
gtggcatgcctgtag

SEQ ID NO: 1603016 - DNA, 15 bp, Homo sapiens
tggcatgcctgtagt

SEQ ID NO: 1603017 - DNA, 15 bp, Homo sapiens
ggcatgcctgtagtc

SEQ ID NO: 1603018 - DNA, 15 bp, Homo sapiens
agctactcaggaagc

SEQ ID NO: 1603019 - DNA, 15 bp, Homo sapiens
gctactcaggaagct

SEQ ID NO: 1603020 - DNA, 15 bp, Homo sapiens
ctactcaggaagctg

SEQ ID NO: 1603021 - DNA, 15 bp, Homo sapiens
tactcaggaagctga

SEQ ID NO: 1603022 - DNA, 15 bp, Homo sapiens
actcaggaagctgag

SEQ ID NO: 1603023 - DNA, 15 bp, Homo sapiens
ctcaggaagctgagg

SEQ ID NO: 1603024 - DNA, 15 bp, Homo sapiens
tcaggaagctgaggc

SEQ ID NO: 1603025 - DNA, 15 bp, Homo sapiens
caggaagctgaggca

SEQ ID NO: 1603026 - DNA, 15 bp, Homo sapiens
aggaagctgaggcat

SEQ ID NO: 1603027 - DNA, 15 bp, Homo sapiens
gctgaggcatgagaa

SEQ ID NO: 1603028 - DNA, 15 bp, Homo sapiens
ctgaggcatgagaat

SEQ ID NO: 1603029 - DNA, 15 bp, Homo sapiens
tgaacctgggaggta

SEQ ID NO: 1603030 - DNA, 15 bp, Homo sapiens
gaacctgggaggtag

SEQ ID NO: 1603031 - DNA, 15 bp, Homo sapiens
aacctgggaggtaga

SEQ ID NO: 1603032 - DNA, 15 bp, Homo sapiens
acctgggaggtagag

SEQ ID NO: 1603033 - DNA, 15 bp, Homo sapiens
cctgggaggtagagg

SEQ ID NO: 1603034 - DNA, 15 bp, Homo sapiens
ctgggaggtagaggt

SEQ ID NO: 1603035 - DNA, 15 bp, Homo sapiens
tgggaggtagaggtt

SEQ ID NO: 1603036 - DNA, 15 bp, Homo sapiens
gggaggtagaggttg

SEQ ID NO: 1603037 - DNA, 15 bp, Homo sapiens
gtgagccaagatcat

SEQ ID NO: 1603038 - DNA, 15 bp, Homo sapiens
tgagccaagatcatg

SEQ ID NO: 1603039 - DNA, 15 bp, Homo sapiens
gagccaagatcatgc

SEQ ID NO: 1603040 - DNA, 15 bp, Homo sapiens
caacctgggtgacaa

SEQ ID NO: 1603041 - DNA, 15 bp, Homo sapiens
aacctgggtgacaaa

SEQ ID NO: 1603042 - DNA, 15 bp, Homo sapiens
acctgggtgacaaag

SEQ ID NO: 1603043 - DNA, 15 bp, Homo sapiens
aaagtgagactctgt

SEQ ID NO: 1603044 - DNA, 15 bp, Homo sapiens
aagtgagactctgtc

SEQ ID NO: 1603045 - DNA, 15 bp, Homo sapiens
tgtctcaaaaaaaat

SEQ ID NO: 1603046 - DNA, 15 bp, Homo sapiens
gtctcaaaaaaaata

SEQ ID NO: 1603047 - DNA, 15 bp, Homo sapiens
ctcaaaaaaaataac

SEQ ID NO: 1603048 - DNA, 15 bp, Homo sapiens
tcaaaaaaaataaca

SEQ ID NO: 1603049 - DNA, 15 bp, Homo sapiens
caaaaaaaataacaa

SEQ ID NO: 1603050 - DNA, 15 bp, Homo sapiens
aaaaaaaataacaat

SEQ ID NO: 1603051 - DNA, 15 bp, Homo sapiens
aaaaaaataacaatt

SEQ ID NO: 1603052 - DNA, 15 bp, Homo sapiens
aaaaaataacaatta

SEQ ID NO: 1603053 - DNA, 15 bp, Homo sapiens
aaaaataacaattaa

SEQ ID NO: 1603054 - DNA, 15 bp, Homo sapiens
aaaataacaattaaa

SEQ ID NO: 1603055 - DNA, 15 bp, Homo sapiens
aaataacaattaaaa

SEQ ID NO: 1603056 - DNA, 15 bp, Homo sapiens
aataacaattaaaat

SEQ ID NO: 1603057 - DNA, 15 bp, Homo sapiens
ataacaattaaaata

SEQ ID NO: 1603058 - DNA, 15 bp, Homo sapiens
taacaattaaaataa

SEQ ID NO: 1603059 - DNA, 15 bp, Homo sapiens
aacaattaaaataaa

SEQ ID NO: 1603060 - DNA, 15 bp, Homo sapiens
acaattaaaataaaa

SEQ ID NO: 1603061 - DNA, 15 bp, Homo sapiens
caattaaaataaaat

SEQ ID NO: 1603062 - DNA, 15 bp, Homo sapiens
aattaaaataaaatc

SEQ ID NO: 1603063 - DNA, 15 bp, Homo sapiens
attaaaataaaatca

SEQ ID NO: 1603064 - DNA, 15 bp, Homo sapiens
ttaaaataaaatcac

SEQ ID NO: 1603065 - DNA, 15 bp, Homo sapiens
taaaataaaatcact

SEQ ID NO: 1603066 - DNA, 15 bp, Homo sapiens
aaaataaaatcactt

SEQ ID NO: 1603067 - DNA, 15 bp, Homo sapiens
aaataaaatcacttc

SEQ ID NO: 1603068 - DNA, 15 bp, Homo sapiens
aataaaatcacttct

SEQ ID NO: 1603069 - DNA, 15 bp, Homo sapiens
ataaaatcacttctg

SEQ ID NO: 1603070 - DNA, 15 bp, Homo sapiens
taaaatcacttctga

SEQ ID NO: 1603071 - DNA, 15 bp, Homo sapiens
aaaatcacttctgaa

SEQ ID NO: 1603072 - DNA, 15 bp, Homo sapiens
aaatcacttctgaat

SEQ ID NO: 1603073 - DNA, 15 bp, Homo sapiens
aatcacttctgaatg

SEQ ID NO: 1603074 - DNA, 15 bp, Homo sapiens
atcacttctgaatgg

SEQ ID NO: 1603075 - DNA, 15 bp, Homo sapiens
tcacttctgaatggt

SEQ ID NO: 1603076 - DNA, 15 bp, Homo sapiens
cacttctgaatggtg

SEQ ID NO: 1603077 - DNA, 15 bp, Homo sapiens
acttctgaatggtgg

SEQ ID NO: 1603078 - DNA, 15 bp, Homo sapiens
cttctgaatggtgga

SEQ ID NO: 1603079 - DNA, 15 bp, Homo sapiens
ttctgaatggtggaa

SEQ ID NO: 1603080 - DNA, 15 bp, Homo sapiens
tctgaatggtggaaa

SEQ ID NO: 1603081 - DNA, 15 bp, Homo sapiens
ctgaatggtggaaag

SEQ ID NO: 1603082 - DNA, 15 bp, Homo sapiens
tgaatggtggaaagc

SEQ ID NO: 1603083 - DNA, 15 bp, Homo sapiens
gaatggtggaaagca

SEQ ID NO: 1603084 - DNA, 15 bp, Homo sapiens
aatggtggaaagcac

SEQ ID NO: 1603085 - DNA, 15 bp, Homo sapiens
atggtggaaagcacc

SEQ ID NO: 1603086 - DNA, 15 bp, Homo sapiens
tggtggaaagcacca

SEQ ID NO: 1603087 - DNA, 15 bp, Homo sapiens
ggtggaaagcaccac

SEQ ID NO: 1603088 - DNA, 15 bp, Homo sapiens
gtggaaagcaccaca

SEQ ID NO: 1603089 - DNA, 15 bp, Homo sapiens
tggaaagcaccacaa

SEQ ID NO: 1603090 - DNA, 15 bp, Homo sapiens
ggaaagcaccacaaa

SEQ ID NO: 1603091 - DNA, 15 bp, Homo sapiens
gaaagcaccacaaag

SEQ ID NO: 1603092 - DNA, 15 bp, Homo sapiens
aaagcaccacaaagt

SEQ ID NO: 1603093 - DNA, 15 bp, Homo sapiens
aagcaccacaaagtt

SEQ ID NO: 1603094 - DNA, 15 bp, Homo sapiens
agcaccacaaagtta

SEQ ID NO: 1603095 - DNA, 15 bp, Homo sapiens
gcaccacaaagttag

SEQ ID NO: 1603096 - DNA, 15 bp, Homo sapiens
caccacaaagttaga

SEQ ID NO: 1603097 - DNA, 15 bp, Homo sapiens
accacaaagttagag

SEQ ID NO: 1603098 - DNA, 15 bp, Homo sapiens
ccacaaagttagagg

SEQ ID NO: 1603099 - DNA, 15 bp, Homo sapiens
cacaaagttagaggt

SEQ ID NO: 1603100 - DNA, 15 bp, Homo sapiens
acaaagttagaggtc

SEQ ID NO: 1603101 - DNA, 15 bp, Homo sapiens
caaagttagaggtca

SEQ ID NO: 1603102 - DNA, 15 bp, Homo sapiens
aaagttagaggtcaa

SEQ ID NO: 1603103 - DNA, 15 bp, Homo sapiens
aagttagaggtcaag

SEQ ID NO: 1603104 - DNA, 15 bp, Homo sapiens
agttagaggtcaagc

SEQ ID NO: 1603105 - DNA, 15 bp, Homo sapiens
gttagaggtcaagca

SEQ ID NO: 1603106 - DNA, 15 bp, Homo sapiens
ttagaggtcaagcaa

SEQ ID NO: 1603107 - DNA, 15 bp, Homo sapiens
tagaggtcaagcaat

SEQ ID NO: 1603108 - DNA, 15 bp, Homo sapiens
agaggtcaagcaata

SEQ ID NO: 1603109 - DNA, 15 bp, Homo sapiens
gaggtcaagcaataa

SEQ ID NO: 1603110 - DNA, 15 bp, Homo sapiens
aggtcaagcaataat

SEQ ID NO: 1603111 - DNA, 15 bp, Homo sapiens
ggtcaagcaataatt

SEQ ID NO: 1603112 - DNA, 15 bp, Homo sapiens
gtcaagcaataattt

SEQ ID NO: 1603113 - DNA, 15 bp, Homo sapiens
tcaagcaataatttg

SEQ ID NO: 1603114 - DNA, 15 bp, Homo sapiens
caagcaataatttgg

SEQ ID NO: 1603115 - DNA, 15 bp, Homo sapiens
aagcaataatttgga

SEQ ID NO: 1603116 - DNA, 15 bp, Homo sapiens
agcaataatttggag

SEQ ID NO: 1603117 - DNA, 15 bp, Homo sapiens
gcaataatttggaga

SEQ ID NO: 1603118 - DNA, 15 bp, Homo sapiens
caataatttggagaa

SEQ ID NO: 1603119 - DNA, 15 bp, Homo sapiens
aataatttggagaaa

SEQ ID NO: 1603120 - DNA, 15 bp, Homo sapiens
ataatttggagaaaa

SEQ ID NO: 1603121 - DNA, 15 bp, Homo sapiens
taatttggagaaaag

SEQ ID NO: 1603122 - DNA, 15 bp, Homo sapiens
aatttggagaaaaga

SEQ ID NO: 1603123 - DNA, 15 bp, Homo sapiens
atttggagaaaagaa

SEQ ID NO: 1603124 - DNA, 15 bp, Homo sapiens
tttggagaaaagaat

SEQ ID NO: 1603125 - DNA, 15 bp, Homo sapiens
ttggagaaaagaatt

SEQ ID NO: 1603126 - DNA, 15 bp, Homo sapiens
tggagaaaagaatta

SEQ ID NO: 1603127 - DNA, 15 bp, Homo sapiens
ggagaaaagaattag

SEQ ID NO: 1603128 - DNA, 15 bp, Homo sapiens
agaaaagaattagta

SEQ ID NO: 1603129 - DNA, 15 bp, Homo sapiens
gaaaagaattagtaa

SEQ ID NO: 1603130 - DNA, 15 bp, Homo sapiens
aaaagaattagtaat

SEQ ID NO: 1603131 - DNA, 15 bp, Homo sapiens
aaagaattagtaatt

SEQ ID NO: 1603132 - DNA, 15 bp, Homo sapiens
aagaattagtaattt

SEQ ID NO: 1603133 - DNA, 15 bp, Homo sapiens
agaattagtaatttg

SEQ ID NO: 1603134 - DNA, 15 bp, Homo sapiens
gaattagtaatttgt

SEQ ID NO: 1603135 - DNA, 15 bp, Homo sapiens
aattagtaatttgtt

SEQ ID NO: 1603136 - DNA, 15 bp, Homo sapiens
attagtaatttgttg

SEQ ID NO: 1603137 - DNA, 15 bp, Homo sapiens
ttagtaatttgttgg

SEQ ID NO: 1603138 - DNA, 15 bp, Homo sapiens
tagtaatttgttgga

SEQ ID NO: 1603139 - DNA, 15 bp, Homo sapiens
agtaatttgttggac

SEQ ID NO: 1603140 - DNA, 15 bp, Homo sapiens
gtaatttgttggaca

SEQ ID NO: 1603141 - DNA, 15 bp, Homo sapiens
taatttgttggacag

SEQ ID NO: 1603142 - DNA, 15 bp, Homo sapiens
aatttgttggacaga

SEQ ID NO: 1603143 - DNA, 15 bp, Homo sapiens
atttgttggacagac

SEQ ID NO: 1603144 - DNA, 15 bp, Homo sapiens
tttgttggacagaca

SEQ ID NO: 1603145 - DNA, 15 bp, Homo sapiens
ttgttggacagacaa

SEQ ID NO: 1603146 - DNA, 15 bp, Homo sapiens
tgttggacagacaaa

SEQ ID NO: 1603147 - DNA, 15 bp, Homo sapiens
gttggacagacaaaa

SEQ ID NO: 1603148 - DNA, 15 bp, Homo sapiens
ttggacagacaaaag

SEQ ID NO: 1603149 - DNA, 15 bp, Homo sapiens
tggacagacaaaaga

SEQ ID NO: 1603150 - DNA, 15 bp, Homo sapiens
ggacagacaaaagac

SEQ ID NO: 1603151 - DNA, 15 bp, Homo sapiens
gacagacaaaagact

SEQ ID NO: 1603152 - DNA, 15 bp, Homo sapiens
acagacaaaagactt

SEQ ID NO: 1603153 - DNA, 15 bp, Homo sapiens
cagacaaaagacttt

SEQ ID NO: 1603154 - DNA, 15 bp, Homo sapiens
agacaaaagactttt

SEQ ID NO: 1603155 - DNA, 15 bp, Homo sapiens
gacaaaagacttttt

SEQ ID NO: 1603156 - DNA, 15 bp, Homo sapiens
acaaaagactttttt

SEQ ID NO: 1603157 - DNA, 15 bp, Homo sapiens
caaaagactttttta

SEQ ID NO: 1603158 - DNA, 15 bp, Homo sapiens
aaaagacttttttaa

SEQ ID NO: 1603159 - DNA, 15 bp, Homo sapiens
aaagacttttttaat

SEQ ID NO: 1603160 - DNA, 15 bp, Homo sapiens
aagacttttttaata

SEQ ID NO: 1603161 - DNA, 15 bp, Homo sapiens
agacttttttaatat

SEQ ID NO: 1603162 - DNA, 15 bp, Homo sapiens
gacttttttaatata

SEQ ID NO: 1603163 - DNA, 15 bp, Homo sapiens
acttttttaatataa

SEQ ID NO: 1603164 - DNA, 15 bp, Homo sapiens
cttttttaatataac

SEQ ID NO: 1603165 - DNA, 15 bp, Homo sapiens
ttttttaatataaca

SEQ ID NO: 1603166 - DNA, 15 bp, Homo sapiens
tttttaatataacaa

SEQ ID NO: 1603167 - DNA, 15 bp, Homo sapiens
ttttaatataacaaa

SEQ ID NO: 1603168 - DNA, 15 bp, Homo sapiens
tttaatataacaaaa

SEQ ID NO: 1603169 - DNA, 15 bp, Homo sapiens
ttaatataacaaaaa

SEQ ID NO: 1603170 - DNA, 15 bp, Homo sapiens
taatataacaaaaac

SEQ ID NO: 1603171 - DNA, 15 bp, Homo sapiens
aatataacaaaaact

SEQ ID NO: 1603172 - DNA, 15 bp, Homo sapiens
atataacaaaaactt

SEQ ID NO: 1603173 - DNA, 15 bp, Homo sapiens
tataacaaaaacttt

SEQ ID NO: 1603174 - DNA, 15 bp, Homo sapiens
ataacaaaaacttta

SEQ ID NO: 1603175 - DNA, 15 bp, Homo sapiens
taacaaaaactttaa

SEQ ID NO: 1603176 - DNA, 15 bp, Homo sapiens
aacaaaaactttaaa

SEQ ID NO: 1603177 - DNA, 15 bp, Homo sapiens
acaaaaactttaaaa

SEQ ID NO: 1603178 - DNA, 15 bp, Homo sapiens
caaaaactttaaaaa

SEQ ID NO: 1603179 - DNA, 15 bp, Homo sapiens
aaaaactttaaaaat

SEQ ID NO: 1603180 - DNA, 15 bp, Homo sapiens
aaaactttaaaaatt

SEQ ID NO: 1603181 - DNA, 15 bp, Homo sapiens
aaactttaaaaatta

SEQ ID NO: 1603182 - DNA, 15 bp, Homo sapiens
aactttaaaaattaa

SEQ ID NO: 1603183 - DNA, 15 bp, Homo sapiens
actttaaaaattaaa

SEQ ID NO: 1603184 - DNA, 15 bp, Homo sapiens
ctttaaaaattaaaa

SEQ ID NO: 1603185 - DNA, 15 bp, Homo sapiens
aaattaaaaaaatac

SEQ ID NO: 1603186 - DNA, 15 bp, Homo sapiens
aattaaaaaaataca

SEQ ID NO: 1603187 - DNA, 15 bp, Homo sapiens
attaaaaaaatacac

SEQ ID NO: 1603188 - DNA, 15 bp, Homo sapiens
ttaaaaaaatacaca

SEQ ID NO: 1603189 - DNA, 15 bp, Homo sapiens
taaaaaaatacacat

SEQ ID NO: 1603190 - DNA, 15 bp, Homo sapiens
aaaaaaatacacatt

SEQ ID NO: 1603191 - DNA, 15 bp, Homo sapiens
aaaaaatacacattc

SEQ ID NO: 1603192 - DNA, 15 bp, Homo sapiens
aaaaatacacattcg

SEQ ID NO: 1603193 - DNA, 15 bp, Homo sapiens
aaaatacacattcga

SEQ ID NO: 1603194 - DNA, 15 bp, Homo sapiens
aaatacacattcgag

SEQ ID NO: 1603195 - DNA, 15 bp, Homo sapiens
aatacacattcgagg

SEQ ID NO: 1603196 - DNA, 15 bp, Homo sapiens
atacacattcgagga

SEQ ID NO: 1603197 - DNA, 15 bp, Homo sapiens
tacacattcgaggac

SEQ ID NO: 1603198 - DNA, 15 bp, Homo sapiens
acacattcgaggaca

SEQ ID NO: 1603199 - DNA, 15 bp, Homo sapiens
cacattcgaggacat

SEQ ID NO: 1603200 - DNA, 15 bp, Homo sapiens
acattcgaggacatt

SEQ ID NO: 1603201 - DNA, 15 bp, Homo sapiens
cattcgaggacattt

SEQ ID NO: 1603202 - DNA, 15 bp, Homo sapiens
attcgaggacatttt

SEQ ID NO: 1603203 - DNA, 15 bp, Homo sapiens
ttcgaggacattttc

SEQ ID NO: 1603204 - DNA, 15 bp, Homo sapiens
tcgaggacattttcc

SEQ ID NO: 1603205 - DNA, 15 bp, Homo sapiens
cgaggacattttcct

SEQ ID NO: 1603206 - DNA, 15 bp, Homo sapiens
gaggacattttccta

SEQ ID NO: 1603207 - DNA, 15 bp, Homo sapiens
aggacattttcctaa

SEQ ID NO: 1603208 - DNA, 15 bp, Homo sapiens
ggacattttcctaaa

SEQ ID NO: 1603209 - DNA, 15 bp, Homo sapiens
gacattttcctaaaa

SEQ ID NO: 1603210 - DNA, 15 bp, Homo sapiens
acattttcctaaaaa

SEQ ID NO: 1603211 - DNA, 15 bp, Homo sapiens
cattttcctaaaaac

SEQ ID NO: 1603212 - DNA, 15 bp, Homo sapiens
attttcctaaaaaca

SEQ ID NO: 1603213 - DNA, 15 bp, Homo sapiens
ttttcctaaaaacac

SEQ ID NO: 1603214 - DNA, 15 bp, Homo sapiens
tttcctaaaaacaca

SEQ ID NO: 1603215 - DNA, 15 bp, Homo sapiens
ttcctaaaaacacag

SEQ ID NO: 1603216 - DNA, 15 bp, Homo sapiens
tcctaaaaacacagg

SEQ ID NO: 1603217 - DNA, 15 bp, Homo sapiens
cctaaaaacacaggc

SEQ ID NO: 1603218 - DNA, 15 bp, Homo sapiens
ctaaaaacacaggca

SEQ ID NO: 1603219 - DNA, 15 bp, Homo sapiens
taaaaacacaggcaa

SEQ ID NO: 1603220 - DNA, 15 bp, Homo sapiens
aaaaacacaggcaaa

SEQ ID NO: 1603221 - DNA, 15 bp, Homo sapiens
aaaacacaggcaaag

SEQ ID NO: 1603222 - DNA, 15 bp, Homo sapiens
aaacacaggcaaagg

SEQ ID NO: 1603223 - DNA, 15 bp, Homo sapiens
aacacaggcaaagga

SEQ ID NO: 1603224 - DNA, 15 bp, Homo sapiens
acacaggcaaaggac

SEQ ID NO: 1603225 - DNA, 15 bp, Homo sapiens
cacaggcaaaggaca

SEQ ID NO: 1603226 - DNA, 15 bp, Homo sapiens
acaggcaaaggacat

SEQ ID NO: 1603227 - DNA, 15 bp, Homo sapiens
caggcaaaggacata

SEQ ID NO: 1603228 - DNA, 15 bp, Homo sapiens
aggcaaaggacataa

SEQ ID NO: 1603229 - DNA, 15 bp, Homo sapiens
ggcaaaggacataaa

SEQ ID NO: 1603230 - DNA, 15 bp, Homo sapiens
gcaaaggacataaac

SEQ ID NO: 1603231 - DNA, 15 bp, Homo sapiens
caaaggacataaaca

SEQ ID NO: 1603232 - DNA, 15 bp, Homo sapiens
aaaggacataaacag

SEQ ID NO: 1603233 - DNA, 15 bp, Homo sapiens
aaggacataaacagc

SEQ ID NO: 1603234 - DNA, 15 bp, Homo sapiens
aggacataaacagca

SEQ ID NO: 1603235 - DNA, 15 bp, Homo sapiens
ggacataaacagcaa

SEQ ID NO: 1603236 - DNA, 15 bp, Homo sapiens
gacataaacagcaaa

SEQ ID NO: 1603237 - DNA, 15 bp, Homo sapiens
acataaacagcaaag

SEQ ID NO: 1603238 - DNA, 15 bp, Homo sapiens
cataaacagcaaagc

SEQ ID NO: 1603239 - DNA, 15 bp, Homo sapiens
ataaacagcaaagca

SEQ ID NO: 1603240 - DNA, 15 bp, Homo sapiens
taaacagcaaagcaa

SEQ ID NO: 1603241 - DNA, 15 bp, Homo sapiens
aaacagcaaagcaag

SEQ ID NO: 1603242 - DNA, 15 bp, Homo sapiens
aacagcaaagcaaga

SEQ ID NO: 1603243 - DNA, 15 bp, Homo sapiens
acagcaaagcaagaa

SEQ ID NO: 1603244 - DNA, 15 bp, Homo sapiens
cagcaaagcaagaag

SEQ ID NO: 1603245 - DNA, 15 bp, Homo sapiens
agcaaagcaagaaga

SEQ ID NO: 1603246 - DNA, 15 bp, Homo sapiens
gcaaagcaagaagac

SEQ ID NO: 1603247 - DNA, 15 bp, Homo sapiens
caaagcaagaagaca

SEQ ID NO: 1603248 - DNA, 15 bp, Homo sapiens
aaagcaagaagacag

SEQ ID NO: 1603249 - DNA, 15 bp, Homo sapiens
aagcaagaagacagc

SEQ ID NO: 1603250 - DNA, 15 bp, Homo sapiens
agcaagaagacagct

SEQ ID NO: 1603251 - DNA, 15 bp, Homo sapiens
gcaagaagacagctt

SEQ ID NO: 1603252 - DNA, 15 bp, Homo sapiens
caagaagacagcttg

SEQ ID NO: 1603253 - DNA, 15 bp, Homo sapiens
aagaagacagcttga

SEQ ID NO: 1603254 - DNA, 15 bp, Homo sapiens
agaagacagcttgat

SEQ ID NO: 1603255 - DNA, 15 bp, Homo sapiens
gaagacagcttgatg

SEQ ID NO: 1603256 - DNA, 15 bp, Homo sapiens
aagacagcttgatgt

SEQ ID NO: 1603257 - DNA, 15 bp, Homo sapiens
agacagcttgatgtg

SEQ ID NO: 1603258 - DNA, 15 bp, Homo sapiens
gacagcttgatgtgg

SEQ ID NO: 1603259 - DNA, 15 bp, Homo sapiens
acagcttgatgtggc

SEQ ID NO: 1603260 - DNA, 15 bp, Homo sapiens
cagcttgatgtggcc

SEQ ID NO: 1603261 - DNA, 15 bp, Homo sapiens
agcttgatgtggcca

SEQ ID NO: 1603262 - DNA, 15 bp, Homo sapiens
gcttgatgtggccat

SEQ ID NO: 1603263 - DNA, 15 bp, Homo sapiens
cttgatgtggccatt

SEQ ID NO: 1603264 - DNA, 15 bp, Homo sapiens
ttgatgtggccattt

SEQ ID NO: 1603265 - DNA, 15 bp, Homo sapiens
tgatgtggccatttt

SEQ ID NO: 1603266 - DNA, 15 bp, Homo sapiens
gatgtggccatttta

SEQ ID NO: 1603267 - DNA, 15 bp, Homo sapiens
atgtggccattttat

SEQ ID NO: 1603268 - DNA, 15 bp, Homo sapiens
tgtggccattttatc

SEQ ID NO: 1603269 - DNA, 15 bp, Homo sapiens
gtggccattttatcc

SEQ ID NO: 1603270 - DNA, 15 bp, Homo sapiens
tggccattttatcca

SEQ ID NO: 1603271 - DNA, 15 bp, Homo sapiens
ggccattttatccag

SEQ ID NO: 1603272 - DNA, 15 bp, Homo sapiens
gccattttatccagg

SEQ ID NO: 1603273 - DNA, 15 bp, Homo sapiens
ccattttatccaggg

SEQ ID NO: 1603274 - DNA, 15 bp, Homo sapiens
cattttatccagggg

SEQ ID NO: 1603275 - DNA, 15 bp, Homo sapiens
attttatccaggggg

SEQ ID NO: 1603276 - DNA, 15 bp, Homo sapiens
ttttatccaggggga

SEQ ID NO: 1603277 - DNA, 15 bp, Homo sapiens
tttatccagggggac

SEQ ID NO: 1603278 - DNA, 15 bp, Homo sapiens
ttatccagggggaca

SEQ ID NO: 1603279 - DNA, 15 bp, Homo sapiens
tatccagggggacat

SEQ ID NO: 1603280 - DNA, 15 bp, Homo sapiens
atccagggggacatt

SEQ ID NO: 1603281 - DNA, 15 bp, Homo sapiens
tccagggggacattt

SEQ ID NO: 1603282 - DNA, 15 bp, Homo sapiens
ccagggggacatttt

SEQ ID NO: 1603283 - DNA, 15 bp, Homo sapiens
cagggggacattttg

SEQ ID NO: 1603284 - DNA, 15 bp, Homo sapiens
agggggacattttgg

SEQ ID NO: 1603285 - DNA, 15 bp, Homo sapiens
gggggacattttggt

SEQ ID NO: 1603286 - DNA, 15 bp, Homo sapiens
ggggacattttggtg

SEQ ID NO: 1603287 - DNA, 15 bp, Homo sapiens
gggacattttggtga

SEQ ID NO: 1603288 - DNA, 15 bp, Homo sapiens
ggacattttggtgag

SEQ ID NO: 1603289 - DNA, 15 bp, Homo sapiens
gacattttggtgagc

SEQ ID NO: 1603290 - DNA, 15 bp, Homo sapiens
acattttggtgagcc

SEQ ID NO: 1603291 - DNA, 15 bp, Homo sapiens
cattttggtgagccc

SEQ ID NO: 1603292 - DNA, 15 bp, Homo sapiens
attttggtgagccct

SEQ ID NO: 1603293 - DNA, 15 bp, Homo sapiens
ttttggtgagcccta

SEQ ID NO: 1603294 - DNA, 15 bp, Homo sapiens
tttggtgagccctat

SEQ ID NO: 1603295 - DNA, 15 bp, Homo sapiens
ttggtgagccctatg

SEQ ID NO: 1603296 - DNA, 15 bp, Homo sapiens
tggtgagccctatgg

SEQ ID NO: 1603297 - DNA, 15 bp, Homo sapiens
ggtgagccctatgga

SEQ ID NO: 1603298 - DNA, 15 bp, Homo sapiens
gtgagccctatggac

SEQ ID NO: 1603299 - DNA, 15 bp, Homo sapiens
tgagccctatggaca

SEQ ID NO: 1603300 - DNA, 15 bp, Homo sapiens
gagccctatggacac

SEQ ID NO: 1603301 - DNA, 15 bp, Homo sapiens
agccctatggacaca

SEQ ID NO: 1603302 - DNA, 15 bp, Homo sapiens
gccctatggacacag

SEQ ID NO: 1603303 - DNA, 15 bp, Homo sapiens
ccctatggacacagc

SEQ ID NO: 1603304 - DNA, 15 bp, Homo sapiens
cctatggacacagct

SEQ ID NO: 1603305 - DNA, 15 bp, Homo sapiens
ctatggacacagctg

SEQ ID NO: 1603306 - DNA, 15 bp, Homo sapiens
tatggacacagctgc

SEQ ID NO: 1603307 - DNA, 15 bp, Homo sapiens
atggacacagctgcc

SEQ ID NO: 1603308 - DNA, 15 bp, Homo sapiens
tggacacagctgcca

SEQ ID NO: 1603309 - DNA, 15 bp, Homo sapiens
ggacacagctgccat

SEQ ID NO: 1603310 - DNA, 15 bp, Homo sapiens
gacacagctgccatg

SEQ ID NO: 1603311 - DNA, 15 bp, Homo sapiens
acacagctgccatga

SEQ ID NO: 1603312 - DNA, 15 bp, Homo sapiens
cacagctgccatgat

SEQ ID NO: 1603313 - DNA, 15 bp, Homo sapiens
acagctgccatgatg

SEQ ID NO: 1603314 - DNA, 15 bp, Homo sapiens
cagctgccatgatgc

SEQ ID NO: 1603315 - DNA, 15 bp, Homo sapiens
agctgccatgatgcc

SEQ ID NO: 1603316 - DNA, 15 bp, Homo sapiens
gctgccatgatgcca

SEQ ID NO: 1603317 - DNA, 15 bp, Homo sapiens
ctgccatgatgccaa

SEQ ID NO: 1603318 - DNA, 15 bp, Homo sapiens
tgccatgatgccaac

SEQ ID NO: 1603319 - DNA, 15 bp, Homo sapiens
gccatgatgccaaca

SEQ ID NO: 1603320 - DNA, 15 bp, Homo sapiens
ccatgatgccaacaa

SEQ ID NO: 1603321 - DNA, 15 bp, Homo sapiens
catgatgccaacaat

SEQ ID NO: 1603322 - DNA, 15 bp, Homo sapiens
atgatgccaacaatg

SEQ ID NO: 1603323 - DNA, 15 bp, Homo sapiens
tgatgccaacaatgt

SEQ ID NO: 1603324 - DNA, 15 bp, Homo sapiens
gatgccaacaatgtg

SEQ ID NO: 1603325 - DNA, 15 bp, Homo sapiens
atgccaacaatgtga

SEQ ID NO: 1603326 - DNA, 15 bp, Homo sapiens
tgccaacaatgtgac

SEQ ID NO: 1603327 - DNA, 15 bp, Homo sapiens
gccaacaatgtgaca

SEQ ID NO: 1603328 - DNA, 15 bp, Homo sapiens
ccaacaatgtgacag

SEQ ID NO: 1603329 - DNA, 15 bp, Homo sapiens
caacaatgtgacagc

SEQ ID NO: 1603330 - DNA, 15 bp, Homo sapiens
aacaatgtgacagct

SEQ ID NO: 1603331 - DNA, 15 bp, Homo sapiens
acaatgtgacagctg

SEQ ID NO: 1603332 - DNA, 15 bp, Homo sapiens
caatgtgacagctgt

SEQ ID NO: 1603333 - DNA, 15 bp, Homo sapiens
aatgtgacagctgtc

SEQ ID NO: 1603334 - DNA, 15 bp, Homo sapiens
atgtgacagctgtcc

SEQ ID NO: 1603335 - DNA, 15 bp, Homo sapiens
tgtgacagctgtccc

SEQ ID NO: 1603336 - DNA, 15 bp, Homo sapiens
gtgacagctgtcccc

SEQ ID NO: 1603337 - DNA, 15 bp, Homo sapiens
tgacagctgtcccct

SEQ ID NO: 1603338 - DNA, 15 bp, Homo sapiens
gacagctgtcccctt

SEQ ID NO: 1603339 - DNA, 15 bp, Homo sapiens
acagctgtccccttc

SEQ ID NO: 1603340 - DNA, 15 bp, Homo sapiens
cagctgtccccttca

SEQ ID NO: 1603341 - DNA, 15 bp, Homo sapiens
agctgtccccttcaa

SEQ ID NO: 1603342 - DNA, 15 bp, Homo sapiens
gctgtccccttcaaa

SEQ ID NO: 1603343 - DNA, 15 bp, Homo sapiens
ctgtccccttcaaaa

SEQ ID NO: 1603344 - DNA, 15 bp, Homo sapiens
tgtccccttcaaaat

SEQ ID NO: 1603345 - DNA, 15 bp, Homo sapiens
gtccccttcaaaatg

SEQ ID NO: 1603346 - DNA, 15 bp, Homo sapiens
tccccttcaaaatgc

SEQ ID NO: 1603347 - DNA, 15 bp, Homo sapiens
ccccttcaaaatgcg

SEQ ID NO: 1603348 - DNA, 15 bp, Homo sapiens
cccttcaaaatgcgt

SEQ ID NO: 1603349 - DNA, 15 bp, Homo sapiens
ccttcaaaatgcgtt

SEQ ID NO: 1603350 - DNA, 15 bp, Homo sapiens
cttcaaaatgcgtta

SEQ ID NO: 1603351 - DNA, 15 bp, Homo sapiens
ttcaaaatgcgttag

SEQ ID NO: 1603352 - DNA, 15 bp, Homo sapiens
tcaaaatgcgttagc

SEQ ID NO: 1603353 - DNA, 15 bp, Homo sapiens
caaaatgcgttagcc

SEQ ID NO: 1603354 - DNA, 15 bp, Homo sapiens
aaaatgcgttagccc

SEQ ID NO: 1603355 - DNA, 15 bp, Homo sapiens
aaatgcgttagcccc

SEQ ID NO: 1603356 - DNA, 15 bp, Homo sapiens
aatgcgttagcccca

SEQ ID NO: 1603357 - DNA, 15 bp, Homo sapiens
atgcgttagccccag

SEQ ID NO: 1603358 - DNA, 15 bp, Homo sapiens
tgcgttagccccagc

SEQ ID NO: 1603359 - DNA, 15 bp, Homo sapiens
gcgttagccccagct

SEQ ID NO: 1603360 - DNA, 15 bp, Homo sapiens
cgttagccccagctc

SEQ ID NO: 1603361 - DNA, 15 bp, Homo sapiens
gttagccccagctct

SEQ ID NO: 1603362 - DNA, 15 bp, Homo sapiens
ttagccccagctctt

SEQ ID NO: 1603363 - DNA, 15 bp, Homo sapiens
tagccccagctcttc

SEQ ID NO: 1603364 - DNA, 15 bp, Homo sapiens
agccccagctcttcc

SEQ ID NO: 1603365 - DNA, 15 bp, Homo sapiens
gccccagctcttcct

SEQ ID NO: 1603366 - DNA, 15 bp, Homo sapiens
ccccagctcttcctc

SEQ ID NO: 1603367 - DNA, 15 bp, Homo sapiens
cccagctcttcctct

SEQ ID NO: 1603368 - DNA, 15 bp, Homo sapiens
ccagctcttcctctc

SEQ ID NO: 1603369 - DNA, 15 bp, Homo sapiens
cagctcttcctctcc

SEQ ID NO: 1603370 - DNA, 15 bp, Homo sapiens
agctcttcctctccc

SEQ ID NO: 1603371 - DNA, 15 bp, Homo sapiens
gctcttcctctcccc

SEQ ID NO: 1603372 - DNA, 15 bp, Homo sapiens
ctcttcctctccccc

SEQ ID NO: 1603373 - DNA, 15 bp, Homo sapiens
tcttcctctccccca

SEQ ID NO: 1603374 - DNA, 15 bp, Homo sapiens
cttcctctcccccaa

SEQ ID NO: 1603375 - DNA, 15 bp, Homo sapiens
ttcctctcccccaac

SEQ ID NO: 1603376 - DNA, 15 bp, Homo sapiens
tcctctcccccaacc

SEQ ID NO: 1603377 - DNA, 15 bp, Homo sapiens
cctctcccccaacct

SEQ ID NO: 1603378 - DNA, 15 bp, Homo sapiens
ctctcccccaacctc

SEQ ID NO: 1603379 - DNA, 15 bp, Homo sapiens
tctcccccaacctcc

SEQ ID NO: 1603380 - DNA, 15 bp, Homo sapiens
ctcccccaacctcca

SEQ ID NO: 1603381 - DNA, 15 bp, Homo sapiens
tcccccaacctccag

SEQ ID NO: 1603382 - DNA, 15 bp, Homo sapiens
cccccaacctccagt

SEQ ID NO: 1603383 - DNA, 15 bp, Homo sapiens
ccccaacctccagtc

SEQ ID NO: 1603384 - DNA, 15 bp, Homo sapiens
cccaacctccagtcc

SEQ ID NO: 1603385 - DNA, 15 bp, Homo sapiens
ccaacctccagtcca

SEQ ID NO: 1603386 - DNA, 15 bp, Homo sapiens
caacctccagtccaa

SEQ ID NO: 1603387 - DNA, 15 bp, Homo sapiens
aacctccagtccaaa

SEQ ID NO: 1603388 - DNA, 15 bp, Homo sapiens
acctccagtccaaag

SEQ ID NO: 1603389 - DNA, 15 bp, Homo sapiens
cctccagtccaaagg

SEQ ID NO: 1603390 - DNA, 15 bp, Homo sapiens
ctccagtccaaagga

SEQ ID NO: 1603391 - DNA, 15 bp, Homo sapiens
tccagtccaaaggac

SEQ ID NO: 1603392 - DNA, 15 bp, Homo sapiens
ccagtccaaaggact

SEQ ID NO: 1603393 - DNA, 15 bp, Homo sapiens
cagtccaaaggactt

SEQ ID NO: 1603394 - DNA, 15 bp, Homo sapiens
agtccaaaggacttg

SEQ ID NO: 1603395 - DNA, 15 bp, Homo sapiens
gtccaaaggacttgc

SEQ ID NO: 1603396 - DNA, 15 bp, Homo sapiens
tccaaaggacttgca

SEQ ID NO: 1603397 - DNA, 15 bp, Homo sapiens
ccaaaggacttgcac

SEQ ID NO: 1603398 - DNA, 15 bp, Homo sapiens
caaaggacttgcact

SEQ ID NO: 1603399 - DNA, 15 bp, Homo sapiens
aaaggacttgcactt

SEQ ID NO: 1603400 - DNA, 15 bp, Homo sapiens
aaggacttgcacttt

SEQ ID NO: 1603401 - DNA, 15 bp, Homo sapiens
aggacttgcactttc

SEQ ID NO: 1603402 - DNA, 15 bp, Homo sapiens
ggacttgcactttct

SEQ ID NO: 1603403 - DNA, 15 bp, Homo sapiens
gacttgcactttcta

SEQ ID NO: 1603404 - DNA, 15 bp, Homo sapiens
acttgcactttctac

SEQ ID NO: 1603405 - DNA, 15 bp, Homo sapiens
cttgcactttctact

SEQ ID NO: 1603406 - DNA, 15 bp, Homo sapiens
ttgcactttctactt

SEQ ID NO: 1603407 - DNA, 15 bp, Homo sapiens
tgcactttctacttt

SEQ ID NO: 1603408 - DNA, 15 bp, Homo sapiens
gcactttctacttta

SEQ ID NO: 1603409 - DNA, 15 bp, Homo sapiens
cactttctactttac

SEQ ID NO: 1603410 - DNA, 15 bp, Homo sapiens
actttctactttact

SEQ ID NO: 1603411 - DNA, 15 bp, Homo sapiens
ctttctactttactc

SEQ ID NO: 1603412 - DNA, 15 bp, Homo sapiens
tttctactttactcc

SEQ ID NO: 1603413 - DNA, 15 bp, Homo sapiens
ttctactttactcct

SEQ ID NO: 1603414 - DNA, 15 bp, Homo sapiens
tctactttactcctt

SEQ ID NO: 1603415 - DNA, 15 bp, Homo sapiens
ctactttactccttt

SEQ ID NO: 1603416 - DNA, 15 bp, Homo sapiens
tactttactcctttc

SEQ ID NO: 1603417 - DNA, 15 bp, Homo sapiens
actttactcctttct

SEQ ID NO: 1603418 - DNA, 15 bp, Homo sapiens
ctttactcctttctg

SEQ ID NO: 1603419 - DNA, 15 bp, Homo sapiens
tttactcctttctgc

SEQ ID NO: 1603420 - DNA, 15 bp, Homo sapiens
ttactcctttctgca

SEQ ID NO: 1603421 - DNA, 15 bp, Homo sapiens
tactcctttctgcat

SEQ ID NO: 1603422 - DNA, 15 bp, Homo sapiens
actcctttctgcatt

SEQ ID NO: 1603423 - DNA, 15 bp, Homo sapiens
ctcctttctgcattg

SEQ ID NO: 1603424 - DNA, 15 bp, Homo sapiens
tcctttctgcattgt

SEQ ID NO: 1603425 - DNA, 15 bp, Homo sapiens
cctttctgcattgtt

SEQ ID NO: 1603426 - DNA, 15 bp, Homo sapiens
ctttctgcattgttt

SEQ ID NO: 1603427 - DNA, 15 bp, Homo sapiens
tttctgcattgttta

SEQ ID NO: 1603428 - DNA, 15 bp, Homo sapiens
ttctgcattgtttaa

SEQ ID NO: 1603429 - DNA, 15 bp, Homo sapiens
tctgcattgtttaat

SEQ ID NO: 1603430 - DNA, 15 bp, Homo sapiens
ctgcattgtttaatt

SEQ ID NO: 1603431 - DNA, 15 bp, Homo sapiens
tgcattgtttaattt

SEQ ID NO: 1603432 - DNA, 15 bp, Homo sapiens
gcattgtttaatttt

SEQ ID NO: 1603433 - DNA, 15 bp, Homo sapiens
cattgtttaattttc

SEQ ID NO: 1603434 - DNA, 15 bp, Homo sapiens
attgtttaattttct

SEQ ID NO: 1603435 - DNA, 15 bp, Homo sapiens
ttgtttaattttctt

SEQ ID NO: 1603436 - DNA, 15 bp, Homo sapiens
tgtttaattttcttt

SEQ ID NO: 1603437 - DNA, 15 bp, Homo sapiens
gtttaattttctttt

SEQ ID NO: 1603438 - DNA, 15 bp, Homo sapiens
ttaattttcttttac

SEQ ID NO: 1603439 - DNA, 15 bp, Homo sapiens
taattttcttttaca

SEQ ID NO: 1603440 - DNA, 15 bp, Homo sapiens
aattttcttttacaa

SEQ ID NO: 1603441 - DNA, 15 bp, Homo sapiens
attttcttttacaaa

SEQ ID NO: 1603442 - DNA, 15 bp, Homo sapiens
ttttcttttacaaat

SEQ ID NO: 1603443 - DNA, 15 bp, Homo sapiens
tttcttttacaaata

SEQ ID NO: 1603444 - DNA, 15 bp, Homo sapiens
ttcttttacaaatat

SEQ ID NO: 1603445 - DNA, 15 bp, Homo sapiens
tcttttacaaatatg

SEQ ID NO: 1603446 - DNA, 15 bp, Homo sapiens
cttttacaaatatgt

SEQ ID NO: 1603447 - DNA, 15 bp, Homo sapiens
ttttacaaatatgtt

SEQ ID NO: 1603448 - DNA, 15 bp, Homo sapiens
tttacaaatatgtta

SEQ ID NO: 1603449 - DNA, 15 bp, Homo sapiens
ttacaaatatgttac

SEQ ID NO: 1603450 - DNA, 15 bp, Homo sapiens
tacaaatatgttact

SEQ ID NO: 1603451 - DNA, 15 bp, Homo sapiens
acaaatatgttactt

SEQ ID NO: 1603452 - DNA, 15 bp, Homo sapiens
caaatatgttacttg

SEQ ID NO: 1603453 - DNA, 15 bp, Homo sapiens
aaatatgttacttgt

SEQ ID NO: 1603454 - DNA, 15 bp, Homo sapiens
aatatgttacttgtc

SEQ ID NO: 1603455 - DNA, 15 bp, Homo sapiens
atatgttacttgtca

SEQ ID NO: 1603456 - DNA, 15 bp, Homo sapiens
tatgttacttgtcat

SEQ ID NO: 1603457 - DNA, 15 bp, Homo sapiens
atgttacttgtcatc

SEQ ID NO: 1603458 - DNA, 15 bp, Homo sapiens
tgttacttgtcatca

SEQ ID NO: 1603459 - DNA, 15 bp, Homo sapiens
gttacttgtcatcag

SEQ ID NO: 1603460 - DNA, 15 bp, Homo sapiens
ttacttgtcatcaga

SEQ ID NO: 1603461 - DNA, 15 bp, Homo sapiens
tacttgtcatcagaa

SEQ ID NO: 1603462 - DNA, 15 bp, Homo sapiens
acttgtcatcagaaa

SEQ ID NO: 1603463 - DNA, 15 bp, Homo sapiens
cttgtcatcagaaaa

SEQ ID NO: 1603464 - DNA, 15 bp, Homo sapiens
ttgtcatcagaaaaa

SEQ ID NO: 1603465 - DNA, 15 bp, Homo sapiens
tgtcatcagaaaaaa

SEQ ID NO: 1603466 - DNA, 15 bp, Homo sapiens
gtcatcagaaaaaat

SEQ ID NO: 1603467 - DNA, 15 bp, Homo sapiens
tcatcagaaaaaata

SEQ ID NO: 1603468 - DNA, 15 bp, Homo sapiens
catcagaaaaaataa

SEQ ID NO: 1603469 - DNA, 15 bp, Homo sapiens
atcagaaaaaataaa

SEQ ID NO: 1603470 - DNA, 15 bp, Homo sapiens
tcagaaaaaataaag

SEQ ID NO: 1603471 - DNA, 15 bp, Homo sapiens
cagaaaaaataaaga

SEQ ID NO: 1603472 - DNA, 15 bp, Homo sapiens
agaaaaaataaagaa

SEQ ID NO: 1603473 - DNA, 15 bp, Homo sapiens
gaaaaaataaagaaa

SEQ ID NO: 1603474 - DNA, 15 bp, Homo sapiens
aaaaaataaagaaat

SEQ ID NO: 1603475 - DNA, 15 bp, Homo sapiens
aaaaataaagaaata

SEQ ID NO: 1603476 - DNA, 15 bp, Homo sapiens
aaaataaagaaataa

SEQ ID NO: 1603477 - DNA, 15 bp, Homo sapiens
aaataaagaaataaa

SEQ ID NO: 1603478 - DNA, 15 bp, Homo sapiens
aataaagaaataaat

SEQ ID NO: 1603479 - DNA, 15 bp, Homo sapiens
ataaagaaataaata

SEQ ID NO: 1603480 - DNA, 15 bp, Homo sapiens
taaagaaataaataa

SEQ ID NO: 1603481 - DNA, 15 bp, Homo sapiens
aaagaaataaataaa

SEQ ID NO: 1603482 - DNA, 15 bp, Homo sapiens
aagaaataaataaac

SEQ ID NO: 1603483 - DNA, 15 bp, Homo sapiens
agaaataaataaact

SEQ ID NO: 1603484 - DNA, 15 bp, Homo sapiens
gaaataaataaactg

SEQ ID NO: 1603485 - DNA, 15 bp, Homo sapiens
aaataaataaactgt

SEQ ID NO: 1603486 - DNA, 15 bp, Homo sapiens
aataaataaactgtt

SEQ ID NO: 1603487 - DNA, 15 bp, Homo sapiens
ataaataaactgtta

SEQ ID NO: 1603488 - DNA, 15 bp, Homo sapiens
taaataaactgttag

SEQ ID NO: 1603489 - DNA, 15 bp, Homo sapiens
aaataaactgttaga

SEQ ID NO: 1603490 - DNA, 15 bp, Homo sapiens
aataaactgttagag

SEQ ID NO: 1603491 - DNA, 15 bp, Homo sapiens
ataaactgttagagt

SEQ ID NO: 1603492 - DNA, 15 bp, Homo sapiens
taaactgttagagtg

SEQ ID NO: 1603493 - DNA, 15 bp, Homo sapiens
aaactgttagagtgt

SEQ ID NO: 1603494 - DNA, 15 bp, Homo sapiens
aactgttagagtgtt

SEQ ID NO: 1603495 - DNA, 15 bp, Homo sapiens
actgttagagtgtta

SEQ ID NO: 1603496 - DNA, 15 bp, Homo sapiens
ctgttagagtgttag

SEQ ID NO: 1603497 - DNA, 15 bp, Homo sapiens
tgttagagtgttagc

SEQ ID NO: 1603498 - DNA, 15 bp, Homo sapiens
gttagagtgttagcc

SEQ ID NO: 1603499 - DNA, 15 bp, Homo sapiens
ttagagtgttagccc

SEQ ID NO: 1603500 - DNA, 15 bp, Homo sapiens
tagagtgttagcccc

SEQ ID NO: 1603501 - DNA, 15 bp, Homo sapiens
agagtgttagcccct

SEQ ID NO: 1603502 - DNA, 15 bp, Homo sapiens
gagtgttagcccctt

SEQ ID NO: 1603503 - DNA, 15 bp, Homo sapiens
agtgttagcccctta

SEQ ID NO: 1603504 - DNA, 15 bp, Homo sapiens
gtgttagccccttaa

SEQ ID NO: 1603505 - DNA, 15 bp, Homo sapiens
tgttagccccttaaa

SEQ ID NO: 1603506 - DNA, 15 bp, Homo sapiens
gttagccccttaaag

SEQ ID NO: 1603507 - DNA, 15 bp, Homo sapiens
ttagccccttaaagg

SEQ ID NO: 1603508 - DNA, 15 bp, Homo sapiens
tagccccttaaaggg

SEQ ID NO: 1603509 - DNA, 15 bp, Homo sapiens
agccccttaaagggg

SEQ ID NO: 1603510 - DNA, 15 bp, Homo sapiens
gccccttaaagggga

SEQ ID NO: 1603511 - DNA, 15 bp, Homo sapiens
ccccttaaaggggag

SEQ ID NO: 1603512 - DNA, 15 bp, Homo sapiens
cccttaaaggggagc

SEQ ID NO: 1603513 - DNA, 15 bp, Homo sapiens
ccttaaaggggagca

SEQ ID NO: 1603514 - DNA, 15 bp, Homo sapiens
cttaaaggggagcaa

SEQ ID NO: 1603515 - DNA, 15 bp, Homo sapiens
ttaaaggggagcaag

SEQ ID NO: 1603516 - DNA, 15 bp, Homo sapiens
taaaggggagcaaga

SEQ ID NO: 1603517 - DNA, 15 bp, Homo sapiens
aaaggggagcaagaa

SEQ ID NO: 1603518 - DNA, 15 bp, Homo sapiens
aaggggagcaagaat

SEQ ID NO: 1603519 - DNA, 15 bp, Homo sapiens
aggggagcaagaatc

SEQ ID NO: 1603520 - DNA, 15 bp, Homo sapiens
ggggagcaagaatca

SEQ ID NO: 1603521 - DNA, 15 bp, Homo sapiens
gggagcaagaatcac

SEQ ID NO: 1603522 - DNA, 15 bp, Homo sapiens
ggagcaagaatcacc

SEQ ID NO: 1603523 - DNA, 15 bp, Homo sapiens
gagcaagaatcacct

SEQ ID NO: 1603524 - DNA, 15 bp, Homo sapiens
agcaagaatcacctt

SEQ ID NO: 1603525 - DNA, 15 bp, Homo sapiens
gcaagaatcaccttt

SEQ ID NO: 1603526 - DNA, 15 bp, Homo sapiens
caagaatcacctttc

SEQ ID NO: 1603527 - DNA, 15 bp, Homo sapiens
aagaatcacctttct

SEQ ID NO: 1603528 - DNA, 15 bp, Homo sapiens
agaatcacctttcta

SEQ ID NO: 1603529 - DNA, 15 bp, Homo sapiens
gaatcacctttctaa

SEQ ID NO: 1603530 - DNA, 15 bp, Homo sapiens
aatcacctttctaaa

SEQ ID NO: 1603531 - DNA, 15 bp, Homo sapiens
atcacctttctaaaa

SEQ ID NO: 1603532 - DNA, 15 bp, Homo sapiens
tcacctttctaaaag

SEQ ID NO: 1603533 - DNA, 15 bp, Homo sapiens
cacctttctaaaaga

SEQ ID NO: 1603534 - DNA, 15 bp, Homo sapiens
acctttctaaaagaa

SEQ ID NO: 1603535 - DNA, 15 bp, Homo sapiens
cctttctaaaagaaa

SEQ ID NO: 1603536 - DNA, 15 bp, Homo sapiens
ctttctaaaagaaag

SEQ ID NO: 1603537 - DNA, 15 bp, Homo sapiens
tttctaaaagaaagt

SEQ ID NO: 1603538 - DNA, 15 bp, Homo sapiens
ttctaaaagaaagtt

SEQ ID NO: 1603539 - DNA, 15 bp, Homo sapiens
tctaaaagaaagttt

SEQ ID NO: 1603540 - DNA, 15 bp, Homo sapiens
ctaaaagaaagttta

SEQ ID NO: 1603541 - DNA, 15 bp, Homo sapiens
taaaagaaagtttat

SEQ ID NO: 1603542 - DNA, 15 bp, Homo sapiens
aaaagaaagtttatg

SEQ ID NO: 1603543 - DNA, 15 bp, Homo sapiens
aaagaaagtttatgt

SEQ ID NO: 1603544 - DNA, 15 bp, Homo sapiens
aagaaagtttatgtt

SEQ ID NO: 1603545 - DNA, 15 bp, Homo sapiens
agaaagtttatgtta

SEQ ID NO: 1603546 - DNA, 15 bp, Homo sapiens
gaaagtttatgttaa

SEQ ID NO: 1603547 - DNA, 15 bp, Homo sapiens
aaagtttatgttaaa

SEQ ID NO: 1603548 - DNA, 15 bp, Homo sapiens
aagtttatgttaaat

SEQ ID NO: 1603549 - DNA, 15 bp, Homo sapiens
agtttatgttaaata

SEQ ID NO: 1603550 - DNA, 15 bp, Homo sapiens
gtttatgttaaatat

SEQ ID NO: 1603551 - DNA, 15 bp, Homo sapiens
tttatgttaaatata

SEQ ID NO: 1603552 - DNA, 15 bp, Homo sapiens
ttatgttaaatataa

SEQ ID NO: 1603553 - DNA, 15 bp, Homo sapiens
tatgttaaatataat

SEQ ID NO: 1603554 - DNA, 15 bp, Homo sapiens
atgttaaatataata

SEQ ID NO: 1603555 - DNA, 15 bp, Homo sapiens
tgttaaatataatat

SEQ ID NO: 1603556 - DNA, 15 bp, Homo sapiens
gttaaatataatatt

SEQ ID NO: 1603557 - DNA, 15 bp, Homo sapiens
ttaaatataatatta

SEQ ID NO: 1603558 - DNA, 15 bp, Homo sapiens
taaatataatattag

SEQ ID NO: 1603559 - DNA, 15 bp, Homo sapiens
aaatataatattagc

SEQ ID NO: 1603560 - DNA, 15 bp, Homo sapiens
aatataatattagca

SEQ ID NO: 1603561 - DNA, 15 bp, Homo sapiens
atataatattagcat

SEQ ID NO: 1603562 - DNA, 15 bp, Homo sapiens
tataatattagcata

SEQ ID NO: 1603563 - DNA, 15 bp, Homo sapiens
ataatattagcatat

SEQ ID NO: 1603564 - DNA, 15 bp, Homo sapiens
taatattagcatatg

SEQ ID NO: 1603565 - DNA, 15 bp, Homo sapiens
aatattagcatatgt

SEQ ID NO: 1603566 - DNA, 15 bp, Homo sapiens
atattagcatatgtg

SEQ ID NO: 1603567 - DNA, 15 bp, Homo sapiens
tattagcatatgtga

SEQ ID NO: 1603568 - DNA, 15 bp, Homo sapiens
attagcatatgtgaa

SEQ ID NO: 1603569 - DNA, 15 bp, Homo sapiens
ttagcatatgtgaat

SEQ ID NO: 1603570 - DNA, 15 bp, Homo sapiens
tagcatatgtgaatc

SEQ ID NO: 1603571 - DNA, 15 bp, Homo sapiens
agcatatgtgaatcc

SEQ ID NO: 1603572 - DNA, 15 bp, Homo sapiens
gcatatgtgaatcct

SEQ ID NO: 1603573 - DNA, 15 bp, Homo sapiens
catatgtgaatcctg

SEQ ID NO: 1603574 - DNA, 15 bp, Homo sapiens
atatgtgaatcctga

SEQ ID NO: 1603575 - DNA, 15 bp, Homo sapiens
tatgtgaatcctgag

SEQ ID NO: 1603576 - DNA, 15 bp, Homo sapiens
atgtgaatcctgaga

SEQ ID NO: 1603577 - DNA, 15 bp, Homo sapiens
tgtgaatcctgagag

SEQ ID NO: 1603578 - DNA, 15 bp, Homo sapiens
gtgaatcctgagaga

SEQ ID NO: 1603579 - DNA, 15 bp, Homo sapiens
tgaatcctgagagaa

SEQ ID NO: 1603580 - DNA, 15 bp, Homo sapiens
gaatcctgagagaaa

SEQ ID NO: 1603581 - DNA, 15 bp, Homo sapiens
aatcctgagagaaaa

SEQ ID NO: 1603582 - DNA, 15 bp, Homo sapiens
atcctgagagaaaag

SEQ ID NO: 1603583 - DNA, 15 bp, Homo sapiens
tcctgagagaaaagt

SEQ ID NO: 1603584 - DNA, 15 bp, Homo sapiens
cctgagagaaaagtt

SEQ ID NO: 1603585 - DNA, 15 bp, Homo sapiens
ctgagagaaaagtta

SEQ ID NO: 1603586 - DNA, 15 bp, Homo sapiens
tgagagaaaagttaa

SEQ ID NO: 1603587 - DNA, 15 bp, Homo sapiens
gagagaaaagttaac

SEQ ID NO: 1603588 - DNA, 15 bp, Homo sapiens
agagaaaagttaaca

SEQ ID NO: 1603589 - DNA, 15 bp, Homo sapiens
gagaaaagttaacag

SEQ ID NO: 1603590 - DNA, 15 bp, Homo sapiens
agaaaagttaacagt

SEQ ID NO: 1603591 - DNA, 15 bp, Homo sapiens
gaaaagttaacagtt

SEQ ID NO: 1603592 - DNA, 15 bp, Homo sapiens
aaaagttaacagttt

SEQ ID NO: 1603593 - DNA, 15 bp, Homo sapiens
aaagttaacagttta

SEQ ID NO: 1603594 - DNA, 15 bp, Homo sapiens
aagttaacagtttag

SEQ ID NO: 1603595 - DNA, 15 bp, Homo sapiens
agttaacagtttagt

SEQ ID NO: 1603596 - DNA, 15 bp, Homo sapiens
gttaacagtttagtt

SEQ ID NO: 1603597 - DNA, 15 bp, Homo sapiens
ttaacagtttagttg

SEQ ID NO: 1603598 - DNA, 15 bp, Homo sapiens
taacagtttagttga

SEQ ID NO: 1603599 - DNA, 15 bp, Homo sapiens
aacagtttagttgag

SEQ ID NO: 1603600 - DNA, 15 bp, Homo sapiens
acagtttagttgagt

SEQ ID NO: 1603601 - DNA, 15 bp, Homo sapiens
cagtttagttgagtt

SEQ ID NO: 1603602 - DNA, 15 bp, Homo sapiens
agtttagttgagtta

SEQ ID NO: 1603603 - DNA, 15 bp, Homo sapiens
gtttagttgagttat

SEQ ID NO: 1603604 - DNA, 15 bp, Homo sapiens
tttagttgagttatt

SEQ ID NO: 1603605 - DNA, 15 bp, Homo sapiens
ttagttgagttattt

SEQ ID NO: 1603606 - DNA, 15 bp, Homo sapiens
tagttgagttatttc

SEQ ID NO: 1603607 - DNA, 15 bp, Homo sapiens
agttgagttatttcc

SEQ ID NO: 1603608 - DNA, 15 bp, Homo sapiens
gttgagttatttcct

SEQ ID NO: 1603609 - DNA, 15 bp, Homo sapiens
ttgagttatttcctc

SEQ ID NO: 1603610 - DNA, 15 bp, Homo sapiens
tgagttatttcctct

SEQ ID NO: 1603611 - DNA, 15 bp, Homo sapiens
gagttatttcctctg

SEQ ID NO: 1603612 - DNA, 15 bp, Homo sapiens
agttatttcctctgt

SEQ ID NO: 1603613 - DNA, 15 bp, Homo sapiens
gttatttcctctgta

SEQ ID NO: 1603614 - DNA, 15 bp, Homo sapiens
ttatttcctctgtag

SEQ ID NO: 1603615 - DNA, 15 bp, Homo sapiens
tatttcctctgtagt

SEQ ID NO: 1603616 - DNA, 15 bp, Homo sapiens
atttcctctgtagtc

SEQ ID NO: 1603617 - DNA, 15 bp, Homo sapiens
tttcctctgtagtct

SEQ ID NO: 1603618 - DNA, 15 bp, Homo sapiens
ttcctctgtagtctg

SEQ ID NO: 1603619 - DNA, 15 bp, Homo sapiens
tcctctgtagtctgg

SEQ ID NO: 1603620 - DNA, 15 bp, Homo sapiens
cctctgtagtctgga

SEQ ID NO: 1603621 - DNA, 15 bp, Homo sapiens
ctctgtagtctggag

SEQ ID NO: 1603622 - DNA, 15 bp, Homo sapiens
tctgtagtctggagc

SEQ ID NO: 1603623 - DNA, 15 bp, Homo sapiens
ctgtagtctggagct

SEQ ID NO: 1603624 - DNA, 15 bp, Homo sapiens
tgtagtctggagcta

SEQ ID NO: 1603625 - DNA, 15 bp, Homo sapiens
gtagtctggagctaa

SEQ ID NO: 1603626 - DNA, 15 bp, Homo sapiens
tagtctggagctaaa

SEQ ID NO: 1603627 - DNA, 15 bp, Homo sapiens
agtctggagctaaaa

SEQ ID NO: 1603628 - DNA, 15 bp, Homo sapiens
gtctggagctaaaaa

SEQ ID NO: 1603629 - DNA, 15 bp, Homo sapiens
tctggagctaaaaat

SEQ ID NO: 1603630 - DNA, 15 bp, Homo sapiens
ctggagctaaaaata

SEQ ID NO: 1603631 - DNA, 15 bp, Homo sapiens
tggagctaaaaatag

SEQ ID NO: 1603632 - DNA, 15 bp, Homo sapiens
ggagctaaaaatagg

SEQ ID NO: 1603633 - DNA, 15 bp, Homo sapiens
gagctaaaaataggg

SEQ ID NO: 1603634 - DNA, 15 bp, Homo sapiens
agctaaaaataggga

SEQ ID NO: 1603635 - DNA, 15 bp, Homo sapiens
gctaaaaatagggaa

SEQ ID NO: 1603636 - DNA, 15 bp, Homo sapiens
ctaaaaatagggaat

SEQ ID NO: 1603637 - DNA, 15 bp, Homo sapiens
taaaaatagggaatc

SEQ ID NO: 1603638 - DNA, 15 bp, Homo sapiens
aaaaatagggaatct

SEQ ID NO: 1603639 - DNA, 15 bp, Homo sapiens
aaaatagggaatctt

SEQ ID NO: 1603640 - DNA, 15 bp, Homo sapiens
aaatagggaatctta

SEQ ID NO: 1603641 - DNA, 15 bp, Homo sapiens
aatagggaatcttat

SEQ ID NO: 1603642 - DNA, 15 bp, Homo sapiens
atagggaatcttatt

SEQ ID NO: 1603643 - DNA, 15 bp, Homo sapiens
tagggaatcttattc

SEQ ID NO: 1603644 - DNA, 15 bp, Homo sapiens
agggaatcttattct

SEQ ID NO: 1603645 - DNA, 15 bp, Homo sapiens
gggaatcttattctg

SEQ ID NO: 1603646 - DNA, 15 bp, Homo sapiens
ggaatcttattctgt

SEQ ID NO: 1603647 - DNA, 15 bp, Homo sapiens
gaatcttattctgtc

SEQ ID NO: 1603648 - DNA, 15 bp, Homo sapiens
aatcttattctgtcc

SEQ ID NO: 1603649 - DNA, 15 bp, Homo sapiens
atcttattctgtcct

SEQ ID NO: 1603650 - DNA, 15 bp, Homo sapiens
tcttattctgtccta

SEQ ID NO: 1603651 - DNA, 15 bp, Homo sapiens
cttattctgtcctaa

SEQ ID NO: 1603652 - DNA, 15 bp, Homo sapiens
ttattctgtcctaaa

SEQ ID NO: 1603653 - DNA, 15 bp, Homo sapiens
tattctgtcctaaat

SEQ ID NO: 1603654 - DNA, 15 bp, Homo sapiens
attctgtcctaaatc

SEQ ID NO: 1603655 - DNA, 15 bp, Homo sapiens
ttctgtcctaaatct

SEQ ID NO: 1603656 - DNA, 15 bp, Homo sapiens
tctgtcctaaatctt

SEQ ID NO: 1603657 - DNA, 15 bp, Homo sapiens
ctgtcctaaatcttt

SEQ ID NO: 1603658 - DNA, 15 bp, Homo sapiens
tgtcctaaatctttt

SEQ ID NO: 1603659 - DNA, 15 bp, Homo sapiens
gtcctaaatcttttc

SEQ ID NO: 1603660 - DNA, 15 bp, Homo sapiens
tcctaaatcttttcc

SEQ ID NO: 1603661 - DNA, 15 bp, Homo sapiens
cctaaatcttttcct

SEQ ID NO: 1603662 - DNA, 15 bp, Homo sapiens
ctaaatcttttcctt

SEQ ID NO: 1603663 - DNA, 15 bp, Homo sapiens
taaatcttttccttc

SEQ ID NO: 1603664 - DNA, 15 bp, Homo sapiens
aaatcttttccttcc

SEQ ID NO: 1603665 - DNA, 15 bp, Homo sapiens
aatcttttccttcct

SEQ ID NO: 1603666 - DNA, 15 bp, Homo sapiens
atcttttccttcctc

SEQ ID NO: 1603667 - DNA, 15 bp, Homo sapiens
tcttttccttcctcc

SEQ ID NO: 1603668 - DNA, 15 bp, Homo sapiens
cttttccttcctcca

SEQ ID NO: 1603669 - DNA, 15 bp, Homo sapiens
ttttccttcctccac

SEQ ID NO: 1603670 - DNA, 15 bp, Homo sapiens
tttccttcctccacc

SEQ ID NO: 1603671 - DNA, 15 bp, Homo sapiens
ttccttcctccaccc

SEQ ID NO: 1603672 - DNA, 15 bp, Homo sapiens
tccttcctccaccca

SEQ ID NO: 1603673 - DNA, 15 bp, Homo sapiens
ccttcctccacccag

SEQ ID NO: 1603674 - DNA, 15 bp, Homo sapiens
cttcctccacccagt

SEQ ID NO: 1603675 - DNA, 15 bp, Homo sapiens
ttcctccacccagtg

SEQ ID NO: 1603676 - DNA, 15 bp, Homo sapiens
tcctccacccagtgt

SEQ ID NO: 1603677 - DNA, 15 bp, Homo sapiens
cctccacccagtgtc

SEQ ID NO: 1603678 - DNA, 15 bp, Homo sapiens
ctccacccagtgtct

SEQ ID NO: 1603679 - DNA, 15 bp, Homo sapiens
tccacccagtgtctg

SEQ ID NO: 1603680 - DNA, 15 bp, Homo sapiens
ccacccagtgtctgt

SEQ ID NO: 1603681 - DNA, 15 bp, Homo sapiens
cacccagtgtctgtc

SEQ ID NO: 1603682 - DNA, 15 bp, Homo sapiens
acccagtgtctgtct

SEQ ID NO: 1603683 - DNA, 15 bp, Homo sapiens
cccagtgtctgtctg

SEQ ID NO: 1603684 - DNA, 15 bp, Homo sapiens
ccagtgtctgtctgg

SEQ ID NO: 1603685 - DNA, 15 bp, Homo sapiens
cagtgtctgtctgga

SEQ ID NO: 1603686 - DNA, 15 bp, Homo sapiens
agtgtctgtctggat

SEQ ID NO: 1603687 - DNA, 15 bp, Homo sapiens
gtgtctgtctggatc

SEQ ID NO: 1603688 - DNA, 15 bp, Homo sapiens
tgtctgtctggatcg

SEQ ID NO: 1603689 - DNA, 15 bp, Homo sapiens
gtctgtctggatcga

SEQ ID NO: 1603690 - DNA, 15 bp, Homo sapiens
tctgtctggatcgaa

SEQ ID NO: 1603691 - DNA, 15 bp, Homo sapiens
ctgtctggatcgaat

SEQ ID NO: 1603692 - DNA, 15 bp, Homo sapiens
tgtctggatcgaatt

SEQ ID NO: 1603693 - DNA, 15 bp, Homo sapiens
gtctggatcgaattc

SEQ ID NO: 1603694 - DNA, 15 bp, Homo sapiens
tctggatcgaattca

SEQ ID NO: 1603695 - DNA, 15 bp, Homo sapiens
ctggatcgaattcat

SEQ ID NO: 1603696 - DNA, 15 bp, Homo sapiens
tggatcgaattcatt

SEQ ID NO: 1603697 - DNA, 15 bp, Homo sapiens
ggatcgaattcattc

SEQ ID NO: 1603698 - DNA, 15 bp, Homo sapiens
gatcgaattcattca

SEQ ID NO: 1603699 - DNA, 15 bp, Homo sapiens
atcgaattcattcat

SEQ ID NO: 1603700 - DNA, 15 bp, Homo sapiens
tcgaattcattcatt

SEQ ID NO: 1603701 - DNA, 15 bp, Homo sapiens
cgaattcattcattc

SEQ ID NO: 1603702 - DNA, 15 bp, Homo sapiens
gaattcattcattca

SEQ ID NO: 1603703 - DNA, 15 bp, Homo sapiens
aattcattcattcac

SEQ ID NO: 1603704 - DNA, 15 bp, Homo sapiens
cattcattcactcag

SEQ ID NO: 1603705 - DNA, 15 bp, Homo sapiens
attcattcactcagt

SEQ ID NO: 1603706 - DNA, 15 bp, Homo sapiens
ttcattcactcagta

SEQ ID NO: 1603707 - DNA, 15 bp, Homo sapiens
tcattcactcagtag

SEQ ID NO: 1603708 - DNA, 15 bp, Homo sapiens
cattcactcagtagg

SEQ ID NO: 1603709 - DNA, 15 bp, Homo sapiens
attcactcagtaggc

SEQ ID NO: 1603710 - DNA, 15 bp, Homo sapiens
ttcactcagtaggca

SEQ ID NO: 1603711 - DNA, 15 bp, Homo sapiens
tcactcagtaggcac

SEQ ID NO: 1603712 - DNA, 15 bp, Homo sapiens
cactcagtaggcact

SEQ ID NO: 1603713 - DNA, 15 bp, Homo sapiens
actcagtaggcactc

SEQ ID NO: 1603714 - DNA, 15 bp, Homo sapiens
ctcagtaggcactca

SEQ ID NO: 1603715 - DNA, 15 bp, Homo sapiens
tcagtaggcactcac

SEQ ID NO: 1603716 - DNA, 15 bp, Homo sapiens
cagtaggcactcact

SEQ ID NO: 1603717 - DNA, 15 bp, Homo sapiens
agtaggcactcactc

SEQ ID NO: 1603718 - DNA, 15 bp, Homo sapiens
gtaggcactcactca

SEQ ID NO: 1603719 - DNA, 15 bp, Homo sapiens
taggcactcactcag

SEQ ID NO: 1603720 - DNA, 15 bp, Homo sapiens
aggcactcactcagc

SEQ ID NO: 1603721 - DNA, 15 bp, Homo sapiens
ggcactcactcagcc

SEQ ID NO: 1603722 - DNA, 15 bp, Homo sapiens
gcactcactcagcca

SEQ ID NO: 1603723 - DNA, 15 bp, Homo sapiens
cactcactcagccag

SEQ ID NO: 1603724 - DNA, 15 bp, Homo sapiens
actcactcagccagg

SEQ ID NO: 1603725 - DNA, 15 bp, Homo sapiens
ctcactcagccaggc

SEQ ID NO: 1603726 - DNA, 15 bp, Homo sapiens
agccaggcatggtgc

SEQ ID NO: 1603727 - DNA, 15 bp, Homo sapiens
gccaggcatggtgct

SEQ ID NO: 1603728 - DNA, 15 bp, Homo sapiens
ccaggcatggtgcta

SEQ ID NO: 1603729 - DNA, 15 bp, Homo sapiens
caggcatggtgctag

SEQ ID NO: 1603730 - DNA, 15 bp, Homo sapiens
aggcatggtgctagg

SEQ ID NO: 1603731 - DNA, 15 bp, Homo sapiens
ggcatggtgctaggc

SEQ ID NO: 1603732 - DNA, 15 bp, Homo sapiens
gcatggtgctaggcc

SEQ ID NO: 1603733 - DNA, 15 bp, Homo sapiens
catggtgctaggcct

SEQ ID NO: 1603734 - DNA, 15 bp, Homo sapiens
atggtgctaggcctc

SEQ ID NO: 1603735 - DNA, 15 bp, Homo sapiens
tggtgctaggcctca

SEQ ID NO: 1603736 - DNA, 15 bp, Homo sapiens
ggtgctaggcctcag

SEQ ID NO: 1603737 - DNA, 15 bp, Homo sapiens
gtgctaggcctcagg

SEQ ID NO: 1603738 - DNA, 15 bp, Homo sapiens
tgctaggcctcagga

SEQ ID NO: 1603739 - DNA, 15 bp, Homo sapiens
gctaggcctcaggac

SEQ ID NO: 1603740 - DNA, 15 bp, Homo sapiens
ctaggcctcaggacc

SEQ ID NO: 1603741 - DNA, 15 bp, Homo sapiens
taggcctcaggacct

SEQ ID NO: 1603742 - DNA, 15 bp, Homo sapiens
aggcctcaggacctc

SEQ ID NO: 1603743 - DNA, 15 bp, Homo sapiens
ggcctcaggacctcg

SEQ ID NO: 1603744 - DNA, 15 bp, Homo sapiens
gcctcaggacctcgc

SEQ ID NO: 1603745 - DNA, 15 bp, Homo sapiens
cctcaggacctcgct

SEQ ID NO: 1603746 - DNA, 15 bp, Homo sapiens
ctcaggacctcgctg

SEQ ID NO: 1603747 - DNA, 15 bp, Homo sapiens
tcaggacctcgctgt

SEQ ID NO: 1603748 - DNA, 15 bp, Homo sapiens
caggacctcgctgtg

SEQ ID NO: 1603749 - DNA, 15 bp, Homo sapiens
aggacctcgctgtga

SEQ ID NO: 1603750 - DNA, 15 bp, Homo sapiens
ggacctcgctgtgaa

SEQ ID NO: 1603751 - DNA, 15 bp, Homo sapiens
gacctcgctgtgaac

SEQ ID NO: 1603752 - DNA, 15 bp, Homo sapiens
acctcgctgtgaacc

SEQ ID NO: 1603753 - DNA, 15 bp, Homo sapiens
cctcgctgtgaacca

SEQ ID NO: 1603754 - DNA, 15 bp, Homo sapiens
ctcgctgtgaaccag

SEQ ID NO: 1603755 - DNA, 15 bp, Homo sapiens
tcgctgtgaaccaga

SEQ ID NO: 1603756 - DNA, 15 bp, Homo sapiens
cgctgtgaaccagaa

SEQ ID NO: 1603757 - DNA, 15 bp, Homo sapiens
gctgtgaaccagaaa

SEQ ID NO: 1603758 - DNA, 15 bp, Homo sapiens
ctgtgaaccagaaac

SEQ ID NO: 1603759 - DNA, 15 bp, Homo sapiens
tgtgaaccagaaact

SEQ ID NO: 1603760 - DNA, 15 bp, Homo sapiens
gtgaaccagaaactg

SEQ ID NO: 1603761 - DNA, 15 bp, Homo sapiens
tgaaccagaaactgt

SEQ ID NO: 1603762 - DNA, 15 bp, Homo sapiens
gaaccagaaactgtc

SEQ ID NO: 1603763 - DNA, 15 bp, Homo sapiens
aaccagaaactgtcc

SEQ ID NO: 1603764 - DNA, 15 bp, Homo sapiens
accagaaactgtccc

SEQ ID NO: 1603765 - DNA, 15 bp, Homo sapiens
ccagaaactgtccct

SEQ ID NO: 1603766 - DNA, 15 bp, Homo sapiens
cagaaactgtcccta

SEQ ID NO: 1603767 - DNA, 15 bp, Homo sapiens
agaaactgtccctac

SEQ ID NO: 1603768 - DNA, 15 bp, Homo sapiens
gaaactgtccctacc

SEQ ID NO: 1603769 - DNA, 15 bp, Homo sapiens
aaactgtccctaccc

SEQ ID NO: 1603770 - DNA, 15 bp, Homo sapiens
aactgtccctacccc

SEQ ID NO: 1603771 - DNA, 15 bp, Homo sapiens
actgtccctaccccc

SEQ ID NO: 1603772 - DNA, 15 bp, Homo sapiens
ctgtccctaccccca

SEQ ID NO: 1603773 - DNA, 15 bp, Homo sapiens
tgtccctacccccat

SEQ ID NO: 1603774 - DNA, 15 bp, Homo sapiens
gtccctacccccatg

SEQ ID NO: 1603775 - DNA, 15 bp, Homo sapiens
tccctacccccatgg

SEQ ID NO: 1603776 - DNA, 15 bp, Homo sapiens
ccctacccccatggt

SEQ ID NO: 1603777 - DNA, 15 bp, Homo sapiens
cctacccccatggtg

SEQ ID NO: 1603778 - DNA, 15 bp, Homo sapiens
ctacccccatggtgc

SEQ ID NO: 1603779 - DNA, 15 bp, Homo sapiens
tacccccatggtgca

SEQ ID NO: 1603780 - DNA, 15 bp, Homo sapiens
acccccatggtgcag

SEQ ID NO: 1603781 - DNA, 15 bp, Homo sapiens
cccccatggtgcagg

SEQ ID NO: 1603782 - DNA, 15 bp, Homo sapiens
ccccatggtgcaggc

SEQ ID NO: 1603783 - DNA, 15 bp, Homo sapiens
cccatggtgcaggca

SEQ ID NO: 1603784 - DNA, 15 bp, Homo sapiens
ccatggtgcaggcat

SEQ ID NO: 1603785 - DNA, 15 bp, Homo sapiens
catggtgcaggcatt

SEQ ID NO: 1603786 - DNA, 15 bp, Homo sapiens
atggtgcaggcattc

SEQ ID NO: 1603787 - DNA, 15 bp, Homo sapiens
tggtgcaggcattct

SEQ ID NO: 1603788 - DNA, 15 bp, Homo sapiens
ggtgcaggcattctg

SEQ ID NO: 1603789 - DNA, 15 bp, Homo sapiens
gtgcaggcattctgc

SEQ ID NO: 1603790 - DNA, 15 bp, Homo sapiens
tgcaggcattctgct

SEQ ID NO: 1603791 - DNA, 15 bp, Homo sapiens
gcaggcattctgctt

SEQ ID NO: 1603792 - DNA, 15 bp, Homo sapiens
caggcattctgcttg

SEQ ID NO: 1603793 - DNA, 15 bp, Homo sapiens
aggcattctgcttgg

SEQ ID NO: 1603794 - DNA, 15 bp, Homo sapiens
ggcattctgcttggg

SEQ ID NO: 1603795 - DNA, 15 bp, Homo sapiens
gcattctgcttggga

SEQ ID NO: 1603796 - DNA, 15 bp, Homo sapiens
cattctgcttgggag

SEQ ID NO: 1603797 - DNA, 15 bp, Homo sapiens
attctgcttgggagt

SEQ ID NO: 1603798 - DNA, 15 bp, Homo sapiens
ttctgcttgggagtt

SEQ ID NO: 1603799 - DNA, 15 bp, Homo sapiens
tctgcttgggagttg

SEQ ID NO: 1603800 - DNA, 15 bp, Homo sapiens
ctgcttgggagttgg

SEQ ID NO: 1603801 - DNA, 15 bp, Homo sapiens
tgcttgggagttgga

SEQ ID NO: 1603802 - DNA, 15 bp, Homo sapiens
gcttgggagttggag

SEQ ID NO: 1603803 - DNA, 15 bp, Homo sapiens
cttgggagttggagg

SEQ ID NO: 1603804 - DNA, 15 bp, Homo sapiens
ttgggagttggagga

SEQ ID NO: 1603805 - DNA, 15 bp, Homo sapiens
tgggagttggaggag

SEQ ID NO: 1603806 - DNA, 15 bp, Homo sapiens
gggagttggaggagg

SEQ ID NO: 1603807 - DNA, 15 bp, Homo sapiens
ggagttggaggagga

SEQ ID NO: 1603808 - DNA, 15 bp, Homo sapiens
gagttggaggaggaa

SEQ ID NO: 1603809 - DNA, 15 bp, Homo sapiens
agttggaggaggaac

SEQ ID NO: 1603810 - DNA, 15 bp, Homo sapiens
gttggaggaggaaca

SEQ ID NO: 1603811 - DNA, 15 bp, Homo sapiens
ttggaggaggaacag

SEQ ID NO: 1603812 - DNA, 15 bp, Homo sapiens
tggaggaggaacagg

SEQ ID NO: 1603813 - DNA, 15 bp, Homo sapiens
ggaggaggaacaggt

SEQ ID NO: 1603814 - DNA, 15 bp, Homo sapiens
gaggaggaacaggta

SEQ ID NO: 1603815 - DNA, 15 bp, Homo sapiens
aggaggaacaggtaa

SEQ ID NO: 1603816 - DNA, 15 bp, Homo sapiens
ggaggaacaggtaaa

SEQ ID NO: 1603817 - DNA, 15 bp, Homo sapiens
gaggaacaggtaaaa

SEQ ID NO: 1603818 - DNA, 15 bp, Homo sapiens
aggaacaggtaaaaa

SEQ ID NO: 1603819 - DNA, 15 bp, Homo sapiens
ggaacaggtaaaaaa

SEQ ID NO: 1603820 - DNA, 15 bp, Homo sapiens
gaacaggtaaaaaat

SEQ ID NO: 1603821 - DNA, 15 bp, Homo sapiens
aacaggtaaaaaata

SEQ ID NO: 1603822 - DNA, 15 bp, Homo sapiens
caggtaaaaaataat

SEQ ID NO: 1603823 - DNA, 15 bp, Homo sapiens
aggtaaaaaataatt

SEQ ID NO: 1603824 - DNA, 15 bp, Homo sapiens
ggtaaaaaataatta

SEQ ID NO: 1603825 - DNA, 15 bp, Homo sapiens
gtaaaaaataattaa

SEQ ID NO: 1603826 - DNA, 15 bp, Homo sapiens
taaaaaataattaaa

SEQ ID NO: 1603827 - DNA, 15 bp, Homo sapiens
aaaaaataattaaat

SEQ ID NO: 1603828 - DNA, 15 bp, Homo sapiens
aaaaataattaaata

SEQ ID NO: 1603829 - DNA, 15 bp, Homo sapiens
aaaataattaaatat

SEQ ID NO: 1603830 - DNA, 15 bp, Homo sapiens
aaataattaaatatt

SEQ ID NO: 1603831 - DNA, 15 bp, Homo sapiens
aataattaaatattc

SEQ ID NO: 1603832 - DNA, 15 bp, Homo sapiens
ataattaaatattca

SEQ ID NO: 1603833 - DNA, 15 bp, Homo sapiens
taattaaatattcag

SEQ ID NO: 1603834 - DNA, 15 bp, Homo sapiens
aattaaatattcagg

SEQ ID NO: 1603835 - DNA, 15 bp, Homo sapiens
attaaatattcaggt

SEQ ID NO: 1603836 - DNA, 15 bp, Homo sapiens
ttaaatattcaggtt

SEQ ID NO: 1603837 - DNA, 15 bp, Homo sapiens
taaatattcaggtta

SEQ ID NO: 1603838 - DNA, 15 bp, Homo sapiens
aaatattcaggttaa

SEQ ID NO: 1603839 - DNA, 15 bp, Homo sapiens
aatattcaggttaac

SEQ ID NO: 1603840 - DNA, 15 bp, Homo sapiens
atattcaggttaacg

SEQ ID NO: 1603841 - DNA, 15 bp, Homo sapiens
tattcaggttaacga

SEQ ID NO: 1603842 - DNA, 15 bp, Homo sapiens
attcaggttaacgat

SEQ ID NO: 1603843 - DNA, 15 bp, Homo sapiens
ttcaggttaacgata

SEQ ID NO: 1603844 - DNA, 15 bp, Homo sapiens
tcaggttaacgatat

SEQ ID NO: 1603845 - DNA, 15 bp, Homo sapiens
caggttaacgatata

SEQ ID NO: 1603846 - DNA, 15 bp, Homo sapiens
aggttaacgatatat

SEQ ID NO: 1603847 - DNA, 15 bp, Homo sapiens
ggttaacgatatatt

SEQ ID NO: 1603848 - DNA, 15 bp, Homo sapiens
gttaacgatatattg

SEQ ID NO: 1603849 - DNA, 15 bp, Homo sapiens
ttaacgatatattgt

SEQ ID NO: 1603850 - DNA, 15 bp, Homo sapiens
taacgatatattgtc

SEQ ID NO: 1603851 - DNA, 15 bp, Homo sapiens
aacgatatattgtca

SEQ ID NO: 1603852 - DNA, 15 bp, Homo sapiens
acgatatattgtcag

SEQ ID NO: 1603853 - DNA, 15 bp, Homo sapiens
cgatatattgtcagg

SEQ ID NO: 1603854 - DNA, 15 bp, Homo sapiens
gatatattgtcaggt

SEQ ID NO: 1603855 - DNA, 15 bp, Homo sapiens
atatattgtcaggtt

SEQ ID NO: 1603856 - DNA, 15 bp, Homo sapiens
tatattgtcaggttt

SEQ ID NO: 1603857 - DNA, 15 bp, Homo sapiens
atattgtcaggtttg

SEQ ID NO: 1603858 - DNA, 15 bp, Homo sapiens
tattgtcaggtttga

SEQ ID NO: 1603859 - DNA, 15 bp, Homo sapiens
attgtcaggtttgag

SEQ ID NO: 1603860 - DNA, 15 bp, Homo sapiens
ttgtcaggtttgagg

SEQ ID NO: 1603861 - DNA, 15 bp, Homo sapiens
tgtcaggtttgagga

SEQ ID NO: 1603862 - DNA, 15 bp, Homo sapiens
gtcaggtttgaggat

SEQ ID NO: 1603863 - DNA, 15 bp, Homo sapiens
tcaggtttgaggatt

SEQ ID NO: 1603864 - DNA, 15 bp, Homo sapiens
caggtttgaggattg

SEQ ID NO: 1603865 - DNA, 15 bp, Homo sapiens
aggtttgaggattga

SEQ ID NO: 1603866 - DNA, 15 bp, Homo sapiens
ggtttgaggattgag

SEQ ID NO: 1603867 - DNA, 15 bp, Homo sapiens
gtttgaggattgagg

SEQ ID NO: 1603868 - DNA, 15 bp, Homo sapiens
tttgaggattgagga

SEQ ID NO: 1603869 - DNA, 15 bp, Homo sapiens
ttgaggattgaggaa

SEQ ID NO: 1603870 - DNA, 15 bp, Homo sapiens
tgaggattgaggaaa

SEQ ID NO: 1603871 - DNA, 15 bp, Homo sapiens
gaggattgaggaaag

SEQ ID NO: 1603872 - DNA, 15 bp, Homo sapiens
aggattgaggaaagg

SEQ ID NO: 1603873 - DNA, 15 bp, Homo sapiens
ggattgaggaaaggg

SEQ ID NO: 1603874 - DNA, 15 bp, Homo sapiens
gattgaggaaagggc

SEQ ID NO: 1603875 - DNA, 15 bp, Homo sapiens
attgaggaaagggcg

SEQ ID NO: 1603876 - DNA, 15 bp, Homo sapiens
ttgaggaaagggcgc

SEQ ID NO: 1603877 - DNA, 15 bp, Homo sapiens
tgaggaaagggcgca

SEQ ID NO: 1603878 - DNA, 15 bp, Homo sapiens
gaggaaagggcgcag

SEQ ID NO: 1603879 - DNA, 15 bp, Homo sapiens
aggaaagggcgcaga

SEQ ID NO: 1603880 - DNA, 15 bp, Homo sapiens
ggaaagggcgcagag

SEQ ID NO: 1603881 - DNA, 15 bp, Homo sapiens
gaaagggcgcagaga

SEQ ID NO: 1603882 - DNA, 15 bp, Homo sapiens
aaagggcgcagagag

SEQ ID NO: 1603883 - DNA, 15 bp, Homo sapiens
aagggcgcagagagt

SEQ ID NO: 1603884 - DNA, 15 bp, Homo sapiens
agggcgcagagagtg

SEQ ID NO: 1603885 - DNA, 15 bp, Homo sapiens
gggcgcagagagtgg

SEQ ID NO: 1603886 - DNA, 15 bp, Homo sapiens
ggcgcagagagtggc

SEQ ID NO: 1603887 - DNA, 15 bp, Homo sapiens
gcgcagagagtggca

SEQ ID NO: 1603888 - DNA, 15 bp, Homo sapiens
cgcagagagtggcaa

SEQ ID NO: 1603889 - DNA, 15 bp, Homo sapiens
gcagagagtggcaag

SEQ ID NO: 1603890 - DNA, 15 bp, Homo sapiens
cagagagtggcaagg

SEQ ID NO: 1603891 - DNA, 15 bp, Homo sapiens
agagagtggcaaggg

SEQ ID NO: 1603892 - DNA, 15 bp, Homo sapiens
gagagtggcaagggc

SEQ ID NO: 1603893 - DNA, 15 bp, Homo sapiens
agagtggcaagggct

SEQ ID NO: 1603894 - DNA, 15 bp, Homo sapiens
gagtggcaagggctg

SEQ ID NO: 1603895 - DNA, 15 bp, Homo sapiens
agtggcaagggctgc

SEQ ID NO: 1603896 - DNA, 15 bp, Homo sapiens
gtggcaagggctgct

SEQ ID NO: 1603897 - DNA, 15 bp, Homo sapiens
tggcaagggctgctg

SEQ ID NO: 1603898 - DNA, 15 bp, Homo sapiens
ggcaagggctgctgt

SEQ ID NO: 1603899 - DNA, 15 bp, Homo sapiens
gcaagggctgctgtt

SEQ ID NO: 1603900 - DNA, 15 bp, Homo sapiens
caagggctgctgttt

SEQ ID NO: 1603901 - DNA, 15 bp, Homo sapiens
aagggctgctgtttt

SEQ ID NO: 1603902 - DNA, 15 bp, Homo sapiens
agggctgctgtttta

SEQ ID NO: 1603903 - DNA, 15 bp, Homo sapiens
gggctgctgttttag

SEQ ID NO: 1603904 - DNA, 15 bp, Homo sapiens
ggctgctgttttaga

SEQ ID NO: 1603905 - DNA, 15 bp, Homo sapiens
gctgctgttttagat

SEQ ID NO: 1603906 - DNA, 15 bp, Homo sapiens
ctgctgttttagata

SEQ ID NO: 1603907 - DNA, 15 bp, Homo sapiens
tgctgttttagatac

SEQ ID NO: 1603908 - DNA, 15 bp, Homo sapiens
gctgttttagataca

SEQ ID NO: 1603909 - DNA, 15 bp, Homo sapiens
tgttttagatacagt

SEQ ID NO: 1603910 - DNA, 15 bp, Homo sapiens
gttttagatacagtg

SEQ ID NO: 1603911 - DNA, 15 bp, Homo sapiens
ttttagatacagtgg

SEQ ID NO: 1603912 - DNA, 15 bp, Homo sapiens
tttagatacagtggc

SEQ ID NO: 1603913 - DNA, 15 bp, Homo sapiens
ttagatacagtggcc

SEQ ID NO: 1603914 - DNA, 15 bp, Homo sapiens
tagatacagtggcca

SEQ ID NO: 1603915 - DNA, 15 bp, Homo sapiens
agatacagtggccag

SEQ ID NO: 1603916 - DNA, 15 bp, Homo sapiens
gatacagtggccagg

SEQ ID NO: 1603917 - DNA, 15 bp, Homo sapiens
atacagtggccagga

SEQ ID NO: 1603918 - DNA, 15 bp, Homo sapiens
tacagtggccaggag

SEQ ID NO: 1603919 - DNA, 15 bp, Homo sapiens
acagtggccaggagg

SEQ ID NO: 1603920 - DNA, 15 bp, Homo sapiens
cagtggccaggaggc

SEQ ID NO: 1603921 - DNA, 15 bp, Homo sapiens
agtggccaggaggcc

SEQ ID NO: 1603922 - DNA, 15 bp, Homo sapiens
gtggccaggaggcct

SEQ ID NO: 1603923 - DNA, 15 bp, Homo sapiens
tggccaggaggcctc

SEQ ID NO: 1603924 - DNA, 15 bp, Homo sapiens
ggccaggaggcctcc

SEQ ID NO: 1603925 - DNA, 15 bp, Homo sapiens
gccaggaggcctccg

SEQ ID NO: 1603926 - DNA, 15 bp, Homo sapiens
ccaggaggcctccga

SEQ ID NO: 1603927 - DNA, 15 bp, Homo sapiens
caggaggcctccgat

SEQ ID NO: 1603928 - DNA, 15 bp, Homo sapiens
aggaggcctccgatg

SEQ ID NO: 1603929 - DNA, 15 bp, Homo sapiens
ggaggcctccgatga

SEQ ID NO: 1603930 - DNA, 15 bp, Homo sapiens
gaggcctccgatgag

SEQ ID NO: 1603931 - DNA, 15 bp, Homo sapiens
aggcctccgatgagg

SEQ ID NO: 1603932 - DNA, 15 bp, Homo sapiens
ggcctccgatgaggt

SEQ ID NO: 1603933 - DNA, 15 bp, Homo sapiens
gcctccgatgaggtg

SEQ ID NO: 1603934 - DNA, 15 bp, Homo sapiens
cctccgatgaggtga

SEQ ID NO: 1603935 - DNA, 15 bp, Homo sapiens
ctccgatgaggtgac

SEQ ID NO: 1603936 - DNA, 15 bp, Homo sapiens
tccgatgaggtgacc

SEQ ID NO: 1603937 - DNA, 15 bp, Homo sapiens
ccgatgaggtgacct

SEQ ID NO: 1603938 - DNA, 15 bp, Homo sapiens
cgatgaggtgacctt

SEQ ID NO: 1603939 - DNA, 15 bp, Homo sapiens
gatgaggtgaccttt

SEQ ID NO: 1603940 - DNA, 15 bp, Homo sapiens
atgaggtgacctttg

SEQ ID NO: 1603941 - DNA, 15 bp, Homo sapiens
tgaggtgacctttga

SEQ ID NO: 1603942 - DNA, 15 bp, Homo sapiens
gaggtgacctttgag

SEQ ID NO: 1603943 - DNA, 15 bp, Homo sapiens
aggtgacctttgagg

SEQ ID NO: 1603944 - DNA, 15 bp, Homo sapiens
ggtgacctttgagga

SEQ ID NO: 1603945 - DNA, 15 bp, Homo sapiens
gtgacctttgaggag

SEQ ID NO: 1603946 - DNA, 15 bp, Homo sapiens
tgacctttgaggaga

SEQ ID NO: 1603947 - DNA, 15 bp, Homo sapiens
gacctttgaggagag

SEQ ID NO: 1603948 - DNA, 15 bp, Homo sapiens
acctttgaggagaga

SEQ ID NO: 1603949 - DNA, 15 bp, Homo sapiens
cctttgaggagagac

SEQ ID NO: 1603950 - DNA, 15 bp, Homo sapiens
ctttgaggagagaca

SEQ ID NO: 1603951 - DNA, 15 bp, Homo sapiens
tttgaggagagacat

SEQ ID NO: 1603952 - DNA, 15 bp, Homo sapiens
ttgaggagagacatg

SEQ ID NO: 1603953 - DNA, 15 bp, Homo sapiens
tgaggagagacatgc

SEQ ID NO: 1603954 - DNA, 15 bp, Homo sapiens
gaggagagacatgca

SEQ ID NO: 1603955 - DNA, 15 bp, Homo sapiens
aggagagacatgcag

SEQ ID NO: 1603956 - DNA, 15 bp, Homo sapiens
ggagagacatgcagg

SEQ ID NO: 1603957 - DNA, 15 bp, Homo sapiens
gagagacatgcagga

SEQ ID NO: 1603958 - DNA, 15 bp, Homo sapiens
agagacatgcaggag

SEQ ID NO: 1603959 - DNA, 15 bp, Homo sapiens
gagacatgcaggaga

SEQ ID NO: 1603960 - DNA, 15 bp, Homo sapiens
agacatgcaggagat

SEQ ID NO: 1603961 - DNA, 15 bp, Homo sapiens
gacatgcaggagatg

SEQ ID NO: 1603962 - DNA, 15 bp, Homo sapiens
acatgcaggagatga

SEQ ID NO: 1603963 - DNA, 15 bp, Homo sapiens
catgcaggagatgag

SEQ ID NO: 1603964 - DNA, 15 bp, Homo sapiens
atgcaggagatgagg

SEQ ID NO: 1603965 - DNA, 15 bp, Homo sapiens
tgcaggagatgaggg

SEQ ID NO: 1603966 - DNA, 15 bp, Homo sapiens
gcaggagatgagggg

SEQ ID NO: 1603967 - DNA, 15 bp, Homo sapiens
caggagatgagggga

SEQ ID NO: 1603968 - DNA, 15 bp, Homo sapiens
aggagatgaggggac

SEQ ID NO: 1603969 - DNA, 15 bp, Homo sapiens
ggagatgaggggaca

SEQ ID NO: 1603970 - DNA, 15 bp, Homo sapiens
gagatgaggggacag

SEQ ID NO: 1603971 - DNA, 15 bp, Homo sapiens
agatgaggggacagt

SEQ ID NO: 1603972 - DNA, 15 bp, Homo sapiens
gatgaggggacagtg

SEQ ID NO: 1603973 - DNA, 15 bp, Homo sapiens
atgaggggacagtga

SEQ ID NO: 1603974 - DNA, 15 bp, Homo sapiens
tgaggggacagtgaa

SEQ ID NO: 1603975 - DNA, 15 bp, Homo sapiens
gaggggacagtgaag

SEQ ID NO: 1603976 - DNA, 15 bp, Homo sapiens
aggggacagtgaaga

SEQ ID NO: 1603977 - DNA, 15 bp, Homo sapiens
ggggacagtgaagag

SEQ ID NO: 1603978 - DNA, 15 bp, Homo sapiens
gggacagtgaagagg

SEQ ID NO: 1603979 - DNA, 15 bp, Homo sapiens
ggacagtgaagagga

SEQ ID NO: 1603980 - DNA, 15 bp, Homo sapiens
gacagtgaagaggat

SEQ ID NO: 1603981 - DNA, 15 bp, Homo sapiens
acagtgaagaggatt

SEQ ID NO: 1603982 - DNA, 15 bp, Homo sapiens
cagtgaagaggattt

SEQ ID NO: 1603983 - DNA, 15 bp, Homo sapiens
agtgaagaggatttc

SEQ ID NO: 1603984 - DNA, 15 bp, Homo sapiens
gtgaagaggatttct

SEQ ID NO: 1603985 - DNA, 15 bp, Homo sapiens
tgaagaggatttcta

SEQ ID NO: 1603986 - DNA, 15 bp, Homo sapiens
gaagaggatttctaa

SEQ ID NO: 1603987 - DNA, 15 bp, Homo sapiens
aagaggatttctaag

SEQ ID NO: 1603988 - DNA, 15 bp, Homo sapiens
agaggatttctaaga

SEQ ID NO: 1603989 - DNA, 15 bp, Homo sapiens
gaggatttctaagaa

SEQ ID NO: 1603990 - DNA, 15 bp, Homo sapiens
aggatttctaagaac

SEQ ID NO: 1603991 - DNA, 15 bp, Homo sapiens
ggatttctaagaaca

SEQ ID NO: 1603992 - DNA, 15 bp, Homo sapiens
gatttctaagaacac

SEQ ID NO: 1603993 - DNA, 15 bp, Homo sapiens
atttctaagaacact

SEQ ID NO: 1603994 - DNA, 15 bp, Homo sapiens
tttctaagaacactc

SEQ ID NO: 1603995 - DNA, 15 bp, Homo sapiens
ttctaagaacactcc

SEQ ID NO: 1603996 - DNA, 15 bp, Homo sapiens
tctaagaacactcca

SEQ ID NO: 1603997 - DNA, 15 bp, Homo sapiens
ctaagaacactccag

SEQ ID NO: 1603998 - DNA, 15 bp, Homo sapiens
taagaacactccagg

SEQ ID NO: 1603999 - DNA, 15 bp, Homo sapiens
aagaacactccaggc

SEQ ID NO: 1604000 - DNA, 15 bp, Homo sapiens
agaacactccaggca

SEQ ID NO: 1604001 - DNA, 15 bp, Homo sapiens
gaacactccaggcag

SEQ ID NO: 1604002 - DNA, 15 bp, Homo sapiens
aacactccaggcaga

SEQ ID NO: 1604003 - DNA, 15 bp, Homo sapiens
acactccaggcagac

SEQ ID NO: 1604004 - DNA, 15 bp, Homo sapiens
cactccaggcagaca

SEQ ID NO: 1604005 - DNA, 15 bp, Homo sapiens
actccaggcagacag

SEQ ID NO: 1604006 - DNA, 15 bp, Homo sapiens
ctccaggcagacaga

SEQ ID NO: 1604007 - DNA, 15 bp, Homo sapiens
tccaggcagacagaa

SEQ ID NO: 1604008 - DNA, 15 bp, Homo sapiens
ccaggcagacagaac

SEQ ID NO: 1604009 - DNA, 15 bp, Homo sapiens
caggcagacagaaca

SEQ ID NO: 1604010 - DNA, 15 bp, Homo sapiens
aggcagacagaacag

SEQ ID NO: 1604011 - DNA, 15 bp, Homo sapiens
ggcagacagaacagc

SEQ ID NO: 1604012 - DNA, 15 bp, Homo sapiens
gcagacagaacagcg

SEQ ID NO: 1604013 - DNA, 15 bp, Homo sapiens
cagacagaacagcga

SEQ ID NO: 1604014 - DNA, 15 bp, Homo sapiens
agacagaacagcgac

SEQ ID NO: 1604015 - DNA, 15 bp, Homo sapiens
gacagaacagcgaca

SEQ ID NO: 1604016 - DNA, 15 bp, Homo sapiens
acagaacagcgacag

SEQ ID NO: 1604017 - DNA, 15 bp, Homo sapiens
cagaacagcgacagc

SEQ ID NO: 1604018 - DNA, 15 bp, Homo sapiens
agaacagcgacagcc

SEQ ID NO: 1604019 - DNA, 15 bp, Homo sapiens
gaacagcgacagcca

SEQ ID NO: 1604020 - DNA, 15 bp, Homo sapiens
aacagcgacagccaa

SEQ ID NO: 1604021 - DNA, 15 bp, Homo sapiens
acagcgacagccaag

SEQ ID NO: 1604022 - DNA, 15 bp, Homo sapiens
cagcgacagccaagg

SEQ ID NO: 1604023 - DNA, 15 bp, Homo sapiens
agcgacagccaaggc

SEQ ID NO: 1604024 - DNA, 15 bp, Homo sapiens
gcgacagccaaggcc

SEQ ID NO: 1604025 - DNA, 15 bp, Homo sapiens
cgacagccaaggccc

SEQ ID NO: 1604026 - DNA, 15 bp, Homo sapiens
gacagccaaggccct

SEQ ID NO: 1604027 - DNA, 15 bp, Homo sapiens
acagccaaggccctg

SEQ ID NO: 1604028 - DNA, 15 bp, Homo sapiens
cagccaaggccctga

SEQ ID NO: 1604029 - DNA, 15 bp, Homo sapiens
agccaaggccctgaa

SEQ ID NO: 1604030 - DNA, 15 bp, Homo sapiens
gccaaggccctgaag

SEQ ID NO: 1604031 - DNA, 15 bp, Homo sapiens
ccaaggccctgaagt

SEQ ID NO: 1604032 - DNA, 15 bp, Homo sapiens
caaggccctgaagtg

SEQ ID NO: 1604033 - DNA, 15 bp, Homo sapiens
aaggccctgaagtgg

SEQ ID NO: 1604034 - DNA, 15 bp, Homo sapiens
aggccctgaagtggg

SEQ ID NO: 1604035 - DNA, 15 bp, Homo sapiens
ggccctgaagtgggt

SEQ ID NO: 1604036 - DNA, 15 bp, Homo sapiens
gccctgaagtgggta

SEQ ID NO: 1604037 - DNA, 15 bp, Homo sapiens
ccctgaagtgggtag

SEQ ID NO: 1604038 - DNA, 15 bp, Homo sapiens
cctgaagtgggtagg

SEQ ID NO: 1604039 - DNA, 15 bp, Homo sapiens
ctgaagtgggtaggg

SEQ ID NO: 1604040 - DNA, 15 bp, Homo sapiens
tgaagtgggtagggg

SEQ ID NO: 1604041 - DNA, 15 bp, Homo sapiens
gaagtgggtaggggc

SEQ ID NO: 1604042 - DNA, 15 bp, Homo sapiens
aagtgggtaggggcc

SEQ ID NO: 1604043 - DNA, 15 bp, Homo sapiens
agtgggtaggggcct

SEQ ID NO: 1604044 - DNA, 15 bp, Homo sapiens
gtgggtaggggcctg

SEQ ID NO: 1604045 - DNA, 15 bp, Homo sapiens
tgggtaggggcctgg

SEQ ID NO: 1604046 - DNA, 15 bp, Homo sapiens
gggtaggggcctggt

SEQ ID NO: 1604047 - DNA, 15 bp, Homo sapiens
ggtaggggcctggtg

SEQ ID NO: 1604048 - DNA, 15 bp, Homo sapiens
gtaggggcctggtgt

SEQ ID NO: 1604049 - DNA, 15 bp, Homo sapiens
taggggcctggtgtg

SEQ ID NO: 1604050 - DNA, 15 bp, Homo sapiens
aggggcctggtgtgt

SEQ ID NO: 1604051 - DNA, 15 bp, Homo sapiens
ggggcctggtgtgtg

SEQ ID NO: 1604052 - DNA, 15 bp, Homo sapiens
gggcctggtgtgtgt

SEQ ID NO: 1604053 - DNA, 15 bp, Homo sapiens
ggcctggtgtgtgtg

SEQ ID NO: 1604054 - DNA, 15 bp, Homo sapiens
gcctggtgtgtgtga

SEQ ID NO: 1604055 - DNA, 15 bp, Homo sapiens
cctggtgtgtgtgag

SEQ ID NO: 1604056 - DNA, 15 bp, Homo sapiens
ctggtgtgtgtgagg

SEQ ID NO: 1604057 - DNA, 15 bp, Homo sapiens
tggtgtgtgtgagga

SEQ ID NO: 1604058 - DNA, 15 bp, Homo sapiens
ggtgtgtgtgaggaa

SEQ ID NO: 1604059 - DNA, 15 bp, Homo sapiens
gtgtgtgtgaggaac

SEQ ID NO: 1604060 - DNA, 15 bp, Homo sapiens
tgtgtgtgaggaacc

SEQ ID NO: 1604061 - DNA, 15 bp, Homo sapiens
gtgtgtgaggaacct

SEQ ID NO: 1604062 - DNA, 15 bp, Homo sapiens
tgtgtgaggaacctc

SEQ ID NO: 1604063 - DNA, 15 bp, Homo sapiens
gtgtgaggaacctca

SEQ ID NO: 1604064 - DNA, 15 bp, Homo sapiens
tgtgaggaacctcag

SEQ ID NO: 1604065 - DNA, 15 bp, Homo sapiens
gtgaggaacctcagg

SEQ ID NO: 1604066 - DNA, 15 bp, Homo sapiens
tgaggaacctcagga

SEQ ID NO: 1604067 - DNA, 15 bp, Homo sapiens
gaggaacctcaggat

SEQ ID NO: 1604068 - DNA, 15 bp, Homo sapiens
aggaacctcaggatt

SEQ ID NO: 1604069 - DNA, 15 bp, Homo sapiens
ggaacctcaggattg

SEQ ID NO: 1604070 - DNA, 15 bp, Homo sapiens
gaacctcaggattgc

SEQ ID NO: 1604071 - DNA, 15 bp, Homo sapiens
aacctcaggattgcc

SEQ ID NO: 1604072 - DNA, 15 bp, Homo sapiens
acctcaggattgcca

SEQ ID NO: 1604073 - DNA, 15 bp, Homo sapiens
cctcaggattgccat

SEQ ID NO: 1604074 - DNA, 15 bp, Homo sapiens
ctcaggattgccatc

SEQ ID NO: 1604075 - DNA, 15 bp, Homo sapiens
tcaggattgccatca

SEQ ID NO: 1604076 - DNA, 15 bp, Homo sapiens
caggattgccatcat

SEQ ID NO: 1604077 - DNA, 15 bp, Homo sapiens
aggattgccatcatg

SEQ ID NO: 1604078 - DNA, 15 bp, Homo sapiens
ggattgccatcatgg

SEQ ID NO: 1604079 - DNA, 15 bp, Homo sapiens
gattgccatcatggc

SEQ ID NO: 1604080 - DNA, 15 bp, Homo sapiens
attgccatcatggct

SEQ ID NO: 1604081 - DNA, 15 bp, Homo sapiens
ttgccatcatggctg

SEQ ID NO: 1604082 - DNA, 15 bp, Homo sapiens
tgccatcatggctgg

SEQ ID NO: 1604083 - DNA, 15 bp, Homo sapiens
gccatcatggctgga

SEQ ID NO: 1604084 - DNA, 15 bp, Homo sapiens
ccatcatggctggag

SEQ ID NO: 1604085 - DNA, 15 bp, Homo sapiens
catcatggctggagc

SEQ ID NO: 1604086 - DNA, 15 bp, Homo sapiens
atcatggctggagca

SEQ ID NO: 1604087 - DNA, 15 bp, Homo sapiens
tcatggctggagcag

SEQ ID NO: 1604088 - DNA, 15 bp, Homo sapiens
catggctggagcaga

SEQ ID NO: 1604089 - DNA, 15 bp, Homo sapiens
atggctggagcagag

SEQ ID NO: 1604090 - DNA, 15 bp, Homo sapiens
tggctggagcagaga

SEQ ID NO: 1604091 - DNA, 15 bp, Homo sapiens
ggctggagcagagac

SEQ ID NO: 1604092 - DNA, 15 bp, Homo sapiens
gctggagcagagaca

SEQ ID NO: 1604093 - DNA, 15 bp, Homo sapiens
ctggagcagagacat

SEQ ID NO: 1604094 - DNA, 15 bp, Homo sapiens
tggagcagagacatg

SEQ ID NO: 1604095 - DNA, 15 bp, Homo sapiens
ggagcagagacatga

SEQ ID NO: 1604096 - DNA, 15 bp, Homo sapiens
gagcagagacatgaa

SEQ ID NO: 1604097 - DNA, 15 bp, Homo sapiens
gcagagacatgaagc

SEQ ID NO: 1604098 - DNA, 15 bp, Homo sapiens
cagagacatgaagca

SEQ ID NO: 1604099 - DNA, 15 bp, Homo sapiens
agagacatgaagcaa

SEQ ID NO: 1604100 - DNA, 15 bp, Homo sapiens
gagacatgaagcaag

SEQ ID NO: 1604101 - DNA, 15 bp, Homo sapiens
agacatgaagcaaga

SEQ ID NO: 1604102 - DNA, 15 bp, Homo sapiens
gacatgaagcaagaa

SEQ ID NO: 1604103 - DNA, 15 bp, Homo sapiens
acatgaagcaagaag

SEQ ID NO: 1604104 - DNA, 15 bp, Homo sapiens
catgaagcaagaagg

SEQ ID NO: 1604105 - DNA, 15 bp, Homo sapiens
atgaagcaagaaggc

SEQ ID NO: 1604106 - DNA, 15 bp, Homo sapiens
tgaagcaagaaggcc

SEQ ID NO: 1604107 - DNA, 15 bp, Homo sapiens
gaagcaagaaggcca

SEQ ID NO: 1604108 - DNA, 15 bp, Homo sapiens
aagcaagaaggccat

SEQ ID NO: 1604109 - DNA, 15 bp, Homo sapiens
agcaagaaggccatg

SEQ ID NO: 1604110 - DNA, 15 bp, Homo sapiens
gcaagaaggccatgg

SEQ ID NO: 1604111 - DNA, 15 bp, Homo sapiens
caagaaggccatgga

SEQ ID NO: 1604112 - DNA, 15 bp, Homo sapiens
aagaaggccatggag

SEQ ID NO: 1604113 - DNA, 15 bp, Homo sapiens
agaaggccatggaga

SEQ ID NO: 1604114 - DNA, 15 bp, Homo sapiens
gaaggccatggagat

SEQ ID NO: 1604115 - DNA, 15 bp, Homo sapiens
aaggccatggagatg

SEQ ID NO: 1604116 - DNA, 15 bp, Homo sapiens
aggccatggagatga

SEQ ID NO: 1604117 - DNA, 15 bp, Homo sapiens
ggccatggagatgag

SEQ ID NO: 1604118 - DNA, 15 bp, Homo sapiens
gccatggagatgagg

SEQ ID NO: 1604119 - DNA, 15 bp, Homo sapiens
ccatggagatgaggg

SEQ ID NO: 1604120 - DNA, 15 bp, Homo sapiens
catggagatgagggc

SEQ ID NO: 1604121 - DNA, 15 bp, Homo sapiens
atggagatgagggca

SEQ ID NO: 1604122 - DNA, 15 bp, Homo sapiens
tggagatgagggcag

SEQ ID NO: 1604123 - DNA, 15 bp, Homo sapiens
ggagatgagggcagg

SEQ ID NO: 1604124 - DNA, 15 bp, Homo sapiens
gagatgagggcaggg

SEQ ID NO: 1604125 - DNA, 15 bp, Homo sapiens
agatgagggcaggga

SEQ ID NO: 1604126 - DNA, 15 bp, Homo sapiens
gatgagggcagggag

SEQ ID NO: 1604127 - DNA, 15 bp, Homo sapiens
atgagggcagggaga

SEQ ID NO: 1604128 - DNA, 15 bp, Homo sapiens
tgagggcagggagat

SEQ ID NO: 1604129 - DNA, 15 bp, Homo sapiens
gagggcagggagatc

SEQ ID NO: 1604130 - DNA, 15 bp, Homo sapiens
agggcagggagatcc

SEQ ID NO: 1604131 - DNA, 15 bp, Homo sapiens
gggcagggagatccc

SEQ ID NO: 1604132 - DNA, 15 bp, Homo sapiens
ggcagggagatcccg

SEQ ID NO: 1604133 - DNA, 15 bp, Homo sapiens
gcagggagatcccgg

SEQ ID NO: 1604134 - DNA, 15 bp, Homo sapiens
cagggagatcccgga

SEQ ID NO: 1604135 - DNA, 15 bp, Homo sapiens
agggagatcccggag

SEQ ID NO: 1604136 - DNA, 15 bp, Homo sapiens
gggagatcccggagt

SEQ ID NO: 1604137 - DNA, 15 bp, Homo sapiens
ggagatcccggagtg

SEQ ID NO: 1604138 - DNA, 15 bp, Homo sapiens
gagatcccggagtgg

SEQ ID NO: 1604139 - DNA, 15 bp, Homo sapiens
agatcccggagtggg

SEQ ID NO: 1604140 - DNA, 15 bp, Homo sapiens
gatcccggagtgggg

SEQ ID NO: 1604141 - DNA, 15 bp, Homo sapiens
atcccggagtgggga

SEQ ID NO: 1604142 - DNA, 15 bp, Homo sapiens
tcccggagtggggag

SEQ ID NO: 1604143 - DNA, 15 bp, Homo sapiens
cccggagtggggaga

SEQ ID NO: 1604144 - DNA, 15 bp, Homo sapiens
ccggagtggggagat

SEQ ID NO: 1604145 - DNA, 15 bp, Homo sapiens
cggagtggggagatc

SEQ ID NO: 1604146 - DNA, 15 bp, Homo sapiens
ggagtggggagatca

SEQ ID NO: 1604147 - DNA, 15 bp, Homo sapiens
gagtggggagatcag

SEQ ID NO: 1604148 - DNA, 15 bp, Homo sapiens
agtggggagatcaga

SEQ ID NO: 1604149 - DNA, 15 bp, Homo sapiens
gtggggagatcagat

SEQ ID NO: 1604150 - DNA, 15 bp, Homo sapiens
tggggagatcagatg

SEQ ID NO: 1604151 - DNA, 15 bp, Homo sapiens
ggggagatcagatgg

SEQ ID NO: 1604152 - DNA, 15 bp, Homo sapiens
gggagatcagatggg

SEQ ID NO: 1604153 - DNA, 15 bp, Homo sapiens
ggagatcagatgggg

SEQ ID NO: 1604154 - DNA, 15 bp, Homo sapiens
gagatcagatggggc

SEQ ID NO: 1604155 - DNA, 15 bp, Homo sapiens
agatcagatggggct

SEQ ID NO: 1604156 - DNA, 15 bp, Homo sapiens
gatcagatggggctc

SEQ ID NO: 1604157 - DNA, 15 bp, Homo sapiens
atcagatggggctct

SEQ ID NO: 1604158 - DNA, 15 bp, Homo sapiens
tcagatggggctctg

SEQ ID NO: 1604159 - DNA, 15 bp, Homo sapiens
cagatggggctctgt

SEQ ID NO: 1604160 - DNA, 15 bp, Homo sapiens
agatggggctctgtg

SEQ ID NO: 1604161 - DNA, 15 bp, Homo sapiens
gatggggctctgtgt

SEQ ID NO: 1604162 - DNA, 15 bp, Homo sapiens
atggggctctgtgta

SEQ ID NO: 1604163 - DNA, 15 bp, Homo sapiens
tggggctctgtgtat

SEQ ID NO: 1604164 - DNA, 15 bp, Homo sapiens
ggggctctgtgtatc

SEQ ID NO: 1604165 - DNA, 15 bp, Homo sapiens
gggctctgtgtatca

SEQ ID NO: 1604166 - DNA, 15 bp, Homo sapiens
ggctctgtgtatcat

SEQ ID NO: 1604167 - DNA, 15 bp, Homo sapiens
gctctgtgtatcatg

SEQ ID NO: 1604168 - DNA, 15 bp, Homo sapiens
ctctgtgtatcatgc

SEQ ID NO: 1604169 - DNA, 15 bp, Homo sapiens
tctgtgtatcatgca

SEQ ID NO: 1604170 - DNA, 15 bp, Homo sapiens
ctgtgtatcatgcaa

SEQ ID NO: 1604171 - DNA, 15 bp, Homo sapiens
tgtgtatcatgcaaa

SEQ ID NO: 1604172 - DNA, 15 bp, Homo sapiens
gtgtatcatgcaaag

SEQ ID NO: 1604173 - DNA, 15 bp, Homo sapiens
tgtatcatgcaaagg

SEQ ID NO: 1604174 - DNA, 15 bp, Homo sapiens
gtatcatgcaaagga

SEQ ID NO: 1604175 - DNA, 15 bp, Homo sapiens
tatcatgcaaaggac

SEQ ID NO: 1604176 - DNA, 15 bp, Homo sapiens
atcatgcaaaggact

SEQ ID NO: 1604177 - DNA, 15 bp, Homo sapiens
tcatgcaaaggactt

SEQ ID NO: 1604178 - DNA, 15 bp, Homo sapiens
catgcaaaggacttt

SEQ ID NO: 1604179 - DNA, 15 bp, Homo sapiens
atgcaaaggactttg

SEQ ID NO: 1604180 - DNA, 15 bp, Homo sapiens
tgcaaaggactttgc

SEQ ID NO: 1604181 - DNA, 15 bp, Homo sapiens
gcaaaggactttgca

SEQ ID NO: 1604182 - DNA, 15 bp, Homo sapiens
caaaggactttgcat

SEQ ID NO: 1604183 - DNA, 15 bp, Homo sapiens
aaaggactttgcatt

SEQ ID NO: 1604184 - DNA, 15 bp, Homo sapiens
aaggactttgcattc

SEQ ID NO: 1604185 - DNA, 15 bp, Homo sapiens
aggactttgcattct

SEQ ID NO: 1604186 - DNA, 15 bp, Homo sapiens
ggactttgcattctg

SEQ ID NO: 1604187 - DNA, 15 bp, Homo sapiens
gactttgcattctgt

SEQ ID NO: 1604188 - DNA, 15 bp, Homo sapiens
actttgcattctgtt

SEQ ID NO: 1604189 - DNA, 15 bp, Homo sapiens
ctttgcattctgttc

SEQ ID NO: 1604190 - DNA, 15 bp, Homo sapiens
tttgcattctgttcc

SEQ ID NO: 1604191 - DNA, 15 bp, Homo sapiens
ttgcattctgttcca

SEQ ID NO: 1604192 - DNA, 15 bp, Homo sapiens
tgcattctgttccaa

SEQ ID NO: 1604193 - DNA, 15 bp, Homo sapiens
gcattctgttccaag

SEQ ID NO: 1604194 - DNA, 15 bp, Homo sapiens
cattctgttccaaga

SEQ ID NO: 1604195 - DNA, 15 bp, Homo sapiens
attctgttccaagag

SEQ ID NO: 1604196 - DNA, 15 bp, Homo sapiens
ttctgttccaagagc

SEQ ID NO: 1604197 - DNA, 15 bp, Homo sapiens
tctgttccaagagct

SEQ ID NO: 1604198 - DNA, 15 bp, Homo sapiens
ctgttccaagagctg

SEQ ID NO: 1604199 - DNA, 15 bp, Homo sapiens
tgttccaagagctgg

SEQ ID NO: 1604200 - DNA, 15 bp, Homo sapiens
gttccaagagctggg

SEQ ID NO: 1604201 - DNA, 15 bp, Homo sapiens
ttccaagagctggga

SEQ ID NO: 1604202 - DNA, 15 bp, Homo sapiens
tccaagagctgggaa

SEQ ID NO: 1604203 - DNA, 15 bp, Homo sapiens
ccaagagctgggaag

SEQ ID NO: 1604204 - DNA, 15 bp, Homo sapiens
caagagctgggaagg

SEQ ID NO: 1604205 - DNA, 15 bp, Homo sapiens
aagagctgggaaggt

SEQ ID NO: 1604206 - DNA, 15 bp, Homo sapiens
agagctgggaaggtt

SEQ ID NO: 1604207 - DNA, 15 bp, Homo sapiens
gagctgggaaggttg

SEQ ID NO: 1604208 - DNA, 15 bp, Homo sapiens
agctgggaaggttga

SEQ ID NO: 1604209 - DNA, 15 bp, Homo sapiens
gctgggaaggttgac

SEQ ID NO: 1604210 - DNA, 15 bp, Homo sapiens
ctgggaaggttgaca

SEQ ID NO: 1604211 - DNA, 15 bp, Homo sapiens
tgggaaggttgacat

SEQ ID NO: 1604212 - DNA, 15 bp, Homo sapiens
gggaaggttgacata

SEQ ID NO: 1604213 - DNA, 15 bp, Homo sapiens
ggaaggttgacataa

SEQ ID NO: 1604214 - DNA, 15 bp, Homo sapiens
gaaggttgacataat

SEQ ID NO: 1604215 - DNA, 15 bp, Homo sapiens
aaggttgacataatt

SEQ ID NO: 1604216 - DNA, 15 bp, Homo sapiens
aggttgacataatta

SEQ ID NO: 1604217 - DNA, 15 bp, Homo sapiens
ggttgacataattag

SEQ ID NO: 1604218 - DNA, 15 bp, Homo sapiens
gttgacataattagg

SEQ ID NO: 1604219 - DNA, 15 bp, Homo sapiens
ttgacataattagga

SEQ ID NO: 1604220 - DNA, 15 bp, Homo sapiens
tgacataattaggaa

SEQ ID NO: 1604221 - DNA, 15 bp, Homo sapiens
gacataattaggaaa

SEQ ID NO: 1604222 - DNA, 15 bp, Homo sapiens
acataattaggaaaa

SEQ ID NO: 1604223 - DNA, 15 bp, Homo sapiens
cataattaggaaaaa

SEQ ID NO: 1604224 - DNA, 15 bp, Homo sapiens
ataattaggaaaaaa

SEQ ID NO: 1604225 - DNA, 15 bp, Homo sapiens
taattaggaaaaaag

SEQ ID NO: 1604226 - DNA, 15 bp, Homo sapiens
aattaggaaaaaagc

SEQ ID NO: 1604227 - DNA, 15 bp, Homo sapiens
attaggaaaaaagcc

SEQ ID NO: 1604228 - DNA, 15 bp, Homo sapiens
ttaggaaaaaagccc

SEQ ID NO: 1604229 - DNA, 15 bp, Homo sapiens
taggaaaaaagccca

SEQ ID NO: 1604230 - DNA, 15 bp, Homo sapiens
aggaaaaaagcccag

SEQ ID NO: 1604231 - DNA, 15 bp, Homo sapiens
ggaaaaaagcccaga

SEQ ID NO: 1604232 - DNA, 15 bp, Homo sapiens
gaaaaaagcccagaa

SEQ ID NO: 1604233 - DNA, 15 bp, Homo sapiens
aaaaaagcccagaaa

SEQ ID NO: 1604234 - DNA, 15 bp, Homo sapiens
aaaaagcccagaaaa

SEQ ID NO: 1604235 - DNA, 15 bp, Homo sapiens
aaaagcccagaaaag

SEQ ID NO: 1604236 - DNA, 15 bp, Homo sapiens
aaagcccagaaaagc

SEQ ID NO: 1604237 - DNA, 15 bp, Homo sapiens
aagcccagaaaagca

SEQ ID NO: 1604238 - DNA, 15 bp, Homo sapiens
agcccagaaaagcag

SEQ ID NO: 1604239 - DNA, 15 bp, Homo sapiens
gcccagaaaagcaga

SEQ ID NO: 1604240 - DNA, 15 bp, Homo sapiens
cccagaaaagcagag

SEQ ID NO: 1604241 - DNA, 15 bp, Homo sapiens
ccagaaaagcagagg

SEQ ID NO: 1604242 - DNA, 15 bp, Homo sapiens
cagaaaagcagaggt

SEQ ID NO: 1604243 - DNA, 15 bp, Homo sapiens
agaaaagcagaggta

SEQ ID NO: 1604244 - DNA, 15 bp, Homo sapiens
gaaaagcagaggtat

SEQ ID NO: 1604245 - DNA, 15 bp, Homo sapiens
aaaagcagaggtatc

SEQ ID NO: 1604246 - DNA, 15 bp, Homo sapiens
aaagcagaggtatcc

SEQ ID NO: 1604247 - DNA, 15 bp, Homo sapiens
aagcagaggtatcca

SEQ ID NO: 1604248 - DNA, 15 bp, Homo sapiens
agcagaggtatccat

SEQ ID NO: 1604249 - DNA, 15 bp, Homo sapiens
gcagaggtatccatt

SEQ ID NO: 1604250 - DNA, 15 bp, Homo sapiens
cagaggtatccattt

SEQ ID NO: 1604251 - DNA, 15 bp, Homo sapiens
agaggtatccatttt

SEQ ID NO: 1604252 - DNA, 15 bp, Homo sapiens
gaggtatccattttt

SEQ ID NO: 1604253 - DNA, 15 bp, Homo sapiens
aggtatccatttttc

SEQ ID NO: 1604254 - DNA, 15 bp, Homo sapiens
ggtatccatttttca

SEQ ID NO: 1604255 - DNA, 15 bp, Homo sapiens
gtatccatttttcat

SEQ ID NO: 1604256 - DNA, 15 bp, Homo sapiens
tatccatttttcatg

SEQ ID NO: 1604257 - DNA, 15 bp, Homo sapiens
atccatttttcatgg

SEQ ID NO: 1604258 - DNA, 15 bp, Homo sapiens
tccatttttcatggt

SEQ ID NO: 1604259 - DNA, 15 bp, Homo sapiens
ccatttttcatggta

SEQ ID NO: 1604260 - DNA, 15 bp, Homo sapiens
catttttcatggtaa

SEQ ID NO: 1604261 - DNA, 15 bp, Homo sapiens
atttttcatggtaaa

SEQ ID NO: 1604262 - DNA, 15 bp, Homo sapiens
tttttcatggtaaag

SEQ ID NO: 1604263 - DNA, 15 bp, Homo sapiens
ttttcatggtaaaga

SEQ ID NO: 1604264 - DNA, 15 bp, Homo sapiens
tttcatggtaaagat

SEQ ID NO: 1604265 - DNA, 15 bp, Homo sapiens
ttcatggtaaagatg

SEQ ID NO: 1604266 - DNA, 15 bp, Homo sapiens
tcatggtaaagatga

SEQ ID NO: 1604267 - DNA, 15 bp, Homo sapiens
catggtaaagatgat

SEQ ID NO: 1604268 - DNA, 15 bp, Homo sapiens
atggtaaagatgata

SEQ ID NO: 1604269 - DNA, 15 bp, Homo sapiens
tggtaaagatgataa

SEQ ID NO: 1604270 - DNA, 15 bp, Homo sapiens
ggtaaagatgataat

SEQ ID NO: 1604271 - DNA, 15 bp, Homo sapiens
gtaaagatgataatt

SEQ ID NO: 1604272 - DNA, 15 bp, Homo sapiens
taaagatgataattt

SEQ ID NO: 1604273 - DNA, 15 bp, Homo sapiens
aaagatgataatttc

SEQ ID NO: 1604274 - DNA, 15 bp, Homo sapiens
aagatgataatttca

SEQ ID NO: 1604275 - DNA, 15 bp, Homo sapiens
agatgataatttcaa

SEQ ID NO: 1604276 - DNA, 15 bp, Homo sapiens
gatgataatttcaat

SEQ ID NO: 1604277 - DNA, 15 bp, Homo sapiens
atgataatttcaatt

SEQ ID NO: 1604278 - DNA, 15 bp, Homo sapiens
tgataatttcaatta

SEQ ID NO: 1604279 - DNA, 15 bp, Homo sapiens
gataatttcaattaa

SEQ ID NO: 1604280 - DNA, 15 bp, Homo sapiens
ataatttcaattaaa

SEQ ID NO: 1604281 - DNA, 15 bp, Homo sapiens
taatttcaattaaaa

SEQ ID NO: 1604282 - DNA, 15 bp, Homo sapiens
aatttcaattaaaac

SEQ ID NO: 1604283 - DNA, 15 bp, Homo sapiens
atttcaattaaaaca

SEQ ID NO: 1604284 - DNA, 15 bp, Homo sapiens
tttcaattaaaacac

SEQ ID NO: 1604285 - DNA, 15 bp, Homo sapiens
ttcaattaaaacacg

SEQ ID NO: 1604286 - DNA, 15 bp, Homo sapiens
tcaattaaaacacga

SEQ ID NO: 1604287 - DNA, 15 bp, Homo sapiens
caattaaaacacgat

SEQ ID NO: 1604288 - DNA, 15 bp, Homo sapiens
aattaaaacacgatt

SEQ ID NO: 1604289 - DNA, 15 bp, Homo sapiens
attaaaacacgattc

SEQ ID NO: 1604290 - DNA, 15 bp, Homo sapiens
ttaaaacacgattcc

SEQ ID NO: 1604291 - DNA, 15 bp, Homo sapiens
taaaacacgattcct

SEQ ID NO: 1604292 - DNA, 15 bp, Homo sapiens
aaaacacgattcctg

SEQ ID NO: 1604293 - DNA, 15 bp, Homo sapiens
aaacacgattcctgg

SEQ ID NO: 1604294 - DNA, 15 bp, Homo sapiens
aacacgattcctgga

SEQ ID NO: 1604295 - DNA, 15 bp, Homo sapiens
acacgattcctggat

SEQ ID NO: 1604296 - DNA, 15 bp, Homo sapiens
cacgattcctggata

SEQ ID NO: 1604297 - DNA, 15 bp, Homo sapiens
acgattcctggatat

SEQ ID NO: 1604298 - DNA, 15 bp, Homo sapiens
cgattcctggatata

SEQ ID NO: 1604299 - DNA, 15 bp, Homo sapiens
gattcctggatatat

SEQ ID NO: 1604300 - DNA, 15 bp, Homo sapiens
attcctggatatatg

SEQ ID NO: 1604301 - DNA, 15 bp, Homo sapiens
ttcctggatatatgt

SEQ ID NO: 1604302 - DNA, 15 bp, Homo sapiens
tcctggatatatgta

SEQ ID NO: 1604303 - DNA, 15 bp, Homo sapiens
cctggatatatgtaa

SEQ ID NO: 1604304 - DNA, 15 bp, Homo sapiens
ctggatatatgtaat

SEQ ID NO: 1604305 - DNA, 15 bp, Homo sapiens
tggatatatgtaatt

SEQ ID NO: 1604306 - DNA, 15 bp, Homo sapiens
ggatatatgtaattt

SEQ ID NO: 1604307 - DNA, 15 bp, Homo sapiens
gatatatgtaatttg

SEQ ID NO: 1604308 - DNA, 15 bp, Homo sapiens
atatatgtaatttgt

SEQ ID NO: 1604309 - DNA, 15 bp, Homo sapiens
tatatgtaatttgta

SEQ ID NO: 1604310 - DNA, 15 bp, Homo sapiens
atatgtaatttgtag

SEQ ID NO: 1604311 - DNA, 15 bp, Homo sapiens
tatgtaatttgtagg

SEQ ID NO: 1604312 - DNA, 15 bp, Homo sapiens
atgtaatttgtaggc

SEQ ID NO: 1604313 - DNA, 15 bp, Homo sapiens
tgtaatttgtaggcc

SEQ ID NO: 1604314 - DNA, 15 bp, Homo sapiens
gtaatttgtaggcca

SEQ ID NO: 1604315 - DNA, 15 bp, Homo sapiens
taatttgtaggccaa

SEQ ID NO: 1604316 - DNA, 15 bp, Homo sapiens
aatttgtaggccaaa

SEQ ID NO: 1604317 - DNA, 15 bp, Homo sapiens
atttgtaggccaaat

SEQ ID NO: 1604318 - DNA, 15 bp, Homo sapiens
tttgtaggccaaatg

SEQ ID NO: 1604319 - DNA, 15 bp, Homo sapiens
ttgtaggccaaatgg

SEQ ID NO: 1604320 - DNA, 15 bp, Homo sapiens
tgtaggccaaatggt

SEQ ID NO: 1604321 - DNA, 15 bp, Homo sapiens
gtaggccaaatggtg

SEQ ID NO: 1604322 - DNA, 15 bp, Homo sapiens
taggccaaatggtgc

SEQ ID NO: 1604323 - DNA, 15 bp, Homo sapiens
aggccaaatggtgcc

SEQ ID NO: 1604324 - DNA, 15 bp, Homo sapiens
ggccaaatggtgccc

SEQ ID NO: 1604325 - DNA, 15 bp, Homo sapiens
gccaaatggtgccca

SEQ ID NO: 1604326 - DNA, 15 bp, Homo sapiens
ccaaatggtgcccaa

SEQ ID NO: 1604327 - DNA, 15 bp, Homo sapiens
caaatggtgcccaat

SEQ ID NO: 1604328 - DNA, 15 bp, Homo sapiens
aaatggtgcccaatc

SEQ ID NO: 1604329 - DNA, 15 bp, Homo sapiens
aatggtgcccaatcc

SEQ ID NO: 1604330 - DNA, 15 bp, Homo sapiens
atggtgcccaatccc

SEQ ID NO: 1604331 - DNA, 15 bp, Homo sapiens
tggtgcccaatccct

SEQ ID NO: 1604332 - DNA, 15 bp, Homo sapiens
ggtgcccaatcccta

SEQ ID NO: 1604333 - DNA, 15 bp, Homo sapiens
gtgcccaatccctac

SEQ ID NO: 1604334 - DNA, 15 bp, Homo sapiens
tgcccaatccctacc

SEQ ID NO: 1604335 - DNA, 15 bp, Homo sapiens
gcccaatccctacct

SEQ ID NO: 1604336 - DNA, 15 bp, Homo sapiens
cccaatccctacctc

SEQ ID NO: 1604337 - DNA, 15 bp, Homo sapiens
ccaatccctacctcc

SEQ ID NO: 1604338 - DNA, 15 bp, Homo sapiens
caatccctacctccc

SEQ ID NO: 1604339 - DNA, 15 bp, Homo sapiens
aatccctacctccct

SEQ ID NO: 1604340 - DNA, 15 bp, Homo sapiens
atccctacctccctc

SEQ ID NO: 1604341 - DNA, 15 bp, Homo sapiens
tccctacctccctca

SEQ ID NO: 1604342 - DNA, 15 bp, Homo sapiens
ccctacctccctcac

SEQ ID NO: 1604343 - DNA, 15 bp, Homo sapiens
cctacctccctcacc

SEQ ID NO: 1604344 - DNA, 15 bp, Homo sapiens
ctacctccctcaccc

SEQ ID NO: 1604345 - DNA, 15 bp, Homo sapiens
tacctccctcacccc

SEQ ID NO: 1604346 - DNA, 15 bp, Homo sapiens
acctccctcaccccc

SEQ ID NO: 1604347 - DNA, 15 bp, Homo sapiens
cctccctcaccccct

SEQ ID NO: 1604348 - DNA, 15 bp, Homo sapiens
ctccctcaccccctc

SEQ ID NO: 1604349 - DNA, 15 bp, Homo sapiens
tccctcaccccctca

SEQ ID NO: 1604350 - DNA, 15 bp, Homo sapiens
ccctcaccccctcac

SEQ ID NO: 1604351 - DNA, 15 bp, Homo sapiens
cctcaccccctcact

SEQ ID NO: 1604352 - DNA, 15 bp, Homo sapiens
ctcaccccctcactt

SEQ ID NO: 1604353 - DNA, 15 bp, Homo sapiens
tcaccccctcacttc

SEQ ID NO: 1604354 - DNA, 15 bp, Homo sapiens
caccccctcacttcc

SEQ ID NO: 1604355 - DNA, 15 bp, Homo sapiens
accccctcacttccc

SEQ ID NO: 1604356 - DNA, 15 bp, Homo sapiens
ccccctcacttccct

SEQ ID NO: 1604357 - DNA, 15 bp, Homo sapiens
cccctcacttcccta

SEQ ID NO: 1604358 - DNA, 15 bp, Homo sapiens
ccctcacttccctat

SEQ ID NO: 1604359 - DNA, 15 bp, Homo sapiens
cctcacttccctatc

SEQ ID NO: 1604360 - DNA, 15 bp, Homo sapiens
ctcacttccctatcc

SEQ ID NO: 1604361 - DNA, 15 bp, Homo sapiens
tcacttccctatccc

SEQ ID NO: 1604362 - DNA, 15 bp, Homo sapiens
cacttccctatccct

SEQ ID NO: 1604363 - DNA, 15 bp, Homo sapiens
acttccctatcccta

SEQ ID NO: 1604364 - DNA, 15 bp, Homo sapiens
cttccctatccctaa

SEQ ID NO: 1604365 - DNA, 15 bp, Homo sapiens
ttccctatccctaaa

SEQ ID NO: 1604366 - DNA, 15 bp, Homo sapiens
tccctatccctaaaa

SEQ ID NO: 1604367 - DNA, 15 bp, Homo sapiens
ccctatccctaaaac

SEQ ID NO: 1604368 - DNA, 15 bp, Homo sapiens
cctatccctaaaacc

SEQ ID NO: 1604369 - DNA, 15 bp, Homo sapiens
ctatccctaaaacct

SEQ ID NO: 1604370 - DNA, 15 bp, Homo sapiens
tatccctaaaacctg

SEQ ID NO: 1604371 - DNA, 15 bp, Homo sapiens
atccctaaaacctgt

SEQ ID NO: 1604372 - DNA, 15 bp, Homo sapiens
tccctaaaacctgta

SEQ ID NO: 1604373 - DNA, 15 bp, Homo sapiens
ccctaaaacctgtac

SEQ ID NO: 1604374 - DNA, 15 bp, Homo sapiens
cctaaaacctgtacc

SEQ ID NO: 1604375 - DNA, 15 bp, Homo sapiens
ctaaaacctgtacct

SEQ ID NO: 1604376 - DNA, 15 bp, Homo sapiens
taaaacctgtacctc

SEQ ID NO: 1604377 - DNA, 15 bp, Homo sapiens
aaaacctgtacctca

SEQ ID NO: 1604378 - DNA, 15 bp, Homo sapiens
aaacctgtacctcaa

SEQ ID NO: 1604379 - DNA, 15 bp, Homo sapiens
aacctgtacctcaac

SEQ ID NO: 1604380 - DNA, 15 bp, Homo sapiens
acctgtacctcaact

SEQ ID NO: 1604381 - DNA, 15 bp, Homo sapiens
cctgtacctcaactc

SEQ ID NO: 1604382 - DNA, 15 bp, Homo sapiens
ctgtacctcaactcc

SEQ ID NO: 1604383 - DNA, 15 bp, Homo sapiens
tgtacctcaactccc

SEQ ID NO: 1604384 - DNA, 15 bp, Homo sapiens
gtacctcaactcccg

SEQ ID NO: 1604385 - DNA, 15 bp, Homo sapiens
tacctcaactcccgt

SEQ ID NO: 1604386 - DNA, 15 bp, Homo sapiens
acctcaactcccgtt

SEQ ID NO: 1604387 - DNA, 15 bp, Homo sapiens
cctcaactcccgttc

SEQ ID NO: 1604388 - DNA, 15 bp, Homo sapiens
ctcaactcccgttcg

SEQ ID NO: 1604389 - DNA, 15 bp, Homo sapiens
tcaactcccgttcgt

SEQ ID NO: 1604390 - DNA, 15 bp, Homo sapiens
caactcccgttcgta

SEQ ID NO: 1604391 - DNA, 15 bp, Homo sapiens
aactcccgttcgtaa

SEQ ID NO: 1604392 - DNA, 15 bp, Homo sapiens
actcccgttcgtaag

SEQ ID NO: 1604393 - DNA, 15 bp, Homo sapiens
ctcccgttcgtaagt

SEQ ID NO: 1604394 - DNA, 15 bp, Homo sapiens
tcccgttcgtaagtg

SEQ ID NO: 1604395 - DNA, 15 bp, Homo sapiens
cccgttcgtaagtga

SEQ ID NO: 1604396 - DNA, 15 bp, Homo sapiens
ccgttcgtaagtgat

SEQ ID NO: 1604397 - DNA, 15 bp, Homo sapiens
cgttcgtaagtgatg

SEQ ID NO: 1604398 - DNA, 15 bp, Homo sapiens
gttcgtaagtgatgg

SEQ ID NO: 1604399 - DNA, 15 bp, Homo sapiens
ttcgtaagtgatggg

SEQ ID NO: 1604400 - DNA, 15 bp, Homo sapiens
tcgtaagtgatggga

SEQ ID NO: 1604401 - DNA, 15 bp, Homo sapiens
cgtaagtgatgggag

SEQ ID NO: 1604402 - DNA, 15 bp, Homo sapiens
gtaagtgatgggagt

SEQ ID NO: 1604403 - DNA, 15 bp, Homo sapiens
taagtgatgggagtt

SEQ ID NO: 1604404 - DNA, 15 bp, Homo sapiens
aagtgatgggagtta

SEQ ID NO: 1604405 - DNA, 15 bp, Homo sapiens
agtgatgggagttag

SEQ ID NO: 1604406 - DNA, 15 bp, Homo sapiens
gtgatgggagttagg

SEQ ID NO: 1604407 - DNA, 15 bp, Homo sapiens
tgatgggagttagga

SEQ ID NO: 1604408 - DNA, 15 bp, Homo sapiens
gatgggagttaggaa

SEQ ID NO: 1604409 - DNA, 15 bp, Homo sapiens
atgggagttaggaat

SEQ ID NO: 1604410 - DNA, 15 bp, Homo sapiens
tgggagttaggaata

SEQ ID NO: 1604411 - DNA, 15 bp, Homo sapiens
gggagttaggaatag

SEQ ID NO: 1604412 - DNA, 15 bp, Homo sapiens
ggagttaggaataga

SEQ ID NO: 1604413 - DNA, 15 bp, Homo sapiens
gagttaggaatagag

SEQ ID NO: 1604414 - DNA, 15 bp, Homo sapiens
agttaggaatagaga

SEQ ID NO: 1604415 - DNA, 15 bp, Homo sapiens
gttaggaatagagaa

SEQ ID NO: 1604416 - DNA, 15 bp, Homo sapiens
ttaggaatagagaaa

SEQ ID NO: 1604417 - DNA, 15 bp, Homo sapiens
taggaatagagaaat

SEQ ID NO: 1604418 - DNA, 15 bp, Homo sapiens
aggaatagagaaatc

SEQ ID NO: 1604419 - DNA, 15 bp, Homo sapiens
ggaatagagaaatct

SEQ ID NO: 1604420 - DNA, 15 bp, Homo sapiens
gaatagagaaatctc

SEQ ID NO: 1604421 - DNA, 15 bp, Homo sapiens
aatagagaaatctcc

SEQ ID NO: 1604422 - DNA, 15 bp, Homo sapiens
atagagaaatctccc

SEQ ID NO: 1604423 - DNA, 15 bp, Homo sapiens
tagagaaatctcccg

SEQ ID NO: 1604424 - DNA, 15 bp, Homo sapiens
agagaaatctcccgg

SEQ ID NO: 1604425 - DNA, 15 bp, Homo sapiens
gagaaatctcccggt

SEQ ID NO: 1604426 - DNA, 15 bp, Homo sapiens
agaaatctcccggtt

SEQ ID NO: 1604427 - DNA, 15 bp, Homo sapiens
gaaatctcccggttg

SEQ ID NO: 1604428 - DNA, 15 bp, Homo sapiens
aaatctcccggttgg

SEQ ID NO: 1604429 - DNA, 15 bp, Homo sapiens
aatctcccggttggg

SEQ ID NO: 1604430 - DNA, 15 bp, Homo sapiens
atctcccggttgggt

SEQ ID NO: 1604431 - DNA, 15 bp, Homo sapiens
tctcccggttgggtt

SEQ ID NO: 1604432 - DNA, 15 bp, Homo sapiens
ctcccggttgggttt

SEQ ID NO: 1604433 - DNA, 15 bp, Homo sapiens
tcccggttgggtttt

SEQ ID NO: 1604434 - DNA, 15 bp, Homo sapiens
cccggttgggttttc

SEQ ID NO: 1604435 - DNA, 15 bp, Homo sapiens
ccggttgggttttct

SEQ ID NO: 1604436 - DNA, 15 bp, Homo sapiens
cggttgggttttctg

SEQ ID NO: 1604437 - DNA, 15 bp, Homo sapiens
ggttgggttttctga

SEQ ID NO: 1604438 - DNA, 15 bp, Homo sapiens
gttgggttttctgag

SEQ ID NO: 1604439 - DNA, 15 bp, Homo sapiens
ttgggttttctgagc

SEQ ID NO: 1604440 - DNA, 15 bp, Homo sapiens
tgggttttctgagca

SEQ ID NO: 1604441 - DNA, 15 bp, Homo sapiens
gggttttctgagcaa

SEQ ID NO: 1604442 - DNA, 15 bp, Homo sapiens
ggttttctgagcaaa

SEQ ID NO: 1604443 - DNA, 15 bp, Homo sapiens
gttttctgagcaaag

SEQ ID NO: 1604444 - DNA, 15 bp, Homo sapiens
ttttctgagcaaaga

SEQ ID NO: 1604445 - DNA, 15 bp, Homo sapiens
tttctgagcaaagag

SEQ ID NO: 1604446 - DNA, 15 bp, Homo sapiens
ttctgagcaaagagg

SEQ ID NO: 1604447 - DNA, 15 bp, Homo sapiens
tctgagcaaagaggt

SEQ ID NO: 1604448 - DNA, 15 bp, Homo sapiens
ctgagcaaagaggta

SEQ ID NO: 1604449 - DNA, 15 bp, Homo sapiens
tgagcaaagaggtaa

SEQ ID NO: 1604450 - DNA, 15 bp, Homo sapiens
gagcaaagaggtaac

SEQ ID NO: 1604451 - DNA, 15 bp, Homo sapiens
agcaaagaggtaaca

SEQ ID NO: 1604452 - DNA, 15 bp, Homo sapiens
gcaaagaggtaacat

SEQ ID NO: 1604453 - DNA, 15 bp, Homo sapiens
caaagaggtaacata

SEQ ID NO: 1604454 - DNA, 15 bp, Homo sapiens
aaagaggtaacatag

SEQ ID NO: 1604455 - DNA, 15 bp, Homo sapiens
aagaggtaacatagc

SEQ ID NO: 1604456 - DNA, 15 bp, Homo sapiens
agaggtaacatagca

SEQ ID NO: 1604457 - DNA, 15 bp, Homo sapiens
gaggtaacatagcag

SEQ ID NO: 1604458 - DNA, 15 bp, Homo sapiens
aggtaacatagcagc

SEQ ID NO: 1604459 - DNA, 15 bp, Homo sapiens
ggtaacatagcagct

SEQ ID NO: 1604460 - DNA, 15 bp, Homo sapiens
tttaaaagcccttgg

SEQ ID NO: 1604461 - DNA, 15 bp, Homo sapiens
ttaaaagcccttggt

SEQ ID NO: 1604462 - DNA, 15 bp, Homo sapiens
taaaagcccttggtg

SEQ ID NO: 1604463 - DNA, 15 bp, Homo sapiens
aaaagcccttggtga

SEQ ID NO: 1604464 - DNA, 15 bp, Homo sapiens
aaagcccttggtgac

SEQ ID NO: 1604465 - DNA, 15 bp, Homo sapiens
aagcccttggtgacc

SEQ ID NO: 1604466 - DNA, 15 bp, Homo sapiens
agcccttggtgacca

SEQ ID NO: 1604467 - DNA, 15 bp, Homo sapiens
gcccttggtgaccaa

SEQ ID NO: 1604468 - DNA, 15 bp, Homo sapiens
cccttggtgaccaac

SEQ ID NO: 1604469 - DNA, 15 bp, Homo sapiens
ccttggtgaccaaca

SEQ ID NO: 1604470 - DNA, 15 bp, Homo sapiens
cttggtgaccaacat

SEQ ID NO: 1604471 - DNA, 15 bp, Homo sapiens
ttggtgaccaacatg

SEQ ID NO: 1604472 - DNA, 15 bp, Homo sapiens
tggtgaccaacatgc

SEQ ID NO: 1604473 - DNA, 15 bp, Homo sapiens
ggtgaccaacatgca

SEQ ID NO: 1604474 - DNA, 15 bp, Homo sapiens
gtgaccaacatgcac

SEQ ID NO: 1604475 - DNA, 15 bp, Homo sapiens
tgaccaacatgcact

SEQ ID NO: 1604476 - DNA, 15 bp, Homo sapiens
gaccaacatgcactg

SEQ ID NO: 1604477 - DNA, 15 bp, Homo sapiens
accaacatgcactgg

SEQ ID NO: 1604478 - DNA, 15 bp, Homo sapiens
ccaacatgcactgga

SEQ ID NO: 1604479 - DNA, 15 bp, Homo sapiens
caacatgcactggag

SEQ ID NO: 1604480 - DNA, 15 bp, Homo sapiens
aacatgcactggagg

SEQ ID NO: 1604481 - DNA, 15 bp, Homo sapiens
acatgcactggaggt

SEQ ID NO: 1604482 - DNA, 15 bp, Homo sapiens
catgcactggaggta

SEQ ID NO: 1604483 - DNA, 15 bp, Homo sapiens
atgcactggaggtaa

SEQ ID NO: 1604484 - DNA, 15 bp, Homo sapiens
tgcactggaggtaac

SEQ ID NO: 1604485 - DNA, 15 bp, Homo sapiens
gcactggaggtaact

SEQ ID NO: 1604486 - DNA, 15 bp, Homo sapiens
cactggaggtaactg

SEQ ID NO: 1604487 - DNA, 15 bp, Homo sapiens
actggaggtaactgt

SEQ ID NO: 1604488 - DNA, 15 bp, Homo sapiens
ctggaggtaactgtt

SEQ ID NO: 1604489 - DNA, 15 bp, Homo sapiens
tggaggtaactgttc

SEQ ID NO: 1604490 - DNA, 15 bp, Homo sapiens
ggaggtaactgttct

SEQ ID NO: 1604491 - DNA, 15 bp, Homo sapiens
gaggtaactgttctc

SEQ ID NO: 1604492 - DNA, 15 bp, Homo sapiens
aggtaactgttctct

SEQ ID NO: 1604493 - DNA, 15 bp, Homo sapiens
ggtaactgttctctg

SEQ ID NO: 1604494 - DNA, 15 bp, Homo sapiens
gtaactgttctctgg

SEQ ID NO: 1604495 - DNA, 15 bp, Homo sapiens
taactgttctctgga

SEQ ID NO: 1604496 - DNA, 15 bp, Homo sapiens
aactgttctctggag

SEQ ID NO: 1604497 - DNA, 15 bp, Homo sapiens
actgttctctggagt

SEQ ID NO: 1604498 - DNA, 15 bp, Homo sapiens
ctgttctctggagtt

SEQ ID NO: 1604499 - DNA, 15 bp, Homo sapiens
tgttctctggagtta

SEQ ID NO: 1604500 - DNA, 15 bp, Homo sapiens
gttctctggagttac

SEQ ID NO: 1604501 - DNA, 15 bp, Homo sapiens
ttctctggagttact

SEQ ID NO: 1604502 - DNA, 15 bp, Homo sapiens
tctctggagttactt

SEQ ID NO: 1604503 - DNA, 15 bp, Homo sapiens
ctctggagttacttt

SEQ ID NO: 1604504 - DNA, 15 bp, Homo sapiens
tctggagttacttta

SEQ ID NO: 1604505 - DNA, 15 bp, Homo sapiens
ctggagttactttat

SEQ ID NO: 1604506 - DNA, 15 bp, Homo sapiens
tggagttactttatc

SEQ ID NO: 1604507 - DNA, 15 bp, Homo sapiens
ggagttactttatct

SEQ ID NO: 1604508 - DNA, 15 bp, Homo sapiens
gagttactttatctg

SEQ ID NO: 1604509 - DNA, 15 bp, Homo sapiens
agttactttatctgc

SEQ ID NO: 1604510 - DNA, 15 bp, Homo sapiens
gttactttatctgcc

SEQ ID NO: 1604511 - DNA, 15 bp, Homo sapiens
ttactttatctgcct

SEQ ID NO: 1604512 - DNA, 15 bp, Homo sapiens
tactttatctgccta

SEQ ID NO: 1604513 - DNA, 15 bp, Homo sapiens
actttatctgcctaa

SEQ ID NO: 1604514 - DNA, 15 bp, Homo sapiens
ctttatctgcctaaa

SEQ ID NO: 1604515 - DNA, 15 bp, Homo sapiens
tttatctgcctaaag

SEQ ID NO: 1604516 - DNA, 15 bp, Homo sapiens
ttatctgcctaaagt

SEQ ID NO: 1604517 - DNA, 15 bp, Homo sapiens
tatctgcctaaagtc

SEQ ID NO: 1604518 - DNA, 15 bp, Homo sapiens
atctgcctaaagtct

SEQ ID NO: 1604519 - DNA, 15 bp, Homo sapiens
tctgcctaaagtctg

SEQ ID NO: 1604520 - DNA, 15 bp, Homo sapiens
ctgcctaaagtctgg

SEQ ID NO: 1604521 - DNA, 15 bp, Homo sapiens
tgcctaaagtctgga

SEQ ID NO: 1604522 - DNA, 15 bp, Homo sapiens
gcctaaagtctggaa

SEQ ID NO: 1604523 - DNA, 15 bp, Homo sapiens
cctaaagtctggaac

SEQ ID NO: 1604524 - DNA, 15 bp, Homo sapiens
ctaaagtctggaact

SEQ ID NO: 1604525 - DNA, 15 bp, Homo sapiens
taaagtctggaacta

SEQ ID NO: 1604526 - DNA, 15 bp, Homo sapiens
aaagtctggaactac

SEQ ID NO: 1604527 - DNA, 15 bp, Homo sapiens
aagtctggaactacc

SEQ ID NO: 1604528 - DNA, 15 bp, Homo sapiens
agtctggaactacca

SEQ ID NO: 1604529 - DNA, 15 bp, Homo sapiens
gtctggaactaccaa

SEQ ID NO: 1604530 - DNA, 15 bp, Homo sapiens
tctggaactaccaaa

SEQ ID NO: 1604531 - DNA, 15 bp, Homo sapiens
ctggaactaccaaag

SEQ ID NO: 1604532 - DNA, 15 bp, Homo sapiens
tggaactaccaaaga

SEQ ID NO: 1604533 - DNA, 15 bp, Homo sapiens
ggaactaccaaagaa

SEQ ID NO: 1604534 - DNA, 15 bp, Homo sapiens
gaactaccaaagaat

SEQ ID NO: 1604535 - DNA, 15 bp, Homo sapiens
aactaccaaagaata

SEQ ID NO: 1604536 - DNA, 15 bp, Homo sapiens
actaccaaagaataa

SEQ ID NO: 1604537 - DNA, 15 bp, Homo sapiens
ctaccaaagaataaa

SEQ ID NO: 1604538 - DNA, 15 bp, Homo sapiens
taccaaagaataaaa

SEQ ID NO: 1604539 - DNA, 15 bp, Homo sapiens
accaaagaataaaac

SEQ ID NO: 1604540 - DNA, 15 bp, Homo sapiens
ccaaagaataaaaca

SEQ ID NO: 1604541 - DNA, 15 bp, Homo sapiens
caaagaataaaacaa

SEQ ID NO: 1604542 - DNA, 15 bp, Homo sapiens
aaagaataaaacaat

SEQ ID NO: 1604543 - DNA, 15 bp, Homo sapiens
aagaataaaacaatg

SEQ ID NO: 1604544 - DNA, 15 bp, Homo sapiens
agaataaaacaatga

SEQ ID NO: 1604545 - DNA, 15 bp, Homo sapiens
gaataaaacaatgac

SEQ ID NO: 1604546 - DNA, 15 bp, Homo sapiens
aataaaacaatgacc

SEQ ID NO: 1604547 - DNA, 15 bp, Homo sapiens
ataaaacaatgacca

SEQ ID NO: 1604548 - DNA, 15 bp, Homo sapiens
taaaacaatgaccac

SEQ ID NO: 1604549 - DNA, 15 bp, Homo sapiens
aaaacaatgaccact

SEQ ID NO: 1604550 - DNA, 15 bp, Homo sapiens
aaacaatgaccactg

SEQ ID NO: 1604551 - DNA, 15 bp, Homo sapiens
aacaatgaccactgg

SEQ ID NO: 1604552 - DNA, 15 bp, Homo sapiens
acaatgaccactggt

SEQ ID NO: 1604553 - DNA, 15 bp, Homo sapiens
caatgaccactggtc

SEQ ID NO: 1604554 - DNA, 15 bp, Homo sapiens
aatgaccactggtcc

SEQ ID NO: 1604555 - DNA, 15 bp, Homo sapiens
atgaccactggtcct

SEQ ID NO: 1604556 - DNA, 15 bp, Homo sapiens
tgaccactggtcctt

SEQ ID NO: 1604557 - DNA, 15 bp, Homo sapiens
gaccactggtccttt

SEQ ID NO: 1604558 - DNA, 15 bp, Homo sapiens
accactggtcctttt

SEQ ID NO: 1604559 - DNA, 15 bp, Homo sapiens
ccactggtccttttt

SEQ ID NO: 1604560 - DNA, 15 bp, Homo sapiens
cactggtccttttta

SEQ ID NO: 1604561 - DNA, 15 bp, Homo sapiens
actggtcctttttat

SEQ ID NO: 1604562 - DNA, 15 bp, Homo sapiens
ctggtcctttttatg

SEQ ID NO: 1604563 - DNA, 15 bp, Homo sapiens
tggtcctttttatgt

SEQ ID NO: 1604564 - DNA, 15 bp, Homo sapiens
ggtcctttttatgtg

SEQ ID NO: 1604565 - DNA, 15 bp, Homo sapiens
gtcctttttatgtgt

SEQ ID NO: 1604566 - DNA, 15 bp, Homo sapiens
tcctttttatgtgtt

SEQ ID NO: 1604567 - DNA, 15 bp, Homo sapiens
cctttttatgtgttt

SEQ ID NO: 1604568 - DNA, 15 bp, Homo sapiens
ctttttatgtgtttg

SEQ ID NO: 1604569 - DNA, 15 bp, Homo sapiens
tttttatgtgtttgc

SEQ ID NO: 1604570 - DNA, 15 bp, Homo sapiens
ttttatgtgtttgca

SEQ ID NO: 1604571 - DNA, 15 bp, Homo sapiens
tttatgtgtttgcat

SEQ ID NO: 1604572 - DNA, 15 bp, Homo sapiens
ttatgtgtttgcatt

SEQ ID NO: 1604573 - DNA, 15 bp, Homo sapiens
tatgtgtttgcatta

SEQ ID NO: 1604574 - DNA, 15 bp, Homo sapiens
atgtgtttgcattaa

SEQ ID NO: 1604575 - DNA, 15 bp, Homo sapiens
tgtgtttgcattaac

SEQ ID NO: 1604576 - DNA, 15 bp, Homo sapiens
gtgtttgcattaact

SEQ ID NO: 1604577 - DNA, 15 bp, Homo sapiens
tgtttgcattaactt

SEQ ID NO: 1604578 - DNA, 15 bp, Homo sapiens
gtttgcattaactta

SEQ ID NO: 1604579 - DNA, 15 bp, Homo sapiens
tttgcattaacttaa

SEQ ID NO: 1604580 - DNA, 15 bp, Homo sapiens
ttgcattaacttaat

SEQ ID NO: 1604581 - DNA, 15 bp, Homo sapiens
tgcattaacttaatt

SEQ ID NO: 1604582 - DNA, 15 bp, Homo sapiens
gcattaacttaattc

SEQ ID NO: 1604583 - DNA, 15 bp, Homo sapiens
cattaacttaattca

SEQ ID NO: 1604584 - DNA, 15 bp, Homo sapiens
attaacttaattcat

SEQ ID NO: 1604585 - DNA, 15 bp, Homo sapiens
ttaacttaattcata

SEQ ID NO: 1604586 - DNA, 15 bp, Homo sapiens
taacttaattcatat

SEQ ID NO: 1604587 - DNA, 15 bp, Homo sapiens
aacttaattcatatc

SEQ ID NO: 1604588 - DNA, 15 bp, Homo sapiens
acttaattcatatca

SEQ ID NO: 1604589 - DNA, 15 bp, Homo sapiens
cttaattcatatcaa

SEQ ID NO: 1604590 - DNA, 15 bp, Homo sapiens
ttaattcatatcaaa

SEQ ID NO: 1604591 - DNA, 15 bp, Homo sapiens
taattcatatcaaag

SEQ ID NO: 1604592 - DNA, 15 bp, Homo sapiens
aattcatatcaaagg

SEQ ID NO: 1604593 - DNA, 15 bp, Homo sapiens
attcatatcaaagga

SEQ ID NO: 1604594 - DNA, 15 bp, Homo sapiens
ttcatatcaaaggaa

SEQ ID NO: 1604595 - DNA, 15 bp, Homo sapiens
tcatatcaaaggaag

SEQ ID NO: 1604596 - DNA, 15 bp, Homo sapiens
catatcaaaggaaga

SEQ ID NO: 1604597 - DNA, 15 bp, Homo sapiens
atatcaaaggaagaa

SEQ ID NO: 1604598 - DNA, 15 bp, Homo sapiens
tatcaaaggaagaaa

SEQ ID NO: 1604599 - DNA, 15 bp, Homo sapiens
atcaaaggaagaaag

SEQ ID NO: 1604600 - DNA, 15 bp, Homo sapiens
tcaaaggaagaaaga

SEQ ID NO: 1604601 - DNA, 15 bp, Homo sapiens
caaaggaagaaagac

SEQ ID NO: 1604602 - DNA, 15 bp, Homo sapiens
aaaggaagaaagaca

SEQ ID NO: 1604603 - DNA, 15 bp, Homo sapiens
aaggaagaaagacac

SEQ ID NO: 1604604 - DNA, 15 bp, Homo sapiens
aggaagaaagacaca

SEQ ID NO: 1604605 - DNA, 15 bp, Homo sapiens
ggaagaaagacacac

SEQ ID NO: 1604606 - DNA, 15 bp, Homo sapiens
gaagaaagacacacc

SEQ ID NO: 1604607 - DNA, 15 bp, Homo sapiens
aagaaagacacacct

SEQ ID NO: 1604608 - DNA, 15 bp, Homo sapiens
agaaagacacacctg

SEQ ID NO: 1604609 - DNA, 15 bp, Homo sapiens
gaaagacacacctgg

SEQ ID NO: 1604610 - DNA, 15 bp, Homo sapiens
aaagacacacctgga

SEQ ID NO: 1604611 - DNA, 15 bp, Homo sapiens
aagacacacctggac

SEQ ID NO: 1604612 - DNA, 15 bp, Homo sapiens
agacacacctggaca

SEQ ID NO: 1604613 - DNA, 15 bp, Homo sapiens
gacacacctggacag

SEQ ID NO: 1604614 - DNA, 15 bp, Homo sapiens
acacacctggacaga

SEQ ID NO: 1604615 - DNA, 15 bp, Homo sapiens
cacacctggacagag

SEQ ID NO: 1604616 - DNA, 15 bp, Homo sapiens
acacctggacagagt

SEQ ID NO: 1604617 - DNA, 15 bp, Homo sapiens
cacctggacagagtt

SEQ ID NO: 1604618 - DNA, 15 bp, Homo sapiens
acctggacagagttt

SEQ ID NO: 1604619 - DNA, 15 bp, Homo sapiens
cctggacagagtttt

SEQ ID NO: 1604620 - DNA, 15 bp, Homo sapiens
ctggacagagttttg

SEQ ID NO: 1604621 - DNA, 15 bp, Homo sapiens
tggacagagttttgt

SEQ ID NO: 1604622 - DNA, 15 bp, Homo sapiens
ggacagagttttgtc

SEQ ID NO: 1604623 - DNA, 15 bp, Homo sapiens
gacagagttttgtca

SEQ ID NO: 1604624 - DNA, 15 bp, Homo sapiens
acagagttttgtcac

SEQ ID NO: 1604625 - DNA, 15 bp, Homo sapiens
cagagttttgtcaca

SEQ ID NO: 1604626 - DNA, 15 bp, Homo sapiens
agagttttgtcacaa

SEQ ID NO: 1604627 - DNA, 15 bp, Homo sapiens
gagttttgtcacaaa

SEQ ID NO: 1604628 - DNA, 15 bp, Homo sapiens
agttttgtcacaaac

SEQ ID NO: 1604629 - DNA, 15 bp, Homo sapiens
gttttgtcacaaacc

SEQ ID NO: 1604630 - DNA, 15 bp, Homo sapiens
ttttgtcacaaacca

SEQ ID NO: 1604631 - DNA, 15 bp, Homo sapiens
tttgtcacaaaccat

SEQ ID NO: 1604632 - DNA, 15 bp, Homo sapiens
ttgtcacaaaccatc

SEQ ID NO: 1604633 - DNA, 15 bp, Homo sapiens
tgtcacaaaccatcg

SEQ ID NO: 1604634 - DNA, 15 bp, Homo sapiens
gtcacaaaccatcgc

SEQ ID NO: 1604635 - DNA, 15 bp, Homo sapiens
tcacaaaccatcgcc

SEQ ID NO: 1604636 - DNA, 15 bp, Homo sapiens
cacaaaccatcgcct

SEQ ID NO: 1604637 - DNA, 15 bp, Homo sapiens
acaaaccatcgcctt

SEQ ID NO: 1604638 - DNA, 15 bp, Homo sapiens
caaaccatcgccttc

SEQ ID NO: 1604639 - DNA, 15 bp, Homo sapiens
aaaccatcgccttct

SEQ ID NO: 1604640 - DNA, 15 bp, Homo sapiens
aaccatcgccttcta

SEQ ID NO: 1604641 - DNA, 15 bp, Homo sapiens
accatcgccttctat

SEQ ID NO: 1604642 - DNA, 15 bp, Homo sapiens
ccatcgccttctatt

SEQ ID NO: 1604643 - DNA, 15 bp, Homo sapiens
catcgccttctattt

SEQ ID NO: 1604644 - DNA, 15 bp, Homo sapiens
atcgccttctatttc

SEQ ID NO: 1604645 - DNA, 15 bp, Homo sapiens
tcgccttctatttca

SEQ ID NO: 1604646 - DNA, 15 bp, Homo sapiens
cgccttctatttcag

SEQ ID NO: 1604647 - DNA, 15 bp, Homo sapiens
gccttctatttcagt

SEQ ID NO: 1604648 - DNA, 15 bp, Homo sapiens
ccttctatttcagtc

SEQ ID NO: 1604649 - DNA, 15 bp, Homo sapiens
cttctatttcagtct

SEQ ID NO: 1604650 - DNA, 15 bp, Homo sapiens
ttctatttcagtcta

SEQ ID NO: 1604651 - DNA, 15 bp, Homo sapiens
tctatttcagtctaa

SEQ ID NO: 1604652 - DNA, 15 bp, Homo sapiens
ctatttcagtctaat

SEQ ID NO: 1604653 - DNA, 15 bp, Homo sapiens
tatttcagtctaatt

SEQ ID NO: 1604654 - DNA, 15 bp, Homo sapiens
atttcagtctaattc

SEQ ID NO: 1604655 - DNA, 15 bp, Homo sapiens
tttcagtctaattca

SEQ ID NO: 1604656 - DNA, 15 bp, Homo sapiens
ttcagtctaattcag

SEQ ID NO: 1604657 - DNA, 15 bp, Homo sapiens
tcagtctaattcagt

SEQ ID NO: 1604658 - DNA, 15 bp, Homo sapiens
cagtctaattcagta

SEQ ID NO: 1604659 - DNA, 15 bp, Homo sapiens
agtctaattcagtat

SEQ ID NO: 1604660 - DNA, 15 bp, Homo sapiens
gtctaattcagtatt

SEQ ID NO: 1604661 - DNA, 15 bp, Homo sapiens
tctaattcagtattt

SEQ ID NO: 1604662 - DNA, 15 bp, Homo sapiens
ctaattcagtatttc

SEQ ID NO: 1604663 - DNA, 15 bp, Homo sapiens
taattcagtatttca

SEQ ID NO: 1604664 - DNA, 15 bp, Homo sapiens
aattcagtatttcaa

SEQ ID NO: 1604665 - DNA, 15 bp, Homo sapiens
attcagtatttcaaa

SEQ ID NO: 1604666 - DNA, 15 bp, Homo sapiens
ttcagtatttcaaag

SEQ ID NO: 1604667 - DNA, 15 bp, Homo sapiens
tcagtatttcaaaga

SEQ ID NO: 1604668 - DNA, 15 bp, Homo sapiens
cagtatttcaaagaa

SEQ ID NO: 1604669 - DNA, 15 bp, Homo sapiens
agtatttcaaagaaa

SEQ ID NO: 1604670 - DNA, 15 bp, Homo sapiens
gtatttcaaagaaaa

SEQ ID NO: 1604671 - DNA, 15 bp, Homo sapiens
tatttcaaagaaaat

SEQ ID NO: 1604672 - DNA, 15 bp, Homo sapiens
atttcaaagaaaatc

SEQ ID NO: 1604673 - DNA, 15 bp, Homo sapiens
tttcaaagaaaatca

SEQ ID NO: 1604674 - DNA, 15 bp, Homo sapiens
ttcaaagaaaatcat

SEQ ID NO: 1604675 - DNA, 15 bp, Homo sapiens
tcaaagaaaatcatt

SEQ ID NO: 1604676 - DNA, 15 bp, Homo sapiens
caaagaaaatcattt

SEQ ID NO: 1604677 - DNA, 15 bp, Homo sapiens
aaagaaaatcatttc

SEQ ID NO: 1604678 - DNA, 15 bp, Homo sapiens
aagaaaatcatttca

SEQ ID NO: 1604679 - DNA, 15 bp, Homo sapiens
agaaaatcatttcat

SEQ ID NO: 1604680 - DNA, 15 bp, Homo sapiens
gaaaatcatttcata

SEQ ID NO: 1604681 - DNA, 15 bp, Homo sapiens
aaaatcatttcatag

SEQ ID NO: 1604682 - DNA, 15 bp, Homo sapiens
aaatcatttcatagc

SEQ ID NO: 1604683 - DNA, 15 bp, Homo sapiens
aatcatttcatagcc

SEQ ID NO: 1604684 - DNA, 15 bp, Homo sapiens
atcatttcatagcca

SEQ ID NO: 1604685 - DNA, 15 bp, Homo sapiens
tcatttcatagccat

SEQ ID NO: 1604686 - DNA, 15 bp, Homo sapiens
catttcatagccatt

SEQ ID NO: 1604687 - DNA, 15 bp, Homo sapiens
atttcatagccattg

SEQ ID NO: 1604688 - DNA, 15 bp, Homo sapiens
tttcatagccattgt

SEQ ID NO: 1604689 - DNA, 15 bp, Homo sapiens
ttcatagccattgtc

SEQ ID NO: 1604690 - DNA, 15 bp, Homo sapiens
tcatagccattgtct

SEQ ID NO: 1604691 - DNA, 15 bp, Homo sapiens
catagccattgtctg

SEQ ID NO: 1604692 - DNA, 15 bp, Homo sapiens
atagccattgtctgc

SEQ ID NO: 1604693 - DNA, 15 bp, Homo sapiens
tagccattgtctgct

SEQ ID NO: 1604694 - DNA, 15 bp, Homo sapiens
agccattgtctgctc

SEQ ID NO: 1604695 - DNA, 15 bp, Homo sapiens
gccattgtctgctct

SEQ ID NO: 1604696 - DNA, 15 bp, Homo sapiens
ccattgtctgctctg

SEQ ID NO: 1604697 - DNA, 15 bp, Homo sapiens
cattgtctgctctgc

SEQ ID NO: 1604698 - DNA, 15 bp, Homo sapiens
attgtctgctctgca

SEQ ID NO: 1604699 - DNA, 15 bp, Homo sapiens
ttgtctgctctgcag

SEQ ID NO: 1604700 - DNA, 15 bp, Homo sapiens
tgtctgctctgcagg

SEQ ID NO: 1604701 - DNA, 15 bp, Homo sapiens
gtctgctctgcaggc

SEQ ID NO: 1604702 - DNA, 15 bp, Homo sapiens
tctgctctgcaggct

SEQ ID NO: 1604703 - DNA, 15 bp, Homo sapiens
ctgctctgcaggctc

SEQ ID NO: 1604704 - DNA, 15 bp, Homo sapiens
tgctctgcaggctca

SEQ ID NO: 1604705 - DNA, 15 bp, Homo sapiens
gctctgcaggctcaa

SEQ ID NO: 1604706 - DNA, 15 bp, Homo sapiens
ctctgcaggctcaac

SEQ ID NO: 1604707 - DNA, 15 bp, Homo sapiens
tctgcaggctcaaca

SEQ ID NO: 1604708 - DNA, 15 bp, Homo sapiens
ctgcaggctcaacag

SEQ ID NO: 1604709 - DNA, 15 bp, Homo sapiens
tgcaggctcaacaga

SEQ ID NO: 1604710 - DNA, 15 bp, Homo sapiens
gcaggctcaacagac

SEQ ID NO: 1604711 - DNA, 15 bp, Homo sapiens
caggctcaacagacc

SEQ ID NO: 1604712 - DNA, 15 bp, Homo sapiens
aggctcaacagacct

SEQ ID NO: 1604713 - DNA, 15 bp, Homo sapiens
ggctcaacagacctt

SEQ ID NO: 1604714 - DNA, 15 bp, Homo sapiens
gctcaacagaccttg

SEQ ID NO: 1604715 - DNA, 15 bp, Homo sapiens
ctcaacagaccttgt

SEQ ID NO: 1604716 - DNA, 15 bp, Homo sapiens
tcaacagaccttgtt

SEQ ID NO: 1604717 - DNA, 15 bp, Homo sapiens
caacagaccttgtta

SEQ ID NO: 1604718 - DNA, 15 bp, Homo sapiens
aacagaccttgttac

SEQ ID NO: 1604719 - DNA, 15 bp, Homo sapiens
acagaccttgttaca

SEQ ID NO: 1604720 - DNA, 15 bp, Homo sapiens
cagaccttgttacag

SEQ ID NO: 1604721 - DNA, 15 bp, Homo sapiens
agaccttgttacagg

SEQ ID NO: 1604722 - DNA, 15 bp, Homo sapiens
gaccttgttacaggc

SEQ ID NO: 1604723 - DNA, 15 bp, Homo sapiens
accttgttacaggcc

SEQ ID NO: 1604724 - DNA, 15 bp, Homo sapiens
ccttgttacaggcct

SEQ ID NO: 1604725 - DNA, 15 bp, Homo sapiens
cttgttacaggcctt

SEQ ID NO: 1604726 - DNA, 15 bp, Homo sapiens
ttgttacaggccttt

SEQ ID NO: 1604727 - DNA, 15 bp, Homo sapiens
tgttacaggcctttt

SEQ ID NO: 1604728 - DNA, 15 bp, Homo sapiens
gttacaggccttttt

SEQ ID NO: 1604729 - DNA, 15 bp, Homo sapiens
ttacaggcctttttg

SEQ ID NO: 1604730 - DNA, 15 bp, Homo sapiens
tacaggcctttttga

SEQ ID NO: 1604731 - DNA, 15 bp, Homo sapiens
acaggcctttttgag

SEQ ID NO: 1604732 - DNA, 15 bp, Homo sapiens
caggcctttttgagt

SEQ ID NO: 1604733 - DNA, 15 bp, Homo sapiens
aggcctttttgagtt

SEQ ID NO: 1604734 - DNA, 15 bp, Homo sapiens
ggcctttttgagttc

SEQ ID NO: 1604735 - DNA, 15 bp, Homo sapiens
gcctttttgagttct

SEQ ID NO: 1604736 - DNA, 15 bp, Homo sapiens
cctttttgagttctc

SEQ ID NO: 1604737 - DNA, 15 bp, Homo sapiens
ctttttgagttctcc

SEQ ID NO: 1604738 - DNA, 15 bp, Homo sapiens
tttttgagttctcca

SEQ ID NO: 1604739 - DNA, 15 bp, Homo sapiens
ttttgagttctccaa

SEQ ID NO: 1604740 - DNA, 15 bp, Homo sapiens
tttgagttctccaag

SEQ ID NO: 1604741 - DNA, 15 bp, Homo sapiens
ttgagttctccaagt

SEQ ID NO: 1604742 - DNA, 15 bp, Homo sapiens
tgagttctccaagtc

SEQ ID NO: 1604743 - DNA, 15 bp, Homo sapiens
gagttctccaagtcc

SEQ ID NO: 1604744 - DNA, 15 bp, Homo sapiens
agttctccaagtcca

SEQ ID NO: 1604745 - DNA, 15 bp, Homo sapiens
gttctccaagtccat

SEQ ID NO: 1604746 - DNA, 15 bp, Homo sapiens
ttctccaagtccatt

SEQ ID NO: 1604747 - DNA, 15 bp, Homo sapiens
tctccaagtccattc

SEQ ID NO: 1604748 - DNA, 15 bp, Homo sapiens
ctccaagtccattca

SEQ ID NO: 1604749 - DNA, 15 bp, Homo sapiens
tccaagtccattcat

SEQ ID NO: 1604750 - DNA, 15 bp, Homo sapiens
ccaagtccattcatt

SEQ ID NO: 1604751 - DNA, 15 bp, Homo sapiens
caagtccattcattt

SEQ ID NO: 1604752 - DNA, 15 bp, Homo sapiens
aagtccattcatttc

SEQ ID NO: 1604753 - DNA, 15 bp, Homo sapiens
agtccattcatttcc

SEQ ID NO: 1604754 - DNA, 15 bp, Homo sapiens
gtccattcatttccc

SEQ ID NO: 1604755 - DNA, 15 bp, Homo sapiens
tccattcatttcccc

SEQ ID NO: 1604756 - DNA, 15 bp, Homo sapiens
ccattcatttcccct

SEQ ID NO: 1604757 - DNA, 15 bp, Homo sapiens
cattcatttccccta

SEQ ID NO: 1604758 - DNA, 15 bp, Homo sapiens
attcatttcccctaa

SEQ ID NO: 1604759 - DNA, 15 bp, Homo sapiens
ttcatttcccctaaa

SEQ ID NO: 1604760 - DNA, 15 bp, Homo sapiens
tcatttcccctaaaa

SEQ ID NO: 1604761 - DNA, 15 bp, Homo sapiens
catttcccctaaaaa

SEQ ID NO: 1604762 - DNA, 15 bp, Homo sapiens
atttcccctaaaaaa

SEQ ID NO: 1604763 - DNA, 15 bp, Homo sapiens
tttcccctaaaaaat

SEQ ID NO: 1604764 - DNA, 15 bp, Homo sapiens
ttcccctaaaaaatc

SEQ ID NO: 1604765 - DNA, 15 bp, Homo sapiens
tcccctaaaaaatca

SEQ ID NO: 1604766 - DNA, 15 bp, Homo sapiens
cccctaaaaaatcat

SEQ ID NO: 1604767 - DNA, 15 bp, Homo sapiens
ccctaaaaaatcatt

SEQ ID NO: 1604768 - DNA, 15 bp, Homo sapiens
cctaaaaaatcattt

SEQ ID NO: 1604769 - DNA, 15 bp, Homo sapiens
ctaaaaaatcatttt

SEQ ID NO: 1604770 - DNA, 15 bp, Homo sapiens
taaaaaatcatttta

SEQ ID NO: 1604771 - DNA, 15 bp, Homo sapiens
aaaaaatcattttat

SEQ ID NO: 1604772 - DNA, 15 bp, Homo sapiens
aaaaatcattttata

SEQ ID NO: 1604773 - DNA, 15 bp, Homo sapiens
aaaatcattttatat

SEQ ID NO: 1604774 - DNA, 15 bp, Homo sapiens
aaatcattttatata

SEQ ID NO: 1604775 - DNA, 15 bp, Homo sapiens
aatcattttatatac

SEQ ID NO: 1604776 - DNA, 15 bp, Homo sapiens
atcattttatatacc

SEQ ID NO: 1604777 - DNA, 15 bp, Homo sapiens
tcattttatataccc

SEQ ID NO: 1604778 - DNA, 15 bp, Homo sapiens
cattttatatacccc

SEQ ID NO: 1604779 - DNA, 15 bp, Homo sapiens
attttatatacccca

SEQ ID NO: 1604780 - DNA, 15 bp, Homo sapiens
ttttatataccccaa

SEQ ID NO: 1604781 - DNA, 15 bp, Homo sapiens
tttatataccccaaa

SEQ ID NO: 1604782 - DNA, 15 bp, Homo sapiens
ttatataccccaaat

SEQ ID NO: 1604783 - DNA, 15 bp, Homo sapiens
tatataccccaaatt

SEQ ID NO: 1604784 - DNA, 15 bp, Homo sapiens
atataccccaaattg

SEQ ID NO: 1604785 - DNA, 15 bp, Homo sapiens
tataccccaaattgt

SEQ ID NO: 1604786 - DNA, 15 bp, Homo sapiens
ataccccaaattgtc

SEQ ID NO: 1604787 - DNA, 15 bp, Homo sapiens
taccccaaattgtca

SEQ ID NO: 1604788 - DNA, 15 bp, Homo sapiens
accccaaattgtcac

SEQ ID NO: 1604789 - DNA, 15 bp, Homo sapiens
ccccaaattgtcaca

SEQ ID NO: 1604790 - DNA, 15 bp, Homo sapiens
cccaaattgtcacat

SEQ ID NO: 1604791 - DNA, 15 bp, Homo sapiens
ccaaattgtcacatt

SEQ ID NO: 1604792 - DNA, 15 bp, Homo sapiens
caaattgtcacattt

SEQ ID NO: 1604793 - DNA, 15 bp, Homo sapiens
aaattgtcacattta

SEQ ID NO: 1604794 - DNA, 15 bp, Homo sapiens
aattgtcacatttac

SEQ ID NO: 1604795 - DNA, 15 bp, Homo sapiens
attgtcacatttacc

SEQ ID NO: 1604796 - DNA, 15 bp, Homo sapiens
ttgtcacatttaccc

SEQ ID NO: 1604797 - DNA, 15 bp, Homo sapiens
tgtcacatttacccc

SEQ ID NO: 1604798 - DNA, 15 bp, Homo sapiens
gtcacatttacccca

SEQ ID NO: 1604799 - DNA, 15 bp, Homo sapiens
tcacatttaccccac

SEQ ID NO: 1604800 - DNA, 15 bp, Homo sapiens
cacatttaccccact

SEQ ID NO: 1604801 - DNA, 15 bp, Homo sapiens
acatttaccccactt

SEQ ID NO: 1604802 - DNA, 15 bp, Homo sapiens
catttaccccacttc

SEQ ID NO: 1604803 - DNA, 15 bp, Homo sapiens
atttaccccacttct

SEQ ID NO: 1604804 - DNA, 15 bp, Homo sapiens
tttaccccacttctt

SEQ ID NO: 1604805 - DNA, 15 bp, Homo sapiens
ttaccccacttcttc

SEQ ID NO: 1604806 - DNA, 15 bp, Homo sapiens
taccccacttcttcc

SEQ ID NO: 1604807 - DNA, 15 bp, Homo sapiens
accccacttcttccc

SEQ ID NO: 1604808 - DNA, 15 bp, Homo sapiens
ccccacttcttccct

SEQ ID NO: 1604809 - DNA, 15 bp, Homo sapiens
cccacttcttcccta

SEQ ID NO: 1604810 - DNA, 15 bp, Homo sapiens
ccacttcttccctat

SEQ ID NO: 1604811 - DNA, 15 bp, Homo sapiens
cacttcttccctatg

SEQ ID NO: 1604812 - DNA, 15 bp, Homo sapiens
acttcttccctatga

SEQ ID NO: 1604813 - DNA, 15 bp, Homo sapiens
cttcttccctatgaa

SEQ ID NO: 1604814 - DNA, 15 bp, Homo sapiens
ttcttccctatgaaa

SEQ ID NO: 1604815 - DNA, 15 bp, Homo sapiens
tcttccctatgaaaa

SEQ ID NO: 1604816 - DNA, 15 bp, Homo sapiens
cttccctatgaaaag

SEQ ID NO: 1604817 - DNA, 15 bp, Homo sapiens
ttccctatgaaaagt

SEQ ID NO: 1604818 - DNA, 15 bp, Homo sapiens
tccctatgaaaagtg

SEQ ID NO: 1604819 - DNA, 15 bp, Homo sapiens
ccctatgaaaagtgg

SEQ ID NO: 1604820 - DNA, 15 bp, Homo sapiens
cctatgaaaagtggt

SEQ ID NO: 1604821 - DNA, 15 bp, Homo sapiens
ctatgaaaagtggta

SEQ ID NO: 1604822 - DNA, 15 bp, Homo sapiens
tatgaaaagtggtat

SEQ ID NO: 1604823 - DNA, 15 bp, Homo sapiens
atgaaaagtggtata

SEQ ID NO: 1604824 - DNA, 15 bp, Homo sapiens
tgaaaagtggtatat

SEQ ID NO: 1604825 - DNA, 15 bp, Homo sapiens
gaaaagtggtatata

SEQ ID NO: 1604826 - DNA, 15 bp, Homo sapiens
aaaagtggtatatag

SEQ ID NO: 1604827 - DNA, 15 bp, Homo sapiens
aaagtggtatatagg

SEQ ID NO: 1604828 - DNA, 15 bp, Homo sapiens
aagtggtatataggc

SEQ ID NO: 1604829 - DNA, 15 bp, Homo sapiens
agtggtatataggca

SEQ ID NO: 1604830 - DNA, 15 bp, Homo sapiens
gtggtatataggcat

SEQ ID NO: 1604831 - DNA, 15 bp, Homo sapiens
tggtatataggcatc

SEQ ID NO: 1604832 - DNA, 15 bp, Homo sapiens
ggtatataggcatct

SEQ ID NO: 1604833 - DNA, 15 bp, Homo sapiens
gtatataggcatctc

SEQ ID NO: 1604834 - DNA, 15 bp, Homo sapiens
tatataggcatctct

SEQ ID NO: 1604835 - DNA, 15 bp, Homo sapiens
atataggcatctcta

SEQ ID NO: 1604836 - DNA, 15 bp, Homo sapiens
tataggcatctctac

SEQ ID NO: 1604837 - DNA, 15 bp, Homo sapiens
ataggcatctctacc

SEQ ID NO: 1604838 - DNA, 15 bp, Homo sapiens
taggcatctctaccc

SEQ ID NO: 1604839 - DNA, 15 bp, Homo sapiens
aggcatctctacccc

SEQ ID NO: 1604840 - DNA, 15 bp, Homo sapiens
ggcatctctaccccc

SEQ ID NO: 1604841 - DNA, 15 bp, Homo sapiens
gcatctctaccccca

SEQ ID NO: 1604842 - DNA, 15 bp, Homo sapiens
catctctacccccat

SEQ ID NO: 1604843 - DNA, 15 bp, Homo sapiens
atctctacccccatc

SEQ ID NO: 1604844 - DNA, 15 bp, Homo sapiens
tctctacccccatcg

SEQ ID NO: 1604845 - DNA, 15 bp, Homo sapiens
ctctacccccatcgg

SEQ ID NO: 1604846 - DNA, 15 bp, Homo sapiens
tctacccccatcggg

SEQ ID NO: 1604847 - DNA, 15 bp, Homo sapiens
ctacccccatcgggt

SEQ ID NO: 1604848 - DNA, 15 bp, Homo sapiens
tacccccatcgggtt

SEQ ID NO: 1604849 - DNA, 15 bp, Homo sapiens
acccccatcgggtta

SEQ ID NO: 1604850 - DNA, 15 bp, Homo sapiens
cccccatcgggttat

SEQ ID NO: 1604851 - DNA, 15 bp, Homo sapiens
ccccatcgggttatt

SEQ ID NO: 1604852 - DNA, 15 bp, Homo sapiens
cccatcgggttattg

SEQ ID NO: 1604853 - DNA, 15 bp, Homo sapiens
ccatcgggttattgg

SEQ ID NO: 1604854 - DNA, 15 bp, Homo sapiens
catcgggttattggg

SEQ ID NO: 1604855 - DNA, 15 bp, Homo sapiens
atcgggttattgggt

SEQ ID NO: 1604856 - DNA, 15 bp, Homo sapiens
tcgggttattgggta

SEQ ID NO: 1604857 - DNA, 15 bp, Homo sapiens
cgggttattgggtaa

SEQ ID NO: 1604858 - DNA, 15 bp, Homo sapiens
gggttattgggtaat

SEQ ID NO: 1604859 - DNA, 15 bp, Homo sapiens
ggttattgggtaatc

SEQ ID NO: 1604860 - DNA, 15 bp, Homo sapiens
gttattgggtaatcc

SEQ ID NO: 1604861 - DNA, 15 bp, Homo sapiens
ttattgggtaatcct

SEQ ID NO: 1604862 - DNA, 15 bp, Homo sapiens
tattgggtaatcctt

SEQ ID NO: 1604863 - DNA, 15 bp, Homo sapiens
attgggtaatccttc

SEQ ID NO: 1604864 - DNA, 15 bp, Homo sapiens
ttgggtaatccttct

SEQ ID NO: 1604865 - DNA, 15 bp, Homo sapiens
tgggtaatccttctc

SEQ ID NO: 1604866 - DNA, 15 bp, Homo sapiens
gggtaatccttctcc

SEQ ID NO: 1604867 - DNA, 15 bp, Homo sapiens
ggtaatccttctcct

SEQ ID NO: 1604868 - DNA, 15 bp, Homo sapiens
gtaatccttctccta

SEQ ID NO: 1604869 - DNA, 15 bp, Homo sapiens
taatccttctcctac

SEQ ID NO: 1604870 - DNA, 15 bp, Homo sapiens
aatccttctcctaca

SEQ ID NO: 1604871 - DNA, 15 bp, Homo sapiens
atccttctcctacaa

SEQ ID NO: 1604872 - DNA, 15 bp, Homo sapiens
tccttctcctacaat

SEQ ID NO: 1604873 - DNA, 15 bp, Homo sapiens
ccttctcctacaatc

SEQ ID NO: 1604874 - DNA, 15 bp, Homo sapiens
cttctcctacaatcc

SEQ ID NO: 1604875 - DNA, 15 bp, Homo sapiens
ttctcctacaatccc

SEQ ID NO: 1604876 - DNA, 15 bp, Homo sapiens
tctcctacaatcccc

SEQ ID NO: 1604877 - DNA, 15 bp, Homo sapiens
ctcctacaatccccc

SEQ ID NO: 1604878 - DNA, 15 bp, Homo sapiens
tcctacaatccccct

SEQ ID NO: 1604879 - DNA, 15 bp, Homo sapiens
cctacaatcccccta

SEQ ID NO: 1604880 - DNA, 15 bp, Homo sapiens
ctacaatccccctat

SEQ ID NO: 1604881 - DNA, 15 bp, Homo sapiens
tacaatccccctatg

SEQ ID NO: 1604882 - DNA, 15 bp, Homo sapiens
acaatccccctatgc

SEQ ID NO: 1604883 - DNA, 15 bp, Homo sapiens
caatccccctatgct

SEQ ID NO: 1604884 - DNA, 15 bp, Homo sapiens
aatccccctatgcta

SEQ ID NO: 1604885 - DNA, 15 bp, Homo sapiens
atccccctatgctat

SEQ ID NO: 1604886 - DNA, 15 bp, Homo sapiens
tccccctatgctatg

SEQ ID NO: 1604887 - DNA, 15 bp, Homo sapiens
ccccctatgctatgc

SEQ ID NO: 1604888 - DNA, 15 bp, Homo sapiens
cccctatgctatgca

SEQ ID NO: 1604889 - DNA, 15 bp, Homo sapiens
ccctatgctatgcac

SEQ ID NO: 1604890 - DNA, 15 bp, Homo sapiens
cctatgctatgcaca

SEQ ID NO: 1604891 - DNA, 15 bp, Homo sapiens
ctatgctatgcacat

SEQ ID NO: 1604892 - DNA, 15 bp, Homo sapiens
tatgctatgcacatt

SEQ ID NO: 1604893 - DNA, 15 bp, Homo sapiens
atgctatgcacatta

SEQ ID NO: 1604894 - DNA, 15 bp, Homo sapiens
tgctatgcacattaa

SEQ ID NO: 1604895 - DNA, 15 bp, Homo sapiens
gctatgcacattaac

SEQ ID NO: 1604896 - DNA, 15 bp, Homo sapiens
ctatgcacattaaca

SEQ ID NO: 1604897 - DNA, 15 bp, Homo sapiens
tatgcacattaacat

SEQ ID NO: 1604898 - DNA, 15 bp, Homo sapiens
atgcacattaacata

SEQ ID NO: 1604899 - DNA, 15 bp, Homo sapiens
tgcacattaacataa

SEQ ID NO: 1604900 - DNA, 15 bp, Homo sapiens
gcacattaacataaa

SEQ ID NO: 1604901 - DNA, 15 bp, Homo sapiens
cacattaacataaaa

SEQ ID NO: 1604902 - DNA, 15 bp, Homo sapiens
acattaacataaaat

SEQ ID NO: 1604903 - DNA, 15 bp, Homo sapiens
cattaacataaaatt

SEQ ID NO: 1604904 - DNA, 15 bp, Homo sapiens
attaacataaaattt

SEQ ID NO: 1604905 - DNA, 15 bp, Homo sapiens
ttaacataaaatttg

SEQ ID NO: 1604906 - DNA, 15 bp, Homo sapiens
taacataaaatttgc

SEQ ID NO: 1604907 - DNA, 15 bp, Homo sapiens
aacataaaatttgca

SEQ ID NO: 1604908 - DNA, 15 bp, Homo sapiens
acataaaatttgcat

SEQ ID NO: 1604909 - DNA, 15 bp, Homo sapiens
cataaaatttgcatg

SEQ ID NO: 1604910 - DNA, 15 bp, Homo sapiens
ataaaatttgcatgc

SEQ ID NO: 1604911 - DNA, 15 bp, Homo sapiens
taaaatttgcatgcc

SEQ ID NO: 1604912 - DNA, 15 bp, Homo sapiens
aaaatttgcatgcct

SEQ ID NO: 1604913 - DNA, 15 bp, Homo sapiens
aaatttgcatgcctt

SEQ ID NO: 1604914 - DNA, 15 bp, Homo sapiens
aatttgcatgccttt

SEQ ID NO: 1604915 - DNA, 15 bp, Homo sapiens
atttgcatgcctttt

SEQ ID NO: 1604916 - DNA, 15 bp, Homo sapiens
tttgcatgccttttc

SEQ ID NO: 1604917 - DNA, 15 bp, Homo sapiens
ttgcatgccttttct

SEQ ID NO: 1604918 - DNA, 15 bp, Homo sapiens
tgcatgccttttctc

SEQ ID NO: 1604919 - DNA, 15 bp, Homo sapiens
gcatgccttttctcc

SEQ ID NO: 1604920 - DNA, 15 bp, Homo sapiens
catgccttttctcct

SEQ ID NO: 1604921 - DNA, 15 bp, Homo sapiens
atgccttttctccta

SEQ ID NO: 1604922 - DNA, 15 bp, Homo sapiens
tgccttttctcctat

SEQ ID NO: 1604923 - DNA, 15 bp, Homo sapiens
gccttttctcctatt

SEQ ID NO: 1604924 - DNA, 15 bp, Homo sapiens
ccttttctcctatta

SEQ ID NO: 1604925 - DNA, 15 bp, Homo sapiens
cttttctcctattaa

SEQ ID NO: 1604926 - DNA, 15 bp, Homo sapiens
ttttctcctattaat

SEQ ID NO: 1604927 - DNA, 15 bp, Homo sapiens
tttctcctattaatc

SEQ ID NO: 1604928 - DNA, 15 bp, Homo sapiens
ttctcctattaatct

SEQ ID NO: 1604929 - DNA, 15 bp, Homo sapiens
tctcctattaatctg

SEQ ID NO: 1604930 - DNA, 15 bp, Homo sapiens
ctcctattaatctgc

SEQ ID NO: 1604931 - DNA, 15 bp, Homo sapiens
tcctattaatctgct

SEQ ID NO: 1604932 - DNA, 15 bp, Homo sapiens
cctattaatctgctt

SEQ ID NO: 1604933 - DNA, 15 bp, Homo sapiens
ctattaatctgcttt

SEQ ID NO: 1604934 - DNA, 15 bp, Homo sapiens
tattaatctgctttg

SEQ ID NO: 1604935 - DNA, 15 bp, Homo sapiens
attaatctgctttgt

SEQ ID NO: 1604936 - DNA, 15 bp, Homo sapiens
ttaatctgctttgtc

SEQ ID NO: 1604937 - DNA, 15 bp, Homo sapiens
taatctgctttgtca

SEQ ID NO: 1604938 - DNA, 15 bp, Homo sapiens
aatctgctttgtcat

SEQ ID NO: 1604939 - DNA, 15 bp, Homo sapiens
atctgctttgtcatt

SEQ ID NO: 1604940 - DNA, 15 bp, Homo sapiens
tctgctttgtcattt

SEQ ID NO: 1604941 - DNA, 15 bp, Homo sapiens
ctgctttgtcatttg

SEQ ID NO: 1604942 - DNA, 15 bp, Homo sapiens
tgctttgtcatttga

SEQ ID NO: 1604943 - DNA, 15 bp, Homo sapiens
gctttgtcatttgat

SEQ ID NO: 1604944 - DNA, 15 bp, Homo sapiens
ctttgtcatttgatt

SEQ ID NO: 1604945 - DNA, 15 bp, Homo sapiens
tttgtcatttgattt

SEQ ID NO: 1604946 - DNA, 15 bp, Homo sapiens
ttgtcatttgatttt

SEQ ID NO: 1604947 - DNA, 15 bp, Homo sapiens
tgtcatttgattttc

SEQ ID NO: 1604948 - DNA, 15 bp, Homo sapiens
gtcatttgattttca

SEQ ID NO: 1604949 - DNA, 15 bp, Homo sapiens
tcatttgattttcaa

SEQ ID NO: 1604950 - DNA, 15 bp, Homo sapiens
catttgattttcaat

SEQ ID NO: 1604951 - DNA, 15 bp, Homo sapiens
atttgattttcaatg

SEQ ID NO: 1604952 - DNA, 15 bp, Homo sapiens
tttgattttcaatga

SEQ ID NO: 1604953 - DNA, 15 bp, Homo sapiens
ttgattttcaatgaa

SEQ ID NO: 1604954 - DNA, 15 bp, Homo sapiens
tgattttcaatgaac

SEQ ID NO: 1604955 - DNA, 15 bp, Homo sapiens
gattttcaatgaacc

SEQ ID NO: 1604956 - DNA, 15 bp, Homo sapiens
attttcaatgaacct

SEQ ID NO: 1604957 - DNA, 15 bp, Homo sapiens
ttttcaatgaacctt

SEQ ID NO: 1604958 - DNA, 15 bp, Homo sapiens
tttcaatgaaccttc

SEQ ID NO: 1604959 - DNA, 15 bp, Homo sapiens
ttcaatgaaccttca

SEQ ID NO: 1604960 - DNA, 15 bp, Homo sapiens
tcaatgaaccttcag

SEQ ID NO: 1604961 - DNA, 15 bp, Homo sapiens
caatgaaccttcaga

SEQ ID NO: 1604962 - DNA, 15 bp, Homo sapiens
aatgaaccttcagag

SEQ ID NO: 1604963 - DNA, 15 bp, Homo sapiens
atgaaccttcagagg

SEQ ID NO: 1604964 - DNA, 15 bp, Homo sapiens
tgaaccttcagaggg

SEQ ID NO: 1604965 - DNA, 15 bp, Homo sapiens
gaaccttcagagggc

SEQ ID NO: 1604966 - DNA, 15 bp, Homo sapiens
aaccttcagagggca

SEQ ID NO: 1604967 - DNA, 15 bp, Homo sapiens
accttcagagggcaa

SEQ ID NO: 1604968 - DNA, 15 bp, Homo sapiens
ccttcagagggcaaa

SEQ ID NO: 1604969 - DNA, 15 bp, Homo sapiens
cttcagagggcaaaa

SEQ ID NO: 1604970 - DNA, 15 bp, Homo sapiens
ttcagagggcaaaag

SEQ ID NO: 1604971 - DNA, 15 bp, Homo sapiens
tcagagggcaaaagg

SEQ ID NO: 1604972 - DNA, 15 bp, Homo sapiens
cagagggcaaaagga

SEQ ID NO: 1604973 - DNA, 15 bp, Homo sapiens
agagggcaaaaggaa

SEQ ID NO: 1604974 - DNA, 15 bp, Homo sapiens
gagggcaaaaggaaa

SEQ ID NO: 1604975 - DNA, 15 bp, Homo sapiens
agggcaaaaggaaag

SEQ ID NO: 1604976 - DNA, 15 bp, Homo sapiens
gggcaaaaggaaagt

SEQ ID NO: 1604977 - DNA, 15 bp, Homo sapiens
ggcaaaaggaaagtt

SEQ ID NO: 1604978 - DNA, 15 bp, Homo sapiens
gcaaaaggaaagttt

SEQ ID NO: 1604979 - DNA, 15 bp, Homo sapiens
caaaaggaaagtttt

SEQ ID NO: 1604980 - DNA, 15 bp, Homo sapiens
aaaaggaaagttttc

SEQ ID NO: 1604981 - DNA, 15 bp, Homo sapiens
aaaggaaagttttcc

SEQ ID NO: 1604982 - DNA, 15 bp, Homo sapiens
aaggaaagttttccc

SEQ ID NO: 1604983 - DNA, 15 bp, Homo sapiens
aggaaagttttccct

SEQ ID NO: 1604984 - DNA, 15 bp, Homo sapiens
ggaaagttttccctc

SEQ ID NO: 1604985 - DNA, 15 bp, Homo sapiens
gaaagttttccctca

SEQ ID NO: 1604986 - DNA, 15 bp, Homo sapiens
aaagttttccctcag

SEQ ID NO: 1604987 - DNA, 15 bp, Homo sapiens
aagttttccctcagc

SEQ ID NO: 1604988 - DNA, 15 bp, Homo sapiens
agttttccctcagct

SEQ ID NO: 1604989 - DNA, 15 bp, Homo sapiens
gttttccctcagctc

SEQ ID NO: 1604990 - DNA, 15 bp, Homo sapiens
ttttccctcagctcc

SEQ ID NO: 1604991 - DNA, 15 bp, Homo sapiens
tttccctcagctcca

SEQ ID NO: 1604992 - DNA, 15 bp, Homo sapiens
ttccctcagctccaa

SEQ ID NO: 1604993 - DNA, 15 bp, Homo sapiens
tccctcagctccaac

SEQ ID NO: 1604994 - DNA, 15 bp, Homo sapiens
ccctcagctccaaca

SEQ ID NO: 1604995 - DNA, 15 bp, Homo sapiens
cctcagctccaacag

SEQ ID NO: 1604996 - DNA, 15 bp, Homo sapiens
ctcagctccaacagt

SEQ ID NO: 1604997 - DNA, 15 bp, Homo sapiens
tcagctccaacagtt

SEQ ID NO: 1604998 - DNA, 15 bp, Homo sapiens
cagctccaacagttt

SEQ ID NO: 1604999 - DNA, 15 bp, Homo sapiens
agctccaacagtttt

SEQ ID NO: 1605000 - DNA, 15 bp, Homo sapiens
gctccaacagttttg

SEQ ID NO: 1605001 - DNA, 15 bp, Homo sapiens
ctccaacagttttgg

SEQ ID NO: 1605002 - DNA, 15 bp, Homo sapiens
tccaacagttttggc

SEQ ID NO: 1605003 - DNA, 15 bp, Homo sapiens
ccaacagttttggcc

SEQ ID NO: 1605004 - DNA, 15 bp, Homo sapiens
caacagttttggccc

SEQ ID NO: 1605005 - DNA, 15 bp, Homo sapiens
aacagttttggccca

SEQ ID NO: 1605006 - DNA, 15 bp, Homo sapiens
acagttttggcccag

SEQ ID NO: 1605007 - DNA, 15 bp, Homo sapiens
cagttttggcccagt

SEQ ID NO: 1605008 - DNA, 15 bp, Homo sapiens
agttttggcccagtg

SEQ ID NO: 1605009 - DNA, 15 bp, Homo sapiens
gttttggcccagtga

SEQ ID NO: 1605010 - DNA, 15 bp, Homo sapiens
ttttggcccagtgaa

SEQ ID NO: 1605011 - DNA, 15 bp, Homo sapiens
tttggcccagtgaac

SEQ ID NO: 1605012 - DNA, 15 bp, Homo sapiens
ttggcccagtgaaca

SEQ ID NO: 1605013 - DNA, 15 bp, Homo sapiens
tggcccagtgaacag

SEQ ID NO: 1605014 - DNA, 15 bp, Homo sapiens
ggcccagtgaacagg

SEQ ID NO: 1605015 - DNA, 15 bp, Homo sapiens
gcccagtgaacagga

SEQ ID NO: 1605016 - DNA, 15 bp, Homo sapiens
cccagtgaacaggac

SEQ ID NO: 1605017 - DNA, 15 bp, Homo sapiens
ccagtgaacaggaca

SEQ ID NO: 1605018 - DNA, 15 bp, Homo sapiens
cagtgaacaggacaa

SEQ ID NO: 1605019 - DNA, 15 bp, Homo sapiens
agtgaacaggacaac

SEQ ID NO: 1605020 - DNA, 15 bp, Homo sapiens
gtgaacaggacaacc

SEQ ID NO: 1605021 - DNA, 15 bp, Homo sapiens
tgaacaggacaacca

SEQ ID NO: 1605022 - DNA, 15 bp, Homo sapiens
gaacaggacaaccaa

SEQ ID NO: 1605023 - DNA, 15 bp, Homo sapiens
aacaggacaaccaaa

SEQ ID NO: 1605024 - DNA, 15 bp, Homo sapiens
acaggacaaccaaaa

SEQ ID NO: 1605025 - DNA, 15 bp, Homo sapiens
caggacaaccaaaac

SEQ ID NO: 1605026 - DNA, 15 bp, Homo sapiens
aggacaaccaaaact

SEQ ID NO: 1605027 - DNA, 15 bp, Homo sapiens
ggacaaccaaaactg

SEQ ID NO: 1605028 - DNA, 15 bp, Homo sapiens
gacaaccaaaactgc

SEQ ID NO: 1605029 - DNA, 15 bp, Homo sapiens
acaaccaaaactgct

SEQ ID NO: 1605030 - DNA, 15 bp, Homo sapiens
caaccaaaactgctc

SEQ ID NO: 1605031 - DNA, 15 bp, Homo sapiens
aaccaaaactgctct

SEQ ID NO: 1605032 - DNA, 15 bp, Homo sapiens
accaaaactgctctg

SEQ ID NO: 1605033 - DNA, 15 bp, Homo sapiens
ccaaaactgctctgc

SEQ ID NO: 1605034 - DNA, 15 bp, Homo sapiens
caaaactgctctgct

SEQ ID NO: 1605035 - DNA, 15 bp, Homo sapiens
aaaactgctctgctc

SEQ ID NO: 1605036 - DNA, 15 bp, Homo sapiens
aaactgctctgctct

SEQ ID NO: 1605037 - DNA, 15 bp, Homo sapiens
aactgctctgctctt

SEQ ID NO: 1605038 - DNA, 15 bp, Homo sapiens
actgctctgctcttc

SEQ ID NO: 1605039 - DNA, 15 bp, Homo sapiens
ctgctctgctcttcc

SEQ ID NO: 1605040 - DNA, 15 bp, Homo sapiens
tgctctgctcttccg

SEQ ID NO: 1605041 - DNA, 15 bp, Homo sapiens
gctctgctcttccga

SEQ ID NO: 1605042 - DNA, 15 bp, Homo sapiens
ctctgctcttccgaa

SEQ ID NO: 1605043 - DNA, 15 bp, Homo sapiens
tctgctcttccgaaa

SEQ ID NO: 1605044 - DNA, 15 bp, Homo sapiens
ctgctcttccgaaaa

SEQ ID NO: 1605045 - DNA, 15 bp, Homo sapiens
tgctcttccgaaaat

SEQ ID NO: 1605046 - DNA, 15 bp, Homo sapiens
gctcttccgaaaatt

SEQ ID NO: 1605047 - DNA, 15 bp, Homo sapiens
ctcttccgaaaattg

SEQ ID NO: 1605048 - DNA, 15 bp, Homo sapiens
tcttccgaaaattgc

SEQ ID NO: 1605049 - DNA, 15 bp, Homo sapiens
cttccgaaaattgca

SEQ ID NO: 1605050 - DNA, 15 bp, Homo sapiens
ttccgaaaattgcag

SEQ ID NO: 1605051 - DNA, 15 bp, Homo sapiens
tccgaaaattgcagt

SEQ ID NO: 1605052 - DNA, 15 bp, Homo sapiens
ccgaaaattgcagtc

SEQ ID NO: 1605053 - DNA, 15 bp, Homo sapiens
cgaaaattgcagtca

SEQ ID NO: 1605054 - DNA, 15 bp, Homo sapiens
gaaaattgcagtcag

SEQ ID NO: 1605055 - DNA, 15 bp, Homo sapiens
aaaattgcagtcagg

SEQ ID NO: 1605056 - DNA, 15 bp, Homo sapiens
aaattgcagtcaggg

SEQ ID NO: 1605057 - DNA, 15 bp, Homo sapiens
aattgcagtcaggga

SEQ ID NO: 1605058 - DNA, 15 bp, Homo sapiens
attgcagtcagggaa

SEQ ID NO: 1605059 - DNA, 15 bp, Homo sapiens
ttgcagtcagggaac

SEQ ID NO: 1605060 - DNA, 15 bp, Homo sapiens
tgcagtcagggaacc

SEQ ID NO: 1605061 - DNA, 15 bp, Homo sapiens
gcagtcagggaacct

SEQ ID NO: 1605062 - DNA, 15 bp, Homo sapiens
cagtcagggaacctg

SEQ ID NO: 1605063 - DNA, 15 bp, Homo sapiens
agtcagggaacctgg

SEQ ID NO: 1605064 - DNA, 15 bp, Homo sapiens
gtcagggaacctggg

SEQ ID NO: 1605065 - DNA, 15 bp, Homo sapiens
tcagggaacctggga

SEQ ID NO: 1605066 - DNA, 15 bp, Homo sapiens
cagggaacctgggac

SEQ ID NO: 1605067 - DNA, 15 bp, Homo sapiens
agggaacctgggacc

SEQ ID NO: 1605068 - DNA, 15 bp, Homo sapiens
gggaacctgggaccc

SEQ ID NO: 1605069 - DNA, 15 bp, Homo sapiens
ggaacctgggacccg

SEQ ID NO: 1605070 - DNA, 15 bp, Homo sapiens
gaacctgggacccgg

SEQ ID NO: 1605071 - DNA, 15 bp, Homo sapiens
aacctgggacccggc

SEQ ID NO: 1605072 - DNA, 15 bp, Homo sapiens
acctgggacccggca

SEQ ID NO: 1605073 - DNA, 15 bp, Homo sapiens
cctgggacccggcaa

SEQ ID NO: 1605074 - DNA, 15 bp, Homo sapiens
ctgggacccggcaag

SEQ ID NO: 1605075 - DNA, 15 bp, Homo sapiens
tgggacccggcaagc

SEQ ID NO: 1605076 - DNA, 15 bp, Homo sapiens
gggacccggcaagcc

SEQ ID NO: 1605077 - DNA, 15 bp, Homo sapiens
ggacccggcaagcca

SEQ ID NO: 1605078 - DNA, 15 bp, Homo sapiens
gacccggcaagccag

SEQ ID NO: 1605079 - DNA, 15 bp, Homo sapiens
acccggcaagccagc

SEQ ID NO: 1605080 - DNA, 15 bp, Homo sapiens
cccggcaagccagca

SEQ ID NO: 1605081 - DNA, 15 bp, Homo sapiens
ccggcaagccagcag

SEQ ID NO: 1605082 - DNA, 15 bp, Homo sapiens
cggcaagccagcaga

SEQ ID NO: 1605083 - DNA, 15 bp, Homo sapiens
ggcaagccagcagaa

SEQ ID NO: 1605084 - DNA, 15 bp, Homo sapiens
gcaagccagcagaag

SEQ ID NO: 1605085 - DNA, 15 bp, Homo sapiens
caagccagcagaagg

SEQ ID NO: 1605086 - DNA, 15 bp, Homo sapiens
aagccagcagaaggg

SEQ ID NO: 1605087 - DNA, 15 bp, Homo sapiens
agccagcagaagggt

SEQ ID NO: 1605088 - DNA, 15 bp, Homo sapiens
gccagcagaagggta

SEQ ID NO: 1605089 - DNA, 15 bp, Homo sapiens
ccagcagaagggtaa

SEQ ID NO: 1605090 - DNA, 15 bp, Homo sapiens
cagcagaagggtaag

SEQ ID NO: 1605091 - DNA, 15 bp, Homo sapiens
agcagaagggtaaga

SEQ ID NO: 1605092 - DNA, 15 bp, Homo sapiens
gcagaagggtaagaa

SEQ ID NO: 1605093 - DNA, 15 bp, Homo sapiens
cagaagggtaagaaa

SEQ ID NO: 1605094 - DNA, 15 bp, Homo sapiens
agaagggtaagaaat

SEQ ID NO: 1605095 - DNA, 15 bp, Homo sapiens
gaagggtaagaaatt

SEQ ID NO: 1605096 - DNA, 15 bp, Homo sapiens
aagggtaagaaattc

SEQ ID NO: 1605097 - DNA, 15 bp, Homo sapiens
agggtaagaaattct

SEQ ID NO: 1605098 - DNA, 15 bp, Homo sapiens
gggtaagaaattctt

SEQ ID NO: 1605099 - DNA, 15 bp, Homo sapiens
ggtaagaaattcttt

SEQ ID NO: 1605100 - DNA, 15 bp, Homo sapiens
gtaagaaattctttc

SEQ ID NO: 1605101 - DNA, 15 bp, Homo sapiens
taagaaattctttcc

SEQ ID NO: 1605102 - DNA, 15 bp, Homo sapiens
aagaaattctttcca

SEQ ID NO: 1605103 - DNA, 15 bp, Homo sapiens
agaaattctttccag

SEQ ID NO: 1605104 - DNA, 15 bp, Homo sapiens
gaaattctttccagt

SEQ ID NO: 1605105 - DNA, 15 bp, Homo sapiens
aaattctttccagtc

SEQ ID NO: 1605106 - DNA, 15 bp, Homo sapiens
aattctttccagtca

SEQ ID NO: 1605107 - DNA, 15 bp, Homo sapiens
attctttccagtcag

SEQ ID NO: 1605108 - DNA, 15 bp, Homo sapiens
ttctttccagtcaga

SEQ ID NO: 1605109 - DNA, 15 bp, Homo sapiens
tctttccagtcagaa

SEQ ID NO: 1605110 - DNA, 15 bp, Homo sapiens
ctttccagtcagaat

SEQ ID NO: 1605111 - DNA, 15 bp, Homo sapiens
tttccagtcagaatc

SEQ ID NO: 1605112 - DNA, 15 bp, Homo sapiens
ttccagtcagaatct

SEQ ID NO: 1605113 - DNA, 15 bp, Homo sapiens
tccagtcagaatctt

SEQ ID NO: 1605114 - DNA, 15 bp, Homo sapiens
ccagtcagaatcttg

SEQ ID NO: 1605115 - DNA, 15 bp, Homo sapiens
cagtcagaatcttgg

SEQ ID NO: 1605116 - DNA, 15 bp, Homo sapiens
agtcagaatcttggt

SEQ ID NO: 1605117 - DNA, 15 bp, Homo sapiens
gtcagaatcttggtc

SEQ ID NO: 1605118 - DNA, 15 bp, Homo sapiens
tcagaatcttggtct

SEQ ID NO: 1605119 - DNA, 15 bp, Homo sapiens
cagaatcttggtctg

SEQ ID NO: 1605120 - DNA, 15 bp, Homo sapiens
agaatcttggtctgt

SEQ ID NO: 1605121 - DNA, 15 bp, Homo sapiens
gaatcttggtctgtg

SEQ ID NO: 1605122 - DNA, 15 bp, Homo sapiens
aatcttggtctgtgt

SEQ ID NO: 1605123 - DNA, 15 bp, Homo sapiens
atcttggtctgtgtt

SEQ ID NO: 1605124 - DNA, 15 bp, Homo sapiens
tcttggtctgtgttt

SEQ ID NO: 1605125 - DNA, 15 bp, Homo sapiens
cttggtctgtgtttg

SEQ ID NO: 1605126 - DNA, 15 bp, Homo sapiens
ttggtctgtgtttgt

SEQ ID NO: 1605127 - DNA, 15 bp, Homo sapiens
tggtctgtgtttgtc

SEQ ID NO: 1605128 - DNA, 15 bp, Homo sapiens
ggtctgtgtttgtct

SEQ ID NO: 1605129 - DNA, 15 bp, Homo sapiens
gtctgtgtttgtctt

SEQ ID NO: 1605130 - DNA, 15 bp, Homo sapiens
tctgtgtttgtcttt

SEQ ID NO: 1605131 - DNA, 15 bp, Homo sapiens
ctgtgtttgtctttg

SEQ ID NO: 1605132 - DNA, 15 bp, Homo sapiens
tgtgtttgtctttgg

SEQ ID NO: 1605133 - DNA, 15 bp, Homo sapiens
gtgtttgtctttgga

SEQ ID NO: 1605134 - DNA, 15 bp, Homo sapiens
tgtttgtctttggaa

SEQ ID NO: 1605135 - DNA, 15 bp, Homo sapiens
gtttgtctttggaat

SEQ ID NO: 1605136 - DNA, 15 bp, Homo sapiens
tttgtctttggaatc

SEQ ID NO: 1605137 - DNA, 15 bp, Homo sapiens
ttgtctttggaatct

SEQ ID NO: 1605138 - DNA, 15 bp, Homo sapiens
tgtctttggaatctg

SEQ ID NO: 1605139 - DNA, 15 bp, Homo sapiens
gtctttggaatctgg

SEQ ID NO: 1605140 - DNA, 15 bp, Homo sapiens
tctttggaatctgga

SEQ ID NO: 1605141 - DNA, 15 bp, Homo sapiens
ctttggaatctggat

SEQ ID NO: 1605142 - DNA, 15 bp, Homo sapiens
tttggaatctggatg

SEQ ID NO: 1605143 - DNA, 15 bp, Homo sapiens
ttggaatctggatga

SEQ ID NO: 1605144 - DNA, 15 bp, Homo sapiens
tggaatctggatgag

SEQ ID NO: 1605145 - DNA, 15 bp, Homo sapiens
ggaatctggatgagc

SEQ ID NO: 1605146 - DNA, 15 bp, Homo sapiens
gaatctggatgagcg

SEQ ID NO: 1605147 - DNA, 15 bp, Homo sapiens
aatctggatgagcgg

SEQ ID NO: 1605148 - DNA, 15 bp, Homo sapiens
atctggatgagcgga

SEQ ID NO: 1605149 - DNA, 15 bp, Homo sapiens
tctggatgagcggat

SEQ ID NO: 1605150 - DNA, 15 bp, Homo sapiens
ctggatgagcggata

SEQ ID NO: 1605151 - DNA, 15 bp, Homo sapiens
tggatgagcggatag

SEQ ID NO: 1605152 - DNA, 15 bp, Homo sapiens
ggatgagcggatagt

SEQ ID NO: 1605153 - DNA, 15 bp, Homo sapiens
gatgagcggatagta

SEQ ID NO: 1605154 - DNA, 15 bp, Homo sapiens
atgagcggatagtaa

SEQ ID NO: 1605155 - DNA, 15 bp, Homo sapiens
tgagcggatagtaaa

SEQ ID NO: 1605156 - DNA, 15 bp, Homo sapiens
gagcggatagtaaaa

SEQ ID NO: 1605157 - DNA, 15 bp, Homo sapiens
agcggatagtaaaaa

SEQ ID NO: 1605158 - DNA, 15 bp, Homo sapiens
gcggatagtaaaaaa

SEQ ID NO: 1605159 - DNA, 15 bp, Homo sapiens
cggatagtaaaaaaa

SEQ ID NO: 1605160 - DNA, 15 bp, Homo sapiens
ggatagtaaaaaaac

SEQ ID NO: 1605161 - DNA, 15 bp, Homo sapiens
gatagtaaaaaaacc

SEQ ID NO: 1605162 - DNA, 15 bp, Homo sapiens
atagtaaaaaaacca

SEQ ID NO: 1605163 - DNA, 15 bp, Homo sapiens
tagtaaaaaaaccat

SEQ ID NO: 1605164 - DNA, 15 bp, Homo sapiens
agtaaaaaaaccatg

SEQ ID NO: 1605165 - DNA, 15 bp, Homo sapiens
gtaaaaaaaccatgt

SEQ ID NO: 1605166 - DNA, 15 bp, Homo sapiens
taaaaaaaccatgtt

SEQ ID NO: 1605167 - DNA, 15 bp, Homo sapiens
aaaaaaaccatgttt

SEQ ID NO: 1605168 - DNA, 15 bp, Homo sapiens
aaaaaaccatgtttg

SEQ ID NO: 1605169 - DNA, 15 bp, Homo sapiens
aaaaaccatgtttgt

SEQ ID NO: 1605170 - DNA, 15 bp, Homo sapiens
aaaaccatgtttgtc

SEQ ID NO: 1605171 - DNA, 15 bp, Homo sapiens
aaaccatgtttgtct

SEQ ID NO: 1605172 - DNA, 15 bp, Homo sapiens
aaccatgtttgtctc

SEQ ID NO: 1605173 - DNA, 15 bp, Homo sapiens
accatgtttgtctct

SEQ ID NO: 1605174 - DNA, 15 bp, Homo sapiens
ccatgtttgtctctc

SEQ ID NO: 1605175 - DNA, 15 bp, Homo sapiens
catgtttgtctctct

SEQ ID NO: 1605176 - DNA, 15 bp, Homo sapiens
atgtttgtctctctt

SEQ ID NO: 1605177 - DNA, 15 bp, Homo sapiens
tgtttgtctctcttt

SEQ ID NO: 1605178 - DNA, 15 bp, Homo sapiens
gtttgtctctctttc

SEQ ID NO: 1605179 - DNA, 15 bp, Homo sapiens
tttgtctctctttcc

SEQ ID NO: 1605180 - DNA, 15 bp, Homo sapiens
ttgtctctctttcca

SEQ ID NO: 1605181 - DNA, 15 bp, Homo sapiens
tgtctctctttccat

SEQ ID NO: 1605182 - DNA, 15 bp, Homo sapiens
gtctctctttccata

SEQ ID NO: 1605183 - DNA, 15 bp, Homo sapiens
tctctctttccatat

SEQ ID NO: 1605184 - DNA, 15 bp, Homo sapiens
ctctctttccatatg

SEQ ID NO: 1605185 - DNA, 15 bp, Homo sapiens
tctctttccatatgt

SEQ ID NO: 1605186 - DNA, 15 bp, Homo sapiens
ctctttccatatgta

SEQ ID NO: 1605187 - DNA, 15 bp, Homo sapiens
tctttccatatgtaa

SEQ ID NO: 1605188 - DNA, 15 bp, Homo sapiens
ctttccatatgtaac

SEQ ID NO: 1605189 - DNA, 15 bp, Homo sapiens
tttccatatgtaaca

SEQ ID NO: 1605190 - DNA, 15 bp, Homo sapiens
ttccatatgtaacat

SEQ ID NO: 1605191 - DNA, 15 bp, Homo sapiens
tccatatgtaacatt

SEQ ID NO: 1605192 - DNA, 15 bp, Homo sapiens
ccatatgtaacatta

SEQ ID NO: 1605193 - DNA, 15 bp, Homo sapiens
catatgtaacattaa

SEQ ID NO: 1605194 - DNA, 15 bp, Homo sapiens
atatgtaacattaac

SEQ ID NO: 1605195 - DNA, 15 bp, Homo sapiens
tatgtaacattaaca

SEQ ID NO: 1605196 - DNA, 15 bp, Homo sapiens
atgtaacattaacag

SEQ ID NO: 1605197 - DNA, 15 bp, Homo sapiens
tgtaacattaacagg

SEQ ID NO: 1605198 - DNA, 15 bp, Homo sapiens
gtaacattaacagga

SEQ ID NO: 1605199 - DNA, 15 bp, Homo sapiens
taacattaacaggag

SEQ ID NO: 1605200 - DNA, 15 bp, Homo sapiens
aacattaacaggaga

SEQ ID NO: 1605201 - DNA, 15 bp, Homo sapiens
acattaacaggagaa

SEQ ID NO: 1605202 - DNA, 15 bp, Homo sapiens
cattaacaggagaaa

SEQ ID NO: 1605203 - DNA, 15 bp, Homo sapiens
attaacaggagaaaa

SEQ ID NO: 1605204 - DNA, 15 bp, Homo sapiens
ttaacaggagaaaat

SEQ ID NO: 1605205 - DNA, 15 bp, Homo sapiens
taacaggagaaaatc

SEQ ID NO: 1605206 - DNA, 15 bp, Homo sapiens
aacaggagaaaatca

SEQ ID NO: 1605207 - DNA, 15 bp, Homo sapiens
acaggagaaaatcat

SEQ ID NO: 1605208 - DNA, 15 bp, Homo sapiens
caggagaaaatcatt

SEQ ID NO: 1605209 - DNA, 15 bp, Homo sapiens
aggagaaaatcattt

SEQ ID NO: 1605210 - DNA, 15 bp, Homo sapiens
ggagaaaatcatttt

SEQ ID NO: 1605211 - DNA, 15 bp, Homo sapiens
gagaaaatcattttt

SEQ ID NO: 1605212 - DNA, 15 bp, Homo sapiens
agaaaatcatttttg

SEQ ID NO: 1605213 - DNA, 15 bp, Homo sapiens
gaaaatcatttttga

SEQ ID NO: 1605214 - DNA, 15 bp, Homo sapiens
aaaatcatttttgac

SEQ ID NO: 1605215 - DNA, 15 bp, Homo sapiens
aaatcatttttgact

SEQ ID NO: 1605216 - DNA, 15 bp, Homo sapiens
aatcatttttgactg

SEQ ID NO: 1605217 - DNA, 15 bp, Homo sapiens
atcatttttgactgg

SEQ ID NO: 1605218 - DNA, 15 bp, Homo sapiens
tcatttttgactggt

SEQ ID NO: 1605219 - DNA, 15 bp, Homo sapiens
catttttgactggtc

SEQ ID NO: 1605220 - DNA, 15 bp, Homo sapiens
atttttgactggtct

SEQ ID NO: 1605221 - DNA, 15 bp, Homo sapiens
tttttgactggtctt

SEQ ID NO: 1605222 - DNA, 15 bp, Homo sapiens
ttttgactggtcttg

SEQ ID NO: 1605223 - DNA, 15 bp, Homo sapiens
tttgactggtcttgg

SEQ ID NO: 1605224 - DNA, 15 bp, Homo sapiens
ttgactggtcttggg

SEQ ID NO: 1605225 - DNA, 15 bp, Homo sapiens
tgactggtcttgggt

SEQ ID NO: 1605226 - DNA, 15 bp, Homo sapiens
gactggtcttgggtg

SEQ ID NO: 1605227 - DNA, 15 bp, Homo sapiens
actggtcttgggtgt

SEQ ID NO: 1605228 - DNA, 15 bp, Homo sapiens
ctggtcttgggtgta

SEQ ID NO: 1605229 - DNA, 15 bp, Homo sapiens
tggtcttgggtgtag

SEQ ID NO: 1605230 - DNA, 15 bp, Homo sapiens
ggtcttgggtgtagc

SEQ ID NO: 1605231 - DNA, 15 bp, Homo sapiens
gtcttgggtgtagca

SEQ ID NO: 1605232 - DNA, 15 bp, Homo sapiens
tcttgggtgtagcaa

SEQ ID NO: 1605233 - DNA, 15 bp, Homo sapiens
cttgggtgtagcaac

SEQ ID NO: 1605234 - DNA, 15 bp, Homo sapiens
ttgggtgtagcaact

SEQ ID NO: 1605235 - DNA, 15 bp, Homo sapiens
tgggtgtagcaactc

SEQ ID NO: 1605236 - DNA, 15 bp, Homo sapiens
gggtgtagcaactct

SEQ ID NO: 1605237 - DNA, 15 bp, Homo sapiens
ggtgtagcaactctg

SEQ ID NO: 1605238 - DNA, 15 bp, Homo sapiens
gtgtagcaactctgg

SEQ ID NO: 1605239 - DNA, 15 bp, Homo sapiens
tgtagcaactctggt

SEQ ID NO: 1605240 - DNA, 15 bp, Homo sapiens
gtagcaactctggtg

SEQ ID NO: 1605241 - DNA, 15 bp, Homo sapiens
tagcaactctggtgt

SEQ ID NO: 1605242 - DNA, 15 bp, Homo sapiens
agcaactctggtgta

SEQ ID NO: 1605243 - DNA, 15 bp, Homo sapiens
gcaactctggtgtat

SEQ ID NO: 1605244 - DNA, 15 bp, Homo sapiens
caactctggtgtatt

SEQ ID NO: 1605245 - DNA, 15 bp, Homo sapiens
aactctggtgtattt

SEQ ID NO: 1605246 - DNA, 15 bp, Homo sapiens
actctggtgtatttt

SEQ ID NO: 1605247 - DNA, 15 bp, Homo sapiens
ctctggtgtatttta

SEQ ID NO: 1605248 - DNA, 15 bp, Homo sapiens
tctggtgtattttat

SEQ ID NO: 1605249 - DNA, 15 bp, Homo sapiens
ctggtgtattttatt

SEQ ID NO: 1605250 - DNA, 15 bp, Homo sapiens
tggtgtattttattg

SEQ ID NO: 1605251 - DNA, 15 bp, Homo sapiens
ggtgtattttattgt

SEQ ID NO: 1605252 - DNA, 15 bp, Homo sapiens
gtgtattttattgta

SEQ ID NO: 1605253 - DNA, 15 bp, Homo sapiens
tgtattttattgtat

SEQ ID NO: 1605254 - DNA, 15 bp, Homo sapiens
gtattttattgtata

SEQ ID NO: 1605255 - DNA, 15 bp, Homo sapiens
tattttattgtatag

SEQ ID NO: 1605256 - DNA, 15 bp, Homo sapiens
attttattgtataga

SEQ ID NO: 1605257 - DNA, 15 bp, Homo sapiens
ttttattgtatagat

SEQ ID NO: 1605258 - DNA, 15 bp, Homo sapiens
tttattgtatagata

SEQ ID NO: 1605259 - DNA, 15 bp, Homo sapiens
ttattgtatagatat

SEQ ID NO: 1605260 - DNA, 15 bp, Homo sapiens
tattgtatagatatt

SEQ ID NO: 1605261 - DNA, 15 bp, Homo sapiens
attgtatagatattc

SEQ ID NO: 1605262 - DNA, 15 bp, Homo sapiens
ttgtatagatattca

SEQ ID NO: 1605263 - DNA, 15 bp, Homo sapiens
tgtatagatattcat

SEQ ID NO: 1605264 - DNA, 15 bp, Homo sapiens
gtatagatattcata

SEQ ID NO: 1605265 - DNA, 15 bp, Homo sapiens
tatagatattcatat

SEQ ID NO: 1605266 - DNA, 15 bp, Homo sapiens
atagatattcatatt

SEQ ID NO: 1605267 - DNA, 15 bp, Homo sapiens
tagatattcatattg

SEQ ID NO: 1605268 - DNA, 15 bp, Homo sapiens
agatattcatattgt

SEQ ID NO: 1605269 - DNA, 15 bp, Homo sapiens
gatattcatattgtc

SEQ ID NO: 1605270 - DNA, 15 bp, Homo sapiens
atattcatattgtct

SEQ ID NO: 1605271 - DNA, 15 bp, Homo sapiens
tattcatattgtctt

SEQ ID NO: 1605272 - DNA, 15 bp, Homo sapiens
attcatattgtctta

SEQ ID NO: 1605273 - DNA, 15 bp, Homo sapiens
ttcatattgtcttat

SEQ ID NO: 1605274 - DNA, 15 bp, Homo sapiens
tcatattgtcttatc

SEQ ID NO: 1605275 - DNA, 15 bp, Homo sapiens
catattgtcttatct

SEQ ID NO: 1605276 - DNA, 15 bp, Homo sapiens
atattgtcttatctt

SEQ ID NO: 1605277 - DNA, 15 bp, Homo sapiens
tattgtcttatcttt

SEQ ID NO: 1605278 - DNA, 15 bp, Homo sapiens
attgtcttatctttt

SEQ ID NO: 1605279 - DNA, 15 bp, Homo sapiens
ttgtcttatcttttt

SEQ ID NO: 1605280 - DNA, 15 bp, Homo sapiens
tgtcttatctttttt

SEQ ID NO: 1605281 - DNA, 15 bp, Homo sapiens
gtcttatcttttttc

SEQ ID NO: 1605282 - DNA, 15 bp, Homo sapiens
tcttatcttttttct

SEQ ID NO: 1605283 - DNA, 15 bp, Homo sapiens
cttatcttttttctc

SEQ ID NO: 1605284 - DNA, 15 bp, Homo sapiens
ttatcttttttctcc

SEQ ID NO: 1605285 - DNA, 15 bp, Homo sapiens
tatcttttttctccc

SEQ ID NO: 1605286 - DNA, 15 bp, Homo sapiens
atcttttttctccca

SEQ ID NO: 1605287 - DNA, 15 bp, Homo sapiens
tcttttttctcccag

SEQ ID NO: 1605288 - DNA, 15 bp, Homo sapiens
cttttttctcccaga

SEQ ID NO: 1605289 - DNA, 15 bp, Homo sapiens
ttttttctcccagaa

SEQ ID NO: 1605290 - DNA, 15 bp, Homo sapiens
tttttctcccagaaa

SEQ ID NO: 1605291 - DNA, 15 bp, Homo sapiens
ttttctcccagaaat

SEQ ID NO: 1605292 - DNA, 15 bp, Homo sapiens
tttctcccagaaata

SEQ ID NO: 1605293 - DNA, 15 bp, Homo sapiens
ttctcccagaaatag

SEQ ID NO: 1605294 - DNA, 15 bp, Homo sapiens
tctcccagaaataga

SEQ ID NO: 1605295 - DNA, 15 bp, Homo sapiens
ctcccagaaatagat

SEQ ID NO: 1605296 - DNA, 15 bp, Homo sapiens
tcccagaaatagatt

SEQ ID NO: 1605297 - DNA, 15 bp, Homo sapiens
cccagaaatagattt

SEQ ID NO: 1605298 - DNA, 15 bp, Homo sapiens
ccagaaatagatttt

SEQ ID NO: 1605299 - DNA, 15 bp, Homo sapiens
cagaaatagattttg

SEQ ID NO: 1605300 - DNA, 15 bp, Homo sapiens
agaaatagattttgt

SEQ ID NO: 1605301 - DNA, 15 bp, Homo sapiens
gaaatagattttgtt

SEQ ID NO: 1605302 - DNA, 15 bp, Homo sapiens
tagattttgtttctc

SEQ ID NO: 1605303 - DNA, 15 bp, Homo sapiens
agattttgtttctcc

SEQ ID NO: 1605304 - DNA, 15 bp, Homo sapiens
gattttgtttctcca

SEQ ID NO: 1605305 - DNA, 15 bp, Homo sapiens
attttgtttctccat

SEQ ID NO: 1605306 - DNA, 15 bp, Homo sapiens
ttttgtttctccatt

SEQ ID NO: 1605307 - DNA, 15 bp, Homo sapiens
tttgtttctccattg

SEQ ID NO: 1605308 - DNA, 15 bp, Homo sapiens
ttgtttctccattgt

SEQ ID NO: 1605309 - DNA, 15 bp, Homo sapiens
tgtttctccattgtc

SEQ ID NO: 1605310 - DNA, 15 bp, Homo sapiens
gtttctccattgtct

SEQ ID NO: 1605311 - DNA, 15 bp, Homo sapiens
tttctccattgtctt

SEQ ID NO: 1605312 - DNA, 15 bp, Homo sapiens
ttctccattgtcttt

SEQ ID NO: 1605313 - DNA, 15 bp, Homo sapiens
tctccattgtctttg

SEQ ID NO: 1605314 - DNA, 15 bp, Homo sapiens
ctccattgtctttgt

SEQ ID NO: 1605315 - DNA, 15 bp, Homo sapiens
tccattgtctttgtc

SEQ ID NO: 1605316 - DNA, 15 bp, Homo sapiens
ccattgtctttgtct

SEQ ID NO: 1605317 - DNA, 15 bp, Homo sapiens
cattgtctttgtctt

SEQ ID NO: 1605318 - DNA, 15 bp, Homo sapiens
attgtctttgtcttt

SEQ ID NO: 1605319 - DNA, 15 bp, Homo sapiens
ttgtctttgtcttta

SEQ ID NO: 1605320 - DNA, 15 bp, Homo sapiens
tgtctttgtctttat

SEQ ID NO: 1605321 - DNA, 15 bp, Homo sapiens
gtctttgtctttatg

SEQ ID NO: 1605322 - DNA, 15 bp, Homo sapiens
tctttgtctttatgt

SEQ ID NO: 1605323 - DNA, 15 bp, Homo sapiens
ctttgtctttatgtg

SEQ ID NO: 1605324 - DNA, 15 bp, Homo sapiens
tttgtctttatgtgt

SEQ ID NO: 1605325 - DNA, 15 bp, Homo sapiens
ttgtctttatgtgtt

SEQ ID NO: 1605326 - DNA, 15 bp, Homo sapiens
tgtctttatgtgttg

SEQ ID NO: 1605327 - DNA, 15 bp, Homo sapiens
gtctttatgtgttgt

SEQ ID NO: 1605328 - DNA, 15 bp, Homo sapiens
tctttatgtgttgtt

SEQ ID NO: 1605329 - DNA, 15 bp, Homo sapiens
ctttatgtgttgttt

SEQ ID NO: 1605330 - DNA, 15 bp, Homo sapiens
tttatgtgttgtttt

SEQ ID NO: 1605331 - DNA, 15 bp, Homo sapiens
ttatgtgttgttttg

SEQ ID NO: 1605332 - DNA, 15 bp, Homo sapiens
tatgtgttgttttgt

SEQ ID NO: 1605333 - DNA, 15 bp, Homo sapiens
atgtgttgttttgtc

SEQ ID NO: 1605334 - DNA, 15 bp, Homo sapiens
tgtgttgttttgtca

SEQ ID NO: 1605335 - DNA, 15 bp, Homo sapiens
gtgttgttttgtcat

SEQ ID NO: 1605336 - DNA, 15 bp, Homo sapiens
tgttgttttgtcata

SEQ ID NO: 1605337 - DNA, 15 bp, Homo sapiens
gttgttttgtcataa

SEQ ID NO: 1605338 - DNA, 15 bp, Homo sapiens
ttgttttgtcataaa

SEQ ID NO: 1605339 - DNA, 15 bp, Homo sapiens
tgttttgtcataaag

SEQ ID NO: 1605340 - DNA, 15 bp, Homo sapiens
gttttgtcataaaga

SEQ ID NO: 1605341 - DNA, 15 bp, Homo sapiens
ttttgtcataaagat

SEQ ID NO: 1605342 - DNA, 15 bp, Homo sapiens
tttgtcataaagatg

SEQ ID NO: 1605343 - DNA, 15 bp, Homo sapiens
ttgtcataaagatgg

SEQ ID NO: 1605344 - DNA, 15 bp, Homo sapiens
tgtcataaagatggg

SEQ ID NO: 1605345 - DNA, 15 bp, Homo sapiens
gtcataaagatgggt

SEQ ID NO: 1605346 - DNA, 15 bp, Homo sapiens
tcataaagatgggtg

SEQ ID NO: 1605347 - DNA, 15 bp, Homo sapiens
cataaagatgggtgt

SEQ ID NO: 1605348 - DNA, 15 bp, Homo sapiens
ataaagatgggtgtc

SEQ ID NO: 1605349 - DNA, 15 bp, Homo sapiens
taaagatgggtgtca

SEQ ID NO: 1605350 - DNA, 15 bp, Homo sapiens
aaagatgggtgtcat

SEQ ID NO: 1605351 - DNA, 15 bp, Homo sapiens
aagatgggtgtcata

SEQ ID NO: 1605352 - DNA, 15 bp, Homo sapiens
agatgggtgtcatag

SEQ ID NO: 1605353 - DNA, 15 bp, Homo sapiens
gatgggtgtcatagg

SEQ ID NO: 1605354 - DNA, 15 bp, Homo sapiens
atgggtgtcatagga

SEQ ID NO: 1605355 - DNA, 15 bp, Homo sapiens
tgggtgtcataggat

SEQ ID NO: 1605356 - DNA, 15 bp, Homo sapiens
gggtgtcataggata

SEQ ID NO: 1605357 - DNA, 15 bp, Homo sapiens
ggtgtcataggatag

SEQ ID NO: 1605358 - DNA, 15 bp, Homo sapiens
gtgtcataggataga

SEQ ID NO: 1605359 - DNA, 15 bp, Homo sapiens
tgtcataggatagaa

SEQ ID NO: 1605360 - DNA, 15 bp, Homo sapiens
gtcataggatagaac

SEQ ID NO: 1605361 - DNA, 15 bp, Homo sapiens
tcataggatagaaca

SEQ ID NO: 1605362 - DNA, 15 bp, Homo sapiens
cataggatagaacat

SEQ ID NO: 1605363 - DNA, 15 bp, Homo sapiens
ataggatagaacatg

SEQ ID NO: 1605364 - DNA, 15 bp, Homo sapiens
taggatagaacatgg

SEQ ID NO: 1605365 - DNA, 15 bp, Homo sapiens
aggatagaacatggg

SEQ ID NO: 1605366 - DNA, 15 bp, Homo sapiens
ggatagaacatgggt

SEQ ID NO: 1605367 - DNA, 15 bp, Homo sapiens
gatagaacatgggtc

SEQ ID NO: 1605368 - DNA, 15 bp, Homo sapiens
atagaacatgggtct

SEQ ID NO: 1605369 - DNA, 15 bp, Homo sapiens
tagaacatgggtcta

SEQ ID NO: 1605370 - DNA, 15 bp, Homo sapiens
agaacatgggtctaa

SEQ ID NO: 1605371 - DNA, 15 bp, Homo sapiens
gaacatgggtctaaa

SEQ ID NO: 1605372 - DNA, 15 bp, Homo sapiens
aacatgggtctaaag

SEQ ID NO: 1605373 - DNA, 15 bp, Homo sapiens
acatgggtctaaagt

SEQ ID NO: 1605374 - DNA, 15 bp, Homo sapiens
catgggtctaaagtc

SEQ ID NO: 1605375 - DNA, 15 bp, Homo sapiens
atgggtctaaagtct

SEQ ID NO: 1605376 - DNA, 15 bp, Homo sapiens
tgggtctaaagtctc

SEQ ID NO: 1605377 - DNA, 15 bp, Homo sapiens
gggtctaaagtctct

SEQ ID NO: 1605378 - DNA, 15 bp, Homo sapiens
ggtctaaagtctcta

SEQ ID NO: 1605379 - DNA, 15 bp, Homo sapiens
gtctaaagtctctat

SEQ ID NO: 1605380 - DNA, 15 bp, Homo sapiens
tctaaagtctctata

SEQ ID NO: 1605381 - DNA, 15 bp, Homo sapiens
ctaaagtctctataa

SEQ ID NO: 1605382 - DNA, 15 bp, Homo sapiens
taaagtctctataag

SEQ ID NO: 1605383 - DNA, 15 bp, Homo sapiens
aaagtctctataagc

SEQ ID NO: 1605384 - DNA, 15 bp, Homo sapiens
aagtctctataagcc

SEQ ID NO: 1605385 - DNA, 15 bp, Homo sapiens
agtctctataagccc

SEQ ID NO: 1605386 - DNA, 15 bp, Homo sapiens
gtctctataagcccc

SEQ ID NO: 1605387 - DNA, 15 bp, Homo sapiens
tctctataagcccct

SEQ ID NO: 1605388 - DNA, 15 bp, Homo sapiens
ctctataagcccctt

SEQ ID NO: 1605389 - DNA, 15 bp, Homo sapiens
tctataagccccttg

SEQ ID NO: 1605390 - DNA, 15 bp, Homo sapiens
ctataagccccttgt

SEQ ID NO: 1605391 - DNA, 15 bp, Homo sapiens
tataagccccttgtc

SEQ ID NO: 1605392 - DNA, 15 bp, Homo sapiens
ataagccccttgtct

SEQ ID NO: 1605393 - DNA, 15 bp, Homo sapiens
taagccccttgtctg

SEQ ID NO: 1605394 - DNA, 15 bp, Homo sapiens
aagccccttgtctga

SEQ ID NO: 1605395 - DNA, 15 bp, Homo sapiens
agccccttgtctgag

SEQ ID NO: 1605396 - DNA, 15 bp, Homo sapiens
gccccttgtctgagc

SEQ ID NO: 1605397 - DNA, 15 bp, Homo sapiens
ccccttgtctgagct

SEQ ID NO: 1605398 - DNA, 15 bp, Homo sapiens
cccttgtctgagctg

SEQ ID NO: 1605399 - DNA, 15 bp, Homo sapiens
ccttgtctgagctgg

SEQ ID NO: 1605400 - DNA, 15 bp, Homo sapiens
cttgtctgagctggc

SEQ ID NO: 1605401 - DNA, 15 bp, Homo sapiens
ttgtctgagctggcc

SEQ ID NO: 1605402 - DNA, 15 bp, Homo sapiens
tgtctgagctggccc

SEQ ID NO: 1605403 - DNA, 15 bp, Homo sapiens
gtctgagctggcccc

SEQ ID NO: 1605404 - DNA, 15 bp, Homo sapiens
tctgagctggccccc

SEQ ID NO: 1605405 - DNA, 15 bp, Homo sapiens
ctgagctggcccccg

SEQ ID NO: 1605406 - DNA, 15 bp, Homo sapiens
tgagctggcccccga

SEQ ID NO: 1605407 - DNA, 15 bp, Homo sapiens
gagctggcccccgag

SEQ ID NO: 1605408 - DNA, 15 bp, Homo sapiens
agctggcccccgaga

SEQ ID NO: 1605409 - DNA, 15 bp, Homo sapiens
gctggcccccgagag

SEQ ID NO: 1605410 - DNA, 15 bp, Homo sapiens
ctggcccccgagaga

SEQ ID NO: 1605411 - DNA, 15 bp, Homo sapiens
tggcccccgagagac

SEQ ID NO: 1605412 - DNA, 15 bp, Homo sapiens
ggcccccgagagact

SEQ ID NO: 1605413 - DNA, 15 bp, Homo sapiens
gcccccgagagactg

SEQ ID NO: 1605414 - DNA, 15 bp, Homo sapiens
cccccgagagactgg

SEQ ID NO: 1605415 - DNA, 15 bp, Homo sapiens
ccccgagagactggt

SEQ ID NO: 1605416 - DNA, 15 bp, Homo sapiens
cccgagagactggtg

SEQ ID NO: 1605417 - DNA, 15 bp, Homo sapiens
ccgagagactggtga

SEQ ID NO: 1605418 - DNA, 15 bp, Homo sapiens
cgagagactggtgat

SEQ ID NO: 1605419 - DNA, 15 bp, Homo sapiens
gagagactggtgatg

SEQ ID NO: 1605420 - DNA, 15 bp, Homo sapiens
agagactggtgatgt

SEQ ID NO: 1605421 - DNA, 15 bp, Homo sapiens
gagactggtgatgtt

SEQ ID NO: 1605422 - DNA, 15 bp, Homo sapiens
agactggtgatgttt

SEQ ID NO: 1605423 - DNA, 15 bp, Homo sapiens
gactggtgatgttta

SEQ ID NO: 1605424 - DNA, 15 bp, Homo sapiens
actggtgatgtttac

SEQ ID NO: 1605425 - DNA, 15 bp, Homo sapiens
ctggtgatgtttaca

SEQ ID NO: 1605426 - DNA, 15 bp, Homo sapiens
tggtgatgtttacag

SEQ ID NO: 1605427 - DNA, 15 bp, Homo sapiens
ggtgatgtttacagt

SEQ ID NO: 1605428 - DNA, 15 bp, Homo sapiens
gtgatgtttacagtt

SEQ ID NO: 1605429 - DNA, 15 bp, Homo sapiens
tgatgtttacagttt

SEQ ID NO: 1605430 - DNA, 15 bp, Homo sapiens
gatgtttacagtttc

SEQ ID NO: 1605431 - DNA, 15 bp, Homo sapiens
atgtttacagtttca

SEQ ID NO: 1605432 - DNA, 15 bp, Homo sapiens
tgtttacagtttcat

SEQ ID NO: 1605433 - DNA, 15 bp, Homo sapiens
gtttacagtttcatc

SEQ ID NO: 1605434 - DNA, 15 bp, Homo sapiens
tttacagtttcatca

SEQ ID NO: 1605435 - DNA, 15 bp, Homo sapiens
ttacagtttcatcag

SEQ ID NO: 1605436 - DNA, 15 bp, Homo sapiens
tacagtttcatcaga

SEQ ID NO: 1605437 - DNA, 15 bp, Homo sapiens
acagtttcatcagac

SEQ ID NO: 1605438 - DNA, 15 bp, Homo sapiens
cagtttcatcagacc

SEQ ID NO: 1605439 - DNA, 15 bp, Homo sapiens
agtttcatcagacct

SEQ ID NO: 1605440 - DNA, 15 bp, Homo sapiens
gtttcatcagaccta

SEQ ID NO: 1605441 - DNA, 15 bp, Homo sapiens
tttcatcagacctat

SEQ ID NO: 1605442 - DNA, 15 bp, Homo sapiens
ttcatcagacctatg

SEQ ID NO: 1605443 - DNA, 15 bp, Homo sapiens
tcatcagacctatgt

SEQ ID NO: 1605444 - DNA, 15 bp, Homo sapiens
catcagacctatgta

SEQ ID NO: 1605445 - DNA, 15 bp, Homo sapiens
atcagacctatgtac

SEQ ID NO: 1605446 - DNA, 15 bp, Homo sapiens
tcagacctatgtaca

SEQ ID NO: 1605447 - DNA, 15 bp, Homo sapiens
cagacctatgtacaa

SEQ ID NO: 1605448 - DNA, 15 bp, Homo sapiens
agacctatgtacaat

SEQ ID NO: 1605449 - DNA, 15 bp, Homo sapiens
gacctatgtacaatt

SEQ ID NO: 1605450 - DNA, 15 bp, Homo sapiens
acctatgtacaattg

SEQ ID NO: 1605451 - DNA, 15 bp, Homo sapiens
cctatgtacaattgt

SEQ ID NO: 1605452 - DNA, 15 bp, Homo sapiens
ctatgtacaattgta

SEQ ID NO: 1605453 - DNA, 15 bp, Homo sapiens
tatgtacaattgtac

SEQ ID NO: 1605454 - DNA, 15 bp, Homo sapiens
atgtacaattgtacg

SEQ ID NO: 1605455 - DNA, 15 bp, Homo sapiens
tgtacaattgtacgt

SEQ ID NO: 1605456 - DNA, 15 bp, Homo sapiens
gtacaattgtacgtg

SEQ ID NO: 1605457 - DNA, 15 bp, Homo sapiens
tacaattgtacgtgc

SEQ ID NO: 1605458 - DNA, 15 bp, Homo sapiens
acaattgtacgtgct

SEQ ID NO: 1605459 - DNA, 15 bp, Homo sapiens
caattgtacgtgctg

SEQ ID NO: 1605460 - DNA, 15 bp, Homo sapiens
aattgtacgtgctgt

SEQ ID NO: 1605461 - DNA, 15 bp, Homo sapiens
attgtacgtgctgtg

SEQ ID NO: 1605462 - DNA, 15 bp, Homo sapiens
ttgtacgtgctgtga

SEQ ID NO: 1605463 - DNA, 15 bp, Homo sapiens
tgtacgtgctgtgag

SEQ ID NO: 1605464 - DNA, 15 bp, Homo sapiens
gtacgtgctgtgagt

SEQ ID NO: 1605465 - DNA, 15 bp, Homo sapiens
tacgtgctgtgagtc

SEQ ID NO: 1605466 - DNA, 15 bp, Homo sapiens
acgtgctgtgagtcc

SEQ ID NO: 1605467 - DNA, 15 bp, Homo sapiens
cgtgctgtgagtccc

SEQ ID NO: 1605468 - DNA, 15 bp, Homo sapiens
gtgctgtgagtcccc

SEQ ID NO: 1605469 - DNA, 15 bp, Homo sapiens
tgctgtgagtccccg

SEQ ID NO: 1605470 - DNA, 15 bp, Homo sapiens
gctgtgagtccccga

SEQ ID NO: 1605471 - DNA, 15 bp, Homo sapiens
ctgtgagtccccgaa

SEQ ID NO: 1605472 - DNA, 15 bp, Homo sapiens
tgtgagtccccgaaa

SEQ ID NO: 1605473 - DNA, 15 bp, Homo sapiens
gtgagtccccgaaat

SEQ ID NO: 1605474 - DNA, 15 bp, Homo sapiens
tgagtccccgaaata

SEQ ID NO: 1605475 - DNA, 15 bp, Homo sapiens
gagtccccgaaataa

SEQ ID NO: 1605476 - DNA, 15 bp, Homo sapiens
agtccccgaaataaa

SEQ ID NO: 1605477 - DNA, 15 bp, Homo sapiens
gtccccgaaataaaa

SEQ ID NO: 1605478 - DNA, 15 bp, Homo sapiens
tccccgaaataaaaa

SEQ ID NO: 1605479 - DNA, 15 bp, Homo sapiens
ccccgaaataaaaac

SEQ ID NO: 1605480 - DNA, 15 bp, Homo sapiens
cccgaaataaaaact

SEQ ID NO: 1605481 - DNA, 15 bp, Homo sapiens
ccgaaataaaaactg

SEQ ID NO: 1605482 - DNA, 15 bp, Homo sapiens
cgaaataaaaactgg

SEQ ID NO: 1605483 - DNA, 15 bp, Homo sapiens
gaaataaaaactgga

SEQ ID NO: 1605484 - DNA, 15 bp, Homo sapiens
aaataaaaactggat

SEQ ID NO: 1605485 - DNA, 15 bp, Homo sapiens
aataaaaactggatg

SEQ ID NO: 1605486 - DNA, 15 bp, Homo sapiens
ataaaaactggatga

SEQ ID NO: 1605487 - DNA, 15 bp, Homo sapiens
taaaaactggatgag

SEQ ID NO: 1605488 - DNA, 15 bp, Homo sapiens
aaaaactggatgagg

SEQ ID NO: 1605489 - DNA, 15 bp, Homo sapiens
aaaactggatgaggg

SEQ ID NO: 1605490 - DNA, 15 bp, Homo sapiens
aaactggatgagggt

SEQ ID NO: 1605491 - DNA, 15 bp, Homo sapiens
aactggatgagggtc

SEQ ID NO: 1605492 - DNA, 15 bp, Homo sapiens
actggatgagggtcc

SEQ ID NO: 1605493 - DNA, 15 bp, Homo sapiens
ctggatgagggtccc

SEQ ID NO: 1605494 - DNA, 15 bp, Homo sapiens
tggatgagggtcccc

SEQ ID NO: 1605495 - DNA, 15 bp, Homo sapiens
ggatgagggtcccct

SEQ ID NO: 1605496 - DNA, 15 bp, Homo sapiens
gatgagggtcccctt

SEQ ID NO: 1605497 - DNA, 15 bp, Homo sapiens
atgagggtcccctta

SEQ ID NO: 1605498 - DNA, 15 bp, Homo sapiens
tgagggtccccttat

SEQ ID NO: 1605499 - DNA, 15 bp, Homo sapiens
gagggtccccttata

SEQ ID NO: 1605500 - DNA, 15 bp, Homo sapiens
agggtccccttatat

SEQ ID NO: 1605501 - DNA, 15 bp, Homo sapiens
gggtccccttatatc

SEQ ID NO: 1605502 - DNA, 15 bp, Homo sapiens
ggtccccttatatct

SEQ ID NO: 1605503 - DNA, 15 bp, Homo sapiens
gtccccttatatctt

SEQ ID NO: 1605504 - DNA, 15 bp, Homo sapiens
tccccttatatcttg

SEQ ID NO: 1605505 - DNA, 15 bp, Homo sapiens
ccccttatatcttgt

SEQ ID NO: 1605506 - DNA, 15 bp, Homo sapiens
cccttatatcttgtt

SEQ ID NO: 1605507 - DNA, 15 bp, Homo sapiens
ccttatatcttgttt

SEQ ID NO: 1605508 - DNA, 15 bp, Homo sapiens
cttatatcttgtttt

SEQ ID NO: 1605509 - DNA, 15 bp, Homo sapiens
ttatatcttgttttg

SEQ ID NO: 1605510 - DNA, 15 bp, Homo sapiens
tatatcttgttttgt

SEQ ID NO: 1605511 - DNA, 15 bp, Homo sapiens
atatcttgttttgtg

SEQ ID NO: 1605512 - DNA, 15 bp, Homo sapiens
tatcttgttttgtgt

SEQ ID NO: 1605513 - DNA, 15 bp, Homo sapiens
atcttgttttgtgtt

SEQ ID NO: 1605514 - DNA, 15 bp, Homo sapiens
tcttgttttgtgttt

SEQ ID NO: 1605515 - DNA, 15 bp, Homo sapiens
cttgttttgtgtttg

SEQ ID NO: 1605516 - DNA, 15 bp, Homo sapiens
ttgttttgtgtttgt

SEQ ID NO: 1605517 - DNA, 15 bp, Homo sapiens
tgttttgtgtttgtg

SEQ ID NO: 1605518 - DNA, 15 bp, Homo sapiens
gttttgtgtttgtga

SEQ ID NO: 1605519 - DNA, 15 bp, Homo sapiens
ttttgtgtttgtgag

SEQ ID NO: 1605520 - DNA, 15 bp, Homo sapiens
tttgtgtttgtgaga

SEQ ID NO: 1605521 - DNA, 15 bp, Homo sapiens
ttgtgtttgtgagaa

SEQ ID NO: 1605522 - DNA, 15 bp, Homo sapiens
tgtgtttgtgagaac

SEQ ID NO: 1605523 - DNA, 15 bp, Homo sapiens
gtgtttgtgagaact

SEQ ID NO: 1605524 - DNA, 15 bp, Homo sapiens
tgtttgtgagaactt

SEQ ID NO: 1605525 - DNA, 15 bp, Homo sapiens
gtttgtgagaacttg

SEQ ID NO: 1605526 - DNA, 15 bp, Homo sapiens
tttgtgagaacttga

SEQ ID NO: 1605527 - DNA, 15 bp, Homo sapiens
ttgtgagaacttgac

SEQ ID NO: 1605528 - DNA, 15 bp, Homo sapiens
tgtgagaacttgact

SEQ ID NO: 1605529 - DNA, 15 bp, Homo sapiens
gtgagaacttgactt

SEQ ID NO: 1605530 - DNA, 15 bp, Homo sapiens
tgagaacttgacttg

SEQ ID NO: 1605531 - DNA, 15 bp, Homo sapiens
gagaacttgacttgt

SEQ ID NO: 1605532 - DNA, 15 bp, Homo sapiens
agaacttgacttgtt

SEQ ID NO: 1605533 - DNA, 15 bp, Homo sapiens
gaacttgacttgttt

SEQ ID NO: 1605534 - DNA, 15 bp, Homo sapiens
aacttgacttgtttg

SEQ ID NO: 1605535 - DNA, 15 bp, Homo sapiens
acttgacttgtttgt

SEQ ID NO: 1605536 - DNA, 15 bp, Homo sapiens
cttgacttgtttgtt

SEQ ID NO: 1605537 - DNA, 15 bp, Homo sapiens
ttgacttgtttgtta

SEQ ID NO: 1605538 - DNA, 15 bp, Homo sapiens
tgacttgtttgttac

SEQ ID NO: 1605539 - DNA, 15 bp, Homo sapiens
gacttgtttgttact

SEQ ID NO: 1605540 - DNA, 15 bp, Homo sapiens
acttgtttgttactg

SEQ ID NO: 1605541 - DNA, 15 bp, Homo sapiens
cttgtttgttactgg

SEQ ID NO: 1605542 - DNA, 15 bp, Homo sapiens
ttgtttgttactggt

SEQ ID NO: 1605543 - DNA, 15 bp, Homo sapiens
tgtttgttactggtg

SEQ ID NO: 1605544 - DNA, 15 bp, Homo sapiens
gtttgttactggtgg

SEQ ID NO: 1605545 - DNA, 15 bp, Homo sapiens
tttgttactggtggg

SEQ ID NO: 1605546 - DNA, 15 bp, Homo sapiens
ttgttactggtggga

SEQ ID NO: 1605547 - DNA, 15 bp, Homo sapiens
tgttactggtgggag

SEQ ID NO: 1605548 - DNA, 15 bp, Homo sapiens
gttactggtgggagc

SEQ ID NO: 1605549 - DNA, 15 bp, Homo sapiens
ttactggtgggagca

SEQ ID NO: 1605550 - DNA, 15 bp, Homo sapiens
tactggtgggagcac

SEQ ID NO: 1605551 - DNA, 15 bp, Homo sapiens
actggtgggagcact

SEQ ID NO: 1605552 - DNA, 15 bp, Homo sapiens
ctggtgggagcactc

SEQ ID NO: 1605553 - DNA, 15 bp, Homo sapiens
tggtgggagcactcg

SEQ ID NO: 1605554 - DNA, 15 bp, Homo sapiens
ggtgggagcactcgc

SEQ ID NO: 1605555 - DNA, 15 bp, Homo sapiens
gtgggagcactcgct

SEQ ID NO: 1605556 - DNA, 15 bp, Homo sapiens
tgggagcactcgctc

SEQ ID NO: 1605557 - DNA, 15 bp, Homo sapiens
gggagcactcgctct

SEQ ID NO: 1605558 - DNA, 15 bp, Homo sapiens
ggagcactcgctctt

SEQ ID NO: 1605559 - DNA, 15 bp, Homo sapiens
gagcactcgctcttg

SEQ ID NO: 1605560 - DNA, 15 bp, Homo sapiens
agcactcgctcttgt

SEQ ID NO: 1605561 - DNA, 15 bp, Homo sapiens
gcactcgctcttgtt

SEQ ID NO: 1605562 - DNA, 15 bp, Homo sapiens
cactcgctcttgttt

SEQ ID NO: 1605563 - DNA, 15 bp, Homo sapiens
actcgctcttgtttt

SEQ ID NO: 1605564 - DNA, 15 bp, Homo sapiens
ctcgctcttgttttt

SEQ ID NO: 1605565 - DNA, 15 bp, Homo sapiens
tcgctcttgtttttc

SEQ ID NO: 1605566 - DNA, 15 bp, Homo sapiens
cgctcttgtttttca

SEQ ID NO: 1605567 - DNA, 15 bp, Homo sapiens
gctcttgtttttcac

SEQ ID NO: 1605568 - DNA, 15 bp, Homo sapiens
ctcttgtttttcacc

SEQ ID NO: 1605569 - DNA, 15 bp, Homo sapiens
tcttgtttttcacca

SEQ ID NO: 1605570 - DNA, 15 bp, Homo sapiens
cttgtttttcaccat

SEQ ID NO: 1605571 - DNA, 15 bp, Homo sapiens
ttgtttttcaccatc

SEQ ID NO: 1605572 - DNA, 15 bp, Homo sapiens
tgtttttcaccatct

SEQ ID NO: 1605573 - DNA, 15 bp, Homo sapiens
gtttttcaccatctg

SEQ ID NO: 1605574 - DNA, 15 bp, Homo sapiens
tttttcaccatctgg

SEQ ID NO: 1605575 - DNA, 15 bp, Homo sapiens
ttttcaccatctggg

SEQ ID NO: 1605576 - DNA, 15 bp, Homo sapiens
tttcaccatctgggg

SEQ ID NO: 1605577 - DNA, 15 bp, Homo sapiens
ttcaccatctgggga

SEQ ID NO: 1605578 - DNA, 15 bp, Homo sapiens
tcaccatctggggag

SEQ ID NO: 1605579 - DNA, 15 bp, Homo sapiens
caccatctggggagt

SEQ ID NO: 1605580 - DNA, 15 bp, Homo sapiens
accatctggggagta

SEQ ID NO: 1605581 - DNA, 15 bp, Homo sapiens
ccatctggggagtat

SEQ ID NO: 1605582 - DNA, 15 bp, Homo sapiens
catctggggagtatg

SEQ ID NO: 1605583 - DNA, 15 bp, Homo sapiens
atctggggagtatga

SEQ ID NO: 1605584 - DNA, 15 bp, Homo sapiens
tctggggagtatgat

SEQ ID NO: 1605585 - DNA, 15 bp, Homo sapiens
ctggggagtatgatt

SEQ ID NO: 1605586 - DNA, 15 bp, Homo sapiens
tggggagtatgattt

SEQ ID NO: 1605587 - DNA, 15 bp, Homo sapiens
ggggagtatgatttt

SEQ ID NO: 1605588 - DNA, 15 bp, Homo sapiens
gggagtatgattttc

SEQ ID NO: 1605589 - DNA, 15 bp, Homo sapiens
ggagtatgattttcg

SEQ ID NO: 1605590 - DNA, 15 bp, Homo sapiens
gagtatgattttcgg

SEQ ID NO: 1605591 - DNA, 15 bp, Homo sapiens
agtatgattttcggg

SEQ ID NO: 1605592 - DNA, 15 bp, Homo sapiens
gtatgattttcggga

SEQ ID NO: 1605593 - DNA, 15 bp, Homo sapiens
tatgattttcgggac

SEQ ID NO: 1605594 - DNA, 15 bp, Homo sapiens
atgattttcgggaca

SEQ ID NO: 1605595 - DNA, 15 bp, Homo sapiens
tgattttcgggacat

SEQ ID NO: 1605596 - DNA, 15 bp, Homo sapiens
gattttcgggacata

SEQ ID NO: 1605597 - DNA, 15 bp, Homo sapiens
attttcgggacataa

SEQ ID NO: 1605598 - DNA, 15 bp, Homo sapiens
ttttcgggacataac

SEQ ID NO: 1605599 - DNA, 15 bp, Homo sapiens
tttcgggacataact

SEQ ID NO: 1605600 - DNA, 15 bp, Homo sapiens
ttcgggacataactg

SEQ ID NO: 1605601 - DNA, 15 bp, Homo sapiens
tcgggacataactgg

SEQ ID NO: 1605602 - DNA, 15 bp, Homo sapiens
cgggacataactggt

SEQ ID NO: 1605603 - DNA, 15 bp, Homo sapiens
gggacataactggtg

SEQ ID NO: 1605604 - DNA, 15 bp, Homo sapiens
ggacataactggtgg

SEQ ID NO: 1605605 - DNA, 15 bp, Homo sapiens
gacataactggtggc

SEQ ID NO: 1605606 - DNA, 15 bp, Homo sapiens
acataactggtggcc

SEQ ID NO: 1605607 - DNA, 15 bp, Homo sapiens
cataactggtggcca

SEQ ID NO: 1605608 - DNA, 15 bp, Homo sapiens
ataactggtggccag

SEQ ID NO: 1605609 - DNA, 15 bp, Homo sapiens
taactggtggccagt

SEQ ID NO: 1605610 - DNA, 15 bp, Homo sapiens
aactggtggccagtc

SEQ ID NO: 1605611 - DNA, 15 bp, Homo sapiens
actggtggccagtct

SEQ ID NO: 1605612 - DNA, 15 bp, Homo sapiens
ctggtggccagtctg

SEQ ID NO: 1605613 - DNA, 15 bp, Homo sapiens
tggtggccagtctga

SEQ ID NO: 1605614 - DNA, 15 bp, Homo sapiens
ggtggccagtctgaa

SEQ ID NO: 1605615 - DNA, 15 bp, Homo sapiens
gtggccagtctgaaa

SEQ ID NO: 1605616 - DNA, 15 bp, Homo sapiens
tggccagtctgaaag

SEQ ID NO: 1605617 - DNA, 15 bp, Homo sapiens
ggccagtctgaaagg

SEQ ID NO: 1605618 - DNA, 15 bp, Homo sapiens
gccagtctgaaaggg

SEQ ID NO: 1605619 - DNA, 15 bp, Homo sapiens
ccagtctgaaagggc

SEQ ID NO: 1605620 - DNA, 15 bp, Homo sapiens
cagtctgaaagggcc

SEQ ID NO: 1605621 - DNA, 15 bp, Homo sapiens
agtctgaaagggcca

SEQ ID NO: 1605622 - DNA, 15 bp, Homo sapiens
gtctgaaagggccag

SEQ ID NO: 1605623 - DNA, 15 bp, Homo sapiens
tctgaaagggccaga

SEQ ID NO: 1605624 - DNA, 15 bp, Homo sapiens
ctgaaagggccagaa

SEQ ID NO: 1605625 - DNA, 15 bp, Homo sapiens
tgaaagggccagaac

SEQ ID NO: 1605626 - DNA, 15 bp, Homo sapiens
gaaagggccagaacc

SEQ ID NO: 1605627 - DNA, 15 bp, Homo sapiens
aaagggccagaaccc

SEQ ID NO: 1605628 - DNA, 15 bp, Homo sapiens
aagggccagaaccct

SEQ ID NO: 1605629 - DNA, 15 bp, Homo sapiens
agggccagaacccta

SEQ ID NO: 1605630 - DNA, 15 bp, Homo sapiens
gggccagaaccctag

SEQ ID NO: 1605631 - DNA, 15 bp, Homo sapiens
ggccagaaccctaga

SEQ ID NO: 1605632 - DNA, 15 bp, Homo sapiens
gccagaaccctagac

SEQ ID NO: 1605633 - DNA, 15 bp, Homo sapiens
ccagaaccctagaca

SEQ ID NO: 1605634 - DNA, 15 bp, Homo sapiens
cagaaccctagacac

SEQ ID NO: 1605635 - DNA, 15 bp, Homo sapiens
agaaccctagacacc

SEQ ID NO: 1605636 - DNA, 15 bp, Homo sapiens
gaaccctagacacct

SEQ ID NO: 1605637 - DNA, 15 bp, Homo sapiens
aaccctagacaccta

SEQ ID NO: 1605638 - DNA, 15 bp, Homo sapiens
accctagacacctaa

SEQ ID NO: 1605639 - DNA, 15 bp, Homo sapiens
ccctagacacctaag

SEQ ID NO: 1605640 - DNA, 15 bp, Homo sapiens
cctagacacctaaga

SEQ ID NO: 1605641 - DNA, 15 bp, Homo sapiens
ctagacacctaagat

SEQ ID NO: 1605642 - DNA, 15 bp, Homo sapiens
tagacacctaagata

SEQ ID NO: 1605643 - DNA, 15 bp, Homo sapiens
agacacctaagatat

SEQ ID NO: 1605644 - DNA, 15 bp, Homo sapiens
gacacctaagatatt

SEQ ID NO: 1605645 - DNA, 15 bp, Homo sapiens
acacctaagatatta

SEQ ID NO: 1605646 - DNA, 15 bp, Homo sapiens
cacctaagatattaa

SEQ ID NO: 1605647 - DNA, 15 bp, Homo sapiens
acctaagatattaag

SEQ ID NO: 1605648 - DNA, 15 bp, Homo sapiens
cctaagatattaagc

SEQ ID NO: 1605649 - DNA, 15 bp, Homo sapiens
ctaagatattaagca

SEQ ID NO: 1605650 - DNA, 15 bp, Homo sapiens
taagatattaagcag

SEQ ID NO: 1605651 - DNA, 15 bp, Homo sapiens
aagatattaagcagc

SEQ ID NO: 1605652 - DNA, 15 bp, Homo sapiens
agatattaagcagca

SEQ ID NO: 1605653 - DNA, 15 bp, Homo sapiens
gatattaagcagcac

SEQ ID NO: 1605654 - DNA, 15 bp, Homo sapiens
atattaagcagcaca

SEQ ID NO: 1605655 - DNA, 15 bp, Homo sapiens
tattaagcagcacac

SEQ ID NO: 1605656 - DNA, 15 bp, Homo sapiens
attaagcagcacact

SEQ ID NO: 1605657 - DNA, 15 bp, Homo sapiens
ttaagcagcacactc

SEQ ID NO: 1605658 - DNA, 15 bp, Homo sapiens
taagcagcacactct

SEQ ID NO: 1605659 - DNA, 15 bp, Homo sapiens
aagcagcacactctt

SEQ ID NO: 1605660 - DNA, 15 bp, Homo sapiens
agcagcacactctta

SEQ ID NO: 1605661 - DNA, 15 bp, Homo sapiens
gcagcacactcttag

SEQ ID NO: 1605662 - DNA, 15 bp, Homo sapiens
cagcacactcttagg

SEQ ID NO: 1605663 - DNA, 15 bp, Homo sapiens
agcacactcttaggt

SEQ ID NO: 1605664 - DNA, 15 bp, Homo sapiens
gcacactcttaggtc

SEQ ID NO: 1605665 - DNA, 15 bp, Homo sapiens
cacactcttaggtct

SEQ ID NO: 1605666 - DNA, 15 bp, Homo sapiens
acactcttaggtctg

SEQ ID NO: 1605667 - DNA, 15 bp, Homo sapiens
cactcttaggtctga

SEQ ID NO: 1605668 - DNA, 15 bp, Homo sapiens
actcttaggtctgaa

SEQ ID NO: 1605669 - DNA, 15 bp, Homo sapiens
ctcttaggtctgaat

SEQ ID NO: 1605670 - DNA, 15 bp, Homo sapiens
tcttaggtctgaata

SEQ ID NO: 1605671 - DNA, 15 bp, Homo sapiens
cttaggtctgaatat

SEQ ID NO: 1605672 - DNA, 15 bp, Homo sapiens
ttaggtctgaatatg

SEQ ID NO: 1605673 - DNA, 15 bp, Homo sapiens
taggtctgaatatgc

SEQ ID NO: 1605674 - DNA, 15 bp, Homo sapiens
aggtctgaatatgcc

SEQ ID NO: 1605675 - DNA, 15 bp, Homo sapiens
ggtctgaatatgcca

SEQ ID NO: 1605676 - DNA, 15 bp, Homo sapiens
gtctgaatatgccag

SEQ ID NO: 1605677 - DNA, 15 bp, Homo sapiens
tctgaatatgccaga

SEQ ID NO: 1605678 - DNA, 15 bp, Homo sapiens
ctgaatatgccagac

SEQ ID NO: 1605679 - DNA, 15 bp, Homo sapiens
tgaatatgccagact

SEQ ID NO: 1605680 - DNA, 15 bp, Homo sapiens
gaatatgccagactc

SEQ ID NO: 1605681 - DNA, 15 bp, Homo sapiens
aatatgccagactct

SEQ ID NO: 1605682 - DNA, 15 bp, Homo sapiens
atatgccagactctc

SEQ ID NO: 1605683 - DNA, 15 bp, Homo sapiens
tatgccagactctca

SEQ ID NO: 1605684 - DNA, 15 bp, Homo sapiens
atgccagactctcag

SEQ ID NO: 1605685 - DNA, 15 bp, Homo sapiens
tgccagactctcagg

SEQ ID NO: 1605686 - DNA, 15 bp, Homo sapiens
gccagactctcaggg

SEQ ID NO: 1605687 - DNA, 15 bp, Homo sapiens
ccagactctcagggg

SEQ ID NO: 1605688 - DNA, 15 bp, Homo sapiens
cagactctcagggga

SEQ ID NO: 1605689 - DNA, 15 bp, Homo sapiens
agactctcaggggac

SEQ ID NO: 1605690 - DNA, 15 bp, Homo sapiens
actctcaggggactt

SEQ ID NO: 1605691 - DNA, 15 bp, Homo sapiens
ctctcaggggacttt

SEQ ID NO: 1605692 - DNA, 15 bp, Homo sapiens
tctcaggggactttg

SEQ ID NO: 1605693 - DNA, 15 bp, Homo sapiens
ctcaggggactttgt

SEQ ID NO: 1605694 - DNA, 15 bp, Homo sapiens
tcaggggactttgtc

SEQ ID NO: 1605695 - DNA, 15 bp, Homo sapiens
caggggactttgtcc

SEQ ID NO: 1605696 - DNA, 15 bp, Homo sapiens
aggggactttgtcct

SEQ ID NO: 1605697 - DNA, 15 bp, Homo sapiens
ggggactttgtccta

SEQ ID NO: 1605698 - DNA, 15 bp, Homo sapiens
gggactttgtcctat

SEQ ID NO: 1605699 - DNA, 15 bp, Homo sapiens
ggactttgtcctatc

SEQ ID NO: 1605700 - DNA, 15 bp, Homo sapiens
gactttgtcctatct

SEQ ID NO: 1605701 - DNA, 15 bp, Homo sapiens
actttgtcctatcta

SEQ ID NO: 1605702 - DNA, 15 bp, Homo sapiens
ctttgtcctatctat

SEQ ID NO: 1605703 - DNA, 15 bp, Homo sapiens
tttgtcctatctata

SEQ ID NO: 1605704 - DNA, 15 bp, Homo sapiens
ttgtcctatctataa

SEQ ID NO: 1605705 - DNA, 15 bp, Homo sapiens
tgtcctatctataaa

SEQ ID NO: 1605706 - DNA, 15 bp, Homo sapiens
gtcctatctataaag

SEQ ID NO: 1605707 - DNA, 15 bp, Homo sapiens
tcctatctataaagg

SEQ ID NO: 1605708 - DNA, 15 bp, Homo sapiens
cctatctataaagga

SEQ ID NO: 1605709 - DNA, 15 bp, Homo sapiens
ctatctataaaggac

SEQ ID NO: 1605710 - DNA, 15 bp, Homo sapiens
tatctataaaggacc

SEQ ID NO: 1605711 - DNA, 15 bp, Homo sapiens
atctataaaggacct

SEQ ID NO: 1605712 - DNA, 15 bp, Homo sapiens
tctataaaggacctt

SEQ ID NO: 1605713 - DNA, 15 bp, Homo sapiens
ctataaaggaccttt

SEQ ID NO: 1605714 - DNA, 15 bp, Homo sapiens
tataaaggacctttg

SEQ ID NO: 1605715 - DNA, 15 bp, Homo sapiens
ataaaggacctttgt

SEQ ID NO: 1605716 - DNA, 15 bp, Homo sapiens
taaaggacctttgtt

SEQ ID NO: 1605717 - DNA, 15 bp, Homo sapiens
aaaggacctttgttg

SEQ ID NO: 1605718 - DNA, 15 bp, Homo sapiens
aaggacctttgttgt

SEQ ID NO: 1605719 - DNA, 15 bp, Homo sapiens
aggacctttgttgtc

SEQ ID NO: 1605720 - DNA, 15 bp, Homo sapiens
ggacctttgttgtct

SEQ ID NO: 1605721 - DNA, 15 bp, Homo sapiens
gacctttgttgtctc

SEQ ID NO: 1605722 - DNA, 15 bp, Homo sapiens
acctttgttgtctca

SEQ ID NO: 1605723 - DNA, 15 bp, Homo sapiens
cctttgttgtctcaa

SEQ ID NO: 1605724 - DNA, 15 bp, Homo sapiens
ctttgttgtctcaac

SEQ ID NO: 1605725 - DNA, 15 bp, Homo sapiens
tttgttgtctcaaca

SEQ ID NO: 1605726 - DNA, 15 bp, Homo sapiens
ttgttgtctcaacac

SEQ ID NO: 1605727 - DNA, 15 bp, Homo sapiens
tgttgtctcaacaca

SEQ ID NO: 1605728 - DNA, 15 bp, Homo sapiens
gttgtctcaacacat

SEQ ID NO: 1605729 - DNA, 15 bp, Homo sapiens
ttgtctcaacacatg

SEQ ID NO: 1605730 - DNA, 15 bp, Homo sapiens
tgtctcaacacatgc

SEQ ID NO: 1605731 - DNA, 15 bp, Homo sapiens
gtctcaacacatgct

SEQ ID NO: 1605732 - DNA, 15 bp, Homo sapiens
tctcaacacatgcta

SEQ ID NO: 1605733 - DNA, 15 bp, Homo sapiens
ctcaacacatgctac

SEQ ID NO: 1605734 - DNA, 15 bp, Homo sapiens
tcaacacatgctacc

SEQ ID NO: 1605735 - DNA, 15 bp, Homo sapiens
caacacatgctacct

SEQ ID NO: 1605736 - DNA, 15 bp, Homo sapiens
aacacatgctacctg

SEQ ID NO: 1605737 - DNA, 15 bp, Homo sapiens
acacatgctacctgg

SEQ ID NO: 1605738 - DNA, 15 bp, Homo sapiens
cacatgctacctggt

SEQ ID NO: 1605739 - DNA, 15 bp, Homo sapiens
acatgctacctggtt

SEQ ID NO: 1605740 - DNA, 15 bp, Homo sapiens
catgctacctggtta

SEQ ID NO: 1605741 - DNA, 15 bp, Homo sapiens
atgctacctggttag

SEQ ID NO: 1605742 - DNA, 15 bp, Homo sapiens
tgctacctggttagt

SEQ ID NO: 1605743 - DNA, 15 bp, Homo sapiens
gctacctggttagtt

SEQ ID NO: 1605744 - DNA, 15 bp, Homo sapiens
ctacctggttagttc

SEQ ID NO: 1605745 - DNA, 15 bp, Homo sapiens
tacctggttagttct

SEQ ID NO: 1605746 - DNA, 15 bp, Homo sapiens
acctggttagttctg

SEQ ID NO: 1605747 - DNA, 15 bp, Homo sapiens
cctggttagttctgg

SEQ ID NO: 1605748 - DNA, 15 bp, Homo sapiens
ctggttagttctgga

SEQ ID NO: 1605749 - DNA, 15 bp, Homo sapiens
tggttagttctggaa

SEQ ID NO: 1605750 - DNA, 15 bp, Homo sapiens
ggttagttctggaaa

SEQ ID NO: 1605751 - DNA, 15 bp, Homo sapiens
gttagttctggaaaa

SEQ ID NO: 1605752 - DNA, 15 bp, Homo sapiens
ttagttctggaaaag

SEQ ID NO: 1605753 - DNA, 15 bp, Homo sapiens
tagttctggaaaagt

SEQ ID NO: 1605754 - DNA, 15 bp, Homo sapiens
agttctggaaaagtc

SEQ ID NO: 1605755 - DNA, 15 bp, Homo sapiens
gttctggaaaagtcc

SEQ ID NO: 1605756 - DNA, 15 bp, Homo sapiens
ttctggaaaagtcca

SEQ ID NO: 1605757 - DNA, 15 bp, Homo sapiens
tctggaaaagtccaa

SEQ ID NO: 1605758 - DNA, 15 bp, Homo sapiens
ctggaaaagtccaaa

SEQ ID NO: 1605759 - DNA, 15 bp, Homo sapiens
tggaaaagtccaaac

SEQ ID NO: 1605760 - DNA, 15 bp, Homo sapiens
ggaaaagtccaaacc

SEQ ID NO: 1605761 - DNA, 15 bp, Homo sapiens
gaaaagtccaaaccc

SEQ ID NO: 1605762 - DNA, 15 bp, Homo sapiens
aaaagtccaaaccca

SEQ ID NO: 1605763 - DNA, 15 bp, Homo sapiens
aaagtccaaacccag

SEQ ID NO: 1605764 - DNA, 15 bp, Homo sapiens
aagtccaaacccagg

SEQ ID NO: 1605765 - DNA, 15 bp, Homo sapiens
agtccaaacccagga

SEQ ID NO: 1605766 - DNA, 15 bp, Homo sapiens
gtccaaacccaggag

SEQ ID NO: 1605767 - DNA, 15 bp, Homo sapiens
tccaaacccaggagg

SEQ ID NO: 1605768 - DNA, 15 bp, Homo sapiens
ccaaacccaggaggg

SEQ ID NO: 1605769 - DNA, 15 bp, Homo sapiens
caaacccaggagggt

SEQ ID NO: 1605770 - DNA, 15 bp, Homo sapiens
aaacccaggagggtc

SEQ ID NO: 1605771 - DNA, 15 bp, Homo sapiens
aacccaggagggtct

SEQ ID NO: 1605772 - DNA, 15 bp, Homo sapiens
acccaggagggtctg

SEQ ID NO: 1605773 - DNA, 15 bp, Homo sapiens
cccaggagggtctgc

SEQ ID NO: 1605774 - DNA, 15 bp, Homo sapiens
ccaggagggtctgct

SEQ ID NO: 1605775 - DNA, 15 bp, Homo sapiens
caggagggtctgctg

SEQ ID NO: 1605776 - DNA, 15 bp, Homo sapiens
aggagggtctgctgg

SEQ ID NO: 1605777 - DNA, 15 bp, Homo sapiens
ggagggtctgctggt

SEQ ID NO: 1605778 - DNA, 15 bp, Homo sapiens
gagggtctgctggtg

SEQ ID NO: 1605779 - DNA, 15 bp, Homo sapiens
agggtctgctggtgc

SEQ ID NO: 1605780 - DNA, 15 bp, Homo sapiens
gggtctgctggtgca

SEQ ID NO: 1605781 - DNA, 15 bp, Homo sapiens
ggtctgctggtgcaa

SEQ ID NO: 1605782 - DNA, 15 bp, Homo sapiens
gtctgctggtgcaac

SEQ ID NO: 1605783 - DNA, 15 bp, Homo sapiens
tctgctggtgcaaca

SEQ ID NO: 1605784 - DNA, 15 bp, Homo sapiens
ctgctggtgcaacag

SEQ ID NO: 1605785 - DNA, 15 bp, Homo sapiens
tgctggtgcaacaga

SEQ ID NO: 1605786 - DNA, 15 bp, Homo sapiens
gctggtgcaacagat

SEQ ID NO: 1605787 - DNA, 15 bp, Homo sapiens
ctggtgcaacagatt

SEQ ID NO: 1605788 - DNA, 15 bp, Homo sapiens
tggtgcaacagatta

SEQ ID NO: 1605789 - DNA, 15 bp, Homo sapiens
ggtgcaacagattaa

SEQ ID NO: 1605790 - DNA, 15 bp, Homo sapiens
gtgcaacagattaag

SEQ ID NO: 1605791 - DNA, 15 bp, Homo sapiens
tgcaacagattaagg

SEQ ID NO: 1605792 - DNA, 15 bp, Homo sapiens
gcaacagattaaggg

SEQ ID NO: 1605793 - DNA, 15 bp, Homo sapiens
caacagattaagggg

SEQ ID NO: 1605794 - DNA, 15 bp, Homo sapiens
aacagattaaggggt

SEQ ID NO: 1605795 - DNA, 15 bp, Homo sapiens
acagattaaggggtc

SEQ ID NO: 1605796 - DNA, 15 bp, Homo sapiens
cagattaaggggtct

SEQ ID NO: 1605797 - DNA, 15 bp, Homo sapiens
agattaaggggtctg

SEQ ID NO: 1605798 - DNA, 15 bp, Homo sapiens
gattaaggggtctgt

SEQ ID NO: 1605799 - DNA, 15 bp, Homo sapiens
attaaggggtctgtg

SEQ ID NO: 1605800 - DNA, 15 bp, Homo sapiens
ttaaggggtctgtga

SEQ ID NO: 1605801 - DNA, 15 bp, Homo sapiens
taaggggtctgtgac

SEQ ID NO: 1605802 - DNA, 15 bp, Homo sapiens
aaggggtctgtgact

SEQ ID NO: 1605803 - DNA, 15 bp, Homo sapiens
aggggtctgtgactg

SEQ ID NO: 1605804 - DNA, 15 bp, Homo sapiens
ggggtctgtgactgg

SEQ ID NO: 1605805 - DNA, 15 bp, Homo sapiens
gggtctgtgactggc

SEQ ID NO: 1605806 - DNA, 15 bp, Homo sapiens
ggtctgtgactggca

SEQ ID NO: 1605807 - DNA, 15 bp, Homo sapiens
gtctgtgactggcac

SEQ ID NO: 1605808 - DNA, 15 bp, Homo sapiens
tctgtgactggcaca

SEQ ID NO: 1605809 - DNA, 15 bp, Homo sapiens
ctgtgactggcacac

SEQ ID NO: 1605810 - DNA, 15 bp, Homo sapiens
tgtgactggcacacc

SEQ ID NO: 1605811 - DNA, 15 bp, Homo sapiens
gtgactggcacaccc

SEQ ID NO: 1605812 - DNA, 15 bp, Homo sapiens
tgactggcacacccc

SEQ ID NO: 1605813 - DNA, 15 bp, Homo sapiens
gactggcacacccca

SEQ ID NO: 1605814 - DNA, 15 bp, Homo sapiens
actggcacaccccac

SEQ ID NO: 1605815 - DNA, 15 bp, Homo sapiens
ctggcacaccccaca

SEQ ID NO: 1605816 - DNA, 15 bp, Homo sapiens
tggcacaccccacaa

SEQ ID NO: 1605817 - DNA, 15 bp, Homo sapiens
ggcacaccccacaac

SEQ ID NO: 1605818 - DNA, 15 bp, Homo sapiens
gcacaccccacaact

SEQ ID NO: 1605819 - DNA, 15 bp, Homo sapiens
cacaccccacaactt

SEQ ID NO: 1605820 - DNA, 15 bp, Homo sapiens
acaccccacaacttt

SEQ ID NO: 1605821 - DNA, 15 bp, Homo sapiens
caccccacaactttg

SEQ ID NO: 1605822 - DNA, 15 bp, Homo sapiens
accccacaactttgt

SEQ ID NO: 1605823 - DNA, 15 bp, Homo sapiens
ccccacaactttgtg

SEQ ID NO: 1605824 - DNA, 15 bp, Homo sapiens
cccacaactttgtgg

SEQ ID NO: 1605825 - DNA, 15 bp, Homo sapiens
ccacaactttgtggg

SEQ ID NO: 1605826 - DNA, 15 bp, Homo sapiens
cacaactttgtggga

SEQ ID NO: 1605827 - DNA, 15 bp, Homo sapiens
acaactttgtgggat

SEQ ID NO: 1605828 - DNA, 15 bp, Homo sapiens
caactttgtgggata

SEQ ID NO: 1605829 - DNA, 15 bp, Homo sapiens
aactttgtgggatag

SEQ ID NO: 1605830 - DNA, 15 bp, Homo sapiens
actttgtgggatagt

SEQ ID NO: 1605831 - DNA, 15 bp, Homo sapiens
ctttgtgggatagtg

SEQ ID NO: 1605832 - DNA, 15 bp, Homo sapiens
tttgtgggatagtgt

SEQ ID NO: 1605833 - DNA, 15 bp, Homo sapiens
ttgtgggatagtgtg

SEQ ID NO: 1605834 - DNA, 15 bp, Homo sapiens
tgtgggatagtgtgg

SEQ ID NO: 1605835 - DNA, 15 bp, Homo sapiens
gtgggatagtgtggc

SEQ ID NO: 1605836 - DNA, 15 bp, Homo sapiens
tgggatagtgtggca

SEQ ID NO: 1605837 - DNA, 15 bp, Homo sapiens
gggatagtgtggcac

SEQ ID NO: 1605838 - DNA, 15 bp, Homo sapiens
ggatagtgtggcact

SEQ ID NO: 1605839 - DNA, 15 bp, Homo sapiens
gatagtgtggcactg

SEQ ID NO: 1605840 - DNA, 15 bp, Homo sapiens
atagtgtggcactgc

SEQ ID NO: 1605841 - DNA, 15 bp, Homo sapiens
tagtgtggcactgct

SEQ ID NO: 1605842 - DNA, 15 bp, Homo sapiens
agtgtggcactgctg

SEQ ID NO: 1605843 - DNA, 15 bp, Homo sapiens
gtgtggcactgctgc

SEQ ID NO: 1605844 - DNA, 15 bp, Homo sapiens
tgtggcactgctgca

SEQ ID NO: 1605845 - DNA, 15 bp, Homo sapiens
gtggcactgctgcac

SEQ ID NO: 1605846 - DNA, 15 bp, Homo sapiens
tggcactgctgcaca

SEQ ID NO: 1605847 - DNA, 15 bp, Homo sapiens
ggcactgctgcacac

SEQ ID NO: 1605848 - DNA, 15 bp, Homo sapiens
gcactgctgcacaca

SEQ ID NO: 1605849 - DNA, 15 bp, Homo sapiens
cactgctgcacacac

SEQ ID NO: 1605850 - DNA, 15 bp, Homo sapiens
actgctgcacacaca

SEQ ID NO: 1605851 - DNA, 15 bp, Homo sapiens
ctgctgcacacacag

SEQ ID NO: 1605852 - DNA, 15 bp, Homo sapiens
tgctgcacacacaga

SEQ ID NO: 1605853 - DNA, 15 bp, Homo sapiens
gctgcacacacagac

SEQ ID NO: 1605854 - DNA, 15 bp, Homo sapiens
ctgcacacacagaca

SEQ ID NO: 1605855 - DNA, 15 bp, Homo sapiens
tgcacacacagacag

SEQ ID NO: 1605856 - DNA, 15 bp, Homo sapiens
gcacacacagacagc

SEQ ID NO: 1605857 - DNA, 15 bp, Homo sapiens
cacacacagacagca

SEQ ID NO: 1605858 - DNA, 15 bp, Homo sapiens
acacacagacagcac

SEQ ID NO: 1605859 - DNA, 15 bp, Homo sapiens
cacacagacagcacc

SEQ ID NO: 1605860 - DNA, 15 bp, Homo sapiens
acacagacagcaccc

SEQ ID NO: 1605861 - DNA, 15 bp, Homo sapiens
cacagacagcaccct

SEQ ID NO: 1605862 - DNA, 15 bp, Homo sapiens
acagacagcaccctg

SEQ ID NO: 1605863 - DNA, 15 bp, Homo sapiens
cagacagcaccctgc

SEQ ID NO: 1605864 - DNA, 15 bp, Homo sapiens
agacagcaccctgcg

SEQ ID NO: 1605865 - DNA, 15 bp, Homo sapiens
gacagcaccctgcgc

SEQ ID NO: 1605866 - DNA, 15 bp, Homo sapiens
acagcaccctgcgcc

SEQ ID NO: 1605867 - DNA, 15 bp, Homo sapiens
cagcaccctgcgcca

SEQ ID NO: 1605868 - DNA, 15 bp, Homo sapiens
agcaccctgcgccat

SEQ ID NO: 1605869 - DNA, 15 bp, Homo sapiens
gcaccctgcgccatc

SEQ ID NO: 1605870 - DNA, 15 bp, Homo sapiens
caccctgcgccatct

SEQ ID NO: 1605871 - DNA, 15 bp, Homo sapiens
accctgcgccatctg

SEQ ID NO: 1605872 - DNA, 15 bp, Homo sapiens
ccctgcgccatctgt

SEQ ID NO: 1605873 - DNA, 15 bp, Homo sapiens
cctgcgccatctgtg

SEQ ID NO: 1605874 - DNA, 15 bp, Homo sapiens
ctgcgccatctgtgg

SEQ ID NO: 1605875 - DNA, 15 bp, Homo sapiens
tgcgccatctgtggt

SEQ ID NO: 1605876 - DNA, 15 bp, Homo sapiens
gcgccatctgtggta

SEQ ID NO: 1605877 - DNA, 15 bp, Homo sapiens
cgccatctgtggtaa

SEQ ID NO: 1605878 - DNA, 15 bp, Homo sapiens
gccatctgtggtaat

SEQ ID NO: 1605879 - DNA, 15 bp, Homo sapiens
ccatctgtggtaatg

SEQ ID NO: 1605880 - DNA, 15 bp, Homo sapiens
catctgtggtaatga

SEQ ID NO: 1605881 - DNA, 15 bp, Homo sapiens
atctgtggtaatgag

SEQ ID NO: 1605882 - DNA, 15 bp, Homo sapiens
tctgtggtaatgagt

SEQ ID NO: 1605883 - DNA, 15 bp, Homo sapiens
ctgtggtaatgagtc

SEQ ID NO: 1605884 - DNA, 15 bp, Homo sapiens
tgtggtaatgagtct

SEQ ID NO: 1605885 - DNA, 15 bp, Homo sapiens
gtggtaatgagtctt

SEQ ID NO: 1605886 - DNA, 15 bp, Homo sapiens
tggtaatgagtcttt

SEQ ID NO: 1605887 - DNA, 15 bp, Homo sapiens
ggtaatgagtctttt

SEQ ID NO: 1605888 - DNA, 15 bp, Homo sapiens
gtaatgagtcttttg

SEQ ID NO: 1605889 - DNA, 15 bp, Homo sapiens
taatgagtcttttgc

SEQ ID NO: 1605890 - DNA, 15 bp, Homo sapiens
aatgagtcttttgct

SEQ ID NO: 1605891 - DNA, 15 bp, Homo sapiens
atgagtcttttgcta

SEQ ID NO: 1605892 - DNA, 15 bp, Homo sapiens
tgagtcttttgctac

SEQ ID NO: 1605893 - DNA, 15 bp, Homo sapiens
gagtcttttgctacc

SEQ ID NO: 1605894 - DNA, 15 bp, Homo sapiens
agtcttttgctacct

SEQ ID NO: 1605895 - DNA, 15 bp, Homo sapiens
gtcttttgctacctt

SEQ ID NO: 1605896 - DNA, 15 bp, Homo sapiens
tcttttgctacctta

SEQ ID NO: 1605897 - DNA, 15 bp, Homo sapiens
cttttgctaccttag

SEQ ID NO: 1605898 - DNA, 15 bp, Homo sapiens
ttttgctaccttagc

SEQ ID NO: 1605899 - DNA, 15 bp, Homo sapiens
tttgctaccttagcc

SEQ ID NO: 1605900 - DNA, 15 bp, Homo sapiens
ttgctaccttagcct

SEQ ID NO: 1605901 - DNA, 15 bp, Homo sapiens
tgctaccttagccta

SEQ ID NO: 1605902 - DNA, 15 bp, Homo sapiens
gctaccttagcctat

SEQ ID NO: 1605903 - DNA, 15 bp, Homo sapiens
ctaccttagcctatt

SEQ ID NO: 1605904 - DNA, 15 bp, Homo sapiens
taccttagcctattt

SEQ ID NO: 1605905 - DNA, 15 bp, Homo sapiens
accttagcctatttc

SEQ ID NO: 1605906 - DNA, 15 bp, Homo sapiens
ccttagcctatttct

SEQ ID NO: 1605907 - DNA, 15 bp, Homo sapiens
cttagcctatttctg

SEQ ID NO: 1605908 - DNA, 15 bp, Homo sapiens
ttagcctatttctga

SEQ ID NO: 1605909 - DNA, 15 bp, Homo sapiens
tagcctatttctgag

SEQ ID NO: 1605910 - DNA, 15 bp, Homo sapiens
agcctatttctgaga

SEQ ID NO: 1605911 - DNA, 15 bp, Homo sapiens
gcctatttctgagag

SEQ ID NO: 1605912 - DNA, 15 bp, Homo sapiens
cctatttctgagagt

SEQ ID NO: 1605913 - DNA, 15 bp, Homo sapiens
ctatttctgagagtg

SEQ ID NO: 1605914 - DNA, 15 bp, Homo sapiens
tatttctgagagtga

SEQ ID NO: 1605915 - DNA, 15 bp, Homo sapiens
atttctgagagtgaa

SEQ ID NO: 1605916 - DNA, 15 bp, Homo sapiens
tttctgagagtgaat

SEQ ID NO: 1605917 - DNA, 15 bp, Homo sapiens
ttctgagagtgaatt

SEQ ID NO: 1605918 - DNA, 15 bp, Homo sapiens
tctgagagtgaattt

SEQ ID NO: 1605919 - DNA, 15 bp, Homo sapiens
ctgagagtgaatttt

SEQ ID NO: 1605920 - DNA, 15 bp, Homo sapiens
tgagagtgaattttt

SEQ ID NO: 1605921 - DNA, 15 bp, Homo sapiens
gagagtgaatttttg

SEQ ID NO: 1605922 - DNA, 15 bp, Homo sapiens
agagtgaatttttga

SEQ ID NO: 1605923 - DNA, 15 bp, Homo sapiens
gagtgaatttttgag

SEQ ID NO: 1605924 - DNA, 15 bp, Homo sapiens
agtgaatttttgagg

SEQ ID NO: 1605925 - DNA, 15 bp, Homo sapiens
gtgaatttttgagga

SEQ ID NO: 1605926 - DNA, 15 bp, Homo sapiens
tgaatttttgaggaa

SEQ ID NO: 1605927 - DNA, 15 bp, Homo sapiens
gaatttttgaggaat

SEQ ID NO: 1605928 - DNA, 15 bp, Homo sapiens
aatttttgaggaatc

SEQ ID NO: 1605929 - DNA, 15 bp, Homo sapiens
atttttgaggaatca

SEQ ID NO: 1605930 - DNA, 15 bp, Homo sapiens
tttttgaggaatcat

SEQ ID NO: 1605931 - DNA, 15 bp, Homo sapiens
ttttgaggaatcatg

SEQ ID NO: 1605932 - DNA, 15 bp, Homo sapiens
tttgaggaatcatga

SEQ ID NO: 1605933 - DNA, 15 bp, Homo sapiens
ttgaggaatcatgag

SEQ ID NO: 1605934 - DNA, 15 bp, Homo sapiens
tgaggaatcatgagg

SEQ ID NO: 1605935 - DNA, 15 bp, Homo sapiens
gaggaatcatgaggg

SEQ ID NO: 1605936 - DNA, 15 bp, Homo sapiens
aggaatcatgagggc

SEQ ID NO: 1605937 - DNA, 15 bp, Homo sapiens
ggaatcatgagggct

SEQ ID NO: 1605938 - DNA, 15 bp, Homo sapiens
gaatcatgagggcta

SEQ ID NO: 1605939 - DNA, 15 bp, Homo sapiens
aatcatgagggctac

SEQ ID NO: 1605940 - DNA, 15 bp, Homo sapiens
atcatgagggctaca

SEQ ID NO: 1605941 - DNA, 15 bp, Homo sapiens
tcatgagggctacat

SEQ ID NO: 1605942 - DNA, 15 bp, Homo sapiens
catgagggctacatc

SEQ ID NO: 1605943 - DNA, 15 bp, Homo sapiens
atgagggctacatca

SEQ ID NO: 1605944 - DNA, 15 bp, Homo sapiens
tgagggctacatcaa

SEQ ID NO: 1605945 - DNA, 15 bp, Homo sapiens
gagggctacatcaac

SEQ ID NO: 1605946 - DNA, 15 bp, Homo sapiens
agggctacatcaact

SEQ ID NO: 1605947 - DNA, 15 bp, Homo sapiens
gggctacatcaactg

SEQ ID NO: 1605948 - DNA, 15 bp, Homo sapiens
ggctacatcaactga

SEQ ID NO: 1605949 - DNA, 15 bp, Homo sapiens
gctacatcaactgaa

SEQ ID NO: 1605950 - DNA, 15 bp, Homo sapiens
ctacatcaactgaac

SEQ ID NO: 1605951 - DNA, 15 bp, Homo sapiens
tacatcaactgaacc

SEQ ID NO: 1605952 - DNA, 15 bp, Homo sapiens
acatcaactgaaccg

SEQ ID NO: 1605953 - DNA, 15 bp, Homo sapiens
catcaactgaaccga

SEQ ID NO: 1605954 - DNA, 15 bp, Homo sapiens
atcaactgaaccgat

SEQ ID NO: 1605955 - DNA, 15 bp, Homo sapiens
tcaactgaaccgatt

SEQ ID NO: 1605956 - DNA, 15 bp, Homo sapiens
caactgaaccgattt

SEQ ID NO: 1605957 - DNA, 15 bp, Homo sapiens
aactgaaccgatttt

SEQ ID NO: 1605958 - DNA, 15 bp, Homo sapiens
actgaaccgattttt

SEQ ID NO: 1605959 - DNA, 15 bp, Homo sapiens
ctgaaccgattttta

SEQ ID NO: 1605960 - DNA, 15 bp, Homo sapiens
tgaaccgatttttaa

SEQ ID NO: 1605961 - DNA, 15 bp, Homo sapiens
gaaccgatttttaaa

SEQ ID NO: 1605962 - DNA, 15 bp, Homo sapiens
aaccgatttttaaaa

SEQ ID NO: 1605963 - DNA, 15 bp, Homo sapiens
accgatttttaaaat

SEQ ID NO: 1605964 - DNA, 15 bp, Homo sapiens
ccgatttttaaaatg

SEQ ID NO: 1605965 - DNA, 15 bp, Homo sapiens
cgatttttaaaatgc

SEQ ID NO: 1605966 - DNA, 15 bp, Homo sapiens
gatttttaaaatgcc

SEQ ID NO: 1605967 - DNA, 15 bp, Homo sapiens
atttttaaaatgcca

SEQ ID NO: 1605968 - DNA, 15 bp, Homo sapiens
tttttaaaatgccac

SEQ ID NO: 1605969 - DNA, 15 bp, Homo sapiens
ttttaaaatgccact

SEQ ID NO: 1605970 - DNA, 15 bp, Homo sapiens
tttaaaatgccactt

SEQ ID NO: 1605971 - DNA, 15 bp, Homo sapiens
ttaaaatgccactta

SEQ ID NO: 1605972 - DNA, 15 bp, Homo sapiens
taaaatgccacttaa

SEQ ID NO: 1605973 - DNA, 15 bp, Homo sapiens
aaaatgccacttaac

SEQ ID NO: 1605974 - DNA, 15 bp, Homo sapiens
aaatgccacttaaca

SEQ ID NO: 1605975 - DNA, 15 bp, Homo sapiens
aatgccacttaacat

SEQ ID NO: 1605976 - DNA, 15 bp, Homo sapiens
atgccacttaacatt

SEQ ID NO: 1605977 - DNA, 15 bp, Homo sapiens
tgccacttaacattc

SEQ ID NO: 1605978 - DNA, 15 bp, Homo sapiens
gccacttaacattca

SEQ ID NO: 1605979 - DNA, 15 bp, Homo sapiens
ccacttaacattcat

SEQ ID NO: 1605980 - DNA, 15 bp, Homo sapiens
cacttaacattcata

SEQ ID NO: 1605981 - DNA, 15 bp, Homo sapiens
acttaacattcatag

SEQ ID NO: 1605982 - DNA, 15 bp, Homo sapiens
cttaacattcatagt

SEQ ID NO: 1605983 - DNA, 15 bp, Homo sapiens
ttaacattcatagta

SEQ ID NO: 1605984 - DNA, 15 bp, Homo sapiens
taacattcatagtat

SEQ ID NO: 1605985 - DNA, 15 bp, Homo sapiens
aacattcatagtatt

SEQ ID NO: 1605986 - DNA, 15 bp, Homo sapiens
acattcatagtattg

SEQ ID NO: 1605987 - DNA, 15 bp, Homo sapiens
cattcatagtattgt

SEQ ID NO: 1605988 - DNA, 15 bp, Homo sapiens
attcatagtattgta

SEQ ID NO: 1605989 - DNA, 15 bp, Homo sapiens
ttcatagtattgtaa

SEQ ID NO: 1605990 - DNA, 15 bp, Homo sapiens
tcatagtattgtaaa

SEQ ID NO: 1605991 - DNA, 15 bp, Homo sapiens
catagtattgtaaac

SEQ ID NO: 1605992 - DNA, 15 bp, Homo sapiens
atagtattgtaaact

SEQ ID NO: 1605993 - DNA, 15 bp, Homo sapiens
tagtattgtaaactt

SEQ ID NO: 1605994 - DNA, 15 bp, Homo sapiens
agtattgtaaacttg

SEQ ID NO: 1605995 - DNA, 15 bp, Homo sapiens
gtattgtaaacttgg

SEQ ID NO: 1605996 - DNA, 15 bp, Homo sapiens
tattgtaaacttgga

SEQ ID NO: 1605997 - DNA, 15 bp, Homo sapiens
attgtaaacttggaa

SEQ ID NO: 1605998 - DNA, 15 bp, Homo sapiens
ttgtaaacttggaaa

SEQ ID NO: 1605999 - DNA, 15 bp, Homo sapiens
tgtaaacttggaaag

SEQ ID NO: 1606000 - DNA, 15 bp, Homo sapiens
gtaaacttggaaagt

SEQ ID NO: 1606001 - DNA, 15 bp, Homo sapiens
taaacttggaaagtt

SEQ ID NO: 1606002 - DNA, 15 bp, Homo sapiens
aaacttggaaagtta

SEQ ID NO: 1606003 - DNA, 15 bp, Homo sapiens
aacttggaaagttac

SEQ ID NO: 1606004 - DNA, 15 bp, Homo sapiens
acttggaaagttacc

SEQ ID NO: 1606005 - DNA, 15 bp, Homo sapiens
cttggaaagttacct

SEQ ID NO: 1606006 - DNA, 15 bp, Homo sapiens
ttggaaagttacctc

SEQ ID NO: 1606007 - DNA, 15 bp, Homo sapiens
tggaaagttacctct

SEQ ID NO: 1606008 - DNA, 15 bp, Homo sapiens
ggaaagttacctctg

SEQ ID NO: 1606009 - DNA, 15 bp, Homo sapiens
gaaagttacctctgg

SEQ ID NO: 1606010 - DNA, 15 bp, Homo sapiens
aaagttacctctggg

SEQ ID NO: 1606011 - DNA, 15 bp, Homo sapiens
aagttacctctggga

SEQ ID NO: 1606012 - DNA, 15 bp, Homo sapiens
agttacctctgggac

SEQ ID NO: 1606013 - DNA, 15 bp, Homo sapiens
gttacctctgggact

SEQ ID NO: 1606014 - DNA, 15 bp, Homo sapiens
ttacctctgggactt

SEQ ID NO: 1606015 - DNA, 15 bp, Homo sapiens
tacctctgggacttt

SEQ ID NO: 1606016 - DNA, 15 bp, Homo sapiens
acctctgggactttg

SEQ ID NO: 1606017 - DNA, 15 bp, Homo sapiens
cctctgggactttgc

SEQ ID NO: 1606018 - DNA, 15 bp, Homo sapiens
ctctgggactttgca

SEQ ID NO: 1606019 - DNA, 15 bp, Homo sapiens
tctgggactttgcat

SEQ ID NO: 1606020 - DNA, 15 bp, Homo sapiens
ctgggactttgcatg

SEQ ID NO: 1606021 - DNA, 15 bp, Homo sapiens
tgggactttgcatga

SEQ ID NO: 1606022 - DNA, 15 bp, Homo sapiens
gggactttgcatgaa

SEQ ID NO: 1606023 - DNA, 15 bp, Homo sapiens
ggactttgcatgaaa

SEQ ID NO: 1606024 - DNA, 15 bp, Homo sapiens
gactttgcatgaaaa

SEQ ID NO: 1606025 - DNA, 15 bp, Homo sapiens
actttgcatgaaaaa

SEQ ID NO: 1606026 - DNA, 15 bp, Homo sapiens
ctttgcatgaaaaaa

SEQ ID NO: 1606027 - DNA, 15 bp, Homo sapiens
tttgcatgaaaaaag

SEQ ID NO: 1606028 - DNA, 15 bp, Homo sapiens
ttgcatgaaaaaagc

SEQ ID NO: 1606029 - DNA, 15 bp, Homo sapiens
tgcatgaaaaaagct

SEQ ID NO: 1606030 - DNA, 15 bp, Homo sapiens
gcatgaaaaaagctg

SEQ ID NO: 1606031 - DNA, 15 bp, Homo sapiens
catgaaaaaagctga

SEQ ID NO: 1606032 - DNA, 15 bp, Homo sapiens
atgaaaaaagctgat

SEQ ID NO: 1606033 - DNA, 15 bp, Homo sapiens
tgaaaaaagctgatt

SEQ ID NO: 1606034 - DNA, 15 bp, Homo sapiens
gaaaaaagctgattg

SEQ ID NO: 1606035 - DNA, 15 bp, Homo sapiens
aaaaaagctgattgg

SEQ ID NO: 1606036 - DNA, 15 bp, Homo sapiens
aaaaagctgattggc

SEQ ID NO: 1606037 - DNA, 15 bp, Homo sapiens
aaaagctgattggct

SEQ ID NO: 1606038 - DNA, 15 bp, Homo sapiens
aaagctgattggctt

SEQ ID NO: 1606039 - DNA, 15 bp, Homo sapiens
aagctgattggcttc

SEQ ID NO: 1606040 - DNA, 15 bp, Homo sapiens
agctgattggcttca

SEQ ID NO: 1606041 - DNA, 15 bp, Homo sapiens
gctgattggcttcag

SEQ ID NO: 1606042 - DNA, 15 bp, Homo sapiens
ctgattggcttcagt

SEQ ID NO: 1606043 - DNA, 15 bp, Homo sapiens
tgattggcttcagtt

SEQ ID NO: 1606044 - DNA, 15 bp, Homo sapiens
gattggcttcagttg

SEQ ID NO: 1606045 - DNA, 15 bp, Homo sapiens
attggcttcagttgc

SEQ ID NO: 1606046 - DNA, 15 bp, Homo sapiens
ttggcttcagttgct

SEQ ID NO: 1606047 - DNA, 15 bp, Homo sapiens
tggcttcagttgctt

SEQ ID NO: 1606048 - DNA, 15 bp, Homo sapiens
ggcttcagttgcttt

SEQ ID NO: 1606049 - DNA, 15 bp, Homo sapiens
gcttcagttgctttg

SEQ ID NO: 1606050 - DNA, 15 bp, Homo sapiens
cttcagttgctttgc

SEQ ID NO: 1606051 - DNA, 15 bp, Homo sapiens
ttcagttgctttgca

SEQ ID NO: 1606052 - DNA, 15 bp, Homo sapiens
tcagttgctttgcaa

SEQ ID NO: 1606053 - DNA, 15 bp, Homo sapiens
cagttgctttgcaat

SEQ ID NO: 1606054 - DNA, 15 bp, Homo sapiens
agttgctttgcaata

SEQ ID NO: 1606055 - DNA, 15 bp, Homo sapiens
gttgctttgcaataa

SEQ ID NO: 1606056 - DNA, 15 bp, Homo sapiens
ttgctttgcaataaa

SEQ ID NO: 1606057 - DNA, 15 bp, Homo sapiens
tgctttgcaataaag

SEQ ID NO: 1606058 - DNA, 15 bp, Homo sapiens
gctttgcaataaaga

SEQ ID NO: 1606059 - DNA, 15 bp, Homo sapiens
ctttgcaataaagaa

SEQ ID NO: 1606060 - DNA, 15 bp, Homo sapiens
tttgcaataaagaaa

SEQ ID NO: 1606061 - DNA, 15 bp, Homo sapiens
ttgcaataaagaaac

SEQ ID NO: 1606062 - DNA, 15 bp, Homo sapiens
tgcaataaagaaact

SEQ ID NO: 1606063 - DNA, 15 bp, Homo sapiens
gcaataaagaaactg

SEQ ID NO: 1606064 - DNA, 15 bp, Homo sapiens
caataaagaaactgg

SEQ ID NO: 1606065 - DNA, 15 bp, Homo sapiens
aataaagaaactggc

SEQ ID NO: 1606066 - DNA, 15 bp, Homo sapiens
ataaagaaactggct

SEQ ID NO: 1606067 - DNA, 15 bp, Homo sapiens
taaagaaactggcta

SEQ ID NO: 1606068 - DNA, 15 bp, Homo sapiens
aaagaaactggctat

SEQ ID NO: 1606069 - DNA, 15 bp, Homo sapiens
aagaaactggctata

SEQ ID NO: 1606070 - DNA, 15 bp, Homo sapiens
agaaactggctatat

SEQ ID NO: 1606071 - DNA, 15 bp, Homo sapiens
gaaactggctatatt

SEQ ID NO: 1606072 - DNA, 15 bp, Homo sapiens
aaactggctatattt

SEQ ID NO: 1606073 - DNA, 15 bp, Homo sapiens
aactggctatattta

SEQ ID NO: 1606074 - DNA, 15 bp, Homo sapiens
actggctatatttaa

SEQ ID NO: 1606075 - DNA, 15 bp, Homo sapiens
ctggctatatttaag

SEQ ID NO: 1606076 - DNA, 15 bp, Homo sapiens
tggctatatttaagt

SEQ ID NO: 1606077 - DNA, 15 bp, Homo sapiens
ggctatatttaagtg

SEQ ID NO: 1606078 - DNA, 15 bp, Homo sapiens
gctatatttaagtga

SEQ ID NO: 1606079 - DNA, 15 bp, Homo sapiens
ctatatttaagtgaa

SEQ ID NO: 1606080 - DNA, 15 bp, Homo sapiens
tatatttaagtgaaa

SEQ ID NO: 1606081 - DNA, 15 bp, Homo sapiens
atatttaagtgaaaa

SEQ ID NO: 1606082 - DNA, 15 bp, Homo sapiens
tatttaagtgaaaac

SEQ ID NO: 1606083 - DNA, 15 bp, Homo sapiens
atttaagtgaaaact

SEQ ID NO: 1606084 - DNA, 15 bp, Homo sapiens
tttaagtgaaaactt

SEQ ID NO: 1606085 - DNA, 15 bp, Homo sapiens
ttaagtgaaaacttt

SEQ ID NO: 1606086 - DNA, 15 bp, Homo sapiens
taagtgaaaactttt

SEQ ID NO: 1606087 - DNA, 15 bp, Homo sapiens
aagtgaaaacttttt

SEQ ID NO: 1606088 - DNA, 15 bp, Homo sapiens
agtgaaaacttttta

SEQ ID NO: 1606089 - DNA, 15 bp, Homo sapiens
gtgaaaactttttag

SEQ ID NO: 1606090 - DNA, 15 bp, Homo sapiens
tgaaaactttttaga

SEQ ID NO: 1606091 - DNA, 15 bp, Homo sapiens
gaaaactttttagag

SEQ ID NO: 1606092 - DNA, 15 bp, Homo sapiens
aaaactttttagagg

SEQ ID NO: 1606093 - DNA, 15 bp, Homo sapiens
aaactttttagaggg

SEQ ID NO: 1606094 - DNA, 15 bp, Homo sapiens
aactttttagagggc

SEQ ID NO: 1606095 - DNA, 15 bp, Homo sapiens
actttttagagggct

SEQ ID NO: 1606096 - DNA, 15 bp, Homo sapiens
ctttttagagggctc

SEQ ID NO: 1606097 - DNA, 15 bp, Homo sapiens
tttttagagggctct

SEQ ID NO: 1606098 - DNA, 15 bp, Homo sapiens
ttttagagggctctt

SEQ ID NO: 1606099 - DNA, 15 bp, Homo sapiens
tttagagggctcttg

SEQ ID NO: 1606100 - DNA, 15 bp, Homo sapiens
ttagagggctcttgc

SEQ ID NO: 1606101 - DNA, 15 bp, Homo sapiens
tagagggctcttgcc

SEQ ID NO: 1606102 - DNA, 15 bp, Homo sapiens
agagggctcttgcct

SEQ ID NO: 1606103 - DNA, 15 bp, Homo sapiens
gagggctcttgcctt

SEQ ID NO: 1606104 - DNA, 15 bp, Homo sapiens
agggctcttgcctta

SEQ ID NO: 1606105 - DNA, 15 bp, Homo sapiens
gggctcttgccttaa

SEQ ID NO: 1606106 - DNA, 15 bp, Homo sapiens
ggctcttgccttaat

SEQ ID NO: 1606107 - DNA, 15 bp, Homo sapiens
gctcttgccttaatc

SEQ ID NO: 1606108 - DNA, 15 bp, Homo sapiens
ctcttgccttaatca

SEQ ID NO: 1606109 - DNA, 15 bp, Homo sapiens
tcttgccttaatcag

SEQ ID NO: 1606110 - DNA, 15 bp, Homo sapiens
cttgccttaatcagc

SEQ ID NO: 1606111 - DNA, 15 bp, Homo sapiens
ttgccttaatcagct

SEQ ID NO: 1606112 - DNA, 15 bp, Homo sapiens
tgccttaatcagctg

SEQ ID NO: 1606113 - DNA, 15 bp, Homo sapiens
gccttaatcagctgt

SEQ ID NO: 1606114 - DNA, 15 bp, Homo sapiens
ccttaatcagctgtt

SEQ ID NO: 1606115 - DNA, 15 bp, Homo sapiens
cttaatcagctgtta

SEQ ID NO: 1606116 - DNA, 15 bp, Homo sapiens
ttaatcagctgttat

SEQ ID NO: 1606117 - DNA, 15 bp, Homo sapiens
taatcagctgttatt

SEQ ID NO: 1606118 - DNA, 15 bp, Homo sapiens
aatcagctgttattg

SEQ ID NO: 1606119 - DNA, 15 bp, Homo sapiens
atcagctgttattgg

SEQ ID NO: 1606120 - DNA, 15 bp, Homo sapiens
tcagctgttattggt

SEQ ID NO: 1606121 - DNA, 15 bp, Homo sapiens
cagctgttattggta

SEQ ID NO: 1606122 - DNA, 15 bp, Homo sapiens
agctgttattggtac

SEQ ID NO: 1606123 - DNA, 15 bp, Homo sapiens
gctgttattggtact

SEQ ID NO: 1606124 - DNA, 15 bp, Homo sapiens
ctgttattggtactt

SEQ ID NO: 1606125 - DNA, 15 bp, Homo sapiens
tgttattggtactta

SEQ ID NO: 1606126 - DNA, 15 bp, Homo sapiens
gttattggtacttat

SEQ ID NO: 1606127 - DNA, 15 bp, Homo sapiens
ttattggtacttata

SEQ ID NO: 1606128 - DNA, 15 bp, Homo sapiens
tattggtacttatat

SEQ ID NO: 1606129 - DNA, 15 bp, Homo sapiens
attggtacttatata

SEQ ID NO: 1606130 - DNA, 15 bp, Homo sapiens
ttggtacttatataa

SEQ ID NO: 1606131 - DNA, 15 bp, Homo sapiens
tggtacttatataag

SEQ ID NO: 1606132 - DNA, 15 bp, Homo sapiens
ggtacttatataaga

SEQ ID NO: 1606133 - DNA, 15 bp, Homo sapiens
gtacttatataagaa

SEQ ID NO: 1606134 - DNA, 15 bp, Homo sapiens
tacttatataagaaa

SEQ ID NO: 1606135 - DNA, 15 bp, Homo sapiens
acttatataagaaac

SEQ ID NO: 1606136 - DNA, 15 bp, Homo sapiens
cttatataagaaaca

SEQ ID NO: 1606137 - DNA, 15 bp, Homo sapiens
ttatataagaaacaa

SEQ ID NO: 1606138 - DNA, 15 bp, Homo sapiens
tatataagaaacaaa

SEQ ID NO: 1606139 - DNA, 15 bp, Homo sapiens
atataagaaacaaaa

SEQ ID NO: 1606140 - DNA, 15 bp, Homo sapiens
tataagaaacaaaag

SEQ ID NO: 1606141 - DNA, 15 bp, Homo sapiens
ataagaaacaaaaga

SEQ ID NO: 1606142 - DNA, 15 bp, Homo sapiens
taagaaacaaaagaa

SEQ ID NO: 1606143 - DNA, 15 bp, Homo sapiens
aagaaacaaaagaaa

SEQ ID NO: 1606144 - DNA, 15 bp, Homo sapiens
agaaacaaaagaaat

SEQ ID NO: 1606145 - DNA, 15 bp, Homo sapiens
aacaaaagaaatgta

SEQ ID NO: 1606146 - DNA, 15 bp, Homo sapiens
acaaaagaaatgtag

SEQ ID NO: 1606147 - DNA, 15 bp, Homo sapiens
caaaagaaatgtagc

SEQ ID NO: 1606148 - DNA, 15 bp, Homo sapiens
aaaagaaatgtagcc

SEQ ID NO: 1606149 - DNA, 15 bp, Homo sapiens
aaagaaatgtagcct

SEQ ID NO: 1606150 - DNA, 15 bp, Homo sapiens
aagaaatgtagcctt

SEQ ID NO: 1606151 - DNA, 15 bp, Homo sapiens
agaaatgtagcctta

SEQ ID NO: 1606152 - DNA, 15 bp, Homo sapiens
gaaatgtagccttag

SEQ ID NO: 1606153 - DNA, 15 bp, Homo sapiens
aaatgtagccttaga

SEQ ID NO: 1606154 - DNA, 15 bp, Homo sapiens
aatgtagccttagaa

SEQ ID NO: 1606155 - DNA, 15 bp, Homo sapiens
atgtagccttagaaa

SEQ ID NO: 1606156 - DNA, 15 bp, Homo sapiens
tgtagccttagaaac

SEQ ID NO: 1606157 - DNA, 15 bp, Homo sapiens
gtagccttagaaact

SEQ ID NO: 1606158 - DNA, 15 bp, Homo sapiens
tagccttagaaactc

SEQ ID NO: 1606159 - DNA, 15 bp, Homo sapiens
agccttagaaactcc

SEQ ID NO: 1606160 - DNA, 15 bp, Homo sapiens
gccttagaaactcct

SEQ ID NO: 1606161 - DNA, 15 bp, Homo sapiens
ccttagaaactcctt

SEQ ID NO: 1606162 - DNA, 15 bp, Homo sapiens
cttagaaactccttt

SEQ ID NO: 1606163 - DNA, 15 bp, Homo sapiens
ttagaaactcctttg

SEQ ID NO: 1606164 - DNA, 15 bp, Homo sapiens
tagaaactcctttgg

SEQ ID NO: 1606165 - DNA, 15 bp, Homo sapiens
agaaactcctttggc

SEQ ID NO: 1606166 - DNA, 15 bp, Homo sapiens
gaaactcctttggca

SEQ ID NO: 1606167 - DNA, 15 bp, Homo sapiens
aaactcctttggcaa

SEQ ID NO: 1606168 - DNA, 15 bp, Homo sapiens
aactcctttggcaag

SEQ ID NO: 1606169 - DNA, 15 bp, Homo sapiens
actcctttggcaaga

SEQ ID NO: 1606170 - DNA, 15 bp, Homo sapiens
ctcctttggcaagat

SEQ ID NO: 1606171 - DNA, 15 bp, Homo sapiens
tcctttggcaagatt

SEQ ID NO: 1606172 - DNA, 15 bp, Homo sapiens
cctttggcaagattt

SEQ ID NO: 1606173 - DNA, 15 bp, Homo sapiens
ctttggcaagatttc

SEQ ID NO: 1606174 - DNA, 15 bp, Homo sapiens
tttggcaagatttca

SEQ ID NO: 1606175 - DNA, 15 bp, Homo sapiens
ttggcaagatttcaa

SEQ ID NO: 1606176 - DNA, 15 bp, Homo sapiens
tggcaagatttcaaa

SEQ ID NO: 1606177 - DNA, 15 bp, Homo sapiens
ggcaagatttcaaaa

SEQ ID NO: 1606178 - DNA, 15 bp, Homo sapiens
gcaagatttcaaaaa

SEQ ID NO: 1606179 - DNA, 15 bp, Homo sapiens
caagatttcaaaaag

SEQ ID NO: 1606180 - DNA, 15 bp, Homo sapiens
aagatttcaaaaagg

SEQ ID NO: 1606181 - DNA, 15 bp, Homo sapiens
agatttcaaaaaggc

SEQ ID NO: 1606182 - DNA, 15 bp, Homo sapiens
gatttcaaaaaggca

SEQ ID NO: 1606183 - DNA, 15 bp, Homo sapiens
atttcaaaaaggcag

SEQ ID NO: 1606184 - DNA, 15 bp, Homo sapiens
tttcaaaaaggcaga

SEQ ID NO: 1606185 - DNA, 15 bp, Homo sapiens
ttcaaaaaggcagaa

SEQ ID NO: 1606186 - DNA, 15 bp, Homo sapiens
tcaaaaaggcagaaa

SEQ ID NO: 1606187 - DNA, 15 bp, Homo sapiens
caaaaaggcagaaag

SEQ ID NO: 1606188 - DNA, 15 bp, Homo sapiens
aaaaaggcagaaagc

SEQ ID NO: 1606189 - DNA, 15 bp, Homo sapiens
aaaaggcagaaagca

SEQ ID NO: 1606190 - DNA, 15 bp, Homo sapiens
aaaggcagaaagcag

SEQ ID NO: 1606191 - DNA, 15 bp, Homo sapiens
aaggcagaaagcaga

SEQ ID NO: 1606192 - DNA, 15 bp, Homo sapiens
aggcagaaagcagat

SEQ ID NO: 1606193 - DNA, 15 bp, Homo sapiens
ggcagaaagcagatt

SEQ ID NO: 1606194 - DNA, 15 bp, Homo sapiens
gcagaaagcagattg

SEQ ID NO: 1606195 - DNA, 15 bp, Homo sapiens
cagaaagcagattgt

SEQ ID NO: 1606196 - DNA, 15 bp, Homo sapiens
agaaagcagattgta

SEQ ID NO: 1606197 - DNA, 15 bp, Homo sapiens
gaaagcagattgtaa

SEQ ID NO: 1606198 - DNA, 15 bp, Homo sapiens
aaagcagattgtaaa

SEQ ID NO: 1606199 - DNA, 15 bp, Homo sapiens
aagcagattgtaaat

SEQ ID NO: 1606200 - DNA, 15 bp, Homo sapiens
agcagattgtaaatg

SEQ ID NO: 1606201 - DNA, 15 bp, Homo sapiens
gcagattgtaaatgt

SEQ ID NO: 1606202 - DNA, 15 bp, Homo sapiens
cagattgtaaatgta

SEQ ID NO: 1606203 - DNA, 15 bp, Homo sapiens
ttgtaaatgtactta

SEQ ID NO: 1606204 - DNA, 15 bp, Homo sapiens
tgtaaatgtacttaa

SEQ ID NO: 1606205 - DNA, 15 bp, Homo sapiens
gtaaatgtacttaaa

SEQ ID NO: 1606206 - DNA, 15 bp, Homo sapiens
taaatgtacttaaaa

SEQ ID NO: 1606207 - DNA, 15 bp, Homo sapiens
aaatgtacttaaaat

SEQ ID NO: 1606208 - DNA, 15 bp, Homo sapiens
aatgtacttaaaatc

SEQ ID NO: 1606209 - DNA, 15 bp, Homo sapiens
atgtacttaaaatct

SEQ ID NO: 1606210 - DNA, 15 bp, Homo sapiens
tgtacttaaaatctt

SEQ ID NO: 1606211 - DNA, 15 bp, Homo sapiens
gtacttaaaatcttt

SEQ ID NO: 1606212 - DNA, 15 bp, Homo sapiens
tacttaaaatctttt

SEQ ID NO: 1606213 - DNA, 15 bp, Homo sapiens
acttaaaatcttttt

SEQ ID NO: 1606214 - DNA, 15 bp, Homo sapiens
cttaaaatctttttg

SEQ ID NO: 1606215 - DNA, 15 bp, Homo sapiens
ttaaaatctttttgc

SEQ ID NO: 1606216 - DNA, 15 bp, Homo sapiens
taaaatctttttgct

SEQ ID NO: 1606217 - DNA, 15 bp, Homo sapiens
aaaatctttttgctt

SEQ ID NO: 1606218 - DNA, 15 bp, Homo sapiens
aaatctttttgcttc

SEQ ID NO: 1606219 - DNA, 15 bp, Homo sapiens
aatctttttgcttca

SEQ ID NO: 1606220 - DNA, 15 bp, Homo sapiens
atctttttgcttcaa

SEQ ID NO: 1606221 - DNA, 15 bp, Homo sapiens
tctttttgcttcaaa

SEQ ID NO: 1606222 - DNA, 15 bp, Homo sapiens
ctttttgcttcaaac

SEQ ID NO: 1606223 - DNA, 15 bp, Homo sapiens
tttttgcttcaaact

SEQ ID NO: 1606224 - DNA, 15 bp, Homo sapiens
ttttgcttcaaactg

SEQ ID NO: 1606225 - DNA, 15 bp, Homo sapiens
tttgcttcaaactgc

SEQ ID NO: 1606226 - DNA, 15 bp, Homo sapiens
ttgcttcaaactgcc

SEQ ID NO: 1606227 - DNA, 15 bp, Homo sapiens
tgcttcaaactgcct

SEQ ID NO: 1606228 - DNA, 15 bp, Homo sapiens
gcttcaaactgcctg

SEQ ID NO: 1606229 - DNA, 15 bp, Homo sapiens
cttcaaactgcctgc

SEQ ID NO: 1606230 - DNA, 15 bp, Homo sapiens
ttcaaactgcctgct

SEQ ID NO: 1606231 - DNA, 15 bp, Homo sapiens
tcaaactgcctgctt

SEQ ID NO: 1606232 - DNA, 15 bp, Homo sapiens
caaactgcctgcttt

SEQ ID NO: 1606233 - DNA, 15 bp, Homo sapiens
aaactgcctgctttg

SEQ ID NO: 1606234 - DNA, 15 bp, Homo sapiens
aactgcctgctttgg

SEQ ID NO: 1606235 - DNA, 15 bp, Homo sapiens
actgcctgctttggg

SEQ ID NO: 1606236 - DNA, 15 bp, Homo sapiens
ctgcctgctttgggg

SEQ ID NO: 1606237 - DNA, 15 bp, Homo sapiens
tgcctgctttggggt

SEQ ID NO: 1606238 - DNA, 15 bp, Homo sapiens
gcctgctttggggtt

SEQ ID NO: 1606239 - DNA, 15 bp, Homo sapiens
cctgctttggggttc

SEQ ID NO: 1606240 - DNA, 15 bp, Homo sapiens
ctgctttggggttcc

SEQ ID NO: 1606241 - DNA, 15 bp, Homo sapiens
tgctttggggttccc

SEQ ID NO: 1606242 - DNA, 15 bp, Homo sapiens
gctttggggttcccg

SEQ ID NO: 1606243 - DNA, 15 bp, Homo sapiens
ctttggggttcccgc

SEQ ID NO: 1606244 - DNA, 15 bp, Homo sapiens
tttggggttcccgct

SEQ ID NO: 1606245 - DNA, 15 bp, Homo sapiens
ttggggttcccgctg

SEQ ID NO: 1606246 - DNA, 15 bp, Homo sapiens
tggggttcccgctga

SEQ ID NO: 1606247 - DNA, 15 bp, Homo sapiens
ggggttcccgctgaa

SEQ ID NO: 1606248 - DNA, 15 bp, Homo sapiens
gggttcccgctgaac

SEQ ID NO: 1606249 - DNA, 15 bp, Homo sapiens
ggttcccgctgaacc

SEQ ID NO: 1606250 - DNA, 15 bp, Homo sapiens
gttcccgctgaacct

SEQ ID NO: 1606251 - DNA, 15 bp, Homo sapiens
ttcccgctgaaccta

SEQ ID NO: 1606252 - DNA, 15 bp, Homo sapiens
tcccgctgaacctac

SEQ ID NO: 1606253 - DNA, 15 bp, Homo sapiens
cccgctgaacctaca

SEQ ID NO: 1606254 - DNA, 15 bp, Homo sapiens
ccgctgaacctacaa

SEQ ID NO: 1606255 - DNA, 15 bp, Homo sapiens
cgctgaacctacaaa

SEQ ID NO: 1606256 - DNA, 15 bp, Homo sapiens
gctgaacctacaaaa

SEQ ID NO: 1606257 - DNA, 15 bp, Homo sapiens
ctgaacctacaaaaa

SEQ ID NO: 1606258 - DNA, 15 bp, Homo sapiens
tgaacctacaaaaag

SEQ ID NO: 1606259 - DNA, 15 bp, Homo sapiens
gaacctacaaaaaga

SEQ ID NO: 1606260 - DNA, 15 bp, Homo sapiens
aacctacaaaaagat

SEQ ID NO: 1606261 - DNA, 15 bp, Homo sapiens
acctacaaaaagata

SEQ ID NO: 1606262 - DNA, 15 bp, Homo sapiens
cctacaaaaagatac

SEQ ID NO: 1606263 - DNA, 15 bp, Homo sapiens
ctacaaaaagatacc

SEQ ID NO: 1606264 - DNA, 15 bp, Homo sapiens
tacaaaaagataccc

SEQ ID NO: 1606265 - DNA, 15 bp, Homo sapiens
acaaaaagatacccc

SEQ ID NO: 1606266 - DNA, 15 bp, Homo sapiens
caaaaagatacccca

SEQ ID NO: 1606267 - DNA, 15 bp, Homo sapiens
aaaaagataccccag

SEQ ID NO: 1606268 - DNA, 15 bp, Homo sapiens
aaaagataccccagc

SEQ ID NO: 1606269 - DNA, 15 bp, Homo sapiens
aaagataccccagct

SEQ ID NO: 1606270 - DNA, 15 bp, Homo sapiens
aagataccccagctt

SEQ ID NO: 1606271 - DNA, 15 bp, Homo sapiens
agataccccagcttg

SEQ ID NO: 1606272 - DNA, 15 bp, Homo sapiens
gataccccagcttgt

SEQ ID NO: 1606273 - DNA, 15 bp, Homo sapiens
ataccccagcttgta

SEQ ID NO: 1606274 - DNA, 15 bp, Homo sapiens
taccccagcttgtag

SEQ ID NO: 1606275 - DNA, 15 bp, Homo sapiens
accccagcttgtagt

SEQ ID NO: 1606276 - DNA, 15 bp, Homo sapiens
ccccagcttgtagtg

SEQ ID NO: 1606277 - DNA, 15 bp, Homo sapiens
cccagcttgtagtgt

SEQ ID NO: 1606278 - DNA, 15 bp, Homo sapiens
ccagcttgtagtgta

SEQ ID NO: 1606279 - DNA, 15 bp, Homo sapiens
cagcttgtagtgtag

SEQ ID NO: 1606280 - DNA, 15 bp, Homo sapiens
agcttgtagtgtagg

SEQ ID NO: 1606281 - DNA, 15 bp, Homo sapiens
gcttgtagtgtaggg

SEQ ID NO: 1606282 - DNA, 15 bp, Homo sapiens
cttgtagtgtagggg

SEQ ID NO: 1606283 - DNA, 15 bp, Homo sapiens
ttgtagtgtaggggc

SEQ ID NO: 1606284 - DNA, 15 bp, Homo sapiens
tgtagtgtaggggct

SEQ ID NO: 1606285 - DNA, 15 bp, Homo sapiens
gtagtgtaggggcta

SEQ ID NO: 1606286 - DNA, 15 bp, Homo sapiens
tagtgtaggggctag

SEQ ID NO: 1606287 - DNA, 15 bp, Homo sapiens
agtgtaggggctagg

SEQ ID NO: 1606288 - DNA, 15 bp, Homo sapiens
gtgtaggggctagga

SEQ ID NO: 1606289 - DNA, 15 bp, Homo sapiens
tgtaggggctaggat

SEQ ID NO: 1606290 - DNA, 15 bp, Homo sapiens
gtaggggctaggatt

SEQ ID NO: 1606291 - DNA, 15 bp, Homo sapiens
taggggctaggattc

SEQ ID NO: 1606292 - DNA, 15 bp, Homo sapiens
aggggctaggattct

SEQ ID NO: 1606293 - DNA, 15 bp, Homo sapiens
ggggctaggattcta

SEQ ID NO: 1606294 - DNA, 15 bp, Homo sapiens
gggctaggattctac

SEQ ID NO: 1606295 - DNA, 15 bp, Homo sapiens
ggctaggattctact

SEQ ID NO: 1606296 - DNA, 15 bp, Homo sapiens
gctaggattctactc

SEQ ID NO: 1606297 - DNA, 15 bp, Homo sapiens
ctaggattctactct

SEQ ID NO: 1606298 - DNA, 15 bp, Homo sapiens
taggattctactctt

SEQ ID NO: 1606299 - DNA, 15 bp, Homo sapiens
aggattctactcttc

SEQ ID NO: 1606300 - DNA, 15 bp, Homo sapiens
ggattctactcttca

SEQ ID NO: 1606301 - DNA, 15 bp, Homo sapiens
gattctactcttcac

SEQ ID NO: 1606302 - DNA, 15 bp, Homo sapiens
attctactcttcact

SEQ ID NO: 1606303 - DNA, 15 bp, Homo sapiens
ttctactcttcactg

SEQ ID NO: 1606304 - DNA, 15 bp, Homo sapiens
tctactcttcactgc

SEQ ID NO: 1606305 - DNA, 15 bp, Homo sapiens
ctactcttcactgct

SEQ ID NO: 1606306 - DNA, 15 bp, Homo sapiens
tactcttcactgctg

SEQ ID NO: 1606307 - DNA, 15 bp, Homo sapiens
actcttcactgctgt

SEQ ID NO: 1606308 - DNA, 15 bp, Homo sapiens
ctcttcactgctgtg

SEQ ID NO: 1606309 - DNA, 15 bp, Homo sapiens
tcttcactgctgtga

SEQ ID NO: 1606310 - DNA, 15 bp, Homo sapiens
cttcactgctgtgat

SEQ ID NO: 1606311 - DNA, 15 bp, Homo sapiens
ttcactgctgtgatc

SEQ ID NO: 1606312 - DNA, 15 bp, Homo sapiens
tcactgctgtgatct

SEQ ID NO: 1606313 - DNA, 15 bp, Homo sapiens
cactgctgtgatctg

SEQ ID NO: 1606314 - DNA, 15 bp, Homo sapiens
actgctgtgatctgg

SEQ ID NO: 1606315 - DNA, 15 bp, Homo sapiens
ctgctgtgatctggg

SEQ ID NO: 1606316 - DNA, 15 bp, Homo sapiens
tgctgtgatctggga

SEQ ID NO: 1606317 - DNA, 15 bp, Homo sapiens
gctgtgatctgggat

SEQ ID NO: 1606318 - DNA, 15 bp, Homo sapiens
ctgtgatctgggatt

SEQ ID NO: 1606319 - DNA, 15 bp, Homo sapiens
tgtgatctgggattg

SEQ ID NO: 1606320 - DNA, 15 bp, Homo sapiens
gtgatctgggattgg

SEQ ID NO: 1606321 - DNA, 15 bp, Homo sapiens
tgatctgggattgga

SEQ ID NO: 1606322 - DNA, 15 bp, Homo sapiens
gatctgggattggat

SEQ ID NO: 1606323 - DNA, 15 bp, Homo sapiens
atctgggattggatt

SEQ ID NO: 1606324 - DNA, 15 bp, Homo sapiens
tctgggattggattc

SEQ ID NO: 1606325 - DNA, 15 bp, Homo sapiens
ctgggattggattct

SEQ ID NO: 1606326 - DNA, 15 bp, Homo sapiens
tgggattggattctc

SEQ ID NO: 1606327 - DNA, 15 bp, Homo sapiens
gggattggattctca

SEQ ID NO: 1606328 - DNA, 15 bp, Homo sapiens
ggattggattctcat

SEQ ID NO: 1606329 - DNA, 15 bp, Homo sapiens
gattggattctcatt

SEQ ID NO: 1606330 - DNA, 15 bp, Homo sapiens
attggattctcattc

SEQ ID NO: 1606331 - DNA, 15 bp, Homo sapiens
ttggattctcattca

SEQ ID NO: 1606332 - DNA, 15 bp, Homo sapiens
tggattctcattcag

SEQ ID NO: 1606333 - DNA, 15 bp, Homo sapiens
ggattctcattcagg

SEQ ID NO: 1606334 - DNA, 15 bp, Homo sapiens
gattctcattcagga

SEQ ID NO: 1606335 - DNA, 15 bp, Homo sapiens
attctcattcaggaa

SEQ ID NO: 1606336 - DNA, 15 bp, Homo sapiens
ttctcattcaggaaa

SEQ ID NO: 1606337 - DNA, 15 bp, Homo sapiens
tctcattcaggaaat

SEQ ID NO: 1606338 - DNA, 15 bp, Homo sapiens
ctcattcaggaaatc

SEQ ID NO: 1606339 - DNA, 15 bp, Homo sapiens
tcattcaggaaatca

SEQ ID NO: 1606340 - DNA, 15 bp, Homo sapiens
cattcaggaaatcag

SEQ ID NO: 1606341 - DNA, 15 bp, Homo sapiens
attcaggaaatcaga

SEQ ID NO: 1606342 - DNA, 15 bp, Homo sapiens
ttcaggaaatcagac

SEQ ID NO: 1606343 - DNA, 15 bp, Homo sapiens
tcaggaaatcagacc

SEQ ID NO: 1606344 - DNA, 15 bp, Homo sapiens
caggaaatcagaccc

SEQ ID NO: 1606345 - DNA, 15 bp, Homo sapiens
aggaaatcagaccct

SEQ ID NO: 1606346 - DNA, 15 bp, Homo sapiens
ggaaatcagaccctt

SEQ ID NO: 1606347 - DNA, 15 bp, Homo sapiens
gaaatcagaccctta

SEQ ID NO: 1606348 - DNA, 15 bp, Homo sapiens
aaatcagacccttag

SEQ ID NO: 1606349 - DNA, 15 bp, Homo sapiens
aatcagacccttaga

SEQ ID NO: 1606350 - DNA, 15 bp, Homo sapiens
atcagacccttagag

SEQ ID NO: 1606351 - DNA, 15 bp, Homo sapiens
tcagacccttagaga

SEQ ID NO: 1606352 - DNA, 15 bp, Homo sapiens
cagacccttagagat

SEQ ID NO: 1606353 - DNA, 15 bp, Homo sapiens
agacccttagagatc

SEQ ID NO: 1606354 - DNA, 15 bp, Homo sapiens
gacccttagagatct

SEQ ID NO: 1606355 - DNA, 15 bp, Homo sapiens
acccttagagatcta

SEQ ID NO: 1606356 - DNA, 15 bp, Homo sapiens
cccttagagatctag

SEQ ID NO: 1606357 - DNA, 15 bp, Homo sapiens
ccttagagatctaga

SEQ ID NO: 1606358 - DNA, 15 bp, Homo sapiens
cttagagatctagat

SEQ ID NO: 1606359 - DNA, 15 bp, Homo sapiens
ttagagatctagatc

SEQ ID NO: 1606360 - DNA, 15 bp, Homo sapiens
tagagatctagatct

SEQ ID NO: 1606361 - DNA, 15 bp, Homo sapiens
agagatctagatctt

SEQ ID NO: 1606362 - DNA, 15 bp, Homo sapiens
gagatctagatcttt

SEQ ID NO: 1606363 - DNA, 15 bp, Homo sapiens
agatctagatctttg

SEQ ID NO: 1606364 - DNA, 15 bp, Homo sapiens
gatctagatctttgc

SEQ ID NO: 1606365 - DNA, 15 bp, Homo sapiens
atctagatctttgca

SEQ ID NO: 1606366 - DNA, 15 bp, Homo sapiens
tctagatctttgcaa

SEQ ID NO: 1606367 - DNA, 15 bp, Homo sapiens
ctagatctttgcaac

SEQ ID NO: 1606368 - DNA, 15 bp, Homo sapiens
tagatctttgcaact

SEQ ID NO: 1606369 - DNA, 15 bp, Homo sapiens
agatctttgcaactc

SEQ ID NO: 1606370 - DNA, 15 bp, Homo sapiens
gatctttgcaactca

SEQ ID NO: 1606371 - DNA, 15 bp, Homo sapiens
atctttgcaactcag

SEQ ID NO: 1606372 - DNA, 15 bp, Homo sapiens
tctttgcaactcagg

SEQ ID NO: 1606373 - DNA, 15 bp, Homo sapiens
ctttgcaactcagga

SEQ ID NO: 1606374 - DNA, 15 bp, Homo sapiens
tttgcaactcaggag

SEQ ID NO: 1606375 - DNA, 15 bp, Homo sapiens
ttgcaactcaggaga

SEQ ID NO: 1606376 - DNA, 15 bp, Homo sapiens
tgcaactcaggagaa

SEQ ID NO: 1606377 - DNA, 15 bp, Homo sapiens
gcaactcaggagaaa

SEQ ID NO: 1606378 - DNA, 15 bp, Homo sapiens
caactcaggagaaaa

SEQ ID NO: 1606379 - DNA, 15 bp, Homo sapiens
aactcaggagaaaaa

SEQ ID NO: 1606380 - DNA, 15 bp, Homo sapiens
actcaggagaaaaag

SEQ ID NO: 1606381 - DNA, 15 bp, Homo sapiens
ctcaggagaaaaaga

SEQ ID NO: 1606382 - DNA, 15 bp, Homo sapiens
tcaggagaaaaagaa

SEQ ID NO: 1606383 - DNA, 15 bp, Homo sapiens
caggagaaaaagaaa

SEQ ID NO: 1606384 - DNA, 15 bp, Homo sapiens
aggagaaaaagaaaa

SEQ ID NO: 1606385 - DNA, 15 bp, Homo sapiens
ggagaaaaagaaaaa

SEQ ID NO: 1606386 - DNA, 15 bp, Homo sapiens
gagaaaaagaaaaat

SEQ ID NO: 1606387 - DNA, 15 bp, Homo sapiens
agaaaaagaaaaatg

SEQ ID NO: 1606388 - DNA, 15 bp, Homo sapiens
gaaaaagaaaaatgt

SEQ ID NO: 1606389 - DNA, 15 bp, Homo sapiens
aaaaagaaaaatgta

SEQ ID NO: 1606390 - DNA, 15 bp, Homo sapiens
aaaagaaaaatgtac

SEQ ID NO: 1606391 - DNA, 15 bp, Homo sapiens
aaagaaaaatgtaca

SEQ ID NO: 1606392 - DNA, 15 bp, Homo sapiens
aagaaaaatgtacaa

SEQ ID NO: 1606393 - DNA, 15 bp, Homo sapiens
agaaaaatgtacaac

SEQ ID NO: 1606394 - DNA, 15 bp, Homo sapiens
gaaaaatgtacaaca

SEQ ID NO: 1606395 - DNA, 15 bp, Homo sapiens
aaaaatgtacaacaa

SEQ ID NO: 1606396 - DNA, 15 bp, Homo sapiens
aaaatgtacaacaat

SEQ ID NO: 1606397 - DNA, 15 bp, Homo sapiens
aaatgtacaacaatt

SEQ ID NO: 1606398 - DNA, 15 bp, Homo sapiens
aatgtacaacaatta

SEQ ID NO: 1606399 - DNA, 15 bp, Homo sapiens
atgtacaacaattag

SEQ ID NO: 1606400 - DNA, 15 bp, Homo sapiens
tgtacaacaattagc

SEQ ID NO: 1606401 - DNA, 15 bp, Homo sapiens
gtacaacaattagct

SEQ ID NO: 1606402 - DNA, 15 bp, Homo sapiens
tacaacaattagctt

SEQ ID NO: 1606403 - DNA, 15 bp, Homo sapiens
acaacaattagcttg

SEQ ID NO: 1606404 - DNA, 15 bp, Homo sapiens
caacaattagcttga

SEQ ID NO: 1606405 - DNA, 15 bp, Homo sapiens
aacaattagcttgaa

SEQ ID NO: 1606406 - DNA, 15 bp, Homo sapiens
acaattagcttgaat

SEQ ID NO: 1606407 - DNA, 15 bp, Homo sapiens
caattagcttgaatt

SEQ ID NO: 1606408 - DNA, 15 bp, Homo sapiens
aattagcttgaatta

SEQ ID NO: 1606409 - DNA, 15 bp, Homo sapiens
attagcttgaattat

SEQ ID NO: 1606410 - DNA, 15 bp, Homo sapiens
ttagcttgaattatt

SEQ ID NO: 1606411 - DNA, 15 bp, Homo sapiens
tagcttgaattattt

SEQ ID NO: 1606412 - DNA, 15 bp, Homo sapiens
agcttgaattatttg

SEQ ID NO: 1606413 - DNA, 15 bp, Homo sapiens
gcttgaattatttgt

SEQ ID NO: 1606414 - DNA, 15 bp, Homo sapiens
cttgaattatttgtt

SEQ ID NO: 1606415 - DNA, 15 bp, Homo sapiens
ttgaattatttgttt

SEQ ID NO: 1606416 - DNA, 15 bp, Homo sapiens
tgaattatttgtttt

SEQ ID NO: 1606417 - DNA, 15 bp, Homo sapiens
gaattatttgttttg

SEQ ID NO: 1606418 - DNA, 15 bp, Homo sapiens
aattatttgttttga

SEQ ID NO: 1606419 - DNA, 15 bp, Homo sapiens
attatttgttttgaa

SEQ ID NO: 1606420 - DNA, 15 bp, Homo sapiens
ttatttgttttgaat

SEQ ID NO: 1606421 - DNA, 15 bp, Homo sapiens
tatttgttttgaatt

SEQ ID NO: 1606422 - DNA, 15 bp, Homo sapiens
atttgttttgaattt

SEQ ID NO: 1606423 - DNA, 15 bp, Homo sapiens
tttgttttgaattta

SEQ ID NO: 1606424 - DNA, 15 bp, Homo sapiens
ttgttttgaatttat

SEQ ID NO: 1606425 - DNA, 15 bp, Homo sapiens
tgttttgaatttatg

SEQ ID NO: 1606426 - DNA, 15 bp, Homo sapiens
gttttgaatttatgt

SEQ ID NO: 1606427 - DNA, 15 bp, Homo sapiens
ttttgaatttatgtt

SEQ ID NO: 1606428 - DNA, 15 bp, Homo sapiens
tttgaatttatgttt

SEQ ID NO: 1606429 - DNA, 15 bp, Homo sapiens
ttgaatttatgtttg

SEQ ID NO: 1606430 - DNA, 15 bp, Homo sapiens
tgaatttatgtttgt

SEQ ID NO: 1606431 - DNA, 15 bp, Homo sapiens
gaatttatgtttgtg

SEQ ID NO: 1606432 - DNA, 15 bp, Homo sapiens
aatttatgtttgtgt

SEQ ID NO: 1606433 - DNA, 15 bp, Homo sapiens
atttatgtttgtgtg

SEQ ID NO: 1606434 - DNA, 15 bp, Homo sapiens
tttatgtttgtgtga

SEQ ID NO: 1606435 - DNA, 15 bp, Homo sapiens
ttatgtttgtgtgac

SEQ ID NO: 1606436 - DNA, 15 bp, Homo sapiens
tatgtttgtgtgact

SEQ ID NO: 1606437 - DNA, 15 bp, Homo sapiens
atgtttgtgtgactc

SEQ ID NO: 1606438 - DNA, 15 bp, Homo sapiens
tgtttgtgtgactct

SEQ ID NO: 1606439 - DNA, 15 bp, Homo sapiens
gtttgtgtgactctc

SEQ ID NO: 1606440 - DNA, 15 bp, Homo sapiens
tttgtgtgactctcg

SEQ ID NO: 1606441 - DNA, 15 bp, Homo sapiens
ttgtgtgactctcga

SEQ ID NO: 1606442 - DNA, 15 bp, Homo sapiens
tgtgtgactctcgac

SEQ ID NO: 1606443 - DNA, 15 bp, Homo sapiens
gtgtgactctcgact

SEQ ID NO: 1606444 - DNA, 15 bp, Homo sapiens
tgtgactctcgactg

SEQ ID NO: 1606445 - DNA, 15 bp, Homo sapiens
gtgactctcgactgt

SEQ ID NO: 1606446 - DNA, 15 bp, Homo sapiens
tgactctcgactgtt

SEQ ID NO: 1606447 - DNA, 15 bp, Homo sapiens
gactctcgactgttt

SEQ ID NO: 1606448 - DNA, 15 bp, Homo sapiens
actctcgactgtttg

SEQ ID NO: 1606449 - DNA, 15 bp, Homo sapiens
ctctcgactgtttgg

SEQ ID NO: 1606450 - DNA, 15 bp, Homo sapiens
tctcgactgtttgga

SEQ ID NO: 1606451 - DNA, 15 bp, Homo sapiens
ctcgactgtttggag

SEQ ID NO: 1606452 - DNA, 15 bp, Homo sapiens
tcgactgtttggaga

SEQ ID NO: 1606453 - DNA, 15 bp, Homo sapiens
cgactgtttggagag

SEQ ID NO: 1606454 - DNA, 15 bp, Homo sapiens
gactgtttggagagt

SEQ ID NO: 1606455 - DNA, 15 bp, Homo sapiens
actgtttggagagtt

SEQ ID NO: 1606456 - DNA, 15 bp, Homo sapiens
ctgtttggagagtta

SEQ ID NO: 1606457 - DNA, 15 bp, Homo sapiens
tgtttggagagttac

SEQ ID NO: 1606458 - DNA, 15 bp, Homo sapiens
gtttggagagttaca

SEQ ID NO: 1606459 - DNA, 15 bp, Homo sapiens
tttggagagttacat

SEQ ID NO: 1606460 - DNA, 15 bp, Homo sapiens
ttggagagttacatt

SEQ ID NO: 1606461 - DNA, 15 bp, Homo sapiens
tggagagttacatta

SEQ ID NO: 1606462 - DNA, 15 bp, Homo sapiens
ggagagttacattac

SEQ ID NO: 1606463 - DNA, 15 bp, Homo sapiens
gagagttacattacc

SEQ ID NO: 1606464 - DNA, 15 bp, Homo sapiens
agagttacattacca

SEQ ID NO: 1606465 - DNA, 15 bp, Homo sapiens
gagttacattaccat

SEQ ID NO: 1606466 - DNA, 15 bp, Homo sapiens
agttacattaccatt

SEQ ID NO: 1606467 - DNA, 15 bp, Homo sapiens
gttacattaccattt

SEQ ID NO: 1606468 - DNA, 15 bp, Homo sapiens
ttacattaccatttg

SEQ ID NO: 1606469 - DNA, 15 bp, Homo sapiens
tacattaccatttga

SEQ ID NO: 1606470 - DNA, 15 bp, Homo sapiens
acattaccatttgat

SEQ ID NO: 1606471 - DNA, 15 bp, Homo sapiens
cattaccatttgata

SEQ ID NO: 1606472 - DNA, 15 bp, Homo sapiens
attaccatttgatat

SEQ ID NO: 1606473 - DNA, 15 bp, Homo sapiens
ttaccatttgatatt

SEQ ID NO: 1606474 - DNA, 15 bp, Homo sapiens
taccatttgatattg

SEQ ID NO: 1606475 - DNA, 15 bp, Homo sapiens
accatttgatattga

SEQ ID NO: 1606476 - DNA, 15 bp, Homo sapiens
ccatttgatattgat

SEQ ID NO: 1606477 - DNA, 15 bp, Homo sapiens
catttgatattgatc

SEQ ID NO: 1606478 - DNA, 15 bp, Homo sapiens
atttgatattgatct

SEQ ID NO: 1606479 - DNA, 15 bp, Homo sapiens
tttgatattgatctt

SEQ ID NO: 1606480 - DNA, 15 bp, Homo sapiens
ttgatattgatcttt

SEQ ID NO: 1606481 - DNA, 15 bp, Homo sapiens
tgatattgatctttt

SEQ ID NO: 1606482 - DNA, 15 bp, Homo sapiens
gatattgatcttttt

SEQ ID NO: 1606483 - DNA, 15 bp, Homo sapiens
atattgatctttttc

SEQ ID NO: 1606484 - DNA, 15 bp, Homo sapiens
tattgatctttttcc

SEQ ID NO: 1606485 - DNA, 15 bp, Homo sapiens
attgatctttttccc

SEQ ID NO: 1606486 - DNA, 15 bp, Homo sapiens
ttgatctttttccct

SEQ ID NO: 1606487 - DNA, 15 bp, Homo sapiens
tgatctttttccctt

SEQ ID NO: 1606488 - DNA, 15 bp, Homo sapiens
gatctttttcccttt

SEQ ID NO: 1606489 - DNA, 15 bp, Homo sapiens
atctttttccctttt

SEQ ID NO: 1606490 - DNA, 15 bp, Homo sapiens
tctttttccctttta

SEQ ID NO: 1606491 - DNA, 15 bp, Homo sapiens
ctttttcccttttat

SEQ ID NO: 1606492 - DNA, 15 bp, Homo sapiens
tttttcccttttatg

SEQ ID NO: 1606493 - DNA, 15 bp, Homo sapiens
ttttcccttttatgg

SEQ ID NO: 1606494 - DNA, 15 bp, Homo sapiens
tttcccttttatgga

SEQ ID NO: 1606495 - DNA, 15 bp, Homo sapiens
ttcccttttatggac

SEQ ID NO: 1606496 - DNA, 15 bp, Homo sapiens
tcccttttatggacc

SEQ ID NO: 1606497 - DNA, 15 bp, Homo sapiens
cccttttatggacca

SEQ ID NO: 1606498 - DNA, 15 bp, Homo sapiens
ccttttatggaccat

SEQ ID NO: 1606499 - DNA, 15 bp, Homo sapiens
cttttatggaccatt

SEQ ID NO: 1606500 - DNA, 15 bp, Homo sapiens
ttttatggaccattt

SEQ ID NO: 1606501 - DNA, 15 bp, Homo sapiens
tttatggaccatttt

SEQ ID NO: 1606502 - DNA, 15 bp, Homo sapiens
ttatggaccattttt

SEQ ID NO: 1606503 - DNA, 15 bp, Homo sapiens
tatggaccattttta

SEQ ID NO: 1606504 - DNA, 15 bp, Homo sapiens
atggaccatttttac

SEQ ID NO: 1606505 - DNA, 15 bp, Homo sapiens
tggaccatttttact

SEQ ID NO: 1606506 - DNA, 15 bp, Homo sapiens
ggaccatttttactt

SEQ ID NO: 1606507 - DNA, 15 bp, Homo sapiens
gaccatttttacttt

SEQ ID NO: 1606508 - DNA, 15 bp, Homo sapiens
accatttttactttt

SEQ ID NO: 1606509 - DNA, 15 bp, Homo sapiens
ccatttttacttttc

SEQ ID NO: 1606510 - DNA, 15 bp, Homo sapiens
catttttacttttct

SEQ ID NO: 1606511 - DNA, 15 bp, Homo sapiens
atttttacttttctg

SEQ ID NO: 1606512 - DNA, 15 bp, Homo sapiens
tttttacttttctgt

SEQ ID NO: 1606513 - DNA, 15 bp, Homo sapiens
ttttacttttctgtt

SEQ ID NO: 1606514 - DNA, 15 bp, Homo sapiens
tttacttttctgtta

SEQ ID NO: 1606515 - DNA, 15 bp, Homo sapiens
ttacttttctgttat

SEQ ID NO: 1606516 - DNA, 15 bp, Homo sapiens
tacttttctgttatt

SEQ ID NO: 1606517 - DNA, 15 bp, Homo sapiens
acttttctgttattg

SEQ ID NO: 1606518 - DNA, 15 bp, Homo sapiens
cttttctgttattga

SEQ ID NO: 1606519 - DNA, 15 bp, Homo sapiens
ttttctgttattgaa

SEQ ID NO: 1606520 - DNA, 15 bp, Homo sapiens
tttctgttattgaag

SEQ ID NO: 1606521 - DNA, 15 bp, Homo sapiens
ttctgttattgaagt

SEQ ID NO: 1606522 - DNA, 15 bp, Homo sapiens
tctgttattgaagtc

SEQ ID NO: 1606523 - DNA, 15 bp, Homo sapiens
ctgttattgaagtct

SEQ ID NO: 1606524 - DNA, 15 bp, Homo sapiens
tgttattgaagtctc

SEQ ID NO: 1606525 - DNA, 15 bp, Homo sapiens
gttattgaagtctct

SEQ ID NO: 1606526 - DNA, 15 bp, Homo sapiens
ttattgaagtctctt

SEQ ID NO: 1606527 - DNA, 15 bp, Homo sapiens
tattgaagtctcttt

SEQ ID NO: 1606528 - DNA, 15 bp, Homo sapiens
attgaagtctcttta

SEQ ID NO: 1606529 - DNA, 15 bp, Homo sapiens
ttgaagtctctttag

SEQ ID NO: 1606530 - DNA, 15 bp, Homo sapiens
tgaagtctctttagg

SEQ ID NO: 1606531 - DNA, 15 bp, Homo sapiens
gaagtctctttaggg

SEQ ID NO: 1606532 - DNA, 15 bp, Homo sapiens
aagtctctttagggg

SEQ ID NO: 1606533 - DNA, 15 bp, Homo sapiens
agtctctttaggggc

SEQ ID NO: 1606534 - DNA, 15 bp, Homo sapiens
gtctctttaggggct

SEQ ID NO: 1606535 - DNA, 15 bp, Homo sapiens
tctctttaggggctg

SEQ ID NO: 1606536 - DNA, 15 bp, Homo sapiens
ctctttaggggctgg

SEQ ID NO: 1606537 - DNA, 15 bp, Homo sapiens
tctttaggggctggc

SEQ ID NO: 1606538 - DNA, 15 bp, Homo sapiens
ctttaggggctggct

SEQ ID NO: 1606539 - DNA, 15 bp, Homo sapiens
tttaggggctggctc

SEQ ID NO: 1606540 - DNA, 15 bp, Homo sapiens
ttaggggctggctcc

SEQ ID NO: 1606541 - DNA, 15 bp, Homo sapiens
taggggctggctcca

SEQ ID NO: 1606542 - DNA, 15 bp, Homo sapiens
aggggctggctccag

SEQ ID NO: 1606543 - DNA, 15 bp, Homo sapiens
ggggctggctccaga

SEQ ID NO: 1606544 - DNA, 15 bp, Homo sapiens
gggctggctccagat

SEQ ID NO: 1606545 - DNA, 15 bp, Homo sapiens
ggctggctccagatc

SEQ ID NO: 1606546 - DNA, 15 bp, Homo sapiens
gctggctccagatct

SEQ ID NO: 1606547 - DNA, 15 bp, Homo sapiens
ctggctccagatctt

SEQ ID NO: 1606548 - DNA, 15 bp, Homo sapiens
tggctccagatcttg

SEQ ID NO: 1606549 - DNA, 15 bp, Homo sapiens
ggctccagatcttgt

SEQ ID NO: 1606550 - DNA, 15 bp, Homo sapiens
gctccagatcttgtg

SEQ ID NO: 1606551 - DNA, 15 bp, Homo sapiens
ctccagatcttgtga

SEQ ID NO: 1606552 - DNA, 15 bp, Homo sapiens
tccagatcttgtgag

SEQ ID NO: 1606553 - DNA, 15 bp, Homo sapiens
ccagatcttgtgagg

SEQ ID NO: 1606554 - DNA, 15 bp, Homo sapiens
cagatcttgtgagga

SEQ ID NO: 1606555 - DNA, 15 bp, Homo sapiens
agatcttgtgaggac

SEQ ID NO: 1606556 - DNA, 15 bp, Homo sapiens
gatcttgtgaggact

SEQ ID NO: 1606557 - DNA, 15 bp, Homo sapiens
atcttgtgaggactt

SEQ ID NO: 1606558 - DNA, 15 bp, Homo sapiens
tcttgtgaggacttc

SEQ ID NO: 1606559 - DNA, 15 bp, Homo sapiens
cttgtgaggacttcc

SEQ ID NO: 1606560 - DNA, 15 bp, Homo sapiens
ttgtgaggacttcct

SEQ ID NO: 1606561 - DNA, 15 bp, Homo sapiens
tgtgaggacttcctc

SEQ ID NO: 1606562 - DNA, 15 bp, Homo sapiens
gtgaggacttcctct

SEQ ID NO: 1606563 - DNA, 15 bp, Homo sapiens
tgaggacttcctctt

SEQ ID NO: 1606564 - DNA, 15 bp, Homo sapiens
gaggacttcctcttc

SEQ ID NO: 1606565 - DNA, 15 bp, Homo sapiens
aggacttcctcttca

SEQ ID NO: 1606566 - DNA, 15 bp, Homo sapiens
ggacttcctcttcat

SEQ ID NO: 1606567 - DNA, 15 bp, Homo sapiens
gacttcctcttcatg

SEQ ID NO: 1606568 - DNA, 15 bp, Homo sapiens
acttcctcttcatgc

SEQ ID NO: 1606569 - DNA, 15 bp, Homo sapiens
cttcctcttcatgcc

SEQ ID NO: 1606570 - DNA, 15 bp, Homo sapiens
ttcctcttcatgcca

SEQ ID NO: 1606571 - DNA, 15 bp, Homo sapiens
tcctcttcatgccac

SEQ ID NO: 1606572 - DNA, 15 bp, Homo sapiens
cctcttcatgccact

SEQ ID NO: 1606573 - DNA, 15 bp, Homo sapiens
ctcttcatgccactt

SEQ ID NO: 1606574 - DNA, 15 bp, Homo sapiens
tcttcatgccacttt

SEQ ID NO: 1606575 - DNA, 15 bp, Homo sapiens
cttcatgccactttg

SEQ ID NO: 1606576 - DNA, 15 bp, Homo sapiens
ttcatgccactttga

SEQ ID NO: 1606577 - DNA, 15 bp, Homo sapiens
tcatgccactttgag

SEQ ID NO: 1606578 - DNA, 15 bp, Homo sapiens
catgccactttgagg

SEQ ID NO: 1606579 - DNA, 15 bp, Homo sapiens
atgccactttgaggt

SEQ ID NO: 1606580 - DNA, 15 bp, Homo sapiens
tgccactttgaggtg

SEQ ID NO: 1606581 - DNA, 15 bp, Homo sapiens
gccactttgaggtgc

SEQ ID NO: 1606582 - DNA, 15 bp, Homo sapiens
ccactttgaggtgcc

SEQ ID NO: 1606583 - DNA, 15 bp, Homo sapiens
cactttgaggtgcct

SEQ ID NO: 1606584 - DNA, 15 bp, Homo sapiens
actttgaggtgcctc

SEQ ID NO: 1606585 - DNA, 15 bp, Homo sapiens
ctttgaggtgcctca

SEQ ID NO: 1606586 - DNA, 15 bp, Homo sapiens
tttgaggtgcctcat

SEQ ID NO: 1606587 - DNA, 15 bp, Homo sapiens
ttgaggtgcctcata

SEQ ID NO: 1606588 - DNA, 15 bp, Homo sapiens
tgaggtgcctcatat

SEQ ID NO: 1606589 - DNA, 15 bp, Homo sapiens
gaggtgcctcatatc

SEQ ID NO: 1606590 - DNA, 15 bp, Homo sapiens
aggtgcctcatatct

SEQ ID NO: 1606591 - DNA, 15 bp, Homo sapiens
ggtgcctcatatctg

SEQ ID NO: 1606592 - DNA, 15 bp, Homo sapiens
gtgcctcatatctgt

SEQ ID NO: 1606593 - DNA, 15 bp, Homo sapiens
tgcctcatatctgtc

SEQ ID NO: 1606594 - DNA, 15 bp, Homo sapiens
gcctcatatctgtcc

SEQ ID NO: 1606595 - DNA, 15 bp, Homo sapiens
cctcatatctgtcct

SEQ ID NO: 1606596 - DNA, 15 bp, Homo sapiens
ctcatatctgtcctt

SEQ ID NO: 1606597 - DNA, 15 bp, Homo sapiens
tcatatctgtccttt

SEQ ID NO: 1606598 - DNA, 15 bp, Homo sapiens
catatctgtcctttg

SEQ ID NO: 1606599 - DNA, 15 bp, Homo sapiens
atatctgtcctttgt

SEQ ID NO: 1606600 - DNA, 15 bp, Homo sapiens
tatctgtcctttgtt

SEQ ID NO: 1606601 - DNA, 15 bp, Homo sapiens
atctgtcctttgtta

SEQ ID NO: 1606602 - DNA, 15 bp, Homo sapiens
tctgtcctttgttac

SEQ ID NO: 1606603 - DNA, 15 bp, Homo sapiens
ctgtcctttgttacc

SEQ ID NO: 1606604 - DNA, 15 bp, Homo sapiens
tgtcctttgttacct

SEQ ID NO: 1606605 - DNA, 15 bp, Homo sapiens
gtcctttgttacctc

SEQ ID NO: 1606606 - DNA, 15 bp, Homo sapiens
tcctttgttacctca

SEQ ID NO: 1606607 - DNA, 15 bp, Homo sapiens
cctttgttacctcat

SEQ ID NO: 1606608 - DNA, 15 bp, Homo sapiens
ctttgttacctcata

SEQ ID NO: 1606609 - DNA, 15 bp, Homo sapiens
tttgttacctcataa

SEQ ID NO: 1606610 - DNA, 15 bp, Homo sapiens
ttgttacctcataaa

SEQ ID NO: 1606611 - DNA, 15 bp, Homo sapiens
tgttacctcataaag

SEQ ID NO: 1606612 - DNA, 15 bp, Homo sapiens
gttacctcataaagg

SEQ ID NO: 1606613 - DNA, 15 bp, Homo sapiens
ttacctcataaagga

SEQ ID NO: 1606614 - DNA, 15 bp, Homo sapiens
tacctcataaaggat

SEQ ID NO: 1606615 - DNA, 15 bp, Homo sapiens
acctcataaaggatt

SEQ ID NO: 1606616 - DNA, 15 bp, Homo sapiens
cctcataaaggattt

SEQ ID NO: 1606617 - DNA, 15 bp, Homo sapiens
ctcataaaggattta

SEQ ID NO: 1606618 - DNA, 15 bp, Homo sapiens
tcataaaggatttac

SEQ ID NO: 1606619 - DNA, 15 bp, Homo sapiens
cataaaggatttact

SEQ ID NO: 1606620 - DNA, 15 bp, Homo sapiens
ataaaggatttactg

SEQ ID NO: 1606621 - DNA, 15 bp, Homo sapiens
taaaggatttactgg

SEQ ID NO: 1606622 - DNA, 15 bp, Homo sapiens
aaaggatttactggc

SEQ ID NO: 1606623 - DNA, 15 bp, Homo sapiens
aaggatttactggct

SEQ ID NO: 1606624 - DNA, 15 bp, Homo sapiens
aggatttactggctt

SEQ ID NO: 1606625 - DNA, 15 bp, Homo sapiens
ggatttactggcttt

SEQ ID NO: 1606626 - DNA, 15 bp, Homo sapiens
gatttactggctttg

SEQ ID NO: 1606627 - DNA, 15 bp, Homo sapiens
atttactggctttgg

SEQ ID NO: 1606628 - DNA, 15 bp, Homo sapiens
tttactggctttggt

SEQ ID NO: 1606629 - DNA, 15 bp, Homo sapiens
ttactggctttggtt

SEQ ID NO: 1606630 - DNA, 15 bp, Homo sapiens
tactggctttggttc

SEQ ID NO: 1606631 - DNA, 15 bp, Homo sapiens
actggctttggttct

SEQ ID NO: 1606632 - DNA, 15 bp, Homo sapiens
ctggctttggttctg

SEQ ID NO: 1606633 - DNA, 15 bp, Homo sapiens
tggctttggttctga

SEQ ID NO: 1606634 - DNA, 15 bp, Homo sapiens
ggctttggttctgag

SEQ ID NO: 1606635 - DNA, 15 bp, Homo sapiens
gctttggttctgagt

SEQ ID NO: 1606636 - DNA, 15 bp, Homo sapiens
ctttggttctgagtc

SEQ ID NO: 1606637 - DNA, 15 bp, Homo sapiens
tttggttctgagtca

SEQ ID NO: 1606638 - DNA, 15 bp, Homo sapiens
ttggttctgagtcac

SEQ ID NO: 1606639 - DNA, 15 bp, Homo sapiens
tggttctgagtcact

SEQ ID NO: 1606640 - DNA, 15 bp, Homo sapiens
ggttctgagtcactc

SEQ ID NO: 1606641 - DNA, 15 bp, Homo sapiens
gttctgagtcactca

SEQ ID NO: 1606642 - DNA, 15 bp, Homo sapiens
ttctgagtcactcag

SEQ ID NO: 1606643 - DNA, 15 bp, Homo sapiens
tctgagtcactcagt

SEQ ID NO: 1606644 - DNA, 15 bp, Homo sapiens
ctgagtcactcagta

SEQ ID NO: 1606645 - DNA, 15 bp, Homo sapiens
tgagtcactcagtag

SEQ ID NO: 1606646 - DNA, 15 bp, Homo sapiens
gagtcactcagtaga

SEQ ID NO: 1606647 - DNA, 15 bp, Homo sapiens
agtcactcagtagat

SEQ ID NO: 1606648 - DNA, 15 bp, Homo sapiens
gtcactcagtagata

SEQ ID NO: 1606649 - DNA, 15 bp, Homo sapiens
tcactcagtagatac

SEQ ID NO: 1606650 - DNA, 15 bp, Homo sapiens
cactcagtagatacc

SEQ ID NO: 1606651 - DNA, 15 bp, Homo sapiens
actcagtagatacct

SEQ ID NO: 1606652 - DNA, 15 bp, Homo sapiens
ctcagtagatacctt

SEQ ID NO: 1606653 - DNA, 15 bp, Homo sapiens
tcagtagataccttt

SEQ ID NO: 1606654 - DNA, 15 bp, Homo sapiens
cagtagatacctttg

SEQ ID NO: 1606655 - DNA, 15 bp, Homo sapiens
agtagatacctttgg

SEQ ID NO: 1606656 - DNA, 15 bp, Homo sapiens
gtagatacctttggt

SEQ ID NO: 1606657 - DNA, 15 bp, Homo sapiens
tagatacctttggtt

SEQ ID NO: 1606658 - DNA, 15 bp, Homo sapiens
agatacctttggtta

SEQ ID NO: 1606659 - DNA, 15 bp, Homo sapiens
gatacctttggttag

SEQ ID NO: 1606660 - DNA, 15 bp, Homo sapiens
atacctttggttaga

SEQ ID NO: 1606661 - DNA, 15 bp, Homo sapiens
tacctttggttagaa

SEQ ID NO: 1606662 - DNA, 15 bp, Homo sapiens
acctttggttagaaa

SEQ ID NO: 1606663 - DNA, 15 bp, Homo sapiens
cctttggttagaaag

SEQ ID NO: 1606664 - DNA, 15 bp, Homo sapiens
ctttggttagaaagg

SEQ ID NO: 1606665 - DNA, 15 bp, Homo sapiens
tttggttagaaagga

SEQ ID NO: 1606666 - DNA, 15 bp, Homo sapiens
ttggttagaaaggag

SEQ ID NO: 1606667 - DNA, 15 bp, Homo sapiens
tggttagaaaggaga

SEQ ID NO: 1606668 - DNA, 15 bp, Homo sapiens
ggttagaaaggagaa

SEQ ID NO: 1606669 - DNA, 15 bp, Homo sapiens
gttagaaaggagaaa

SEQ ID NO: 1606670 - DNA, 15 bp, Homo sapiens
ttagaaaggagaaat

SEQ ID NO: 1606671 - DNA, 15 bp, Homo sapiens
tagaaaggagaaata

SEQ ID NO: 1606672 - DNA, 15 bp, Homo sapiens
agaaaggagaaataa

SEQ ID NO: 1606673 - DNA, 15 bp, Homo sapiens
gaaaggagaaataaa

SEQ ID NO: 1606674 - DNA, 15 bp, Homo sapiens
aaaggagaaataaaa

SEQ ID NO: 1606675 - DNA, 15 bp, Homo sapiens
aaggagaaataaaag

SEQ ID NO: 1606676 - DNA, 15 bp, Homo sapiens
aggagaaataaaagt

SEQ ID NO: 1606677 - DNA, 15 bp, Homo sapiens
ggagaaataaaagtt

SEQ ID NO: 1606678 - DNA, 15 bp, Homo sapiens
gagaaataaaagttc

SEQ ID NO: 1606679 - DNA, 15 bp, Homo sapiens
agaaataaaagttca

SEQ ID NO: 1606680 - DNA, 15 bp, Homo sapiens
gaaataaaagttcaa

SEQ ID NO: 1606681 - DNA, 15 bp, Homo sapiens
aaataaaagttcaaa

SEQ ID NO: 1606682 - DNA, 15 bp, Homo sapiens
aataaaagttcaaaa

SEQ ID NO: 1606683 - DNA, 15 bp, Homo sapiens
ataaaagttcaaaaa

SEQ ID NO: 1606684 - DNA, 15 bp, Homo sapiens
taaaagttcaaaaac

SEQ ID NO: 1606685 - DNA, 15 bp, Homo sapiens
aaaagttcaaaaaca

SEQ ID NO: 1606686 - DNA, 15 bp, Homo sapiens
aaagttcaaaaacaa

SEQ ID NO: 1606687 - DNA, 15 bp, Homo sapiens
aagttcaaaaacaag

SEQ ID NO: 1606688 - DNA, 15 bp, Homo sapiens
agttcaaaaacaagg

SEQ ID NO: 1606689 - DNA, 15 bp, Homo sapiens
gttcaaaaacaagga

SEQ ID NO: 1606690 - DNA, 15 bp, Homo sapiens
ttcaaaaacaaggaa

SEQ ID NO: 1606691 - DNA, 15 bp, Homo sapiens
tcaaaaacaaggaat

SEQ ID NO: 1606692 - DNA, 15 bp, Homo sapiens
caaaaacaaggaata

SEQ ID NO: 1606693 - DNA, 15 bp, Homo sapiens
aaaaacaaggaatac

SEQ ID NO: 1606694 - DNA, 15 bp, Homo sapiens
aaaacaaggaatact

SEQ ID NO: 1606695 - DNA, 15 bp, Homo sapiens
aaacaaggaatactg

SEQ ID NO: 1606696 - DNA, 15 bp, Homo sapiens
aacaaggaatactgg

SEQ ID NO: 1606697 - DNA, 15 bp, Homo sapiens
acaaggaatactggt

SEQ ID NO: 1606698 - DNA, 15 bp, Homo sapiens
caaggaatactggtt

SEQ ID NO: 1606699 - DNA, 15 bp, Homo sapiens
aaggaatactggttt

SEQ ID NO: 1606700 - DNA, 15 bp, Homo sapiens
aggaatactggtttt

SEQ ID NO: 1606701 - DNA, 15 bp, Homo sapiens
ggaatactggttttt

SEQ ID NO: 1606702 - DNA, 15 bp, Homo sapiens
gaatactggtttttt

SEQ ID NO: 1606703 - DNA, 15 bp, Homo sapiens
aatactggttttttg

SEQ ID NO: 1606704 - DNA, 15 bp, Homo sapiens
atactggttttttgt

SEQ ID NO: 1606705 - DNA, 15 bp, Homo sapiens
tactggttttttgtc

SEQ ID NO: 1606706 - DNA, 15 bp, Homo sapiens
actggttttttgtcc

SEQ ID NO: 1606707 - DNA, 15 bp, Homo sapiens
ctggttttttgtccc

SEQ ID NO: 1606708 - DNA, 15 bp, Homo sapiens
tggttttttgtccca

SEQ ID NO: 1606709 - DNA, 15 bp, Homo sapiens
ggttttttgtcccag

SEQ ID NO: 1606710 - DNA, 15 bp, Homo sapiens
gttttttgtcccagc

SEQ ID NO: 1606711 - DNA, 15 bp, Homo sapiens
ttttttgtcccagct

SEQ ID NO: 1606712 - DNA, 15 bp, Homo sapiens
tttttgtcccagctg

SEQ ID NO: 1606713 - DNA, 15 bp, Homo sapiens
ttttgtcccagctga

SEQ ID NO: 1606714 - DNA, 15 bp, Homo sapiens
tttgtcccagctgaa

SEQ ID NO: 1606715 - DNA, 15 bp, Homo sapiens
ttgtcccagctgaaa

SEQ ID NO: 1606716 - DNA, 15 bp, Homo sapiens
tgtcccagctgaaat

SEQ ID NO: 1606717 - DNA, 15 bp, Homo sapiens
gtcccagctgaaatc

SEQ ID NO: 1606718 - DNA, 15 bp, Homo sapiens
tcccagctgaaatct

SEQ ID NO: 1606719 - DNA, 15 bp, Homo sapiens
cccagctgaaatctg

SEQ ID NO: 1606720 - DNA, 15 bp, Homo sapiens
ccagctgaaatctga

SEQ ID NO: 1606721 - DNA, 15 bp, Homo sapiens
cagctgaaatctgat

SEQ ID NO: 1606722 - DNA, 15 bp, Homo sapiens
agctgaaatctgata

SEQ ID NO: 1606723 - DNA, 15 bp, Homo sapiens
gctgaaatctgataa

SEQ ID NO: 1606724 - DNA, 15 bp, Homo sapiens
ctgaaatctgataat

SEQ ID NO: 1606725 - DNA, 15 bp, Homo sapiens
tgaaatctgataata

SEQ ID NO: 1606726 - DNA, 15 bp, Homo sapiens
gaaatctgataataa

SEQ ID NO: 1606727 - DNA, 15 bp, Homo sapiens
aaatctgataataat

SEQ ID NO: 1606728 - DNA, 15 bp, Homo sapiens
aatctgataataata

SEQ ID NO: 1606729 - DNA, 15 bp, Homo sapiens
atctgataataataa

SEQ ID NO: 1606730 - DNA, 15 bp, Homo sapiens
tctgataataataaa

SEQ ID NO: 1606731 - DNA, 15 bp, Homo sapiens
ctgataataataaat

SEQ ID NO: 1606732 - DNA, 15 bp, Homo sapiens
tgataataataaatt

SEQ ID NO: 1606733 - DNA, 15 bp, Homo sapiens
gataataataaattc

SEQ ID NO: 1606734 - DNA, 15 bp, Homo sapiens
ataataataaattcc

SEQ ID NO: 1606735 - DNA, 15 bp, Homo sapiens
taataataaattcca

SEQ ID NO: 1606736 - DNA, 15 bp, Homo sapiens
aataataaattccaa

SEQ ID NO: 1606737 - DNA, 15 bp, Homo sapiens
ataataaattccaat

SEQ ID NO: 1606738 - DNA, 15 bp, Homo sapiens
taataaattccaatt

SEQ ID NO: 1606739 - DNA, 15 bp, Homo sapiens
aataaattccaattt

SEQ ID NO: 1606740 - DNA, 15 bp, Homo sapiens
ataaattccaatttt

SEQ ID NO: 1606741 - DNA, 15 bp, Homo sapiens
taaattccaattttt

SEQ ID NO: 1606742 - DNA, 15 bp, Homo sapiens
aaattccaattttta

SEQ ID NO: 1606743 - DNA, 15 bp, Homo sapiens
aattccaatttttaa

SEQ ID NO: 1606744 - DNA, 15 bp, Homo sapiens
attccaatttttaaa

SEQ ID NO: 1606745 - DNA, 15 bp, Homo sapiens
ttccaatttttaaaa

SEQ ID NO: 1606746 - DNA, 15 bp, Homo sapiens
tccaatttttaaaaa

SEQ ID NO: 1606747 - DNA, 15 bp, Homo sapiens
ccaatttttaaaaaa

SEQ ID NO: 1606748 - DNA, 15 bp, Homo sapiens
caatttttaaaaaaa

SEQ ID NO: 1606749 - DNA, 15 bp, Homo sapiens
aatttttaaaaaaag

SEQ ID NO: 1606750 - DNA, 15 bp, Homo sapiens
atttttaaaaaaaga

SEQ ID NO: 1606751 - DNA, 15 bp, Homo sapiens
tttttaaaaaaagaa

SEQ ID NO: 1606752 - DNA, 15 bp, Homo sapiens
ttttaaaaaaagaac

SEQ ID NO: 1606753 - DNA, 15 bp, Homo sapiens
tttaaaaaaagaact

SEQ ID NO: 1606754 - DNA, 15 bp, Homo sapiens
ttaaaaaaagaactc

SEQ ID NO: 1606755 - DNA, 15 bp, Homo sapiens
taaaaaaagaactct

SEQ ID NO: 1606756 - DNA, 15 bp, Homo sapiens
aaaaaaagaactcta

SEQ ID NO: 1606757 - DNA, 15 bp, Homo sapiens
aaaaaagaactctaa

SEQ ID NO: 1606758 - DNA, 15 bp, Homo sapiens
aaaaagaactctaag

SEQ ID NO: 1606759 - DNA, 15 bp, Homo sapiens
aaaagaactctaagg

SEQ ID NO: 1606760 - DNA, 15 bp, Homo sapiens
aaagaactctaaggt

SEQ ID NO: 1606761 - DNA, 15 bp, Homo sapiens
aagaactctaaggtc

SEQ ID NO: 1606762 - DNA, 15 bp, Homo sapiens
agaactctaaggtca

SEQ ID NO: 1606763 - DNA, 15 bp, Homo sapiens
gaactctaaggtcag

SEQ ID NO: 1606764 - DNA, 15 bp, Homo sapiens
aactctaaggtcaga

SEQ ID NO: 1606765 - DNA, 15 bp, Homo sapiens
actctaaggtcagaa

SEQ ID NO: 1606766 - DNA, 15 bp, Homo sapiens
ctctaaggtcagaaa

SEQ ID NO: 1606767 - DNA, 15 bp, Homo sapiens
tctaaggtcagaaaa

SEQ ID NO: 1606768 - DNA, 15 bp, Homo sapiens
ctaaggtcagaaaac

SEQ ID NO: 1606769 - DNA, 15 bp, Homo sapiens
taaggtcagaaaaca

SEQ ID NO: 1606770 - DNA, 15 bp, Homo sapiens
aaggtcagaaaacag

SEQ ID NO: 1606771 - DNA, 15 bp, Homo sapiens
aggtcagaaaacagc

SEQ ID NO: 1606772 - DNA, 15 bp, Homo sapiens
ggtcagaaaacagct

SEQ ID NO: 1606773 - DNA, 15 bp, Homo sapiens
gtcagaaaacagctt

SEQ ID NO: 1606774 - DNA, 15 bp, Homo sapiens
tcagaaaacagctta

SEQ ID NO: 1606775 - DNA, 15 bp, Homo sapiens
cagaaaacagcttaa

SEQ ID NO: 1606776 - DNA, 15 bp, Homo sapiens
agaaaacagcttaac

SEQ ID NO: 1606777 - DNA, 15 bp, Homo sapiens
gaaaacagcttaact

SEQ ID NO: 1606778 - DNA, 15 bp, Homo sapiens
aaaacagcttaacta

SEQ ID NO: 1606779 - DNA, 15 bp, Homo sapiens
aaacagcttaactaa

SEQ ID NO: 1606780 - DNA, 15 bp, Homo sapiens
aacagcttaactaaa

SEQ ID NO: 1606781 - DNA, 15 bp, Homo sapiens
acagcttaactaaaa

SEQ ID NO: 1606782 - DNA, 15 bp, Homo sapiens
cagcttaactaaaag

SEQ ID NO: 1606783 - DNA, 15 bp, Homo sapiens
agcttaactaaaagc

SEQ ID NO: 1606784 - DNA, 15 bp, Homo sapiens
gcttaactaaaagct

SEQ ID NO: 1606785 - DNA, 15 bp, Homo sapiens
cttaactaaaagctg

SEQ ID NO: 1606786 - DNA, 15 bp, Homo sapiens
ttaactaaaagctga

SEQ ID NO: 1606787 - DNA, 15 bp, Homo sapiens
taactaaaagctgat

SEQ ID NO: 1606788 - DNA, 15 bp, Homo sapiens
aactaaaagctgata

SEQ ID NO: 1606789 - DNA, 15 bp, Homo sapiens
actaaaagctgatat

SEQ ID NO: 1606790 - DNA, 15 bp, Homo sapiens
ctaaaagctgatatt

SEQ ID NO: 1606791 - DNA, 15 bp, Homo sapiens
taaaagctgatattc

SEQ ID NO: 1606792 - DNA, 15 bp, Homo sapiens
aaaagctgatattca

SEQ ID NO: 1606793 - DNA, 15 bp, Homo sapiens
aaagctgatattcag

SEQ ID NO: 1606794 - DNA, 15 bp, Homo sapiens
aagctgatattcagg

SEQ ID NO: 1606795 - DNA, 15 bp, Homo sapiens
agctgatattcaggc

SEQ ID NO: 1606796 - DNA, 15 bp, Homo sapiens
gctgatattcaggct

SEQ ID NO: 1606797 - DNA, 15 bp, Homo sapiens
ctgatattcaggcta

SEQ ID NO: 1606798 - DNA, 15 bp, Homo sapiens
tgatattcaggctat

SEQ ID NO: 1606799 - DNA, 15 bp, Homo sapiens
gatattcaggctata

SEQ ID NO: 1606800 - DNA, 15 bp, Homo sapiens
atattcaggctataa

SEQ ID NO: 1606801 - DNA, 15 bp, Homo sapiens
tattcaggctataat

SEQ ID NO: 1606802 - DNA, 15 bp, Homo sapiens
attcaggctataatt

SEQ ID NO: 1606803 - DNA, 15 bp, Homo sapiens
ttcaggctataattt

SEQ ID NO: 1606804 - DNA, 15 bp, Homo sapiens
tcaggctataatttt

SEQ ID NO: 1606805 - DNA, 15 bp, Homo sapiens
caggctataattttt

SEQ ID NO: 1606806 - DNA, 15 bp, Homo sapiens
aggctataattttta

SEQ ID NO: 1606807 - DNA, 15 bp, Homo sapiens
ggctataatttttac

SEQ ID NO: 1606808 - DNA, 15 bp, Homo sapiens
gctataatttttact

SEQ ID NO: 1606809 - DNA, 15 bp, Homo sapiens
ctataatttttactt

SEQ ID NO: 1606810 - DNA, 15 bp, Homo sapiens
tataatttttacttt

SEQ ID NO: 1606811 - DNA, 15 bp, Homo sapiens
ataatttttacttta

SEQ ID NO: 1606812 - DNA, 15 bp, Homo sapiens
taatttttactttat

SEQ ID NO: 1606813 - DNA, 15 bp, Homo sapiens
aatttttactttatt

SEQ ID NO: 1606814 - DNA, 15 bp, Homo sapiens
atttttactttattt

SEQ ID NO: 1606815 - DNA, 15 bp, Homo sapiens
tttttactttatttt

SEQ ID NO: 1606816 - DNA, 15 bp, Homo sapiens
ttttactttattttt

SEQ ID NO: 1606817 - DNA, 15 bp, Homo sapiens
tttactttatttttt

SEQ ID NO: 1606818 - DNA, 15 bp, Homo sapiens
ttactttattttttt

SEQ ID NO: 1606819 - DNA, 15 bp, Homo sapiens
tactttattttttta

SEQ ID NO: 1606820 - DNA, 15 bp, Homo sapiens
actttatttttttaa

SEQ ID NO: 1606821 - DNA, 15 bp, Homo sapiens
ctttatttttttaat

SEQ ID NO: 1606822 - DNA, 15 bp, Homo sapiens
tttatttttttaatt

SEQ ID NO: 1606823 - DNA, 15 bp, Homo sapiens
ttatttttttaattt

SEQ ID NO: 1606824 - DNA, 15 bp, Homo sapiens
tatttttttaattta

SEQ ID NO: 1606825 - DNA, 15 bp, Homo sapiens
atttttttaatttat

SEQ ID NO: 1606826 - DNA, 15 bp, Homo sapiens
tttttttaatttatt

SEQ ID NO: 1606827 - DNA, 15 bp, Homo sapiens
ttttttaatttatta

SEQ ID NO: 1606828 - DNA, 15 bp, Homo sapiens
tttttaatttattat

SEQ ID NO: 1606829 - DNA, 15 bp, Homo sapiens
ttttaatttattatt

SEQ ID NO: 1606830 - DNA, 15 bp, Homo sapiens
tttaatttattatta

SEQ ID NO: 1606831 - DNA, 15 bp, Homo sapiens
ttaatttattattat

SEQ ID NO: 1606832 - DNA, 15 bp, Homo sapiens
taatttattattatt

SEQ ID NO: 1606833 - DNA, 15 bp, Homo sapiens
aatttattattatta

SEQ ID NO: 1606834 - DNA, 15 bp, Homo sapiens
atttattattattat

SEQ ID NO: 1606835 - DNA, 15 bp, Homo sapiens
attattattattttg

SEQ ID NO: 1606836 - DNA, 15 bp, Homo sapiens
ttattattattttga

SEQ ID NO: 1606837 - DNA, 15 bp, Homo sapiens
tattattattttgag

SEQ ID NO: 1606838 - DNA, 15 bp, Homo sapiens
attattattttgaga

SEQ ID NO: 1606839 - DNA, 15 bp, Homo sapiens
ttattattttgagac

SEQ ID NO: 1606840 - DNA, 15 bp, Homo sapiens
tattattttgagaca

SEQ ID NO: 1606841 - DNA, 15 bp, Homo sapiens
attattttgagacaa

SEQ ID NO: 1606842 - DNA, 15 bp, Homo sapiens
ttattttgagacaaa

SEQ ID NO: 1606843 - DNA, 15 bp, Homo sapiens
tattttgagacaaag

SEQ ID NO: 1606844 - DNA, 15 bp, Homo sapiens
attttgagacaaagt

SEQ ID NO: 1606845 - DNA, 15 bp, Homo sapiens
tgagacaaagtctca

SEQ ID NO: 1606846 - DNA, 15 bp, Homo sapiens
gagacaaagtctcac

SEQ ID NO: 1606847 - DNA, 15 bp, Homo sapiens
aagtctcactctgta

SEQ ID NO: 1606848 - DNA, 15 bp, Homo sapiens
agtctcactctgtat

SEQ ID NO: 1606849 - DNA, 15 bp, Homo sapiens
gtctcactctgtatc

SEQ ID NO: 1606850 - DNA, 15 bp, Homo sapiens
tctcactctgtatcc

SEQ ID NO: 1606851 - DNA, 15 bp, Homo sapiens
ctcactctgtatccc

SEQ ID NO: 1606852 - DNA, 15 bp, Homo sapiens
tcactctgtatccca

SEQ ID NO: 1606853 - DNA, 15 bp, Homo sapiens
cactctgtatcccag

SEQ ID NO: 1606854 - DNA, 15 bp, Homo sapiens
actctgtatcccagg

SEQ ID NO: 1606855 - DNA, 15 bp, Homo sapiens
ctctgtatcccaggc

SEQ ID NO: 1606856 - DNA, 15 bp, Homo sapiens
tctgtatcccaggct

SEQ ID NO: 1606857 - DNA, 15 bp, Homo sapiens
ctgtatcccaggctg

SEQ ID NO: 1606858 - DNA, 15 bp, Homo sapiens
tgtatcccaggctgg

SEQ ID NO: 1606859 - DNA, 15 bp, Homo sapiens
gtatcccaggctgga

SEQ ID NO: 1606860 - DNA, 15 bp, Homo sapiens
tatcccaggctggag

SEQ ID NO: 1606861 - DNA, 15 bp, Homo sapiens
atcccaggctggagt

SEQ ID NO: 1606862 - DNA, 15 bp, Homo sapiens
tggagtgcagtagca

SEQ ID NO: 1606863 - DNA, 15 bp, Homo sapiens
ggagtgcagtagcat

SEQ ID NO: 1606864 - DNA, 15 bp, Homo sapiens
gagtgcagtagcatg

SEQ ID NO: 1606865 - DNA, 15 bp, Homo sapiens
agtgcagtagcatga

SEQ ID NO: 1606866 - DNA, 15 bp, Homo sapiens
gtgcagtagcatgat

SEQ ID NO: 1606867 - DNA, 15 bp, Homo sapiens
tgcagtagcatgatc

SEQ ID NO: 1606868 - DNA, 15 bp, Homo sapiens
gcagtagcatgatct

SEQ ID NO: 1606869 - DNA, 15 bp, Homo sapiens
cagtagcatgatctc

SEQ ID NO: 1606870 - DNA, 15 bp, Homo sapiens
agtagcatgatctcg

SEQ ID NO: 1606871 - DNA, 15 bp, Homo sapiens
gtagcatgatctcgg

SEQ ID NO: 1606872 - DNA, 15 bp, Homo sapiens
tagcatgatctcggc

SEQ ID NO: 1606873 - DNA, 15 bp, Homo sapiens
agcatgatctcggct

SEQ ID NO: 1606874 - DNA, 15 bp, Homo sapiens
ctcagcttcccgagt

SEQ ID NO: 1606875 - DNA, 15 bp, Homo sapiens
tcagcttcccgagta

SEQ ID NO: 1606876 - DNA, 15 bp, Homo sapiens
cagcttcccgagtag

SEQ ID NO: 1606877 - DNA, 15 bp, Homo sapiens
agcttcccgagtagc

SEQ ID NO: 1606878 - DNA, 15 bp, Homo sapiens
gcttcccgagtagct

SEQ ID NO: 1606879 - DNA, 15 bp, Homo sapiens
cttcccgagtagctg

SEQ ID NO: 1606880 - DNA, 15 bp, Homo sapiens
ttcccgagtagctga

SEQ ID NO: 1606881 - DNA, 15 bp, Homo sapiens
tgagattacaggcac

SEQ ID NO: 1606882 - DNA, 15 bp, Homo sapiens
gagattacaggcacc

SEQ ID NO: 1606883 - DNA, 15 bp, Homo sapiens
agattacaggcaccc

SEQ ID NO: 1606884 - DNA, 15 bp, Homo sapiens
ggcacccaccaccat

SEQ ID NO: 1606885 - DNA, 15 bp, Homo sapiens
gcacccaccaccatg

SEQ ID NO: 1606886 - DNA, 15 bp, Homo sapiens
cacccaccaccatgt

SEQ ID NO: 1606887 - DNA, 15 bp, Homo sapiens
acccaccaccatgtc

SEQ ID NO: 1606888 - DNA, 15 bp, Homo sapiens
cccaccaccatgtca

SEQ ID NO: 1606889 - DNA, 15 bp, Homo sapiens
ccaccaccatgtcaa

SEQ ID NO: 1606890 - DNA, 15 bp, Homo sapiens
caccaccatgtcaag

SEQ ID NO: 1606891 - DNA, 15 bp, Homo sapiens
accaccatgtcaagc

SEQ ID NO: 1606892 - DNA, 15 bp, Homo sapiens
ccaccatgtcaagct

SEQ ID NO: 1606893 - DNA, 15 bp, Homo sapiens
caccatgtcaagcta

SEQ ID NO: 1606894 - DNA, 15 bp, Homo sapiens
accatgtcaagctaa

SEQ ID NO: 1606895 - DNA, 15 bp, Homo sapiens
ccatgtcaagctaat

SEQ ID NO: 1606896 - DNA, 15 bp, Homo sapiens
catgtcaagctaatt

SEQ ID NO: 1606897 - DNA, 15 bp, Homo sapiens
atgtcaagctaattt

SEQ ID NO: 1606898 - DNA, 15 bp, Homo sapiens
tgtcaagctaatttt

SEQ ID NO: 1606899 - DNA, 15 bp, Homo sapiens
gtcaagctaattttt

SEQ ID NO: 1606900 - DNA, 15 bp, Homo sapiens
tcaagctaatttttg

SEQ ID NO: 1606901 - DNA, 15 bp, Homo sapiens
caagctaatttttgt

SEQ ID NO: 1606902 - DNA, 15 bp, Homo sapiens
aagctaatttttgta

SEQ ID NO: 1606903 - DNA, 15 bp, Homo sapiens
gttttagtagagata

SEQ ID NO: 1606904 - DNA, 15 bp, Homo sapiens
tagagataaggtttt

SEQ ID NO: 1606905 - DNA, 15 bp, Homo sapiens
agagataaggttttg

SEQ ID NO: 1606906 - DNA, 15 bp, Homo sapiens
gagataaggttttgc

SEQ ID NO: 1606907 - DNA, 15 bp, Homo sapiens
agataaggttttgcc

SEQ ID NO: 1606908 - DNA, 15 bp, Homo sapiens
gataaggttttgcca

SEQ ID NO: 1606909 - DNA, 15 bp, Homo sapiens
ataaggttttgccat

SEQ ID NO: 1606910 - DNA, 15 bp, Homo sapiens
taaggttttgccatg

SEQ ID NO: 1606911 - DNA, 15 bp, Homo sapiens
aaggttttgccatgt

SEQ ID NO: 1606912 - DNA, 15 bp, Homo sapiens
tcaaactcctgaccc

SEQ ID NO: 1606913 - DNA, 15 bp, Homo sapiens
caaactcctgaccca

SEQ ID NO: 1606914 - DNA, 15 bp, Homo sapiens
aaactcctgacccag

SEQ ID NO: 1606915 - DNA, 15 bp, Homo sapiens
actcctgacccaggt

SEQ ID NO: 1606916 - DNA, 15 bp, Homo sapiens
ctcctgacccaggtg

SEQ ID NO: 1606917 - DNA, 15 bp, Homo sapiens
tcctgacccaggtga

SEQ ID NO: 1606918 - DNA, 15 bp, Homo sapiens
cctgacccaggtgat

SEQ ID NO: 1606919 - DNA, 15 bp, Homo sapiens
ctgacccaggtgatc

SEQ ID NO: 1606920 - DNA, 15 bp, Homo sapiens
tgacccaggtgatcc

SEQ ID NO: 1606921 - DNA, 15 bp, Homo sapiens
gacccaggtgatcca

SEQ ID NO: 1606922 - DNA, 15 bp, Homo sapiens
acccaggtgatccac

SEQ ID NO: 1606923 - DNA, 15 bp, Homo sapiens
cccaggtgatccacc

SEQ ID NO: 1606924 - DNA, 15 bp, Homo sapiens
ccaggtgatccaccc

SEQ ID NO: 1606925 - DNA, 15 bp, Homo sapiens
acccacctcagcctt

SEQ ID NO: 1606926 - DNA, 15 bp, Homo sapiens
cctcagccttccaaa

SEQ ID NO: 1606927 - DNA, 15 bp, Homo sapiens
ctcagccttccaaag

SEQ ID NO: 1606928 - DNA, 15 bp, Homo sapiens
tcagccttccaaagt

SEQ ID NO: 1606929 - DNA, 15 bp, Homo sapiens
cagccttccaaagtg

SEQ ID NO: 1606930 - DNA, 15 bp, Homo sapiens
agccttccaaagtgc

SEQ ID NO: 1606931 - DNA, 15 bp, Homo sapiens
aggcgtgagccacct

SEQ ID NO: 1606932 - DNA, 15 bp, Homo sapiens
ggcgtgagccacctt

SEQ ID NO: 1606933 - DNA, 15 bp, Homo sapiens
gcgtgagccaccttg

SEQ ID NO: 1606934 - DNA, 15 bp, Homo sapiens
cgtgagccaccttgc

SEQ ID NO: 1606935 - DNA, 15 bp, Homo sapiens
gtgagccaccttgcc

SEQ ID NO: 1606936 - DNA, 15 bp, Homo sapiens
tgagccaccttgccc

SEQ ID NO: 1606937 - DNA, 15 bp, Homo sapiens
gagccaccttgcccg

SEQ ID NO: 1606938 - DNA, 15 bp, Homo sapiens
agccaccttgcccgg

SEQ ID NO: 1606939 - DNA, 15 bp, Homo sapiens
gccaccttgcccggc

SEQ ID NO: 1606940 - DNA, 15 bp, Homo sapiens
ccaccttgcccggcc

SEQ ID NO: 1606941 - DNA, 15 bp, Homo sapiens
caccttgcccggccg

SEQ ID NO: 1606942 - DNA, 15 bp, Homo sapiens
accttgcccggccgt

SEQ ID NO: 1606943 - DNA, 15 bp, Homo sapiens
ccttgcccggccgta

SEQ ID NO: 1606944 - DNA, 15 bp, Homo sapiens
cttgcccggccgtac

SEQ ID NO: 1606945 - DNA, 15 bp, Homo sapiens
ttgcccggccgtact

SEQ ID NO: 1606946 - DNA, 15 bp, Homo sapiens
tgcccggccgtactt

SEQ ID NO: 1606947 - DNA, 15 bp, Homo sapiens
gcccggccgtacttt

SEQ ID NO: 1606948 - DNA, 15 bp, Homo sapiens
cccggccgtactttg

SEQ ID NO: 1606949 - DNA, 15 bp, Homo sapiens
ccggccgtactttgt

SEQ ID NO: 1606950 - DNA, 15 bp, Homo sapiens
cggccgtactttgtt

SEQ ID NO: 1606951 - DNA, 15 bp, Homo sapiens
ggccgtactttgttt

SEQ ID NO: 1606952 - DNA, 15 bp, Homo sapiens
gccgtactttgtttt

SEQ ID NO: 1606953 - DNA, 15 bp, Homo sapiens
ccgtactttgtttta

SEQ ID NO: 1606954 - DNA, 15 bp, Homo sapiens
cgtactttgttttat

SEQ ID NO: 1606955 - DNA, 15 bp, Homo sapiens
gtactttgttttatt

SEQ ID NO: 1606956 - DNA, 15 bp, Homo sapiens
tactttgttttattt

SEQ ID NO: 1606957 - DNA, 15 bp, Homo sapiens
actttgttttatttt

SEQ ID NO: 1606958 - DNA, 15 bp, Homo sapiens
ctttgttttattttt

SEQ ID NO: 1606959 - DNA, 15 bp, Homo sapiens
tttgttttatttttc

SEQ ID NO: 1606960 - DNA, 15 bp, Homo sapiens
ttgttttatttttca

SEQ ID NO: 1606961 - DNA, 15 bp, Homo sapiens
tgttttatttttcac

SEQ ID NO: 1606962 - DNA, 15 bp, Homo sapiens
gttttatttttcaca

SEQ ID NO: 1606963 - DNA, 15 bp, Homo sapiens
ttatttttcacaaag

SEQ ID NO: 1606964 - DNA, 15 bp, Homo sapiens
tatttttcacaaaga

SEQ ID NO: 1606965 - DNA, 15 bp, Homo sapiens
atttttcacaaagac

SEQ ID NO: 1606966 - DNA, 15 bp, Homo sapiens
tttttcacaaagact

SEQ ID NO: 1606967 - DNA, 15 bp, Homo sapiens
ttttcacaaagactt

SEQ ID NO: 1606968 - DNA, 15 bp, Homo sapiens
tttcacaaagacttt

SEQ ID NO: 1606969 - DNA, 15 bp, Homo sapiens
ttcacaaagactttt

SEQ ID NO: 1606970 - DNA, 15 bp, Homo sapiens
tcacaaagacttttc

SEQ ID NO: 1606971 - DNA, 15 bp, Homo sapiens
cacaaagacttttcc

SEQ ID NO: 1606972 - DNA, 15 bp, Homo sapiens
acaaagacttttccc

SEQ ID NO: 1606973 - DNA, 15 bp, Homo sapiens
caaagacttttccct

SEQ ID NO: 1606974 - DNA, 15 bp, Homo sapiens
aaagacttttccctt

SEQ ID NO: 1606975 - DNA, 15 bp, Homo sapiens
aagacttttcccttt

SEQ ID NO: 1606976 - DNA, 15 bp, Homo sapiens
agacttttccctttt

SEQ ID NO: 1606977 - DNA, 15 bp, Homo sapiens
gacttttcccttttg

SEQ ID NO: 1606978 - DNA, 15 bp, Homo sapiens
acttttcccttttgg

SEQ ID NO: 1606979 - DNA, 15 bp, Homo sapiens
cttttcccttttgga

SEQ ID NO: 1606980 - DNA, 15 bp, Homo sapiens
ttttcccttttggat

SEQ ID NO: 1606981 - DNA, 15 bp, Homo sapiens
tttcccttttggatc

SEQ ID NO: 1606982 - DNA, 15 bp, Homo sapiens
ttcccttttggatct

SEQ ID NO: 1606983 - DNA, 15 bp, Homo sapiens
tcccttttggatctt

SEQ ID NO: 1606984 - DNA, 15 bp, Homo sapiens
cccttttggatcttc

SEQ ID NO: 1606985 - DNA, 15 bp, Homo sapiens
ccttttggatcttct

SEQ ID NO: 1606986 - DNA, 15 bp, Homo sapiens
ttttggatcttcttt

SEQ ID NO: 1606987 - DNA, 15 bp, Homo sapiens
tttggatcttctttc

SEQ ID NO: 1606988 - DNA, 15 bp, Homo sapiens
ttggatcttctttct

SEQ ID NO: 1606989 - DNA, 15 bp, Homo sapiens
tggatcttctttcta

SEQ ID NO: 1606990 - DNA, 15 bp, Homo sapiens
ggatcttctttctac

SEQ ID NO: 1606991 - DNA, 15 bp, Homo sapiens
gatcttctttctacc

SEQ ID NO: 1606992 - DNA, 15 bp, Homo sapiens
atcttctttctaccc

SEQ ID NO: 1606993 - DNA, 15 bp, Homo sapiens
tcttctttctaccct

SEQ ID NO: 1606994 - DNA, 15 bp, Homo sapiens
cttctttctaccctg

SEQ ID NO: 1606995 - DNA, 15 bp, Homo sapiens
ttctttctaccctgt

SEQ ID NO: 1606996 - DNA, 15 bp, Homo sapiens
tctttctaccctgtg

SEQ ID NO: 1606997 - DNA, 15 bp, Homo sapiens
ctttctaccctgtgt

SEQ ID NO: 1606998 - DNA, 15 bp, Homo sapiens
tttctaccctgtgtt

SEQ ID NO: 1606999 - DNA, 15 bp, Homo sapiens
ttctaccctgtgttg

SEQ ID NO: 1607000 - DNA, 15 bp, Homo sapiens
tctaccctgtgttgg

SEQ ID NO: 1607001 - DNA, 15 bp, Homo sapiens
ctaccctgtgttggt

SEQ ID NO: 1607002 - DNA, 15 bp, Homo sapiens
taccctgtgttggtt

SEQ ID NO: 1607003 - DNA, 15 bp, Homo sapiens
accctgtgttggttt

SEQ ID NO: 1607004 - DNA, 15 bp, Homo sapiens
ccctgtgttggtttt

SEQ ID NO: 1607005 - DNA, 15 bp, Homo sapiens
cctgtgttggttttt

SEQ ID NO: 1607006 - DNA, 15 bp, Homo sapiens
ctgtgttggtttttg

SEQ ID NO: 1607007 - DNA, 15 bp, Homo sapiens
tgtgttggtttttgt

SEQ ID NO: 1607008 - DNA, 15 bp, Homo sapiens
gtgttggtttttgtt

SEQ ID NO: 1607009 - DNA, 15 bp, Homo sapiens
tgttggtttttgttt

SEQ ID NO: 1607010 - DNA, 15 bp, Homo sapiens
gttggtttttgtttt

SEQ ID NO: 1607011 - DNA, 15 bp, Homo sapiens
ttggtttttgttttg

SEQ ID NO: 1607012 - DNA, 15 bp, Homo sapiens
tggtttttgttttgt

SEQ ID NO: 1607013 - DNA, 15 bp, Homo sapiens
ttgttttgttttggg

SEQ ID NO: 1607014 - DNA, 15 bp, Homo sapiens
tgttttgttttgggc

SEQ ID NO: 1607015 - DNA, 15 bp, Homo sapiens
gttttgttttgggct

SEQ ID NO: 1607016 - DNA, 15 bp, Homo sapiens
ttttgttttgggctt

SEQ ID NO: 1607017 - DNA, 15 bp, Homo sapiens
tttgttttgggcttt

SEQ ID NO: 1607018 - DNA, 15 bp, Homo sapiens
ttgttttgggctttt

SEQ ID NO: 1607019 - DNA, 15 bp, Homo sapiens
tgttttgggcttttt

SEQ ID NO: 1607020 - DNA, 15 bp, Homo sapiens
gttttgggctttttt

SEQ ID NO: 1607021 - DNA, 15 bp, Homo sapiens
ttttgggcttttttg

SEQ ID NO: 1607022 - DNA, 15 bp, Homo sapiens
tttgggcttttttgt

SEQ ID NO: 1607023 - DNA, 15 bp, Homo sapiens
ttgggcttttttgtt

SEQ ID NO: 1607024 - DNA, 15 bp, Homo sapiens
tgggcttttttgttt

SEQ ID NO: 1607025 - DNA, 15 bp, Homo sapiens
gggcttttttgtttt

SEQ ID NO: 1607026 - DNA, 15 bp, Homo sapiens
ggcttttttgttttt

SEQ ID NO: 1607027 - DNA, 15 bp, Homo sapiens
gcttttttgtttttc

SEQ ID NO: 1607028 - DNA, 15 bp, Homo sapiens
cttttttgtttttcc

SEQ ID NO: 1607029 - DNA, 15 bp, Homo sapiens
ttttttgtttttcca

SEQ ID NO: 1607030 - DNA, 15 bp, Homo sapiens
tttttgtttttccag

SEQ ID NO: 1607031 - DNA, 15 bp, Homo sapiens
ttttgtttttccagt

SEQ ID NO: 1607032 - DNA, 15 bp, Homo sapiens
tttgtttttccagtc

SEQ ID NO: 1607033 - DNA, 15 bp, Homo sapiens
ttgtttttccagtca

SEQ ID NO: 1607034 - DNA, 15 bp, Homo sapiens
tgtttttccagtcaa

SEQ ID NO: 1607035 - DNA, 15 bp, Homo sapiens
gtttttccagtcaac

SEQ ID NO: 1607036 - DNA, 15 bp, Homo sapiens
tttttccagtcaact

SEQ ID NO: 1607037 - DNA, 15 bp, Homo sapiens
ttttccagtcaactg

SEQ ID NO: 1607038 - DNA, 15 bp, Homo sapiens
tttccagtcaactga

SEQ ID NO: 1607039 - DNA, 15 bp, Homo sapiens
ttccagtcaactgaa

SEQ ID NO: 1607040 - DNA, 15 bp, Homo sapiens
tccagtcaactgaag

SEQ ID NO: 1607041 - DNA, 15 bp, Homo sapiens
ccagtcaactgaagc

SEQ ID NO: 1607042 - DNA, 15 bp, Homo sapiens
cagtcaactgaagct

SEQ ID NO: 1607043 - DNA, 15 bp, Homo sapiens
agtcaactgaagctc

SEQ ID NO: 1607044 - DNA, 15 bp, Homo sapiens
gtcaactgaagctct

SEQ ID NO: 1607045 - DNA, 15 bp, Homo sapiens
tcaactgaagctctt

SEQ ID NO: 1607046 - DNA, 15 bp, Homo sapiens
caactgaagctcttt

SEQ ID NO: 1607047 - DNA, 15 bp, Homo sapiens
aactgaagctctttt

SEQ ID NO: 1607048 - DNA, 15 bp, Homo sapiens
actgaagctcttttt

SEQ ID NO: 1607049 - DNA, 15 bp, Homo sapiens
ctgaagctcttttta

SEQ ID NO: 1607050 - DNA, 15 bp, Homo sapiens
tgaagctctttttaa

SEQ ID NO: 1607051 - DNA, 15 bp, Homo sapiens
gaagctctttttaaa

SEQ ID NO: 1607052 - DNA, 15 bp, Homo sapiens
aagctctttttaaaa

SEQ ID NO: 1607053 - DNA, 15 bp, Homo sapiens
agctctttttaaaaa

SEQ ID NO: 1607054 - DNA, 15 bp, Homo sapiens
gctctttttaaaaat

SEQ ID NO: 1607055 - DNA, 15 bp, Homo sapiens
ctctttttaaaaatt

SEQ ID NO: 1607056 - DNA, 15 bp, Homo sapiens
tctttttaaaaatta

SEQ ID NO: 1607057 - DNA, 15 bp, Homo sapiens
ctttttaaaaattat

SEQ ID NO: 1607058 - DNA, 15 bp, Homo sapiens
tttttaaaaattata

SEQ ID NO: 1607059 - DNA, 15 bp, Homo sapiens
ttttaaaaattatac

SEQ ID NO: 1607060 - DNA, 15 bp, Homo sapiens
tttaaaaattataca

SEQ ID NO: 1607061 - DNA, 15 bp, Homo sapiens
ttaaaaattatacat

SEQ ID NO: 1607062 - DNA, 15 bp, Homo sapiens
taaaaattatacatt

SEQ ID NO: 1607063 - DNA, 15 bp, Homo sapiens
aaaaattatacattt

SEQ ID NO: 1607064 - DNA, 15 bp, Homo sapiens
aaaattatacatttg

SEQ ID NO: 1607065 - DNA, 15 bp, Homo sapiens
aaattatacatttgg

SEQ ID NO: 1607066 - DNA, 15 bp, Homo sapiens
aattatacatttggt

SEQ ID NO: 1607067 - DNA, 15 bp, Homo sapiens
attatacatttggtc

SEQ ID NO: 1607068 - DNA, 15 bp, Homo sapiens
ttatacatttggtcc

SEQ ID NO: 1607069 - DNA, 15 bp, Homo sapiens
tatacatttggtcct

SEQ ID NO: 1607070 - DNA, 15 bp, Homo sapiens
atacatttggtcctt

SEQ ID NO: 1607071 - DNA, 15 bp, Homo sapiens
tacatttggtccttt

SEQ ID NO: 1607072 - DNA, 15 bp, Homo sapiens
acatttggtcctttt

SEQ ID NO: 1607073 - DNA, 15 bp, Homo sapiens
catttggtccttttt

SEQ ID NO: 1607074 - DNA, 15 bp, Homo sapiens
atttggtcctttttt

SEQ ID NO: 1607075 - DNA, 15 bp, Homo sapiens
tttggtccttttttt

SEQ ID NO: 1607076 - DNA, 15 bp, Homo sapiens
ttggtcctttttttt

SEQ ID NO: 1607077 - DNA, 15 bp, Homo sapiens
tggtccttttttttg

SEQ ID NO: 1607078 - DNA, 15 bp, Homo sapiens
ggtccttttttttgc

SEQ ID NO: 1607079 - DNA, 15 bp, Homo sapiens
gtccttttttttgct

SEQ ID NO: 1607080 - DNA, 15 bp, Homo sapiens
tccttttttttgctt

SEQ ID NO: 1607081 - DNA, 15 bp, Homo sapiens
ccttttttttgcttc

SEQ ID NO: 1607082 - DNA, 15 bp, Homo sapiens
cttttttttgcttcc

SEQ ID NO: 1607083 - DNA, 15 bp, Homo sapiens
ttttttttgcttcct

SEQ ID NO: 1607084 - DNA, 15 bp, Homo sapiens
tttttttgcttcctt

SEQ ID NO: 1607085 - DNA, 15 bp, Homo sapiens
ttttttgcttccttt

SEQ ID NO: 1607086 - DNA, 15 bp, Homo sapiens
tttttgcttcctttc

SEQ ID NO: 1607087 - DNA, 15 bp, Homo sapiens
ttttgcttcctttct

SEQ ID NO: 1607088 - DNA, 15 bp, Homo sapiens
tttgcttcctttctt

SEQ ID NO: 1607089 - DNA, 15 bp, Homo sapiens
ttgcttcctttctta

SEQ ID NO: 1607090 - DNA, 15 bp, Homo sapiens
tgcttcctttcttat

SEQ ID NO: 1607091 - DNA, 15 bp, Homo sapiens
gcttcctttcttatt

SEQ ID NO: 1607092 - DNA, 15 bp, Homo sapiens
cttcctttcttatta

SEQ ID NO: 1607093 - DNA, 15 bp, Homo sapiens
ttcctttcttattag

SEQ ID NO: 1607094 - DNA, 15 bp, Homo sapiens
tcctttcttattaga

SEQ ID NO: 1607095 - DNA, 15 bp, Homo sapiens
cctttcttattagaa

SEQ ID NO: 1607096 - DNA, 15 bp, Homo sapiens
ctttcttattagaat

SEQ ID NO: 1607097 - DNA, 15 bp, Homo sapiens
tttcttattagaatt

SEQ ID NO: 1607098 - DNA, 15 bp, Homo sapiens
ttcttattagaatta

SEQ ID NO: 1607099 - DNA, 15 bp, Homo sapiens
tcttattagaattat

SEQ ID NO: 1607100 - DNA, 15 bp, Homo sapiens
cttattagaattatt

SEQ ID NO: 1607101 - DNA, 15 bp, Homo sapiens
ttattagaattattt

SEQ ID NO: 1607102 - DNA, 15 bp, Homo sapiens
tattagaattatttt

SEQ ID NO: 1607103 - DNA, 15 bp, Homo sapiens
attagaattattttt

SEQ ID NO: 1607104 - DNA, 15 bp, Homo sapiens
ttagaattattttta

SEQ ID NO: 1607105 - DNA, 15 bp, Homo sapiens
tagaattatttttac

SEQ ID NO: 1607106 - DNA, 15 bp, Homo sapiens
agaattatttttact

SEQ ID NO: 1607107 - DNA, 15 bp, Homo sapiens
gaattatttttactg

SEQ ID NO: 1607108 - DNA, 15 bp, Homo sapiens
aattatttttactga

SEQ ID NO: 1607109 - DNA, 15 bp, Homo sapiens
attatttttactgag

SEQ ID NO: 1607110 - DNA, 15 bp, Homo sapiens
ttatttttactgaga

SEQ ID NO: 1607111 - DNA, 15 bp, Homo sapiens
tatttttactgagaa

SEQ ID NO: 1607112 - DNA, 15 bp, Homo sapiens
atttttactgagaaa

SEQ ID NO: 1607113 - DNA, 15 bp, Homo sapiens
tttttactgagaaaa

SEQ ID NO: 1607114 - DNA, 15 bp, Homo sapiens
ttttactgagaaaaa

SEQ ID NO: 1607115 - DNA, 15 bp, Homo sapiens
tttactgagaaaaaa

SEQ ID NO: 1607116 - DNA, 15 bp, Homo sapiens
ttactgagaaaaaaa

SEQ ID NO: 1607117 - DNA, 15 bp, Homo sapiens
tactgagaaaaaaaa

SEQ ID NO: 1607118 - DNA, 15 bp, Homo sapiens
actgagaaaaaaaag

SEQ ID NO: 1607119 - DNA, 15 bp, Homo sapiens
ctgagaaaaaaaagt

SEQ ID NO: 1607120 - DNA, 15 bp, Homo sapiens
tgagaaaaaaaagta

SEQ ID NO: 1607121 - DNA, 15 bp, Homo sapiens
gagaaaaaaaagtaa

SEQ ID NO: 1607122 - DNA, 15 bp, Homo sapiens
agaaaaaaaagtaaa

SEQ ID NO: 1607123 - DNA, 15 bp, Homo sapiens
gaaaaaaaagtaaaa

SEQ ID NO: 1607124 - DNA, 15 bp, Homo sapiens
aaaaaaaagtaaaat

SEQ ID NO: 1607125 - DNA, 15 bp, Homo sapiens
aaaaaaagtaaaatt

SEQ ID NO: 1607126 - DNA, 15 bp, Homo sapiens
aaaaaagtaaaattt

SEQ ID NO: 1607127 - DNA, 15 bp, Homo sapiens
aaaaagtaaaatttc

SEQ ID NO: 1607128 - DNA, 15 bp, Homo sapiens
aaaagtaaaatttca

SEQ ID NO: 1607129 - DNA, 15 bp, Homo sapiens
aaagtaaaatttcat

SEQ ID NO: 1607130 - DNA, 15 bp, Homo sapiens
aagtaaaatttcatt

SEQ ID NO: 1607131 - DNA, 15 bp, Homo sapiens
agtaaaatttcattg

SEQ ID NO: 1607132 - DNA, 15 bp, Homo sapiens
gtaaaatttcattgg

SEQ ID NO: 1607133 - DNA, 15 bp, Homo sapiens
taaaatttcattggt

SEQ ID NO: 1607134 - DNA, 15 bp, Homo sapiens
aaaatttcattggtc

SEQ ID NO: 1607135 - DNA, 15 bp, Homo sapiens
aaatttcattggtct

SEQ ID NO: 1607136 - DNA, 15 bp, Homo sapiens
aatttcattggtctt

SEQ ID NO: 1607137 - DNA, 15 bp, Homo sapiens
atttcattggtcttt

SEQ ID NO: 1607138 - DNA, 15 bp, Homo sapiens
tttcattggtctttt

SEQ ID NO: 1607139 - DNA, 15 bp, Homo sapiens
ttcattggtcttttt

SEQ ID NO: 1607140 - DNA, 15 bp, Homo sapiens
tcattggtctttttg

SEQ ID NO: 1607141 - DNA, 15 bp, Homo sapiens
cattggtctttttgg

SEQ ID NO: 1607142 - DNA, 15 bp, Homo sapiens
attggtctttttgga

SEQ ID NO: 1607143 - DNA, 15 bp, Homo sapiens
ttggtctttttggaa

SEQ ID NO: 1607144 - DNA, 15 bp, Homo sapiens
tggtctttttggaaa

SEQ ID NO: 1607145 - DNA, 15 bp, Homo sapiens
ggtctttttggaaaa

SEQ ID NO: 1607146 - DNA, 15 bp, Homo sapiens
gtctttttggaaaag

SEQ ID NO: 1607147 - DNA, 15 bp, Homo sapiens
tctttttggaaaagc

SEQ ID NO: 1607148 - DNA, 15 bp, Homo sapiens
ctttttggaaaagct

SEQ ID NO: 1607149 - DNA, 15 bp, Homo sapiens
tttttggaaaagctt

SEQ ID NO: 1607150 - DNA, 15 bp, Homo sapiens
ttttggaaaagctta

SEQ ID NO: 1607151 - DNA, 15 bp, Homo sapiens
tttggaaaagcttaa

SEQ ID NO: 1607152 - DNA, 15 bp, Homo sapiens
ttggaaaagcttaaa

SEQ ID NO: 1607153 - DNA, 15 bp, Homo sapiens
tggaaaagcttaaaa

SEQ ID NO: 1607154 - DNA, 15 bp, Homo sapiens
ggaaaagcttaaaat

SEQ ID NO: 1607155 - DNA, 15 bp, Homo sapiens
gaaaagcttaaaata

SEQ ID NO: 1607156 - DNA, 15 bp, Homo sapiens
aaaagcttaaaatat

SEQ ID NO: 1607157 - DNA, 15 bp, Homo sapiens
aaagcttaaaatatt

SEQ ID NO: 1607158 - DNA, 15 bp, Homo sapiens
aagcttaaaatattc

SEQ ID NO: 1607159 - DNA, 15 bp, Homo sapiens
agcttaaaatattcc

SEQ ID NO: 1607160 - DNA, 15 bp, Homo sapiens
gcttaaaatattccc

SEQ ID NO: 1607161 - DNA, 15 bp, Homo sapiens
cttaaaatattcccg

SEQ ID NO: 1607162 - DNA, 15 bp, Homo sapiens
ttaaaatattcccga

SEQ ID NO: 1607163 - DNA, 15 bp, Homo sapiens
taaaatattcccgat

SEQ ID NO: 1607164 - DNA, 15 bp, Homo sapiens
aaaatattcccgatg

SEQ ID NO: 1607165 - DNA, 15 bp, Homo sapiens
aaatattcccgatgg

SEQ ID NO: 1607166 - DNA, 15 bp, Homo sapiens
aatattcccgatggg

SEQ ID NO: 1607167 - DNA, 15 bp, Homo sapiens
atattcccgatgggc

SEQ ID NO: 1607168 - DNA, 15 bp, Homo sapiens
tattcccgatgggct

SEQ ID NO: 1607169 - DNA, 15 bp, Homo sapiens
attcccgatgggctt

SEQ ID NO: 1607170 - DNA, 15 bp, Homo sapiens
ttcccgatgggcttc

SEQ ID NO: 1607171 - DNA, 15 bp, Homo sapiens
tcccgatgggcttct

SEQ ID NO: 1607172 - DNA, 15 bp, Homo sapiens
cccgatgggcttctc

SEQ ID NO: 1607173 - DNA, 15 bp, Homo sapiens
ccgatgggcttctct

SEQ ID NO: 1607174 - DNA, 15 bp, Homo sapiens
cgatgggcttctcta

SEQ ID NO: 1607175 - DNA, 15 bp, Homo sapiens
gatgggcttctctaa

SEQ ID NO: 1607176 - DNA, 15 bp, Homo sapiens
atgggcttctctaag

SEQ ID NO: 1607177 - DNA, 15 bp, Homo sapiens
tgggcttctctaaga

SEQ ID NO: 1607178 - DNA, 15 bp, Homo sapiens
gggcttctctaagag

SEQ ID NO: 1607179 - DNA, 15 bp, Homo sapiens
ggcttctctaagagt

SEQ ID NO: 1607180 - DNA, 15 bp, Homo sapiens
gcttctctaagagtt

SEQ ID NO: 1607181 - DNA, 15 bp, Homo sapiens
cttctctaagagttg

SEQ ID NO: 1607182 - DNA, 15 bp, Homo sapiens
ttctctaagagttgt

SEQ ID NO: 1607183 - DNA, 15 bp, Homo sapiens
tctctaagagttgtt

SEQ ID NO: 1607184 - DNA, 15 bp, Homo sapiens
ctctaagagttgttt

SEQ ID NO: 1607185 - DNA, 15 bp, Homo sapiens
tctaagagttgtttt

SEQ ID NO: 1607186 - DNA, 15 bp, Homo sapiens
ctaagagttgttttc

SEQ ID NO: 1607187 - DNA, 15 bp, Homo sapiens
taagagttgttttcc

SEQ ID NO: 1607188 - DNA, 15 bp, Homo sapiens
aagagttgttttccc

SEQ ID NO: 1607189 - DNA, 15 bp, Homo sapiens
agagttgttttccca

SEQ ID NO: 1607190 - DNA, 15 bp, Homo sapiens
gagttgttttcccat

SEQ ID NO: 1607191 - DNA, 15 bp, Homo sapiens
agttgttttcccatt

SEQ ID NO: 1607192 - DNA, 15 bp, Homo sapiens
gttgttttcccattt

SEQ ID NO: 1607193 - DNA, 15 bp, Homo sapiens
ttgttttcccattta

SEQ ID NO: 1607194 - DNA, 15 bp, Homo sapiens
tgttttcccatttac

SEQ ID NO: 1607195 - DNA, 15 bp, Homo sapiens
gttttcccatttact

SEQ ID NO: 1607196 - DNA, 15 bp, Homo sapiens
ttttcccatttactt

SEQ ID NO: 1607197 - DNA, 15 bp, Homo sapiens
tttcccatttacttc

SEQ ID NO: 1607198 - DNA, 15 bp, Homo sapiens
ttcccatttacttct

SEQ ID NO: 1607199 - DNA, 15 bp, Homo sapiens
tcccatttacttcta

SEQ ID NO: 1607200 - DNA, 15 bp, Homo sapiens
cccatttacttctac

SEQ ID NO: 1607201 - DNA, 15 bp, Homo sapiens
ccatttacttctact

SEQ ID NO: 1607202 - DNA, 15 bp, Homo sapiens
catttacttctactt

SEQ ID NO: 1607203 - DNA, 15 bp, Homo sapiens
atttacttctacttc

SEQ ID NO: 1607204 - DNA, 15 bp, Homo sapiens
tttacttctacttca

SEQ ID NO: 1607205 - DNA, 15 bp, Homo sapiens
ttacttctacttcac

SEQ ID NO: 1607206 - DNA, 15 bp, Homo sapiens
tacttctacttcacc

SEQ ID NO: 1607207 - DNA, 15 bp, Homo sapiens
acttctacttcacct

SEQ ID NO: 1607208 - DNA, 15 bp, Homo sapiens
cttctacttcacctt

SEQ ID NO: 1607209 - DNA, 15 bp, Homo sapiens
ttctacttcaccttt

SEQ ID NO: 1607210 - DNA, 15 bp, Homo sapiens
tctacttcacctttc

SEQ ID NO: 1607211 - DNA, 15 bp, Homo sapiens
ctacttcacctttct

SEQ ID NO: 1607212 - DNA, 15 bp, Homo sapiens
tacttcacctttctt

SEQ ID NO: 1607213 - DNA, 15 bp, Homo sapiens
acttcacctttcttt

SEQ ID NO: 1607214 - DNA, 15 bp, Homo sapiens
cttcacctttctttt

SEQ ID NO: 1607215 - DNA, 15 bp, Homo sapiens
cgcttataaggaagt

SEQ ID NO: 1607216 - DNA, 15 bp, Homo sapiens
gcttataaggaagtc

SEQ ID NO: 1607217 - DNA, 15 bp, Homo sapiens
cttataaggaagtca

SEQ ID NO: 1607218 - DNA, 15 bp, Homo sapiens
ttataaggaagtcat

SEQ ID NO: 1607219 - DNA, 15 bp, Homo sapiens
tataaggaagtcatg

SEQ ID NO: 1607220 - DNA, 15 bp, Homo sapiens
ataaggaagtcatga

SEQ ID NO: 1607221 - DNA, 15 bp, Homo sapiens
taaggaagtcatgag

SEQ ID NO: 1607222 - DNA, 15 bp, Homo sapiens
aaggaagtcatgagt

SEQ ID NO: 1607223 - DNA, 15 bp, Homo sapiens
aggaagtcatgagta

SEQ ID NO: 1607224 - DNA, 15 bp, Homo sapiens
ggaagtcatgagtat

SEQ ID NO: 1607225 - DNA, 15 bp, Homo sapiens
gaagtcatgagtatg

SEQ ID NO: 1607226 - DNA, 15 bp, Homo sapiens
aagtcatgagtatgt

SEQ ID NO: 1607227 - DNA, 15 bp, Homo sapiens
agtcatgagtatgtg

SEQ ID NO: 1607228 - DNA, 15 bp, Homo sapiens
gtcatgagtatgtgg

SEQ ID NO: 1607229 - DNA, 15 bp, Homo sapiens
tcatgagtatgtggt

SEQ ID NO: 1607230 - DNA, 15 bp, Homo sapiens
catgagtatgtggtt

SEQ ID NO: 1607231 - DNA, 15 bp, Homo sapiens
atgagtatgtggttt

SEQ ID NO: 1607232 - DNA, 15 bp, Homo sapiens
tgagtatgtggtttg

SEQ ID NO: 1607233 - DNA, 15 bp, Homo sapiens
gagtatgtggtttgg

SEQ ID NO: 1607234 - DNA, 15 bp, Homo sapiens
agtatgtggtttggt

SEQ ID NO: 1607235 - DNA, 15 bp, Homo sapiens
gtatgtggtttggtt

SEQ ID NO: 1607236 - DNA, 15 bp, Homo sapiens
tatgtggtttggtta

SEQ ID NO: 1607237 - DNA, 15 bp, Homo sapiens
atgtggtttggttaa

SEQ ID NO: 1607238 - DNA, 15 bp, Homo sapiens
tgtggtttggttaaa

SEQ ID NO: 1607239 - DNA, 15 bp, Homo sapiens
gtggtttggttaaag

SEQ ID NO: 1607240 - DNA, 15 bp, Homo sapiens
tggtttggttaaagg

SEQ ID NO: 1607241 - DNA, 15 bp, Homo sapiens
ggtttggttaaagga

SEQ ID NO: 1607242 - DNA, 15 bp, Homo sapiens
gtttggttaaaggaa

SEQ ID NO: 1607243 - DNA, 15 bp, Homo sapiens
tttggttaaaggaaa

SEQ ID NO: 1607244 - DNA, 15 bp, Homo sapiens
ttggttaaaggaaaa

SEQ ID NO: 1607245 - DNA, 15 bp, Homo sapiens
tggttaaaggaaaag

SEQ ID NO: 1607246 - DNA, 15 bp, Homo sapiens
ggttaaaggaaaagt

SEQ ID NO: 1607247 - DNA, 15 bp, Homo sapiens
gttaaaggaaaagta

SEQ ID NO: 1607248 - DNA, 15 bp, Homo sapiens
ttaaaggaaaagtaa

SEQ ID NO: 1607249 - DNA, 15 bp, Homo sapiens
taaaggaaaagtaat

SEQ ID NO: 1607250 - DNA, 15 bp, Homo sapiens
aaaggaaaagtaatt

SEQ ID NO: 1607251 - DNA, 15 bp, Homo sapiens
aaggaaaagtaattt

SEQ ID NO: 1607252 - DNA, 15 bp, Homo sapiens
aggaaaagtaatttt

SEQ ID NO: 1607253 - DNA, 15 bp, Homo sapiens
ggaaaagtaattttg

SEQ ID NO: 1607254 - DNA, 15 bp, Homo sapiens
gaaaagtaattttgt

SEQ ID NO: 1607255 - DNA, 15 bp, Homo sapiens
aaaagtaattttgtc

SEQ ID NO: 1607256 - DNA, 15 bp, Homo sapiens
aaagtaattttgtct

SEQ ID NO: 1607257 - DNA, 15 bp, Homo sapiens
aagtaattttgtcta

SEQ ID NO: 1607258 - DNA, 15 bp, Homo sapiens
agtaattttgtctag

SEQ ID NO: 1607259 - DNA, 15 bp, Homo sapiens
gtaattttgtctagt

SEQ ID NO: 1607260 - DNA, 15 bp, Homo sapiens
taattttgtctagtt

SEQ ID NO: 1607261 - DNA, 15 bp, Homo sapiens
aattttgtctagttt

SEQ ID NO: 1607262 - DNA, 15 bp, Homo sapiens
attttgtctagttta

SEQ ID NO: 1607263 - DNA, 15 bp, Homo sapiens
ttttgtctagtttag

SEQ ID NO: 1607264 - DNA, 15 bp, Homo sapiens
tttgtctagtttaga

SEQ ID NO: 1607265 - DNA, 15 bp, Homo sapiens
ttgtctagtttagag

SEQ ID NO: 1607266 - DNA, 15 bp, Homo sapiens
tgtctagtttagagg

SEQ ID NO: 1607267 - DNA, 15 bp, Homo sapiens
gtctagtttagaggt

SEQ ID NO: 1607268 - DNA, 15 bp, Homo sapiens
tctagtttagaggtt

SEQ ID NO: 1607269 - DNA, 15 bp, Homo sapiens
ctagtttagaggtta

SEQ ID NO: 1607270 - DNA, 15 bp, Homo sapiens
tagtttagaggttac

SEQ ID NO: 1607271 - DNA, 15 bp, Homo sapiens
agtttagaggttact

SEQ ID NO: 1607272 - DNA, 15 bp, Homo sapiens
gtttagaggttactt

SEQ ID NO: 1607273 - DNA, 15 bp, Homo sapiens
tttagaggttactta

SEQ ID NO: 1607274 - DNA, 15 bp, Homo sapiens
ttagaggttacttaa

SEQ ID NO: 1607275 - DNA, 15 bp, Homo sapiens
tagaggttacttaaa

SEQ ID NO: 1607276 - DNA, 15 bp, Homo sapiens
agaggttacttaaaa

SEQ ID NO: 1607277 - DNA, 15 bp, Homo sapiens
gaggttacttaaaag

SEQ ID NO: 1607278 - DNA, 15 bp, Homo sapiens
aggttacttaaaagt

SEQ ID NO: 1607279 - DNA, 15 bp, Homo sapiens
ggttacttaaaagtt

SEQ ID NO: 1607280 - DNA, 15 bp, Homo sapiens
gttacttaaaagttg

SEQ ID NO: 1607281 - DNA, 15 bp, Homo sapiens
ttacttaaaagttgt

SEQ ID NO: 1607282 - DNA, 15 bp, Homo sapiens
tacttaaaagttgtt

SEQ ID NO: 1607283 - DNA, 15 bp, Homo sapiens
acttaaaagttgttt

SEQ ID NO: 1607284 - DNA, 15 bp, Homo sapiens
cttaaaagttgtttc

SEQ ID NO: 1607285 - DNA, 15 bp, Homo sapiens
ttaaaagttgtttca

SEQ ID NO: 1607286 - DNA, 15 bp, Homo sapiens
taaaagttgtttcag

SEQ ID NO: 1607287 - DNA, 15 bp, Homo sapiens
aaaagttgtttcaga

SEQ ID NO: 1607288 - DNA, 15 bp, Homo sapiens
aaagttgtttcagac

SEQ ID NO: 1607289 - DNA, 15 bp, Homo sapiens
aagttgtttcagacc

SEQ ID NO: 1607290 - DNA, 15 bp, Homo sapiens
agttgtttcagacca

SEQ ID NO: 1607291 - DNA, 15 bp, Homo sapiens
gttgtttcagaccag

SEQ ID NO: 1607292 - DNA, 15 bp, Homo sapiens
ttgtttcagaccagg

SEQ ID NO: 1607293 - DNA, 15 bp, Homo sapiens
tgtttcagaccaggc

SEQ ID NO: 1607294 - DNA, 15 bp, Homo sapiens
gtttcagaccaggca

SEQ ID NO: 1607295 - DNA, 15 bp, Homo sapiens
tttcagaccaggcac

SEQ ID NO: 1607296 - DNA, 15 bp, Homo sapiens
ttcagaccaggcaca

SEQ ID NO: 1607297 - DNA, 15 bp, Homo sapiens
tcagaccaggcacag

SEQ ID NO: 1607298 - DNA, 15 bp, Homo sapiens
cagaccaggcacagt

SEQ ID NO: 1607299 - DNA, 15 bp, Homo sapiens
agaccaggcacagtg

SEQ ID NO: 1607300 - DNA, 15 bp, Homo sapiens
gaccaggcacagtgg

SEQ ID NO: 1607301 - DNA, 15 bp, Homo sapiens
accaggcacagtggc

SEQ ID NO: 1607302 - DNA, 15 bp, Homo sapiens
gcacagtggctcata

SEQ ID NO: 1607303 - DNA, 15 bp, Homo sapiens
cacagtggctcatat

SEQ ID NO: 1607304 - DNA, 15 bp, Homo sapiens
acagtggctcatatc

SEQ ID NO: 1607305 - DNA, 15 bp, Homo sapiens
cagtggctcatatct

SEQ ID NO: 1607306 - DNA, 15 bp, Homo sapiens
agtggctcatatctg

SEQ ID NO: 1607307 - DNA, 15 bp, Homo sapiens
gtggctcatatctgt

SEQ ID NO: 1607308 - DNA, 15 bp, Homo sapiens
tggctcatatctgta

SEQ ID NO: 1607309 - DNA, 15 bp, Homo sapiens
ggctcatatctgtaa

SEQ ID NO: 1607310 - DNA, 15 bp, Homo sapiens
gctcatatctgtaat

SEQ ID NO: 1607311 - DNA, 15 bp, Homo sapiens
ctcatatctgtaatc

SEQ ID NO: 1607312 - DNA, 15 bp, Homo sapiens
tcatatctgtaatcc

SEQ ID NO: 1607313 - DNA, 15 bp, Homo sapiens
catatctgtaatccc

SEQ ID NO: 1607314 - DNA, 15 bp, Homo sapiens
atatctgtaatccca

SEQ ID NO: 1607315 - DNA, 15 bp, Homo sapiens
tatctgtaatcccaa

SEQ ID NO: 1607316 - DNA, 15 bp, Homo sapiens
atctgtaatcccaac

SEQ ID NO: 1607317 - DNA, 15 bp, Homo sapiens
tctgtaatcccaaca

SEQ ID NO: 1607318 - DNA, 15 bp, Homo sapiens
taatcccaacacttc

SEQ ID NO: 1607319 - DNA, 15 bp, Homo sapiens
aatcccaacacttcg

SEQ ID NO: 1607320 - DNA, 15 bp, Homo sapiens
atcccaacacttcgg

SEQ ID NO: 1607321 - DNA, 15 bp, Homo sapiens
tcccaacacttcggg

SEQ ID NO: 1607322 - DNA, 15 bp, Homo sapiens
cccaacacttcggga

SEQ ID NO: 1607323 - DNA, 15 bp, Homo sapiens
ccaacacttcgggag

SEQ ID NO: 1607324 - DNA, 15 bp, Homo sapiens
caacacttcgggagg

SEQ ID NO: 1607325 - DNA, 15 bp, Homo sapiens
aacacttcgggaggc

SEQ ID NO: 1607326 - DNA, 15 bp, Homo sapiens
acacttcgggaggcc

SEQ ID NO: 1607327 - DNA, 15 bp, Homo sapiens
cacttcgggaggcca

SEQ ID NO: 1607328 - DNA, 15 bp, Homo sapiens
acttcgggaggccaa

SEQ ID NO: 1607329 - DNA, 15 bp, Homo sapiens
cttcgggaggccaaa

SEQ ID NO: 1607330 - DNA, 15 bp, Homo sapiens
ttcgggaggccaaag

SEQ ID NO: 1607331 - DNA, 15 bp, Homo sapiens
tcgggaggccaaagt

SEQ ID NO: 1607332 - DNA, 15 bp, Homo sapiens
cgggaggccaaagtg

SEQ ID NO: 1607333 - DNA, 15 bp, Homo sapiens
ggccaaagtgggagg

SEQ ID NO: 1607334 - DNA, 15 bp, Homo sapiens
gccaaagtgggagga

SEQ ID NO: 1607335 - DNA, 15 bp, Homo sapiens
ccaaagtgggaggat

SEQ ID NO: 1607336 - DNA, 15 bp, Homo sapiens
caaagtgggaggatt

SEQ ID NO: 1607337 - DNA, 15 bp, Homo sapiens
aaagtgggaggattt

SEQ ID NO: 1607338 - DNA, 15 bp, Homo sapiens
aagtgggaggatttc

SEQ ID NO: 1607339 - DNA, 15 bp, Homo sapiens
agtgggaggatttct

SEQ ID NO: 1607340 - DNA, 15 bp, Homo sapiens
gtgggaggatttctt

SEQ ID NO: 1607341 - DNA, 15 bp, Homo sapiens
tgggaggatttcttg

SEQ ID NO: 1607342 - DNA, 15 bp, Homo sapiens
gggaggatttcttga

SEQ ID NO: 1607343 - DNA, 15 bp, Homo sapiens
ggaggatttcttgag

SEQ ID NO: 1607344 - DNA, 15 bp, Homo sapiens
gaggatttcttgagg

SEQ ID NO: 1607345 - DNA, 15 bp, Homo sapiens
aggatttcttgaggc

SEQ ID NO: 1607346 - DNA, 15 bp, Homo sapiens
ggatttcttgaggcc

SEQ ID NO: 1607347 - DNA, 15 bp, Homo sapiens
gatttcttgaggcca

SEQ ID NO: 1607348 - DNA, 15 bp, Homo sapiens
atttcttgaggccag

SEQ ID NO: 1607349 - DNA, 15 bp, Homo sapiens
tttcttgaggccagc

SEQ ID NO: 1607350 - DNA, 15 bp, Homo sapiens
ttcttgaggccagct

SEQ ID NO: 1607351 - DNA, 15 bp, Homo sapiens
tcttgaggccagctt

SEQ ID NO: 1607352 - DNA, 15 bp, Homo sapiens
cttgaggccagcttg

SEQ ID NO: 1607353 - DNA, 15 bp, Homo sapiens
ttgaggccagcttgg

SEQ ID NO: 1607354 - DNA, 15 bp, Homo sapiens
tgaggccagcttggg

SEQ ID NO: 1607355 - DNA, 15 bp, Homo sapiens
gaggccagcttgggc

SEQ ID NO: 1607356 - DNA, 15 bp, Homo sapiens
aggccagcttgggca

SEQ ID NO: 1607357 - DNA, 15 bp, Homo sapiens
ggccagcttgggcaa

SEQ ID NO: 1607358 - DNA, 15 bp, Homo sapiens
gccagcttgggcaac

SEQ ID NO: 1607359 - DNA, 15 bp, Homo sapiens
cagcttgggcaacag

SEQ ID NO: 1607360 - DNA, 15 bp, Homo sapiens
agcttgggcaacaga

SEQ ID NO: 1607361 - DNA, 15 bp, Homo sapiens
gcttgggcaacagag

SEQ ID NO: 1607362 - DNA, 15 bp, Homo sapiens
cttgggcaacagagg

SEQ ID NO: 1607363 - DNA, 15 bp, Homo sapiens
ttgggcaacagaggg

SEQ ID NO: 1607364 - DNA, 15 bp, Homo sapiens
tgggcaacagaggga

SEQ ID NO: 1607365 - DNA, 15 bp, Homo sapiens
gggcaacagagggag

SEQ ID NO: 1607366 - DNA, 15 bp, Homo sapiens
ggcaacagagggaga

SEQ ID NO: 1607367 - DNA, 15 bp, Homo sapiens
gcaacagagggagac

SEQ ID NO: 1607368 - DNA, 15 bp, Homo sapiens
caacagagggagacc

SEQ ID NO: 1607369 - DNA, 15 bp, Homo sapiens
aacagagggagaccc

SEQ ID NO: 1607370 - DNA, 15 bp, Homo sapiens
acagagggagaccct

SEQ ID NO: 1607371 - DNA, 15 bp, Homo sapiens
cagagggagaccctg

SEQ ID NO: 1607372 - DNA, 15 bp, Homo sapiens
agagggagaccctgt

SEQ ID NO: 1607373 - DNA, 15 bp, Homo sapiens
gagggagaccctgtc

SEQ ID NO: 1607374 - DNA, 15 bp, Homo sapiens
agggagaccctgtct

SEQ ID NO: 1607375 - DNA, 15 bp, Homo sapiens
gggagaccctgtctc

SEQ ID NO: 1607376 - DNA, 15 bp, Homo sapiens
ggagaccctgtctct

SEQ ID NO: 1607377 - DNA, 15 bp, Homo sapiens
gtctctacaaaaaaa

SEQ ID NO: 1607378 - DNA, 15 bp, Homo sapiens
tctctacaaaaaaaa

SEQ ID NO: 1607379 - DNA, 15 bp, Homo sapiens
ctctacaaaaaaaaa

SEQ ID NO: 1607380 - DNA, 15 bp, Homo sapiens
tctacaaaaaaaaaa

SEQ ID NO: 1607381 - DNA, 15 bp, Homo sapiens
ctacaaaaaaaaaaa

SEQ ID NO: 1607382 - DNA, 15 bp, Homo sapiens
aaaaaaaaaatttta

SEQ ID NO: 1607383 - DNA, 15 bp, Homo sapiens
aaaaaaaaattttaa

SEQ ID NO: 1607384 - DNA, 15 bp, Homo sapiens
aaaaaaaattttaat

SEQ ID NO: 1607385 - DNA, 15 bp, Homo sapiens
aaaaaaattttaatt

SEQ ID NO: 1607386 - DNA, 15 bp, Homo sapiens
aaaaaattttaatta

SEQ ID NO: 1607387 - DNA, 15 bp, Homo sapiens
aaaaattttaattag

SEQ ID NO: 1607388 - DNA, 15 bp, Homo sapiens
aaaattttaattagc

SEQ ID NO: 1607389 - DNA, 15 bp, Homo sapiens
aaattttaattagct

SEQ ID NO: 1607390 - DNA, 15 bp, Homo sapiens
aattttaattagcta

SEQ ID NO: 1607391 - DNA, 15 bp, Homo sapiens
attttaattagctag

SEQ ID NO: 1607392 - DNA, 15 bp, Homo sapiens
ttttaattagctagg

SEQ ID NO: 1607393 - DNA, 15 bp, Homo sapiens
tttaattagctaggt

SEQ ID NO: 1607394 - DNA, 15 bp, Homo sapiens
ttaattagctaggtg

SEQ ID NO: 1607395 - DNA, 15 bp, Homo sapiens
taattagctaggtgt

SEQ ID NO: 1607396 - DNA, 15 bp, Homo sapiens
aattagctaggtgtg

SEQ ID NO: 1607397 - DNA, 15 bp, Homo sapiens
attagctaggtgtgg

SEQ ID NO: 1607398 - DNA, 15 bp, Homo sapiens
ttagctaggtgtggt

SEQ ID NO: 1607399 - DNA, 15 bp, Homo sapiens
tagctaggtgtggtg

SEQ ID NO: 1607400 - DNA, 15 bp, Homo sapiens
agctaggtgtggtgg

SEQ ID NO: 1607401 - DNA, 15 bp, Homo sapiens
gctaggtgtggtggt

SEQ ID NO: 1607402 - DNA, 15 bp, Homo sapiens
ctaggtgtggtggtg

SEQ ID NO: 1607403 - DNA, 15 bp, Homo sapiens
taggtgtggtggtgc

SEQ ID NO: 1607404 - DNA, 15 bp, Homo sapiens
ggtggtgcacacctg

SEQ ID NO: 1607405 - DNA, 15 bp, Homo sapiens
tggtgcacacctgtg

SEQ ID NO: 1607406 - DNA, 15 bp, Homo sapiens
ggtgcacacctgtgg

SEQ ID NO: 1607407 - DNA, 15 bp, Homo sapiens
gtgcacacctgtggt

SEQ ID NO: 1607408 - DNA, 15 bp, Homo sapiens
tgcacacctgtggtc

SEQ ID NO: 1607409 - DNA, 15 bp, Homo sapiens
gcacacctgtggtct

SEQ ID NO: 1607410 - DNA, 15 bp, Homo sapiens
cacacctgtggtctc

SEQ ID NO: 1607411 - DNA, 15 bp, Homo sapiens
acacctgtggtctca

SEQ ID NO: 1607412 - DNA, 15 bp, Homo sapiens
cacctgtggtctcag

SEQ ID NO: 1607413 - DNA, 15 bp, Homo sapiens
acctgtggtctcagc

SEQ ID NO: 1607414 - DNA, 15 bp, Homo sapiens
gtggtctcagctact

SEQ ID NO: 1607415 - DNA, 15 bp, Homo sapiens
tggtctcagctactg

SEQ ID NO: 1607416 - DNA, 15 bp, Homo sapiens
ggtctcagctactgt

SEQ ID NO: 1607417 - DNA, 15 bp, Homo sapiens
gtctcagctactgtg

SEQ ID NO: 1607418 - DNA, 15 bp, Homo sapiens
tctcagctactgtgg

SEQ ID NO: 1607419 - DNA, 15 bp, Homo sapiens
ctcagctactgtgga

SEQ ID NO: 1607420 - DNA, 15 bp, Homo sapiens
tcagctactgtggag

SEQ ID NO: 1607421 - DNA, 15 bp, Homo sapiens
cagctactgtggagg

SEQ ID NO: 1607422 - DNA, 15 bp, Homo sapiens
agctactgtggaggc

SEQ ID NO: 1607423 - DNA, 15 bp, Homo sapiens
gctactgtggaggct

SEQ ID NO: 1607424 - DNA, 15 bp, Homo sapiens
ctactgtggaggctg

SEQ ID NO: 1607425 - DNA, 15 bp, Homo sapiens
tactgtggaggctga

SEQ ID NO: 1607426 - DNA, 15 bp, Homo sapiens
actgtggaggctgag

SEQ ID NO: 1607427 - DNA, 15 bp, Homo sapiens
ctgtggaggctgagg

SEQ ID NO: 1607428 - DNA, 15 bp, Homo sapiens
tgtggaggctgaggg

SEQ ID NO: 1607429 - DNA, 15 bp, Homo sapiens
gtggaggctgagggc

SEQ ID NO: 1607430 - DNA, 15 bp, Homo sapiens
tggaggctgagggct

SEQ ID NO: 1607431 - DNA, 15 bp, Homo sapiens
ggaggctgagggctg

SEQ ID NO: 1607432 - DNA, 15 bp, Homo sapiens
gaggctgagggctga

SEQ ID NO: 1607433 - DNA, 15 bp, Homo sapiens
aggctgagggctgag

SEQ ID NO: 1607434 - DNA, 15 bp, Homo sapiens
ggctgagggctgaga

SEQ ID NO: 1607435 - DNA, 15 bp, Homo sapiens
gctgagggctgagat

SEQ ID NO: 1607436 - DNA, 15 bp, Homo sapiens
ctgagggctgagatg

SEQ ID NO: 1607437 - DNA, 15 bp, Homo sapiens
tgagggctgagatgg

SEQ ID NO: 1607438 - DNA, 15 bp, Homo sapiens
gagggctgagatggg

SEQ ID NO: 1607439 - DNA, 15 bp, Homo sapiens
agggctgagatggga

SEQ ID NO: 1607440 - DNA, 15 bp, Homo sapiens
gggctgagatgggag

SEQ ID NO: 1607441 - DNA, 15 bp, Homo sapiens
ggctgagatgggagg

SEQ ID NO: 1607442 - DNA, 15 bp, Homo sapiens
gctgagatgggagga

SEQ ID NO: 1607443 - DNA, 15 bp, Homo sapiens
ctgagatgggaggat

SEQ ID NO: 1607444 - DNA, 15 bp, Homo sapiens
tgagatgggaggatc

SEQ ID NO: 1607445 - DNA, 15 bp, Homo sapiens
gagatgggaggatca

SEQ ID NO: 1607446 - DNA, 15 bp, Homo sapiens
agatgggaggatcac

SEQ ID NO: 1607447 - DNA, 15 bp, Homo sapiens
gatgggaggatcact

SEQ ID NO: 1607448 - DNA, 15 bp, Homo sapiens
atgggaggatcactt

SEQ ID NO: 1607449 - DNA, 15 bp, Homo sapiens
ggatcacttgagccg

SEQ ID NO: 1607450 - DNA, 15 bp, Homo sapiens
gatcacttgagccgg

SEQ ID NO: 1607451 - DNA, 15 bp, Homo sapiens
atcacttgagccggg

SEQ ID NO: 1607452 - DNA, 15 bp, Homo sapiens
tcacttgagccgggg

SEQ ID NO: 1607453 - DNA, 15 bp, Homo sapiens
cacttgagccgggga

SEQ ID NO: 1607454 - DNA, 15 bp, Homo sapiens
acttgagccggggag

SEQ ID NO: 1607455 - DNA, 15 bp, Homo sapiens
cttgagccggggagg

SEQ ID NO: 1607456 - DNA, 15 bp, Homo sapiens
ttgagccggggaggt

SEQ ID NO: 1607457 - DNA, 15 bp, Homo sapiens
tgagccggggaggtc

SEQ ID NO: 1607458 - DNA, 15 bp, Homo sapiens
gagccggggaggtca

SEQ ID NO: 1607459 - DNA, 15 bp, Homo sapiens
agccggggaggtcaa

SEQ ID NO: 1607460 - DNA, 15 bp, Homo sapiens
gccggggaggtcaag

SEQ ID NO: 1607461 - DNA, 15 bp, Homo sapiens
ccggggaggtcaagg

SEQ ID NO: 1607462 - DNA, 15 bp, Homo sapiens
cggggaggtcaaggc

SEQ ID NO: 1607463 - DNA, 15 bp, Homo sapiens
ggggaggtcaaggct

SEQ ID NO: 1607464 - DNA, 15 bp, Homo sapiens
gaggtcaaggctgct

SEQ ID NO: 1607465 - DNA, 15 bp, Homo sapiens
aggtcaaggctgctg

SEQ ID NO: 1607466 - DNA, 15 bp, Homo sapiens
ggtcaaggctgctgt

SEQ ID NO: 1607467 - DNA, 15 bp, Homo sapiens
gtcaaggctgctgtg

SEQ ID NO: 1607468 - DNA, 15 bp, Homo sapiens
tcaaggctgctgtga

SEQ ID NO: 1607469 - DNA, 15 bp, Homo sapiens
caaggctgctgtgag

SEQ ID NO: 1607470 - DNA, 15 bp, Homo sapiens
aaggctgctgtgagc

SEQ ID NO: 1607471 - DNA, 15 bp, Homo sapiens
aggctgctgtgagcc

SEQ ID NO: 1607472 - DNA, 15 bp, Homo sapiens
ggctgctgtgagcca

SEQ ID NO: 1607473 - DNA, 15 bp, Homo sapiens
gctgctgtgagccat

SEQ ID NO: 1607474 - DNA, 15 bp, Homo sapiens
ctgctgtgagccatg

SEQ ID NO: 1607475 - DNA, 15 bp, Homo sapiens
tgctgtgagccatga

SEQ ID NO: 1607476 - DNA, 15 bp, Homo sapiens
gctgtgagccatgat

SEQ ID NO: 1607477 - DNA, 15 bp, Homo sapiens
ctgtgagccatgatc

SEQ ID NO: 1607478 - DNA, 15 bp, Homo sapiens
tgtgagccatgatca

SEQ ID NO: 1607479 - DNA, 15 bp, Homo sapiens
gtgagccatgatcag

SEQ ID NO: 1607480 - DNA, 15 bp, Homo sapiens
tgagccatgatcagg

SEQ ID NO: 1607481 - DNA, 15 bp, Homo sapiens
gagccatgatcaggc

SEQ ID NO: 1607482 - DNA, 15 bp, Homo sapiens
agccatgatcaggcc

SEQ ID NO: 1607483 - DNA, 15 bp, Homo sapiens
gccatgatcaggcca

SEQ ID NO: 1607484 - DNA, 15 bp, Homo sapiens
ccatgatcaggccat

SEQ ID NO: 1607485 - DNA, 15 bp, Homo sapiens
catgatcaggccatt

SEQ ID NO: 1607486 - DNA, 15 bp, Homo sapiens
atgatcaggccattg

SEQ ID NO: 1607487 - DNA, 15 bp, Homo sapiens
tgatcaggccattgc

SEQ ID NO: 1607488 - DNA, 15 bp, Homo sapiens
gatcaggccattgca

SEQ ID NO: 1607489 - DNA, 15 bp, Homo sapiens
atcaggccattgcac

SEQ ID NO: 1607490 - DNA, 15 bp, Homo sapiens
tcaggccattgcact

SEQ ID NO: 1607491 - DNA, 15 bp, Homo sapiens
caggccattgcactc

SEQ ID NO: 1607492 - DNA, 15 bp, Homo sapiens
aggccattgcactcc

SEQ ID NO: 1607493 - DNA, 15 bp, Homo sapiens
ggccattgcactcca

SEQ ID NO: 1607494 - DNA, 15 bp, Homo sapiens
cagcctgagtgacaa

SEQ ID NO: 1607495 - DNA, 15 bp, Homo sapiens
agcctgagtgacaag

SEQ ID NO: 1607496 - DNA, 15 bp, Homo sapiens
gcctgagtgacaaga

SEQ ID NO: 1607497 - DNA, 15 bp, Homo sapiens
cctgagtgacaagac

SEQ ID NO: 1607498 - DNA, 15 bp, Homo sapiens
ctgagtgacaagacc

SEQ ID NO: 1607499 - DNA, 15 bp, Homo sapiens
tgagtgacaagaccc

SEQ ID NO: 1607500 - DNA, 15 bp, Homo sapiens
gagtgacaagaccct

SEQ ID NO: 1607501 - DNA, 15 bp, Homo sapiens
agtgacaagaccctg

SEQ ID NO: 1607502 - DNA, 15 bp, Homo sapiens
gtgacaagaccctgt

SEQ ID NO: 1607503 - DNA, 15 bp, Homo sapiens
tgacaagaccctgtc

SEQ ID NO: 1607504 - DNA, 15 bp, Homo sapiens
gacaagaccctgtct

SEQ ID NO: 1607505 - DNA, 15 bp, Homo sapiens
ctaaaaaataaaaat

SEQ ID NO: 1607506 - DNA, 15 bp, Homo sapiens
taaaaataaataaaa

SEQ ID NO: 1607507 - DNA, 15 bp, Homo sapiens
aaaaataaataaaaa

SEQ ID NO: 1607508 - DNA, 15 bp, Homo sapiens
aaaataaataaaaaa

SEQ ID NO: 1607509 - DNA, 15 bp, Homo sapiens
aaataaataaaaaat

SEQ ID NO: 1607510 - DNA, 15 bp, Homo sapiens
aataaataaaaaata

SEQ ID NO: 1607511 - DNA, 15 bp, Homo sapiens
ataaataaaaaataa

SEQ ID NO: 1607512 - DNA, 15 bp, Homo sapiens
taaataaaaaataaa

SEQ ID NO: 1607513 - DNA, 15 bp, Homo sapiens
aaataaaaaataaat

SEQ ID NO: 1607514 - DNA, 15 bp, Homo sapiens
aataaaaaataaata

SEQ ID NO: 1607515 - DNA, 15 bp, Homo sapiens
ataaaaaataaataa

SEQ ID NO: 1607516 - DNA, 15 bp, Homo sapiens
taaaaaataaataaa

SEQ ID NO: 1607517 - DNA, 15 bp, Homo sapiens
aaaaaataaataaag

SEQ ID NO: 1607518 - DNA, 15 bp, Homo sapiens
aaaaataaataaaga

SEQ ID NO: 1607519 - DNA, 15 bp, Homo sapiens
aaaataaataaagat

SEQ ID NO: 1607520 - DNA, 15 bp, Homo sapiens
aaataaataaagatt

SEQ ID NO: 1607521 - DNA, 15 bp, Homo sapiens
aataaataaagattg

SEQ ID NO: 1607522 - DNA, 15 bp, Homo sapiens
ataaataaagattgc

SEQ ID NO: 1607523 - DNA, 15 bp, Homo sapiens
taaataaagattgct

SEQ ID NO: 1607524 - DNA, 15 bp, Homo sapiens
aaataaagattgctt

SEQ ID NO: 1607525 - DNA, 15 bp, Homo sapiens
aataaagattgcttc

SEQ ID NO: 1607526 - DNA, 15 bp, Homo sapiens
ataaagattgcttca

SEQ ID NO: 1607527 - DNA, 15 bp, Homo sapiens
taaagattgcttcag

SEQ ID NO: 1607528 - DNA, 15 bp, Homo sapiens
aaagattgcttcaga

SEQ ID NO: 1607529 - DNA, 15 bp, Homo sapiens
aagattgcttcagac

SEQ ID NO: 1607530 - DNA, 15 bp, Homo sapiens
agattgcttcagact

SEQ ID NO: 1607531 - DNA, 15 bp, Homo sapiens
gattgcttcagacta

SEQ ID NO: 1607532 - DNA, 15 bp, Homo sapiens
attgcttcagactaa

SEQ ID NO: 1607533 - DNA, 15 bp, Homo sapiens
ttgcttcagactaag

SEQ ID NO: 1607534 - DNA, 15 bp, Homo sapiens
tgcttcagactaagt

SEQ ID NO: 1607535 - DNA, 15 bp, Homo sapiens
gcttcagactaagtg

SEQ ID NO: 1607536 - DNA, 15 bp, Homo sapiens
cttcagactaagtga

SEQ ID NO: 1607537 - DNA, 15 bp, Homo sapiens
ttcagactaagtgaa

SEQ ID NO: 1607538 - DNA, 15 bp, Homo sapiens
tcagactaagtgaat

SEQ ID NO: 1607539 - DNA, 15 bp, Homo sapiens
cagactaagtgaatg

SEQ ID NO: 1607540 - DNA, 15 bp, Homo sapiens
agactaagtgaatgg

SEQ ID NO: 1607541 - DNA, 15 bp, Homo sapiens
gactaagtgaatgga

SEQ ID NO: 1607542 - DNA, 15 bp, Homo sapiens
actaagtgaatggag

SEQ ID NO: 1607543 - DNA, 15 bp, Homo sapiens
ctaagtgaatggaga

SEQ ID NO: 1607544 - DNA, 15 bp, Homo sapiens
taagtgaatggagaa

SEQ ID NO: 1607545 - DNA, 15 bp, Homo sapiens
aagtgaatggagaaa

SEQ ID NO: 1607546 - DNA, 15 bp, Homo sapiens
agtgaatggagaaaa

SEQ ID NO: 1607547 - DNA, 15 bp, Homo sapiens
gtgaatggagaaaaa

SEQ ID NO: 1607548 - DNA, 15 bp, Homo sapiens
tgaatggagaaaaaa

SEQ ID NO: 1607549 - DNA, 15 bp, Homo sapiens
gaatggagaaaaaaa

SEQ ID NO: 1607550 - DNA, 15 bp, Homo sapiens
aatggagaaaaaaaa

SEQ ID NO: 1607551 - DNA, 15 bp, Homo sapiens
atggagaaaaaaaat

SEQ ID NO: 1607552 - DNA, 15 bp, Homo sapiens
tggagaaaaaaaatg

SEQ ID NO: 1607553 - DNA, 15 bp, Homo sapiens
gagaaaaaaaatgat

SEQ ID NO: 1607554 - DNA, 15 bp, Homo sapiens
agaaaaaaaatgata

SEQ ID NO: 1607555 - DNA, 15 bp, Homo sapiens
gaaaaaaaatgatat

SEQ ID NO: 1607556 - DNA, 15 bp, Homo sapiens
aaaaaaaatgatata

SEQ ID NO: 1607557 - DNA, 15 bp, Homo sapiens
aaaaaaatgatatag

SEQ ID NO: 1607558 - DNA, 15 bp, Homo sapiens
aaaaaatgatatagg

SEQ ID NO: 1607559 - DNA, 15 bp, Homo sapiens
aaaaatgatataggt

SEQ ID NO: 1607560 - DNA, 15 bp, Homo sapiens
aaaatgatataggta

SEQ ID NO: 1607561 - DNA, 15 bp, Homo sapiens
aaatgatataggtaa

SEQ ID NO: 1607562 - DNA, 15 bp, Homo sapiens
aatgatataggtaaa

SEQ ID NO: 1607563 - DNA, 15 bp, Homo sapiens
atgatataggtaaaa

SEQ ID NO: 1607564 - DNA, 15 bp, Homo sapiens
tgatataggtaaaac

SEQ ID NO: 1607565 - DNA, 15 bp, Homo sapiens
gatataggtaaaact

SEQ ID NO: 1607566 - DNA, 15 bp, Homo sapiens
atataggtaaaacta

SEQ ID NO: 1607567 - DNA, 15 bp, Homo sapiens
tataggtaaaactaa

SEQ ID NO: 1607568 - DNA, 15 bp, Homo sapiens
ataggtaaaactaaa

SEQ ID NO: 1607569 - DNA, 15 bp, Homo sapiens
taggtaaaactaaat

SEQ ID NO: 1607570 - DNA, 15 bp, Homo sapiens
aggtaaaactaaatg

SEQ ID NO: 1607571 - DNA, 15 bp, Homo sapiens
ggtaaaactaaatgg

SEQ ID NO: 1607572 - DNA, 15 bp, Homo sapiens
gtaaaactaaatgga

SEQ ID NO: 1607573 - DNA, 15 bp, Homo sapiens
taaaactaaatggat

SEQ ID NO: 1607574 - DNA, 15 bp, Homo sapiens
aaaactaaatggata

SEQ ID NO: 1607575 - DNA, 15 bp, Homo sapiens
aaactaaatggatat

SEQ ID NO: 1607576 - DNA, 15 bp, Homo sapiens
aactaaatggatata

SEQ ID NO: 1607577 - DNA, 15 bp, Homo sapiens
actaaatggatataa

SEQ ID NO: 1607578 - DNA, 15 bp, Homo sapiens
ctaaatggatataaa

SEQ ID NO: 1607579 - DNA, 15 bp, Homo sapiens
taaatggatataaag

SEQ ID NO: 1607580 - DNA, 15 bp, Homo sapiens
aaatggatataaaga

SEQ ID NO: 1607581 - DNA, 15 bp, Homo sapiens
aatggatataaagac

SEQ ID NO: 1607582 - DNA, 15 bp, Homo sapiens
atggatataaagact

SEQ ID NO: 1607583 - DNA, 15 bp, Homo sapiens
tggatataaagactt

SEQ ID NO: 1607584 - DNA, 15 bp, Homo sapiens
ggatataaagacttt

SEQ ID NO: 1607585 - DNA, 15 bp, Homo sapiens
gatataaagactttt

SEQ ID NO: 1607586 - DNA, 15 bp, Homo sapiens
atataaagactttta

SEQ ID NO: 1607587 - DNA, 15 bp, Homo sapiens
tataaagacttttaa

SEQ ID NO: 1607588 - DNA, 15 bp, Homo sapiens
ataaagacttttaaa

SEQ ID NO: 1607589 - DNA, 15 bp, Homo sapiens
taaagacttttaaaa

SEQ ID NO: 1607590 - DNA, 15 bp, Homo sapiens
aaagacttttaaaaa

SEQ ID NO: 1607591 - DNA, 15 bp, Homo sapiens
aagacttttaaaaag

SEQ ID NO: 1607592 - DNA, 15 bp, Homo sapiens
agacttttaaaaagt

SEQ ID NO: 1607593 - DNA, 15 bp, Homo sapiens
gacttttaaaaagta

SEQ ID NO: 1607594 - DNA, 15 bp, Homo sapiens
acttttaaaaagtag

SEQ ID NO: 1607595 - DNA, 15 bp, Homo sapiens
cttttaaaaagtaga

SEQ ID NO: 1607596 - DNA, 15 bp, Homo sapiens
ttttaaaaagtagaa

SEQ ID NO: 1607597 - DNA, 15 bp, Homo sapiens
tttaaaaagtagaag

SEQ ID NO: 1607598 - DNA, 15 bp, Homo sapiens
ttaaaaagtagaaga

SEQ ID NO: 1607599 - DNA, 15 bp, Homo sapiens
taaaaagtagaagag

SEQ ID NO: 1607600 - DNA, 15 bp, Homo sapiens
aaaaagtagaagagt

SEQ ID NO: 1607601 - DNA, 15 bp, Homo sapiens
aaaagtagaagagta

SEQ ID NO: 1607602 - DNA, 15 bp, Homo sapiens
aaagtagaagagtag

SEQ ID NO: 1607603 - DNA, 15 bp, Homo sapiens
aagtagaagagtagg

SEQ ID NO: 1607604 - DNA, 15 bp, Homo sapiens
agtagaagagtagga

SEQ ID NO: 1607605 - DNA, 15 bp, Homo sapiens
gtagaagagtaggaa

SEQ ID NO: 1607606 - DNA, 15 bp, Homo sapiens
tagaagagtaggaaa

SEQ ID NO: 1607607 - DNA, 15 bp, Homo sapiens
agaagagtaggaaaa

SEQ ID NO: 1607608 - DNA, 15 bp, Homo sapiens
gaagagtaggaaaaa

SEQ ID NO: 1607609 - DNA, 15 bp, Homo sapiens
aagagtaggaaaaaa

SEQ ID NO: 1607610 - DNA, 15 bp, Homo sapiens
agagtaggaaaaaat

SEQ ID NO: 1607611 - DNA, 15 bp, Homo sapiens
gagtaggaaaaaatt

SEQ ID NO: 1607612 - DNA, 15 bp, Homo sapiens
agtaggaaaaaatta

SEQ ID NO: 1607613 - DNA, 15 bp, Homo sapiens
gtaggaaaaaattat

SEQ ID NO: 1607614 - DNA, 15 bp, Homo sapiens
taggaaaaaattata

SEQ ID NO: 1607615 - DNA, 15 bp, Homo sapiens
aggaaaaaattataa

SEQ ID NO: 1607616 - DNA, 15 bp, Homo sapiens
ggaaaaaattataat

SEQ ID NO: 1607617 - DNA, 15 bp, Homo sapiens
gaaaaaattataata

SEQ ID NO: 1607618 - DNA, 15 bp, Homo sapiens
aaaaaattataatag

SEQ ID NO: 1607619 - DNA, 15 bp, Homo sapiens
aaaaattataatagg

SEQ ID NO: 1607620 - DNA, 15 bp, Homo sapiens
aaaattataataggt

SEQ ID NO: 1607621 - DNA, 15 bp, Homo sapiens
aaattataataggtt

SEQ ID NO: 1607622 - DNA, 15 bp, Homo sapiens
aattataataggtta

SEQ ID NO: 1607623 - DNA, 15 bp, Homo sapiens
attataataggttat

SEQ ID NO: 1607624 - DNA, 15 bp, Homo sapiens
ttataataggttata

SEQ ID NO: 1607625 - DNA, 15 bp, Homo sapiens
tataataggttatag

SEQ ID NO: 1607626 - DNA, 15 bp, Homo sapiens
ataataggttataga

SEQ ID NO: 1607627 - DNA, 15 bp, Homo sapiens
taataggttatagaa

SEQ ID NO: 1607628 - DNA, 15 bp, Homo sapiens
aataggttatagaag

SEQ ID NO: 1607629 - DNA, 15 bp, Homo sapiens
ataggttatagaagg

SEQ ID NO: 1607630 - DNA, 15 bp, Homo sapiens
taggttatagaaggt

SEQ ID NO: 1607631 - DNA, 15 bp, Homo sapiens
aggttatagaaggtt

SEQ ID NO: 1607632 - DNA, 15 bp, Homo sapiens
ggttatagaaggttt

SEQ ID NO: 1607633 - DNA, 15 bp, Homo sapiens
gttatagaaggttta

SEQ ID NO: 1607634 - DNA, 15 bp, Homo sapiens
ttatagaaggtttat

SEQ ID NO: 1607635 - DNA, 15 bp, Homo sapiens
tatagaaggtttatg

SEQ ID NO: 1607636 - DNA, 15 bp, Homo sapiens
atagaaggtttatga

SEQ ID NO: 1607637 - DNA, 15 bp, Homo sapiens
tagaaggtttatgaa

SEQ ID NO: 1607638 - DNA, 15 bp, Homo sapiens
agaaggtttatgaaa

SEQ ID NO: 1607639 - DNA, 15 bp, Homo sapiens
gaaggtttatgaaaa

SEQ ID NO: 1607640 - DNA, 15 bp, Homo sapiens
aaggtttatgaaaag

SEQ ID NO: 1607641 - DNA, 15 bp, Homo sapiens
aggtttatgaaaagt

SEQ ID NO: 1607642 - DNA, 15 bp, Homo sapiens
ggtttatgaaaagtt

SEQ ID NO: 1607643 - DNA, 15 bp, Homo sapiens
gtttatgaaaagttt

SEQ ID NO: 1607644 - DNA, 15 bp, Homo sapiens
tttatgaaaagttta

SEQ ID NO: 1607645 - DNA, 15 bp, Homo sapiens
ttatgaaaagtttat

SEQ ID NO: 1607646 - DNA, 15 bp, Homo sapiens
tatgaaaagtttatc

SEQ ID NO: 1607647 - DNA, 15 bp, Homo sapiens
atgaaaagtttatct

SEQ ID NO: 1607648 - DNA, 15 bp, Homo sapiens
tgaaaagtttatctt

SEQ ID NO: 1607649 - DNA, 15 bp, Homo sapiens
gaaaagtttatcttg

SEQ ID NO: 1607650 - DNA, 15 bp, Homo sapiens
aaaagtttatcttgt

SEQ ID NO: 1607651 - DNA, 15 bp, Homo sapiens
aaagtttatcttgtg

SEQ ID NO: 1607652 - DNA, 15 bp, Homo sapiens
aagtttatcttgtgt

SEQ ID NO: 1607653 - DNA, 15 bp, Homo sapiens
agtttatcttgtgtg

SEQ ID NO: 1607654 - DNA, 15 bp, Homo sapiens
gtttatcttgtgtgc

SEQ ID NO: 1607655 - DNA, 15 bp, Homo sapiens
tttatcttgtgtgca

SEQ ID NO: 1607656 - DNA, 15 bp, Homo sapiens
ttatcttgtgtgcaa

SEQ ID NO: 1607657 - DNA, 15 bp, Homo sapiens
tatcttgtgtgcaaa

SEQ ID NO: 1607658 - DNA, 15 bp, Homo sapiens
atcttgtgtgcaaag

SEQ ID NO: 1607659 - DNA, 15 bp, Homo sapiens
tcttgtgtgcaaagc

SEQ ID NO: 1607660 - DNA, 15 bp, Homo sapiens
cttgtgtgcaaagct

SEQ ID NO: 1607661 - DNA, 15 bp, Homo sapiens
ttgtgtgcaaagctg

SEQ ID NO: 1607662 - DNA, 15 bp, Homo sapiens
tgtgtgcaaagctga

SEQ ID NO: 1607663 - DNA, 15 bp, Homo sapiens
gtgtgcaaagctgac

SEQ ID NO: 1607664 - DNA, 15 bp, Homo sapiens
tgtgcaaagctgact

SEQ ID NO: 1607665 - DNA, 15 bp, Homo sapiens
gtgcaaagctgactg

SEQ ID NO: 1607666 - DNA, 15 bp, Homo sapiens
tgcaaagctgactga

SEQ ID NO: 1607667 - DNA, 15 bp, Homo sapiens
gcaaagctgactgat

SEQ ID NO: 1607668 - DNA, 15 bp, Homo sapiens
caaagctgactgata

SEQ ID NO: 1607669 - DNA, 15 bp, Homo sapiens
aaagctgactgatat

SEQ ID NO: 1607670 - DNA, 15 bp, Homo sapiens
aagctgactgatatc

SEQ ID NO: 1607671 - DNA, 15 bp, Homo sapiens
agctgactgatatca

SEQ ID NO: 1607672 - DNA, 15 bp, Homo sapiens
gctgactgatatcag

SEQ ID NO: 1607673 - DNA, 15 bp, Homo sapiens
ctgactgatatcaga

SEQ ID NO: 1607674 - DNA, 15 bp, Homo sapiens
tgactgatatcagag

SEQ ID NO: 1607675 - DNA, 15 bp, Homo sapiens
gactgatatcagaga

SEQ ID NO: 1607676 - DNA, 15 bp, Homo sapiens
actgatatcagagaa

SEQ ID NO: 1607677 - DNA, 15 bp, Homo sapiens
ctgatatcagagaaa

SEQ ID NO: 1607678 - DNA, 15 bp, Homo sapiens
tgatatcagagaaat

SEQ ID NO: 1607679 - DNA, 15 bp, Homo sapiens
gatatcagagaaatt

SEQ ID NO: 1607680 - DNA, 15 bp, Homo sapiens
atatcagagaaattt

SEQ ID NO: 1607681 - DNA, 15 bp, Homo sapiens
tatcagagaaatttg

SEQ ID NO: 1607682 - DNA, 15 bp, Homo sapiens
atcagagaaatttgt

SEQ ID NO: 1607683 - DNA, 15 bp, Homo sapiens
tcagagaaatttgtt

SEQ ID NO: 1607684 - DNA, 15 bp, Homo sapiens
cagagaaatttgttt

SEQ ID NO: 1607685 - DNA, 15 bp, Homo sapiens
agagaaatttgttta

SEQ ID NO: 1607686 - DNA, 15 bp, Homo sapiens
gagaaatttgtttac

SEQ ID NO: 1607687 - DNA, 15 bp, Homo sapiens
agaaatttgtttaca

SEQ ID NO: 1607688 - DNA, 15 bp, Homo sapiens
gaaatttgtttacac

SEQ ID NO: 1607689 - DNA, 15 bp, Homo sapiens
aaatttgtttacacg

SEQ ID NO: 1607690 - DNA, 15 bp, Homo sapiens
aatttgtttacacgt

SEQ ID NO: 1607691 - DNA, 15 bp, Homo sapiens
atttgtttacacgtc

SEQ ID NO: 1607692 - DNA, 15 bp, Homo sapiens
tttgtttacacgtca

SEQ ID NO: 1607693 - DNA, 15 bp, Homo sapiens
ttgtttacacgtcat

SEQ ID NO: 1607694 - DNA, 15 bp, Homo sapiens
tgtttacacgtcatt

SEQ ID NO: 1607695 - DNA, 15 bp, Homo sapiens
gtttacacgtcatta

SEQ ID NO: 1607696 - DNA, 15 bp, Homo sapiens
tttacacgtcattaa

SEQ ID NO: 1607697 - DNA, 15 bp, Homo sapiens
ttacacgtcattaaa

SEQ ID NO: 1607698 - DNA, 15 bp, Homo sapiens
tacacgtcattaaaa

SEQ ID NO: 1607699 - DNA, 15 bp, Homo sapiens
acacgtcattaaaat

SEQ ID NO: 1607700 - DNA, 15 bp, Homo sapiens
cacgtcattaaaatt

SEQ ID NO: 1607701 - DNA, 15 bp, Homo sapiens
acgtcattaaaatta

SEQ ID NO: 1607702 - DNA, 15 bp, Homo sapiens
cgtcattaaaattag

SEQ ID NO: 1607703 - DNA, 15 bp, Homo sapiens
gtcattaaaattagc

SEQ ID NO: 1607704 - DNA, 15 bp, Homo sapiens
tcattaaaattagct

SEQ ID NO: 1607705 - DNA, 15 bp, Homo sapiens
cattaaaattagctt

SEQ ID NO: 1607706 - DNA, 15 bp, Homo sapiens
attaaaattagcttt

SEQ ID NO: 1607707 - DNA, 15 bp, Homo sapiens
ttaaaattagcttta

SEQ ID NO: 1607708 - DNA, 15 bp, Homo sapiens
taaaattagctttag

SEQ ID NO: 1607709 - DNA, 15 bp, Homo sapiens
aaaattagctttagt

SEQ ID NO: 1607710 - DNA, 15 bp, Homo sapiens
aaattagctttagta

SEQ ID NO: 1607711 - DNA, 15 bp, Homo sapiens
aattagctttagtat

SEQ ID NO: 1607712 - DNA, 15 bp, Homo sapiens
attagctttagtatt

SEQ ID NO: 1607713 - DNA, 15 bp, Homo sapiens
ttagctttagtattt

SEQ ID NO: 1607714 - DNA, 15 bp, Homo sapiens
tagctttagtattta

SEQ ID NO: 1607715 - DNA, 15 bp, Homo sapiens
agctttagtatttaa

SEQ ID NO: 1607716 - DNA, 15 bp, Homo sapiens
gctttagtatttaaa

SEQ ID NO: 1607717 - DNA, 15 bp, Homo sapiens
ctttagtatttaaag

SEQ ID NO: 1607718 - DNA, 15 bp, Homo sapiens
tttagtatttaaagt

SEQ ID NO: 1607719 - DNA, 15 bp, Homo sapiens
ttagtatttaaagta

SEQ ID NO: 1607720 - DNA, 15 bp, Homo sapiens
tagtatttaaagtac

SEQ ID NO: 1607721 - DNA, 15 bp, Homo sapiens
agtatttaaagtaca

SEQ ID NO: 1607722 - DNA, 15 bp, Homo sapiens
gtatttaaagtacac

SEQ ID NO: 1607723 - DNA, 15 bp, Homo sapiens
tatttaaagtacaca

SEQ ID NO: 1607724 - DNA, 15 bp, Homo sapiens
atttaaagtacacaa

SEQ ID NO: 1607725 - DNA, 15 bp, Homo sapiens
tttaaagtacacaaa

SEQ ID NO: 1607726 - DNA, 15 bp, Homo sapiens
ttaaagtacacaaag

SEQ ID NO: 1607727 - DNA, 15 bp, Homo sapiens
taaagtacacaaaga

SEQ ID NO: 1607728 - DNA, 15 bp, Homo sapiens
aaagtacacaaagac

SEQ ID NO: 1607729 - DNA, 15 bp, Homo sapiens
aagtacacaaagaca

SEQ ID NO: 1607730 - DNA, 15 bp, Homo sapiens
agtacacaaagacaa

SEQ ID NO: 1607731 - DNA, 15 bp, Homo sapiens
gtacacaaagacaaa

SEQ ID NO: 1607732 - DNA, 15 bp, Homo sapiens
tacacaaagacaaag

SEQ ID NO: 1607733 - DNA, 15 bp, Homo sapiens
acacaaagacaaagc

SEQ ID NO: 1607734 - DNA, 15 bp, Homo sapiens
cacaaagacaaagct

SEQ ID NO: 1607735 - DNA, 15 bp, Homo sapiens
acaaagacaaagcta

SEQ ID NO: 1607736 - DNA, 15 bp, Homo sapiens
caaagacaaagctag

SEQ ID NO: 1607737 - DNA, 15 bp, Homo sapiens
aaagacaaagctagt

SEQ ID NO: 1607738 - DNA, 15 bp, Homo sapiens
aagacaaagctagtg

SEQ ID NO: 1607739 - DNA, 15 bp, Homo sapiens
agacaaagctagtgg

SEQ ID NO: 1607740 - DNA, 15 bp, Homo sapiens
gacaaagctagtggt

SEQ ID NO: 1607741 - DNA, 15 bp, Homo sapiens
acaaagctagtggtt

SEQ ID NO: 1607742 - DNA, 15 bp, Homo sapiens
caaagctagtggttg

SEQ ID NO: 1607743 - DNA, 15 bp, Homo sapiens
aaagctagtggttga

SEQ ID NO: 1607744 - DNA, 15 bp, Homo sapiens
aagctagtggttgat

SEQ ID NO: 1607745 - DNA, 15 bp, Homo sapiens
agctagtggttgatt

SEQ ID NO: 1607746 - DNA, 15 bp, Homo sapiens
gctagtggttgattt

SEQ ID NO: 1607747 - DNA, 15 bp, Homo sapiens
ctagtggttgatttt

SEQ ID NO: 1607748 - DNA, 15 bp, Homo sapiens
tagtggttgattttc

SEQ ID NO: 1607749 - DNA, 15 bp, Homo sapiens
agtggttgattttct

SEQ ID NO: 1607750 - DNA, 15 bp, Homo sapiens
gtggttgattttctc

SEQ ID NO: 1607751 - DNA, 15 bp, Homo sapiens
tggttgattttctct

SEQ ID NO: 1607752 - DNA, 15 bp, Homo sapiens
ggttgattttctctt

SEQ ID NO: 1607753 - DNA, 15 bp, Homo sapiens
gttgattttctcttt

SEQ ID NO: 1607754 - DNA, 15 bp, Homo sapiens
ttgattttctctttt

SEQ ID NO: 1607755 - DNA, 15 bp, Homo sapiens
tgattttctctttta

SEQ ID NO: 1607756 - DNA, 15 bp, Homo sapiens
gattttctcttttaa

SEQ ID NO: 1607757 - DNA, 15 bp, Homo sapiens
attttctcttttaaa

SEQ ID NO: 1607758 - DNA, 15 bp, Homo sapiens
ttttctcttttaaat

SEQ ID NO: 1607759 - DNA, 15 bp, Homo sapiens
tttctcttttaaata

SEQ ID NO: 1607760 - DNA, 15 bp, Homo sapiens
ttctcttttaaataa

SEQ ID NO: 1607761 - DNA, 15 bp, Homo sapiens
tctcttttaaataat

SEQ ID NO: 1607762 - DNA, 15 bp, Homo sapiens
ctcttttaaataata

SEQ ID NO: 1607763 - DNA, 15 bp, Homo sapiens
tcttttaaataatat

SEQ ID NO: 1607764 - DNA, 15 bp, Homo sapiens
cttttaaataatatt

SEQ ID NO: 1607765 - DNA, 15 bp, Homo sapiens
ttaaataatattttt

SEQ ID NO: 1607766 - DNA, 15 bp, Homo sapiens
taaataatatttttg

SEQ ID NO: 1607767 - DNA, 15 bp, Homo sapiens
aaataatatttttgc

SEQ ID NO: 1607768 - DNA, 15 bp, Homo sapiens
aataatatttttgca

SEQ ID NO: 1607769 - DNA, 15 bp, Homo sapiens
ataatatttttgcat

SEQ ID NO: 1607770 - DNA, 15 bp, Homo sapiens
taatatttttgcata

SEQ ID NO: 1607771 - DNA, 15 bp, Homo sapiens
aatatttttgcatag

SEQ ID NO: 1607772 - DNA, 15 bp, Homo sapiens
atatttttgcatagg

SEQ ID NO: 1607773 - DNA, 15 bp, Homo sapiens
tatttttgcatagga

SEQ ID NO: 1607774 - DNA, 15 bp, Homo sapiens
atttttgcataggat

SEQ ID NO: 1607775 - DNA, 15 bp, Homo sapiens
tttttgcataggatt

SEQ ID NO: 1607776 - DNA, 15 bp, Homo sapiens
ttttgcataggatta

SEQ ID NO: 1607777 - DNA, 15 bp, Homo sapiens
tttgcataggattaa

SEQ ID NO: 1607778 - DNA, 15 bp, Homo sapiens
ttgcataggattaat

SEQ ID NO: 1607779 - DNA, 15 bp, Homo sapiens
tgcataggattaata

SEQ ID NO: 1607780 - DNA, 15 bp, Homo sapiens
gcataggattaataa

SEQ ID NO: 1607781 - DNA, 15 bp, Homo sapiens
cataggattaataaa

SEQ ID NO: 1607782 - DNA, 15 bp, Homo sapiens
ataggattaataaaa

SEQ ID NO: 1607783 - DNA, 15 bp, Homo sapiens
taggattaataaaaa

SEQ ID NO: 1607784 - DNA, 15 bp, Homo sapiens
aggattaataaaaag

SEQ ID NO: 1607785 - DNA, 15 bp, Homo sapiens
ggattaataaaaaga

SEQ ID NO: 1607786 - DNA, 15 bp, Homo sapiens
gattaataaaaagaa

SEQ ID NO: 1607787 - DNA, 15 bp, Homo sapiens
attaataaaaagaaa

SEQ ID NO: 1607788 - DNA, 15 bp, Homo sapiens
ttaataaaaagaaaa

SEQ ID NO: 1607789 - DNA, 15 bp, Homo sapiens
taataaaaagaaaag

SEQ ID NO: 1607790 - DNA, 15 bp, Homo sapiens
aataaaaagaaaaga

SEQ ID NO: 1607791 - DNA, 15 bp, Homo sapiens
ataaaaagaaaagat

SEQ ID NO: 1607792 - DNA, 15 bp, Homo sapiens
taaaaagaaaagatt

SEQ ID NO: 1607793 - DNA, 15 bp, Homo sapiens
aaaaagaaaagattt

SEQ ID NO: 1607794 - DNA, 15 bp, Homo sapiens
aaaagaaaagatttt

SEQ ID NO: 1607795 - DNA, 15 bp, Homo sapiens
aaagaaaagattttt

SEQ ID NO: 1607796 - DNA, 15 bp, Homo sapiens
aagaaaagatttttg

SEQ ID NO: 1607797 - DNA, 15 bp, Homo sapiens
agaaaagatttttgt

SEQ ID NO: 1607798 - DNA, 15 bp, Homo sapiens
gaaaagatttttgta

SEQ ID NO: 1607799 - DNA, 15 bp, Homo sapiens
aaaagatttttgtac

SEQ ID NO: 1607800 - DNA, 15 bp, Homo sapiens
aaagatttttgtaca

SEQ ID NO: 1607801 - DNA, 15 bp, Homo sapiens
aagatttttgtacat

SEQ ID NO: 1607802 - DNA, 15 bp, Homo sapiens
agatttttgtacatg

SEQ ID NO: 1607803 - DNA, 15 bp, Homo sapiens
gatttttgtacatgt

SEQ ID NO: 1607804 - DNA, 15 bp, Homo sapiens
atttttgtacatgtt

SEQ ID NO: 1607805 - DNA, 15 bp, Homo sapiens
tttttgtacatgttc

SEQ ID NO: 1607806 - DNA, 15 bp, Homo sapiens
ttttgtacatgttct

SEQ ID NO: 1607807 - DNA, 15 bp, Homo sapiens
tttgtacatgttctg

SEQ ID NO: 1607808 - DNA, 15 bp, Homo sapiens
ttgtacatgttctga

SEQ ID NO: 1607809 - DNA, 15 bp, Homo sapiens
tgtacatgttctgag

SEQ ID NO: 1607810 - DNA, 15 bp, Homo sapiens
gtacatgttctgagt

SEQ ID NO: 1607811 - DNA, 15 bp, Homo sapiens
tacatgttctgagta

SEQ ID NO: 1607812 - DNA, 15 bp, Homo sapiens
acatgttctgagtaa

SEQ ID NO: 1607813 - DNA, 15 bp, Homo sapiens
catgttctgagtaaa

SEQ ID NO: 1607814 - DNA, 15 bp, Homo sapiens
atgttctgagtaaaa

SEQ ID NO: 1607815 - DNA, 15 bp, Homo sapiens
tgttctgagtaaaat

SEQ ID NO: 1607816 - DNA, 15 bp, Homo sapiens
gttctgagtaaaatg

SEQ ID NO: 1607817 - DNA, 15 bp, Homo sapiens
ttctgagtaaaatgc

SEQ ID NO: 1607818 - DNA, 15 bp, Homo sapiens
tctgagtaaaatgca

SEQ ID NO: 1607819 - DNA, 15 bp, Homo sapiens
ctgagtaaaatgcaa

SEQ ID NO: 1607820 - DNA, 15 bp, Homo sapiens
tgagtaaaatgcaaa

SEQ ID NO: 1607821 - DNA, 15 bp, Homo sapiens
gagtaaaatgcaaaa

SEQ ID NO: 1607822 - DNA, 15 bp, Homo sapiens
agtaaaatgcaaaaa

SEQ ID NO: 1607823 - DNA, 15 bp, Homo sapiens
gtaaaatgcaaaaaa

SEQ ID NO: 1607824 - DNA, 15 bp, Homo sapiens
taaaatgcaaaaaaa

SEQ ID NO: 1607825 - DNA, 15 bp, Homo sapiens
aaaatgcaaaaaaac

SEQ ID NO: 1607826 - DNA, 15 bp, Homo sapiens
aaatgcaaaaaaaca

SEQ ID NO: 1607827 - DNA, 15 bp, Homo sapiens
aatgcaaaaaaacaa

SEQ ID NO: 1607828 - DNA, 15 bp, Homo sapiens
atgcaaaaaaacaaa

SEQ ID NO: 1607829 - DNA, 15 bp, Homo sapiens
tgcaaaaaaacaaaa

SEQ ID NO: 1607830 - DNA, 15 bp, Homo sapiens
gcaaaaaaacaaaaa

SEQ ID NO: 1607831 - DNA, 15 bp, Homo sapiens
aaacaaaaaaaaagc

SEQ ID NO: 1607832 - DNA, 15 bp, Homo sapiens
aacaaaaaaaaagca

SEQ ID NO: 1607833 - DNA, 15 bp, Homo sapiens
acaaaaaaaaagcaa

SEQ ID NO: 1607834 - DNA, 15 bp, Homo sapiens
caaaaaaaaagcaag

SEQ ID NO: 1607835 - DNA, 15 bp, Homo sapiens
aaaaaaaaagcaaga

SEQ ID NO: 1607836 - DNA, 15 bp, Homo sapiens
aaaaaaaagcaagag

SEQ ID NO: 1607837 - DNA, 15 bp, Homo sapiens
aaaaaaagcaagaga

SEQ ID NO: 1607838 - DNA, 15 bp, Homo sapiens
aaaaaagcaagagag

SEQ ID NO: 1607839 - DNA, 15 bp, Homo sapiens
aaaaagcaagagaga

SEQ ID NO: 1607840 - DNA, 15 bp, Homo sapiens
aaaagcaagagagag

SEQ ID NO: 1607841 - DNA, 15 bp, Homo sapiens
aaagcaagagagaga

SEQ ID NO: 1607842 - DNA, 15 bp, Homo sapiens
aagcaagagagagaa

SEQ ID NO: 1607843 - DNA, 15 bp, Homo sapiens
agcaagagagagaaa

SEQ ID NO: 1607844 - DNA, 15 bp, Homo sapiens
gcaagagagagaaac

SEQ ID NO: 1607845 - DNA, 15 bp, Homo sapiens
caagagagagaaaca

SEQ ID NO: 1607846 - DNA, 15 bp, Homo sapiens
aagagagagaaacag

SEQ ID NO: 1607847 - DNA, 15 bp, Homo sapiens
agagagagaaacaga

SEQ ID NO: 1607848 - DNA, 15 bp, Homo sapiens
gagagagaaacagat

SEQ ID NO: 1607849 - DNA, 15 bp, Homo sapiens
agagagaaacagatt

SEQ ID NO: 1607850 - DNA, 15 bp, Homo sapiens
gagagaaacagattt

SEQ ID NO: 1607851 - DNA, 15 bp, Homo sapiens
agagaaacagatttt

SEQ ID NO: 1607852 - DNA, 15 bp, Homo sapiens
gagaaacagattttg

SEQ ID NO: 1607853 - DNA, 15 bp, Homo sapiens
agaaacagattttgt

SEQ ID NO: 1607854 - DNA, 15 bp, Homo sapiens
gaaacagattttgtg

SEQ ID NO: 1607855 - DNA, 15 bp, Homo sapiens
aaacagattttgtgt

SEQ ID NO: 1607856 - DNA, 15 bp, Homo sapiens
aacagattttgtgtg

SEQ ID NO: 1607857 - DNA, 15 bp, Homo sapiens
acagattttgtgtgc

SEQ ID NO: 1607858 - DNA, 15 bp, Homo sapiens
cagattttgtgtgcc

SEQ ID NO: 1607859 - DNA, 15 bp, Homo sapiens
agattttgtgtgcct

SEQ ID NO: 1607860 - DNA, 15 bp, Homo sapiens
gattttgtgtgcctc

SEQ ID NO: 1607861 - DNA, 15 bp, Homo sapiens
attttgtgtgcctca

SEQ ID NO: 1607862 - DNA, 15 bp, Homo sapiens
ttttgtgtgcctcat

SEQ ID NO: 1607863 - DNA, 15 bp, Homo sapiens
tttgtgtgcctcatg

SEQ ID NO: 1607864 - DNA, 15 bp, Homo sapiens
ttgtgtgcctcatgt

SEQ ID NO: 1607865 - DNA, 15 bp, Homo sapiens
tgtgtgcctcatgtc

SEQ ID NO: 1607866 - DNA, 15 bp, Homo sapiens
gtgtgcctcatgtct

SEQ ID NO: 1607867 - DNA, 15 bp, Homo sapiens
tgtgcctcatgtctt

SEQ ID NO: 1607868 - DNA, 15 bp, Homo sapiens
gtgcctcatgtcttg

SEQ ID NO: 1607869 - DNA, 15 bp, Homo sapiens
tgcctcatgtcttgt

SEQ ID NO: 1607870 - DNA, 15 bp, Homo sapiens
gcctcatgtcttgtc

SEQ ID NO: 1607871 - DNA, 15 bp, Homo sapiens
cctcatgtcttgtca

SEQ ID NO: 1607872 - DNA, 15 bp, Homo sapiens
ctcatgtcttgtcat

SEQ ID NO: 1607873 - DNA, 15 bp, Homo sapiens
tcatgtcttgtcatg

SEQ ID NO: 1607874 - DNA, 15 bp, Homo sapiens
catgtcttgtcatgc

SEQ ID NO: 1607875 - DNA, 15 bp, Homo sapiens
atgtcttgtcatgct

SEQ ID NO: 1607876 - DNA, 15 bp, Homo sapiens
tgtcttgtcatgctt

SEQ ID NO: 1607877 - DNA, 15 bp, Homo sapiens
gtcttgtcatgcttc

SEQ ID NO: 1607878 - DNA, 15 bp, Homo sapiens
tcttgtcatgcttct

SEQ ID NO: 1607879 - DNA, 15 bp, Homo sapiens
cttgtcatgcttctt

SEQ ID NO: 1607880 - DNA, 15 bp, Homo sapiens
ttgtcatgcttcttc

SEQ ID NO: 1607881 - DNA, 15 bp, Homo sapiens
tgtcatgcttcttca

SEQ ID NO: 1607882 - DNA, 15 bp, Homo sapiens
gtcatgcttcttcag

SEQ ID NO: 1607883 - DNA, 15 bp, Homo sapiens
tcatgcttcttcaga

SEQ ID NO: 1607884 - DNA, 15 bp, Homo sapiens
catgcttcttcagaa

SEQ ID NO: 1607885 - DNA, 15 bp, Homo sapiens
atgcttcttcagaag

SEQ ID NO: 1607886 - DNA, 15 bp, Homo sapiens
tgcttcttcagaagg

SEQ ID NO: 1607887 - DNA, 15 bp, Homo sapiens
gcttcttcagaaggt

SEQ ID NO: 1607888 - DNA, 15 bp, Homo sapiens
cttcttcagaaggtg

SEQ ID NO: 1607889 - DNA, 15 bp, Homo sapiens
ttcttcagaaggtgt

SEQ ID NO: 1607890 - DNA, 15 bp, Homo sapiens
tcttcagaaggtgtt

SEQ ID NO: 1607891 - DNA, 15 bp, Homo sapiens
cttcagaaggtgttt

SEQ ID NO: 1607892 - DNA, 15 bp, Homo sapiens
ttcagaaggtgtttt

SEQ ID NO: 1607893 - DNA, 15 bp, Homo sapiens
tcagaaggtgttttg

SEQ ID NO: 1607894 - DNA, 15 bp, Homo sapiens
cagaaggtgttttga

SEQ ID NO: 1607895 - DNA, 15 bp, Homo sapiens
agaaggtgttttgat

SEQ ID NO: 1607896 - DNA, 15 bp, Homo sapiens
gaaggtgttttgatt

SEQ ID NO: 1607897 - DNA, 15 bp, Homo sapiens
aaggtgttttgatta

SEQ ID NO: 1607898 - DNA, 15 bp, Homo sapiens
aggtgttttgattat

SEQ ID NO: 1607899 - DNA, 15 bp, Homo sapiens
ggtgttttgattatt

SEQ ID NO: 1607900 - DNA, 15 bp, Homo sapiens
gtgttttgattattt

SEQ ID NO: 1607901 - DNA, 15 bp, Homo sapiens
tgttttgattatttg

SEQ ID NO: 1607902 - DNA, 15 bp, Homo sapiens
gttttgattatttgc

SEQ ID NO: 1607903 - DNA, 15 bp, Homo sapiens
ttttgattatttgca

SEQ ID NO: 1607904 - DNA, 15 bp, Homo sapiens
tttgattatttgcaa

SEQ ID NO: 1607905 - DNA, 15 bp, Homo sapiens
ttgattatttgcaaa

SEQ ID NO: 1607906 - DNA, 15 bp, Homo sapiens
tgattatttgcaaaa

SEQ ID NO: 1607907 - DNA, 15 bp, Homo sapiens
gattatttgcaaaac

SEQ ID NO: 1607908 - DNA, 15 bp, Homo sapiens
attatttgcaaaacc

SEQ ID NO: 1607909 - DNA, 15 bp, Homo sapiens
ttatttgcaaaaccg

SEQ ID NO: 1607910 - DNA, 15 bp, Homo sapiens
tatttgcaaaaccga

SEQ ID NO: 1607911 - DNA, 15 bp, Homo sapiens
atttgcaaaaccgag

SEQ ID NO: 1607912 - DNA, 15 bp, Homo sapiens
tttgcaaaaccgagt

SEQ ID NO: 1607913 - DNA, 15 bp, Homo sapiens
ttgcaaaaccgagtc

SEQ ID NO: 1607914 - DNA, 15 bp, Homo sapiens
tgcaaaaccgagtct

SEQ ID NO: 1607915 - DNA, 15 bp, Homo sapiens
gcaaaaccgagtctc

SEQ ID NO: 1607916 - DNA, 15 bp, Homo sapiens
caaaaccgagtctct

SEQ ID NO: 1607917 - DNA, 15 bp, Homo sapiens
aaaaccgagtctctt

SEQ ID NO: 1607918 - DNA, 15 bp, Homo sapiens
aaaccgagtctctta

SEQ ID NO: 1607919 - DNA, 15 bp, Homo sapiens
aaccgagtctcttat

SEQ ID NO: 1607920 - DNA, 15 bp, Homo sapiens
accgagtctcttatc

SEQ ID NO: 1607921 - DNA, 15 bp, Homo sapiens
ccgagtctcttatca

SEQ ID NO: 1607922 - DNA, 15 bp, Homo sapiens
cgagtctcttatcaa

SEQ ID NO: 1607923 - DNA, 15 bp, Homo sapiens
gagtctcttatcaat

SEQ ID NO: 1607924 - DNA, 15 bp, Homo sapiens
agtctcttatcaatc

SEQ ID NO: 1607925 - DNA, 15 bp, Homo sapiens
gtctcttatcaatca

SEQ ID NO: 1607926 - DNA, 15 bp, Homo sapiens
tctcttatcaatcaa

SEQ ID NO: 1607927 - DNA, 15 bp, Homo sapiens
ctcttatcaatcaaa

SEQ ID NO: 1607928 - DNA, 15 bp, Homo sapiens
tcttatcaatcaaac

SEQ ID NO: 1607929 - DNA, 15 bp, Homo sapiens
cttatcaatcaaaca

SEQ ID NO: 1607930 - DNA, 15 bp, Homo sapiens
ttatcaatcaaacag

SEQ ID NO: 1607931 - DNA, 15 bp, Homo sapiens
tatcaatcaaacagc

SEQ ID NO: 1607932 - DNA, 15 bp, Homo sapiens
atcaatcaaacagca

SEQ ID NO: 1607933 - DNA, 15 bp, Homo sapiens
tcaatcaaacagcaa

SEQ ID NO: 1607934 - DNA, 15 bp, Homo sapiens
caatcaaacagcaaa

SEQ ID NO: 1607935 - DNA, 15 bp, Homo sapiens
aatcaaacagcaaag

SEQ ID NO: 1607936 - DNA, 15 bp, Homo sapiens
atcaaacagcaaagg

SEQ ID NO: 1607937 - DNA, 15 bp, Homo sapiens
tcaaacagcaaaggt

SEQ ID NO: 1607938 - DNA, 15 bp, Homo sapiens
caaacagcaaaggtt

SEQ ID NO: 1607939 - DNA, 15 bp, Homo sapiens
aaacagcaaaggttt

SEQ ID NO: 1607940 - DNA, 15 bp, Homo sapiens
aacagcaaaggtttt

SEQ ID NO: 1607941 - DNA, 15 bp, Homo sapiens
acagcaaaggttttt

SEQ ID NO: 1607942 - DNA, 15 bp, Homo sapiens
cagcaaaggtttttg

SEQ ID NO: 1607943 - DNA, 15 bp, Homo sapiens
agcaaaggtttttgc

SEQ ID NO: 1607944 - DNA, 15 bp, Homo sapiens
gcaaaggtttttgct

SEQ ID NO: 1607945 - DNA, 15 bp, Homo sapiens
caaaggtttttgctt

SEQ ID NO: 1607946 - DNA, 15 bp, Homo sapiens
aaaggtttttgcttt

SEQ ID NO: 1607947 - DNA, 15 bp, Homo sapiens
aaggtttttgctttt

SEQ ID NO: 1607948 - DNA, 15 bp, Homo sapiens
aggtttttgcttttt

SEQ ID NO: 1607949 - DNA, 15 bp, Homo sapiens
ggtttttgctttttg

SEQ ID NO: 1607950 - DNA, 15 bp, Homo sapiens
gtttttgctttttga

SEQ ID NO: 1607951 - DNA, 15 bp, Homo sapiens
tttttgctttttgaa

SEQ ID NO: 1607952 - DNA, 15 bp, Homo sapiens
ttttgctttttgaaa

SEQ ID NO: 1607953 - DNA, 15 bp, Homo sapiens
tttgctttttgaaat

SEQ ID NO: 1607954 - DNA, 15 bp, Homo sapiens
ttgctttttgaaatc

SEQ ID NO: 1607955 - DNA, 15 bp, Homo sapiens
tgctttttgaaatct

SEQ ID NO: 1607956 - DNA, 15 bp, Homo sapiens
gctttttgaaatctt

SEQ ID NO: 1607957 - DNA, 15 bp, Homo sapiens
ctttttgaaatcttc

SEQ ID NO: 1607958 - DNA, 15 bp, Homo sapiens
tttttgaaatcttct

SEQ ID NO: 1607959 - DNA, 15 bp, Homo sapiens
ttttgaaatcttcta

SEQ ID NO: 1607960 - DNA, 15 bp, Homo sapiens
tttgaaatcttctaa

SEQ ID NO: 1607961 - DNA, 15 bp, Homo sapiens
ttgaaatcttctaat

SEQ ID NO: 1607962 - DNA, 15 bp, Homo sapiens
tgaaatcttctaatt

SEQ ID NO: 1607963 - DNA, 15 bp, Homo sapiens
gaaatcttctaatta

SEQ ID NO: 1607964 - DNA, 15 bp, Homo sapiens
aaatcttctaattat

SEQ ID NO: 1607965 - DNA, 15 bp, Homo sapiens
aatcttctaattatc

SEQ ID NO: 1607966 - DNA, 15 bp, Homo sapiens
atcttctaattatca

SEQ ID NO: 1607967 - DNA, 15 bp, Homo sapiens
tcttctaattatcac

SEQ ID NO: 1607968 - DNA, 15 bp, Homo sapiens
cttctaattatcact

SEQ ID NO: 1607969 - DNA, 15 bp, Homo sapiens
ttctaattatcactt

SEQ ID NO: 1607970 - DNA, 15 bp, Homo sapiens
tctaattatcacttt

SEQ ID NO: 1607971 - DNA, 15 bp, Homo sapiens
ctaattatcactttg

SEQ ID NO: 1607972 - DNA, 15 bp, Homo sapiens
taattatcactttgg

SEQ ID NO: 1607973 - DNA, 15 bp, Homo sapiens
aattatcactttggc

SEQ ID NO: 1607974 - DNA, 15 bp, Homo sapiens
attatcactttggct

SEQ ID NO: 1607975 - DNA, 15 bp, Homo sapiens
ttatcactttggcta

SEQ ID NO: 1607976 - DNA, 15 bp, Homo sapiens
tatcactttggctaa

SEQ ID NO: 1607977 - DNA, 15 bp, Homo sapiens
atcactttggctaaa

SEQ ID NO: 1607978 - DNA, 15 bp, Homo sapiens
tcactttggctaaat

SEQ ID NO: 1607979 - DNA, 15 bp, Homo sapiens
cactttggctaaatg

SEQ ID NO: 1607980 - DNA, 15 bp, Homo sapiens
actttggctaaatga

SEQ ID NO: 1607981 - DNA, 15 bp, Homo sapiens
ctttggctaaatgaa

SEQ ID NO: 1607982 - DNA, 15 bp, Homo sapiens
tttggctaaatgaat

SEQ ID NO: 1607983 - DNA, 15 bp, Homo sapiens
ttggctaaatgaatg

SEQ ID NO: 1607984 - DNA, 15 bp, Homo sapiens
tggctaaatgaatga

SEQ ID NO: 1607985 - DNA, 15 bp, Homo sapiens
ggctaaatgaatgac

SEQ ID NO: 1607986 - DNA, 15 bp, Homo sapiens
gctaaatgaatgact

SEQ ID NO: 1607987 - DNA, 15 bp, Homo sapiens
ctaaatgaatgacta

SEQ ID NO: 1607988 - DNA, 15 bp, Homo sapiens
taaatgaatgactat

SEQ ID NO: 1607989 - DNA, 15 bp, Homo sapiens
aaatgaatgactatt

SEQ ID NO: 1607990 - DNA, 15 bp, Homo sapiens
aatgaatgactatta

SEQ ID NO: 1607991 - DNA, 15 bp, Homo sapiens
atgaatgactattat

SEQ ID NO: 1607992 - DNA, 15 bp, Homo sapiens
tgaatgactattatt

SEQ ID NO: 1607993 - DNA, 15 bp, Homo sapiens
gaatgactattattt

SEQ ID NO: 1607994 - DNA, 15 bp, Homo sapiens
aatgactattatttt

SEQ ID NO: 1607995 - DNA, 15 bp, Homo sapiens
atgactattattttt

SEQ ID NO: 1607996 - DNA, 15 bp, Homo sapiens
tgactattatttttt

SEQ ID NO: 1607997 - DNA, 15 bp, Homo sapiens
gactattattttttc

SEQ ID NO: 1607998 - DNA, 15 bp, Homo sapiens
actattattttttca

SEQ ID NO: 1607999 - DNA, 15 bp, Homo sapiens
ctattattttttcat

SEQ ID NO: 1608000 - DNA, 15 bp, Homo sapiens
tattattttttcatt

SEQ ID NO: 1608001 - DNA, 15 bp, Homo sapiens
attattttttcattg

SEQ ID NO: 1608002 - DNA, 15 bp, Homo sapiens
ttattttttcattgg

SEQ ID NO: 1608003 - DNA, 15 bp, Homo sapiens
tattttttcattgga

SEQ ID NO: 1608004 - DNA, 15 bp, Homo sapiens
attttttcattggac

SEQ ID NO: 1608005 - DNA, 15 bp, Homo sapiens
ttttttcattggacc

SEQ ID NO: 1608006 - DNA, 15 bp, Homo sapiens
tttttcattggacct

SEQ ID NO: 1608007 - DNA, 15 bp, Homo sapiens
ttttcattggaccta

SEQ ID NO: 1608008 - DNA, 15 bp, Homo sapiens
tttcattggacctat

SEQ ID NO: 1608009 - DNA, 15 bp, Homo sapiens
ttcattggacctatg

SEQ ID NO: 1608010 - DNA, 15 bp, Homo sapiens
tcattggacctatga

SEQ ID NO: 1608011 - DNA, 15 bp, Homo sapiens
cattggacctatgat

SEQ ID NO: 1608012 - DNA, 15 bp, Homo sapiens
attggacctatgatc

SEQ ID NO: 1608013 - DNA, 15 bp, Homo sapiens
ttggacctatgatcc

SEQ ID NO: 1608014 - DNA, 15 bp, Homo sapiens
tggacctatgatcct

SEQ ID NO: 1608015 - DNA, 15 bp, Homo sapiens
ggacctatgatccta

SEQ ID NO: 1608016 - DNA, 15 bp, Homo sapiens
gacctatgatcctat

SEQ ID NO: 1608017 - DNA, 15 bp, Homo sapiens
acctatgatcctatt

SEQ ID NO: 1608018 - DNA, 15 bp, Homo sapiens
cctatgatcctattt

SEQ ID NO: 1608019 - DNA, 15 bp, Homo sapiens
ctatgatcctatttt

SEQ ID NO: 1608020 - DNA, 15 bp, Homo sapiens
tatgatcctattttg

SEQ ID NO: 1608021 - DNA, 15 bp, Homo sapiens
atgatcctattttga

SEQ ID NO: 1608022 - DNA, 15 bp, Homo sapiens
tgatcctattttgat

SEQ ID NO: 1608023 - DNA, 15 bp, Homo sapiens
gatcctattttgatc

SEQ ID NO: 1608024 - DNA, 15 bp, Homo sapiens
atcctattttgatca

SEQ ID NO: 1608025 - DNA, 15 bp, Homo sapiens
tcctattttgatcaa

SEQ ID NO: 1608026 - DNA, 15 bp, Homo sapiens
cctattttgatcaag

SEQ ID NO: 1608027 - DNA, 15 bp, Homo sapiens
ctattttgatcaagt

SEQ ID NO: 1608028 - DNA, 15 bp, Homo sapiens
tattttgatcaagta

SEQ ID NO: 1608029 - DNA, 15 bp, Homo sapiens
attttgatcaagtat

SEQ ID NO: 1608030 - DNA, 15 bp, Homo sapiens
ttttgatcaagtatt

SEQ ID NO: 1608031 - DNA, 15 bp, Homo sapiens
tttgatcaagtattt

SEQ ID NO: 1608032 - DNA, 15 bp, Homo sapiens
ttgatcaagtatttg

SEQ ID NO: 1608033 - DNA, 15 bp, Homo sapiens
tgatcaagtatttga

SEQ ID NO: 1608034 - DNA, 15 bp, Homo sapiens
gatcaagtatttgaa

SEQ ID NO: 1608035 - DNA, 15 bp, Homo sapiens
atcaagtatttgaaa

SEQ ID NO: 1608036 - DNA, 15 bp, Homo sapiens
tcaagtatttgaaac

SEQ ID NO: 1608037 - DNA, 15 bp, Homo sapiens
caagtatttgaaacc

SEQ ID NO: 1608038 - DNA, 15 bp, Homo sapiens
aagtatttgaaacct

SEQ ID NO: 1608039 - DNA, 15 bp, Homo sapiens
agtatttgaaacctt

SEQ ID NO: 1608040 - DNA, 15 bp, Homo sapiens
gtatttgaaaccttt

SEQ ID NO: 1608041 - DNA, 15 bp, Homo sapiens
tatttgaaaccttta

SEQ ID NO: 1608042 - DNA, 15 bp, Homo sapiens
atttgaaacctttaa

SEQ ID NO: 1608043 - DNA, 15 bp, Homo sapiens
tttgaaacctttaat

SEQ ID NO: 1608044 - DNA, 15 bp, Homo sapiens
ttgaaacctttaatg

SEQ ID NO: 1608045 - DNA, 15 bp, Homo sapiens
tgaaacctttaatgt

SEQ ID NO: 1608046 - DNA, 15 bp, Homo sapiens
gaaacctttaatgta

SEQ ID NO: 1608047 - DNA, 15 bp, Homo sapiens
aaacctttaatgtat

SEQ ID NO: 1608048 - DNA, 15 bp, Homo sapiens
aacctttaatgtatt

SEQ ID NO: 1608049 - DNA, 15 bp, Homo sapiens
acctttaatgtattt

SEQ ID NO: 1608050 - DNA, 15 bp, Homo sapiens
cctttaatgtatttg

SEQ ID NO: 1608051 - DNA, 15 bp, Homo sapiens
ctttaatgtatttga

SEQ ID NO: 1608052 - DNA, 15 bp, Homo sapiens
tttaatgtatttgag

SEQ ID NO: 1608053 - DNA, 15 bp, Homo sapiens
ttaatgtatttgaga

SEQ ID NO: 1608054 - DNA, 15 bp, Homo sapiens
taatgtatttgagag

SEQ ID NO: 1608055 - DNA, 15 bp, Homo sapiens
aatgtatttgagagg

SEQ ID NO: 1608056 - DNA, 15 bp, Homo sapiens
atgtatttgagaggc

SEQ ID NO: 1608057 - DNA, 15 bp, Homo sapiens
tgtatttgagaggct

SEQ ID NO: 1608058 - DNA, 15 bp, Homo sapiens
gtatttgagaggctt

SEQ ID NO: 1608059 - DNA, 15 bp, Homo sapiens
tatttgagaggcttc

SEQ ID NO: 1608060 - DNA, 15 bp, Homo sapiens
atttgagaggcttct

SEQ ID NO: 1608061 - DNA, 15 bp, Homo sapiens
tttgagaggcttctc

SEQ ID NO: 1608062 - DNA, 15 bp, Homo sapiens
ttgagaggcttctca

SEQ ID NO: 1608063 - DNA, 15 bp, Homo sapiens
tgagaggcttctcac

SEQ ID NO: 1608064 - DNA, 15 bp, Homo sapiens
gagaggcttctcaca

SEQ ID NO: 1608065 - DNA, 15 bp, Homo sapiens
agaggcttctcacaa

SEQ ID NO: 1608066 - DNA, 15 bp, Homo sapiens
gaggcttctcacaat

SEQ ID NO: 1608067 - DNA, 15 bp, Homo sapiens
aggcttctcacaatt

SEQ ID NO: 1608068 - DNA, 15 bp, Homo sapiens
ggcttctcacaatta

SEQ ID NO: 1608069 - DNA, 15 bp, Homo sapiens
gcttctcacaattat

SEQ ID NO: 1608070 - DNA, 15 bp, Homo sapiens
cttctcacaattata

SEQ ID NO: 1608071 - DNA, 15 bp, Homo sapiens
ttctcacaattatat

SEQ ID NO: 1608072 - DNA, 15 bp, Homo sapiens
tctcacaattatatt

SEQ ID NO: 1608073 - DNA, 15 bp, Homo sapiens
ctcacaattatattt

SEQ ID NO: 1608074 - DNA, 15 bp, Homo sapiens
tcacaattatatttc

SEQ ID NO: 1608075 - DNA, 15 bp, Homo sapiens
cacaattatatttca

SEQ ID NO: 1608076 - DNA, 15 bp, Homo sapiens
acaattatatttcaa

SEQ ID NO: 1608077 - DNA, 15 bp, Homo sapiens
caattatatttcaaa

SEQ ID NO: 1608078 - DNA, 15 bp, Homo sapiens
aattatatttcaaaa

SEQ ID NO: 1608079 - DNA, 15 bp, Homo sapiens
attatatttcaaaat

SEQ ID NO: 1608080 - DNA, 15 bp, Homo sapiens
ttatatttcaaaatc

SEQ ID NO: 1608081 - DNA, 15 bp, Homo sapiens
tatatttcaaaatct

SEQ ID NO: 1608082 - DNA, 15 bp, Homo sapiens
atatttcaaaatcta

SEQ ID NO: 1608083 - DNA, 15 bp, Homo sapiens
tatttcaaaatctaa

SEQ ID NO: 1608084 - DNA, 15 bp, Homo sapiens
atttcaaaatctaaa

SEQ ID NO: 1608085 - DNA, 15 bp, Homo sapiens
tttcaaaatctaaaa

SEQ ID NO: 1608086 - DNA, 15 bp, Homo sapiens
ttcaaaatctaaaat

SEQ ID NO: 1608087 - DNA, 15 bp, Homo sapiens
tcaaaatctaaaatt

SEQ ID NO: 1608088 - DNA, 15 bp, Homo sapiens
caaaatctaaaatta

SEQ ID NO: 1608089 - DNA, 15 bp, Homo sapiens
aaaatctaaaattaa

SEQ ID NO: 1608090 - DNA, 15 bp, Homo sapiens
aaatctaaaattaag

SEQ ID NO: 1608091 - DNA, 15 bp, Homo sapiens
aatctaaaattaagt

SEQ ID NO: 1608092 - DNA, 15 bp, Homo sapiens
atctaaaattaagta

SEQ ID NO: 1608093 - DNA, 15 bp, Homo sapiens
tctaaaattaagtat

SEQ ID NO: 1608094 - DNA, 15 bp, Homo sapiens
ctaaaattaagtatt

SEQ ID NO: 1608095 - DNA, 15 bp, Homo sapiens
taaaattaagtattt

SEQ ID NO: 1608096 - DNA, 15 bp, Homo sapiens
aaaattaagtatttt

SEQ ID NO: 1608097 - DNA, 15 bp, Homo sapiens
aaattaagtattttt

SEQ ID NO: 1608098 - DNA, 15 bp, Homo sapiens
aattaagtatttttg

SEQ ID NO: 1608099 - DNA, 15 bp, Homo sapiens
attaagtatttttga

SEQ ID NO: 1608100 - DNA, 15 bp, Homo sapiens
ttaagtatttttgac

SEQ ID NO: 1608101 - DNA, 15 bp, Homo sapiens
taagtatttttgacc

SEQ ID NO: 1608102 - DNA, 15 bp, Homo sapiens
aagtatttttgacct

SEQ ID NO: 1608103 - DNA, 15 bp, Homo sapiens
agtatttttgacctc

SEQ ID NO: 1608104 - DNA, 15 bp, Homo sapiens
gtatttttgacctca

SEQ ID NO: 1608105 - DNA, 15 bp, Homo sapiens
tatttttgacctcaa

SEQ ID NO: 1608106 - DNA, 15 bp, Homo sapiens
atttttgacctcaaa

SEQ ID NO: 1608107 - DNA, 15 bp, Homo sapiens
tttttgacctcaaac

SEQ ID NO: 1608108 - DNA, 15 bp, Homo sapiens
ttttgacctcaaact

SEQ ID NO: 1608109 - DNA, 15 bp, Homo sapiens
tttgacctcaaacta

SEQ ID NO: 1608110 - DNA, 15 bp, Homo sapiens
ttgacctcaaactaa

SEQ ID NO: 1608111 - DNA, 15 bp, Homo sapiens
tgacctcaaactaac

SEQ ID NO: 1608112 - DNA, 15 bp, Homo sapiens
gacctcaaactaact

SEQ ID NO: 1608113 - DNA, 15 bp, Homo sapiens
acctcaaactaactt

SEQ ID NO: 1608114 - DNA, 15 bp, Homo sapiens
cctcaaactaacttt

SEQ ID NO: 1608115 - DNA, 15 bp, Homo sapiens
ctcaaactaactttg

SEQ ID NO: 1608116 - DNA, 15 bp, Homo sapiens
tcaaactaactttga

SEQ ID NO: 1608117 - DNA, 15 bp, Homo sapiens
caaactaactttgag

SEQ ID NO: 1608118 - DNA, 15 bp, Homo sapiens
aaactaactttgaga

SEQ ID NO: 1608119 - DNA, 15 bp, Homo sapiens
aactaactttgagat

SEQ ID NO: 1608120 - DNA, 15 bp, Homo sapiens
actaactttgagata

SEQ ID NO: 1608121 - DNA, 15 bp, Homo sapiens
ctaactttgagatat

SEQ ID NO: 1608122 - DNA, 15 bp, Homo sapiens
taactttgagatatt

SEQ ID NO: 1608123 - DNA, 15 bp, Homo sapiens
aactttgagatattc

SEQ ID NO: 1608124 - DNA, 15 bp, Homo sapiens
actttgagatattcc

SEQ ID NO: 1608125 - DNA, 15 bp, Homo sapiens
ctttgagatattcca

SEQ ID NO: 1608126 - DNA, 15 bp, Homo sapiens
tttgagatattccaa

SEQ ID NO: 1608127 - DNA, 15 bp, Homo sapiens
ttgagatattccaaa

SEQ ID NO: 1608128 - DNA, 15 bp, Homo sapiens
tgagatattccaaaa

SEQ ID NO: 1608129 - DNA, 15 bp, Homo sapiens
gagatattccaaaaa

SEQ ID NO: 1608130 - DNA, 15 bp, Homo sapiens
agatattccaaaaag

SEQ ID NO: 1608131 - DNA, 15 bp, Homo sapiens
gatattccaaaaagc

SEQ ID NO: 1608132 - DNA, 15 bp, Homo sapiens
atattccaaaaagct

SEQ ID NO: 1608133 - DNA, 15 bp, Homo sapiens
tattccaaaaagctg

SEQ ID NO: 1608134 - DNA, 15 bp, Homo sapiens
attccaaaaagctgc

SEQ ID NO: 1608135 - DNA, 15 bp, Homo sapiens
ttccaaaaagctgct

SEQ ID NO: 1608136 - DNA, 15 bp, Homo sapiens
tccaaaaagctgctg

SEQ ID NO: 1608137 - DNA, 15 bp, Homo sapiens
ccaaaaagctgctga

SEQ ID NO: 1608138 - DNA, 15 bp, Homo sapiens
caaaaagctgctgaa

SEQ ID NO: 1608139 - DNA, 15 bp, Homo sapiens
aaaaagctgctgaag

SEQ ID NO: 1608140 - DNA, 15 bp, Homo sapiens
aaaagctgctgaagc

SEQ ID NO: 1608141 - DNA, 15 bp, Homo sapiens
aaagctgctgaagct

SEQ ID NO: 1608142 - DNA, 15 bp, Homo sapiens
aagctgctgaagctt

SEQ ID NO: 1608143 - DNA, 15 bp, Homo sapiens
agctgctgaagcttc

SEQ ID NO: 1608144 - DNA, 15 bp, Homo sapiens
gctgctgaagcttcc

SEQ ID NO: 1608145 - DNA, 15 bp, Homo sapiens
ctgctgaagcttcca

SEQ ID NO: 1608146 - DNA, 15 bp, Homo sapiens
tgctgaagcttccaa

SEQ ID NO: 1608147 - DNA, 15 bp, Homo sapiens
gctgaagcttccaaa

SEQ ID NO: 1608148 - DNA, 15 bp, Homo sapiens
ctgaagcttccaaaa

SEQ ID NO: 1608149 - DNA, 15 bp, Homo sapiens
tgaagcttccaaaag

SEQ ID NO: 1608150 - DNA, 15 bp, Homo sapiens
gaagcttccaaaaga

SEQ ID NO: 1608151 - DNA, 15 bp, Homo sapiens
aagcttccaaaagaa

SEQ ID NO: 1608152 - DNA, 15 bp, Homo sapiens
agcttccaaaagaaa

SEQ ID NO: 1608153 - DNA, 15 bp, Homo sapiens
gcttccaaaagaaat

SEQ ID NO: 1608154 - DNA, 15 bp, Homo sapiens
cttccaaaagaaata

SEQ ID NO: 1608155 - DNA, 15 bp, Homo sapiens
ttccaaaagaaataa

SEQ ID NO: 1608156 - DNA, 15 bp, Homo sapiens
tccaaaagaaataat

SEQ ID NO: 1608157 - DNA, 15 bp, Homo sapiens
ccaaaagaaataata

SEQ ID NO: 1608158 - DNA, 15 bp, Homo sapiens
caaaagaaataataa

SEQ ID NO: 1608159 - DNA, 15 bp, Homo sapiens
aaaagaaataataaa

SEQ ID NO: 1608160 - DNA, 15 bp, Homo sapiens
aaagaaataataaac

SEQ ID NO: 1608161 - DNA, 15 bp, Homo sapiens
aagaaataataaaca

SEQ ID NO: 1608162 - DNA, 15 bp, Homo sapiens
agaaataataaacag

SEQ ID NO: 1608163 - DNA, 15 bp, Homo sapiens
gaaataataaacagg

SEQ ID NO: 1608164 - DNA, 15 bp, Homo sapiens
aaataataaacaggc

SEQ ID NO: 1608165 - DNA, 15 bp, Homo sapiens
aataataaacaggct

SEQ ID NO: 1608166 - DNA, 15 bp, Homo sapiens
ataataaacaggctt

SEQ ID NO: 1608167 - DNA, 15 bp, Homo sapiens
taataaacaggctta

SEQ ID NO: 1608168 - DNA, 15 bp, Homo sapiens
aataaacaggcttat

SEQ ID NO: 1608169 - DNA, 15 bp, Homo sapiens
ataaacaggcttatt

SEQ ID NO: 1608170 - DNA, 15 bp, Homo sapiens
taaacaggcttattt

SEQ ID NO: 1608171 - DNA, 15 bp, Homo sapiens
aaacaggcttatttg

SEQ ID NO: 1608172 - DNA, 15 bp, Homo sapiens
aacaggcttatttga

SEQ ID NO: 1608173 - DNA, 15 bp, Homo sapiens
acaggcttatttgat

SEQ ID NO: 1608174 - DNA, 15 bp, Homo sapiens
caggcttatttgata

SEQ ID NO: 1608175 - DNA, 15 bp, Homo sapiens
aggcttatttgatat

SEQ ID NO: 1608176 - DNA, 15 bp, Homo sapiens
ggcttatttgatatg

SEQ ID NO: 1608177 - DNA, 15 bp, Homo sapiens
gcttatttgatatgt

SEQ ID NO: 1608178 - DNA, 15 bp, Homo sapiens
cttatttgatatgtt

SEQ ID NO: 1608179 - DNA, 15 bp, Homo sapiens
ttatttgatatgttc

SEQ ID NO: 1608180 - DNA, 15 bp, Homo sapiens
tatttgatatgttca

SEQ ID NO: 1608181 - DNA, 15 bp, Homo sapiens
atttgatatgttcat

SEQ ID NO: 1608182 - DNA, 15 bp, Homo sapiens
tttgatatgttcatt

SEQ ID NO: 1608183 - DNA, 15 bp, Homo sapiens
ttgatatgttcatta

SEQ ID NO: 1608184 - DNA, 15 bp, Homo sapiens
tgatatgttcattat

SEQ ID NO: 1608185 - DNA, 15 bp, Homo sapiens
gatatgttcattatg

SEQ ID NO: 1608186 - DNA, 15 bp, Homo sapiens
atatgttcattatgt

SEQ ID NO: 1608187 - DNA, 15 bp, Homo sapiens
tatgttcattatgta

SEQ ID NO: 1608188 - DNA, 15 bp, Homo sapiens
atgttcattatgtaa

SEQ ID NO: 1608189 - DNA, 15 bp, Homo sapiens
tgttcattatgtaaa

SEQ ID NO: 1608190 - DNA, 15 bp, Homo sapiens
gttcattatgtaaaa

SEQ ID NO: 1608191 - DNA, 15 bp, Homo sapiens
ttcattatgtaaaaa

SEQ ID NO: 1608192 - DNA, 15 bp, Homo sapiens
tcattatgtaaaaag

SEQ ID NO: 1608193 - DNA, 15 bp, Homo sapiens
cattatgtaaaaaga

SEQ ID NO: 1608194 - DNA, 15 bp, Homo sapiens
attatgtaaaaagat

SEQ ID NO: 1608195 - DNA, 15 bp, Homo sapiens
ttatgtaaaaagatt

SEQ ID NO: 1608196 - DNA, 15 bp, Homo sapiens
tatgtaaaaagattt

SEQ ID NO: 1608197 - DNA, 15 bp, Homo sapiens
atgtaaaaagatttt

SEQ ID NO: 1608198 - DNA, 15 bp, Homo sapiens
tgtaaaaagattttc

SEQ ID NO: 1608199 - DNA, 15 bp, Homo sapiens
gtaaaaagattttca

SEQ ID NO: 1608200 - DNA, 15 bp, Homo sapiens
aagattttcaaataa

SEQ ID NO: 1608201 - DNA, 15 bp, Homo sapiens
agattttcaaataag

SEQ ID NO: 1608202 - DNA, 15 bp, Homo sapiens
gattttcaaataaga

SEQ ID NO: 1608203 - DNA, 15 bp, Homo sapiens
attttcaaataagaa

SEQ ID NO: 1608204 - DNA, 15 bp, Homo sapiens
ttttcaaataagaaa

SEQ ID NO: 1608205 - DNA, 15 bp, Homo sapiens
tttcaaataagaaat

SEQ ID NO: 1608206 - DNA, 15 bp, Homo sapiens
ttcaaataagaaata

SEQ ID NO: 1608207 - DNA, 15 bp, Homo sapiens
tcaaataagaaataa

SEQ ID NO: 1608208 - DNA, 15 bp, Homo sapiens
caaataagaaataat

SEQ ID NO: 1608209 - DNA, 15 bp, Homo sapiens
aaataagaaataata

SEQ ID NO: 1608210 - DNA, 15 bp, Homo sapiens
aataagaaataatat

SEQ ID NO: 1608211 - DNA, 15 bp, Homo sapiens
ataagaaataatatt

SEQ ID NO: 1608212 - DNA, 15 bp, Homo sapiens
taagaaataatattt

SEQ ID NO: 1608213 - DNA, 15 bp, Homo sapiens
aagaaataatattta

SEQ ID NO: 1608214 - DNA, 15 bp, Homo sapiens
agaaataatatttaa

SEQ ID NO: 1608215 - DNA, 15 bp, Homo sapiens
gaaataatatttaag

SEQ ID NO: 1608216 - DNA, 15 bp, Homo sapiens
aaataatatttaagg

SEQ ID NO: 1608217 - DNA, 15 bp, Homo sapiens
aataatatttaaggc

SEQ ID NO: 1608218 - DNA, 15 bp, Homo sapiens
ataatatttaaggcc

SEQ ID NO: 1608219 - DNA, 15 bp, Homo sapiens
taatatttaaggccg

SEQ ID NO: 1608220 - DNA, 15 bp, Homo sapiens
aatatttaaggccgg

SEQ ID NO: 1608221 - DNA, 15 bp, Homo sapiens
atatttaaggccggg

SEQ ID NO: 1608222 - DNA, 15 bp, Homo sapiens
tatttaaggccgggc

SEQ ID NO: 1608223 - DNA, 15 bp, Homo sapiens
atttaaggccgggcg

SEQ ID NO: 1608224 - DNA, 15 bp, Homo sapiens
tttaaggccgggcgc

SEQ ID NO: 1608225 - DNA, 15 bp, Homo sapiens
ttaaggccgggcgcg

SEQ ID NO: 1608226 - DNA, 15 bp, Homo sapiens
taaggccgggcgcgg

SEQ ID NO: 1608227 - DNA, 15 bp, Homo sapiens
cagaactttgggagg

SEQ ID NO: 1608228 - DNA, 15 bp, Homo sapiens
agaactttgggaggc

SEQ ID NO: 1608229 - DNA, 15 bp, Homo sapiens
gaactttgggaggcc

SEQ ID NO: 1608230 - DNA, 15 bp, Homo sapiens
aactttgggaggccg

SEQ ID NO: 1608231 - DNA, 15 bp, Homo sapiens
attagccgggtgtag

SEQ ID NO: 1608232 - DNA, 15 bp, Homo sapiens
ttagccgggtgtagt

SEQ ID NO: 1608233 - DNA, 15 bp, Homo sapiens
tagccgggtgtagtg

SEQ ID NO: 1608234 - DNA, 15 bp, Homo sapiens
agccgggtgtagtgg

SEQ ID NO: 1608235 - DNA, 15 bp, Homo sapiens
gccgggtgtagtggc

SEQ ID NO: 1608236 - DNA, 15 bp, Homo sapiens
ccgggtgtagtggcg

SEQ ID NO: 1608237 - DNA, 15 bp, Homo sapiens
cgggtgtagtggcgc

SEQ ID NO: 1608238 - DNA, 15 bp, Homo sapiens
gggtgtagtggcgcg

SEQ ID NO: 1608239 - DNA, 15 bp, Homo sapiens
ggtgtagtggcgcgc

SEQ ID NO: 1608240 - DNA, 15 bp, Homo sapiens
gtgtagtggcgcgcg

SEQ ID NO: 1608241 - DNA, 15 bp, Homo sapiens
tgtagtggcgcgcgc

SEQ ID NO: 1608242 - DNA, 15 bp, Homo sapiens
gtagtggcgcgcgcc

SEQ ID NO: 1608243 - DNA, 15 bp, Homo sapiens
tagtggcgcgcgcct

SEQ ID NO: 1608244 - DNA, 15 bp, Homo sapiens
agtggcgcgcgcctg

SEQ ID NO: 1608245 - DNA, 15 bp, Homo sapiens
cactccagccagggc

SEQ ID NO: 1608246 - DNA, 15 bp, Homo sapiens
actccagccagggcg

SEQ ID NO: 1608247 - DNA, 15 bp, Homo sapiens
ctccagccagggcga

SEQ ID NO: 1608248 - DNA, 15 bp, Homo sapiens
tccagccagggcgac

SEQ ID NO: 1608249 - DNA, 15 bp, Homo sapiens
ccagccagggcgaca

SEQ ID NO: 1608250 - DNA, 15 bp, Homo sapiens
cagccagggcgacag

SEQ ID NO: 1608251 - DNA, 15 bp, Homo sapiens
agccagggcgacaga

SEQ ID NO: 1608252 - DNA, 15 bp, Homo sapiens
gccagggcgacagag

SEQ ID NO: 1608253 - DNA, 15 bp, Homo sapiens
ccagggcgacagagc

SEQ ID NO: 1608254 - DNA, 15 bp, Homo sapiens
cagggcgacagagcg

SEQ ID NO: 1608255 - DNA, 15 bp, Homo sapiens
agggcgacagagcga

SEQ ID NO: 1608256 - DNA, 15 bp, Homo sapiens
aaaaaaaaaagaaat

SEQ ID NO: 1608257 - DNA, 15 bp, Homo sapiens
aaaaaaaaagaaata

SEQ ID NO: 1608258 - DNA, 15 bp, Homo sapiens
aaaaaaaagaaataa

SEQ ID NO: 1608259 - DNA, 15 bp, Homo sapiens
aaaaaaagaaataat

SEQ ID NO: 1608260 - DNA, 15 bp, Homo sapiens
aaaaaagaaataata

SEQ ID NO: 1608261 - DNA, 15 bp, Homo sapiens
aaaaagaaataatat

SEQ ID NO: 1608262 - DNA, 15 bp, Homo sapiens
aaaagaaataatatt

SEQ ID NO: 1608263 - DNA, 15 bp, Homo sapiens
aaagaaataatattt

SEQ ID NO: 1608264 - DNA, 15 bp, Homo sapiens
gaaataatatttaac

SEQ ID NO: 1608265 - DNA, 15 bp, Homo sapiens
aaataatatttaacc

SEQ ID NO: 1608266 - DNA, 15 bp, Homo sapiens
aataatatttaacct

SEQ ID NO: 1608267 - DNA, 15 bp, Homo sapiens
ataatatttaacctt

SEQ ID NO: 1608268 - DNA, 15 bp, Homo sapiens
taatatttaaccttt

SEQ ID NO: 1608269 - DNA, 15 bp, Homo sapiens
aatatttaacctttt

SEQ ID NO: 1608270 - DNA, 15 bp, Homo sapiens
atatttaaccttttc

SEQ ID NO: 1608271 - DNA, 15 bp, Homo sapiens
tatttaaccttttca

SEQ ID NO: 1608272 - DNA, 15 bp, Homo sapiens
atttaaccttttcaa

SEQ ID NO: 1608273 - DNA, 15 bp, Homo sapiens
tttaaccttttcaaa

SEQ ID NO: 1608274 - DNA, 15 bp, Homo sapiens
ttaaccttttcaaaa

SEQ ID NO: 1608275 - DNA, 15 bp, Homo sapiens
taaccttttcaaaat

SEQ ID NO: 1608276 - DNA, 15 bp, Homo sapiens
aaccttttcaaaatt

SEQ ID NO: 1608277 - DNA, 15 bp, Homo sapiens
accttttcaaaatta

SEQ ID NO: 1608278 - DNA, 15 bp, Homo sapiens
ccttttcaaaattat

SEQ ID NO: 1608279 - DNA, 15 bp, Homo sapiens
cttttcaaaattata

SEQ ID NO: 1608280 - DNA, 15 bp, Homo sapiens
ttttcaaaattatat

SEQ ID NO: 1608281 - DNA, 15 bp, Homo sapiens
tttcaaaattatatt

SEQ ID NO: 1608282 - DNA, 15 bp, Homo sapiens
ttcaaaattatattt

SEQ ID NO: 1608283 - DNA, 15 bp, Homo sapiens
tcaaaattatatttg

SEQ ID NO: 1608284 - DNA, 15 bp, Homo sapiens
caaaattatatttgt

SEQ ID NO: 1608285 - DNA, 15 bp, Homo sapiens
aaaattatatttgta

SEQ ID NO: 1608286 - DNA, 15 bp, Homo sapiens
aaattatatttgtat

SEQ ID NO: 1608287 - DNA, 15 bp, Homo sapiens
aattatatttgtatt

SEQ ID NO: 1608288 - DNA, 15 bp, Homo sapiens
attatatttgtattg

SEQ ID NO: 1608289 - DNA, 15 bp, Homo sapiens
ttatatttgtattgt

SEQ ID NO: 1608290 - DNA, 15 bp, Homo sapiens
tatatttgtattgtc

SEQ ID NO: 1608291 - DNA, 15 bp, Homo sapiens
atatttgtattgtca

SEQ ID NO: 1608292 - DNA, 15 bp, Homo sapiens
tatttgtattgtcat

SEQ ID NO: 1608293 - DNA, 15 bp, Homo sapiens
atttgtattgtcatg

SEQ ID NO: 1608294 - DNA, 15 bp, Homo sapiens
tttgtattgtcatgt

SEQ ID NO: 1608295 - DNA, 15 bp, Homo sapiens
ttgtattgtcatgtt

SEQ ID NO: 1608296 - DNA, 15 bp, Homo sapiens
tgtattgtcatgtta

SEQ ID NO: 1608297 - DNA, 15 bp, Homo sapiens
gtattgtcatgttat

SEQ ID NO: 1608298 - DNA, 15 bp, Homo sapiens
tattgtcatgttatt

SEQ ID NO: 1608299 - DNA, 15 bp, Homo sapiens
attgtcatgttatta

SEQ ID NO: 1608300 - DNA, 15 bp, Homo sapiens
ttgtcatgttattag

SEQ ID NO: 1608301 - DNA, 15 bp, Homo sapiens
tgtcatgttattagt

SEQ ID NO: 1608302 - DNA, 15 bp, Homo sapiens
gtcatgttattagta

SEQ ID NO: 1608303 - DNA, 15 bp, Homo sapiens
tcatgttattagtat

SEQ ID NO: 1608304 - DNA, 15 bp, Homo sapiens
catgttattagtatt

SEQ ID NO: 1608305 - DNA, 15 bp, Homo sapiens
atgttattagtattt

SEQ ID NO: 1608306 - DNA, 15 bp, Homo sapiens
tgttattagtatttg

SEQ ID NO: 1608307 - DNA, 15 bp, Homo sapiens
gttattagtatttgc

SEQ ID NO: 1608308 - DNA, 15 bp, Homo sapiens
ttattagtatttgct

SEQ ID NO: 1608309 - DNA, 15 bp, Homo sapiens
tattagtatttgctc

SEQ ID NO: 1608310 - DNA, 15 bp, Homo sapiens
attagtatttgctcc

SEQ ID NO: 1608311 - DNA, 15 bp, Homo sapiens
ttagtatttgctcca

SEQ ID NO: 1608312 - DNA, 15 bp, Homo sapiens
tagtatttgctccaa

SEQ ID NO: 1608313 - DNA, 15 bp, Homo sapiens
agtatttgctccaaa

SEQ ID NO: 1608314 - DNA, 15 bp, Homo sapiens
gtatttgctccaaaa

SEQ ID NO: 1608315 - DNA, 15 bp, Homo sapiens
tatttgctccaaaat

SEQ ID NO: 1608316 - DNA, 15 bp, Homo sapiens
atttgctccaaaatt

SEQ ID NO: 1608317 - DNA, 15 bp, Homo sapiens
tttgctccaaaatta

SEQ ID NO: 1608318 - DNA, 15 bp, Homo sapiens
ttgctccaaaattat

SEQ ID NO: 1608319 - DNA, 15 bp, Homo sapiens
tgctccaaaattata

SEQ ID NO: 1608320 - DNA, 15 bp, Homo sapiens
gctccaaaattatat

SEQ ID NO: 1608321 - DNA, 15 bp, Homo sapiens
ctccaaaattatatg

SEQ ID NO: 1608322 - DNA, 15 bp, Homo sapiens
tccaaaattatatga

SEQ ID NO: 1608323 - DNA, 15 bp, Homo sapiens
ccaaaattatatgag

SEQ ID NO: 1608324 - DNA, 15 bp, Homo sapiens
caaaattatatgaga

SEQ ID NO: 1608325 - DNA, 15 bp, Homo sapiens
aaaattatatgagat

SEQ ID NO: 1608326 - DNA, 15 bp, Homo sapiens
aaattatatgagatt

SEQ ID NO: 1608327 - DNA, 15 bp, Homo sapiens
aattatatgagattc

SEQ ID NO: 1608328 - DNA, 15 bp, Homo sapiens
attatatgagattcc

SEQ ID NO: 1608329 - DNA, 15 bp, Homo sapiens
ttatatgagattcct

SEQ ID NO: 1608330 - DNA, 15 bp, Homo sapiens
tatatgagattccta

SEQ ID NO: 1608331 - DNA, 15 bp, Homo sapiens
atatgagattcctaa

SEQ ID NO: 1608332 - DNA, 15 bp, Homo sapiens
tatgagattcctaaa

SEQ ID NO: 1608333 - DNA, 15 bp, Homo sapiens
atgagattcctaaaa

SEQ ID NO: 1608334 - DNA, 15 bp, Homo sapiens
tgagattcctaaaaa

SEQ ID NO: 1608335 - DNA, 15 bp, Homo sapiens
gagattcctaaaaat

SEQ ID NO: 1608336 - DNA, 15 bp, Homo sapiens
agattcctaaaaatt

SEQ ID NO: 1608337 - DNA, 15 bp, Homo sapiens
gattcctaaaaattg

SEQ ID NO: 1608338 - DNA, 15 bp, Homo sapiens
attcctaaaaattgg

SEQ ID NO: 1608339 - DNA, 15 bp, Homo sapiens
ttcctaaaaattgga

SEQ ID NO: 1608340 - DNA, 15 bp, Homo sapiens
tcctaaaaattggat

SEQ ID NO: 1608341 - DNA, 15 bp, Homo sapiens
cctaaaaattggatt

SEQ ID NO: 1608342 - DNA, 15 bp, Homo sapiens
ctaaaaattggattt

SEQ ID NO: 1608343 - DNA, 15 bp, Homo sapiens
taaaaattggatttg

SEQ ID NO: 1608344 - DNA, 15 bp, Homo sapiens
aaaaattggatttgt

SEQ ID NO: 1608345 - DNA, 15 bp, Homo sapiens
aaaattggatttgtt

SEQ ID NO: 1608346 - DNA, 15 bp, Homo sapiens
aaattggatttgttt

SEQ ID NO: 1608347 - DNA, 15 bp, Homo sapiens
aattggatttgtttt

SEQ ID NO: 1608348 - DNA, 15 bp, Homo sapiens
attggatttgttttg

SEQ ID NO: 1608349 - DNA, 15 bp, Homo sapiens
ttggatttgttttgt

SEQ ID NO: 1608350 - DNA, 15 bp, Homo sapiens
tggatttgttttgtt

SEQ ID NO: 1608351 - DNA, 15 bp, Homo sapiens
ggatttgttttgtta

SEQ ID NO: 1608352 - DNA, 15 bp, Homo sapiens
gatttgttttgttat

SEQ ID NO: 1608353 - DNA, 15 bp, Homo sapiens
atttgttttgttata

SEQ ID NO: 1608354 - DNA, 15 bp, Homo sapiens
tttgttttgttatat

SEQ ID NO: 1608355 - DNA, 15 bp, Homo sapiens
ttgttttgttatatg

SEQ ID NO: 1608356 - DNA, 15 bp, Homo sapiens
tgttttgttatatgt

SEQ ID NO: 1608357 - DNA, 15 bp, Homo sapiens
gttttgttatatgtt

SEQ ID NO: 1608358 - DNA, 15 bp, Homo sapiens
ttttgttatatgtta

SEQ ID NO: 1608359 - DNA, 15 bp, Homo sapiens
tttgttatatgttat

SEQ ID NO: 1608360 - DNA, 15 bp, Homo sapiens
ttgttatatgttatt

SEQ ID NO: 1608361 - DNA, 15 bp, Homo sapiens
tgttatatgttatta

SEQ ID NO: 1608362 - DNA, 15 bp, Homo sapiens
gttatatgttattag

SEQ ID NO: 1608363 - DNA, 15 bp, Homo sapiens
ttatatgttattagt

SEQ ID NO: 1608364 - DNA, 15 bp, Homo sapiens
tatatgttattagtc

SEQ ID NO: 1608365 - DNA, 15 bp, Homo sapiens
atatgttattagtca

SEQ ID NO: 1608366 - DNA, 15 bp, Homo sapiens
tatgttattagtcat

SEQ ID NO: 1608367 - DNA, 15 bp, Homo sapiens
atgttattagtcata

SEQ ID NO: 1608368 - DNA, 15 bp, Homo sapiens
tgttattagtcataa

SEQ ID NO: 1608369 - DNA, 15 bp, Homo sapiens
gttattagtcataat

SEQ ID NO: 1608370 - DNA, 15 bp, Homo sapiens
ttattagtcataatt

SEQ ID NO: 1608371 - DNA, 15 bp, Homo sapiens
tattagtcataatta

SEQ ID NO: 1608372 - DNA, 15 bp, Homo sapiens
attagtcataattat

SEQ ID NO: 1608373 - DNA, 15 bp, Homo sapiens
ttagtcataattatg

SEQ ID NO: 1608374 - DNA, 15 bp, Homo sapiens
tagtcataattatga

SEQ ID NO: 1608375 - DNA, 15 bp, Homo sapiens
agtcataattatgag

SEQ ID NO: 1608376 - DNA, 15 bp, Homo sapiens
gtcataattatgagt

SEQ ID NO: 1608377 - DNA, 15 bp, Homo sapiens
tcataattatgagta

SEQ ID NO: 1608378 - DNA, 15 bp, Homo sapiens
cataattatgagtat

SEQ ID NO: 1608379 - DNA, 15 bp, Homo sapiens
ataattatgagtatt

SEQ ID NO: 1608380 - DNA, 15 bp, Homo sapiens
taattatgagtatta

SEQ ID NO: 1608381 - DNA, 15 bp, Homo sapiens
aattatgagtattat

SEQ ID NO: 1608382 - DNA, 15 bp, Homo sapiens
attatgagtattatg

SEQ ID NO: 1608383 - DNA, 15 bp, Homo sapiens
ttatgagtattatgt

SEQ ID NO: 1608384 - DNA, 15 bp, Homo sapiens
tatgagtattatgtt

SEQ ID NO: 1608385 - DNA, 15 bp, Homo sapiens
atgagtattatgtta

SEQ ID NO: 1608386 - DNA, 15 bp, Homo sapiens
tgagtattatgttaa

SEQ ID NO: 1608387 - DNA, 15 bp, Homo sapiens
gagtattatgttaaa

SEQ ID NO: 1608388 - DNA, 15 bp, Homo sapiens
agtattatgttaaat

SEQ ID NO: 1608389 - DNA, 15 bp, Homo sapiens
gtattatgttaaatt

SEQ ID NO: 1608390 - DNA, 15 bp, Homo sapiens
tattatgttaaattg

SEQ ID NO: 1608391 - DNA, 15 bp, Homo sapiens
attatgttaaattgt

SEQ ID NO: 1608392 - DNA, 15 bp, Homo sapiens
ttatgttaaattgtt

SEQ ID NO: 1608393 - DNA, 15 bp, Homo sapiens
tatgttaaattgttg

SEQ ID NO: 1608394 - DNA, 15 bp, Homo sapiens
atgttaaattgttgt

SEQ ID NO: 1608395 - DNA, 15 bp, Homo sapiens
tgttaaattgttgta

SEQ ID NO: 1608396 - DNA, 15 bp, Homo sapiens
gttaaattgttgtag

SEQ ID NO: 1608397 - DNA, 15 bp, Homo sapiens
ttaaattgttgtagg

SEQ ID NO: 1608398 - DNA, 15 bp, Homo sapiens
taaattgttgtaggt

SEQ ID NO: 1608399 - DNA, 15 bp, Homo sapiens
aaattgttgtaggtc

SEQ ID NO: 1608400 - DNA, 15 bp, Homo sapiens
aattgttgtaggtca

SEQ ID NO: 1608401 - DNA, 15 bp, Homo sapiens
attgttgtaggtcat

SEQ ID NO: 1608402 - DNA, 15 bp, Homo sapiens
ttgttgtaggtcata

SEQ ID NO: 1608403 - DNA, 15 bp, Homo sapiens
tgttgtaggtcataa

SEQ ID NO: 1608404 - DNA, 15 bp, Homo sapiens
gttgtaggtcataaa

SEQ ID NO: 1608405 - DNA, 15 bp, Homo sapiens
ttgtaggtcataaaa

SEQ ID NO: 1608406 - DNA, 15 bp, Homo sapiens
tgtaggtcataaaag

SEQ ID NO: 1608407 - DNA, 15 bp, Homo sapiens
gtaggtcataaaagg

SEQ ID NO: 1608408 - DNA, 15 bp, Homo sapiens
taggtcataaaagga

SEQ ID NO: 1608409 - DNA, 15 bp, Homo sapiens
aggtcataaaaggag

SEQ ID NO: 1608410 - DNA, 15 bp, Homo sapiens
ggtcataaaaggaga

SEQ ID NO: 1608411 - DNA, 15 bp, Homo sapiens
gtcataaaaggagaa

SEQ ID NO: 1608412 - DNA, 15 bp, Homo sapiens
tcataaaaggagaaa

SEQ ID NO: 1608413 - DNA, 15 bp, Homo sapiens
cataaaaggagaaaa

SEQ ID NO: 1608414 - DNA, 15 bp, Homo sapiens
ataaaaggagaaaat

SEQ ID NO: 1608415 - DNA, 15 bp, Homo sapiens
taaaaggagaaaatg

SEQ ID NO: 1608416 - DNA, 15 bp, Homo sapiens
aaaaggagaaaatga

SEQ ID NO: 1608417 - DNA, 15 bp, Homo sapiens
aaaggagaaaatgac

SEQ ID NO: 1608418 - DNA, 15 bp, Homo sapiens
aaggagaaaatgacc

SEQ ID NO: 1608419 - DNA, 15 bp, Homo sapiens
aggagaaaatgacct

SEQ ID NO: 1608420 - DNA, 15 bp, Homo sapiens
ggagaaaatgaccta

SEQ ID NO: 1608421 - DNA, 15 bp, Homo sapiens
gagaaaatgacctag

SEQ ID NO: 1608422 - DNA, 15 bp, Homo sapiens
agaaaatgacctagt

SEQ ID NO: 1608423 - DNA, 15 bp, Homo sapiens
gaaaatgacctagtt

SEQ ID NO: 1608424 - DNA, 15 bp, Homo sapiens
aaaatgacctagttt

SEQ ID NO: 1608425 - DNA, 15 bp, Homo sapiens
aaatgacctagtttt

SEQ ID NO: 1608426 - DNA, 15 bp, Homo sapiens
aatgacctagttttc

SEQ ID NO: 1608427 - DNA, 15 bp, Homo sapiens
atgacctagttttct

SEQ ID NO: 1608428 - DNA, 15 bp, Homo sapiens
tgacctagttttctt

SEQ ID NO: 1608429 - DNA, 15 bp, Homo sapiens
gacctagttttcttg

SEQ ID NO: 1608430 - DNA, 15 bp, Homo sapiens
acctagttttcttgt

SEQ ID NO: 1608431 - DNA, 15 bp, Homo sapiens
cctagttttcttgtt

SEQ ID NO: 1608432 - DNA, 15 bp, Homo sapiens
ctagttttcttgtta

SEQ ID NO: 1608433 - DNA, 15 bp, Homo sapiens
tagttttcttgttaa

SEQ ID NO: 1608434 - DNA, 15 bp, Homo sapiens
agttttcttgttaat

SEQ ID NO: 1608435 - DNA, 15 bp, Homo sapiens
gttttcttgttaatt

SEQ ID NO: 1608436 - DNA, 15 bp, Homo sapiens
ttttcttgttaattc

SEQ ID NO: 1608437 - DNA, 15 bp, Homo sapiens
tttcttgttaattcc

SEQ ID NO: 1608438 - DNA, 15 bp, Homo sapiens
ttcttgttaattcca

SEQ ID NO: 1608439 - DNA, 15 bp, Homo sapiens
tcttgttaattccat

SEQ ID NO: 1608440 - DNA, 15 bp, Homo sapiens
cttgttaattccatc

SEQ ID NO: 1608441 - DNA, 15 bp, Homo sapiens
ttgttaattccatct

SEQ ID NO: 1608442 - DNA, 15 bp, Homo sapiens
tgttaattccatctt

SEQ ID NO: 1608443 - DNA, 15 bp, Homo sapiens
gttaattccatcttt

SEQ ID NO: 1608444 - DNA, 15 bp, Homo sapiens
ttaattccatcttta

SEQ ID NO: 1608445 - DNA, 15 bp, Homo sapiens
taattccatctttaa

SEQ ID NO: 1608446 - DNA, 15 bp, Homo sapiens
aattccatctttaac

SEQ ID NO: 1608447 - DNA, 15 bp, Homo sapiens
attccatctttaacc

SEQ ID NO: 1608448 - DNA, 15 bp, Homo sapiens
ttccatctttaacca

SEQ ID NO: 1608449 - DNA, 15 bp, Homo sapiens
tccatctttaaccac

SEQ ID NO: 1608450 - DNA, 15 bp, Homo sapiens
ccatctttaaccacg

SEQ ID NO: 1608451 - DNA, 15 bp, Homo sapiens
catctttaaccacgg

SEQ ID NO: 1608452 - DNA, 15 bp, Homo sapiens
atctttaaccacggc

SEQ ID NO: 1608453 - DNA, 15 bp, Homo sapiens
tctttaaccacggcc

SEQ ID NO: 1608454 - DNA, 15 bp, Homo sapiens
ctttaaccacggcca

SEQ ID NO: 1608455 - DNA, 15 bp, Homo sapiens
tttaaccacggccat

SEQ ID NO: 1608456 - DNA, 15 bp, Homo sapiens
ttaaccacggccatt

SEQ ID NO: 1608457 - DNA, 15 bp, Homo sapiens
taaccacggccattt

SEQ ID NO: 1608458 - DNA, 15 bp, Homo sapiens
aaccacggccatttt

SEQ ID NO: 1608459 - DNA, 15 bp, Homo sapiens
accacggccattttt

SEQ ID NO: 1608460 - DNA, 15 bp, Homo sapiens
ccacggccattttta

SEQ ID NO: 1608461 - DNA, 15 bp, Homo sapiens
cacggccatttttag

SEQ ID NO: 1608462 - DNA, 15 bp, Homo sapiens
acggccatttttagt

SEQ ID NO: 1608463 - DNA, 15 bp, Homo sapiens
cggccatttttagtc

SEQ ID NO: 1608464 - DNA, 15 bp, Homo sapiens
ggccatttttagtct

SEQ ID NO: 1608465 - DNA, 15 bp, Homo sapiens
gccatttttagtctt

SEQ ID NO: 1608466 - DNA, 15 bp, Homo sapiens
ccatttttagtcttg

SEQ ID NO: 1608467 - DNA, 15 bp, Homo sapiens
catttttagtcttgc

SEQ ID NO: 1608468 - DNA, 15 bp, Homo sapiens
atttttagtcttgct

SEQ ID NO: 1608469 - DNA, 15 bp, Homo sapiens
tttttagtcttgctc

SEQ ID NO: 1608470 - DNA, 15 bp, Homo sapiens
ttttagtcttgctca

SEQ ID NO: 1608471 - DNA, 15 bp, Homo sapiens
tttagtcttgctcac

SEQ ID NO: 1608472 - DNA, 15 bp, Homo sapiens
ttagtcttgctcaca

SEQ ID NO: 1608473 - DNA, 15 bp, Homo sapiens
tagtcttgctcacaa

SEQ ID NO: 1608474 - DNA, 15 bp, Homo sapiens
agtcttgctcacaat

SEQ ID NO: 1608475 - DNA, 15 bp, Homo sapiens
gtcttgctcacaatt

SEQ ID NO: 1608476 - DNA, 15 bp, Homo sapiens
tcttgctcacaatta

SEQ ID NO: 1608477 - DNA, 15 bp, Homo sapiens
cttgctcacaattaa

SEQ ID NO: 1608478 - DNA, 15 bp, Homo sapiens
ttgctcacaattaat

SEQ ID NO: 1608479 - DNA, 15 bp, Homo sapiens
tgctcacaattaatt

SEQ ID NO: 1608480 - DNA, 15 bp, Homo sapiens
gctcacaattaattt

SEQ ID NO: 1608481 - DNA, 15 bp, Homo sapiens
ctcacaattaatttt

SEQ ID NO: 1608482 - DNA, 15 bp, Homo sapiens
tcacaattaattttt

SEQ ID NO: 1608483 - DNA, 15 bp, Homo sapiens
cacaattaatttttt

SEQ ID NO: 1608484 - DNA, 15 bp, Homo sapiens
acaattaattttttt

SEQ ID NO: 1608485 - DNA, 15 bp, Homo sapiens
caattaattttttta

SEQ ID NO: 1608486 - DNA, 15 bp, Homo sapiens
aattaatttttttat

SEQ ID NO: 1608487 - DNA, 15 bp, Homo sapiens
attaatttttttatg

SEQ ID NO: 1608488 - DNA, 15 bp, Homo sapiens
ttaatttttttatgc

SEQ ID NO: 1608489 - DNA, 15 bp, Homo sapiens
taatttttttatgct

SEQ ID NO: 1608490 - DNA, 15 bp, Homo sapiens
aatttttttatgctg

SEQ ID NO: 1608491 - DNA, 15 bp, Homo sapiens
atttttttatgctga

SEQ ID NO: 1608492 - DNA, 15 bp, Homo sapiens
tttttttatgctgat

SEQ ID NO: 1608493 - DNA, 15 bp, Homo sapiens
ttttttatgctgatc

SEQ ID NO: 1608494 - DNA, 15 bp, Homo sapiens
tttttatgctgatcc

SEQ ID NO: 1608495 - DNA, 15 bp, Homo sapiens
ttttatgctgatcct

SEQ ID NO: 1608496 - DNA, 15 bp, Homo sapiens
tttatgctgatcctt

SEQ ID NO: 1608497 - DNA, 15 bp, Homo sapiens
ttatgctgatccttt

SEQ ID NO: 1608498 - DNA, 15 bp, Homo sapiens
tatgctgatcctttt

SEQ ID NO: 1608499 - DNA, 15 bp, Homo sapiens
atgctgatccttttt

SEQ ID NO: 1608500 - DNA, 15 bp, Homo sapiens
tgctgatcctttttt

SEQ ID NO: 1608501 - DNA, 15 bp, Homo sapiens
gctgatccttttttt

SEQ ID NO: 1608502 - DNA, 15 bp, Homo sapiens
ctgatcctttttttc

SEQ ID NO: 1608503 - DNA, 15 bp, Homo sapiens
tgatcctttttttct

SEQ ID NO: 1608504 - DNA, 15 bp, Homo sapiens
gatcctttttttctg

SEQ ID NO: 1608505 - DNA, 15 bp, Homo sapiens
atcctttttttctga

SEQ ID NO: 1608506 - DNA, 15 bp, Homo sapiens
tcctttttttctgaa

SEQ ID NO: 1608507 - DNA, 15 bp, Homo sapiens
tttttttctgaaagc

SEQ ID NO: 1608508 - DNA, 15 bp, Homo sapiens
ttttttctgaaagct

SEQ ID NO: 1608509 - DNA, 15 bp, Homo sapiens
tttttctgaaagctc

SEQ ID NO: 1608510 - DNA, 15 bp, Homo sapiens
ttttctgaaagctct

SEQ ID NO: 1608511 - DNA, 15 bp, Homo sapiens
tttctgaaagctctt

SEQ ID NO: 1608512 - DNA, 15 bp, Homo sapiens
ttctgaaagctcttt

SEQ ID NO: 1608513 - DNA, 15 bp, Homo sapiens
tctgaaagctctttg

SEQ ID NO: 1608514 - DNA, 15 bp, Homo sapiens
ctgaaagctctttgc

SEQ ID NO: 1608515 - DNA, 15 bp, Homo sapiens
tgaaagctctttgca

SEQ ID NO: 1608516 - DNA, 15 bp, Homo sapiens
gaaagctctttgcaa

SEQ ID NO: 1608517 - DNA, 15 bp, Homo sapiens
aaagctctttgcaaa

SEQ ID NO: 1608518 - DNA, 15 bp, Homo sapiens
aagctctttgcaaat

SEQ ID NO: 1608519 - DNA, 15 bp, Homo sapiens
agctctttgcaaatc

SEQ ID NO: 1608520 - DNA, 15 bp, Homo sapiens
gctctttgcaaatcc

SEQ ID NO: 1608521 - DNA, 15 bp, Homo sapiens
ctctttgcaaatcct

SEQ ID NO: 1608522 - DNA, 15 bp, Homo sapiens
tctttgcaaatccta

SEQ ID NO: 1608523 - DNA, 15 bp, Homo sapiens
ctttgcaaatcctaa

SEQ ID NO: 1608524 - DNA, 15 bp, Homo sapiens
tttgcaaatcctaaa

SEQ ID NO: 1608525 - DNA, 15 bp, Homo sapiens
ttgcaaatcctaaag

SEQ ID NO: 1608526 - DNA, 15 bp, Homo sapiens
tgcaaatcctaaagt

SEQ ID NO: 1608527 - DNA, 15 bp, Homo sapiens
gcaaatcctaaagtg

SEQ ID NO: 1608528 - DNA, 15 bp, Homo sapiens
caaatcctaaagtgt

SEQ ID NO: 1608529 - DNA, 15 bp, Homo sapiens
aaatcctaaagtgtt

SEQ ID NO: 1608530 - DNA, 15 bp, Homo sapiens
aatcctaaagtgttg

SEQ ID NO: 1608531 - DNA, 15 bp, Homo sapiens
atcctaaagtgttgt

SEQ ID NO: 1608532 - DNA, 15 bp, Homo sapiens
tcctaaagtgttgtg

SEQ ID NO: 1608533 - DNA, 15 bp, Homo sapiens
cctaaagtgttgtgt

SEQ ID NO: 1608534 - DNA, 15 bp, Homo sapiens
ctaaagtgttgtgtc

SEQ ID NO: 1608535 - DNA, 15 bp, Homo sapiens
taaagtgttgtgtct

SEQ ID NO: 1608536 - DNA, 15 bp, Homo sapiens
aaagtgttgtgtctt

SEQ ID NO: 1608537 - DNA, 15 bp, Homo sapiens
aagtgttgtgtcttc

SEQ ID NO: 1608538 - DNA, 15 bp, Homo sapiens
agtgttgtgtcttca

SEQ ID NO: 1608539 - DNA, 15 bp, Homo sapiens
gtgttgtgtcttcaa

SEQ ID NO: 1608540 - DNA, 15 bp, Homo sapiens
tgttgtgtcttcaag

SEQ ID NO: 1608541 - DNA, 15 bp, Homo sapiens
gttgtgtcttcaaga

SEQ ID NO: 1608542 - DNA, 15 bp, Homo sapiens
ttgtgtcttcaagaa

SEQ ID NO: 1608543 - DNA, 15 bp, Homo sapiens
tgtgtcttcaagaaa

SEQ ID NO: 1608544 - DNA, 15 bp, Homo sapiens
gtgtcttcaagaaag

SEQ ID NO: 1608545 - DNA, 15 bp, Homo sapiens
tgtcttcaagaaagc

SEQ ID NO: 1608546 - DNA, 15 bp, Homo sapiens
gtcttcaagaaagct

SEQ ID NO: 1608547 - DNA, 15 bp, Homo sapiens
tcttcaagaaagctc

SEQ ID NO: 1608548 - DNA, 15 bp, Homo sapiens
cttcaagaaagctca

SEQ ID NO: 1608549 - DNA, 15 bp, Homo sapiens
ttcaagaaagctcat

SEQ ID NO: 1608550 - DNA, 15 bp, Homo sapiens
tcaagaaagctcatg

SEQ ID NO: 1608551 - DNA, 15 bp, Homo sapiens
caagaaagctcatgg

SEQ ID NO: 1608552 - DNA, 15 bp, Homo sapiens
aagaaagctcatgga

SEQ ID NO: 1608553 - DNA, 15 bp, Homo sapiens
agaaagctcatggaa

SEQ ID NO: 1608554 - DNA, 15 bp, Homo sapiens
gaaagctcatggaaa

SEQ ID NO: 1608555 - DNA, 15 bp, Homo sapiens
aaagctcatggaaag

SEQ ID NO: 1608556 - DNA, 15 bp, Homo sapiens
aagctcatggaaagg

SEQ ID NO: 1608557 - DNA, 15 bp, Homo sapiens
agctcatggaaagga

SEQ ID NO: 1608558 - DNA, 15 bp, Homo sapiens
gctcatggaaaggac

SEQ ID NO: 1608559 - DNA, 15 bp, Homo sapiens
ctcatggaaaggact

SEQ ID NO: 1608560 - DNA, 15 bp, Homo sapiens
tcatggaaaggactg

SEQ ID NO: 1608561 - DNA, 15 bp, Homo sapiens
catggaaaggactgc

SEQ ID NO: 1608562 - DNA, 15 bp, Homo sapiens
atggaaaggactgca

SEQ ID NO: 1608563 - DNA, 15 bp, Homo sapiens
tggaaaggactgcaa

SEQ ID NO: 1608564 - DNA, 15 bp, Homo sapiens
ggaaaggactgcaac

SEQ ID NO: 1608565 - DNA, 15 bp, Homo sapiens
gaaaggactgcaaca

SEQ ID NO: 1608566 - DNA, 15 bp, Homo sapiens
aaaggactgcaacaa

SEQ ID NO: 1608567 - DNA, 15 bp, Homo sapiens
aaggactgcaacaag

SEQ ID NO: 1608568 - DNA, 15 bp, Homo sapiens
aggactgcaacaagt

SEQ ID NO: 1608569 - DNA, 15 bp, Homo sapiens
ggactgcaacaagta

SEQ ID NO: 1608570 - DNA, 15 bp, Homo sapiens
gactgcaacaagtac

SEQ ID NO: 1608571 - DNA, 15 bp, Homo sapiens
actgcaacaagtact

SEQ ID NO: 1608572 - DNA, 15 bp, Homo sapiens
ctgcaacaagtactc

SEQ ID NO: 1608573 - DNA, 15 bp, Homo sapiens
tgcaacaagtactct

SEQ ID NO: 1608574 - DNA, 15 bp, Homo sapiens
gcaacaagtactctt

SEQ ID NO: 1608575 - DNA, 15 bp, Homo sapiens
caacaagtactcttg

SEQ ID NO: 1608576 - DNA, 15 bp, Homo sapiens
aacaagtactcttgg

SEQ ID NO: 1608577 - DNA, 15 bp, Homo sapiens
acaagtactcttggc

SEQ ID NO: 1608578 - DNA, 15 bp, Homo sapiens
caagtactcttggct

SEQ ID NO: 1608579 - DNA, 15 bp, Homo sapiens
aagtactcttggctg

SEQ ID NO: 1608580 - DNA, 15 bp, Homo sapiens
agtactcttggctgg

SEQ ID NO: 1608581 - DNA, 15 bp, Homo sapiens
gtactcttggctggg

SEQ ID NO: 1608582 - DNA, 15 bp, Homo sapiens
tactcttggctgggc

SEQ ID NO: 1608583 - DNA, 15 bp, Homo sapiens
actcttggctgggca

SEQ ID NO: 1608584 - DNA, 15 bp, Homo sapiens
ctcttggctgggcac

SEQ ID NO: 1608585 - DNA, 15 bp, Homo sapiens
tcttggctgggcaca

SEQ ID NO: 1608586 - DNA, 15 bp, Homo sapiens
cttggctgggcacag

SEQ ID NO: 1608587 - DNA, 15 bp, Homo sapiens
ttggctgggcacagt

SEQ ID NO: 1608588 - DNA, 15 bp, Homo sapiens
acactttgggaggca

SEQ ID NO: 1608589 - DNA, 15 bp, Homo sapiens
tgggaggcagaggtg

SEQ ID NO: 1608590 - DNA, 15 bp, Homo sapiens
agaggtgggtggatc

SEQ ID NO: 1608591 - DNA, 15 bp, Homo sapiens
cacctgaggtcaggt

SEQ ID NO: 1608592 - DNA, 15 bp, Homo sapiens
acctgaggtcaggtg

SEQ ID NO: 1608593 - DNA, 15 bp, Homo sapiens
cctgaggtcaggtgt

SEQ ID NO: 1608594 - DNA, 15 bp, Homo sapiens
ctgaggtcaggtgtt

SEQ ID NO: 1608595 - DNA, 15 bp, Homo sapiens
tgaggtcaggtgttc

SEQ ID NO: 1608596 - DNA, 15 bp, Homo sapiens
gaggtcaggtgttcg

SEQ ID NO: 1608597 - DNA, 15 bp, Homo sapiens
aggtcaggtgttcga

SEQ ID NO: 1608598 - DNA, 15 bp, Homo sapiens
ggtcaggtgttcgag

SEQ ID NO: 1608599 - DNA, 15 bp, Homo sapiens
gtcaggtgttcgaga

SEQ ID NO: 1608600 - DNA, 15 bp, Homo sapiens
tcaggtgttcgagac

SEQ ID NO: 1608601 - DNA, 15 bp, Homo sapiens
caggtgttcgagacc

SEQ ID NO: 1608602 - DNA, 15 bp, Homo sapiens
aggtgttcgagacca

SEQ ID NO: 1608603 - DNA, 15 bp, Homo sapiens
ggtgttcgagaccag

SEQ ID NO: 1608604 - DNA, 15 bp, Homo sapiens
gtgttcgagaccagc

SEQ ID NO: 1608605 - DNA, 15 bp, Homo sapiens
tgttcgagaccagcc

SEQ ID NO: 1608606 - DNA, 15 bp, Homo sapiens
agcctgaccaacata

SEQ ID NO: 1608607 - DNA, 15 bp, Homo sapiens
gcctgaccaacatag

SEQ ID NO: 1608608 - DNA, 15 bp, Homo sapiens
accctgtctctgcta

SEQ ID NO: 1608609 - DNA, 15 bp, Homo sapiens
ccctgtctctgctaa

SEQ ID NO: 1608610 - DNA, 15 bp, Homo sapiens
cctgtctctgctaaa

SEQ ID NO: 1608611 - DNA, 15 bp, Homo sapiens
ctgtctctgctaaaa

SEQ ID NO: 1608612 - DNA, 15 bp, Homo sapiens
tctctgctaaaataa

SEQ ID NO: 1608613 - DNA, 15 bp, Homo sapiens
ctctgctaaaataaa

SEQ ID NO: 1608614 - DNA, 15 bp, Homo sapiens
tctgctaaaataaaa

SEQ ID NO: 1608615 - DNA, 15 bp, Homo sapiens
ctgctaaaataaaaa

SEQ ID NO: 1608616 - DNA, 15 bp, Homo sapiens
tgctaaaataaaaaa

SEQ ID NO: 1608617 - DNA, 15 bp, Homo sapiens
gctaaaataaaaaaa

SEQ ID NO: 1608618 - DNA, 15 bp, Homo sapiens
ctaaaataaaaaaat

SEQ ID NO: 1608619 - DNA, 15 bp, Homo sapiens
taaaataaaaaaatt

SEQ ID NO: 1608620 - DNA, 15 bp, Homo sapiens
aataaaaaaattagg

SEQ ID NO: 1608621 - DNA, 15 bp, Homo sapiens
ataaaaaaattaggc

SEQ ID NO: 1608622 - DNA, 15 bp, Homo sapiens
taaaaaaattaggcc

SEQ ID NO: 1608623 - DNA, 15 bp, Homo sapiens
aaaaaaattaggcca

SEQ ID NO: 1608624 - DNA, 15 bp, Homo sapiens
aaaaaattaggccag

SEQ ID NO: 1608625 - DNA, 15 bp, Homo sapiens
aaaaattaggccagc

SEQ ID NO: 1608626 - DNA, 15 bp, Homo sapiens
aaaattaggccagca

SEQ ID NO: 1608627 - DNA, 15 bp, Homo sapiens
aaattaggccagcat

SEQ ID NO: 1608628 - DNA, 15 bp, Homo sapiens
aattaggccagcatg

SEQ ID NO: 1608629 - DNA, 15 bp, Homo sapiens
attaggccagcatgg

SEQ ID NO: 1608630 - DNA, 15 bp, Homo sapiens
ttaggccagcatggt

SEQ ID NO: 1608631 - DNA, 15 bp, Homo sapiens
taggccagcatggtg

SEQ ID NO: 1608632 - DNA, 15 bp, Homo sapiens
aggccagcatggtgg

SEQ ID NO: 1608633 - DNA, 15 bp, Homo sapiens
ggccagcatggtggc

SEQ ID NO: 1608634 - DNA, 15 bp, Homo sapiens
gccagcatggtggca

SEQ ID NO: 1608635 - DNA, 15 bp, Homo sapiens
ccagcatggtggcag

SEQ ID NO: 1608636 - DNA, 15 bp, Homo sapiens
cagcatggtggcagg

SEQ ID NO: 1608637 - DNA, 15 bp, Homo sapiens
agcatggtggcaggt

SEQ ID NO: 1608638 - DNA, 15 bp, Homo sapiens
gcatggtggcaggtg

SEQ ID NO: 1608639 - DNA, 15 bp, Homo sapiens
catggtggcaggtgc

SEQ ID NO: 1608640 - DNA, 15 bp, Homo sapiens
atggtggcaggtgcc

SEQ ID NO: 1608641 - DNA, 15 bp, Homo sapiens
aggtgcctgtaatct

SEQ ID NO: 1608642 - DNA, 15 bp, Homo sapiens
ggtgcctgtaatctc

SEQ ID NO: 1608643 - DNA, 15 bp, Homo sapiens
aatctcagctactca

SEQ ID NO: 1608644 - DNA, 15 bp, Homo sapiens
atctcagctactcag

SEQ ID NO: 1608645 - DNA, 15 bp, Homo sapiens
agatcatgccattgc

SEQ ID NO: 1608646 - DNA, 15 bp, Homo sapiens
gatcatgccattgca

SEQ ID NO: 1608647 - DNA, 15 bp, Homo sapiens
atcatgccattgcac

SEQ ID NO: 1608648 - DNA, 15 bp, Homo sapiens
tcatgccattgcact

SEQ ID NO: 1608649 - DNA, 15 bp, Homo sapiens
catgccattgcactc

SEQ ID NO: 1608650 - DNA, 15 bp, Homo sapiens
actccagcctggcca

SEQ ID NO: 1608651 - DNA, 15 bp, Homo sapiens
ctccagcctggccaa

SEQ ID NO: 1608652 - DNA, 15 bp, Homo sapiens
tccagcctggccaag

SEQ ID NO: 1608653 - DNA, 15 bp, Homo sapiens
cagcctggccaagag

SEQ ID NO: 1608654 - DNA, 15 bp, Homo sapiens
agcctggccaagagc

SEQ ID NO: 1608655 - DNA, 15 bp, Homo sapiens
gcctggccaagagca

SEQ ID NO: 1608656 - DNA, 15 bp, Homo sapiens
cctggccaagagcaa

SEQ ID NO: 1608657 - DNA, 15 bp, Homo sapiens
ctggccaagagcaaa

SEQ ID NO: 1608658 - DNA, 15 bp, Homo sapiens
tggccaagagcaaaa

SEQ ID NO: 1608659 - DNA, 15 bp, Homo sapiens
ggccaagagcaaaat

SEQ ID NO: 1608660 - DNA, 15 bp, Homo sapiens
gccaagagcaaaatt

SEQ ID NO: 1608661 - DNA, 15 bp, Homo sapiens
ccaagagcaaaattc

SEQ ID NO: 1608662 - DNA, 15 bp, Homo sapiens
caagagcaaaattcc

SEQ ID NO: 1608663 - DNA, 15 bp, Homo sapiens
aagagcaaaattcca

SEQ ID NO: 1608664 - DNA, 15 bp, Homo sapiens
agagcaaaattccat

SEQ ID NO: 1608665 - DNA, 15 bp, Homo sapiens
gagcaaaattccatc

SEQ ID NO: 1608666 - DNA, 15 bp, Homo sapiens
agcaaaattccatct

SEQ ID NO: 1608667 - DNA, 15 bp, Homo sapiens
gcaaaattccatctc

SEQ ID NO: 1608668 - DNA, 15 bp, Homo sapiens
caaaattccatctca

SEQ ID NO: 1608669 - DNA, 15 bp, Homo sapiens
aaaattccatctcaa

SEQ ID NO: 1608670 - DNA, 15 bp, Homo sapiens
aaattccatctcaaa

SEQ ID NO: 1608671 - DNA, 15 bp, Homo sapiens
aattccatctcaaaa

SEQ ID NO: 1608672 - DNA, 15 bp, Homo sapiens
ttccatctcaaaaac

SEQ ID NO: 1608673 - DNA, 15 bp, Homo sapiens
atctcaaaaacaaac

SEQ ID NO: 1608674 - DNA, 15 bp, Homo sapiens
tctcaaaaacaaaca

SEQ ID NO: 1608675 - DNA, 15 bp, Homo sapiens
ctcaaaaacaaacaa

SEQ ID NO: 1608676 - DNA, 15 bp, Homo sapiens
tcaaaaacaaacaaa

SEQ ID NO: 1608677 - DNA, 15 bp, Homo sapiens
caaacaaacaaaaac

SEQ ID NO: 1608678 - DNA, 15 bp, Homo sapiens
aaacaaacaaaaaca

SEQ ID NO: 1608679 - DNA, 15 bp, Homo sapiens
aacaaacaaaaacaa

SEQ ID NO: 1608680 - DNA, 15 bp, Homo sapiens
acaaacaaaaacaaa

SEQ ID NO: 1608681 - DNA, 15 bp, Homo sapiens
caaaaacaaaaaaca

SEQ ID NO: 1608682 - DNA, 15 bp, Homo sapiens
aaaaacaaacaaaac

SEQ ID NO: 1608683 - DNA, 15 bp, Homo sapiens
aaaacaaacaaaaca

SEQ ID NO: 1608684 - DNA, 15 bp, Homo sapiens
aaacaaacaaaacaa

SEQ ID NO: 1608685 - DNA, 15 bp, Homo sapiens
aacaaacaaaacaaa

SEQ ID NO: 1608686 - DNA, 15 bp, Homo sapiens
caaacaaaacaaaaa

SEQ ID NO: 1608687 - DNA, 15 bp, Homo sapiens
aacaaaacaaaaaac

SEQ ID NO: 1608688 - DNA, 15 bp, Homo sapiens
acaaaacaaaaaaca

SEQ ID NO: 1608689 - DNA, 15 bp, Homo sapiens
caaaacaaaaaacaa

SEQ ID NO: 1608690 - DNA, 15 bp, Homo sapiens
aaaacaaaaaacaag

SEQ ID NO: 1608691 - DNA, 15 bp, Homo sapiens
aaacaaaaaacaagt

SEQ ID NO: 1608692 - DNA, 15 bp, Homo sapiens
aacaaaaaacaagta

SEQ ID NO: 1608693 - DNA, 15 bp, Homo sapiens
acaaaaaacaagtac

SEQ ID NO: 1608694 - DNA, 15 bp, Homo sapiens
caaaaaacaagtact

SEQ ID NO: 1608695 - DNA, 15 bp, Homo sapiens
aaaaaacaagtactc

SEQ ID NO: 1608696 - DNA, 15 bp, Homo sapiens
aaaaacaagtactct

SEQ ID NO: 1608697 - DNA, 15 bp, Homo sapiens
aaaacaagtactctt

SEQ ID NO: 1608698 - DNA, 15 bp, Homo sapiens
aaacaagtactcttg

SEQ ID NO: 1608699 - DNA, 15 bp, Homo sapiens
aacaagtactcttga

SEQ ID NO: 1608700 - DNA, 15 bp, Homo sapiens
acaagtactcttgaa

SEQ ID NO: 1608701 - DNA, 15 bp, Homo sapiens
caagtactcttgaat

SEQ ID NO: 1608702 - DNA, 15 bp, Homo sapiens
aagtactcttgaata

SEQ ID NO: 1608703 - DNA, 15 bp, Homo sapiens
agtactcttgaatac

SEQ ID NO: 1608704 - DNA, 15 bp, Homo sapiens
gtactcttgaataca

SEQ ID NO: 1608705 - DNA, 15 bp, Homo sapiens
tactcttgaatacaa

SEQ ID NO: 1608706 - DNA, 15 bp, Homo sapiens
actcttgaatacaag

SEQ ID NO: 1608707 - DNA, 15 bp, Homo sapiens
ctcttgaatacaagt

SEQ ID NO: 1608708 - DNA, 15 bp, Homo sapiens
tcttgaatacaagtt

SEQ ID NO: 1608709 - DNA, 15 bp, Homo sapiens
cttgaatacaagttt

SEQ ID NO: 1608710 - DNA, 15 bp, Homo sapiens
ttgaatacaagtttc

SEQ ID NO: 1608711 - DNA, 15 bp, Homo sapiens
tgaatacaagtttct

SEQ ID NO: 1608712 - DNA, 15 bp, Homo sapiens
gaatacaagtttctt

SEQ ID NO: 1608713 - DNA, 15 bp, Homo sapiens
aatacaagtttctta

SEQ ID NO: 1608714 - DNA, 15 bp, Homo sapiens
atacaagtttcttat

SEQ ID NO: 1608715 - DNA, 15 bp, Homo sapiens
tacaagtttcttata

SEQ ID NO: 1608716 - DNA, 15 bp, Homo sapiens
acaagtttcttataa

SEQ ID NO: 1608717 - DNA, 15 bp, Homo sapiens
caagtttcttataat

SEQ ID NO: 1608718 - DNA, 15 bp, Homo sapiens
aagtttcttataatt

SEQ ID NO: 1608719 - DNA, 15 bp, Homo sapiens
agtttcttataattt

SEQ ID NO: 1608720 - DNA, 15 bp, Homo sapiens
gtttcttataatttt

SEQ ID NO: 1608721 - DNA, 15 bp, Homo sapiens
tttcttataatttta

SEQ ID NO: 1608722 - DNA, 15 bp, Homo sapiens
ttcttataattttaa

SEQ ID NO: 1608723 - DNA, 15 bp, Homo sapiens
tcttataattttaag

SEQ ID NO: 1608724 - DNA, 15 bp, Homo sapiens
cttataattttaaga

SEQ ID NO: 1608725 - DNA, 15 bp, Homo sapiens
ttataattttaagat

SEQ ID NO: 1608726 - DNA, 15 bp, Homo sapiens
tataattttaagatt

SEQ ID NO: 1608727 - DNA, 15 bp, Homo sapiens
ataattttaagattg

SEQ ID NO: 1608728 - DNA, 15 bp, Homo sapiens
taattttaagattgt

SEQ ID NO: 1608729 - DNA, 15 bp, Homo sapiens
aattttaagattgta

SEQ ID NO: 1608730 - DNA, 15 bp, Homo sapiens
attttaagattgtat

SEQ ID NO: 1608731 - DNA, 15 bp, Homo sapiens
ttttaagattgtatt

SEQ ID NO: 1608732 - DNA, 15 bp, Homo sapiens
tttaagattgtatta

SEQ ID NO: 1608733 - DNA, 15 bp, Homo sapiens
ttaagattgtattat

SEQ ID NO: 1608734 - DNA, 15 bp, Homo sapiens
taagattgtattata

SEQ ID NO: 1608735 - DNA, 15 bp, Homo sapiens
aagattgtattatag

SEQ ID NO: 1608736 - DNA, 15 bp, Homo sapiens
agattgtattatagc

SEQ ID NO: 1608737 - DNA, 15 bp, Homo sapiens
gattgtattatagca

SEQ ID NO: 1608738 - DNA, 15 bp, Homo sapiens
attgtattatagcac

SEQ ID NO: 1608739 - DNA, 15 bp, Homo sapiens
ttgtattatagcact

SEQ ID NO: 1608740 - DNA, 15 bp, Homo sapiens
tgtattatagcactg

SEQ ID NO: 1608741 - DNA, 15 bp, Homo sapiens
gtattatagcactga

SEQ ID NO: 1608742 - DNA, 15 bp, Homo sapiens
tattatagcactgag

SEQ ID NO: 1608743 - DNA, 15 bp, Homo sapiens
attatagcactgagt

SEQ ID NO: 1608744 - DNA, 15 bp, Homo sapiens
ttatagcactgagta

SEQ ID NO: 1608745 - DNA, 15 bp, Homo sapiens
tatagcactgagtaa

SEQ ID NO: 1608746 - DNA, 15 bp, Homo sapiens
atagcactgagtaaa

SEQ ID NO: 1608747 - DNA, 15 bp, Homo sapiens
tagcactgagtaaac

SEQ ID NO: 1608748 - DNA, 15 bp, Homo sapiens
agcactgagtaaaca

SEQ ID NO: 1608749 - DNA, 15 bp, Homo sapiens
gcactgagtaaacaa

SEQ ID NO: 1608750 - DNA, 15 bp, Homo sapiens
cactgagtaaacaat

SEQ ID NO: 1608751 - DNA, 15 bp, Homo sapiens
actgagtaaacaatt

SEQ ID NO: 1608752 - DNA, 15 bp, Homo sapiens
ctgagtaaacaattt

SEQ ID NO: 1608753 - DNA, 15 bp, Homo sapiens
tgagtaaacaatttc

SEQ ID NO: 1608754 - DNA, 15 bp, Homo sapiens
gagtaaacaatttca

SEQ ID NO: 1608755 - DNA, 15 bp, Homo sapiens
agtaaacaatttcag

SEQ ID NO: 1608756 - DNA, 15 bp, Homo sapiens
gtaaacaatttcaga

SEQ ID NO: 1608757 - DNA, 15 bp, Homo sapiens
taaacaatttcagaa

SEQ ID NO: 1608758 - DNA, 15 bp, Homo sapiens
aaacaatttcagaac

SEQ ID NO: 1608759 - DNA, 15 bp, Homo sapiens
aacaatttcagaact

SEQ ID NO: 1608760 - DNA, 15 bp, Homo sapiens
acaatttcagaactc

SEQ ID NO: 1608761 - DNA, 15 bp, Homo sapiens
caatttcagaactct

SEQ ID NO: 1608762 - DNA, 15 bp, Homo sapiens
aatttcagaactcta

SEQ ID NO: 1608763 - DNA, 15 bp, Homo sapiens
atttcagaactctaa

SEQ ID NO: 1608764 - DNA, 15 bp, Homo sapiens
tttcagaactctaat

SEQ ID NO: 1608765 - DNA, 15 bp, Homo sapiens
ttcagaactctaatt

SEQ ID NO: 1608766 - DNA, 15 bp, Homo sapiens
tcagaactctaattt

SEQ ID NO: 1608767 - DNA, 15 bp, Homo sapiens
cagaactctaatttt

SEQ ID NO: 1608768 - DNA, 15 bp, Homo sapiens
agaactctaattttt

SEQ ID NO: 1608769 - DNA, 15 bp, Homo sapiens
gaactctaattttta

SEQ ID NO: 1608770 - DNA, 15 bp, Homo sapiens
aactctaatttttaa

SEQ ID NO: 1608771 - DNA, 15 bp, Homo sapiens
actctaatttttaaa

SEQ ID NO: 1608772 - DNA, 15 bp, Homo sapiens
ctctaatttttaaaa

SEQ ID NO: 1608773 - DNA, 15 bp, Homo sapiens
tctaatttttaaaaa

SEQ ID NO: 1608774 - DNA, 15 bp, Homo sapiens
ctaatttttaaaaag

SEQ ID NO: 1608775 - DNA, 15 bp, Homo sapiens
taatttttaaaaagt

SEQ ID NO: 1608776 - DNA, 15 bp, Homo sapiens
aatttttaaaaagtc

SEQ ID NO: 1608777 - DNA, 15 bp, Homo sapiens
atttttaaaaagtca

SEQ ID NO: 1608778 - DNA, 15 bp, Homo sapiens
tttttaaaaagtcat

SEQ ID NO: 1608779 - DNA, 15 bp, Homo sapiens
ttttaaaaagtcata

SEQ ID NO: 1608780 - DNA, 15 bp, Homo sapiens
tttaaaaagtcataa

SEQ ID NO: 1608781 - DNA, 15 bp, Homo sapiens
ttaaaaagtcataaa

SEQ ID NO: 1608782 - DNA, 15 bp, Homo sapiens
taaaaagtcataaaa

SEQ ID NO: 1608783 - DNA, 15 bp, Homo sapiens
aaaaagtcataaaat

SEQ ID NO: 1608784 - DNA, 15 bp, Homo sapiens
aaaagtcataaaatt

SEQ ID NO: 1608785 - DNA, 15 bp, Homo sapiens
aaagtcataaaattg

SEQ ID NO: 1608786 - DNA, 15 bp, Homo sapiens
aagtcataaaattgt

SEQ ID NO: 1608787 - DNA, 15 bp, Homo sapiens
agtcataaaattgtt

SEQ ID NO: 1608788 - DNA, 15 bp, Homo sapiens
gtcataaaattgtta

SEQ ID NO: 1608789 - DNA, 15 bp, Homo sapiens
tcataaaattgttaa

SEQ ID NO: 1608790 - DNA, 15 bp, Homo sapiens
cataaaattgttaac

SEQ ID NO: 1608791 - DNA, 15 bp, Homo sapiens
ataaaattgttaact

SEQ ID NO: 1608792 - DNA, 15 bp, Homo sapiens
taaaattgttaactc

SEQ ID NO: 1608793 - DNA, 15 bp, Homo sapiens
aaaattgttaactca

SEQ ID NO: 1608794 - DNA, 15 bp, Homo sapiens
aaattgttaactcaa

SEQ ID NO: 1608795 - DNA, 15 bp, Homo sapiens
aattgttaactcaac

SEQ ID NO: 1608796 - DNA, 15 bp, Homo sapiens
attgttaactcaaca

SEQ ID NO: 1608797 - DNA, 15 bp, Homo sapiens
ttgttaactcaacat

SEQ ID NO: 1608798 - DNA, 15 bp, Homo sapiens
tgttaactcaacatc

SEQ ID NO: 1608799 - DNA, 15 bp, Homo sapiens
gttaactcaacatca

SEQ ID NO: 1608800 - DNA, 15 bp, Homo sapiens
ttaactcaacatcaa

SEQ ID NO: 1608801 - DNA, 15 bp, Homo sapiens
taactcaacatcaag

SEQ ID NO: 1608802 - DNA, 15 bp, Homo sapiens
aactcaacatcaagc

SEQ ID NO: 1608803 - DNA, 15 bp, Homo sapiens
actcaacatcaagca

SEQ ID NO: 1608804 - DNA, 15 bp, Homo sapiens
ctcaacatcaagcaa

SEQ ID NO: 1608805 - DNA, 15 bp, Homo sapiens
tcaacatcaagcaaa

SEQ ID NO: 1608806 - DNA, 15 bp, Homo sapiens
caacatcaagcaaaa

SEQ ID NO: 1608807 - DNA, 15 bp, Homo sapiens
aacatcaagcaaaac

SEQ ID NO: 1608808 - DNA, 15 bp, Homo sapiens
acatcaagcaaaaca

SEQ ID NO: 1608809 - DNA, 15 bp, Homo sapiens
catcaagcaaaacaa

SEQ ID NO: 1608810 - DNA, 15 bp, Homo sapiens
atcaagcaaaacaac

SEQ ID NO: 1608811 - DNA, 15 bp, Homo sapiens
tcaagcaaaacaact

SEQ ID NO: 1608812 - DNA, 15 bp, Homo sapiens
caagcaaaacaacta

SEQ ID NO: 1608813 - DNA, 15 bp, Homo sapiens
aagcaaaacaactaa

SEQ ID NO: 1608814 - DNA, 15 bp, Homo sapiens
agcaaaacaactaat

SEQ ID NO: 1608815 - DNA, 15 bp, Homo sapiens
gcaaaacaactaatt

SEQ ID NO: 1608816 - DNA, 15 bp, Homo sapiens
caaaacaactaatta

SEQ ID NO: 1608817 - DNA, 15 bp, Homo sapiens
aaaacaactaattac

SEQ ID NO: 1608818 - DNA, 15 bp, Homo sapiens
aaacaactaattaca

SEQ ID NO: 1608819 - DNA, 15 bp, Homo sapiens
aacaactaattacat

SEQ ID NO: 1608820 - DNA, 15 bp, Homo sapiens
acaactaattacatt

SEQ ID NO: 1608821 - DNA, 15 bp, Homo sapiens
caactaattacattg

SEQ ID NO: 1608822 - DNA, 15 bp, Homo sapiens
aactaattacattgg

SEQ ID NO: 1608823 - DNA, 15 bp, Homo sapiens
actaattacattgga

SEQ ID NO: 1608824 - DNA, 15 bp, Homo sapiens
ctaattacattggac

SEQ ID NO: 1608825 - DNA, 15 bp, Homo sapiens
taattacattggact

SEQ ID NO: 1608826 - DNA, 15 bp, Homo sapiens
aattacattggacta

SEQ ID NO: 1608827 - DNA, 15 bp, Homo sapiens
attacattggactaa

SEQ ID NO: 1608828 - DNA, 15 bp, Homo sapiens
ttacattggactaat

SEQ ID NO: 1608829 - DNA, 15 bp, Homo sapiens
tacattggactaatg

SEQ ID NO: 1608830 - DNA, 15 bp, Homo sapiens
acattggactaatgt

SEQ ID NO: 1608831 - DNA, 15 bp, Homo sapiens
cattggactaatgta

SEQ ID NO: 1608832 - DNA, 15 bp, Homo sapiens
attggactaatgtaa

SEQ ID NO: 1608833 - DNA, 15 bp, Homo sapiens
ttggactaatgtaat

SEQ ID NO: 1608834 - DNA, 15 bp, Homo sapiens
tggactaatgtaatt

SEQ ID NO: 1608835 - DNA, 15 bp, Homo sapiens
ggactaatgtaattt

SEQ ID NO: 1608836 - DNA, 15 bp, Homo sapiens
gactaatgtaatttt

SEQ ID NO: 1608837 - DNA, 15 bp, Homo sapiens
actaatgtaatttta

SEQ ID NO: 1608838 - DNA, 15 bp, Homo sapiens
ctaatgtaattttaa

SEQ ID NO: 1608839 - DNA, 15 bp, Homo sapiens
taatgtaattttaat

SEQ ID NO: 1608840 - DNA, 15 bp, Homo sapiens
aatgtaattttaata

SEQ ID NO: 1608841 - DNA, 15 bp, Homo sapiens
atgtaattttaataa

SEQ ID NO: 1608842 - DNA, 15 bp, Homo sapiens
tgtaattttaataac

SEQ ID NO: 1608843 - DNA, 15 bp, Homo sapiens
gtaattttaataact

SEQ ID NO: 1608844 - DNA, 15 bp, Homo sapiens
taattttaataactt

SEQ ID NO: 1608845 - DNA, 15 bp, Homo sapiens
aattttaataacttt

SEQ ID NO: 1608846 - DNA, 15 bp, Homo sapiens
attttaataactttt

SEQ ID NO: 1608847 - DNA, 15 bp, Homo sapiens
ttttaataacttttt

SEQ ID NO: 1608848 - DNA, 15 bp, Homo sapiens
tttaataactttttt

SEQ ID NO: 1608849 - DNA, 15 bp, Homo sapiens
ttaataacttttttg

SEQ ID NO: 1608850 - DNA, 15 bp, Homo sapiens
taataacttttttgt

SEQ ID NO: 1608851 - DNA, 15 bp, Homo sapiens
aataacttttttgtt

SEQ ID NO: 1608852 - DNA, 15 bp, Homo sapiens
ataacttttttgttt

SEQ ID NO: 1608853 - DNA, 15 bp, Homo sapiens
taacttttttgttta

SEQ ID NO: 1608854 - DNA, 15 bp, Homo sapiens
aacttttttgtttaa

SEQ ID NO: 1608855 - DNA, 15 bp, Homo sapiens
acttttttgtttaaa

SEQ ID NO: 1608856 - DNA, 15 bp, Homo sapiens
cttttttgtttaaaa

SEQ ID NO: 1608857 - DNA, 15 bp, Homo sapiens
ttttttgtttaaaat

SEQ ID NO: 1608858 - DNA, 15 bp, Homo sapiens
tttttgtttaaaata

SEQ ID NO: 1608859 - DNA, 15 bp, Homo sapiens
tttgtttaaaatatt

SEQ ID NO: 1608860 - DNA, 15 bp, Homo sapiens
ttgtttaaaatattg

SEQ ID NO: 1608861 - DNA, 15 bp, Homo sapiens
tgtttaaaatattgc

SEQ ID NO: 1608862 - DNA, 15 bp, Homo sapiens
gtttaaaatattgct

SEQ ID NO: 1608863 - DNA, 15 bp, Homo sapiens
tttaaaatattgctg

SEQ ID NO: 1608864 - DNA, 15 bp, Homo sapiens
ttaaaatattgctga

SEQ ID NO: 1608865 - DNA, 15 bp, Homo sapiens
taaaatattgctgat

SEQ ID NO: 1608866 - DNA, 15 bp, Homo sapiens
aaaatattgctgatt

SEQ ID NO: 1608867 - DNA, 15 bp, Homo sapiens
aaatattgctgattc

SEQ ID NO: 1608868 - DNA, 15 bp, Homo sapiens
aatattgctgattct

SEQ ID NO: 1608869 - DNA, 15 bp, Homo sapiens
atattgctgattctt

SEQ ID NO: 1608870 - DNA, 15 bp, Homo sapiens
tattgctgattcttt

SEQ ID NO: 1608871 - DNA, 15 bp, Homo sapiens
attgctgattctttt

SEQ ID NO: 1608872 - DNA, 15 bp, Homo sapiens
ttgctgattcttttt

SEQ ID NO: 1608873 - DNA, 15 bp, Homo sapiens
tgctgattcttttta

SEQ ID NO: 1608874 - DNA, 15 bp, Homo sapiens
gctgattctttttat

SEQ ID NO: 1608875 - DNA, 15 bp, Homo sapiens
ctgattctttttatg

SEQ ID NO: 1608876 - DNA, 15 bp, Homo sapiens
tgattctttttatgt

SEQ ID NO: 1608877 - DNA, 15 bp, Homo sapiens
gattctttttatgtt

SEQ ID NO: 1608878 - DNA, 15 bp, Homo sapiens
attctttttatgttt

SEQ ID NO: 1608879 - DNA, 15 bp, Homo sapiens
ttctttttatgtttt

SEQ ID NO: 1608880 - DNA, 15 bp, Homo sapiens
tctttttatgttttg

SEQ ID NO: 1608881 - DNA, 15 bp, Homo sapiens
ctttttatgttttgc

SEQ ID NO: 1608882 - DNA, 15 bp, Homo sapiens
tttttatgttttgct

SEQ ID NO: 1608883 - DNA, 15 bp, Homo sapiens
ttttatgttttgctt

SEQ ID NO: 1608884 - DNA, 15 bp, Homo sapiens
tttatgttttgcttt

SEQ ID NO: 1608885 - DNA, 15 bp, Homo sapiens
ttatgttttgcttta

SEQ ID NO: 1608886 - DNA, 15 bp, Homo sapiens
tatgttttgctttac

SEQ ID NO: 1608887 - DNA, 15 bp, Homo sapiens
atgttttgctttaca

SEQ ID NO: 1608888 - DNA, 15 bp, Homo sapiens
tgttttgctttacag

SEQ ID NO: 1608889 - DNA, 15 bp, Homo sapiens
gttttgctttacaga

SEQ ID NO: 1608890 - DNA, 15 bp, Homo sapiens
ttttgctttacagag

SEQ ID NO: 1608891 - DNA, 15 bp, Homo sapiens
tttgctttacagagt

SEQ ID NO: 1608892 - DNA, 15 bp, Homo sapiens
ttgctttacagagtt

SEQ ID NO: 1608893 - DNA, 15 bp, Homo sapiens
tgctttacagagtta

SEQ ID NO: 1608894 - DNA, 15 bp, Homo sapiens
gctttacagagttaa

SEQ ID NO: 1608895 - DNA, 15 bp, Homo sapiens
ctttacagagttaag

SEQ ID NO: 1608896 - DNA, 15 bp, Homo sapiens
tttacagagttaagg

SEQ ID NO: 1608897 - DNA, 15 bp, Homo sapiens
ttacagagttaagga

SEQ ID NO: 1608898 - DNA, 15 bp, Homo sapiens
tacagagttaaggaa

SEQ ID NO: 1608899 - DNA, 15 bp, Homo sapiens
acagagttaaggaaa

SEQ ID NO: 1608900 - DNA, 15 bp, Homo sapiens
cagagttaaggaaaa

SEQ ID NO: 1608901 - DNA, 15 bp, Homo sapiens
agagttaaggaaaat

SEQ ID NO: 1608902 - DNA, 15 bp, Homo sapiens
gagttaaggaaaatg

SEQ ID NO: 1608903 - DNA, 15 bp, Homo sapiens
agttaaggaaaatgt

SEQ ID NO: 1608904 - DNA, 15 bp, Homo sapiens
gttaaggaaaatgtt

SEQ ID NO: 1608905 - DNA, 15 bp, Homo sapiens
ttaaggaaaatgttt

SEQ ID NO: 1608906 - DNA, 15 bp, Homo sapiens
taaggaaaatgtttg

SEQ ID NO: 1608907 - DNA, 15 bp, Homo sapiens
aaggaaaatgtttgt

SEQ ID NO: 1608908 - DNA, 15 bp, Homo sapiens
aggaaaatgtttgtt

SEQ ID NO: 1608909 - DNA, 15 bp, Homo sapiens
ggaaaatgtttgttc

SEQ ID NO: 1608910 - DNA, 15 bp, Homo sapiens
gaaaatgtttgttct

SEQ ID NO: 1608911 - DNA, 15 bp, Homo sapiens
aaaatgtttgttctg

SEQ ID NO: 1608912 - DNA, 15 bp, Homo sapiens
aaatgtttgttctgt

SEQ ID NO: 1608913 - DNA, 15 bp, Homo sapiens
aatgtttgttctgtt

SEQ ID NO: 1608914 - DNA, 15 bp, Homo sapiens
atgtttgttctgtta

SEQ ID NO: 1608915 - DNA, 15 bp, Homo sapiens
tgtttgttctgttaa

SEQ ID NO: 1608916 - DNA, 15 bp, Homo sapiens
gtttgttctgttaag

SEQ ID NO: 1608917 - DNA, 15 bp, Homo sapiens
tttgttctgttaagc

SEQ ID NO: 1608918 - DNA, 15 bp, Homo sapiens
ttgttctgttaagct

SEQ ID NO: 1608919 - DNA, 15 bp, Homo sapiens
tgttctgttaagctt

SEQ ID NO: 1608920 - DNA, 15 bp, Homo sapiens
gttctgttaagcttt

SEQ ID NO: 1608921 - DNA, 15 bp, Homo sapiens
ttctgttaagcttta

SEQ ID NO: 1608922 - DNA, 15 bp, Homo sapiens
tctgttaagctttac

SEQ ID NO: 1608923 - DNA, 15 bp, Homo sapiens
ctgttaagctttaca

SEQ ID NO: 1608924 - DNA, 15 bp, Homo sapiens
tgttaagctttacag

SEQ ID NO: 1608925 - DNA, 15 bp, Homo sapiens
gttaagctttacaga

SEQ ID NO: 1608926 - DNA, 15 bp, Homo sapiens
ttaagctttacagaa

SEQ ID NO: 1608927 - DNA, 15 bp, Homo sapiens
taagctttacagaaa

SEQ ID NO: 1608928 - DNA, 15 bp, Homo sapiens
aagctttacagaaat

SEQ ID NO: 1608929 - DNA, 15 bp, Homo sapiens
agctttacagaaatg

SEQ ID NO: 1608930 - DNA, 15 bp, Homo sapiens
gctttacagaaatgg

SEQ ID NO: 1608931 - DNA, 15 bp, Homo sapiens
ctttacagaaatggg

SEQ ID NO: 1608932 - DNA, 15 bp, Homo sapiens
tttacagaaatgggt

SEQ ID NO: 1608933 - DNA, 15 bp, Homo sapiens
ttacagaaatgggta

SEQ ID NO: 1608934 - DNA, 15 bp, Homo sapiens
tacagaaatgggtaa

SEQ ID NO: 1608935 - DNA, 15 bp, Homo sapiens
acagaaatgggtaaa

SEQ ID NO: 1608936 - DNA, 15 bp, Homo sapiens
cagaaatgggtaaag

SEQ ID NO: 1608937 - DNA, 15 bp, Homo sapiens
agaaatgggtaaagt

SEQ ID NO: 1608938 - DNA, 15 bp, Homo sapiens
gaaatgggtaaagta

SEQ ID NO: 1608939 - DNA, 15 bp, Homo sapiens
aaatgggtaaagtat

SEQ ID NO: 1608940 - DNA, 15 bp, Homo sapiens
aatgggtaaagtata

SEQ ID NO: 1608941 - DNA, 15 bp, Homo sapiens
atgggtaaagtatac

SEQ ID NO: 1608942 - DNA, 15 bp, Homo sapiens
tgggtaaagtatact

SEQ ID NO: 1608943 - DNA, 15 bp, Homo sapiens
gggtaaagtatactt

SEQ ID NO: 1608944 - DNA, 15 bp, Homo sapiens
ggtaaagtatacttt

SEQ ID NO: 1608945 - DNA, 15 bp, Homo sapiens
gtaaagtatactttt

SEQ ID NO: 1608946 - DNA, 15 bp, Homo sapiens
taaagtatacttttt

SEQ ID NO: 1608947 - DNA, 15 bp, Homo sapiens
aaagtatactttttt

SEQ ID NO: 1608948 - DNA, 15 bp, Homo sapiens
aagtatacttttttg

SEQ ID NO: 1608949 - DNA, 15 bp, Homo sapiens
agtatacttttttga

SEQ ID NO: 1608950 - DNA, 15 bp, Homo sapiens
gtatacttttttgaa

SEQ ID NO: 1608951 - DNA, 15 bp, Homo sapiens
tatacttttttgaac

SEQ ID NO: 1608952 - DNA, 15 bp, Homo sapiens
atacttttttgaaca

SEQ ID NO: 1608953 - DNA, 15 bp, Homo sapiens
tacttttttgaacaa

SEQ ID NO: 1608954 - DNA, 15 bp, Homo sapiens
acttttttgaacaaa

SEQ ID NO: 1608955 - DNA, 15 bp, Homo sapiens
cttttttgaacaaaa

SEQ ID NO: 1608956 - DNA, 15 bp, Homo sapiens
ttttttgaacaaaat

SEQ ID NO: 1608957 - DNA, 15 bp, Homo sapiens
tttttgaacaaaatt

SEQ ID NO: 1608958 - DNA, 15 bp, Homo sapiens
ttttgaacaaaattg

SEQ ID NO: 1608959 - DNA, 15 bp, Homo sapiens
tttgaacaaaattga

SEQ ID NO: 1608960 - DNA, 15 bp, Homo sapiens
ttgaacaaaattgaa

SEQ ID NO: 1608961 - DNA, 15 bp, Homo sapiens
tgaacaaaattgaaa

SEQ ID NO: 1608962 - DNA, 15 bp, Homo sapiens
gaacaaaattgaaac

SEQ ID NO: 1608963 - DNA, 15 bp, Homo sapiens
aacaaaattgaaaca

SEQ ID NO: 1608964 - DNA, 15 bp, Homo sapiens
acaaaattgaaacat

SEQ ID NO: 1608965 - DNA, 15 bp, Homo sapiens
caaaattgaaacatt

SEQ ID NO: 1608966 - DNA, 15 bp, Homo sapiens
aaaattgaaacattc

SEQ ID NO: 1608967 - DNA, 15 bp, Homo sapiens
aaattgaaacattca

SEQ ID NO: 1608968 - DNA, 15 bp, Homo sapiens
aattgaaacattcac

SEQ ID NO: 1608969 - DNA, 15 bp, Homo sapiens
attgaaacattcact

SEQ ID NO: 1608970 - DNA, 15 bp, Homo sapiens
ttgaaacattcactt

SEQ ID NO: 1608971 - DNA, 15 bp, Homo sapiens
tgaaacattcacttt

SEQ ID NO: 1608972 - DNA, 15 bp, Homo sapiens
gaaacattcactttt

SEQ ID NO: 1608973 - DNA, 15 bp, Homo sapiens
aaacattcacttttc

SEQ ID NO: 1608974 - DNA, 15 bp, Homo sapiens
aacattcacttttct

SEQ ID NO: 1608975 - DNA, 15 bp, Homo sapiens
acattcacttttctc

SEQ ID NO: 1608976 - DNA, 15 bp, Homo sapiens
cattcacttttctct

SEQ ID NO: 1608977 - DNA, 15 bp, Homo sapiens
attcacttttctctc

SEQ ID NO: 1608978 - DNA, 15 bp, Homo sapiens
ttcacttttctctct

SEQ ID NO: 1608979 - DNA, 15 bp, Homo sapiens
tcacttttctctcta

SEQ ID NO: 1608980 - DNA, 15 bp, Homo sapiens
cacttttctctctac

SEQ ID NO: 1608981 - DNA, 15 bp, Homo sapiens
acttttctctctacc

SEQ ID NO: 1608982 - DNA, 15 bp, Homo sapiens
cttttctctctacct

SEQ ID NO: 1608983 - DNA, 15 bp, Homo sapiens
ttttctctctacctg

SEQ ID NO: 1608984 - DNA, 15 bp, Homo sapiens
tttctctctacctga

SEQ ID NO: 1608985 - DNA, 15 bp, Homo sapiens
ttctctctacctgat

SEQ ID NO: 1608986 - DNA, 15 bp, Homo sapiens
tctctctacctgatt

SEQ ID NO: 1608987 - DNA, 15 bp, Homo sapiens
ctctctacctgattg

SEQ ID NO: 1608988 - DNA, 15 bp, Homo sapiens
tctctacctgattga

SEQ ID NO: 1608989 - DNA, 15 bp, Homo sapiens
ctctacctgattgat

SEQ ID NO: 1608990 - DNA, 15 bp, Homo sapiens
tctacctgattgatc

SEQ ID NO: 1608991 - DNA, 15 bp, Homo sapiens
ctacctgattgatcc

SEQ ID NO: 1608992 - DNA, 15 bp, Homo sapiens
tacctgattgatcct

SEQ ID NO: 1608993 - DNA, 15 bp, Homo sapiens
acctgattgatcctg

SEQ ID NO: 1608994 - DNA, 15 bp, Homo sapiens
cctgattgatcctga

SEQ ID NO: 1608995 - DNA, 15 bp, Homo sapiens
ctgattgatcctgaa

SEQ ID NO: 1608996 - DNA, 15 bp, Homo sapiens
tgattgatcctgaat

SEQ ID NO: 1608997 - DNA, 15 bp, Homo sapiens
gattgatcctgaatt

SEQ ID NO: 1608998 - DNA, 15 bp, Homo sapiens
attgatcctgaattt

SEQ ID NO: 1608999 - DNA, 15 bp, Homo sapiens
ttgatcctgaatttg

SEQ ID NO: 1609000 - DNA, 15 bp, Homo sapiens
tgatcctgaatttgg

SEQ ID NO: 1609001 - DNA, 15 bp, Homo sapiens
gatcctgaatttgga

SEQ ID NO: 1609002 - DNA, 15 bp, Homo sapiens
atcctgaatttggaa

SEQ ID NO: 1609003 - DNA, 15 bp, Homo sapiens
tcctgaatttggaaa

SEQ ID NO: 1609004 - DNA, 15 bp, Homo sapiens
cctgaatttggaaac

SEQ ID NO: 1609005 - DNA, 15 bp, Homo sapiens
ctgaatttggaaact

SEQ ID NO: 1609006 - DNA, 15 bp, Homo sapiens
tgaatttggaaacta

SEQ ID NO: 1609007 - DNA, 15 bp, Homo sapiens
gaatttggaaactat

SEQ ID NO: 1609008 - DNA, 15 bp, Homo sapiens
aatttggaaactatg

SEQ ID NO: 1609009 - DNA, 15 bp, Homo sapiens
atttggaaactatga

SEQ ID NO: 1609010 - DNA, 15 bp, Homo sapiens
tttggaaactatgag

SEQ ID NO: 1609011 - DNA, 15 bp, Homo sapiens
ttggaaactatgagt

SEQ ID NO: 1609012 - DNA, 15 bp, Homo sapiens
tggaaactatgagta

SEQ ID NO: 1609013 - DNA, 15 bp, Homo sapiens
ggaaactatgagtat

SEQ ID NO: 1609014 - DNA, 15 bp, Homo sapiens
gaaactatgagtatt

SEQ ID NO: 1609015 - DNA, 15 bp, Homo sapiens
aaactatgagtattt

SEQ ID NO: 1609016 - DNA, 15 bp, Homo sapiens
aactatgagtatttc

SEQ ID NO: 1609017 - DNA, 15 bp, Homo sapiens
actatgagtatttct

SEQ ID NO: 1609018 - DNA, 15 bp, Homo sapiens
ctatgagtatttcta

SEQ ID NO: 1609019 - DNA, 15 bp, Homo sapiens
tatgagtatttctat

SEQ ID NO: 1609020 - DNA, 15 bp, Homo sapiens
atgagtatttctatt

SEQ ID NO: 1609021 - DNA, 15 bp, Homo sapiens
tgagtatttctattt

SEQ ID NO: 1609022 - DNA, 15 bp, Homo sapiens
gagtatttctatttt

SEQ ID NO: 1609023 - DNA, 15 bp, Homo sapiens
agtatttctatttta

SEQ ID NO: 1609024 - DNA, 15 bp, Homo sapiens
gtatttctattttat

SEQ ID NO: 1609025 - DNA, 15 bp, Homo sapiens
tatttctattttatg

SEQ ID NO: 1609026 - DNA, 15 bp, Homo sapiens
atttctattttatgg

SEQ ID NO: 1609027 - DNA, 15 bp, Homo sapiens
tttctattttatggc

SEQ ID NO: 1609028 - DNA, 15 bp, Homo sapiens
ttctattttatggca

SEQ ID NO: 1609029 - DNA, 15 bp, Homo sapiens
tctattttatggcaa

SEQ ID NO: 1609030 - DNA, 15 bp, Homo sapiens
ctattttatggcaaa

SEQ ID NO: 1609031 - DNA, 15 bp, Homo sapiens
tattttatggcaaaa

SEQ ID NO: 1609032 - DNA, 15 bp, Homo sapiens
attttatggcaaaat

SEQ ID NO: 1609033 - DNA, 15 bp, Homo sapiens
ttttatggcaaaata

SEQ ID NO: 1609034 - DNA, 15 bp, Homo sapiens
tttatggcaaaatag

SEQ ID NO: 1609035 - DNA, 15 bp, Homo sapiens
ttatggcaaaatagt

SEQ ID NO: 1609036 - DNA, 15 bp, Homo sapiens
tatggcaaaatagtt

SEQ ID NO: 1609037 - DNA, 15 bp, Homo sapiens
atggcaaaatagtta

SEQ ID NO: 1609038 - DNA, 15 bp, Homo sapiens
tggcaaaatagttat

SEQ ID NO: 1609039 - DNA, 15 bp, Homo sapiens
ggcaaaatagttatt

SEQ ID NO: 1609040 - DNA, 15 bp, Homo sapiens
gcaaaatagttattt

SEQ ID NO: 1609041 - DNA, 15 bp, Homo sapiens
caaaatagttatttg

SEQ ID NO: 1609042 - DNA, 15 bp, Homo sapiens
aaaatagttatttga

SEQ ID NO: 1609043 - DNA, 15 bp, Homo sapiens
aaatagttatttgaa

SEQ ID NO: 1609044 - DNA, 15 bp, Homo sapiens
aatagttatttgaat

SEQ ID NO: 1609045 - DNA, 15 bp, Homo sapiens
atagttatttgaatc

SEQ ID NO: 1609046 - DNA, 15 bp, Homo sapiens
tagttatttgaatca

SEQ ID NO: 1609047 - DNA, 15 bp, Homo sapiens
agttatttgaatcag

SEQ ID NO: 1609048 - DNA, 15 bp, Homo sapiens
gttatttgaatcagt

SEQ ID NO: 1609049 - DNA, 15 bp, Homo sapiens
ttatttgaatcagtt

SEQ ID NO: 1609050 - DNA, 15 bp, Homo sapiens
tatttgaatcagttc

SEQ ID NO: 1609051 - DNA, 15 bp, Homo sapiens
atttgaatcagttca

SEQ ID NO: 1609052 - DNA, 15 bp, Homo sapiens
tttgaatcagttcat

SEQ ID NO: 1609053 - DNA, 15 bp, Homo sapiens
ttgaatcagttcatt

SEQ ID NO: 1609054 - DNA, 15 bp, Homo sapiens
tgaatcagttcatta

SEQ ID NO: 1609055 - DNA, 15 bp, Homo sapiens
gaatcagttcattaa

SEQ ID NO: 1609056 - DNA, 15 bp, Homo sapiens
aatcagttcattaag

SEQ ID NO: 1609057 - DNA, 15 bp, Homo sapiens
atcagttcattaaga

SEQ ID NO: 1609058 - DNA, 15 bp, Homo sapiens
tcagttcattaagaa

SEQ ID NO: 1609059 - DNA, 15 bp, Homo sapiens
cagttcattaagaat

SEQ ID NO: 1609060 - DNA, 15 bp, Homo sapiens
agttcattaagaatc

SEQ ID NO: 1609061 - DNA, 15 bp, Homo sapiens
gttcattaagaatct

SEQ ID NO: 1609062 - DNA, 15 bp, Homo sapiens
ttcattaagaatctg

SEQ ID NO: 1609063 - DNA, 15 bp, Homo sapiens
tcattaagaatctgt

SEQ ID NO: 1609064 - DNA, 15 bp, Homo sapiens
cattaagaatctgtt

SEQ ID NO: 1609065 - DNA, 15 bp, Homo sapiens
attaagaatctgttc

SEQ ID NO: 1609066 - DNA, 15 bp, Homo sapiens
ttaagaatctgttcc

SEQ ID NO: 1609067 - DNA, 15 bp, Homo sapiens
taagaatctgttccc

SEQ ID NO: 1609068 - DNA, 15 bp, Homo sapiens
aagaatctgttccct

SEQ ID NO: 1609069 - DNA, 15 bp, Homo sapiens
agaatctgttccctt

SEQ ID NO: 1609070 - DNA, 15 bp, Homo sapiens
gaatctgttcccttt

SEQ ID NO: 1609071 - DNA, 15 bp, Homo sapiens
aatctgttccctttt

SEQ ID NO: 1609072 - DNA, 15 bp, Homo sapiens
atctgttcccttttg

SEQ ID NO: 1609073 - DNA, 15 bp, Homo sapiens
tctgttcccttttgc

SEQ ID NO: 1609074 - DNA, 15 bp, Homo sapiens
ctgttcccttttgcc

SEQ ID NO: 1609075 - DNA, 15 bp, Homo sapiens
tgttcccttttgcca

SEQ ID NO: 1609076 - DNA, 15 bp, Homo sapiens
gttcccttttgccac

SEQ ID NO: 1609077 - DNA, 15 bp, Homo sapiens
ttcccttttgccaca

SEQ ID NO: 1609078 - DNA, 15 bp, Homo sapiens
tcccttttgccacag

SEQ ID NO: 1609079 - DNA, 15 bp, Homo sapiens
cccttttgccacaga

SEQ ID NO: 1609080 - DNA, 15 bp, Homo sapiens
ccttttgccacagaa

SEQ ID NO: 1609081 - DNA, 15 bp, Homo sapiens
cttttgccacagaac

SEQ ID NO: 1609082 - DNA, 15 bp, Homo sapiens
ttttgccacagaaca

SEQ ID NO: 1609083 - DNA, 15 bp, Homo sapiens
tttgccacagaacac

SEQ ID NO: 1609084 - DNA, 15 bp, Homo sapiens
ttgccacagaacaca

SEQ ID NO: 1609085 - DNA, 15 bp, Homo sapiens
tgccacagaacacag

SEQ ID NO: 1609086 - DNA, 15 bp, Homo sapiens
gccacagaacacagt

SEQ ID NO: 1609087 - DNA, 15 bp, Homo sapiens
ccacagaacacagtt

SEQ ID NO: 1609088 - DNA, 15 bp, Homo sapiens
cacagaacacagttg

SEQ ID NO: 1609089 - DNA, 15 bp, Homo sapiens
acagaacacagttgg

SEQ ID NO: 1609090 - DNA, 15 bp, Homo sapiens
cagaacacagttgga

SEQ ID NO: 1609091 - DNA, 15 bp, Homo sapiens
agaacacagttggag

SEQ ID NO: 1609092 - DNA, 15 bp, Homo sapiens
gaacacagttggaga

SEQ ID NO: 1609093 - DNA, 15 bp, Homo sapiens
aacacagttggagac

SEQ ID NO: 1609094 - DNA, 15 bp, Homo sapiens
acacagttggagact

SEQ ID NO: 1609095 - DNA, 15 bp, Homo sapiens
cacagttggagactc

SEQ ID NO: 1609096 - DNA, 15 bp, Homo sapiens
acagttggagactct

SEQ ID NO: 1609097 - DNA, 15 bp, Homo sapiens
cagttggagactctg

SEQ ID NO: 1609098 - DNA, 15 bp, Homo sapiens
agttggagactctgg

SEQ ID NO: 1609099 - DNA, 15 bp, Homo sapiens
gttggagactctggt

SEQ ID NO: 1609100 - DNA, 15 bp, Homo sapiens
ttggagactctggtt

SEQ ID NO: 1609101 - DNA, 15 bp, Homo sapiens
tggagactctggtta

SEQ ID NO: 1609102 - DNA, 15 bp, Homo sapiens
ggagactctggttat

SEQ ID NO: 1609103 - DNA, 15 bp, Homo sapiens
gagactctggttatt

SEQ ID NO: 1609104 - DNA, 15 bp, Homo sapiens
agactctggttattt

SEQ ID NO: 1609105 - DNA, 15 bp, Homo sapiens
gactctggttatttt

SEQ ID NO: 1609106 - DNA, 15 bp, Homo sapiens
actctggttatttta

SEQ ID NO: 1609107 - DNA, 15 bp, Homo sapiens
ctctggttattttac

SEQ ID NO: 1609108 - DNA, 15 bp, Homo sapiens
tctggttattttacc

SEQ ID NO: 1609109 - DNA, 15 bp, Homo sapiens
ctggttattttacca

SEQ ID NO: 1609110 - DNA, 15 bp, Homo sapiens
tggttattttaccaa

SEQ ID NO: 1609111 - DNA, 15 bp, Homo sapiens
ggttattttaccaag

SEQ ID NO: 1609112 - DNA, 15 bp, Homo sapiens
gttattttaccaagg

SEQ ID NO: 1609113 - DNA, 15 bp, Homo sapiens
ttattttaccaaggc

SEQ ID NO: 1609114 - DNA, 15 bp, Homo sapiens
tattttaccaaggct

SEQ ID NO: 1609115 - DNA, 15 bp, Homo sapiens
attttaccaaggctt

SEQ ID NO: 1609116 - DNA, 15 bp, Homo sapiens
ttttaccaaggcttt

SEQ ID NO: 1609117 - DNA, 15 bp, Homo sapiens
tttaccaaggctttg

SEQ ID NO: 1609118 - DNA, 15 bp, Homo sapiens
ttaccaaggctttga

SEQ ID NO: 1609119 - DNA, 15 bp, Homo sapiens
taccaaggctttgac

SEQ ID NO: 1609120 - DNA, 15 bp, Homo sapiens
accaaggctttgact

SEQ ID NO: 1609121 - DNA, 15 bp, Homo sapiens
ccaaggctttgactg

SEQ ID NO: 1609122 - DNA, 15 bp, Homo sapiens
caaggctttgactga

SEQ ID NO: 1609123 - DNA, 15 bp, Homo sapiens
aaggctttgactgaa

SEQ ID NO: 1609124 - DNA, 15 bp, Homo sapiens
aggctttgactgaaa

SEQ ID NO: 1609125 - DNA, 15 bp, Homo sapiens
ggctttgactgaaat

SEQ ID NO: 1609126 - DNA, 15 bp, Homo sapiens
gctttgactgaaatg

SEQ ID NO: 1609127 - DNA, 15 bp, Homo sapiens
ctttgactgaaatgc

SEQ ID NO: 1609128 - DNA, 15 bp, Homo sapiens
tttgactgaaatgcc

SEQ ID NO: 1609129 - DNA, 15 bp, Homo sapiens
ttgactgaaatgcca

SEQ ID NO: 1609130 - DNA, 15 bp, Homo sapiens
tgactgaaatgccat

SEQ ID NO: 1609131 - DNA, 15 bp, Homo sapiens
gactgaaatgccata

SEQ ID NO: 1609132 - DNA, 15 bp, Homo sapiens
actgaaatgccatat

SEQ ID NO: 1609133 - DNA, 15 bp, Homo sapiens
ctgaaatgccatatt

SEQ ID NO: 1609134 - DNA, 15 bp, Homo sapiens
tgaaatgccatattt

SEQ ID NO: 1609135 - DNA, 15 bp, Homo sapiens
gaaatgccatatttt

SEQ ID NO: 1609136 - DNA, 15 bp, Homo sapiens
aaatgccatattttc

SEQ ID NO: 1609137 - DNA, 15 bp, Homo sapiens
aatgccatattttca

SEQ ID NO: 1609138 - DNA, 15 bp, Homo sapiens
atgccatattttcag

SEQ ID NO: 1609139 - DNA, 15 bp, Homo sapiens
tgccatattttcaga

SEQ ID NO: 1609140 - DNA, 15 bp, Homo sapiens
gccatattttcagat

SEQ ID NO: 1609141 - DNA, 15 bp, Homo sapiens
ccatattttcagatg

SEQ ID NO: 1609142 - DNA, 15 bp, Homo sapiens
catattttcagatgt

SEQ ID NO: 1609143 - DNA, 15 bp, Homo sapiens
atattttcagatgtg

SEQ ID NO: 1609144 - DNA, 15 bp, Homo sapiens
tattttcagatgtga

SEQ ID NO: 1609145 - DNA, 15 bp, Homo sapiens
attttcagatgtgac

SEQ ID NO: 1609146 - DNA, 15 bp, Homo sapiens
ttttcagatgtgacc

SEQ ID NO: 1609147 - DNA, 15 bp, Homo sapiens
tttcagatgtgacca

SEQ ID NO: 1609148 - DNA, 15 bp, Homo sapiens
ttcagatgtgaccag

SEQ ID NO: 1609149 - DNA, 15 bp, Homo sapiens
tcagatgtgaccaga

SEQ ID NO: 1609150 - DNA, 15 bp, Homo sapiens
cagatgtgaccagac

SEQ ID NO: 1609151 - DNA, 15 bp, Homo sapiens
agatgtgaccagaca

SEQ ID NO: 1609152 - DNA, 15 bp, Homo sapiens
gatgtgaccagacag

SEQ ID NO: 1609153 - DNA, 15 bp, Homo sapiens
atgtgaccagacagc

SEQ ID NO: 1609154 - DNA, 15 bp, Homo sapiens
tgtgaccagacagct

SEQ ID NO: 1609155 - DNA, 15 bp, Homo sapiens
gtgaccagacagctt

SEQ ID NO: 1609156 - DNA, 15 bp, Homo sapiens
tgaccagacagcttt

SEQ ID NO: 1609157 - DNA, 15 bp, Homo sapiens
gaccagacagcttta

SEQ ID NO: 1609158 - DNA, 15 bp, Homo sapiens
accagacagctttaa

SEQ ID NO: 1609159 - DNA, 15 bp, Homo sapiens
ccagacagctttaag

SEQ ID NO: 1609160 - DNA, 15 bp, Homo sapiens
cagacagctttaaga

SEQ ID NO: 1609161 - DNA, 15 bp, Homo sapiens
agacagctttaagaa

SEQ ID NO: 1609162 - DNA, 15 bp, Homo sapiens
gacagctttaagaaa

SEQ ID NO: 1609163 - DNA, 15 bp, Homo sapiens
acagctttaagaaac

SEQ ID NO: 1609164 - DNA, 15 bp, Homo sapiens
cagctttaagaaact

SEQ ID NO: 1609165 - DNA, 15 bp, Homo sapiens
agctttaagaaactg

SEQ ID NO: 1609166 - DNA, 15 bp, Homo sapiens
gctttaagaaactga

SEQ ID NO: 1609167 - DNA, 15 bp, Homo sapiens
ctttaagaaactgag

SEQ ID NO: 1609168 - DNA, 15 bp, Homo sapiens
tttaagaaactgagg

SEQ ID NO: 1609169 - DNA, 15 bp, Homo sapiens
ttaagaaactgaggt

SEQ ID NO: 1609170 - DNA, 15 bp, Homo sapiens
taagaaactgaggtt

SEQ ID NO: 1609171 - DNA, 15 bp, Homo sapiens
aagaaactgaggttg

SEQ ID NO: 1609172 - DNA, 15 bp, Homo sapiens
agaaactgaggttga

SEQ ID NO: 1609173 - DNA, 15 bp, Homo sapiens
gaaactgaggttgat

SEQ ID NO: 1609174 - DNA, 15 bp, Homo sapiens
aaactgaggttgata

SEQ ID NO: 1609175 - DNA, 15 bp, Homo sapiens
aactgaggttgatat

SEQ ID NO: 1609176 - DNA, 15 bp, Homo sapiens
actgaggttgatatt

SEQ ID NO: 1609177 - DNA, 15 bp, Homo sapiens
ctgaggttgatatta

SEQ ID NO: 1609178 - DNA, 15 bp, Homo sapiens
tgaggttgatattat

SEQ ID NO: 1609179 - DNA, 15 bp, Homo sapiens
gaggttgatattatg

SEQ ID NO: 1609180 - DNA, 15 bp, Homo sapiens
aggttgatattatga

SEQ ID NO: 1609181 - DNA, 15 bp, Homo sapiens
ggttgatattatgaa

SEQ ID NO: 1609182 - DNA, 15 bp, Homo sapiens
gttgatattatgaag

SEQ ID NO: 1609183 - DNA, 15 bp, Homo sapiens
ttgatattatgaagc

SEQ ID NO: 1609184 - DNA, 15 bp, Homo sapiens
tgatattatgaagcc

SEQ ID NO: 1609185 - DNA, 15 bp, Homo sapiens
gatattatgaagccc

SEQ ID NO: 1609186 - DNA, 15 bp, Homo sapiens
atattatgaagccca

SEQ ID NO: 1609187 - DNA, 15 bp, Homo sapiens
tattatgaagcccat

SEQ ID NO: 1609188 - DNA, 15 bp, Homo sapiens
attatgaagcccata

SEQ ID NO: 1609189 - DNA, 15 bp, Homo sapiens
ttatgaagcccatag

SEQ ID NO: 1609190 - DNA, 15 bp, Homo sapiens
tatgaagcccatagg

SEQ ID NO: 1609191 - DNA, 15 bp, Homo sapiens
atgaagcccatagga

SEQ ID NO: 1609192 - DNA, 15 bp, Homo sapiens
tgaagcccataggag

SEQ ID NO: 1609193 - DNA, 15 bp, Homo sapiens
gaagcccataggagc

SEQ ID NO: 1609194 - DNA, 15 bp, Homo sapiens
aagcccataggagct

SEQ ID NO: 1609195 - DNA, 15 bp, Homo sapiens
agcccataggagctt

SEQ ID NO: 1609196 - DNA, 15 bp, Homo sapiens
gcccataggagcttt

SEQ ID NO: 1609197 - DNA, 15 bp, Homo sapiens
cccataggagctttt

SEQ ID NO: 1609198 - DNA, 15 bp, Homo sapiens
ccataggagcttttg

SEQ ID NO: 1609199 - DNA, 15 bp, Homo sapiens
cataggagcttttgg

SEQ ID NO: 1609200 - DNA, 15 bp, Homo sapiens
ataggagcttttgga

SEQ ID NO: 1609201 - DNA, 15 bp, Homo sapiens
taggagcttttggaa

SEQ ID NO: 1609202 - DNA, 15 bp, Homo sapiens
aggagcttttggaaa

SEQ ID NO: 1609203 - DNA, 15 bp, Homo sapiens
ggagcttttggaaaa

SEQ ID NO: 1609204 - DNA, 15 bp, Homo sapiens
gagcttttggaaaaa

SEQ ID NO: 1609205 - DNA, 15 bp, Homo sapiens
agcttttggaaaaac

SEQ ID NO: 1609206 - DNA, 15 bp, Homo sapiens
gcttttggaaaaact

SEQ ID NO: 1609207 - DNA, 15 bp, Homo sapiens
cttttggaaaaactg

SEQ ID NO: 1609208 - DNA, 15 bp, Homo sapiens
ttttggaaaaactgg

SEQ ID NO: 1609209 - DNA, 15 bp, Homo sapiens
tttggaaaaactggt

SEQ ID NO: 1609210 - DNA, 15 bp, Homo sapiens
ttggaaaaactggtc

SEQ ID NO: 1609211 - DNA, 15 bp, Homo sapiens
tggaaaaactggtct

SEQ ID NO: 1609212 - DNA, 15 bp, Homo sapiens
ggaaaaactggtcta

SEQ ID NO: 1609213 - DNA, 15 bp, Homo sapiens
gaaaaactggtctaa

SEQ ID NO: 1609214 - DNA, 15 bp, Homo sapiens
aaaaactggtctaat

SEQ ID NO: 1609215 - DNA, 15 bp, Homo sapiens
aaaactggtctaata

SEQ ID NO: 1609216 - DNA, 15 bp, Homo sapiens
aaactggtctaatat

SEQ ID NO: 1609217 - DNA, 15 bp, Homo sapiens
aactggtctaatatc

SEQ ID NO: 1609218 - DNA, 15 bp, Homo sapiens
actggtctaatatcc

SEQ ID NO: 1609219 - DNA, 15 bp, Homo sapiens
ctggtctaatatcct

SEQ ID NO: 1609220 - DNA, 15 bp, Homo sapiens
tggtctaatatccta

SEQ ID NO: 1609221 - DNA, 15 bp, Homo sapiens
ggtctaatatcctaa

SEQ ID NO: 1609222 - DNA, 15 bp, Homo sapiens
gtctaatatcctaaa

SEQ ID NO: 1609223 - DNA, 15 bp, Homo sapiens
tctaatatcctaaat

SEQ ID NO: 1609224 - DNA, 15 bp, Homo sapiens
ctaatatcctaaata

SEQ ID NO: 1609225 - DNA, 15 bp, Homo sapiens
taatatcctaaatac

SEQ ID NO: 1609226 - DNA, 15 bp, Homo sapiens
aatatcctaaataca

SEQ ID NO: 1609227 - DNA, 15 bp, Homo sapiens
atatcctaaatacac

SEQ ID NO: 1609228 - DNA, 15 bp, Homo sapiens
tatcctaaatacacg

SEQ ID NO: 1609229 - DNA, 15 bp, Homo sapiens
atcctaaatacacgg

SEQ ID NO: 1609230 - DNA, 15 bp, Homo sapiens
tcctaaatacacggt

SEQ ID NO: 1609231 - DNA, 15 bp, Homo sapiens
cctaaatacacggtt

SEQ ID NO: 1609232 - DNA, 15 bp, Homo sapiens
ctaaatacacggttc

SEQ ID NO: 1609233 - DNA, 15 bp, Homo sapiens
taaatacacggttca

SEQ ID NO: 1609234 - DNA, 15 bp, Homo sapiens
aaatacacggttcac

SEQ ID NO: 1609235 - DNA, 15 bp, Homo sapiens
aatacacggttcaca

SEQ ID NO: 1609236 - DNA, 15 bp, Homo sapiens
atacacggttcacat

SEQ ID NO: 1609237 - DNA, 15 bp, Homo sapiens
tacacggttcacata

SEQ ID NO: 1609238 - DNA, 15 bp, Homo sapiens
acacggttcacataa

SEQ ID NO: 1609239 - DNA, 15 bp, Homo sapiens
cacggttcacataat

SEQ ID NO: 1609240 - DNA, 15 bp, Homo sapiens
acggttcacataatg

SEQ ID NO: 1609241 - DNA, 15 bp, Homo sapiens
cggttcacataatgg

SEQ ID NO: 1609242 - DNA, 15 bp, Homo sapiens
ggttcacataatggg

SEQ ID NO: 1609243 - DNA, 15 bp, Homo sapiens
gttcacataatgggc

SEQ ID NO: 1609244 - DNA, 15 bp, Homo sapiens
ttcacataatgggct

SEQ ID NO: 1609245 - DNA, 15 bp, Homo sapiens
tcacataatgggctt

SEQ ID NO: 1609246 - DNA, 15 bp, Homo sapiens
cacataatgggcttg

SEQ ID NO: 1609247 - DNA, 15 bp, Homo sapiens
acataatgggcttgt

SEQ ID NO: 1609248 - DNA, 15 bp, Homo sapiens
cataatgggcttgtg

SEQ ID NO: 1609249 - DNA, 15 bp, Homo sapiens
ataatgggcttgtgg

SEQ ID NO: 1609250 - DNA, 15 bp, Homo sapiens
taatgggcttgtggt

SEQ ID NO: 1609251 - DNA, 15 bp, Homo sapiens
aatgggcttgtggta

SEQ ID NO: 1609252 - DNA, 15 bp, Homo sapiens
atgggcttgtggtaa

SEQ ID NO: 1609253 - DNA, 15 bp, Homo sapiens
tgggcttgtggtaag

SEQ ID NO: 1609254 - DNA, 15 bp, Homo sapiens
gggcttgtggtaagt

SEQ ID NO: 1609255 - DNA, 15 bp, Homo sapiens
ggcttgtggtaagta

SEQ ID NO: 1609256 - DNA, 15 bp, Homo sapiens
gcttgtggtaagtaa

SEQ ID NO: 1609257 - DNA, 15 bp, Homo sapiens
cttgtggtaagtaag

SEQ ID NO: 1609258 - DNA, 15 bp, Homo sapiens
ttgtggtaagtaaga

SEQ ID NO: 1609259 - DNA, 15 bp, Homo sapiens
tgtggtaagtaagaa

SEQ ID NO: 1609260 - DNA, 15 bp, Homo sapiens
gtggtaagtaagaat

SEQ ID NO: 1609261 - DNA, 15 bp, Homo sapiens
tggtaagtaagaatg

SEQ ID NO: 1609262 - DNA, 15 bp, Homo sapiens
ggtaagtaagaatgt

SEQ ID NO: 1609263 - DNA, 15 bp, Homo sapiens
gtaagtaagaatgtc

SEQ ID NO: 1609264 - DNA, 15 bp, Homo sapiens
taagtaagaatgtca

SEQ ID NO: 1609265 - DNA, 15 bp, Homo sapiens
aagtaagaatgtcac

SEQ ID NO: 1609266 - DNA, 15 bp, Homo sapiens
agtaagaatgtcact

SEQ ID NO: 1609267 - DNA, 15 bp, Homo sapiens
gtaagaatgtcactt

SEQ ID NO: 1609268 - DNA, 15 bp, Homo sapiens
taagaatgtcacttt

SEQ ID NO: 1609269 - DNA, 15 bp, Homo sapiens
aagaatgtcactttc

SEQ ID NO: 1609270 - DNA, 15 bp, Homo sapiens
agaatgtcactttct

SEQ ID NO: 1609271 - DNA, 15 bp, Homo sapiens
gaatgtcactttctg

SEQ ID NO: 1609272 - DNA, 15 bp, Homo sapiens
aatgtcactttctga

SEQ ID NO: 1609273 - DNA, 15 bp, Homo sapiens
atgtcactttctgac

SEQ ID NO: 1609274 - DNA, 15 bp, Homo sapiens
tgtcactttctgaca

SEQ ID NO: 1609275 - DNA, 15 bp, Homo sapiens
gtcactttctgacat

SEQ ID NO: 1609276 - DNA, 15 bp, Homo sapiens
tcactttctgacatc

SEQ ID NO: 1609277 - DNA, 15 bp, Homo sapiens
cactttctgacatcc

SEQ ID NO: 1609278 - DNA, 15 bp, Homo sapiens
actttctgacatccc

SEQ ID NO: 1609279 - DNA, 15 bp, Homo sapiens
ctttctgacatccca

SEQ ID NO: 1609280 - DNA, 15 bp, Homo sapiens
tttctgacatcccag

SEQ ID NO: 1609281 - DNA, 15 bp, Homo sapiens
ttctgacatcccagg

SEQ ID NO: 1609282 - DNA, 15 bp, Homo sapiens
tctgacatcccagga

SEQ ID NO: 1609283 - DNA, 15 bp, Homo sapiens
ctgacatcccaggaa

SEQ ID NO: 1609284 - DNA, 15 bp, Homo sapiens
tgacatcccaggaac

SEQ ID NO: 1609285 - DNA, 15 bp, Homo sapiens
gacatcccaggaacc

SEQ ID NO: 1609286 - DNA, 15 bp, Homo sapiens
acatcccaggaacct

SEQ ID NO: 1609287 - DNA, 15 bp, Homo sapiens
catcccaggaacctc

SEQ ID NO: 1609288 - DNA, 15 bp, Homo sapiens
atcccaggaacctca

SEQ ID NO: 1609289 - DNA, 15 bp, Homo sapiens
tcccaggaacctcaa

SEQ ID NO: 1609290 - DNA, 15 bp, Homo sapiens
cccaggaacctcaag

SEQ ID NO: 1609291 - DNA, 15 bp, Homo sapiens
ccaggaacctcaagt

SEQ ID NO: 1609292 - DNA, 15 bp, Homo sapiens
caggaacctcaagtt

SEQ ID NO: 1609293 - DNA, 15 bp, Homo sapiens
aggaacctcaagtta

SEQ ID NO: 1609294 - DNA, 15 bp, Homo sapiens
ggaacctcaagttaa

SEQ ID NO: 1609295 - DNA, 15 bp, Homo sapiens
gaacctcaagttaat

SEQ ID NO: 1609296 - DNA, 15 bp, Homo sapiens
aacctcaagttaatt

SEQ ID NO: 1609297 - DNA, 15 bp, Homo sapiens
acctcaagttaattg

SEQ ID NO: 1609298 - DNA, 15 bp, Homo sapiens
cctcaagttaattgg

SEQ ID NO: 1609299 - DNA, 15 bp, Homo sapiens
ctcaagttaattggg

SEQ ID NO: 1609300 - DNA, 15 bp, Homo sapiens
tcaagttaattgggg

SEQ ID NO: 1609301 - DNA, 15 bp, Homo sapiens
caagttaattggggg

SEQ ID NO: 1609302 - DNA, 15 bp, Homo sapiens
aagttaattggggga

SEQ ID NO: 1609303 - DNA, 15 bp, Homo sapiens
agttaattgggggac

SEQ ID NO: 1609304 - DNA, 15 bp, Homo sapiens
gttaattgggggacc

SEQ ID NO: 1609305 - DNA, 15 bp, Homo sapiens
ttaattgggggacct

SEQ ID NO: 1609306 - DNA, 15 bp, Homo sapiens
taattgggggacctt

SEQ ID NO: 1609307 - DNA, 15 bp, Homo sapiens
aattgggggaccttg

SEQ ID NO: 1609308 - DNA, 15 bp, Homo sapiens
attgggggaccttga

SEQ ID NO: 1609309 - DNA, 15 bp, Homo sapiens
ttgggggaccttgag

SEQ ID NO: 1609310 - DNA, 15 bp, Homo sapiens
tgggggaccttgaga

SEQ ID NO: 1609311 - DNA, 15 bp, Homo sapiens
gggggaccttgagaa

SEQ ID NO: 1609312 - DNA, 15 bp, Homo sapiens
ggggaccttgagaaa

SEQ ID NO: 1609313 - DNA, 15 bp, Homo sapiens
gggaccttgagaaaa

SEQ ID NO: 1609314 - DNA, 15 bp, Homo sapiens
ggaccttgagaaaag

SEQ ID NO: 1609315 - DNA, 15 bp, Homo sapiens
gaccttgagaaaaga

SEQ ID NO: 1609316 - DNA, 15 bp, Homo sapiens
accttgagaaaagag

SEQ ID NO: 1609317 - DNA, 15 bp, Homo sapiens
ccttgagaaaagaga

SEQ ID NO: 1609318 - DNA, 15 bp, Homo sapiens
cttgagaaaagagaa

SEQ ID NO: 1609319 - DNA, 15 bp, Homo sapiens
ttgagaaaagagaaa

SEQ ID NO: 1609320 - DNA, 15 bp, Homo sapiens
tgagaaaagagaaat

SEQ ID NO: 1609321 - DNA, 15 bp, Homo sapiens
gagaaaagagaaatt

SEQ ID NO: 1609322 - DNA, 15 bp, Homo sapiens
agaaaagagaaattc

SEQ ID NO: 1609323 - DNA, 15 bp, Homo sapiens
gaaaagagaaattca

SEQ ID NO: 1609324 - DNA, 15 bp, Homo sapiens
aaaagagaaattcac

SEQ ID NO: 1609325 - DNA, 15 bp, Homo sapiens
aaagagaaattcact

SEQ ID NO: 1609326 - DNA, 15 bp, Homo sapiens
aagagaaattcacta

SEQ ID NO: 1609327 - DNA, 15 bp, Homo sapiens
agagaaattcactaa

SEQ ID NO: 1609328 - DNA, 15 bp, Homo sapiens
gagaaattcactaat

SEQ ID NO: 1609329 - DNA, 15 bp, Homo sapiens
agaaattcactaatt

SEQ ID NO: 1609330 - DNA, 15 bp, Homo sapiens
gaaattcactaattt

SEQ ID NO: 1609331 - DNA, 15 bp, Homo sapiens
aaattcactaatttg

SEQ ID NO: 1609332 - DNA, 15 bp, Homo sapiens
aattcactaatttgt

SEQ ID NO: 1609333 - DNA, 15 bp, Homo sapiens
attcactaatttgta

SEQ ID NO: 1609334 - DNA, 15 bp, Homo sapiens
ttcactaatttgtac

SEQ ID NO: 1609335 - DNA, 15 bp, Homo sapiens
tcactaatttgtaca

SEQ ID NO: 1609336 - DNA, 15 bp, Homo sapiens
cactaatttgtacag

SEQ ID NO: 1609337 - DNA, 15 bp, Homo sapiens
actaatttgtacagg

SEQ ID NO: 1609338 - DNA, 15 bp, Homo sapiens
ctaatttgtacaggt

SEQ ID NO: 1609339 - DNA, 15 bp, Homo sapiens
taatttgtacaggta

SEQ ID NO: 1609340 - DNA, 15 bp, Homo sapiens
aatttgtacaggtat

SEQ ID NO: 1609341 - DNA, 15 bp, Homo sapiens
atttgtacaggtatt

SEQ ID NO: 1609342 - DNA, 15 bp, Homo sapiens
tttgtacaggtatta

SEQ ID NO: 1609343 - DNA, 15 bp, Homo sapiens
ttgtacaggtattac

SEQ ID NO: 1609344 - DNA, 15 bp, Homo sapiens
tgtacaggtattact

SEQ ID NO: 1609345 - DNA, 15 bp, Homo sapiens
gtacaggtattactg

SEQ ID NO: 1609346 - DNA, 15 bp, Homo sapiens
tacaggtattactga

SEQ ID NO: 1609347 - DNA, 15 bp, Homo sapiens
acaggtattactgac

SEQ ID NO: 1609348 - DNA, 15 bp, Homo sapiens
caggtattactgaca

SEQ ID NO: 1609349 - DNA, 15 bp, Homo sapiens
aggtattactgacac

SEQ ID NO: 1609350 - DNA, 15 bp, Homo sapiens
ggtattactgacaca

SEQ ID NO: 1609351 - DNA, 15 bp, Homo sapiens
gtattactgacacaa

SEQ ID NO: 1609352 - DNA, 15 bp, Homo sapiens
tattactgacacaat

SEQ ID NO: 1609353 - DNA, 15 bp, Homo sapiens
attactgacacaatc

SEQ ID NO: 1609354 - DNA, 15 bp, Homo sapiens
ttactgacacaatct

SEQ ID NO: 1609355 - DNA, 15 bp, Homo sapiens
tactgacacaatcta

SEQ ID NO: 1609356 - DNA, 15 bp, Homo sapiens
actgacacaatctaa

SEQ ID NO: 1609357 - DNA, 15 bp, Homo sapiens
ctgacacaatctaag

SEQ ID NO: 1609358 - DNA, 15 bp, Homo sapiens
tgacacaatctaaga

SEQ ID NO: 1609359 - DNA, 15 bp, Homo sapiens
gacacaatctaagag

SEQ ID NO: 1609360 - DNA, 15 bp, Homo sapiens
acacaatctaagagc

SEQ ID NO: 1609361 - DNA, 15 bp, Homo sapiens
cacaatctaagagca

SEQ ID NO: 1609362 - DNA, 15 bp, Homo sapiens
acaatctaagagcaa

SEQ ID NO: 1609363 - DNA, 15 bp, Homo sapiens
caatctaagagcaaa

SEQ ID NO: 1609364 - DNA, 15 bp, Homo sapiens
aatctaagagcaaat

SEQ ID NO: 1609365 - DNA, 15 bp, Homo sapiens
atctaagagcaaatc

SEQ ID NO: 1609366 - DNA, 15 bp, Homo sapiens
tctaagagcaaatcc

SEQ ID NO: 1609367 - DNA, 15 bp, Homo sapiens
ctaagagcaaatcca

SEQ ID NO: 1609368 - DNA, 15 bp, Homo sapiens
taagagcaaatccaa

SEQ ID NO: 1609369 - DNA, 15 bp, Homo sapiens
aagagcaaatccaat

SEQ ID NO: 1609370 - DNA, 15 bp, Homo sapiens
agagcaaatccaatc

SEQ ID NO: 1609371 - DNA, 15 bp, Homo sapiens
gagcaaatccaatcc

SEQ ID NO: 1609372 - DNA, 15 bp, Homo sapiens
agcaaatccaatcct

SEQ ID NO: 1609373 - DNA, 15 bp, Homo sapiens
gcaaatccaatcctt

SEQ ID NO: 1609374 - DNA, 15 bp, Homo sapiens
caaatccaatccttg

SEQ ID NO: 1609375 - DNA, 15 bp, Homo sapiens
aaatccaatccttga

SEQ ID NO: 1609376 - DNA, 15 bp, Homo sapiens
aatccaatccttgac

SEQ ID NO: 1609377 - DNA, 15 bp, Homo sapiens
atccaatccttgact

SEQ ID NO: 1609378 - DNA, 15 bp, Homo sapiens
tccaatccttgactt

SEQ ID NO: 1609379 - DNA, 15 bp, Homo sapiens
ccaatccttgacttg

SEQ ID NO: 1609380 - DNA, 15 bp, Homo sapiens
caatccttgacttgg

SEQ ID NO: 1609381 - DNA, 15 bp, Homo sapiens
aatccttgacttggc

SEQ ID NO: 1609382 - DNA, 15 bp, Homo sapiens
atccttgacttggct

SEQ ID NO: 1609383 - DNA, 15 bp, Homo sapiens
tccttgacttggctt

SEQ ID NO: 1609384 - DNA, 15 bp, Homo sapiens
ccttgacttggcttt

SEQ ID NO: 1609385 - DNA, 15 bp, Homo sapiens
cttgacttggctttc

SEQ ID NO: 1609386 - DNA, 15 bp, Homo sapiens
ttgacttggctttct

SEQ ID NO: 1609387 - DNA, 15 bp, Homo sapiens
tgacttggctttcta

SEQ ID NO: 1609388 - DNA, 15 bp, Homo sapiens
gacttggctttctag

SEQ ID NO: 1609389 - DNA, 15 bp, Homo sapiens
acttggctttctagc

SEQ ID NO: 1609390 - DNA, 15 bp, Homo sapiens
cttggctttctagcc

SEQ ID NO: 1609391 - DNA, 15 bp, Homo sapiens
ttggctttctagcct

SEQ ID NO: 1609392 - DNA, 15 bp, Homo sapiens
tggctttctagcctg

SEQ ID NO: 1609393 - DNA, 15 bp, Homo sapiens
ggctttctagcctga

SEQ ID NO: 1609394 - DNA, 15 bp, Homo sapiens
gctttctagcctgaa

SEQ ID NO: 1609395 - DNA, 15 bp, Homo sapiens
ctttctagcctgaag

SEQ ID NO: 1609396 - DNA, 15 bp, Homo sapiens
tttctagcctgaaga

SEQ ID NO: 1609397 - DNA, 15 bp, Homo sapiens
ttctagcctgaagag

SEQ ID NO: 1609398 - DNA, 15 bp, Homo sapiens
tctagcctgaagagg

SEQ ID NO: 1609399 - DNA, 15 bp, Homo sapiens
ctagcctgaagaggt

SEQ ID NO: 1609400 - DNA, 15 bp, Homo sapiens
tagcctgaagaggtt

SEQ ID NO: 1609401 - DNA, 15 bp, Homo sapiens
agcctgaagaggttt

SEQ ID NO: 1609402 - DNA, 15 bp, Homo sapiens
gcctgaagaggtttc

SEQ ID NO: 1609403 - DNA, 15 bp, Homo sapiens
cctgaagaggtttct

SEQ ID NO: 1609404 - DNA, 15 bp, Homo sapiens
ctgaagaggtttcta

SEQ ID NO: 1609405 - DNA, 15 bp, Homo sapiens
tgaagaggtttctaa

SEQ ID NO: 1609406 - DNA, 15 bp, Homo sapiens
gaagaggtttctaaa

SEQ ID NO: 1609407 - DNA, 15 bp, Homo sapiens
aagaggtttctaaaa

SEQ ID NO: 1609408 - DNA, 15 bp, Homo sapiens
agaggtttctaaaag

SEQ ID NO: 1609409 - DNA, 15 bp, Homo sapiens
gaggtttctaaaagt

SEQ ID NO: 1609410 - DNA, 15 bp, Homo sapiens
aggtttctaaaagtt

SEQ ID NO: 1609411 - DNA, 15 bp, Homo sapiens
ggtttctaaaagttt

SEQ ID NO: 1609412 - DNA, 15 bp, Homo sapiens
gtttctaaaagttta

SEQ ID NO: 1609413 - DNA, 15 bp, Homo sapiens
tttctaaaagtttaa

SEQ ID NO: 1609414 - DNA, 15 bp, Homo sapiens
ttctaaaagtttaat

SEQ ID NO: 1609415 - DNA, 15 bp, Homo sapiens
tctaaaagtttaatc

SEQ ID NO: 1609416 - DNA, 15 bp, Homo sapiens
ctaaaagtttaatct

SEQ ID NO: 1609417 - DNA, 15 bp, Homo sapiens
taaaagtttaatctg

SEQ ID NO: 1609418 - DNA, 15 bp, Homo sapiens
aaaagtttaatctga

SEQ ID NO: 1609419 - DNA, 15 bp, Homo sapiens
aaagtttaatctgag

SEQ ID NO: 1609420 - DNA, 15 bp, Homo sapiens
aagtttaatctgaga

SEQ ID NO: 1609421 - DNA, 15 bp, Homo sapiens
agtttaatctgagat

SEQ ID NO: 1609422 - DNA, 15 bp, Homo sapiens
gtttaatctgagatt

SEQ ID NO: 1609423 - DNA, 15 bp, Homo sapiens
tttaatctgagattc

SEQ ID NO: 1609424 - DNA, 15 bp, Homo sapiens
ttaatctgagattcc

SEQ ID NO: 1609425 - DNA, 15 bp, Homo sapiens
taatctgagattcct

SEQ ID NO: 1609426 - DNA, 15 bp, Homo sapiens
aatctgagattcctt

SEQ ID NO: 1609427 - DNA, 15 bp, Homo sapiens
atctgagattcctta

SEQ ID NO: 1609428 - DNA, 15 bp, Homo sapiens
tctgagattccttac

SEQ ID NO: 1609429 - DNA, 15 bp, Homo sapiens
ctgagattccttacg

SEQ ID NO: 1609430 - DNA, 15 bp, Homo sapiens
tgagattccttacga

SEQ ID NO: 1609431 - DNA, 15 bp, Homo sapiens
gagattccttacgaa

SEQ ID NO: 1609432 - DNA, 15 bp, Homo sapiens
agattccttacgaaa

SEQ ID NO: 1609433 - DNA, 15 bp, Homo sapiens
gattccttacgaaaa

SEQ ID NO: 1609434 - DNA, 15 bp, Homo sapiens
attccttacgaaaag

SEQ ID NO: 1609435 - DNA, 15 bp, Homo sapiens
ttccttacgaaaagt

SEQ ID NO: 1609436 - DNA, 15 bp, Homo sapiens
tccttacgaaaagtt

SEQ ID NO: 1609437 - DNA, 15 bp, Homo sapiens
ccttacgaaaagttc

SEQ ID NO: 1609438 - DNA, 15 bp, Homo sapiens
cttacgaaaagttcc

SEQ ID NO: 1609439 - DNA, 15 bp, Homo sapiens
ttacgaaaagttcca

SEQ ID NO: 1609440 - DNA, 15 bp, Homo sapiens
tacgaaaagttccag

SEQ ID NO: 1609441 - DNA, 15 bp, Homo sapiens
acgaaaagttccagc

SEQ ID NO: 1609442 - DNA, 15 bp, Homo sapiens
cgaaaagttccagca

SEQ ID NO: 1609443 - DNA, 15 bp, Homo sapiens
gaaaagttccagcaa

SEQ ID NO: 1609444 - DNA, 15 bp, Homo sapiens
aaaagttccagcaaa

SEQ ID NO: 1609445 - DNA, 15 bp, Homo sapiens
aaagttccagcaaag

SEQ ID NO: 1609446 - DNA, 15 bp, Homo sapiens
aagttccagcaaagt

SEQ ID NO: 1609447 - DNA, 15 bp, Homo sapiens
agttccagcaaagtg

SEQ ID NO: 1609448 - DNA, 15 bp, Homo sapiens
gttccagcaaagtga

SEQ ID NO: 1609449 - DNA, 15 bp, Homo sapiens
ttccagcaaagtgaa

SEQ ID NO: 1609450 - DNA, 15 bp, Homo sapiens
tccagcaaagtgaac

SEQ ID NO: 1609451 - DNA, 15 bp, Homo sapiens
ccagcaaagtgaact

SEQ ID NO: 1609452 - DNA, 15 bp, Homo sapiens
cagcaaagtgaactt

SEQ ID NO: 1609453 - DNA, 15 bp, Homo sapiens
agcaaagtgaactta

SEQ ID NO: 1609454 - DNA, 15 bp, Homo sapiens
gcaaagtgaacttaa

SEQ ID NO: 1609455 - DNA, 15 bp, Homo sapiens
caaagtgaacttaaa

SEQ ID NO: 1609456 - DNA, 15 bp, Homo sapiens
aaagtgaacttaaaa

SEQ ID NO: 1609457 - DNA, 15 bp, Homo sapiens
aagtgaacttaaaag

SEQ ID NO: 1609458 - DNA, 15 bp, Homo sapiens
agtgaacttaaaagg

SEQ ID NO: 1609459 - DNA, 15 bp, Homo sapiens
gtgaacttaaaagga

SEQ ID NO: 1609460 - DNA, 15 bp, Homo sapiens
tgaacttaaaaggag

SEQ ID NO: 1609461 - DNA, 15 bp, Homo sapiens
gaacttaaaaggagc

SEQ ID NO: 1609462 - DNA, 15 bp, Homo sapiens
aacttaaaaggagcc

SEQ ID NO: 1609463 - DNA, 15 bp, Homo sapiens
acttaaaaggagcct

SEQ ID NO: 1609464 - DNA, 15 bp, Homo sapiens
cttaaaaggagcctg

SEQ ID NO: 1609465 - DNA, 15 bp, Homo sapiens
ttaaaaggagcctgt

SEQ ID NO: 1609466 - DNA, 15 bp, Homo sapiens
taaaaggagcctgtg

SEQ ID NO: 1609467 - DNA, 15 bp, Homo sapiens
aaaaggagcctgtgt

SEQ ID NO: 1609468 - DNA, 15 bp, Homo sapiens
aaaggagcctgtgtt

SEQ ID NO: 1609469 - DNA, 15 bp, Homo sapiens
aaggagcctgtgtta

SEQ ID NO: 1609470 - DNA, 15 bp, Homo sapiens
aggagcctgtgttac

SEQ ID NO: 1609471 - DNA, 15 bp, Homo sapiens
ggagcctgtgttaca

SEQ ID NO: 1609472 - DNA, 15 bp, Homo sapiens
gagcctgtgttacaa

SEQ ID NO: 1609473 - DNA, 15 bp, Homo sapiens
agcctgtgttacaaa

SEQ ID NO: 1609474 - DNA, 15 bp, Homo sapiens
gcctgtgttacaaat

SEQ ID NO: 1609475 - DNA, 15 bp, Homo sapiens
cctgtgttacaaatt

SEQ ID NO: 1609476 - DNA, 15 bp, Homo sapiens
ctgtgttacaaattg

SEQ ID NO: 1609477 - DNA, 15 bp, Homo sapiens
tgtgttacaaattga

SEQ ID NO: 1609478 - DNA, 15 bp, Homo sapiens
gtgttacaaattgat

SEQ ID NO: 1609479 - DNA, 15 bp, Homo sapiens
tgttacaaattgata

SEQ ID NO: 1609480 - DNA, 15 bp, Homo sapiens
gttacaaattgatat

SEQ ID NO: 1609481 - DNA, 15 bp, Homo sapiens
ttacaaattgatatt

SEQ ID NO: 1609482 - DNA, 15 bp, Homo sapiens
tacaaattgatattc

SEQ ID NO: 1609483 - DNA, 15 bp, Homo sapiens
acaaattgatattct

SEQ ID NO: 1609484 - DNA, 15 bp, Homo sapiens
caaattgatattctt

SEQ ID NO: 1609485 - DNA, 15 bp, Homo sapiens
aaattgatattctta

SEQ ID NO: 1609486 - DNA, 15 bp, Homo sapiens
aattgatattcttac

SEQ ID NO: 1609487 - DNA, 15 bp, Homo sapiens
attgatattcttact

SEQ ID NO: 1609488 - DNA, 15 bp, Homo sapiens
ttgatattcttactg

SEQ ID NO: 1609489 - DNA, 15 bp, Homo sapiens
tgatattcttactgc

SEQ ID NO: 1609490 - DNA, 15 bp, Homo sapiens
gatattcttactgca

SEQ ID NO: 1609491 - DNA, 15 bp, Homo sapiens
atattcttactgcac

SEQ ID NO: 1609492 - DNA, 15 bp, Homo sapiens
tattcttactgcact

SEQ ID NO: 1609493 - DNA, 15 bp, Homo sapiens
attcttactgcactt

SEQ ID NO: 1609494 - DNA, 15 bp, Homo sapiens
ttcttactgcacttt

SEQ ID NO: 1609495 - DNA, 15 bp, Homo sapiens
tcttactgcacttta

SEQ ID NO: 1609496 - DNA, 15 bp, Homo sapiens
cttactgcactttat

SEQ ID NO: 1609497 - DNA, 15 bp, Homo sapiens
ttactgcactttatg

SEQ ID NO: 1609498 - DNA, 15 bp, Homo sapiens
tactgcactttatgc

SEQ ID NO: 1609499 - DNA, 15 bp, Homo sapiens
actgcactttatgca

SEQ ID NO: 1609500 - DNA, 15 bp, Homo sapiens
ctgcactttatgcaa

SEQ ID NO: 1609501 - DNA, 15 bp, Homo sapiens
tgcactttatgcaaa

SEQ ID NO: 1609502 - DNA, 15 bp, Homo sapiens
gcactttatgcaaat

SEQ ID NO: 1609503 - DNA, 15 bp, Homo sapiens
cactttatgcaaata

SEQ ID NO: 1609504 - DNA, 15 bp, Homo sapiens
actttatgcaaataa

SEQ ID NO: 1609505 - DNA, 15 bp, Homo sapiens
ctttatgcaaataat

SEQ ID NO: 1609506 - DNA, 15 bp, Homo sapiens
tttatgcaaataatc

SEQ ID NO: 1609507 - DNA, 15 bp, Homo sapiens
ttatgcaaataatca

SEQ ID NO: 1609508 - DNA, 15 bp, Homo sapiens
tatgcaaataatcag

SEQ ID NO: 1609509 - DNA, 15 bp, Homo sapiens
atgcaaataatcagg

SEQ ID NO: 1609510 - DNA, 15 bp, Homo sapiens
tgcaaataatcaggc

SEQ ID NO: 1609511 - DNA, 15 bp, Homo sapiens
gcaaataatcaggcc

SEQ ID NO: 1609512 - DNA, 15 bp, Homo sapiens
caaataatcaggcca

SEQ ID NO: 1609513 - DNA, 15 bp, Homo sapiens
aaataatcaggccaa

SEQ ID NO: 1609514 - DNA, 15 bp, Homo sapiens
aataatcaggccaag

SEQ ID NO: 1609515 - DNA, 15 bp, Homo sapiens
ataatcaggccaagt

SEQ ID NO: 1609516 - DNA, 15 bp, Homo sapiens
taatcaggccaagta

SEQ ID NO: 1609517 - DNA, 15 bp, Homo sapiens
aatcaggccaagtac

SEQ ID NO: 1609518 - DNA, 15 bp, Homo sapiens
atcaggccaagtaca

SEQ ID NO: 1609519 - DNA, 15 bp, Homo sapiens
tcaggccaagtacaa

SEQ ID NO: 1609520 - DNA, 15 bp, Homo sapiens
caggccaagtacaat

SEQ ID NO: 1609521 - DNA, 15 bp, Homo sapiens
aggccaagtacaata

SEQ ID NO: 1609522 - DNA, 15 bp, Homo sapiens
ggccaagtacaataa

SEQ ID NO: 1609523 - DNA, 15 bp, Homo sapiens
gccaagtacaataag

SEQ ID NO: 1609524 - DNA, 15 bp, Homo sapiens
ccaagtacaataaga

SEQ ID NO: 1609525 - DNA, 15 bp, Homo sapiens
caagtacaataagac

SEQ ID NO: 1609526 - DNA, 15 bp, Homo sapiens
aagtacaataagacg

SEQ ID NO: 1609527 - DNA, 15 bp, Homo sapiens
agtacaataagacga

SEQ ID NO: 1609528 - DNA, 15 bp, Homo sapiens
gtacaataagacgaa

SEQ ID NO: 1609529 - DNA, 15 bp, Homo sapiens
tacaataagacgaaa

SEQ ID NO: 1609530 - DNA, 15 bp, Homo sapiens
acaataagacgaaaa

SEQ ID NO: 1609531 - DNA, 15 bp, Homo sapiens
caataagacgaaaac

SEQ ID NO: 1609532 - DNA, 15 bp, Homo sapiens
aataagacgaaaact

SEQ ID NO: 1609533 - DNA, 15 bp, Homo sapiens
ataagacgaaaactt

SEQ ID NO: 1609534 - DNA, 15 bp, Homo sapiens
taagacgaaaactta

SEQ ID NO: 1609535 - DNA, 15 bp, Homo sapiens
aagacgaaaacttaa

SEQ ID NO: 1609536 - DNA, 15 bp, Homo sapiens
agacgaaaacttaat

SEQ ID NO: 1609537 - DNA, 15 bp, Homo sapiens
gacgaaaacttaata

SEQ ID NO: 1609538 - DNA, 15 bp, Homo sapiens
acgaaaacttaatat

SEQ ID NO: 1609539 - DNA, 15 bp, Homo sapiens
cgaaaacttaatatg

SEQ ID NO: 1609540 - DNA, 15 bp, Homo sapiens
gaaaacttaatatgc

SEQ ID NO: 1609541 - DNA, 15 bp, Homo sapiens
aaaacttaatatgca

SEQ ID NO: 1609542 - DNA, 15 bp, Homo sapiens
aaacttaatatgcaa

SEQ ID NO: 1609543 - DNA, 15 bp, Homo sapiens
aacttaatatgcaaa

SEQ ID NO: 1609544 - DNA, 15 bp, Homo sapiens
acttaatatgcaaat

SEQ ID NO: 1609545 - DNA, 15 bp, Homo sapiens
cttaatatgcaaata

SEQ ID NO: 1609546 - DNA, 15 bp, Homo sapiens
ttaatatgcaaataa

SEQ ID NO: 1609547 - DNA, 15 bp, Homo sapiens
taatatgcaaataaa

SEQ ID NO: 1609548 - DNA, 15 bp, Homo sapiens
aatatgcaaataaaa

SEQ ID NO: 1609549 - DNA, 15 bp, Homo sapiens
atatgcaaataaaat

SEQ ID NO: 1609550 - DNA, 15 bp, Homo sapiens
tatgcaaataaaatg

SEQ ID NO: 1609551 - DNA, 15 bp, Homo sapiens
atgcaaataaaatgg

SEQ ID NO: 1609552 - DNA, 15 bp, Homo sapiens
tgcaaataaaatggc

SEQ ID NO: 1609553 - DNA, 15 bp, Homo sapiens
gcaaataaaatggct

SEQ ID NO: 1609554 - DNA, 15 bp, Homo sapiens
caaataaaatggctt

SEQ ID NO: 1609555 - DNA, 15 bp, Homo sapiens
aaataaaatggcttt

SEQ ID NO: 1609556 - DNA, 15 bp, Homo sapiens
aataaaatggctttg

SEQ ID NO: 1609557 - DNA, 15 bp, Homo sapiens
ataaaatggctttgc

SEQ ID NO: 1609558 - DNA, 15 bp, Homo sapiens
taaaatggctttgct

SEQ ID NO: 1609559 - DNA, 15 bp, Homo sapiens
aaaatggctttgctt

SEQ ID NO: 1609560 - DNA, 15 bp, Homo sapiens
aaatggctttgcttt

SEQ ID NO: 1609561 - DNA, 15 bp, Homo sapiens
aatggctttgctttt

SEQ ID NO: 1609562 - DNA, 15 bp, Homo sapiens
atggctttgctttta

SEQ ID NO: 1609563 - DNA, 15 bp, Homo sapiens
tggctttgcttttat

SEQ ID NO: 1609564 - DNA, 15 bp, Homo sapiens
ggctttgcttttatt

SEQ ID NO: 1609565 - DNA, 15 bp, Homo sapiens
gctttgcttttattt

SEQ ID NO: 1609566 - DNA, 15 bp, Homo sapiens
ctttgcttttattta

SEQ ID NO: 1609567 - DNA, 15 bp, Homo sapiens
tttgcttttatttat

SEQ ID NO: 1609568 - DNA, 15 bp, Homo sapiens
ttgcttttatttatc

SEQ ID NO: 1609569 - DNA, 15 bp, Homo sapiens
tgcttttatttatct

SEQ ID NO: 1609570 - DNA, 15 bp, Homo sapiens
gcttttatttatctt

SEQ ID NO: 1609571 - DNA, 15 bp, Homo sapiens
cttttatttatcttt

SEQ ID NO: 1609572 - DNA, 15 bp, Homo sapiens
ttttatttatctttg

SEQ ID NO: 1609573 - DNA, 15 bp, Homo sapiens
tttatttatctttgg

SEQ ID NO: 1609574 - DNA, 15 bp, Homo sapiens
ttatttatctttggt

SEQ ID NO: 1609575 - DNA, 15 bp, Homo sapiens
tatttatctttggta

SEQ ID NO: 1609576 - DNA, 15 bp, Homo sapiens
atttatctttggtag

SEQ ID NO: 1609577 - DNA, 15 bp, Homo sapiens
tttatctttggtaga

SEQ ID NO: 1609578 - DNA, 15 bp, Homo sapiens
ttatctttggtagaa

SEQ ID NO: 1609579 - DNA, 15 bp, Homo sapiens
tatctttggtagaaa

SEQ ID NO: 1609580 - DNA, 15 bp, Homo sapiens
atctttggtagaaat

SEQ ID NO: 1609581 - DNA, 15 bp, Homo sapiens
tctttggtagaaatg

SEQ ID NO: 1609582 - DNA, 15 bp, Homo sapiens
ctttggtagaaatgg

SEQ ID NO: 1609583 - DNA, 15 bp, Homo sapiens
tttggtagaaatggg

SEQ ID NO: 1609584 - DNA, 15 bp, Homo sapiens
ttggtagaaatgggg

SEQ ID NO: 1609585 - DNA, 15 bp, Homo sapiens
tggtagaaatggggg

SEQ ID NO: 1609586 - DNA, 15 bp, Homo sapiens
ggtagaaatggggga

SEQ ID NO: 1609587 - DNA, 15 bp, Homo sapiens
gtagaaatgggggac

SEQ ID NO: 1609588 - DNA, 15 bp, Homo sapiens
tagaaatgggggact

SEQ ID NO: 1609589 - DNA, 15 bp, Homo sapiens
agaaatgggggactg

SEQ ID NO: 1609590 - DNA, 15 bp, Homo sapiens
gaaatgggggactga

SEQ ID NO: 1609591 - DNA, 15 bp, Homo sapiens
aaatgggggactgaa

SEQ ID NO: 1609592 - DNA, 15 bp, Homo sapiens
aatgggggactgaag

SEQ ID NO: 1609593 - DNA, 15 bp, Homo sapiens
atgggggactgaaga

SEQ ID NO: 1609594 - DNA, 15 bp, Homo sapiens
tgggggactgaagag

SEQ ID NO: 1609595 - DNA, 15 bp, Homo sapiens
gggggactgaagaga

SEQ ID NO: 1609596 - DNA, 15 bp, Homo sapiens
ggggactgaagagag

SEQ ID NO: 1609597 - DNA, 15 bp, Homo sapiens
gggactgaagagaga

SEQ ID NO: 1609598 - DNA, 15 bp, Homo sapiens
ggactgaagagagaa

SEQ ID NO: 1609599 - DNA, 15 bp, Homo sapiens
gactgaagagagaaa

SEQ ID NO: 1609600 - DNA, 15 bp, Homo sapiens
actgaagagagaaaa

SEQ ID NO: 1609601 - DNA, 15 bp, Homo sapiens
ctgaagagagaaaaa

SEQ ID NO: 1609602 - DNA, 15 bp, Homo sapiens
tgaagagagaaaaat

SEQ ID NO: 1609603 - DNA, 15 bp, Homo sapiens
gaagagagaaaaatc

SEQ ID NO: 1609604 - DNA, 15 bp, Homo sapiens
aagagagaaaaatca

SEQ ID NO: 1609605 - DNA, 15 bp, Homo sapiens
agagagaaaaatcat

SEQ ID NO: 1609606 - DNA, 15 bp, Homo sapiens
gagagaaaaatcatg

SEQ ID NO: 1609607 - DNA, 15 bp, Homo sapiens
agagaaaaatcatgt

SEQ ID NO: 1609608 - DNA, 15 bp, Homo sapiens
gagaaaaatcatgtt

SEQ ID NO: 1609609 - DNA, 15 bp, Homo sapiens
agaaaaatcatgttt

SEQ ID NO: 1609610 - DNA, 15 bp, Homo sapiens
gaaaaatcatgtttc

SEQ ID NO: 1609611 - DNA, 15 bp, Homo sapiens
aaaaatcatgtttca

SEQ ID NO: 1609612 - DNA, 15 bp, Homo sapiens
aaaatcatgtttcag

SEQ ID NO: 1609613 - DNA, 15 bp, Homo sapiens
aaatcatgtttcagg

SEQ ID NO: 1609614 - DNA, 15 bp, Homo sapiens
aatcatgtttcagga

SEQ ID NO: 1609615 - DNA, 15 bp, Homo sapiens
atcatgtttcaggaa

SEQ ID NO: 1609616 - DNA, 15 bp, Homo sapiens
tcatgtttcaggaaa

SEQ ID NO: 1609617 - DNA, 15 bp, Homo sapiens
catgtttcaggaaag

SEQ ID NO: 1609618 - DNA, 15 bp, Homo sapiens
atgtttcaggaaaga

SEQ ID NO: 1609619 - DNA, 15 bp, Homo sapiens
tgtttcaggaaagaa

SEQ ID NO: 1609620 - DNA, 15 bp, Homo sapiens
gtttcaggaaagaaa

SEQ ID NO: 1609621 - DNA, 15 bp, Homo sapiens
tttcaggaaagaaaa

SEQ ID NO: 1609622 - DNA, 15 bp, Homo sapiens
ttcaggaaagaaaaa

SEQ ID NO: 1609623 - DNA, 15 bp, Homo sapiens
tcaggaaagaaaaaa

SEQ ID NO: 1609624 - DNA, 15 bp, Homo sapiens
caggaaagaaaaaaa

SEQ ID NO: 1609625 - DNA, 15 bp, Homo sapiens
ggaaagaaaaaaaaa

SEQ ID NO: 1609626 - DNA, 15 bp, Homo sapiens
gaaagaaaaaaaaac

SEQ ID NO: 1609627 - DNA, 15 bp, Homo sapiens
aaagaaaaaaaaact

SEQ ID NO: 1609628 - DNA, 15 bp, Homo sapiens
aagaaaaaaaaacta

SEQ ID NO: 1609629 - DNA, 15 bp, Homo sapiens
agaaaaaaaaactat

SEQ ID NO: 1609630 - DNA, 15 bp, Homo sapiens
gaaaaaaaaactata

SEQ ID NO: 1609631 - DNA, 15 bp, Homo sapiens
aaaaaaaaactataa

SEQ ID NO: 1609632 - DNA, 15 bp, Homo sapiens
aaaaaaaactataat

SEQ ID NO: 1609633 - DNA, 15 bp, Homo sapiens
aaaaaaactataatt

SEQ ID NO: 1609634 - DNA, 15 bp, Homo sapiens
aaaaaactataatta

SEQ ID NO: 1609635 - DNA, 15 bp, Homo sapiens
aaaaactataattag

SEQ ID NO: 1609636 - DNA, 15 bp, Homo sapiens
aaaactataattaga

SEQ ID NO: 1609637 - DNA, 15 bp, Homo sapiens
aaactataattagat

SEQ ID NO: 1609638 - DNA, 15 bp, Homo sapiens
aactataattagatt

SEQ ID NO: 1609639 - DNA, 15 bp, Homo sapiens
aattagattccagtt

SEQ ID NO: 1609640 - DNA, 15 bp, Homo sapiens
attagattccagttc

SEQ ID NO: 1609641 - DNA, 15 bp, Homo sapiens
ttagattccagttca

SEQ ID NO: 1609642 - DNA, 15 bp, Homo sapiens
tagattccagttcat

SEQ ID NO: 1609643 - DNA, 15 bp, Homo sapiens
agattccagttcatt

SEQ ID NO: 1609644 - DNA, 15 bp, Homo sapiens
gattccagttcattg

SEQ ID NO: 1609645 - DNA, 15 bp, Homo sapiens
attccagttcattgt

SEQ ID NO: 1609646 - DNA, 15 bp, Homo sapiens
ttccagttcattgtt

SEQ ID NO: 1609647 - DNA, 15 bp, Homo sapiens
tccagttcattgttt

SEQ ID NO: 1609648 - DNA, 15 bp, Homo sapiens
ccagttcattgtttg

SEQ ID NO: 1609649 - DNA, 15 bp, Homo sapiens
cagttcattgtttgt

SEQ ID NO: 1609650 - DNA, 15 bp, Homo sapiens
agttcattgtttgtt

SEQ ID NO: 1609651 - DNA, 15 bp, Homo sapiens
gttcattgtttgttt

SEQ ID NO: 1609652 - DNA, 15 bp, Homo sapiens
ttcattgtttgtttt

SEQ ID NO: 1609653 - DNA, 15 bp, Homo sapiens
tcattgtttgttttt

SEQ ID NO: 1609654 - DNA, 15 bp, Homo sapiens
cattgtttgtttttt

SEQ ID NO: 1609655 - DNA, 15 bp, Homo sapiens
attgtttgttttttc

SEQ ID NO: 1609656 - DNA, 15 bp, Homo sapiens
ttgtttgttttttct

SEQ ID NO: 1609657 - DNA, 15 bp, Homo sapiens
tgtttgttttttctt

SEQ ID NO: 1609658 - DNA, 15 bp, Homo sapiens
gtttgttttttcttt

SEQ ID NO: 1609659 - DNA, 15 bp, Homo sapiens
tttgttttttctttc

SEQ ID NO: 1609660 - DNA, 15 bp, Homo sapiens
ttgttttttctttct

SEQ ID NO: 1609661 - DNA, 15 bp, Homo sapiens
tgttttttctttctt

SEQ ID NO: 1609662 - DNA, 15 bp, Homo sapiens
gttttttctttcttt

SEQ ID NO: 1609663 - DNA, 15 bp, Homo sapiens
ttttctttctttctc

SEQ ID NO: 1609664 - DNA, 15 bp, Homo sapiens
tttctttctttctca

SEQ ID NO: 1609665 - DNA, 15 bp, Homo sapiens
ttctttctttctcag

SEQ ID NO: 1609666 - DNA, 15 bp, Homo sapiens
tctttctttctcaga

SEQ ID NO: 1609667 - DNA, 15 bp, Homo sapiens
ctttctttctcagat

SEQ ID NO: 1609668 - DNA, 15 bp, Homo sapiens
tttctttctcagatt

SEQ ID NO: 1609669 - DNA, 15 bp, Homo sapiens
ttctttctcagattt

SEQ ID NO: 1609670 - DNA, 15 bp, Homo sapiens
tctttctcagatttt

SEQ ID NO: 1609671 - DNA, 15 bp, Homo sapiens
ctttctcagattttt

SEQ ID NO: 1609672 - DNA, 15 bp, Homo sapiens
tttctcagatttttt

SEQ ID NO: 1609673 - DNA, 15 bp, Homo sapiens
ttctcagattttttt

SEQ ID NO: 1609674 - DNA, 15 bp, Homo sapiens
tctcagattttttta

SEQ ID NO: 1609675 - DNA, 15 bp, Homo sapiens
ctcagatttttttat

SEQ ID NO: 1609676 - DNA, 15 bp, Homo sapiens
tcagatttttttatt

SEQ ID NO: 1609677 - DNA, 15 bp, Homo sapiens
cagatttttttattt

SEQ ID NO: 1609678 - DNA, 15 bp, Homo sapiens
agatttttttatttg

SEQ ID NO: 1609679 - DNA, 15 bp, Homo sapiens
gatttttttatttgc

SEQ ID NO: 1609680 - DNA, 15 bp, Homo sapiens
atttttttatttgcc

SEQ ID NO: 1609681 - DNA, 15 bp, Homo sapiens
tttttttatttgcct

SEQ ID NO: 1609682 - DNA, 15 bp, Homo sapiens
ttttttatttgcctg

SEQ ID NO: 1609683 - DNA, 15 bp, Homo sapiens
tttttatttgcctgt

SEQ ID NO: 1609684 - DNA, 15 bp, Homo sapiens
ttttatttgcctgta

SEQ ID NO: 1609685 - DNA, 15 bp, Homo sapiens
tttatttgcctgtaa

SEQ ID NO: 1609686 - DNA, 15 bp, Homo sapiens
ttatttgcctgtaat

SEQ ID NO: 1609687 - DNA, 15 bp, Homo sapiens
tatttgcctgtaatc

SEQ ID NO: 1609688 - DNA, 15 bp, Homo sapiens
atttgcctgtaatct

SEQ ID NO: 1609689 - DNA, 15 bp, Homo sapiens
tttgcctgtaatcta

SEQ ID NO: 1609690 - DNA, 15 bp, Homo sapiens
ttgcctgtaatctaa

SEQ ID NO: 1609691 - DNA, 15 bp, Homo sapiens
tgcctgtaatctaaa

SEQ ID NO: 1609692 - DNA, 15 bp, Homo sapiens
gcctgtaatctaaac

SEQ ID NO: 1609693 - DNA, 15 bp, Homo sapiens
cctgtaatctaaact

SEQ ID NO: 1609694 - DNA, 15 bp, Homo sapiens
ctgtaatctaaacta

SEQ ID NO: 1609695 - DNA, 15 bp, Homo sapiens
tgtaatctaaactaa

SEQ ID NO: 1609696 - DNA, 15 bp, Homo sapiens
gtaatctaaactaaa

SEQ ID NO: 1609697 - DNA, 15 bp, Homo sapiens
taatctaaactaaat

SEQ ID NO: 1609698 - DNA, 15 bp, Homo sapiens
aatctaaactaaatc

SEQ ID NO: 1609699 - DNA, 15 bp, Homo sapiens
atctaaactaaatct

SEQ ID NO: 1609700 - DNA, 15 bp, Homo sapiens
tctaaactaaatctt

SEQ ID NO: 1609701 - DNA, 15 bp, Homo sapiens
ctaaactaaatctta

SEQ ID NO: 1609702 - DNA, 15 bp, Homo sapiens
taaactaaatcttaa

SEQ ID NO: 1609703 - DNA, 15 bp, Homo sapiens
aaactaaatcttaaa

SEQ ID NO: 1609704 - DNA, 15 bp, Homo sapiens
aactaaatcttaaat

SEQ ID NO: 1609705 - DNA, 15 bp, Homo sapiens
actaaatcttaaatt

SEQ ID NO: 1609706 - DNA, 15 bp, Homo sapiens
ctaaatcttaaattg

SEQ ID NO: 1609707 - DNA, 15 bp, Homo sapiens
taaatcttaaattgt

SEQ ID NO: 1609708 - DNA, 15 bp, Homo sapiens
aaatcttaaattgtt

SEQ ID NO: 1609709 - DNA, 15 bp, Homo sapiens
aatcttaaattgtta

SEQ ID NO: 1609710 - DNA, 15 bp, Homo sapiens
atcttaaattgttag

SEQ ID NO: 1609711 - DNA, 15 bp, Homo sapiens
tcttaaattgttagt

SEQ ID NO: 1609712 - DNA, 15 bp, Homo sapiens
cttaaattgttagtc

SEQ ID NO: 1609713 - DNA, 15 bp, Homo sapiens
ttaaattgttagtcc

SEQ ID NO: 1609714 - DNA, 15 bp, Homo sapiens
taaattgttagtcct

SEQ ID NO: 1609715 - DNA, 15 bp, Homo sapiens
aaattgttagtccta

SEQ ID NO: 1609716 - DNA, 15 bp, Homo sapiens
aattgttagtcctat

SEQ ID NO: 1609717 - DNA, 15 bp, Homo sapiens
attgttagtcctatc

SEQ ID NO: 1609718 - DNA, 15 bp, Homo sapiens
ttgttagtcctatca

SEQ ID NO: 1609719 - DNA, 15 bp, Homo sapiens
tgttagtcctatcaa

SEQ ID NO: 1609720 - DNA, 15 bp, Homo sapiens
gttagtcctatcaaa

SEQ ID NO: 1609721 - DNA, 15 bp, Homo sapiens
ttagtcctatcaaaa

SEQ ID NO: 1609722 - DNA, 15 bp, Homo sapiens
tagtcctatcaaaat

SEQ ID NO: 1609723 - DNA, 15 bp, Homo sapiens
agtcctatcaaaatc

SEQ ID NO: 1609724 - DNA, 15 bp, Homo sapiens
gtcctatcaaaatct

SEQ ID NO: 1609725 - DNA, 15 bp, Homo sapiens
tcctatcaaaatctg

SEQ ID NO: 1609726 - DNA, 15 bp, Homo sapiens
cctatcaaaatctgt

SEQ ID NO: 1609727 - DNA, 15 bp, Homo sapiens
ctatcaaaatctgtc

SEQ ID NO: 1609728 - DNA, 15 bp, Homo sapiens
tatcaaaatctgtct

SEQ ID NO: 1609729 - DNA, 15 bp, Homo sapiens
atcaaaatctgtctt

SEQ ID NO: 1609730 - DNA, 15 bp, Homo sapiens
tcaaaatctgtcttt

SEQ ID NO: 1609731 - DNA, 15 bp, Homo sapiens
caaaatctgtctttg

SEQ ID NO: 1609732 - DNA, 15 bp, Homo sapiens
aaaatctgtctttga

SEQ ID NO: 1609733 - DNA, 15 bp, Homo sapiens
aaatctgtctttgaa

SEQ ID NO: 1609734 - DNA, 15 bp, Homo sapiens
aatctgtctttgaat

SEQ ID NO: 1609735 - DNA, 15 bp, Homo sapiens
atctgtctttgaatc

SEQ ID NO: 1609736 - DNA, 15 bp, Homo sapiens
tctgtctttgaatct

SEQ ID NO: 1609737 - DNA, 15 bp, Homo sapiens
ctgtctttgaatctc

SEQ ID NO: 1609738 - DNA, 15 bp, Homo sapiens
tgtctttgaatctcc

SEQ ID NO: 1609739 - DNA, 15 bp, Homo sapiens
gtctttgaatctcca

SEQ ID NO: 1609740 - DNA, 15 bp, Homo sapiens
tctttgaatctccag

SEQ ID NO: 1609741 - DNA, 15 bp, Homo sapiens
ctttgaatctccagg

SEQ ID NO: 1609742 - DNA, 15 bp, Homo sapiens
tttgaatctccaggc

SEQ ID NO: 1609743 - DNA, 15 bp, Homo sapiens
ttgaatctccaggca

SEQ ID NO: 1609744 - DNA, 15 bp, Homo sapiens
tgaatctccaggcaa

SEQ ID NO: 1609745 - DNA, 15 bp, Homo sapiens
gaatctccaggcaag

SEQ ID NO: 1609746 - DNA, 15 bp, Homo sapiens
aatctccaggcaagc

SEQ ID NO: 1609747 - DNA, 15 bp, Homo sapiens
atctccaggcaagca

SEQ ID NO: 1609748 - DNA, 15 bp, Homo sapiens
tctccaggcaagcat

SEQ ID NO: 1609749 - DNA, 15 bp, Homo sapiens
ctccaggcaagcatt

SEQ ID NO: 1609750 - DNA, 15 bp, Homo sapiens
tccaggcaagcattt

SEQ ID NO: 1609751 - DNA, 15 bp, Homo sapiens
ccaggcaagcatttt

SEQ ID NO: 1609752 - DNA, 15 bp, Homo sapiens
caggcaagcattttc

SEQ ID NO: 1609753 - DNA, 15 bp, Homo sapiens
aggcaagcattttca

SEQ ID NO: 1609754 - DNA, 15 bp, Homo sapiens
ggcaagcattttcaa

SEQ ID NO: 1609755 - DNA, 15 bp, Homo sapiens
gcaagcattttcaat

SEQ ID NO: 1609756 - DNA, 15 bp, Homo sapiens
caagcattttcaatt

SEQ ID NO: 1609757 - DNA, 15 bp, Homo sapiens
aagcattttcaattt

SEQ ID NO: 1609758 - DNA, 15 bp, Homo sapiens
agcattttcaatttt

SEQ ID NO: 1609759 - DNA, 15 bp, Homo sapiens
gcattttcaattttc

SEQ ID NO: 1609760 - DNA, 15 bp, Homo sapiens
cattttcaattttcc

SEQ ID NO: 1609761 - DNA, 15 bp, Homo sapiens
attttcaattttcct

SEQ ID NO: 1609762 - DNA, 15 bp, Homo sapiens
ttttcaattttcctc

SEQ ID NO: 1609763 - DNA, 15 bp, Homo sapiens
tttcaattttcctcc

SEQ ID NO: 1609764 - DNA, 15 bp, Homo sapiens
ttcaattttcctcct

SEQ ID NO: 1609765 - DNA, 15 bp, Homo sapiens
tcaattttcctccta

SEQ ID NO: 1609766 - DNA, 15 bp, Homo sapiens
caattttcctcctac

SEQ ID NO: 1609767 - DNA, 15 bp, Homo sapiens
aattttcctcctaca

SEQ ID NO: 1609768 - DNA, 15 bp, Homo sapiens
attttcctcctacat

SEQ ID NO: 1609769 - DNA, 15 bp, Homo sapiens
ttttcctcctacatt

SEQ ID NO: 1609770 - DNA, 15 bp, Homo sapiens
tttcctcctacattt

SEQ ID NO: 1609771 - DNA, 15 bp, Homo sapiens
ttcctcctacatttc

SEQ ID NO: 1609772 - DNA, 15 bp, Homo sapiens
tcctcctacatttct

SEQ ID NO: 1609773 - DNA, 15 bp, Homo sapiens
cctcctacatttctg

SEQ ID NO: 1609774 - DNA, 15 bp, Homo sapiens
ctcctacatttctga

SEQ ID NO: 1609775 - DNA, 15 bp, Homo sapiens
tcctacatttctgac

SEQ ID NO: 1609776 - DNA, 15 bp, Homo sapiens
cctacatttctgact

SEQ ID NO: 1609777 - DNA, 15 bp, Homo sapiens
ctacatttctgactt

SEQ ID NO: 1609778 - DNA, 15 bp, Homo sapiens
tacatttctgacttg

SEQ ID NO: 1609779 - DNA, 15 bp, Homo sapiens
acatttctgacttgg

SEQ ID NO: 1609780 - DNA, 15 bp, Homo sapiens
catttctgacttgga

SEQ ID NO: 1609781 - DNA, 15 bp, Homo sapiens
atttctgacttggaa

SEQ ID NO: 1609782 - DNA, 15 bp, Homo sapiens
tttctgacttggaat

SEQ ID NO: 1609783 - DNA, 15 bp, Homo sapiens
ttctgacttggaatc

SEQ ID NO: 1609784 - DNA, 15 bp, Homo sapiens
tctgacttggaatca

SEQ ID NO: 1609785 - DNA, 15 bp, Homo sapiens
ctgacttggaatcac

SEQ ID NO: 1609786 - DNA, 15 bp, Homo sapiens
tgacttggaatcact

SEQ ID NO: 1609787 - DNA, 15 bp, Homo sapiens
gacttggaatcacta

SEQ ID NO: 1609788 - DNA, 15 bp, Homo sapiens
acttggaatcactaa

SEQ ID NO: 1609789 - DNA, 15 bp, Homo sapiens
cttggaatcactaaa

SEQ ID NO: 1609790 - DNA, 15 bp, Homo sapiens
ttggaatcactaaac

SEQ ID NO: 1609791 - DNA, 15 bp, Homo sapiens
tggaatcactaaacg

SEQ ID NO: 1609792 - DNA, 15 bp, Homo sapiens
ggaatcactaaacgt

SEQ ID NO: 1609793 - DNA, 15 bp, Homo sapiens
gaatcactaaacgtt

SEQ ID NO: 1609794 - DNA, 15 bp, Homo sapiens
aatcactaaacgtta

SEQ ID NO: 1609795 - DNA, 15 bp, Homo sapiens
atcactaaacgttaa

SEQ ID NO: 1609796 - DNA, 15 bp, Homo sapiens
tcactaaacgttaaa

SEQ ID NO: 1609797 - DNA, 15 bp, Homo sapiens
cactaaacgttaaaa

SEQ ID NO: 1609798 - DNA, 15 bp, Homo sapiens
actaaacgttaaaat

SEQ ID NO: 1609799 - DNA, 15 bp, Homo sapiens
ctaaacgttaaaatt

SEQ ID NO: 1609800 - DNA, 15 bp, Homo sapiens
taaacgttaaaattc

SEQ ID NO: 1609801 - DNA, 15 bp, Homo sapiens
aaacgttaaaattcc

SEQ ID NO: 1609802 - DNA, 15 bp, Homo sapiens
aacgttaaaattccc

SEQ ID NO: 1609803 - DNA, 15 bp, Homo sapiens
acgttaaaattccct

SEQ ID NO: 1609804 - DNA, 15 bp, Homo sapiens
cgttaaaattccctt

SEQ ID NO: 1609805 - DNA, 15 bp, Homo sapiens
gttaaaattcccttt

SEQ ID NO: 1609806 - DNA, 15 bp, Homo sapiens
ttaaaattccctttt

SEQ ID NO: 1609807 - DNA, 15 bp, Homo sapiens
taaaattcccttttt

SEQ ID NO: 1609808 - DNA, 15 bp, Homo sapiens
aaaattccctttttc

SEQ ID NO: 1609809 - DNA, 15 bp, Homo sapiens
aaattccctttttcc

SEQ ID NO: 1609810 - DNA, 15 bp, Homo sapiens
aattccctttttcct

SEQ ID NO: 1609811 - DNA, 15 bp, Homo sapiens
attccctttttccta

SEQ ID NO: 1609812 - DNA, 15 bp, Homo sapiens
ttccctttttcctaa

SEQ ID NO: 1609813 - DNA, 15 bp, Homo sapiens
tccctttttcctaag

SEQ ID NO: 1609814 - DNA, 15 bp, Homo sapiens
ccctttttcctaaga

SEQ ID NO: 1609815 - DNA, 15 bp, Homo sapiens
cctttttcctaagac

SEQ ID NO: 1609816 - DNA, 15 bp, Homo sapiens
ctttttcctaagact

SEQ ID NO: 1609817 - DNA, 15 bp, Homo sapiens
tttttcctaagactc

SEQ ID NO: 1609818 - DNA, 15 bp, Homo sapiens
ttttcctaagactct

SEQ ID NO: 1609819 - DNA, 15 bp, Homo sapiens
tttcctaagactcta

SEQ ID NO: 1609820 - DNA, 15 bp, Homo sapiens
ttcctaagactctac

SEQ ID NO: 1609821 - DNA, 15 bp, Homo sapiens
tcctaagactctaca

SEQ ID NO: 1609822 - DNA, 15 bp, Homo sapiens
cctaagactctacaa

SEQ ID NO: 1609823 - DNA, 15 bp, Homo sapiens
ctaagactctacaag

SEQ ID NO: 1609824 - DNA, 15 bp, Homo sapiens
taagactctacaagc

SEQ ID NO: 1609825 - DNA, 15 bp, Homo sapiens
aagactctacaagct

SEQ ID NO: 1609826 - DNA, 15 bp, Homo sapiens
agactctacaagctg

SEQ ID NO: 1609827 - DNA, 15 bp, Homo sapiens
gactctacaagctga

SEQ ID NO: 1609828 - DNA, 15 bp, Homo sapiens
actctacaagctgat

SEQ ID NO: 1609829 - DNA, 15 bp, Homo sapiens
ctctacaagctgata

SEQ ID NO: 1609830 - DNA, 15 bp, Homo sapiens
tctacaagctgatac

SEQ ID NO: 1609831 - DNA, 15 bp, Homo sapiens
ctacaagctgatact

SEQ ID NO: 1609832 - DNA, 15 bp, Homo sapiens
tacaagctgatacta

SEQ ID NO: 1609833 - DNA, 15 bp, Homo sapiens
acaagctgatactag

SEQ ID NO: 1609834 - DNA, 15 bp, Homo sapiens
caagctgatactagc

SEQ ID NO: 1609835 - DNA, 15 bp, Homo sapiens
aagctgatactagct

SEQ ID NO: 1609836 - DNA, 15 bp, Homo sapiens
agctgatactagcta

SEQ ID NO: 1609837 - DNA, 15 bp, Homo sapiens
gctgatactagctaa

SEQ ID NO: 1609838 - DNA, 15 bp, Homo sapiens
ctgatactagctaac

SEQ ID NO: 1609839 - DNA, 15 bp, Homo sapiens
tgatactagctaact

SEQ ID NO: 1609840 - DNA, 15 bp, Homo sapiens
gatactagctaactt

SEQ ID NO: 1609841 - DNA, 15 bp, Homo sapiens
atactagctaacttg

SEQ ID NO: 1609842 - DNA, 15 bp, Homo sapiens
tactagctaacttgg

SEQ ID NO: 1609843 - DNA, 15 bp, Homo sapiens
actagctaacttggc

SEQ ID NO: 1609844 - DNA, 15 bp, Homo sapiens
ctagctaacttggct

SEQ ID NO: 1609845 - DNA, 15 bp, Homo sapiens
tagctaacttggctt

SEQ ID NO: 1609846 - DNA, 15 bp, Homo sapiens
agctaacttggcttt

SEQ ID NO: 1609847 - DNA, 15 bp, Homo sapiens
gctaacttggctttg

SEQ ID NO: 1609848 - DNA, 15 bp, Homo sapiens
taacttggctttgaa

SEQ ID NO: 1609849 - DNA, 15 bp, Homo sapiens
aacttggctttgaag

SEQ ID NO: 1609850 - DNA, 15 bp, Homo sapiens
acttggctttgaaga

SEQ ID NO: 1609851 - DNA, 15 bp, Homo sapiens
cttggctttgaagaa

SEQ ID NO: 1609852 - DNA, 15 bp, Homo sapiens
ttggctttgaagaaa

SEQ ID NO: 1609853 - DNA, 15 bp, Homo sapiens
tggctttgaagaaaa

SEQ ID NO: 1609854 - DNA, 15 bp, Homo sapiens
ggctttgaagaaaaa

SEQ ID NO: 1609855 - DNA, 15 bp, Homo sapiens
gctttgaagaaaaat

SEQ ID NO: 1609856 - DNA, 15 bp, Homo sapiens
ctttgaagaaaaatc

SEQ ID NO: 1609857 - DNA, 15 bp, Homo sapiens
tttgaagaaaaatca

SEQ ID NO: 1609858 - DNA, 15 bp, Homo sapiens
ttgaagaaaaatcac

SEQ ID NO: 1609859 - DNA, 15 bp, Homo sapiens
tgaagaaaaatcact

SEQ ID NO: 1609860 - DNA, 15 bp, Homo sapiens
gaagaaaaatcactg

SEQ ID NO: 1609861 - DNA, 15 bp, Homo sapiens
aagaaaaatcactgc

SEQ ID NO: 1609862 - DNA, 15 bp, Homo sapiens
agaaaaatcactgca

SEQ ID NO: 1609863 - DNA, 15 bp, Homo sapiens
gaaaaatcactgcaa

SEQ ID NO: 1609864 - DNA, 15 bp, Homo sapiens
aaaaatcactgcaac

SEQ ID NO: 1609865 - DNA, 15 bp, Homo sapiens
aaaatcactgcaaca

SEQ ID NO: 1609866 - DNA, 15 bp, Homo sapiens
aaatcactgcaacat

SEQ ID NO: 1609867 - DNA, 15 bp, Homo sapiens
aatcactgcaacatt

SEQ ID NO: 1609868 - DNA, 15 bp, Homo sapiens
atcactgcaacattt

SEQ ID NO: 1609869 - DNA, 15 bp, Homo sapiens
tcactgcaacatttt

SEQ ID NO: 1609870 - DNA, 15 bp, Homo sapiens
cactgcaacatttta

SEQ ID NO: 1609871 - DNA, 15 bp, Homo sapiens
actgcaacattttat

SEQ ID NO: 1609872 - DNA, 15 bp, Homo sapiens
ctgcaacattttata

SEQ ID NO: 1609873 - DNA, 15 bp, Homo sapiens
tgcaacattttataa

SEQ ID NO: 1609874 - DNA, 15 bp, Homo sapiens
gcaacattttataaa

SEQ ID NO: 1609875 - DNA, 15 bp, Homo sapiens
caacattttataaat

SEQ ID NO: 1609876 - DNA, 15 bp, Homo sapiens
aacattttataaatg

SEQ ID NO: 1609877 - DNA, 15 bp, Homo sapiens
acattttataaatgg

SEQ ID NO: 1609878 - DNA, 15 bp, Homo sapiens
cattttataaatgga

SEQ ID NO: 1609879 - DNA, 15 bp, Homo sapiens
attttataaatggac

SEQ ID NO: 1609880 - DNA, 15 bp, Homo sapiens
ttttataaatggaca

SEQ ID NO: 1609881 - DNA, 15 bp, Homo sapiens
tttataaatggacaa

SEQ ID NO: 1609882 - DNA, 15 bp, Homo sapiens
ttataaatggacaaa

SEQ ID NO: 1609883 - DNA, 15 bp, Homo sapiens
tataaatggacaaac

SEQ ID NO: 1609884 - DNA, 15 bp, Homo sapiens
ataaatggacaaact

SEQ ID NO: 1609885 - DNA, 15 bp, Homo sapiens
taaatggacaaactt

SEQ ID NO: 1609886 - DNA, 15 bp, Homo sapiens
aaatggacaaacttt

SEQ ID NO: 1609887 - DNA, 15 bp, Homo sapiens
aatggacaaactttg

SEQ ID NO: 1609888 - DNA, 15 bp, Homo sapiens
atggacaaactttgc

SEQ ID NO: 1609889 - DNA, 15 bp, Homo sapiens
tggacaaactttgca

SEQ ID NO: 1609890 - DNA, 15 bp, Homo sapiens
ggacaaactttgcac

SEQ ID NO: 1609891 - DNA, 15 bp, Homo sapiens
gacaaactttgcaca

SEQ ID NO: 1609892 - DNA, 15 bp, Homo sapiens
acaaactttgcacac

SEQ ID NO: 1609893 - DNA, 15 bp, Homo sapiens
caaactttgcacaca

SEQ ID NO: 1609894 - DNA, 15 bp, Homo sapiens
aaactttgcacacaa

SEQ ID NO: 1609895 - DNA, 15 bp, Homo sapiens
aactttgcacacaag

SEQ ID NO: 1609896 - DNA, 15 bp, Homo sapiens
actttgcacacaagc

SEQ ID NO: 1609897 - DNA, 15 bp, Homo sapiens
ctttgcacacaagct

SEQ ID NO: 1609898 - DNA, 15 bp, Homo sapiens
tttgcacacaagcta

SEQ ID NO: 1609899 - DNA, 15 bp, Homo sapiens
ttgcacacaagctac

SEQ ID NO: 1609900 - DNA, 15 bp, Homo sapiens
tgcacacaagctaca

SEQ ID NO: 1609901 - DNA, 15 bp, Homo sapiens
gcacacaagctacaa

SEQ ID NO: 1609902 - DNA, 15 bp, Homo sapiens
cacacaagctacaat

SEQ ID NO: 1609903 - DNA, 15 bp, Homo sapiens
acacaagctacaatc

SEQ ID NO: 1609904 - DNA, 15 bp, Homo sapiens
cacaagctacaatcc

SEQ ID NO: 1609905 - DNA, 15 bp, Homo sapiens
acaagctacaatcca

SEQ ID NO: 1609906 - DNA, 15 bp, Homo sapiens
caagctacaatccag

SEQ ID NO: 1609907 - DNA, 15 bp, Homo sapiens
aagctacaatccagg

SEQ ID NO: 1609908 - DNA, 15 bp, Homo sapiens
agctacaatccagga

SEQ ID NO: 1609909 - DNA, 15 bp, Homo sapiens
gctacaatccaggaa

SEQ ID NO: 1609910 - DNA, 15 bp, Homo sapiens
ctacaatccaggaaa

SEQ ID NO: 1609911 - DNA, 15 bp, Homo sapiens
tacaatccaggaaaa

SEQ ID NO: 1609912 - DNA, 15 bp, Homo sapiens
acaatccaggaaaat

SEQ ID NO: 1609913 - DNA, 15 bp, Homo sapiens
caatccaggaaaatc

SEQ ID NO: 1609914 - DNA, 15 bp, Homo sapiens
aatccaggaaaatct

SEQ ID NO: 1609915 - DNA, 15 bp, Homo sapiens
atccaggaaaatctg

SEQ ID NO: 1609916 - DNA, 15 bp, Homo sapiens
tccaggaaaatctgt

SEQ ID NO: 1609917 - DNA, 15 bp, Homo sapiens
ccaggaaaatctgtc

SEQ ID NO: 1609918 - DNA, 15 bp, Homo sapiens
caggaaaatctgtca

SEQ ID NO: 1609919 - DNA, 15 bp, Homo sapiens
aggaaaatctgtcag

SEQ ID NO: 1609920 - DNA, 15 bp, Homo sapiens
ggaaaatctgtcaga

SEQ ID NO: 1609921 - DNA, 15 bp, Homo sapiens
gaaaatctgtcagat

SEQ ID NO: 1609922 - DNA, 15 bp, Homo sapiens
aaaatctgtcagatt

SEQ ID NO: 1609923 - DNA, 15 bp, Homo sapiens
aaatctgtcagattg

SEQ ID NO: 1609924 - DNA, 15 bp, Homo sapiens
aatctgtcagattgc

SEQ ID NO: 1609925 - DNA, 15 bp, Homo sapiens
atctgtcagattgct

SEQ ID NO: 1609926 - DNA, 15 bp, Homo sapiens
tctgtcagattgcta

SEQ ID NO: 1609927 - DNA, 15 bp, Homo sapiens
ctgtcagattgctac

SEQ ID NO: 1609928 - DNA, 15 bp, Homo sapiens
tgtcagattgctact

SEQ ID NO: 1609929 - DNA, 15 bp, Homo sapiens
gtcagattgctactg

SEQ ID NO: 1609930 - DNA, 15 bp, Homo sapiens
tcagattgctactga

SEQ ID NO: 1609931 - DNA, 15 bp, Homo sapiens
cagattgctactgat

SEQ ID NO: 1609932 - DNA, 15 bp, Homo sapiens
agattgctactgata

SEQ ID NO: 1609933 - DNA, 15 bp, Homo sapiens
gattgctactgatat

SEQ ID NO: 1609934 - DNA, 15 bp, Homo sapiens
attgctactgatatt

SEQ ID NO: 1609935 - DNA, 15 bp, Homo sapiens
ttgctactgatattc

SEQ ID NO: 1609936 - DNA, 15 bp, Homo sapiens
tgctactgatattct

SEQ ID NO: 1609937 - DNA, 15 bp, Homo sapiens
gctactgatattctc

SEQ ID NO: 1609938 - DNA, 15 bp, Homo sapiens
ctactgatattctca

SEQ ID NO: 1609939 - DNA, 15 bp, Homo sapiens
tactgatattctcag

SEQ ID NO: 1609940 - DNA, 15 bp, Homo sapiens
actgatattctcagc

SEQ ID NO: 1609941 - DNA, 15 bp, Homo sapiens
ctgatattctcagct

SEQ ID NO: 1609942 - DNA, 15 bp, Homo sapiens
tgatattctcagctg

SEQ ID NO: 1609943 - DNA, 15 bp, Homo sapiens
gatattctcagctgt

SEQ ID NO: 1609944 - DNA, 15 bp, Homo sapiens
atattctcagctgtc

SEQ ID NO: 1609945 - DNA, 15 bp, Homo sapiens
tattctcagctgtcc

SEQ ID NO: 1609946 - DNA, 15 bp, Homo sapiens
attctcagctgtcct

SEQ ID NO: 1609947 - DNA, 15 bp, Homo sapiens
ttctcagctgtcctg

SEQ ID NO: 1609948 - DNA, 15 bp, Homo sapiens
tctcagctgtcctgc

SEQ ID NO: 1609949 - DNA, 15 bp, Homo sapiens
ctcagctgtcctgca

SEQ ID NO: 1609950 - DNA, 15 bp, Homo sapiens
tcagctgtcctgcag

SEQ ID NO: 1609951 - DNA, 15 bp, Homo sapiens
cagctgtcctgcaga

SEQ ID NO: 1609952 - DNA, 15 bp, Homo sapiens
agctgtcctgcagac

SEQ ID NO: 1609953 - DNA, 15 bp, Homo sapiens
gctgtcctgcagact

SEQ ID NO: 1609954 - DNA, 15 bp, Homo sapiens
ctgtcctgcagactt

SEQ ID NO: 1609955 - DNA, 15 bp, Homo sapiens
tgtcctgcagacttt

SEQ ID NO: 1609956 - DNA, 15 bp, Homo sapiens
gtcctgcagacttta

SEQ ID NO: 1609957 - DNA, 15 bp, Homo sapiens
tcctgcagactttag

SEQ ID NO: 1609958 - DNA, 15 bp, Homo sapiens
cctgcagactttaga

SEQ ID NO: 1609959 - DNA, 15 bp, Homo sapiens
ctgcagactttagaa

SEQ ID NO: 1609960 - DNA, 15 bp, Homo sapiens
tgcagactttagaag

SEQ ID NO: 1609961 - DNA, 15 bp, Homo sapiens
gcagactttagaaga

SEQ ID NO: 1609962 - DNA, 15 bp, Homo sapiens
cagactttagaagaa

SEQ ID NO: 1609963 - DNA, 15 bp, Homo sapiens
agactttagaagaaa

SEQ ID NO: 1609964 - DNA, 15 bp, Homo sapiens
gactttagaagaaac

SEQ ID NO: 1609965 - DNA, 15 bp, Homo sapiens
actttagaagaaact

SEQ ID NO: 1609966 - DNA, 15 bp, Homo sapiens
ctttagaagaaacta

SEQ ID NO: 1609967 - DNA, 15 bp, Homo sapiens
tttagaagaaactag

SEQ ID NO: 1609968 - DNA, 15 bp, Homo sapiens
ttagaagaaactagt

SEQ ID NO: 1609969 - DNA, 15 bp, Homo sapiens
tagaagaaactagtt

SEQ ID NO: 1609970 - DNA, 15 bp, Homo sapiens
agaagaaactagttt

SEQ ID NO: 1609971 - DNA, 15 bp, Homo sapiens
gaagaaactagtttg

SEQ ID NO: 1609972 - DNA, 15 bp, Homo sapiens
aagaaactagtttgt

SEQ ID NO: 1609973 - DNA, 15 bp, Homo sapiens
agaaactagtttgta

SEQ ID NO: 1609974 - DNA, 15 bp, Homo sapiens
gaaactagtttgtaa

SEQ ID NO: 1609975 - DNA, 15 bp, Homo sapiens
aaactagtttgtaaa

SEQ ID NO: 1609976 - DNA, 15 bp, Homo sapiens
aactagtttgtaaac

SEQ ID NO: 1609977 - DNA, 15 bp, Homo sapiens
actagtttgtaaact

SEQ ID NO: 1609978 - DNA, 15 bp, Homo sapiens
ctagtttgtaaacta

SEQ ID NO: 1609979 - DNA, 15 bp, Homo sapiens
tagtttgtaaactac

SEQ ID NO: 1609980 - DNA, 15 bp, Homo sapiens
agtttgtaaactact

SEQ ID NO: 1609981 - DNA, 15 bp, Homo sapiens
gtttgtaaactactc

SEQ ID NO: 1609982 - DNA, 15 bp, Homo sapiens
tttgtaaactactcc

SEQ ID NO: 1609983 - DNA, 15 bp, Homo sapiens
ttgtaaactactcca

SEQ ID NO: 1609984 - DNA, 15 bp, Homo sapiens
tgtaaactactccaa

SEQ ID NO: 1609985 - DNA, 15 bp, Homo sapiens
gtaaactactccaaa

SEQ ID NO: 1609986 - DNA, 15 bp, Homo sapiens
taaactactccaaag

SEQ ID NO: 1609987 - DNA, 15 bp, Homo sapiens
aaactactccaaaga

SEQ ID NO: 1609988 - DNA, 15 bp, Homo sapiens
aactactccaaagat

SEQ ID NO: 1609989 - DNA, 15 bp, Homo sapiens
actactccaaagatt

SEQ ID NO: 1609990 - DNA, 15 bp, Homo sapiens
ctactccaaagatta

SEQ ID NO: 1609991 - DNA, 15 bp, Homo sapiens
tactccaaagattaa

SEQ ID NO: 1609992 - DNA, 15 bp, Homo sapiens
actccaaagattaac

SEQ ID NO: 1609993 - DNA, 15 bp, Homo sapiens
ctccaaagattaacc

SEQ ID NO: 1609994 - DNA, 15 bp, Homo sapiens
tccaaagattaacct

SEQ ID NO: 1609995 - DNA, 15 bp, Homo sapiens
ccaaagattaacctt

SEQ ID NO: 1609996 - DNA, 15 bp, Homo sapiens
caaagattaaccttt

SEQ ID NO: 1609997 - DNA, 15 bp, Homo sapiens
aaagattaacctttg

SEQ ID NO: 1609998 - DNA, 15 bp, Homo sapiens
aagattaacctttgt

SEQ ID NO: 1609999 - DNA, 15 bp, Homo sapiens
agattaacctttgtt

SEQ ID NO: 1610000 - DNA, 15 bp, Homo sapiens
gattaacctttgttt

SEQ ID NO: 1610001 - DNA, 15 bp, Homo sapiens
attaacctttgtttt

SEQ ID NO: 1610002 - DNA, 15 bp, Homo sapiens
ttaacctttgttttt

SEQ ID NO: 1610003 - DNA, 15 bp, Homo sapiens
taacctttgtttttc

SEQ ID NO: 1610004 - DNA, 15 bp, Homo sapiens
aacctttgtttttct

SEQ ID NO: 1610005 - DNA, 15 bp, Homo sapiens
acctttgtttttctt

SEQ ID NO: 1610006 - DNA, 15 bp, Homo sapiens
cctttgtttttcttc

SEQ ID NO: 1610007 - DNA, 15 bp, Homo sapiens
ctttgtttttcttcc

SEQ ID NO: 1610008 - DNA, 15 bp, Homo sapiens
tttgtttttcttcca

SEQ ID NO: 1610009 - DNA, 15 bp, Homo sapiens
ttgtttttcttccaa

SEQ ID NO: 1610010 - DNA, 15 bp, Homo sapiens
tgtttttcttccaat

SEQ ID NO: 1610011 - DNA, 15 bp, Homo sapiens
gtttttcttccaatt

SEQ ID NO: 1610012 - DNA, 15 bp, Homo sapiens
tttttcttccaattc

SEQ ID NO: 1610013 - DNA, 15 bp, Homo sapiens
ttttcttccaattct

SEQ ID NO: 1610014 - DNA, 15 bp, Homo sapiens
tttcttccaattctg

SEQ ID NO: 1610015 - DNA, 15 bp, Homo sapiens
ttcttccaattctgt

SEQ ID NO: 1610016 - DNA, 15 bp, Homo sapiens
tcttccaattctgta

SEQ ID NO: 1610017 - DNA, 15 bp, Homo sapiens
cttccaattctgtaa

SEQ ID NO: 1610018 - DNA, 15 bp, Homo sapiens
ttccaattctgtaaa

SEQ ID NO: 1610019 - DNA, 15 bp, Homo sapiens
tccaattctgtaaaa

SEQ ID NO: 1610020 - DNA, 15 bp, Homo sapiens
attctgtaaaaaatg

SEQ ID NO: 1610021 - DNA, 15 bp, Homo sapiens
ttctgtaaaaaatgg

SEQ ID NO: 1610022 - DNA, 15 bp, Homo sapiens
tctgtaaaaaatggc

SEQ ID NO: 1610023 - DNA, 15 bp, Homo sapiens
ctgtaaaaaatggct

SEQ ID NO: 1610024 - DNA, 15 bp, Homo sapiens
tgtaaaaaatggctc

SEQ ID NO: 1610025 - DNA, 15 bp, Homo sapiens
gtaaaaaatggctct

SEQ ID NO: 1610026 - DNA, 15 bp, Homo sapiens
taaaaaatggctctt

SEQ ID NO: 1610027 - DNA, 15 bp, Homo sapiens
aaaaaatggctctta

SEQ ID NO: 1610028 - DNA, 15 bp, Homo sapiens
aaaaatggctcttac

SEQ ID NO: 1610029 - DNA, 15 bp, Homo sapiens
aaaatggctcttact

SEQ ID NO: 1610030 - DNA, 15 bp, Homo sapiens
aaatggctcttactg

SEQ ID NO: 1610031 - DNA, 15 bp, Homo sapiens
aatggctcttactgt

SEQ ID NO: 1610032 - DNA, 15 bp, Homo sapiens
atggctcttactgta

SEQ ID NO: 1610033 - DNA, 15 bp, Homo sapiens
tggctcttactgtag

SEQ ID NO: 1610034 - DNA, 15 bp, Homo sapiens
ggctcttactgtaga

SEQ ID NO: 1610035 - DNA, 15 bp, Homo sapiens
gctcttactgtagat

SEQ ID NO: 1610036 - DNA, 15 bp, Homo sapiens
ctcttactgtagatc

SEQ ID NO: 1610037 - DNA, 15 bp, Homo sapiens
tcttactgtagatct

SEQ ID NO: 1610038 - DNA, 15 bp, Homo sapiens
cttactgtagatctt

SEQ ID NO: 1610039 - DNA, 15 bp, Homo sapiens
ttactgtagatcttt

SEQ ID NO: 1610040 - DNA, 15 bp, Homo sapiens
tactgtagatctttt

SEQ ID NO: 1610041 - DNA, 15 bp, Homo sapiens
actgtagatcttttt

SEQ ID NO: 1610042 - DNA, 15 bp, Homo sapiens
ctgtagatctttttg

SEQ ID NO: 1610043 - DNA, 15 bp, Homo sapiens
tgtagatctttttgt

SEQ ID NO: 1610044 - DNA, 15 bp, Homo sapiens
gtagatctttttgtc

SEQ ID NO: 1610045 - DNA, 15 bp, Homo sapiens
tagatctttttgtct

SEQ ID NO: 1610046 - DNA, 15 bp, Homo sapiens
agatctttttgtctg

SEQ ID NO: 1610047 - DNA, 15 bp, Homo sapiens
gatctttttgtctgc

SEQ ID NO: 1610048 - DNA, 15 bp, Homo sapiens
atctttttgtctgca

SEQ ID NO: 1610049 - DNA, 15 bp, Homo sapiens
tctttttgtctgcat

SEQ ID NO: 1610050 - DNA, 15 bp, Homo sapiens
ctttttgtctgcatt

SEQ ID NO: 1610051 - DNA, 15 bp, Homo sapiens
tttttgtctgcatta

SEQ ID NO: 1610052 - DNA, 15 bp, Homo sapiens
ttttgtctgcattat

SEQ ID NO: 1610053 - DNA, 15 bp, Homo sapiens
tttgtctgcattata

SEQ ID NO: 1610054 - DNA, 15 bp, Homo sapiens
ttgtctgcattatat

SEQ ID NO: 1610055 - DNA, 15 bp, Homo sapiens
tgtctgcattatata

SEQ ID NO: 1610056 - DNA, 15 bp, Homo sapiens
gtctgcattatatat

SEQ ID NO: 1610057 - DNA, 15 bp, Homo sapiens
tctgcattatatata

SEQ ID NO: 1610058 - DNA, 15 bp, Homo sapiens
ctgcattatatatag

SEQ ID NO: 1610059 - DNA, 15 bp, Homo sapiens
tgcattatatataga

SEQ ID NO: 1610060 - DNA, 15 bp, Homo sapiens
gcattatatatagag

SEQ ID NO: 1610061 - DNA, 15 bp, Homo sapiens
cattatatatagagt

SEQ ID NO: 1610062 - DNA, 15 bp, Homo sapiens
attatatatagagtc

SEQ ID NO: 1610063 - DNA, 15 bp, Homo sapiens
ttatatatagagtca

SEQ ID NO: 1610064 - DNA, 15 bp, Homo sapiens
tatatatagagtcat

SEQ ID NO: 1610065 - DNA, 15 bp, Homo sapiens
atatatagagtcata

SEQ ID NO: 1610066 - DNA, 15 bp, Homo sapiens
tatatagagtcatag

SEQ ID NO: 1610067 - DNA, 15 bp, Homo sapiens
atatagagtcatagc

SEQ ID NO: 1610068 - DNA, 15 bp, Homo sapiens
tatagagtcatagct

SEQ ID NO: 1610069 - DNA, 15 bp, Homo sapiens
atagagtcatagctt

SEQ ID NO: 1610070 - DNA, 15 bp, Homo sapiens
tagagtcatagcttt

SEQ ID NO: 1610071 - DNA, 15 bp, Homo sapiens
agagtcatagcttta

SEQ ID NO: 1610072 - DNA, 15 bp, Homo sapiens
gagtcatagctttaa

SEQ ID NO: 1610073 - DNA, 15 bp, Homo sapiens
agtcatagctttaag

SEQ ID NO: 1610074 - DNA, 15 bp, Homo sapiens
gtcatagctttaaga

SEQ ID NO: 1610075 - DNA, 15 bp, Homo sapiens
tcatagctttaagat

SEQ ID NO: 1610076 - DNA, 15 bp, Homo sapiens
catagctttaagatc

SEQ ID NO: 1610077 - DNA, 15 bp, Homo sapiens
atagctttaagatcc

SEQ ID NO: 1610078 - DNA, 15 bp, Homo sapiens
tagctttaagatccc

SEQ ID NO: 1610079 - DNA, 15 bp, Homo sapiens
agctttaagatccca

SEQ ID NO: 1610080 - DNA, 15 bp, Homo sapiens
gctttaagatcccat

SEQ ID NO: 1610081 - DNA, 15 bp, Homo sapiens
ctttaagatcccatc

SEQ ID NO: 1610082 - DNA, 15 bp, Homo sapiens
tttaagatcccatct

SEQ ID NO: 1610083 - DNA, 15 bp, Homo sapiens
ttaagatcccatcta

SEQ ID NO: 1610084 - DNA, 15 bp, Homo sapiens
taagatcccatctac

SEQ ID NO: 1610085 - DNA, 15 bp, Homo sapiens
aagatcccatctaca

SEQ ID NO: 1610086 - DNA, 15 bp, Homo sapiens
agatcccatctacaa

SEQ ID NO: 1610087 - DNA, 15 bp, Homo sapiens
gatcccatctacaaa

SEQ ID NO: 1610088 - DNA, 15 bp, Homo sapiens
atcccatctacaaag

SEQ ID NO: 1610089 - DNA, 15 bp, Homo sapiens
tcccatctacaaagc

SEQ ID NO: 1610090 - DNA, 15 bp, Homo sapiens
cccatctacaaagcc

SEQ ID NO: 1610091 - DNA, 15 bp, Homo sapiens
ccatctacaaagcca

SEQ ID NO: 1610092 - DNA, 15 bp, Homo sapiens
catctacaaagccat

SEQ ID NO: 1610093 - DNA, 15 bp, Homo sapiens
atctacaaagccatc

SEQ ID NO: 1610094 - DNA, 15 bp, Homo sapiens
tctacaaagccatct

SEQ ID NO: 1610095 - DNA, 15 bp, Homo sapiens
ctacaaagccatctc

SEQ ID NO: 1610096 - DNA, 15 bp, Homo sapiens
tacaaagccatctcc

SEQ ID NO: 1610097 - DNA, 15 bp, Homo sapiens
acaaagccatctcct

SEQ ID NO: 1610098 - DNA, 15 bp, Homo sapiens
caaagccatctcctg

SEQ ID NO: 1610099 - DNA, 15 bp, Homo sapiens
aaagccatctcctga

SEQ ID NO: 1610100 - DNA, 15 bp, Homo sapiens
aagccatctcctgat

SEQ ID NO: 1610101 - DNA, 15 bp, Homo sapiens
agccatctcctgata

SEQ ID NO: 1610102 - DNA, 15 bp, Homo sapiens
gccatctcctgatat

SEQ ID NO: 1610103 - DNA, 15 bp, Homo sapiens
ccatctcctgatata

SEQ ID NO: 1610104 - DNA, 15 bp, Homo sapiens
catctcctgatataa

SEQ ID NO: 1610105 - DNA, 15 bp, Homo sapiens
atctcctgatataag

SEQ ID NO: 1610106 - DNA, 15 bp, Homo sapiens
tctcctgatataaga

SEQ ID NO: 1610107 - DNA, 15 bp, Homo sapiens
ctcctgatataagac

SEQ ID NO: 1610108 - DNA, 15 bp, Homo sapiens
tcctgatataagaca

SEQ ID NO: 1610109 - DNA, 15 bp, Homo sapiens
cctgatataagacaa

SEQ ID NO: 1610110 - DNA, 15 bp, Homo sapiens
ctgatataagacaaa

SEQ ID NO: 1610111 - DNA, 15 bp, Homo sapiens
tgatataagacaaaa

SEQ ID NO: 1610112 - DNA, 15 bp, Homo sapiens
gatataagacaaaac

SEQ ID NO: 1610113 - DNA, 15 bp, Homo sapiens
atataagacaaaact

SEQ ID NO: 1610114 - DNA, 15 bp, Homo sapiens
tataagacaaaactg

SEQ ID NO: 1610115 - DNA, 15 bp, Homo sapiens
ataagacaaaactgg

SEQ ID NO: 1610116 - DNA, 15 bp, Homo sapiens
taagacaaaactggc

SEQ ID NO: 1610117 - DNA, 15 bp, Homo sapiens
aagacaaaactggcc

SEQ ID NO: 1610118 - DNA, 15 bp, Homo sapiens
agacaaaactggcct

SEQ ID NO: 1610119 - DNA, 15 bp, Homo sapiens
gacaaaactggcctt

SEQ ID NO: 1610120 - DNA, 15 bp, Homo sapiens
acaaaactggccttt

SEQ ID NO: 1610121 - DNA, 15 bp, Homo sapiens
caaaactggcctttt

SEQ ID NO: 1610122 - DNA, 15 bp, Homo sapiens
aaaactggccttttc

SEQ ID NO: 1610123 - DNA, 15 bp, Homo sapiens
aaactggccttttcc

SEQ ID NO: 1610124 - DNA, 15 bp, Homo sapiens
aactggccttttccc

SEQ ID NO: 1610125 - DNA, 15 bp, Homo sapiens
actggccttttccca

SEQ ID NO: 1610126 - DNA, 15 bp, Homo sapiens
ctggccttttcccag

SEQ ID NO: 1610127 - DNA, 15 bp, Homo sapiens
tggccttttcccaga

SEQ ID NO: 1610128 - DNA, 15 bp, Homo sapiens
ggccttttcccagaa

SEQ ID NO: 1610129 - DNA, 15 bp, Homo sapiens
gccttttcccagaag

SEQ ID NO: 1610130 - DNA, 15 bp, Homo sapiens
ccttttcccagaagt

SEQ ID NO: 1610131 - DNA, 15 bp, Homo sapiens
cttttcccagaagtg

SEQ ID NO: 1610132 - DNA, 15 bp, Homo sapiens
ttttcccagaagtga

SEQ ID NO: 1610133 - DNA, 15 bp, Homo sapiens
tttcccagaagtgag

SEQ ID NO: 1610134 - DNA, 15 bp, Homo sapiens
ttcccagaagtgaga

SEQ ID NO: 1610135 - DNA, 15 bp, Homo sapiens
tcccagaagtgagaa

SEQ ID NO: 1610136 - DNA, 15 bp, Homo sapiens
cccagaagtgagaag

SEQ ID NO: 1610137 - DNA, 15 bp, Homo sapiens
ccagaagtgagaaga

SEQ ID NO: 1610138 - DNA, 15 bp, Homo sapiens
cagaagtgagaagac

SEQ ID NO: 1610139 - DNA, 15 bp, Homo sapiens
agaagtgagaagact

SEQ ID NO: 1610140 - DNA, 15 bp, Homo sapiens
gaagtgagaagacta

SEQ ID NO: 1610141 - DNA, 15 bp, Homo sapiens
aagtgagaagactaa

SEQ ID NO: 1610142 - DNA, 15 bp, Homo sapiens
agtgagaagactaat

SEQ ID NO: 1610143 - DNA, 15 bp, Homo sapiens
gtgagaagactaatt

SEQ ID NO: 1610144 - DNA, 15 bp, Homo sapiens
tgagaagactaatta

SEQ ID NO: 1610145 - DNA, 15 bp, Homo sapiens
gagaagactaattag

SEQ ID NO: 1610146 - DNA, 15 bp, Homo sapiens
agaagactaattaga

SEQ ID NO: 1610147 - DNA, 15 bp, Homo sapiens
gaagactaattagac

SEQ ID NO: 1610148 - DNA, 15 bp, Homo sapiens
aagactaattagact

SEQ ID NO: 1610149 - DNA, 15 bp, Homo sapiens
agactaattagactg

SEQ ID NO: 1610150 - DNA, 15 bp, Homo sapiens
gactaattagactgg

SEQ ID NO: 1610151 - DNA, 15 bp, Homo sapiens
actaattagactggc

SEQ ID NO: 1610152 - DNA, 15 bp, Homo sapiens
ctaattagactggcc

SEQ ID NO: 1610153 - DNA, 15 bp, Homo sapiens
taattagactggcct

SEQ ID NO: 1610154 - DNA, 15 bp, Homo sapiens
aattagactggcctt

SEQ ID NO: 1610155 - DNA, 15 bp, Homo sapiens
attagactggccttt

SEQ ID NO: 1610156 - DNA, 15 bp, Homo sapiens
ttagactggcctttt

SEQ ID NO: 1610157 - DNA, 15 bp, Homo sapiens
tagactggccttttc

SEQ ID NO: 1610158 - DNA, 15 bp, Homo sapiens
agactggccttttcc

SEQ ID NO: 1610159 - DNA, 15 bp, Homo sapiens
gactggccttttccc

SEQ ID NO: 1610160 - DNA, 15 bp, Homo sapiens
gaagtgagaagactg

SEQ ID NO: 1610161 - DNA, 15 bp, Homo sapiens
aagtgagaagactgg

SEQ ID NO: 1610162 - DNA, 15 bp, Homo sapiens
agtgagaagactggt

SEQ ID NO: 1610163 - DNA, 15 bp, Homo sapiens
gtgagaagactggtt

SEQ ID NO: 1610164 - DNA, 15 bp, Homo sapiens
tgagaagactggttt

SEQ ID NO: 1610165 - DNA, 15 bp, Homo sapiens
gagaagactggttta

SEQ ID NO: 1610166 - DNA, 15 bp, Homo sapiens
agaagactggtttaa

SEQ ID NO: 1610167 - DNA, 15 bp, Homo sapiens
gaagactggtttaat

SEQ ID NO: 1610168 - DNA, 15 bp, Homo sapiens
aagactggtttaatg

SEQ ID NO: 1610169 - DNA, 15 bp, Homo sapiens
agactggtttaatga

SEQ ID NO: 1610170 - DNA, 15 bp, Homo sapiens
gactggtttaatgag

SEQ ID NO: 1610171 - DNA, 15 bp, Homo sapiens
actggtttaatgaga

SEQ ID NO: 1610172 - DNA, 15 bp, Homo sapiens
ctggtttaatgagat

SEQ ID NO: 1610173 - DNA, 15 bp, Homo sapiens
tggtttaatgagatc

SEQ ID NO: 1610174 - DNA, 15 bp, Homo sapiens
ggtttaatgagatcc

SEQ ID NO: 1610175 - DNA, 15 bp, Homo sapiens
gtttaatgagatcct

SEQ ID NO: 1610176 - DNA, 15 bp, Homo sapiens
tttaatgagatcctt

SEQ ID NO: 1610177 - DNA, 15 bp, Homo sapiens
ttaatgagatccttt

SEQ ID NO: 1610178 - DNA, 15 bp, Homo sapiens
taatgagatcctttg

SEQ ID NO: 1610179 - DNA, 15 bp, Homo sapiens
aatgagatcctttgc

SEQ ID NO: 1610180 - DNA, 15 bp, Homo sapiens
atgagatcctttgcc

SEQ ID NO: 1610181 - DNA, 15 bp, Homo sapiens
tgagatcctttgcca

SEQ ID NO: 1610182 - DNA, 15 bp, Homo sapiens
gagatcctttgccat

SEQ ID NO: 1610183 - DNA, 15 bp, Homo sapiens
agatcctttgccatt

SEQ ID NO: 1610184 - DNA, 15 bp, Homo sapiens
gatcctttgccattc

SEQ ID NO: 1610185 - DNA, 15 bp, Homo sapiens
atcctttgccattca

SEQ ID NO: 1610186 - DNA, 15 bp, Homo sapiens
tcctttgccattcag

SEQ ID NO: 1610187 - DNA, 15 bp, Homo sapiens
cctttgccattcagc

SEQ ID NO: 1610188 - DNA, 15 bp, Homo sapiens
ctttgccattcagct

SEQ ID NO: 1610189 - DNA, 15 bp, Homo sapiens
tttgccattcagcta

SEQ ID NO: 1610190 - DNA, 15 bp, Homo sapiens
ttgccattcagctac

SEQ ID NO: 1610191 - DNA, 15 bp, Homo sapiens
tgccattcagctact

SEQ ID NO: 1610192 - DNA, 15 bp, Homo sapiens
gccattcagctacta

SEQ ID NO: 1610193 - DNA, 15 bp, Homo sapiens
ccattcagctactaa

SEQ ID NO: 1610194 - DNA, 15 bp, Homo sapiens
cattcagctactaac

SEQ ID NO: 1610195 - DNA, 15 bp, Homo sapiens
attcagctactaact

SEQ ID NO: 1610196 - DNA, 15 bp, Homo sapiens
ttcagctactaactc

SEQ ID NO: 1610197 - DNA, 15 bp, Homo sapiens
tcagctactaactca

SEQ ID NO: 1610198 - DNA, 15 bp, Homo sapiens
cagctactaactcag

SEQ ID NO: 1610199 - DNA, 15 bp, Homo sapiens
agctactaactcagt

SEQ ID NO: 1610200 - DNA, 15 bp, Homo sapiens
gctactaactcagtt

SEQ ID NO: 1610201 - DNA, 15 bp, Homo sapiens
ctactaactcagttt

SEQ ID NO: 1610202 - DNA, 15 bp, Homo sapiens
tactaactcagtttt

SEQ ID NO: 1610203 - DNA, 15 bp, Homo sapiens
actaactcagttttt

SEQ ID NO: 1610204 - DNA, 15 bp, Homo sapiens
ctaactcagtttttc

SEQ ID NO: 1610205 - DNA, 15 bp, Homo sapiens
taactcagtttttct

SEQ ID NO: 1610206 - DNA, 15 bp, Homo sapiens
aactcagtttttctc

SEQ ID NO: 1610207 - DNA, 15 bp, Homo sapiens
actcagtttttctct

SEQ ID NO: 1610208 - DNA, 15 bp, Homo sapiens
ctcagtttttctctc

SEQ ID NO: 1610209 - DNA, 15 bp, Homo sapiens
tcagtttttctctct

SEQ ID NO: 1610210 - DNA, 15 bp, Homo sapiens
cagtttttctctcta

SEQ ID NO: 1610211 - DNA, 15 bp, Homo sapiens
agtttttctctctac

SEQ ID NO: 1610212 - DNA, 15 bp, Homo sapiens
gtttttctctctaca

SEQ ID NO: 1610213 - DNA, 15 bp, Homo sapiens
tttttctctctacaa

SEQ ID NO: 1610214 - DNA, 15 bp, Homo sapiens
ttttctctctacaac

SEQ ID NO: 1610215 - DNA, 15 bp, Homo sapiens
tttctctctacaact

SEQ ID NO: 1610216 - DNA, 15 bp, Homo sapiens
ttctctctacaacta

SEQ ID NO: 1610217 - DNA, 15 bp, Homo sapiens
tctctctacaactac

SEQ ID NO: 1610218 - DNA, 15 bp, Homo sapiens
ctctctacaactacc

SEQ ID NO: 1610219 - DNA, 15 bp, Homo sapiens
tctctacaactacca

SEQ ID NO: 1610220 - DNA, 15 bp, Homo sapiens
ctctacaactaccaa

SEQ ID NO: 1610221 - DNA, 15 bp, Homo sapiens
tctacaactaccaac

SEQ ID NO: 1610222 - DNA, 15 bp, Homo sapiens
ctacaactaccaact

SEQ ID NO: 1610223 - DNA, 15 bp, Homo sapiens
tacaactaccaactc

SEQ ID NO: 1610224 - DNA, 15 bp, Homo sapiens
acaactaccaactca

SEQ ID NO: 1610225 - DNA, 15 bp, Homo sapiens
caactaccaactcaa

SEQ ID NO: 1610226 - DNA, 15 bp, Homo sapiens
aactaccaactcaac

SEQ ID NO: 1610227 - DNA, 15 bp, Homo sapiens
actaccaactcaact

SEQ ID NO: 1610228 - DNA, 15 bp, Homo sapiens
ctaccaactcaactt

SEQ ID NO: 1610229 - DNA, 15 bp, Homo sapiens
taccaactcaacttt

SEQ ID NO: 1610230 - DNA, 15 bp, Homo sapiens
accaactcaactttt

SEQ ID NO: 1610231 - DNA, 15 bp, Homo sapiens
ccaactcaacttttt

SEQ ID NO: 1610232 - DNA, 15 bp, Homo sapiens
caactcaactttttg

SEQ ID NO: 1610233 - DNA, 15 bp, Homo sapiens
aactcaactttttgt

SEQ ID NO: 1610234 - DNA, 15 bp, Homo sapiens
actcaactttttgtg

SEQ ID NO: 1610235 - DNA, 15 bp, Homo sapiens
ctcaactttttgtgt

SEQ ID NO: 1610236 - DNA, 15 bp, Homo sapiens
tcaactttttgtgta

SEQ ID NO: 1610237 - DNA, 15 bp, Homo sapiens
caactttttgtgtat

SEQ ID NO: 1610238 - DNA, 15 bp, Homo sapiens
aactttttgtgtatg

SEQ ID NO: 1610239 - DNA, 15 bp, Homo sapiens
actttttgtgtatga

SEQ ID NO: 1610240 - DNA, 15 bp, Homo sapiens
ctttttgtgtatgaa

SEQ ID NO: 1610241 - DNA, 15 bp, Homo sapiens
tttttgtgtatgaaa

SEQ ID NO: 1610242 - DNA, 15 bp, Homo sapiens
ttttgtgtatgaaac

SEQ ID NO: 1610243 - DNA, 15 bp, Homo sapiens
tttgtgtatgaaaca

SEQ ID NO: 1610244 - DNA, 15 bp, Homo sapiens
ttgtgtatgaaacat

SEQ ID NO: 1610245 - DNA, 15 bp, Homo sapiens
tgtgtatgaaacatt

SEQ ID NO: 1610246 - DNA, 15 bp, Homo sapiens
gtgtatgaaacatta

SEQ ID NO: 1610247 - DNA, 15 bp, Homo sapiens
tgtatgaaacattag

SEQ ID NO: 1610248 - DNA, 15 bp, Homo sapiens
gtatgaaacattaga

SEQ ID NO: 1610249 - DNA, 15 bp, Homo sapiens
tatgaaacattagaa

SEQ ID NO: 1610250 - DNA, 15 bp, Homo sapiens
atgaaacattagaaa

SEQ ID NO: 1610251 - DNA, 15 bp, Homo sapiens
tgaaacattagaaaa

SEQ ID NO: 1610252 - DNA, 15 bp, Homo sapiens
gaaacattagaaaag

SEQ ID NO: 1610253 - DNA, 15 bp, Homo sapiens
aaacattagaaaagt

SEQ ID NO: 1610254 - DNA, 15 bp, Homo sapiens
aacattagaaaagtt

SEQ ID NO: 1610255 - DNA, 15 bp, Homo sapiens
acattagaaaagttt

SEQ ID NO: 1610256 - DNA, 15 bp, Homo sapiens
cattagaaaagtttc

SEQ ID NO: 1610257 - DNA, 15 bp, Homo sapiens
attagaaaagtttca

SEQ ID NO: 1610258 - DNA, 15 bp, Homo sapiens
ttagaaaagtttcaa

SEQ ID NO: 1610259 - DNA, 15 bp, Homo sapiens
tagaaaagtttcaaa

SEQ ID NO: 1610260 - DNA, 15 bp, Homo sapiens
agaaaagtttcaaac

SEQ ID NO: 1610261 - DNA, 15 bp, Homo sapiens
gaaaagtttcaaaca

SEQ ID NO: 1610262 - DNA, 15 bp, Homo sapiens
aaaagtttcaaacag

SEQ ID NO: 1610263 - DNA, 15 bp, Homo sapiens
aaagtttcaaacagg

SEQ ID NO: 1610264 - DNA, 15 bp, Homo sapiens
aagtttcaaacaggg

SEQ ID NO: 1610265 - DNA, 15 bp, Homo sapiens
agtttcaaacagggg

SEQ ID NO: 1610266 - DNA, 15 bp, Homo sapiens
gtttcaaacagggga

SEQ ID NO: 1610267 - DNA, 15 bp, Homo sapiens
tttcaaacaggggaa

SEQ ID NO: 1610268 - DNA, 15 bp, Homo sapiens
ttcaaacaggggaat

SEQ ID NO: 1610269 - DNA, 15 bp, Homo sapiens
tcaaacaggggaatt

SEQ ID NO: 1610270 - DNA, 15 bp, Homo sapiens
caaacaggggaatta

SEQ ID NO: 1610271 - DNA, 15 bp, Homo sapiens
aaacaggggaattac

SEQ ID NO: 1610272 - DNA, 15 bp, Homo sapiens
aacaggggaattact

SEQ ID NO: 1610273 - DNA, 15 bp, Homo sapiens
acaggggaattactg

SEQ ID NO: 1610274 - DNA, 15 bp, Homo sapiens
caggggaattactgg

SEQ ID NO: 1610275 - DNA, 15 bp, Homo sapiens
aggggaattactggg

SEQ ID NO: 1610276 - DNA, 15 bp, Homo sapiens
ggggaattactgggg

SEQ ID NO: 1610277 - DNA, 15 bp, Homo sapiens
gggaattactggggc

SEQ ID NO: 1610278 - DNA, 15 bp, Homo sapiens
ggaattactggggct

SEQ ID NO: 1610279 - DNA, 15 bp, Homo sapiens
gaattactggggctc

SEQ ID NO: 1610280 - DNA, 15 bp, Homo sapiens
aattactggggctca

SEQ ID NO: 1610281 - DNA, 15 bp, Homo sapiens
attactggggctcag

SEQ ID NO: 1610282 - DNA, 15 bp, Homo sapiens
ttactggggctcaga

SEQ ID NO: 1610283 - DNA, 15 bp, Homo sapiens
tactggggctcagaa

SEQ ID NO: 1610284 - DNA, 15 bp, Homo sapiens
actggggctcagaaa

SEQ ID NO: 1610285 - DNA, 15 bp, Homo sapiens
ctggggctcagaaaa

SEQ ID NO: 1610286 - DNA, 15 bp, Homo sapiens
tggggctcagaaaag

SEQ ID NO: 1610287 - DNA, 15 bp, Homo sapiens
ggggctcagaaaagg

SEQ ID NO: 1610288 - DNA, 15 bp, Homo sapiens
gggctcagaaaagga

SEQ ID NO: 1610289 - DNA, 15 bp, Homo sapiens
ggctcagaaaaggac

SEQ ID NO: 1610290 - DNA, 15 bp, Homo sapiens
gctcagaaaaggaca

SEQ ID NO: 1610291 - DNA, 15 bp, Homo sapiens
ctcagaaaaggacac

SEQ ID NO: 1610292 - DNA, 15 bp, Homo sapiens
tcagaaaaggacacc

SEQ ID NO: 1610293 - DNA, 15 bp, Homo sapiens
cagaaaaggacaccc

SEQ ID NO: 1610294 - DNA, 15 bp, Homo sapiens
agaaaaggacaccca

SEQ ID NO: 1610295 - DNA, 15 bp, Homo sapiens
gaaaaggacacccaa

SEQ ID NO: 1610296 - DNA, 15 bp, Homo sapiens
aaaaggacacccaaa

SEQ ID NO: 1610297 - DNA, 15 bp, Homo sapiens
aaaggacacccaaaa

SEQ ID NO: 1610298 - DNA, 15 bp, Homo sapiens
aaggacacccaaaaa

SEQ ID NO: 1610299 - DNA, 15 bp, Homo sapiens
aggacacccaaaaat

SEQ ID NO: 1610300 - DNA, 15 bp, Homo sapiens
ggacacccaaaaata

SEQ ID NO: 1610301 - DNA, 15 bp, Homo sapiens
gacacccaaaaatat

SEQ ID NO: 1610302 - DNA, 15 bp, Homo sapiens
acacccaaaaatatg

SEQ ID NO: 1610303 - DNA, 15 bp, Homo sapiens
cacccaaaaatatgg

SEQ ID NO: 1610304 - DNA, 15 bp, Homo sapiens
acccaaaaatatggc

SEQ ID NO: 1610305 - DNA, 15 bp, Homo sapiens
cccaaaaatatggca

SEQ ID NO: 1610306 - DNA, 15 bp, Homo sapiens
ccaaaaatatggcac

SEQ ID NO: 1610307 - DNA, 15 bp, Homo sapiens
caaaaatatggcact

SEQ ID NO: 1610308 - DNA, 15 bp, Homo sapiens
aaaaatatggcactc

SEQ ID NO: 1610309 - DNA, 15 bp, Homo sapiens
aaaatatggcactct

SEQ ID NO: 1610310 - DNA, 15 bp, Homo sapiens
aaatatggcactctg

SEQ ID NO: 1610311 - DNA, 15 bp, Homo sapiens
aatatggcactctga

SEQ ID NO: 1610312 - DNA, 15 bp, Homo sapiens
atatggcactctgat

SEQ ID NO: 1610313 - DNA, 15 bp, Homo sapiens
tatggcactctgata

SEQ ID NO: 1610314 - DNA, 15 bp, Homo sapiens
atggcactctgatat

SEQ ID NO: 1610315 - DNA, 15 bp, Homo sapiens
tggcactctgatatg

SEQ ID NO: 1610316 - DNA, 15 bp, Homo sapiens
ggcactctgatatgc

SEQ ID NO: 1610317 - DNA, 15 bp, Homo sapiens
gcactctgatatgct

SEQ ID NO: 1610318 - DNA, 15 bp, Homo sapiens
cactctgatatgctg

SEQ ID NO: 1610319 - DNA, 15 bp, Homo sapiens
actctgatatgctgg

SEQ ID NO: 1610320 - DNA, 15 bp, Homo sapiens
ctctgatatgctggt

SEQ ID NO: 1610321 - DNA, 15 bp, Homo sapiens
tctgatatgctggtt

SEQ ID NO: 1610322 - DNA, 15 bp, Homo sapiens
ctgatatgctggtta

SEQ ID NO: 1610323 - DNA, 15 bp, Homo sapiens
tgatatgctggttac

SEQ ID NO: 1610324 - DNA, 15 bp, Homo sapiens
gatatgctggttact

SEQ ID NO: 1610325 - DNA, 15 bp, Homo sapiens
atatgctggttactt

SEQ ID NO: 1610326 - DNA, 15 bp, Homo sapiens
tatgctggttacttc

SEQ ID NO: 1610327 - DNA, 15 bp, Homo sapiens
atgctggttacttca

SEQ ID NO: 1610328 - DNA, 15 bp, Homo sapiens
tgctggttacttcaa

SEQ ID NO: 1610329 - DNA, 15 bp, Homo sapiens
gctggttacttcaaa

SEQ ID NO: 1610330 - DNA, 15 bp, Homo sapiens
ctggttacttcaaat

SEQ ID NO: 1610331 - DNA, 15 bp, Homo sapiens
tggttacttcaaatt

SEQ ID NO: 1610332 - DNA, 15 bp, Homo sapiens
ggttacttcaaatta

SEQ ID NO: 1610333 - DNA, 15 bp, Homo sapiens
gttacttcaaattaa

SEQ ID NO: 1610334 - DNA, 15 bp, Homo sapiens
ttacttcaaattaaa

SEQ ID NO: 1610335 - DNA, 15 bp, Homo sapiens
tacttcaaattaaag

SEQ ID NO: 1610336 - DNA, 15 bp, Homo sapiens
acttcaaattaaagg

SEQ ID NO: 1610337 - DNA, 15 bp, Homo sapiens
cttcaaattaaaggc

SEQ ID NO: 1610338 - DNA, 15 bp, Homo sapiens
ttcaaattaaaggct

SEQ ID NO: 1610339 - DNA, 15 bp, Homo sapiens
tcaaattaaaggctc

SEQ ID NO: 1610340 - DNA, 15 bp, Homo sapiens
caaattaaaggctcc

SEQ ID NO: 1610341 - DNA, 15 bp, Homo sapiens
aaattaaaggctccc

SEQ ID NO: 1610342 - DNA, 15 bp, Homo sapiens
aattaaaggctcccg

SEQ ID NO: 1610343 - DNA, 15 bp, Homo sapiens
attaaaggctcccgg

SEQ ID NO: 1610344 - DNA, 15 bp, Homo sapiens
ttaaaggctcccgga

SEQ ID NO: 1610345 - DNA, 15 bp, Homo sapiens
taaaggctcccggaa

SEQ ID NO: 1610346 - DNA, 15 bp, Homo sapiens
aaaggctcccggaag

SEQ ID NO: 1610347 - DNA, 15 bp, Homo sapiens
aaggctcccggaagc

SEQ ID NO: 1610348 - DNA, 15 bp, Homo sapiens
aggctcccggaagcc

SEQ ID NO: 1610349 - DNA, 15 bp, Homo sapiens
ggctcccggaagcca

SEQ ID NO: 1610350 - DNA, 15 bp, Homo sapiens
gctcccggaagccag

SEQ ID NO: 1610351 - DNA, 15 bp, Homo sapiens
ctcccggaagccagt

SEQ ID NO: 1610352 - DNA, 15 bp, Homo sapiens
tcccggaagccagta

SEQ ID NO: 1610353 - DNA, 15 bp, Homo sapiens
cccggaagccagtag

SEQ ID NO: 1610354 - DNA, 15 bp, Homo sapiens
ccggaagccagtaga

SEQ ID NO: 1610355 - DNA, 15 bp, Homo sapiens
cggaagccagtagac

SEQ ID NO: 1610356 - DNA, 15 bp, Homo sapiens
ggaagccagtagaca

SEQ ID NO: 1610357 - DNA, 15 bp, Homo sapiens
gaagccagtagacac

SEQ ID NO: 1610358 - DNA, 15 bp, Homo sapiens
aagccagtagacact

SEQ ID NO: 1610359 - DNA, 15 bp, Homo sapiens
agccagtagacactg

SEQ ID NO: 1610360 - DNA, 15 bp, Homo sapiens
gccagtagacactgg

SEQ ID NO: 1610361 - DNA, 15 bp, Homo sapiens
ccagtagacactgga

SEQ ID NO: 1610362 - DNA, 15 bp, Homo sapiens
cagtagacactggaa

SEQ ID NO: 1610363 - DNA, 15 bp, Homo sapiens
agtagacactggaag

SEQ ID NO: 1610364 - DNA, 15 bp, Homo sapiens
gtagacactggaaga

SEQ ID NO: 1610365 - DNA, 15 bp, Homo sapiens
tagacactggaagaa

SEQ ID NO: 1610366 - DNA, 15 bp, Homo sapiens
agacactggaagaag

SEQ ID NO: 1610367 - DNA, 15 bp, Homo sapiens
gacactggaagaagt

SEQ ID NO: 1610368 - DNA, 15 bp, Homo sapiens
acactggaagaagtt

SEQ ID NO: 1610369 - DNA, 15 bp, Homo sapiens
cactggaagaagttg

SEQ ID NO: 1610370 - DNA, 15 bp, Homo sapiens
actggaagaagttgt

SEQ ID NO: 1610371 - DNA, 15 bp, Homo sapiens
ctggaagaagttgtt

SEQ ID NO: 1610372 - DNA, 15 bp, Homo sapiens
tggaagaagttgttc

SEQ ID NO: 1610373 - DNA, 15 bp, Homo sapiens
ggaagaagttgttcc

SEQ ID NO: 1610374 - DNA, 15 bp, Homo sapiens
gaagaagttgttccc

SEQ ID NO: 1610375 - DNA, 15 bp, Homo sapiens
aagaagttgttcccc

SEQ ID NO: 1610376 - DNA, 15 bp, Homo sapiens
agaagttgttccccg

SEQ ID NO: 1610377 - DNA, 15 bp, Homo sapiens
gaagttgttccccga

SEQ ID NO: 1610378 - DNA, 15 bp, Homo sapiens
aagttgttccccgaa

SEQ ID NO: 1610379 - DNA, 15 bp, Homo sapiens
agttgttccccgaag

SEQ ID NO: 1610380 - DNA, 15 bp, Homo sapiens
gttgttccccgaagt

SEQ ID NO: 1610381 - DNA, 15 bp, Homo sapiens
ttgttccccgaagtt

SEQ ID NO: 1610382 - DNA, 15 bp, Homo sapiens
tgttccccgaagttc

SEQ ID NO: 1610383 - DNA, 15 bp, Homo sapiens
gttccccgaagttct

SEQ ID NO: 1610384 - DNA, 15 bp, Homo sapiens
ttccccgaagttctc

SEQ ID NO: 1610385 - DNA, 15 bp, Homo sapiens
tccccgaagttctct

SEQ ID NO: 1610386 - DNA, 15 bp, Homo sapiens
ccccgaagttctctt

SEQ ID NO: 1610387 - DNA, 15 bp, Homo sapiens
cccgaagttctctta

SEQ ID NO: 1610388 - DNA, 15 bp, Homo sapiens
ccgaagttctcttac

SEQ ID NO: 1610389 - DNA, 15 bp, Homo sapiens
cgaagttctcttacc

SEQ ID NO: 1610390 - DNA, 15 bp, Homo sapiens
gaagttctcttacct

SEQ ID NO: 1610391 - DNA, 15 bp, Homo sapiens
aagttctcttacctg

SEQ ID NO: 1610392 - DNA, 15 bp, Homo sapiens
agttctcttacctgc

SEQ ID NO: 1610393 - DNA, 15 bp, Homo sapiens
gttctcttacctgcc

SEQ ID NO: 1610394 - DNA, 15 bp, Homo sapiens
ttctcttacctgcct

SEQ ID NO: 1610395 - DNA, 15 bp, Homo sapiens
tctcttacctgcctt

SEQ ID NO: 1610396 - DNA, 15 bp, Homo sapiens
ctcttacctgcctta

SEQ ID NO: 1610397 - DNA, 15 bp, Homo sapiens
tcttacctgccttaa

SEQ ID NO: 1610398 - DNA, 15 bp, Homo sapiens
cttacctgccttaag

SEQ ID NO: 1610399 - DNA, 15 bp, Homo sapiens
ttacctgccttaagt

SEQ ID NO: 1610400 - DNA, 15 bp, Homo sapiens
tacctgccttaagtc

SEQ ID NO: 1610401 - DNA, 15 bp, Homo sapiens
acctgccttaagtcc

SEQ ID NO: 1610402 - DNA, 15 bp, Homo sapiens
cctgccttaagtcca

SEQ ID NO: 1610403 - DNA, 15 bp, Homo sapiens
ctgccttaagtccag

SEQ ID NO: 1610404 - DNA, 15 bp, Homo sapiens
tgccttaagtccaga

SEQ ID NO: 1610405 - DNA, 15 bp, Homo sapiens
gccttaagtccagat

SEQ ID NO: 1610406 - DNA, 15 bp, Homo sapiens
ccttaagtccagatc

SEQ ID NO: 1610407 - DNA, 15 bp, Homo sapiens
cttaagtccagatct

SEQ ID NO: 1610408 - DNA, 15 bp, Homo sapiens
ttaagtccagatctg

SEQ ID NO: 1610409 - DNA, 15 bp, Homo sapiens
taagtccagatctgc

SEQ ID NO: 1610410 - DNA, 15 bp, Homo sapiens
aagtccagatctgcc

SEQ ID NO: 1610411 - DNA, 15 bp, Homo sapiens
agtccagatctgcca

SEQ ID NO: 1610412 - DNA, 15 bp, Homo sapiens
gtccagatctgccaa

SEQ ID NO: 1610413 - DNA, 15 bp, Homo sapiens
tccagatctgccaaa

SEQ ID NO: 1610414 - DNA, 15 bp, Homo sapiens
ccagatctgccaaag

SEQ ID NO: 1610415 - DNA, 15 bp, Homo sapiens
cagatctgccaaaga

SEQ ID NO: 1610416 - DNA, 15 bp, Homo sapiens
gatctgccaaagaag

SEQ ID NO: 1610417 - DNA, 15 bp, Homo sapiens
atctgccaaagaaga

SEQ ID NO: 1610418 - DNA, 15 bp, Homo sapiens
tctgccaaagaagaa

SEQ ID NO: 1610419 - DNA, 15 bp, Homo sapiens
ctgccaaagaagaaa

SEQ ID NO: 1610420 - DNA, 15 bp, Homo sapiens
tgccaaagaagaaaa

SEQ ID NO: 1610421 - DNA, 15 bp, Homo sapiens
gccaaagaagaaaac

SEQ ID NO: 1610422 - DNA, 15 bp, Homo sapiens
ccaaagaagaaaaca

SEQ ID NO: 1610423 - DNA, 15 bp, Homo sapiens
caaagaagaaaacaa

SEQ ID NO: 1610424 - DNA, 15 bp, Homo sapiens
aaagaagaaaacaat

SEQ ID NO: 1610425 - DNA, 15 bp, Homo sapiens
aagaagaaaacaatt

SEQ ID NO: 1610426 - DNA, 15 bp, Homo sapiens
agaagaaaacaatta

SEQ ID NO: 1610427 - DNA, 15 bp, Homo sapiens
gaagaaaacaattac

SEQ ID NO: 1610428 - DNA, 15 bp, Homo sapiens
aagaaaacaattacc

SEQ ID NO: 1610429 - DNA, 15 bp, Homo sapiens
agaaaacaattacct

SEQ ID NO: 1610430 - DNA, 15 bp, Homo sapiens
gaaaacaattacctc

SEQ ID NO: 1610431 - DNA, 15 bp, Homo sapiens
aaaacaattacctct

SEQ ID NO: 1610432 - DNA, 15 bp, Homo sapiens
aaacaattacctctg

SEQ ID NO: 1610433 - DNA, 15 bp, Homo sapiens
aacaattacctctgg

SEQ ID NO: 1610434 - DNA, 15 bp, Homo sapiens
acaattacctctggt

SEQ ID NO: 1610435 - DNA, 15 bp, Homo sapiens
caattacctctggtc

SEQ ID NO: 1610436 - DNA, 15 bp, Homo sapiens
aattacctctggtcc

SEQ ID NO: 1610437 - DNA, 15 bp, Homo sapiens
attacctctggtccc

SEQ ID NO: 1610438 - DNA, 15 bp, Homo sapiens
ttacctctggtccct

SEQ ID NO: 1610439 - DNA, 15 bp, Homo sapiens
tacctctggtccctt

SEQ ID NO: 1610440 - DNA, 15 bp, Homo sapiens
acctctggtcccttt

SEQ ID NO: 1610441 - DNA, 15 bp, Homo sapiens
cctctggtccctttt

SEQ ID NO: 1610442 - DNA, 15 bp, Homo sapiens
ctctggtcccttttc

SEQ ID NO: 1610443 - DNA, 15 bp, Homo sapiens
tctggtcccttttct

SEQ ID NO: 1610444 - DNA, 15 bp, Homo sapiens
ctggtcccttttctg

SEQ ID NO: 1610445 - DNA, 15 bp, Homo sapiens
tggtcccttttctgt

SEQ ID NO: 1610446 - DNA, 15 bp, Homo sapiens
ggtcccttttctgtg

SEQ ID NO: 1610447 - DNA, 15 bp, Homo sapiens
gtcccttttctgtgt

SEQ ID NO: 1610448 - DNA, 15 bp, Homo sapiens
tcccttttctgtgtt

SEQ ID NO: 1610449 - DNA, 15 bp, Homo sapiens
cccttttctgtgttt

SEQ ID NO: 1610450 - DNA, 15 bp, Homo sapiens
ccttttctgtgtttt

SEQ ID NO: 1610451 - DNA, 15 bp, Homo sapiens
cttttctgtgttttc

SEQ ID NO: 1610452 - DNA, 15 bp, Homo sapiens
ttttctgtgttttca

SEQ ID NO: 1610453 - DNA, 15 bp, Homo sapiens
tttctgtgttttcat

SEQ ID NO: 1610454 - DNA, 15 bp, Homo sapiens
ttctgtgttttcatt

SEQ ID NO: 1610455 - DNA, 15 bp, Homo sapiens
tctgtgttttcatta

SEQ ID NO: 1610456 - DNA, 15 bp, Homo sapiens
ctgtgttttcattaa

SEQ ID NO: 1610457 - DNA, 15 bp, Homo sapiens
tgtgttttcattaac

SEQ ID NO: 1610458 - DNA, 15 bp, Homo sapiens
gtgttttcattaact

SEQ ID NO: 1610459 - DNA, 15 bp, Homo sapiens
tgttttcattaactt

SEQ ID NO: 1610460 - DNA, 15 bp, Homo sapiens
gttttcattaactta

SEQ ID NO: 1610461 - DNA, 15 bp, Homo sapiens
ttttcattaacttaa

SEQ ID NO: 1610462 - DNA, 15 bp, Homo sapiens
tttcattaacttaac

SEQ ID NO: 1610463 - DNA, 15 bp, Homo sapiens
ttcattaacttaact

SEQ ID NO: 1610464 - DNA, 15 bp, Homo sapiens
tcattaacttaactc

SEQ ID NO: 1610465 - DNA, 15 bp, Homo sapiens
cattaacttaactca

SEQ ID NO: 1610466 - DNA, 15 bp, Homo sapiens
attaacttaactcat

SEQ ID NO: 1610467 - DNA, 15 bp, Homo sapiens
ttaacttaactcatg

SEQ ID NO: 1610468 - DNA, 15 bp, Homo sapiens
taacttaactcatgt

SEQ ID NO: 1610469 - DNA, 15 bp, Homo sapiens
aacttaactcatgtt

SEQ ID NO: 1610470 - DNA, 15 bp, Homo sapiens
acttaactcatgtta

SEQ ID NO: 1610471 - DNA, 15 bp, Homo sapiens
cttaactcatgttac

SEQ ID NO: 1610472 - DNA, 15 bp, Homo sapiens
ttaactcatgttaca

SEQ ID NO: 1610473 - DNA, 15 bp, Homo sapiens
taactcatgttacag

SEQ ID NO: 1610474 - DNA, 15 bp, Homo sapiens
aactcatgttacagg

SEQ ID NO: 1610475 - DNA, 15 bp, Homo sapiens
actcatgttacagga

SEQ ID NO: 1610476 - DNA, 15 bp, Homo sapiens
ctcatgttacaggaa

SEQ ID NO: 1610477 - DNA, 15 bp, Homo sapiens
tcatgttacaggaag

SEQ ID NO: 1610478 - DNA, 15 bp, Homo sapiens
catgttacaggaaga

SEQ ID NO: 1610479 - DNA, 15 bp, Homo sapiens
atgttacaggaagaa

SEQ ID NO: 1610480 - DNA, 15 bp, Homo sapiens
tgttacaggaagaat

SEQ ID NO: 1610481 - DNA, 15 bp, Homo sapiens
gttacaggaagaatg

SEQ ID NO: 1610482 - DNA, 15 bp, Homo sapiens
ttacaggaagaatga

SEQ ID NO: 1610483 - DNA, 15 bp, Homo sapiens
tacaggaagaatgac

SEQ ID NO: 1610484 - DNA, 15 bp, Homo sapiens
acaggaagaatgact

SEQ ID NO: 1610485 - DNA, 15 bp, Homo sapiens
caggaagaatgacta

SEQ ID NO: 1610486 - DNA, 15 bp, Homo sapiens
aggaagaatgactaa

SEQ ID NO: 1610487 - DNA, 15 bp, Homo sapiens
ggaagaatgactaaa

SEQ ID NO: 1610488 - DNA, 15 bp, Homo sapiens
gaagaatgactaaag

SEQ ID NO: 1610489 - DNA, 15 bp, Homo sapiens
aagaatgactaaagt

SEQ ID NO: 1610490 - DNA, 15 bp, Homo sapiens
agaatgactaaagtt

SEQ ID NO: 1610491 - DNA, 15 bp, Homo sapiens
gaatgactaaagttt

SEQ ID NO: 1610492 - DNA, 15 bp, Homo sapiens
aatgactaaagtttg

SEQ ID NO: 1610493 - DNA, 15 bp, Homo sapiens
atgactaaagtttgt

SEQ ID NO: 1610494 - DNA, 15 bp, Homo sapiens
tgactaaagtttgtc

SEQ ID NO: 1610495 - DNA, 15 bp, Homo sapiens
gactaaagtttgtca

SEQ ID NO: 1610496 - DNA, 15 bp, Homo sapiens
actaaagtttgtcaa

SEQ ID NO: 1610497 - DNA, 15 bp, Homo sapiens
ctaaagtttgtcaac

SEQ ID NO: 1610498 - DNA, 15 bp, Homo sapiens
taaagtttgtcaaca

SEQ ID NO: 1610499 - DNA, 15 bp, Homo sapiens
aaagtttgtcaacac

SEQ ID NO: 1610500 - DNA, 15 bp, Homo sapiens
aagtttgtcaacaca

SEQ ID NO: 1610501 - DNA, 15 bp, Homo sapiens
agtttgtcaacacac

SEQ ID NO: 1610502 - DNA, 15 bp, Homo sapiens
gtttgtcaacacacc

SEQ ID NO: 1610503 - DNA, 15 bp, Homo sapiens
tttgtcaacacacct

SEQ ID NO: 1610504 - DNA, 15 bp, Homo sapiens
ttgtcaacacacctg

SEQ ID NO: 1610505 - DNA, 15 bp, Homo sapiens
tgtcaacacacctgg

SEQ ID NO: 1610506 - DNA, 15 bp, Homo sapiens
gtcaacacacctgga

SEQ ID NO: 1610507 - DNA, 15 bp, Homo sapiens
tcaacacacctggac

SEQ ID NO: 1610508 - DNA, 15 bp, Homo sapiens
caacacacctggaca

SEQ ID NO: 1610509 - DNA, 15 bp, Homo sapiens
aacacacctggacag

SEQ ID NO: 1610510 - DNA, 15 bp, Homo sapiens
cacacctggacagac

SEQ ID NO: 1610511 - DNA, 15 bp, Homo sapiens
acacctggacagact

SEQ ID NO: 1610512 - DNA, 15 bp, Homo sapiens
cacctggacagactt

SEQ ID NO: 1610513 - DNA, 15 bp, Homo sapiens
acctggacagacttt

SEQ ID NO: 1610514 - DNA, 15 bp, Homo sapiens
cctggacagactttt

SEQ ID NO: 1610515 - DNA, 15 bp, Homo sapiens
ctggacagacttttg

SEQ ID NO: 1610516 - DNA, 15 bp, Homo sapiens
tggacagacttttgt

SEQ ID NO: 1610517 - DNA, 15 bp, Homo sapiens
ggacagacttttgtc

SEQ ID NO: 1610518 - DNA, 15 bp, Homo sapiens
gacagacttttgtca

SEQ ID NO: 1610519 - DNA, 15 bp, Homo sapiens
acagacttttgtcac

SEQ ID NO: 1610520 - DNA, 15 bp, Homo sapiens
cagacttttgtcaca

SEQ ID NO: 1610521 - DNA, 15 bp, Homo sapiens
agacttttgtcacac

SEQ ID NO: 1610522 - DNA, 15 bp, Homo sapiens
gacttttgtcacaca

SEQ ID NO: 1610523 - DNA, 15 bp, Homo sapiens
acttttgtcacacat

SEQ ID NO: 1610524 - DNA, 15 bp, Homo sapiens
cttttgtcacacatc

SEQ ID NO: 1610525 - DNA, 15 bp, Homo sapiens
ttttgtcacacatca

SEQ ID NO: 1610526 - DNA, 15 bp, Homo sapiens
tttgtcacacatcat

SEQ ID NO: 1610527 - DNA, 15 bp, Homo sapiens
ttgtcacacatcatt

SEQ ID NO: 1610528 - DNA, 15 bp, Homo sapiens
tgtcacacatcattg

SEQ ID NO: 1610529 - DNA, 15 bp, Homo sapiens
gtcacacatcattgt

SEQ ID NO: 1610530 - DNA, 15 bp, Homo sapiens
tcacacatcattgtc

SEQ ID NO: 1610531 - DNA, 15 bp, Homo sapiens
cacacatcattgtct

SEQ ID NO: 1610532 - DNA, 15 bp, Homo sapiens
acacatcattgtctt

SEQ ID NO: 1610533 - DNA, 15 bp, Homo sapiens
cacatcattgtcttc

SEQ ID NO: 1610534 - DNA, 15 bp, Homo sapiens
acatcattgtcttct

SEQ ID NO: 1610535 - DNA, 15 bp, Homo sapiens
catcattgtcttcta

SEQ ID NO: 1610536 - DNA, 15 bp, Homo sapiens
atcattgtcttctat

SEQ ID NO: 1610537 - DNA, 15 bp, Homo sapiens
tcattgtcttctatt

SEQ ID NO: 1610538 - DNA, 15 bp, Homo sapiens
cattgtcttctattt

SEQ ID NO: 1610539 - DNA, 15 bp, Homo sapiens
attgtcttctatttc

SEQ ID NO: 1610540 - DNA, 15 bp, Homo sapiens
ttgtcttctatttca

SEQ ID NO: 1610541 - DNA, 15 bp, Homo sapiens
tgtcttctatttcag

SEQ ID NO: 1610542 - DNA, 15 bp, Homo sapiens
gtcttctatttcagt

SEQ ID NO: 1610543 - DNA, 15 bp, Homo sapiens
tcttctatttcagtc

SEQ ID NO: 1610544 - DNA, 15 bp, Homo sapiens
cttctatttcagtcc

SEQ ID NO: 1610545 - DNA, 15 bp, Homo sapiens
ttctatttcagtcca

SEQ ID NO: 1610546 - DNA, 15 bp, Homo sapiens
tctatttcagtccaa

SEQ ID NO: 1610547 - DNA, 15 bp, Homo sapiens
ctatttcagtccaat

SEQ ID NO: 1610548 - DNA, 15 bp, Homo sapiens
tatttcagtccaatt

SEQ ID NO: 1610549 - DNA, 15 bp, Homo sapiens
atttcagtccaattc

SEQ ID NO: 1610550 - DNA, 15 bp, Homo sapiens
tttcagtccaattca

SEQ ID NO: 1610551 - DNA, 15 bp, Homo sapiens
ttcagtccaattcag

SEQ ID NO: 1610552 - DNA, 15 bp, Homo sapiens
tcagtccaattcagt

SEQ ID NO: 1610553 - DNA, 15 bp, Homo sapiens
cagtccaattcagta

SEQ ID NO: 1610554 - DNA, 15 bp, Homo sapiens
agtccaattcagtat

SEQ ID NO: 1610555 - DNA, 15 bp, Homo sapiens
gtccaattcagtatt

SEQ ID NO: 1610556 - DNA, 15 bp, Homo sapiens
tccaattcagtattt

SEQ ID NO: 1610557 - DNA, 15 bp, Homo sapiens
ccaattcagtatttt

SEQ ID NO: 1610558 - DNA, 15 bp, Homo sapiens
caattcagtatttta

SEQ ID NO: 1610559 - DNA, 15 bp, Homo sapiens
aattcagtattttat

SEQ ID NO: 1610560 - DNA, 15 bp, Homo sapiens
attcagtattttatt

SEQ ID NO: 1610561 - DNA, 15 bp, Homo sapiens
ttcagtattttattt

SEQ ID NO: 1610562 - DNA, 15 bp, Homo sapiens
tcagtattttatttt

SEQ ID NO: 1610563 - DNA, 15 bp, Homo sapiens
cagtattttatttta

SEQ ID NO: 1610564 - DNA, 15 bp, Homo sapiens
agtattttattttac

SEQ ID NO: 1610565 - DNA, 15 bp, Homo sapiens
gtattttattttact

SEQ ID NO: 1610566 - DNA, 15 bp, Homo sapiens
attttattttactta

SEQ ID NO: 1610567 - DNA, 15 bp, Homo sapiens
tacttatttatttta

SEQ ID NO: 1610568 - DNA, 15 bp, Homo sapiens
acttatttattttat

SEQ ID NO: 1610569 - DNA, 15 bp, Homo sapiens
cttatttattttatt

SEQ ID NO: 1610570 - DNA, 15 bp, Homo sapiens
ttatttattttattt

SEQ ID NO: 1610571 - DNA, 15 bp, Homo sapiens
tatttattttatttt

SEQ ID NO: 1610572 - DNA, 15 bp, Homo sapiens
atttattttatttta

SEQ ID NO: 1610573 - DNA, 15 bp, Homo sapiens
attttattttattta

SEQ ID NO: 1610574 - DNA, 15 bp, Homo sapiens
ttttattttatttat

SEQ ID NO: 1610575 - DNA, 15 bp, Homo sapiens
tattttatttatttt

SEQ ID NO: 1610576 - DNA, 15 bp, Homo sapiens
attttatttattttt

SEQ ID NO: 1610577 - DNA, 15 bp, Homo sapiens
tttgagacggagtcg

SEQ ID NO: 1610578 - DNA, 15 bp, Homo sapiens
ttgagacggagtcgc

SEQ ID NO: 1610579 - DNA, 15 bp, Homo sapiens
tgagacggagtcgcc

SEQ ID NO: 1610580 - DNA, 15 bp, Homo sapiens
gagacggagtcgcct

SEQ ID NO: 1610581 - DNA, 15 bp, Homo sapiens
agacggagtcgcctt

SEQ ID NO: 1610582 - DNA, 15 bp, Homo sapiens
gacggagtcgccttc

SEQ ID NO: 1610583 - DNA, 15 bp, Homo sapiens
acggagtcgccttct

SEQ ID NO: 1610584 - DNA, 15 bp, Homo sapiens
cggagtcgccttctg

SEQ ID NO: 1610585 - DNA, 15 bp, Homo sapiens
ggagtcgccttctgt

SEQ ID NO: 1610586 - DNA, 15 bp, Homo sapiens
gagtcgccttctgtc

SEQ ID NO: 1610587 - DNA, 15 bp, Homo sapiens
agtcgccttctgtcg

SEQ ID NO: 1610588 - DNA, 15 bp, Homo sapiens
gtcgccttctgtcgc

SEQ ID NO: 1610589 - DNA, 15 bp, Homo sapiens
tcgccttctgtcgca

SEQ ID NO: 1610590 - DNA, 15 bp, Homo sapiens
cgccttctgtcgcac

SEQ ID NO: 1610591 - DNA, 15 bp, Homo sapiens
gccttctgtcgcaca

SEQ ID NO: 1610592 - DNA, 15 bp, Homo sapiens
ccttctgtcgcacag

SEQ ID NO: 1610593 - DNA, 15 bp, Homo sapiens
cttctgtcgcacagg

SEQ ID NO: 1610594 - DNA, 15 bp, Homo sapiens
ttctgtcgcacaggc

SEQ ID NO: 1610595 - DNA, 15 bp, Homo sapiens
tctgtcgcacaggct

SEQ ID NO: 1610596 - DNA, 15 bp, Homo sapiens
ctgtcgcacaggctg

SEQ ID NO: 1610597 - DNA, 15 bp, Homo sapiens
tgtcgcacaggctgg

SEQ ID NO: 1610598 - DNA, 15 bp, Homo sapiens
gtcgcacaggctgga

SEQ ID NO: 1610599 - DNA, 15 bp, Homo sapiens
tcgcacaggctggag

SEQ ID NO: 1610600 - DNA, 15 bp, Homo sapiens
cgcacaggctggagt

SEQ ID NO: 1610601 - DNA, 15 bp, Homo sapiens
gcacaggctggagtg

SEQ ID NO: 1610602 - DNA, 15 bp, Homo sapiens
acctccctggttcaa

SEQ ID NO: 1610603 - DNA, 15 bp, Homo sapiens
cctccctggttcaag

SEQ ID NO: 1610604 - DNA, 15 bp, Homo sapiens
ctccctggttcaagc

SEQ ID NO: 1610605 - DNA, 15 bp, Homo sapiens
tccctggttcaagcg

SEQ ID NO: 1610606 - DNA, 15 bp, Homo sapiens
ccctggttcaagcga

SEQ ID NO: 1610607 - DNA, 15 bp, Homo sapiens
cctggttcaagcgat

SEQ ID NO: 1610608 - DNA, 15 bp, Homo sapiens
ctggttcaagcgatt

SEQ ID NO: 1610609 - DNA, 15 bp, Homo sapiens
tggttcaagcgattc

SEQ ID NO: 1610610 - DNA, 15 bp, Homo sapiens
ccgagtagctgtgat

SEQ ID NO: 1610611 - DNA, 15 bp, Homo sapiens
cgagtagctgtgatt

SEQ ID NO: 1610612 - DNA, 15 bp, Homo sapiens
gagtagctgtgatta

SEQ ID NO: 1610613 - DNA, 15 bp, Homo sapiens
gattacaggcacata

SEQ ID NO: 1610614 - DNA, 15 bp, Homo sapiens
attacaggcacatac

SEQ ID NO: 1610615 - DNA, 15 bp, Homo sapiens
ttacaggcacatacc

SEQ ID NO: 1610616 - DNA, 15 bp, Homo sapiens
tacaggcacatacca

SEQ ID NO: 1610617 - DNA, 15 bp, Homo sapiens
acaggcacataccac

SEQ ID NO: 1610618 - DNA, 15 bp, Homo sapiens
caggcacataccacc

SEQ ID NO: 1610619 - DNA, 15 bp, Homo sapiens
aggcacataccacca

SEQ ID NO: 1610620 - DNA, 15 bp, Homo sapiens
ggcacataccaccat

SEQ ID NO: 1610621 - DNA, 15 bp, Homo sapiens
gcacataccaccatg

SEQ ID NO: 1610622 - DNA, 15 bp, Homo sapiens
cacataccaccatgc

SEQ ID NO: 1610623 - DNA, 15 bp, Homo sapiens
acataccaccatgcc

SEQ ID NO: 1610624 - DNA, 15 bp, Homo sapiens
cataccaccatgccc

SEQ ID NO: 1610625 - DNA, 15 bp, Homo sapiens
ataccaccatgccca

SEQ ID NO: 1610626 - DNA, 15 bp, Homo sapiens
taccaccatgcccag

SEQ ID NO: 1610627 - DNA, 15 bp, Homo sapiens
gctaatttttttgtt

SEQ ID NO: 1610628 - DNA, 15 bp, Homo sapiens
ctaatttttttgtta

SEQ ID NO: 1610629 - DNA, 15 bp, Homo sapiens
taatttttttgttat

SEQ ID NO: 1610630 - DNA, 15 bp, Homo sapiens
aatttttttgttatt

SEQ ID NO: 1610631 - DNA, 15 bp, Homo sapiens
atttttttgttattt

SEQ ID NO: 1610632 - DNA, 15 bp, Homo sapiens
tttttttgttatttt

SEQ ID NO: 1610633 - DNA, 15 bp, Homo sapiens
ttttttgttattttt

SEQ ID NO: 1610634 - DNA, 15 bp, Homo sapiens
tttttgttattttta

SEQ ID NO: 1610635 - DNA, 15 bp, Homo sapiens
ttttgttatttttag

SEQ ID NO: 1610636 - DNA, 15 bp, Homo sapiens
tttgttatttttagt

SEQ ID NO: 1610637 - DNA, 15 bp, Homo sapiens
ttgttatttttagta

SEQ ID NO: 1610638 - DNA, 15 bp, Homo sapiens
tgttatttttagtag

SEQ ID NO: 1610639 - DNA, 15 bp, Homo sapiens
gttatttttagtaga

SEQ ID NO: 1610640 - DNA, 15 bp, Homo sapiens
gacggggtttcacct

SEQ ID NO: 1610641 - DNA, 15 bp, Homo sapiens
acggggtttcacctt

SEQ ID NO: 1610642 - DNA, 15 bp, Homo sapiens
cggggtttcaccttg

SEQ ID NO: 1610643 - DNA, 15 bp, Homo sapiens
ggggtttcaccttgg

SEQ ID NO: 1610644 - DNA, 15 bp, Homo sapiens
gggtttcaccttggc

SEQ ID NO: 1610645 - DNA, 15 bp, Homo sapiens
ggtttcaccttggcc

SEQ ID NO: 1610646 - DNA, 15 bp, Homo sapiens
gtttcaccttggcca

SEQ ID NO: 1610647 - DNA, 15 bp, Homo sapiens
tttcaccttggccac

SEQ ID NO: 1610648 - DNA, 15 bp, Homo sapiens
ttcaccttggccaca

SEQ ID NO: 1610649 - DNA, 15 bp, Homo sapiens
tcaccttggccacac

SEQ ID NO: 1610650 - DNA, 15 bp, Homo sapiens
caccttggccacact

SEQ ID NO: 1610651 - DNA, 15 bp, Homo sapiens
accttggccacactg

SEQ ID NO: 1610652 - DNA, 15 bp, Homo sapiens
ccttggccacactgg

SEQ ID NO: 1610653 - DNA, 15 bp, Homo sapiens
cttggccacactggt

SEQ ID NO: 1610654 - DNA, 15 bp, Homo sapiens
ttggccacactggtc

SEQ ID NO: 1610655 - DNA, 15 bp, Homo sapiens
tggccacactggtct

SEQ ID NO: 1610656 - DNA, 15 bp, Homo sapiens
ggccacactggtctc

SEQ ID NO: 1610657 - DNA, 15 bp, Homo sapiens
gccacactggtctcg

SEQ ID NO: 1610658 - DNA, 15 bp, Homo sapiens
ccacactggtctcga

SEQ ID NO: 1610659 - DNA, 15 bp, Homo sapiens
cacactggtctcgag

SEQ ID NO: 1610660 - DNA, 15 bp, Homo sapiens
acactggtctcgagc

SEQ ID NO: 1610661 - DNA, 15 bp, Homo sapiens
cactggtctcgagct

SEQ ID NO: 1610662 - DNA, 15 bp, Homo sapiens
actggtctcgagctc

SEQ ID NO: 1610663 - DNA, 15 bp, Homo sapiens
ctggtctcgagctcc

SEQ ID NO: 1610664 - DNA, 15 bp, Homo sapiens
tggtctcgagctcct

SEQ ID NO: 1610665 - DNA, 15 bp, Homo sapiens
ggtctcgagctcctg

SEQ ID NO: 1610666 - DNA, 15 bp, Homo sapiens
gtctcgagctcctga

SEQ ID NO: 1610667 - DNA, 15 bp, Homo sapiens
tctcgagctcctgac

SEQ ID NO: 1610668 - DNA, 15 bp, Homo sapiens
ctcgagctcctgacc

SEQ ID NO: 1610669 - DNA, 15 bp, Homo sapiens
tcgagctcctgacct

SEQ ID NO: 1610670 - DNA, 15 bp, Homo sapiens
cgagctcctgacctc

SEQ ID NO: 1610671 - DNA, 15 bp, Homo sapiens
gagctcctgacctca

SEQ ID NO: 1610672 - DNA, 15 bp, Homo sapiens
agctcctgacctcag

SEQ ID NO: 1610673 - DNA, 15 bp, Homo sapiens
gctcctgacctcagg

SEQ ID NO: 1610674 - DNA, 15 bp, Homo sapiens
tcctgacctcaggca

SEQ ID NO: 1610675 - DNA, 15 bp, Homo sapiens
cctgacctcaggcag

SEQ ID NO: 1610676 - DNA, 15 bp, Homo sapiens
ctgacctcaggcagt

SEQ ID NO: 1610677 - DNA, 15 bp, Homo sapiens
tgacctcaggcagtc

SEQ ID NO: 1610678 - DNA, 15 bp, Homo sapiens
gacctcaggcagtcc

SEQ ID NO: 1610679 - DNA, 15 bp, Homo sapiens
acctcaggcagtcca

SEQ ID NO: 1610680 - DNA, 15 bp, Homo sapiens
cctcaggcagtccac

SEQ ID NO: 1610681 - DNA, 15 bp, Homo sapiens
ctcaggcagtccacc

SEQ ID NO: 1610682 - DNA, 15 bp, Homo sapiens
tcaggcagtccaccc

SEQ ID NO: 1610683 - DNA, 15 bp, Homo sapiens
caggcagtccacccg

SEQ ID NO: 1610684 - DNA, 15 bp, Homo sapiens
aggcagtccacccgc

SEQ ID NO: 1610685 - DNA, 15 bp, Homo sapiens
ggcagtccacccgcc

SEQ ID NO: 1610686 - DNA, 15 bp, Homo sapiens
gcagtccacccgcct

SEQ ID NO: 1610687 - DNA, 15 bp, Homo sapiens
cagtccacccgcctc

SEQ ID NO: 1610688 - DNA, 15 bp, Homo sapiens
agtccacccgcctca

SEQ ID NO: 1610689 - DNA, 15 bp, Homo sapiens
gtccacccgcctcag

SEQ ID NO: 1610690 - DNA, 15 bp, Homo sapiens
cgtgagccaccgcgg

SEQ ID NO: 1610691 - DNA, 15 bp, Homo sapiens
gtgagccaccgcggc

SEQ ID NO: 1610692 - DNA, 15 bp, Homo sapiens
tgagccaccgcggct

SEQ ID NO: 1610693 - DNA, 15 bp, Homo sapiens
gagccaccgcggctg

SEQ ID NO: 1610694 - DNA, 15 bp, Homo sapiens
agccaccgcggctgg

SEQ ID NO: 1610695 - DNA, 15 bp, Homo sapiens
gccaccgcggctggc

SEQ ID NO: 1610696 - DNA, 15 bp, Homo sapiens
ccaccgcggctggcg

SEQ ID NO: 1610697 - DNA, 15 bp, Homo sapiens
caccgcggctggcgc

SEQ ID NO: 1610698 - DNA, 15 bp, Homo sapiens
accgcggctggcgcc

SEQ ID NO: 1610699 - DNA, 15 bp, Homo sapiens
ccgcggctggcgcct

SEQ ID NO: 1610700 - DNA, 15 bp, Homo sapiens
cgcggctggcgcctg

SEQ ID NO: 1610701 - DNA, 15 bp, Homo sapiens
gcggctggcgcctgg

SEQ ID NO: 1610702 - DNA, 15 bp, Homo sapiens
cggctggcgcctggt

SEQ ID NO: 1610703 - DNA, 15 bp, Homo sapiens
ggctggcgcctggtt

SEQ ID NO: 1610704 - DNA, 15 bp, Homo sapiens
gctggcgcctggtta

SEQ ID NO: 1610705 - DNA, 15 bp, Homo sapiens
ctggcgcctggttat

SEQ ID NO: 1610706 - DNA, 15 bp, Homo sapiens
tggcgcctggttatt

SEQ ID NO: 1610707 - DNA, 15 bp, Homo sapiens
ggcgcctggttattt

SEQ ID NO: 1610708 - DNA, 15 bp, Homo sapiens
gcgcctggttatttt

SEQ ID NO: 1610709 - DNA, 15 bp, Homo sapiens
cgcctggttattttt

SEQ ID NO: 1610710 - DNA, 15 bp, Homo sapiens
gcctggttatttttt

SEQ ID NO: 1610711 - DNA, 15 bp, Homo sapiens
cctggttatttttta

SEQ ID NO: 1610712 - DNA, 15 bp, Homo sapiens
ctggttattttttag

SEQ ID NO: 1610713 - DNA, 15 bp, Homo sapiens
tggttattttttagt

SEQ ID NO: 1610714 - DNA, 15 bp, Homo sapiens
ggttattttttagtg

SEQ ID NO: 1610715 - DNA, 15 bp, Homo sapiens
gttattttttagtga

SEQ ID NO: 1610716 - DNA, 15 bp, Homo sapiens
ttattttttagtgat

SEQ ID NO: 1610717 - DNA, 15 bp, Homo sapiens
tattttttagtgatt

SEQ ID NO: 1610718 - DNA, 15 bp, Homo sapiens
attttttagtgattt

SEQ ID NO: 1610719 - DNA, 15 bp, Homo sapiens
ttttttagtgatttt

SEQ ID NO: 1610720 - DNA, 15 bp, Homo sapiens
tttttagtgattttt

SEQ ID NO: 1610721 - DNA, 15 bp, Homo sapiens
ttttagtgattttta

SEQ ID NO: 1610722 - DNA, 15 bp, Homo sapiens
tttagtgatttttag

SEQ ID NO: 1610723 - DNA, 15 bp, Homo sapiens
ttagtgatttttaga

SEQ ID NO: 1610724 - DNA, 15 bp, Homo sapiens
tagtgatttttagac

SEQ ID NO: 1610725 - DNA, 15 bp, Homo sapiens
agtgatttttagaca

SEQ ID NO: 1610726 - DNA, 15 bp, Homo sapiens
gtgatttttagacat

SEQ ID NO: 1610727 - DNA, 15 bp, Homo sapiens
tgatttttagacatc

SEQ ID NO: 1610728 - DNA, 15 bp, Homo sapiens
gatttttagacatct

SEQ ID NO: 1610729 - DNA, 15 bp, Homo sapiens
atttttagacatcta

SEQ ID NO: 1610730 - DNA, 15 bp, Homo sapiens
tttttagacatctat

SEQ ID NO: 1610731 - DNA, 15 bp, Homo sapiens
ttttagacatctata

SEQ ID NO: 1610732 - DNA, 15 bp, Homo sapiens
tttagacatctataa

SEQ ID NO: 1610733 - DNA, 15 bp, Homo sapiens
ttagacatctataaa

SEQ ID NO: 1610734 - DNA, 15 bp, Homo sapiens
tagacatctataaaa

SEQ ID NO: 1610735 - DNA, 15 bp, Homo sapiens
agacatctataaaaa

SEQ ID NO: 1610736 - DNA, 15 bp, Homo sapiens
gacatctataaaaac

SEQ ID NO: 1610737 - DNA, 15 bp, Homo sapiens
acatctataaaaaca

SEQ ID NO: 1610738 - DNA, 15 bp, Homo sapiens
catctataaaaacaa

SEQ ID NO: 1610739 - DNA, 15 bp, Homo sapiens
atctataaaaacaat

SEQ ID NO: 1610740 - DNA, 15 bp, Homo sapiens
tctataaaaacaata

SEQ ID NO: 1610741 - DNA, 15 bp, Homo sapiens
ctataaaaacaatat

SEQ ID NO: 1610742 - DNA, 15 bp, Homo sapiens
tataaaaacaatatc

SEQ ID NO: 1610743 - DNA, 15 bp, Homo sapiens
ataaaaacaatatca

SEQ ID NO: 1610744 - DNA, 15 bp, Homo sapiens
taaaaacaatatcag

SEQ ID NO: 1610745 - DNA, 15 bp, Homo sapiens
aaaaacaatatcagt

SEQ ID NO: 1610746 - DNA, 15 bp, Homo sapiens
aaaacaatatcagta

SEQ ID NO: 1610747 - DNA, 15 bp, Homo sapiens
aaacaatatcagtac

SEQ ID NO: 1610748 - DNA, 15 bp, Homo sapiens
aacaatatcagtact

SEQ ID NO: 1610749 - DNA, 15 bp, Homo sapiens
acaatatcagtactt

SEQ ID NO: 1610750 - DNA, 15 bp, Homo sapiens
caatatcagtacttt

SEQ ID NO: 1610751 - DNA, 15 bp, Homo sapiens
aatatcagtactttg

SEQ ID NO: 1610752 - DNA, 15 bp, Homo sapiens
atatcagtactttga

SEQ ID NO: 1610753 - DNA, 15 bp, Homo sapiens
tatcagtactttgag

SEQ ID NO: 1610754 - DNA, 15 bp, Homo sapiens
atcagtactttgagg

SEQ ID NO: 1610755 - DNA, 15 bp, Homo sapiens
tcagtactttgaggt

SEQ ID NO: 1610756 - DNA, 15 bp, Homo sapiens
cagtactttgaggtc

SEQ ID NO: 1610757 - DNA, 15 bp, Homo sapiens
agtactttgaggtct

SEQ ID NO: 1610758 - DNA, 15 bp, Homo sapiens
gtactttgaggtcta

SEQ ID NO: 1610759 - DNA, 15 bp, Homo sapiens
tactttgaggtctaa

SEQ ID NO: 1610760 - DNA, 15 bp, Homo sapiens
actttgaggtctaag

SEQ ID NO: 1610761 - DNA, 15 bp, Homo sapiens
ctttgaggtctaaga

SEQ ID NO: 1610762 - DNA, 15 bp, Homo sapiens
tttgaggtctaagat

SEQ ID NO: 1610763 - DNA, 15 bp, Homo sapiens
ttgaggtctaagatg

SEQ ID NO: 1610764 - DNA, 15 bp, Homo sapiens
tgaggtctaagatga

SEQ ID NO: 1610765 - DNA, 15 bp, Homo sapiens
gaggtctaagatgat

SEQ ID NO: 1610766 - DNA, 15 bp, Homo sapiens
aggtctaagatgatg

SEQ ID NO: 1610767 - DNA, 15 bp, Homo sapiens
ggtctaagatgatgt

SEQ ID NO: 1610768 - DNA, 15 bp, Homo sapiens
gtctaagatgatgtt

SEQ ID NO: 1610769 - DNA, 15 bp, Homo sapiens
tctaagatgatgttt

SEQ ID NO: 1610770 - DNA, 15 bp, Homo sapiens
ctaagatgatgtttt

SEQ ID NO: 1610771 - DNA, 15 bp, Homo sapiens
taagatgatgttttc

SEQ ID NO: 1610772 - DNA, 15 bp, Homo sapiens
aagatgatgttttct

SEQ ID NO: 1610773 - DNA, 15 bp, Homo sapiens
agatgatgttttctt

SEQ ID NO: 1610774 - DNA, 15 bp, Homo sapiens
gatgatgttttcttc

SEQ ID NO: 1610775 - DNA, 15 bp, Homo sapiens
atgatgttttcttcc

SEQ ID NO: 1610776 - DNA, 15 bp, Homo sapiens
tgatgttttcttcct

SEQ ID NO: 1610777 - DNA, 15 bp, Homo sapiens
gatgttttcttcctt

SEQ ID NO: 1610778 - DNA, 15 bp, Homo sapiens
atgttttcttcctta

SEQ ID NO: 1610779 - DNA, 15 bp, Homo sapiens
tgttttcttccttaa

SEQ ID NO: 1610780 - DNA, 15 bp, Homo sapiens
gttttcttccttaag

SEQ ID NO: 1610781 - DNA, 15 bp, Homo sapiens
ttttcttccttaagg

SEQ ID NO: 1610782 - DNA, 15 bp, Homo sapiens
tttcttccttaaggg

SEQ ID NO: 1610783 - DNA, 15 bp, Homo sapiens
ttcttccttaaggga

SEQ ID NO: 1610784 - DNA, 15 bp, Homo sapiens
tcttccttaagggag

SEQ ID NO: 1610785 - DNA, 15 bp, Homo sapiens
cttccttaagggagt

SEQ ID NO: 1610786 - DNA, 15 bp, Homo sapiens
ttccttaagggagta

SEQ ID NO: 1610787 - DNA, 15 bp, Homo sapiens
tccttaagggagtat

SEQ ID NO: 1610788 - DNA, 15 bp, Homo sapiens
ccttaagggagtatt

SEQ ID NO: 1610789 - DNA, 15 bp, Homo sapiens
cttaagggagtattt

SEQ ID NO: 1610790 - DNA, 15 bp, Homo sapiens
ttaagggagtattta

SEQ ID NO: 1610791 - DNA, 15 bp, Homo sapiens
taagggagtatttaa

SEQ ID NO: 1610792 - DNA, 15 bp, Homo sapiens
aagggagtatttaat

SEQ ID NO: 1610793 - DNA, 15 bp, Homo sapiens
agggagtatttaatt

SEQ ID NO: 1610794 - DNA, 15 bp, Homo sapiens
gggagtatttaattt

SEQ ID NO: 1610795 - DNA, 15 bp, Homo sapiens
ggagtatttaatttt

SEQ ID NO: 1610796 - DNA, 15 bp, Homo sapiens
gagtatttaattttg

SEQ ID NO: 1610797 - DNA, 15 bp, Homo sapiens
agtatttaattttgt

SEQ ID NO: 1610798 - DNA, 15 bp, Homo sapiens
gtatttaattttgtt

SEQ ID NO: 1610799 - DNA, 15 bp, Homo sapiens
tatttaattttgttt

SEQ ID NO: 1610800 - DNA, 15 bp, Homo sapiens
atttaattttgtttt

SEQ ID NO: 1610801 - DNA, 15 bp, Homo sapiens
tttaattttgtttta

SEQ ID NO: 1610802 - DNA, 15 bp, Homo sapiens
ttaattttgttttat

SEQ ID NO: 1610803 - DNA, 15 bp, Homo sapiens
taattttgttttatt

SEQ ID NO: 1610804 - DNA, 15 bp, Homo sapiens
aattttgttttattt

SEQ ID NO: 1610805 - DNA, 15 bp, Homo sapiens
attttgttttatttt

SEQ ID NO: 1610806 - DNA, 15 bp, Homo sapiens
ttttgttttattttg

SEQ ID NO: 1610807 - DNA, 15 bp, Homo sapiens
tttgttttattttgg

SEQ ID NO: 1610808 - DNA, 15 bp, Homo sapiens
ttgttttattttggc

SEQ ID NO: 1610809 - DNA, 15 bp, Homo sapiens
tgttttattttggca

SEQ ID NO: 1610810 - DNA, 15 bp, Homo sapiens
gttttattttggcaa

SEQ ID NO: 1610811 - DNA, 15 bp, Homo sapiens
ttttattttggcaac

SEQ ID NO: 1610812 - DNA, 15 bp, Homo sapiens
tttattttggcaact

SEQ ID NO: 1610813 - DNA, 15 bp, Homo sapiens
ttattttggcaacta

SEQ ID NO: 1610814 - DNA, 15 bp, Homo sapiens
tattttggcaactaa

SEQ ID NO: 1610815 - DNA, 15 bp, Homo sapiens
attttggcaactaag

SEQ ID NO: 1610816 - DNA, 15 bp, Homo sapiens
ttttggcaactaagg

SEQ ID NO: 1610817 - DNA, 15 bp, Homo sapiens
tttggcaactaaggg

SEQ ID NO: 1610818 - DNA, 15 bp, Homo sapiens
ttggcaactaagggc

SEQ ID NO: 1610819 - DNA, 15 bp, Homo sapiens
tggcaactaagggcc

SEQ ID NO: 1610820 - DNA, 15 bp, Homo sapiens
ggcaactaagggcct

SEQ ID NO: 1610821 - DNA, 15 bp, Homo sapiens
gcaactaagggcctt

SEQ ID NO: 1610822 - DNA, 15 bp, Homo sapiens
caactaagggcctta

SEQ ID NO: 1610823 - DNA, 15 bp, Homo sapiens
aactaagggccttaa

SEQ ID NO: 1610824 - DNA, 15 bp, Homo sapiens
actaagggccttaat

SEQ ID NO: 1610825 - DNA, 15 bp, Homo sapiens
ctaagggccttaatt

SEQ ID NO: 1610826 - DNA, 15 bp, Homo sapiens
taagggccttaatta

SEQ ID NO: 1610827 - DNA, 15 bp, Homo sapiens
aagggccttaattag

SEQ ID NO: 1610828 - DNA, 15 bp, Homo sapiens
agggccttaattagc

SEQ ID NO: 1610829 - DNA, 15 bp, Homo sapiens
gggccttaattagca

SEQ ID NO: 1610830 - DNA, 15 bp, Homo sapiens
ggccttaattagcaa

SEQ ID NO: 1610831 - DNA, 15 bp, Homo sapiens
gccttaattagcaaa

SEQ ID NO: 1610832 - DNA, 15 bp, Homo sapiens
ccttaattagcaaaa

SEQ ID NO: 1610833 - DNA, 15 bp, Homo sapiens
cttaattagcaaaat

SEQ ID NO: 1610834 - DNA, 15 bp, Homo sapiens
ttaattagcaaaatc

SEQ ID NO: 1610835 - DNA, 15 bp, Homo sapiens
taattagcaaaatct

SEQ ID NO: 1610836 - DNA, 15 bp, Homo sapiens
aattagcaaaatctg

SEQ ID NO: 1610837 - DNA, 15 bp, Homo sapiens
attagcaaaatctga

SEQ ID NO: 1610838 - DNA, 15 bp, Homo sapiens
ttagcaaaatctgaa

SEQ ID NO: 1610839 - DNA, 15 bp, Homo sapiens
tagcaaaatctgaat

SEQ ID NO: 1610840 - DNA, 15 bp, Homo sapiens
agcaaaatctgaatc

SEQ ID NO: 1610841 - DNA, 15 bp, Homo sapiens
gcaaaatctgaatca

SEQ ID NO: 1610842 - DNA, 15 bp, Homo sapiens
caaaatctgaatcac

SEQ ID NO: 1610843 - DNA, 15 bp, Homo sapiens
aaaatctgaatcacg

SEQ ID NO: 1610844 - DNA, 15 bp, Homo sapiens
aaatctgaatcacgt

SEQ ID NO: 1610845 - DNA, 15 bp, Homo sapiens
aatctgaatcacgtt

SEQ ID NO: 1610846 - DNA, 15 bp, Homo sapiens
atctgaatcacgtta

SEQ ID NO: 1610847 - DNA, 15 bp, Homo sapiens
tctgaatcacgttaa

SEQ ID NO: 1610848 - DNA, 15 bp, Homo sapiens
ctgaatcacgttaat

SEQ ID NO: 1610849 - DNA, 15 bp, Homo sapiens
tgaatcacgttaatt

SEQ ID NO: 1610850 - DNA, 15 bp, Homo sapiens
gaatcacgttaattc

SEQ ID NO: 1610851 - DNA, 15 bp, Homo sapiens
aatcacgttaattcc

SEQ ID NO: 1610852 - DNA, 15 bp, Homo sapiens
atcacgttaattccc

SEQ ID NO: 1610853 - DNA, 15 bp, Homo sapiens
tcacgttaattccct

SEQ ID NO: 1610854 - DNA, 15 bp, Homo sapiens
cacgttaattccctt

SEQ ID NO: 1610855 - DNA, 15 bp, Homo sapiens
acgttaattcccttt

SEQ ID NO: 1610856 - DNA, 15 bp, Homo sapiens
cgttaattccctttc

SEQ ID NO: 1610857 - DNA, 15 bp, Homo sapiens
gttaattccctttca

SEQ ID NO: 1610858 - DNA, 15 bp, Homo sapiens
ttaattccctttcag

SEQ ID NO: 1610859 - DNA, 15 bp, Homo sapiens
taattccctttcaga

SEQ ID NO: 1610860 - DNA, 15 bp, Homo sapiens
aattccctttcagag

SEQ ID NO: 1610861 - DNA, 15 bp, Homo sapiens
attccctttcagaga

SEQ ID NO: 1610862 - DNA, 15 bp, Homo sapiens
ttccctttcagagat

SEQ ID NO: 1610863 - DNA, 15 bp, Homo sapiens
tccctttcagagata

SEQ ID NO: 1610864 - DNA, 15 bp, Homo sapiens
ccctttcagagatat

SEQ ID NO: 1610865 - DNA, 15 bp, Homo sapiens
cctttcagagatatc

SEQ ID NO: 1610866 - DNA, 15 bp, Homo sapiens
ctttcagagatatca

SEQ ID NO: 1610867 - DNA, 15 bp, Homo sapiens
tttcagagatatcat

SEQ ID NO: 1610868 - DNA, 15 bp, Homo sapiens
ttcagagatatcatg

SEQ ID NO: 1610869 - DNA, 15 bp, Homo sapiens
tcagagatatcatga

SEQ ID NO: 1610870 - DNA, 15 bp, Homo sapiens
cagagatatcatgaa

SEQ ID NO: 1610871 - DNA, 15 bp, Homo sapiens
agagatatcatgaaa

SEQ ID NO: 1610872 - DNA, 15 bp, Homo sapiens
gagatatcatgaaag

SEQ ID NO: 1610873 - DNA, 15 bp, Homo sapiens
agatatcatgaaagt

SEQ ID NO: 1610874 - DNA, 15 bp, Homo sapiens
gatatcatgaaagtt

SEQ ID NO: 1610875 - DNA, 15 bp, Homo sapiens
atatcatgaaagttt

SEQ ID NO: 1610876 - DNA, 15 bp, Homo sapiens
tatcatgaaagtttc

SEQ ID NO: 1610877 - DNA, 15 bp, Homo sapiens
atcatgaaagtttcc

SEQ ID NO: 1610878 - DNA, 15 bp, Homo sapiens
tcatgaaagtttcct

SEQ ID NO: 1610879 - DNA, 15 bp, Homo sapiens
catgaaagtttcctc

SEQ ID NO: 1610880 - DNA, 15 bp, Homo sapiens
atgaaagtttcctca

SEQ ID NO: 1610881 - DNA, 15 bp, Homo sapiens
tgaaagtttcctcat

SEQ ID NO: 1610882 - DNA, 15 bp, Homo sapiens
gaaagtttcctcata

SEQ ID NO: 1610883 - DNA, 15 bp, Homo sapiens
aaagtttcctcataa

SEQ ID NO: 1610884 - DNA, 15 bp, Homo sapiens
aagtttcctcataag

SEQ ID NO: 1610885 - DNA, 15 bp, Homo sapiens
agtttcctcataagc

SEQ ID NO: 1610886 - DNA, 15 bp, Homo sapiens
gtttcctcataagcc

SEQ ID NO: 1610887 - DNA, 15 bp, Homo sapiens
tttcctcataagcca

SEQ ID NO: 1610888 - DNA, 15 bp, Homo sapiens
ttcctcataagccaa

SEQ ID NO: 1610889 - DNA, 15 bp, Homo sapiens
tcctcataagccaat

SEQ ID NO: 1610890 - DNA, 15 bp, Homo sapiens
cctcataagccaatt

SEQ ID NO: 1610891 - DNA, 15 bp, Homo sapiens
ctcataagccaatta

SEQ ID NO: 1610892 - DNA, 15 bp, Homo sapiens
tcataagccaattat

SEQ ID NO: 1610893 - DNA, 15 bp, Homo sapiens
cataagccaattata

SEQ ID NO: 1610894 - DNA, 15 bp, Homo sapiens
ataagccaattataa

SEQ ID NO: 1610895 - DNA, 15 bp, Homo sapiens
taagccaattataaa

SEQ ID NO: 1610896 - DNA, 15 bp, Homo sapiens
aagccaattataaaa

SEQ ID NO: 1610897 - DNA, 15 bp, Homo sapiens
agccaattataaaag

SEQ ID NO: 1610898 - DNA, 15 bp, Homo sapiens
gccaattataaaagt

SEQ ID NO: 1610899 - DNA, 15 bp, Homo sapiens
ccaattataaaagta

SEQ ID NO: 1610900 - DNA, 15 bp, Homo sapiens
caattataaaagtaa

SEQ ID NO: 1610901 - DNA, 15 bp, Homo sapiens
aattataaaagtaaa

SEQ ID NO: 1610902 - DNA, 15 bp, Homo sapiens
attataaaagtaaaa

SEQ ID NO: 1610903 - DNA, 15 bp, Homo sapiens
ttataaaagtaaaat

SEQ ID NO: 1610904 - DNA, 15 bp, Homo sapiens
tataaaagtaaaatt

SEQ ID NO: 1610905 - DNA, 15 bp, Homo sapiens
ataaaagtaaaatta

SEQ ID NO: 1610906 - DNA, 15 bp, Homo sapiens
taaaagtaaaattag

SEQ ID NO: 1610907 - DNA, 15 bp, Homo sapiens
aaaagtaaaattagt

SEQ ID NO: 1610908 - DNA, 15 bp, Homo sapiens
aagtaaaattagtta

SEQ ID NO: 1610909 - DNA, 15 bp, Homo sapiens
agtaaaattagttac

SEQ ID NO: 1610910 - DNA, 15 bp, Homo sapiens
gtaaaattagttact

SEQ ID NO: 1610911 - DNA, 15 bp, Homo sapiens
taaaattagttacta

SEQ ID NO: 1610912 - DNA, 15 bp, Homo sapiens
aaaattagttactac

SEQ ID NO: 1610913 - DNA, 15 bp, Homo sapiens
aaattagttactaca

SEQ ID NO: 1610914 - DNA, 15 bp, Homo sapiens
aattagttactacaa

SEQ ID NO: 1610915 - DNA, 15 bp, Homo sapiens
attagttactacaag

SEQ ID NO: 1610916 - DNA, 15 bp, Homo sapiens
ttagttactacaagc

SEQ ID NO: 1610917 - DNA, 15 bp, Homo sapiens
tagttactacaagca

SEQ ID NO: 1610918 - DNA, 15 bp, Homo sapiens
agttactacaagcaa

SEQ ID NO: 1610919 - DNA, 15 bp, Homo sapiens
gttactacaagcaaa

SEQ ID NO: 1610920 - DNA, 15 bp, Homo sapiens
ttactacaagcaaag

SEQ ID NO: 1610921 - DNA, 15 bp, Homo sapiens
tactacaagcaaagt

SEQ ID NO: 1610922 - DNA, 15 bp, Homo sapiens
actacaagcaaagtt

SEQ ID NO: 1610923 - DNA, 15 bp, Homo sapiens
ctacaagcaaagttt

SEQ ID NO: 1610924 - DNA, 15 bp, Homo sapiens
tacaagcaaagtttt

SEQ ID NO: 1610925 - DNA, 15 bp, Homo sapiens
acaagcaaagttttt

SEQ ID NO: 1610926 - DNA, 15 bp, Homo sapiens
caagcaaagttttta

SEQ ID NO: 1610927 - DNA, 15 bp, Homo sapiens
aagcaaagtttttag

SEQ ID NO: 1610928 - DNA, 15 bp, Homo sapiens
agcaaagtttttaga

SEQ ID NO: 1610929 - DNA, 15 bp, Homo sapiens
gcaaagtttttagaa

SEQ ID NO: 1610930 - DNA, 15 bp, Homo sapiens
caaagtttttagaaa

SEQ ID NO: 1610931 - DNA, 15 bp, Homo sapiens
aaagtttttagaaaa

SEQ ID NO: 1610932 - DNA, 15 bp, Homo sapiens
aagtttttagaaaat

SEQ ID NO: 1610933 - DNA, 15 bp, Homo sapiens
agtttttagaaaatt

SEQ ID NO: 1610934 - DNA, 15 bp, Homo sapiens
gtttttagaaaattc

SEQ ID NO: 1610935 - DNA, 15 bp, Homo sapiens
tttttagaaaattcc

SEQ ID NO: 1610936 - DNA, 15 bp, Homo sapiens
ttttagaaaattcct

SEQ ID NO: 1610937 - DNA, 15 bp, Homo sapiens
tttagaaaattcctg

SEQ ID NO: 1610938 - DNA, 15 bp, Homo sapiens
ttagaaaattcctga

SEQ ID NO: 1610939 - DNA, 15 bp, Homo sapiens
tagaaaattcctgac

SEQ ID NO: 1610940 - DNA, 15 bp, Homo sapiens
agaaaattcctgact

SEQ ID NO: 1610941 - DNA, 15 bp, Homo sapiens
gaaaattcctgactc

SEQ ID NO: 1610942 - DNA, 15 bp, Homo sapiens
aaaattcctgactct

SEQ ID NO: 1610943 - DNA, 15 bp, Homo sapiens
aaattcctgactcta

SEQ ID NO: 1610944 - DNA, 15 bp, Homo sapiens
aattcctgactctag

SEQ ID NO: 1610945 - DNA, 15 bp, Homo sapiens
attcctgactctagt

SEQ ID NO: 1610946 - DNA, 15 bp, Homo sapiens
ttcctgactctagta

SEQ ID NO: 1610947 - DNA, 15 bp, Homo sapiens
tcctgactctagtaa

SEQ ID NO: 1610948 - DNA, 15 bp, Homo sapiens
cctgactctagtaag

SEQ ID NO: 1610949 - DNA, 15 bp, Homo sapiens
ctgactctagtaagt

SEQ ID NO: 1610950 - DNA, 15 bp, Homo sapiens
tgactctagtaagtg

SEQ ID NO: 1610951 - DNA, 15 bp, Homo sapiens
gactctagtaagtgc

SEQ ID NO: 1610952 - DNA, 15 bp, Homo sapiens
actctagtaagtgcc

SEQ ID NO: 1610953 - DNA, 15 bp, Homo sapiens
ctctagtaagtgccc

SEQ ID NO: 1610954 - DNA, 15 bp, Homo sapiens
tctagtaagtgccca

SEQ ID NO: 1610955 - DNA, 15 bp, Homo sapiens
ctagtaagtgcccag

SEQ ID NO: 1610956 - DNA, 15 bp, Homo sapiens
tagtaagtgcccaga

SEQ ID NO: 1610957 - DNA, 15 bp, Homo sapiens
agtaagtgcccagaa

SEQ ID NO: 1610958 - DNA, 15 bp, Homo sapiens
gtaagtgcccagaaa

SEQ ID NO: 1610959 - DNA, 15 bp, Homo sapiens
taagtgcccagaaaa

SEQ ID NO: 1610960 - DNA, 15 bp, Homo sapiens
aagtgcccagaaaaa

SEQ ID NO: 1610961 - DNA, 15 bp, Homo sapiens
agtgcccagaaaaat

SEQ ID NO: 1610962 - DNA, 15 bp, Homo sapiens
gtgcccagaaaaatt

SEQ ID NO: 1610963 - DNA, 15 bp, Homo sapiens
tgcccagaaaaattt

SEQ ID NO: 1610964 - DNA, 15 bp, Homo sapiens
gcccagaaaaatttg

SEQ ID NO: 1610965 - DNA, 15 bp, Homo sapiens
cccagaaaaatttga

SEQ ID NO: 1610966 - DNA, 15 bp, Homo sapiens
ccagaaaaatttgaa

SEQ ID NO: 1610967 - DNA, 15 bp, Homo sapiens
cagaaaaatttgaat

SEQ ID NO: 1610968 - DNA, 15 bp, Homo sapiens
agaaaaatttgaatg

SEQ ID NO: 1610969 - DNA, 15 bp, Homo sapiens
gaaaaatttgaatgt

SEQ ID NO: 1610970 - DNA, 15 bp, Homo sapiens
aaaaatttgaatgta

SEQ ID NO: 1610971 - DNA, 15 bp, Homo sapiens
aaaatttgaatgtaa

SEQ ID NO: 1610972 - DNA, 15 bp, Homo sapiens
aaatttgaatgtaat

SEQ ID NO: 1610973 - DNA, 15 bp, Homo sapiens
aatttgaatgtaatt

SEQ ID NO: 1610974 - DNA, 15 bp, Homo sapiens
atttgaatgtaattg

SEQ ID NO: 1610975 - DNA, 15 bp, Homo sapiens
tttgaatgtaattga

SEQ ID NO: 1610976 - DNA, 15 bp, Homo sapiens
ttgaatgtaattgat

SEQ ID NO: 1610977 - DNA, 15 bp, Homo sapiens
tgaatgtaattgatt

SEQ ID NO: 1610978 - DNA, 15 bp, Homo sapiens
gaatgtaattgattt

SEQ ID NO: 1610979 - DNA, 15 bp, Homo sapiens
aatgtaattgatttg

SEQ ID NO: 1610980 - DNA, 15 bp, Homo sapiens
atgtaattgatttgc

SEQ ID NO: 1610981 - DNA, 15 bp, Homo sapiens
tgtaattgatttgca

SEQ ID NO: 1610982 - DNA, 15 bp, Homo sapiens
gtaattgatttgcat

SEQ ID NO: 1610983 - DNA, 15 bp, Homo sapiens
taattgatttgcatg

SEQ ID NO: 1610984 - DNA, 15 bp, Homo sapiens
aattgatttgcatga

SEQ ID NO: 1610985 - DNA, 15 bp, Homo sapiens
attgatttgcatgaa

SEQ ID NO: 1610986 - DNA, 15 bp, Homo sapiens
ttgatttgcatgaaa

SEQ ID NO: 1610987 - DNA, 15 bp, Homo sapiens
tgatttgcatgaaaa

SEQ ID NO: 1610988 - DNA, 15 bp, Homo sapiens
gatttgcatgaaaaa

SEQ ID NO: 1610989 - DNA, 15 bp, Homo sapiens
atttgcatgaaaaat

SEQ ID NO: 1610990 - DNA, 15 bp, Homo sapiens
tttgcatgaaaaatg

SEQ ID NO: 1610991 - DNA, 15 bp, Homo sapiens
ttgcatgaaaaatgc

SEQ ID NO: 1610992 - DNA, 15 bp, Homo sapiens
tgcatgaaaaatgct

SEQ ID NO: 1610993 - DNA, 15 bp, Homo sapiens
gcatgaaaaatgctg

SEQ ID NO: 1610994 - DNA, 15 bp, Homo sapiens
catgaaaaatgctgt

SEQ ID NO: 1610995 - DNA, 15 bp, Homo sapiens
atgaaaaatgctgta

SEQ ID NO: 1610996 - DNA, 15 bp, Homo sapiens
tgaaaaatgctgtaa

SEQ ID NO: 1610997 - DNA, 15 bp, Homo sapiens
gaaaaatgctgtaaa

SEQ ID NO: 1610998 - DNA, 15 bp, Homo sapiens
aaaaatgctgtaaaa

SEQ ID NO: 1610999 - DNA, 15 bp, Homo sapiens
aaaatgctgtaaaac

SEQ ID NO: 1611000 - DNA, 15 bp, Homo sapiens
aaatgctgtaaaaca

SEQ ID NO: 1611001 - DNA, 15 bp, Homo sapiens
aatgctgtaaaacat

SEQ ID NO: 1611002 - DNA, 15 bp, Homo sapiens
atgctgtaaaacata

SEQ ID NO: 1611003 - DNA, 15 bp, Homo sapiens
tgctgtaaaacataa

SEQ ID NO: 1611004 - DNA, 15 bp, Homo sapiens
gctgtaaaacataat

SEQ ID NO: 1611005 - DNA, 15 bp, Homo sapiens
ctgtaaaacataata

SEQ ID NO: 1611006 - DNA, 15 bp, Homo sapiens
tgtaaaacataataa

SEQ ID NO: 1611007 - DNA, 15 bp, Homo sapiens
gtaaaacataataac

SEQ ID NO: 1611008 - DNA, 15 bp, Homo sapiens
taaaacataataaca

SEQ ID NO: 1611009 - DNA, 15 bp, Homo sapiens
aaaacataataacat

SEQ ID NO: 1611010 - DNA, 15 bp, Homo sapiens
aaacataataacata

SEQ ID NO: 1611011 - DNA, 15 bp, Homo sapiens
aacataataacataa

SEQ ID NO: 1611012 - DNA, 15 bp, Homo sapiens
acataataacataaa

SEQ ID NO: 1611013 - DNA, 15 bp, Homo sapiens
cataataacataaac

SEQ ID NO: 1611014 - DNA, 15 bp, Homo sapiens
ataataacataaacg

SEQ ID NO: 1611015 - DNA, 15 bp, Homo sapiens
taataacataaacgt

SEQ ID NO: 1611016 - DNA, 15 bp, Homo sapiens
aataacataaacgtt

SEQ ID NO: 1611017 - DNA, 15 bp, Homo sapiens
ataacataaacgtta

SEQ ID NO: 1611018 - DNA, 15 bp, Homo sapiens
taacataaacgttaa

SEQ ID NO: 1611019 - DNA, 15 bp, Homo sapiens
aacataaacgttaat

SEQ ID NO: 1611020 - DNA, 15 bp, Homo sapiens
acataaacgttaatg

SEQ ID NO: 1611021 - DNA, 15 bp, Homo sapiens
cataaacgttaatgg

SEQ ID NO: 1611022 - DNA, 15 bp, Homo sapiens
ataaacgttaatggt

SEQ ID NO: 1611023 - DNA, 15 bp, Homo sapiens
taaacgttaatggtg

SEQ ID NO: 1611024 - DNA, 15 bp, Homo sapiens
aaacgttaatggtga

SEQ ID NO: 1611025 - DNA, 15 bp, Homo sapiens
aacgttaatggtgaa

SEQ ID NO: 1611026 - DNA, 15 bp, Homo sapiens
acgttaatggtgaat

SEQ ID NO: 1611027 - DNA, 15 bp, Homo sapiens
cgttaatggtgaatt

SEQ ID NO: 1611028 - DNA, 15 bp, Homo sapiens
gttaatggtgaattc

SEQ ID NO: 1611029 - DNA, 15 bp, Homo sapiens
ttaatggtgaattca

SEQ ID NO: 1611030 - DNA, 15 bp, Homo sapiens
taatggtgaattcag

SEQ ID NO: 1611031 - DNA, 15 bp, Homo sapiens
aatggtgaattcagt

SEQ ID NO: 1611032 - DNA, 15 bp, Homo sapiens
atggtgaattcagtg

SEQ ID NO: 1611033 - DNA, 15 bp, Homo sapiens
tggtgaattcagtga

SEQ ID NO: 1611034 - DNA, 15 bp, Homo sapiens
ggtgaattcagtgat

SEQ ID NO: 1611035 - DNA, 15 bp, Homo sapiens
gtgaattcagtgatg

SEQ ID NO: 1611036 - DNA, 15 bp, Homo sapiens
tgaattcagtgatgt

SEQ ID NO: 1611037 - DNA, 15 bp, Homo sapiens
gaattcagtgatgtt

SEQ ID NO: 1611038 - DNA, 15 bp, Homo sapiens
aattcagtgatgttg

SEQ ID NO: 1611039 - DNA, 15 bp, Homo sapiens
attcagtgatgttgg

SEQ ID NO: 1611040 - DNA, 15 bp, Homo sapiens
ttcagtgatgttggt

SEQ ID NO: 1611041 - DNA, 15 bp, Homo sapiens
tcagtgatgttggta

SEQ ID NO: 1611042 - DNA, 15 bp, Homo sapiens
cagtgatgttggtat

SEQ ID NO: 1611043 - DNA, 15 bp, Homo sapiens
agtgatgttggtatt

SEQ ID NO: 1611044 - DNA, 15 bp, Homo sapiens
gtgatgttggtattt

SEQ ID NO: 1611045 - DNA, 15 bp, Homo sapiens
tgatgttggtatttc

SEQ ID NO: 1611046 - DNA, 15 bp, Homo sapiens
gatgttggtatttcc

SEQ ID NO: 1611047 - DNA, 15 bp, Homo sapiens
atgttggtatttcca

SEQ ID NO: 1611048 - DNA, 15 bp, Homo sapiens
tgttggtatttccat

SEQ ID NO: 1611049 - DNA, 15 bp, Homo sapiens
gttggtatttccatg

SEQ ID NO: 1611050 - DNA, 15 bp, Homo sapiens
ttggtatttccatga

SEQ ID NO: 1611051 - DNA, 15 bp, Homo sapiens
tggtatttccatgac

SEQ ID NO: 1611052 - DNA, 15 bp, Homo sapiens
ggtatttccatgact

SEQ ID NO: 1611053 - DNA, 15 bp, Homo sapiens
gtatttccatgactt

SEQ ID NO: 1611054 - DNA, 15 bp, Homo sapiens
tatttccatgacttt

SEQ ID NO: 1611055 - DNA, 15 bp, Homo sapiens
atttccatgactttt

SEQ ID NO: 1611056 - DNA, 15 bp, Homo sapiens
tttccatgacttttt

SEQ ID NO: 1611057 - DNA, 15 bp, Homo sapiens
ttccatgactttttt

SEQ ID NO: 1611058 - DNA, 15 bp, Homo sapiens
tccatgacttttttc

SEQ ID NO: 1611059 - DNA, 15 bp, Homo sapiens
ccatgacttttttca

SEQ ID NO: 1611060 - DNA, 15 bp, Homo sapiens
catgacttttttcat

SEQ ID NO: 1611061 - DNA, 15 bp, Homo sapiens
atgacttttttcatt

SEQ ID NO: 1611062 - DNA, 15 bp, Homo sapiens
tgacttttttcattc

SEQ ID NO: 1611063 - DNA, 15 bp, Homo sapiens
gacttttttcattct

SEQ ID NO: 1611064 - DNA, 15 bp, Homo sapiens
acttttttcattctc

SEQ ID NO: 1611065 - DNA, 15 bp, Homo sapiens
cttttttcattctcc

SEQ ID NO: 1611066 - DNA, 15 bp, Homo sapiens
ttttttcattctcct

SEQ ID NO: 1611067 - DNA, 15 bp, Homo sapiens
tttttcattctcctt

SEQ ID NO: 1611068 - DNA, 15 bp, Homo sapiens
ttttcattctcctta

SEQ ID NO: 1611069 - DNA, 15 bp, Homo sapiens
tttcattctccttac

SEQ ID NO: 1611070 - DNA, 15 bp, Homo sapiens
ttcattctccttaca

SEQ ID NO: 1611071 - DNA, 15 bp, Homo sapiens
tcattctccttacat

SEQ ID NO: 1611072 - DNA, 15 bp, Homo sapiens
cattctccttacatg

SEQ ID NO: 1611073 - DNA, 15 bp, Homo sapiens
attctccttacatgc

SEQ ID NO: 1611074 - DNA, 15 bp, Homo sapiens
ttctccttacatgct

SEQ ID NO: 1611075 - DNA, 15 bp, Homo sapiens
tctccttacatgctg

SEQ ID NO: 1611076 - DNA, 15 bp, Homo sapiens
ctccttacatgctgt

SEQ ID NO: 1611077 - DNA, 15 bp, Homo sapiens
tccttacatgctgta

SEQ ID NO: 1611078 - DNA, 15 bp, Homo sapiens
ccttacatgctgtaa

SEQ ID NO: 1611079 - DNA, 15 bp, Homo sapiens
cttacatgctgtaaa

SEQ ID NO: 1611080 - DNA, 15 bp, Homo sapiens
ttacatgctgtaaat

SEQ ID NO: 1611081 - DNA, 15 bp, Homo sapiens
tacatgctgtaaatt

SEQ ID NO: 1611082 - DNA, 15 bp, Homo sapiens
acatgctgtaaatta

SEQ ID NO: 1611083 - DNA, 15 bp, Homo sapiens
catgctgtaaattat

SEQ ID NO: 1611084 - DNA, 15 bp, Homo sapiens
atgctgtaaattatt

SEQ ID NO: 1611085 - DNA, 15 bp, Homo sapiens
tgctgtaaattattt

SEQ ID NO: 1611086 - DNA, 15 bp, Homo sapiens
gctgtaaattatttt

SEQ ID NO: 1611087 - DNA, 15 bp, Homo sapiens
ctgtaaattattttt

SEQ ID NO: 1611088 - DNA, 15 bp, Homo sapiens
tgtaaattatttttt

SEQ ID NO: 1611089 - DNA, 15 bp, Homo sapiens
gtaaattatttttta

SEQ ID NO: 1611090 - DNA, 15 bp, Homo sapiens
taaattattttttaa

SEQ ID NO: 1611091 - DNA, 15 bp, Homo sapiens
aaattattttttaaa

SEQ ID NO: 1611092 - DNA, 15 bp, Homo sapiens
aattattttttaaat

SEQ ID NO: 1611093 - DNA, 15 bp, Homo sapiens
attattttttaaatg

SEQ ID NO: 1611094 - DNA, 15 bp, Homo sapiens
ttattttttaaatga

SEQ ID NO: 1611095 - DNA, 15 bp, Homo sapiens
tattttttaaatgaa

SEQ ID NO: 1611096 - DNA, 15 bp, Homo sapiens
ttttttaaatgaaaa

SEQ ID NO: 1611097 - DNA, 15 bp, Homo sapiens
tttttaaatgaaaat

SEQ ID NO: 1611098 - DNA, 15 bp, Homo sapiens
ttttaaatgaaaatt

SEQ ID NO: 1611099 - DNA, 15 bp, Homo sapiens
tttaaatgaaaattc

SEQ ID NO: 1611100 - DNA, 15 bp, Homo sapiens
ttaaatgaaaattct

SEQ ID NO: 1611101 - DNA, 15 bp, Homo sapiens
taaatgaaaattctt

SEQ ID NO: 1611102 - DNA, 15 bp, Homo sapiens
aaatgaaaattcttt

SEQ ID NO: 1611103 - DNA, 15 bp, Homo sapiens
aatgaaaattctttt

SEQ ID NO: 1611104 - DNA, 15 bp, Homo sapiens
atgaaaattctttta

SEQ ID NO: 1611105 - DNA, 15 bp, Homo sapiens
tgaaaattcttttat

SEQ ID NO: 1611106 - DNA, 15 bp, Homo sapiens
gaaaattcttttatt

SEQ ID NO: 1611107 - DNA, 15 bp, Homo sapiens
aaaattcttttatta

SEQ ID NO: 1611108 - DNA, 15 bp, Homo sapiens
aaattcttttattaa

SEQ ID NO: 1611109 - DNA, 15 bp, Homo sapiens
aattcttttattaaa

SEQ ID NO: 1611110 - DNA, 15 bp, Homo sapiens
attcttttattaaaa

SEQ ID NO: 1611111 - DNA, 15 bp, Homo sapiens
ttcttttattaaaaa

SEQ ID NO: 1611112 - DNA, 15 bp, Homo sapiens
tcttttattaaaaaa

SEQ ID NO: 1611113 - DNA, 15 bp, Homo sapiens
cttttattaaaaaaa

SEQ ID NO: 1611114 - DNA, 15 bp, Homo sapiens
ttttattaaaaaaag

SEQ ID NO: 1611115 - DNA, 15 bp, Homo sapiens
tttattaaaaaaagc

SEQ ID NO: 1611116 - DNA, 15 bp, Homo sapiens
ttattaaaaaaagct

SEQ ID NO: 1611117 - DNA, 15 bp, Homo sapiens
tattaaaaaaagcta

SEQ ID NO: 1611118 - DNA, 15 bp, Homo sapiens
attaaaaaaagctac

SEQ ID NO: 1611119 - DNA, 15 bp, Homo sapiens
ttaaaaaaagctaca

SEQ ID NO: 1611120 - DNA, 15 bp, Homo sapiens
taaaaaaagctacat

SEQ ID NO: 1611121 - DNA, 15 bp, Homo sapiens
aaaaaaagctacatt

SEQ ID NO: 1611122 - DNA, 15 bp, Homo sapiens
aaaaaagctacattt

SEQ ID NO: 1611123 - DNA, 15 bp, Homo sapiens
aaaaagctacatttt

SEQ ID NO: 1611124 - DNA, 15 bp, Homo sapiens
aaaagctacatttta

SEQ ID NO: 1611125 - DNA, 15 bp, Homo sapiens
aaagctacattttat

SEQ ID NO: 1611126 - DNA, 15 bp, Homo sapiens
aagctacattttata

SEQ ID NO: 1611127 - DNA, 15 bp, Homo sapiens
agctacattttataa

SEQ ID NO: 1611128 - DNA, 15 bp, Homo sapiens
gctacattttataaa

SEQ ID NO: 1611129 - DNA, 15 bp, Homo sapiens
ctacattttataaat

SEQ ID NO: 1611130 - DNA, 15 bp, Homo sapiens
tacattttataaatt

SEQ ID NO: 1611131 - DNA, 15 bp, Homo sapiens
acattttataaatta

SEQ ID NO: 1611132 - DNA, 15 bp, Homo sapiens
cattttataaattag

SEQ ID NO: 1611133 - DNA, 15 bp, Homo sapiens
attttataaattagt

SEQ ID NO: 1611134 - DNA, 15 bp, Homo sapiens
ttttataaattagta

SEQ ID NO: 1611135 - DNA, 15 bp, Homo sapiens
tttataaattagtat

SEQ ID NO: 1611136 - DNA, 15 bp, Homo sapiens
ttataaattagtata

SEQ ID NO: 1611137 - DNA, 15 bp, Homo sapiens
tataaattagtataa

SEQ ID NO: 1611138 - DNA, 15 bp, Homo sapiens
ataaattagtataac

SEQ ID NO: 1611139 - DNA, 15 bp, Homo sapiens
taaattagtataaca

SEQ ID NO: 1611140 - DNA, 15 bp, Homo sapiens
aaattagtataacat

SEQ ID NO: 1611141 - DNA, 15 bp, Homo sapiens
aattagtataacata

SEQ ID NO: 1611142 - DNA, 15 bp, Homo sapiens
attagtataacataa

SEQ ID NO: 1611143 - DNA, 15 bp, Homo sapiens
ttagtataacataat

SEQ ID NO: 1611144 - DNA, 15 bp, Homo sapiens
tagtataacataatg

SEQ ID NO: 1611145 - DNA, 15 bp, Homo sapiens
agtataacataatgg

SEQ ID NO: 1611146 - DNA, 15 bp, Homo sapiens
gtataacataatggt

SEQ ID NO: 1611147 - DNA, 15 bp, Homo sapiens
tataacataatggta

SEQ ID NO: 1611148 - DNA, 15 bp, Homo sapiens
ataacataatggtaa

SEQ ID NO: 1611149 - DNA, 15 bp, Homo sapiens
taacataatggtaaa

SEQ ID NO: 1611150 - DNA, 15 bp, Homo sapiens
aacataatggtaaag

SEQ ID NO: 1611151 - DNA, 15 bp, Homo sapiens
acataatggtaaaga

SEQ ID NO: 1611152 - DNA, 15 bp, Homo sapiens
cataatggtaaagag

SEQ ID NO: 1611153 - DNA, 15 bp, Homo sapiens
ataatggtaaagaga

SEQ ID NO: 1611154 - DNA, 15 bp, Homo sapiens
taatggtaaagagaa

SEQ ID NO: 1611155 - DNA, 15 bp, Homo sapiens
aatggtaaagagaaa

SEQ ID NO: 1611156 - DNA, 15 bp, Homo sapiens
atggtaaagagaaat

SEQ ID NO: 1611157 - DNA, 15 bp, Homo sapiens
tggtaaagagaaatg

SEQ ID NO: 1611158 - DNA, 15 bp, Homo sapiens
ggtaaagagaaatgt

SEQ ID NO: 1611159 - DNA, 15 bp, Homo sapiens
gtaaagagaaatgtg

SEQ ID NO: 1611160 - DNA, 15 bp, Homo sapiens
taaagagaaatgtga

SEQ ID NO: 1611161 - DNA, 15 bp, Homo sapiens
aaagagaaatgtgaa

SEQ ID NO: 1611162 - DNA, 15 bp, Homo sapiens
aagagaaatgtgaat

SEQ ID NO: 1611163 - DNA, 15 bp, Homo sapiens
agagaaatgtgaatg

SEQ ID NO: 1611164 - DNA, 15 bp, Homo sapiens
gagaaatgtgaatgt

SEQ ID NO: 1611165 - DNA, 15 bp, Homo sapiens
agaaatgtgaatgta

SEQ ID NO: 1611166 - DNA, 15 bp, Homo sapiens
gaaatgtgaatgtat

SEQ ID NO: 1611167 - DNA, 15 bp, Homo sapiens
aaatgtgaatgtatt

SEQ ID NO: 1611168 - DNA, 15 bp, Homo sapiens
aatgtgaatgtatta

SEQ ID NO: 1611169 - DNA, 15 bp, Homo sapiens
atgtgaatgtattag

SEQ ID NO: 1611170 - DNA, 15 bp, Homo sapiens
tgtgaatgtattaga

SEQ ID NO: 1611171 - DNA, 15 bp, Homo sapiens
gtgaatgtattagaa

SEQ ID NO: 1611172 - DNA, 15 bp, Homo sapiens
tgaatgtattagaaa

SEQ ID NO: 1611173 - DNA, 15 bp, Homo sapiens
gaatgtattagaaaa

SEQ ID NO: 1611174 - DNA, 15 bp, Homo sapiens
aatgtattagaaaag

SEQ ID NO: 1611175 - DNA, 15 bp, Homo sapiens
atgtattagaaaaga

SEQ ID NO: 1611176 - DNA, 15 bp, Homo sapiens
tgtattagaaaagat

SEQ ID NO: 1611177 - DNA, 15 bp, Homo sapiens
gtattagaaaagatg

SEQ ID NO: 1611178 - DNA, 15 bp, Homo sapiens
tattagaaaagatgc

SEQ ID NO: 1611179 - DNA, 15 bp, Homo sapiens
attagaaaagatgct

SEQ ID NO: 1611180 - DNA, 15 bp, Homo sapiens
ttagaaaagatgctc

SEQ ID NO: 1611181 - DNA, 15 bp, Homo sapiens
tagaaaagatgctcc

SEQ ID NO: 1611182 - DNA, 15 bp, Homo sapiens
agaaaagatgctcca

SEQ ID NO: 1611183 - DNA, 15 bp, Homo sapiens
gaaaagatgctccat

SEQ ID NO: 1611184 - DNA, 15 bp, Homo sapiens
aaaagatgctccatt

SEQ ID NO: 1611185 - DNA, 15 bp, Homo sapiens
aaagatgctccattg

SEQ ID NO: 1611186 - DNA, 15 bp, Homo sapiens
aagatgctccattga

SEQ ID NO: 1611187 - DNA, 15 bp, Homo sapiens
agatgctccattgag

SEQ ID NO: 1611188 - DNA, 15 bp, Homo sapiens
gatgctccattgaga

SEQ ID NO: 1611189 - DNA, 15 bp, Homo sapiens
atgctccattgagag

SEQ ID NO: 1611190 - DNA, 15 bp, Homo sapiens
tgctccattgagagg

SEQ ID NO: 1611191 - DNA, 15 bp, Homo sapiens
gctccattgagagga

SEQ ID NO: 1611192 - DNA, 15 bp, Homo sapiens
ctccattgagaggag

SEQ ID NO: 1611193 - DNA, 15 bp, Homo sapiens
tccattgagaggaga

SEQ ID NO: 1611194 - DNA, 15 bp, Homo sapiens
ccattgagaggagac

SEQ ID NO: 1611195 - DNA, 15 bp, Homo sapiens
cattgagaggagaca

SEQ ID NO: 1611196 - DNA, 15 bp, Homo sapiens
attgagaggagacac

SEQ ID NO: 1611197 - DNA, 15 bp, Homo sapiens
ttgagaggagacaca

SEQ ID NO: 1611198 - DNA, 15 bp, Homo sapiens
tgagaggagacacat

SEQ ID NO: 1611199 - DNA, 15 bp, Homo sapiens
gagaggagacacatt

SEQ ID NO: 1611200 - DNA, 15 bp, Homo sapiens
agaggagacacattt

SEQ ID NO: 1611201 - DNA, 15 bp, Homo sapiens
gaggagacacatttg

SEQ ID NO: 1611202 - DNA, 15 bp, Homo sapiens
aggagacacatttgt

SEQ ID NO: 1611203 - DNA, 15 bp, Homo sapiens
ggagacacatttgta

SEQ ID NO: 1611204 - DNA, 15 bp, Homo sapiens
gagacacatttgtat

SEQ ID NO: 1611205 - DNA, 15 bp, Homo sapiens
agacacatttgtatt

SEQ ID NO: 1611206 - DNA, 15 bp, Homo sapiens
gacacatttgtattt

SEQ ID NO: 1611207 - DNA, 15 bp, Homo sapiens
acacatttgtattta

SEQ ID NO: 1611208 - DNA, 15 bp, Homo sapiens
cacatttgtatttat

SEQ ID NO: 1611209 - DNA, 15 bp, Homo sapiens
acatttgtatttatc

SEQ ID NO: 1611210 - DNA, 15 bp, Homo sapiens
catttgtatttatca

SEQ ID NO: 1611211 - DNA, 15 bp, Homo sapiens
atttgtatttatcat

SEQ ID NO: 1611212 - DNA, 15 bp, Homo sapiens
tttgtatttatcatg

SEQ ID NO: 1611213 - DNA, 15 bp, Homo sapiens
ttgtatttatcatga

SEQ ID NO: 1611214 - DNA, 15 bp, Homo sapiens
tgtatttatcatgac

SEQ ID NO: 1611215 - DNA, 15 bp, Homo sapiens
gtatttatcatgacc

SEQ ID NO: 1611216 - DNA, 15 bp, Homo sapiens
tatttatcatgacct

SEQ ID NO: 1611217 - DNA, 15 bp, Homo sapiens
atttatcatgacctt

SEQ ID NO: 1611218 - DNA, 15 bp, Homo sapiens
tttatcatgaccttg

SEQ ID NO: 1611219 - DNA, 15 bp, Homo sapiens
ttatcatgaccttga

SEQ ID NO: 1611220 - DNA, 15 bp, Homo sapiens
tatcatgaccttgaa

SEQ ID NO: 1611221 - DNA, 15 bp, Homo sapiens
atcatgaccttgaat

SEQ ID NO: 1611222 - DNA, 15 bp, Homo sapiens
tcatgaccttgaatg

SEQ ID NO: 1611223 - DNA, 15 bp, Homo sapiens
catgaccttgaatga

SEQ ID NO: 1611224 - DNA, 15 bp, Homo sapiens
atgaccttgaatgaa

SEQ ID NO: 1611225 - DNA, 15 bp, Homo sapiens
tgaccttgaatgaag

SEQ ID NO: 1611226 - DNA, 15 bp, Homo sapiens
gaccttgaatgaagg

SEQ ID NO: 1611227 - DNA, 15 bp, Homo sapiens
accttgaatgaaggt

SEQ ID NO: 1611228 - DNA, 15 bp, Homo sapiens
ccttgaatgaaggtc

SEQ ID NO: 1611229 - DNA, 15 bp, Homo sapiens
cttgaatgaaggtcc

SEQ ID NO: 1611230 - DNA, 15 bp, Homo sapiens
ttgaatgaaggtccc

SEQ ID NO: 1611231 - DNA, 15 bp, Homo sapiens
tgaatgaaggtccct

SEQ ID NO: 1611232 - DNA, 15 bp, Homo sapiens
gaatgaaggtccctc

SEQ ID NO: 1611233 - DNA, 15 bp, Homo sapiens
aatgaaggtccctct

SEQ ID NO: 1611234 - DNA, 15 bp, Homo sapiens
atgaaggtccctctg

SEQ ID NO: 1611235 - DNA, 15 bp, Homo sapiens
tgaaggtccctctgc

SEQ ID NO: 1611236 - DNA, 15 bp, Homo sapiens
gaaggtccctctgca

SEQ ID NO: 1611237 - DNA, 15 bp, Homo sapiens
aaggtccctctgcag

SEQ ID NO: 1611238 - DNA, 15 bp, Homo sapiens
aggtccctctgcaga

SEQ ID NO: 1611239 - DNA, 15 bp, Homo sapiens
ggtccctctgcagat

SEQ ID NO: 1611240 - DNA, 15 bp, Homo sapiens
gtccctctgcagatc

SEQ ID NO: 1611241 - DNA, 15 bp, Homo sapiens
tccctctgcagatcc

SEQ ID NO: 1611242 - DNA, 15 bp, Homo sapiens
ccctctgcagatcct

SEQ ID NO: 1611243 - DNA, 15 bp, Homo sapiens
cctctgcagatccta

SEQ ID NO: 1611244 - DNA, 15 bp, Homo sapiens
ctctgcagatcctat

SEQ ID NO: 1611245 - DNA, 15 bp, Homo sapiens
tctgcagatcctatc

SEQ ID NO: 1611246 - DNA, 15 bp, Homo sapiens
ctgcagatcctatca

SEQ ID NO: 1611247 - DNA, 15 bp, Homo sapiens
tgcagatcctatcat

SEQ ID NO: 1611248 - DNA, 15 bp, Homo sapiens
gcagatcctatcata

SEQ ID NO: 1611249 - DNA, 15 bp, Homo sapiens
cagatcctatcataa

SEQ ID NO: 1611250 - DNA, 15 bp, Homo sapiens
agatcctatcataat

SEQ ID NO: 1611251 - DNA, 15 bp, Homo sapiens
gatcctatcataata

SEQ ID NO: 1611252 - DNA, 15 bp, Homo sapiens
atcctatcataatag

SEQ ID NO: 1611253 - DNA, 15 bp, Homo sapiens
tcctatcataatagt

SEQ ID NO: 1611254 - DNA, 15 bp, Homo sapiens
cctatcataatagtc

SEQ ID NO: 1611255 - DNA, 15 bp, Homo sapiens
ctatcataatagtcc

SEQ ID NO: 1611256 - DNA, 15 bp, Homo sapiens
tatcataatagtcct

SEQ ID NO: 1611257 - DNA, 15 bp, Homo sapiens
atcataatagtcctt

SEQ ID NO: 1611258 - DNA, 15 bp, Homo sapiens
tcataatagtccttg

SEQ ID NO: 1611259 - DNA, 15 bp, Homo sapiens
cataatagtccttgt

SEQ ID NO: 1611260 - DNA, 15 bp, Homo sapiens
ataatagtccttgtg

SEQ ID NO: 1611261 - DNA, 15 bp, Homo sapiens
taatagtccttgtgt

SEQ ID NO: 1611262 - DNA, 15 bp, Homo sapiens
aatagtccttgtgtc

SEQ ID NO: 1611263 - DNA, 15 bp, Homo sapiens
atagtccttgtgtca

SEQ ID NO: 1611264 - DNA, 15 bp, Homo sapiens
tagtccttgtgtcag

SEQ ID NO: 1611265 - DNA, 15 bp, Homo sapiens
agtccttgtgtcagt

SEQ ID NO: 1611266 - DNA, 15 bp, Homo sapiens
gtccttgtgtcagtg

SEQ ID NO: 1611267 - DNA, 15 bp, Homo sapiens
tccttgtgtcagtga

SEQ ID NO: 1611268 - DNA, 15 bp, Homo sapiens
ccttgtgtcagtgaa

SEQ ID NO: 1611269 - DNA, 15 bp, Homo sapiens
cttgtgtcagtgaag

SEQ ID NO: 1611270 - DNA, 15 bp, Homo sapiens
ttgtgtcagtgaagt

SEQ ID NO: 1611271 - DNA, 15 bp, Homo sapiens
tgtgtcagtgaagtc

SEQ ID NO: 1611272 - DNA, 15 bp, Homo sapiens
gtgtcagtgaagtcc

SEQ ID NO: 1611273 - DNA, 15 bp, Homo sapiens
tgtcagtgaagtccc

SEQ ID NO: 1611274 - DNA, 15 bp, Homo sapiens
gtcagtgaagtcccc

SEQ ID NO: 1611275 - DNA, 15 bp, Homo sapiens
tcagtgaagtcccct

SEQ ID NO: 1611276 - DNA, 15 bp, Homo sapiens
cagtgaagtcccctg

SEQ ID NO: 1611277 - DNA, 15 bp, Homo sapiens
agtgaagtcccctgt

SEQ ID NO: 1611278 - DNA, 15 bp, Homo sapiens
gtgaagtcccctgtg

SEQ ID NO: 1611279 - DNA, 15 bp, Homo sapiens
tgaagtcccctgtga

SEQ ID NO: 1611280 - DNA, 15 bp, Homo sapiens
gaagtcccctgtgaa

SEQ ID NO: 1611281 - DNA, 15 bp, Homo sapiens
aagtcccctgtgaaa

SEQ ID NO: 1611282 - DNA, 15 bp, Homo sapiens
agtcccctgtgaaac

SEQ ID NO: 1611283 - DNA, 15 bp, Homo sapiens
gtcccctgtgaaact

SEQ ID NO: 1611284 - DNA, 15 bp, Homo sapiens
tcccctgtgaaactg

SEQ ID NO: 1611285 - DNA, 15 bp, Homo sapiens
cccctgtgaaactgg

SEQ ID NO: 1611286 - DNA, 15 bp, Homo sapiens
ccctgtgaaactgga

SEQ ID NO: 1611287 - DNA, 15 bp, Homo sapiens
cctgtgaaactggat

SEQ ID NO: 1611288 - DNA, 15 bp, Homo sapiens
ctgtgaaactggata

SEQ ID NO: 1611289 - DNA, 15 bp, Homo sapiens
tgtgaaactggataa

SEQ ID NO: 1611290 - DNA, 15 bp, Homo sapiens
gtgaaactggataac

SEQ ID NO: 1611291 - DNA, 15 bp, Homo sapiens
tgaaactggataaca

SEQ ID NO: 1611292 - DNA, 15 bp, Homo sapiens
gaaactggataacag

SEQ ID NO: 1611293 - DNA, 15 bp, Homo sapiens
aaactggataacagg

SEQ ID NO: 1611294 - DNA, 15 bp, Homo sapiens
aactggataacagga

SEQ ID NO: 1611295 - DNA, 15 bp, Homo sapiens
actggataacaggat

SEQ ID NO: 1611296 - DNA, 15 bp, Homo sapiens
ctggataacaggatt

SEQ ID NO: 1611297 - DNA, 15 bp, Homo sapiens
tggataacaggattt

SEQ ID NO: 1611298 - DNA, 15 bp, Homo sapiens
ggataacaggatttt

SEQ ID NO: 1611299 - DNA, 15 bp, Homo sapiens
gataacaggatttta

SEQ ID NO: 1611300 - DNA, 15 bp, Homo sapiens
ataacaggattttaa

SEQ ID NO: 1611301 - DNA, 15 bp, Homo sapiens
taacaggattttaag

SEQ ID NO: 1611302 - DNA, 15 bp, Homo sapiens
aacaggattttaagg

SEQ ID NO: 1611303 - DNA, 15 bp, Homo sapiens
acaggattttaaggt

SEQ ID NO: 1611304 - DNA, 15 bp, Homo sapiens
caggattttaaggta

SEQ ID NO: 1611305 - DNA, 15 bp, Homo sapiens
aggattttaaggtag

SEQ ID NO: 1611306 - DNA, 15 bp, Homo sapiens
ggattttaaggtaga

SEQ ID NO: 1611307 - DNA, 15 bp, Homo sapiens
gattttaaggtagag

SEQ ID NO: 1611308 - DNA, 15 bp, Homo sapiens
attttaaggtagaga

SEQ ID NO: 1611309 - DNA, 15 bp, Homo sapiens
ttttaaggtagagat

SEQ ID NO: 1611310 - DNA, 15 bp, Homo sapiens
tttaaggtagagatg

SEQ ID NO: 1611311 - DNA, 15 bp, Homo sapiens
ttaaggtagagatgt

SEQ ID NO: 1611312 - DNA, 15 bp, Homo sapiens
taaggtagagatgtt

SEQ ID NO: 1611313 - DNA, 15 bp, Homo sapiens
aaggtagagatgttc

SEQ ID NO: 1611314 - DNA, 15 bp, Homo sapiens
aggtagagatgttcc

SEQ ID NO: 1611315 - DNA, 15 bp, Homo sapiens
ggtagagatgttcct

SEQ ID NO: 1611316 - DNA, 15 bp, Homo sapiens
gtagagatgttcctc

SEQ ID NO: 1611317 - DNA, 15 bp, Homo sapiens
tagagatgttcctca

SEQ ID NO: 1611318 - DNA, 15 bp, Homo sapiens
agagatgttcctcag

SEQ ID NO: 1611319 - DNA, 15 bp, Homo sapiens
gagatgttcctcagg

SEQ ID NO: 1611320 - DNA, 15 bp, Homo sapiens
agatgttcctcaggc

SEQ ID NO: 1611321 - DNA, 15 bp, Homo sapiens
gatgttcctcaggca

SEQ ID NO: 1611322 - DNA, 15 bp, Homo sapiens
atgttcctcaggcag

SEQ ID NO: 1611323 - DNA, 15 bp, Homo sapiens
tgttcctcaggcaga

SEQ ID NO: 1611324 - DNA, 15 bp, Homo sapiens
gttcctcaggcagat

SEQ ID NO: 1611325 - DNA, 15 bp, Homo sapiens
ttcctcaggcagatg

SEQ ID NO: 1611326 - DNA, 15 bp, Homo sapiens
tcctcaggcagatgg

SEQ ID NO: 1611327 - DNA, 15 bp, Homo sapiens
cctcaggcagatgga

SEQ ID NO: 1611328 - DNA, 15 bp, Homo sapiens
ctcaggcagatggaa

SEQ ID NO: 1611329 - DNA, 15 bp, Homo sapiens
tcaggcagatggaaa

SEQ ID NO: 1611330 - DNA, 15 bp, Homo sapiens
caggcagatggaaat

SEQ ID NO: 1611331 - DNA, 15 bp, Homo sapiens
aggcagatggaaatg

SEQ ID NO: 1611332 - DNA, 15 bp, Homo sapiens
ggcagatggaaatgt

SEQ ID NO: 1611333 - DNA, 15 bp, Homo sapiens
gcagatggaaatgta

SEQ ID NO: 1611334 - DNA, 15 bp, Homo sapiens
cagatggaaatgtag

SEQ ID NO: 1611335 - DNA, 15 bp, Homo sapiens
agatggaaatgtagt

SEQ ID NO: 1611336 - DNA, 15 bp, Homo sapiens
gatggaaatgtagtc

SEQ ID NO: 1611337 - DNA, 15 bp, Homo sapiens
atggaaatgtagtct

SEQ ID NO: 1611338 - DNA, 15 bp, Homo sapiens
tggaaatgtagtcta

SEQ ID NO: 1611339 - DNA, 15 bp, Homo sapiens
ggaaatgtagtctat

SEQ ID NO: 1611340 - DNA, 15 bp, Homo sapiens
gaaatgtagtctata

SEQ ID NO: 1611341 - DNA, 15 bp, Homo sapiens
aaatgtagtctatag

SEQ ID NO: 1611342 - DNA, 15 bp, Homo sapiens
aatgtagtctatagc

SEQ ID NO: 1611343 - DNA, 15 bp, Homo sapiens
atgtagtctatagct

SEQ ID NO: 1611344 - DNA, 15 bp, Homo sapiens
tgtagtctatagctg

SEQ ID NO: 1611345 - DNA, 15 bp, Homo sapiens
gtagtctatagctgt

SEQ ID NO: 1611346 - DNA, 15 bp, Homo sapiens
tagtctatagctgtg

SEQ ID NO: 1611347 - DNA, 15 bp, Homo sapiens
agtctatagctgtga

SEQ ID NO: 1611348 - DNA, 15 bp, Homo sapiens
gtctatagctgtgaa

SEQ ID NO: 1611349 - DNA, 15 bp, Homo sapiens
tctatagctgtgaag

SEQ ID NO: 1611350 - DNA, 15 bp, Homo sapiens
ctatagctgtgaaga

SEQ ID NO: 1611351 - DNA, 15 bp, Homo sapiens
tatagctgtgaagat

SEQ ID NO: 1611352 - DNA, 15 bp, Homo sapiens
atagctgtgaagata

SEQ ID NO: 1611353 - DNA, 15 bp, Homo sapiens
tagctgtgaagataa

SEQ ID NO: 1611354 - DNA, 15 bp, Homo sapiens
agctgtgaagataag

SEQ ID NO: 1611355 - DNA, 15 bp, Homo sapiens
gctgtgaagataagt

SEQ ID NO: 1611356 - DNA, 15 bp, Homo sapiens
ctgtgaagataagtc

SEQ ID NO: 1611357 - DNA, 15 bp, Homo sapiens
tgtgaagataagtca

SEQ ID NO: 1611358 - DNA, 15 bp, Homo sapiens
gtgaagataagtcag

SEQ ID NO: 1611359 - DNA, 15 bp, Homo sapiens
tgaagataagtcagg

SEQ ID NO: 1611360 - DNA, 15 bp, Homo sapiens
gaagataagtcaggc

SEQ ID NO: 1611361 - DNA, 15 bp, Homo sapiens
aagataagtcaggca

SEQ ID NO: 1611362 - DNA, 15 bp, Homo sapiens
agataagtcaggcaa

SEQ ID NO: 1611363 - DNA, 15 bp, Homo sapiens
gataagtcaggcaat

SEQ ID NO: 1611364 - DNA, 15 bp, Homo sapiens
ataagtcaggcaatg

SEQ ID NO: 1611365 - DNA, 15 bp, Homo sapiens
taagtcaggcaatga

SEQ ID NO: 1611366 - DNA, 15 bp, Homo sapiens
aagtcaggcaatgaa

SEQ ID NO: 1611367 - DNA, 15 bp, Homo sapiens
agtcaggcaatgaaa

SEQ ID NO: 1611368 - DNA, 15 bp, Homo sapiens
gtcaggcaatgaaat

SEQ ID NO: 1611369 - DNA, 15 bp, Homo sapiens
tcaggcaatgaaata

SEQ ID NO: 1611370 - DNA, 15 bp, Homo sapiens
caggcaatgaaataa

SEQ ID NO: 1611371 - DNA, 15 bp, Homo sapiens
aggcaatgaaataat

SEQ ID NO: 1611372 - DNA, 15 bp, Homo sapiens
ggcaatgaaataatt

SEQ ID NO: 1611373 - DNA, 15 bp, Homo sapiens
gcaatgaaataatta

SEQ ID NO: 1611374 - DNA, 15 bp, Homo sapiens
caatgaaataattat

SEQ ID NO: 1611375 - DNA, 15 bp, Homo sapiens
aatgaaataattata

SEQ ID NO: 1611376 - DNA, 15 bp, Homo sapiens
atgaaataattatag

SEQ ID NO: 1611377 - DNA, 15 bp, Homo sapiens
tgaaataattataga

SEQ ID NO: 1611378 - DNA, 15 bp, Homo sapiens
gaaataattatagag

SEQ ID NO: 1611379 - DNA, 15 bp, Homo sapiens
aaataattatagaga

SEQ ID NO: 1611380 - DNA, 15 bp, Homo sapiens
aataattatagagaa

SEQ ID NO: 1611381 - DNA, 15 bp, Homo sapiens
ataattatagagaaa

SEQ ID NO: 1611382 - DNA, 15 bp, Homo sapiens
taattatagagaaaa

SEQ ID NO: 1611383 - DNA, 15 bp, Homo sapiens
aattatagagaaaaa

SEQ ID NO: 1611384 - DNA, 15 bp, Homo sapiens
attatagagaaaaaa

SEQ ID NO: 1611385 - DNA, 15 bp, Homo sapiens
ttatagagaaaaaat

SEQ ID NO: 1611386 - DNA, 15 bp, Homo sapiens
tatagagaaaaaata

SEQ ID NO: 1611387 - DNA, 15 bp, Homo sapiens
atagagaaaaaataa

SEQ ID NO: 1611388 - DNA, 15 bp, Homo sapiens
tagagaaaaaataat

SEQ ID NO: 1611389 - DNA, 15 bp, Homo sapiens
agagaaaaaataatg

SEQ ID NO: 1611390 - DNA, 15 bp, Homo sapiens
gagaaaaaataatgt

SEQ ID NO: 1611391 - DNA, 15 bp, Homo sapiens
agaaaaaataatgta

SEQ ID NO: 1611392 - DNA, 15 bp, Homo sapiens
gaaaaaataatgtaa

SEQ ID NO: 1611393 - DNA, 15 bp, Homo sapiens
aaaaaataatgtaag

SEQ ID NO: 1611394 - DNA, 15 bp, Homo sapiens
aaaaataatgtaagc

SEQ ID NO: 1611395 - DNA, 15 bp, Homo sapiens
aaaataatgtaagct

SEQ ID NO: 1611396 - DNA, 15 bp, Homo sapiens
aaataatgtaagcta

SEQ ID NO: 1611397 - DNA, 15 bp, Homo sapiens
aataatgtaagctat

SEQ ID NO: 1611398 - DNA, 15 bp, Homo sapiens
ataatgtaagctatc

SEQ ID NO: 1611399 - DNA, 15 bp, Homo sapiens
taatgtaagctatca

SEQ ID NO: 1611400 - DNA, 15 bp, Homo sapiens
aatgtaagctatcaa

SEQ ID NO: 1611401 - DNA, 15 bp, Homo sapiens
atgtaagctatcaaa

SEQ ID NO: 1611402 - DNA, 15 bp, Homo sapiens
tgtaagctatcaaag

SEQ ID NO: 1611403 - DNA, 15 bp, Homo sapiens
gtaagctatcaaaga

SEQ ID NO: 1611404 - DNA, 15 bp, Homo sapiens
taagctatcaaagac

SEQ ID NO: 1611405 - DNA, 15 bp, Homo sapiens
aagctatcaaagaca

SEQ ID NO: 1611406 - DNA, 15 bp, Homo sapiens
agctatcaaagacag

SEQ ID NO: 1611407 - DNA, 15 bp, Homo sapiens
gctatcaaagacaga

SEQ ID NO: 1611408 - DNA, 15 bp, Homo sapiens
ctatcaaagacagat

SEQ ID NO: 1611409 - DNA, 15 bp, Homo sapiens
tatcaaagacagatg

SEQ ID NO: 1611410 - DNA, 15 bp, Homo sapiens
atcaaagacagatgt

SEQ ID NO: 1611411 - DNA, 15 bp, Homo sapiens
tcaaagacagatgta

SEQ ID NO: 1611412 - DNA, 15 bp, Homo sapiens
caaagacagatgtat

SEQ ID NO: 1611413 - DNA, 15 bp, Homo sapiens
aaagacagatgtata

SEQ ID NO: 1611414 - DNA, 15 bp, Homo sapiens
aagacagatgtatac

SEQ ID NO: 1611415 - DNA, 15 bp, Homo sapiens
agacagatgtataca

SEQ ID NO: 1611416 - DNA, 15 bp, Homo sapiens
gacagatgtatacaa

SEQ ID NO: 1611417 - DNA, 15 bp, Homo sapiens
acagatgtatacaag

SEQ ID NO: 1611418 - DNA, 15 bp, Homo sapiens
cagatgtatacaagg

SEQ ID NO: 1611419 - DNA, 15 bp, Homo sapiens
agatgtatacaaggg

SEQ ID NO: 1611420 - DNA, 15 bp, Homo sapiens
gatgtatacaaggga

SEQ ID NO: 1611421 - DNA, 15 bp, Homo sapiens
atgtatacaagggag

SEQ ID NO: 1611422 - DNA, 15 bp, Homo sapiens
tgtatacaagggaga

SEQ ID NO: 1611423 - DNA, 15 bp, Homo sapiens
gtatacaagggagac

SEQ ID NO: 1611424 - DNA, 15 bp, Homo sapiens
tatacaagggagaca

SEQ ID NO: 1611425 - DNA, 15 bp, Homo sapiens
atacaagggagacag

SEQ ID NO: 1611426 - DNA, 15 bp, Homo sapiens
tacaagggagacaga

SEQ ID NO: 1611427 - DNA, 15 bp, Homo sapiens
acaagggagacagag

SEQ ID NO: 1611428 - DNA, 15 bp, Homo sapiens
caagggagacagagt

SEQ ID NO: 1611429 - DNA, 15 bp, Homo sapiens
aagggagacagagtc

SEQ ID NO: 1611430 - DNA, 15 bp, Homo sapiens
agggagacagagtca

SEQ ID NO: 1611431 - DNA, 15 bp, Homo sapiens
gggagacagagtcac

SEQ ID NO: 1611432 - DNA, 15 bp, Homo sapiens
ggagacagagtcaca

SEQ ID NO: 1611433 - DNA, 15 bp, Homo sapiens
gagacagagtcacat

SEQ ID NO: 1611434 - DNA, 15 bp, Homo sapiens
agacagagtcacata

SEQ ID NO: 1611435 - DNA, 15 bp, Homo sapiens
gacagagtcacataa

SEQ ID NO: 1611436 - DNA, 15 bp, Homo sapiens
acagagtcacataaa

SEQ ID NO: 1611437 - DNA, 15 bp, Homo sapiens
cagagtcacataaag

SEQ ID NO: 1611438 - DNA, 15 bp, Homo sapiens
agagtcacataaagt

SEQ ID NO: 1611439 - DNA, 15 bp, Homo sapiens
gagtcacataaagtc

SEQ ID NO: 1611440 - DNA, 15 bp, Homo sapiens
agtcacataaagtct

SEQ ID NO: 1611441 - DNA, 15 bp, Homo sapiens
gtcacataaagtctc

SEQ ID NO: 1611442 - DNA, 15 bp, Homo sapiens
tcacataaagtctca

SEQ ID NO: 1611443 - DNA, 15 bp, Homo sapiens
cacataaagtctcag

SEQ ID NO: 1611444 - DNA, 15 bp, Homo sapiens
acataaagtctcaga

SEQ ID NO: 1611445 - DNA, 15 bp, Homo sapiens
cataaagtctcagat

SEQ ID NO: 1611446 - DNA, 15 bp, Homo sapiens
ataaagtctcagatg

SEQ ID NO: 1611447 - DNA, 15 bp, Homo sapiens
taaagtctcagatgt

SEQ ID NO: 1611448 - DNA, 15 bp, Homo sapiens
aaagtctcagatgta

SEQ ID NO: 1611449 - DNA, 15 bp, Homo sapiens
aagtctcagatgtag

SEQ ID NO: 1611450 - DNA, 15 bp, Homo sapiens
agtctcagatgtagg

SEQ ID NO: 1611451 - DNA, 15 bp, Homo sapiens
gtctcagatgtagga

SEQ ID NO: 1611452 - DNA, 15 bp, Homo sapiens
tctcagatgtaggag

SEQ ID NO: 1611453 - DNA, 15 bp, Homo sapiens
ctcagatgtaggagg

SEQ ID NO: 1611454 - DNA, 15 bp, Homo sapiens
tcagatgtaggaggc

SEQ ID NO: 1611455 - DNA, 15 bp, Homo sapiens
cagatgtaggaggcc

SEQ ID NO: 1611456 - DNA, 15 bp, Homo sapiens
agatgtaggaggcca

SEQ ID NO: 1611457 - DNA, 15 bp, Homo sapiens
gatgtaggaggccat

SEQ ID NO: 1611458 - DNA, 15 bp, Homo sapiens
atgtaggaggccata

SEQ ID NO: 1611459 - DNA, 15 bp, Homo sapiens
tgtaggaggccatag

SEQ ID NO: 1611460 - DNA, 15 bp, Homo sapiens
gtaggaggccataga

SEQ ID NO: 1611461 - DNA, 15 bp, Homo sapiens
taggaggccatagag

SEQ ID NO: 1611462 - DNA, 15 bp, Homo sapiens
aggaggccatagagc

SEQ ID NO: 1611463 - DNA, 15 bp, Homo sapiens
ggaggccatagagca

SEQ ID NO: 1611464 - DNA, 15 bp, Homo sapiens
gaggccatagagcaa

SEQ ID NO: 1611465 - DNA, 15 bp, Homo sapiens
aggccatagagcaaa

SEQ ID NO: 1611466 - DNA, 15 bp, Homo sapiens
ggccatagagcaaaa

SEQ ID NO: 1611467 - DNA, 15 bp, Homo sapiens
gccatagagcaaaac

SEQ ID NO: 1611468 - DNA, 15 bp, Homo sapiens
ccatagagcaaaacg

SEQ ID NO: 1611469 - DNA, 15 bp, Homo sapiens
catagagcaaaacgc

SEQ ID NO: 1611470 - DNA, 15 bp, Homo sapiens
atagagcaaaacgct

SEQ ID NO: 1611471 - DNA, 15 bp, Homo sapiens
tagagcaaaacgctg

SEQ ID NO: 1611472 - DNA, 15 bp, Homo sapiens
agagcaaaacgctga

SEQ ID NO: 1611473 - DNA, 15 bp, Homo sapiens
gagcaaaacgctgag

SEQ ID NO: 1611474 - DNA, 15 bp, Homo sapiens
agcaaaacgctgagt

SEQ ID NO: 1611475 - DNA, 15 bp, Homo sapiens
gcaaaacgctgagtt

SEQ ID NO: 1611476 - DNA, 15 bp, Homo sapiens
caaaacgctgagttc

SEQ ID NO: 1611477 - DNA, 15 bp, Homo sapiens
aaaacgctgagttct

SEQ ID NO: 1611478 - DNA, 15 bp, Homo sapiens
aaacgctgagttctg

SEQ ID NO: 1611479 - DNA, 15 bp, Homo sapiens
aacgctgagttctgg

SEQ ID NO: 1611480 - DNA, 15 bp, Homo sapiens
acgctgagttctggc

SEQ ID NO: 1611481 - DNA, 15 bp, Homo sapiens
cgctgagttctggct

SEQ ID NO: 1611482 - DNA, 15 bp, Homo sapiens
gctgagttctggctt

SEQ ID NO: 1611483 - DNA, 15 bp, Homo sapiens
ctgagttctggcttt

SEQ ID NO: 1611484 - DNA, 15 bp, Homo sapiens
tgagttctggctttc

SEQ ID NO: 1611485 - DNA, 15 bp, Homo sapiens
gagttctggctttca

SEQ ID NO: 1611486 - DNA, 15 bp, Homo sapiens
agttctggctttcag

SEQ ID NO: 1611487 - DNA, 15 bp, Homo sapiens
gttctggctttcagg

SEQ ID NO: 1611488 - DNA, 15 bp, Homo sapiens
ttctggctttcagga

SEQ ID NO: 1611489 - DNA, 15 bp, Homo sapiens
tctggctttcaggag

SEQ ID NO: 1611490 - DNA, 15 bp, Homo sapiens
ctggctttcaggagt

SEQ ID NO: 1611491 - DNA, 15 bp, Homo sapiens
tggctttcaggagtt

SEQ ID NO: 1611492 - DNA, 15 bp, Homo sapiens
ggctttcaggagttt

SEQ ID NO: 1611493 - DNA, 15 bp, Homo sapiens
gctttcaggagtttt

SEQ ID NO: 1611494 - DNA, 15 bp, Homo sapiens
ctttcaggagttttc

SEQ ID NO: 1611495 - DNA, 15 bp, Homo sapiens
tttcaggagttttct

SEQ ID NO: 1611496 - DNA, 15 bp, Homo sapiens
ttcaggagttttcta

SEQ ID NO: 1611497 - DNA, 15 bp, Homo sapiens
tcaggagttttctaa

SEQ ID NO: 1611498 - DNA, 15 bp, Homo sapiens
caggagttttctaac

SEQ ID NO: 1611499 - DNA, 15 bp, Homo sapiens
aggagttttctaaca

SEQ ID NO: 1611500 - DNA, 15 bp, Homo sapiens
ggagttttctaacat

SEQ ID NO: 1611501 - DNA, 15 bp, Homo sapiens
gagttttctaacata

SEQ ID NO: 1611502 - DNA, 15 bp, Homo sapiens
agttttctaacataa

SEQ ID NO: 1611503 - DNA, 15 bp, Homo sapiens
gttttctaacataac

SEQ ID NO: 1611504 - DNA, 15 bp, Homo sapiens
ttttctaacataaca

SEQ ID NO: 1611505 - DNA, 15 bp, Homo sapiens
tttctaacataacaa

SEQ ID NO: 1611506 - DNA, 15 bp, Homo sapiens
ttctaacataacaac

SEQ ID NO: 1611507 - DNA, 15 bp, Homo sapiens
tctaacataacaacc

SEQ ID NO: 1611508 - DNA, 15 bp, Homo sapiens
ctaacataacaacct

SEQ ID NO: 1611509 - DNA, 15 bp, Homo sapiens
taacataacaacctg

SEQ ID NO: 1611510 - DNA, 15 bp, Homo sapiens
aacataacaacctga

SEQ ID NO: 1611511 - DNA, 15 bp, Homo sapiens
acataacaacctgat

SEQ ID NO: 1611512 - DNA, 15 bp, Homo sapiens
cataacaacctgatc

SEQ ID NO: 1611513 - DNA, 15 bp, Homo sapiens
ataacaacctgatca

SEQ ID NO: 1611514 - DNA, 15 bp, Homo sapiens
taacaacctgatcac

SEQ ID NO: 1611515 - DNA, 15 bp, Homo sapiens
aacaacctgatcacc

SEQ ID NO: 1611516 - DNA, 15 bp, Homo sapiens
acaacctgatcacca

SEQ ID NO: 1611517 - DNA, 15 bp, Homo sapiens
caacctgatcaccag

SEQ ID NO: 1611518 - DNA, 15 bp, Homo sapiens
aacctgatcaccagt

SEQ ID NO: 1611519 - DNA, 15 bp, Homo sapiens
acctgatcaccagtt

SEQ ID NO: 1611520 - DNA, 15 bp, Homo sapiens
cctgatcaccagtta

SEQ ID NO: 1611521 - DNA, 15 bp, Homo sapiens
ctgatcaccagttaa

SEQ ID NO: 1611522 - DNA, 15 bp, Homo sapiens
tgatcaccagttaaa

SEQ ID NO: 1611523 - DNA, 15 bp, Homo sapiens
gatcaccagttaaaa

SEQ ID NO: 1611524 - DNA, 15 bp, Homo sapiens
atcaccagttaaaag

SEQ ID NO: 1611525 - DNA, 15 bp, Homo sapiens
tcaccagttaaaagc

SEQ ID NO: 1611526 - DNA, 15 bp, Homo sapiens
caccagttaaaagct

SEQ ID NO: 1611527 - DNA, 15 bp, Homo sapiens
accagttaaaagcta

SEQ ID NO: 1611528 - DNA, 15 bp, Homo sapiens
ccagttaaaagctaa

SEQ ID NO: 1611529 - DNA, 15 bp, Homo sapiens
cagttaaaagctaag

SEQ ID NO: 1611530 - DNA, 15 bp, Homo sapiens
agttaaaagctaagg

SEQ ID NO: 1611531 - DNA, 15 bp, Homo sapiens
gttaaaagctaagga

SEQ ID NO: 1611532 - DNA, 15 bp, Homo sapiens
ttaaaagctaaggag

SEQ ID NO: 1611533 - DNA, 15 bp, Homo sapiens
taaaagctaaggaga

SEQ ID NO: 1611534 - DNA, 15 bp, Homo sapiens
aaaagctaaggagaa

SEQ ID NO: 1611535 - DNA, 15 bp, Homo sapiens
aaagctaaggagaaa

SEQ ID NO: 1611536 - DNA, 15 bp, Homo sapiens
aagctaaggagaaag

SEQ ID NO: 1611537 - DNA, 15 bp, Homo sapiens
agctaaggagaaaga

SEQ ID NO: 1611538 - DNA, 15 bp, Homo sapiens
gctaaggagaaagat

SEQ ID NO: 1611539 - DNA, 15 bp, Homo sapiens
ctaaggagaaagatg

SEQ ID NO: 1611540 - DNA, 15 bp, Homo sapiens
taaggagaaagatga

SEQ ID NO: 1611541 - DNA, 15 bp, Homo sapiens
aaggagaaagatgaa

SEQ ID NO: 1611542 - DNA, 15 bp, Homo sapiens
aggagaaagatgaag

SEQ ID NO: 1611543 - DNA, 15 bp, Homo sapiens
ggagaaagatgaaga

SEQ ID NO: 1611544 - DNA, 15 bp, Homo sapiens
gagaaagatgaagaa

SEQ ID NO: 1611545 - DNA, 15 bp, Homo sapiens
agaaagatgaagaat

SEQ ID NO: 1611546 - DNA, 15 bp, Homo sapiens
gaaagatgaagaatc

SEQ ID NO: 1611547 - DNA, 15 bp, Homo sapiens
aaagatgaagaatca

SEQ ID NO: 1611548 - DNA, 15 bp, Homo sapiens
aagatgaagaatcag

SEQ ID NO: 1611549 - DNA, 15 bp, Homo sapiens
agatgaagaatcagt

SEQ ID NO: 1611550 - DNA, 15 bp, Homo sapiens
gatgaagaatcagta

SEQ ID NO: 1611551 - DNA, 15 bp, Homo sapiens
atgaagaatcagtat

SEQ ID NO: 1611552 - DNA, 15 bp, Homo sapiens
tgaagaatcagtatg

SEQ ID NO: 1611553 - DNA, 15 bp, Homo sapiens
gaagaatcagtatga

SEQ ID NO: 1611554 - DNA, 15 bp, Homo sapiens
aagaatcagtatgag

SEQ ID NO: 1611555 - DNA, 15 bp, Homo sapiens
agaatcagtatgaga

SEQ ID NO: 1611556 - DNA, 15 bp, Homo sapiens
gaatcagtatgagat

SEQ ID NO: 1611557 - DNA, 15 bp, Homo sapiens
aatcagtatgagatc

SEQ ID NO: 1611558 - DNA, 15 bp, Homo sapiens
atcagtatgagatca

SEQ ID NO: 1611559 - DNA, 15 bp, Homo sapiens
tcagtatgagatcat

SEQ ID NO: 1611560 - DNA, 15 bp, Homo sapiens
cagtatgagatcata

SEQ ID NO: 1611561 - DNA, 15 bp, Homo sapiens
agtatgagatcataa

SEQ ID NO: 1611562 - DNA, 15 bp, Homo sapiens
gtatgagatcataaa

SEQ ID NO: 1611563 - DNA, 15 bp, Homo sapiens
tatgagatcataaaa

SEQ ID NO: 1611564 - DNA, 15 bp, Homo sapiens
atgagatcataaaat

SEQ ID NO: 1611565 - DNA, 15 bp, Homo sapiens
tgagatcataaaatt

SEQ ID NO: 1611566 - DNA, 15 bp, Homo sapiens
gagatcataaaatta

SEQ ID NO: 1611567 - DNA, 15 bp, Homo sapiens
agatcataaaattat

SEQ ID NO: 1611568 - DNA, 15 bp, Homo sapiens
gatcataaaattatg

SEQ ID NO: 1611569 - DNA, 15 bp, Homo sapiens
atcataaaattatga

SEQ ID NO: 1611570 - DNA, 15 bp, Homo sapiens
tcataaaattatgat

SEQ ID NO: 1611571 - DNA, 15 bp, Homo sapiens
cataaaattatgatg

SEQ ID NO: 1611572 - DNA, 15 bp, Homo sapiens
ataaaattatgatgc

SEQ ID NO: 1611573 - DNA, 15 bp, Homo sapiens
taaaattatgatgct

SEQ ID NO: 1611574 - DNA, 15 bp, Homo sapiens
aaaattatgatgctc

SEQ ID NO: 1611575 - DNA, 15 bp, Homo sapiens
aaattatgatgctct

SEQ ID NO: 1611576 - DNA, 15 bp, Homo sapiens
aattatgatgctctt

SEQ ID NO: 1611577 - DNA, 15 bp, Homo sapiens
attatgatgctcttc

SEQ ID NO: 1611578 - DNA, 15 bp, Homo sapiens
ttatgatgctcttct

SEQ ID NO: 1611579 - DNA, 15 bp, Homo sapiens
tatgatgctcttcta

SEQ ID NO: 1611580 - DNA, 15 bp, Homo sapiens
atgatgctcttctaa

SEQ ID NO: 1611581 - DNA, 15 bp, Homo sapiens
tgatgctcttctaaa

SEQ ID NO: 1611582 - DNA, 15 bp, Homo sapiens
gatgctcttctaaaa

SEQ ID NO: 1611583 - DNA, 15 bp, Homo sapiens
atgctcttctaaaaa

SEQ ID NO: 1611584 - DNA, 15 bp, Homo sapiens
tgctcttctaaaaat

SEQ ID NO: 1611585 - DNA, 15 bp, Homo sapiens
gctcttctaaaaata

SEQ ID NO: 1611586 - DNA, 15 bp, Homo sapiens
ctcttctaaaaatat

SEQ ID NO: 1611587 - DNA, 15 bp, Homo sapiens
tcttctaaaaatatg

SEQ ID NO: 1611588 - DNA, 15 bp, Homo sapiens
cttctaaaaatatgc

SEQ ID NO: 1611589 - DNA, 15 bp, Homo sapiens
ttctaaaaatatgcg

SEQ ID NO: 1611590 - DNA, 15 bp, Homo sapiens
tctaaaaatatgcga

SEQ ID NO: 1611591 - DNA, 15 bp, Homo sapiens
ctaaaaatatgcgaa

SEQ ID NO: 1611592 - DNA, 15 bp, Homo sapiens
taaaaatatgcgaaa

SEQ ID NO: 1611593 - DNA, 15 bp, Homo sapiens
aaaaatatgcgaaat

SEQ ID NO: 1611594 - DNA, 15 bp, Homo sapiens
aaaatatgcgaaatg

SEQ ID NO: 1611595 - DNA, 15 bp, Homo sapiens
aaatatgcgaaatga

SEQ ID NO: 1611596 - DNA, 15 bp, Homo sapiens
aatatgcgaaatgag

SEQ ID NO: 1611597 - DNA, 15 bp, Homo sapiens
atatgcgaaatgagg

SEQ ID NO: 1611598 - DNA, 15 bp, Homo sapiens
tatgcgaaatgaggt

SEQ ID NO: 1611599 - DNA, 15 bp, Homo sapiens
atgcgaaatgaggtt

SEQ ID NO: 1611600 - DNA, 15 bp, Homo sapiens
tgcgaaatgaggttt

SEQ ID NO: 1611601 - DNA, 15 bp, Homo sapiens
gcgaaatgaggtttt

SEQ ID NO: 1611602 - DNA, 15 bp, Homo sapiens
cgaaatgaggttttt

SEQ ID NO: 1611603 - DNA, 15 bp, Homo sapiens
gaaatgaggttttta

SEQ ID NO: 1611604 - DNA, 15 bp, Homo sapiens
aaatgaggtttttag

SEQ ID NO: 1611605 - DNA, 15 bp, Homo sapiens
aatgaggtttttagg

SEQ ID NO: 1611606 - DNA, 15 bp, Homo sapiens
atgaggtttttaggg

SEQ ID NO: 1611607 - DNA, 15 bp, Homo sapiens
tgaggtttttaggga

SEQ ID NO: 1611608 - DNA, 15 bp, Homo sapiens
gaggtttttagggag

SEQ ID NO: 1611609 - DNA, 15 bp, Homo sapiens
aggtttttagggagg

SEQ ID NO: 1611610 - DNA, 15 bp, Homo sapiens
ggtttttagggaggt

SEQ ID NO: 1611611 - DNA, 15 bp, Homo sapiens
gtttttagggaggtg

SEQ ID NO: 1611612 - DNA, 15 bp, Homo sapiens
tttttagggaggtgt

SEQ ID NO: 1611613 - DNA, 15 bp, Homo sapiens
ttttagggaggtgta

SEQ ID NO: 1611614 - DNA, 15 bp, Homo sapiens
tttagggaggtgtag

SEQ ID NO: 1611615 - DNA, 15 bp, Homo sapiens
ttagggaggtgtagg

SEQ ID NO: 1611616 - DNA, 15 bp, Homo sapiens
tagggaggtgtaggt

SEQ ID NO: 1611617 - DNA, 15 bp, Homo sapiens
agggaggtgtaggta

SEQ ID NO: 1611618 - DNA, 15 bp, Homo sapiens
gggaggtgtaggtat

SEQ ID NO: 1611619 - DNA, 15 bp, Homo sapiens
ggaggtgtaggtatg

SEQ ID NO: 1611620 - DNA, 15 bp, Homo sapiens
gaggtgtaggtatgg

SEQ ID NO: 1611621 - DNA, 15 bp, Homo sapiens
aggtgtaggtatggc

SEQ ID NO: 1611622 - DNA, 15 bp, Homo sapiens
ggtgtaggtatggct

SEQ ID NO: 1611623 - DNA, 15 bp, Homo sapiens
gtgtaggtatggctg

SEQ ID NO: 1611624 - DNA, 15 bp, Homo sapiens
tgtaggtatggctga

SEQ ID NO: 1611625 - DNA, 15 bp, Homo sapiens
gtaggtatggctgaa

SEQ ID NO: 1611626 - DNA, 15 bp, Homo sapiens
taggtatggctgaag

SEQ ID NO: 1611627 - DNA, 15 bp, Homo sapiens
aggtatggctgaaga

SEQ ID NO: 1611628 - DNA, 15 bp, Homo sapiens
ggtatggctgaagaa

SEQ ID NO: 1611629 - DNA, 15 bp, Homo sapiens
gtatggctgaagaaa

SEQ ID NO: 1611630 - DNA, 15 bp, Homo sapiens
tatggctgaagaaaa

SEQ ID NO: 1611631 - DNA, 15 bp, Homo sapiens
atggctgaagaaaat

SEQ ID NO: 1611632 - DNA, 15 bp, Homo sapiens
tggctgaagaaaatc

SEQ ID NO: 1611633 - DNA, 15 bp, Homo sapiens
ggctgaagaaaatca

SEQ ID NO: 1611634 - DNA, 15 bp, Homo sapiens
gctgaagaaaatcaa

SEQ ID NO: 1611635 - DNA, 15 bp, Homo sapiens
ctgaagaaaatcaag

SEQ ID NO: 1611636 - DNA, 15 bp, Homo sapiens
tgaagaaaatcaagg

SEQ ID NO: 1611637 - DNA, 15 bp, Homo sapiens
gaagaaaatcaaggt

SEQ ID NO: 1611638 - DNA, 15 bp, Homo sapiens
aagaaaatcaaggtg

SEQ ID NO: 1611639 - DNA, 15 bp, Homo sapiens
agaaaatcaaggtga

SEQ ID NO: 1611640 - DNA, 15 bp, Homo sapiens
gaaaatcaaggtgaa

SEQ ID NO: 1611641 - DNA, 15 bp, Homo sapiens
aaaatcaaggtgaat

SEQ ID NO: 1611642 - DNA, 15 bp, Homo sapiens
aaatcaaggtgaatg

SEQ ID NO: 1611643 - DNA, 15 bp, Homo sapiens
aatcaaggtgaatga

SEQ ID NO: 1611644 - DNA, 15 bp, Homo sapiens
atcaaggtgaatgaa

SEQ ID NO: 1611645 - DNA, 15 bp, Homo sapiens
tcaaggtgaatgaag

SEQ ID NO: 1611646 - DNA, 15 bp, Homo sapiens
caaggtgaatgaaga

SEQ ID NO: 1611647 - DNA, 15 bp, Homo sapiens
aaggtgaatgaagac

SEQ ID NO: 1611648 - DNA, 15 bp, Homo sapiens
aggtgaatgaagaca

SEQ ID NO: 1611649 - DNA, 15 bp, Homo sapiens
ggtgaatgaagacaa

SEQ ID NO: 1611650 - DNA, 15 bp, Homo sapiens
gtgaatgaagacaag

SEQ ID NO: 1611651 - DNA, 15 bp, Homo sapiens
tgaatgaagacaaga

SEQ ID NO: 1611652 - DNA, 15 bp, Homo sapiens
gaatgaagacaagat

SEQ ID NO: 1611653 - DNA, 15 bp, Homo sapiens
aatgaagacaagatc

SEQ ID NO: 1611654 - DNA, 15 bp, Homo sapiens
atgaagacaagatca

SEQ ID NO: 1611655 - DNA, 15 bp, Homo sapiens
tgaagacaagatcaa

SEQ ID NO: 1611656 - DNA, 15 bp, Homo sapiens
gaagacaagatcaat

SEQ ID NO: 1611657 - DNA, 15 bp, Homo sapiens
aagacaagatcaatt

SEQ ID NO: 1611658 - DNA, 15 bp, Homo sapiens
agacaagatcaattg

SEQ ID NO: 1611659 - DNA, 15 bp, Homo sapiens
gacaagatcaattga

SEQ ID NO: 1611660 - DNA, 15 bp, Homo sapiens
acaagatcaattgag

SEQ ID NO: 1611661 - DNA, 15 bp, Homo sapiens
caagatcaattgaga

SEQ ID NO: 1611662 - DNA, 15 bp, Homo sapiens
aagatcaattgagaa

SEQ ID NO: 1611663 - DNA, 15 bp, Homo sapiens
agatcaattgagaat

SEQ ID NO: 1611664 - DNA, 15 bp, Homo sapiens
gatcaattgagaatg

SEQ ID NO: 1611665 - DNA, 15 bp, Homo sapiens
atcaattgagaatgt

SEQ ID NO: 1611666 - DNA, 15 bp, Homo sapiens
tcaattgagaatgta

SEQ ID NO: 1611667 - DNA, 15 bp, Homo sapiens
caattgagaatgtag

SEQ ID NO: 1611668 - DNA, 15 bp, Homo sapiens
aattgagaatgtagt

SEQ ID NO: 1611669 - DNA, 15 bp, Homo sapiens
attgagaatgtagtt

SEQ ID NO: 1611670 - DNA, 15 bp, Homo sapiens
ttgagaatgtagttt

SEQ ID NO: 1611671 - DNA, 15 bp, Homo sapiens
tgagaatgtagtttc

SEQ ID NO: 1611672 - DNA, 15 bp, Homo sapiens
gagaatgtagtttca

SEQ ID NO: 1611673 - DNA, 15 bp, Homo sapiens
agaatgtagtttcag

SEQ ID NO: 1611674 - DNA, 15 bp, Homo sapiens
gaatgtagtttcaga

SEQ ID NO: 1611675 - DNA, 15 bp, Homo sapiens
aatgtagtttcagaa

SEQ ID NO: 1611676 - DNA, 15 bp, Homo sapiens
atgtagtttcagaaa

SEQ ID NO: 1611677 - DNA, 15 bp, Homo sapiens
tgtagtttcagaaat

SEQ ID NO: 1611678 - DNA, 15 bp, Homo sapiens
gtagtttcagaaata

SEQ ID NO: 1611679 - DNA, 15 bp, Homo sapiens
tagtttcagaaatag

SEQ ID NO: 1611680 - DNA, 15 bp, Homo sapiens
agtttcagaaatagc

SEQ ID NO: 1611681 - DNA, 15 bp, Homo sapiens
gtttcagaaatagca

SEQ ID NO: 1611682 - DNA, 15 bp, Homo sapiens
tttcagaaatagcaa

SEQ ID NO: 1611683 - DNA, 15 bp, Homo sapiens
ttcagaaatagcaaa

SEQ ID NO: 1611684 - DNA, 15 bp, Homo sapiens
tcagaaatagcaaag

SEQ ID NO: 1611685 - DNA, 15 bp, Homo sapiens
cagaaatagcaaaga

SEQ ID NO: 1611686 - DNA, 15 bp, Homo sapiens
agaaatagcaaagaa

SEQ ID NO: 1611687 - DNA, 15 bp, Homo sapiens
gaaatagcaaagaag

SEQ ID NO: 1611688 - DNA, 15 bp, Homo sapiens
aaatagcaaagaagc

SEQ ID NO: 1611689 - DNA, 15 bp, Homo sapiens
aatagcaaagaagcc

SEQ ID NO: 1611690 - DNA, 15 bp, Homo sapiens
atagcaaagaagcca

SEQ ID NO: 1611691 - DNA, 15 bp, Homo sapiens
tagcaaagaagccaa

SEQ ID NO: 1611692 - DNA, 15 bp, Homo sapiens
agcaaagaagccaaa

SEQ ID NO: 1611693 - DNA, 15 bp, Homo sapiens
gcaaagaagccaaag

SEQ ID NO: 1611694 - DNA, 15 bp, Homo sapiens
caaagaagccaaagt

SEQ ID NO: 1611695 - DNA, 15 bp, Homo sapiens
aaagaagccaaagtt

SEQ ID NO: 1611696 - DNA, 15 bp, Homo sapiens
aagaagccaaagttt

SEQ ID NO: 1611697 - DNA, 15 bp, Homo sapiens
agaagccaaagtttg

SEQ ID NO: 1611698 - DNA, 15 bp, Homo sapiens
gaagccaaagtttga

SEQ ID NO: 1611699 - DNA, 15 bp, Homo sapiens
aagccaaagtttgag

SEQ ID NO: 1611700 - DNA, 15 bp, Homo sapiens
agccaaagtttgagg

SEQ ID NO: 1611701 - DNA, 15 bp, Homo sapiens
gccaaagtttgagga

SEQ ID NO: 1611702 - DNA, 15 bp, Homo sapiens
ccaaagtttgaggaa

SEQ ID NO: 1611703 - DNA, 15 bp, Homo sapiens
caaagtttgaggaag

SEQ ID NO: 1611704 - DNA, 15 bp, Homo sapiens
aaagtttgaggaagt

SEQ ID NO: 1611705 - DNA, 15 bp, Homo sapiens
aagtttgaggaagtt

SEQ ID NO: 1611706 - DNA, 15 bp, Homo sapiens
agtttgaggaagtta

SEQ ID NO: 1611707 - DNA, 15 bp, Homo sapiens
gtttgaggaagttaa

SEQ ID NO: 1611708 - DNA, 15 bp, Homo sapiens
tttgaggaagttaag

SEQ ID NO: 1611709 - DNA, 15 bp, Homo sapiens
ttgaggaagttaagt

SEQ ID NO: 1611710 - DNA, 15 bp, Homo sapiens
tgaggaagttaagtg

SEQ ID NO: 1611711 - DNA, 15 bp, Homo sapiens
gaggaagttaagtgg

SEQ ID NO: 1611712 - DNA, 15 bp, Homo sapiens
aggaagttaagtggc

SEQ ID NO: 1611713 - DNA, 15 bp, Homo sapiens
ggaagttaagtggct

SEQ ID NO: 1611714 - DNA, 15 bp, Homo sapiens
gaagttaagtggcta

SEQ ID NO: 1611715 - DNA, 15 bp, Homo sapiens
aagttaagtggctag

SEQ ID NO: 1611716 - DNA, 15 bp, Homo sapiens
agttaagtggctagg

SEQ ID NO: 1611717 - DNA, 15 bp, Homo sapiens
gttaagtggctaggg

SEQ ID NO: 1611718 - DNA, 15 bp, Homo sapiens
ttaagtggctaggga

SEQ ID NO: 1611719 - DNA, 15 bp, Homo sapiens
taagtggctagggat

SEQ ID NO: 1611720 - DNA, 15 bp, Homo sapiens
aagtggctagggata

SEQ ID NO: 1611721 - DNA, 15 bp, Homo sapiens
agtggctagggataa

SEQ ID NO: 1611722 - DNA, 15 bp, Homo sapiens
gtggctagggataac

SEQ ID NO: 1611723 - DNA, 15 bp, Homo sapiens
tggctagggataaca

SEQ ID NO: 1611724 - DNA, 15 bp, Homo sapiens
ggctagggataacat

SEQ ID NO: 1611725 - DNA, 15 bp, Homo sapiens
gctagggataacatt

SEQ ID NO: 1611726 - DNA, 15 bp, Homo sapiens
ctagggataacattg

SEQ ID NO: 1611727 - DNA, 15 bp, Homo sapiens
tagggataacattga

SEQ ID NO: 1611728 - DNA, 15 bp, Homo sapiens
agggataacattgag

SEQ ID NO: 1611729 - DNA, 15 bp, Homo sapiens
gggataacattgagg

SEQ ID NO: 1611730 - DNA, 15 bp, Homo sapiens
ggataacattgaggc

SEQ ID NO: 1611731 - DNA, 15 bp, Homo sapiens
gataacattgaggca

SEQ ID NO: 1611732 - DNA, 15 bp, Homo sapiens
ataacattgaggcac

SEQ ID NO: 1611733 - DNA, 15 bp, Homo sapiens
taacattgaggcact

SEQ ID NO: 1611734 - DNA, 15 bp, Homo sapiens
aacattgaggcacta

SEQ ID NO: 1611735 - DNA, 15 bp, Homo sapiens
acattgaggcactaa

SEQ ID NO: 1611736 - DNA, 15 bp, Homo sapiens
cattgaggcactaaa

SEQ ID NO: 1611737 - DNA, 15 bp, Homo sapiens
attgaggcactaaag

SEQ ID NO: 1611738 - DNA, 15 bp, Homo sapiens
ttgaggcactaaagc

SEQ ID NO: 1611739 - DNA, 15 bp, Homo sapiens
tgaggcactaaagca

SEQ ID NO: 1611740 - DNA, 15 bp, Homo sapiens
gaggcactaaagcat

SEQ ID NO: 1611741 - DNA, 15 bp, Homo sapiens
aggcactaaagcatt

SEQ ID NO: 1611742 - DNA, 15 bp, Homo sapiens
ggcactaaagcatta

SEQ ID NO: 1611743 - DNA, 15 bp, Homo sapiens
gcactaaagcattat

SEQ ID NO: 1611744 - DNA, 15 bp, Homo sapiens
cactaaagcattatt

SEQ ID NO: 1611745 - DNA, 15 bp, Homo sapiens
actaaagcattattg

SEQ ID NO: 1611746 - DNA, 15 bp, Homo sapiens
ctaaagcattattgg

SEQ ID NO: 1611747 - DNA, 15 bp, Homo sapiens
taaagcattattggt

SEQ ID NO: 1611748 - DNA, 15 bp, Homo sapiens
aaagcattattggtt

SEQ ID NO: 1611749 - DNA, 15 bp, Homo sapiens
aagcattattggttc

SEQ ID NO: 1611750 - DNA, 15 bp, Homo sapiens
agcattattggttct

SEQ ID NO: 1611751 - DNA, 15 bp, Homo sapiens
gcattattggttctg

SEQ ID NO: 1611752 - DNA, 15 bp, Homo sapiens
cattattggttctgc

SEQ ID NO: 1611753 - DNA, 15 bp, Homo sapiens
attattggttctgca

SEQ ID NO: 1611754 - DNA, 15 bp, Homo sapiens
ttattggttctgcag

SEQ ID NO: 1611755 - DNA, 15 bp, Homo sapiens
tattggttctgcagt

SEQ ID NO: 1611756 - DNA, 15 bp, Homo sapiens
attggttctgcagtc

SEQ ID NO: 1611757 - DNA, 15 bp, Homo sapiens
ttggttctgcagtca

SEQ ID NO: 1611758 - DNA, 15 bp, Homo sapiens
tggttctgcagtcaa

SEQ ID NO: 1611759 - DNA, 15 bp, Homo sapiens
ggttctgcagtcaag

SEQ ID NO: 1611760 - DNA, 15 bp, Homo sapiens
gttctgcagtcaagg

SEQ ID NO: 1611761 - DNA, 15 bp, Homo sapiens
ttctgcagtcaaggg

SEQ ID NO: 1611762 - DNA, 15 bp, Homo sapiens
tctgcagtcaagggt

SEQ ID NO: 1611763 - DNA, 15 bp, Homo sapiens
ctgcagtcaagggta

SEQ ID NO: 1611764 - DNA, 15 bp, Homo sapiens
tgcagtcaagggtag

SEQ ID NO: 1611765 - DNA, 15 bp, Homo sapiens
gcagtcaagggtagg

SEQ ID NO: 1611766 - DNA, 15 bp, Homo sapiens
cagtcaagggtagga

SEQ ID NO: 1611767 - DNA, 15 bp, Homo sapiens
agtcaagggtaggat

SEQ ID NO: 1611768 - DNA, 15 bp, Homo sapiens
gtcaagggtaggata

SEQ ID NO: 1611769 - DNA, 15 bp, Homo sapiens
tcaagggtaggatag

SEQ ID NO: 1611770 - DNA, 15 bp, Homo sapiens
caagggtaggataga

SEQ ID NO: 1611771 - DNA, 15 bp, Homo sapiens
aagggtaggatagat

SEQ ID NO: 1611772 - DNA, 15 bp, Homo sapiens
agggtaggatagatt

SEQ ID NO: 1611773 - DNA, 15 bp, Homo sapiens
gggtaggatagattg

SEQ ID NO: 1611774 - DNA, 15 bp, Homo sapiens
ggtaggatagattgt

SEQ ID NO: 1611775 - DNA, 15 bp, Homo sapiens
gtaggatagattgtt

SEQ ID NO: 1611776 - DNA, 15 bp, Homo sapiens
taggatagattgttt

SEQ ID NO: 1611777 - DNA, 15 bp, Homo sapiens
aggatagattgtttt

SEQ ID NO: 1611778 - DNA, 15 bp, Homo sapiens
ggatagattgttttt

SEQ ID NO: 1611779 - DNA, 15 bp, Homo sapiens
gatagattgtttttt

SEQ ID NO: 1611780 - DNA, 15 bp, Homo sapiens
atagattgttttttt

SEQ ID NO: 1611781 - DNA, 15 bp, Homo sapiens
tagattgtttttttt

SEQ ID NO: 1611782 - DNA, 15 bp, Homo sapiens
agattgttttttttt

SEQ ID NO: 1611783 - DNA, 15 bp, Homo sapiens
gattgtttttttttt

SEQ ID NO: 1611784 - DNA, 15 bp, Homo sapiens
attgttttttttttt

SEQ ID NO: 1611785 - DNA, 15 bp, Homo sapiens
ttgggaggctaaggt

SEQ ID NO: 1611786 - DNA, 15 bp, Homo sapiens
tgggaggctaaggtg

SEQ ID NO: 1611787 - DNA, 15 bp, Homo sapiens
gggaggctaaggtgg

SEQ ID NO: 1611788 - DNA, 15 bp, Homo sapiens
gaggctaaggtgggt

SEQ ID NO: 1611789 - DNA, 15 bp, Homo sapiens
aggctaaggtgggtg

SEQ ID NO: 1611790 - DNA, 15 bp, Homo sapiens
ggctaaggtgggtgg

SEQ ID NO: 1611791 - DNA, 15 bp, Homo sapiens
gctaaggtgggtgga

SEQ ID NO: 1611792 - DNA, 15 bp, Homo sapiens
ctaaggtgggtggat

SEQ ID NO: 1611793 - DNA, 15 bp, Homo sapiens
taaggtgggtggatc

SEQ ID NO: 1611794 - DNA, 15 bp, Homo sapiens
aaggtgggtggatca

SEQ ID NO: 1611795 - DNA, 15 bp, Homo sapiens
catggtgaaacccct

SEQ ID NO: 1611796 - DNA, 15 bp, Homo sapiens
atggtgaaacccctg

SEQ ID NO: 1611797 - DNA, 15 bp, Homo sapiens
tggtgaaacccctga

SEQ ID NO: 1611798 - DNA, 15 bp, Homo sapiens
ggtgaaacccctgac

SEQ ID NO: 1611799 - DNA, 15 bp, Homo sapiens
gtgaaacccctgact

SEQ ID NO: 1611800 - DNA, 15 bp, Homo sapiens
tgaaacccctgactc

SEQ ID NO: 1611801 - DNA, 15 bp, Homo sapiens
gaaacccctgactct

SEQ ID NO: 1611802 - DNA, 15 bp, Homo sapiens
aaacccctgactcta

SEQ ID NO: 1611803 - DNA, 15 bp, Homo sapiens
aacccctgactctac

SEQ ID NO: 1611804 - DNA, 15 bp, Homo sapiens
acccctgactctact

SEQ ID NO: 1611805 - DNA, 15 bp, Homo sapiens
cccctgactctacta

SEQ ID NO: 1611806 - DNA, 15 bp, Homo sapiens
ccctgactctactaa

SEQ ID NO: 1611807 - DNA, 15 bp, Homo sapiens
cctgactctactaaa

SEQ ID NO: 1611808 - DNA, 15 bp, Homo sapiens
ctgactctactaaaa

SEQ ID NO: 1611809 - DNA, 15 bp, Homo sapiens
tgactctactaaaaa

SEQ ID NO: 1611810 - DNA, 15 bp, Homo sapiens
gactctactaaaaat

SEQ ID NO: 1611811 - DNA, 15 bp, Homo sapiens
actctactaaaaatg

SEQ ID NO: 1611812 - DNA, 15 bp, Homo sapiens
ctctactaaaaatgc

SEQ ID NO: 1611813 - DNA, 15 bp, Homo sapiens
tctactaaaaatgca

SEQ ID NO: 1611814 - DNA, 15 bp, Homo sapiens
ctactaaaaatgcaa

SEQ ID NO: 1611815 - DNA, 15 bp, Homo sapiens
ctaaaaatgcaaaaa

SEQ ID NO: 1611816 - DNA, 15 bp, Homo sapiens
aaaaatgcaaaaaaa

SEQ ID NO: 1611817 - DNA, 15 bp, Homo sapiens
aaaatgcaaaaaaaa

SEQ ID NO: 1611818 - DNA, 15 bp, Homo sapiens
aaatgcaaaaaaaaa

SEQ ID NO: 1611819 - DNA, 15 bp, Homo sapiens
aatgcaaaaaaaaat

SEQ ID NO: 1611820 - DNA, 15 bp, Homo sapiens
atgcaaaaaaaaatt

SEQ ID NO: 1611821 - DNA, 15 bp, Homo sapiens
tgcaaaaaaaaatta

SEQ ID NO: 1611822 - DNA, 15 bp, Homo sapiens
gcaaaaaaaaattac

SEQ ID NO: 1611823 - DNA, 15 bp, Homo sapiens
caaaaaaaaattacc

SEQ ID NO: 1611824 - DNA, 15 bp, Homo sapiens
aaaaaaaattaccca

SEQ ID NO: 1611825 - DNA, 15 bp, Homo sapiens
aaaaaaattacccag

SEQ ID NO: 1611826 - DNA, 15 bp, Homo sapiens
aaaaaattacccagc

SEQ ID NO: 1611827 - DNA, 15 bp, Homo sapiens
aaaaattacccagca

SEQ ID NO: 1611828 - DNA, 15 bp, Homo sapiens
aaaattacccagcat

SEQ ID NO: 1611829 - DNA, 15 bp, Homo sapiens
aaattacccagcatg

SEQ ID NO: 1611830 - DNA, 15 bp, Homo sapiens
aattacccagcatgt

SEQ ID NO: 1611831 - DNA, 15 bp, Homo sapiens
attacccagcatgtt

SEQ ID NO: 1611832 - DNA, 15 bp, Homo sapiens
ttacccagcatgttg

SEQ ID NO: 1611833 - DNA, 15 bp, Homo sapiens
tacccagcatgttgg

SEQ ID NO: 1611834 - DNA, 15 bp, Homo sapiens
acccagcatgttggt

SEQ ID NO: 1611835 - DNA, 15 bp, Homo sapiens
cccagcatgttggtg

SEQ ID NO: 1611836 - DNA, 15 bp, Homo sapiens
ccagcatgttggtgt

SEQ ID NO: 1611837 - DNA, 15 bp, Homo sapiens
cagcatgttggtgtg

SEQ ID NO: 1611838 - DNA, 15 bp, Homo sapiens
agcatgttggtgtgc

SEQ ID NO: 1611839 - DNA, 15 bp, Homo sapiens
gcatgttggtgtgcc

SEQ ID NO: 1611840 - DNA, 15 bp, Homo sapiens
catgttggtgtgccc

SEQ ID NO: 1611841 - DNA, 15 bp, Homo sapiens
atgttggtgtgcccg

SEQ ID NO: 1611842 - DNA, 15 bp, Homo sapiens
tgttggtgtgcccgt

SEQ ID NO: 1611843 - DNA, 15 bp, Homo sapiens
gttggtgtgcccgta

SEQ ID NO: 1611844 - DNA, 15 bp, Homo sapiens
ttggtgtgcccgtag

SEQ ID NO: 1611845 - DNA, 15 bp, Homo sapiens
tggtgtgcccgtagt

SEQ ID NO: 1611846 - DNA, 15 bp, Homo sapiens
ggtgtgcccgtagtc

SEQ ID NO: 1611847 - DNA, 15 bp, Homo sapiens
gtgtgcccgtagtcc

SEQ ID NO: 1611848 - DNA, 15 bp, Homo sapiens
tgtgcccgtagtccc

SEQ ID NO: 1611849 - DNA, 15 bp, Homo sapiens
gtgcccgtagtccca

SEQ ID NO: 1611850 - DNA, 15 bp, Homo sapiens
tgcccgtagtcccag

SEQ ID NO: 1611851 - DNA, 15 bp, Homo sapiens
agctacttgagaggc

SEQ ID NO: 1611852 - DNA, 15 bp, Homo sapiens
gctacttgagaggct

SEQ ID NO: 1611853 - DNA, 15 bp, Homo sapiens
ctacttgagaggcta

SEQ ID NO: 1611854 - DNA, 15 bp, Homo sapiens
tacttgagaggctaa

SEQ ID NO: 1611855 - DNA, 15 bp, Homo sapiens
acttgagaggctaag

SEQ ID NO: 1611856 - DNA, 15 bp, Homo sapiens
cttgagaggctaaga

SEQ ID NO: 1611857 - DNA, 15 bp, Homo sapiens
ttgagaggctaagac

SEQ ID NO: 1611858 - DNA, 15 bp, Homo sapiens
tgagaggctaagaca

SEQ ID NO: 1611859 - DNA, 15 bp, Homo sapiens
gagaggctaagacag

SEQ ID NO: 1611860 - DNA, 15 bp, Homo sapiens
agaggctaagacagg

SEQ ID NO: 1611861 - DNA, 15 bp, Homo sapiens
taagacaggagaatt

SEQ ID NO: 1611862 - DNA, 15 bp, Homo sapiens
aagacaggagaattg

SEQ ID NO: 1611863 - DNA, 15 bp, Homo sapiens
agacaggagaattgt

SEQ ID NO: 1611864 - DNA, 15 bp, Homo sapiens
gacaggagaattgtt

SEQ ID NO: 1611865 - DNA, 15 bp, Homo sapiens
acaggagaattgttt

SEQ ID NO: 1611866 - DNA, 15 bp, Homo sapiens
caggagaattgtttg

SEQ ID NO: 1611867 - DNA, 15 bp, Homo sapiens
aggagaattgtttga

SEQ ID NO: 1611868 - DNA, 15 bp, Homo sapiens
ggagaattgtttgaa

SEQ ID NO: 1611869 - DNA, 15 bp, Homo sapiens
agaattgtttgaacc

SEQ ID NO: 1611870 - DNA, 15 bp, Homo sapiens
gaattgtttgaacct

SEQ ID NO: 1611871 - DNA, 15 bp, Homo sapiens
aattgtttgaacctg

SEQ ID NO: 1611872 - DNA, 15 bp, Homo sapiens
attgtttgaacctgg

SEQ ID NO: 1611873 - DNA, 15 bp, Homo sapiens
ttgtttgaacctggg

SEQ ID NO: 1611874 - DNA, 15 bp, Homo sapiens
tgtttgaacctggga

SEQ ID NO: 1611875 - DNA, 15 bp, Homo sapiens
gtttgaacctgggag

SEQ ID NO: 1611876 - DNA, 15 bp, Homo sapiens
tttgaacctgggagg

SEQ ID NO: 1611877 - DNA, 15 bp, Homo sapiens
ggaggcggaggttac

SEQ ID NO: 1611878 - DNA, 15 bp, Homo sapiens
gaggcggaggttaca

SEQ ID NO: 1611879 - DNA, 15 bp, Homo sapiens
aggcggaggttacag

SEQ ID NO: 1611880 - DNA, 15 bp, Homo sapiens
ggcggaggttacagt

SEQ ID NO: 1611881 - DNA, 15 bp, Homo sapiens
gcggaggttacagtg

SEQ ID NO: 1611882 - DNA, 15 bp, Homo sapiens
cggaggttacagtga

SEQ ID NO: 1611883 - DNA, 15 bp, Homo sapiens
ggaggttacagtgaa

SEQ ID NO: 1611884 - DNA, 15 bp, Homo sapiens
gaggttacagtgaac

SEQ ID NO: 1611885 - DNA, 15 bp, Homo sapiens
aggttacagtgaact

SEQ ID NO: 1611886 - DNA, 15 bp, Homo sapiens
ggttacagtgaactg

SEQ ID NO: 1611887 - DNA, 15 bp, Homo sapiens
gttacagtgaactga

SEQ ID NO: 1611888 - DNA, 15 bp, Homo sapiens
ttacagtgaactgag

SEQ ID NO: 1611889 - DNA, 15 bp, Homo sapiens
tacagtgaactgaga

SEQ ID NO: 1611890 - DNA, 15 bp, Homo sapiens
acagtgaactgagat

SEQ ID NO: 1611891 - DNA, 15 bp, Homo sapiens
cagtgaactgagatt

SEQ ID NO: 1611892 - DNA, 15 bp, Homo sapiens
agtgaactgagattg

SEQ ID NO: 1611893 - DNA, 15 bp, Homo sapiens
gtgaactgagattgc

SEQ ID NO: 1611894 - DNA, 15 bp, Homo sapiens
tgaactgagattgcg

SEQ ID NO: 1611895 - DNA, 15 bp, Homo sapiens
gaactgagattgcgc

SEQ ID NO: 1611896 - DNA, 15 bp, Homo sapiens
aactgagattgcgcc

SEQ ID NO: 1611897 - DNA, 15 bp, Homo sapiens
actgagattgcgcca

SEQ ID NO: 1611898 - DNA, 15 bp, Homo sapiens
ggtgacagagtgagg

SEQ ID NO: 1611899 - DNA, 15 bp, Homo sapiens
gtgacagagtgaggc

SEQ ID NO: 1611900 - DNA, 15 bp, Homo sapiens
tgacagagtgaggcc

SEQ ID NO: 1611901 - DNA, 15 bp, Homo sapiens
gacagagtgaggccc

SEQ ID NO: 1611902 - DNA, 15 bp, Homo sapiens
gtgaggccctgtctg

SEQ ID NO: 1611903 - DNA, 15 bp, Homo sapiens
tgaggccctgtctga

SEQ ID NO: 1611904 - DNA, 15 bp, Homo sapiens
gaggccctgtctgaa

SEQ ID NO: 1611905 - DNA, 15 bp, Homo sapiens
aggccctgtctgaaa

SEQ ID NO: 1611906 - DNA, 15 bp, Homo sapiens
ggccctgtctgaaaa

SEQ ID NO: 1611907 - DNA, 15 bp, Homo sapiens
gccctgtctgaaaac

SEQ ID NO: 1611908 - DNA, 15 bp, Homo sapiens
ccctgtctgaaaaca

SEQ ID NO: 1611909 - DNA, 15 bp, Homo sapiens
cctgtctgaaaacaa

SEQ ID NO: 1611910 - DNA, 15 bp, Homo sapiens
ctgtctgaaaacaat

SEQ ID NO: 1611911 - DNA, 15 bp, Homo sapiens
tgtctgaaaacaata

SEQ ID NO: 1611912 - DNA, 15 bp, Homo sapiens
gtctgaaaacaataa

SEQ ID NO: 1611913 - DNA, 15 bp, Homo sapiens
tctgaaaacaataac

SEQ ID NO: 1611914 - DNA, 15 bp, Homo sapiens
ctgaaaacaataaca

SEQ ID NO: 1611915 - DNA, 15 bp, Homo sapiens
tgaaaacaataacaa

SEQ ID NO: 1611916 - DNA, 15 bp, Homo sapiens
gaaaacaataacaat

SEQ ID NO: 1611917 - DNA, 15 bp, Homo sapiens
aaaacaataacaata

SEQ ID NO: 1611918 - DNA, 15 bp, Homo sapiens
aaacaataacaataa

SEQ ID NO: 1611919 - DNA, 15 bp, Homo sapiens
aacaataacaataat

SEQ ID NO: 1611920 - DNA, 15 bp, Homo sapiens
acaataacaataata

SEQ ID NO: 1611921 - DNA, 15 bp, Homo sapiens
caataacaataataa

SEQ ID NO: 1611922 - DNA, 15 bp, Homo sapiens
aataacaataataac

SEQ ID NO: 1611923 - DNA, 15 bp, Homo sapiens
ataacaataataaca

SEQ ID NO: 1611924 - DNA, 15 bp, Homo sapiens
taacaataataacaa

SEQ ID NO: 1611925 - DNA, 15 bp, Homo sapiens
aacaataataacaat

SEQ ID NO: 1611926 - DNA, 15 bp, Homo sapiens
acaataataacaatt

SEQ ID NO: 1611927 - DNA, 15 bp, Homo sapiens
caataataacaattc

SEQ ID NO: 1611928 - DNA, 15 bp, Homo sapiens
aataataacaattct

SEQ ID NO: 1611929 - DNA, 15 bp, Homo sapiens
ataataacaattctg

SEQ ID NO: 1611930 - DNA, 15 bp, Homo sapiens
taataacaattctgc

SEQ ID NO: 1611931 - DNA, 15 bp, Homo sapiens
aataacaattctgct

SEQ ID NO: 1611932 - DNA, 15 bp, Homo sapiens
ataacaattctgcta

SEQ ID NO: 1611933 - DNA, 15 bp, Homo sapiens
taacaattctgctag

SEQ ID NO: 1611934 - DNA, 15 bp, Homo sapiens
aacaattctgctagc

SEQ ID NO: 1611935 - DNA, 15 bp, Homo sapiens
acaattctgctagct

SEQ ID NO: 1611936 - DNA, 15 bp, Homo sapiens
caattctgctagctg

SEQ ID NO: 1611937 - DNA, 15 bp, Homo sapiens
aattctgctagctga

SEQ ID NO: 1611938 - DNA, 15 bp, Homo sapiens
attctgctagctgag

SEQ ID NO: 1611939 - DNA, 15 bp, Homo sapiens
ttctgctagctgaga

SEQ ID NO: 1611940 - DNA, 15 bp, Homo sapiens
tctgctagctgagat

SEQ ID NO: 1611941 - DNA, 15 bp, Homo sapiens
ctgctagctgagatg

SEQ ID NO: 1611942 - DNA, 15 bp, Homo sapiens
tgctagctgagatgc

SEQ ID NO: 1611943 - DNA, 15 bp, Homo sapiens
gctagctgagatgct

SEQ ID NO: 1611944 - DNA, 15 bp, Homo sapiens
ctagctgagatgctg

SEQ ID NO: 1611945 - DNA, 15 bp, Homo sapiens
tagctgagatgctgc

SEQ ID NO: 1611946 - DNA, 15 bp, Homo sapiens
agctgagatgctgca

SEQ ID NO: 1611947 - DNA, 15 bp, Homo sapiens
gctgagatgctgcag

SEQ ID NO: 1611948 - DNA, 15 bp, Homo sapiens
ctgagatgctgcaga

SEQ ID NO: 1611949 - DNA, 15 bp, Homo sapiens
tgagatgctgcagaa

SEQ ID NO: 1611950 - DNA, 15 bp, Homo sapiens
gagatgctgcagaag

SEQ ID NO: 1611951 - DNA, 15 bp, Homo sapiens
agatgctgcagaagc

SEQ ID NO: 1611952 - DNA, 15 bp, Homo sapiens
gatgctgcagaagct

SEQ ID NO: 1611953 - DNA, 15 bp, Homo sapiens
atgctgcagaagcta

SEQ ID NO: 1611954 - DNA, 15 bp, Homo sapiens
tgctgcagaagctag

SEQ ID NO: 1611955 - DNA, 15 bp, Homo sapiens
gctgcagaagctaga

SEQ ID NO: 1611956 - DNA, 15 bp, Homo sapiens
ctgcagaagctagat

SEQ ID NO: 1611957 - DNA, 15 bp, Homo sapiens
tgcagaagctagatt

SEQ ID NO: 1611958 - DNA, 15 bp, Homo sapiens
gcagaagctagattc

SEQ ID NO: 1611959 - DNA, 15 bp, Homo sapiens
cagaagctagattca

SEQ ID NO: 1611960 - DNA, 15 bp, Homo sapiens
agaagctagattcac

SEQ ID NO: 1611961 - DNA, 15 bp, Homo sapiens
gaagctagattcact

SEQ ID NO: 1611962 - DNA, 15 bp, Homo sapiens
aagctagattcactg

SEQ ID NO: 1611963 - DNA, 15 bp, Homo sapiens
agctagattcactgt

SEQ ID NO: 1611964 - DNA, 15 bp, Homo sapiens
gctagattcactgtc

SEQ ID NO: 1611965 - DNA, 15 bp, Homo sapiens
ctagattcactgtcc

SEQ ID NO: 1611966 - DNA, 15 bp, Homo sapiens
tagattcactgtccc

SEQ ID NO: 1611967 - DNA, 15 bp, Homo sapiens
agattcactgtcccg

SEQ ID NO: 1611968 - DNA, 15 bp, Homo sapiens
gattcactgtcccgg

SEQ ID NO: 1611969 - DNA, 15 bp, Homo sapiens
attcactgtcccgga

SEQ ID NO: 1611970 - DNA, 15 bp, Homo sapiens
ttcactgtcccggaa

SEQ ID NO: 1611971 - DNA, 15 bp, Homo sapiens
tcactgtcccggaaa

SEQ ID NO: 1611972 - DNA, 15 bp, Homo sapiens
cactgtcccggaaac

SEQ ID NO: 1611973 - DNA, 15 bp, Homo sapiens
actgtcccggaaaca

SEQ ID NO: 1611974 - DNA, 15 bp, Homo sapiens
ctgtcccggaaacat

SEQ ID NO: 1611975 - DNA, 15 bp, Homo sapiens
tgtcccggaaacatg

SEQ ID NO: 1611976 - DNA, 15 bp, Homo sapiens
gtcccggaaacatga

SEQ ID NO: 1611977 - DNA, 15 bp, Homo sapiens
tcccggaaacatgaa

SEQ ID NO: 1611978 - DNA, 15 bp, Homo sapiens
cccggaaacatgaaa

SEQ ID NO: 1611979 - DNA, 15 bp, Homo sapiens
ccggaaacatgaaaa

SEQ ID NO: 1611980 - DNA, 15 bp, Homo sapiens
cggaaacatgaaaaa

SEQ ID NO: 1611981 - DNA, 15 bp, Homo sapiens
ggaaacatgaaaaaa

SEQ ID NO: 1611982 - DNA, 15 bp, Homo sapiens
gaaacatgaaaaaaa

SEQ ID NO: 1611983 - DNA, 15 bp, Homo sapiens
aaacatgaaaaaaaa

SEQ ID NO: 1611984 - DNA, 15 bp, Homo sapiens
aacatgaaaaaaaat

SEQ ID NO: 1611985 - DNA, 15 bp, Homo sapiens
acatgaaaaaaaatt

SEQ ID NO: 1611986 - DNA, 15 bp, Homo sapiens
catgaaaaaaaatta

SEQ ID NO: 1611987 - DNA, 15 bp, Homo sapiens
atgaaaaaaaattat

SEQ ID NO: 1611988 - DNA, 15 bp, Homo sapiens
tgaaaaaaaattatt

SEQ ID NO: 1611989 - DNA, 15 bp, Homo sapiens
gaaaaaaaattattg

SEQ ID NO: 1611990 - DNA, 15 bp, Homo sapiens
aaaaaaaattattgg

SEQ ID NO: 1611991 - DNA, 15 bp, Homo sapiens
aaaaaaattattggt

SEQ ID NO: 1611992 - DNA, 15 bp, Homo sapiens
aaaaaattattggtt

SEQ ID NO: 1611993 - DNA, 15 bp, Homo sapiens
aaaaattattggtta

SEQ ID NO: 1611994 - DNA, 15 bp, Homo sapiens
aaaattattggttac

SEQ ID NO: 1611995 - DNA, 15 bp, Homo sapiens
aaattattggttact

SEQ ID NO: 1611996 - DNA, 15 bp, Homo sapiens
aattattggttactt

SEQ ID NO: 1611997 - DNA, 15 bp, Homo sapiens
attattggttacttt

SEQ ID NO: 1611998 - DNA, 15 bp, Homo sapiens
ttattggttactttt

SEQ ID NO: 1611999 - DNA, 15 bp, Homo sapiens
tattggttactttta

SEQ ID NO: 1612000 - DNA, 15 bp, Homo sapiens
attggttacttttat

SEQ ID NO: 1612001 - DNA, 15 bp, Homo sapiens
ttggttacttttatt

SEQ ID NO: 1612002 - DNA, 15 bp, Homo sapiens
tggttacttttattt

SEQ ID NO: 1612003 - DNA, 15 bp, Homo sapiens
ggttacttttatttc

SEQ ID NO: 1612004 - DNA, 15 bp, Homo sapiens
gttacttttatttct

SEQ ID NO: 1612005 - DNA, 15 bp, Homo sapiens
ttacttttatttctt

SEQ ID NO: 1612006 - DNA, 15 bp, Homo sapiens
tacttttatttcttc

SEQ ID NO: 1612007 - DNA, 15 bp, Homo sapiens
acttttatttcttca

SEQ ID NO: 1612008 - DNA, 15 bp, Homo sapiens
cttttatttcttcac

SEQ ID NO: 1612009 - DNA, 15 bp, Homo sapiens
ttttatttcttcact

SEQ ID NO: 1612010 - DNA, 15 bp, Homo sapiens
tttatttcttcactg

SEQ ID NO: 1612011 - DNA, 15 bp, Homo sapiens
ttatttcttcactga

SEQ ID NO: 1612012 - DNA, 15 bp, Homo sapiens
tatttcttcactgaa

SEQ ID NO: 1612013 - DNA, 15 bp, Homo sapiens
atttcttcactgaag

SEQ ID NO: 1612014 - DNA, 15 bp, Homo sapiens
tttcttcactgaaga

SEQ ID NO: 1612015 - DNA, 15 bp, Homo sapiens
ttcttcactgaagat

SEQ ID NO: 1612016 - DNA, 15 bp, Homo sapiens
tcttcactgaagatc

SEQ ID NO: 1612017 - DNA, 15 bp, Homo sapiens
cttcactgaagatct

SEQ ID NO: 1612018 - DNA, 15 bp, Homo sapiens
ttcactgaagatctt

SEQ ID NO: 1612019 - DNA, 15 bp, Homo sapiens
tcactgaagatcttt

SEQ ID NO: 1612020 - DNA, 15 bp, Homo sapiens
cactgaagatctttc

SEQ ID NO: 1612021 - DNA, 15 bp, Homo sapiens
actgaagatctttcc

SEQ ID NO: 1612022 - DNA, 15 bp, Homo sapiens
ctgaagatctttcct

SEQ ID NO: 1612023 - DNA, 15 bp, Homo sapiens
tgaagatctttccta

SEQ ID NO: 1612024 - DNA, 15 bp, Homo sapiens
gaagatctttcctag

SEQ ID NO: 1612025 - DNA, 15 bp, Homo sapiens
aagatctttcctaga

SEQ ID NO: 1612026 - DNA, 15 bp, Homo sapiens
agatctttcctagaa

SEQ ID NO: 1612027 - DNA, 15 bp, Homo sapiens
gatctttcctagaaa

SEQ ID NO: 1612028 - DNA, 15 bp, Homo sapiens
atctttcctagaaat

SEQ ID NO: 1612029 - DNA, 15 bp, Homo sapiens
tctttcctagaaatt

SEQ ID NO: 1612030 - DNA, 15 bp, Homo sapiens
ctttcctagaaatta

SEQ ID NO: 1612031 - DNA, 15 bp, Homo sapiens
tttcctagaaattat

SEQ ID NO: 1612032 - DNA, 15 bp, Homo sapiens
ttcctagaaattatg

SEQ ID NO: 1612033 - DNA, 15 bp, Homo sapiens
tcctagaaattatga

SEQ ID NO: 1612034 - DNA, 15 bp, Homo sapiens
cctagaaattatgaa

SEQ ID NO: 1612035 - DNA, 15 bp, Homo sapiens
ctagaaattatgaac

SEQ ID NO: 1612036 - DNA, 15 bp, Homo sapiens
tagaaattatgaacc

SEQ ID NO: 1612037 - DNA, 15 bp, Homo sapiens
agaaattatgaacca

SEQ ID NO: 1612038 - DNA, 15 bp, Homo sapiens
gaaattatgaaccaa

SEQ ID NO: 1612039 - DNA, 15 bp, Homo sapiens
aaattatgaaccaaa

SEQ ID NO: 1612040 - DNA, 15 bp, Homo sapiens
aattatgaaccaaaa

SEQ ID NO: 1612041 - DNA, 15 bp, Homo sapiens
attatgaaccaaaaa

SEQ ID NO: 1612042 - DNA, 15 bp, Homo sapiens
ttatgaaccaaaaaa

SEQ ID NO: 1612043 - DNA, 15 bp, Homo sapiens
tatgaaccaaaaaat

SEQ ID NO: 1612044 - DNA, 15 bp, Homo sapiens
atgaaccaaaaaatg

SEQ ID NO: 1612045 - DNA, 15 bp, Homo sapiens
tgaaccaaaaaatgt

SEQ ID NO: 1612046 - DNA, 15 bp, Homo sapiens
gaaccaaaaaatgtc

SEQ ID NO: 1612047 - DNA, 15 bp, Homo sapiens
aaccaaaaaatgtct

SEQ ID NO: 1612048 - DNA, 15 bp, Homo sapiens
accaaaaaatgtctg

SEQ ID NO: 1612049 - DNA, 15 bp, Homo sapiens
ccaaaaaatgtctgt

SEQ ID NO: 1612050 - DNA, 15 bp, Homo sapiens
caaaaaatgtctgtt

SEQ ID NO: 1612051 - DNA, 15 bp, Homo sapiens
aaaaaatgtctgttt

SEQ ID NO: 1612052 - DNA, 15 bp, Homo sapiens
aaaaatgtctgtttt

SEQ ID NO: 1612053 - DNA, 15 bp, Homo sapiens
aaaatgtctgtttta

SEQ ID NO: 1612054 - DNA, 15 bp, Homo sapiens
aaatgtctgttttat

SEQ ID NO: 1612055 - DNA, 15 bp, Homo sapiens
aatgtctgttttatc

SEQ ID NO: 1612056 - DNA, 15 bp, Homo sapiens
atgtctgttttatct

SEQ ID NO: 1612057 - DNA, 15 bp, Homo sapiens
tgtctgttttatctc

SEQ ID NO: 1612058 - DNA, 15 bp, Homo sapiens
gtctgttttatctct

SEQ ID NO: 1612059 - DNA, 15 bp, Homo sapiens
tctgttttatctctc

SEQ ID NO: 1612060 - DNA, 15 bp, Homo sapiens
ctgttttatctctca

SEQ ID NO: 1612061 - DNA, 15 bp, Homo sapiens
tgttttatctctcat

SEQ ID NO: 1612062 - DNA, 15 bp, Homo sapiens
gttttatctctcata

SEQ ID NO: 1612063 - DNA, 15 bp, Homo sapiens
ttttatctctcataa

SEQ ID NO: 1612064 - DNA, 15 bp, Homo sapiens
tttatctctcataat

SEQ ID NO: 1612065 - DNA, 15 bp, Homo sapiens
ttatctctcataatc

SEQ ID NO: 1612066 - DNA, 15 bp, Homo sapiens
tatctctcataatct

SEQ ID NO: 1612067 - DNA, 15 bp, Homo sapiens
atctctcataatcta

SEQ ID NO: 1612068 - DNA, 15 bp, Homo sapiens
tctctcataatctat

SEQ ID NO: 1612069 - DNA, 15 bp, Homo sapiens
ctctcataatctatc

SEQ ID NO: 1612070 - DNA, 15 bp, Homo sapiens
tctcataatctatct

SEQ ID NO: 1612071 - DNA, 15 bp, Homo sapiens
ctcataatctatctg

SEQ ID NO: 1612072 - DNA, 15 bp, Homo sapiens
tcataatctatctgc

SEQ ID NO: 1612073 - DNA, 15 bp, Homo sapiens
cataatctatctgct

SEQ ID NO: 1612074 - DNA, 15 bp, Homo sapiens
ataatctatctgctt

SEQ ID NO: 1612075 - DNA, 15 bp, Homo sapiens
taatctatctgcttc

SEQ ID NO: 1612076 - DNA, 15 bp, Homo sapiens
aatctatctgcttct

SEQ ID NO: 1612077 - DNA, 15 bp, Homo sapiens
atctatctgcttctt

SEQ ID NO: 1612078 - DNA, 15 bp, Homo sapiens
tctatctgcttctta

SEQ ID NO: 1612079 - DNA, 15 bp, Homo sapiens
ctatctgcttcttag

SEQ ID NO: 1612080 - DNA, 15 bp, Homo sapiens
tatctgcttcttagt

SEQ ID NO: 1612081 - DNA, 15 bp, Homo sapiens
atctgcttcttagtc

SEQ ID NO: 1612082 - DNA, 15 bp, Homo sapiens
tctgcttcttagtcc

SEQ ID NO: 1612083 - DNA, 15 bp, Homo sapiens
ctgcttcttagtcca

SEQ ID NO: 1612084 - DNA, 15 bp, Homo sapiens
tgcttcttagtccaa

SEQ ID NO: 1612085 - DNA, 15 bp, Homo sapiens
gcttcttagtccaaa

SEQ ID NO: 1612086 - DNA, 15 bp, Homo sapiens
cttcttagtccaaag

SEQ ID NO: 1612087 - DNA, 15 bp, Homo sapiens
ttcttagtccaaagg

SEQ ID NO: 1612088 - DNA, 15 bp, Homo sapiens
tcttagtccaaagga

SEQ ID NO: 1612089 - DNA, 15 bp, Homo sapiens
cttagtccaaaggaa

SEQ ID NO: 1612090 - DNA, 15 bp, Homo sapiens
ttagtccaaaggaaa

SEQ ID NO: 1612091 - DNA, 15 bp, Homo sapiens
tagtccaaaggaaaa

SEQ ID NO: 1612092 - DNA, 15 bp, Homo sapiens
agtccaaaggaaaat

SEQ ID NO: 1612093 - DNA, 15 bp, Homo sapiens
gtccaaaggaaaata

SEQ ID NO: 1612094 - DNA, 15 bp, Homo sapiens
tccaaaggaaaataa

SEQ ID NO: 1612095 - DNA, 15 bp, Homo sapiens
ccaaaggaaaataat

SEQ ID NO: 1612096 - DNA, 15 bp, Homo sapiens
caaaggaaaataata

SEQ ID NO: 1612097 - DNA, 15 bp, Homo sapiens
aaaggaaaataatat

SEQ ID NO: 1612098 - DNA, 15 bp, Homo sapiens
aaggaaaataatatg

SEQ ID NO: 1612099 - DNA, 15 bp, Homo sapiens
aggaaaataatatgt

SEQ ID NO: 1612100 - DNA, 15 bp, Homo sapiens
ggaaaataatatgtt

SEQ ID NO: 1612101 - DNA, 15 bp, Homo sapiens
gaaaataatatgttt

SEQ ID NO: 1612102 - DNA, 15 bp, Homo sapiens
aaaataatatgtttt

SEQ ID NO: 1612103 - DNA, 15 bp, Homo sapiens
aaataatatgttttc

SEQ ID NO: 1612104 - DNA, 15 bp, Homo sapiens
aataatatgttttct

SEQ ID NO: 1612105 - DNA, 15 bp, Homo sapiens
ataatatgttttctg

SEQ ID NO: 1612106 - DNA, 15 bp, Homo sapiens
taatatgttttctga

SEQ ID NO: 1612107 - DNA, 15 bp, Homo sapiens
aatatgttttctgat

SEQ ID NO: 1612108 - DNA, 15 bp, Homo sapiens
atatgttttctgatt

SEQ ID NO: 1612109 - DNA, 15 bp, Homo sapiens
tatgttttctgattc

SEQ ID NO: 1612110 - DNA, 15 bp, Homo sapiens
atgttttctgattcc

SEQ ID NO: 1612111 - DNA, 15 bp, Homo sapiens
tgttttctgattcca

SEQ ID NO: 1612112 - DNA, 15 bp, Homo sapiens
gttttctgattccat

SEQ ID NO: 1612113 - DNA, 15 bp, Homo sapiens
ttttctgattccata

SEQ ID NO: 1612114 - DNA, 15 bp, Homo sapiens
tttctgattccatat

SEQ ID NO: 1612115 - DNA, 15 bp, Homo sapiens
ttctgattccatata

SEQ ID NO: 1612116 - DNA, 15 bp, Homo sapiens
tctgattccatatag

SEQ ID NO: 1612117 - DNA, 15 bp, Homo sapiens
ctgattccatataga

SEQ ID NO: 1612118 - DNA, 15 bp, Homo sapiens
tgattccatatagat

SEQ ID NO: 1612119 - DNA, 15 bp, Homo sapiens
gattccatatagata

SEQ ID NO: 1612120 - DNA, 15 bp, Homo sapiens
attccatatagatag

SEQ ID NO: 1612121 - DNA, 15 bp, Homo sapiens
ttccatatagataga

SEQ ID NO: 1612122 - DNA, 15 bp, Homo sapiens
tccatatagatagat

SEQ ID NO: 1612123 - DNA, 15 bp, Homo sapiens
ccatatagatagata

SEQ ID NO: 1612124 - DNA, 15 bp, Homo sapiens
catatagatagatac

SEQ ID NO: 1612125 - DNA, 15 bp, Homo sapiens
atatagatagataca

SEQ ID NO: 1612126 - DNA, 15 bp, Homo sapiens
tatagatagatacaa

SEQ ID NO: 1612127 - DNA, 15 bp, Homo sapiens
atagatagatacaag

SEQ ID NO: 1612128 - DNA, 15 bp, Homo sapiens
tagatagatacaagg

SEQ ID NO: 1612129 - DNA, 15 bp, Homo sapiens
agatagatacaaggc

SEQ ID NO: 1612130 - DNA, 15 bp, Homo sapiens
gatagatacaaggca

SEQ ID NO: 1612131 - DNA, 15 bp, Homo sapiens
atagatacaaggcac

SEQ ID NO: 1612132 - DNA, 15 bp, Homo sapiens
tagatacaaggcaca

SEQ ID NO: 1612133 - DNA, 15 bp, Homo sapiens
agatacaaggcacaa

SEQ ID NO: 1612134 - DNA, 15 bp, Homo sapiens
gatacaaggcacaat

SEQ ID NO: 1612135 - DNA, 15 bp, Homo sapiens
atacaaggcacaatc

SEQ ID NO: 1612136 - DNA, 15 bp, Homo sapiens
tacaaggcacaatct

SEQ ID NO: 1612137 - DNA, 15 bp, Homo sapiens
acaaggcacaatctc

SEQ ID NO: 1612138 - DNA, 15 bp, Homo sapiens
caaggcacaatctct

SEQ ID NO: 1612139 - DNA, 15 bp, Homo sapiens
aaggcacaatctcta

SEQ ID NO: 1612140 - DNA, 15 bp, Homo sapiens
aggcacaatctctaa

SEQ ID NO: 1612141 - DNA, 15 bp, Homo sapiens
ggcacaatctctaat

SEQ ID NO: 1612142 - DNA, 15 bp, Homo sapiens
gcacaatctctaatc

SEQ ID NO: 1612143 - DNA, 15 bp, Homo sapiens
cacaatctctaatct

SEQ ID NO: 1612144 - DNA, 15 bp, Homo sapiens
acaatctctaatcta

SEQ ID NO: 1612145 - DNA, 15 bp, Homo sapiens
caatctctaatctag

SEQ ID NO: 1612146 - DNA, 15 bp, Homo sapiens
aatctctaatctagc

SEQ ID NO: 1612147 - DNA, 15 bp, Homo sapiens
atctctaatctagca

SEQ ID NO: 1612148 - DNA, 15 bp, Homo sapiens
tctctaatctagcag

SEQ ID NO: 1612149 - DNA, 15 bp, Homo sapiens
ctctaatctagcaga

SEQ ID NO: 1612150 - DNA, 15 bp, Homo sapiens
tctaatctagcagaa

SEQ ID NO: 1612151 - DNA, 15 bp, Homo sapiens
ctaatctagcagaat

SEQ ID NO: 1612152 - DNA, 15 bp, Homo sapiens
taatctagcagaatt

SEQ ID NO: 1612153 - DNA, 15 bp, Homo sapiens
aatctagcagaattt

SEQ ID NO: 1612154 - DNA, 15 bp, Homo sapiens
atctagcagaatttg

SEQ ID NO: 1612155 - DNA, 15 bp, Homo sapiens
tctagcagaatttga

SEQ ID NO: 1612156 - DNA, 15 bp, Homo sapiens
ctagcagaatttgaa

SEQ ID NO: 1612157 - DNA, 15 bp, Homo sapiens
tagcagaatttgaat

SEQ ID NO: 1612158 - DNA, 15 bp, Homo sapiens
agcagaatttgaatg

SEQ ID NO: 1612159 - DNA, 15 bp, Homo sapiens
gcagaatttgaatga

SEQ ID NO: 1612160 - DNA, 15 bp, Homo sapiens
cagaatttgaatgat

SEQ ID NO: 1612161 - DNA, 15 bp, Homo sapiens
agaatttgaatgatc

SEQ ID NO: 1612162 - DNA, 15 bp, Homo sapiens
gaatttgaatgatcc

SEQ ID NO: 1612163 - DNA, 15 bp, Homo sapiens
aatttgaatgatcct

SEQ ID NO: 1612164 - DNA, 15 bp, Homo sapiens
atttgaatgatcctc

SEQ ID NO: 1612165 - DNA, 15 bp, Homo sapiens
tttgaatgatcctca

SEQ ID NO: 1612166 - DNA, 15 bp, Homo sapiens
ttgaatgatcctcag

SEQ ID NO: 1612167 - DNA, 15 bp, Homo sapiens
tgaatgatcctcagt

SEQ ID NO: 1612168 - DNA, 15 bp, Homo sapiens
gaatgatcctcagta

SEQ ID NO: 1612169 - DNA, 15 bp, Homo sapiens
aatgatcctcagtat

SEQ ID NO: 1612170 - DNA, 15 bp, Homo sapiens
atgatcctcagtatg

SEQ ID NO: 1612171 - DNA, 15 bp, Homo sapiens
tgatcctcagtatga

SEQ ID NO: 1612172 - DNA, 15 bp, Homo sapiens
gatcctcagtatgat

SEQ ID NO: 1612173 - DNA, 15 bp, Homo sapiens
atcctcagtatgatt

SEQ ID NO: 1612174 - DNA, 15 bp, Homo sapiens
tcctcagtatgattc

SEQ ID NO: 1612175 - DNA, 15 bp, Homo sapiens
cctcagtatgattca

SEQ ID NO: 1612176 - DNA, 15 bp, Homo sapiens
ctcagtatgattcat

SEQ ID NO: 1612177 - DNA, 15 bp, Homo sapiens
tcagtatgattcatt

SEQ ID NO: 1612178 - DNA, 15 bp, Homo sapiens
cagtatgattcattt

SEQ ID NO: 1612179 - DNA, 15 bp, Homo sapiens
agtatgattcatttt

SEQ ID NO: 1612180 - DNA, 15 bp, Homo sapiens
gtatgattcattttt

SEQ ID NO: 1612181 - DNA, 15 bp, Homo sapiens
tatgattcattttta

SEQ ID NO: 1612182 - DNA, 15 bp, Homo sapiens
atgattcatttttaa

SEQ ID NO: 1612183 - DNA, 15 bp, Homo sapiens
tgattcatttttaat

SEQ ID NO: 1612184 - DNA, 15 bp, Homo sapiens
gattcatttttaatt

SEQ ID NO: 1612185 - DNA, 15 bp, Homo sapiens
attcatttttaattt

SEQ ID NO: 1612186 - DNA, 15 bp, Homo sapiens
ttcatttttaattta

SEQ ID NO: 1612187 - DNA, 15 bp, Homo sapiens
tcatttttaatttat

SEQ ID NO: 1612188 - DNA, 15 bp, Homo sapiens
catttttaatttata

SEQ ID NO: 1612189 - DNA, 15 bp, Homo sapiens
atttttaatttatat

SEQ ID NO: 1612190 - DNA, 15 bp, Homo sapiens
tttttaatttatatt

SEQ ID NO: 1612191 - DNA, 15 bp, Homo sapiens
ttttaatttatatta

SEQ ID NO: 1612192 - DNA, 15 bp, Homo sapiens
tttaatttatattat

SEQ ID NO: 1612193 - DNA, 15 bp, Homo sapiens
ttaatttatattata

SEQ ID NO: 1612194 - DNA, 15 bp, Homo sapiens
taatttatattatac

SEQ ID NO: 1612195 - DNA, 15 bp, Homo sapiens
aatttatattatacc

SEQ ID NO: 1612196 - DNA, 15 bp, Homo sapiens
atttatattatacca

SEQ ID NO: 1612197 - DNA, 15 bp, Homo sapiens
tttatattataccat

SEQ ID NO: 1612198 - DNA, 15 bp, Homo sapiens
ttatattataccatt

SEQ ID NO: 1612199 - DNA, 15 bp, Homo sapiens
tatattataccattt

SEQ ID NO: 1612200 - DNA, 15 bp, Homo sapiens
atattataccattta

SEQ ID NO: 1612201 - DNA, 15 bp, Homo sapiens
tattataccatttag

SEQ ID NO: 1612202 - DNA, 15 bp, Homo sapiens
attataccatttagg

SEQ ID NO: 1612203 - DNA, 15 bp, Homo sapiens
ttataccatttaggg

SEQ ID NO: 1612204 - DNA, 15 bp, Homo sapiens
tataccatttaggga

SEQ ID NO: 1612205 - DNA, 15 bp, Homo sapiens
ataccatttagggat

SEQ ID NO: 1612206 - DNA, 15 bp, Homo sapiens
taccatttagggatc

SEQ ID NO: 1612207 - DNA, 15 bp, Homo sapiens
accatttagggatcc

SEQ ID NO: 1612208 - DNA, 15 bp, Homo sapiens
ccatttagggatcct

SEQ ID NO: 1612209 - DNA, 15 bp, Homo sapiens
catttagggatcctc

SEQ ID NO: 1612210 - DNA, 15 bp, Homo sapiens
atttagggatcctct

SEQ ID NO: 1612211 - DNA, 15 bp, Homo sapiens
tttagggatcctctg

SEQ ID NO: 1612212 - DNA, 15 bp, Homo sapiens
ttagggatcctctga

SEQ ID NO: 1612213 - DNA, 15 bp, Homo sapiens
tagggatcctctgaa

SEQ ID NO: 1612214 - DNA, 15 bp, Homo sapiens
agggatcctctgaac

SEQ ID NO: 1612215 - DNA, 15 bp, Homo sapiens
gggatcctctgaacc

SEQ ID NO: 1612216 - DNA, 15 bp, Homo sapiens
ggatcctctgaacca

SEQ ID NO: 1612217 - DNA, 15 bp, Homo sapiens
gatcctctgaaccag

SEQ ID NO: 1612218 - DNA, 15 bp, Homo sapiens
atcctctgaaccaga

SEQ ID NO: 1612219 - DNA, 15 bp, Homo sapiens
tcctctgaaccagag

SEQ ID NO: 1612220 - DNA, 15 bp, Homo sapiens
cctctgaaccagagc

SEQ ID NO: 1612221 - DNA, 15 bp, Homo sapiens
ctctgaaccagagca

SEQ ID NO: 1612222 - DNA, 15 bp, Homo sapiens
tctgaaccagagcat

SEQ ID NO: 1612223 - DNA, 15 bp, Homo sapiens
ctgaaccagagcata

SEQ ID NO: 1612224 - DNA, 15 bp, Homo sapiens
tgaaccagagcatat

SEQ ID NO: 1612225 - DNA, 15 bp, Homo sapiens
gaaccagagcatatt

SEQ ID NO: 1612226 - DNA, 15 bp, Homo sapiens
aaccagagcatatta

SEQ ID NO: 1612227 - DNA, 15 bp, Homo sapiens
accagagcatattac

SEQ ID NO: 1612228 - DNA, 15 bp, Homo sapiens
ccagagcatattact

SEQ ID NO: 1612229 - DNA, 15 bp, Homo sapiens
cagagcatattactg

SEQ ID NO: 1612230 - DNA, 15 bp, Homo sapiens
agagcatattactga

SEQ ID NO: 1612231 - DNA, 15 bp, Homo sapiens
gagcatattactgat

SEQ ID NO: 1612232 - DNA, 15 bp, Homo sapiens
agcatattactgatt

SEQ ID NO: 1612233 - DNA, 15 bp, Homo sapiens
gcatattactgatta

SEQ ID NO: 1612234 - DNA, 15 bp, Homo sapiens
catattactgattaa

SEQ ID NO: 1612235 - DNA, 15 bp, Homo sapiens
atattactgattaaa

SEQ ID NO: 1612236 - DNA, 15 bp, Homo sapiens
tattactgattaaat

SEQ ID NO: 1612237 - DNA, 15 bp, Homo sapiens
attactgattaaatt

SEQ ID NO: 1612238 - DNA, 15 bp, Homo sapiens
ttactgattaaattt

SEQ ID NO: 1612239 - DNA, 15 bp, Homo sapiens
tactgattaaatttt

SEQ ID NO: 1612240 - DNA, 15 bp, Homo sapiens
actgattaaatttta

SEQ ID NO: 1612241 - DNA, 15 bp, Homo sapiens
ctgattaaattttat

SEQ ID NO: 1612242 - DNA, 15 bp, Homo sapiens
tgattaaattttata

SEQ ID NO: 1612243 - DNA, 15 bp, Homo sapiens
gattaaattttatac

SEQ ID NO: 1612244 - DNA, 15 bp, Homo sapiens
attaaattttatact

SEQ ID NO: 1612245 - DNA, 15 bp, Homo sapiens
attttatacttgttg

SEQ ID NO: 1612246 - DNA, 15 bp, Homo sapiens
ttttatacttgttga

SEQ ID NO: 1612247 - DNA, 15 bp, Homo sapiens
tttatacttgttgaa

SEQ ID NO: 1612248 - DNA, 15 bp, Homo sapiens
ttatacttgttgaaa

SEQ ID NO: 1612249 - DNA, 15 bp, Homo sapiens
tatacttgttgaaag

SEQ ID NO: 1612250 - DNA, 15 bp, Homo sapiens
atacttgttgaaagt

SEQ ID NO: 1612251 - DNA, 15 bp, Homo sapiens
tacttgttgaaagtg

SEQ ID NO: 1612252 - DNA, 15 bp, Homo sapiens
acttgttgaaagtgc

SEQ ID NO: 1612253 - DNA, 15 bp, Homo sapiens
cttgttgaaagtgct

SEQ ID NO: 1612254 - DNA, 15 bp, Homo sapiens
ttgttgaaagtgctg

SEQ ID NO: 1612255 - DNA, 15 bp, Homo sapiens
tgttgaaagtgctgt

SEQ ID NO: 1612256 - DNA, 15 bp, Homo sapiens
gttgaaagtgctgtc

SEQ ID NO: 1612257 - DNA, 15 bp, Homo sapiens
ttgaaagtgctgtca

SEQ ID NO: 1612258 - DNA, 15 bp, Homo sapiens
tgaaagtgctgtcaa

SEQ ID NO: 1612259 - DNA, 15 bp, Homo sapiens
gaaagtgctgtcaaa

SEQ ID NO: 1612260 - DNA, 15 bp, Homo sapiens
aaagtgctgtcaaat

SEQ ID NO: 1612261 - DNA, 15 bp, Homo sapiens
aagtgctgtcaaata

SEQ ID NO: 1612262 - DNA, 15 bp, Homo sapiens
agtgctgtcaaataa

SEQ ID NO: 1612263 - DNA, 15 bp, Homo sapiens
gtgctgtcaaataaa

SEQ ID NO: 1612264 - DNA, 15 bp, Homo sapiens
tgctgtcaaataaaa

SEQ ID NO: 1612265 - DNA, 15 bp, Homo sapiens
gctgtcaaataaaat

SEQ ID NO: 1612266 - DNA, 15 bp, Homo sapiens
ctgtcaaataaaatg

SEQ ID NO: 1612267 - DNA, 15 bp, Homo sapiens
tgtcaaataaaatga

SEQ ID NO: 1612268 - DNA, 15 bp, Homo sapiens
gtcaaataaaatgat

SEQ ID NO: 1612269 - DNA, 15 bp, Homo sapiens
tcaaataaaatgatc

SEQ ID NO: 1612270 - DNA, 15 bp, Homo sapiens
caaataaaatgatca

SEQ ID NO: 1612271 - DNA, 15 bp, Homo sapiens
aaataaaatgatcat

SEQ ID NO: 1612272 - DNA, 15 bp, Homo sapiens
aataaaatgatcatc

SEQ ID NO: 1612273 - DNA, 15 bp, Homo sapiens
ataaaatgatcatca

SEQ ID NO: 1612274 - DNA, 15 bp, Homo sapiens
taaaatgatcatcat

SEQ ID NO: 1612275 - DNA, 15 bp, Homo sapiens
aaaatgatcatcatt

SEQ ID NO: 1612276 - DNA, 15 bp, Homo sapiens
aaatgatcatcattg

SEQ ID NO: 1612277 - DNA, 15 bp, Homo sapiens
aatgatcatcattgt

SEQ ID NO: 1612278 - DNA, 15 bp, Homo sapiens
atgatcatcattgtg

SEQ ID NO: 1612279 - DNA, 15 bp, Homo sapiens
tgatcatcattgtgc

SEQ ID NO: 1612280 - DNA, 15 bp, Homo sapiens
gatcatcattgtgca

SEQ ID NO: 1612281 - DNA, 15 bp, Homo sapiens
atcatcattgtgcag

SEQ ID NO: 1612282 - DNA, 15 bp, Homo sapiens
tcatcattgtgcaga

SEQ ID NO: 1612283 - DNA, 15 bp, Homo sapiens
ttaataagctttttc

SEQ ID NO: 1612284 - DNA, 15 bp, Homo sapiens
taataagctttttct

SEQ ID NO: 1612285 - DNA, 15 bp, Homo sapiens
aataagctttttctt

SEQ ID NO: 1612286 - DNA, 15 bp, Homo sapiens
ataagctttttcttt

SEQ ID NO: 1612287 - DNA, 15 bp, Homo sapiens
taagctttttctttt

SEQ ID NO: 1612288 - DNA, 15 bp, Homo sapiens
aagctttttcttttt

SEQ ID NO: 1612289 - DNA, 15 bp, Homo sapiens
agctttttcttttta

SEQ ID NO: 1612290 - DNA, 15 bp, Homo sapiens
gctttttctttttac

SEQ ID NO: 1612291 - DNA, 15 bp, Homo sapiens
tttttctttttacct

SEQ ID NO: 1612292 - DNA, 15 bp, Homo sapiens
ttttctttttaccta

SEQ ID NO: 1612293 - DNA, 15 bp, Homo sapiens
tttctttttacctat

SEQ ID NO: 1612294 - DNA, 15 bp, Homo sapiens
ttctttttacctatg

SEQ ID NO: 1612295 - DNA, 15 bp, Homo sapiens
tctttttacctatgt

SEQ ID NO: 1612296 - DNA, 15 bp, Homo sapiens
ctttttacctatgtc

SEQ ID NO: 1612297 - DNA, 15 bp, Homo sapiens
tttttacctatgtct

SEQ ID NO: 1612298 - DNA, 15 bp, Homo sapiens
ttttacctatgtctt

SEQ ID NO: 1612299 - DNA, 15 bp, Homo sapiens
tttacctatgtctta

SEQ ID NO: 1612300 - DNA, 15 bp, Homo sapiens
ttacctatgtcttac

SEQ ID NO: 1612301 - DNA, 15 bp, Homo sapiens
tacctatgtcttacc

SEQ ID NO: 1612302 - DNA, 15 bp, Homo sapiens
acctatgtcttacct

SEQ ID NO: 1612303 - DNA, 15 bp, Homo sapiens
cctatgtcttacctc

SEQ ID NO: 1612304 - DNA, 15 bp, Homo sapiens
ctatgtcttacctct

SEQ ID NO: 1612305 - DNA, 15 bp, Homo sapiens
tatgtcttacctctg

SEQ ID NO: 1612306 - DNA, 15 bp, Homo sapiens
atgtcttacctctga

SEQ ID NO: 1612307 - DNA, 15 bp, Homo sapiens
tgtcttacctctgat

SEQ ID NO: 1612308 - DNA, 15 bp, Homo sapiens
gtcttacctctgata

SEQ ID NO: 1612309 - DNA, 15 bp, Homo sapiens
tcttacctctgatag

SEQ ID NO: 1612310 - DNA, 15 bp, Homo sapiens
cttacctctgatagt

SEQ ID NO: 1612311 - DNA, 15 bp, Homo sapiens
ttacctctgatagta

SEQ ID NO: 1612312 - DNA, 15 bp, Homo sapiens
tacctctgatagtag

SEQ ID NO: 1612313 - DNA, 15 bp, Homo sapiens
acctctgatagtagc

SEQ ID NO: 1612314 - DNA, 15 bp, Homo sapiens
cctctgatagtagca

SEQ ID NO: 1612315 - DNA, 15 bp, Homo sapiens
ctctgatagtagcat

SEQ ID NO: 1612316 - DNA, 15 bp, Homo sapiens
tctgatagtagcatt

SEQ ID NO: 1612317 - DNA, 15 bp, Homo sapiens
ctgatagtagcattc

SEQ ID NO: 1612318 - DNA, 15 bp, Homo sapiens
tgatagtagcattca

SEQ ID NO: 1612319 - DNA, 15 bp, Homo sapiens
gatagtagcattcaa

SEQ ID NO: 1612320 - DNA, 15 bp, Homo sapiens
atagtagcattcaat

SEQ ID NO: 1612321 - DNA, 15 bp, Homo sapiens
tagtagcattcaatc

SEQ ID NO: 1612322 - DNA, 15 bp, Homo sapiens
agtagcattcaatca

SEQ ID NO: 1612323 - DNA, 15 bp, Homo sapiens
gtagcattcaatcaa

SEQ ID NO: 1612324 - DNA, 15 bp, Homo sapiens
tagcattcaatcaaa

SEQ ID NO: 1612325 - DNA, 15 bp, Homo sapiens
agcattcaatcaaat

SEQ ID NO: 1612326 - DNA, 15 bp, Homo sapiens
gcattcaatcaaata

SEQ ID NO: 1612327 - DNA, 15 bp, Homo sapiens
cattcaatcaaatag

SEQ ID NO: 1612328 - DNA, 15 bp, Homo sapiens
attcaatcaaatagc

SEQ ID NO: 1612329 - DNA, 15 bp, Homo sapiens
ttcaatcaaatagca

SEQ ID NO: 1612330 - DNA, 15 bp, Homo sapiens
tcaatcaaatagcaa

SEQ ID NO: 1612331 - DNA, 15 bp, Homo sapiens
caatcaaatagcaac

SEQ ID NO: 1612332 - DNA, 15 bp, Homo sapiens
aatcaaatagcaaca

SEQ ID NO: 1612333 - DNA, 15 bp, Homo sapiens
atcaaatagcaacaa

SEQ ID NO: 1612334 - DNA, 15 bp, Homo sapiens
tcaaatagcaacaac

SEQ ID NO: 1612335 - DNA, 15 bp, Homo sapiens
caaatagcaacaact

SEQ ID NO: 1612336 - DNA, 15 bp, Homo sapiens
aaatagcaacaactc

SEQ ID NO: 1612337 - DNA, 15 bp, Homo sapiens
aatagcaacaactca

SEQ ID NO: 1612338 - DNA, 15 bp, Homo sapiens
atagcaacaactcat

SEQ ID NO: 1612339 - DNA, 15 bp, Homo sapiens
tagcaacaactcatc

SEQ ID NO: 1612340 - DNA, 15 bp, Homo sapiens
agcaacaactcatca

SEQ ID NO: 1612341 - DNA, 15 bp, Homo sapiens
gcaacaactcatcat

SEQ ID NO: 1612342 - DNA, 15 bp, Homo sapiens
caacaactcatcatt

SEQ ID NO: 1612343 - DNA, 15 bp, Homo sapiens
aacaactcatcatta

SEQ ID NO: 1612344 - DNA, 15 bp, Homo sapiens
acaactcatcattat

SEQ ID NO: 1612345 - DNA, 15 bp, Homo sapiens
caactcatcattatt

SEQ ID NO: 1612346 - DNA, 15 bp, Homo sapiens
aactcatcattattt

SEQ ID NO: 1612347 - DNA, 15 bp, Homo sapiens
actcatcattatttg

SEQ ID NO: 1612348 - DNA, 15 bp, Homo sapiens
ctcatcattatttga

SEQ ID NO: 1612349 - DNA, 15 bp, Homo sapiens
tcatcattatttgat

SEQ ID NO: 1612350 - DNA, 15 bp, Homo sapiens
catcattatttgatg

SEQ ID NO: 1612351 - DNA, 15 bp, Homo sapiens
atcattatttgatgt

SEQ ID NO: 1612352 - DNA, 15 bp, Homo sapiens
tcattatttgatgtt

SEQ ID NO: 1612353 - DNA, 15 bp, Homo sapiens
cattatttgatgtta

SEQ ID NO: 1612354 - DNA, 15 bp, Homo sapiens
attatttgatgttaa

SEQ ID NO: 1612355 - DNA, 15 bp, Homo sapiens
ttatttgatgttaaa

SEQ ID NO: 1612356 - DNA, 15 bp, Homo sapiens
tatttgatgttaaat

SEQ ID NO: 1612357 - DNA, 15 bp, Homo sapiens
atttgatgttaaatt

SEQ ID NO: 1612358 - DNA, 15 bp, Homo sapiens
tttgatgttaaattg

SEQ ID NO: 1612359 - DNA, 15 bp, Homo sapiens
ttgatgttaaattgg

SEQ ID NO: 1612360 - DNA, 15 bp, Homo sapiens
tgatgttaaattggt

SEQ ID NO: 1612361 - DNA, 15 bp, Homo sapiens
gatgttaaattggtt

SEQ ID NO: 1612362 - DNA, 15 bp, Homo sapiens
atgttaaattggttt

SEQ ID NO: 1612363 - DNA, 15 bp, Homo sapiens
tgttaaattggtttt

SEQ ID NO: 1612364 - DNA, 15 bp, Homo sapiens
gttaaattggttttc

SEQ ID NO: 1612365 - DNA, 15 bp, Homo sapiens
ttaaattggttttct

SEQ ID NO: 1612366 - DNA, 15 bp, Homo sapiens
taaattggttttctt

SEQ ID NO: 1612367 - DNA, 15 bp, Homo sapiens
aaattggttttcttt

SEQ ID NO: 1612368 - DNA, 15 bp, Homo sapiens
aattggttttctttc

SEQ ID NO: 1612369 - DNA, 15 bp, Homo sapiens
attggttttctttct

SEQ ID NO: 1612370 - DNA, 15 bp, Homo sapiens
ttggttttctttctc

SEQ ID NO: 1612371 - DNA, 15 bp, Homo sapiens
tggttttctttctct

SEQ ID NO: 1612372 - DNA, 15 bp, Homo sapiens
ggttttctttctctc

SEQ ID NO: 1612373 - DNA, 15 bp, Homo sapiens
gttttctttctctct

SEQ ID NO: 1612374 - DNA, 15 bp, Homo sapiens
ttttctttctctctt

SEQ ID NO: 1612375 - DNA, 15 bp, Homo sapiens
tttctttctctcttc

SEQ ID NO: 1612376 - DNA, 15 bp, Homo sapiens
ttctttctctcttcc

SEQ ID NO: 1612377 - DNA, 15 bp, Homo sapiens
tctttctctcttcca

SEQ ID NO: 1612378 - DNA, 15 bp, Homo sapiens
ctttctctcttccaa

SEQ ID NO: 1612379 - DNA, 15 bp, Homo sapiens
tttctctcttccaat

SEQ ID NO: 1612380 - DNA, 15 bp, Homo sapiens
ttctctcttccaatt

SEQ ID NO: 1612381 - DNA, 15 bp, Homo sapiens
tctctcttccaattg

SEQ ID NO: 1612382 - DNA, 15 bp, Homo sapiens
ctctcttccaattgg

SEQ ID NO: 1612383 - DNA, 15 bp, Homo sapiens
tctcttccaattggt

SEQ ID NO: 1612384 - DNA, 15 bp, Homo sapiens
ctcttccaattggtc

SEQ ID NO: 1612385 - DNA, 15 bp, Homo sapiens
tcttccaattggtcc

SEQ ID NO: 1612386 - DNA, 15 bp, Homo sapiens
cttccaattggtcca

SEQ ID NO: 1612387 - DNA, 15 bp, Homo sapiens
ttccaattggtccat

SEQ ID NO: 1612388 - DNA, 15 bp, Homo sapiens
tccaattggtccatt

SEQ ID NO: 1612389 - DNA, 15 bp, Homo sapiens
ccaattggtccattg

SEQ ID NO: 1612390 - DNA, 15 bp, Homo sapiens
caattggtccattgc

SEQ ID NO: 1612391 - DNA, 15 bp, Homo sapiens
aattggtccattgct

SEQ ID NO: 1612392 - DNA, 15 bp, Homo sapiens
attggtccattgctt

SEQ ID NO: 1612393 - DNA, 15 bp, Homo sapiens
ttggtccattgcttc

SEQ ID NO: 1612394 - DNA, 15 bp, Homo sapiens
tggtccattgcttca

SEQ ID NO: 1612395 - DNA, 15 bp, Homo sapiens
ggtccattgcttcat

SEQ ID NO: 1612396 - DNA, 15 bp, Homo sapiens
gtccattgcttcatg

SEQ ID NO: 1612397 - DNA, 15 bp, Homo sapiens
tccattgcttcatgg

SEQ ID NO: 1612398 - DNA, 15 bp, Homo sapiens
ccattgcttcatggc

SEQ ID NO: 1612399 - DNA, 15 bp, Homo sapiens
cattgcttcatggct

SEQ ID NO: 1612400 - DNA, 15 bp, Homo sapiens
attgcttcatggctg

SEQ ID NO: 1612401 - DNA, 15 bp, Homo sapiens
ttgcttcatggctgc

SEQ ID NO: 1612402 - DNA, 15 bp, Homo sapiens
tgcttcatggctgct

SEQ ID NO: 1612403 - DNA, 15 bp, Homo sapiens
gcttcatggctgctt

SEQ ID NO: 1612404 - DNA, 15 bp, Homo sapiens
cttcatggctgcttt

SEQ ID NO: 1612405 - DNA, 15 bp, Homo sapiens
ttcatggctgctttc

SEQ ID NO: 1612406 - DNA, 15 bp, Homo sapiens
tcatggctgctttca

SEQ ID NO: 1612407 - DNA, 15 bp, Homo sapiens
catggctgctttcat

SEQ ID NO: 1612408 - DNA, 15 bp, Homo sapiens
atggctgctttcata

SEQ ID NO: 1612409 - DNA, 15 bp, Homo sapiens
tggctgctttcataa

SEQ ID NO: 1612410 - DNA, 15 bp, Homo sapiens
ggctgctttcataag

SEQ ID NO: 1612411 - DNA, 15 bp, Homo sapiens
gctgctttcataagg

SEQ ID NO: 1612412 - DNA, 15 bp, Homo sapiens
ctgctttcataaggc

SEQ ID NO: 1612413 - DNA, 15 bp, Homo sapiens
tgctttcataaggcc

SEQ ID NO: 1612414 - DNA, 15 bp, Homo sapiens
gctttcataaggccc

SEQ ID NO: 1612415 - DNA, 15 bp, Homo sapiens
ctttcataaggcccc

SEQ ID NO: 1612416 - DNA, 15 bp, Homo sapiens
tttcataaggcccct

SEQ ID NO: 1612417 - DNA, 15 bp, Homo sapiens
ttcataaggcccctg

SEQ ID NO: 1612418 - DNA, 15 bp, Homo sapiens
tcataaggcccctga

SEQ ID NO: 1612419 - DNA, 15 bp, Homo sapiens
cataaggcccctgac

SEQ ID NO: 1612420 - DNA, 15 bp, Homo sapiens
ataaggcccctgact

SEQ ID NO: 1612421 - DNA, 15 bp, Homo sapiens
taaggcccctgactt

SEQ ID NO: 1612422 - DNA, 15 bp, Homo sapiens
aaggcccctgactta

SEQ ID NO: 1612423 - DNA, 15 bp, Homo sapiens
aggcccctgacttat

SEQ ID NO: 1612424 - DNA, 15 bp, Homo sapiens
ggcccctgacttatg

SEQ ID NO: 1612425 - DNA, 15 bp, Homo sapiens
gcccctgacttatga

SEQ ID NO: 1612426 - DNA, 15 bp, Homo sapiens
cccctgacttatgag

SEQ ID NO: 1612427 - DNA, 15 bp, Homo sapiens
ccctgacttatgagt

SEQ ID NO: 1612428 - DNA, 15 bp, Homo sapiens
cctgacttatgagta

SEQ ID NO: 1612429 - DNA, 15 bp, Homo sapiens
ctgacttatgagtaa

SEQ ID NO: 1612430 - DNA, 15 bp, Homo sapiens
tgacttatgagtaag

SEQ ID NO: 1612431 - DNA, 15 bp, Homo sapiens
gacttatgagtaagt

SEQ ID NO: 1612432 - DNA, 15 bp, Homo sapiens
acttatgagtaagta

SEQ ID NO: 1612433 - DNA, 15 bp, Homo sapiens
cttatgagtaagtat

SEQ ID NO: 1612434 - DNA, 15 bp, Homo sapiens
ttatgagtaagtatc

SEQ ID NO: 1612435 - DNA, 15 bp, Homo sapiens
tatgagtaagtatct

SEQ ID NO: 1612436 - DNA, 15 bp, Homo sapiens
atgagtaagtatctg

SEQ ID NO: 1612437 - DNA, 15 bp, Homo sapiens
tgagtaagtatctga

SEQ ID NO: 1612438 - DNA, 15 bp, Homo sapiens
gagtaagtatctgat

SEQ ID NO: 1612439 - DNA, 15 bp, Homo sapiens
agtaagtatctgatt

SEQ ID NO: 1612440 - DNA, 15 bp, Homo sapiens
gtaagtatctgattc

SEQ ID NO: 1612441 - DNA, 15 bp, Homo sapiens
taagtatctgattct

SEQ ID NO: 1612442 - DNA, 15 bp, Homo sapiens
aagtatctgattctt

SEQ ID NO: 1612443 - DNA, 15 bp, Homo sapiens
agtatctgattcttg

SEQ ID NO: 1612444 - DNA, 15 bp, Homo sapiens
gtatctgattcttgt

SEQ ID NO: 1612445 - DNA, 15 bp, Homo sapiens
tatctgattcttgtt

SEQ ID NO: 1612446 - DNA, 15 bp, Homo sapiens
atctgattcttgttt

SEQ ID NO: 1612447 - DNA, 15 bp, Homo sapiens
tctgattcttgtttg

SEQ ID NO: 1612448 - DNA, 15 bp, Homo sapiens
ctgattcttgtttga

SEQ ID NO: 1612449 - DNA, 15 bp, Homo sapiens
tgattcttgtttgat

SEQ ID NO: 1612450 - DNA, 15 bp, Homo sapiens
gattcttgtttgatt

SEQ ID NO: 1612451 - DNA, 15 bp, Homo sapiens
attcttgtttgattc

SEQ ID NO: 1612452 - DNA, 15 bp, Homo sapiens
ttcttgtttgattct

SEQ ID NO: 1612453 - DNA, 15 bp, Homo sapiens
tcttgtttgattcta

SEQ ID NO: 1612454 - DNA, 15 bp, Homo sapiens
cttgtttgattctaa

SEQ ID NO: 1612455 - DNA, 15 bp, Homo sapiens
ttgtttgattctaag

SEQ ID NO: 1612456 - DNA, 15 bp, Homo sapiens
tgtttgattctaaga

SEQ ID NO: 1612457 - DNA, 15 bp, Homo sapiens
gtttgattctaagaa

SEQ ID NO: 1612458 - DNA, 15 bp, Homo sapiens
tttgattctaagaat

SEQ ID NO: 1612459 - DNA, 15 bp, Homo sapiens
ttgattctaagaatt

SEQ ID NO: 1612460 - DNA, 15 bp, Homo sapiens
tgattctaagaatta

SEQ ID NO: 1612461 - DNA, 15 bp, Homo sapiens
gattctaagaattat

SEQ ID NO: 1612462 - DNA, 15 bp, Homo sapiens
attctaagaattatt

SEQ ID NO: 1612463 - DNA, 15 bp, Homo sapiens
ttctaagaattattt

SEQ ID NO: 1612464 - DNA, 15 bp, Homo sapiens
tctaagaattatttg

SEQ ID NO: 1612465 - DNA, 15 bp, Homo sapiens
ctaagaattatttgt

SEQ ID NO: 1612466 - DNA, 15 bp, Homo sapiens
taagaattatttgtt

SEQ ID NO: 1612467 - DNA, 15 bp, Homo sapiens
aagaattatttgtta

SEQ ID NO: 1612468 - DNA, 15 bp, Homo sapiens
agaattatttgttac

SEQ ID NO: 1612469 - DNA, 15 bp, Homo sapiens
gaattatttgttact

SEQ ID NO: 1612470 - DNA, 15 bp, Homo sapiens
aattatttgttactt

SEQ ID NO: 1612471 - DNA, 15 bp, Homo sapiens
attatttgttactta

SEQ ID NO: 1612472 - DNA, 15 bp, Homo sapiens
ttatttgttacttat

SEQ ID NO: 1612473 - DNA, 15 bp, Homo sapiens
tatttgttacttata

SEQ ID NO: 1612474 - DNA, 15 bp, Homo sapiens
atttgttacttatag

SEQ ID NO: 1612475 - DNA, 15 bp, Homo sapiens
tttgttacttatagt

SEQ ID NO: 1612476 - DNA, 15 bp, Homo sapiens
ttgttacttatagtt

SEQ ID NO: 1612477 - DNA, 15 bp, Homo sapiens
tgttacttatagttg

SEQ ID NO: 1612478 - DNA, 15 bp, Homo sapiens
gttacttatagttga

SEQ ID NO: 1612479 - DNA, 15 bp, Homo sapiens
ttacttatagttgaa

SEQ ID NO: 1612480 - DNA, 15 bp, Homo sapiens
tacttatagttgaat

SEQ ID NO: 1612481 - DNA, 15 bp, Homo sapiens
acttatagttgaatg

SEQ ID NO: 1612482 - DNA, 15 bp, Homo sapiens
cttatagttgaatgt

SEQ ID NO: 1612483 - DNA, 15 bp, Homo sapiens
ttatagttgaatgta

SEQ ID NO: 1612484 - DNA, 15 bp, Homo sapiens
tatagttgaatgtag

SEQ ID NO: 1612485 - DNA, 15 bp, Homo sapiens
atagttgaatgtagg

SEQ ID NO: 1612486 - DNA, 15 bp, Homo sapiens
tagttgaatgtaggt

SEQ ID NO: 1612487 - DNA, 15 bp, Homo sapiens
agttgaatgtaggtt

SEQ ID NO: 1612488 - DNA, 15 bp, Homo sapiens
gttgaatgtaggttt

SEQ ID NO: 1612489 - DNA, 15 bp, Homo sapiens
ttgaatgtaggttta

SEQ ID NO: 1612490 - DNA, 15 bp, Homo sapiens
tgaatgtaggtttat

SEQ ID NO: 1612491 - DNA, 15 bp, Homo sapiens
gaatgtaggtttatc

SEQ ID NO: 1612492 - DNA, 15 bp, Homo sapiens
aatgtaggtttatca

SEQ ID NO: 1612493 - DNA, 15 bp, Homo sapiens
atgtaggtttatcaa

SEQ ID NO: 1612494 - DNA, 15 bp, Homo sapiens
tgtaggtttatcaat

SEQ ID NO: 1612495 - DNA, 15 bp, Homo sapiens
gtaggtttatcaata

SEQ ID NO: 1612496 - DNA, 15 bp, Homo sapiens
taggtttatcaatag

SEQ ID NO: 1612497 - DNA, 15 bp, Homo sapiens
aggtttatcaataga

SEQ ID NO: 1612498 - DNA, 15 bp, Homo sapiens
ggtttatcaatagac

SEQ ID NO: 1612499 - DNA, 15 bp, Homo sapiens
gtttatcaatagact

SEQ ID NO: 1612500 - DNA, 15 bp, Homo sapiens
tttatcaatagactc

SEQ ID NO: 1612501 - DNA, 15 bp, Homo sapiens
ttatcaatagactcc

SEQ ID NO: 1612502 - DNA, 15 bp, Homo sapiens
tatcaatagactcca

SEQ ID NO: 1612503 - DNA, 15 bp, Homo sapiens
atcaatagactccaa

SEQ ID NO: 1612504 - DNA, 15 bp, Homo sapiens
tcaatagactccaaa

SEQ ID NO: 1612505 - DNA, 15 bp, Homo sapiens
caatagactccaaat

SEQ ID NO: 1612506 - DNA, 15 bp, Homo sapiens
aatagactccaaatg

SEQ ID NO: 1612507 - DNA, 15 bp, Homo sapiens
atagactccaaatgc

SEQ ID NO: 1612508 - DNA, 15 bp, Homo sapiens
tagactccaaatgca

SEQ ID NO: 1612509 - DNA, 15 bp, Homo sapiens
agactccaaatgcat

SEQ ID NO: 1612510 - DNA, 15 bp, Homo sapiens
gactccaaatgcatt

SEQ ID NO: 1612511 - DNA, 15 bp, Homo sapiens
actccaaatgcattt

SEQ ID NO: 1612512 - DNA, 15 bp, Homo sapiens
ctccaaatgcatttt

SEQ ID NO: 1612513 - DNA, 15 bp, Homo sapiens
tccaaatgcattttt

SEQ ID NO: 1612514 - DNA, 15 bp, Homo sapiens
ccaaatgcattttta

SEQ ID NO: 1612515 - DNA, 15 bp, Homo sapiens
caaatgcatttttaa

SEQ ID NO: 1612516 - DNA, 15 bp, Homo sapiens
aaatgcatttttaaa

SEQ ID NO: 1612517 - DNA, 15 bp, Homo sapiens
aatgcatttttaaat

SEQ ID NO: 1612518 - DNA, 15 bp, Homo sapiens
atgcatttttaaatg

SEQ ID NO: 1612519 - DNA, 15 bp, Homo sapiens
tgcatttttaaatga

SEQ ID NO: 1612520 - DNA, 15 bp, Homo sapiens
gcatttttaaatgat

SEQ ID NO: 1612521 - DNA, 15 bp, Homo sapiens
catttttaaatgatt

SEQ ID NO: 1612522 - DNA, 15 bp, Homo sapiens
atttttaaatgatta

SEQ ID NO: 1612523 - DNA, 15 bp, Homo sapiens
tttttaaatgattaa

SEQ ID NO: 1612524 - DNA, 15 bp, Homo sapiens
ttttaaatgattaat

SEQ ID NO: 1612525 - DNA, 15 bp, Homo sapiens
tttaaatgattaatt

SEQ ID NO: 1612526 - DNA, 15 bp, Homo sapiens
ttaaatgattaattg

SEQ ID NO: 1612527 - DNA, 15 bp, Homo sapiens
taaatgattaattga

SEQ ID NO: 1612528 - DNA, 15 bp, Homo sapiens
aaatgattaattgaa

SEQ ID NO: 1612529 - DNA, 15 bp, Homo sapiens
aatgattaattgaat

SEQ ID NO: 1612530 - DNA, 15 bp, Homo sapiens
atgattaattgaatt

SEQ ID NO: 1612531 - DNA, 15 bp, Homo sapiens
tgattaattgaattc

SEQ ID NO: 1612532 - DNA, 15 bp, Homo sapiens
gattaattgaattca

SEQ ID NO: 1612533 - DNA, 15 bp, Homo sapiens
attaattgaattcag

SEQ ID NO: 1612534 - DNA, 15 bp, Homo sapiens
ttaattgaattcagc

SEQ ID NO: 1612535 - DNA, 15 bp, Homo sapiens
taattgaattcagcc

SEQ ID NO: 1612536 - DNA, 15 bp, Homo sapiens
aattgaattcagcca

SEQ ID NO: 1612537 - DNA, 15 bp, Homo sapiens
attgaattcagccaa

SEQ ID NO: 1612538 - DNA, 15 bp, Homo sapiens
ttgaattcagccaaa

SEQ ID NO: 1612539 - DNA, 15 bp, Homo sapiens
tgaattcagccaaaa

SEQ ID NO: 1612540 - DNA, 15 bp, Homo sapiens
gaattcagccaaaaa

SEQ ID NO: 1612541 - DNA, 15 bp, Homo sapiens
aattcagccaaaaaa

SEQ ID NO: 1612542 - DNA, 15 bp, Homo sapiens
attcagccaaaaaat

SEQ ID NO: 1612543 - DNA, 15 bp, Homo sapiens
ttcagccaaaaaata

SEQ ID NO: 1612544 - DNA, 15 bp, Homo sapiens
tcagccaaaaaataa

SEQ ID NO: 1612545 - DNA, 15 bp, Homo sapiens
cagccaaaaaataat

SEQ ID NO: 1612546 - DNA, 15 bp, Homo sapiens
agccaaaaaataatt

SEQ ID NO: 1612547 - DNA, 15 bp, Homo sapiens
gccaaaaaataattt

SEQ ID NO: 1612548 - DNA, 15 bp, Homo sapiens
ccaaaaaataattta

SEQ ID NO: 1612549 - DNA, 15 bp, Homo sapiens
caaaaaataatttaa

SEQ ID NO: 1612550 - DNA, 15 bp, Homo sapiens
aaaaaataatttaag

SEQ ID NO: 1612551 - DNA, 15 bp, Homo sapiens
aaaaataatttaagt

SEQ ID NO: 1612552 - DNA, 15 bp, Homo sapiens
aaaataatttaagtg

SEQ ID NO: 1612553 - DNA, 15 bp, Homo sapiens
aaataatttaagtga

SEQ ID NO: 1612554 - DNA, 15 bp, Homo sapiens
aataatttaagtgac

SEQ ID NO: 1612555 - DNA, 15 bp, Homo sapiens
ataatttaagtgact

SEQ ID NO: 1612556 - DNA, 15 bp, Homo sapiens
taatttaagtgacta

SEQ ID NO: 1612557 - DNA, 15 bp, Homo sapiens
aatttaagtgactat

SEQ ID NO: 1612558 - DNA, 15 bp, Homo sapiens
atttaagtgactatt

SEQ ID NO: 1612559 - DNA, 15 bp, Homo sapiens
tttaagtgactattt

SEQ ID NO: 1612560 - DNA, 15 bp, Homo sapiens
ttaagtgactattta

SEQ ID NO: 1612561 - DNA, 15 bp, Homo sapiens
taagtgactatttag

SEQ ID NO: 1612562 - DNA, 15 bp, Homo sapiens
aagtgactatttaga

SEQ ID NO: 1612563 - DNA, 15 bp, Homo sapiens
agtgactatttagag

SEQ ID NO: 1612564 - DNA, 15 bp, Homo sapiens
gtgactatttagaga

SEQ ID NO: 1612565 - DNA, 15 bp, Homo sapiens
tgactatttagagaa

SEQ ID NO: 1612566 - DNA, 15 bp, Homo sapiens
gactatttagagaac

SEQ ID NO: 1612567 - DNA, 15 bp, Homo sapiens
actatttagagaaca

SEQ ID NO: 1612568 - DNA, 15 bp, Homo sapiens
ctatttagagaacaa

SEQ ID NO: 1612569 - DNA, 15 bp, Homo sapiens
tatttagagaacaaa

SEQ ID NO: 1612570 - DNA, 15 bp, Homo sapiens
atttagagaacaaat

SEQ ID NO: 1612571 - DNA, 15 bp, Homo sapiens
tttagagaacaaata

SEQ ID NO: 1612572 - DNA, 15 bp, Homo sapiens
ttagagaacaaataa

SEQ ID NO: 1612573 - DNA, 15 bp, Homo sapiens
tagagaacaaataat

SEQ ID NO: 1612574 - DNA, 15 bp, Homo sapiens
agagaacaaataatc

SEQ ID NO: 1612575 - DNA, 15 bp, Homo sapiens
gagaacaaataatct

SEQ ID NO: 1612576 - DNA, 15 bp, Homo sapiens
agaacaaataatctc

SEQ ID NO: 1612577 - DNA, 15 bp, Homo sapiens
gaacaaataatctca

SEQ ID NO: 1612578 - DNA, 15 bp, Homo sapiens
aacaaataatctcag

SEQ ID NO: 1612579 - DNA, 15 bp, Homo sapiens
acaaataatctcagt

SEQ ID NO: 1612580 - DNA, 15 bp, Homo sapiens
caaataatctcagtc

SEQ ID NO: 1612581 - DNA, 15 bp, Homo sapiens
aaataatctcagtct

SEQ ID NO: 1612582 - DNA, 15 bp, Homo sapiens
aataatctcagtctt

SEQ ID NO: 1612583 - DNA, 15 bp, Homo sapiens
ataatctcagtcttt

SEQ ID NO: 1612584 - DNA, 15 bp, Homo sapiens
taatctcagtcttta

SEQ ID NO: 1612585 - DNA, 15 bp, Homo sapiens
aatctcagtctttaa

SEQ ID NO: 1612586 - DNA, 15 bp, Homo sapiens
tctcagtctttaatt

SEQ ID NO: 1612587 - DNA, 15 bp, Homo sapiens
ctcagtctttaattg

SEQ ID NO: 1612588 - DNA, 15 bp, Homo sapiens
tcagtctttaattgt

SEQ ID NO: 1612589 - DNA, 15 bp, Homo sapiens
cagtctttaattgta

SEQ ID NO: 1612590 - DNA, 15 bp, Homo sapiens
agtctttaattgtat

SEQ ID NO: 1612591 - DNA, 15 bp, Homo sapiens
gtctttaattgtatc

SEQ ID NO: 1612592 - DNA, 15 bp, Homo sapiens
tctttaattgtatct

SEQ ID NO: 1612593 - DNA, 15 bp, Homo sapiens
ctttaattgtatcta

SEQ ID NO: 1612594 - DNA, 15 bp, Homo sapiens
tttaattgtatctat

SEQ ID NO: 1612595 - DNA, 15 bp, Homo sapiens
ttaattgtatctatg

SEQ ID NO: 1612596 - DNA, 15 bp, Homo sapiens
taattgtatctatga

SEQ ID NO: 1612597 - DNA, 15 bp, Homo sapiens
aattgtatctatgat

SEQ ID NO: 1612598 - DNA, 15 bp, Homo sapiens
attgtatctatgatt

SEQ ID NO: 1612599 - DNA, 15 bp, Homo sapiens
ttgtatctatgattg

SEQ ID NO: 1612600 - DNA, 15 bp, Homo sapiens
tgtatctatgattgt

SEQ ID NO: 1612601 - DNA, 15 bp, Homo sapiens
gtatctatgattgtg

SEQ ID NO: 1612602 - DNA, 15 bp, Homo sapiens
tatctatgattgtgt

SEQ ID NO: 1612603 - DNA, 15 bp, Homo sapiens
atctatgattgtgtt

SEQ ID NO: 1612604 - DNA, 15 bp, Homo sapiens
tctatgattgtgtta

SEQ ID NO: 1612605 - DNA, 15 bp, Homo sapiens
ctatgattgtgttac

SEQ ID NO: 1612606 - DNA, 15 bp, Homo sapiens
tatgattgtgttaca

SEQ ID NO: 1612607 - DNA, 15 bp, Homo sapiens
atgattgtgttacaa

SEQ ID NO: 1612608 - DNA, 15 bp, Homo sapiens
tgattgtgttacaac

SEQ ID NO: 1612609 - DNA, 15 bp, Homo sapiens
gattgtgttacaact

SEQ ID NO: 1612610 - DNA, 15 bp, Homo sapiens
attgtgttacaacta

SEQ ID NO: 1612611 - DNA, 15 bp, Homo sapiens
ttgtgttacaactat

SEQ ID NO: 1612612 - DNA, 15 bp, Homo sapiens
tgtgttacaactatg

SEQ ID NO: 1612613 - DNA, 15 bp, Homo sapiens
gtgttacaactatgt

SEQ ID NO: 1612614 - DNA, 15 bp, Homo sapiens
tgttacaactatgtc

SEQ ID NO: 1612615 - DNA, 15 bp, Homo sapiens
gttacaactatgtct

SEQ ID NO: 1612616 - DNA, 15 bp, Homo sapiens
ttacaactatgtcta

SEQ ID NO: 1612617 - DNA, 15 bp, Homo sapiens
tacaactatgtctat

SEQ ID NO: 1612618 - DNA, 15 bp, Homo sapiens
acaactatgtctatc

SEQ ID NO: 1612619 - DNA, 15 bp, Homo sapiens
caactatgtctatct

SEQ ID NO: 1612620 - DNA, 15 bp, Homo sapiens
aactatgtctatctg

SEQ ID NO: 1612621 - DNA, 15 bp, Homo sapiens
actatgtctatctga

SEQ ID NO: 1612622 - DNA, 15 bp, Homo sapiens
ctatgtctatctgat

SEQ ID NO: 1612623 - DNA, 15 bp, Homo sapiens
tatgtctatctgata

SEQ ID NO: 1612624 - DNA, 15 bp, Homo sapiens
atgtctatctgatat

SEQ ID NO: 1612625 - DNA, 15 bp, Homo sapiens
tgtctatctgatatt

SEQ ID NO: 1612626 - DNA, 15 bp, Homo sapiens
gtctatctgatatta

SEQ ID NO: 1612627 - DNA, 15 bp, Homo sapiens
tctatctgatattat

SEQ ID NO: 1612628 - DNA, 15 bp, Homo sapiens
ctatctgatattata

SEQ ID NO: 1612629 - DNA, 15 bp, Homo sapiens
tatctgatattatag

SEQ ID NO: 1612630 - DNA, 15 bp, Homo sapiens
atctgatattatagc

SEQ ID NO: 1612631 - DNA, 15 bp, Homo sapiens
tctgatattatagct

SEQ ID NO: 1612632 - DNA, 15 bp, Homo sapiens
ctgatattatagcta

SEQ ID NO: 1612633 - DNA, 15 bp, Homo sapiens
tgatattatagctat

SEQ ID NO: 1612634 - DNA, 15 bp, Homo sapiens
gatattatagctata

SEQ ID NO: 1612635 - DNA, 15 bp, Homo sapiens
atattatagctatag

SEQ ID NO: 1612636 - DNA, 15 bp, Homo sapiens
tattatagctataga

SEQ ID NO: 1612637 - DNA, 15 bp, Homo sapiens
attatagctatagat

SEQ ID NO: 1612638 - DNA, 15 bp, Homo sapiens
ttatagctatagata

SEQ ID NO: 1612639 - DNA, 15 bp, Homo sapiens
tatagctatagatat

SEQ ID NO: 1612640 - DNA, 15 bp, Homo sapiens
atagctatagatata

SEQ ID NO: 1612641 - DNA, 15 bp, Homo sapiens
tagctatagatatat

SEQ ID NO: 1612642 - DNA, 15 bp, Homo sapiens
agctatagatatata

SEQ ID NO: 1612643 - DNA, 15 bp, Homo sapiens
gctatagatatatac

SEQ ID NO: 1612644 - DNA, 15 bp, Homo sapiens
ctatagatatataca

SEQ ID NO: 1612645 - DNA, 15 bp, Homo sapiens
tatagatatatacaa

SEQ ID NO: 1612646 - DNA, 15 bp, Homo sapiens
atagatatatacaag

SEQ ID NO: 1612647 - DNA, 15 bp, Homo sapiens
tagatatatacaaga

SEQ ID NO: 1612648 - DNA, 15 bp, Homo sapiens
agatatatacaagaa

SEQ ID NO: 1612649 - DNA, 15 bp, Homo sapiens
gatatatacaagaat

SEQ ID NO: 1612650 - DNA, 15 bp, Homo sapiens
atatatacaagaata

SEQ ID NO: 1612651 - DNA, 15 bp, Homo sapiens
tatatacaagaatac

SEQ ID NO: 1612652 - DNA, 15 bp, Homo sapiens
atatacaagaatact

SEQ ID NO: 1612653 - DNA, 15 bp, Homo sapiens
tatacaagaatacta

SEQ ID NO: 1612654 - DNA, 15 bp, Homo sapiens
atacaagaatactac

SEQ ID NO: 1612655 - DNA, 15 bp, Homo sapiens
tacaagaatactact

SEQ ID NO: 1612656 - DNA, 15 bp, Homo sapiens
acaagaatactactc

SEQ ID NO: 1612657 - DNA, 15 bp, Homo sapiens
caagaatactactca

SEQ ID NO: 1612658 - DNA, 15 bp, Homo sapiens
aagaatactactcaa

SEQ ID NO: 1612659 - DNA, 15 bp, Homo sapiens
agaatactactcaaa

SEQ ID NO: 1612660 - DNA, 15 bp, Homo sapiens
gaatactactcaaat

SEQ ID NO: 1612661 - DNA, 15 bp, Homo sapiens
aatactactcaaata

SEQ ID NO: 1612662 - DNA, 15 bp, Homo sapiens
atactactcaaatac

SEQ ID NO: 1612663 - DNA, 15 bp, Homo sapiens
tactactcaaataca

SEQ ID NO: 1612664 - DNA, 15 bp, Homo sapiens
actactcaaatacat

SEQ ID NO: 1612665 - DNA, 15 bp, Homo sapiens
ctactcaaatacatc

SEQ ID NO: 1612666 - DNA, 15 bp, Homo sapiens
tactcaaatacatct

SEQ ID NO: 1612667 - DNA, 15 bp, Homo sapiens
actcaaatacatctg

SEQ ID NO: 1612668 - DNA, 15 bp, Homo sapiens
ctcaaatacatctgt

SEQ ID NO: 1612669 - DNA, 15 bp, Homo sapiens
tcaaatacatctgta

SEQ ID NO: 1612670 - DNA, 15 bp, Homo sapiens
caaatacatctgtag

SEQ ID NO: 1612671 - DNA, 15 bp, Homo sapiens
aaatacatctgtagg

SEQ ID NO: 1612672 - DNA, 15 bp, Homo sapiens
aatacatctgtagga

SEQ ID NO: 1612673 - DNA, 15 bp, Homo sapiens
atacatctgtaggaa

SEQ ID NO: 1612674 - DNA, 15 bp, Homo sapiens
tacatctgtaggaaa

SEQ ID NO: 1612675 - DNA, 15 bp, Homo sapiens
acatctgtaggaaat

SEQ ID NO: 1612676 - DNA, 15 bp, Homo sapiens
catctgtaggaaatt

SEQ ID NO: 1612677 - DNA, 15 bp, Homo sapiens
atctgtaggaaatta

SEQ ID NO: 1612678 - DNA, 15 bp, Homo sapiens
tctgtaggaaattaa

SEQ ID NO: 1612679 - DNA, 15 bp, Homo sapiens
ctgtaggaaattaat

SEQ ID NO: 1612680 - DNA, 15 bp, Homo sapiens
tgtaggaaattaata

SEQ ID NO: 1612681 - DNA, 15 bp, Homo sapiens
gtaggaaattaatat

SEQ ID NO: 1612682 - DNA, 15 bp, Homo sapiens
taggaaattaatatg

SEQ ID NO: 1612683 - DNA, 15 bp, Homo sapiens
aggaaattaatatgc

SEQ ID NO: 1612684 - DNA, 15 bp, Homo sapiens
ggaaattaatatgca

SEQ ID NO: 1612685 - DNA, 15 bp, Homo sapiens
gaaattaatatgcaa

SEQ ID NO: 1612686 - DNA, 15 bp, Homo sapiens
aaattaatatgcaaa

SEQ ID NO: 1612687 - DNA, 15 bp, Homo sapiens
aattaatatgcaaac

SEQ ID NO: 1612688 - DNA, 15 bp, Homo sapiens
attaatatgcaaaca

SEQ ID NO: 1612689 - DNA, 15 bp, Homo sapiens
ttaatatgcaaacat

SEQ ID NO: 1612690 - DNA, 15 bp, Homo sapiens
taatatgcaaacata

SEQ ID NO: 1612691 - DNA, 15 bp, Homo sapiens
aatatgcaaacatac

SEQ ID NO: 1612692 - DNA, 15 bp, Homo sapiens
atatgcaaacataca

SEQ ID NO: 1612693 - DNA, 15 bp, Homo sapiens
tatgcaaacatacaa

SEQ ID NO: 1612694 - DNA, 15 bp, Homo sapiens
atgcaaacatacaaa

SEQ ID NO: 1612695 - DNA, 15 bp, Homo sapiens
tgcaaacatacaaaa

SEQ ID NO: 1612696 - DNA, 15 bp, Homo sapiens
gcaaacatacaaaat

SEQ ID NO: 1612697 - DNA, 15 bp, Homo sapiens
caaacatacaaaatg

SEQ ID NO: 1612698 - DNA, 15 bp, Homo sapiens
aaacatacaaaatgc

SEQ ID NO: 1612699 - DNA, 15 bp, Homo sapiens
aacatacaaaatgca

SEQ ID NO: 1612700 - DNA, 15 bp, Homo sapiens
acatacaaaatgcac

SEQ ID NO: 1612701 - DNA, 15 bp, Homo sapiens
catacaaaatgcaca

SEQ ID NO: 1612702 - DNA, 15 bp, Homo sapiens
atacaaaatgcacat

SEQ ID NO: 1612703 - DNA, 15 bp, Homo sapiens
tacaaaatgcacata

SEQ ID NO: 1612704 - DNA, 15 bp, Homo sapiens
acaaaatgcacatac

SEQ ID NO: 1612705 - DNA, 15 bp, Homo sapiens
caaaatgcacataca

SEQ ID NO: 1612706 - DNA, 15 bp, Homo sapiens
aaaatgcacatacat

SEQ ID NO: 1612707 - DNA, 15 bp, Homo sapiens
aaatgcacatacatc

SEQ ID NO: 1612708 - DNA, 15 bp, Homo sapiens
aatgcacatacatct

SEQ ID NO: 1612709 - DNA, 15 bp, Homo sapiens
atgcacatacatctg

SEQ ID NO: 1612710 - DNA, 15 bp, Homo sapiens
tgcacatacatctgt

SEQ ID NO: 1612711 - DNA, 15 bp, Homo sapiens
gcacatacatctgtg

SEQ ID NO: 1612712 - DNA, 15 bp, Homo sapiens
cacatacatctgtgt

SEQ ID NO: 1612713 - DNA, 15 bp, Homo sapiens
acatacatctgtgta

SEQ ID NO: 1612714 - DNA, 15 bp, Homo sapiens
catacatctgtgtat

SEQ ID NO: 1612715 - DNA, 15 bp, Homo sapiens
atacatctgtgtatc

SEQ ID NO: 1612716 - DNA, 15 bp, Homo sapiens
tacatctgtgtatct

SEQ ID NO: 1612717 - DNA, 15 bp, Homo sapiens
acatctgtgtatcta

SEQ ID NO: 1612718 - DNA, 15 bp, Homo sapiens
catctgtgtatctat

SEQ ID NO: 1612719 - DNA, 15 bp, Homo sapiens
atctgtgtatctatg

SEQ ID NO: 1612720 - DNA, 15 bp, Homo sapiens
tctgtgtatctatga

SEQ ID NO: 1612721 - DNA, 15 bp, Homo sapiens
ctgtgtatctatgat

SEQ ID NO: 1612722 - DNA, 15 bp, Homo sapiens
tgtgtatctatgatt

SEQ ID NO: 1612723 - DNA, 15 bp, Homo sapiens
gtgtatctatgattt

SEQ ID NO: 1612724 - DNA, 15 bp, Homo sapiens
tgtatctatgattta

SEQ ID NO: 1612725 - DNA, 15 bp, Homo sapiens
gtatctatgatttaa

SEQ ID NO: 1612726 - DNA, 15 bp, Homo sapiens
tatctatgatttaat

SEQ ID NO: 1612727 - DNA, 15 bp, Homo sapiens
atctatgatttaata

SEQ ID NO: 1612728 - DNA, 15 bp, Homo sapiens
tctatgatttaataa

SEQ ID NO: 1612729 - DNA, 15 bp, Homo sapiens
ctatgatttaataac

SEQ ID NO: 1612730 - DNA, 15 bp, Homo sapiens
tatgatttaataact

SEQ ID NO: 1612731 - DNA, 15 bp, Homo sapiens
atgatttaataactc

SEQ ID NO: 1612732 - DNA, 15 bp, Homo sapiens
tgatttaataactcc

SEQ ID NO: 1612733 - DNA, 15 bp, Homo sapiens
gatttaataactccc

SEQ ID NO: 1612734 - DNA, 15 bp, Homo sapiens
atttaataactccca

SEQ ID NO: 1612735 - DNA, 15 bp, Homo sapiens
tttaataactcccat

SEQ ID NO: 1612736 - DNA, 15 bp, Homo sapiens
ttaataactcccatg

SEQ ID NO: 1612737 - DNA, 15 bp, Homo sapiens
taataactcccatgt

SEQ ID NO: 1612738 - DNA, 15 bp, Homo sapiens
aataactcccatgtc

SEQ ID NO: 1612739 - DNA, 15 bp, Homo sapiens
ataactcccatgtcc

SEQ ID NO: 1612740 - DNA, 15 bp, Homo sapiens
taactcccatgtcca

SEQ ID NO: 1612741 - DNA, 15 bp, Homo sapiens
aactcccatgtccat

SEQ ID NO: 1612742 - DNA, 15 bp, Homo sapiens
actcccatgtccata

SEQ ID NO: 1612743 - DNA, 15 bp, Homo sapiens
ctcccatgtccataa

SEQ ID NO: 1612744 - DNA, 15 bp, Homo sapiens
tcccatgtccataac

SEQ ID NO: 1612745 - DNA, 15 bp, Homo sapiens
cccatgtccataact

SEQ ID NO: 1612746 - DNA, 15 bp, Homo sapiens
ccatgtccataacta

SEQ ID NO: 1612747 - DNA, 15 bp, Homo sapiens
catgtccataactag

SEQ ID NO: 1612748 - DNA, 15 bp, Homo sapiens
atgtccataactagt

SEQ ID NO: 1612749 - DNA, 15 bp, Homo sapiens
tgtccataactagtt

SEQ ID NO: 1612750 - DNA, 15 bp, Homo sapiens
gtccataactagtta

SEQ ID NO: 1612751 - DNA, 15 bp, Homo sapiens
tccataactagttac

SEQ ID NO: 1612752 - DNA, 15 bp, Homo sapiens
ccataactagttacc

SEQ ID NO: 1612753 - DNA, 15 bp, Homo sapiens
cataactagttaccg

SEQ ID NO: 1612754 - DNA, 15 bp, Homo sapiens
ataactagttaccgg

SEQ ID NO: 1612755 - DNA, 15 bp, Homo sapiens
taactagttaccggt

SEQ ID NO: 1612756 - DNA, 15 bp, Homo sapiens
aactagttaccggtg

SEQ ID NO: 1612757 - DNA, 15 bp, Homo sapiens
actagttaccggtgt

SEQ ID NO: 1612758 - DNA, 15 bp, Homo sapiens
ctagttaccggtgtc

SEQ ID NO: 1612759 - DNA, 15 bp, Homo sapiens
tagttaccggtgtca

SEQ ID NO: 1612760 - DNA, 15 bp, Homo sapiens
agttaccggtgtcaa

SEQ ID NO: 1612761 - DNA, 15 bp, Homo sapiens
gttaccggtgtcaat

SEQ ID NO: 1612762 - DNA, 15 bp, Homo sapiens
ttaccggtgtcaata

SEQ ID NO: 1612763 - DNA, 15 bp, Homo sapiens
taccggtgtcaataa

SEQ ID NO: 1612764 - DNA, 15 bp, Homo sapiens
accggtgtcaataag

SEQ ID NO: 1612765 - DNA, 15 bp, Homo sapiens
ccggtgtcaataagt

SEQ ID NO: 1612766 - DNA, 15 bp, Homo sapiens
cggtgtcaataagta

SEQ ID NO: 1612767 - DNA, 15 bp, Homo sapiens
ggtgtcaataagtaa

SEQ ID NO: 1612768 - DNA, 15 bp, Homo sapiens
gtgtcaataagtaac

SEQ ID NO: 1612769 - DNA, 15 bp, Homo sapiens
tgtcaataagtaacc

SEQ ID NO: 1612770 - DNA, 15 bp, Homo sapiens
gtcaataagtaacca

SEQ ID NO: 1612771 - DNA, 15 bp, Homo sapiens
tcaataagtaaccat

SEQ ID NO: 1612772 - DNA, 15 bp, Homo sapiens
caataagtaaccata

SEQ ID NO: 1612773 - DNA, 15 bp, Homo sapiens
aataagtaaccatat

SEQ ID NO: 1612774 - DNA, 15 bp, Homo sapiens
ataagtaaccatata

SEQ ID NO: 1612775 - DNA, 15 bp, Homo sapiens
taagtaaccatatac

SEQ ID NO: 1612776 - DNA, 15 bp, Homo sapiens
aagtaaccatatacc

SEQ ID NO: 1612777 - DNA, 15 bp, Homo sapiens
agtaaccatatacca

SEQ ID NO: 1612778 - DNA, 15 bp, Homo sapiens
gtaaccatataccaa

SEQ ID NO: 1612779 - DNA, 15 bp, Homo sapiens
taaccatataccaac

SEQ ID NO: 1612780 - DNA, 15 bp, Homo sapiens
aaccatataccaact

SEQ ID NO: 1612781 - DNA, 15 bp, Homo sapiens
accatataccaactt

SEQ ID NO: 1612782 - DNA, 15 bp, Homo sapiens
ccatataccaacttg

SEQ ID NO: 1612783 - DNA, 15 bp, Homo sapiens
catataccaacttgt

SEQ ID NO: 1612784 - DNA, 15 bp, Homo sapiens
atataccaacttgtt

SEQ ID NO: 1612785 - DNA, 15 bp, Homo sapiens
tataccaacttgttc

SEQ ID NO: 1612786 - DNA, 15 bp, Homo sapiens
ataccaacttgttct

SEQ ID NO: 1612787 - DNA, 15 bp, Homo sapiens
taccaacttgttctt

SEQ ID NO: 1612788 - DNA, 15 bp, Homo sapiens
accaacttgttcttt

SEQ ID NO: 1612789 - DNA, 15 bp, Homo sapiens
ccaacttgttctttt

SEQ ID NO: 1612790 - DNA, 15 bp, Homo sapiens
caacttgttcttttt

SEQ ID NO: 1612791 - DNA, 15 bp, Homo sapiens
aacttgttctttttg

SEQ ID NO: 1612792 - DNA, 15 bp, Homo sapiens
acttgttctttttga

SEQ ID NO: 1612793 - DNA, 15 bp, Homo sapiens
cttgttctttttgac

SEQ ID NO: 1612794 - DNA, 15 bp, Homo sapiens
ttgttctttttgacc

SEQ ID NO: 1612795 - DNA, 15 bp, Homo sapiens
tgttctttttgaccc

SEQ ID NO: 1612796 - DNA, 15 bp, Homo sapiens
gttctttttgaccca

SEQ ID NO: 1612797 - DNA, 15 bp, Homo sapiens
ttctttttgacccaa

SEQ ID NO: 1612798 - DNA, 15 bp, Homo sapiens
tctttttgacccaat

SEQ ID NO: 1612799 - DNA, 15 bp, Homo sapiens
ctttttgacccaatc

SEQ ID NO: 1612800 - DNA, 15 bp, Homo sapiens
tttttgacccaatcc

SEQ ID NO: 1612801 - DNA, 15 bp, Homo sapiens
ttttgacccaatcct

SEQ ID NO: 1612802 - DNA, 15 bp, Homo sapiens
tttgacccaatcctt

SEQ ID NO: 1612803 - DNA, 15 bp, Homo sapiens
ttgacccaatcctta

SEQ ID NO: 1612804 - DNA, 15 bp, Homo sapiens
tgacccaatccttac

SEQ ID NO: 1612805 - DNA, 15 bp, Homo sapiens
gacccaatccttact

SEQ ID NO: 1612806 - DNA, 15 bp, Homo sapiens
acccaatccttacta

SEQ ID NO: 1612807 - DNA, 15 bp, Homo sapiens
cccaatccttactac

SEQ ID NO: 1612808 - DNA, 15 bp, Homo sapiens
ccaatccttactact

SEQ ID NO: 1612809 - DNA, 15 bp, Homo sapiens
caatccttactactt

SEQ ID NO: 1612810 - DNA, 15 bp, Homo sapiens
aatccttactacttt

SEQ ID NO: 1612811 - DNA, 15 bp, Homo sapiens
atccttactactttt

SEQ ID NO: 1612812 - DNA, 15 bp, Homo sapiens
tccttactacttttg

SEQ ID NO: 1612813 - DNA, 15 bp, Homo sapiens
ccttactacttttga

SEQ ID NO: 1612814 - DNA, 15 bp, Homo sapiens
cttactacttttgac

SEQ ID NO: 1612815 - DNA, 15 bp, Homo sapiens
ttactacttttgacc

SEQ ID NO: 1612816 - DNA, 15 bp, Homo sapiens
tactacttttgacct

SEQ ID NO: 1612817 - DNA, 15 bp, Homo sapiens
actacttttgaccta

SEQ ID NO: 1612818 - DNA, 15 bp, Homo sapiens
ctacttttgacctat

SEQ ID NO: 1612819 - DNA, 15 bp, Homo sapiens
tacttttgacctata

SEQ ID NO: 1612820 - DNA, 15 bp, Homo sapiens
acttttgacctataa

SEQ ID NO: 1612821 - DNA, 15 bp, Homo sapiens
cttttgacctataat

SEQ ID NO: 1612822 - DNA, 15 bp, Homo sapiens
ttttgacctataata

SEQ ID NO: 1612823 - DNA, 15 bp, Homo sapiens
tttgacctataatat

SEQ ID NO: 1612824 - DNA, 15 bp, Homo sapiens
ttgacctataatata

SEQ ID NO: 1612825 - DNA, 15 bp, Homo sapiens
tgacctataatatat

SEQ ID NO: 1612826 - DNA, 15 bp, Homo sapiens
gacctataatatata

SEQ ID NO: 1612827 - DNA, 15 bp, Homo sapiens
acctataatatatac

SEQ ID NO: 1612828 - DNA, 15 bp, Homo sapiens
cctataatatatact

SEQ ID NO: 1612829 - DNA, 15 bp, Homo sapiens
ctataatatatacta

SEQ ID NO: 1612830 - DNA, 15 bp, Homo sapiens
tataatatatactaa

SEQ ID NO: 1612831 - DNA, 15 bp, Homo sapiens
ataatatatactaaa

SEQ ID NO: 1612832 - DNA, 15 bp, Homo sapiens
taatatatactaaac

SEQ ID NO: 1612833 - DNA, 15 bp, Homo sapiens
aatatatactaaaca

SEQ ID NO: 1612834 - DNA, 15 bp, Homo sapiens
atatatactaaacat

SEQ ID NO: 1612835 - DNA, 15 bp, Homo sapiens
tatatactaaacata

SEQ ID NO: 1612836 - DNA, 15 bp, Homo sapiens
atatactaaacatag

SEQ ID NO: 1612837 - DNA, 15 bp, Homo sapiens
tatactaaacatagg

SEQ ID NO: 1612838 - DNA, 15 bp, Homo sapiens
atactaaacataggc

SEQ ID NO: 1612839 - DNA, 15 bp, Homo sapiens
tactaaacataggct

SEQ ID NO: 1612840 - DNA, 15 bp, Homo sapiens
actaaacataggcta

SEQ ID NO: 1612841 - DNA, 15 bp, Homo sapiens
ctaaacataggctaa

SEQ ID NO: 1612842 - DNA, 15 bp, Homo sapiens
taaacataggctaag

SEQ ID NO: 1612843 - DNA, 15 bp, Homo sapiens
aaacataggctaaga

SEQ ID NO: 1612844 - DNA, 15 bp, Homo sapiens
aacataggctaagag

SEQ ID NO: 1612845 - DNA, 15 bp, Homo sapiens
acataggctaagaga

SEQ ID NO: 1612846 - DNA, 15 bp, Homo sapiens
cataggctaagagat

SEQ ID NO: 1612847 - DNA, 15 bp, Homo sapiens
ataggctaagagatg

SEQ ID NO: 1612848 - DNA, 15 bp, Homo sapiens
taggctaagagatgg

SEQ ID NO: 1612849 - DNA, 15 bp, Homo sapiens
aggctaagagatgga

SEQ ID NO: 1612850 - DNA, 15 bp, Homo sapiens
ggctaagagatggaa

SEQ ID NO: 1612851 - DNA, 15 bp, Homo sapiens
gctaagagatggaaa

SEQ ID NO: 1612852 - DNA, 15 bp, Homo sapiens
ctaagagatggaaaa

SEQ ID NO: 1612853 - DNA, 15 bp, Homo sapiens
taagagatggaaaac

SEQ ID NO: 1612854 - DNA, 15 bp, Homo sapiens
aagagatggaaaacc

SEQ ID NO: 1612855 - DNA, 15 bp, Homo sapiens
agagatggaaaacct

SEQ ID NO: 1612856 - DNA, 15 bp, Homo sapiens
gagatggaaaacctg

SEQ ID NO: 1612857 - DNA, 15 bp, Homo sapiens
agatggaaaacctgg

SEQ ID NO: 1612858 - DNA, 15 bp, Homo sapiens
gatggaaaacctggg

SEQ ID NO: 1612859 - DNA, 15 bp, Homo sapiens
atggaaaacctgggc

SEQ ID NO: 1612860 - DNA, 15 bp, Homo sapiens
tggaaaacctgggct

SEQ ID NO: 1612861 - DNA, 15 bp, Homo sapiens
ggaaaacctgggctg

SEQ ID NO: 1612862 - DNA, 15 bp, Homo sapiens
gaaaacctgggctgg

SEQ ID NO: 1612863 - DNA, 15 bp, Homo sapiens
aaaacctgggctggg

SEQ ID NO: 1612864 - DNA, 15 bp, Homo sapiens
aaacctgggctgggt

SEQ ID NO: 1612865 - DNA, 15 bp, Homo sapiens
aacctgggctgggtg

SEQ ID NO: 1612866 - DNA, 15 bp, Homo sapiens
acctgggctgggtgc

SEQ ID NO: 1612867 - DNA, 15 bp, Homo sapiens
cctgggctgggtgca

SEQ ID NO: 1612868 - DNA, 15 bp, Homo sapiens
ctgggctgggtgcat

SEQ ID NO: 1612869 - DNA, 15 bp, Homo sapiens
tgggctgggtgcatg

SEQ ID NO: 1612870 - DNA, 15 bp, Homo sapiens
gggctgggtgcatgg

SEQ ID NO: 1612871 - DNA, 15 bp, Homo sapiens
ggctgggtgcatggc

SEQ ID NO: 1612872 - DNA, 15 bp, Homo sapiens
gctgggtgcatggct

SEQ ID NO: 1612873 - DNA, 15 bp, Homo sapiens
ctgggtgcatggctc

SEQ ID NO: 1612874 - DNA, 15 bp, Homo sapiens
tgggtgcatggctca

SEQ ID NO: 1612875 - DNA, 15 bp, Homo sapiens
gggtgcatggctcac

SEQ ID NO: 1612876 - DNA, 15 bp, Homo sapiens
ggtgcatggctcacg

SEQ ID NO: 1612877 - DNA, 15 bp, Homo sapiens
gtgcatggctcacgc

SEQ ID NO: 1612878 - DNA, 15 bp, Homo sapiens
tgcatggctcacgcc

SEQ ID NO: 1612879 - DNA, 15 bp, Homo sapiens
gcatggctcacgcct

SEQ ID NO: 1612880 - DNA, 15 bp, Homo sapiens
catggctcacgcctg

SEQ ID NO: 1612881 - DNA, 15 bp, Homo sapiens
acgcctgtaatccct

SEQ ID NO: 1612882 - DNA, 15 bp, Homo sapiens
cgcctgtaatccctg

SEQ ID NO: 1612883 - DNA, 15 bp, Homo sapiens
cctgcactttgggat

SEQ ID NO: 1612884 - DNA, 15 bp, Homo sapiens
ctgcactttgggatg

SEQ ID NO: 1612885 - DNA, 15 bp, Homo sapiens
tgcactttgggatgc

SEQ ID NO: 1612886 - DNA, 15 bp, Homo sapiens
gcactttgggatgcc

SEQ ID NO: 1612887 - DNA, 15 bp, Homo sapiens
cactttgggatgccg

SEQ ID NO: 1612888 - DNA, 15 bp, Homo sapiens
actttgggatgccga

SEQ ID NO: 1612889 - DNA, 15 bp, Homo sapiens
ctttgggatgccgag

SEQ ID NO: 1612890 - DNA, 15 bp, Homo sapiens
tttgggatgccgagg

SEQ ID NO: 1612891 - DNA, 15 bp, Homo sapiens
ttgggatgccgaggc

SEQ ID NO: 1612892 - DNA, 15 bp, Homo sapiens
tgggatgccgaggca

SEQ ID NO: 1612893 - DNA, 15 bp, Homo sapiens
gggatgccgaggcag

SEQ ID NO: 1612894 - DNA, 15 bp, Homo sapiens
ggatgccgaggcagg

SEQ ID NO: 1612895 - DNA, 15 bp, Homo sapiens
gatgccgaggcaggt

SEQ ID NO: 1612896 - DNA, 15 bp, Homo sapiens
atgccgaggcaggtg

SEQ ID NO: 1612897 - DNA, 15 bp, Homo sapiens
tgccgaggcaggtgg

SEQ ID NO: 1612898 - DNA, 15 bp, Homo sapiens
cctgggcaacatggt

SEQ ID NO: 1612899 - DNA, 15 bp, Homo sapiens
ctgggcaacatggtg

SEQ ID NO: 1612900 - DNA, 15 bp, Homo sapiens
tgggcaacatggtga

SEQ ID NO: 1612901 - DNA, 15 bp, Homo sapiens
gggcaacatggtgaa

SEQ ID NO: 1612902 - DNA, 15 bp, Homo sapiens
aacatggtgaaacct

SEQ ID NO: 1612903 - DNA, 15 bp, Homo sapiens
acatggtgaaacctc

SEQ ID NO: 1612904 - DNA, 15 bp, Homo sapiens
catggtgaaacctcg

SEQ ID NO: 1612905 - DNA, 15 bp, Homo sapiens
atggtgaaacctcgt

SEQ ID NO: 1612906 - DNA, 15 bp, Homo sapiens
tggtgaaacctcgtc

SEQ ID NO: 1612907 - DNA, 15 bp, Homo sapiens
ggtgaaacctcgtct

SEQ ID NO: 1612908 - DNA, 15 bp, Homo sapiens
gtgaaacctcgtctc

SEQ ID NO: 1612909 - DNA, 15 bp, Homo sapiens
tgaaacctcgtctct

SEQ ID NO: 1612910 - DNA, 15 bp, Homo sapiens
aaaattagccgggcc

SEQ ID NO: 1612911 - DNA, 15 bp, Homo sapiens
aaattagccgggcct

SEQ ID NO: 1612912 - DNA, 15 bp, Homo sapiens
aattagccgggcctg

SEQ ID NO: 1612913 - DNA, 15 bp, Homo sapiens
attagccgggcctgg

SEQ ID NO: 1612914 - DNA, 15 bp, Homo sapiens
ttagccgggcctggt

SEQ ID NO: 1612915 - DNA, 15 bp, Homo sapiens
tagccgggcctggtg

SEQ ID NO: 1612916 - DNA, 15 bp, Homo sapiens
agccgggcctggtgg

SEQ ID NO: 1612917 - DNA, 15 bp, Homo sapiens
gccgggcctggtggc

SEQ ID NO: 1612918 - DNA, 15 bp, Homo sapiens
ccgggcctggtggcg

SEQ ID NO: 1612919 - DNA, 15 bp, Homo sapiens
cgggcctggtggcgg

SEQ ID NO: 1612920 - DNA, 15 bp, Homo sapiens
gggcctggtggcggg

SEQ ID NO: 1612921 - DNA, 15 bp, Homo sapiens
ggcctggtggcgggc

SEQ ID NO: 1612922 - DNA, 15 bp, Homo sapiens
gcctggtggcgggcg

SEQ ID NO: 1612923 - DNA, 15 bp, Homo sapiens
cctggtggcgggcgc

SEQ ID NO: 1612924 - DNA, 15 bp, Homo sapiens
ctggtggcgggcgcc

SEQ ID NO: 1612925 - DNA, 15 bp, Homo sapiens
gggcgcctgtaatct

SEQ ID NO: 1612926 - DNA, 15 bp, Homo sapiens
aggcaggagaatcaa

SEQ ID NO: 1612927 - DNA, 15 bp, Homo sapiens
ggcaggagaatcaat

SEQ ID NO: 1612928 - DNA, 15 bp, Homo sapiens
gcaggagaatcaatt

SEQ ID NO: 1612929 - DNA, 15 bp, Homo sapiens
caggagaatcaattg

SEQ ID NO: 1612930 - DNA, 15 bp, Homo sapiens
aggagaatcaattga

SEQ ID NO: 1612931 - DNA, 15 bp, Homo sapiens
ggagaatcaattgaa

SEQ ID NO: 1612932 - DNA, 15 bp, Homo sapiens
gagaatcaattgaac

SEQ ID NO: 1612933 - DNA, 15 bp, Homo sapiens
agaatcaattgaacc

SEQ ID NO: 1612934 - DNA, 15 bp, Homo sapiens
gaatcaattgaaccc

SEQ ID NO: 1612935 - DNA, 15 bp, Homo sapiens
aatcaattgaaccca

SEQ ID NO: 1612936 - DNA, 15 bp, Homo sapiens
atcaattgaacccag

SEQ ID NO: 1612937 - DNA, 15 bp, Homo sapiens
tcaattgaacccagg

SEQ ID NO: 1612938 - DNA, 15 bp, Homo sapiens
caattgaacccagga

SEQ ID NO: 1612939 - DNA, 15 bp, Homo sapiens
aattgaacccaggag

SEQ ID NO: 1612940 - DNA, 15 bp, Homo sapiens
attgaacccaggagg

SEQ ID NO: 1612941 - DNA, 15 bp, Homo sapiens
aggttgcagtgagcg

SEQ ID NO: 1612942 - DNA, 15 bp, Homo sapiens
ttgcagtgagcggaa

SEQ ID NO: 1612943 - DNA, 15 bp, Homo sapiens
tgcagtgagcggaaa

SEQ ID NO: 1612944 - DNA, 15 bp, Homo sapiens
gcagtgagcggaaat

SEQ ID NO: 1612945 - DNA, 15 bp, Homo sapiens
cagtgagcggaaatc

SEQ ID NO: 1612946 - DNA, 15 bp, Homo sapiens
agtgagcggaaatca

SEQ ID NO: 1612947 - DNA, 15 bp, Homo sapiens
gtgagcggaaatcac

SEQ ID NO: 1612948 - DNA, 15 bp, Homo sapiens
tgagcggaaatcacg

SEQ ID NO: 1612949 - DNA, 15 bp, Homo sapiens
gagcggaaatcacgc

SEQ ID NO: 1612950 - DNA, 15 bp, Homo sapiens
agcggaaatcacgcc

SEQ ID NO: 1612951 - DNA, 15 bp, Homo sapiens
gcggaaatcacgcca

SEQ ID NO: 1612952 - DNA, 15 bp, Homo sapiens
cggaaatcacgccac

SEQ ID NO: 1612953 - DNA, 15 bp, Homo sapiens
ggaaatcacgccact

SEQ ID NO: 1612954 - DNA, 15 bp, Homo sapiens
gaaatcacgccactg

SEQ ID NO: 1612955 - DNA, 15 bp, Homo sapiens
aaatcacgccactgc

SEQ ID NO: 1612956 - DNA, 15 bp, Homo sapiens
aatcacgccactgca

SEQ ID NO: 1612957 - DNA, 15 bp, Homo sapiens
cattccagcctgggt

SEQ ID NO: 1612958 - DNA, 15 bp, Homo sapiens
attccagcctgggtg

SEQ ID NO: 1612959 - DNA, 15 bp, Homo sapiens
ttccagcctgggtga

SEQ ID NO: 1612960 - DNA, 15 bp, Homo sapiens
cctgggtgacagaac

SEQ ID NO: 1612961 - DNA, 15 bp, Homo sapiens
ctgggtgacagaaca

SEQ ID NO: 1612962 - DNA, 15 bp, Homo sapiens
tgggtgacagaacaa

SEQ ID NO: 1612963 - DNA, 15 bp, Homo sapiens
gggtgacagaacaag

SEQ ID NO: 1612964 - DNA, 15 bp, Homo sapiens
ggtgacagaacaaga

SEQ ID NO: 1612965 - DNA, 15 bp, Homo sapiens
gtgacagaacaagac

SEQ ID NO: 1612966 - DNA, 15 bp, Homo sapiens
tgacagaacaagact

SEQ ID NO: 1612967 - DNA, 15 bp, Homo sapiens
gacagaacaagactc

SEQ ID NO: 1612968 - DNA, 15 bp, Homo sapiens
acagaacaagactcc

SEQ ID NO: 1612969 - DNA, 15 bp, Homo sapiens
cagaacaagactcca

SEQ ID NO: 1612970 - DNA, 15 bp, Homo sapiens
agaacaagactccat

SEQ ID NO: 1612971 - DNA, 15 bp, Homo sapiens
gaacaagactccatc

SEQ ID NO: 1612972 - DNA, 15 bp, Homo sapiens
aacaagactccatct

SEQ ID NO: 1612973 - DNA, 15 bp, Homo sapiens
acaagactccatctc

SEQ ID NO: 1612974 - DNA, 15 bp, Homo sapiens
aaaaaaaaaagatgg

SEQ ID NO: 1612975 - DNA, 15 bp, Homo sapiens
aaaaaaaaagatgga

SEQ ID NO: 1612976 - DNA, 15 bp, Homo sapiens
aaaaaaaagatggaa

SEQ ID NO: 1612977 - DNA, 15 bp, Homo sapiens
aaaaaaagatggaaa

SEQ ID NO: 1612978 - DNA, 15 bp, Homo sapiens
aaaaaagatggaaaa

SEQ ID NO: 1612979 - DNA, 15 bp, Homo sapiens
aaaaagatggaaaaa

SEQ ID NO: 1612980 - DNA, 15 bp, Homo sapiens
aaaagatggaaaaac

SEQ ID NO: 1612981 - DNA, 15 bp, Homo sapiens
aaagatggaaaaact

SEQ ID NO: 1612982 - DNA, 15 bp, Homo sapiens
aagatggaaaaacta

SEQ ID NO: 1612983 - DNA, 15 bp, Homo sapiens
agatggaaaaactaa

SEQ ID NO: 1612984 - DNA, 15 bp, Homo sapiens
gatggaaaaactaag

SEQ ID NO: 1612985 - DNA, 15 bp, Homo sapiens
atggaaaaactaagg

SEQ ID NO: 1612986 - DNA, 15 bp, Homo sapiens
tggaaaaactaaggt

SEQ ID NO: 1612987 - DNA, 15 bp, Homo sapiens
ggaaaaactaaggta

SEQ ID NO: 1612988 - DNA, 15 bp, Homo sapiens
gaaaaactaaggtaa

SEQ ID NO: 1612989 - DNA, 15 bp, Homo sapiens
aaaaactaaggtaaa

SEQ ID NO: 1612990 - DNA, 15 bp, Homo sapiens
aaaactaaggtaaat

SEQ ID NO: 1612991 - DNA, 15 bp, Homo sapiens
aaactaaggtaaata

SEQ ID NO: 1612992 - DNA, 15 bp, Homo sapiens
aactaaggtaaatat

SEQ ID NO: 1612993 - DNA, 15 bp, Homo sapiens
actaaggtaaatatc

SEQ ID NO: 1612994 - DNA, 15 bp, Homo sapiens
ctaaggtaaatatca

SEQ ID NO: 1612995 - DNA, 15 bp, Homo sapiens
taaggtaaatatcat

SEQ ID NO: 1612996 - DNA, 15 bp, Homo sapiens
aaggtaaatatcatc

SEQ ID NO: 1612997 - DNA, 15 bp, Homo sapiens
aggtaaatatcatca

SEQ ID NO: 1612998 - DNA, 15 bp, Homo sapiens
ggtaaatatcatcag

SEQ ID NO: 1612999 - DNA, 15 bp, Homo sapiens
gtaaatatcatcagt

SEQ ID NO: 1613000 - DNA, 15 bp, Homo sapiens
taaatatcatcagta

SEQ ID NO: 1613001 - DNA, 15 bp, Homo sapiens
aaatatcatcagtat

SEQ ID NO: 1613002 - DNA, 15 bp, Homo sapiens
aatatcatcagtata

SEQ ID NO: 1613003 - DNA, 15 bp, Homo sapiens
atatcatcagtataa

SEQ ID NO: 1613004 - DNA, 15 bp, Homo sapiens
tatcatcagtataaa

SEQ ID NO: 1613005 - DNA, 15 bp, Homo sapiens
atcatcagtataaac

SEQ ID NO: 1613006 - DNA, 15 bp, Homo sapiens
tcatcagtataaacc

SEQ ID NO: 1613007 - DNA, 15 bp, Homo sapiens
catcagtataaaccc

SEQ ID NO: 1613008 - DNA, 15 bp, Homo sapiens
atcagtataaaccca

SEQ ID NO: 1613009 - DNA, 15 bp, Homo sapiens
tcagtataaacccac

SEQ ID NO: 1613010 - DNA, 15 bp, Homo sapiens
cagtataaacccacc

SEQ ID NO: 1613011 - DNA, 15 bp, Homo sapiens
agtataaacccacct

SEQ ID NO: 1613012 - DNA, 15 bp, Homo sapiens
gtataaacccacctt

SEQ ID NO: 1613013 - DNA, 15 bp, Homo sapiens
tataaacccaccttg

SEQ ID NO: 1613014 - DNA, 15 bp, Homo sapiens
ataaacccaccttgg

SEQ ID NO: 1613015 - DNA, 15 bp, Homo sapiens
taaacccaccttggt

SEQ ID NO: 1613016 - DNA, 15 bp, Homo sapiens
aaacccaccttggtg

SEQ ID NO: 1613017 - DNA, 15 bp, Homo sapiens
aacccaccttggtga

SEQ ID NO: 1613018 - DNA, 15 bp, Homo sapiens
acccaccttggtgaa

SEQ ID NO: 1613019 - DNA, 15 bp, Homo sapiens
cccaccttggtgaag

SEQ ID NO: 1613020 - DNA, 15 bp, Homo sapiens
ccaccttggtgaagc

SEQ ID NO: 1613021 - DNA, 15 bp, Homo sapiens
caccttggtgaagct

SEQ ID NO: 1613022 - DNA, 15 bp, Homo sapiens
accttggtgaagcta

SEQ ID NO: 1613023 - DNA, 15 bp, Homo sapiens
ccttggtgaagctag

SEQ ID NO: 1613024 - DNA, 15 bp, Homo sapiens
cttggtgaagctaga

SEQ ID NO: 1613025 - DNA, 15 bp, Homo sapiens
ttggtgaagctagac

SEQ ID NO: 1613026 - DNA, 15 bp, Homo sapiens
tggtgaagctagact

SEQ ID NO: 1613027 - DNA, 15 bp, Homo sapiens
ggtgaagctagacta

SEQ ID NO: 1613028 - DNA, 15 bp, Homo sapiens
gtgaagctagactaa

SEQ ID NO: 1613029 - DNA, 15 bp, Homo sapiens
tgaagctagactaat

SEQ ID NO: 1613030 - DNA, 15 bp, Homo sapiens
gaagctagactaatg

SEQ ID NO: 1613031 - DNA, 15 bp, Homo sapiens
aagctagactaatga

SEQ ID NO: 1613032 - DNA, 15 bp, Homo sapiens
agctagactaatgaa

SEQ ID NO: 1613033 - DNA, 15 bp, Homo sapiens
gctagactaatgaag

SEQ ID NO: 1613034 - DNA, 15 bp, Homo sapiens
ctagactaatgaaga

SEQ ID NO: 1613035 - DNA, 15 bp, Homo sapiens
tagactaatgaagag

SEQ ID NO: 1613036 - DNA, 15 bp, Homo sapiens
agactaatgaagagg

SEQ ID NO: 1613037 - DNA, 15 bp, Homo sapiens
gactaatgaagagga

SEQ ID NO: 1613038 - DNA, 15 bp, Homo sapiens
actaatgaagaggaa

SEQ ID NO: 1613039 - DNA, 15 bp, Homo sapiens
ctaatgaagaggaaa

SEQ ID NO: 1613040 - DNA, 15 bp, Homo sapiens
taatgaagaggaaag

SEQ ID NO: 1613041 - DNA, 15 bp, Homo sapiens
aatgaagaggaaagg

SEQ ID NO: 1613042 - DNA, 15 bp, Homo sapiens
atgaagaggaaaggc

SEQ ID NO: 1613043 - DNA, 15 bp, Homo sapiens
tgaagaggaaaggca

SEQ ID NO: 1613044 - DNA, 15 bp, Homo sapiens
gaagaggaaaggcag

SEQ ID NO: 1613045 - DNA, 15 bp, Homo sapiens
aagaggaaaggcagt

SEQ ID NO: 1613046 - DNA, 15 bp, Homo sapiens
agaggaaaggcagta

SEQ ID NO: 1613047 - DNA, 15 bp, Homo sapiens
gaggaaaggcagtat

SEQ ID NO: 1613048 - DNA, 15 bp, Homo sapiens
aggaaaggcagtata

SEQ ID NO: 1613049 - DNA, 15 bp, Homo sapiens
ggaaaggcagtatat

SEQ ID NO: 1613050 - DNA, 15 bp, Homo sapiens
gaaaggcagtatatg

SEQ ID NO: 1613051 - DNA, 15 bp, Homo sapiens
aaaggcagtatatga

SEQ ID NO: 1613052 - DNA, 15 bp, Homo sapiens
aaggcagtatatgaa

SEQ ID NO: 1613053 - DNA, 15 bp, Homo sapiens
aggcagtatatgaaa

SEQ ID NO: 1613054 - DNA, 15 bp, Homo sapiens
ggcagtatatgaaaa

SEQ ID NO: 1613055 - DNA, 15 bp, Homo sapiens
gcagtatatgaaaat

SEQ ID NO: 1613056 - DNA, 15 bp, Homo sapiens
cagtatatgaaaatt

SEQ ID NO: 1613057 - DNA, 15 bp, Homo sapiens
agtatatgaaaatta

SEQ ID NO: 1613058 - DNA, 15 bp, Homo sapiens
gtatatgaaaattat

SEQ ID NO: 1613059 - DNA, 15 bp, Homo sapiens
tatatgaaaattatg

SEQ ID NO: 1613060 - DNA, 15 bp, Homo sapiens
atatgaaaattatgt

SEQ ID NO: 1613061 - DNA, 15 bp, Homo sapiens
tatgaaaattatgta

SEQ ID NO: 1613062 - DNA, 15 bp, Homo sapiens
atgaaaattatgtaa

SEQ ID NO: 1613063 - DNA, 15 bp, Homo sapiens
tgaaaattatgtaaa

SEQ ID NO: 1613064 - DNA, 15 bp, Homo sapiens
gaaaattatgtaaat

SEQ ID NO: 1613065 - DNA, 15 bp, Homo sapiens
aaaattatgtaaatt

SEQ ID NO: 1613066 - DNA, 15 bp, Homo sapiens
aaattatgtaaattg

SEQ ID NO: 1613067 - DNA, 15 bp, Homo sapiens
aattatgtaaattgc

SEQ ID NO: 1613068 - DNA, 15 bp, Homo sapiens
attatgtaaattgcg

SEQ ID NO: 1613069 - DNA, 15 bp, Homo sapiens
ttatgtaaattgcga

SEQ ID NO: 1613070 - DNA, 15 bp, Homo sapiens
tatgtaaattgcgat

SEQ ID NO: 1613071 - DNA, 15 bp, Homo sapiens
atgtaaattgcgata

SEQ ID NO: 1613072 - DNA, 15 bp, Homo sapiens
tgtaaattgcgatat

SEQ ID NO: 1613073 - DNA, 15 bp, Homo sapiens
gtaaattgcgatatg

SEQ ID NO: 1613074 - DNA, 15 bp, Homo sapiens
taaattgcgatatga

SEQ ID NO: 1613075 - DNA, 15 bp, Homo sapiens
aaattgcgatatgat

SEQ ID NO: 1613076 - DNA, 15 bp, Homo sapiens
aattgcgatatgata

SEQ ID NO: 1613077 - DNA, 15 bp, Homo sapiens
attgcgatatgataa

SEQ ID NO: 1613078 - DNA, 15 bp, Homo sapiens
ttgcgatatgataaa

SEQ ID NO: 1613079 - DNA, 15 bp, Homo sapiens
tgcgatatgataaag

SEQ ID NO: 1613080 - DNA, 15 bp, Homo sapiens
gcgatatgataaaga

SEQ ID NO: 1613081 - DNA, 15 bp, Homo sapiens
cgatatgataaagat

SEQ ID NO: 1613082 - DNA, 15 bp, Homo sapiens
gatatgataaagata

SEQ ID NO: 1613083 - DNA, 15 bp, Homo sapiens
atatgataaagataa

SEQ ID NO: 1613084 - DNA, 15 bp, Homo sapiens
tatgataaagataag

SEQ ID NO: 1613085 - DNA, 15 bp, Homo sapiens
atgataaagataagg

SEQ ID NO: 1613086 - DNA, 15 bp, Homo sapiens
tgataaagataaggc

SEQ ID NO: 1613087 - DNA, 15 bp, Homo sapiens
gataaagataaggca

SEQ ID NO: 1613088 - DNA, 15 bp, Homo sapiens
ataaagataaggcat

SEQ ID NO: 1613089 - DNA, 15 bp, Homo sapiens
taaagataaggcata

SEQ ID NO: 1613090 - DNA, 15 bp, Homo sapiens
aaagataaggcataa

SEQ ID NO: 1613091 - DNA, 15 bp, Homo sapiens
aagataaggcataag

SEQ ID NO: 1613092 - DNA, 15 bp, Homo sapiens
agataaggcataaga

SEQ ID NO: 1613093 - DNA, 15 bp, Homo sapiens
gataaggcataagaa

SEQ ID NO: 1613094 - DNA, 15 bp, Homo sapiens
ataaggcataagaag

SEQ ID NO: 1613095 - DNA, 15 bp, Homo sapiens
taaggcataagaagt

SEQ ID NO: 1613096 - DNA, 15 bp, Homo sapiens
aaggcataagaagtt

SEQ ID NO: 1613097 - DNA, 15 bp, Homo sapiens
aggcataagaagtta

SEQ ID NO: 1613098 - DNA, 15 bp, Homo sapiens
ggcataagaagttaa

SEQ ID NO: 1613099 - DNA, 15 bp, Homo sapiens
gcataagaagttaaa

SEQ ID NO: 1613100 - DNA, 15 bp, Homo sapiens
cataagaagttaaag

SEQ ID NO: 1613101 - DNA, 15 bp, Homo sapiens
ataagaagttaaagt

SEQ ID NO: 1613102 - DNA, 15 bp, Homo sapiens
taagaagttaaagta

SEQ ID NO: 1613103 - DNA, 15 bp, Homo sapiens
aagaagttaaagtat

SEQ ID NO: 1613104 - DNA, 15 bp, Homo sapiens
agaagttaaagtatt

SEQ ID NO: 1613105 - DNA, 15 bp, Homo sapiens
gaagttaaagtattg

SEQ ID NO: 1613106 - DNA, 15 bp, Homo sapiens
aagttaaagtattgg

SEQ ID NO: 1613107 - DNA, 15 bp, Homo sapiens
agttaaagtattggg

SEQ ID NO: 1613108 - DNA, 15 bp, Homo sapiens
gttaaagtattggga

SEQ ID NO: 1613109 - DNA, 15 bp, Homo sapiens
ttaaagtattgggat

SEQ ID NO: 1613110 - DNA, 15 bp, Homo sapiens
taaagtattgggatc

SEQ ID NO: 1613111 - DNA, 15 bp, Homo sapiens
aaagtattgggatcc

SEQ ID NO: 1613112 - DNA, 15 bp, Homo sapiens
aagtattgggatccc

SEQ ID NO: 1613113 - DNA, 15 bp, Homo sapiens
agtattgggatccct

SEQ ID NO: 1613114 - DNA, 15 bp, Homo sapiens
gtattgggatcccta

SEQ ID NO: 1613115 - DNA, 15 bp, Homo sapiens
tattgggatccctaa

SEQ ID NO: 1613116 - DNA, 15 bp, Homo sapiens
attgggatccctaac

SEQ ID NO: 1613117 - DNA, 15 bp, Homo sapiens
ttgggatccctaacc

SEQ ID NO: 1613118 - DNA, 15 bp, Homo sapiens
tgggatccctaacca

SEQ ID NO: 1613119 - DNA, 15 bp, Homo sapiens
gggatccctaaccaa

SEQ ID NO: 1613120 - DNA, 15 bp, Homo sapiens
ggatccctaaccaaa

SEQ ID NO: 1613121 - DNA, 15 bp, Homo sapiens
gatccctaaccaaat

SEQ ID NO: 1613122 - DNA, 15 bp, Homo sapiens
atccctaaccaaata

SEQ ID NO: 1613123 - DNA, 15 bp, Homo sapiens
tccctaaccaaataa

SEQ ID NO: 1613124 - DNA, 15 bp, Homo sapiens
ccctaaccaaataaa

SEQ ID NO: 1613125 - DNA, 15 bp, Homo sapiens
cctaaccaaataaaa

SEQ ID NO: 1613126 - DNA, 15 bp, Homo sapiens
ctaaccaaataaaag

SEQ ID NO: 1613127 - DNA, 15 bp, Homo sapiens
taaccaaataaaagg

SEQ ID NO: 1613128 - DNA, 15 bp, Homo sapiens
aaccaaataaaagga

SEQ ID NO: 1613129 - DNA, 15 bp, Homo sapiens
accaaataaaaggag

SEQ ID NO: 1613130 - DNA, 15 bp, Homo sapiens
ccaaataaaaggagt

SEQ ID NO: 1613131 - DNA, 15 bp, Homo sapiens
caaataaaaggagtg

SEQ ID NO: 1613132 - DNA, 15 bp, Homo sapiens
aaataaaaggagtga

SEQ ID NO: 1613133 - DNA, 15 bp, Homo sapiens
aataaaaggagtgat

SEQ ID NO: 1613134 - DNA, 15 bp, Homo sapiens
ataaaaggagtgatg

SEQ ID NO: 1613135 - DNA, 15 bp, Homo sapiens
taaaaggagtgatgg

SEQ ID NO: 1613136 - DNA, 15 bp, Homo sapiens
aaaaggagtgatggg

SEQ ID NO: 1613137 - DNA, 15 bp, Homo sapiens
aaaggagtgatgggg

SEQ ID NO: 1613138 - DNA, 15 bp, Homo sapiens
aaggagtgatggggg

SEQ ID NO: 1613139 - DNA, 15 bp, Homo sapiens
aggagtgatggggga

SEQ ID NO: 1613140 - DNA, 15 bp, Homo sapiens
ggagtgatgggggaa

SEQ ID NO: 1613141 - DNA, 15 bp, Homo sapiens
gagtgatgggggaac

SEQ ID NO: 1613142 - DNA, 15 bp, Homo sapiens
agtgatgggggaacc

SEQ ID NO: 1613143 - DNA, 15 bp, Homo sapiens
gtgatgggggaaccc

SEQ ID NO: 1613144 - DNA, 15 bp, Homo sapiens
tgatgggggaaccct

SEQ ID NO: 1613145 - DNA, 15 bp, Homo sapiens
gatgggggaaccctt

SEQ ID NO: 1613146 - DNA, 15 bp, Homo sapiens
atgggggaacccttg

SEQ ID NO: 1613147 - DNA, 15 bp, Homo sapiens
tgggggaacccttga

SEQ ID NO: 1613148 - DNA, 15 bp, Homo sapiens
gggggaacccttgaa

SEQ ID NO: 1613149 - DNA, 15 bp, Homo sapiens
ggggaacccttgaag

SEQ ID NO: 1613150 - DNA, 15 bp, Homo sapiens
gggaacccttgaagc

SEQ ID NO: 1613151 - DNA, 15 bp, Homo sapiens
ggaacccttgaagca

SEQ ID NO: 1613152 - DNA, 15 bp, Homo sapiens
gaacccttgaagcaa

SEQ ID NO: 1613153 - DNA, 15 bp, Homo sapiens
aacccttgaagcaag

SEQ ID NO: 1613154 - DNA, 15 bp, Homo sapiens
acccttgaagcaagt

SEQ ID NO: 1613155 - DNA, 15 bp, Homo sapiens
cccttgaagcaagtt

SEQ ID NO: 1613156 - DNA, 15 bp, Homo sapiens
ccttgaagcaagtta

SEQ ID NO: 1613157 - DNA, 15 bp, Homo sapiens
cttgaagcaagttat

SEQ ID NO: 1613158 - DNA, 15 bp, Homo sapiens
ttgaagcaagttatt

SEQ ID NO: 1613159 - DNA, 15 bp, Homo sapiens
tgaagcaagttattt

SEQ ID NO: 1613160 - DNA, 15 bp, Homo sapiens
gaagcaagttatttg

SEQ ID NO: 1613161 - DNA, 15 bp, Homo sapiens
aagcaagttatttga

SEQ ID NO: 1613162 - DNA, 15 bp, Homo sapiens
agcaagttatttgag

SEQ ID NO: 1613163 - DNA, 15 bp, Homo sapiens
gcaagttatttgagg

SEQ ID NO: 1613164 - DNA, 15 bp, Homo sapiens
caagttatttgagga

SEQ ID NO: 1613165 - DNA, 15 bp, Homo sapiens
aagttatttgaggaa

SEQ ID NO: 1613166 - DNA, 15 bp, Homo sapiens
agttatttgaggaat

SEQ ID NO: 1613167 - DNA, 15 bp, Homo sapiens
gttatttgaggaatt

SEQ ID NO: 1613168 - DNA, 15 bp, Homo sapiens
ttatttgaggaatta

SEQ ID NO: 1613169 - DNA, 15 bp, Homo sapiens
tatttgaggaattag

SEQ ID NO: 1613170 - DNA, 15 bp, Homo sapiens
atttgaggaattagc

SEQ ID NO: 1613171 - DNA, 15 bp, Homo sapiens
tttgaggaattagct

SEQ ID NO: 1613172 - DNA, 15 bp, Homo sapiens
ttgaggaattagcta

SEQ ID NO: 1613173 - DNA, 15 bp, Homo sapiens
tgaggaattagctag

SEQ ID NO: 1613174 - DNA, 15 bp, Homo sapiens
gaggaattagctaga

SEQ ID NO: 1613175 - DNA, 15 bp, Homo sapiens
aggaattagctagag

SEQ ID NO: 1613176 - DNA, 15 bp, Homo sapiens
ggaattagctagagg

SEQ ID NO: 1613177 - DNA, 15 bp, Homo sapiens
gaattagctagagga

SEQ ID NO: 1613178 - DNA, 15 bp, Homo sapiens
aattagctagaggaa

SEQ ID NO: 1613179 - DNA, 15 bp, Homo sapiens
attagctagaggaaa

SEQ ID NO: 1613180 - DNA, 15 bp, Homo sapiens
ttagctagaggaaaa

SEQ ID NO: 1613181 - DNA, 15 bp, Homo sapiens
tagctagaggaaaaa

SEQ ID NO: 1613182 - DNA, 15 bp, Homo sapiens
agctagaggaaaaag

SEQ ID NO: 1613183 - DNA, 15 bp, Homo sapiens
gctagaggaaaaagg

SEQ ID NO: 1613184 - DNA, 15 bp, Homo sapiens
ctagaggaaaaaggt

SEQ ID NO: 1613185 - DNA, 15 bp, Homo sapiens
tagaggaaaaaggta

SEQ ID NO: 1613186 - DNA, 15 bp, Homo sapiens
agaggaaaaaggtaa

SEQ ID NO: 1613187 - DNA, 15 bp, Homo sapiens
gaggaaaaaggtaag

SEQ ID NO: 1613188 - DNA, 15 bp, Homo sapiens
aggaaaaaggtaaga

SEQ ID NO: 1613189 - DNA, 15 bp, Homo sapiens
ggaaaaaggtaagag

SEQ ID NO: 1613190 - DNA, 15 bp, Homo sapiens
gaaaaaggtaagagt

SEQ ID NO: 1613191 - DNA, 15 bp, Homo sapiens
aaaaaggtaagagta

SEQ ID NO: 1613192 - DNA, 15 bp, Homo sapiens
aaaaggtaagagtat

SEQ ID NO: 1613193 - DNA, 15 bp, Homo sapiens
aaaggtaagagtatt

SEQ ID NO: 1613194 - DNA, 15 bp, Homo sapiens
aaggtaagagtattc

SEQ ID NO: 1613195 - DNA, 15 bp, Homo sapiens
aggtaagagtattca

SEQ ID NO: 1613196 - DNA, 15 bp, Homo sapiens
ggtaagagtattcat

SEQ ID NO: 1613197 - DNA, 15 bp, Homo sapiens
gtaagagtattcata

SEQ ID NO: 1613198 - DNA, 15 bp, Homo sapiens
taagagtattcatag

SEQ ID NO: 1613199 - DNA, 15 bp, Homo sapiens
aagagtattcatagc

SEQ ID NO: 1613200 - DNA, 15 bp, Homo sapiens
agagtattcatagcg

SEQ ID NO: 1613201 - DNA, 15 bp, Homo sapiens
gagtattcatagcgg

SEQ ID NO: 1613202 - DNA, 15 bp, Homo sapiens
agtattcatagcgga

SEQ ID NO: 1613203 - DNA, 15 bp, Homo sapiens
gtattcatagcggaa

SEQ ID NO: 1613204 - DNA, 15 bp, Homo sapiens
tattcatagcggaag

SEQ ID NO: 1613205 - DNA, 15 bp, Homo sapiens
attcatagcggaaga

SEQ ID NO: 1613206 - DNA, 15 bp, Homo sapiens
ttcatagcggaagaa

SEQ ID NO: 1613207 - DNA, 15 bp, Homo sapiens
tcatagcggaagaaa

SEQ ID NO: 1613208 - DNA, 15 bp, Homo sapiens
catagcggaagaaac

SEQ ID NO: 1613209 - DNA, 15 bp, Homo sapiens
atagcggaagaaaca

SEQ ID NO: 1613210 - DNA, 15 bp, Homo sapiens
tagcggaagaaacag

SEQ ID NO: 1613211 - DNA, 15 bp, Homo sapiens
agcggaagaaacagc

SEQ ID NO: 1613212 - DNA, 15 bp, Homo sapiens
gcggaagaaacagca

SEQ ID NO: 1613213 - DNA, 15 bp, Homo sapiens
cggaagaaacagcaa

SEQ ID NO: 1613214 - DNA, 15 bp, Homo sapiens
ggaagaaacagcaaa

SEQ ID NO: 1613215 - DNA, 15 bp, Homo sapiens
gaagaaacagcaaaa

SEQ ID NO: 1613216 - DNA, 15 bp, Homo sapiens
aagaaacagcaaaag

SEQ ID NO: 1613217 - DNA, 15 bp, Homo sapiens
agaaacagcaaaagt

SEQ ID NO: 1613218 - DNA, 15 bp, Homo sapiens
gaaacagcaaaagtg

SEQ ID NO: 1613219 - DNA, 15 bp, Homo sapiens
aaacagcaaaagtga

SEQ ID NO: 1613220 - DNA, 15 bp, Homo sapiens
aacagcaaaagtgag

SEQ ID NO: 1613221 - DNA, 15 bp, Homo sapiens
acagcaaaagtgaga

SEQ ID NO: 1613222 - DNA, 15 bp, Homo sapiens
cagcaaaagtgagac

SEQ ID NO: 1613223 - DNA, 15 bp, Homo sapiens
agcaaaagtgagacc

SEQ ID NO: 1613224 - DNA, 15 bp, Homo sapiens
gcaaaagtgagacct

SEQ ID NO: 1613225 - DNA, 15 bp, Homo sapiens
caaaagtgagacctt

SEQ ID NO: 1613226 - DNA, 15 bp, Homo sapiens
aaaagtgagaccttg

SEQ ID NO: 1613227 - DNA, 15 bp, Homo sapiens
aaagtgagaccttga

SEQ ID NO: 1613228 - DNA, 15 bp, Homo sapiens
aagtgagaccttgaa

SEQ ID NO: 1613229 - DNA, 15 bp, Homo sapiens
agtgagaccttgaag

SEQ ID NO: 1613230 - DNA, 15 bp, Homo sapiens
gtgagaccttgaagt

SEQ ID NO: 1613231 - DNA, 15 bp, Homo sapiens
tgagaccttgaagtg

SEQ ID NO: 1613232 - DNA, 15 bp, Homo sapiens
gagaccttgaagtga

SEQ ID NO: 1613233 - DNA, 15 bp, Homo sapiens
agaccttgaagtgac

SEQ ID NO: 1613234 - DNA, 15 bp, Homo sapiens
gaccttgaagtgaca

SEQ ID NO: 1613235 - DNA, 15 bp, Homo sapiens
accttgaagtgacaa

SEQ ID NO: 1613236 - DNA, 15 bp, Homo sapiens
ccttgaagtgacaaa

SEQ ID NO: 1613237 - DNA, 15 bp, Homo sapiens
cttgaagtgacaaac

SEQ ID NO: 1613238 - DNA, 15 bp, Homo sapiens
ttgaagtgacaaaca

SEQ ID NO: 1613239 - DNA, 15 bp, Homo sapiens
tgaagtgacaaacat

SEQ ID NO: 1613240 - DNA, 15 bp, Homo sapiens
gaagtgacaaacatc

SEQ ID NO: 1613241 - DNA, 15 bp, Homo sapiens
aagtgacaaacatct

SEQ ID NO: 1613242 - DNA, 15 bp, Homo sapiens
agtgacaaacatctt

SEQ ID NO: 1613243 - DNA, 15 bp, Homo sapiens
gtgacaaacatcttg

SEQ ID NO: 1613244 - DNA, 15 bp, Homo sapiens
tgacaaacatcttgg

SEQ ID NO: 1613245 - DNA, 15 bp, Homo sapiens
gacaaacatcttggt

SEQ ID NO: 1613246 - DNA, 15 bp, Homo sapiens
acaaacatcttggtg

SEQ ID NO: 1613247 - DNA, 15 bp, Homo sapiens
caaacatcttggtgc

SEQ ID NO: 1613248 - DNA, 15 bp, Homo sapiens
aaacatcttggtgcg

SEQ ID NO: 1613249 - DNA, 15 bp, Homo sapiens
aacatcttggtgcgt

SEQ ID NO: 1613250 - DNA, 15 bp, Homo sapiens
acatcttggtgcgtt

SEQ ID NO: 1613251 - DNA, 15 bp, Homo sapiens
catcttggtgcgtta

SEQ ID NO: 1613252 - DNA, 15 bp, Homo sapiens
atcttggtgcgttat

SEQ ID NO: 1613253 - DNA, 15 bp, Homo sapiens
tcttggtgcgttatc

SEQ ID NO: 1613254 - DNA, 15 bp, Homo sapiens
cttggtgcgttatca

SEQ ID NO: 1613255 - DNA, 15 bp, Homo sapiens
ttggtgcgttatcaa

SEQ ID NO: 1613256 - DNA, 15 bp, Homo sapiens
tggtgcgttatcaaa

SEQ ID NO: 1613257 - DNA, 15 bp, Homo sapiens
ggtgcgttatcaaag

SEQ ID NO: 1613258 - DNA, 15 bp, Homo sapiens
gtgcgttatcaaagc

SEQ ID NO: 1613259 - DNA, 15 bp, Homo sapiens
tgcgttatcaaagct

SEQ ID NO: 1613260 - DNA, 15 bp, Homo sapiens
gcgttatcaaagctg

SEQ ID NO: 1613261 - DNA, 15 bp, Homo sapiens
cgttatcaaagctga

SEQ ID NO: 1613262 - DNA, 15 bp, Homo sapiens
gttatcaaagctgaa

SEQ ID NO: 1613263 - DNA, 15 bp, Homo sapiens
ttatcaaagctgaag

SEQ ID NO: 1613264 - DNA, 15 bp, Homo sapiens
tatcaaagctgaagg

SEQ ID NO: 1613265 - DNA, 15 bp, Homo sapiens
atcaaagctgaagga

SEQ ID NO: 1613266 - DNA, 15 bp, Homo sapiens
tcaaagctgaaggat

SEQ ID NO: 1613267 - DNA, 15 bp, Homo sapiens
caaagctgaaggatg

SEQ ID NO: 1613268 - DNA, 15 bp, Homo sapiens
aaagctgaaggatgg

SEQ ID NO: 1613269 - DNA, 15 bp, Homo sapiens
aagctgaaggatggc

SEQ ID NO: 1613270 - DNA, 15 bp, Homo sapiens
agctgaaggatggct

SEQ ID NO: 1613271 - DNA, 15 bp, Homo sapiens
gctgaaggatggcta

SEQ ID NO: 1613272 - DNA, 15 bp, Homo sapiens
ctgaaggatggctaa

SEQ ID NO: 1613273 - DNA, 15 bp, Homo sapiens
tgaaggatggctaat

SEQ ID NO: 1613274 - DNA, 15 bp, Homo sapiens
gaaggatggctaatg

SEQ ID NO: 1613275 - DNA, 15 bp, Homo sapiens
aaggatggctaatgt

SEQ ID NO: 1613276 - DNA, 15 bp, Homo sapiens
aggatggctaatgtc

SEQ ID NO: 1613277 - DNA, 15 bp, Homo sapiens
ggatggctaatgtca

SEQ ID NO: 1613278 - DNA, 15 bp, Homo sapiens
gatggctaatgtcac

SEQ ID NO: 1613279 - DNA, 15 bp, Homo sapiens
atggctaatgtcact

SEQ ID NO: 1613280 - DNA, 15 bp, Homo sapiens
tggctaatgtcactg

SEQ ID NO: 1613281 - DNA, 15 bp, Homo sapiens
ggctaatgtcactga

SEQ ID NO: 1613282 - DNA, 15 bp, Homo sapiens
gctaatgtcactgat

SEQ ID NO: 1613283 - DNA, 15 bp, Homo sapiens
ctaatgtcactgata

SEQ ID NO: 1613284 - DNA, 15 bp, Homo sapiens
taatgtcactgataa

SEQ ID NO: 1613285 - DNA, 15 bp, Homo sapiens
aatgtcactgataat

SEQ ID NO: 1613286 - DNA, 15 bp, Homo sapiens
atgtcactgataata

SEQ ID NO: 1613287 - DNA, 15 bp, Homo sapiens
tgtcactgataataa

SEQ ID NO: 1613288 - DNA, 15 bp, Homo sapiens
gtcactgataataag

SEQ ID NO: 1613289 - DNA, 15 bp, Homo sapiens
tcactgataataagt

SEQ ID NO: 1613290 - DNA, 15 bp, Homo sapiens
cactgataataagtg

SEQ ID NO: 1613291 - DNA, 15 bp, Homo sapiens
actgataataagtga

SEQ ID NO: 1613292 - DNA, 15 bp, Homo sapiens
ctgataataagtgat

SEQ ID NO: 1613293 - DNA, 15 bp, Homo sapiens
tgataataagtgata

SEQ ID NO: 1613294 - DNA, 15 bp, Homo sapiens
gataataagtgataa

SEQ ID NO: 1613295 - DNA, 15 bp, Homo sapiens
ataataagtgataaa

SEQ ID NO: 1613296 - DNA, 15 bp, Homo sapiens
taataagtgataaaa

SEQ ID NO: 1613297 - DNA, 15 bp, Homo sapiens
aataagtgataaaaa

SEQ ID NO: 1613298 - DNA, 15 bp, Homo sapiens
ataagtgataaaaat

SEQ ID NO: 1613299 - DNA, 15 bp, Homo sapiens
taagtgataaaaata

SEQ ID NO: 1613300 - DNA, 15 bp, Homo sapiens
aagtgataaaaataa

SEQ ID NO: 1613301 - DNA, 15 bp, Homo sapiens
agtgataaaaataac

SEQ ID NO: 1613302 - DNA, 15 bp, Homo sapiens
gtgataaaaataaca

SEQ ID NO: 1613303 - DNA, 15 bp, Homo sapiens
tgataaaaataacag

SEQ ID NO: 1613304 - DNA, 15 bp, Homo sapiens
gataaaaataacagt

SEQ ID NO: 1613305 - DNA, 15 bp, Homo sapiens
ataaaaataacagtg

SEQ ID NO: 1613306 - DNA, 15 bp, Homo sapiens
taaaaataacagtgt

SEQ ID NO: 1613307 - DNA, 15 bp, Homo sapiens
aaaaataacagtgtg

SEQ ID NO: 1613308 - DNA, 15 bp, Homo sapiens
aaaataacagtgtga

SEQ ID NO: 1613309 - DNA, 15 bp, Homo sapiens
aaataacagtgtgag

SEQ ID NO: 1613310 - DNA, 15 bp, Homo sapiens
aataacagtgtgaga

SEQ ID NO: 1613311 - DNA, 15 bp, Homo sapiens
ataacagtgtgagaa

SEQ ID NO: 1613312 - DNA, 15 bp, Homo sapiens
taacagtgtgagaaa

SEQ ID NO: 1613313 - DNA, 15 bp, Homo sapiens
aacagtgtgagaaaa

SEQ ID NO: 1613314 - DNA, 15 bp, Homo sapiens
acagtgtgagaaaaa

SEQ ID NO: 1613315 - DNA, 15 bp, Homo sapiens
cagtgtgagaaaaag

SEQ ID NO: 1613316 - DNA, 15 bp, Homo sapiens
agtgtgagaaaaaga

SEQ ID NO: 1613317 - DNA, 15 bp, Homo sapiens
gtgtgagaaaaagat

SEQ ID NO: 1613318 - DNA, 15 bp, Homo sapiens
tgtgagaaaaagatt

SEQ ID NO: 1613319 - DNA, 15 bp, Homo sapiens
gtgagaaaaagatta

SEQ ID NO: 1613320 - DNA, 15 bp, Homo sapiens
tgagaaaaagattaa

SEQ ID NO: 1613321 - DNA, 15 bp, Homo sapiens
gagaaaaagattaat

SEQ ID NO: 1613322 - DNA, 15 bp, Homo sapiens
agaaaaagattaatt

SEQ ID NO: 1613323 - DNA, 15 bp, Homo sapiens
gaaaaagattaattt

SEQ ID NO: 1613324 - DNA, 15 bp, Homo sapiens
aaaaagattaatttt

SEQ ID NO: 1613325 - DNA, 15 bp, Homo sapiens
aaaagattaattttt

SEQ ID NO: 1613326 - DNA, 15 bp, Homo sapiens
aaagattaatttttt

SEQ ID NO: 1613327 - DNA, 15 bp, Homo sapiens
aagattaattttttt

SEQ ID NO: 1613328 - DNA, 15 bp, Homo sapiens
agattaatttttttt

SEQ ID NO: 1613329 - DNA, 15 bp, Homo sapiens
gattaattttttttt

SEQ ID NO: 1613330 - DNA, 15 bp, Homo sapiens
taattttttttttta

SEQ ID NO: 1613331 - DNA, 15 bp, Homo sapiens
atttttttttttaaa

SEQ ID NO: 1613332 - DNA, 15 bp, Homo sapiens
tttttttttaaagat

SEQ ID NO: 1613333 - DNA, 15 bp, Homo sapiens
ttttttttaaagatc

SEQ ID NO: 1613334 - DNA, 15 bp, Homo sapiens
tttttttaaagatcg

SEQ ID NO: 1613335 - DNA, 15 bp, Homo sapiens
ttttttaaagatcgc

SEQ ID NO: 1613336 - DNA, 15 bp, Homo sapiens
tttttaaagatcgct

SEQ ID NO: 1613337 - DNA, 15 bp, Homo sapiens
ttttaaagatcgctg

SEQ ID NO: 1613338 - DNA, 15 bp, Homo sapiens
tttaaagatcgctgg

SEQ ID NO: 1613339 - DNA, 15 bp, Homo sapiens
ttaaagatcgctggg

SEQ ID NO: 1613340 - DNA, 15 bp, Homo sapiens
taaagatcgctggga

SEQ ID NO: 1613341 - DNA, 15 bp, Homo sapiens
aaagatcgctgggaa

SEQ ID NO: 1613342 - DNA, 15 bp, Homo sapiens
aagatcgctgggaaa

SEQ ID NO: 1613343 - DNA, 15 bp, Homo sapiens
agatcgctgggaaaa

SEQ ID NO: 1613344 - DNA, 15 bp, Homo sapiens
gatcgctgggaaaag

SEQ ID NO: 1613345 - DNA, 15 bp, Homo sapiens
atcgctgggaaaagt

SEQ ID NO: 1613346 - DNA, 15 bp, Homo sapiens
tcgctgggaaaagtg

SEQ ID NO: 1613347 - DNA, 15 bp, Homo sapiens
cgctgggaaaagtgg

SEQ ID NO: 1613348 - DNA, 15 bp, Homo sapiens
gctgggaaaagtggg

SEQ ID NO: 1613349 - DNA, 15 bp, Homo sapiens
ctgggaaaagtgggt

SEQ ID NO: 1613350 - DNA, 15 bp, Homo sapiens
tgggaaaagtgggtg

SEQ ID NO: 1613351 - DNA, 15 bp, Homo sapiens
gggaaaagtgggtga

SEQ ID NO: 1613352 - DNA, 15 bp, Homo sapiens
ggaaaagtgggtgaa

SEQ ID NO: 1613353 - DNA, 15 bp, Homo sapiens
gaaaagtgggtgaat

SEQ ID NO: 1613354 - DNA, 15 bp, Homo sapiens
aaaagtgggtgaatc

SEQ ID NO: 1613355 - DNA, 15 bp, Homo sapiens
aaagtgggtgaatca

SEQ ID NO: 1613356 - DNA, 15 bp, Homo sapiens
aagtgggtgaatcac

SEQ ID NO: 1613357 - DNA, 15 bp, Homo sapiens
agtgggtgaatcacc

SEQ ID NO: 1613358 - DNA, 15 bp, Homo sapiens
gtgggtgaatcacct

SEQ ID NO: 1613359 - DNA, 15 bp, Homo sapiens
tgggtgaatcacctg

SEQ ID NO: 1613360 - DNA, 15 bp, Homo sapiens
gggtgaatcacctga

SEQ ID NO: 1613361 - DNA, 15 bp, Homo sapiens
ggtgaatcacctgag

SEQ ID NO: 1613362 - DNA, 15 bp, Homo sapiens
gtgaatcacctgagg

SEQ ID NO: 1613363 - DNA, 15 bp, Homo sapiens
tgaatcacctgaggt

SEQ ID NO: 1613364 - DNA, 15 bp, Homo sapiens
gaatcacctgaggtc

SEQ ID NO: 1613365 - DNA, 15 bp, Homo sapiens
aatcacctgaggtca

SEQ ID NO: 1613366 - DNA, 15 bp, Homo sapiens
cacctgaggtcaggc

SEQ ID NO: 1613367 - DNA, 15 bp, Homo sapiens
acctgaggtcaggca

SEQ ID NO: 1613368 - DNA, 15 bp, Homo sapiens
cctgaggtcaggcat

SEQ ID NO: 1613369 - DNA, 15 bp, Homo sapiens
ctgaggtcaggcatt

SEQ ID NO: 1613370 - DNA, 15 bp, Homo sapiens
tgaggtcaggcattc

SEQ ID NO: 1613371 - DNA, 15 bp, Homo sapiens
gaggtcaggcattcg

SEQ ID NO: 1613372 - DNA, 15 bp, Homo sapiens
aggtcaggcattcga

SEQ ID NO: 1613373 - DNA, 15 bp, Homo sapiens
ggtcaggcattcgag

SEQ ID NO: 1613374 - DNA, 15 bp, Homo sapiens
gtcaggcattcgaga

SEQ ID NO: 1613375 - DNA, 15 bp, Homo sapiens
tcaggcattcgagac

SEQ ID NO: 1613376 - DNA, 15 bp, Homo sapiens
caggcattcgagacc

SEQ ID NO: 1613377 - DNA, 15 bp, Homo sapiens
aggcattcgagacca

SEQ ID NO: 1613378 - DNA, 15 bp, Homo sapiens
ggcattcgagaccag

SEQ ID NO: 1613379 - DNA, 15 bp, Homo sapiens
gcattcgagaccagc

SEQ ID NO: 1613380 - DNA, 15 bp, Homo sapiens
cattcgagaccagcc

SEQ ID NO: 1613381 - DNA, 15 bp, Homo sapiens
ccaacatagtgaaaa

SEQ ID NO: 1613382 - DNA, 15 bp, Homo sapiens
caacatagtgaaaac

SEQ ID NO: 1613383 - DNA, 15 bp, Homo sapiens
aacatagtgaaaacc

SEQ ID NO: 1613384 - DNA, 15 bp, Homo sapiens
acatagtgaaaaccc

SEQ ID NO: 1613385 - DNA, 15 bp, Homo sapiens
catagtgaaaaccct

SEQ ID NO: 1613386 - DNA, 15 bp, Homo sapiens
atagtgaaaaccctc

SEQ ID NO: 1613387 - DNA, 15 bp, Homo sapiens
tagtgaaaaccctcc

SEQ ID NO: 1613388 - DNA, 15 bp, Homo sapiens
agtgaaaaccctcct

SEQ ID NO: 1613389 - DNA, 15 bp, Homo sapiens
gtgaaaaccctcctc

SEQ ID NO: 1613390 - DNA, 15 bp, Homo sapiens
tgaaaaccctcctct

SEQ ID NO: 1613391 - DNA, 15 bp, Homo sapiens
gaaaaccctcctctt

SEQ ID NO: 1613392 - DNA, 15 bp, Homo sapiens
aaaaccctcctcttc

SEQ ID NO: 1613393 - DNA, 15 bp, Homo sapiens
aaaccctcctcttct

SEQ ID NO: 1613394 - DNA, 15 bp, Homo sapiens
aaccctcctcttctg

SEQ ID NO: 1613395 - DNA, 15 bp, Homo sapiens
accctcctcttctga

SEQ ID NO: 1613396 - DNA, 15 bp, Homo sapiens
ccctcctcttctgaa

SEQ ID NO: 1613397 - DNA, 15 bp, Homo sapiens
cctcctcttctgaaa

SEQ ID NO: 1613398 - DNA, 15 bp, Homo sapiens
ctcctcttctgaaaa

SEQ ID NO: 1613399 - DNA, 15 bp, Homo sapiens
tcctcttctgaaaat

SEQ ID NO: 1613400 - DNA, 15 bp, Homo sapiens
cctcttctgaaaatg

SEQ ID NO: 1613401 - DNA, 15 bp, Homo sapiens
ctcttctgaaaatgc

SEQ ID NO: 1613402 - DNA, 15 bp, Homo sapiens
tcttctgaaaatgca

SEQ ID NO: 1613403 - DNA, 15 bp, Homo sapiens
cttctgaaaatgcaa

SEQ ID NO: 1613404 - DNA, 15 bp, Homo sapiens
ttctgaaaatgcaaa

SEQ ID NO: 1613405 - DNA, 15 bp, Homo sapiens
tctgaaaatgcaaaa

SEQ ID NO: 1613406 - DNA, 15 bp, Homo sapiens
ctgaaaatgcaaaaa

SEQ ID NO: 1613407 - DNA, 15 bp, Homo sapiens
tgaaaatgcaaaaat

SEQ ID NO: 1613408 - DNA, 15 bp, Homo sapiens
gaaaatgcaaaaatt

SEQ ID NO: 1613409 - DNA, 15 bp, Homo sapiens
aaaatgcaaaaatta

SEQ ID NO: 1613410 - DNA, 15 bp, Homo sapiens
aaatgcaaaaattag

SEQ ID NO: 1613411 - DNA, 15 bp, Homo sapiens
aatgcaaaaattagc

SEQ ID NO: 1613412 - DNA, 15 bp, Homo sapiens
atgcaaaaattagcg

SEQ ID NO: 1613413 - DNA, 15 bp, Homo sapiens
tgcaaaaattagcgg

SEQ ID NO: 1613414 - DNA, 15 bp, Homo sapiens
gcaaaaattagcggg

SEQ ID NO: 1613415 - DNA, 15 bp, Homo sapiens
caaaaattagcgggg

SEQ ID NO: 1613416 - DNA, 15 bp, Homo sapiens
aaaaattagcggggc

SEQ ID NO: 1613417 - DNA, 15 bp, Homo sapiens
aaaattagcggggca

SEQ ID NO: 1613418 - DNA, 15 bp, Homo sapiens
aaattagcggggcat

SEQ ID NO: 1613419 - DNA, 15 bp, Homo sapiens
aattagcggggcatg

SEQ ID NO: 1613420 - DNA, 15 bp, Homo sapiens
attagcggggcatgg

SEQ ID NO: 1613421 - DNA, 15 bp, Homo sapiens
ttagcggggcatggt

SEQ ID NO: 1613422 - DNA, 15 bp, Homo sapiens
tagcggggcatggtg

SEQ ID NO: 1613423 - DNA, 15 bp, Homo sapiens
agcggggcatggtgg

SEQ ID NO: 1613424 - DNA, 15 bp, Homo sapiens
gcggggcatggtggc

SEQ ID NO: 1613425 - DNA, 15 bp, Homo sapiens
cggggcatggtggca

SEQ ID NO: 1613426 - DNA, 15 bp, Homo sapiens
ggggcatggtggcac

SEQ ID NO: 1613427 - DNA, 15 bp, Homo sapiens
actcgggagactgaa

SEQ ID NO: 1613428 - DNA, 15 bp, Homo sapiens
ctcgggagactgaag

SEQ ID NO: 1613429 - DNA, 15 bp, Homo sapiens
tcgggagactgaagc

SEQ ID NO: 1613430 - DNA, 15 bp, Homo sapiens
cgggagactgaagca

SEQ ID NO: 1613431 - DNA, 15 bp, Homo sapiens
gggagactgaagcag

SEQ ID NO: 1613432 - DNA, 15 bp, Homo sapiens
ggagactgaagcagg

SEQ ID NO: 1613433 - DNA, 15 bp, Homo sapiens
gagactgaagcagga

SEQ ID NO: 1613434 - DNA, 15 bp, Homo sapiens
agactgaagcaggag

SEQ ID NO: 1613435 - DNA, 15 bp, Homo sapiens
gactgaagcaggaga

SEQ ID NO: 1613436 - DNA, 15 bp, Homo sapiens
actgaagcaggagaa

SEQ ID NO: 1613437 - DNA, 15 bp, Homo sapiens
tgaagcaggagaata

SEQ ID NO: 1613438 - DNA, 15 bp, Homo sapiens
gaagcaggagaatag

SEQ ID NO: 1613439 - DNA, 15 bp, Homo sapiens
aagcaggagaatagc

SEQ ID NO: 1613440 - DNA, 15 bp, Homo sapiens
agcaggagaatagct

SEQ ID NO: 1613441 - DNA, 15 bp, Homo sapiens
gcaggagaatagctt

SEQ ID NO: 1613442 - DNA, 15 bp, Homo sapiens
caggagaatagcttg

SEQ ID NO: 1613443 - DNA, 15 bp, Homo sapiens
aggagaatagcttga

SEQ ID NO: 1613444 - DNA, 15 bp, Homo sapiens
ggagaatagcttgaa

SEQ ID NO: 1613445 - DNA, 15 bp, Homo sapiens
gagaatagcttgaac

SEQ ID NO: 1613446 - DNA, 15 bp, Homo sapiens
agaatagcttgaacc

SEQ ID NO: 1613447 - DNA, 15 bp, Homo sapiens
gaatagcttgaaccc

SEQ ID NO: 1613448 - DNA, 15 bp, Homo sapiens
aatagcttgaaccca

SEQ ID NO: 1613449 - DNA, 15 bp, Homo sapiens
atagcttgaacccag

SEQ ID NO: 1613450 - DNA, 15 bp, Homo sapiens
tagcttgaacccagg

SEQ ID NO: 1613451 - DNA, 15 bp, Homo sapiens
agcttgaacccagga

SEQ ID NO: 1613452 - DNA, 15 bp, Homo sapiens
acccaggaggcagat

SEQ ID NO: 1613453 - DNA, 15 bp, Homo sapiens
cccaggaggcagatg

SEQ ID NO: 1613454 - DNA, 15 bp, Homo sapiens
ccaggaggcagatgt

SEQ ID NO: 1613455 - DNA, 15 bp, Homo sapiens
caggaggcagatgtg

SEQ ID NO: 1613456 - DNA, 15 bp, Homo sapiens
aggaggcagatgtgg

SEQ ID NO: 1613457 - DNA, 15 bp, Homo sapiens
ggaggcagatgtggc

SEQ ID NO: 1613458 - DNA, 15 bp, Homo sapiens
gaggcagatgtggca

SEQ ID NO: 1613459 - DNA, 15 bp, Homo sapiens
aggcagatgtggcag

SEQ ID NO: 1613460 - DNA, 15 bp, Homo sapiens
ggcagatgtggcagt

SEQ ID NO: 1613461 - DNA, 15 bp, Homo sapiens
gcagatgtggcagtg

SEQ ID NO: 1613462 - DNA, 15 bp, Homo sapiens
cagatgtggcagtga

SEQ ID NO: 1613463 - DNA, 15 bp, Homo sapiens
agatgtggcagtgag

SEQ ID NO: 1613464 - DNA, 15 bp, Homo sapiens
gatgtggcagtgaga

SEQ ID NO: 1613465 - DNA, 15 bp, Homo sapiens
atgtggcagtgagac

SEQ ID NO: 1613466 - DNA, 15 bp, Homo sapiens
tgtggcagtgagacg

SEQ ID NO: 1613467 - DNA, 15 bp, Homo sapiens
gtggcagtgagacga

SEQ ID NO: 1613468 - DNA, 15 bp, Homo sapiens
tggcagtgagacgag

SEQ ID NO: 1613469 - DNA, 15 bp, Homo sapiens
ggcagtgagacgaga

SEQ ID NO: 1613470 - DNA, 15 bp, Homo sapiens
gtgagacgagattgt

SEQ ID NO: 1613471 - DNA, 15 bp, Homo sapiens
tgagacgagattgtg

SEQ ID NO: 1613472 - DNA, 15 bp, Homo sapiens
gagacgagattgtgc

SEQ ID NO: 1613473 - DNA, 15 bp, Homo sapiens
agacgagattgtgcc

SEQ ID NO: 1613474 - DNA, 15 bp, Homo sapiens
gacgagattgtgcca

SEQ ID NO: 1613475 - DNA, 15 bp, Homo sapiens
acgagattgtgccat

SEQ ID NO: 1613476 - DNA, 15 bp, Homo sapiens
cgagattgtgccatt

SEQ ID NO: 1613477 - DNA, 15 bp, Homo sapiens
gagattgtgccattg

SEQ ID NO: 1613478 - DNA, 15 bp, Homo sapiens
ctgggcgacagagta

SEQ ID NO: 1613479 - DNA, 15 bp, Homo sapiens
tgggcgacagagtaa

SEQ ID NO: 1613480 - DNA, 15 bp, Homo sapiens
gggcgacagagtaag

SEQ ID NO: 1613481 - DNA, 15 bp, Homo sapiens
ggcgacagagtaaga

SEQ ID NO: 1613482 - DNA, 15 bp, Homo sapiens
gcgacagagtaagac

SEQ ID NO: 1613483 - DNA, 15 bp, Homo sapiens
cgacagagtaagacc

SEQ ID NO: 1613484 - DNA, 15 bp, Homo sapiens
gacagagtaagaccc

SEQ ID NO: 1613485 - DNA, 15 bp, Homo sapiens
acagagtaagacccc

SEQ ID NO: 1613486 - DNA, 15 bp, Homo sapiens
cagagtaagacccca

SEQ ID NO: 1613487 - DNA, 15 bp, Homo sapiens
agagtaagaccccat

SEQ ID NO: 1613488 - DNA, 15 bp, Homo sapiens
gagtaagaccccatc

SEQ ID NO: 1613489 - DNA, 15 bp, Homo sapiens
agtaagaccccatct

SEQ ID NO: 1613490 - DNA, 15 bp, Homo sapiens
gtaagaccccatctc

SEQ ID NO: 1613491 - DNA, 15 bp, Homo sapiens
taagaccccatctca

SEQ ID NO: 1613492 - DNA, 15 bp, Homo sapiens
aagaccccatctcaa

SEQ ID NO: 1613493 - DNA, 15 bp, Homo sapiens
cccatctcaaaaaat

SEQ ID NO: 1613494 - DNA, 15 bp, Homo sapiens
ccatctcaaaaaatt

SEQ ID NO: 1613495 - DNA, 15 bp, Homo sapiens
tcaaaaaattaaaat

SEQ ID NO: 1613496 - DNA, 15 bp, Homo sapiens
aaattaaaataaaaa

SEQ ID NO: 1613497 - DNA, 15 bp, Homo sapiens
aattaaaataaaaat

SEQ ID NO: 1613498 - DNA, 15 bp, Homo sapiens
attaaaataaaaata

SEQ ID NO: 1613499 - DNA, 15 bp, Homo sapiens
taaaataaaaataaa

SEQ ID NO: 1613500 - DNA, 15 bp, Homo sapiens
taaaaataaataaag

SEQ ID NO: 1613501 - DNA, 15 bp, Homo sapiens
aataaataaagatta

SEQ ID NO: 1613502 - DNA, 15 bp, Homo sapiens
ataaataaagattat

SEQ ID NO: 1613503 - DNA, 15 bp, Homo sapiens
taaataaagattatg

SEQ ID NO: 1613504 - DNA, 15 bp, Homo sapiens
aaataaagattatgt

SEQ ID NO: 1613505 - DNA, 15 bp, Homo sapiens
aataaagattatgta

SEQ ID NO: 1613506 - DNA, 15 bp, Homo sapiens
ataaagattatgtag

SEQ ID NO: 1613507 - DNA, 15 bp, Homo sapiens
taaagattatgtagg

SEQ ID NO: 1613508 - DNA, 15 bp, Homo sapiens
aaagattatgtagga

SEQ ID NO: 1613509 - DNA, 15 bp, Homo sapiens
aagattatgtaggat

SEQ ID NO: 1613510 - DNA, 15 bp, Homo sapiens
agattatgtaggatt

SEQ ID NO: 1613511 - DNA, 15 bp, Homo sapiens
gattatgtaggattt

SEQ ID NO: 1613512 - DNA, 15 bp, Homo sapiens
attatgtaggatttt

SEQ ID NO: 1613513 - DNA, 15 bp, Homo sapiens
ttatgtaggatttta

SEQ ID NO: 1613514 - DNA, 15 bp, Homo sapiens
tatgtaggattttat

SEQ ID NO: 1613515 - DNA, 15 bp, Homo sapiens
atgtaggattttatt

SEQ ID NO: 1613516 - DNA, 15 bp, Homo sapiens
tgtaggattttatta

SEQ ID NO: 1613517 - DNA, 15 bp, Homo sapiens
gtaggattttattag

SEQ ID NO: 1613518 - DNA, 15 bp, Homo sapiens
taggattttattagc

SEQ ID NO: 1613519 - DNA, 15 bp, Homo sapiens
aggattttattagct

SEQ ID NO: 1613520 - DNA, 15 bp, Homo sapiens
ggattttattagcta

SEQ ID NO: 1613521 - DNA, 15 bp, Homo sapiens
gattttattagctat

SEQ ID NO: 1613522 - DNA, 15 bp, Homo sapiens
attttattagctatg

SEQ ID NO: 1613523 - DNA, 15 bp, Homo sapiens
ttttattagctatga

SEQ ID NO: 1613524 - DNA, 15 bp, Homo sapiens
tttattagctatgat

SEQ ID NO: 1613525 - DNA, 15 bp, Homo sapiens
ttattagctatgata

SEQ ID NO: 1613526 - DNA, 15 bp, Homo sapiens
tattagctatgataa

SEQ ID NO: 1613527 - DNA, 15 bp, Homo sapiens
attagctatgataag

SEQ ID NO: 1613528 - DNA, 15 bp, Homo sapiens
ttagctatgataagg

SEQ ID NO: 1613529 - DNA, 15 bp, Homo sapiens
tagctatgataagga

SEQ ID NO: 1613530 - DNA, 15 bp, Homo sapiens
agctatgataaggag

SEQ ID NO: 1613531 - DNA, 15 bp, Homo sapiens
gctatgataaggagt

SEQ ID NO: 1613532 - DNA, 15 bp, Homo sapiens
ctatgataaggagtt

SEQ ID NO: 1613533 - DNA, 15 bp, Homo sapiens
tatgataaggagtta

SEQ ID NO: 1613534 - DNA, 15 bp, Homo sapiens
atgataaggagttaa

SEQ ID NO: 1613535 - DNA, 15 bp, Homo sapiens
tgataaggagttaaa

SEQ ID NO: 1613536 - DNA, 15 bp, Homo sapiens
gataaggagttaaaa

SEQ ID NO: 1613537 - DNA, 15 bp, Homo sapiens
ataaggagttaaaac

SEQ ID NO: 1613538 - DNA, 15 bp, Homo sapiens
taaggagttaaaaca

SEQ ID NO: 1613539 - DNA, 15 bp, Homo sapiens
aaggagttaaaacag

SEQ ID NO: 1613540 - DNA, 15 bp, Homo sapiens
aggagttaaaacagt

SEQ ID NO: 1613541 - DNA, 15 bp, Homo sapiens
ggagttaaaacagta

SEQ ID NO: 1613542 - DNA, 15 bp, Homo sapiens
gagttaaaacagtat

SEQ ID NO: 1613543 - DNA, 15 bp, Homo sapiens
agttaaaacagtatc

SEQ ID NO: 1613544 - DNA, 15 bp, Homo sapiens
gttaaaacagtatct

SEQ ID NO: 1613545 - DNA, 15 bp, Homo sapiens
ttaaaacagtatctt

SEQ ID NO: 1613546 - DNA, 15 bp, Homo sapiens
taaaacagtatctta

SEQ ID NO: 1613547 - DNA, 15 bp, Homo sapiens
aaaacagtatcttaa

SEQ ID NO: 1613548 - DNA, 15 bp, Homo sapiens
aaacagtatcttaag

SEQ ID NO: 1613549 - DNA, 15 bp, Homo sapiens
aacagtatcttaagg

SEQ ID NO: 1613550 - DNA, 15 bp, Homo sapiens
acagtatcttaaggg

SEQ ID NO: 1613551 - DNA, 15 bp, Homo sapiens
cagtatcttaaggga

SEQ ID NO: 1613552 - DNA, 15 bp, Homo sapiens
agtatcttaagggag

SEQ ID NO: 1613553 - DNA, 15 bp, Homo sapiens
gtatcttaagggaga

SEQ ID NO: 1613554 - DNA, 15 bp, Homo sapiens
tatcttaagggagaa

SEQ ID NO: 1613555 - DNA, 15 bp, Homo sapiens
atcttaagggagaaa

SEQ ID NO: 1613556 - DNA, 15 bp, Homo sapiens
tcttaagggagaaac

SEQ ID NO: 1613557 - DNA, 15 bp, Homo sapiens
cttaagggagaaact

SEQ ID NO: 1613558 - DNA, 15 bp, Homo sapiens
ttaagggagaaactg

SEQ ID NO: 1613559 - DNA, 15 bp, Homo sapiens
taagggagaaactgg

SEQ ID NO: 1613560 - DNA, 15 bp, Homo sapiens
aagggagaaactgga

SEQ ID NO: 1613561 - DNA, 15 bp, Homo sapiens
agggagaaactggaa

SEQ ID NO: 1613562 - DNA, 15 bp, Homo sapiens
gggagaaactggaag

SEQ ID NO: 1613563 - DNA, 15 bp, Homo sapiens
ggagaaactggaagg

SEQ ID NO: 1613564 - DNA, 15 bp, Homo sapiens
gagaaactggaaggt

SEQ ID NO: 1613565 - DNA, 15 bp, Homo sapiens
agaaactggaaggtt

SEQ ID NO: 1613566 - DNA, 15 bp, Homo sapiens
gaaactggaaggttt

SEQ ID NO: 1613567 - DNA, 15 bp, Homo sapiens
aaactggaaggtttt

SEQ ID NO: 1613568 - DNA, 15 bp, Homo sapiens
aactggaaggttttt

SEQ ID NO: 1613569 - DNA, 15 bp, Homo sapiens
actggaaggttttta

SEQ ID NO: 1613570 - DNA, 15 bp, Homo sapiens
ctggaaggtttttaa

SEQ ID NO: 1613571 - DNA, 15 bp, Homo sapiens
tggaaggtttttaaa

SEQ ID NO: 1613572 - DNA, 15 bp, Homo sapiens
ggaaggtttttaaaa

SEQ ID NO: 1613573 - DNA, 15 bp, Homo sapiens
gaaggtttttaaaaa

SEQ ID NO: 1613574 - DNA, 15 bp, Homo sapiens
aaggtttttaaaaac

SEQ ID NO: 1613575 - DNA, 15 bp, Homo sapiens
aggtttttaaaaacg

SEQ ID NO: 1613576 - DNA, 15 bp, Homo sapiens
ggtttttaaaaacga

SEQ ID NO: 1613577 - DNA, 15 bp, Homo sapiens
gtttttaaaaacgag

SEQ ID NO: 1613578 - DNA, 15 bp, Homo sapiens
tttttaaaaacgagg

SEQ ID NO: 1613579 - DNA, 15 bp, Homo sapiens
ttttaaaaacgagga

SEQ ID NO: 1613580 - DNA, 15 bp, Homo sapiens
tttaaaaacgaggat

SEQ ID NO: 1613581 - DNA, 15 bp, Homo sapiens
ttaaaaacgaggatg

SEQ ID NO: 1613582 - DNA, 15 bp, Homo sapiens
taaaaacgaggatga

SEQ ID NO: 1613583 - DNA, 15 bp, Homo sapiens
aaaaacgaggatgac

SEQ ID NO: 1613584 - DNA, 15 bp, Homo sapiens
aaaacgaggatgaca

SEQ ID NO: 1613585 - DNA, 15 bp, Homo sapiens
aaacgaggatgacat

SEQ ID NO: 1613586 - DNA, 15 bp, Homo sapiens
aacgaggatgacatc

SEQ ID NO: 1613587 - DNA, 15 bp, Homo sapiens
acgaggatgacatca

SEQ ID NO: 1613588 - DNA, 15 bp, Homo sapiens
cgaggatgacatcag

SEQ ID NO: 1613589 - DNA, 15 bp, Homo sapiens
gaggatgacatcagc

SEQ ID NO: 1613590 - DNA, 15 bp, Homo sapiens
aggatgacatcagca

SEQ ID NO: 1613591 - DNA, 15 bp, Homo sapiens
ggatgacatcagcag

SEQ ID NO: 1613592 - DNA, 15 bp, Homo sapiens
gatgacatcagcagt

SEQ ID NO: 1613593 - DNA, 15 bp, Homo sapiens
atgacatcagcagtc

SEQ ID NO: 1613594 - DNA, 15 bp, Homo sapiens
tgacatcagcagtca

SEQ ID NO: 1613595 - DNA, 15 bp, Homo sapiens
gacatcagcagtcag

SEQ ID NO: 1613596 - DNA, 15 bp, Homo sapiens
acatcagcagtcagt

SEQ ID NO: 1613597 - DNA, 15 bp, Homo sapiens
catcagcagtcagtc

SEQ ID NO: 1613598 - DNA, 15 bp, Homo sapiens
atcagcagtcagtct

SEQ ID NO: 1613599 - DNA, 15 bp, Homo sapiens
tcagcagtcagtctc

SEQ ID NO: 1613600 - DNA, 15 bp, Homo sapiens
cagcagtcagtctca

SEQ ID NO: 1613601 - DNA, 15 bp, Homo sapiens
agcagtcagtctcac

SEQ ID NO: 1613602 - DNA, 15 bp, Homo sapiens
gcagtcagtctcact

SEQ ID NO: 1613603 - DNA, 15 bp, Homo sapiens
cagtcagtctcactt

SEQ ID NO: 1613604 - DNA, 15 bp, Homo sapiens
agtcagtctcacttt

SEQ ID NO: 1613605 - DNA, 15 bp, Homo sapiens
gtcagtctcacttta

SEQ ID NO: 1613606 - DNA, 15 bp, Homo sapiens
tcagtctcactttac

SEQ ID NO: 1613607 - DNA, 15 bp, Homo sapiens
cagtctcactttaca

SEQ ID NO: 1613608 - DNA, 15 bp, Homo sapiens
agtctcactttacag

SEQ ID NO: 1613609 - DNA, 15 bp, Homo sapiens
gtctcactttacaga

SEQ ID NO: 1613610 - DNA, 15 bp, Homo sapiens
tctcactttacagat

SEQ ID NO: 1613611 - DNA, 15 bp, Homo sapiens
ctcactttacagatg

SEQ ID NO: 1613612 - DNA, 15 bp, Homo sapiens
tcactttacagatga

SEQ ID NO: 1613613 - DNA, 15 bp, Homo sapiens
cactttacagatgag

SEQ ID NO: 1613614 - DNA, 15 bp, Homo sapiens
actttacagatgaga

SEQ ID NO: 1613615 - DNA, 15 bp, Homo sapiens
ctttacagatgagaa

SEQ ID NO: 1613616 - DNA, 15 bp, Homo sapiens
tttacagatgagaac

SEQ ID NO: 1613617 - DNA, 15 bp, Homo sapiens
ttacagatgagaaca

SEQ ID NO: 1613618 - DNA, 15 bp, Homo sapiens
tacagatgagaacac

SEQ ID NO: 1613619 - DNA, 15 bp, Homo sapiens
acagatgagaacacc

SEQ ID NO: 1613620 - DNA, 15 bp, Homo sapiens
cagatgagaacacca

SEQ ID NO: 1613621 - DNA, 15 bp, Homo sapiens
agatgagaacaccaa

SEQ ID NO: 1613622 - DNA, 15 bp, Homo sapiens
gatgagaacaccaag

SEQ ID NO: 1613623 - DNA, 15 bp, Homo sapiens
atgagaacaccaagg

SEQ ID NO: 1613624 - DNA, 15 bp, Homo sapiens
tgagaacaccaaggc

SEQ ID NO: 1613625 - DNA, 15 bp, Homo sapiens
gagaacaccaaggca

SEQ ID NO: 1613626 - DNA, 15 bp, Homo sapiens
agaacaccaaggcag

SEQ ID NO: 1613627 - DNA, 15 bp, Homo sapiens
gaacaccaaggcaga

SEQ ID NO: 1613628 - DNA, 15 bp, Homo sapiens
aacaccaaggcagac

SEQ ID NO: 1613629 - DNA, 15 bp, Homo sapiens
acaccaaggcagacg

SEQ ID NO: 1613630 - DNA, 15 bp, Homo sapiens
caccaaggcagacgg

SEQ ID NO: 1613631 - DNA, 15 bp, Homo sapiens
accaaggcagacggt

SEQ ID NO: 1613632 - DNA, 15 bp, Homo sapiens
ccaaggcagacggtg

SEQ ID NO: 1613633 - DNA, 15 bp, Homo sapiens
caaggcagacggtgt

SEQ ID NO: 1613634 - DNA, 15 bp, Homo sapiens
aaggcagacggtgtc

SEQ ID NO: 1613635 - DNA, 15 bp, Homo sapiens
aggcagacggtgtca

SEQ ID NO: 1613636 - DNA, 15 bp, Homo sapiens
ggcagacggtgtcat

SEQ ID NO: 1613637 - DNA, 15 bp, Homo sapiens
gcagacggtgtcata

SEQ ID NO: 1613638 - DNA, 15 bp, Homo sapiens
cagacggtgtcatat

SEQ ID NO: 1613639 - DNA, 15 bp, Homo sapiens
agacggtgtcatatc

SEQ ID NO: 1613640 - DNA, 15 bp, Homo sapiens
gacggtgtcatatct

SEQ ID NO: 1613641 - DNA, 15 bp, Homo sapiens
acggtgtcatatctt

SEQ ID NO: 1613642 - DNA, 15 bp, Homo sapiens
cggtgtcatatcttg

SEQ ID NO: 1613643 - DNA, 15 bp, Homo sapiens
ggtgtcatatcttgc

SEQ ID NO: 1613644 - DNA, 15 bp, Homo sapiens
gtgtcatatcttgct

SEQ ID NO: 1613645 - DNA, 15 bp, Homo sapiens
tgtcatatcttgctc

SEQ ID NO: 1613646 - DNA, 15 bp, Homo sapiens
gtcatatcttgctca

SEQ ID NO: 1613647 - DNA, 15 bp, Homo sapiens
tcatatcttgctcaa

SEQ ID NO: 1613648 - DNA, 15 bp, Homo sapiens
catatcttgctcaag

SEQ ID NO: 1613649 - DNA, 15 bp, Homo sapiens
atatcttgctcaagg

SEQ ID NO: 1613650 - DNA, 15 bp, Homo sapiens
tatcttgctcaaggt

SEQ ID NO: 1613651 - DNA, 15 bp, Homo sapiens
atcttgctcaaggtc

SEQ ID NO: 1613652 - DNA, 15 bp, Homo sapiens
tcttgctcaaggtca

SEQ ID NO: 1613653 - DNA, 15 bp, Homo sapiens
cttgctcaaggtcac

SEQ ID NO: 1613654 - DNA, 15 bp, Homo sapiens
ttgctcaaggtcaca

SEQ ID NO: 1613655 - DNA, 15 bp, Homo sapiens
tgctcaaggtcacac

SEQ ID NO: 1613656 - DNA, 15 bp, Homo sapiens
gctcaaggtcacaca

SEQ ID NO: 1613657 - DNA, 15 bp, Homo sapiens
ctcaaggtcacacag

SEQ ID NO: 1613658 - DNA, 15 bp, Homo sapiens
tcaaggtcacacagc

SEQ ID NO: 1613659 - DNA, 15 bp, Homo sapiens
caaggtcacacagca

SEQ ID NO: 1613660 - DNA, 15 bp, Homo sapiens
aaggtcacacagcaa

SEQ ID NO: 1613661 - DNA, 15 bp, Homo sapiens
aggtcacacagcaag

SEQ ID NO: 1613662 - DNA, 15 bp, Homo sapiens
ggtcacacagcaagt

SEQ ID NO: 1613663 - DNA, 15 bp, Homo sapiens
gtcacacagcaagta

SEQ ID NO: 1613664 - DNA, 15 bp, Homo sapiens
tcacacagcaagtaa

SEQ ID NO: 1613665 - DNA, 15 bp, Homo sapiens
cacacagcaagtaag

SEQ ID NO: 1613666 - DNA, 15 bp, Homo sapiens
acacagcaagtaagt

SEQ ID NO: 1613667 - DNA, 15 bp, Homo sapiens
cacagcaagtaagtt

SEQ ID NO: 1613668 - DNA, 15 bp, Homo sapiens
acagcaagtaagttg

SEQ ID NO: 1613669 - DNA, 15 bp, Homo sapiens
cagcaagtaagttgc

SEQ ID NO: 1613670 - DNA, 15 bp, Homo sapiens
agcaagtaagttgca

SEQ ID NO: 1613671 - DNA, 15 bp, Homo sapiens
gcaagtaagttgcag

SEQ ID NO: 1613672 - DNA, 15 bp, Homo sapiens
caagtaagttgcaga

SEQ ID NO: 1613673 - DNA, 15 bp, Homo sapiens
aagtaagttgcagag

SEQ ID NO: 1613674 - DNA, 15 bp, Homo sapiens
agtaagttgcagaga

SEQ ID NO: 1613675 - DNA, 15 bp, Homo sapiens
gtaagttgcagagat

SEQ ID NO: 1613676 - DNA, 15 bp, Homo sapiens
taagttgcagagatg

SEQ ID NO: 1613677 - DNA, 15 bp, Homo sapiens
aagttgcagagatgg

SEQ ID NO: 1613678 - DNA, 15 bp, Homo sapiens
agttgcagagatggt

SEQ ID NO: 1613679 - DNA, 15 bp, Homo sapiens
gttgcagagatggtc

SEQ ID NO: 1613680 - DNA, 15 bp, Homo sapiens
ttgcagagatggtct

SEQ ID NO: 1613681 - DNA, 15 bp, Homo sapiens
tgcagagatggtctg

SEQ ID NO: 1613682 - DNA, 15 bp, Homo sapiens
gcagagatggtctgg

SEQ ID NO: 1613683 - DNA, 15 bp, Homo sapiens
cagagatggtctggc

SEQ ID NO: 1613684 - DNA, 15 bp, Homo sapiens
agagatggtctggct

SEQ ID NO: 1613685 - DNA, 15 bp, Homo sapiens
gagatggtctggctt

SEQ ID NO: 1613686 - DNA, 15 bp, Homo sapiens
agatggtctggcttc

SEQ ID NO: 1613687 - DNA, 15 bp, Homo sapiens
gatggtctggcttca

SEQ ID NO: 1613688 - DNA, 15 bp, Homo sapiens
atggtctggcttcag

SEQ ID NO: 1613689 - DNA, 15 bp, Homo sapiens
tggtctggcttcaga

SEQ ID NO: 1613690 - DNA, 15 bp, Homo sapiens
ggtctggcttcagat

SEQ ID NO: 1613691 - DNA, 15 bp, Homo sapiens
gtctggcttcagata

SEQ ID NO: 1613692 - DNA, 15 bp, Homo sapiens
tctggcttcagatac

SEQ ID NO: 1613693 - DNA, 15 bp, Homo sapiens
ctggcttcagatacc

SEQ ID NO: 1613694 - DNA, 15 bp, Homo sapiens
tggcttcagatacca

SEQ ID NO: 1613695 - DNA, 15 bp, Homo sapiens
ggcttcagataccat

SEQ ID NO: 1613696 - DNA, 15 bp, Homo sapiens
gcttcagataccatg

SEQ ID NO: 1613697 - DNA, 15 bp, Homo sapiens
cttcagataccatga

SEQ ID NO: 1613698 - DNA, 15 bp, Homo sapiens
ttcagataccatgaa

SEQ ID NO: 1613699 - DNA, 15 bp, Homo sapiens
tcagataccatgaat

SEQ ID NO: 1613700 - DNA, 15 bp, Homo sapiens
cagataccatgaatt

SEQ ID NO: 1613701 - DNA, 15 bp, Homo sapiens
agataccatgaattt

SEQ ID NO: 1613702 - DNA, 15 bp, Homo sapiens
gataccatgaattta

SEQ ID NO: 1613703 - DNA, 15 bp, Homo sapiens
ataccatgaatttaa

SEQ ID NO: 1613704 - DNA, 15 bp, Homo sapiens
taccatgaatttaac

SEQ ID NO: 1613705 - DNA, 15 bp, Homo sapiens
accatgaatttaacc

SEQ ID NO: 1613706 - DNA, 15 bp, Homo sapiens
ccatgaatttaacca

SEQ ID NO: 1613707 - DNA, 15 bp, Homo sapiens
catgaatttaaccac

SEQ ID NO: 1613708 - DNA, 15 bp, Homo sapiens
atgaatttaaccacc

SEQ ID NO: 1613709 - DNA, 15 bp, Homo sapiens
tgaatttaaccacca

SEQ ID NO: 1613710 - DNA, 15 bp, Homo sapiens
gaatttaaccaccac

SEQ ID NO: 1613711 - DNA, 15 bp, Homo sapiens
aatttaaccaccaca

SEQ ID NO: 1613712 - DNA, 15 bp, Homo sapiens
atttaaccaccacaa

SEQ ID NO: 1613713 - DNA, 15 bp, Homo sapiens
tttaaccaccacaaa

SEQ ID NO: 1613714 - DNA, 15 bp, Homo sapiens
ttaaccaccacaaaa

SEQ ID NO: 1613715 - DNA, 15 bp, Homo sapiens
taaccaccacaaaac

SEQ ID NO: 1613716 - DNA, 15 bp, Homo sapiens
aaccaccacaaaact

SEQ ID NO: 1613717 - DNA, 15 bp, Homo sapiens
accaccacaaaactc

SEQ ID NO: 1613718 - DNA, 15 bp, Homo sapiens
ccaccacaaaactca

SEQ ID NO: 1613719 - DNA, 15 bp, Homo sapiens
caccacaaaactcat

SEQ ID NO: 1613720 - DNA, 15 bp, Homo sapiens
accacaaaactcata

SEQ ID NO: 1613721 - DNA, 15 bp, Homo sapiens
ccacaaaactcatag

SEQ ID NO: 1613722 - DNA, 15 bp, Homo sapiens
cacaaaactcataga

SEQ ID NO: 1613723 - DNA, 15 bp, Homo sapiens
acaaaactcatagat

SEQ ID NO: 1613724 - DNA, 15 bp, Homo sapiens
caaaactcatagata

SEQ ID NO: 1613725 - DNA, 15 bp, Homo sapiens
aaaactcatagatat

SEQ ID NO: 1613726 - DNA, 15 bp, Homo sapiens
aaactcatagatata

SEQ ID NO: 1613727 - DNA, 15 bp, Homo sapiens
aactcatagatatac

SEQ ID NO: 1613728 - DNA, 15 bp, Homo sapiens
actcatagatataca

SEQ ID NO: 1613729 - DNA, 15 bp, Homo sapiens
ctcatagatatacag

SEQ ID NO: 1613730 - DNA, 15 bp, Homo sapiens
tcatagatatacaga

SEQ ID NO: 1613731 - DNA, 15 bp, Homo sapiens
catagatatacagat

SEQ ID NO: 1613732 - DNA, 15 bp, Homo sapiens
atagatatacagata

SEQ ID NO: 1613733 - DNA, 15 bp, Homo sapiens
tagatatacagatag

SEQ ID NO: 1613734 - DNA, 15 bp, Homo sapiens
agatatacagatagt

SEQ ID NO: 1613735 - DNA, 15 bp, Homo sapiens
gatatacagatagta

SEQ ID NO: 1613736 - DNA, 15 bp, Homo sapiens
atatacagatagtaa

SEQ ID NO: 1613737 - DNA, 15 bp, Homo sapiens
tatacagatagtaag

SEQ ID NO: 1613738 - DNA, 15 bp, Homo sapiens
atacagatagtaaga

SEQ ID NO: 1613739 - DNA, 15 bp, Homo sapiens
tacagatagtaagac

SEQ ID NO: 1613740 - DNA, 15 bp, Homo sapiens
acagatagtaagact

SEQ ID NO: 1613741 - DNA, 15 bp, Homo sapiens
cagatagtaagacta

SEQ ID NO: 1613742 - DNA, 15 bp, Homo sapiens
agatagtaagactat

SEQ ID NO: 1613743 - DNA, 15 bp, Homo sapiens
gatagtaagactatg

SEQ ID NO: 1613744 - DNA, 15 bp, Homo sapiens
atagtaagactatgt

SEQ ID NO: 1613745 - DNA, 15 bp, Homo sapiens
tagtaagactatgtt

SEQ ID NO: 1613746 - DNA, 15 bp, Homo sapiens
agtaagactatgttt

SEQ ID NO: 1613747 - DNA, 15 bp, Homo sapiens
gtaagactatgtttg

SEQ ID NO: 1613748 - DNA, 15 bp, Homo sapiens
taagactatgtttgc

SEQ ID NO: 1613749 - DNA, 15 bp, Homo sapiens
aagactatgtttgca

SEQ ID NO: 1613750 - DNA, 15 bp, Homo sapiens
agactatgtttgcac

SEQ ID NO: 1613751 - DNA, 15 bp, Homo sapiens
gactatgtttgcacc

SEQ ID NO: 1613752 - DNA, 15 bp, Homo sapiens
actatgtttgcacca

SEQ ID NO: 1613753 - DNA, 15 bp, Homo sapiens
ctatgtttgcaccaa

SEQ ID NO: 1613754 - DNA, 15 bp, Homo sapiens
tatgtttgcaccaac

SEQ ID NO: 1613755 - DNA, 15 bp, Homo sapiens
atgtttgcaccaacg

SEQ ID NO: 1613756 - DNA, 15 bp, Homo sapiens
tgtttgcaccaacgc

SEQ ID NO: 1613757 - DNA, 15 bp, Homo sapiens
gtttgcaccaacgcc

SEQ ID NO: 1613758 - DNA, 15 bp, Homo sapiens
tttgcaccaacgccc

SEQ ID NO: 1613759 - DNA, 15 bp, Homo sapiens
ttgcaccaacgccca

SEQ ID NO: 1613760 - DNA, 15 bp, Homo sapiens
tgcaccaacgcccaa

SEQ ID NO: 1613761 - DNA, 15 bp, Homo sapiens
gcaccaacgcccaaa

SEQ ID NO: 1613762 - DNA, 15 bp, Homo sapiens
caccaacgcccaaac

SEQ ID NO: 1613763 - DNA, 15 bp, Homo sapiens
accaacgcccaaact

SEQ ID NO: 1613764 - DNA, 15 bp, Homo sapiens
ccaacgcccaaactt

SEQ ID NO: 1613765 - DNA, 15 bp, Homo sapiens
caacgcccaaacttc

SEQ ID NO: 1613766 - DNA, 15 bp, Homo sapiens
aacgcccaaacttca

SEQ ID NO: 1613767 - DNA, 15 bp, Homo sapiens
acgcccaaacttcaa

SEQ ID NO: 1613768 - DNA, 15 bp, Homo sapiens
cgcccaaacttcaat

SEQ ID NO: 1613769 - DNA, 15 bp, Homo sapiens
gcccaaacttcaatt

SEQ ID NO: 1613770 - DNA, 15 bp, Homo sapiens
cccaaacttcaatta

SEQ ID NO: 1613771 - DNA, 15 bp, Homo sapiens
ccaaacttcaattaa

SEQ ID NO: 1613772 - DNA, 15 bp, Homo sapiens
caaacttcaattaaa

SEQ ID NO: 1613773 - DNA, 15 bp, Homo sapiens
aaacttcaattaaaa

SEQ ID NO: 1613774 - DNA, 15 bp, Homo sapiens
aacttcaattaaaaa

SEQ ID NO: 1613775 - DNA, 15 bp, Homo sapiens
acttcaattaaaaag

SEQ ID NO: 1613776 - DNA, 15 bp, Homo sapiens
cttcaattaaaaaga

SEQ ID NO: 1613777 - DNA, 15 bp, Homo sapiens
ttcaattaaaaagaa

SEQ ID NO: 1613778 - DNA, 15 bp, Homo sapiens
tcaattaaaaagaaa

SEQ ID NO: 1613779 - DNA, 15 bp, Homo sapiens
caattaaaaagaaaa

SEQ ID NO: 1613780 - DNA, 15 bp, Homo sapiens
aattaaaaagaaaaa

SEQ ID NO: 1613781 - DNA, 15 bp, Homo sapiens
attaaaaagaaaaac

SEQ ID NO: 1613782 - DNA, 15 bp, Homo sapiens
ttaaaaagaaaaaca

SEQ ID NO: 1613783 - DNA, 15 bp, Homo sapiens
taaaaagaaaaacag

SEQ ID NO: 1613784 - DNA, 15 bp, Homo sapiens
aaaaagaaaaacagg

SEQ ID NO: 1613785 - DNA, 15 bp, Homo sapiens
aaaagaaaaacaggg

SEQ ID NO: 1613786 - DNA, 15 bp, Homo sapiens
aaagaaaaacagggt

SEQ ID NO: 1613787 - DNA, 15 bp, Homo sapiens
aagaaaaacagggtc

SEQ ID NO: 1613788 - DNA, 15 bp, Homo sapiens
agaaaaacagggtct

SEQ ID NO: 1613789 - DNA, 15 bp, Homo sapiens
gaaaaacagggtcta

SEQ ID NO: 1613790 - DNA, 15 bp, Homo sapiens
aaaaacagggtctaa

SEQ ID NO: 1613791 - DNA, 15 bp, Homo sapiens
aaaacagggtctaat

SEQ ID NO: 1613792 - DNA, 15 bp, Homo sapiens
aaacagggtctaatc

SEQ ID NO: 1613793 - DNA, 15 bp, Homo sapiens
aacagggtctaatca

SEQ ID NO: 1613794 - DNA, 15 bp, Homo sapiens
acagggtctaatcag

SEQ ID NO: 1613795 - DNA, 15 bp, Homo sapiens
cagggtctaatcagt

SEQ ID NO: 1613796 - DNA, 15 bp, Homo sapiens
agggtctaatcagtt

SEQ ID NO: 1613797 - DNA, 15 bp, Homo sapiens
gggtctaatcagtta

SEQ ID NO: 1613798 - DNA, 15 bp, Homo sapiens
ggtctaatcagttat

SEQ ID NO: 1613799 - DNA, 15 bp, Homo sapiens
gtctaatcagttatt

SEQ ID NO: 1613800 - DNA, 15 bp, Homo sapiens
tctaatcagttattt

SEQ ID NO: 1613801 - DNA, 15 bp, Homo sapiens
ctaatcagttatttg

SEQ ID NO: 1613802 - DNA, 15 bp, Homo sapiens
taatcagttatttga

SEQ ID NO: 1613803 - DNA, 15 bp, Homo sapiens
aatcagttatttgaa

SEQ ID NO: 1613804 - DNA, 15 bp, Homo sapiens
atcagttatttgaat

SEQ ID NO: 1613805 - DNA, 15 bp, Homo sapiens
tcagttatttgaatt

SEQ ID NO: 1613806 - DNA, 15 bp, Homo sapiens
cagttatttgaattt

SEQ ID NO: 1613807 - DNA, 15 bp, Homo sapiens
agttatttgaatttc

SEQ ID NO: 1613808 - DNA, 15 bp, Homo sapiens
gttatttgaatttcg

SEQ ID NO: 1613809 - DNA, 15 bp, Homo sapiens
ttatttgaatttcgc

SEQ ID NO: 1613810 - DNA, 15 bp, Homo sapiens
tatttgaatttcgca

SEQ ID NO: 1613811 - DNA, 15 bp, Homo sapiens
atttgaatttcgcag

SEQ ID NO: 1613812 - DNA, 15 bp, Homo sapiens
tttgaatttcgcagt

SEQ ID NO: 1613813 - DNA, 15 bp, Homo sapiens
ttgaatttcgcagtc

SEQ ID NO: 1613814 - DNA, 15 bp, Homo sapiens
tgaatttcgcagtca

SEQ ID NO: 1613815 - DNA, 15 bp, Homo sapiens
gaatttcgcagtcaa

SEQ ID NO: 1613816 - DNA, 15 bp, Homo sapiens
aatttcgcagtcaat

SEQ ID NO: 1613817 - DNA, 15 bp, Homo sapiens
atttcgcagtcaatt

SEQ ID NO: 1613818 - DNA, 15 bp, Homo sapiens
tttcgcagtcaattc

SEQ ID NO: 1613819 - DNA, 15 bp, Homo sapiens
ttcgcagtcaattcc

SEQ ID NO: 1613820 - DNA, 15 bp, Homo sapiens
tcgcagtcaattcct

SEQ ID NO: 1613821 - DNA, 15 bp, Homo sapiens
cgcagtcaattcctt

SEQ ID NO: 1613822 - DNA, 15 bp, Homo sapiens
gcagtcaattccttt

SEQ ID NO: 1613823 - DNA, 15 bp, Homo sapiens
cagtcaattcctttg

SEQ ID NO: 1613824 - DNA, 15 bp, Homo sapiens
agtcaattcctttgt

SEQ ID NO: 1613825 - DNA, 15 bp, Homo sapiens
gtcaattcctttgta

SEQ ID NO: 1613826 - DNA, 15 bp, Homo sapiens
tcaattcctttgtaa

SEQ ID NO: 1613827 - DNA, 15 bp, Homo sapiens
caattcctttgtaaa

SEQ ID NO: 1613828 - DNA, 15 bp, Homo sapiens
aattcctttgtaaag

SEQ ID NO: 1613829 - DNA, 15 bp, Homo sapiens
attcctttgtaaagc

SEQ ID NO: 1613830 - DNA, 15 bp, Homo sapiens
ttcctttgtaaagca

SEQ ID NO: 1613831 - DNA, 15 bp, Homo sapiens
tcctttgtaaagcat

SEQ ID NO: 1613832 - DNA, 15 bp, Homo sapiens
cctttgtaaagcata

SEQ ID NO: 1613833 - DNA, 15 bp, Homo sapiens
ctttgtaaagcatat

SEQ ID NO: 1613834 - DNA, 15 bp, Homo sapiens
tttgtaaagcatata

SEQ ID NO: 1613835 - DNA, 15 bp, Homo sapiens
ttgtaaagcatataa

SEQ ID NO: 1613836 - DNA, 15 bp, Homo sapiens
tgtaaagcatataaa

SEQ ID NO: 1613837 - DNA, 15 bp, Homo sapiens
gtaaagcatataaac

SEQ ID NO: 1613838 - DNA, 15 bp, Homo sapiens
taaagcatataaacc

SEQ ID NO: 1613839 - DNA, 15 bp, Homo sapiens
aaagcatataaacca

SEQ ID NO: 1613840 - DNA, 15 bp, Homo sapiens
aagcatataaaccac

SEQ ID NO: 1613841 - DNA, 15 bp, Homo sapiens
agcatataaaccact

SEQ ID NO: 1613842 - DNA, 15 bp, Homo sapiens
gcatataaaccactg

SEQ ID NO: 1613843 - DNA, 15 bp, Homo sapiens
catataaaccactga

SEQ ID NO: 1613844 - DNA, 15 bp, Homo sapiens
atataaaccactgag

SEQ ID NO: 1613845 - DNA, 15 bp, Homo sapiens
tataaaccactgaga

SEQ ID NO: 1613846 - DNA, 15 bp, Homo sapiens
ataaaccactgagaa

SEQ ID NO: 1613847 - DNA, 15 bp, Homo sapiens
taaaccactgagaaa

SEQ ID NO: 1613848 - DNA, 15 bp, Homo sapiens
aaaccactgagaaat

SEQ ID NO: 1613849 - DNA, 15 bp, Homo sapiens
aaccactgagaaatt

SEQ ID NO: 1613850 - DNA, 15 bp, Homo sapiens
accactgagaaattg

SEQ ID NO: 1613851 - DNA, 15 bp, Homo sapiens
ccactgagaaattga

SEQ ID NO: 1613852 - DNA, 15 bp, Homo sapiens
cactgagaaattgaa

SEQ ID NO: 1613853 - DNA, 15 bp, Homo sapiens
actgagaaattgaat

SEQ ID NO: 1613854 - DNA, 15 bp, Homo sapiens
ctgagaaattgaatt

SEQ ID NO: 1613855 - DNA, 15 bp, Homo sapiens
tgagaaattgaatta

SEQ ID NO: 1613856 - DNA, 15 bp, Homo sapiens
gagaaattgaattag

SEQ ID NO: 1613857 - DNA, 15 bp, Homo sapiens
agaaattgaattagg

SEQ ID NO: 1613858 - DNA, 15 bp, Homo sapiens
gaaattgaattaggc

SEQ ID NO: 1613859 - DNA, 15 bp, Homo sapiens
aaattgaattaggct

SEQ ID NO: 1613860 - DNA, 15 bp, Homo sapiens
aattgaattaggctc

SEQ ID NO: 1613861 - DNA, 15 bp, Homo sapiens
attgaattaggctca

SEQ ID NO: 1613862 - DNA, 15 bp, Homo sapiens
ttgaattaggctcac

SEQ ID NO: 1613863 - DNA, 15 bp, Homo sapiens
tgaattaggctcaca

SEQ ID NO: 1613864 - DNA, 15 bp, Homo sapiens
gaattaggctcacaa

SEQ ID NO: 1613865 - DNA, 15 bp, Homo sapiens
aattaggctcacaaa

SEQ ID NO: 1613866 - DNA, 15 bp, Homo sapiens
attaggctcacaaat

SEQ ID NO: 1613867 - DNA, 15 bp, Homo sapiens
ttaggctcacaaatt

SEQ ID NO: 1613868 - DNA, 15 bp, Homo sapiens
taggctcacaaatta

SEQ ID NO: 1613869 - DNA, 15 bp, Homo sapiens
aggctcacaaattaa

SEQ ID NO: 1613870 - DNA, 15 bp, Homo sapiens
ggctcacaaattaaa

SEQ ID NO: 1613871 - DNA, 15 bp, Homo sapiens
gctcacaaattaaaa

SEQ ID NO: 1613872 - DNA, 15 bp, Homo sapiens
ctcacaaattaaaat

SEQ ID NO: 1613873 - DNA, 15 bp, Homo sapiens
tcacaaattaaaatg

SEQ ID NO: 1613874 - DNA, 15 bp, Homo sapiens
cacaaattaaaatgt

SEQ ID NO: 1613875 - DNA, 15 bp, Homo sapiens
acaaattaaaatgtg

SEQ ID NO: 1613876 - DNA, 15 bp, Homo sapiens
caaattaaaatgtga

SEQ ID NO: 1613877 - DNA, 15 bp, Homo sapiens
aaattaaaatgtgaa

SEQ ID NO: 1613878 - DNA, 15 bp, Homo sapiens
aattaaaatgtgaat

SEQ ID NO: 1613879 - DNA, 15 bp, Homo sapiens
attaaaatgtgaata

SEQ ID NO: 1613880 - DNA, 15 bp, Homo sapiens
ttaaaatgtgaatat

SEQ ID NO: 1613881 - DNA, 15 bp, Homo sapiens
taaaatgtgaatatg

SEQ ID NO: 1613882 - DNA, 15 bp, Homo sapiens
aaaatgtgaatatga

SEQ ID NO: 1613883 - DNA, 15 bp, Homo sapiens
aaatgtgaatatgaa

SEQ ID NO: 1613884 - DNA, 15 bp, Homo sapiens
aatgtgaatatgaat

SEQ ID NO: 1613885 - DNA, 15 bp, Homo sapiens
atgtgaatatgaata

SEQ ID NO: 1613886 - DNA, 15 bp, Homo sapiens
tgtgaatatgaatat

SEQ ID NO: 1613887 - DNA, 15 bp, Homo sapiens
gtgaatatgaatata

SEQ ID NO: 1613888 - DNA, 15 bp, Homo sapiens
tgaatatgaatataa

SEQ ID NO: 1613889 - DNA, 15 bp, Homo sapiens
gaatatgaatataat

SEQ ID NO: 1613890 - DNA, 15 bp, Homo sapiens
aatatgaatataatt

SEQ ID NO: 1613891 - DNA, 15 bp, Homo sapiens
atatgaatataatta

SEQ ID NO: 1613892 - DNA, 15 bp, Homo sapiens
tatgaatataattat

SEQ ID NO: 1613893 - DNA, 15 bp, Homo sapiens
atgaatataattatt

SEQ ID NO: 1613894 - DNA, 15 bp, Homo sapiens
tgaatataattattt

SEQ ID NO: 1613895 - DNA, 15 bp, Homo sapiens
gaatataattattta

SEQ ID NO: 1613896 - DNA, 15 bp, Homo sapiens
aatataattatttaa

SEQ ID NO: 1613897 - DNA, 15 bp, Homo sapiens
atataattatttaaa

SEQ ID NO: 1613898 - DNA, 15 bp, Homo sapiens
tataattatttaaac

SEQ ID NO: 1613899 - DNA, 15 bp, Homo sapiens
ataattatttaaaca

SEQ ID NO: 1613900 - DNA, 15 bp, Homo sapiens
taattatttaaacaa

SEQ ID NO: 1613901 - DNA, 15 bp, Homo sapiens
aattatttaaacaaa

SEQ ID NO: 1613902 - DNA, 15 bp, Homo sapiens
attatttaaacaaaa

SEQ ID NO: 1613903 - DNA, 15 bp, Homo sapiens
ttatttaaacaaaag

SEQ ID NO: 1613904 - DNA, 15 bp, Homo sapiens
tatttaaacaaaaga

SEQ ID NO: 1613905 - DNA, 15 bp, Homo sapiens
atttaaacaaaagac

SEQ ID NO: 1613906 - DNA, 15 bp, Homo sapiens
tttaaacaaaagact

SEQ ID NO: 1613907 - DNA, 15 bp, Homo sapiens
ttaaacaaaagacta

SEQ ID NO: 1613908 - DNA, 15 bp, Homo sapiens
aaacaaaagactacc

SEQ ID NO: 1613909 - DNA, 15 bp, Homo sapiens
aacaaaagactacct

SEQ ID NO: 1613910 - DNA, 15 bp, Homo sapiens
acaaaagactacctc

SEQ ID NO: 1613911 - DNA, 15 bp, Homo sapiens
caaaagactacctct

SEQ ID NO: 1613912 - DNA, 15 bp, Homo sapiens
aaaagactacctctt

SEQ ID NO: 1613913 - DNA, 15 bp, Homo sapiens
aaagactacctctta

SEQ ID NO: 1613914 - DNA, 15 bp, Homo sapiens
aagactacctcttaa

SEQ ID NO: 1613915 - DNA, 15 bp, Homo sapiens
agactacctcttaaa

SEQ ID NO: 1613916 - DNA, 15 bp, Homo sapiens
gactacctcttaaaa

SEQ ID NO: 1613917 - DNA, 15 bp, Homo sapiens
actacctcttaaaac

SEQ ID NO: 1613918 - DNA, 15 bp, Homo sapiens
ctacctcttaaaact

SEQ ID NO: 1613919 - DNA, 15 bp, Homo sapiens
tacctcttaaaactc

SEQ ID NO: 1613920 - DNA, 15 bp, Homo sapiens
acctcttaaaactct

SEQ ID NO: 1613921 - DNA, 15 bp, Homo sapiens
cctcttaaaactcta

SEQ ID NO: 1613922 - DNA, 15 bp, Homo sapiens
ctcttaaaactctac

SEQ ID NO: 1613923 - DNA, 15 bp, Homo sapiens
tcttaaaactctacc

SEQ ID NO: 1613924 - DNA, 15 bp, Homo sapiens
cttaaaactctacct

SEQ ID NO: 1613925 - DNA, 15 bp, Homo sapiens
ttaaaactctacctc

SEQ ID NO: 1613926 - DNA, 15 bp, Homo sapiens
taaaactctacctcg

SEQ ID NO: 1613927 - DNA, 15 bp, Homo sapiens
aaaactctacctcgc

SEQ ID NO: 1613928 - DNA, 15 bp, Homo sapiens
aaactctacctcgca

SEQ ID NO: 1613929 - DNA, 15 bp, Homo sapiens
aactctacctcgcag

SEQ ID NO: 1613930 - DNA, 15 bp, Homo sapiens
actctacctcgcaga

SEQ ID NO: 1613931 - DNA, 15 bp, Homo sapiens
ctctacctcgcagat

SEQ ID NO: 1613932 - DNA, 15 bp, Homo sapiens
tctacctcgcagata

SEQ ID NO: 1613933 - DNA, 15 bp, Homo sapiens
ctacctcgcagatat

SEQ ID NO: 1613934 - DNA, 15 bp, Homo sapiens
tacctcgcagatatc

SEQ ID NO: 1613935 - DNA, 15 bp, Homo sapiens
acctcgcagatatcc

SEQ ID NO: 1613936 - DNA, 15 bp, Homo sapiens
cctcgcagatatcct

SEQ ID NO: 1613937 - DNA, 15 bp, Homo sapiens
ctcgcagatatcctg

SEQ ID NO: 1613938 - DNA, 15 bp, Homo sapiens
tcgcagatatcctgt

SEQ ID NO: 1613939 - DNA, 15 bp, Homo sapiens
cgcagatatcctgtg

SEQ ID NO: 1613940 - DNA, 15 bp, Homo sapiens
gcagatatcctgtga

SEQ ID NO: 1613941 - DNA, 15 bp, Homo sapiens
cagatatcctgtgag

SEQ ID NO: 1613942 - DNA, 15 bp, Homo sapiens
agatatcctgtgaga

SEQ ID NO: 1613943 - DNA, 15 bp, Homo sapiens
gatatcctgtgagaa

SEQ ID NO: 1613944 - DNA, 15 bp, Homo sapiens
atatcctgtgagaag

SEQ ID NO: 1613945 - DNA, 15 bp, Homo sapiens
tatcctgtgagaagt

SEQ ID NO: 1613946 - DNA, 15 bp, Homo sapiens
atcctgtgagaagtt

SEQ ID NO: 1613947 - DNA, 15 bp, Homo sapiens
tcctgtgagaagttg

SEQ ID NO: 1613948 - DNA, 15 bp, Homo sapiens
cctgtgagaagttga

SEQ ID NO: 1613949 - DNA, 15 bp, Homo sapiens
ctgtgagaagttgac

SEQ ID NO: 1613950 - DNA, 15 bp, Homo sapiens
tgtgagaagttgacg

SEQ ID NO: 1613951 - DNA, 15 bp, Homo sapiens
gtgagaagttgacgg

SEQ ID NO: 1613952 - DNA, 15 bp, Homo sapiens
tgagaagttgacggg

SEQ ID NO: 1613953 - DNA, 15 bp, Homo sapiens
gagaagttgacggga

SEQ ID NO: 1613954 - DNA, 15 bp, Homo sapiens
agaagttgacgggat

SEQ ID NO: 1613955 - DNA, 15 bp, Homo sapiens
gaagttgacgggata

SEQ ID NO: 1613956 - DNA, 15 bp, Homo sapiens
aagttgacgggataa

SEQ ID NO: 1613957 - DNA, 15 bp, Homo sapiens
agttgacgggataat

SEQ ID NO: 1613958 - DNA, 15 bp, Homo sapiens
gttgacgggataata

SEQ ID NO: 1613959 - DNA, 15 bp, Homo sapiens
ttgacgggataatag

SEQ ID NO: 1613960 - DNA, 15 bp, Homo sapiens
tgacgggataataga

SEQ ID NO: 1613961 - DNA, 15 bp, Homo sapiens
gacgggataatagaa

SEQ ID NO: 1613962 - DNA, 15 bp, Homo sapiens
acgggataatagaaa

SEQ ID NO: 1613963 - DNA, 15 bp, Homo sapiens
cgggataatagaaac

SEQ ID NO: 1613964 - DNA, 15 bp, Homo sapiens
gggataatagaaaca

SEQ ID NO: 1613965 - DNA, 15 bp, Homo sapiens
ggataatagaaacag

SEQ ID NO: 1613966 - DNA, 15 bp, Homo sapiens
gataatagaaacaga

SEQ ID NO: 1613967 - DNA, 15 bp, Homo sapiens
ataatagaaacagaa

SEQ ID NO: 1613968 - DNA, 15 bp, Homo sapiens
taatagaaacagaac

SEQ ID NO: 1613969 - DNA, 15 bp, Homo sapiens
aatagaaacagaact

SEQ ID NO: 1613970 - DNA, 15 bp, Homo sapiens
atagaaacagaacta

SEQ ID NO: 1613971 - DNA, 15 bp, Homo sapiens
tagaaacagaactag

SEQ ID NO: 1613972 - DNA, 15 bp, Homo sapiens
agaaacagaactagt

SEQ ID NO: 1613973 - DNA, 15 bp, Homo sapiens
gaaacagaactagtt

SEQ ID NO: 1613974 - DNA, 15 bp, Homo sapiens
aaacagaactagttt

SEQ ID NO: 1613975 - DNA, 15 bp, Homo sapiens
aacagaactagtttg

SEQ ID NO: 1613976 - DNA, 15 bp, Homo sapiens
acagaactagtttgg

SEQ ID NO: 1613977 - DNA, 15 bp, Homo sapiens
cagaactagtttggg

SEQ ID NO: 1613978 - DNA, 15 bp, Homo sapiens
agaactagtttggga

SEQ ID NO: 1613979 - DNA, 15 bp, Homo sapiens
gaactagtttgggaa

SEQ ID NO: 1613980 - DNA, 15 bp, Homo sapiens
aactagtttgggaat

SEQ ID NO: 1613981 - DNA, 15 bp, Homo sapiens
actagtttgggaatt

SEQ ID NO: 1613982 - DNA, 15 bp, Homo sapiens
ctagtttgggaattt

SEQ ID NO: 1613983 - DNA, 15 bp, Homo sapiens
tagtttgggaatttc

SEQ ID NO: 1613984 - DNA, 15 bp, Homo sapiens
agtttgggaatttct

SEQ ID NO: 1613985 - DNA, 15 bp, Homo sapiens
gtttgggaatttcta

SEQ ID NO: 1613986 - DNA, 15 bp, Homo sapiens
tttgggaatttctaa

SEQ ID NO: 1613987 - DNA, 15 bp, Homo sapiens
ttgggaatttctaat

SEQ ID NO: 1613988 - DNA, 15 bp, Homo sapiens
tgggaatttctaatt

SEQ ID NO: 1613989 - DNA, 15 bp, Homo sapiens
gggaatttctaattc

SEQ ID NO: 1613990 - DNA, 15 bp, Homo sapiens
ggaatttctaattct

SEQ ID NO: 1613991 - DNA, 15 bp, Homo sapiens
gaatttctaattctg

SEQ ID NO: 1613992 - DNA, 15 bp, Homo sapiens
aatttctaattctga

SEQ ID NO: 1613993 - DNA, 15 bp, Homo sapiens
atttctaattctgag

SEQ ID NO: 1613994 - DNA, 15 bp, Homo sapiens
tttctaattctgagt

SEQ ID NO: 1613995 - DNA, 15 bp, Homo sapiens
ttctaattctgagtg

SEQ ID NO: 1613996 - DNA, 15 bp, Homo sapiens
tctaattctgagtgt

SEQ ID NO: 1613997 - DNA, 15 bp, Homo sapiens
ctaattctgagtgtt

SEQ ID NO: 1613998 - DNA, 15 bp, Homo sapiens
taattctgagtgttt

SEQ ID NO: 1613999 - DNA, 15 bp, Homo sapiens
aattctgagtgtttt

SEQ ID NO: 1614000 - DNA, 15 bp, Homo sapiens
attctgagtgttttt

SEQ ID NO: 1614001 - DNA, 15 bp, Homo sapiens
ttctgagtgtttttt

SEQ ID NO: 1614002 - DNA, 15 bp, Homo sapiens
tctgagtgttttttg

SEQ ID NO: 1614003 - DNA, 15 bp, Homo sapiens
ctgagtgttttttgt

SEQ ID NO: 1614004 - DNA, 15 bp, Homo sapiens
tgagtgttttttgtt

SEQ ID NO: 1614005 - DNA, 15 bp, Homo sapiens
gagtgttttttgttg

SEQ ID NO: 1614006 - DNA, 15 bp, Homo sapiens
agtgttttttgttgt

SEQ ID NO: 1614007 - DNA, 15 bp, Homo sapiens
gtgttttttgttgtt

SEQ ID NO: 1614008 - DNA, 15 bp, Homo sapiens
tgttttttgttgttg

SEQ ID NO: 1614009 - DNA, 15 bp, Homo sapiens
gttttttgttgttgt

SEQ ID NO: 1614010 - DNA, 15 bp, Homo sapiens
gttgttgttgttttg

SEQ ID NO: 1614011 - DNA, 15 bp, Homo sapiens
ttgttgttgttttgt

SEQ ID NO: 1614012 - DNA, 15 bp, Homo sapiens
tgttgttgttttgtt

SEQ ID NO: 1614013 - DNA, 15 bp, Homo sapiens
gttgttgttttgttt

SEQ ID NO: 1614014 - DNA, 15 bp, Homo sapiens
ttgttgttttgtttt

SEQ ID NO: 1614015 - DNA, 15 bp, Homo sapiens
tgttgttttgttttg

SEQ ID NO: 1614016 - DNA, 15 bp, Homo sapiens
gttgttttgttttgt

SEQ ID NO: 1614017 - DNA, 15 bp, Homo sapiens
gttttgttttgttta

SEQ ID NO: 1614018 - DNA, 15 bp, Homo sapiens
ttttgttttgtttat

SEQ ID NO: 1614019 - DNA, 15 bp, Homo sapiens
tttgttttgtttatt

SEQ ID NO: 1614020 - DNA, 15 bp, Homo sapiens
ttgttttgtttattt

SEQ ID NO: 1614021 - DNA, 15 bp, Homo sapiens
tgttttgtttatttg

SEQ ID NO: 1614022 - DNA, 15 bp, Homo sapiens
gttttgtttatttgt

SEQ ID NO: 1614023 - DNA, 15 bp, Homo sapiens
ttttgtttatttgtt

SEQ ID NO: 1614024 - DNA, 15 bp, Homo sapiens
tgtttatttgttttc

SEQ ID NO: 1614025 - DNA, 15 bp, Homo sapiens
gtttatttgttttct

SEQ ID NO: 1614026 - DNA, 15 bp, Homo sapiens
tttatttgttttctg

SEQ ID NO: 1614027 - DNA, 15 bp, Homo sapiens
ttatttgttttctga

SEQ ID NO: 1614028 - DNA, 15 bp, Homo sapiens
tatttgttttctgag

SEQ ID NO: 1614029 - DNA, 15 bp, Homo sapiens
atttgttttctgaga

SEQ ID NO: 1614030 - DNA, 15 bp, Homo sapiens
tttgttttctgagac

SEQ ID NO: 1614031 - DNA, 15 bp, Homo sapiens
ttgttttctgagacg

SEQ ID NO: 1614032 - DNA, 15 bp, Homo sapiens
tgttttctgagacga

SEQ ID NO: 1614033 - DNA, 15 bp, Homo sapiens
gttttctgagacgag

SEQ ID NO: 1614034 - DNA, 15 bp, Homo sapiens
ttttctgagacgagt

SEQ ID NO: 1614035 - DNA, 15 bp, Homo sapiens
tttctgagacgagtc

SEQ ID NO: 1614036 - DNA, 15 bp, Homo sapiens
ttctgagacgagtct

SEQ ID NO: 1614037 - DNA, 15 bp, Homo sapiens
tctgagacgagtctc

SEQ ID NO: 1614038 - DNA, 15 bp, Homo sapiens
ctgagacgagtctcg

SEQ ID NO: 1614039 - DNA, 15 bp, Homo sapiens
tgagacgagtctcgc

SEQ ID NO: 1614040 - DNA, 15 bp, Homo sapiens
gagacgagtctcgct

SEQ ID NO: 1614041 - DNA, 15 bp, Homo sapiens
agacgagtctcgctc

SEQ ID NO: 1614042 - DNA, 15 bp, Homo sapiens
gacgagtctcgctct

SEQ ID NO: 1614043 - DNA, 15 bp, Homo sapiens
acgagtctcgctctt

SEQ ID NO: 1614044 - DNA, 15 bp, Homo sapiens
cgagtctcgctcttg

SEQ ID NO: 1614045 - DNA, 15 bp, Homo sapiens
gagtctcgctcttgt

SEQ ID NO: 1614046 - DNA, 15 bp, Homo sapiens
agtctcgctcttgtc

SEQ ID NO: 1614047 - DNA, 15 bp, Homo sapiens
gtctcgctcttgtcg

SEQ ID NO: 1614048 - DNA, 15 bp, Homo sapiens
tctcgctcttgtcgc

SEQ ID NO: 1614049 - DNA, 15 bp, Homo sapiens
ctcgctcttgtcgcc

SEQ ID NO: 1614050 - DNA, 15 bp, Homo sapiens
tcgctcttgtcgccc

SEQ ID NO: 1614051 - DNA, 15 bp, Homo sapiens
cgctcttgtcgccca

SEQ ID NO: 1614052 - DNA, 15 bp, Homo sapiens
gctcttgtcgcccag

SEQ ID NO: 1614053 - DNA, 15 bp, Homo sapiens
ctggagtgcaatgga

SEQ ID NO: 1614054 - DNA, 15 bp, Homo sapiens
tggagtgcaatggag

SEQ ID NO: 1614055 - DNA, 15 bp, Homo sapiens
ggagtgcaatggagt

SEQ ID NO: 1614056 - DNA, 15 bp, Homo sapiens
gagtgcaatggagtg

SEQ ID NO: 1614057 - DNA, 15 bp, Homo sapiens
agtgcaatggagtga

SEQ ID NO: 1614058 - DNA, 15 bp, Homo sapiens
gtgcaatggagtgat

SEQ ID NO: 1614059 - DNA, 15 bp, Homo sapiens
tgcaatggagtgatc

SEQ ID NO: 1614060 - DNA, 15 bp, Homo sapiens
gcaatggagtgatct

SEQ ID NO: 1614061 - DNA, 15 bp, Homo sapiens
caatggagtgatctt

SEQ ID NO: 1614062 - DNA, 15 bp, Homo sapiens
aatggagtgatcttg

SEQ ID NO: 1614063 - DNA, 15 bp, Homo sapiens
atggagtgatcttgg

SEQ ID NO: 1614064 - DNA, 15 bp, Homo sapiens
tggagtgatcttggc

SEQ ID NO: 1614065 - DNA, 15 bp, Homo sapiens
ggagtgatcttggct

SEQ ID NO: 1614066 - DNA, 15 bp, Homo sapiens
gagtgatcttggctc

SEQ ID NO: 1614067 - DNA, 15 bp, Homo sapiens
agtgatcttggctca

SEQ ID NO: 1614068 - DNA, 15 bp, Homo sapiens
acctccgcctcctgt

SEQ ID NO: 1614069 - DNA, 15 bp, Homo sapiens
cctccgcctcctgtg

SEQ ID NO: 1614070 - DNA, 15 bp, Homo sapiens
ctccgcctcctgtgt

SEQ ID NO: 1614071 - DNA, 15 bp, Homo sapiens
tccgcctcctgtgtt

SEQ ID NO: 1614072 - DNA, 15 bp, Homo sapiens
ccgcctcctgtgttc

SEQ ID NO: 1614073 - DNA, 15 bp, Homo sapiens
cgcctcctgtgttca

SEQ ID NO: 1614074 - DNA, 15 bp, Homo sapiens
gcctcctgtgttcaa

SEQ ID NO: 1614075 - DNA, 15 bp, Homo sapiens
cctcctgtgttcaag

SEQ ID NO: 1614076 - DNA, 15 bp, Homo sapiens
ctcctgtgttcaagt

SEQ ID NO: 1614077 - DNA, 15 bp, Homo sapiens
tcctgtgttcaagtg

SEQ ID NO: 1614078 - DNA, 15 bp, Homo sapiens
cctgtgttcaagtga

SEQ ID NO: 1614079 - DNA, 15 bp, Homo sapiens
ctgtgttcaagtgat

SEQ ID NO: 1614080 - DNA, 15 bp, Homo sapiens
tgtgttcaagtgatt

SEQ ID NO: 1614081 - DNA, 15 bp, Homo sapiens
gtgttcaagtgattc

SEQ ID NO: 1614082 - DNA, 15 bp, Homo sapiens
tgttcaagtgattct

SEQ ID NO: 1614083 - DNA, 15 bp, Homo sapiens
gattacaggcgccca

SEQ ID NO: 1614084 - DNA, 15 bp, Homo sapiens
attacaggcgcccat

SEQ ID NO: 1614085 - DNA, 15 bp, Homo sapiens
ttacaggcgcccatc

SEQ ID NO: 1614086 - DNA, 15 bp, Homo sapiens
tacaggcgcccatca

SEQ ID NO: 1614087 - DNA, 15 bp, Homo sapiens
acaggcgcccatcac

SEQ ID NO: 1614088 - DNA, 15 bp, Homo sapiens
caggcgcccatcacc

SEQ ID NO: 1614089 - DNA, 15 bp, Homo sapiens
aggcgcccatcacca

SEQ ID NO: 1614090 - DNA, 15 bp, Homo sapiens
ggcgcccatcaccat

SEQ ID NO: 1614091 - DNA, 15 bp, Homo sapiens
gcgcccatcaccatg

SEQ ID NO: 1614092 - DNA, 15 bp, Homo sapiens
cgcccatcaccatgc

SEQ ID NO: 1614093 - DNA, 15 bp, Homo sapiens
gcccatcaccatgcc

SEQ ID NO: 1614094 - DNA, 15 bp, Homo sapiens
cccatcaccatgccc

SEQ ID NO: 1614095 - DNA, 15 bp, Homo sapiens
ccatcaccatgccca

SEQ ID NO: 1614096 - DNA, 15 bp, Homo sapiens
catcaccatgcccac

SEQ ID NO: 1614097 - DNA, 15 bp, Homo sapiens
atcaccatgcccacc

SEQ ID NO: 1614098 - DNA, 15 bp, Homo sapiens
tcaccatgcccacct

SEQ ID NO: 1614099 - DNA, 15 bp, Homo sapiens
caccatgcccaccta

SEQ ID NO: 1614100 - DNA, 15 bp, Homo sapiens
accatgcccacctaa

SEQ ID NO: 1614101 - DNA, 15 bp, Homo sapiens
ccatgcccacctaat

SEQ ID NO: 1614102 - DNA, 15 bp, Homo sapiens
catgcccacctaatt

SEQ ID NO: 1614103 - DNA, 15 bp, Homo sapiens
atgcccacctaattt

SEQ ID NO: 1614104 - DNA, 15 bp, Homo sapiens
tgcccacctaatttt

SEQ ID NO: 1614105 - DNA, 15 bp, Homo sapiens
cccacctaatttttg

SEQ ID NO: 1614106 - DNA, 15 bp, Homo sapiens
ccacctaatttttgt

SEQ ID NO: 1614107 - DNA, 15 bp, Homo sapiens
cacctaatttttgta

SEQ ID NO: 1614108 - DNA, 15 bp, Homo sapiens
acctaatttttgtat

SEQ ID NO: 1614109 - DNA, 15 bp, Homo sapiens
ctaatttttgtattc

SEQ ID NO: 1614110 - DNA, 15 bp, Homo sapiens
taatttttgtattct

SEQ ID NO: 1614111 - DNA, 15 bp, Homo sapiens
aatttttgtattctt

SEQ ID NO: 1614112 - DNA, 15 bp, Homo sapiens
atttttgtattctta

SEQ ID NO: 1614113 - DNA, 15 bp, Homo sapiens
tttttgtattcttag

SEQ ID NO: 1614114 - DNA, 15 bp, Homo sapiens
ttttgtattcttagt

SEQ ID NO: 1614115 - DNA, 15 bp, Homo sapiens
tttgtattcttagta

SEQ ID NO: 1614116 - DNA, 15 bp, Homo sapiens
ttgtattcttagtag

SEQ ID NO: 1614117 - DNA, 15 bp, Homo sapiens
tgtattcttagtaga

SEQ ID NO: 1614118 - DNA, 15 bp, Homo sapiens
gtattcttagtagag

SEQ ID NO: 1614119 - DNA, 15 bp, Homo sapiens
tattcttagtagaga

SEQ ID NO: 1614120 - DNA, 15 bp, Homo sapiens
attcttagtagagac

SEQ ID NO: 1614121 - DNA, 15 bp, Homo sapiens
ttcttagtagagacg

SEQ ID NO: 1614122 - DNA, 15 bp, Homo sapiens
tcttagtagagacgg

SEQ ID NO: 1614123 - DNA, 15 bp, Homo sapiens
cttagtagagacggg

SEQ ID NO: 1614124 - DNA, 15 bp, Homo sapiens
acggggtttcaccac

SEQ ID NO: 1614125 - DNA, 15 bp, Homo sapiens
cggggtttcaccaca

SEQ ID NO: 1614126 - DNA, 15 bp, Homo sapiens
tttcaccacattggc

SEQ ID NO: 1614127 - DNA, 15 bp, Homo sapiens
ttcaccacattggcc

SEQ ID NO: 1614128 - DNA, 15 bp, Homo sapiens
tcaccacattggcca

SEQ ID NO: 1614129 - DNA, 15 bp, Homo sapiens
caccacattggccag

SEQ ID NO: 1614130 - DNA, 15 bp, Homo sapiens
accacattggccagg

SEQ ID NO: 1614131 - DNA, 15 bp, Homo sapiens
ccacattggccaggc

SEQ ID NO: 1614132 - DNA, 15 bp, Homo sapiens
ccgccttggcctcct

SEQ ID NO: 1614133 - DNA, 15 bp, Homo sapiens
cgccttggcctccta

SEQ ID NO: 1614134 - DNA, 15 bp, Homo sapiens
gccttggcctcctaa

SEQ ID NO: 1614135 - DNA, 15 bp, Homo sapiens
ccttggcctcctaaa

SEQ ID NO: 1614136 - DNA, 15 bp, Homo sapiens
cttggcctcctaaag

SEQ ID NO: 1614137 - DNA, 15 bp, Homo sapiens
ttggcctcctaaagt

SEQ ID NO: 1614138 - DNA, 15 bp, Homo sapiens
tggcctcctaaagtg

SEQ ID NO: 1614139 - DNA, 15 bp, Homo sapiens
agcagaatcaggcaa

SEQ ID NO: 1614140 - DNA, 15 bp, Homo sapiens
gcagaatcaggcaag

SEQ ID NO: 1614141 - DNA, 15 bp, Homo sapiens
cagaatcaggcaagt

SEQ ID NO: 1614142 - DNA, 15 bp, Homo sapiens
agaatcaggcaagta

SEQ ID NO: 1614143 - DNA, 15 bp, Homo sapiens
gaatcaggcaagtag

SEQ ID NO: 1614144 - DNA, 15 bp, Homo sapiens
aatcaggcaagtagg

SEQ ID NO: 1614145 - DNA, 15 bp, Homo sapiens
atcaggcaagtaggg

SEQ ID NO: 1614146 - DNA, 15 bp, Homo sapiens
tcaggcaagtaggga

SEQ ID NO: 1614147 - DNA, 15 bp, Homo sapiens
caggcaagtagggat

SEQ ID NO: 1614148 - DNA, 15 bp, Homo sapiens
aggcaagtagggatt

SEQ ID NO: 1614149 - DNA, 15 bp, Homo sapiens
ggcaagtagggattt

SEQ ID NO: 1614150 - DNA, 15 bp, Homo sapiens
gcaagtagggatttg

SEQ ID NO: 1614151 - DNA, 15 bp, Homo sapiens
caagtagggatttgg

SEQ ID NO: 1614152 - DNA, 15 bp, Homo sapiens
aagtagggatttggt

SEQ ID NO: 1614153 - DNA, 15 bp, Homo sapiens
agtagggatttggtt

SEQ ID NO: 1614154 - DNA, 15 bp, Homo sapiens
gtagggatttggttg

SEQ ID NO: 1614155 - DNA, 15 bp, Homo sapiens
tagggatttggttgc

SEQ ID NO: 1614156 - DNA, 15 bp, Homo sapiens
agggatttggttgcc

SEQ ID NO: 1614157 - DNA, 15 bp, Homo sapiens
gggatttggttgcca

SEQ ID NO: 1614158 - DNA, 15 bp, Homo sapiens
ggatttggttgccat

SEQ ID NO: 1614159 - DNA, 15 bp, Homo sapiens
gatttggttgccatg

SEQ ID NO: 1614160 - DNA, 15 bp, Homo sapiens
atttggttgccatga

SEQ ID NO: 1614161 - DNA, 15 bp, Homo sapiens
tttggttgccatgat

SEQ ID NO: 1614162 - DNA, 15 bp, Homo sapiens
ttggttgccatgatc

SEQ ID NO: 1614163 - DNA, 15 bp, Homo sapiens
tggttgccatgatcc

SEQ ID NO: 1614164 - DNA, 15 bp, Homo sapiens
ggttgccatgatccc

SEQ ID NO: 1614165 - DNA, 15 bp, Homo sapiens
gttgccatgatccca

SEQ ID NO: 1614166 - DNA, 15 bp, Homo sapiens
ttgccatgatcccat

SEQ ID NO: 1614167 - DNA, 15 bp, Homo sapiens
tgccatgatcccatt

SEQ ID NO: 1614168 - DNA, 15 bp, Homo sapiens
gccatgatcccattt

SEQ ID NO: 1614169 - DNA, 15 bp, Homo sapiens
ccatgatcccatttt

SEQ ID NO: 1614170 - DNA, 15 bp, Homo sapiens
catgatcccatttta

SEQ ID NO: 1614171 - DNA, 15 bp, Homo sapiens
atgatcccattttaa

SEQ ID NO: 1614172 - DNA, 15 bp, Homo sapiens
tgatcccattttaaa

SEQ ID NO: 1614173 - DNA, 15 bp, Homo sapiens
gatcccattttaaaa

SEQ ID NO: 1614174 - DNA, 15 bp, Homo sapiens
atcccattttaaaaa

SEQ ID NO: 1614175 - DNA, 15 bp, Homo sapiens
tcccattttaaaaat

SEQ ID NO: 1614176 - DNA, 15 bp, Homo sapiens
cccattttaaaaatg

SEQ ID NO: 1614177 - DNA, 15 bp, Homo sapiens
ccattttaaaaatga

SEQ ID NO: 1614178 - DNA, 15 bp, Homo sapiens
cattttaaaaatgaa

SEQ ID NO: 1614179 - DNA, 15 bp, Homo sapiens
attttaaaaatgaag

SEQ ID NO: 1614180 - DNA, 15 bp, Homo sapiens
ttttaaaaatgaaga

SEQ ID NO: 1614181 - DNA, 15 bp, Homo sapiens
tttaaaaatgaagat

SEQ ID NO: 1614182 - DNA, 15 bp, Homo sapiens
ttaaaaatgaagatg

SEQ ID NO: 1614183 - DNA, 15 bp, Homo sapiens
taaaaatgaagatgc

SEQ ID NO: 1614184 - DNA, 15 bp, Homo sapiens
aaaaatgaagatgca

SEQ ID NO: 1614185 - DNA, 15 bp, Homo sapiens
aaaatgaagatgcag

SEQ ID NO: 1614186 - DNA, 15 bp, Homo sapiens
aaatgaagatgcaga

SEQ ID NO: 1614187 - DNA, 15 bp, Homo sapiens
aatgaagatgcagaa

SEQ ID NO: 1614188 - DNA, 15 bp, Homo sapiens
atgaagatgcagaaa

SEQ ID NO: 1614189 - DNA, 15 bp, Homo sapiens
tgaagatgcagaaac

SEQ ID NO: 1614190 - DNA, 15 bp, Homo sapiens
gaagatgcagaaact

SEQ ID NO: 1614191 - DNA, 15 bp, Homo sapiens
aagatgcagaaactt

SEQ ID NO: 1614192 - DNA, 15 bp, Homo sapiens
agatgcagaaactta

SEQ ID NO: 1614193 - DNA, 15 bp, Homo sapiens
gatgcagaaacttaa

SEQ ID NO: 1614194 - DNA, 15 bp, Homo sapiens
atgcagaaacttaat

SEQ ID NO: 1614195 - DNA, 15 bp, Homo sapiens
tgcagaaacttaatg

SEQ ID NO: 1614196 - DNA, 15 bp, Homo sapiens
gcagaaacttaatga

SEQ ID NO: 1614197 - DNA, 15 bp, Homo sapiens
cagaaacttaatgag

SEQ ID NO: 1614198 - DNA, 15 bp, Homo sapiens
agaaacttaatgaga

SEQ ID NO: 1614199 - DNA, 15 bp, Homo sapiens
gaaacttaatgagag

SEQ ID NO: 1614200 - DNA, 15 bp, Homo sapiens
aaacttaatgagagt

SEQ ID NO: 1614201 - DNA, 15 bp, Homo sapiens
aacttaatgagagtc

SEQ ID NO: 1614202 - DNA, 15 bp, Homo sapiens
acttaatgagagtca

SEQ ID NO: 1614203 - DNA, 15 bp, Homo sapiens
cttaatgagagtcag

SEQ ID NO: 1614204 - DNA, 15 bp, Homo sapiens
ttaatgagagtcagt

SEQ ID NO: 1614205 - DNA, 15 bp, Homo sapiens
taatgagagtcagtg

SEQ ID NO: 1614206 - DNA, 15 bp, Homo sapiens
aatgagagtcagtga

SEQ ID NO: 1614207 - DNA, 15 bp, Homo sapiens
atgagagtcagtgac

SEQ ID NO: 1614208 - DNA, 15 bp, Homo sapiens
tgagagtcagtgaca

SEQ ID NO: 1614209 - DNA, 15 bp, Homo sapiens
gagagtcagtgacag

SEQ ID NO: 1614210 - DNA, 15 bp, Homo sapiens
agagtcagtgacagg

SEQ ID NO: 1614211 - DNA, 15 bp, Homo sapiens
gagtcagtgacaggt

SEQ ID NO: 1614212 - DNA, 15 bp, Homo sapiens
agtcagtgacaggtt

SEQ ID NO: 1614213 - DNA, 15 bp, Homo sapiens
gtcagtgacaggttc

SEQ ID NO: 1614214 - DNA, 15 bp, Homo sapiens
tcagtgacaggttcc

SEQ ID NO: 1614215 - DNA, 15 bp, Homo sapiens
cagtgacaggttcct

SEQ ID NO: 1614216 - DNA, 15 bp, Homo sapiens
agtgacaggttcctt

SEQ ID NO: 1614217 - DNA, 15 bp, Homo sapiens
gtgacaggttccttg

SEQ ID NO: 1614218 - DNA, 15 bp, Homo sapiens
tgacaggttccttgt

SEQ ID NO: 1614219 - DNA, 15 bp, Homo sapiens
gacaggttccttgtg

SEQ ID NO: 1614220 - DNA, 15 bp, Homo sapiens
acaggttccttgtga

SEQ ID NO: 1614221 - DNA, 15 bp, Homo sapiens
caggttccttgtgaa

SEQ ID NO: 1614222 - DNA, 15 bp, Homo sapiens
aggttccttgtgaac

SEQ ID NO: 1614223 - DNA, 15 bp, Homo sapiens
ggttccttgtgaacc

SEQ ID NO: 1614224 - DNA, 15 bp, Homo sapiens
gttccttgtgaacca

SEQ ID NO: 1614225 - DNA, 15 bp, Homo sapiens
ttccttgtgaaccag

SEQ ID NO: 1614226 - DNA, 15 bp, Homo sapiens
tccttgtgaaccagc

SEQ ID NO: 1614227 - DNA, 15 bp, Homo sapiens
ccttgtgaaccagct

SEQ ID NO: 1614228 - DNA, 15 bp, Homo sapiens
cttgtgaaccagcta

SEQ ID NO: 1614229 - DNA, 15 bp, Homo sapiens
ttgtgaaccagctag

SEQ ID NO: 1614230 - DNA, 15 bp, Homo sapiens
tgtgaaccagctaga

SEQ ID NO: 1614231 - DNA, 15 bp, Homo sapiens
gtgaaccagctagaa

SEQ ID NO: 1614232 - DNA, 15 bp, Homo sapiens
tgaaccagctagaaa

SEQ ID NO: 1614233 - DNA, 15 bp, Homo sapiens
gaaccagctagaaag

SEQ ID NO: 1614234 - DNA, 15 bp, Homo sapiens
aaccagctagaaagt

SEQ ID NO: 1614235 - DNA, 15 bp, Homo sapiens
accagctagaaagtg

SEQ ID NO: 1614236 - DNA, 15 bp, Homo sapiens
ccagctagaaagtgg

SEQ ID NO: 1614237 - DNA, 15 bp, Homo sapiens
cagctagaaagtggc

SEQ ID NO: 1614238 - DNA, 15 bp, Homo sapiens
agctagaaagtggca

SEQ ID NO: 1614239 - DNA, 15 bp, Homo sapiens
gctagaaagtggcag

SEQ ID NO: 1614240 - DNA, 15 bp, Homo sapiens
ctagaaagtggcaga

SEQ ID NO: 1614241 - DNA, 15 bp, Homo sapiens
tagaaagtggcagag

SEQ ID NO: 1614242 - DNA, 15 bp, Homo sapiens
agaaagtggcagagc

SEQ ID NO: 1614243 - DNA, 15 bp, Homo sapiens
gaaagtggcagagct

SEQ ID NO: 1614244 - DNA, 15 bp, Homo sapiens
aaagtggcagagctg

SEQ ID NO: 1614245 - DNA, 15 bp, Homo sapiens
aagtggcagagctgg

SEQ ID NO: 1614246 - DNA, 15 bp, Homo sapiens
agtggcagagctggc

SEQ ID NO: 1614247 - DNA, 15 bp, Homo sapiens
gtggcagagctggcc

SEQ ID NO: 1614248 - DNA, 15 bp, Homo sapiens
tggcagagctggcca

SEQ ID NO: 1614249 - DNA, 15 bp, Homo sapiens
ggcagagctggccag

SEQ ID NO: 1614250 - DNA, 15 bp, Homo sapiens
gcagagctggccagg

SEQ ID NO: 1614251 - DNA, 15 bp, Homo sapiens
cagagctggccaggt

SEQ ID NO: 1614252 - DNA, 15 bp, Homo sapiens
agagctggccaggtg

SEQ ID NO: 1614253 - DNA, 15 bp, Homo sapiens
gagctggccaggtgc

SEQ ID NO: 1614254 - DNA, 15 bp, Homo sapiens
agctggccaggtgcg

SEQ ID NO: 1614255 - DNA, 15 bp, Homo sapiens
gctggccaggtgcgg

SEQ ID NO: 1614256 - DNA, 15 bp, Homo sapiens
ggccaggtgcggtga

SEQ ID NO: 1614257 - DNA, 15 bp, Homo sapiens
gccaggtgcggtgac

SEQ ID NO: 1614258 - DNA, 15 bp, Homo sapiens
ccaggtgcggtgact

SEQ ID NO: 1614259 - DNA, 15 bp, Homo sapiens
caggtgcggtgactc

SEQ ID NO: 1614260 - DNA, 15 bp, Homo sapiens
aggtgcggtgactca

SEQ ID NO: 1614261 - DNA, 15 bp, Homo sapiens
ggtgcggtgactcaa

SEQ ID NO: 1614262 - DNA, 15 bp, Homo sapiens
gtgcggtgactcaag

SEQ ID NO: 1614263 - DNA, 15 bp, Homo sapiens
tgcggtgactcaagc

SEQ ID NO: 1614264 - DNA, 15 bp, Homo sapiens
gcggtgactcaagcc

SEQ ID NO: 1614265 - DNA, 15 bp, Homo sapiens
cggtgactcaagcct

SEQ ID NO: 1614266 - DNA, 15 bp, Homo sapiens
ggtgactcaagcctg

SEQ ID NO: 1614267 - DNA, 15 bp, Homo sapiens
gtgactcaagcctgt

SEQ ID NO: 1614268 - DNA, 15 bp, Homo sapiens
tgactcaagcctgta

SEQ ID NO: 1614269 - DNA, 15 bp, Homo sapiens
gactcaagcctgtaa

SEQ ID NO: 1614270 - DNA, 15 bp, Homo sapiens
actcaagcctgtaat

SEQ ID NO: 1614271 - DNA, 15 bp, Homo sapiens
caagcctgtaatcct

SEQ ID NO: 1614272 - DNA, 15 bp, Homo sapiens
aagcctgtaatccta

SEQ ID NO: 1614273 - DNA, 15 bp, Homo sapiens
agcctgtaatcctag

SEQ ID NO: 1614274 - DNA, 15 bp, Homo sapiens
taatcctagcacttc

SEQ ID NO: 1614275 - DNA, 15 bp, Homo sapiens
aatcctagcacttcg

SEQ ID NO: 1614276 - DNA, 15 bp, Homo sapiens
atcctagcacttcgg

SEQ ID NO: 1614277 - DNA, 15 bp, Homo sapiens
tcctagcacttcggg

SEQ ID NO: 1614278 - DNA, 15 bp, Homo sapiens
cctagcacttcggga

SEQ ID NO: 1614279 - DNA, 15 bp, Homo sapiens
ctagcacttcgggag

SEQ ID NO: 1614280 - DNA, 15 bp, Homo sapiens
tagcacttcgggaga

SEQ ID NO: 1614281 - DNA, 15 bp, Homo sapiens
agcacttcgggagac

SEQ ID NO: 1614282 - DNA, 15 bp, Homo sapiens
gcacttcgggagacc

SEQ ID NO: 1614283 - DNA, 15 bp, Homo sapiens
cacttcgggagacct

SEQ ID NO: 1614284 - DNA, 15 bp, Homo sapiens
acttcgggagaccta

SEQ ID NO: 1614285 - DNA, 15 bp, Homo sapiens
cttcgggagacctag

SEQ ID NO: 1614286 - DNA, 15 bp, Homo sapiens
ttcgggagacctagg

SEQ ID NO: 1614287 - DNA, 15 bp, Homo sapiens
tcgggagacctaggc

SEQ ID NO: 1614288 - DNA, 15 bp, Homo sapiens
cgggagacctaggca

SEQ ID NO: 1614289 - DNA, 15 bp, Homo sapiens
gggagacctaggcag

SEQ ID NO: 1614290 - DNA, 15 bp, Homo sapiens
ggagacctaggcagg

SEQ ID NO: 1614291 - DNA, 15 bp, Homo sapiens
gagacctaggcaggt

SEQ ID NO: 1614292 - DNA, 15 bp, Homo sapiens
agacctaggcaggtg

SEQ ID NO: 1614293 - DNA, 15 bp, Homo sapiens
gacctaggcaggtgg

SEQ ID NO: 1614294 - DNA, 15 bp, Homo sapiens
acctaggcaggtgga

SEQ ID NO: 1614295 - DNA, 15 bp, Homo sapiens
cctaggcaggtggat

SEQ ID NO: 1614296 - DNA, 15 bp, Homo sapiens
ctaggcaggtggatc

SEQ ID NO: 1614297 - DNA, 15 bp, Homo sapiens
taggcaggtggatca

SEQ ID NO: 1614298 - DNA, 15 bp, Homo sapiens
acatggtgaaacccg

SEQ ID NO: 1614299 - DNA, 15 bp, Homo sapiens
catggtgaaacccgg

SEQ ID NO: 1614300 - DNA, 15 bp, Homo sapiens
atggtgaaacccggt

SEQ ID NO: 1614301 - DNA, 15 bp, Homo sapiens
tggtgaaacccggtc

SEQ ID NO: 1614302 - DNA, 15 bp, Homo sapiens
cccggtctctactaa

SEQ ID NO: 1614303 - DNA, 15 bp, Homo sapiens
ccggtctctactaaa

SEQ ID NO: 1614304 - DNA, 15 bp, Homo sapiens
cggtctctactaaaa

SEQ ID NO: 1614305 - DNA, 15 bp, Homo sapiens
taaaaatacaaaaac

SEQ ID NO: 1614306 - DNA, 15 bp, Homo sapiens
tacaaaaactagctg

SEQ ID NO: 1614307 - DNA, 15 bp, Homo sapiens
acaaaaactagctga

SEQ ID NO: 1614308 - DNA, 15 bp, Homo sapiens
caaaaactagctgag

SEQ ID NO: 1614309 - DNA, 15 bp, Homo sapiens
aaaaactagctgagt

SEQ ID NO: 1614310 - DNA, 15 bp, Homo sapiens
aaaactagctgagtg

SEQ ID NO: 1614311 - DNA, 15 bp, Homo sapiens
aaactagctgagtgt

SEQ ID NO: 1614312 - DNA, 15 bp, Homo sapiens
aactagctgagtgtg

SEQ ID NO: 1614313 - DNA, 15 bp, Homo sapiens
actagctgagtgtgg

SEQ ID NO: 1614314 - DNA, 15 bp, Homo sapiens
ctagctgagtgtggt

SEQ ID NO: 1614315 - DNA, 15 bp, Homo sapiens
tagctgagtgtggtg

SEQ ID NO: 1614316 - DNA, 15 bp, Homo sapiens
agctgagtgtggtgg

SEQ ID NO: 1614317 - DNA, 15 bp, Homo sapiens
gctgagtgtggtggt

SEQ ID NO: 1614318 - DNA, 15 bp, Homo sapiens
ctgagtgtggtggtg

SEQ ID NO: 1614319 - DNA, 15 bp, Homo sapiens
tgagtgtggtggtgg

SEQ ID NO: 1614320 - DNA, 15 bp, Homo sapiens
gagtgtggtggtggg

SEQ ID NO: 1614321 - DNA, 15 bp, Homo sapiens
agtgtggtggtgggt

SEQ ID NO: 1614322 - DNA, 15 bp, Homo sapiens
gtgtggtggtgggtg

SEQ ID NO: 1614323 - DNA, 15 bp, Homo sapiens
tgtggtggtgggtgc

SEQ ID NO: 1614324 - DNA, 15 bp, Homo sapiens
gtggtggtgggtgcc

SEQ ID NO: 1614325 - DNA, 15 bp, Homo sapiens
tggtggtgggtgcct

SEQ ID NO: 1614326 - DNA, 15 bp, Homo sapiens
ggtggtgggtgcctc

SEQ ID NO: 1614327 - DNA, 15 bp, Homo sapiens
gtggtgggtgcctct

SEQ ID NO: 1614328 - DNA, 15 bp, Homo sapiens
tggtgggtgcctcta

SEQ ID NO: 1614329 - DNA, 15 bp, Homo sapiens
ggtgggtgcctctaa

SEQ ID NO: 1614330 - DNA, 15 bp, Homo sapiens
gtgggtgcctctaat

SEQ ID NO: 1614331 - DNA, 15 bp, Homo sapiens
tgggtgcctctaatc

SEQ ID NO: 1614332 - DNA, 15 bp, Homo sapiens
gggtgcctctaatcc

SEQ ID NO: 1614333 - DNA, 15 bp, Homo sapiens
ggtgcctctaatccc

SEQ ID NO: 1614334 - DNA, 15 bp, Homo sapiens
gtgcctctaatccca

SEQ ID NO: 1614335 - DNA, 15 bp, Homo sapiens
tgcctctaatcccag

SEQ ID NO: 1614336 - DNA, 15 bp, Homo sapiens
gcctctaatcccagc

SEQ ID NO: 1614337 - DNA, 15 bp, Homo sapiens
cctctaatcccagct

SEQ ID NO: 1614338 - DNA, 15 bp, Homo sapiens
ctctaatcccagcta

SEQ ID NO: 1614339 - DNA, 15 bp, Homo sapiens
tctaatcccagctac

SEQ ID NO: 1614340 - DNA, 15 bp, Homo sapiens
ctaatcccagctact

SEQ ID NO: 1614341 - DNA, 15 bp, Homo sapiens
ggcaggagaatcgcc

SEQ ID NO: 1614342 - DNA, 15 bp, Homo sapiens
gcaggagaatcgcct

SEQ ID NO: 1614343 - DNA, 15 bp, Homo sapiens
caggagaatcgcctg

SEQ ID NO: 1614344 - DNA, 15 bp, Homo sapiens
aatcgcctgaacccc

SEQ ID NO: 1614345 - DNA, 15 bp, Homo sapiens
atcgcctgaacccca

SEQ ID NO: 1614346 - DNA, 15 bp, Homo sapiens
tcgcctgaaccccac

SEQ ID NO: 1614347 - DNA, 15 bp, Homo sapiens
cgcctgaaccccaca

SEQ ID NO: 1614348 - DNA, 15 bp, Homo sapiens
gcctgaaccccacag

SEQ ID NO: 1614349 - DNA, 15 bp, Homo sapiens
cctgaaccccacagg

SEQ ID NO: 1614350 - DNA, 15 bp, Homo sapiens
ctgaaccccacaggc

SEQ ID NO: 1614351 - DNA, 15 bp, Homo sapiens
tgaaccccacaggca

SEQ ID NO: 1614352 - DNA, 15 bp, Homo sapiens
gaaccccacaggcag

SEQ ID NO: 1614353 - DNA, 15 bp, Homo sapiens
aaccccacaggcaga

SEQ ID NO: 1614354 - DNA, 15 bp, Homo sapiens
accccacaggcagag

SEQ ID NO: 1614355 - DNA, 15 bp, Homo sapiens
ccccacaggcagagg

SEQ ID NO: 1614356 - DNA, 15 bp, Homo sapiens
cccacaggcagaggt

SEQ ID NO: 1614357 - DNA, 15 bp, Homo sapiens
ccacaggcagaggtt

SEQ ID NO: 1614358 - DNA, 15 bp, Homo sapiens
cacaggcagaggttg

SEQ ID NO: 1614359 - DNA, 15 bp, Homo sapiens
acaggcagaggttgc

SEQ ID NO: 1614360 - DNA, 15 bp, Homo sapiens
caggcagaggttgca

SEQ ID NO: 1614361 - DNA, 15 bp, Homo sapiens
agccaagatcgtgct

SEQ ID NO: 1614362 - DNA, 15 bp, Homo sapiens
gccaagatcgtgcta

SEQ ID NO: 1614363 - DNA, 15 bp, Homo sapiens
ccaagatcgtgctac

SEQ ID NO: 1614364 - DNA, 15 bp, Homo sapiens
caagatcgtgctact

SEQ ID NO: 1614365 - DNA, 15 bp, Homo sapiens
aagatcgtgctactg

SEQ ID NO: 1614366 - DNA, 15 bp, Homo sapiens
agatcgtgctactgt

SEQ ID NO: 1614367 - DNA, 15 bp, Homo sapiens
gatcgtgctactgta

SEQ ID NO: 1614368 - DNA, 15 bp, Homo sapiens
atcgtgctactgtac

SEQ ID NO: 1614369 - DNA, 15 bp, Homo sapiens
tcgtgctactgtact

SEQ ID NO: 1614370 - DNA, 15 bp, Homo sapiens
cgtgctactgtactc

SEQ ID NO: 1614371 - DNA, 15 bp, Homo sapiens
gtgctactgtactcc

SEQ ID NO: 1614372 - DNA, 15 bp, Homo sapiens
tgctactgtactcca

SEQ ID NO: 1614373 - DNA, 15 bp, Homo sapiens
gctactgtactccag

SEQ ID NO: 1614374 - DNA, 15 bp, Homo sapiens
ctactgtactccagc

SEQ ID NO: 1614375 - DNA, 15 bp, Homo sapiens
tactgtactccagcc

SEQ ID NO: 1614376 - DNA, 15 bp, Homo sapiens
ctgggcaaaagagca

SEQ ID NO: 1614377 - DNA, 15 bp, Homo sapiens
tgggcaaaagagcaa

SEQ ID NO: 1614378 - DNA, 15 bp, Homo sapiens
gggcaaaagagcaaa

SEQ ID NO: 1614379 - DNA, 15 bp, Homo sapiens
ggcaaaagagcaaaa

SEQ ID NO: 1614380 - DNA, 15 bp, Homo sapiens
gcaaaagagcaaaac

SEQ ID NO: 1614381 - DNA, 15 bp, Homo sapiens
caaaagagcaaaact

SEQ ID NO: 1614382 - DNA, 15 bp, Homo sapiens
aaaagagcaaaactc

SEQ ID NO: 1614383 - DNA, 15 bp, Homo sapiens
aaagagcaaaactcc

SEQ ID NO: 1614384 - DNA, 15 bp, Homo sapiens
atctcaaaataaaaa

SEQ ID NO: 1614385 - DNA, 15 bp, Homo sapiens
tctcaaaataaaaat

SEQ ID NO: 1614386 - DNA, 15 bp, Homo sapiens
ctcaaaataaaaata

SEQ ID NO: 1614387 - DNA, 15 bp, Homo sapiens
tcaaaataaaaataa

SEQ ID NO: 1614388 - DNA, 15 bp, Homo sapiens
aataaaaataaaaaa

SEQ ID NO: 1614389 - DNA, 15 bp, Homo sapiens
ataaaaataaaaaat

SEQ ID NO: 1614390 - DNA, 15 bp, Homo sapiens
taaaaataaaaaata

SEQ ID NO: 1614391 - DNA, 15 bp, Homo sapiens
aaaaaataaaaagcc

SEQ ID NO: 1614392 - DNA, 15 bp, Homo sapiens
aaaaataaaaagcca

SEQ ID NO: 1614393 - DNA, 15 bp, Homo sapiens
aaaataaaaagccag

SEQ ID NO: 1614394 - DNA, 15 bp, Homo sapiens
aaataaaaagccagg

SEQ ID NO: 1614395 - DNA, 15 bp, Homo sapiens
ataaaaagccaggtg

SEQ ID NO: 1614396 - DNA, 15 bp, Homo sapiens
taaaaagccaggtgc

SEQ ID NO: 1614397 - DNA, 15 bp, Homo sapiens
aaaaagccaggtgca

SEQ ID NO: 1614398 - DNA, 15 bp, Homo sapiens
aaaagccaggtgcag

SEQ ID NO: 1614399 - DNA, 15 bp, Homo sapiens
aaagccaggtgcagt

SEQ ID NO: 1614400 - DNA, 15 bp, Homo sapiens
aagccaggtgcagtc

SEQ ID NO: 1614401 - DNA, 15 bp, Homo sapiens
agccaggtgcagtcg

SEQ ID NO: 1614402 - DNA, 15 bp, Homo sapiens
gccaggtgcagtcgc

SEQ ID NO: 1614403 - DNA, 15 bp, Homo sapiens
ccaggtgcagtcgct

SEQ ID NO: 1614404 - DNA, 15 bp, Homo sapiens
caggtgcagtcgctc

SEQ ID NO: 1614405 - DNA, 15 bp, Homo sapiens
aggtgcagtcgctca

SEQ ID NO: 1614406 - DNA, 15 bp, Homo sapiens
ggtgcagtcgctcac

SEQ ID NO: 1614407 - DNA, 15 bp, Homo sapiens
gtgcagtcgctcacg

SEQ ID NO: 1614408 - DNA, 15 bp, Homo sapiens
tgcagtcgctcacgc

SEQ ID NO: 1614409 - DNA, 15 bp, Homo sapiens
gcagtcgctcacgcc

SEQ ID NO: 1614410 - DNA, 15 bp, Homo sapiens
cagtcgctcacgcct

SEQ ID NO: 1614411 - DNA, 15 bp, Homo sapiens
agtcgctcacgcctg

SEQ ID NO: 1614412 - DNA, 15 bp, Homo sapiens
gtcgctcacgcctgt

SEQ ID NO: 1614413 - DNA, 15 bp, Homo sapiens
tcgctcacgcctgta

SEQ ID NO: 1614414 - DNA, 15 bp, Homo sapiens
cgctcacgcctgtaa

SEQ ID NO: 1614415 - DNA, 15 bp, Homo sapiens
ggcgggcggatcaca

SEQ ID NO: 1614416 - DNA, 15 bp, Homo sapiens
gcgggcggatcacaa

SEQ ID NO: 1614417 - DNA, 15 bp, Homo sapiens
cgggcggatcacaag

SEQ ID NO: 1614418 - DNA, 15 bp, Homo sapiens
gggcggatcacaaga

SEQ ID NO: 1614419 - DNA, 15 bp, Homo sapiens
ggcggatcacaagat

SEQ ID NO: 1614420 - DNA, 15 bp, Homo sapiens
gcggatcacaagatc

SEQ ID NO: 1614421 - DNA, 15 bp, Homo sapiens
cggatcacaagatca

SEQ ID NO: 1614422 - DNA, 15 bp, Homo sapiens
ggatcacaagatcag

SEQ ID NO: 1614423 - DNA, 15 bp, Homo sapiens
gatcacaagatcagg

SEQ ID NO: 1614424 - DNA, 15 bp, Homo sapiens
atcacaagatcagga

SEQ ID NO: 1614425 - DNA, 15 bp, Homo sapiens
tcacaagatcaggag

SEQ ID NO: 1614426 - DNA, 15 bp, Homo sapiens
cacaagatcaggaga

SEQ ID NO: 1614427 - DNA, 15 bp, Homo sapiens
acaagatcaggagat

SEQ ID NO: 1614428 - DNA, 15 bp, Homo sapiens
caagatcaggagatc

SEQ ID NO: 1614429 - DNA, 15 bp, Homo sapiens
aagatcaggagatcg

SEQ ID NO: 1614430 - DNA, 15 bp, Homo sapiens
agatcaggagatcga

SEQ ID NO: 1614431 - DNA, 15 bp, Homo sapiens
gatcaggagatcgag

SEQ ID NO: 1614432 - DNA, 15 bp, Homo sapiens
atcaggagatcgaga

SEQ ID NO: 1614433 - DNA, 15 bp, Homo sapiens
aaaaatacaaaaaag

SEQ ID NO: 1614434 - DNA, 15 bp, Homo sapiens
aaaatacaaaaaagt

SEQ ID NO: 1614435 - DNA, 15 bp, Homo sapiens
aaatacaaaaaagta

SEQ ID NO: 1614436 - DNA, 15 bp, Homo sapiens
aatacaaaaaagtag

SEQ ID NO: 1614437 - DNA, 15 bp, Homo sapiens
atacaaaaaagtagc

SEQ ID NO: 1614438 - DNA, 15 bp, Homo sapiens
tacaaaaaagtagct

SEQ ID NO: 1614439 - DNA, 15 bp, Homo sapiens
acaaaaaagtagctg

SEQ ID NO: 1614440 - DNA, 15 bp, Homo sapiens
caaaaaagtagctgg

SEQ ID NO: 1614441 - DNA, 15 bp, Homo sapiens
aaaaaagtagctggg

SEQ ID NO: 1614442 - DNA, 15 bp, Homo sapiens
aaaaagtagctgggc

SEQ ID NO: 1614443 - DNA, 15 bp, Homo sapiens
aaaagtagctgggca

SEQ ID NO: 1614444 - DNA, 15 bp, Homo sapiens
aaagtagctgggcat

SEQ ID NO: 1614445 - DNA, 15 bp, Homo sapiens
aagtagctgggcatg

SEQ ID NO: 1614446 - DNA, 15 bp, Homo sapiens
agtagctgggcatgg

SEQ ID NO: 1614447 - DNA, 15 bp, Homo sapiens
ctgggcatggtggcg

SEQ ID NO: 1614448 - DNA, 15 bp, Homo sapiens
tgggcatggtggcgg

SEQ ID NO: 1614449 - DNA, 15 bp, Homo sapiens
gggcatggtggcggg

SEQ ID NO: 1614450 - DNA, 15 bp, Homo sapiens
aatggcgtgaaccca

SEQ ID NO: 1614451 - DNA, 15 bp, Homo sapiens
atggcgtgaacccag

SEQ ID NO: 1614452 - DNA, 15 bp, Homo sapiens
tggcgtgaacccagg

SEQ ID NO: 1614453 - DNA, 15 bp, Homo sapiens
ggcgtgaacccagga

SEQ ID NO: 1614454 - DNA, 15 bp, Homo sapiens
gcgtgaacccaggag

SEQ ID NO: 1614455 - DNA, 15 bp, Homo sapiens
gtgaacccaggaggc

SEQ ID NO: 1614456 - DNA, 15 bp, Homo sapiens
cccaggaggcggagc

SEQ ID NO: 1614457 - DNA, 15 bp, Homo sapiens
ccaggaggcggagct

SEQ ID NO: 1614458 - DNA, 15 bp, Homo sapiens
caggaggcggagctt

SEQ ID NO: 1614459 - DNA, 15 bp, Homo sapiens
aggaggcggagcttg

SEQ ID NO: 1614460 - DNA, 15 bp, Homo sapiens
ggagcttgcagtgaa

SEQ ID NO: 1614461 - DNA, 15 bp, Homo sapiens
gagcttgcagtgaac

SEQ ID NO: 1614462 - DNA, 15 bp, Homo sapiens
agcttgcagtgaacc

SEQ ID NO: 1614463 - DNA, 15 bp, Homo sapiens
gcttgcagtgaaccg

SEQ ID NO: 1614464 - DNA, 15 bp, Homo sapiens
cttgcagtgaaccga

SEQ ID NO: 1614465 - DNA, 15 bp, Homo sapiens
ttgcagtgaaccgat

SEQ ID NO: 1614466 - DNA, 15 bp, Homo sapiens
tgcagtgaaccgata

SEQ ID NO: 1614467 - DNA, 15 bp, Homo sapiens
gcagtgaaccgatat

SEQ ID NO: 1614468 - DNA, 15 bp, Homo sapiens
cagtgaaccgatatg

SEQ ID NO: 1614469 - DNA, 15 bp, Homo sapiens
agtgaaccgatatgg

SEQ ID NO: 1614470 - DNA, 15 bp, Homo sapiens
gtgaaccgatatggc

SEQ ID NO: 1614471 - DNA, 15 bp, Homo sapiens
tgaaccgatatggcg

SEQ ID NO: 1614472 - DNA, 15 bp, Homo sapiens
gaaccgatatggcgc

SEQ ID NO: 1614473 - DNA, 15 bp, Homo sapiens
aaccgatatggcgcc

SEQ ID NO: 1614474 - DNA, 15 bp, Homo sapiens
accgatatggcgcca

SEQ ID NO: 1614475 - DNA, 15 bp, Homo sapiens
ccgatatggcgccac

SEQ ID NO: 1614476 - DNA, 15 bp, Homo sapiens
cgatatggcgccact

SEQ ID NO: 1614477 - DNA, 15 bp, Homo sapiens
gatatggcgccactg

SEQ ID NO: 1614478 - DNA, 15 bp, Homo sapiens
atatggcgccactgc

SEQ ID NO: 1614479 - DNA, 15 bp, Homo sapiens
tatggcgccactgca

SEQ ID NO: 1614480 - DNA, 15 bp, Homo sapiens
tccagcctaggcaag

SEQ ID NO: 1614481 - DNA, 15 bp, Homo sapiens
ccagcctaggcaaga

SEQ ID NO: 1614482 - DNA, 15 bp, Homo sapiens
agcctaggcaagagt

SEQ ID NO: 1614483 - DNA, 15 bp, Homo sapiens
gcctaggcaagagtg

SEQ ID NO: 1614484 - DNA, 15 bp, Homo sapiens
cctaggcaagagtgc

SEQ ID NO: 1614485 - DNA, 15 bp, Homo sapiens
ctaggcaagagtgcg

SEQ ID NO: 1614486 - DNA, 15 bp, Homo sapiens
taggcaagagtgcga

SEQ ID NO: 1614487 - DNA, 15 bp, Homo sapiens
aggcaagagtgcgag

SEQ ID NO: 1614488 - DNA, 15 bp, Homo sapiens
ggcaagagtgcgaga

SEQ ID NO: 1614489 - DNA, 15 bp, Homo sapiens
gcaagagtgcgagac

SEQ ID NO: 1614490 - DNA, 15 bp, Homo sapiens
caagagtgcgagact

SEQ ID NO: 1614491 - DNA, 15 bp, Homo sapiens
aagagtgcgagactc

SEQ ID NO: 1614492 - DNA, 15 bp, Homo sapiens
gagtgcgagactcca

SEQ ID NO: 1614493 - DNA, 15 bp, Homo sapiens
agtgcgagactccat

SEQ ID NO: 1614494 - DNA, 15 bp, Homo sapiens
gtgcgagactccatc

SEQ ID NO: 1614495 - DNA, 15 bp, Homo sapiens
tgcgagactccatct

SEQ ID NO: 1614496 - DNA, 15 bp, Homo sapiens
catctcaaaaaaaat

SEQ ID NO: 1614497 - DNA, 15 bp, Homo sapiens
atctcaaaaaaaatt

SEQ ID NO: 1614498 - DNA, 15 bp, Homo sapiens
tctcaaaaaaaatta

SEQ ID NO: 1614499 - DNA, 15 bp, Homo sapiens
ctcaaaaaaaattaa

SEQ ID NO: 1614500 - DNA, 15 bp, Homo sapiens
tcaaaaaaaattaat

SEQ ID NO: 1614501 - DNA, 15 bp, Homo sapiens
caaaaaaaattaata

SEQ ID NO: 1614502 - DNA, 15 bp, Homo sapiens
aaaaaaaattaataa

SEQ ID NO: 1614503 - DNA, 15 bp, Homo sapiens
aaaaaattaataaat

SEQ ID NO: 1614504 - DNA, 15 bp, Homo sapiens
aaaaattaataaata

SEQ ID NO: 1614505 - DNA, 15 bp, Homo sapiens
aaattaataaataaa

SEQ ID NO: 1614506 - DNA, 15 bp, Homo sapiens
aattaataaataaaa

SEQ ID NO: 1614507 - DNA, 15 bp, Homo sapiens
attaataaataaaaa

SEQ ID NO: 1614508 - DNA, 15 bp, Homo sapiens
ttaataaataaaaac

SEQ ID NO: 1614509 - DNA, 15 bp, Homo sapiens
taataaataaaaaca

SEQ ID NO: 1614510 - DNA, 15 bp, Homo sapiens
aataaataaaaacaa

SEQ ID NO: 1614511 - DNA, 15 bp, Homo sapiens
ataaataaaaacaaa

SEQ ID NO: 1614512 - DNA, 15 bp, Homo sapiens
taaataaaaacaaaa

SEQ ID NO: 1614513 - DNA, 15 bp, Homo sapiens
aaataaaaacaaaaa

SEQ ID NO: 1614514 - DNA, 15 bp, Homo sapiens
aataaaaacaaaaag

SEQ ID NO: 1614515 - DNA, 15 bp, Homo sapiens
ataaaaacaaaaaga

SEQ ID NO: 1614516 - DNA, 15 bp, Homo sapiens
taaaaacaaaaagaa

SEQ ID NO: 1614517 - DNA, 15 bp, Homo sapiens
aaaacaaaaagaaaa

SEQ ID NO: 1614518 - DNA, 15 bp, Homo sapiens
aaacaaaaagaaaaa

SEQ ID NO: 1614519 - DNA, 15 bp, Homo sapiens
aacaaaaagaaaaat

SEQ ID NO: 1614520 - DNA, 15 bp, Homo sapiens
acaaaaagaaaaata

SEQ ID NO: 1614521 - DNA, 15 bp, Homo sapiens
caaaaagaaaaataa

SEQ ID NO: 1614522 - DNA, 15 bp, Homo sapiens
aaaaagaaaaataaa

SEQ ID NO: 1614523 - DNA, 15 bp, Homo sapiens
aaaagaaaaataaaa

SEQ ID NO: 1614524 - DNA, 15 bp, Homo sapiens
aaagaaaaataaaat

SEQ ID NO: 1614525 - DNA, 15 bp, Homo sapiens
aagaaaaataaaata

SEQ ID NO: 1614526 - DNA, 15 bp, Homo sapiens
agaaaaataaaataa

SEQ ID NO: 1614527 - DNA, 15 bp, Homo sapiens
gaaaaataaaataaa

SEQ ID NO: 1614528 - DNA, 15 bp, Homo sapiens
aaataaaataaattg

SEQ ID NO: 1614529 - DNA, 15 bp, Homo sapiens
aataaaataaattgg

SEQ ID NO: 1614530 - DNA, 15 bp, Homo sapiens
ataaaataaattggc

SEQ ID NO: 1614531 - DNA, 15 bp, Homo sapiens
taaaataaattggca

SEQ ID NO: 1614532 - DNA, 15 bp, Homo sapiens
aaaataaattggcag

SEQ ID NO: 1614533 - DNA, 15 bp, Homo sapiens
aaataaattggcaga

SEQ ID NO: 1614534 - DNA, 15 bp, Homo sapiens
aataaattggcagag

SEQ ID NO: 1614535 - DNA, 15 bp, Homo sapiens
ataaattggcagagc

SEQ ID NO: 1614536 - DNA, 15 bp, Homo sapiens
taaattggcagagct

SEQ ID NO: 1614537 - DNA, 15 bp, Homo sapiens
aaattggcagagctt

SEQ ID NO: 1614538 - DNA, 15 bp, Homo sapiens
aattggcagagcttt

SEQ ID NO: 1614539 - DNA, 15 bp, Homo sapiens
attggcagagctttc

SEQ ID NO: 1614540 - DNA, 15 bp, Homo sapiens
ttggcagagctttcc

SEQ ID NO: 1614541 - DNA, 15 bp, Homo sapiens
tggcagagctttcct

SEQ ID NO: 1614542 - DNA, 15 bp, Homo sapiens
ggcagagctttcctc

SEQ ID NO: 1614543 - DNA, 15 bp, Homo sapiens
gcagagctttcctca

SEQ ID NO: 1614544 - DNA, 15 bp, Homo sapiens
cagagctttcctcac

SEQ ID NO: 1614545 - DNA, 15 bp, Homo sapiens
agagctttcctcaca

SEQ ID NO: 1614546 - DNA, 15 bp, Homo sapiens
gagctttcctcacac

SEQ ID NO: 1614547 - DNA, 15 bp, Homo sapiens
agctttcctcacacc

SEQ ID NO: 1614548 - DNA, 15 bp, Homo sapiens
gctttcctcacaccc

SEQ ID NO: 1614549 - DNA, 15 bp, Homo sapiens
ctttcctcacaccca

SEQ ID NO: 1614550 - DNA, 15 bp, Homo sapiens
tttcctcacacccaa

SEQ ID NO: 1614551 - DNA, 15 bp, Homo sapiens
ttcctcacacccaag

SEQ ID NO: 1614552 - DNA, 15 bp, Homo sapiens
tcctcacacccaagt

SEQ ID NO: 1614553 - DNA, 15 bp, Homo sapiens
cctcacacccaagtt

SEQ ID NO: 1614554 - DNA, 15 bp, Homo sapiens
ctcacacccaagttc

SEQ ID NO: 1614555 - DNA, 15 bp, Homo sapiens
tcacacccaagttcc

SEQ ID NO: 1614556 - DNA, 15 bp, Homo sapiens
cacacccaagttcca

SEQ ID NO: 1614557 - DNA, 15 bp, Homo sapiens
acacccaagttccat

SEQ ID NO: 1614558 - DNA, 15 bp, Homo sapiens
cacccaagttccatc

SEQ ID NO: 1614559 - DNA, 15 bp, Homo sapiens
acccaagttccatct

SEQ ID NO: 1614560 - DNA, 15 bp, Homo sapiens
cccaagttccatctt

SEQ ID NO: 1614561 - DNA, 15 bp, Homo sapiens
ccaagttccatcttg

SEQ ID NO: 1614562 - DNA, 15 bp, Homo sapiens
caagttccatcttga

SEQ ID NO: 1614563 - DNA, 15 bp, Homo sapiens
aagttccatcttgaa

SEQ ID NO: 1614564 - DNA, 15 bp, Homo sapiens
agttccatcttgaaa

SEQ ID NO: 1614565 - DNA, 15 bp, Homo sapiens
gttccatcttgaaat

SEQ ID NO: 1614566 - DNA, 15 bp, Homo sapiens
ttccatcttgaaatc

SEQ ID NO: 1614567 - DNA, 15 bp, Homo sapiens
tccatcttgaaatct

SEQ ID NO: 1614568 - DNA, 15 bp, Homo sapiens
ccatcttgaaatctg

SEQ ID NO: 1614569 - DNA, 15 bp, Homo sapiens
catcttgaaatctga

SEQ ID NO: 1614570 - DNA, 15 bp, Homo sapiens
atcttgaaatctgaa

SEQ ID NO: 1614571 - DNA, 15 bp, Homo sapiens
tcttgaaatctgaac

SEQ ID NO: 1614572 - DNA, 15 bp, Homo sapiens
cttgaaatctgaaca

SEQ ID NO: 1614573 - DNA, 15 bp, Homo sapiens
ttgaaatctgaacat

SEQ ID NO: 1614574 - DNA, 15 bp, Homo sapiens
tgaaatctgaacatg

SEQ ID NO: 1614575 - DNA, 15 bp, Homo sapiens
gaaatctgaacatgt

SEQ ID NO: 1614576 - DNA, 15 bp, Homo sapiens
aaatctgaacatgtc

SEQ ID NO: 1614577 - DNA, 15 bp, Homo sapiens
aatctgaacatgtct

SEQ ID NO: 1614578 - DNA, 15 bp, Homo sapiens
atctgaacatgtcta

SEQ ID NO: 1614579 - DNA, 15 bp, Homo sapiens
tctgaacatgtctat

SEQ ID NO: 1614580 - DNA, 15 bp, Homo sapiens
ctgaacatgtctata

SEQ ID NO: 1614581 - DNA, 15 bp, Homo sapiens
tgaacatgtctataa

SEQ ID NO: 1614582 - DNA, 15 bp, Homo sapiens
gaacatgtctataaa

SEQ ID NO: 1614583 - DNA, 15 bp, Homo sapiens
aacatgtctataaag

SEQ ID NO: 1614584 - DNA, 15 bp, Homo sapiens
acatgtctataaaga

SEQ ID NO: 1614585 - DNA, 15 bp, Homo sapiens
catgtctataaagac

SEQ ID NO: 1614586 - DNA, 15 bp, Homo sapiens
atgtctataaagact

SEQ ID NO: 1614587 - DNA, 15 bp, Homo sapiens
tgtctataaagactg

SEQ ID NO: 1614588 - DNA, 15 bp, Homo sapiens
gtctataaagactgg

SEQ ID NO: 1614589 - DNA, 15 bp, Homo sapiens
tctataaagactggt

SEQ ID NO: 1614590 - DNA, 15 bp, Homo sapiens
ctataaagactggtt

SEQ ID NO: 1614591 - DNA, 15 bp, Homo sapiens
tataaagactggttg

SEQ ID NO: 1614592 - DNA, 15 bp, Homo sapiens
ataaagactggttga

SEQ ID NO: 1614593 - DNA, 15 bp, Homo sapiens
taaagactggttgac

SEQ ID NO: 1614594 - DNA, 15 bp, Homo sapiens
aaagactggttgact

SEQ ID NO: 1614595 - DNA, 15 bp, Homo sapiens
aagactggttgactc

SEQ ID NO: 1614596 - DNA, 15 bp, Homo sapiens
agactggttgactcc

SEQ ID NO: 1614597 - DNA, 15 bp, Homo sapiens
gactggttgactccg

SEQ ID NO: 1614598 - DNA, 15 bp, Homo sapiens
actggttgactccgg

SEQ ID NO: 1614599 - DNA, 15 bp, Homo sapiens
ctggttgactccggt

SEQ ID NO: 1614600 - DNA, 15 bp, Homo sapiens
tggttgactccggtg

SEQ ID NO: 1614601 - DNA, 15 bp, Homo sapiens
ggttgactccggtga

SEQ ID NO: 1614602 - DNA, 15 bp, Homo sapiens
gttgactccggtgaa

SEQ ID NO: 1614603 - DNA, 15 bp, Homo sapiens
ttgactccggtgaag

SEQ ID NO: 1614604 - DNA, 15 bp, Homo sapiens
tgactccggtgaagc

SEQ ID NO: 1614605 - DNA, 15 bp, Homo sapiens
gactccggtgaagcc

SEQ ID NO: 1614606 - DNA, 15 bp, Homo sapiens
actccggtgaagcca

SEQ ID NO: 1614607 - DNA, 15 bp, Homo sapiens
ctccggtgaagccaa

SEQ ID NO: 1614608 - DNA, 15 bp, Homo sapiens
tccggtgaagccaat

SEQ ID NO: 1614609 - DNA, 15 bp, Homo sapiens
ccggtgaagccaata

SEQ ID NO: 1614610 - DNA, 15 bp, Homo sapiens
cggtgaagccaatat

SEQ ID NO: 1614611 - DNA, 15 bp, Homo sapiens
ggtgaagccaatatc

SEQ ID NO: 1614612 - DNA, 15 bp, Homo sapiens
gtgaagccaatatca

SEQ ID NO: 1614613 - DNA, 15 bp, Homo sapiens
tgaagccaatatcac

SEQ ID NO: 1614614 - DNA, 15 bp, Homo sapiens
gaagccaatatcaca

SEQ ID NO: 1614615 - DNA, 15 bp, Homo sapiens
aagccaatatcacat

SEQ ID NO: 1614616 - DNA, 15 bp, Homo sapiens
agccaatatcacatg

SEQ ID NO: 1614617 - DNA, 15 bp, Homo sapiens
gccaatatcacatgc

SEQ ID NO: 1614618 - DNA, 15 bp, Homo sapiens
ccaatatcacatgct

SEQ ID NO: 1614619 - DNA, 15 bp, Homo sapiens
caatatcacatgctc

SEQ ID NO: 1614620 - DNA, 15 bp, Homo sapiens
aatatcacatgctct

SEQ ID NO: 1614621 - DNA, 15 bp, Homo sapiens
atatcacatgctctg

SEQ ID NO: 1614622 - DNA, 15 bp, Homo sapiens
tatcacatgctctga

SEQ ID NO: 1614623 - DNA, 15 bp, Homo sapiens
atcacatgctctgaa

SEQ ID NO: 1614624 - DNA, 15 bp, Homo sapiens
tcacatgctctgaaa

SEQ ID NO: 1614625 - DNA, 15 bp, Homo sapiens
cacatgctctgaaaa

SEQ ID NO: 1614626 - DNA, 15 bp, Homo sapiens
acatgctctgaaaat

SEQ ID NO: 1614627 - DNA, 15 bp, Homo sapiens
catgctctgaaaatg

SEQ ID NO: 1614628 - DNA, 15 bp, Homo sapiens
atgctctgaaaatgt

SEQ ID NO: 1614629 - DNA, 15 bp, Homo sapiens
tgctctgaaaatgta

SEQ ID NO: 1614630 - DNA, 15 bp, Homo sapiens
gctctgaaaatgtat

SEQ ID NO: 1614631 - DNA, 15 bp, Homo sapiens
ctctgaaaatgtatg

SEQ ID NO: 1614632 - DNA, 15 bp, Homo sapiens
tctgaaaatgtatga

SEQ ID NO: 1614633 - DNA, 15 bp, Homo sapiens
ctgaaaatgtatgat

SEQ ID NO: 1614634 - DNA, 15 bp, Homo sapiens
tgaaaatgtatgatc

SEQ ID NO: 1614635 - DNA, 15 bp, Homo sapiens
gaaaatgtatgatca

SEQ ID NO: 1614636 - DNA, 15 bp, Homo sapiens
aaaatgtatgatcag

SEQ ID NO: 1614637 - DNA, 15 bp, Homo sapiens
aaatgtatgatcaga

SEQ ID NO: 1614638 - DNA, 15 bp, Homo sapiens
aatgtatgatcagac

SEQ ID NO: 1614639 - DNA, 15 bp, Homo sapiens
atgtatgatcagact

SEQ ID NO: 1614640 - DNA, 15 bp, Homo sapiens
tgtatgatcagactc

SEQ ID NO: 1614641 - DNA, 15 bp, Homo sapiens
gtatgatcagactca

SEQ ID NO: 1614642 - DNA, 15 bp, Homo sapiens
tatgatcagactcag

SEQ ID NO: 1614643 - DNA, 15 bp, Homo sapiens
atgatcagactcaga

SEQ ID NO: 1614644 - DNA, 15 bp, Homo sapiens
tgatcagactcagaa

SEQ ID NO: 1614645 - DNA, 15 bp, Homo sapiens
gatcagactcagaaa

SEQ ID NO: 1614646 - DNA, 15 bp, Homo sapiens
atcagactcagaaag

SEQ ID NO: 1614647 - DNA, 15 bp, Homo sapiens
tcagactcagaaaga

SEQ ID NO: 1614648 - DNA, 15 bp, Homo sapiens
cagactcagaaagag

SEQ ID NO: 1614649 - DNA, 15 bp, Homo sapiens
agactcagaaagaga

SEQ ID NO: 1614650 - DNA, 15 bp, Homo sapiens
gactcagaaagagac

SEQ ID NO: 1614651 - DNA, 15 bp, Homo sapiens
actcagaaagagaca

SEQ ID NO: 1614652 - DNA, 15 bp, Homo sapiens
ctcagaaagagacac

SEQ ID NO: 1614653 - DNA, 15 bp, Homo sapiens
tcagaaagagacact

SEQ ID NO: 1614654 - DNA, 15 bp, Homo sapiens
cagaaagagacactc

SEQ ID NO: 1614655 - DNA, 15 bp, Homo sapiens
agaaagagacactca

SEQ ID NO: 1614656 - DNA, 15 bp, Homo sapiens
gaaagagacactcac

SEQ ID NO: 1614657 - DNA, 15 bp, Homo sapiens
aaagagacactcacc

SEQ ID NO: 1614658 - DNA, 15 bp, Homo sapiens
aagagacactcacct

SEQ ID NO: 1614659 - DNA, 15 bp, Homo sapiens
agagacactcacctg

SEQ ID NO: 1614660 - DNA, 15 bp, Homo sapiens
gagacactcacctgc

SEQ ID NO: 1614661 - DNA, 15 bp, Homo sapiens
agacactcacctgca

SEQ ID NO: 1614662 - DNA, 15 bp, Homo sapiens
gacactcacctgcaa

SEQ ID NO: 1614663 - DNA, 15 bp, Homo sapiens
acactcacctgcaaa

SEQ ID NO: 1614664 - DNA, 15 bp, Homo sapiens
cactcacctgcaaat

SEQ ID NO: 1614665 - DNA, 15 bp, Homo sapiens
actcacctgcaaatg

SEQ ID NO: 1614666 - DNA, 15 bp, Homo sapiens
ctcacctgcaaatga

SEQ ID NO: 1614667 - DNA, 15 bp, Homo sapiens
tcacctgcaaatgag

SEQ ID NO: 1614668 - DNA, 15 bp, Homo sapiens
cacctgcaaatgaga

SEQ ID NO: 1614669 - DNA, 15 bp, Homo sapiens
acctgcaaatgagac

SEQ ID NO: 1614670 - DNA, 15 bp, Homo sapiens
cctgcaaatgagaca

SEQ ID NO: 1614671 - DNA, 15 bp, Homo sapiens
ctgcaaatgagacag

SEQ ID NO: 1614672 - DNA, 15 bp, Homo sapiens
tgcaaatgagacagg

SEQ ID NO: 1614673 - DNA, 15 bp, Homo sapiens
gcaaatgagacaggg

SEQ ID NO: 1614674 - DNA, 15 bp, Homo sapiens
caaatgagacagggc

SEQ ID NO: 1614675 - DNA, 15 bp, Homo sapiens
aaatgagacagggct

SEQ ID NO: 1614676 - DNA, 15 bp, Homo sapiens
aatgagacagggctg

SEQ ID NO: 1614677 - DNA, 15 bp, Homo sapiens
atgagacagggctgt

SEQ ID NO: 1614678 - DNA, 15 bp, Homo sapiens
tgagacagggctgtt

SEQ ID NO: 1614679 - DNA, 15 bp, Homo sapiens
gagacagggctgtta

SEQ ID NO: 1614680 - DNA, 15 bp, Homo sapiens
agacagggctgttag

SEQ ID NO: 1614681 - DNA, 15 bp, Homo sapiens
gacagggctgttagt

SEQ ID NO: 1614682 - DNA, 15 bp, Homo sapiens
acagggctgttagtg

SEQ ID NO: 1614683 - DNA, 15 bp, Homo sapiens
cagggctgttagtgg

SEQ ID NO: 1614684 - DNA, 15 bp, Homo sapiens
agggctgttagtggg

SEQ ID NO: 1614685 - DNA, 15 bp, Homo sapiens
gggctgttagtgggg

SEQ ID NO: 1614686 - DNA, 15 bp, Homo sapiens
ggctgttagtgggga

SEQ ID NO: 1614687 - DNA, 15 bp, Homo sapiens
gctgttagtggggag

SEQ ID NO: 1614688 - DNA, 15 bp, Homo sapiens
ctgttagtggggaga

SEQ ID NO: 1614689 - DNA, 15 bp, Homo sapiens
tgttagtggggagat

SEQ ID NO: 1614690 - DNA, 15 bp, Homo sapiens
gttagtggggagata

SEQ ID NO: 1614691 - DNA, 15 bp, Homo sapiens
ttagtggggagataa

SEQ ID NO: 1614692 - DNA, 15 bp, Homo sapiens
tagtggggagataaa

SEQ ID NO: 1614693 - DNA, 15 bp, Homo sapiens
agtggggagataaag

SEQ ID NO: 1614694 - DNA, 15 bp, Homo sapiens
gtggggagataaaga

SEQ ID NO: 1614695 - DNA, 15 bp, Homo sapiens
tggggagataaagac

SEQ ID NO: 1614696 - DNA, 15 bp, Homo sapiens
ggggagataaagacc

SEQ ID NO: 1614697 - DNA, 15 bp, Homo sapiens
gggagataaagacct

SEQ ID NO: 1614698 - DNA, 15 bp, Homo sapiens
ggagataaagacctc

SEQ ID NO: 1614699 - DNA, 15 bp, Homo sapiens
gagataaagacctca

SEQ ID NO: 1614700 - DNA, 15 bp, Homo sapiens
agataaagacctcag

SEQ ID NO: 1614701 - DNA, 15 bp, Homo sapiens
gataaagacctcagt

SEQ ID NO: 1614702 - DNA, 15 bp, Homo sapiens
ataaagacctcagtg

SEQ ID NO: 1614703 - DNA, 15 bp, Homo sapiens
taaagacctcagtga

SEQ ID NO: 1614704 - DNA, 15 bp, Homo sapiens
aaagacctcagtgac

SEQ ID NO: 1614705 - DNA, 15 bp, Homo sapiens
aagacctcagtgaca

SEQ ID NO: 1614706 - DNA, 15 bp, Homo sapiens
agacctcagtgacaa

SEQ ID NO: 1614707 - DNA, 15 bp, Homo sapiens
gacctcagtgacaag

SEQ ID NO: 1614708 - DNA, 15 bp, Homo sapiens
acctcagtgacaagc

SEQ ID NO: 1614709 - DNA, 15 bp, Homo sapiens
cctcagtgacaagca

SEQ ID NO: 1614710 - DNA, 15 bp, Homo sapiens
ctcagtgacaagcag

SEQ ID NO: 1614711 - DNA, 15 bp, Homo sapiens
tcagtgacaagcaga

SEQ ID NO: 1614712 - DNA, 15 bp, Homo sapiens
cagtgacaagcagag

SEQ ID NO: 1614713 - DNA, 15 bp, Homo sapiens
agtgacaagcagagt

SEQ ID NO: 1614714 - DNA, 15 bp, Homo sapiens
gtgacaagcagagtc

SEQ ID NO: 1614715 - DNA, 15 bp, Homo sapiens
tgacaagcagagtct

SEQ ID NO: 1614716 - DNA, 15 bp, Homo sapiens
gacaagcagagtctg

SEQ ID NO: 1614717 - DNA, 15 bp, Homo sapiens
acaagcagagtctgg

SEQ ID NO: 1614718 - DNA, 15 bp, Homo sapiens
caagcagagtctggg

SEQ ID NO: 1614719 - DNA, 15 bp, Homo sapiens
aagcagagtctgggc

SEQ ID NO: 1614720 - DNA, 15 bp, Homo sapiens
agcagagtctgggcc

SEQ ID NO: 1614721 - DNA, 15 bp, Homo sapiens
gcagagtctgggccc

SEQ ID NO: 1614722 - DNA, 15 bp, Homo sapiens
cagagtctgggccct

SEQ ID NO: 1614723 - DNA, 15 bp, Homo sapiens
agagtctgggccctg

SEQ ID NO: 1614724 - DNA, 15 bp, Homo sapiens
gagtctgggccctgc

SEQ ID NO: 1614725 - DNA, 15 bp, Homo sapiens
agtctgggccctgct

SEQ ID NO: 1614726 - DNA, 15 bp, Homo sapiens
gtctgggccctgctc

SEQ ID NO: 1614727 - DNA, 15 bp, Homo sapiens
tctgggccctgctct

SEQ ID NO: 1614728 - DNA, 15 bp, Homo sapiens
ctgggccctgctctt

SEQ ID NO: 1614729 - DNA, 15 bp, Homo sapiens
tgggccctgctcttg

SEQ ID NO: 1614730 - DNA, 15 bp, Homo sapiens
gggccctgctcttgt

SEQ ID NO: 1614731 - DNA, 15 bp, Homo sapiens
ggccctgctcttgtt

SEQ ID NO: 1614732 - DNA, 15 bp, Homo sapiens
gccctgctcttgttc

SEQ ID NO: 1614733 - DNA, 15 bp, Homo sapiens
ccctgctcttgttca

SEQ ID NO: 1614734 - DNA, 15 bp, Homo sapiens
cctgctcttgttcag

SEQ ID NO: 1614735 - DNA, 15 bp, Homo sapiens
ctgctcttgttcagc

SEQ ID NO: 1614736 - DNA, 15 bp, Homo sapiens
tgctcttgttcagct

SEQ ID NO: 1614737 - DNA, 15 bp, Homo sapiens
gctcttgttcagctg

SEQ ID NO: 1614738 - DNA, 15 bp, Homo sapiens
ctcttgttcagctgt

SEQ ID NO: 1614739 - DNA, 15 bp, Homo sapiens
tcttgttcagctgtc

SEQ ID NO: 1614740 - DNA, 15 bp, Homo sapiens
cttgttcagctgtcc

SEQ ID NO: 1614741 - DNA, 15 bp, Homo sapiens
ttgttcagctgtccc

SEQ ID NO: 1614742 - DNA, 15 bp, Homo sapiens
tgttcagctgtcccg

SEQ ID NO: 1614743 - DNA, 15 bp, Homo sapiens
gttcagctgtcccgt

SEQ ID NO: 1614744 - DNA, 15 bp, Homo sapiens
ttcagctgtcccgtg

SEQ ID NO: 1614745 - DNA, 15 bp, Homo sapiens
tcagctgtcccgtgg

SEQ ID NO: 1614746 - DNA, 15 bp, Homo sapiens
cagctgtcccgtggc

SEQ ID NO: 1614747 - DNA, 15 bp, Homo sapiens
agctgtcccgtggcc

SEQ ID NO: 1614748 - DNA, 15 bp, Homo sapiens
gctgtcccgtggccc

SEQ ID NO: 1614749 - DNA, 15 bp, Homo sapiens
ctgtcccgtggcccc

SEQ ID NO: 1614750 - DNA, 15 bp, Homo sapiens
tgtcccgtggcccca

SEQ ID NO: 1614751 - DNA, 15 bp, Homo sapiens
gtcccgtggccccag

SEQ ID NO: 1614752 - DNA, 15 bp, Homo sapiens
tcccgtggccccagc

SEQ ID NO: 1614753 - DNA, 15 bp, Homo sapiens
cccgtggccccagcc

SEQ ID NO: 1614754 - DNA, 15 bp, Homo sapiens
ccgtggccccagcca

SEQ ID NO: 1614755 - DNA, 15 bp, Homo sapiens
cgtggccccagccac

SEQ ID NO: 1614756 - DNA, 15 bp, Homo sapiens
gtggccccagccacc

SEQ ID NO: 1614757 - DNA, 15 bp, Homo sapiens
tggccccagccaccc

SEQ ID NO: 1614758 - DNA, 15 bp, Homo sapiens
ggccccagccaccca

SEQ ID NO: 1614759 - DNA, 15 bp, Homo sapiens
gccccagccacccag

SEQ ID NO: 1614760 - DNA, 15 bp, Homo sapiens
ccccagccacccaga

SEQ ID NO: 1614761 - DNA, 15 bp, Homo sapiens
cccagccacccagag

SEQ ID NO: 1614762 - DNA, 15 bp, Homo sapiens
ccagccacccagagc

SEQ ID NO: 1614763 - DNA, 15 bp, Homo sapiens
cagccacccagagca

SEQ ID NO: 1614764 - DNA, 15 bp, Homo sapiens
agccacccagagcaa

SEQ ID NO: 1614765 - DNA, 15 bp, Homo sapiens
gccacccagagcaat

SEQ ID NO: 1614766 - DNA, 15 bp, Homo sapiens
ccacccagagcaatg

SEQ ID NO: 1614767 - DNA, 15 bp, Homo sapiens
cacccagagcaatgc

SEQ ID NO: 1614768 - DNA, 15 bp, Homo sapiens
acccagagcaatgcc

SEQ ID NO: 1614769 - DNA, 15 bp, Homo sapiens
cccagagcaatgcct

SEQ ID NO: 1614770 - DNA, 15 bp, Homo sapiens
ccagagcaatgcctg

SEQ ID NO: 1614771 - DNA, 15 bp, Homo sapiens
cagagcaatgcctgc

SEQ ID NO: 1614772 - DNA, 15 bp, Homo sapiens
agagcaatgcctgca

SEQ ID NO: 1614773 - DNA, 15 bp, Homo sapiens
gagcaatgcctgcac

SEQ ID NO: 1614774 - DNA, 15 bp, Homo sapiens
agcaatgcctgcacc

SEQ ID NO: 1614775 - DNA, 15 bp, Homo sapiens
gcaatgcctgcacca

SEQ ID NO: 1614776 - DNA, 15 bp, Homo sapiens
caatgcctgcaccaa

SEQ ID NO: 1614777 - DNA, 15 bp, Homo sapiens
aatgcctgcaccaaa

SEQ ID NO: 1614778 - DNA, 15 bp, Homo sapiens
atgcctgcaccaaag

SEQ ID NO: 1614779 - DNA, 15 bp, Homo sapiens
tgcctgcaccaaagt

SEQ ID NO: 1614780 - DNA, 15 bp, Homo sapiens
gcctgcaccaaagtt

SEQ ID NO: 1614781 - DNA, 15 bp, Homo sapiens
cctgcaccaaagttt

SEQ ID NO: 1614782 - DNA, 15 bp, Homo sapiens
ctgcaccaaagttta

SEQ ID NO: 1614783 - DNA, 15 bp, Homo sapiens
tgcaccaaagtttaa

SEQ ID NO: 1614784 - DNA, 15 bp, Homo sapiens
gcaccaaagtttaaa

SEQ ID NO: 1614785 - DNA, 15 bp, Homo sapiens
caccaaagtttaaag

SEQ ID NO: 1614786 - DNA, 15 bp, Homo sapiens
accaaagtttaaagg

SEQ ID NO: 1614787 - DNA, 15 bp, Homo sapiens
ccaaagtttaaaggt

SEQ ID NO: 1614788 - DNA, 15 bp, Homo sapiens
caaagtttaaaggtg

SEQ ID NO: 1614789 - DNA, 15 bp, Homo sapiens
aaagtttaaaggtga

SEQ ID NO: 1614790 - DNA, 15 bp, Homo sapiens
aagtttaaaggtgag

SEQ ID NO: 1614791 - DNA, 15 bp, Homo sapiens
agtttaaaggtgagc

SEQ ID NO: 1614792 - DNA, 15 bp, Homo sapiens
gtttaaaggtgagcc

SEQ ID NO: 1614793 - DNA, 15 bp, Homo sapiens
tttaaaggtgagcca

SEQ ID NO: 1614794 - DNA, 15 bp, Homo sapiens
ttaaaggtgagccac

SEQ ID NO: 1614795 - DNA, 15 bp, Homo sapiens
taaaggtgagccaca

SEQ ID NO: 1614796 - DNA, 15 bp, Homo sapiens
aaaggtgagccacat

SEQ ID NO: 1614797 - DNA, 15 bp, Homo sapiens
aaggtgagccacatt

SEQ ID NO: 1614798 - DNA, 15 bp, Homo sapiens
aggtgagccacattc

SEQ ID NO: 1614799 - DNA, 15 bp, Homo sapiens
ggtgagccacattca

SEQ ID NO: 1614800 - DNA, 15 bp, Homo sapiens
gtgagccacattcat

SEQ ID NO: 1614801 - DNA, 15 bp, Homo sapiens
tgagccacattcatt

SEQ ID NO: 1614802 - DNA, 15 bp, Homo sapiens
gagccacattcattg

SEQ ID NO: 1614803 - DNA, 15 bp, Homo sapiens
agccacattcattgt

SEQ ID NO: 1614804 - DNA, 15 bp, Homo sapiens
gccacattcattgta

SEQ ID NO: 1614805 - DNA, 15 bp, Homo sapiens
ccacattcattgtat

SEQ ID NO: 1614806 - DNA, 15 bp, Homo sapiens
cacattcattgtatg

SEQ ID NO: 1614807 - DNA, 15 bp, Homo sapiens
acattcattgtatgc

SEQ ID NO: 1614808 - DNA, 15 bp, Homo sapiens
cattcattgtatgcc

SEQ ID NO: 1614809 - DNA, 15 bp, Homo sapiens
attcattgtatgcct

SEQ ID NO: 1614810 - DNA, 15 bp, Homo sapiens
ttcattgtatgcctt

SEQ ID NO: 1614811 - DNA, 15 bp, Homo sapiens
tcattgtatgccttc

SEQ ID NO: 1614812 - DNA, 15 bp, Homo sapiens
cattgtatgccttct

SEQ ID NO: 1614813 - DNA, 15 bp, Homo sapiens
attgtatgccttcta

SEQ ID NO: 1614814 - DNA, 15 bp, Homo sapiens
ttgtatgccttctag

SEQ ID NO: 1614815 - DNA, 15 bp, Homo sapiens
tgtatgccttctagg

SEQ ID NO: 1614816 - DNA, 15 bp, Homo sapiens
gtatgccttctaggg

SEQ ID NO: 1614817 - DNA, 15 bp, Homo sapiens
tatgccttctagggg

SEQ ID NO: 1614818 - DNA, 15 bp, Homo sapiens
atgccttctaggggc

SEQ ID NO: 1614819 - DNA, 15 bp, Homo sapiens
tgccttctaggggct

SEQ ID NO: 1614820 - DNA, 15 bp, Homo sapiens
gccttctaggggctt

SEQ ID NO: 1614821 - DNA, 15 bp, Homo sapiens
ccttctaggggctta

SEQ ID NO: 1614822 - DNA, 15 bp, Homo sapiens
cttctaggggcttag

SEQ ID NO: 1614823 - DNA, 15 bp, Homo sapiens
ttctaggggcttagc

SEQ ID NO: 1614824 - DNA, 15 bp, Homo sapiens
tctaggggcttagct

SEQ ID NO: 1614825 - DNA, 15 bp, Homo sapiens
ctaggggcttagctg

SEQ ID NO: 1614826 - DNA, 15 bp, Homo sapiens
taggggcttagctgg

SEQ ID NO: 1614827 - DNA, 15 bp, Homo sapiens
aggggcttagctgga

SEQ ID NO: 1614828 - DNA, 15 bp, Homo sapiens
ggggcttagctggag

SEQ ID NO: 1614829 - DNA, 15 bp, Homo sapiens
gggcttagctggagg

SEQ ID NO: 1614830 - DNA, 15 bp, Homo sapiens
ggcttagctggaggg

SEQ ID NO: 1614831 - DNA, 15 bp, Homo sapiens
gcttagctggagggg

SEQ ID NO: 1614832 - DNA, 15 bp, Homo sapiens
cttagctggagggga

SEQ ID NO: 1614833 - DNA, 15 bp, Homo sapiens
ttagctggaggggag

SEQ ID NO: 1614834 - DNA, 15 bp, Homo sapiens
tagctggaggggagg

SEQ ID NO: 1614835 - DNA, 15 bp, Homo sapiens
agctggaggggagga

SEQ ID NO: 1614836 - DNA, 15 bp, Homo sapiens
gctggaggggaggaa

SEQ ID NO: 1614837 - DNA, 15 bp, Homo sapiens
ctggaggggaggaat

SEQ ID NO: 1614838 - DNA, 15 bp, Homo sapiens
tggaggggaggaata

SEQ ID NO: 1614839 - DNA, 15 bp, Homo sapiens
ggaggggaggaataa

SEQ ID NO: 1614840 - DNA, 15 bp, Homo sapiens
gaggggaggaataag

SEQ ID NO: 1614841 - DNA, 15 bp, Homo sapiens
aggggaggaataagc

SEQ ID NO: 1614842 - DNA, 15 bp, Homo sapiens
ggggaggaataagct

SEQ ID NO: 1614843 - DNA, 15 bp, Homo sapiens
gggaggaataagctc

SEQ ID NO: 1614844 - DNA, 15 bp, Homo sapiens
ggaggaataagctcc

SEQ ID NO: 1614845 - DNA, 15 bp, Homo sapiens
gaggaataagctcca

SEQ ID NO: 1614846 - DNA, 15 bp, Homo sapiens
aggaataagctccaa

SEQ ID NO: 1614847 - DNA, 15 bp, Homo sapiens
ggaataagctccaag

SEQ ID NO: 1614848 - DNA, 15 bp, Homo sapiens
gaataagctccaaga

SEQ ID NO: 1614849 - DNA, 15 bp, Homo sapiens
aataagctccaagaa

SEQ ID NO: 1614850 - DNA, 15 bp, Homo sapiens
ataagctccaagaag

SEQ ID NO: 1614851 - DNA, 15 bp, Homo sapiens
taagctccaagaaga

SEQ ID NO: 1614852 - DNA, 15 bp, Homo sapiens
aagctccaagaagaa

SEQ ID NO: 1614853 - DNA, 15 bp, Homo sapiens
agctccaagaagaac

SEQ ID NO: 1614854 - DNA, 15 bp, Homo sapiens
gctccaagaagaact

SEQ ID NO: 1614855 - DNA, 15 bp, Homo sapiens
ctccaagaagaactt

SEQ ID NO: 1614856 - DNA, 15 bp, Homo sapiens
tccaagaagaacttc

SEQ ID NO: 1614857 - DNA, 15 bp, Homo sapiens
ccaagaagaacttct

SEQ ID NO: 1614858 - DNA, 15 bp, Homo sapiens
caagaagaacttctt

SEQ ID NO: 1614859 - DNA, 15 bp, Homo sapiens
aagaagaacttcttt

SEQ ID NO: 1614860 - DNA, 15 bp, Homo sapiens
agaagaacttctttt

SEQ ID NO: 1614861 - DNA, 15 bp, Homo sapiens
gaagaacttcttttt

SEQ ID NO: 1614862 - DNA, 15 bp, Homo sapiens
aagaacttcttttta

SEQ ID NO: 1614863 - DNA, 15 bp, Homo sapiens
agaacttctttttaa

SEQ ID NO: 1614864 - DNA, 15 bp, Homo sapiens
gaacttctttttaat

SEQ ID NO: 1614865 - DNA, 15 bp, Homo sapiens
aacttctttttaatt

SEQ ID NO: 1614866 - DNA, 15 bp, Homo sapiens
acttctttttaattt

SEQ ID NO: 1614867 - DNA, 15 bp, Homo sapiens
cttctttttaatttt

SEQ ID NO: 1614868 - DNA, 15 bp, Homo sapiens
ttctttttaattttc

SEQ ID NO: 1614869 - DNA, 15 bp, Homo sapiens
tctttttaattttct

SEQ ID NO: 1614870 - DNA, 15 bp, Homo sapiens
ctttttaattttctc

SEQ ID NO: 1614871 - DNA, 15 bp, Homo sapiens
tttttaattttctct

SEQ ID NO: 1614872 - DNA, 15 bp, Homo sapiens
ttttaattttctctg

SEQ ID NO: 1614873 - DNA, 15 bp, Homo sapiens
tttaattttctctgt

SEQ ID NO: 1614874 - DNA, 15 bp, Homo sapiens
ttaattttctctgtt

SEQ ID NO: 1614875 - DNA, 15 bp, Homo sapiens
taattttctctgttt

SEQ ID NO: 1614876 - DNA, 15 bp, Homo sapiens
aattttctctgtttt

SEQ ID NO: 1614877 - DNA, 15 bp, Homo sapiens
attttctctgttttg

SEQ ID NO: 1614878 - DNA, 15 bp, Homo sapiens
ttttctctgttttgt

SEQ ID NO: 1614879 - DNA, 15 bp, Homo sapiens
tttctctgttttgtt

SEQ ID NO: 1614880 - DNA, 15 bp, Homo sapiens
ttctctgttttgtta

SEQ ID NO: 1614881 - DNA, 15 bp, Homo sapiens
tctctgttttgttaa

SEQ ID NO: 1614882 - DNA, 15 bp, Homo sapiens
ctctgttttgttaaa

SEQ ID NO: 1614883 - DNA, 15 bp, Homo sapiens
tctgttttgttaaac

SEQ ID NO: 1614884 - DNA, 15 bp, Homo sapiens
ctgttttgttaaact

SEQ ID NO: 1614885 - DNA, 15 bp, Homo sapiens
tgttttgttaaactt

SEQ ID NO: 1614886 - DNA, 15 bp, Homo sapiens
gttttgttaaacttc

SEQ ID NO: 1614887 - DNA, 15 bp, Homo sapiens
ttttgttaaacttct

SEQ ID NO: 1614888 - DNA, 15 bp, Homo sapiens
tttgttaaacttctg

SEQ ID NO: 1614889 - DNA, 15 bp, Homo sapiens
ttgttaaacttctgt

SEQ ID NO: 1614890 - DNA, 15 bp, Homo sapiens
tgttaaacttctgtt

SEQ ID NO: 1614891 - DNA, 15 bp, Homo sapiens
gttaaacttctgttt

SEQ ID NO: 1614892 - DNA, 15 bp, Homo sapiens
ttaaacttctgttta

SEQ ID NO: 1614893 - DNA, 15 bp, Homo sapiens
taaacttctgtttaa

SEQ ID NO: 1614894 - DNA, 15 bp, Homo sapiens
aaacttctgtttaac

SEQ ID NO: 1614895 - DNA, 15 bp, Homo sapiens
aacttctgtttaaca

SEQ ID NO: 1614896 - DNA, 15 bp, Homo sapiens
acttctgtttaacag

SEQ ID NO: 1614897 - DNA, 15 bp, Homo sapiens
cttctgtttaacagt

SEQ ID NO: 1614898 - DNA, 15 bp, Homo sapiens
ttctgtttaacagtc

SEQ ID NO: 1614899 - DNA, 15 bp, Homo sapiens
tctgtttaacagtca

SEQ ID NO: 1614900 - DNA, 15 bp, Homo sapiens
ctgtttaacagtcaa

SEQ ID NO: 1614901 - DNA, 15 bp, Homo sapiens
tgtttaacagtcaaa

SEQ ID NO: 1614902 - DNA, 15 bp, Homo sapiens
gtttaacagtcaaag

SEQ ID NO: 1614903 - DNA, 15 bp, Homo sapiens
tttaacagtcaaagg

SEQ ID NO: 1614904 - DNA, 15 bp, Homo sapiens
ttaacagtcaaaggg

SEQ ID NO: 1614905 - DNA, 15 bp, Homo sapiens
taacagtcaaagggg

SEQ ID NO: 1614906 - DNA, 15 bp, Homo sapiens
aacagtcaaagggga

SEQ ID NO: 1614907 - DNA, 15 bp, Homo sapiens
acagtcaaaggggaa

SEQ ID NO: 1614908 - DNA, 15 bp, Homo sapiens
cagtcaaaggggaaa

SEQ ID NO: 1614909 - DNA, 15 bp, Homo sapiens
agtcaaaggggaaag

SEQ ID NO: 1614910 - DNA, 15 bp, Homo sapiens
gtcaaaggggaaagc

SEQ ID NO: 1614911 - DNA, 15 bp, Homo sapiens
tcaaaggggaaagca

SEQ ID NO: 1614912 - DNA, 15 bp, Homo sapiens
caaaggggaaagcat

SEQ ID NO: 1614913 - DNA, 15 bp, Homo sapiens
aaaggggaaagcatc

SEQ ID NO: 1614914 - DNA, 15 bp, Homo sapiens
aaggggaaagcatcg

SEQ ID NO: 1614915 - DNA, 15 bp, Homo sapiens
aggggaaagcatcgg

SEQ ID NO: 1614916 - DNA, 15 bp, Homo sapiens
ggggaaagcatcggg

SEQ ID NO: 1614917 - DNA, 15 bp, Homo sapiens
gggaaagcatcgggc

SEQ ID NO: 1614918 - DNA, 15 bp, Homo sapiens
ggaaagcatcgggct

SEQ ID NO: 1614919 - DNA, 15 bp, Homo sapiens
gaaagcatcgggctg

SEQ ID NO: 1614920 - DNA, 15 bp, Homo sapiens
aaagcatcgggctgg

SEQ ID NO: 1614921 - DNA, 15 bp, Homo sapiens
aagcatcgggctggg

SEQ ID NO: 1614922 - DNA, 15 bp, Homo sapiens
agcatcgggctgggt

SEQ ID NO: 1614923 - DNA, 15 bp, Homo sapiens
gcatcgggctgggta

SEQ ID NO: 1614924 - DNA, 15 bp, Homo sapiens
catcgggctgggtaa

SEQ ID NO: 1614925 - DNA, 15 bp, Homo sapiens
atcgggctgggtaaa

SEQ ID NO: 1614926 - DNA, 15 bp, Homo sapiens
tcgggctgggtaaaa

SEQ ID NO: 1614927 - DNA, 15 bp, Homo sapiens
cgggctgggtaaaaa

SEQ ID NO: 1614928 - DNA, 15 bp, Homo sapiens
gggctgggtaaaaac

SEQ ID NO: 1614929 - DNA, 15 bp, Homo sapiens
ggctgggtaaaaaca

SEQ ID NO: 1614930 - DNA, 15 bp, Homo sapiens
gctgggtaaaaacat

SEQ ID NO: 1614931 - DNA, 15 bp, Homo sapiens
ctgggtaaaaacatg

SEQ ID NO: 1614932 - DNA, 15 bp, Homo sapiens
tgggtaaaaacatga

SEQ ID NO: 1614933 - DNA, 15 bp, Homo sapiens
gggtaaaaacatgag

SEQ ID NO: 1614934 - DNA, 15 bp, Homo sapiens
ggtaaaaacatgagt

SEQ ID NO: 1614935 - DNA, 15 bp, Homo sapiens
gtaaaaacatgagtt

SEQ ID NO: 1614936 - DNA, 15 bp, Homo sapiens
taaaaacatgagttt

SEQ ID NO: 1614937 - DNA, 15 bp, Homo sapiens
aaaaacatgagtttt

SEQ ID NO: 1614938 - DNA, 15 bp, Homo sapiens
aaaacatgagttttt

SEQ ID NO: 1614939 - DNA, 15 bp, Homo sapiens
aaacatgagtttttc

SEQ ID NO: 1614940 - DNA, 15 bp, Homo sapiens
aacatgagtttttct

SEQ ID NO: 1614941 - DNA, 15 bp, Homo sapiens
acatgagtttttctt

SEQ ID NO: 1614942 - DNA, 15 bp, Homo sapiens
catgagtttttctta

SEQ ID NO: 1614943 - DNA, 15 bp, Homo sapiens
atgagtttttcttaa

SEQ ID NO: 1614944 - DNA, 15 bp, Homo sapiens
tgagtttttcttaat

SEQ ID NO: 1614945 - DNA, 15 bp, Homo sapiens
gagtttttcttaatt

SEQ ID NO: 1614946 - DNA, 15 bp, Homo sapiens
agtttttcttaattt

SEQ ID NO: 1614947 - DNA, 15 bp, Homo sapiens
gtttttcttaatttg

SEQ ID NO: 1614948 - DNA, 15 bp, Homo sapiens
tttttcttaatttga

SEQ ID NO: 1614949 - DNA, 15 bp, Homo sapiens
ttttcttaatttgag

SEQ ID NO: 1614950 - DNA, 15 bp, Homo sapiens
tttcttaatttgagc

SEQ ID NO: 1614951 - DNA, 15 bp, Homo sapiens
ttcttaatttgagca

SEQ ID NO: 1614952 - DNA, 15 bp, Homo sapiens
tcttaatttgagcac

SEQ ID NO: 1614953 - DNA, 15 bp, Homo sapiens
cttaatttgagcact

SEQ ID NO: 1614954 - DNA, 15 bp, Homo sapiens
ttaatttgagcactc

SEQ ID NO: 1614955 - DNA, 15 bp, Homo sapiens
taatttgagcactca

SEQ ID NO: 1614956 - DNA, 15 bp, Homo sapiens
aatttgagcactcat

SEQ ID NO: 1614957 - DNA, 15 bp, Homo sapiens
atttgagcactcatt

SEQ ID NO: 1614958 - DNA, 15 bp, Homo sapiens
tttgagcactcattt

SEQ ID NO: 1614959 - DNA, 15 bp, Homo sapiens
ttgagcactcatttt

SEQ ID NO: 1614960 - DNA, 15 bp, Homo sapiens
tgagcactcattttt

SEQ ID NO: 1614961 - DNA, 15 bp, Homo sapiens
gagcactcattttta

SEQ ID NO: 1614962 - DNA, 15 bp, Homo sapiens
agcactcatttttaa

SEQ ID NO: 1614963 - DNA, 15 bp, Homo sapiens
gcactcatttttaaa

SEQ ID NO: 1614964 - DNA, 15 bp, Homo sapiens
cactcatttttaaaa

SEQ ID NO: 1614965 - DNA, 15 bp, Homo sapiens
actcatttttaaaat

SEQ ID NO: 1614966 - DNA, 15 bp, Homo sapiens
ctcatttttaaaatt

SEQ ID NO: 1614967 - DNA, 15 bp, Homo sapiens
tcatttttaaaattt

SEQ ID NO: 1614968 - DNA, 15 bp, Homo sapiens
catttttaaaatttt

SEQ ID NO: 1614969 - DNA, 15 bp, Homo sapiens
atttttaaaattttt

SEQ ID NO: 1614970 - DNA, 15 bp, Homo sapiens
ttttaaaattttttt

SEQ ID NO: 1614971 - DNA, 15 bp, Homo sapiens
tttaaaattttttta

SEQ ID NO: 1614972 - DNA, 15 bp, Homo sapiens
ttaaaatttttttat

SEQ ID NO: 1614973 - DNA, 15 bp, Homo sapiens
taaaatttttttatc

SEQ ID NO: 1614974 - DNA, 15 bp, Homo sapiens
aaaatttttttatca

SEQ ID NO: 1614975 - DNA, 15 bp, Homo sapiens
aaatttttttatcat

SEQ ID NO: 1614976 - DNA, 15 bp, Homo sapiens
aatttttttatcata

SEQ ID NO: 1614977 - DNA, 15 bp, Homo sapiens
atttttttatcatat

SEQ ID NO: 1614978 - DNA, 15 bp, Homo sapiens
tttttttatcatatt

SEQ ID NO: 1614979 - DNA, 15 bp, Homo sapiens
ttttttatcatattt

SEQ ID NO: 1614980 - DNA, 15 bp, Homo sapiens
tttttatcatattta

SEQ ID NO: 1614981 - DNA, 15 bp, Homo sapiens
ttttatcatatttaa

SEQ ID NO: 1614982 - DNA, 15 bp, Homo sapiens
tttatcatatttaac

SEQ ID NO: 1614983 - DNA, 15 bp, Homo sapiens
ttatcatatttaact

SEQ ID NO: 1614984 - DNA, 15 bp, Homo sapiens
tatcatatttaactt

SEQ ID NO: 1614985 - DNA, 15 bp, Homo sapiens
atcatatttaacttt

SEQ ID NO: 1614986 - DNA, 15 bp, Homo sapiens
tcatatttaactttt

SEQ ID NO: 1614987 - DNA, 15 bp, Homo sapiens
catatttaacttttt

SEQ ID NO: 1614988 - DNA, 15 bp, Homo sapiens
atatttaactttttt

SEQ ID NO: 1614989 - DNA, 15 bp, Homo sapiens
tatttaactttttta

SEQ ID NO: 1614990 - DNA, 15 bp, Homo sapiens
atttaacttttttat

SEQ ID NO: 1614991 - DNA, 15 bp, Homo sapiens
tttaacttttttatt

SEQ ID NO: 1614992 - DNA, 15 bp, Homo sapiens
ttaacttttttattt

SEQ ID NO: 1614993 - DNA, 15 bp, Homo sapiens
aacttttttatttta

SEQ ID NO: 1614994 - DNA, 15 bp, Homo sapiens
acttttttattttag

SEQ ID NO: 1614995 - DNA, 15 bp, Homo sapiens
cttttttattttaga

SEQ ID NO: 1614996 - DNA, 15 bp, Homo sapiens
ttttttattttagat

SEQ ID NO: 1614997 - DNA, 15 bp, Homo sapiens
tttttattttagatt

SEQ ID NO: 1614998 - DNA, 15 bp, Homo sapiens
ttttattttagattc

SEQ ID NO: 1614999 - DNA, 15 bp, Homo sapiens
tttattttagattca

SEQ ID NO: 1615000 - DNA, 15 bp, Homo sapiens
ttattttagattcag

SEQ ID NO: 1615001 - DNA, 15 bp, Homo sapiens
tattttagattcagg

SEQ ID NO: 1615002 - DNA, 15 bp, Homo sapiens
attttagattcaggg

SEQ ID NO: 1615003 - DNA, 15 bp, Homo sapiens
ttttagattcagggg

SEQ ID NO: 1615004 - DNA, 15 bp, Homo sapiens
tttagattcagggga

SEQ ID NO: 1615005 - DNA, 15 bp, Homo sapiens
ttagattcaggggat

SEQ ID NO: 1615006 - DNA, 15 bp, Homo sapiens
tagattcaggggata

SEQ ID NO: 1615007 - DNA, 15 bp, Homo sapiens
agattcaggggatac

SEQ ID NO: 1615008 - DNA, 15 bp, Homo sapiens
gattcaggggataca

SEQ ID NO: 1615009 - DNA, 15 bp, Homo sapiens
attcaggggatacat

SEQ ID NO: 1615010 - DNA, 15 bp, Homo sapiens
ttcaggggatacatg

SEQ ID NO: 1615011 - DNA, 15 bp, Homo sapiens
tcaggggatacatgt

SEQ ID NO: 1615012 - DNA, 15 bp, Homo sapiens
caggggatacatgtg

SEQ ID NO: 1615013 - DNA, 15 bp, Homo sapiens
aggggatacatgtgc

SEQ ID NO: 1615014 - DNA, 15 bp, Homo sapiens
ggggatacatgtgca

SEQ ID NO: 1615015 - DNA, 15 bp, Homo sapiens
ggatacatgtgcagg

SEQ ID NO: 1615016 - DNA, 15 bp, Homo sapiens
gatacatgtgcaggc

SEQ ID NO: 1615017 - DNA, 15 bp, Homo sapiens
atacatgtgcaggct

SEQ ID NO: 1615018 - DNA, 15 bp, Homo sapiens
tacatgtgcaggctt

SEQ ID NO: 1615019 - DNA, 15 bp, Homo sapiens
acatgtgcaggctta

SEQ ID NO: 1615020 - DNA, 15 bp, Homo sapiens
catgtgcaggcttat

SEQ ID NO: 1615021 - DNA, 15 bp, Homo sapiens
atgtgcaggcttatt

SEQ ID NO: 1615022 - DNA, 15 bp, Homo sapiens
tgtgcaggcttatta

SEQ ID NO: 1615023 - DNA, 15 bp, Homo sapiens
gtgcaggcttattac

SEQ ID NO: 1615024 - DNA, 15 bp, Homo sapiens
tgcaggcttattaca

SEQ ID NO: 1615025 - DNA, 15 bp, Homo sapiens
gcaggcttattacac

SEQ ID NO: 1615026 - DNA, 15 bp, Homo sapiens
caggcttattacaca

SEQ ID NO: 1615027 - DNA, 15 bp, Homo sapiens
aggcttattacacag

SEQ ID NO: 1615028 - DNA, 15 bp, Homo sapiens
ggcttattacacagg

SEQ ID NO: 1615029 - DNA, 15 bp, Homo sapiens
gcttattacacaggt

SEQ ID NO: 1615030 - DNA, 15 bp, Homo sapiens
cttattacacaggta

SEQ ID NO: 1615031 - DNA, 15 bp, Homo sapiens
ttattacacaggtat

SEQ ID NO: 1615032 - DNA, 15 bp, Homo sapiens
tattacacaggtata

SEQ ID NO: 1615033 - DNA, 15 bp, Homo sapiens
attacacaggtataa

SEQ ID NO: 1615034 - DNA, 15 bp, Homo sapiens
ttacacaggtataat

SEQ ID NO: 1615035 - DNA, 15 bp, Homo sapiens
tacacaggtataatg

SEQ ID NO: 1615036 - DNA, 15 bp, Homo sapiens
acacaggtataatgg

SEQ ID NO: 1615037 - DNA, 15 bp, Homo sapiens
cacaggtataatggg

SEQ ID NO: 1615038 - DNA, 15 bp, Homo sapiens
acaggtataatgggt

SEQ ID NO: 1615039 - DNA, 15 bp, Homo sapiens
caggtataatgggtg

SEQ ID NO: 1615040 - DNA, 15 bp, Homo sapiens
aggtataatgggtga

SEQ ID NO: 1615041 - DNA, 15 bp, Homo sapiens
ggtataatgggtgat

SEQ ID NO: 1615042 - DNA, 15 bp, Homo sapiens
gtataatgggtgatg

SEQ ID NO: 1615043 - DNA, 15 bp, Homo sapiens
tataatgggtgatgc

SEQ ID NO: 1615044 - DNA, 15 bp, Homo sapiens
ataatgggtgatgct

SEQ ID NO: 1615045 - DNA, 15 bp, Homo sapiens
taatgggtgatgctg

SEQ ID NO: 1615046 - DNA, 15 bp, Homo sapiens
aatgggtgatgctga

SEQ ID NO: 1615047 - DNA, 15 bp, Homo sapiens
atgggtgatgctgat

SEQ ID NO: 1615048 - DNA, 15 bp, Homo sapiens
tgggtgatgctgatg

SEQ ID NO: 1615049 - DNA, 15 bp, Homo sapiens
gggtgatgctgatgt

SEQ ID NO: 1615050 - DNA, 15 bp, Homo sapiens
ggtgatgctgatgtt

SEQ ID NO: 1615051 - DNA, 15 bp, Homo sapiens
gtgatgctgatgttt

SEQ ID NO: 1615052 - DNA, 15 bp, Homo sapiens
tgatgctgatgtttg

SEQ ID NO: 1615053 - DNA, 15 bp, Homo sapiens
gatgctgatgtttgg

SEQ ID NO: 1615054 - DNA, 15 bp, Homo sapiens
atgctgatgtttggg

SEQ ID NO: 1615055 - DNA, 15 bp, Homo sapiens
tgctgatgtttgggc

SEQ ID NO: 1615056 - DNA, 15 bp, Homo sapiens
gctgatgtttgggct

SEQ ID NO: 1615057 - DNA, 15 bp, Homo sapiens
ctgatgtttgggctt

SEQ ID NO: 1615058 - DNA, 15 bp, Homo sapiens
tgatgtttgggcttc

SEQ ID NO: 1615059 - DNA, 15 bp, Homo sapiens
gatgtttgggcttct

SEQ ID NO: 1615060 - DNA, 15 bp, Homo sapiens
atgtttgggcttcta

SEQ ID NO: 1615061 - DNA, 15 bp, Homo sapiens
tgtttgggcttctaa

SEQ ID NO: 1615062 - DNA, 15 bp, Homo sapiens
gtttgggcttctaat

SEQ ID NO: 1615063 - DNA, 15 bp, Homo sapiens
tttgggcttctaatg

SEQ ID NO: 1615064 - DNA, 15 bp, Homo sapiens
ttgggcttctaatga

SEQ ID NO: 1615065 - DNA, 15 bp, Homo sapiens
tgggcttctaatgat

SEQ ID NO: 1615066 - DNA, 15 bp, Homo sapiens
gggcttctaatgatc

SEQ ID NO: 1615067 - DNA, 15 bp, Homo sapiens
ggcttctaatgatcc

SEQ ID NO: 1615068 - DNA, 15 bp, Homo sapiens
gcttctaatgatccc

SEQ ID NO: 1615069 - DNA, 15 bp, Homo sapiens
cttctaatgatcccc

SEQ ID NO: 1615070 - DNA, 15 bp, Homo sapiens
ttctaatgatcccct

SEQ ID NO: 1615071 - DNA, 15 bp, Homo sapiens
tctaatgatcccctc

SEQ ID NO: 1615072 - DNA, 15 bp, Homo sapiens
ctaatgatcccctca

SEQ ID NO: 1615073 - DNA, 15 bp, Homo sapiens
taatgatcccctcac

SEQ ID NO: 1615074 - DNA, 15 bp, Homo sapiens
aatgatcccctcacc

SEQ ID NO: 1615075 - DNA, 15 bp, Homo sapiens
atgatcccctcaccc

SEQ ID NO: 1615076 - DNA, 15 bp, Homo sapiens
tgatcccctcaccca

SEQ ID NO: 1615077 - DNA, 15 bp, Homo sapiens
gatcccctcacccaa

SEQ ID NO: 1615078 - DNA, 15 bp, Homo sapiens
atcccctcacccaag

SEQ ID NO: 1615079 - DNA, 15 bp, Homo sapiens
tcccctcacccaagt

SEQ ID NO: 1615080 - DNA, 15 bp, Homo sapiens
cccctcacccaagta

SEQ ID NO: 1615081 - DNA, 15 bp, Homo sapiens
ccctcacccaagtat

SEQ ID NO: 1615082 - DNA, 15 bp, Homo sapiens
cctcacccaagtata

SEQ ID NO: 1615083 - DNA, 15 bp, Homo sapiens
ctcacccaagtatag

SEQ ID NO: 1615084 - DNA, 15 bp, Homo sapiens
tcacccaagtataga

SEQ ID NO: 1615085 - DNA, 15 bp, Homo sapiens
cacccaagtatagaa

SEQ ID NO: 1615086 - DNA, 15 bp, Homo sapiens
acccaagtatagaac

SEQ ID NO: 1615087 - DNA, 15 bp, Homo sapiens
cccaagtatagaaca

SEQ ID NO: 1615088 - DNA, 15 bp, Homo sapiens
ccaagtatagaacat

SEQ ID NO: 1615089 - DNA, 15 bp, Homo sapiens
caagtatagaacata

SEQ ID NO: 1615090 - DNA, 15 bp, Homo sapiens
aagtatagaacatag

SEQ ID NO: 1615091 - DNA, 15 bp, Homo sapiens
agtatagaacatagt

SEQ ID NO: 1615092 - DNA, 15 bp, Homo sapiens
gtatagaacatagtg

SEQ ID NO: 1615093 - DNA, 15 bp, Homo sapiens
tatagaacatagtgc

SEQ ID NO: 1615094 - DNA, 15 bp, Homo sapiens
atagaacatagtgcc

SEQ ID NO: 1615095 - DNA, 15 bp, Homo sapiens
tagaacatagtgccc

SEQ ID NO: 1615096 - DNA, 15 bp, Homo sapiens
agaacatagtgccca

SEQ ID NO: 1615097 - DNA, 15 bp, Homo sapiens
gaacatagtgcccaa

SEQ ID NO: 1615098 - DNA, 15 bp, Homo sapiens
aacatagtgcccaat

SEQ ID NO: 1615099 - DNA, 15 bp, Homo sapiens
acatagtgcccaata

SEQ ID NO: 1615100 - DNA, 15 bp, Homo sapiens
catagtgcccaatag

SEQ ID NO: 1615101 - DNA, 15 bp, Homo sapiens
atagtgcccaatagg

SEQ ID NO: 1615102 - DNA, 15 bp, Homo sapiens
tagtgcccaataggt

SEQ ID NO: 1615103 - DNA, 15 bp, Homo sapiens
agtgcccaataggta

SEQ ID NO: 1615104 - DNA, 15 bp, Homo sapiens
gtgcccaataggtag

SEQ ID NO: 1615105 - DNA, 15 bp, Homo sapiens
tgcccaataggtagt

SEQ ID NO: 1615106 - DNA, 15 bp, Homo sapiens
gcccaataggtagtt

SEQ ID NO: 1615107 - DNA, 15 bp, Homo sapiens
cccaataggtagttt

SEQ ID NO: 1615108 - DNA, 15 bp, Homo sapiens
ccaataggtagtttt

SEQ ID NO: 1615109 - DNA, 15 bp, Homo sapiens
caataggtagttttt

SEQ ID NO: 1615110 - DNA, 15 bp, Homo sapiens
aataggtagtttttc

SEQ ID NO: 1615111 - DNA, 15 bp, Homo sapiens
ataggtagtttttca

SEQ ID NO: 1615112 - DNA, 15 bp, Homo sapiens
taggtagtttttcaa

SEQ ID NO: 1615113 - DNA, 15 bp, Homo sapiens
aggtagtttttcaac

SEQ ID NO: 1615114 - DNA, 15 bp, Homo sapiens
ggtagtttttcaacc

SEQ ID NO: 1615115 - DNA, 15 bp, Homo sapiens
gtagtttttcaacct

SEQ ID NO: 1615116 - DNA, 15 bp, Homo sapiens
tagtttttcaacctt

SEQ ID NO: 1615117 - DNA, 15 bp, Homo sapiens
agtttttcaaccttt

SEQ ID NO: 1615118 - DNA, 15 bp, Homo sapiens
gtttttcaacctttg

SEQ ID NO: 1615119 - DNA, 15 bp, Homo sapiens
tttttcaacctttgc

SEQ ID NO: 1615120 - DNA, 15 bp, Homo sapiens
ttttcaacctttgct

SEQ ID NO: 1615121 - DNA, 15 bp, Homo sapiens
tttcaacctttgctt

SEQ ID NO: 1615122 - DNA, 15 bp, Homo sapiens
ttcaacctttgcttt

SEQ ID NO: 1615123 - DNA, 15 bp, Homo sapiens
tcaacctttgctttc

SEQ ID NO: 1615124 - DNA, 15 bp, Homo sapiens
caacctttgctttcc

SEQ ID NO: 1615125 - DNA, 15 bp, Homo sapiens
aacctttgctttcct

SEQ ID NO: 1615126 - DNA, 15 bp, Homo sapiens
acctttgctttcctt

SEQ ID NO: 1615127 - DNA, 15 bp, Homo sapiens
cctttgctttccttc

SEQ ID NO: 1615128 - DNA, 15 bp, Homo sapiens
ctttgctttccttcc

SEQ ID NO: 1615129 - DNA, 15 bp, Homo sapiens
tttgctttccttcct

SEQ ID NO: 1615130 - DNA, 15 bp, Homo sapiens
ttgctttccttcctc

SEQ ID NO: 1615131 - DNA, 15 bp, Homo sapiens
tgctttccttcctcc

SEQ ID NO: 1615132 - DNA, 15 bp, Homo sapiens
gctttccttcctccc

SEQ ID NO: 1615133 - DNA, 15 bp, Homo sapiens
ctttccttcctccct

SEQ ID NO: 1615134 - DNA, 15 bp, Homo sapiens
tttccttcctccctc

SEQ ID NO: 1615135 - DNA, 15 bp, Homo sapiens
ttccttcctccctcc

SEQ ID NO: 1615136 - DNA, 15 bp, Homo sapiens
tccttcctccctccc

SEQ ID NO: 1615137 - DNA, 15 bp, Homo sapiens
ccttcctccctccct

SEQ ID NO: 1615138 - DNA, 15 bp, Homo sapiens
cttcctccctccctc

SEQ ID NO: 1615139 - DNA, 15 bp, Homo sapiens
ttcctccctccctcc

SEQ ID NO: 1615140 - DNA, 15 bp, Homo sapiens
tcctccctccctccc

SEQ ID NO: 1615141 - DNA, 15 bp, Homo sapiens
cctccctccctcccc

SEQ ID NO: 1615142 - DNA, 15 bp, Homo sapiens
ctccctccctcccct

SEQ ID NO: 1615143 - DNA, 15 bp, Homo sapiens
tccctccctccccta

SEQ ID NO: 1615144 - DNA, 15 bp, Homo sapiens
ccctccctcccctat

SEQ ID NO: 1615145 - DNA, 15 bp, Homo sapiens
cctccctcccctatt

SEQ ID NO: 1615146 - DNA, 15 bp, Homo sapiens
ctccctcccctattt

SEQ ID NO: 1615147 - DNA, 15 bp, Homo sapiens
tccctcccctatttg

SEQ ID NO: 1615148 - DNA, 15 bp, Homo sapiens
ccctcccctatttga

SEQ ID NO: 1615149 - DNA, 15 bp, Homo sapiens
cctcccctatttgaa

SEQ ID NO: 1615150 - DNA, 15 bp, Homo sapiens
ctcccctatttgaaa

SEQ ID NO: 1615151 - DNA, 15 bp, Homo sapiens
tcccctatttgaaat

SEQ ID NO: 1615152 - DNA, 15 bp, Homo sapiens
cccctatttgaaatc

SEQ ID NO: 1615153 - DNA, 15 bp, Homo sapiens
ccctatttgaaatcc

SEQ ID NO: 1615154 - DNA, 15 bp, Homo sapiens
cctatttgaaatcct

SEQ ID NO: 1615155 - DNA, 15 bp, Homo sapiens
ctatttgaaatcctc

SEQ ID NO: 1615156 - DNA, 15 bp, Homo sapiens
tatttgaaatcctca

SEQ ID NO: 1615157 - DNA, 15 bp, Homo sapiens
atttgaaatcctcac

SEQ ID NO: 1615158 - DNA, 15 bp, Homo sapiens
tttgaaatcctcact

SEQ ID NO: 1615159 - DNA, 15 bp, Homo sapiens
ttgaaatcctcactg

SEQ ID NO: 1615160 - DNA, 15 bp, Homo sapiens
tgaaatcctcactgt

SEQ ID NO: 1615161 - DNA, 15 bp, Homo sapiens
gaaatcctcactgtc

SEQ ID NO: 1615162 - DNA, 15 bp, Homo sapiens
aaatcctcactgtct

SEQ ID NO: 1615163 - DNA, 15 bp, Homo sapiens
aatcctcactgtcta

SEQ ID NO: 1615164 - DNA, 15 bp, Homo sapiens
atcctcactgtctat

SEQ ID NO: 1615165 - DNA, 15 bp, Homo sapiens
tcctcactgtctatt

SEQ ID NO: 1615166 - DNA, 15 bp, Homo sapiens
cctcactgtctattg

SEQ ID NO: 1615167 - DNA, 15 bp, Homo sapiens
ctcactgtctattgt

SEQ ID NO: 1615168 - DNA, 15 bp, Homo sapiens
tcactgtctattgtt

SEQ ID NO: 1615169 - DNA, 15 bp, Homo sapiens
cactgtctattgttc

SEQ ID NO: 1615170 - DNA, 15 bp, Homo sapiens
actgtctattgttcc

SEQ ID NO: 1615171 - DNA, 15 bp, Homo sapiens
ctgtctattgttcct

SEQ ID NO: 1615172 - DNA, 15 bp, Homo sapiens
tgtctattgttccta

SEQ ID NO: 1615173 - DNA, 15 bp, Homo sapiens
gtctattgttcctat

SEQ ID NO: 1615174 - DNA, 15 bp, Homo sapiens
tctattgttcctatc

SEQ ID NO: 1615175 - DNA, 15 bp, Homo sapiens
ctattgttcctatct

SEQ ID NO: 1615176 - DNA, 15 bp, Homo sapiens
tattgttcctatctt

SEQ ID NO: 1615177 - DNA, 15 bp, Homo sapiens
attgttcctatcttt

SEQ ID NO: 1615178 - DNA, 15 bp, Homo sapiens
ttgttcctatctttg

SEQ ID NO: 1615179 - DNA, 15 bp, Homo sapiens
tgttcctatctttgt

SEQ ID NO: 1615180 - DNA, 15 bp, Homo sapiens
gttcctatctttgtg

SEQ ID NO: 1615181 - DNA, 15 bp, Homo sapiens
ttcctatctttgtgt

SEQ ID NO: 1615182 - DNA, 15 bp, Homo sapiens
tcctatctttgtgtc

SEQ ID NO: 1615183 - DNA, 15 bp, Homo sapiens
cctatctttgtgtcc

SEQ ID NO: 1615184 - DNA, 15 bp, Homo sapiens
ctatctttgtgtcca

SEQ ID NO: 1615185 - DNA, 15 bp, Homo sapiens
tatctttgtgtccat

SEQ ID NO: 1615186 - DNA, 15 bp, Homo sapiens
atctttgtgtccatg

SEQ ID NO: 1615187 - DNA, 15 bp, Homo sapiens
tctttgtgtccatgt

SEQ ID NO: 1615188 - DNA, 15 bp, Homo sapiens
ctttgtgtccatgtg

SEQ ID NO: 1615189 - DNA, 15 bp, Homo sapiens
tttgtgtccatgtgt

SEQ ID NO: 1615190 - DNA, 15 bp, Homo sapiens
ttgtgtccatgtgta

SEQ ID NO: 1615191 - DNA, 15 bp, Homo sapiens
tgtgtccatgtgtac

SEQ ID NO: 1615192 - DNA, 15 bp, Homo sapiens
gtgtccatgtgtact

SEQ ID NO: 1615193 - DNA, 15 bp, Homo sapiens
tgtccatgtgtactc

SEQ ID NO: 1615194 - DNA, 15 bp, Homo sapiens
gtccatgtgtactca

SEQ ID NO: 1615195 - DNA, 15 bp, Homo sapiens
tccatgtgtactcaa

SEQ ID NO: 1615196 - DNA, 15 bp, Homo sapiens
ccatgtgtactcaat

SEQ ID NO: 1615197 - DNA, 15 bp, Homo sapiens
catgtgtactcaata

SEQ ID NO: 1615198 - DNA, 15 bp, Homo sapiens
atgtgtactcaatat

SEQ ID NO: 1615199 - DNA, 15 bp, Homo sapiens
tgtgtactcaatatt

SEQ ID NO: 1615200 - DNA, 15 bp, Homo sapiens
gtgtactcaatattt

SEQ ID NO: 1615201 - DNA, 15 bp, Homo sapiens
tgtactcaatattta

SEQ ID NO: 1615202 - DNA, 15 bp, Homo sapiens
gtactcaatatttaa

SEQ ID NO: 1615203 - DNA, 15 bp, Homo sapiens
tactcaatatttaac

SEQ ID NO: 1615204 - DNA, 15 bp, Homo sapiens
actcaatatttaact

SEQ ID NO: 1615205 - DNA, 15 bp, Homo sapiens
ctcaatatttaactc

SEQ ID NO: 1615206 - DNA, 15 bp, Homo sapiens
tcaatatttaactcc

SEQ ID NO: 1615207 - DNA, 15 bp, Homo sapiens
caatatttaactccc

SEQ ID NO: 1615208 - DNA, 15 bp, Homo sapiens
aatatttaactccca

SEQ ID NO: 1615209 - DNA, 15 bp, Homo sapiens
atatttaactcccac

SEQ ID NO: 1615210 - DNA, 15 bp, Homo sapiens
tatttaactcccact

SEQ ID NO: 1615211 - DNA, 15 bp, Homo sapiens
atttaactcccactt

SEQ ID NO: 1615212 - DNA, 15 bp, Homo sapiens
tttaactcccactta

SEQ ID NO: 1615213 - DNA, 15 bp, Homo sapiens
ttaactcccacttat

SEQ ID NO: 1615214 - DNA, 15 bp, Homo sapiens
taactcccacttatc

SEQ ID NO: 1615215 - DNA, 15 bp, Homo sapiens
aactcccacttatcg

SEQ ID NO: 1615216 - DNA, 15 bp, Homo sapiens
actcccacttatcgg

SEQ ID NO: 1615217 - DNA, 15 bp, Homo sapiens
ctcccacttatcggt

SEQ ID NO: 1615218 - DNA, 15 bp, Homo sapiens
tcccacttatcggtg

SEQ ID NO: 1615219 - DNA, 15 bp, Homo sapiens
cccacttatcggtga

SEQ ID NO: 1615220 - DNA, 15 bp, Homo sapiens
ccacttatcggtgag

SEQ ID NO: 1615221 - DNA, 15 bp, Homo sapiens
cacttatcggtgaga

SEQ ID NO: 1615222 - DNA, 15 bp, Homo sapiens
acttatcggtgagaa

SEQ ID NO: 1615223 - DNA, 15 bp, Homo sapiens
cttatcggtgagaac

SEQ ID NO: 1615224 - DNA, 15 bp, Homo sapiens
ttatcggtgagaaca

SEQ ID NO: 1615225 - DNA, 15 bp, Homo sapiens
tatcggtgagaacat

SEQ ID NO: 1615226 - DNA, 15 bp, Homo sapiens
atcggtgagaacatg

SEQ ID NO: 1615227 - DNA, 15 bp, Homo sapiens
tcggtgagaacatgt

SEQ ID NO: 1615228 - DNA, 15 bp, Homo sapiens
cggtgagaacatgtg

SEQ ID NO: 1615229 - DNA, 15 bp, Homo sapiens
ggtgagaacatgtgg

SEQ ID NO: 1615230 - DNA, 15 bp, Homo sapiens
gtgagaacatgtggt

SEQ ID NO: 1615231 - DNA, 15 bp, Homo sapiens
tgagaacatgtggta

SEQ ID NO: 1615232 - DNA, 15 bp, Homo sapiens
gagaacatgtggtat

SEQ ID NO: 1615233 - DNA, 15 bp, Homo sapiens
agaacatgtggtatt

SEQ ID NO: 1615234 - DNA, 15 bp, Homo sapiens
gaacatgtggtattt

SEQ ID NO: 1615235 - DNA, 15 bp, Homo sapiens
aacatgtggtatttg

SEQ ID NO: 1615236 - DNA, 15 bp, Homo sapiens
acatgtggtatttgg

SEQ ID NO: 1615237 - DNA, 15 bp, Homo sapiens
catgtggtatttggt

SEQ ID NO: 1615238 - DNA, 15 bp, Homo sapiens
atgtggtatttggtt

SEQ ID NO: 1615239 - DNA, 15 bp, Homo sapiens
tgtggtatttggttt

SEQ ID NO: 1615240 - DNA, 15 bp, Homo sapiens
gtggtatttggtttt

SEQ ID NO: 1615241 - DNA, 15 bp, Homo sapiens
tggtatttggttttc

SEQ ID NO: 1615242 - DNA, 15 bp, Homo sapiens
ggtatttggttttct

SEQ ID NO: 1615243 - DNA, 15 bp, Homo sapiens
gtatttggttttctg

SEQ ID NO: 1615244 - DNA, 15 bp, Homo sapiens
tatttggttttctgt

SEQ ID NO: 1615245 - DNA, 15 bp, Homo sapiens
tttggttttctgttt

SEQ ID NO: 1615246 - DNA, 15 bp, Homo sapiens
ttggttttctgtttc

SEQ ID NO: 1615247 - DNA, 15 bp, Homo sapiens
tggttttctgtttct

SEQ ID NO: 1615248 - DNA, 15 bp, Homo sapiens
ggttttctgtttctg

SEQ ID NO: 1615249 - DNA, 15 bp, Homo sapiens
gttttctgtttctgc

SEQ ID NO: 1615250 - DNA, 15 bp, Homo sapiens
ttttctgtttctgca

SEQ ID NO: 1615251 - DNA, 15 bp, Homo sapiens
tttctgtttctgcat

SEQ ID NO: 1615252 - DNA, 15 bp, Homo sapiens
ttctgtttctgcatt

SEQ ID NO: 1615253 - DNA, 15 bp, Homo sapiens
tctgtttctgcatta

SEQ ID NO: 1615254 - DNA, 15 bp, Homo sapiens
ctgtttctgcattat

SEQ ID NO: 1615255 - DNA, 15 bp, Homo sapiens
tgtttctgcattatt

SEQ ID NO: 1615256 - DNA, 15 bp, Homo sapiens
gtttctgcattattt

SEQ ID NO: 1615257 - DNA, 15 bp, Homo sapiens
tttctgcattatttc

SEQ ID NO: 1615258 - DNA, 15 bp, Homo sapiens
ttctgcattatttca

SEQ ID NO: 1615259 - DNA, 15 bp, Homo sapiens
tctgcattatttcac

SEQ ID NO: 1615260 - DNA, 15 bp, Homo sapiens
ctgcattatttcact

SEQ ID NO: 1615261 - DNA, 15 bp, Homo sapiens
tgcattatttcactt

SEQ ID NO: 1615262 - DNA, 15 bp, Homo sapiens
gcattatttcactta

SEQ ID NO: 1615263 - DNA, 15 bp, Homo sapiens
cattatttcacttag

SEQ ID NO: 1615264 - DNA, 15 bp, Homo sapiens
attatttcacttagg

SEQ ID NO: 1615265 - DNA, 15 bp, Homo sapiens
ttatttcacttaggc

SEQ ID NO: 1615266 - DNA, 15 bp, Homo sapiens
tatttcacttaggct

SEQ ID NO: 1615267 - DNA, 15 bp, Homo sapiens
atttcacttaggcta

SEQ ID NO: 1615268 - DNA, 15 bp, Homo sapiens
tttcacttaggctaa

SEQ ID NO: 1615269 - DNA, 15 bp, Homo sapiens
ttcacttaggctaac

SEQ ID NO: 1615270 - DNA, 15 bp, Homo sapiens
tcacttaggctaact

SEQ ID NO: 1615271 - DNA, 15 bp, Homo sapiens
cacttaggctaactt

SEQ ID NO: 1615272 - DNA, 15 bp, Homo sapiens
acttaggctaactta

SEQ ID NO: 1615273 - DNA, 15 bp, Homo sapiens
cttaggctaacttaa

SEQ ID NO: 1615274 - DNA, 15 bp, Homo sapiens
ttaggctaacttaag

SEQ ID NO: 1615275 - DNA, 15 bp, Homo sapiens
taggctaacttaagc

SEQ ID NO: 1615276 - DNA, 15 bp, Homo sapiens
aggctaacttaagct

SEQ ID NO: 1615277 - DNA, 15 bp, Homo sapiens
ggctaacttaagcta

SEQ ID NO: 1615278 - DNA, 15 bp, Homo sapiens
gctaacttaagctaa

SEQ ID NO: 1615279 - DNA, 15 bp, Homo sapiens
ctaacttaagctaat

SEQ ID NO: 1615280 - DNA, 15 bp, Homo sapiens
taacttaagctaatg

SEQ ID NO: 1615281 - DNA, 15 bp, Homo sapiens
aacttaagctaatgg

SEQ ID NO: 1615282 - DNA, 15 bp, Homo sapiens
acttaagctaatggc

SEQ ID NO: 1615283 - DNA, 15 bp, Homo sapiens
cttaagctaatggcc

SEQ ID NO: 1615284 - DNA, 15 bp, Homo sapiens
ttaagctaatggcct

SEQ ID NO: 1615285 - DNA, 15 bp, Homo sapiens
taagctaatggcctc

SEQ ID NO: 1615286 - DNA, 15 bp, Homo sapiens
aagctaatggcctcc

SEQ ID NO: 1615287 - DNA, 15 bp, Homo sapiens
agctaatggcctcca

SEQ ID NO: 1615288 - DNA, 15 bp, Homo sapiens
gctaatggcctccag

SEQ ID NO: 1615289 - DNA, 15 bp, Homo sapiens
ctaatggcctccagc

SEQ ID NO: 1615290 - DNA, 15 bp, Homo sapiens
aatggcctccagctg

SEQ ID NO: 1615291 - DNA, 15 bp, Homo sapiens
atggcctccagctgc

SEQ ID NO: 1615292 - DNA, 15 bp, Homo sapiens
tggcctccagctgca

SEQ ID NO: 1615293 - DNA, 15 bp, Homo sapiens
ggcctccagctgcat

SEQ ID NO: 1615294 - DNA, 15 bp, Homo sapiens
gcctccagctgcatc

SEQ ID NO: 1615295 - DNA, 15 bp, Homo sapiens
cctccagctgcatcc

SEQ ID NO: 1615296 - DNA, 15 bp, Homo sapiens
ctccagctgcatcca

SEQ ID NO: 1615297 - DNA, 15 bp, Homo sapiens
tccagctgcatccat

SEQ ID NO: 1615298 - DNA, 15 bp, Homo sapiens
ccagctgcatccatg

SEQ ID NO: 1615299 - DNA, 15 bp, Homo sapiens
cagctgcatccatgt

SEQ ID NO: 1615300 - DNA, 15 bp, Homo sapiens
agctgcatccatgtt

SEQ ID NO: 1615301 - DNA, 15 bp, Homo sapiens
gctgcatccatgttg

SEQ ID NO: 1615302 - DNA, 15 bp, Homo sapiens
ctgcatccatgttgc

SEQ ID NO: 1615303 - DNA, 15 bp, Homo sapiens
tgcatccatgttgct

SEQ ID NO: 1615304 - DNA, 15 bp, Homo sapiens
gcatccatgttgctg

SEQ ID NO: 1615305 - DNA, 15 bp, Homo sapiens
catccatgttgctgt

SEQ ID NO: 1615306 - DNA, 15 bp, Homo sapiens
atccatgttgctgtg

SEQ ID NO: 1615307 - DNA, 15 bp, Homo sapiens
tccatgttgctgtga

SEQ ID NO: 1615308 - DNA, 15 bp, Homo sapiens
ccatgttgctgtgaa

SEQ ID NO: 1615309 - DNA, 15 bp, Homo sapiens
catgttgctgtgaag

SEQ ID NO: 1615310 - DNA, 15 bp, Homo sapiens
atgttgctgtgaagc

SEQ ID NO: 1615311 - DNA, 15 bp, Homo sapiens
tgttgctgtgaagcg

SEQ ID NO: 1615312 - DNA, 15 bp, Homo sapiens
gttgctgtgaagcgc

SEQ ID NO: 1615313 - DNA, 15 bp, Homo sapiens
ttgctgtgaagcgct

SEQ ID NO: 1615314 - DNA, 15 bp, Homo sapiens
tgctgtgaagcgctt

SEQ ID NO: 1615315 - DNA, 15 bp, Homo sapiens
gctgtgaagcgcttg

SEQ ID NO: 1615316 - DNA, 15 bp, Homo sapiens
ctgtgaagcgcttga

SEQ ID NO: 1615317 - DNA, 15 bp, Homo sapiens
tgtgaagcgcttgat

SEQ ID NO: 1615318 - DNA, 15 bp, Homo sapiens
gtgaagcgcttgatt

SEQ ID NO: 1615319 - DNA, 15 bp, Homo sapiens
tgaagcgcttgattt

SEQ ID NO: 1615320 - DNA, 15 bp, Homo sapiens
gaagcgcttgatttc

SEQ ID NO: 1615321 - DNA, 15 bp, Homo sapiens
aagcgcttgatttca

SEQ ID NO: 1615322 - DNA, 15 bp, Homo sapiens
agcgcttgatttcat

SEQ ID NO: 1615323 - DNA, 15 bp, Homo sapiens
gcgcttgatttcatt

SEQ ID NO: 1615324 - DNA, 15 bp, Homo sapiens
cgcttgatttcattc

SEQ ID NO: 1615325 - DNA, 15 bp, Homo sapiens
gcttgatttcattct

SEQ ID NO: 1615326 - DNA, 15 bp, Homo sapiens
cttgatttcattctt

SEQ ID NO: 1615327 - DNA, 15 bp, Homo sapiens
ttgatttcattcttt

SEQ ID NO: 1615328 - DNA, 15 bp, Homo sapiens
tgatttcattctttt

SEQ ID NO: 1615329 - DNA, 15 bp, Homo sapiens
gatttcattcttttt

SEQ ID NO: 1615330 - DNA, 15 bp, Homo sapiens
atttcattctttttc

SEQ ID NO: 1615331 - DNA, 15 bp, Homo sapiens
tttcattctttttca

SEQ ID NO: 1615332 - DNA, 15 bp, Homo sapiens
ttcattctttttcat

SEQ ID NO: 1615333 - DNA, 15 bp, Homo sapiens
tcattctttttcatg

SEQ ID NO: 1615334 - DNA, 15 bp, Homo sapiens
cattctttttcatgg

SEQ ID NO: 1615335 - DNA, 15 bp, Homo sapiens
attctttttcatggc

SEQ ID NO: 1615336 - DNA, 15 bp, Homo sapiens
ttctttttcatggct

SEQ ID NO: 1615337 - DNA, 15 bp, Homo sapiens
tctttttcatggctg

SEQ ID NO: 1615338 - DNA, 15 bp, Homo sapiens
ctttttcatggctgt

SEQ ID NO: 1615339 - DNA, 15 bp, Homo sapiens
tttttcatggctgtg

SEQ ID NO: 1615340 - DNA, 15 bp, Homo sapiens
ttttcatggctgtgt

SEQ ID NO: 1615341 - DNA, 15 bp, Homo sapiens
tttcatggctgtgta

SEQ ID NO: 1615342 - DNA, 15 bp, Homo sapiens
ttcatggctgtgtag

SEQ ID NO: 1615343 - DNA, 15 bp, Homo sapiens
tcatggctgtgtagt

SEQ ID NO: 1615344 - DNA, 15 bp, Homo sapiens
catggctgtgtagta

SEQ ID NO: 1615345 - DNA, 15 bp, Homo sapiens
atggctgtgtagtat

SEQ ID NO: 1615346 - DNA, 15 bp, Homo sapiens
tggctgtgtagtatt

SEQ ID NO: 1615347 - DNA, 15 bp, Homo sapiens
ggctgtgtagtattc

SEQ ID NO: 1615348 - DNA, 15 bp, Homo sapiens
gctgtgtagtattcc

SEQ ID NO: 1615349 - DNA, 15 bp, Homo sapiens
ctgtgtagtattcca

SEQ ID NO: 1615350 - DNA, 15 bp, Homo sapiens
tgtgtagtattccat

SEQ ID NO: 1615351 - DNA, 15 bp, Homo sapiens
gtgtagtattccatg

SEQ ID NO: 1615352 - DNA, 15 bp, Homo sapiens
tgtagtattccatgg

SEQ ID NO: 1615353 - DNA, 15 bp, Homo sapiens
gtagtattccatggt

SEQ ID NO: 1615354 - DNA, 15 bp, Homo sapiens
tattccatggtgtac

SEQ ID NO: 1615355 - DNA, 15 bp, Homo sapiens
attccatggtgtaca

SEQ ID NO: 1615356 - DNA, 15 bp, Homo sapiens
ttccatggtgtacat

SEQ ID NO: 1615357 - DNA, 15 bp, Homo sapiens
tccatggtgtacatg

SEQ ID NO: 1615358 - DNA, 15 bp, Homo sapiens
ccatggtgtacatgt

SEQ ID NO: 1615359 - DNA, 15 bp, Homo sapiens
catggtgtacatgta

SEQ ID NO: 1615360 - DNA, 15 bp, Homo sapiens
atggtgtacatgtac

SEQ ID NO: 1615361 - DNA, 15 bp, Homo sapiens
tggtgtacatgtacc

SEQ ID NO: 1615362 - DNA, 15 bp, Homo sapiens
ggtgtacatgtacca

SEQ ID NO: 1615363 - DNA, 15 bp, Homo sapiens
gtgtacatgtaccac

SEQ ID NO: 1615364 - DNA, 15 bp, Homo sapiens
tgtacatgtaccaca

SEQ ID NO: 1615365 - DNA, 15 bp, Homo sapiens
gtacatgtaccacat

SEQ ID NO: 1615366 - DNA, 15 bp, Homo sapiens
tacatgtaccacatt

SEQ ID NO: 1615367 - DNA, 15 bp, Homo sapiens
acatgtaccacattt

SEQ ID NO: 1615368 - DNA, 15 bp, Homo sapiens
catgtaccacatttt

SEQ ID NO: 1615369 - DNA, 15 bp, Homo sapiens
accacattttctttg

SEQ ID NO: 1615370 - DNA, 15 bp, Homo sapiens
ccacattttctttgt

SEQ ID NO: 1615371 - DNA, 15 bp, Homo sapiens
cacattttctttgtc

SEQ ID NO: 1615372 - DNA, 15 bp, Homo sapiens
acattttctttgtcc

SEQ ID NO: 1615373 - DNA, 15 bp, Homo sapiens
cattttctttgtccc

SEQ ID NO: 1615374 - DNA, 15 bp, Homo sapiens
attttctttgtccca

SEQ ID NO: 1615375 - DNA, 15 bp, Homo sapiens
ttttctttgtcccat

SEQ ID NO: 1615376 - DNA, 15 bp, Homo sapiens
tttctttgtcccatc

SEQ ID NO: 1615377 - DNA, 15 bp, Homo sapiens
ttctttgtcccatct

SEQ ID NO: 1615378 - DNA, 15 bp, Homo sapiens
tctttgtcccatcta

SEQ ID NO: 1615379 - DNA, 15 bp, Homo sapiens
ctttgtcccatctac

SEQ ID NO: 1615380 - DNA, 15 bp, Homo sapiens
tttgtcccatctacc

SEQ ID NO: 1615381 - DNA, 15 bp, Homo sapiens
ttgtcccatctacca

SEQ ID NO: 1615382 - DNA, 15 bp, Homo sapiens
tgtcccatctaccat

SEQ ID NO: 1615383 - DNA, 15 bp, Homo sapiens
gtcccatctaccatt

SEQ ID NO: 1615384 - DNA, 15 bp, Homo sapiens
tcccatctaccattg

SEQ ID NO: 1615385 - DNA, 15 bp, Homo sapiens
cccatctaccattga

SEQ ID NO: 1615386 - DNA, 15 bp, Homo sapiens
ccatctaccattgat

SEQ ID NO: 1615387 - DNA, 15 bp, Homo sapiens
catctaccattgatg

SEQ ID NO: 1615388 - DNA, 15 bp, Homo sapiens
atctaccattgatgg

SEQ ID NO: 1615389 - DNA, 15 bp, Homo sapiens
tctaccattgatggg

SEQ ID NO: 1615390 - DNA, 15 bp, Homo sapiens
ctaccattgatgggc

SEQ ID NO: 1615391 - DNA, 15 bp, Homo sapiens
taccattgatgggca

SEQ ID NO: 1615392 - DNA, 15 bp, Homo sapiens
accattgatgggcac

SEQ ID NO: 1615393 - DNA, 15 bp, Homo sapiens
ccattgatgggcacc

SEQ ID NO: 1615394 - DNA, 15 bp, Homo sapiens
cattgatgggcacct

SEQ ID NO: 1615395 - DNA, 15 bp, Homo sapiens
attgatgggcacctg

SEQ ID NO: 1615396 - DNA, 15 bp, Homo sapiens
ttgatgggcacctgg

SEQ ID NO: 1615397 - DNA, 15 bp, Homo sapiens
tgatgggcacctggg

SEQ ID NO: 1615398 - DNA, 15 bp, Homo sapiens
gatgggcacctgggt

SEQ ID NO: 1615399 - DNA, 15 bp, Homo sapiens
atgggcacctgggtt

SEQ ID NO: 1615400 - DNA, 15 bp, Homo sapiens
tgggcacctgggttc

SEQ ID NO: 1615401 - DNA, 15 bp, Homo sapiens
gggcacctgggttca

SEQ ID NO: 1615402 - DNA, 15 bp, Homo sapiens
ggcacctgggttcat

SEQ ID NO: 1615403 - DNA, 15 bp, Homo sapiens
gcacctgggttcatt

SEQ ID NO: 1615404 - DNA, 15 bp, Homo sapiens
cacctgggttcattc

SEQ ID NO: 1615405 - DNA, 15 bp, Homo sapiens
acctgggttcattcc

SEQ ID NO: 1615406 - DNA, 15 bp, Homo sapiens
cctgggttcattcca

SEQ ID NO: 1615407 - DNA, 15 bp, Homo sapiens
ctgggttcattccat

SEQ ID NO: 1615408 - DNA, 15 bp, Homo sapiens
tgggttcattccatg

SEQ ID NO: 1615409 - DNA, 15 bp, Homo sapiens
gggttcattccatgt

SEQ ID NO: 1615410 - DNA, 15 bp, Homo sapiens
ggttcattccatgtc

SEQ ID NO: 1615411 - DNA, 15 bp, Homo sapiens
gttcattccatgtct

SEQ ID NO: 1615412 - DNA, 15 bp, Homo sapiens
ttcattccatgtctt

SEQ ID NO: 1615413 - DNA, 15 bp, Homo sapiens
tcattccatgtcttt

SEQ ID NO: 1615414 - DNA, 15 bp, Homo sapiens
cattccatgtctttg

SEQ ID NO: 1615415 - DNA, 15 bp, Homo sapiens
tccatgtctttgctg

SEQ ID NO: 1615416 - DNA, 15 bp, Homo sapiens
ccatgtctttgctgt

SEQ ID NO: 1615417 - DNA, 15 bp, Homo sapiens
catgtctttgctgtt

SEQ ID NO: 1615418 - DNA, 15 bp, Homo sapiens
atgtctttgctgttg

SEQ ID NO: 1615419 - DNA, 15 bp, Homo sapiens
tgtctttgctgttgt

SEQ ID NO: 1615420 - DNA, 15 bp, Homo sapiens
gtctttgctgttgtt

SEQ ID NO: 1615421 - DNA, 15 bp, Homo sapiens
tctttgctgttgttg

SEQ ID NO: 1615422 - DNA, 15 bp, Homo sapiens
ctttgctgttgttga

SEQ ID NO: 1615423 - DNA, 15 bp, Homo sapiens
tttgctgttgttgaa

SEQ ID NO: 1615424 - DNA, 15 bp, Homo sapiens
ttgctgttgttgaac

SEQ ID NO: 1615425 - DNA, 15 bp, Homo sapiens
gctgttgttgaacac

SEQ ID NO: 1615426 - DNA, 15 bp, Homo sapiens
ctgttgttgaacact

SEQ ID NO: 1615427 - DNA, 15 bp, Homo sapiens
tgttgttgaacactc

SEQ ID NO: 1615428 - DNA, 15 bp, Homo sapiens
gttgttgaacactca

SEQ ID NO: 1615429 - DNA, 15 bp, Homo sapiens
ttgttgaacactcat

SEQ ID NO: 1615430 - DNA, 15 bp, Homo sapiens
tgttgaacactcatt

SEQ ID NO: 1615431 - DNA, 15 bp, Homo sapiens
gttgaacactcattt

SEQ ID NO: 1615432 - DNA, 15 bp, Homo sapiens
ttgaacactcattta

SEQ ID NO: 1615433 - DNA, 15 bp, Homo sapiens
tgaacactcatttaa

SEQ ID NO: 1615434 - DNA, 15 bp, Homo sapiens
gaacactcatttaaa

SEQ ID NO: 1615435 - DNA, 15 bp, Homo sapiens
aacactcatttaaac

SEQ ID NO: 1615436 - DNA, 15 bp, Homo sapiens
acactcatttaaaca

SEQ ID NO: 1615437 - DNA, 15 bp, Homo sapiens
cactcatttaaacac

SEQ ID NO: 1615438 - DNA, 15 bp, Homo sapiens
actcatttaaacaca

SEQ ID NO: 1615439 - DNA, 15 bp, Homo sapiens
ctcatttaaacacaa

SEQ ID NO: 1615440 - DNA, 15 bp, Homo sapiens
tcatttaaacacaat

SEQ ID NO: 1615441 - DNA, 15 bp, Homo sapiens
catttaaacacaatc

SEQ ID NO: 1615442 - DNA, 15 bp, Homo sapiens
atttaaacacaatct

SEQ ID NO: 1615443 - DNA, 15 bp, Homo sapiens
tttaaacacaatctc

SEQ ID NO: 1615444 - DNA, 15 bp, Homo sapiens
ttaaacacaatctct

SEQ ID NO: 1615445 - DNA, 15 bp, Homo sapiens
taaacacaatctctt

SEQ ID NO: 1615446 - DNA, 15 bp, Homo sapiens
aaacacaatctctta

SEQ ID NO: 1615447 - DNA, 15 bp, Homo sapiens
aacacaatctcttaa

SEQ ID NO: 1615448 - DNA, 15 bp, Homo sapiens
acacaatctcttaaa

SEQ ID NO: 1615449 - DNA, 15 bp, Homo sapiens
cacaatctcttaaac

SEQ ID NO: 1615450 - DNA, 15 bp, Homo sapiens
acaatctcttaaact

SEQ ID NO: 1615451 - DNA, 15 bp, Homo sapiens
caatctcttaaactc

SEQ ID NO: 1615452 - DNA, 15 bp, Homo sapiens
aatctcttaaactct

SEQ ID NO: 1615453 - DNA, 15 bp, Homo sapiens
atctcttaaactctc

SEQ ID NO: 1615454 - DNA, 15 bp, Homo sapiens
tctcttaaactctct

SEQ ID NO: 1615455 - DNA, 15 bp, Homo sapiens
ctcttaaactctctt

SEQ ID NO: 1615456 - DNA, 15 bp, Homo sapiens
tcttaaactctctta

SEQ ID NO: 1615457 - DNA, 15 bp, Homo sapiens
cttaaactctcttaa

SEQ ID NO: 1615458 - DNA, 15 bp, Homo sapiens
ttaaactctcttaag

SEQ ID NO: 1615459 - DNA, 15 bp, Homo sapiens
taaactctcttaaga

SEQ ID NO: 1615460 - DNA, 15 bp, Homo sapiens
aaactctcttaagaa

SEQ ID NO: 1615461 - DNA, 15 bp, Homo sapiens
aactctcttaagaat

SEQ ID NO: 1615462 - DNA, 15 bp, Homo sapiens
actctcttaagaatc

SEQ ID NO: 1615463 - DNA, 15 bp, Homo sapiens
ctctcttaagaatca

SEQ ID NO: 1615464 - DNA, 15 bp, Homo sapiens
tctcttaagaatcag

SEQ ID NO: 1615465 - DNA, 15 bp, Homo sapiens
ctcttaagaatcagt

SEQ ID NO: 1615466 - DNA, 15 bp, Homo sapiens
tcttaagaatcagtc

SEQ ID NO: 1615467 - DNA, 15 bp, Homo sapiens
cttaagaatcagtca

SEQ ID NO: 1615468 - DNA, 15 bp, Homo sapiens
ttaagaatcagtcat

SEQ ID NO: 1615469 - DNA, 15 bp, Homo sapiens
taagaatcagtcata

SEQ ID NO: 1615470 - DNA, 15 bp, Homo sapiens
aagaatcagtcataa

SEQ ID NO: 1615471 - DNA, 15 bp, Homo sapiens
agaatcagtcataat

SEQ ID NO: 1615472 - DNA, 15 bp, Homo sapiens
gaatcagtcataatc

SEQ ID NO: 1615473 - DNA, 15 bp, Homo sapiens
aatcagtcataatct

SEQ ID NO: 1615474 - DNA, 15 bp, Homo sapiens
atcagtcataatctg

SEQ ID NO: 1615475 - DNA, 15 bp, Homo sapiens
tcagtcataatctgt

SEQ ID NO: 1615476 - DNA, 15 bp, Homo sapiens
cagtcataatctgtc

SEQ ID NO: 1615477 - DNA, 15 bp, Homo sapiens
agtcataatctgtca

SEQ ID NO: 1615478 - DNA, 15 bp, Homo sapiens
gtcataatctgtcaa

SEQ ID NO: 1615479 - DNA, 15 bp, Homo sapiens
tcataatctgtcaaa

SEQ ID NO: 1615480 - DNA, 15 bp, Homo sapiens
cataatctgtcaaat

SEQ ID NO: 1615481 - DNA, 15 bp, Homo sapiens
ataatctgtcaaatg

SEQ ID NO: 1615482 - DNA, 15 bp, Homo sapiens
taatctgtcaaatgc

SEQ ID NO: 1615483 - DNA, 15 bp, Homo sapiens
aatctgtcaaatgca

SEQ ID NO: 1615484 - DNA, 15 bp, Homo sapiens
atctgtcaaatgcag

SEQ ID NO: 1615485 - DNA, 15 bp, Homo sapiens
tctgtcaaatgcaga

SEQ ID NO: 1615486 - DNA, 15 bp, Homo sapiens
ctgtcaaatgcagat

SEQ ID NO: 1615487 - DNA, 15 bp, Homo sapiens
tgtcaaatgcagatt

SEQ ID NO: 1615488 - DNA, 15 bp, Homo sapiens
gtcaaatgcagatta

SEQ ID NO: 1615489 - DNA, 15 bp, Homo sapiens
tcaaatgcagattat

SEQ ID NO: 1615490 - DNA, 15 bp, Homo sapiens
caaatgcagattata

SEQ ID NO: 1615491 - DNA, 15 bp, Homo sapiens
aaatgcagattatat

SEQ ID NO: 1615492 - DNA, 15 bp, Homo sapiens
aatgcagattatata

SEQ ID NO: 1615493 - DNA, 15 bp, Homo sapiens
atgcagattatatat

SEQ ID NO: 1615494 - DNA, 15 bp, Homo sapiens
tgcagattatatatg

SEQ ID NO: 1615495 - DNA, 15 bp, Homo sapiens
gcagattatatatgc

SEQ ID NO: 1615496 - DNA, 15 bp, Homo sapiens
cagattatatatgcc

SEQ ID NO: 1615497 - DNA, 15 bp, Homo sapiens
agattatatatgccc

SEQ ID NO: 1615498 - DNA, 15 bp, Homo sapiens
gattatatatgcccc

SEQ ID NO: 1615499 - DNA, 15 bp, Homo sapiens
attatatatgcccct

SEQ ID NO: 1615500 - DNA, 15 bp, Homo sapiens
ttatatatgcccctt

SEQ ID NO: 1615501 - DNA, 15 bp, Homo sapiens
tatatatgccccttg

SEQ ID NO: 1615502 - DNA, 15 bp, Homo sapiens
atatatgccccttgt

SEQ ID NO: 1615503 - DNA, 15 bp, Homo sapiens
tatatgccccttgtc

SEQ ID NO: 1615504 - DNA, 15 bp, Homo sapiens
atatgccccttgtct

SEQ ID NO: 1615505 - DNA, 15 bp, Homo sapiens
tatgccccttgtcta

SEQ ID NO: 1615506 - DNA, 15 bp, Homo sapiens
atgccccttgtctat

SEQ ID NO: 1615507 - DNA, 15 bp, Homo sapiens
tgccccttgtctata

SEQ ID NO: 1615508 - DNA, 15 bp, Homo sapiens
gccccttgtctatac

SEQ ID NO: 1615509 - DNA, 15 bp, Homo sapiens
ccccttgtctatacc

SEQ ID NO: 1615510 - DNA, 15 bp, Homo sapiens
cccttgtctatacca

SEQ ID NO: 1615511 - DNA, 15 bp, Homo sapiens
ccttgtctataccat

SEQ ID NO: 1615512 - DNA, 15 bp, Homo sapiens
cttgtctataccatc

SEQ ID NO: 1615513 - DNA, 15 bp, Homo sapiens
ttgtctataccatca

SEQ ID NO: 1615514 - DNA, 15 bp, Homo sapiens
tgtctataccatcag

SEQ ID NO: 1615515 - DNA, 15 bp, Homo sapiens
gtctataccatcagc

SEQ ID NO: 1615516 - DNA, 15 bp, Homo sapiens
tctataccatcagct

SEQ ID NO: 1615517 - DNA, 15 bp, Homo sapiens
ctataccatcagctt

SEQ ID NO: 1615518 - DNA, 15 bp, Homo sapiens
tataccatcagcttc

SEQ ID NO: 1615519 - DNA, 15 bp, Homo sapiens
ataccatcagcttct

SEQ ID NO: 1615520 - DNA, 15 bp, Homo sapiens
taccatcagcttctt

SEQ ID NO: 1615521 - DNA, 15 bp, Homo sapiens
accatcagcttctta

SEQ ID NO: 1615522 - DNA, 15 bp, Homo sapiens
ccatcagcttcttac

SEQ ID NO: 1615523 - DNA, 15 bp, Homo sapiens
catcagcttcttaca

SEQ ID NO: 1615524 - DNA, 15 bp, Homo sapiens
atcagcttcttacag

SEQ ID NO: 1615525 - DNA, 15 bp, Homo sapiens
tcagcttcttacagt

SEQ ID NO: 1615526 - DNA, 15 bp, Homo sapiens
cagcttcttacagta

SEQ ID NO: 1615527 - DNA, 15 bp, Homo sapiens
agcttcttacagtag

SEQ ID NO: 1615528 - DNA, 15 bp, Homo sapiens
gcttcttacagtaga

SEQ ID NO: 1615529 - DNA, 15 bp, Homo sapiens
cttcttacagtagaa

SEQ ID NO: 1615530 - DNA, 15 bp, Homo sapiens
ttcttacagtagaaa

SEQ ID NO: 1615531 - DNA, 15 bp, Homo sapiens
tcttacagtagaaaa

SEQ ID NO: 1615532 - DNA, 15 bp, Homo sapiens
cttacagtagaaaag

SEQ ID NO: 1615533 - DNA, 15 bp, Homo sapiens
ttacagtagaaaaga

SEQ ID NO: 1615534 - DNA, 15 bp, Homo sapiens
tacagtagaaaagag

SEQ ID NO: 1615535 - DNA, 15 bp, Homo sapiens
acagtagaaaagaga

SEQ ID NO: 1615536 - DNA, 15 bp, Homo sapiens
cagtagaaaagagag

SEQ ID NO: 1615537 - DNA, 15 bp, Homo sapiens
agtagaaaagagaga

SEQ ID NO: 1615538 - DNA, 15 bp, Homo sapiens
gtagaaaagagagaa

SEQ ID NO: 1615539 - DNA, 15 bp, Homo sapiens
tagaaaagagagaaa

SEQ ID NO: 1615540 - DNA, 15 bp, Homo sapiens
agaaaagagagaaag

SEQ ID NO: 1615541 - DNA, 15 bp, Homo sapiens
gaaaagagagaaaga

SEQ ID NO: 1615542 - DNA, 15 bp, Homo sapiens
aaaagagagaaagaa

SEQ ID NO: 1615543 - DNA, 15 bp, Homo sapiens
aaagagagaaagaaa

SEQ ID NO: 1615544 - DNA, 15 bp, Homo sapiens
aagagagaaagaaag

SEQ ID NO: 1615545 - DNA, 15 bp, Homo sapiens
agagagaaagaaagt

SEQ ID NO: 1615546 - DNA, 15 bp, Homo sapiens
gagagaaagaaagtg

SEQ ID NO: 1615547 - DNA, 15 bp, Homo sapiens
agagaaagaaagtgc

SEQ ID NO: 1615548 - DNA, 15 bp, Homo sapiens
gagaaagaaagtgca

SEQ ID NO: 1615549 - DNA, 15 bp, Homo sapiens
agaaagaaagtgcaa

SEQ ID NO: 1615550 - DNA, 15 bp, Homo sapiens
gaaagaaagtgcaaa

SEQ ID NO: 1615551 - DNA, 15 bp, Homo sapiens
aaagaaagtgcaaac

SEQ ID NO: 1615552 - DNA, 15 bp, Homo sapiens
aagaaagtgcaaaca

SEQ ID NO: 1615553 - DNA, 15 bp, Homo sapiens
agaaagtgcaaacaa

SEQ ID NO: 1615554 - DNA, 15 bp, Homo sapiens
gaaagtgcaaacaaa

SEQ ID NO: 1615555 - DNA, 15 bp, Homo sapiens
aaagtgcaaacaaag

SEQ ID NO: 1615556 - DNA, 15 bp, Homo sapiens
aagtgcaaacaaagg

SEQ ID NO: 1615557 - DNA, 15 bp, Homo sapiens
agtgcaaacaaaggc

SEQ ID NO: 1615558 - DNA, 15 bp, Homo sapiens
gtgcaaacaaaggcc

SEQ ID NO: 1615559 - DNA, 15 bp, Homo sapiens
tgcaaacaaaggcca

SEQ ID NO: 1615560 - DNA, 15 bp, Homo sapiens
gcaaacaaaggccag

SEQ ID NO: 1615561 - DNA, 15 bp, Homo sapiens
caaacaaaggccagg

SEQ ID NO: 1615562 - DNA, 15 bp, Homo sapiens
aaacaaaggccaggc

SEQ ID NO: 1615563 - DNA, 15 bp, Homo sapiens
aacaaaggccaggcg

SEQ ID NO: 1615564 - DNA, 15 bp, Homo sapiens
acaaaggccaggcgc

SEQ ID NO: 1615565 - DNA, 15 bp, Homo sapiens
caaaggccaggcgcg

SEQ ID NO: 1615566 - DNA, 15 bp, Homo sapiens
aaaggccaggcgcgg

SEQ ID NO: 1615567 - DNA, 15 bp, Homo sapiens
aaggccaggcgcggt

SEQ ID NO: 1615568 - DNA, 15 bp, Homo sapiens
aggcaggtggatcat

SEQ ID NO: 1615569 - DNA, 15 bp, Homo sapiens
ggcaggtggatcatc

SEQ ID NO: 1615570 - DNA, 15 bp, Homo sapiens
gcaggtggatcatct

SEQ ID NO: 1615571 - DNA, 15 bp, Homo sapiens
caggtggatcatctg

SEQ ID NO: 1615572 - DNA, 15 bp, Homo sapiens
aggtggatcatctga

SEQ ID NO: 1615573 - DNA, 15 bp, Homo sapiens
ccgggcatggtggcg

SEQ ID NO: 1615574 - DNA, 15 bp, Homo sapiens
cgggcatggtggcgc

SEQ ID NO: 1615575 - DNA, 15 bp, Homo sapiens
gggcatggtggcgca

SEQ ID NO: 1615576 - DNA, 15 bp, Homo sapiens
gtggcgcatgcctga

SEQ ID NO: 1615577 - DNA, 15 bp, Homo sapiens
tggcgcatgcctgaa

SEQ ID NO: 1615578 - DNA, 15 bp, Homo sapiens
ggcgcatgcctgaaa

SEQ ID NO: 1615579 - DNA, 15 bp, Homo sapiens
gcgcatgcctgaaat

SEQ ID NO: 1615580 - DNA, 15 bp, Homo sapiens
cgcatgcctgaaatc

SEQ ID NO: 1615581 - DNA, 15 bp, Homo sapiens
gcatgcctgaaatcc

SEQ ID NO: 1615582 - DNA, 15 bp, Homo sapiens
catgcctgaaatccc

SEQ ID NO: 1615583 - DNA, 15 bp, Homo sapiens
atgcctgaaatccca

SEQ ID NO: 1615584 - DNA, 15 bp, Homo sapiens
tgcctgaaatcccag

SEQ ID NO: 1615585 - DNA, 15 bp, Homo sapiens
gcctgaaatcccagc

SEQ ID NO: 1615586 - DNA, 15 bp, Homo sapiens
cctgaaatcccagct

SEQ ID NO: 1615587 - DNA, 15 bp, Homo sapiens
ctgaaatcccagcta

SEQ ID NO: 1615588 - DNA, 15 bp, Homo sapiens
tgaaatcccagctac

SEQ ID NO: 1615589 - DNA, 15 bp, Homo sapiens
gaaatcccagctact

SEQ ID NO: 1615590 - DNA, 15 bp, Homo sapiens
aaatcccagctactc

SEQ ID NO: 1615591 - DNA, 15 bp, Homo sapiens
aatcccagctactcc

SEQ ID NO: 1615592 - DNA, 15 bp, Homo sapiens
atcccagctactccg

SEQ ID NO: 1615593 - DNA, 15 bp, Homo sapiens
tccggaggctgaggc

SEQ ID NO: 1615594 - DNA, 15 bp, Homo sapiens
ccggaggctgaggca

SEQ ID NO: 1615595 - DNA, 15 bp, Homo sapiens
cggaggctgaggcag

SEQ ID NO: 1615596 - DNA, 15 bp, Homo sapiens
ggagaattgcttgag

SEQ ID NO: 1615597 - DNA, 15 bp, Homo sapiens
gaattgcttgagccc

SEQ ID NO: 1615598 - DNA, 15 bp, Homo sapiens
aattgcttgagcccg

SEQ ID NO: 1615599 - DNA, 15 bp, Homo sapiens
gagcccgggaggcac

SEQ ID NO: 1615600 - DNA, 15 bp, Homo sapiens
agcccgggaggcaca

SEQ ID NO: 1615601 - DNA, 15 bp, Homo sapiens
gcccgggaggcacag

SEQ ID NO: 1615602 - DNA, 15 bp, Homo sapiens
cccgggaggcacagg

SEQ ID NO: 1615603 - DNA, 15 bp, Homo sapiens
ccgggaggcacaggt

SEQ ID NO: 1615604 - DNA, 15 bp, Homo sapiens
cgggaggcacaggtt

SEQ ID NO: 1615605 - DNA, 15 bp, Homo sapiens
gggaggcacaggttg

SEQ ID NO: 1615606 - DNA, 15 bp, Homo sapiens
ggaggcacaggttgc

SEQ ID NO: 1615607 - DNA, 15 bp, Homo sapiens
gaggcacaggttgcg

SEQ ID NO: 1615608 - DNA, 15 bp, Homo sapiens
aggcacaggttgcgg

SEQ ID NO: 1615609 - DNA, 15 bp, Homo sapiens
ggcacaggttgcggc

SEQ ID NO: 1615610 - DNA, 15 bp, Homo sapiens
gcacaggttgcggcg

SEQ ID NO: 1615611 - DNA, 15 bp, Homo sapiens
cacaggttgcggcga

SEQ ID NO: 1615612 - DNA, 15 bp, Homo sapiens
acaggttgcggcgag

SEQ ID NO: 1615613 - DNA, 15 bp, Homo sapiens
caggttgcggcgagc

SEQ ID NO: 1615614 - DNA, 15 bp, Homo sapiens
aggttgcggcgagcc

SEQ ID NO: 1615615 - DNA, 15 bp, Homo sapiens
ggttgcggcgagccg

SEQ ID NO: 1615616 - DNA, 15 bp, Homo sapiens
gttgcggcgagccga

SEQ ID NO: 1615617 - DNA, 15 bp, Homo sapiens
ttgcggcgagccgag

SEQ ID NO: 1615618 - DNA, 15 bp, Homo sapiens
tgcggcgagccgaga

SEQ ID NO: 1615619 - DNA, 15 bp, Homo sapiens
gcggcgagccgagat

SEQ ID NO: 1615620 - DNA, 15 bp, Homo sapiens
cggcgagccgagatc

SEQ ID NO: 1615621 - DNA, 15 bp, Homo sapiens
ggcgagccgagatcg

SEQ ID NO: 1615622 - DNA, 15 bp, Homo sapiens
gcgagccgagatcgt

SEQ ID NO: 1615623 - DNA, 15 bp, Homo sapiens
cgagccgagatcgtg

SEQ ID NO: 1615624 - DNA, 15 bp, Homo sapiens
aaaaaaaaaaagcgc

SEQ ID NO: 1615625 - DNA, 15 bp, Homo sapiens
aaaaaaaaaagcgca

SEQ ID NO: 1615626 - DNA, 15 bp, Homo sapiens
aaaaaaaaagcgcaa

SEQ ID NO: 1615627 - DNA, 15 bp, Homo sapiens
aaaaaaaagcgcaaa

SEQ ID NO: 1615628 - DNA, 15 bp, Homo sapiens
aaaaaaagcgcaaac

SEQ ID NO: 1615629 - DNA, 15 bp, Homo sapiens
aaaaaagcgcaaaca

SEQ ID NO: 1615630 - DNA, 15 bp, Homo sapiens
aaaaagcgcaaacaa

SEQ ID NO: 1615631 - DNA, 15 bp, Homo sapiens
aaaagcgcaaacaaa

SEQ ID NO: 1615632 - DNA, 15 bp, Homo sapiens
aaagcgcaaacaaaa

SEQ ID NO: 1615633 - DNA, 15 bp, Homo sapiens
aagcgcaaacaaaaa

SEQ ID NO: 1615634 - DNA, 15 bp, Homo sapiens
agcgcaaacaaaaat

SEQ ID NO: 1615635 - DNA, 15 bp, Homo sapiens
gcgcaaacaaaaata

SEQ ID NO: 1615636 - DNA, 15 bp, Homo sapiens
cgcaaacaaaaatac

SEQ ID NO: 1615637 - DNA, 15 bp, Homo sapiens
gcaaacaaaaatact

SEQ ID NO: 1615638 - DNA, 15 bp, Homo sapiens
caaacaaaaatactt

SEQ ID NO: 1615639 - DNA, 15 bp, Homo sapiens
aaacaaaaatactta

SEQ ID NO: 1615640 - DNA, 15 bp, Homo sapiens
aacaaaaatacttat

SEQ ID NO: 1615641 - DNA, 15 bp, Homo sapiens
acaaaaatacttatt

SEQ ID NO: 1615642 - DNA, 15 bp, Homo sapiens
caaaaatacttattg

SEQ ID NO: 1615643 - DNA, 15 bp, Homo sapiens
aaaaatacttattgt

SEQ ID NO: 1615644 - DNA, 15 bp, Homo sapiens
aaaatacttattgtg

SEQ ID NO: 1615645 - DNA, 15 bp, Homo sapiens
aaatacttattgtga

SEQ ID NO: 1615646 - DNA, 15 bp, Homo sapiens
aatacttattgtgag

SEQ ID NO: 1615647 - DNA, 15 bp, Homo sapiens
atacttattgtgaga

SEQ ID NO: 1615648 - DNA, 15 bp, Homo sapiens
tacttattgtgagaa

SEQ ID NO: 1615649 - DNA, 15 bp, Homo sapiens
acttattgtgagaaa

SEQ ID NO: 1615650 - DNA, 15 bp, Homo sapiens
cttattgtgagaaaa

SEQ ID NO: 1615651 - DNA, 15 bp, Homo sapiens
ttattgtgagaaaat

SEQ ID NO: 1615652 - DNA, 15 bp, Homo sapiens
tattgtgagaaaatg

SEQ ID NO: 1615653 - DNA, 15 bp, Homo sapiens
attgtgagaaaatga

SEQ ID NO: 1615654 - DNA, 15 bp, Homo sapiens
ttgtgagaaaatgag

SEQ ID NO: 1615655 - DNA, 15 bp, Homo sapiens
tgtgagaaaatgagt

SEQ ID NO: 1615656 - DNA, 15 bp, Homo sapiens
gtgagaaaatgagtt

SEQ ID NO: 1615657 - DNA, 15 bp, Homo sapiens
tgagaaaatgagttt

SEQ ID NO: 1615658 - DNA, 15 bp, Homo sapiens
gagaaaatgagttta

SEQ ID NO: 1615659 - DNA, 15 bp, Homo sapiens
agaaaatgagtttag

SEQ ID NO: 1615660 - DNA, 15 bp, Homo sapiens
gaaaatgagtttagc

SEQ ID NO: 1615661 - DNA, 15 bp, Homo sapiens
aaaatgagtttagct

SEQ ID NO: 1615662 - DNA, 15 bp, Homo sapiens
aaatgagtttagctc

SEQ ID NO: 1615663 - DNA, 15 bp, Homo sapiens
aatgagtttagctca

SEQ ID NO: 1615664 - DNA, 15 bp, Homo sapiens
atgagtttagctcat

SEQ ID NO: 1615665 - DNA, 15 bp, Homo sapiens
tgagtttagctcatt

SEQ ID NO: 1615666 - DNA, 15 bp, Homo sapiens
gagtttagctcattc

SEQ ID NO: 1615667 - DNA, 15 bp, Homo sapiens
agtttagctcattca

SEQ ID NO: 1615668 - DNA, 15 bp, Homo sapiens
gtttagctcattcag

SEQ ID NO: 1615669 - DNA, 15 bp, Homo sapiens
tttagctcattcagt

SEQ ID NO: 1615670 - DNA, 15 bp, Homo sapiens
ttagctcattcagtt

SEQ ID NO: 1615671 - DNA, 15 bp, Homo sapiens
tagctcattcagttt

SEQ ID NO: 1615672 - DNA, 15 bp, Homo sapiens
agctcattcagtttt

SEQ ID NO: 1615673 - DNA, 15 bp, Homo sapiens
gctcattcagttttc

SEQ ID NO: 1615674 - DNA, 15 bp, Homo sapiens
ctcattcagttttca

SEQ ID NO: 1615675 - DNA, 15 bp, Homo sapiens
tcattcagttttcaa

SEQ ID NO: 1615676 - DNA, 15 bp, Homo sapiens
cattcagttttcaaa

SEQ ID NO: 1615677 - DNA, 15 bp, Homo sapiens
attcagttttcaaaa

SEQ ID NO: 1615678 - DNA, 15 bp, Homo sapiens
ttcagttttcaaaat

SEQ ID NO: 1615679 - DNA, 15 bp, Homo sapiens
tcagttttcaaaatt

SEQ ID NO: 1615680 - DNA, 15 bp, Homo sapiens
cagttttcaaaatta

SEQ ID NO: 1615681 - DNA, 15 bp, Homo sapiens
agttttcaaaattaa

SEQ ID NO: 1615682 - DNA, 15 bp, Homo sapiens
gttttcaaaattaat

SEQ ID NO: 1615683 - DNA, 15 bp, Homo sapiens
ttttcaaaattaata

SEQ ID NO: 1615684 - DNA, 15 bp, Homo sapiens
tttcaaaattaataa

SEQ ID NO: 1615685 - DNA, 15 bp, Homo sapiens
ttcaaaattaataat

SEQ ID NO: 1615686 - DNA, 15 bp, Homo sapiens
tcaaaattaataata

SEQ ID NO: 1615687 - DNA, 15 bp, Homo sapiens
caaaattaataatat

SEQ ID NO: 1615688 - DNA, 15 bp, Homo sapiens
aaaattaataatatt

SEQ ID NO: 1615689 - DNA, 15 bp, Homo sapiens
aaattaataatattt

SEQ ID NO: 1615690 - DNA, 15 bp, Homo sapiens
aattaataatatttt

SEQ ID NO: 1615691 - DNA, 15 bp, Homo sapiens
attaataatatttta

SEQ ID NO: 1615692 - DNA, 15 bp, Homo sapiens
ttaataatattttac

SEQ ID NO: 1615693 - DNA, 15 bp, Homo sapiens
taataatattttaca

SEQ ID NO: 1615694 - DNA, 15 bp, Homo sapiens
aataatattttacaa

SEQ ID NO: 1615695 - DNA, 15 bp, Homo sapiens
ataatattttacaat

SEQ ID NO: 1615696 - DNA, 15 bp, Homo sapiens
taatattttacaata

SEQ ID NO: 1615697 - DNA, 15 bp, Homo sapiens
aatattttacaataa

SEQ ID NO: 1615698 - DNA, 15 bp, Homo sapiens
atattttacaataat

SEQ ID NO: 1615699 - DNA, 15 bp, Homo sapiens
tattttacaataatt

SEQ ID NO: 1615700 - DNA, 15 bp, Homo sapiens
attttacaataatta

SEQ ID NO: 1615701 - DNA, 15 bp, Homo sapiens
ttttacaataattac

SEQ ID NO: 1615702 - DNA, 15 bp, Homo sapiens
tttacaataattacg

SEQ ID NO: 1615703 - DNA, 15 bp, Homo sapiens
ttacaataattacga

SEQ ID NO: 1615704 - DNA, 15 bp, Homo sapiens
tacaataattacgat

SEQ ID NO: 1615705 - DNA, 15 bp, Homo sapiens
acaataattacgatt

SEQ ID NO: 1615706 - DNA, 15 bp, Homo sapiens
caataattacgattg

SEQ ID NO: 1615707 - DNA, 15 bp, Homo sapiens
aataattacgattgc

SEQ ID NO: 1615708 - DNA, 15 bp, Homo sapiens
ataattacgattgct

SEQ ID NO: 1615709 - DNA, 15 bp, Homo sapiens
taattacgattgcta

SEQ ID NO: 1615710 - DNA, 15 bp, Homo sapiens
aattacgattgctag

SEQ ID NO: 1615711 - DNA, 15 bp, Homo sapiens
attacgattgctagt

SEQ ID NO: 1615712 - DNA, 15 bp, Homo sapiens
ttacgattgctagta

SEQ ID NO: 1615713 - DNA, 15 bp, Homo sapiens
tacgattgctagtag

SEQ ID NO: 1615714 - DNA, 15 bp, Homo sapiens
acgattgctagtagc

SEQ ID NO: 1615715 - DNA, 15 bp, Homo sapiens
cgattgctagtagca

SEQ ID NO: 1615716 - DNA, 15 bp, Homo sapiens
gattgctagtagcaa

SEQ ID NO: 1615717 - DNA, 15 bp, Homo sapiens
attgctagtagcaag

SEQ ID NO: 1615718 - DNA, 15 bp, Homo sapiens
ttgctagtagcaaga

SEQ ID NO: 1615719 - DNA, 15 bp, Homo sapiens
tgctagtagcaagac

SEQ ID NO: 1615720 - DNA, 15 bp, Homo sapiens
gctagtagcaagact

SEQ ID NO: 1615721 - DNA, 15 bp, Homo sapiens
ctagtagcaagacta

SEQ ID NO: 1615722 - DNA, 15 bp, Homo sapiens
tagtagcaagactaa

SEQ ID NO: 1615723 - DNA, 15 bp, Homo sapiens
agtagcaagactaat

SEQ ID NO: 1615724 - DNA, 15 bp, Homo sapiens
gtagcaagactaata

SEQ ID NO: 1615725 - DNA, 15 bp, Homo sapiens
tagcaagactaatag

SEQ ID NO: 1615726 - DNA, 15 bp, Homo sapiens
agcaagactaatagc

SEQ ID NO: 1615727 - DNA, 15 bp, Homo sapiens
gcaagactaatagcc

SEQ ID NO: 1615728 - DNA, 15 bp, Homo sapiens
caagactaatagcca

SEQ ID NO: 1615729 - DNA, 15 bp, Homo sapiens
aagactaatagccaa

SEQ ID NO: 1615730 - DNA, 15 bp, Homo sapiens
agactaatagccaaa

SEQ ID NO: 1615731 - DNA, 15 bp, Homo sapiens
gactaatagccaaac

SEQ ID NO: 1615732 - DNA, 15 bp, Homo sapiens
actaatagccaaaca

SEQ ID NO: 1615733 - DNA, 15 bp, Homo sapiens
ctaatagccaaacat

SEQ ID NO: 1615734 - DNA, 15 bp, Homo sapiens
taatagccaaacatt

SEQ ID NO: 1615735 - DNA, 15 bp, Homo sapiens
aatagccaaacatta

SEQ ID NO: 1615736 - DNA, 15 bp, Homo sapiens
atagccaaacattag

SEQ ID NO: 1615737 - DNA, 15 bp, Homo sapiens
tagccaaacattagc

SEQ ID NO: 1615738 - DNA, 15 bp, Homo sapiens
agccaaacattagcc

SEQ ID NO: 1615739 - DNA, 15 bp, Homo sapiens
gccaaacattagcct

SEQ ID NO: 1615740 - DNA, 15 bp, Homo sapiens
ccaaacattagcctt

SEQ ID NO: 1615741 - DNA, 15 bp, Homo sapiens
caaacattagccttc

SEQ ID NO: 1615742 - DNA, 15 bp, Homo sapiens
aaacattagccttca

SEQ ID NO: 1615743 - DNA, 15 bp, Homo sapiens
aacattagccttcaa

SEQ ID NO: 1615744 - DNA, 15 bp, Homo sapiens
acattagccttcaaa

SEQ ID NO: 1615745 - DNA, 15 bp, Homo sapiens
cattagccttcaaat

SEQ ID NO: 1615746 - DNA, 15 bp, Homo sapiens
attagccttcaaata

SEQ ID NO: 1615747 - DNA, 15 bp, Homo sapiens
ttagccttcaaatag

SEQ ID NO: 1615748 - DNA, 15 bp, Homo sapiens
tagccttcaaataga

SEQ ID NO: 1615749 - DNA, 15 bp, Homo sapiens
agccttcaaatagaa

SEQ ID NO: 1615750 - DNA, 15 bp, Homo sapiens
gccttcaaatagaat

SEQ ID NO: 1615751 - DNA, 15 bp, Homo sapiens
ccttcaaatagaatg

SEQ ID NO: 1615752 - DNA, 15 bp, Homo sapiens
cttcaaatagaatga

SEQ ID NO: 1615753 - DNA, 15 bp, Homo sapiens
ttcaaatagaatgac

SEQ ID NO: 1615754 - DNA, 15 bp, Homo sapiens
tcaaatagaatgacc

SEQ ID NO: 1615755 - DNA, 15 bp, Homo sapiens
caaatagaatgacct

SEQ ID NO: 1615756 - DNA, 15 bp, Homo sapiens
aaatagaatgacctt

SEQ ID NO: 1615757 - DNA, 15 bp, Homo sapiens
aatagaatgaccttg

SEQ ID NO: 1615758 - DNA, 15 bp, Homo sapiens
atagaatgaccttga

SEQ ID NO: 1615759 - DNA, 15 bp, Homo sapiens
tagaatgaccttgac

SEQ ID NO: 1615760 - DNA, 15 bp, Homo sapiens
agaatgaccttgacc

SEQ ID NO: 1615761 - DNA, 15 bp, Homo sapiens
gaatgaccttgacct

SEQ ID NO: 1615762 - DNA, 15 bp, Homo sapiens
aatgaccttgacctc

SEQ ID NO: 1615763 - DNA, 15 bp, Homo sapiens
atgaccttgacctca

SEQ ID NO: 1615764 - DNA, 15 bp, Homo sapiens
tgaccttgacctcag

SEQ ID NO: 1615765 - DNA, 15 bp, Homo sapiens
gaccttgacctcagt

SEQ ID NO: 1615766 - DNA, 15 bp, Homo sapiens
accttgacctcagtg

SEQ ID NO: 1615767 - DNA, 15 bp, Homo sapiens
ccttgacctcagtga

SEQ ID NO: 1615768 - DNA, 15 bp, Homo sapiens
cttgacctcagtgaa

SEQ ID NO: 1615769 - DNA, 15 bp, Homo sapiens
ttgacctcagtgaat

SEQ ID NO: 1615770 - DNA, 15 bp, Homo sapiens
tgacctcagtgaatg

SEQ ID NO: 1615771 - DNA, 15 bp, Homo sapiens
gacctcagtgaatgc

SEQ ID NO: 1615772 - DNA, 15 bp, Homo sapiens
acctcagtgaatgct

SEQ ID NO: 1615773 - DNA, 15 bp, Homo sapiens
cctcagtgaatgcta

SEQ ID NO: 1615774 - DNA, 15 bp, Homo sapiens
ctcagtgaatgctat

SEQ ID NO: 1615775 - DNA, 15 bp, Homo sapiens
tcagtgaatgctata

SEQ ID NO: 1615776 - DNA, 15 bp, Homo sapiens
cagtgaatgctatat

SEQ ID NO: 1615777 - DNA, 15 bp, Homo sapiens
agtgaatgctatatt

SEQ ID NO: 1615778 - DNA, 15 bp, Homo sapiens
gtgaatgctatattg

SEQ ID NO: 1615779 - DNA, 15 bp, Homo sapiens
tgaatgctatattgg

SEQ ID NO: 1615780 - DNA, 15 bp, Homo sapiens
gaatgctatattggt

SEQ ID NO: 1615781 - DNA, 15 bp, Homo sapiens
aatgctatattggtg

SEQ ID NO: 1615782 - DNA, 15 bp, Homo sapiens
atgctatattggtga

SEQ ID NO: 1615783 - DNA, 15 bp, Homo sapiens
tgctatattggtgat

SEQ ID NO: 1615784 - DNA, 15 bp, Homo sapiens
gctatattggtgatc

SEQ ID NO: 1615785 - DNA, 15 bp, Homo sapiens
ctatattggtgatct

SEQ ID NO: 1615786 - DNA, 15 bp, Homo sapiens
tatattggtgatctc

SEQ ID NO: 1615787 - DNA, 15 bp, Homo sapiens
atattggtgatctcc

SEQ ID NO: 1615788 - DNA, 15 bp, Homo sapiens
tattggtgatctcct

SEQ ID NO: 1615789 - DNA, 15 bp, Homo sapiens
attggtgatctcctg

SEQ ID NO: 1615790 - DNA, 15 bp, Homo sapiens
ttggtgatctcctgc

SEQ ID NO: 1615791 - DNA, 15 bp, Homo sapiens
tggtgatctcctgcc

SEQ ID NO: 1615792 - DNA, 15 bp, Homo sapiens
ggtgatctcctgccc

SEQ ID NO: 1615793 - DNA, 15 bp, Homo sapiens
gtgatctcctgccca

SEQ ID NO: 1615794 - DNA, 15 bp, Homo sapiens
tgatctcctgcccac

SEQ ID NO: 1615795 - DNA, 15 bp, Homo sapiens
gatctcctgcccact

SEQ ID NO: 1615796 - DNA, 15 bp, Homo sapiens
ctcctgcccactctg

SEQ ID NO: 1615797 - DNA, 15 bp, Homo sapiens
tcctgcccactctga

SEQ ID NO: 1615798 - DNA, 15 bp, Homo sapiens
cctgcccactctgac

SEQ ID NO: 1615799 - DNA, 15 bp, Homo sapiens
ctgcccactctgacc

SEQ ID NO: 1615800 - DNA, 15 bp, Homo sapiens
tgcccactctgacct

SEQ ID NO: 1615801 - DNA, 15 bp, Homo sapiens
gcccactctgacctc

SEQ ID NO: 1615802 - DNA, 15 bp, Homo sapiens
cccactctgacctca

SEQ ID NO: 1615803 - DNA, 15 bp, Homo sapiens
ccactctgacctcac

SEQ ID NO: 1615804 - DNA, 15 bp, Homo sapiens
cactctgacctcact

SEQ ID NO: 1615805 - DNA, 15 bp, Homo sapiens
actctgacctcactc

SEQ ID NO: 1615806 - DNA, 15 bp, Homo sapiens
ctctgacctcactct

SEQ ID NO: 1615807 - DNA, 15 bp, Homo sapiens
tctgacctcactctg

SEQ ID NO: 1615808 - DNA, 15 bp, Homo sapiens
ctgacctcactctgc

SEQ ID NO: 1615809 - DNA, 15 bp, Homo sapiens
tgacctcactctgcc

SEQ ID NO: 1615810 - DNA, 15 bp, Homo sapiens
gacctcactctgcct

SEQ ID NO: 1615811 - DNA, 15 bp, Homo sapiens
acctcactctgcctt

SEQ ID NO: 1615812 - DNA, 15 bp, Homo sapiens
cctcactctgccttt

SEQ ID NO: 1615813 - DNA, 15 bp, Homo sapiens
ctcactctgcctttc

SEQ ID NO: 1615814 - DNA, 15 bp, Homo sapiens
tcactctgcctttct

SEQ ID NO: 1615815 - DNA, 15 bp, Homo sapiens
cactctgcctttctc

SEQ ID NO: 1615816 - DNA, 15 bp, Homo sapiens
actctgcctttctct

SEQ ID NO: 1615817 - DNA, 15 bp, Homo sapiens
ctctgcctttctctc

SEQ ID NO: 1615818 - DNA, 15 bp, Homo sapiens
tctgcctttctctcc

SEQ ID NO: 1615819 - DNA, 15 bp, Homo sapiens
ctgcctttctctcct

SEQ ID NO: 1615820 - DNA, 15 bp, Homo sapiens
tgcctttctctcctg

SEQ ID NO: 1615821 - DNA, 15 bp, Homo sapiens
gcctttctctcctgg

SEQ ID NO: 1615822 - DNA, 15 bp, Homo sapiens
cctttctctcctgga

SEQ ID NO: 1615823 - DNA, 15 bp, Homo sapiens
ctttctctcctggat

SEQ ID NO: 1615824 - DNA, 15 bp, Homo sapiens
tttctctcctggatt

SEQ ID NO: 1615825 - DNA, 15 bp, Homo sapiens
ttctctcctggattg

SEQ ID NO: 1615826 - DNA, 15 bp, Homo sapiens
tctctcctggattgg

SEQ ID NO: 1615827 - DNA, 15 bp, Homo sapiens
ctctcctggattggg

SEQ ID NO: 1615828 - DNA, 15 bp, Homo sapiens
tctcctggattgggg

SEQ ID NO: 1615829 - DNA, 15 bp, Homo sapiens
ctcctggattgggga

SEQ ID NO: 1615830 - DNA, 15 bp, Homo sapiens
tcctggattggggaa

SEQ ID NO: 1615831 - DNA, 15 bp, Homo sapiens
cctggattggggaat

SEQ ID NO: 1615832 - DNA, 15 bp, Homo sapiens
ctggattggggaatg

SEQ ID NO: 1615833 - DNA, 15 bp, Homo sapiens
tggattggggaatgc

SEQ ID NO: 1615834 - DNA, 15 bp, Homo sapiens
ggattggggaatgct

SEQ ID NO: 1615835 - DNA, 15 bp, Homo sapiens
gattggggaatgctg

SEQ ID NO: 1615836 - DNA, 15 bp, Homo sapiens
attggggaatgctgt

SEQ ID NO: 1615837 - DNA, 15 bp, Homo sapiens
ttggggaatgctgtg

SEQ ID NO: 1615838 - DNA, 15 bp, Homo sapiens
tggggaatgctgtga

SEQ ID NO: 1615839 - DNA, 15 bp, Homo sapiens
ggggaatgctgtgac

SEQ ID NO: 1615840 - DNA, 15 bp, Homo sapiens
gggaatgctgtgacc

SEQ ID NO: 1615841 - DNA, 15 bp, Homo sapiens
ggaatgctgtgacct

SEQ ID NO: 1615842 - DNA, 15 bp, Homo sapiens
gaatgctgtgacctc

SEQ ID NO: 1615843 - DNA, 15 bp, Homo sapiens
aatgctgtgacctcc

SEQ ID NO: 1615844 - DNA, 15 bp, Homo sapiens
atgctgtgacctccg

SEQ ID NO: 1615845 - DNA, 15 bp, Homo sapiens
tgctgtgacctccgt

SEQ ID NO: 1615846 - DNA, 15 bp, Homo sapiens
gctgtgacctccgta

SEQ ID NO: 1615847 - DNA, 15 bp, Homo sapiens
ctgtgacctccgtat

SEQ ID NO: 1615848 - DNA, 15 bp, Homo sapiens
tgtgacctccgtatt

SEQ ID NO: 1615849 - DNA, 15 bp, Homo sapiens
gtgacctccgtattt

SEQ ID NO: 1615850 - DNA, 15 bp, Homo sapiens
tgacctccgtatttc

SEQ ID NO: 1615851 - DNA, 15 bp, Homo sapiens
gacctccgtatttcc

SEQ ID NO: 1615852 - DNA, 15 bp, Homo sapiens
acctccgtatttcct

SEQ ID NO: 1615853 - DNA, 15 bp, Homo sapiens
cctccgtatttcctc

SEQ ID NO: 1615854 - DNA, 15 bp, Homo sapiens
ctccgtatttcctct

SEQ ID NO: 1615855 - DNA, 15 bp, Homo sapiens
tccgtatttcctctt

SEQ ID NO: 1615856 - DNA, 15 bp, Homo sapiens
ccgtatttcctcttt

SEQ ID NO: 1615857 - DNA, 15 bp, Homo sapiens
cgtatttcctctttc

SEQ ID NO: 1615858 - DNA, 15 bp, Homo sapiens
gtatttcctctttct

SEQ ID NO: 1615859 - DNA, 15 bp, Homo sapiens
tatttcctctttctc

SEQ ID NO: 1615860 - DNA, 15 bp, Homo sapiens
atttcctctttctct

SEQ ID NO: 1615861 - DNA, 15 bp, Homo sapiens
tttcctctttctctt

SEQ ID NO: 1615862 - DNA, 15 bp, Homo sapiens
ttcctctttctcttt

SEQ ID NO: 1615863 - DNA, 15 bp, Homo sapiens
tcctctttctctttt

SEQ ID NO: 1615864 - DNA, 15 bp, Homo sapiens
cctctttctcttttt

SEQ ID NO: 1615865 - DNA, 15 bp, Homo sapiens
ctctttctctttttc

SEQ ID NO: 1615866 - DNA, 15 bp, Homo sapiens
tctttctctttttcc

SEQ ID NO: 1615867 - DNA, 15 bp, Homo sapiens
ctttctctttttcct

SEQ ID NO: 1615868 - DNA, 15 bp, Homo sapiens
tttctctttttccta

SEQ ID NO: 1615869 - DNA, 15 bp, Homo sapiens
ttctctttttcctat

SEQ ID NO: 1615870 - DNA, 15 bp, Homo sapiens
tctctttttcctata

SEQ ID NO: 1615871 - DNA, 15 bp, Homo sapiens
ctctttttcctatag

SEQ ID NO: 1615872 - DNA, 15 bp, Homo sapiens
tctttttcctatagg

SEQ ID NO: 1615873 - DNA, 15 bp, Homo sapiens
ctttttcctatagga

SEQ ID NO: 1615874 - DNA, 15 bp, Homo sapiens
tttttcctataggac

SEQ ID NO: 1615875 - DNA, 15 bp, Homo sapiens
ttttcctataggaca

SEQ ID NO: 1615876 - DNA, 15 bp, Homo sapiens
tttcctataggacat

SEQ ID NO: 1615877 - DNA, 15 bp, Homo sapiens
ttcctataggacatg

SEQ ID NO: 1615878 - DNA, 15 bp, Homo sapiens
tcctataggacatgc

SEQ ID NO: 1615879 - DNA, 15 bp, Homo sapiens
cctataggacatgct

SEQ ID NO: 1615880 - DNA, 15 bp, Homo sapiens
ctataggacatgctg

SEQ ID NO: 1615881 - DNA, 15 bp, Homo sapiens
tataggacatgctgc

SEQ ID NO: 1615882 - DNA, 15 bp, Homo sapiens
ataggacatgctgct

SEQ ID NO: 1615883 - DNA, 15 bp, Homo sapiens
taggacatgctgctc

SEQ ID NO: 1615884 - DNA, 15 bp, Homo sapiens
aggacatgctgctca

SEQ ID NO: 1615885 - DNA, 15 bp, Homo sapiens
ggacatgctgctcag

SEQ ID NO: 1615886 - DNA, 15 bp, Homo sapiens
gacatgctgctcagt

SEQ ID NO: 1615887 - DNA, 15 bp, Homo sapiens
acatgctgctcagtt

SEQ ID NO: 1615888 - DNA, 15 bp, Homo sapiens
catgctgctcagttc

SEQ ID NO: 1615889 - DNA, 15 bp, Homo sapiens
atgctgctcagttcc

SEQ ID NO: 1615890 - DNA, 15 bp, Homo sapiens
tgctgctcagttcct

SEQ ID NO: 1615891 - DNA, 15 bp, Homo sapiens
gctgctcagttcctc

SEQ ID NO: 1615892 - DNA, 15 bp, Homo sapiens
ctgctcagttcctcc

SEQ ID NO: 1615893 - DNA, 15 bp, Homo sapiens
tgctcagttcctcca

SEQ ID NO: 1615894 - DNA, 15 bp, Homo sapiens
gctcagttcctccag

SEQ ID NO: 1615895 - DNA, 15 bp, Homo sapiens
ctcagttcctccagg

SEQ ID NO: 1615896 - DNA, 15 bp, Homo sapiens
tcagttcctccagga

SEQ ID NO: 1615897 - DNA, 15 bp, Homo sapiens
cagttcctccaggac

SEQ ID NO: 1615898 - DNA, 15 bp, Homo sapiens
agttcctccaggaca

SEQ ID NO: 1615899 - DNA, 15 bp, Homo sapiens
gttcctccaggacat

SEQ ID NO: 1615900 - DNA, 15 bp, Homo sapiens
ttcctccaggacatg

SEQ ID NO: 1615901 - DNA, 15 bp, Homo sapiens
tcctccaggacatga

SEQ ID NO: 1615902 - DNA, 15 bp, Homo sapiens
cctccaggacatgag

SEQ ID NO: 1615903 - DNA, 15 bp, Homo sapiens
ctccaggacatgaga

SEQ ID NO: 1615904 - DNA, 15 bp, Homo sapiens
tccaggacatgagaa

SEQ ID NO: 1615905 - DNA, 15 bp, Homo sapiens
ccaggacatgagaag

SEQ ID NO: 1615906 - DNA, 15 bp, Homo sapiens
caggacatgagaaga

SEQ ID NO: 1615907 - DNA, 15 bp, Homo sapiens
aggacatgagaagat

SEQ ID NO: 1615908 - DNA, 15 bp, Homo sapiens
ggacatgagaagata

SEQ ID NO: 1615909 - DNA, 15 bp, Homo sapiens
gacatgagaagatat

SEQ ID NO: 1615910 - DNA, 15 bp, Homo sapiens
acatgagaagatata

SEQ ID NO: 1615911 - DNA, 15 bp, Homo sapiens
catgagaagatatat

SEQ ID NO: 1615912 - DNA, 15 bp, Homo sapiens
atgagaagatatatg

SEQ ID NO: 1615913 - DNA, 15 bp, Homo sapiens
tgagaagatatatgc

SEQ ID NO: 1615914 - DNA, 15 bp, Homo sapiens
gagaagatatatgcc

SEQ ID NO: 1615915 - DNA, 15 bp, Homo sapiens
agaagatatatgcca

SEQ ID NO: 1615916 - DNA, 15 bp, Homo sapiens
gaagatatatgccac

SEQ ID NO: 1615917 - DNA, 15 bp, Homo sapiens
aagatatatgccacc

SEQ ID NO: 1615918 - DNA, 15 bp, Homo sapiens
agatatatgccacca

SEQ ID NO: 1615919 - DNA, 15 bp, Homo sapiens
gatatatgccaccag

SEQ ID NO: 1615920 - DNA, 15 bp, Homo sapiens
atatatgccaccagc

SEQ ID NO: 1615921 - DNA, 15 bp, Homo sapiens
tatatgccaccagct

SEQ ID NO: 1615922 - DNA, 15 bp, Homo sapiens
atatgccaccagctc

SEQ ID NO: 1615923 - DNA, 15 bp, Homo sapiens
tatgccaccagctca

SEQ ID NO: 1615924 - DNA, 15 bp, Homo sapiens
atgccaccagctcac

SEQ ID NO: 1615925 - DNA, 15 bp, Homo sapiens
tgccaccagctcaca

SEQ ID NO: 1615926 - DNA, 15 bp, Homo sapiens
gccaccagctcacag

SEQ ID NO: 1615927 - DNA, 15 bp, Homo sapiens
ccaccagctcacagg

SEQ ID NO: 1615928 - DNA, 15 bp, Homo sapiens
caccagctcacagga

SEQ ID NO: 1615929 - DNA, 15 bp, Homo sapiens
accagctcacaggaa

SEQ ID NO: 1615930 - DNA, 15 bp, Homo sapiens
ccagctcacaggaac

SEQ ID NO: 1615931 - DNA, 15 bp, Homo sapiens
cagctcacaggaact

SEQ ID NO: 1615932 - DNA, 15 bp, Homo sapiens
agctcacaggaactt

SEQ ID NO: 1615933 - DNA, 15 bp, Homo sapiens
gctcacaggaacttc

SEQ ID NO: 1615934 - DNA, 15 bp, Homo sapiens
ctcacaggaacttcc

SEQ ID NO: 1615935 - DNA, 15 bp, Homo sapiens
tcacaggaacttcct

SEQ ID NO: 1615936 - DNA, 15 bp, Homo sapiens
cacaggaacttcctg

SEQ ID NO: 1615937 - DNA, 15 bp, Homo sapiens
acaggaacttcctgt

SEQ ID NO: 1615938 - DNA, 15 bp, Homo sapiens
caggaacttcctgtg

SEQ ID NO: 1615939 - DNA, 15 bp, Homo sapiens
aggaacttcctgtgc

SEQ ID NO: 1615940 - DNA, 15 bp, Homo sapiens
ggaacttcctgtgct

SEQ ID NO: 1615941 - DNA, 15 bp, Homo sapiens
gaacttcctgtgctc

SEQ ID NO: 1615942 - DNA, 15 bp, Homo sapiens
aacttcctgtgctca

SEQ ID NO: 1615943 - DNA, 15 bp, Homo sapiens
acttcctgtgctcat

SEQ ID NO: 1615944 - DNA, 15 bp, Homo sapiens
cttcctgtgctcatt

SEQ ID NO: 1615945 - DNA, 15 bp, Homo sapiens
ttcctgtgctcatta

SEQ ID NO: 1615946 - DNA, 15 bp, Homo sapiens
tcctgtgctcattag

SEQ ID NO: 1615947 - DNA, 15 bp, Homo sapiens
cctgtgctcattaga

SEQ ID NO: 1615948 - DNA, 15 bp, Homo sapiens
ctgtgctcattagag

SEQ ID NO: 1615949 - DNA, 15 bp, Homo sapiens
tgtgctcattagagt

SEQ ID NO: 1615950 - DNA, 15 bp, Homo sapiens
gtgctcattagagtc

SEQ ID NO: 1615951 - DNA, 15 bp, Homo sapiens
tgctcattagagtca

SEQ ID NO: 1615952 - DNA, 15 bp, Homo sapiens
gctcattagagtcaa

SEQ ID NO: 1615953 - DNA, 15 bp, Homo sapiens
ctcattagagtcaaa

SEQ ID NO: 1615954 - DNA, 15 bp, Homo sapiens
tcattagagtcaaat

SEQ ID NO: 1615955 - DNA, 15 bp, Homo sapiens
cattagagtcaaatc

SEQ ID NO: 1615956 - DNA, 15 bp, Homo sapiens
attagagtcaaatcc

SEQ ID NO: 1615957 - DNA, 15 bp, Homo sapiens
ttagagtcaaatccc

SEQ ID NO: 1615958 - DNA, 15 bp, Homo sapiens
tagagtcaaatccct

SEQ ID NO: 1615959 - DNA, 15 bp, Homo sapiens
agagtcaaatccctc

SEQ ID NO: 1615960 - DNA, 15 bp, Homo sapiens
gagtcaaatccctca

SEQ ID NO: 1615961 - DNA, 15 bp, Homo sapiens
agtcaaatccctcag

SEQ ID NO: 1615962 - DNA, 15 bp, Homo sapiens
gtcaaatccctcagt

SEQ ID NO: 1615963 - DNA, 15 bp, Homo sapiens
tcaaatccctcagtc

SEQ ID NO: 1615964 - DNA, 15 bp, Homo sapiens
caaatccctcagtcc

SEQ ID NO: 1615965 - DNA, 15 bp, Homo sapiens
aaatccctcagtccg

SEQ ID NO: 1615966 - DNA, 15 bp, Homo sapiens
aatccctcagtccgt

SEQ ID NO: 1615967 - DNA, 15 bp, Homo sapiens
atccctcagtccgtg

SEQ ID NO: 1615968 - DNA, 15 bp, Homo sapiens
tccctcagtccgtga

SEQ ID NO: 1615969 - DNA, 15 bp, Homo sapiens
ccctcagtccgtgag

SEQ ID NO: 1615970 - DNA, 15 bp, Homo sapiens
cctcagtccgtgagt

SEQ ID NO: 1615971 - DNA, 15 bp, Homo sapiens
ctcagtccgtgagtt

SEQ ID NO: 1615972 - DNA, 15 bp, Homo sapiens
tcagtccgtgagttt

SEQ ID NO: 1615973 - DNA, 15 bp, Homo sapiens
cagtccgtgagtttg

SEQ ID NO: 1615974 - DNA, 15 bp, Homo sapiens
agtccgtgagtttgt

SEQ ID NO: 1615975 - DNA, 15 bp, Homo sapiens
gtccgtgagtttgtc

SEQ ID NO: 1615976 - DNA, 15 bp, Homo sapiens
tccgtgagtttgtcc

SEQ ID NO: 1615977 - DNA, 15 bp, Homo sapiens
ccgtgagtttgtcct

SEQ ID NO: 1615978 - DNA, 15 bp, Homo sapiens
cgtgagtttgtcctt

SEQ ID NO: 1615979 - DNA, 15 bp, Homo sapiens
gtgagtttgtccttt

SEQ ID NO: 1615980 - DNA, 15 bp, Homo sapiens
tgagtttgtcctttc

SEQ ID NO: 1615981 - DNA, 15 bp, Homo sapiens
gagtttgtcctttca

SEQ ID NO: 1615982 - DNA, 15 bp, Homo sapiens
agtttgtcctttcaa

SEQ ID NO: 1615983 - DNA, 15 bp, Homo sapiens
gtttgtcctttcaaa

SEQ ID NO: 1615984 - DNA, 15 bp, Homo sapiens
tttgtcctttcaaaa

SEQ ID NO: 1615985 - DNA, 15 bp, Homo sapiens
ttgtcctttcaaaag

SEQ ID NO: 1615986 - DNA, 15 bp, Homo sapiens
tgtcctttcaaaagg

SEQ ID NO: 1615987 - DNA, 15 bp, Homo sapiens
gtcctttcaaaaggt

SEQ ID NO: 1615988 - DNA, 15 bp, Homo sapiens
tcctttcaaaaggtg

SEQ ID NO: 1615989 - DNA, 15 bp, Homo sapiens
cctttcaaaaggtga

SEQ ID NO: 1615990 - DNA, 15 bp, Homo sapiens
ctttcaaaaggtgat

SEQ ID NO: 1615991 - DNA, 15 bp, Homo sapiens
tttcaaaaggtgatg

SEQ ID NO: 1615992 - DNA, 15 bp, Homo sapiens
ttcaaaaggtgatgc

SEQ ID NO: 1615993 - DNA, 15 bp, Homo sapiens
tcaaaaggtgatgct

SEQ ID NO: 1615994 - DNA, 15 bp, Homo sapiens
caaaaggtgatgctg

SEQ ID NO: 1615995 - DNA, 15 bp, Homo sapiens
aaaaggtgatgctgg

SEQ ID NO: 1615996 - DNA, 15 bp, Homo sapiens
aaaggtgatgctggc

SEQ ID NO: 1615997 - DNA, 15 bp, Homo sapiens
aaggtgatgctggcc

SEQ ID NO: 1615998 - DNA, 15 bp, Homo sapiens
aggtgatgctggcct

SEQ ID NO: 1615999 - DNA, 15 bp, Homo sapiens
ggtgatgctggcctg

SEQ ID NO: 1616000 - DNA, 15 bp, Homo sapiens
gtgatgctggcctgc

SEQ ID NO: 1616001 - DNA, 15 bp, Homo sapiens
tgatgctggcctgcg

SEQ ID NO: 1616002 - DNA, 15 bp, Homo sapiens
gatgctggcctgcgg

SEQ ID NO: 1616003 - DNA, 15 bp, Homo sapiens
atgctggcctgcggg

SEQ ID NO: 1616004 - DNA, 15 bp, Homo sapiens
tgctggcctgcggga

SEQ ID NO: 1616005 - DNA, 15 bp, Homo sapiens
gctggcctgcgggaa

SEQ ID NO: 1616006 - DNA, 15 bp, Homo sapiens
ctggcctgcgggaag

SEQ ID NO: 1616007 - DNA, 15 bp, Homo sapiens
tggcctgcgggaagc

SEQ ID NO: 1616008 - DNA, 15 bp, Homo sapiens
ggcctgcgggaagct

SEQ ID NO: 1616009 - DNA, 15 bp, Homo sapiens
gcctgcgggaagctt

SEQ ID NO: 1616010 - DNA, 15 bp, Homo sapiens
cctgcgggaagctta

SEQ ID NO: 1616011 - DNA, 15 bp, Homo sapiens
ctgcgggaagcttat

SEQ ID NO: 1616012 - DNA, 15 bp, Homo sapiens
tgcgggaagcttatg

SEQ ID NO: 1616013 - DNA, 15 bp, Homo sapiens
gcgggaagcttatga

SEQ ID NO: 1616014 - DNA, 15 bp, Homo sapiens
cgggaagcttatgac

SEQ ID NO: 1616015 - DNA, 15 bp, Homo sapiens
gggaagcttatgacg

SEQ ID NO: 1616016 - DNA, 15 bp, Homo sapiens
ggaagcttatgacgc

SEQ ID NO: 1616017 - DNA, 15 bp, Homo sapiens
gaagcttatgacgcc

SEQ ID NO: 1616018 - DNA, 15 bp, Homo sapiens
aagcttatgacgcct

SEQ ID NO: 1616019 - DNA, 15 bp, Homo sapiens
agcttatgacgcctg

SEQ ID NO: 1616020 - DNA, 15 bp, Homo sapiens
gcttatgacgcctgt

SEQ ID NO: 1616021 - DNA, 15 bp, Homo sapiens
cttatgacgcctgtg

SEQ ID NO: 1616022 - DNA, 15 bp, Homo sapiens
ttatgacgcctgtgt

SEQ ID NO: 1616023 - DNA, 15 bp, Homo sapiens
tatgacgcctgtgtg

SEQ ID NO: 1616024 - DNA, 15 bp, Homo sapiens
atgacgcctgtgtga

SEQ ID NO: 1616025 - DNA, 15 bp, Homo sapiens
tgacgcctgtgtgaa

SEQ ID NO: 1616026 - DNA, 15 bp, Homo sapiens
gacgcctgtgtgaaa

SEQ ID NO: 1616027 - DNA, 15 bp, Homo sapiens
acgcctgtgtgaaag

SEQ ID NO: 1616028 - DNA, 15 bp, Homo sapiens
cgcctgtgtgaaagc

SEQ ID NO: 1616029 - DNA, 15 bp, Homo sapiens
gcctgtgtgaaagct

SEQ ID NO: 1616030 - DNA, 15 bp, Homo sapiens
cctgtgtgaaagctc

SEQ ID NO: 1616031 - DNA, 15 bp, Homo sapiens
ctgtgtgaaagctct

SEQ ID NO: 1616032 - DNA, 15 bp, Homo sapiens
tgtgtgaaagctctg

SEQ ID NO: 1616033 - DNA, 15 bp, Homo sapiens
gtgtgaaagctctgg

SEQ ID NO: 1616034 - DNA, 15 bp, Homo sapiens
tgtgaaagctctggt

SEQ ID NO: 1616035 - DNA, 15 bp, Homo sapiens
gtgaaagctctggtc

SEQ ID NO: 1616036 - DNA, 15 bp, Homo sapiens
tgaaagctctggtct

SEQ ID NO: 1616037 - DNA, 15 bp, Homo sapiens
gaaagctctggtctc

SEQ ID NO: 1616038 - DNA, 15 bp, Homo sapiens
aaagctctggtctcc

SEQ ID NO: 1616039 - DNA, 15 bp, Homo sapiens
aagctctggtctccc

SEQ ID NO: 1616040 - DNA, 15 bp, Homo sapiens
agctctggtctccct

SEQ ID NO: 1616041 - DNA, 15 bp, Homo sapiens
gctctggtctccctg

SEQ ID NO: 1616042 - DNA, 15 bp, Homo sapiens
ctctggtctccctga

SEQ ID NO: 1616043 - DNA, 15 bp, Homo sapiens
tctggtctccctgag

SEQ ID NO: 1616044 - DNA, 15 bp, Homo sapiens
ctggtctccctgagg

SEQ ID NO: 1616045 - DNA, 15 bp, Homo sapiens
tggtctccctgagga

SEQ ID NO: 1616046 - DNA, 15 bp, Homo sapiens
ggtctccctgaggag

SEQ ID NO: 1616047 - DNA, 15 bp, Homo sapiens
gtctccctgaggagc

SEQ ID NO: 1616048 - DNA, 15 bp, Homo sapiens
tctccctgaggagct

SEQ ID NO: 1616049 - DNA, 15 bp, Homo sapiens
ctccctgaggagcta

SEQ ID NO: 1616050 - DNA, 15 bp, Homo sapiens
tccctgaggagctac

SEQ ID NO: 1616051 - DNA, 15 bp, Homo sapiens
ccctgaggagctacc

SEQ ID NO: 1616052 - DNA, 15 bp, Homo sapiens
cctgaggagctacca

SEQ ID NO: 1616053 - DNA, 15 bp, Homo sapiens
ctgaggagctaccat

SEQ ID NO: 1616054 - DNA, 15 bp, Homo sapiens
tgaggagctaccatc

SEQ ID NO: 1616055 - DNA, 15 bp, Homo sapiens
gaggagctaccatct

SEQ ID NO: 1616056 - DNA, 15 bp, Homo sapiens
aggagctaccatctg

SEQ ID NO: 1616057 - DNA, 15 bp, Homo sapiens
ggagctaccatctgc

SEQ ID NO: 1616058 - DNA, 15 bp, Homo sapiens
gagctaccatctgca

SEQ ID NO: 1616059 - DNA, 15 bp, Homo sapiens
agctaccatctgcaa

SEQ ID NO: 1616060 - DNA, 15 bp, Homo sapiens
gctaccatctgcaaa

SEQ ID NO: 1616061 - DNA, 15 bp, Homo sapiens
ctaccatctgcaaat

SEQ ID NO: 1616062 - DNA, 15 bp, Homo sapiens
taccatctgcaaatc

SEQ ID NO: 1616063 - DNA, 15 bp, Homo sapiens
accatctgcaaatcg

SEQ ID NO: 1616064 - DNA, 15 bp, Homo sapiens
ccatctgcaaatcgt

SEQ ID NO: 1616065 - DNA, 15 bp, Homo sapiens
catctgcaaatcgtg

SEQ ID NO: 1616066 - DNA, 15 bp, Homo sapiens
atctgcaaatcgtga

SEQ ID NO: 1616067 - DNA, 15 bp, Homo sapiens
tctgcaaatcgtgac

SEQ ID NO: 1616068 - DNA, 15 bp, Homo sapiens
ctgcaaatcgtgact

SEQ ID NO: 1616069 - DNA, 15 bp, Homo sapiens
tgcaaatcgtgacta

SEQ ID NO: 1616070 - DNA, 15 bp, Homo sapiens
gcaaatcgtgactaa

SEQ ID NO: 1616071 - DNA, 15 bp, Homo sapiens
caaatcgtgactaag

SEQ ID NO: 1616072 - DNA, 15 bp, Homo sapiens
aaatcgtgactaagt

SEQ ID NO: 1616073 - DNA, 15 bp, Homo sapiens
aatcgtgactaagta

SEQ ID NO: 1616074 - DNA, 15 bp, Homo sapiens
atcgtgactaagtac

SEQ ID NO: 1616075 - DNA, 15 bp, Homo sapiens
tcgtgactaagtaca

SEQ ID NO: 1616076 - DNA, 15 bp, Homo sapiens
cgtgactaagtacat

SEQ ID NO: 1616077 - DNA, 15 bp, Homo sapiens
gtgactaagtacatc

SEQ ID NO: 1616078 - DNA, 15 bp, Homo sapiens
tgactaagtacatcc

SEQ ID NO: 1616079 - DNA, 15 bp, Homo sapiens
gactaagtacatcct

SEQ ID NO: 1616080 - DNA, 15 bp, Homo sapiens
actaagtacatcctg

SEQ ID NO: 1616081 - DNA, 15 bp, Homo sapiens
ctaagtacatcctga

SEQ ID NO: 1616082 - DNA, 15 bp, Homo sapiens
taagtacatcctgat

SEQ ID NO: 1616083 - DNA, 15 bp, Homo sapiens
aagtacatcctgatt

SEQ ID NO: 1616084 - DNA, 15 bp, Homo sapiens
agtacatcctgattc

SEQ ID NO: 1616085 - DNA, 15 bp, Homo sapiens
gtacatcctgattcc

SEQ ID NO: 1616086 - DNA, 15 bp, Homo sapiens
tacatcctgattcct

SEQ ID NO: 1616087 - DNA, 15 bp, Homo sapiens
acatcctgattcctg

SEQ ID NO: 1616088 - DNA, 15 bp, Homo sapiens
catcctgattcctgc

SEQ ID NO: 1616089 - DNA, 15 bp, Homo sapiens
atcctgattcctgca

SEQ ID NO: 1616090 - DNA, 15 bp, Homo sapiens
tcctgattcctgcaa

SEQ ID NO: 1616091 - DNA, 15 bp, Homo sapiens
cctgattcctgcaag

SEQ ID NO: 1616092 - DNA, 15 bp, Homo sapiens
ctgattcctgcaagc

SEQ ID NO: 1616093 - DNA, 15 bp, Homo sapiens
tgattcctgcaagcc

SEQ ID NO: 1616094 - DNA, 15 bp, Homo sapiens
gattcctgcaagcca

SEQ ID NO: 1616095 - DNA, 15 bp, Homo sapiens
attcctgcaagccag

SEQ ID NO: 1616096 - DNA, 15 bp, Homo sapiens
ttcctgcaagccagc

SEQ ID NO: 1616097 - DNA, 15 bp, Homo sapiens
tcctgcaagccagca

SEQ ID NO: 1616098 - DNA, 15 bp, Homo sapiens
cctgcaagccagcag

SEQ ID NO: 1616099 - DNA, 15 bp, Homo sapiens
ctgcaagccagcagc

SEQ ID NO: 1616100 - DNA, 15 bp, Homo sapiens
tgcaagccagcagcc

SEQ ID NO: 1616101 - DNA, 15 bp, Homo sapiens
gcaagccagcagcca

SEQ ID NO: 1616102 - DNA, 15 bp, Homo sapiens
caagccagcagccaa

SEQ ID NO: 1616103 - DNA, 15 bp, Homo sapiens
aagccagcagccaaa

SEQ ID NO: 1616104 - DNA, 15 bp, Homo sapiens
agccagcagccaaag

SEQ ID NO: 1616105 - DNA, 15 bp, Homo sapiens
gccagcagccaaagg

SEQ ID NO: 1616106 - DNA, 15 bp, Homo sapiens
ccagcagccaaagga

SEQ ID NO: 1616107 - DNA, 15 bp, Homo sapiens
cagcagccaaaggag

SEQ ID NO: 1616108 - DNA, 15 bp, Homo sapiens
agcagccaaaggaga

SEQ ID NO: 1616109 - DNA, 15 bp, Homo sapiens
gcagccaaaggagaa

SEQ ID NO: 1616110 - DNA, 15 bp, Homo sapiens
cagccaaaggagaat

SEQ ID NO: 1616111 - DNA, 15 bp, Homo sapiens
agccaaaggagaata

SEQ ID NO: 1616112 - DNA, 15 bp, Homo sapiens
gccaaaggagaataa

SEQ ID NO: 1616113 - DNA, 15 bp, Homo sapiens
ccaaaggagaataag

SEQ ID NO: 1616114 - DNA, 15 bp, Homo sapiens
caaaggagaataaga

SEQ ID NO: 1616115 - DNA, 15 bp, Homo sapiens
aaaggagaataagac

SEQ ID NO: 1616116 - DNA, 15 bp, Homo sapiens
aaggagaataagacc

SEQ ID NO: 1616117 - DNA, 15 bp, Homo sapiens
aggagaataagacct

SEQ ID NO: 1616118 - DNA, 15 bp, Homo sapiens
ggagaataagacctc

SEQ ID NO: 1616119 - DNA, 15 bp, Homo sapiens
gagaataagacctct

SEQ ID NO: 1616120 - DNA, 15 bp, Homo sapiens
agaataagacctctg

SEQ ID NO: 1616121 - DNA, 15 bp, Homo sapiens
gaataagacctctga

SEQ ID NO: 1616122 - DNA, 15 bp, Homo sapiens
aataagacctctgaa

SEQ ID NO: 1616123 - DNA, 15 bp, Homo sapiens
ataagacctctgaag

SEQ ID NO: 1616124 - DNA, 15 bp, Homo sapiens
taagacctctgaaga

SEQ ID NO: 1616125 - DNA, 15 bp, Homo sapiens
aagacctctgaagac

SEQ ID NO: 1616126 - DNA, 15 bp, Homo sapiens
agacctctgaagacc

SEQ ID NO: 1616127 - DNA, 15 bp, Homo sapiens
gacctctgaagaccc

SEQ ID NO: 1616128 - DNA, 15 bp, Homo sapiens
acctctgaagaccct

SEQ ID NO: 1616129 - DNA, 15 bp, Homo sapiens
cctctgaagaccctt

SEQ ID NO: 1616130 - DNA, 15 bp, Homo sapiens
ctctgaagacccttc

SEQ ID NO: 1616131 - DNA, 15 bp, Homo sapiens
tctgaagacccttca

SEQ ID NO: 1616132 - DNA, 15 bp, Homo sapiens
ctgaagacccttcaa

SEQ ID NO: 1616133 - DNA, 15 bp, Homo sapiens
tgaagacccttcaaa

SEQ ID NO: 1616134 - DNA, 15 bp, Homo sapiens
gaagacccttcaaaa

SEQ ID NO: 1616135 - DNA, 15 bp, Homo sapiens
aagacccttcaaaac

SEQ ID NO: 1616136 - DNA, 15 bp, Homo sapiens
agacccttcaaaact

SEQ ID NO: 1616137 - DNA, 15 bp, Homo sapiens
gacccttcaaaactg

SEQ ID NO: 1616138 - DNA, 15 bp, Homo sapiens
acccttcaaaactgg

SEQ ID NO: 1616139 - DNA, 15 bp, Homo sapiens
cccttcaaaactgga

SEQ ID NO: 1616140 - DNA, 15 bp, Homo sapiens
ccttcaaaactggaa

SEQ ID NO: 1616141 - DNA, 15 bp, Homo sapiens
cttcaaaactggaag

SEQ ID NO: 1616142 - DNA, 15 bp, Homo sapiens
ttcaaaactggaagc

SEQ ID NO: 1616143 - DNA, 15 bp, Homo sapiens
tcaaaactggaagcc

SEQ ID NO: 1616144 - DNA, 15 bp, Homo sapiens
caaaactggaagcca

SEQ ID NO: 1616145 - DNA, 15 bp, Homo sapiens
aaaactggaagccaa

SEQ ID NO: 1616146 - DNA, 15 bp, Homo sapiens
aaactggaagccaaa

SEQ ID NO: 1616147 - DNA, 15 bp, Homo sapiens
aactggaagccaaag

SEQ ID NO: 1616148 - DNA, 15 bp, Homo sapiens
actggaagccaaagg

SEQ ID NO: 1616149 - DNA, 15 bp, Homo sapiens
ctggaagccaaagga

SEQ ID NO: 1616150 - DNA, 15 bp, Homo sapiens
tggaagccaaaggaa

SEQ ID NO: 1616151 - DNA, 15 bp, Homo sapiens
ggaagccaaaggaac

SEQ ID NO: 1616152 - DNA, 15 bp, Homo sapiens
gaagccaaaggaact

SEQ ID NO: 1616153 - DNA, 15 bp, Homo sapiens
aagccaaaggaactg

SEQ ID NO: 1616154 - DNA, 15 bp, Homo sapiens
agccaaaggaactgg

SEQ ID NO: 1616155 - DNA, 15 bp, Homo sapiens
gccaaaggaactgga

SEQ ID NO: 1616156 - DNA, 15 bp, Homo sapiens
ccaaaggaactggag

SEQ ID NO: 1616157 - DNA, 15 bp, Homo sapiens
caaaggaactggagg

SEQ ID NO: 1616158 - DNA, 15 bp, Homo sapiens
aaaggaactggaggc

SEQ ID NO: 1616159 - DNA, 15 bp, Homo sapiens
aggaactggaggcac

SEQ ID NO: 1616160 - DNA, 15 bp, Homo sapiens
ggaactggaggcact

SEQ ID NO: 1616161 - DNA, 15 bp, Homo sapiens
gaactggaggcactg

SEQ ID NO: 1616162 - DNA, 15 bp, Homo sapiens
aactggaggcactga

SEQ ID NO: 1616163 - DNA, 15 bp, Homo sapiens
actggaggcactgat

SEQ ID NO: 1616164 - DNA, 15 bp, Homo sapiens
ctggaggcactgatt

SEQ ID NO: 1616165 - DNA, 15 bp, Homo sapiens
tggaggcactgattt

SEQ ID NO: 1616166 - DNA, 15 bp, Homo sapiens
ggaggcactgattta

SEQ ID NO: 1616167 - DNA, 15 bp, Homo sapiens
gaggcactgatttaa

SEQ ID NO: 1616168 - DNA, 15 bp, Homo sapiens
aggcactgatttaat

SEQ ID NO: 1616169 - DNA, 15 bp, Homo sapiens
ggcactgatttaatg

SEQ ID NO: 1616170 - DNA, 15 bp, Homo sapiens
gcactgatttaatga

SEQ ID NO: 1616171 - DNA, 15 bp, Homo sapiens
cactgatttaatgaa

SEQ ID NO: 1616172 - DNA, 15 bp, Homo sapiens
actgatttaatgaat

SEQ ID NO: 1616173 - DNA, 15 bp, Homo sapiens
ctgatttaatgaatt

SEQ ID NO: 1616174 - DNA, 15 bp, Homo sapiens
tgatttaatgaattt

SEQ ID NO: 1616175 - DNA, 15 bp, Homo sapiens
gatttaatgaatttc

SEQ ID NO: 1616176 - DNA, 15 bp, Homo sapiens
atttaatgaatttcc

SEQ ID NO: 1616177 - DNA, 15 bp, Homo sapiens
tttaatgaatttcct

SEQ ID NO: 1616178 - DNA, 15 bp, Homo sapiens
ttaatgaatttcctg

SEQ ID NO: 1616179 - DNA, 15 bp, Homo sapiens
taatgaatttcctga

SEQ ID NO: 1616180 - DNA, 15 bp, Homo sapiens
aatgaatttcctgaa

SEQ ID NO: 1616181 - DNA, 15 bp, Homo sapiens
atgaatttcctgaag

SEQ ID NO: 1616182 - DNA, 15 bp, Homo sapiens
tgaatttcctgaaga

SEQ ID NO: 1616183 - DNA, 15 bp, Homo sapiens
gaatttcctgaagac

SEQ ID NO: 1616184 - DNA, 15 bp, Homo sapiens
aatttcctgaagact

SEQ ID NO: 1616185 - DNA, 15 bp, Homo sapiens
atttcctgaagactg

SEQ ID NO: 1616186 - DNA, 15 bp, Homo sapiens
tttcctgaagactgt

SEQ ID NO: 1616187 - DNA, 15 bp, Homo sapiens
ttcctgaagactgta

SEQ ID NO: 1616188 - DNA, 15 bp, Homo sapiens
tcctgaagactgtaa

SEQ ID NO: 1616189 - DNA, 15 bp, Homo sapiens
cctgaagactgtaag

SEQ ID NO: 1616190 - DNA, 15 bp, Homo sapiens
ctgaagactgtaaga

SEQ ID NO: 1616191 - DNA, 15 bp, Homo sapiens
tgaagactgtaagaa

SEQ ID NO: 1616192 - DNA, 15 bp, Homo sapiens
gaagactgtaagaag

SEQ ID NO: 1616193 - DNA, 15 bp, Homo sapiens
aagactgtaagaagt

SEQ ID NO: 1616194 - DNA, 15 bp, Homo sapiens
agactgtaagaagta

SEQ ID NO: 1616195 - DNA, 15 bp, Homo sapiens
gactgtaagaagtac

SEQ ID NO: 1616196 - DNA, 15 bp, Homo sapiens
actgtaagaagtaca

SEQ ID NO: 1616197 - DNA, 15 bp, Homo sapiens
ctgtaagaagtacaa

SEQ ID NO: 1616198 - DNA, 15 bp, Homo sapiens
tgtaagaagtacaac

SEQ ID NO: 1616199 - DNA, 15 bp, Homo sapiens
gtaagaagtacaact

SEQ ID NO: 1616200 - DNA, 15 bp, Homo sapiens
taagaagtacaactg

SEQ ID NO: 1616201 - DNA, 15 bp, Homo sapiens
aagaagtacaactga

SEQ ID NO: 1616202 - DNA, 15 bp, Homo sapiens
agaagtacaactgag

SEQ ID NO: 1616203 - DNA, 15 bp, Homo sapiens
gaagtacaactgaga

SEQ ID NO: 1616204 - DNA, 15 bp, Homo sapiens
aagtacaactgagaa

SEQ ID NO: 1616205 - DNA, 15 bp, Homo sapiens
agtacaactgagaaa

SEQ ID NO: 1616206 - DNA, 15 bp, Homo sapiens
gtacaactgagaaat

SEQ ID NO: 1616207 - DNA, 15 bp, Homo sapiens
tacaactgagaaatc

SEQ ID NO: 1616208 - DNA, 15 bp, Homo sapiens
acaactgagaaatcc

SEQ ID NO: 1616209 - DNA, 15 bp, Homo sapiens
caactgagaaatccc

SEQ ID NO: 1616210 - DNA, 15 bp, Homo sapiens
aactgagaaatccct

SEQ ID NO: 1616211 - DNA, 15 bp, Homo sapiens
actgagaaatccctt

SEQ ID NO: 1616212 - DNA, 15 bp, Homo sapiens
ctgagaaatcccttt

SEQ ID NO: 1616213 - DNA, 15 bp, Homo sapiens
tgagaaatccctttt

SEQ ID NO: 1616214 - DNA, 15 bp, Homo sapiens
gagaaatcccttttg

SEQ ID NO: 1616215 - DNA, 15 bp, Homo sapiens
agaaatcccttttga

SEQ ID NO: 1616216 - DNA, 15 bp, Homo sapiens
gaaatcccttttgaa

SEQ ID NO: 1616217 - DNA, 15 bp, Homo sapiens
aaatcccttttgaag

SEQ ID NO: 1616218 - DNA, 15 bp, Homo sapiens
aatcccttttgaagg

SEQ ID NO: 1616219 - DNA, 15 bp, Homo sapiens
atcccttttgaagga

SEQ ID NO: 1616220 - DNA, 15 bp, Homo sapiens
tcccttttgaaggaa

SEQ ID NO: 1616221 - DNA, 15 bp, Homo sapiens
cccttttgaaggaag

SEQ ID NO: 1616222 - DNA, 15 bp, Homo sapiens
ccttttgaaggaagg

SEQ ID NO: 1616223 - DNA, 15 bp, Homo sapiens
cttttgaaggaaggt

SEQ ID NO: 1616224 - DNA, 15 bp, Homo sapiens
ttttgaaggaaggtt

SEQ ID NO: 1616225 - DNA, 15 bp, Homo sapiens
tttgaaggaaggtta

SEQ ID NO: 1616226 - DNA, 15 bp, Homo sapiens
ttgaaggaaggttaa

SEQ ID NO: 1616227 - DNA, 15 bp, Homo sapiens
tgaaggaaggttaat

SEQ ID NO: 1616228 - DNA, 15 bp, Homo sapiens
gaaggaaggttaatg

SEQ ID NO: 1616229 - DNA, 15 bp, Homo sapiens
aaggaaggttaatgt

SEQ ID NO: 1616230 - DNA, 15 bp, Homo sapiens
aggaaggttaatgta

SEQ ID NO: 1616231 - DNA, 15 bp, Homo sapiens
ggaaggttaatgtaa

SEQ ID NO: 1616232 - DNA, 15 bp, Homo sapiens
gaaggttaatgtaac

SEQ ID NO: 1616233 - DNA, 15 bp, Homo sapiens
aaggttaatgtaacc

SEQ ID NO: 1616234 - DNA, 15 bp, Homo sapiens
aggttaatgtaaccc

SEQ ID NO: 1616235 - DNA, 15 bp, Homo sapiens
ggttaatgtaaccca

SEQ ID NO: 1616236 - DNA, 15 bp, Homo sapiens
gttaatgtaacccaa

SEQ ID NO: 1616237 - DNA, 15 bp, Homo sapiens
ttaatgtaacccaac

SEQ ID NO: 1616238 - DNA, 15 bp, Homo sapiens
taatgtaacccaaca

SEQ ID NO: 1616239 - DNA, 15 bp, Homo sapiens
aatgtaacccaacaa

SEQ ID NO: 1616240 - DNA, 15 bp, Homo sapiens
atgtaacccaacaag

SEQ ID NO: 1616241 - DNA, 15 bp, Homo sapiens
tgtaacccaacaaga

SEQ ID NO: 1616242 - DNA, 15 bp, Homo sapiens
gtaacccaacaagag

SEQ ID NO: 1616243 - DNA, 15 bp, Homo sapiens
taacccaacaagagc

SEQ ID NO: 1616244 - DNA, 15 bp, Homo sapiens
aacccaacaagagca

SEQ ID NO: 1616245 - DNA, 15 bp, Homo sapiens
acccaacaagagcac

SEQ ID NO: 1616246 - DNA, 15 bp, Homo sapiens
cccaacaagagcaca

SEQ ID NO: 1616247 - DNA, 15 bp, Homo sapiens
ccaacaagagcacat

SEQ ID NO: 1616248 - DNA, 15 bp, Homo sapiens
caacaagagcacatt

SEQ ID NO: 1616249 - DNA, 15 bp, Homo sapiens
aacaagagcacattt

SEQ ID NO: 1616250 - DNA, 15 bp, Homo sapiens
acaagagcacatttt

SEQ ID NO: 1616251 - DNA, 15 bp, Homo sapiens
caagagcacatttta

SEQ ID NO: 1616252 - DNA, 15 bp, Homo sapiens
aagagcacattttat

SEQ ID NO: 1616253 - DNA, 15 bp, Homo sapiens
agagcacattttatc

SEQ ID NO: 1616254 - DNA, 15 bp, Homo sapiens
gagcacattttatca

SEQ ID NO: 1616255 - DNA, 15 bp, Homo sapiens
agcacattttatcat

SEQ ID NO: 1616256 - DNA, 15 bp, Homo sapiens
gcacattttatcata

SEQ ID NO: 1616257 - DNA, 15 bp, Homo sapiens
cacattttatcatag

SEQ ID NO: 1616258 - DNA, 15 bp, Homo sapiens
acattttatcatagc

SEQ ID NO: 1616259 - DNA, 15 bp, Homo sapiens
cattttatcatagca

SEQ ID NO: 1616260 - DNA, 15 bp, Homo sapiens
attttatcatagcag

SEQ ID NO: 1616261 - DNA, 15 bp, Homo sapiens
ttttatcatagcaga

SEQ ID NO: 1616262 - DNA, 15 bp, Homo sapiens
tttatcatagcagag

SEQ ID NO: 1616263 - DNA, 15 bp, Homo sapiens
ttatcatagcagaga

SEQ ID NO: 1616264 - DNA, 15 bp, Homo sapiens
tatcatagcagagac

SEQ ID NO: 1616265 - DNA, 15 bp, Homo sapiens
atcatagcagagaca

SEQ ID NO: 1616266 - DNA, 15 bp, Homo sapiens
tcatagcagagacat

SEQ ID NO: 1616267 - DNA, 15 bp, Homo sapiens
catagcagagacatc

SEQ ID NO: 1616268 - DNA, 15 bp, Homo sapiens
atagcagagacatct

SEQ ID NO: 1616269 - DNA, 15 bp, Homo sapiens
tagcagagacatctg

SEQ ID NO: 1616270 - DNA, 15 bp, Homo sapiens
agcagagacatctgt

SEQ ID NO: 1616271 - DNA, 15 bp, Homo sapiens
gcagagacatctgta

SEQ ID NO: 1616272 - DNA, 15 bp, Homo sapiens
cagagacatctgtat

SEQ ID NO: 1616273 - DNA, 15 bp, Homo sapiens
agagacatctgtatg

SEQ ID NO: 1616274 - DNA, 15 bp, Homo sapiens
gagacatctgtatgc

SEQ ID NO: 1616275 - DNA, 15 bp, Homo sapiens
agacatctgtatgca

SEQ ID NO: 1616276 - DNA, 15 bp, Homo sapiens
gacatctgtatgcat

SEQ ID NO: 1616277 - DNA, 15 bp, Homo sapiens
acatctgtatgcatt

SEQ ID NO: 1616278 - DNA, 15 bp, Homo sapiens
catctgtatgcattc

SEQ ID NO: 1616279 - DNA, 15 bp, Homo sapiens
atctgtatgcattcc

SEQ ID NO: 1616280 - DNA, 15 bp, Homo sapiens
tctgtatgcattcct

SEQ ID NO: 1616281 - DNA, 15 bp, Homo sapiens
ctgtatgcattcctg

SEQ ID NO: 1616282 - DNA, 15 bp, Homo sapiens
tgtatgcattcctgt

SEQ ID NO: 1616283 - DNA, 15 bp, Homo sapiens
gtatgcattcctgtc

SEQ ID NO: 1616284 - DNA, 15 bp, Homo sapiens
tatgcattcctgtca

SEQ ID NO: 1616285 - DNA, 15 bp, Homo sapiens
atgcattcctgtcat

SEQ ID NO: 1616286 - DNA, 15 bp, Homo sapiens
tgcattcctgtcatt

SEQ ID NO: 1616287 - DNA, 15 bp, Homo sapiens
gcattcctgtcatta

SEQ ID NO: 1616288 - DNA, 15 bp, Homo sapiens
cattcctgtcattac

SEQ ID NO: 1616289 - DNA, 15 bp, Homo sapiens
attcctgtcattacc

SEQ ID NO: 1616290 - DNA, 15 bp, Homo sapiens
ttcctgtcattaccc

SEQ ID NO: 1616291 - DNA, 15 bp, Homo sapiens
tcctgtcattaccca

SEQ ID NO: 1616292 - DNA, 15 bp, Homo sapiens
cctgtcattacccat

SEQ ID NO: 1616293 - DNA, 15 bp, Homo sapiens
ctgtcattacccatt

SEQ ID NO: 1616294 - DNA, 15 bp, Homo sapiens
tgtcattacccattg

SEQ ID NO: 1616295 - DNA, 15 bp, Homo sapiens
gtcattacccattgt

SEQ ID NO: 1616296 - DNA, 15 bp, Homo sapiens
tcattacccattgta

SEQ ID NO: 1616297 - DNA, 15 bp, Homo sapiens
cattacccattgtaa

SEQ ID NO: 1616298 - DNA, 15 bp, Homo sapiens
attacccattgtaac

SEQ ID NO: 1616299 - DNA, 15 bp, Homo sapiens
ttacccattgtaaca

SEQ ID NO: 1616300 - DNA, 15 bp, Homo sapiens
tacccattgtaacag

SEQ ID NO: 1616301 - DNA, 15 bp, Homo sapiens
acccattgtaacaga

SEQ ID NO: 1616302 - DNA, 15 bp, Homo sapiens
cccattgtaacagag

SEQ ID NO: 1616303 - DNA, 15 bp, Homo sapiens
ccattgtaacagagc

SEQ ID NO: 1616304 - DNA, 15 bp, Homo sapiens
cattgtaacagagcc

SEQ ID NO: 1616305 - DNA, 15 bp, Homo sapiens
attgtaacagagcca

SEQ ID NO: 1616306 - DNA, 15 bp, Homo sapiens
ttgtaacagagccac

SEQ ID NO: 1616307 - DNA, 15 bp, Homo sapiens
tgtaacagagccaca

SEQ ID NO: 1616308 - DNA, 15 bp, Homo sapiens
gtaacagagccacaa

SEQ ID NO: 1616309 - DNA, 15 bp, Homo sapiens
taacagagccacaaa

SEQ ID NO: 1616310 - DNA, 15 bp, Homo sapiens
aacagagccacaaac

SEQ ID NO: 1616311 - DNA, 15 bp, Homo sapiens
acagagccacaaact

SEQ ID NO: 1616312 - DNA, 15 bp, Homo sapiens
cagagccacaaacta

SEQ ID NO: 1616313 - DNA, 15 bp, Homo sapiens
agagccacaaactaa

SEQ ID NO: 1616314 - DNA, 15 bp, Homo sapiens
gagccacaaactaat

SEQ ID NO: 1616315 - DNA, 15 bp, Homo sapiens
agccacaaactaata

SEQ ID NO: 1616316 - DNA, 15 bp, Homo sapiens
gccacaaactaatac

SEQ ID NO: 1616317 - DNA, 15 bp, Homo sapiens
ccacaaactaatact

SEQ ID NO: 1616318 - DNA, 15 bp, Homo sapiens
cacaaactaatacta

SEQ ID NO: 1616319 - DNA, 15 bp, Homo sapiens
acaaactaatactat

SEQ ID NO: 1616320 - DNA, 15 bp, Homo sapiens
caaactaatactatg

SEQ ID NO: 1616321 - DNA, 15 bp, Homo sapiens
aaactaatactatgc

SEQ ID NO: 1616322 - DNA, 15 bp, Homo sapiens
aactaatactatgca

SEQ ID NO: 1616323 - DNA, 15 bp, Homo sapiens
actaatactatgcaa

SEQ ID NO: 1616324 - DNA, 15 bp, Homo sapiens
ctaatactatgcaat

SEQ ID NO: 1616325 - DNA, 15 bp, Homo sapiens
taatactatgcaatg

SEQ ID NO: 1616326 - DNA, 15 bp, Homo sapiens
aatactatgcaatgt

SEQ ID NO: 1616327 - DNA, 15 bp, Homo sapiens
atactatgcaatgtt

SEQ ID NO: 1616328 - DNA, 15 bp, Homo sapiens
tactatgcaatgttt

SEQ ID NO: 1616329 - DNA, 15 bp, Homo sapiens
actatgcaatgtttt

SEQ ID NO: 1616330 - DNA, 15 bp, Homo sapiens
ctatgcaatgtttta

SEQ ID NO: 1616331 - DNA, 15 bp, Homo sapiens
tatgcaatgttttac

SEQ ID NO: 1616332 - DNA, 15 bp, Homo sapiens
atgcaatgttttacc

SEQ ID NO: 1616333 - DNA, 15 bp, Homo sapiens
tgcaatgttttacca

SEQ ID NO: 1616334 - DNA, 15 bp, Homo sapiens
gcaatgttttaccaa

SEQ ID NO: 1616335 - DNA, 15 bp, Homo sapiens
caatgttttaccaat

SEQ ID NO: 1616336 - DNA, 15 bp, Homo sapiens
aatgttttaccaata

SEQ ID NO: 1616337 - DNA, 15 bp, Homo sapiens
atgttttaccaataa

SEQ ID NO: 1616338 - DNA, 15 bp, Homo sapiens
tgttttaccaataat

SEQ ID NO: 1616339 - DNA, 15 bp, Homo sapiens
gttttaccaataatg

SEQ ID NO: 1616340 - DNA, 15 bp, Homo sapiens
ttttaccaataatgc

SEQ ID NO: 1616341 - DNA, 15 bp, Homo sapiens
tttaccaataatgca

SEQ ID NO: 1616342 - DNA, 15 bp, Homo sapiens
ttaccaataatgcaa

SEQ ID NO: 1616343 - DNA, 15 bp, Homo sapiens
taccaataatgcaat

SEQ ID NO: 1616344 - DNA, 15 bp, Homo sapiens
accaataatgcaata

SEQ ID NO: 1616345 - DNA, 15 bp, Homo sapiens
ccaataatgcaatac

SEQ ID NO: 1616346 - DNA, 15 bp, Homo sapiens
caataatgcaataca

SEQ ID NO: 1616347 - DNA, 15 bp, Homo sapiens
aataatgcaatacaa

SEQ ID NO: 1616348 - DNA, 15 bp, Homo sapiens
ataatgcaatacaaa

SEQ ID NO: 1616349 - DNA, 15 bp, Homo sapiens
taatgcaatacaaaa

SEQ ID NO: 1616350 - DNA, 15 bp, Homo sapiens
aatgcaatacaaaag

SEQ ID NO: 1616351 - DNA, 15 bp, Homo sapiens
atgcaatacaaaaga

SEQ ID NO: 1616352 - DNA, 15 bp, Homo sapiens
tgcaatacaaaagac

SEQ ID NO: 1616353 - DNA, 15 bp, Homo sapiens
gcaatacaaaagacc

SEQ ID NO: 1616354 - DNA, 15 bp, Homo sapiens
caatacaaaagacct

SEQ ID NO: 1616355 - DNA, 15 bp, Homo sapiens
aatacaaaagacctc

SEQ ID NO: 1616356 - DNA, 15 bp, Homo sapiens
atacaaaagacctca

SEQ ID NO: 1616357 - DNA, 15 bp, Homo sapiens
tacaaaagacctcaa

SEQ ID NO: 1616358 - DNA, 15 bp, Homo sapiens
acaaaagacctcaaa

SEQ ID NO: 1616359 - DNA, 15 bp, Homo sapiens
caaaagacctcaaaa

SEQ ID NO: 1616360 - DNA, 15 bp, Homo sapiens
aaaagacctcaaaat

SEQ ID NO: 1616361 - DNA, 15 bp, Homo sapiens
aaagacctcaaaata

SEQ ID NO: 1616362 - DNA, 15 bp, Homo sapiens
aagacctcaaaatac

SEQ ID NO: 1616363 - DNA, 15 bp, Homo sapiens
agacctcaaaatacc

SEQ ID NO: 1616364 - DNA, 15 bp, Homo sapiens
gacctcaaaatacct

SEQ ID NO: 1616365 - DNA, 15 bp, Homo sapiens
acctcaaaatacctg

SEQ ID NO: 1616366 - DNA, 15 bp, Homo sapiens
cctcaaaatacctgt

SEQ ID NO: 1616367 - DNA, 15 bp, Homo sapiens
ctcaaaatacctgtg

SEQ ID NO: 1616368 - DNA, 15 bp, Homo sapiens
tcaaaatacctgtgc

SEQ ID NO: 1616369 - DNA, 15 bp, Homo sapiens
caaaatacctgtgca

SEQ ID NO: 1616370 - DNA, 15 bp, Homo sapiens
aaaatacctgtgcat

SEQ ID NO: 1616371 - DNA, 15 bp, Homo sapiens
aaatacctgtgcatt

SEQ ID NO: 1616372 - DNA, 15 bp, Homo sapiens
aatacctgtgcattt

SEQ ID NO: 1616373 - DNA, 15 bp, Homo sapiens
atacctgtgcatttc

SEQ ID NO: 1616374 - DNA, 15 bp, Homo sapiens
tacctgtgcatttct

SEQ ID NO: 1616375 - DNA, 15 bp, Homo sapiens
acctgtgcatttctt

SEQ ID NO: 1616376 - DNA, 15 bp, Homo sapiens
cctgtgcatttcttg

SEQ ID NO: 1616377 - DNA, 15 bp, Homo sapiens
ctgtgcatttcttgt

SEQ ID NO: 1616378 - DNA, 15 bp, Homo sapiens
tgtgcatttcttgta

SEQ ID NO: 1616379 - DNA, 15 bp, Homo sapiens
gtgcatttcttgtag

SEQ ID NO: 1616380 - DNA, 15 bp, Homo sapiens
tgcatttcttgtagg

SEQ ID NO: 1616381 - DNA, 15 bp, Homo sapiens
gcatttcttgtagga

SEQ ID NO: 1616382 - DNA, 15 bp, Homo sapiens
catttcttgtaggaa

SEQ ID NO: 1616383 - DNA, 15 bp, Homo sapiens
atttcttgtaggaaa

SEQ ID NO: 1616384 - DNA, 15 bp, Homo sapiens
tttcttgtaggaaaa

SEQ ID NO: 1616385 - DNA, 15 bp, Homo sapiens
ttcttgtaggaaaac

SEQ ID NO: 1616386 - DNA, 15 bp, Homo sapiens
tcttgtaggaaaaca

SEQ ID NO: 1616387 - DNA, 15 bp, Homo sapiens
cttgtaggaaaacaa

SEQ ID NO: 1616388 - DNA, 15 bp, Homo sapiens
ttgtaggaaaacaac

SEQ ID NO: 1616389 - DNA, 15 bp, Homo sapiens
tgtaggaaaacaaca

SEQ ID NO: 1616390 - DNA, 15 bp, Homo sapiens
gtaggaaaacaacaa

SEQ ID NO: 1616391 - DNA, 15 bp, Homo sapiens
taggaaaacaacaaa

SEQ ID NO: 1616392 - DNA, 15 bp, Homo sapiens
aggaaaacaacaaaa

SEQ ID NO: 1616393 - DNA, 15 bp, Homo sapiens
ggaaaacaacaaaag

SEQ ID NO: 1616394 - DNA, 15 bp, Homo sapiens
gaaaacaacaaaagg

SEQ ID NO: 1616395 - DNA, 15 bp, Homo sapiens
aaaacaacaaaaggt

SEQ ID NO: 1616396 - DNA, 15 bp, Homo sapiens
aaacaacaaaaggta

SEQ ID NO: 1616397 - DNA, 15 bp, Homo sapiens
aacaacaaaaggtaa

SEQ ID NO: 1616398 - DNA, 15 bp, Homo sapiens
acaacaaaaggtaat

SEQ ID NO: 1616399 - DNA, 15 bp, Homo sapiens
caacaaaaggtaatt

SEQ ID NO: 1616400 - DNA, 15 bp, Homo sapiens
aacaaaaggtaatta

SEQ ID NO: 1616401 - DNA, 15 bp, Homo sapiens
acaaaaggtaattat

SEQ ID NO: 1616402 - DNA, 15 bp, Homo sapiens
caaaaggtaattatg

SEQ ID NO: 1616403 - DNA, 15 bp, Homo sapiens
aaaaggtaattatgt

SEQ ID NO: 1616404 - DNA, 15 bp, Homo sapiens
aaaggtaattatgtg

SEQ ID NO: 1616405 - DNA, 15 bp, Homo sapiens
aaggtaattatgtgt

SEQ ID NO: 1616406 - DNA, 15 bp, Homo sapiens
aggtaattatgtgta

SEQ ID NO: 1616407 - DNA, 15 bp, Homo sapiens
ggtaattatgtgtaa

SEQ ID NO: 1616408 - DNA, 15 bp, Homo sapiens
gtaattatgtgtaat

SEQ ID NO: 1616409 - DNA, 15 bp, Homo sapiens
taattatgtgtaatt

SEQ ID NO: 1616410 - DNA, 15 bp, Homo sapiens
aattatgtgtaatta

SEQ ID NO: 1616411 - DNA, 15 bp, Homo sapiens
attatgtgtaattat

SEQ ID NO: 1616412 - DNA, 15 bp, Homo sapiens
ttatgtgtaattata

SEQ ID NO: 1616413 - DNA, 15 bp, Homo sapiens
tatgtgtaattatac

SEQ ID NO: 1616414 - DNA, 15 bp, Homo sapiens
atgtgtaattatact

SEQ ID NO: 1616415 - DNA, 15 bp, Homo sapiens
tgtgtaattatacta

SEQ ID NO: 1616416 - DNA, 15 bp, Homo sapiens
gtgtaattatactag

SEQ ID NO: 1616417 - DNA, 15 bp, Homo sapiens
tgtaattatactaga

SEQ ID NO: 1616418 - DNA, 15 bp, Homo sapiens
gtaattatactagaa

SEQ ID NO: 1616419 - DNA, 15 bp, Homo sapiens
taattatactagaag

SEQ ID NO: 1616420 - DNA, 15 bp, Homo sapiens
aattatactagaagt

SEQ ID NO: 1616421 - DNA, 15 bp, Homo sapiens
attatactagaagtt

SEQ ID NO: 1616422 - DNA, 15 bp, Homo sapiens
ttatactagaagttt

SEQ ID NO: 1616423 - DNA, 15 bp, Homo sapiens
tatactagaagtttt

SEQ ID NO: 1616424 - DNA, 15 bp, Homo sapiens
atactagaagttttg

SEQ ID NO: 1616425 - DNA, 15 bp, Homo sapiens
tactagaagttttgt

SEQ ID NO: 1616426 - DNA, 15 bp, Homo sapiens
actagaagttttgta

SEQ ID NO: 1616427 - DNA, 15 bp, Homo sapiens
ctagaagttttgtaa

SEQ ID NO: 1616428 - DNA, 15 bp, Homo sapiens
tagaagttttgtaat

SEQ ID NO: 1616429 - DNA, 15 bp, Homo sapiens
agaagttttgtaatc

SEQ ID NO: 1616430 - DNA, 15 bp, Homo sapiens
gaagttttgtaatct

SEQ ID NO: 1616431 - DNA, 15 bp, Homo sapiens
aagttttgtaatctg

SEQ ID NO: 1616432 - DNA, 15 bp, Homo sapiens
agttttgtaatctgt

SEQ ID NO: 1616433 - DNA, 15 bp, Homo sapiens
gttttgtaatctgta

SEQ ID NO: 1616434 - DNA, 15 bp, Homo sapiens
ttttgtaatctgtat

SEQ ID NO: 1616435 - DNA, 15 bp, Homo sapiens
tttgtaatctgtatc

SEQ ID NO: 1616436 - DNA, 15 bp, Homo sapiens
ttgtaatctgtatct

SEQ ID NO: 1616437 - DNA, 15 bp, Homo sapiens
tgtaatctgtatctt

SEQ ID NO: 1616438 - DNA, 15 bp, Homo sapiens
gtaatctgtatctta

SEQ ID NO: 1616439 - DNA, 15 bp, Homo sapiens
taatctgtatcttat

SEQ ID NO: 1616440 - DNA, 15 bp, Homo sapiens
aatctgtatcttatc

SEQ ID NO: 1616441 - DNA, 15 bp, Homo sapiens
atctgtatcttatca

SEQ ID NO: 1616442 - DNA, 15 bp, Homo sapiens
tctgtatcttatcat

SEQ ID NO: 1616443 - DNA, 15 bp, Homo sapiens
ctgtatcttatcatt

SEQ ID NO: 1616444 - DNA, 15 bp, Homo sapiens
tgtatcttatcattg

SEQ ID NO: 1616445 - DNA, 15 bp, Homo sapiens
gtatcttatcattgg

SEQ ID NO: 1616446 - DNA, 15 bp, Homo sapiens
tatcttatcattgga

SEQ ID NO: 1616447 - DNA, 15 bp, Homo sapiens
atcttatcattggaa

SEQ ID NO: 1616448 - DNA, 15 bp, Homo sapiens
tcttatcattggaat

SEQ ID NO: 1616449 - DNA, 15 bp, Homo sapiens
cttatcattggaata

SEQ ID NO: 1616450 - DNA, 15 bp, Homo sapiens
ttatcattggaataa

SEQ ID NO: 1616451 - DNA, 15 bp, Homo sapiens
tatcattggaataaa

SEQ ID NO: 1616452 - DNA, 15 bp, Homo sapiens
atcattggaataaaa

SEQ ID NO: 1616453 - DNA, 15 bp, Homo sapiens
tcattggaataaaat

SEQ ID NO: 1616454 - DNA, 15 bp, Homo sapiens
cattggaataaaatg

SEQ ID NO: 1616455 - DNA, 15 bp, Homo sapiens
attggaataaaatga

SEQ ID NO: 1616456 - DNA, 15 bp, Homo sapiens
ttggaataaaatgac

SEQ ID NO: 1616457 - DNA, 15 bp, Homo sapiens
tggaataaaatgaca

SEQ ID NO: 1616458 - DNA, 15 bp, Homo sapiens
ggaataaaatgacat

SEQ ID NO: 1616459 - DNA, 15 bp, Homo sapiens
gaataaaatgacatt

SEQ ID NO: 1616460 - DNA, 15 bp, Homo sapiens
aataaaatgacattc

SEQ ID NO: 1616461 - DNA, 15 bp, Homo sapiens
ataaaatgacattca

SEQ ID NO: 1616462 - DNA, 15 bp, Homo sapiens
taaaatgacattcaa

SEQ ID NO: 1616463 - DNA, 15 bp, Homo sapiens
aaaatgacattcaat

SEQ ID NO: 1616464 - DNA, 15 bp, Homo sapiens
aaatgacattcaata

SEQ ID NO: 1616465 - DNA, 15 bp, Homo sapiens
aatgacattcaataa

SEQ ID NO: 1616466 - DNA, 15 bp, Homo sapiens
atgacattcaataaa

SEQ ID NO: 1616467 - DNA, 15 bp, Homo sapiens
tgacattcaataaat

SEQ ID NO: 1616468 - DNA, 15 bp, Homo sapiens
gacattcaataaata

SEQ ID NO: 1616469 - DNA, 15 bp, Homo sapiens
acattcaataaataa

SEQ ID NO: 1616470 - DNA, 15 bp, Homo sapiens
cattcaataaataaa

SEQ ID NO: 1616471 - DNA, 15 bp, Homo sapiens
attcaataaataaaa

SEQ ID NO: 1616472 - DNA, 15 bp, Homo sapiens
ttcaataaataaaaa

SEQ ID NO: 1616473 - DNA, 15 bp, Homo sapiens
tcaataaataaaaat

SEQ ID NO: 1616474 - DNA, 15 bp, Homo sapiens
caataaataaaaatg

SEQ ID NO: 1616475 - DNA, 15 bp, Homo sapiens
aataaataaaaatgc

SEQ ID NO: 1616476 - DNA, 15 bp, Homo sapiens
ataaataaaaatgca

SEQ ID NO: 1616477 - DNA, 15 bp, Homo sapiens
taaataaaaatgcat

SEQ ID NO: 1616478 - DNA, 15 bp, Homo sapiens
aaataaaaatgcata

SEQ ID NO: 1616479 - DNA, 15 bp, Homo sapiens
aataaaaatgcataa

SEQ ID NO: 1616480 - DNA, 15 bp, Homo sapiens
ataaaaatgcataag

SEQ ID NO: 1616481 - DNA, 15 bp, Homo sapiens
taaaaatgcataaga

SEQ ID NO: 1616482 - DNA, 15 bp, Homo sapiens
aaaaatgcataagat

SEQ ID NO: 1616483 - DNA, 15 bp, Homo sapiens
aaaatgcataagata

SEQ ID NO: 1616484 - DNA, 15 bp, Homo sapiens
aaatgcataagatat

SEQ ID NO: 1616485 - DNA, 15 bp, Homo sapiens
aatgcataagatata

SEQ ID NO: 1616486 - DNA, 15 bp, Homo sapiens
atgcataagatatat

SEQ ID NO: 1616487 - DNA, 15 bp, Homo sapiens
tgcataagatatatt

SEQ ID NO: 1616488 - DNA, 15 bp, Homo sapiens
gcataagatatattc

SEQ ID NO: 1616489 - DNA, 15 bp, Homo sapiens
cataagatatattct

SEQ ID NO: 1616490 - DNA, 15 bp, Homo sapiens
ataagatatattctg

SEQ ID NO: 1616491 - DNA, 15 bp, Homo sapiens
taagatatattctgt

SEQ ID NO: 1616492 - DNA, 15 bp, Homo sapiens
aagatatattctgtc

SEQ ID NO: 1616493 - DNA, 15 bp, Homo sapiens
agatatattctgtcg

SEQ ID NO: 1616494 - DNA, 15 bp, Homo sapiens
gatatattctgtcgg

SEQ ID NO: 1616495 - DNA, 15 bp, Homo sapiens
atatattctgtcggc

SEQ ID NO: 1616496 - DNA, 15 bp, Homo sapiens
tatattctgtcggct

SEQ ID NO: 1616497 - DNA, 15 bp, Homo sapiens
atattctgtcggctg

SEQ ID NO: 1616498 - DNA, 15 bp, Homo sapiens
tattctgtcggctgg

SEQ ID NO: 1616499 - DNA, 15 bp, Homo sapiens
attctgtcggctggg

SEQ ID NO: 1616500 - DNA, 15 bp, Homo sapiens
ttctgtcggctgggc

SEQ ID NO: 1616501 - DNA, 15 bp, Homo sapiens
tctgtcggctgggcg

SEQ ID NO: 1616502 - DNA, 15 bp, Homo sapiens
ctgtcggctgggcgc

SEQ ID NO: 1616503 - DNA, 15 bp, Homo sapiens
tgtcggctgggcgcg

SEQ ID NO: 1616504 - DNA, 15 bp, Homo sapiens
gtcggctgggcgcgg

SEQ ID NO: 1616505 - DNA, 15 bp, Homo sapiens
agatcgagaccatct

SEQ ID NO: 1616506 - DNA, 15 bp, Homo sapiens
gatcgagaccatctt

SEQ ID NO: 1616507 - DNA, 15 bp, Homo sapiens
atcgagaccatcttg

SEQ ID NO: 1616508 - DNA, 15 bp, Homo sapiens
tcgagaccatcttgg

SEQ ID NO: 1616509 - DNA, 15 bp, Homo sapiens
cgagaccatcttggc

SEQ ID NO: 1616510 - DNA, 15 bp, Homo sapiens
gagaccatcttggct

SEQ ID NO: 1616511 - DNA, 15 bp, Homo sapiens
agaccatcttggcta

SEQ ID NO: 1616512 - DNA, 15 bp, Homo sapiens
gaccatcttggctaa

SEQ ID NO: 1616513 - DNA, 15 bp, Homo sapiens
accatcttggctaac

SEQ ID NO: 1616514 - DNA, 15 bp, Homo sapiens
ccatcttggctaaca

SEQ ID NO: 1616515 - DNA, 15 bp, Homo sapiens
catcttggctaacac

SEQ ID NO: 1616516 - DNA, 15 bp, Homo sapiens
atcttggctaacacg

SEQ ID NO: 1616517 - DNA, 15 bp, Homo sapiens
tcttggctaacacgg

SEQ ID NO: 1616518 - DNA, 15 bp, Homo sapiens
cttggctaacacggt

SEQ ID NO: 1616519 - DNA, 15 bp, Homo sapiens
aaattagccgggcgc

SEQ ID NO: 1616520 - DNA, 15 bp, Homo sapiens
aattagccgggcgcg

SEQ ID NO: 1616521 - DNA, 15 bp, Homo sapiens
attagccgggcgcgg

SEQ ID NO: 1616522 - DNA, 15 bp, Homo sapiens
ttagccgggcgcggt

SEQ ID NO: 1616523 - DNA, 15 bp, Homo sapiens
tagccgggcgcggtg

SEQ ID NO: 1616524 - DNA, 15 bp, Homo sapiens
ccgggcgcggtggcg

SEQ ID NO: 1616525 - DNA, 15 bp, Homo sapiens
cgggcgcggtggcgg

SEQ ID NO: 1616526 - DNA, 15 bp, Homo sapiens
gggcgcggtggcggg

SEQ ID NO: 1616527 - DNA, 15 bp, Homo sapiens
ggcgcggtggcgggc

SEQ ID NO: 1616528 - DNA, 15 bp, Homo sapiens
gcgcggtggcgggca

SEQ ID NO: 1616529 - DNA, 15 bp, Homo sapiens
cgcggtggcgggcac

SEQ ID NO: 1616530 - DNA, 15 bp, Homo sapiens
gcggtggcgggcacc

SEQ ID NO: 1616531 - DNA, 15 bp, Homo sapiens
cggtggcgggcacct

SEQ ID NO: 1616532 - DNA, 15 bp, Homo sapiens
attgtgccactgcaa

SEQ ID NO: 1616533 - DNA, 15 bp, Homo sapiens
ttgtgccactgcaat

SEQ ID NO: 1616534 - DNA, 15 bp, Homo sapiens
tgtgccactgcaatc

SEQ ID NO: 1616535 - DNA, 15 bp, Homo sapiens
gtgccactgcaatcc

SEQ ID NO: 1616536 - DNA, 15 bp, Homo sapiens
tgccactgcaatccg

SEQ ID NO: 1616537 - DNA, 15 bp, Homo sapiens
gccactgcaatccgg

SEQ ID NO: 1616538 - DNA, 15 bp, Homo sapiens
ccactgcaatccggc

SEQ ID NO: 1616539 - DNA, 15 bp, Homo sapiens
cactgcaatccggcc

SEQ ID NO: 1616540 - DNA, 15 bp, Homo sapiens
actgcaatccggcct

SEQ ID NO: 1616541 - DNA, 15 bp, Homo sapiens
ctgcaatccggcctg

SEQ ID NO: 1616542 - DNA, 15 bp, Homo sapiens
tgcaatccggcctgg

SEQ ID NO: 1616543 - DNA, 15 bp, Homo sapiens
gcaatccggcctggg

SEQ ID NO: 1616544 - DNA, 15 bp, Homo sapiens
caatccggcctgggc

SEQ ID NO: 1616545 - DNA, 15 bp, Homo sapiens
aatccggcctgggct

SEQ ID NO: 1616546 - DNA, 15 bp, Homo sapiens
atccggcctgggcta

SEQ ID NO: 1616547 - DNA, 15 bp, Homo sapiens
tccggcctgggctaa

SEQ ID NO: 1616548 - DNA, 15 bp, Homo sapiens
ccggcctgggctaaa

SEQ ID NO: 1616549 - DNA, 15 bp, Homo sapiens
cggcctgggctaaag

SEQ ID NO: 1616550 - DNA, 15 bp, Homo sapiens
ggcctgggctaaaga

SEQ ID NO: 1616551 - DNA, 15 bp, Homo sapiens
gcctgggctaaagag

SEQ ID NO: 1616552 - DNA, 15 bp, Homo sapiens
cctgggctaaagagc

SEQ ID NO: 1616553 - DNA, 15 bp, Homo sapiens
ctgggctaaagagcg

SEQ ID NO: 1616554 - DNA, 15 bp, Homo sapiens
tgggctaaagagcgg

SEQ ID NO: 1616555 - DNA, 15 bp, Homo sapiens
gggctaaagagcggg

SEQ ID NO: 1616556 - DNA, 15 bp, Homo sapiens
ggctaaagagcggga

SEQ ID NO: 1616557 - DNA, 15 bp, Homo sapiens
gctaaagagcgggac

SEQ ID NO: 1616558 - DNA, 15 bp, Homo sapiens
ctaaagagcgggact

SEQ ID NO: 1616559 - DNA, 15 bp, Homo sapiens
taaagagcgggactc

SEQ ID NO: 1616560 - DNA, 15 bp, Homo sapiens
aaagagcgggactcc

SEQ ID NO: 1616561 - DNA, 15 bp, Homo sapiens
aagagcgggactccg

SEQ ID NO: 1616562 - DNA, 15 bp, Homo sapiens
agagcgggactccgt

SEQ ID NO: 1616563 - DNA, 15 bp, Homo sapiens
gagcgggactccgtc

SEQ ID NO: 1616564 - DNA, 15 bp, Homo sapiens
agcgggactccgtct

SEQ ID NO: 1616565 - DNA, 15 bp, Homo sapiens
gcgggactccgtctc

SEQ ID NO: 1616566 - DNA, 15 bp, Homo sapiens
cgggactccgtctca

SEQ ID NO: 1616567 - DNA, 15 bp, Homo sapiens
gggactccgtctcaa

SEQ ID NO: 1616568 - DNA, 15 bp, Homo sapiens
ggactccgtctcaaa

SEQ ID NO: 1616569 - DNA, 15 bp, Homo sapiens
aaaaaaaaaaagata

SEQ ID NO: 1616570 - DNA, 15 bp, Homo sapiens
aaaaaaaaaagatat

SEQ ID NO: 1616571 - DNA, 15 bp, Homo sapiens
aaaaaaaaagatata

SEQ ID NO: 1616572 - DNA, 15 bp, Homo sapiens
aaaaaaaagatatat

SEQ ID NO: 1616573 - DNA, 15 bp, Homo sapiens
aaaaaaagatatatt

SEQ ID NO: 1616574 - DNA, 15 bp, Homo sapiens
aaaaaagatatattc

SEQ ID NO: 1616575 - DNA, 15 bp, Homo sapiens
aaaaagatatattct

SEQ ID NO: 1616576 - DNA, 15 bp, Homo sapiens
aaaagatatattctg

SEQ ID NO: 1616577 - DNA, 15 bp, Homo sapiens
aaagatatattctgt

SEQ ID NO: 1616578 - DNA, 15 bp, Homo sapiens
agatatattctgtca

SEQ ID NO: 1616579 - DNA, 15 bp, Homo sapiens
gatatattctgtcat

SEQ ID NO: 1616580 - DNA, 15 bp, Homo sapiens
atatattctgtcata

SEQ ID NO: 1616581 - DNA, 15 bp, Homo sapiens
tatattctgtcataa

SEQ ID NO: 1616582 - DNA, 15 bp, Homo sapiens
atattctgtcataat

SEQ ID NO: 1616583 - DNA, 15 bp, Homo sapiens
tattctgtcataata

SEQ ID NO: 1616584 - DNA, 15 bp, Homo sapiens
attctgtcataataa

SEQ ID NO: 1616585 - DNA, 15 bp, Homo sapiens
ttctgtcataataaa

SEQ ID NO: 1616586 - DNA, 15 bp, Homo sapiens
tctgtcataataaat

SEQ ID NO: 1616587 - DNA, 15 bp, Homo sapiens
ctgtcataataaata

SEQ ID NO: 1616588 - DNA, 15 bp, Homo sapiens
tgtcataataaataa

SEQ ID NO: 1616589 - DNA, 15 bp, Homo sapiens
gtcataataaataaa

SEQ ID NO: 1616590 - DNA, 15 bp, Homo sapiens
tcataataaataaaa

SEQ ID NO: 1616591 - DNA, 15 bp, Homo sapiens
cataataaataaaaa

SEQ ID NO: 1616592 - DNA, 15 bp, Homo sapiens
ataataaataaaaat

SEQ ID NO: 1616593 - DNA, 15 bp, Homo sapiens
taataaataaaaatg

SEQ ID NO: 1616594 - DNA, 15 bp, Homo sapiens
atgcataagatataa

SEQ ID NO: 1616595 - DNA, 15 bp, Homo sapiens
tgcataagatataat

SEQ ID NO: 1616596 - DNA, 15 bp, Homo sapiens
gcataagatataata

SEQ ID NO: 1616597 - DNA, 15 bp, Homo sapiens
cataagatataataa

SEQ ID NO: 1616598 - DNA, 15 bp, Homo sapiens
ataagatataataaa

SEQ ID NO: 1616599 - DNA, 15 bp, Homo sapiens
taagatataataaat

SEQ ID NO: 1616600 - DNA, 15 bp, Homo sapiens
aagatataataaatg

SEQ ID NO: 1616601 - DNA, 15 bp, Homo sapiens
agatataataaatgt

SEQ ID NO: 1616602 - DNA, 15 bp, Homo sapiens
gatataataaatgtt

SEQ ID NO: 1616603 - DNA, 15 bp, Homo sapiens
atataataaatgttg

SEQ ID NO: 1616604 - DNA, 15 bp, Homo sapiens
tataataaatgttgc

SEQ ID NO: 1616605 - DNA, 15 bp, Homo sapiens
ataataaatgttgct

SEQ ID NO: 1616606 - DNA, 15 bp, Homo sapiens
taataaatgttgctt

SEQ ID NO: 1616607 - DNA, 15 bp, Homo sapiens
aataaatgttgcttc

SEQ ID NO: 1616608 - DNA, 15 bp, Homo sapiens
ataaatgttgcttca

SEQ ID NO: 1616609 - DNA, 15 bp, Homo sapiens
taaatgttgcttcat

SEQ ID NO: 1616610 - DNA, 15 bp, Homo sapiens
aaatgttgcttcatt

SEQ ID NO: 1616611 - DNA, 15 bp, Homo sapiens
aatgttgcttcattt

SEQ ID NO: 1616612 - DNA, 15 bp, Homo sapiens
atgttgcttcattta

SEQ ID NO: 1616613 - DNA, 15 bp, Homo sapiens
tgttgcttcatttat

SEQ ID NO: 1616614 - DNA, 15 bp, Homo sapiens
gttgcttcatttata

SEQ ID NO: 1616615 - DNA, 15 bp, Homo sapiens
ttgcttcatttataa

SEQ ID NO: 1616616 - DNA, 15 bp, Homo sapiens
tgcttcatttataac

SEQ ID NO: 1616617 - DNA, 15 bp, Homo sapiens
gcttcatttataacc

SEQ ID NO: 1616618 - DNA, 15 bp, Homo sapiens
cttcatttataacca

SEQ ID NO: 1616619 - DNA, 15 bp, Homo sapiens
ttcatttataaccat

SEQ ID NO: 1616620 - DNA, 15 bp, Homo sapiens
tcatttataaccata

SEQ ID NO: 1616621 - DNA, 15 bp, Homo sapiens
catttataaccataa

SEQ ID NO: 1616622 - DNA, 15 bp, Homo sapiens
atttataaccataat

SEQ ID NO: 1616623 - DNA, 15 bp, Homo sapiens
tttataaccataata

SEQ ID NO: 1616624 - DNA, 15 bp, Homo sapiens
ttataaccataataa

SEQ ID NO: 1616625 - DNA, 15 bp, Homo sapiens
tataaccataataaa

SEQ ID NO: 1616626 - DNA, 15 bp, Homo sapiens
ataaccataataaaa

SEQ ID NO: 1616627 - DNA, 15 bp, Homo sapiens
taaccataataaaat

SEQ ID NO: 1616628 - DNA, 15 bp, Homo sapiens
aaccataataaaata

SEQ ID NO: 1616629 - DNA, 15 bp, Homo sapiens
accataataaaatat

SEQ ID NO: 1616630 - DNA, 15 bp, Homo sapiens
ccataataaaatatt

SEQ ID NO: 1616631 - DNA, 15 bp, Homo sapiens
cataataaaatattt

SEQ ID NO: 1616632 - DNA, 15 bp, Homo sapiens
ataataaaatattta

SEQ ID NO: 1616633 - DNA, 15 bp, Homo sapiens
taataaaatatttat

SEQ ID NO: 1616634 - DNA, 15 bp, Homo sapiens
aataaaatatttatt

SEQ ID NO: 1616635 - DNA, 15 bp, Homo sapiens
ataaaatatttattt

SEQ ID NO: 1616636 - DNA, 15 bp, Homo sapiens
taaaatatttattta

SEQ ID NO: 1616637 - DNA, 15 bp, Homo sapiens
aaaatatttatttag

SEQ ID NO: 1616638 - DNA, 15 bp, Homo sapiens
aaatatttatttaga

SEQ ID NO: 1616639 - DNA, 15 bp, Homo sapiens
aatatttatttagat

SEQ ID NO: 1616640 - DNA, 15 bp, Homo sapiens
atatttatttagatg

SEQ ID NO: 1616641 - DNA, 15 bp, Homo sapiens
tatttatttagatga

SEQ ID NO: 1616642 - DNA, 15 bp, Homo sapiens
atttatttagatgag

SEQ ID NO: 1616643 - DNA, 15 bp, Homo sapiens
tttatttagatgaga

SEQ ID NO: 1616644 - DNA, 15 bp, Homo sapiens
ttatttagatgagac

SEQ ID NO: 1616645 - DNA, 15 bp, Homo sapiens
tatttagatgagacc

SEQ ID NO: 1616646 - DNA, 15 bp, Homo sapiens
atttagatgagacct

SEQ ID NO: 1616647 - DNA, 15 bp, Homo sapiens
tttagatgagaccta

SEQ ID NO: 1616648 - DNA, 15 bp, Homo sapiens
ttagatgagacctac

SEQ ID NO: 1616649 - DNA, 15 bp, Homo sapiens
tagatgagacctact

SEQ ID NO: 1616650 - DNA, 15 bp, Homo sapiens
agatgagacctacta

SEQ ID NO: 1616651 - DNA, 15 bp, Homo sapiens
gatgagacctactat

SEQ ID NO: 1616652 - DNA, 15 bp, Homo sapiens
atgagacctactata

SEQ ID NO: 1616653 - DNA, 15 bp, Homo sapiens
tgagacctactataa

SEQ ID NO: 1616654 - DNA, 15 bp, Homo sapiens
gagacctactataaa

SEQ ID NO: 1616655 - DNA, 15 bp, Homo sapiens
agacctactataaac

SEQ ID NO: 1616656 - DNA, 15 bp, Homo sapiens
gacctactataaact

SEQ ID NO: 1616657 - DNA, 15 bp, Homo sapiens
acctactataaactg

SEQ ID NO: 1616658 - DNA, 15 bp, Homo sapiens
cctactataaactgc

SEQ ID NO: 1616659 - DNA, 15 bp, Homo sapiens
ctactataaactgct

SEQ ID NO: 1616660 - DNA, 15 bp, Homo sapiens
tactataaactgctt

SEQ ID NO: 1616661 - DNA, 15 bp, Homo sapiens
actataaactgcttt

SEQ ID NO: 1616662 - DNA, 15 bp, Homo sapiens
ctataaactgctttc

SEQ ID NO: 1616663 - DNA, 15 bp, Homo sapiens
tataaactgctttca

SEQ ID NO: 1616664 - DNA, 15 bp, Homo sapiens
ataaactgctttcag

SEQ ID NO: 1616665 - DNA, 15 bp, Homo sapiens
taaactgctttcagc

SEQ ID NO: 1616666 - DNA, 15 bp, Homo sapiens
aaactgctttcagca

SEQ ID NO: 1616667 - DNA, 15 bp, Homo sapiens
aactgctttcagcag

SEQ ID NO: 1616668 - DNA, 15 bp, Homo sapiens
actgctttcagcagg

SEQ ID NO: 1616669 - DNA, 15 bp, Homo sapiens
ctgctttcagcaggg

SEQ ID NO: 1616670 - DNA, 15 bp, Homo sapiens
tgctttcagcagggc

SEQ ID NO: 1616671 - DNA, 15 bp, Homo sapiens
gctttcagcagggct

SEQ ID NO: 1616672 - DNA, 15 bp, Homo sapiens
ctttcagcagggcta

SEQ ID NO: 1616673 - DNA, 15 bp, Homo sapiens
tttcagcagggctaa

SEQ ID NO: 1616674 - DNA, 15 bp, Homo sapiens
ttcagcagggctaat

SEQ ID NO: 1616675 - DNA, 15 bp, Homo sapiens
tcagcagggctaata

SEQ ID NO: 1616676 - DNA, 15 bp, Homo sapiens
cagcagggctaatag

SEQ ID NO: 1616677 - DNA, 15 bp, Homo sapiens
agcagggctaataga

SEQ ID NO: 1616678 - DNA, 15 bp, Homo sapiens
gcagggctaatagac

SEQ ID NO: 1616679 - DNA, 15 bp, Homo sapiens
cagggctaatagact

SEQ ID NO: 1616680 - DNA, 15 bp, Homo sapiens
agggctaatagactc

SEQ ID NO: 1616681 - DNA, 15 bp, Homo sapiens
gggctaatagactcc

SEQ ID NO: 1616682 - DNA, 15 bp, Homo sapiens
ggctaatagactcct

SEQ ID NO: 1616683 - DNA, 15 bp, Homo sapiens
gctaatagactccta

SEQ ID NO: 1616684 - DNA, 15 bp, Homo sapiens
ctaatagactcctat

SEQ ID NO: 1616685 - DNA, 15 bp, Homo sapiens
taatagactcctata

SEQ ID NO: 1616686 - DNA, 15 bp, Homo sapiens
aatagactcctatac

SEQ ID NO: 1616687 - DNA, 15 bp, Homo sapiens
atagactcctatact

SEQ ID NO: 1616688 - DNA, 15 bp, Homo sapiens
tagactcctatactt

SEQ ID NO: 1616689 - DNA, 15 bp, Homo sapiens
agactcctatacttt

SEQ ID NO: 1616690 - DNA, 15 bp, Homo sapiens
gactcctatactttc

SEQ ID NO: 1616691 - DNA, 15 bp, Homo sapiens
actcctatactttcc

SEQ ID NO: 1616692 - DNA, 15 bp, Homo sapiens
ctcctatactttccc

SEQ ID NO: 1616693 - DNA, 15 bp, Homo sapiens
tcctatactttccct

SEQ ID NO: 1616694 - DNA, 15 bp, Homo sapiens
cctatactttcccta

SEQ ID NO: 1616695 - DNA, 15 bp, Homo sapiens
ctatactttccctat

SEQ ID NO: 1616696 - DNA, 15 bp, Homo sapiens
tatactttccctatg

SEQ ID NO: 1616697 - DNA, 15 bp, Homo sapiens
atactttccctatgt

SEQ ID NO: 1616698 - DNA, 15 bp, Homo sapiens
tactttccctatgtt

SEQ ID NO: 1616699 - DNA, 15 bp, Homo sapiens
actttccctatgtta

SEQ ID NO: 1616700 - DNA, 15 bp, Homo sapiens
ctttccctatgttaa

SEQ ID NO: 1616701 - DNA, 15 bp, Homo sapiens
tttccctatgttaat

SEQ ID NO: 1616702 - DNA, 15 bp, Homo sapiens
ttccctatgttaatg

SEQ ID NO: 1616703 - DNA, 15 bp, Homo sapiens
tccctatgttaatgt

SEQ ID NO: 1616704 - DNA, 15 bp, Homo sapiens
ccctatgttaatgtg

SEQ ID NO: 1616705 - DNA, 15 bp, Homo sapiens
cctatgttaatgtga

SEQ ID NO: 1616706 - DNA, 15 bp, Homo sapiens
ctatgttaatgtgag

SEQ ID NO: 1616707 - DNA, 15 bp, Homo sapiens
tatgttaatgtgaga

SEQ ID NO: 1616708 - DNA, 15 bp, Homo sapiens
atgttaatgtgagac

SEQ ID NO: 1616709 - DNA, 15 bp, Homo sapiens
tgttaatgtgagact

SEQ ID NO: 1616710 - DNA, 15 bp, Homo sapiens
gttaatgtgagactt

SEQ ID NO: 1616711 - DNA, 15 bp, Homo sapiens
ttaatgtgagacttt

SEQ ID NO: 1616712 - DNA, 15 bp, Homo sapiens
taatgtgagactttt

SEQ ID NO: 1616713 - DNA, 15 bp, Homo sapiens
aatgtgagacttttt

SEQ ID NO: 1616714 - DNA, 15 bp, Homo sapiens
atgtgagactttttc

SEQ ID NO: 1616715 - DNA, 15 bp, Homo sapiens
tgtgagactttttca

SEQ ID NO: 1616716 - DNA, 15 bp, Homo sapiens
gtgagactttttcat

SEQ ID NO: 1616717 - DNA, 15 bp, Homo sapiens
tgagactttttcata

SEQ ID NO: 1616718 - DNA, 15 bp, Homo sapiens
gagactttttcataa

SEQ ID NO: 1616719 - DNA, 15 bp, Homo sapiens
agactttttcataat

SEQ ID NO: 1616720 - DNA, 15 bp, Homo sapiens
gactttttcataatt

SEQ ID NO: 1616721 - DNA, 15 bp, Homo sapiens
actttttcataatta

SEQ ID NO: 1616722 - DNA, 15 bp, Homo sapiens
ctttttcataattac

SEQ ID NO: 1616723 - DNA, 15 bp, Homo sapiens
tttttcataattacc

SEQ ID NO: 1616724 - DNA, 15 bp, Homo sapiens
ttttcataattacct

SEQ ID NO: 1616725 - DNA, 15 bp, Homo sapiens
tttcataattacctg

SEQ ID NO: 1616726 - DNA, 15 bp, Homo sapiens
ttcataattacctgt

SEQ ID NO: 1616727 - DNA, 15 bp, Homo sapiens
tcataattacctgtc

SEQ ID NO: 1616728 - DNA, 15 bp, Homo sapiens
cataattacctgtca

SEQ ID NO: 1616729 - DNA, 15 bp, Homo sapiens
ataattacctgtcaa

SEQ ID NO: 1616730 - DNA, 15 bp, Homo sapiens
taattacctgtcaac

SEQ ID NO: 1616731 - DNA, 15 bp, Homo sapiens
aattacctgtcaact

SEQ ID NO: 1616732 - DNA, 15 bp, Homo sapiens
attacctgtcaactt

SEQ ID NO: 1616733 - DNA, 15 bp, Homo sapiens
ttacctgtcaacttg

SEQ ID NO: 1616734 - DNA, 15 bp, Homo sapiens
tacctgtcaacttgt

SEQ ID NO: 1616735 - DNA, 15 bp, Homo sapiens
acctgtcaacttgtc

SEQ ID NO: 1616736 - DNA, 15 bp, Homo sapiens
cctgtcaacttgtct

SEQ ID NO: 1616737 - DNA, 15 bp, Homo sapiens
ctgtcaacttgtcta

SEQ ID NO: 1616738 - DNA, 15 bp, Homo sapiens
tgtcaacttgtctat

SEQ ID NO: 1616739 - DNA, 15 bp, Homo sapiens
gtcaacttgtctata

SEQ ID NO: 1616740 - DNA, 15 bp, Homo sapiens
tcaacttgtctatat

SEQ ID NO: 1616741 - DNA, 15 bp, Homo sapiens
caacttgtctatatt

SEQ ID NO: 1616742 - DNA, 15 bp, Homo sapiens
aacttgtctatattc

SEQ ID NO: 1616743 - DNA, 15 bp, Homo sapiens
acttgtctatattct

SEQ ID NO: 1616744 - DNA, 15 bp, Homo sapiens
cttgtctatattctt

SEQ ID NO: 1616745 - DNA, 15 bp, Homo sapiens
ttgtctatattctta

SEQ ID NO: 1616746 - DNA, 15 bp, Homo sapiens
tgtctatattcttat

SEQ ID NO: 1616747 - DNA, 15 bp, Homo sapiens
gtctatattcttatt

SEQ ID NO: 1616748 - DNA, 15 bp, Homo sapiens
tctatattcttatta

SEQ ID NO: 1616749 - DNA, 15 bp, Homo sapiens
ctatattcttattac

SEQ ID NO: 1616750 - DNA, 15 bp, Homo sapiens
tatattcttattaca

SEQ ID NO: 1616751 - DNA, 15 bp, Homo sapiens
atattcttattacat

SEQ ID NO: 1616752 - DNA, 15 bp, Homo sapiens
tattcttattacatg

SEQ ID NO: 1616753 - DNA, 15 bp, Homo sapiens
attcttattacatga

SEQ ID NO: 1616754 - DNA, 15 bp, Homo sapiens
ttcttattacatgat

SEQ ID NO: 1616755 - DNA, 15 bp, Homo sapiens
tcttattacatgata

SEQ ID NO: 1616756 - DNA, 15 bp, Homo sapiens
cttattacatgataa

SEQ ID NO: 1616757 - DNA, 15 bp, Homo sapiens
ttattacatgataag

SEQ ID NO: 1616758 - DNA, 15 bp, Homo sapiens
tattacatgataagc

SEQ ID NO: 1616759 - DNA, 15 bp, Homo sapiens
attacatgataagct

SEQ ID NO: 1616760 - DNA, 15 bp, Homo sapiens
ttacatgataagctt

SEQ ID NO: 1616761 - DNA, 15 bp, Homo sapiens
tacatgataagcttc

SEQ ID NO: 1616762 - DNA, 15 bp, Homo sapiens
acatgataagcttct

SEQ ID NO: 1616763 - DNA, 15 bp, Homo sapiens
catgataagcttctt

SEQ ID NO: 1616764 - DNA, 15 bp, Homo sapiens
atgataagcttcttg

SEQ ID NO: 1616765 - DNA, 15 bp, Homo sapiens
tgataagcttcttga

SEQ ID NO: 1616766 - DNA, 15 bp, Homo sapiens
gataagcttcttgat

SEQ ID NO: 1616767 - DNA, 15 bp, Homo sapiens
ataagcttcttgatg

SEQ ID NO: 1616768 - DNA, 15 bp, Homo sapiens
taagcttcttgatgc

SEQ ID NO: 1616769 - DNA, 15 bp, Homo sapiens
aagcttcttgatgcc

SEQ ID NO: 1616770 - DNA, 15 bp, Homo sapiens
agcttcttgatgcca

SEQ ID NO: 1616771 - DNA, 15 bp, Homo sapiens
gcttcttgatgccag

SEQ ID NO: 1616772 - DNA, 15 bp, Homo sapiens
cttcttgatgccagg

SEQ ID NO: 1616773 - DNA, 15 bp, Homo sapiens
ttcttgatgccaggg

SEQ ID NO: 1616774 - DNA, 15 bp, Homo sapiens
tcttgatgccaggga

SEQ ID NO: 1616775 - DNA, 15 bp, Homo sapiens
cttgatgccagggac

SEQ ID NO: 1616776 - DNA, 15 bp, Homo sapiens
ttgatgccagggaca

SEQ ID NO: 1616777 - DNA, 15 bp, Homo sapiens
tgatgccagggacac

SEQ ID NO: 1616778 - DNA, 15 bp, Homo sapiens
gatgccagggacact

SEQ ID NO: 1616779 - DNA, 15 bp, Homo sapiens
atgccagggacactc

SEQ ID NO: 1616780 - DNA, 15 bp, Homo sapiens
tgccagggacactct

SEQ ID NO: 1616781 - DNA, 15 bp, Homo sapiens
gccagggacactctg

SEQ ID NO: 1616782 - DNA, 15 bp, Homo sapiens
cagggacactctgta

SEQ ID NO: 1616783 - DNA, 15 bp, Homo sapiens
agggacactctgtat

SEQ ID NO: 1616784 - DNA, 15 bp, Homo sapiens
gggacactctgtatt

SEQ ID NO: 1616785 - DNA, 15 bp, Homo sapiens
ggacactctgtattg

SEQ ID NO: 1616786 - DNA, 15 bp, Homo sapiens
gacactctgtattgt

SEQ ID NO: 1616787 - DNA, 15 bp, Homo sapiens
acactctgtattgtt

SEQ ID NO: 1616788 - DNA, 15 bp, Homo sapiens
cactctgtattgttt

SEQ ID NO: 1616789 - DNA, 15 bp, Homo sapiens
actctgtattgttta

SEQ ID NO: 1616790 - DNA, 15 bp, Homo sapiens
ctctgtattgtttac

SEQ ID NO: 1616791 - DNA, 15 bp, Homo sapiens
tctgtattgtttacc

SEQ ID NO: 1616792 - DNA, 15 bp, Homo sapiens
ctgtattgtttacca

SEQ ID NO: 1616793 - DNA, 15 bp, Homo sapiens
tgtattgtttaccag

SEQ ID NO: 1616794 - DNA, 15 bp, Homo sapiens
gtattgtttaccaga

SEQ ID NO: 1616795 - DNA, 15 bp, Homo sapiens
tattgtttaccagat

SEQ ID NO: 1616796 - DNA, 15 bp, Homo sapiens
attgtttaccagatt

SEQ ID NO: 1616797 - DNA, 15 bp, Homo sapiens
ttgtttaccagattt

SEQ ID NO: 1616798 - DNA, 15 bp, Homo sapiens
tgtttaccagattta

SEQ ID NO: 1616799 - DNA, 15 bp, Homo sapiens
gtttaccagatttat

SEQ ID NO: 1616800 - DNA, 15 bp, Homo sapiens
tttaccagatttata

SEQ ID NO: 1616801 - DNA, 15 bp, Homo sapiens
ttaccagatttatac

SEQ ID NO: 1616802 - DNA, 15 bp, Homo sapiens
taccagatttataca

SEQ ID NO: 1616803 - DNA, 15 bp, Homo sapiens
accagatttatacat

SEQ ID NO: 1616804 - DNA, 15 bp, Homo sapiens
ccagatttatacatc

SEQ ID NO: 1616805 - DNA, 15 bp, Homo sapiens
cagatttatacatcc

SEQ ID NO: 1616806 - DNA, 15 bp, Homo sapiens
agatttatacatccc

SEQ ID NO: 1616807 - DNA, 15 bp, Homo sapiens
gatttatacatccca

SEQ ID NO: 1616808 - DNA, 15 bp, Homo sapiens
atttatacatcccag

SEQ ID NO: 1616809 - DNA, 15 bp, Homo sapiens
tttatacatcccagc

SEQ ID NO: 1616810 - DNA, 15 bp, Homo sapiens
ttatacatcccagct

SEQ ID NO: 1616811 - DNA, 15 bp, Homo sapiens
tatacatcccagctt

SEQ ID NO: 1616812 - DNA, 15 bp, Homo sapiens
atacatcccagcttt

SEQ ID NO: 1616813 - DNA, 15 bp, Homo sapiens
tacatcccagctttt

SEQ ID NO: 1616814 - DNA, 15 bp, Homo sapiens
acatcccagcttttt

SEQ ID NO: 1616815 - DNA, 15 bp, Homo sapiens
catcccagctttttt

SEQ ID NO: 1616816 - DNA, 15 bp, Homo sapiens
atcccagcttttttt

SEQ ID NO: 1616817 - DNA, 15 bp, Homo sapiens
tcccagctttttttt

SEQ ID NO: 1616818 - DNA, 15 bp, Homo sapiens
cccagcttttttttg

SEQ ID NO: 1616819 - DNA, 15 bp, Homo sapiens
ccagcttttttttgt

SEQ ID NO: 1616820 - DNA, 15 bp, Homo sapiens
cagcttttttttgtt

SEQ ID NO: 1616821 - DNA, 15 bp, Homo sapiens
agcttttttttgttt

SEQ ID NO: 1616822 - DNA, 15 bp, Homo sapiens
gcttttttttgtttg

SEQ ID NO: 1616823 - DNA, 15 bp, Homo sapiens
tgtttttgagacagg

SEQ ID NO: 1616824 - DNA, 15 bp, Homo sapiens
gtttttgagacaggg

SEQ ID NO: 1616825 - DNA, 15 bp, Homo sapiens
agtggcatgatctca

SEQ ID NO: 1616826 - DNA, 15 bp, Homo sapiens
atgatctcagctcat

SEQ ID NO: 1616827 - DNA, 15 bp, Homo sapiens
tgatctcagctcatt

SEQ ID NO: 1616828 - DNA, 15 bp, Homo sapiens
ctcagctcattgcag

SEQ ID NO: 1616829 - DNA, 15 bp, Homo sapiens
tcagctcattgcagc

SEQ ID NO: 1616830 - DNA, 15 bp, Homo sapiens
cagctcattgcagcc

SEQ ID NO: 1616831 - DNA, 15 bp, Homo sapiens
agctcattgcagccc

SEQ ID NO: 1616832 - DNA, 15 bp, Homo sapiens
gctcattgcagccct

SEQ ID NO: 1616833 - DNA, 15 bp, Homo sapiens
ctcattgcagccctg

SEQ ID NO: 1616834 - DNA, 15 bp, Homo sapiens
tcattgcagccctga

SEQ ID NO: 1616835 - DNA, 15 bp, Homo sapiens
cattgcagccctgac

SEQ ID NO: 1616836 - DNA, 15 bp, Homo sapiens
attgcagccctgacc

SEQ ID NO: 1616837 - DNA, 15 bp, Homo sapiens
ttgcagccctgacct

SEQ ID NO: 1616838 - DNA, 15 bp, Homo sapiens
tgcagccctgacctc

SEQ ID NO: 1616839 - DNA, 15 bp, Homo sapiens
gcagccctgacctcc

SEQ ID NO: 1616840 - DNA, 15 bp, Homo sapiens
cagccctgacctccc

SEQ ID NO: 1616841 - DNA, 15 bp, Homo sapiens
agccctgacctccca

SEQ ID NO: 1616842 - DNA, 15 bp, Homo sapiens
gccctgacctcccag

SEQ ID NO: 1616843 - DNA, 15 bp, Homo sapiens
ccctgacctcccaga

SEQ ID NO: 1616844 - DNA, 15 bp, Homo sapiens
cctgacctcccagac

SEQ ID NO: 1616845 - DNA, 15 bp, Homo sapiens
ctgacctcccagacc

SEQ ID NO: 1616846 - DNA, 15 bp, Homo sapiens
tgacctcccagacct

SEQ ID NO: 1616847 - DNA, 15 bp, Homo sapiens
gacctcccagaccta

SEQ ID NO: 1616848 - DNA, 15 bp, Homo sapiens
acctcccagacctaa

SEQ ID NO: 1616849 - DNA, 15 bp, Homo sapiens
cctcccagacctaag

SEQ ID NO: 1616850 - DNA, 15 bp, Homo sapiens
ctcccagacctaagt

SEQ ID NO: 1616851 - DNA, 15 bp, Homo sapiens
tcccagacctaagtg

SEQ ID NO: 1616852 - DNA, 15 bp, Homo sapiens
cccagacctaagtga

SEQ ID NO: 1616853 - DNA, 15 bp, Homo sapiens
ccagacctaagtgat

SEQ ID NO: 1616854 - DNA, 15 bp, Homo sapiens
cagacctaagtgatc

SEQ ID NO: 1616855 - DNA, 15 bp, Homo sapiens
agacctaagtgatcc

SEQ ID NO: 1616856 - DNA, 15 bp, Homo sapiens
gacctaagtgatcct

SEQ ID NO: 1616857 - DNA, 15 bp, Homo sapiens
acctaagtgatcctc

SEQ ID NO: 1616858 - DNA, 15 bp, Homo sapiens
cctaagtgatcctcc

SEQ ID NO: 1616859 - DNA, 15 bp, Homo sapiens
ctaagtgatcctcct

SEQ ID NO: 1616860 - DNA, 15 bp, Homo sapiens
taagtgatcctccta

SEQ ID NO: 1616861 - DNA, 15 bp, Homo sapiens
aagtgatcctcctac

SEQ ID NO: 1616862 - DNA, 15 bp, Homo sapiens
ctcctacctcagccc

SEQ ID NO: 1616863 - DNA, 15 bp, Homo sapiens
tcctacctcagcccc

SEQ ID NO: 1616864 - DNA, 15 bp, Homo sapiens
cctacctcagccccc

SEQ ID NO: 1616865 - DNA, 15 bp, Homo sapiens
ctacctcagccccct

SEQ ID NO: 1616866 - DNA, 15 bp, Homo sapiens
tacctcagcccccta

SEQ ID NO: 1616867 - DNA, 15 bp, Homo sapiens
acctcagccccctaa

SEQ ID NO: 1616868 - DNA, 15 bp, Homo sapiens
cctcagccccctaag

SEQ ID NO: 1616869 - DNA, 15 bp, Homo sapiens
agccccctaagtagc

SEQ ID NO: 1616870 - DNA, 15 bp, Homo sapiens
gccccctaagtagct

SEQ ID NO: 1616871 - DNA, 15 bp, Homo sapiens
ccccctaagtagcta

SEQ ID NO: 1616872 - DNA, 15 bp, Homo sapiens
cccctaagtagctaa

SEQ ID NO: 1616873 - DNA, 15 bp, Homo sapiens
ccctaagtagctaag

SEQ ID NO: 1616874 - DNA, 15 bp, Homo sapiens
cctaagtagctaaga

SEQ ID NO: 1616875 - DNA, 15 bp, Homo sapiens
ctaagtagctaagac

SEQ ID NO: 1616876 - DNA, 15 bp, Homo sapiens
taagtagctaagact

SEQ ID NO: 1616877 - DNA, 15 bp, Homo sapiens
agctaagactacagc

SEQ ID NO: 1616878 - DNA, 15 bp, Homo sapiens
gctaagactacagct

SEQ ID NO: 1616879 - DNA, 15 bp, Homo sapiens
ctaagactacagctg

SEQ ID NO: 1616880 - DNA, 15 bp, Homo sapiens
taagactacagctgt

SEQ ID NO: 1616881 - DNA, 15 bp, Homo sapiens
aagactacagctgtg

SEQ ID NO: 1616882 - DNA, 15 bp, Homo sapiens
agactacagctgtgc

SEQ ID NO: 1616883 - DNA, 15 bp, Homo sapiens
gactacagctgtgca

SEQ ID NO: 1616884 - DNA, 15 bp, Homo sapiens
actacagctgtgcac

SEQ ID NO: 1616885 - DNA, 15 bp, Homo sapiens
ctacagctgtgcacc

SEQ ID NO: 1616886 - DNA, 15 bp, Homo sapiens
tacagctgtgcacca

SEQ ID NO: 1616887 - DNA, 15 bp, Homo sapiens
acagctgtgcaccaa

SEQ ID NO: 1616888 - DNA, 15 bp, Homo sapiens
cagctgtgcaccaac

SEQ ID NO: 1616889 - DNA, 15 bp, Homo sapiens
agctgtgcaccaaca

SEQ ID NO: 1616890 - DNA, 15 bp, Homo sapiens
gctgtgcaccaacat

SEQ ID NO: 1616891 - DNA, 15 bp, Homo sapiens
ctgtgcaccaacatg

SEQ ID NO: 1616892 - DNA, 15 bp, Homo sapiens
tgtgcaccaacatgc

SEQ ID NO: 1616893 - DNA, 15 bp, Homo sapiens
gtgcaccaacatgct

SEQ ID NO: 1616894 - DNA, 15 bp, Homo sapiens
tgcaccaacatgctc

SEQ ID NO: 1616895 - DNA, 15 bp, Homo sapiens
gcaccaacatgctca

SEQ ID NO: 1616896 - DNA, 15 bp, Homo sapiens
caccaacatgctcag

SEQ ID NO: 1616897 - DNA, 15 bp, Homo sapiens
accaacatgctcagc

SEQ ID NO: 1616898 - DNA, 15 bp, Homo sapiens
ccaacatgctcagcc

SEQ ID NO: 1616899 - DNA, 15 bp, Homo sapiens
caacatgctcagcca

SEQ ID NO: 1616900 - DNA, 15 bp, Homo sapiens
aacatgctcagccaa

SEQ ID NO: 1616901 - DNA, 15 bp, Homo sapiens
acatgctcagccaat

SEQ ID NO: 1616902 - DNA, 15 bp, Homo sapiens
catgctcagccaatt

SEQ ID NO: 1616903 - DNA, 15 bp, Homo sapiens
atgctcagccaattt

SEQ ID NO: 1616904 - DNA, 15 bp, Homo sapiens
tgctcagccaatttt

SEQ ID NO: 1616905 - DNA, 15 bp, Homo sapiens
gctcagccaattttt

SEQ ID NO: 1616906 - DNA, 15 bp, Homo sapiens
ctcagccaatttttg

SEQ ID NO: 1616907 - DNA, 15 bp, Homo sapiens
tcagccaatttttgt

SEQ ID NO: 1616908 - DNA, 15 bp, Homo sapiens
cagccaatttttgta

SEQ ID NO: 1616909 - DNA, 15 bp, Homo sapiens
agccaatttttgtat

SEQ ID NO: 1616910 - DNA, 15 bp, Homo sapiens
gacagggtcttgcta

SEQ ID NO: 1616911 - DNA, 15 bp, Homo sapiens
acagggtcttgctat

SEQ ID NO: 1616912 - DNA, 15 bp, Homo sapiens
cagggtcttgctatg

SEQ ID NO: 1616913 - DNA, 15 bp, Homo sapiens
tcctgagctcaagtt

SEQ ID NO: 1616914 - DNA, 15 bp, Homo sapiens
cctgagctcaagtta

SEQ ID NO: 1616915 - DNA, 15 bp, Homo sapiens
ctgagctcaagttat

SEQ ID NO: 1616916 - DNA, 15 bp, Homo sapiens
tgagctcaagttatg

SEQ ID NO: 1616917 - DNA, 15 bp, Homo sapiens
gagctcaagttatgt

SEQ ID NO: 1616918 - DNA, 15 bp, Homo sapiens
agctcaagttatgtc

SEQ ID NO: 1616919 - DNA, 15 bp, Homo sapiens
gctcaagttatgtct

SEQ ID NO: 1616920 - DNA, 15 bp, Homo sapiens
ctcaagttatgtctg

SEQ ID NO: 1616921 - DNA, 15 bp, Homo sapiens
tcaagttatgtctgt

SEQ ID NO: 1616922 - DNA, 15 bp, Homo sapiens
caagttatgtctgta

SEQ ID NO: 1616923 - DNA, 15 bp, Homo sapiens
aagttatgtctgtat

SEQ ID NO: 1616924 - DNA, 15 bp, Homo sapiens
agttatgtctgtatc

SEQ ID NO: 1616925 - DNA, 15 bp, Homo sapiens
gttatgtctgtatct

SEQ ID NO: 1616926 - DNA, 15 bp, Homo sapiens
ttatgtctgtatctt

SEQ ID NO: 1616927 - DNA, 15 bp, Homo sapiens
tatgtctgtatctta

SEQ ID NO: 1616928 - DNA, 15 bp, Homo sapiens
atgtctgtatcttat

SEQ ID NO: 1616929 - DNA, 15 bp, Homo sapiens
tgtctgtatcttatc

SEQ ID NO: 1616930 - DNA, 15 bp, Homo sapiens
gtctgtatcttatca

SEQ ID NO: 1616931 - DNA, 15 bp, Homo sapiens
ttatcattggaatat

SEQ ID NO: 1616932 - DNA, 15 bp, Homo sapiens
tatcattggaatata

SEQ ID NO: 1616933 - DNA, 15 bp, Homo sapiens
atcattggaatatat

SEQ ID NO: 1616934 - DNA, 15 bp, Homo sapiens
tcattggaatatatg

SEQ ID NO: 1616935 - DNA, 15 bp, Homo sapiens
cattggaatatatga

SEQ ID NO: 1616936 - DNA, 15 bp, Homo sapiens
attggaatatatgat

SEQ ID NO: 1616937 - DNA, 15 bp, Homo sapiens
ttggaatatatgata

SEQ ID NO: 1616938 - DNA, 15 bp, Homo sapiens
tggaatatatgataa

SEQ ID NO: 1616939 - DNA, 15 bp, Homo sapiens
ggaatatatgataat

SEQ ID NO: 1616940 - DNA, 15 bp, Homo sapiens
gaatatatgataatc

SEQ ID NO: 1616941 - DNA, 15 bp, Homo sapiens
aatatatgataatcc

SEQ ID NO: 1616942 - DNA, 15 bp, Homo sapiens
atatatgataatccc

SEQ ID NO: 1616943 - DNA, 15 bp, Homo sapiens
tatatgataatccca

SEQ ID NO: 1616944 - DNA, 15 bp, Homo sapiens
atatgataatcccag

SEQ ID NO: 1616945 - DNA, 15 bp, Homo sapiens
tatgataatcccagc

SEQ ID NO: 1616946 - DNA, 15 bp, Homo sapiens
atgataatcccagca

SEQ ID NO: 1616947 - DNA, 15 bp, Homo sapiens
tgataatcccagcac

SEQ ID NO: 1616948 - DNA, 15 bp, Homo sapiens
gataatcccagcact

SEQ ID NO: 1616949 - DNA, 15 bp, Homo sapiens
ctttggaaggccaaa

SEQ ID NO: 1616950 - DNA, 15 bp, Homo sapiens
tttggaaggccaaag

SEQ ID NO: 1616951 - DNA, 15 bp, Homo sapiens
ttggaaggccaaagt

SEQ ID NO: 1616952 - DNA, 15 bp, Homo sapiens
tggaaggccaaagtg

SEQ ID NO: 1616953 - DNA, 15 bp, Homo sapiens
ggaaggccaaagtgc

SEQ ID NO: 1616954 - DNA, 15 bp, Homo sapiens
gaaggccaaagtgct

SEQ ID NO: 1616955 - DNA, 15 bp, Homo sapiens
aaggccaaagtgctg

SEQ ID NO: 1616956 - DNA, 15 bp, Homo sapiens
aggccaaagtgctgg

SEQ ID NO: 1616957 - DNA, 15 bp, Homo sapiens
ggccaaagtgctggg

SEQ ID NO: 1616958 - DNA, 15 bp, Homo sapiens
gctgggattatagca

SEQ ID NO: 1616959 - DNA, 15 bp, Homo sapiens
ctgggattatagcat

SEQ ID NO: 1616960 - DNA, 15 bp, Homo sapiens
tgggattatagcatc

SEQ ID NO: 1616961 - DNA, 15 bp, Homo sapiens
gggattatagcatcc

SEQ ID NO: 1616962 - DNA, 15 bp, Homo sapiens
ggattatagcatccc

SEQ ID NO: 1616963 - DNA, 15 bp, Homo sapiens
gattatagcatccct

SEQ ID NO: 1616964 - DNA, 15 bp, Homo sapiens
attatagcatccctc

SEQ ID NO: 1616965 - DNA, 15 bp, Homo sapiens
ttatagcatccctcc

SEQ ID NO: 1616966 - DNA, 15 bp, Homo sapiens
tatagcatccctccc

SEQ ID NO: 1616967 - DNA, 15 bp, Homo sapiens
atagcatccctccca

SEQ ID NO: 1616968 - DNA, 15 bp, Homo sapiens
tagcatccctcccaa

SEQ ID NO: 1616969 - DNA, 15 bp, Homo sapiens
agcatccctcccaaa

SEQ ID NO: 1616970 - DNA, 15 bp, Homo sapiens
gcatccctcccaaag

SEQ ID NO: 1616971 - DNA, 15 bp, Homo sapiens
catccctcccaaagt

SEQ ID NO: 1616972 - DNA, 15 bp, Homo sapiens
atccctcccaaagtg

SEQ ID NO: 1616973 - DNA, 15 bp, Homo sapiens
tccctcccaaagtgc

SEQ ID NO: 1616974 - DNA, 15 bp, Homo sapiens
caaagtgctgggatg

SEQ ID NO: 1616975 - DNA, 15 bp, Homo sapiens
aaagtgctgggatgc

SEQ ID NO: 1616976 - DNA, 15 bp, Homo sapiens
aagtgctgggatgca

SEQ ID NO: 1616977 - DNA, 15 bp, Homo sapiens
agtgctgggatgcag

SEQ ID NO: 1616978 - DNA, 15 bp, Homo sapiens
gtgctgggatgcagc

SEQ ID NO: 1616979 - DNA, 15 bp, Homo sapiens
tgctgggatgcagcc

SEQ ID NO: 1616980 - DNA, 15 bp, Homo sapiens
gctgggatgcagcca

SEQ ID NO: 1616981 - DNA, 15 bp, Homo sapiens
ctgggatgcagccag

SEQ ID NO: 1616982 - DNA, 15 bp, Homo sapiens
tgggatgcagccagg

SEQ ID NO: 1616983 - DNA, 15 bp, Homo sapiens
gggatgcagccaggt

SEQ ID NO: 1616984 - DNA, 15 bp, Homo sapiens
ggatgcagccaggtg

SEQ ID NO: 1616985 - DNA, 15 bp, Homo sapiens
gatgcagccaggtgt

SEQ ID NO: 1616986 - DNA, 15 bp, Homo sapiens
atgcagccaggtgtg

SEQ ID NO: 1616987 - DNA, 15 bp, Homo sapiens
tgcagccaggtgtgg

SEQ ID NO: 1616988 - DNA, 15 bp, Homo sapiens
gcagccaggtgtggt

SEQ ID NO: 1616989 - DNA, 15 bp, Homo sapiens
tgcctgtaatcccat

SEQ ID NO: 1616990 - DNA, 15 bp, Homo sapiens
gcctgtaatcccatg

SEQ ID NO: 1616991 - DNA, 15 bp, Homo sapiens
cctgtaatcccatgt

SEQ ID NO: 1616992 - DNA, 15 bp, Homo sapiens
ctgtaatcccatgtg

SEQ ID NO: 1616993 - DNA, 15 bp, Homo sapiens
tgtaatcccatgtga

SEQ ID NO: 1616994 - DNA, 15 bp, Homo sapiens
gtaatcccatgtgat

SEQ ID NO: 1616995 - DNA, 15 bp, Homo sapiens
taatcccatgtgatt

SEQ ID NO: 1616996 - DNA, 15 bp, Homo sapiens
aatcccatgtgatta

SEQ ID NO: 1616997 - DNA, 15 bp, Homo sapiens
atcccatgtgattat

SEQ ID NO: 1616998 - DNA, 15 bp, Homo sapiens
tcccatgtgattatg

SEQ ID NO: 1616999 - DNA, 15 bp, Homo sapiens
cccatgtgattatga

SEQ ID NO: 1617000 - DNA, 15 bp, Homo sapiens
ccatgtgattatgaa

SEQ ID NO: 1617001 - DNA, 15 bp, Homo sapiens
catgtgattatgaaa

SEQ ID NO: 1617002 - DNA, 15 bp, Homo sapiens
atgtgattatgaaag

SEQ ID NO: 1617003 - DNA, 15 bp, Homo sapiens
tgtgattatgaaaga

SEQ ID NO: 1617004 - DNA, 15 bp, Homo sapiens
gtgattatgaaagat

SEQ ID NO: 1617005 - DNA, 15 bp, Homo sapiens
tgattatgaaagata

SEQ ID NO: 1617006 - DNA, 15 bp, Homo sapiens
gattatgaaagatat

SEQ ID NO: 1617007 - DNA, 15 bp, Homo sapiens
attatgaaagatatg

SEQ ID NO: 1617008 - DNA, 15 bp, Homo sapiens
ttatgaaagatatga

SEQ ID NO: 1617009 - DNA, 15 bp, Homo sapiens
tatgaaagatatgat

SEQ ID NO: 1617010 - DNA, 15 bp, Homo sapiens
atgaaagatatgatt

SEQ ID NO: 1617011 - DNA, 15 bp, Homo sapiens
tgaaagatatgattt

SEQ ID NO: 1617012 - DNA, 15 bp, Homo sapiens
gaaagatatgatttg

SEQ ID NO: 1617013 - DNA, 15 bp, Homo sapiens
aaagatatgatttgg

SEQ ID NO: 1617014 - DNA, 15 bp, Homo sapiens
aagatatgatttggc

SEQ ID NO: 1617015 - DNA, 15 bp, Homo sapiens
agatatgatttggcc

SEQ ID NO: 1617016 - DNA, 15 bp, Homo sapiens
gatatgatttggcct

SEQ ID NO: 1617017 - DNA, 15 bp, Homo sapiens
atatgatttggcctc

SEQ ID NO: 1617018 - DNA, 15 bp, Homo sapiens
tatgatttggcctcc

SEQ ID NO: 1617019 - DNA, 15 bp, Homo sapiens
atgatttggcctccc

SEQ ID NO: 1617020 - DNA, 15 bp, Homo sapiens
tgatttggcctccca

SEQ ID NO: 1617021 - DNA, 15 bp, Homo sapiens
gatttggcctcccaa

SEQ ID NO: 1617022 - DNA, 15 bp, Homo sapiens
atttggcctcccaac

SEQ ID NO: 1617023 - DNA, 15 bp, Homo sapiens
tttggcctcccaacg

SEQ ID NO: 1617024 - DNA, 15 bp, Homo sapiens
ttggcctcccaacgt

SEQ ID NO: 1617025 - DNA, 15 bp, Homo sapiens
tggcctcccaacgtg

SEQ ID NO: 1617026 - DNA, 15 bp, Homo sapiens
ggcctcccaacgtgc

SEQ ID NO: 1617027 - DNA, 15 bp, Homo sapiens
gcctcccaacgtgct

SEQ ID NO: 1617028 - DNA, 15 bp, Homo sapiens
cctcccaacgtgctg

SEQ ID NO: 1617029 - DNA, 15 bp, Homo sapiens
ctcccaacgtgctgg

SEQ ID NO: 1617030 - DNA, 15 bp, Homo sapiens
tcccaacgtgctggg

SEQ ID NO: 1617031 - DNA, 15 bp, Homo sapiens
cccaacgtgctggga

SEQ ID NO: 1617032 - DNA, 15 bp, Homo sapiens
ccaacgtgctgggat

SEQ ID NO: 1617033 - DNA, 15 bp, Homo sapiens
caacgtgctgggatt

SEQ ID NO: 1617034 - DNA, 15 bp, Homo sapiens
aacgtgctgggatta

SEQ ID NO: 1617035 - DNA, 15 bp, Homo sapiens
acgtgctgggattac

SEQ ID NO: 1617036 - DNA, 15 bp, Homo sapiens
cgtgctgggattaca

SEQ ID NO: 1617037 - DNA, 15 bp, Homo sapiens
caccgcacccagctg

SEQ ID NO: 1617038 - DNA, 15 bp, Homo sapiens
accgcacccagctgc

SEQ ID NO: 1617039 - DNA, 15 bp, Homo sapiens
ccgcacccagctgca

SEQ ID NO: 1617040 - DNA, 15 bp, Homo sapiens
cgcacccagctgcat

SEQ ID NO: 1617041 - DNA, 15 bp, Homo sapiens
gcacccagctgcatc

SEQ ID NO: 1617042 - DNA, 15 bp, Homo sapiens
cacccagctgcatcc

SEQ ID NO: 1617043 - DNA, 15 bp, Homo sapiens
acccagctgcatccc

SEQ ID NO: 1617044 - DNA, 15 bp, Homo sapiens
cccagctgcatccca

SEQ ID NO: 1617045 - DNA, 15 bp, Homo sapiens
ccagctgcatcccag

SEQ ID NO: 1617046 - DNA, 15 bp, Homo sapiens
cagctgcatcccagc

SEQ ID NO: 1617047 - DNA, 15 bp, Homo sapiens
agctgcatcccagct

SEQ ID NO: 1617048 - DNA, 15 bp, Homo sapiens
gctgcatcccagctt

SEQ ID NO: 1617049 - DNA, 15 bp, Homo sapiens
ctgcatcccagcttt

SEQ ID NO: 1617050 - DNA, 15 bp, Homo sapiens
tgcatcccagctttt

SEQ ID NO: 1617051 - DNA, 15 bp, Homo sapiens
gcatcccagctttta

SEQ ID NO: 1617052 - DNA, 15 bp, Homo sapiens
catcccagcttttag

SEQ ID NO: 1617053 - DNA, 15 bp, Homo sapiens
atcccagcttttaga

SEQ ID NO: 1617054 - DNA, 15 bp, Homo sapiens
tcccagcttttagaa

SEQ ID NO: 1617055 - DNA, 15 bp, Homo sapiens
cccagcttttagaag

SEQ ID NO: 1617056 - DNA, 15 bp, Homo sapiens
ccagcttttagaaga

SEQ ID NO: 1617057 - DNA, 15 bp, Homo sapiens
cagcttttagaagac

SEQ ID NO: 1617058 - DNA, 15 bp, Homo sapiens
agcttttagaagaca

SEQ ID NO: 1617059 - DNA, 15 bp, Homo sapiens
gcttttagaagacac

SEQ ID NO: 1617060 - DNA, 15 bp, Homo sapiens
cttttagaagacact

SEQ ID NO: 1617061 - DNA, 15 bp, Homo sapiens
ttttagaagacactt

SEQ ID NO: 1617062 - DNA, 15 bp, Homo sapiens
tttagaagacactta

SEQ ID NO: 1617063 - DNA, 15 bp, Homo sapiens
ttagaagacacttag

SEQ ID NO: 1617064 - DNA, 15 bp, Homo sapiens
tagaagacacttagc

SEQ ID NO: 1617065 - DNA, 15 bp, Homo sapiens
agaagacacttagca

SEQ ID NO: 1617066 - DNA, 15 bp, Homo sapiens
gaagacacttagcaa

SEQ ID NO: 1617067 - DNA, 15 bp, Homo sapiens
aagacacttagcaaa

SEQ ID NO: 1617068 - DNA, 15 bp, Homo sapiens
agacacttagcaaat

SEQ ID NO: 1617069 - DNA, 15 bp, Homo sapiens
gacacttagcaaatt

SEQ ID NO: 1617070 - DNA, 15 bp, Homo sapiens
acacttagcaaattt

SEQ ID NO: 1617071 - DNA, 15 bp, Homo sapiens
cacttagcaaattta

SEQ ID NO: 1617072 - DNA, 15 bp, Homo sapiens
acttagcaaatttat

SEQ ID NO: 1617073 - DNA, 15 bp, Homo sapiens
cttagcaaatttatg

SEQ ID NO: 1617074 - DNA, 15 bp, Homo sapiens
ttagcaaatttatgt

SEQ ID NO: 1617075 - DNA, 15 bp, Homo sapiens
tagcaaatttatgtt

SEQ ID NO: 1617076 - DNA, 15 bp, Homo sapiens
agcaaatttatgttc

SEQ ID NO: 1617077 - DNA, 15 bp, Homo sapiens
gcaaatttatgttca

SEQ ID NO: 1617078 - DNA, 15 bp, Homo sapiens
caaatttatgttcaa

SEQ ID NO: 1617079 - DNA, 15 bp, Homo sapiens
aaatttatgttcaat

SEQ ID NO: 1617080 - DNA, 15 bp, Homo sapiens
aatttatgttcaata

SEQ ID NO: 1617081 - DNA, 15 bp, Homo sapiens
atttatgttcaataa

SEQ ID NO: 1617082 - DNA, 15 bp, Homo sapiens
tttatgttcaataaa

SEQ ID NO: 1617083 - DNA, 15 bp, Homo sapiens
ttatgttcaataaat

SEQ ID NO: 1617084 - DNA, 15 bp, Homo sapiens
tatgttcaataaata

SEQ ID NO: 1617085 - DNA, 15 bp, Homo sapiens
atgttcaataaatac

SEQ ID NO: 1617086 - DNA, 15 bp, Homo sapiens
tgttcaataaataca

SEQ ID NO: 1617087 - DNA, 15 bp, Homo sapiens
gttcaataaatacat

SEQ ID NO: 1617088 - DNA, 15 bp, Homo sapiens
ttcaataaatacata

SEQ ID NO: 1617089 - DNA, 15 bp, Homo sapiens
tcaataaatacataa

SEQ ID NO: 1617090 - DNA, 15 bp, Homo sapiens
caataaatacataaa

SEQ ID NO: 1617091 - DNA, 15 bp, Homo sapiens
aataaatacataaaa

SEQ ID NO: 1617092 - DNA, 15 bp, Homo sapiens
ataaatacataaaag

SEQ ID NO: 1617093 - DNA, 15 bp, Homo sapiens
taaatacataaaaga

SEQ ID NO: 1617094 - DNA, 15 bp, Homo sapiens
aaatacataaaagaa

SEQ ID NO: 1617095 - DNA, 15 bp, Homo sapiens
aatacataaaagaat

SEQ ID NO: 1617096 - DNA, 15 bp, Homo sapiens
atacataaaagaata

SEQ ID NO: 1617097 - DNA, 15 bp, Homo sapiens
tacataaaagaataa

SEQ ID NO: 1617098 - DNA, 15 bp, Homo sapiens
cataaaagaataaat

SEQ ID NO: 1617099 - DNA, 15 bp, Homo sapiens
ataaaagaataaatg

SEQ ID NO: 1617100 - DNA, 15 bp, Homo sapiens
taaaagaataaatga

SEQ ID NO: 1617101 - DNA, 15 bp, Homo sapiens
aaaagaataaatgaa

SEQ ID NO: 1617102 - DNA, 15 bp, Homo sapiens
aaagaataaatgaat

SEQ ID NO: 1617103 - DNA, 15 bp, Homo sapiens
aagaataaatgaatg

SEQ ID NO: 1617104 - DNA, 15 bp, Homo sapiens
agaataaatgaatgt

SEQ ID NO: 1617105 - DNA, 15 bp, Homo sapiens
gaataaatgaatgta

SEQ ID NO: 1617106 - DNA, 15 bp, Homo sapiens
aataaatgaatgtat

SEQ ID NO: 1617107 - DNA, 15 bp, Homo sapiens
ataaatgaatgtatg

SEQ ID NO: 1617108 - DNA, 15 bp, Homo sapiens
taaatgaatgtatga

SEQ ID NO: 1617109 - DNA, 15 bp, Homo sapiens
aaatgaatgtatgat

SEQ ID NO: 1617110 - DNA, 15 bp, Homo sapiens
aatgaatgtatgata

SEQ ID NO: 1617111 - DNA, 15 bp, Homo sapiens
atgaatgtatgataa

SEQ ID NO: 1617112 - DNA, 15 bp, Homo sapiens
tgaatgtatgataaa

SEQ ID NO: 1617113 - DNA, 15 bp, Homo sapiens
gaatgtatgataaat

SEQ ID NO: 1617114 - DNA, 15 bp, Homo sapiens
aatgtatgataaatt

SEQ ID NO: 1617115 - DNA, 15 bp, Homo sapiens
atgtatgataaatta

SEQ ID NO: 1617116 - DNA, 15 bp, Homo sapiens
tgtatgataaattaa

SEQ ID NO: 1617117 - DNA, 15 bp, Homo sapiens
gtatgataaattaac

SEQ ID NO: 1617118 - DNA, 15 bp, Homo sapiens
tatgataaattaacc

SEQ ID NO: 1617119 - DNA, 15 bp, Homo sapiens
atgataaattaacct

SEQ ID NO: 1617120 - DNA, 15 bp, Homo sapiens
tgataaattaacctg

SEQ ID NO: 1617121 - DNA, 15 bp, Homo sapiens
gataaattaacctgg

SEQ ID NO: 1617122 - DNA, 15 bp, Homo sapiens
ataaattaacctggg

SEQ ID NO: 1617123 - DNA, 15 bp, Homo sapiens
taaattaacctgggc

SEQ ID NO: 1617124 - DNA, 15 bp, Homo sapiens
aaattaacctgggct

SEQ ID NO: 1617125 - DNA, 15 bp, Homo sapiens
aattaacctgggcta

SEQ ID NO: 1617126 - DNA, 15 bp, Homo sapiens
attaacctgggctaa

SEQ ID NO: 1617127 - DNA, 15 bp, Homo sapiens
ttaacctgggctaaa

SEQ ID NO: 1617128 - DNA, 15 bp, Homo sapiens
taacctgggctaaag

SEQ ID NO: 1617129 - DNA, 15 bp, Homo sapiens
aacctgggctaaaga

SEQ ID NO: 1617130 - DNA, 15 bp, Homo sapiens
acctgggctaaagag

SEQ ID NO: 1617131 - DNA, 15 bp, Homo sapiens
cctgggctaaagaga

SEQ ID NO: 1617132 - DNA, 15 bp, Homo sapiens
ctgggctaaagagaa

SEQ ID NO: 1617133 - DNA, 15 bp, Homo sapiens
tgggctaaagagaag

SEQ ID NO: 1617134 - DNA, 15 bp, Homo sapiens
gggctaaagagaaga

SEQ ID NO: 1617135 - DNA, 15 bp, Homo sapiens
ggctaaagagaagat

SEQ ID NO: 1617136 - DNA, 15 bp, Homo sapiens
gctaaagagaagatt

SEQ ID NO: 1617137 - DNA, 15 bp, Homo sapiens
ctaaagagaagattc

SEQ ID NO: 1617138 - DNA, 15 bp, Homo sapiens
taaagagaagattca

SEQ ID NO: 1617139 - DNA, 15 bp, Homo sapiens
aaagagaagattcac

SEQ ID NO: 1617140 - DNA, 15 bp, Homo sapiens
aagagaagattcacc

SEQ ID NO: 1617141 - DNA, 15 bp, Homo sapiens
agagaagattcacct

SEQ ID NO: 1617142 - DNA, 15 bp, Homo sapiens
gagaagattcacctt

SEQ ID NO: 1617143 - DNA, 15 bp, Homo sapiens
agaagattcaccttt

SEQ ID NO: 1617144 - DNA, 15 bp, Homo sapiens
gaagattcacctttg

SEQ ID NO: 1617145 - DNA, 15 bp, Homo sapiens
aagattcacctttga

SEQ ID NO: 1617146 - DNA, 15 bp, Homo sapiens
agattcacctttgaa

SEQ ID NO: 1617147 - DNA, 15 bp, Homo sapiens
gattcacctttgaaa

SEQ ID NO: 1617148 - DNA, 15 bp, Homo sapiens
attcacctttgaaat

SEQ ID NO: 1617149 - DNA, 15 bp, Homo sapiens
ttcacctttgaaata

SEQ ID NO: 1617150 - DNA, 15 bp, Homo sapiens
tcacctttgaaataa

SEQ ID NO: 1617151 - DNA, 15 bp, Homo sapiens
cacctttgaaataac

SEQ ID NO: 1617152 - DNA, 15 bp, Homo sapiens
acctttgaaataaca

SEQ ID NO: 1617153 - DNA, 15 bp, Homo sapiens
cctttgaaataacac

SEQ ID NO: 1617154 - DNA, 15 bp, Homo sapiens
ctttgaaataacact

SEQ ID NO: 1617155 - DNA, 15 bp, Homo sapiens
tttgaaataacactt

SEQ ID NO: 1617156 - DNA, 15 bp, Homo sapiens
ttgaaataacacttc

SEQ ID NO: 1617157 - DNA, 15 bp, Homo sapiens
tgaaataacacttct

SEQ ID NO: 1617158 - DNA, 15 bp, Homo sapiens
gaaataacacttctc

SEQ ID NO: 1617159 - DNA, 15 bp, Homo sapiens
aaataacacttctcc

SEQ ID NO: 1617160 - DNA, 15 bp, Homo sapiens
aataacacttctcct

SEQ ID NO: 1617161 - DNA, 15 bp, Homo sapiens
ataacacttctcctg

SEQ ID NO: 1617162 - DNA, 15 bp, Homo sapiens
taacacttctcctga

SEQ ID NO: 1617163 - DNA, 15 bp, Homo sapiens
aacacttctcctgag

SEQ ID NO: 1617164 - DNA, 15 bp, Homo sapiens
acacttctcctgaga

SEQ ID NO: 1617165 - DNA, 15 bp, Homo sapiens
cacttctcctgagag

SEQ ID NO: 1617166 - DNA, 15 bp, Homo sapiens
acttctcctgagaga

SEQ ID NO: 1617167 - DNA, 15 bp, Homo sapiens
cttctcctgagagat

SEQ ID NO: 1617168 - DNA, 15 bp, Homo sapiens
ttctcctgagagatc

SEQ ID NO: 1617169 - DNA, 15 bp, Homo sapiens
tctcctgagagatcc

SEQ ID NO: 1617170 - DNA, 15 bp, Homo sapiens
ctcctgagagatcca

SEQ ID NO: 1617171 - DNA, 15 bp, Homo sapiens
tcctgagagatccag

SEQ ID NO: 1617172 - DNA, 15 bp, Homo sapiens
cctgagagatccaga

SEQ ID NO: 1617173 - DNA, 15 bp, Homo sapiens
ctgagagatccagat

SEQ ID NO: 1617174 - DNA, 15 bp, Homo sapiens
tgagagatccagatt

SEQ ID NO: 1617175 - DNA, 15 bp, Homo sapiens
gagagatccagatta

SEQ ID NO: 1617176 - DNA, 15 bp, Homo sapiens
agagatccagattat

SEQ ID NO: 1617177 - DNA, 15 bp, Homo sapiens
gagatccagattatt

SEQ ID NO: 1617178 - DNA, 15 bp, Homo sapiens
agatccagattattg

SEQ ID NO: 1617179 - DNA, 15 bp, Homo sapiens
gatccagattattgg

SEQ ID NO: 1617180 - DNA, 15 bp, Homo sapiens
atccagattattggg

SEQ ID NO: 1617181 - DNA, 15 bp, Homo sapiens
tccagattattgggc

SEQ ID NO: 1617182 - DNA, 15 bp, Homo sapiens
ccagattattgggca

SEQ ID NO: 1617183 - DNA, 15 bp, Homo sapiens
cagattattgggcac

SEQ ID NO: 1617184 - DNA, 15 bp, Homo sapiens
agattattgggcact

SEQ ID NO: 1617185 - DNA, 15 bp, Homo sapiens
gattattgggcactc

SEQ ID NO: 1617186 - DNA, 15 bp, Homo sapiens
attattgggcactca

SEQ ID NO: 1617187 - DNA, 15 bp, Homo sapiens
ttattgggcactcac

SEQ ID NO: 1617188 - DNA, 15 bp, Homo sapiens
tattgggcactcaca

SEQ ID NO: 1617189 - DNA, 15 bp, Homo sapiens
attgggcactcacat

SEQ ID NO: 1617190 - DNA, 15 bp, Homo sapiens
ttgggcactcacatt

SEQ ID NO: 1617191 - DNA, 15 bp, Homo sapiens
tgggcactcacattc

SEQ ID NO: 1617192 - DNA, 15 bp, Homo sapiens
gggcactcacattct

SEQ ID NO: 1617193 - DNA, 15 bp, Homo sapiens
ggcactcacattctg

SEQ ID NO: 1617194 - DNA, 15 bp, Homo sapiens
gcactcacattctgg

SEQ ID NO: 1617195 - DNA, 15 bp, Homo sapiens
cactcacattctggc

SEQ ID NO: 1617196 - DNA, 15 bp, Homo sapiens
actcacattctggca

SEQ ID NO: 1617197 - DNA, 15 bp, Homo sapiens
ctcacattctggcat

SEQ ID NO: 1617198 - DNA, 15 bp, Homo sapiens
tcacattctggcatg

SEQ ID NO: 1617199 - DNA, 15 bp, Homo sapiens
cacattctggcatgt

SEQ ID NO: 1617200 - DNA, 15 bp, Homo sapiens
acattctggcatgta

SEQ ID NO: 1617201 - DNA, 15 bp, Homo sapiens
cattctggcatgtat

SEQ ID NO: 1617202 - DNA, 15 bp, Homo sapiens
attctggcatgtata

SEQ ID NO: 1617203 - DNA, 15 bp, Homo sapiens
ttctggcatgtatat

SEQ ID NO: 1617204 - DNA, 15 bp, Homo sapiens
tctggcatgtatata

SEQ ID NO: 1617205 - DNA, 15 bp, Homo sapiens
ctggcatgtatatat

SEQ ID NO: 1617206 - DNA, 15 bp, Homo sapiens
tggcatgtatatatt

SEQ ID NO: 1617207 - DNA, 15 bp, Homo sapiens
ggcatgtatatattt

SEQ ID NO: 1617208 - DNA, 15 bp, Homo sapiens
gcatgtatatattta

SEQ ID NO: 1617209 - DNA, 15 bp, Homo sapiens
catgtatatatttaa

SEQ ID NO: 1617210 - DNA, 15 bp, Homo sapiens
atgtatatatttaat

SEQ ID NO: 1617211 - DNA, 15 bp, Homo sapiens
tgtatatatttaata

SEQ ID NO: 1617212 - DNA, 15 bp, Homo sapiens
gtatatatttaataa

SEQ ID NO: 1617213 - DNA, 15 bp, Homo sapiens
tatatatttaataat

SEQ ID NO: 1617214 - DNA, 15 bp, Homo sapiens
atatatttaataata

SEQ ID NO: 1617215 - DNA, 15 bp, Homo sapiens
tatatttaataatag

SEQ ID NO: 1617216 - DNA, 15 bp, Homo sapiens
atatttaataataga

SEQ ID NO: 1617217 - DNA, 15 bp, Homo sapiens
tatttaataatagaa

SEQ ID NO: 1617218 - DNA, 15 bp, Homo sapiens
atttaataatagaac

SEQ ID NO: 1617219 - DNA, 15 bp, Homo sapiens
tttaataatagaacc

SEQ ID NO: 1617220 - DNA, 15 bp, Homo sapiens
ttaataatagaaccc

SEQ ID NO: 1617221 - DNA, 15 bp, Homo sapiens
taataatagaaccct

SEQ ID NO: 1617222 - DNA, 15 bp, Homo sapiens
aataatagaacccta

SEQ ID NO: 1617223 - DNA, 15 bp, Homo sapiens
ataatagaaccctaa

SEQ ID NO: 1617224 - DNA, 15 bp, Homo sapiens
taatagaaccctaag

SEQ ID NO: 1617225 - DNA, 15 bp, Homo sapiens
aatagaaccctaaga

SEQ ID NO: 1617226 - DNA, 15 bp, Homo sapiens
atagaaccctaagaa

SEQ ID NO: 1617227 - DNA, 15 bp, Homo sapiens
tagaaccctaagaag

SEQ ID NO: 1617228 - DNA, 15 bp, Homo sapiens
agaaccctaagaagc

SEQ ID NO: 1617229 - DNA, 15 bp, Homo sapiens
gaaccctaagaagct

SEQ ID NO: 1617230 - DNA, 15 bp, Homo sapiens
aaccctaagaagcta

SEQ ID NO: 1617231 - DNA, 15 bp, Homo sapiens
accctaagaagctag

SEQ ID NO: 1617232 - DNA, 15 bp, Homo sapiens
ccctaagaagctaga

SEQ ID NO: 1617233 - DNA, 15 bp, Homo sapiens
cctaagaagctagag

SEQ ID NO: 1617234 - DNA, 15 bp, Homo sapiens
ctaagaagctagagc

SEQ ID NO: 1617235 - DNA, 15 bp, Homo sapiens
taagaagctagagcc

SEQ ID NO: 1617236 - DNA, 15 bp, Homo sapiens
aagaagctagagcct

SEQ ID NO: 1617237 - DNA, 15 bp, Homo sapiens
agaagctagagcctg

SEQ ID NO: 1617238 - DNA, 15 bp, Homo sapiens
gaagctagagcctga

SEQ ID NO: 1617239 - DNA, 15 bp, Homo sapiens
aagctagagcctgag

SEQ ID NO: 1617240 - DNA, 15 bp, Homo sapiens
agctagagcctgaga

SEQ ID NO: 1617241 - DNA, 15 bp, Homo sapiens
gctagagcctgagag

SEQ ID NO: 1617242 - DNA, 15 bp, Homo sapiens
ctagagcctgagagg

SEQ ID NO: 1617243 - DNA, 15 bp, Homo sapiens
tagagcctgagagga

SEQ ID NO: 1617244 - DNA, 15 bp, Homo sapiens
agagcctgagaggaa

SEQ ID NO: 1617245 - DNA, 15 bp, Homo sapiens
gagcctgagaggaat

SEQ ID NO: 1617246 - DNA, 15 bp, Homo sapiens
agcctgagaggaatt

SEQ ID NO: 1617247 - DNA, 15 bp, Homo sapiens
gcctgagaggaattt

SEQ ID NO: 1617248 - DNA, 15 bp, Homo sapiens
cctgagaggaattta

SEQ ID NO: 1617249 - DNA, 15 bp, Homo sapiens
ctgagaggaatttaa

SEQ ID NO: 1617250 - DNA, 15 bp, Homo sapiens
tgagaggaatttaag

SEQ ID NO: 1617251 - DNA, 15 bp, Homo sapiens
gagaggaatttaaga

SEQ ID NO: 1617252 - DNA, 15 bp, Homo sapiens
agaggaatttaagaa

SEQ ID NO: 1617253 - DNA, 15 bp, Homo sapiens
gaggaatttaagaat

SEQ ID NO: 1617254 - DNA, 15 bp, Homo sapiens
aggaatttaagaatt

SEQ ID NO: 1617255 - DNA, 15 bp, Homo sapiens
ggaatttaagaatta

SEQ ID NO: 1617256 - DNA, 15 bp, Homo sapiens
gaatttaagaattat

SEQ ID NO: 1617257 - DNA, 15 bp, Homo sapiens
aatttaagaattatc

SEQ ID NO: 1617258 - DNA, 15 bp, Homo sapiens
atttaagaattatca

SEQ ID NO: 1617259 - DNA, 15 bp, Homo sapiens
tttaagaattatcaa

SEQ ID NO: 1617260 - DNA, 15 bp, Homo sapiens
ttaagaattatcaaa

SEQ ID NO: 1617261 - DNA, 15 bp, Homo sapiens
taagaattatcaaag

SEQ ID NO: 1617262 - DNA, 15 bp, Homo sapiens
aagaattatcaaagc

SEQ ID NO: 1617263 - DNA, 15 bp, Homo sapiens
agaattatcaaagca

SEQ ID NO: 1617264 - DNA, 15 bp, Homo sapiens
gaattatcaaagcaa

SEQ ID NO: 1617265 - DNA, 15 bp, Homo sapiens
aattatcaaagcaaa

SEQ ID NO: 1617266 - DNA, 15 bp, Homo sapiens
attatcaaagcaaag

SEQ ID NO: 1617267 - DNA, 15 bp, Homo sapiens
ttatcaaagcaaagc

SEQ ID NO: 1617268 - DNA, 15 bp, Homo sapiens
tatcaaagcaaagct

SEQ ID NO: 1617269 - DNA, 15 bp, Homo sapiens
atcaaagcaaagctc

SEQ ID NO: 1617270 - DNA, 15 bp, Homo sapiens
tcaaagcaaagctct

SEQ ID NO: 1617271 - DNA, 15 bp, Homo sapiens
caaagcaaagctctt

SEQ ID NO: 1617272 - DNA, 15 bp, Homo sapiens
aaagcaaagctcttc

SEQ ID NO: 1617273 - DNA, 15 bp, Homo sapiens
aagcaaagctcttca

SEQ ID NO: 1617274 - DNA, 15 bp, Homo sapiens
agcaaagctcttcat

SEQ ID NO: 1617275 - DNA, 15 bp, Homo sapiens
gcaaagctcttcatt

SEQ ID NO: 1617276 - DNA, 15 bp, Homo sapiens
caaagctcttcattt

SEQ ID NO: 1617277 - DNA, 15 bp, Homo sapiens
aaagctcttcatttt

SEQ ID NO: 1617278 - DNA, 15 bp, Homo sapiens
aagctcttcatttta

SEQ ID NO: 1617279 - DNA, 15 bp, Homo sapiens
agctcttcattttaa

SEQ ID NO: 1617280 - DNA, 15 bp, Homo sapiens
gctcttcattttaaa

SEQ ID NO: 1617281 - DNA, 15 bp, Homo sapiens
ctcttcattttaaag

SEQ ID NO: 1617282 - DNA, 15 bp, Homo sapiens
tcttcattttaaaga

SEQ ID NO: 1617283 - DNA, 15 bp, Homo sapiens
cttcattttaaagat

SEQ ID NO: 1617284 - DNA, 15 bp, Homo sapiens
ttcattttaaagatg

SEQ ID NO: 1617285 - DNA, 15 bp, Homo sapiens
tcattttaaagatgg

SEQ ID NO: 1617286 - DNA, 15 bp, Homo sapiens
cattttaaagatggc

SEQ ID NO: 1617287 - DNA, 15 bp, Homo sapiens
attttaaagatggca

SEQ ID NO: 1617288 - DNA, 15 bp, Homo sapiens
ttttaaagatggcaa

SEQ ID NO: 1617289 - DNA, 15 bp, Homo sapiens
tttaaagatggcaac

SEQ ID NO: 1617290 - DNA, 15 bp, Homo sapiens
ttaaagatggcaaca

SEQ ID NO: 1617291 - DNA, 15 bp, Homo sapiens
taaagatggcaacat

SEQ ID NO: 1617292 - DNA, 15 bp, Homo sapiens
aaagatggcaacatt

SEQ ID NO: 1617293 - DNA, 15 bp, Homo sapiens
aagatggcaacattg

SEQ ID NO: 1617294 - DNA, 15 bp, Homo sapiens
agatggcaacattga

SEQ ID NO: 1617295 - DNA, 15 bp, Homo sapiens
gatggcaacattgag

SEQ ID NO: 1617296 - DNA, 15 bp, Homo sapiens
atggcaacattgagg

SEQ ID NO: 1617297 - DNA, 15 bp, Homo sapiens
tggcaacattgaggc

SEQ ID NO: 1617298 - DNA, 15 bp, Homo sapiens
ggcaacattgaggca

SEQ ID NO: 1617299 - DNA, 15 bp, Homo sapiens
gcaacattgaggcac

SEQ ID NO: 1617300 - DNA, 15 bp, Homo sapiens
caacattgaggcaca

SEQ ID NO: 1617301 - DNA, 15 bp, Homo sapiens
aacattgaggcacaa

SEQ ID NO: 1617302 - DNA, 15 bp, Homo sapiens
acattgaggcacaaa

SEQ ID NO: 1617303 - DNA, 15 bp, Homo sapiens
cattgaggcacaaaa

SEQ ID NO: 1617304 - DNA, 15 bp, Homo sapiens
attgaggcacaaaag

SEQ ID NO: 1617305 - DNA, 15 bp, Homo sapiens
ttgaggcacaaaagg

SEQ ID NO: 1617306 - DNA, 15 bp, Homo sapiens
tgaggcacaaaaggg

SEQ ID NO: 1617307 - DNA, 15 bp, Homo sapiens
gaggcacaaaagggt

SEQ ID NO: 1617308 - DNA, 15 bp, Homo sapiens
aggcacaaaagggtg

SEQ ID NO: 1617309 - DNA, 15 bp, Homo sapiens
ggcacaaaagggtga

SEQ ID NO: 1617310 - DNA, 15 bp, Homo sapiens
gcacaaaagggtgaa

SEQ ID NO: 1617311 - DNA, 15 bp, Homo sapiens
cacaaaagggtgaaa

SEQ ID NO: 1617312 - DNA, 15 bp, Homo sapiens
acaaaagggtgaaat

SEQ ID NO: 1617313 - DNA, 15 bp, Homo sapiens
caaaagggtgaaata

SEQ ID NO: 1617314 - DNA, 15 bp, Homo sapiens
aaaagggtgaaataa

SEQ ID NO: 1617315 - DNA, 15 bp, Homo sapiens
aaagggtgaaataac

SEQ ID NO: 1617316 - DNA, 15 bp, Homo sapiens
aagggtgaaataact

SEQ ID NO: 1617317 - DNA, 15 bp, Homo sapiens
agggtgaaataactt

SEQ ID NO: 1617318 - DNA, 15 bp, Homo sapiens
gggtgaaataactta

SEQ ID NO: 1617319 - DNA, 15 bp, Homo sapiens
ggtgaaataacttac

SEQ ID NO: 1617320 - DNA, 15 bp, Homo sapiens
gtgaaataacttact

SEQ ID NO: 1617321 - DNA, 15 bp, Homo sapiens
tgaaataacttactg

SEQ ID NO: 1617322 - DNA, 15 bp, Homo sapiens
gaaataacttactga

SEQ ID NO: 1617323 - DNA, 15 bp, Homo sapiens
aaataacttactgat

SEQ ID NO: 1617324 - DNA, 15 bp, Homo sapiens
aataacttactgatg

SEQ ID NO: 1617325 - DNA, 15 bp, Homo sapiens
ataacttactgatgg

SEQ ID NO: 1617326 - DNA, 15 bp, Homo sapiens
taacttactgatggc

SEQ ID NO: 1617327 - DNA, 15 bp, Homo sapiens
aacttactgatggcc

SEQ ID NO: 1617328 - DNA, 15 bp, Homo sapiens
acttactgatggcca

SEQ ID NO: 1617329 - DNA, 15 bp, Homo sapiens
cttactgatggccac

SEQ ID NO: 1617330 - DNA, 15 bp, Homo sapiens
ttactgatggccaca

SEQ ID NO: 1617331 - DNA, 15 bp, Homo sapiens
tactgatggccacac

SEQ ID NO: 1617332 - DNA, 15 bp, Homo sapiens
actgatggccacaca

SEQ ID NO: 1617333 - DNA, 15 bp, Homo sapiens
ctgatggccacacaa

SEQ ID NO: 1617334 - DNA, 15 bp, Homo sapiens
tgatggccacacaat

SEQ ID NO: 1617335 - DNA, 15 bp, Homo sapiens
gatggccacacaatt

SEQ ID NO: 1617336 - DNA, 15 bp, Homo sapiens
atggccacacaatta

SEQ ID NO: 1617337 - DNA, 15 bp, Homo sapiens
tggccacacaattag

SEQ ID NO: 1617338 - DNA, 15 bp, Homo sapiens
ggccacacaattagt

SEQ ID NO: 1617339 - DNA, 15 bp, Homo sapiens
gccacacaattagtt

SEQ ID NO: 1617340 - DNA, 15 bp, Homo sapiens
ccacacaattagttg

SEQ ID NO: 1617341 - DNA, 15 bp, Homo sapiens
cacacaattagttgg

SEQ ID NO: 1617342 - DNA, 15 bp, Homo sapiens
acacaattagttggt

SEQ ID NO: 1617343 - DNA, 15 bp, Homo sapiens
cacaattagttggtt

SEQ ID NO: 1617344 - DNA, 15 bp, Homo sapiens
acaattagttggtta

SEQ ID NO: 1617345 - DNA, 15 bp, Homo sapiens
caattagttggttaa

SEQ ID NO: 1617346 - DNA, 15 bp, Homo sapiens
aattagttggttaac

SEQ ID NO: 1617347 - DNA, 15 bp, Homo sapiens
attagttggttaaca

SEQ ID NO: 1617348 - DNA, 15 bp, Homo sapiens
ttagttggttaacaa

SEQ ID NO: 1617349 - DNA, 15 bp, Homo sapiens
tagttggttaacaat

SEQ ID NO: 1617350 - DNA, 15 bp, Homo sapiens
agttggttaacaatg

SEQ ID NO: 1617351 - DNA, 15 bp, Homo sapiens
gttggttaacaatgg

SEQ ID NO: 1617352 - DNA, 15 bp, Homo sapiens
ttggttaacaatggg

SEQ ID NO: 1617353 - DNA, 15 bp, Homo sapiens
tggttaacaatggga

SEQ ID NO: 1617354 - DNA, 15 bp, Homo sapiens
ggttaacaatgggag

SEQ ID NO: 1617355 - DNA, 15 bp, Homo sapiens
gttaacaatgggaga

SEQ ID NO: 1617356 - DNA, 15 bp, Homo sapiens
ttaacaatgggagaa

SEQ ID NO: 1617357 - DNA, 15 bp, Homo sapiens
taacaatgggagaaa

SEQ ID NO: 1617358 - DNA, 15 bp, Homo sapiens
aacaatgggagaaaa

SEQ ID NO: 1617359 - DNA, 15 bp, Homo sapiens
acaatgggagaaaaa

SEQ ID NO: 1617360 - DNA, 15 bp, Homo sapiens
caatgggagaaaaaa

SEQ ID NO: 1617361 - DNA, 15 bp, Homo sapiens
aatgggagaaaaaaa

SEQ ID NO: 1617362 - DNA, 15 bp, Homo sapiens
atgggagaaaaaaat

SEQ ID NO: 1617363 - DNA, 15 bp, Homo sapiens
tgggagaaaaaaatt

SEQ ID NO: 1617364 - DNA, 15 bp, Homo sapiens
gggagaaaaaaattt

SEQ ID NO: 1617365 - DNA, 15 bp, Homo sapiens
ggagaaaaaaatttt

SEQ ID NO: 1617366 - DNA, 15 bp, Homo sapiens
gagaaaaaaattttg

SEQ ID NO: 1617367 - DNA, 15 bp, Homo sapiens
agaaaaaaattttga

SEQ ID NO: 1617368 - DNA, 15 bp, Homo sapiens
gaaaaaaattttgat

SEQ ID NO: 1617369 - DNA, 15 bp, Homo sapiens
aaaaaaattttgatg

SEQ ID NO: 1617370 - DNA, 15 bp, Homo sapiens
aaaaaattttgatga

SEQ ID NO: 1617371 - DNA, 15 bp, Homo sapiens
aaaaattttgatgac

SEQ ID NO: 1617372 - DNA, 15 bp, Homo sapiens
aaaattttgatgact

SEQ ID NO: 1617373 - DNA, 15 bp, Homo sapiens
aaattttgatgactc

SEQ ID NO: 1617374 - DNA, 15 bp, Homo sapiens
aattttgatgactca

SEQ ID NO: 1617375 - DNA, 15 bp, Homo sapiens
attttgatgactcac

SEQ ID NO: 1617376 - DNA, 15 bp, Homo sapiens
ttttgatgactcacg

SEQ ID NO: 1617377 - DNA, 15 bp, Homo sapiens
tttgatgactcacgt

SEQ ID NO: 1617378 - DNA, 15 bp, Homo sapiens
ttgatgactcacgtc

SEQ ID NO: 1617379 - DNA, 15 bp, Homo sapiens
tgatgactcacgtct

SEQ ID NO: 1617380 - DNA, 15 bp, Homo sapiens
gatgactcacgtctt

SEQ ID NO: 1617381 - DNA, 15 bp, Homo sapiens
atgactcacgtcttt

SEQ ID NO: 1617382 - DNA, 15 bp, Homo sapiens
tgactcacgtctttg

SEQ ID NO: 1617383 - DNA, 15 bp, Homo sapiens
gactcacgtctttgt

SEQ ID NO: 1617384 - DNA, 15 bp, Homo sapiens
actcacgtctttgtt

SEQ ID NO: 1617385 - DNA, 15 bp, Homo sapiens
ctcacgtctttgttc

SEQ ID NO: 1617386 - DNA, 15 bp, Homo sapiens
tcacgtctttgttct

SEQ ID NO: 1617387 - DNA, 15 bp, Homo sapiens
cacgtctttgttctt

SEQ ID NO: 1617388 - DNA, 15 bp, Homo sapiens
acgtctttgttcttt

SEQ ID NO: 1617389 - DNA, 15 bp, Homo sapiens
cgtctttgttctttt

SEQ ID NO: 1617390 - DNA, 15 bp, Homo sapiens
gtctttgttcttttt

SEQ ID NO: 1617391 - DNA, 15 bp, Homo sapiens
tctttgttctttttg

SEQ ID NO: 1617392 - DNA, 15 bp, Homo sapiens
ctttgttctttttgc

SEQ ID NO: 1617393 - DNA, 15 bp, Homo sapiens
tttgttctttttgct

SEQ ID NO: 1617394 - DNA, 15 bp, Homo sapiens
ttgttctttttgctc

SEQ ID NO: 1617395 - DNA, 15 bp, Homo sapiens
tgttctttttgctct

SEQ ID NO: 1617396 - DNA, 15 bp, Homo sapiens
gttctttttgctcta

SEQ ID NO: 1617397 - DNA, 15 bp, Homo sapiens
ttctttttgctctac

SEQ ID NO: 1617398 - DNA, 15 bp, Homo sapiens
tctttttgctctact

SEQ ID NO: 1617399 - DNA, 15 bp, Homo sapiens
ctttttgctctactt

SEQ ID NO: 1617400 - DNA, 15 bp, Homo sapiens
tttttgctctacttg

SEQ ID NO: 1617401 - DNA, 15 bp, Homo sapiens
ttttgctctacttgg

SEQ ID NO: 1617402 - DNA, 15 bp, Homo sapiens
tttgctctacttgga

SEQ ID NO: 1617403 - DNA, 15 bp, Homo sapiens
ttgctctacttggag

SEQ ID NO: 1617404 - DNA, 15 bp, Homo sapiens
tgctctacttggagt

SEQ ID NO: 1617405 - DNA, 15 bp, Homo sapiens
gctctacttggagta

SEQ ID NO: 1617406 - DNA, 15 bp, Homo sapiens
ctctacttggagtag

SEQ ID NO: 1617407 - DNA, 15 bp, Homo sapiens
tctacttggagtaga

SEQ ID NO: 1617408 - DNA, 15 bp, Homo sapiens
ctacttggagtagac

SEQ ID NO: 1617409 - DNA, 15 bp, Homo sapiens
tacttggagtagact

SEQ ID NO: 1617410 - DNA, 15 bp, Homo sapiens
acttggagtagacta

SEQ ID NO: 1617411 - DNA, 15 bp, Homo sapiens
cttggagtagactag

SEQ ID NO: 1617412 - DNA, 15 bp, Homo sapiens
ttggagtagactagg

SEQ ID NO: 1617413 - DNA, 15 bp, Homo sapiens
tggagtagactaggt

SEQ ID NO: 1617414 - DNA, 15 bp, Homo sapiens
ggagtagactaggtt

SEQ ID NO: 1617415 - DNA, 15 bp, Homo sapiens
gagtagactaggttg

SEQ ID NO: 1617416 - DNA, 15 bp, Homo sapiens
agtagactaggttga

SEQ ID NO: 1617417 - DNA, 15 bp, Homo sapiens
gtagactaggttgaa

SEQ ID NO: 1617418 - DNA, 15 bp, Homo sapiens
tagactaggttgaag

SEQ ID NO: 1617419 - DNA, 15 bp, Homo sapiens
agactaggttgaagg

SEQ ID NO: 1617420 - DNA, 15 bp, Homo sapiens
gactaggttgaagga

SEQ ID NO: 1617421 - DNA, 15 bp, Homo sapiens
actaggttgaaggaa

SEQ ID NO: 1617422 - DNA, 15 bp, Homo sapiens
ctaggttgaaggaaa

SEQ ID NO: 1617423 - DNA, 15 bp, Homo sapiens
taggttgaaggaaaa

SEQ ID NO: 1617424 - DNA, 15 bp, Homo sapiens
aggttgaaggaaaaa

SEQ ID NO: 1617425 - DNA, 15 bp, Homo sapiens
ggttgaaggaaaaaa

SEQ ID NO: 1617426 - DNA, 15 bp, Homo sapiens
gttgaaggaaaaaat

SEQ ID NO: 1617427 - DNA, 15 bp, Homo sapiens
ttgaaggaaaaaata

SEQ ID NO: 1617428 - DNA, 15 bp, Homo sapiens
tgaaggaaaaaataa

SEQ ID NO: 1617429 - DNA, 15 bp, Homo sapiens
gaaggaaaaaataat

SEQ ID NO: 1617430 - DNA, 15 bp, Homo sapiens
aaggaaaaaataatt

SEQ ID NO: 1617431 - DNA, 15 bp, Homo sapiens
aggaaaaaataattt

SEQ ID NO: 1617432 - DNA, 15 bp, Homo sapiens
ggaaaaaataatttt

SEQ ID NO: 1617433 - DNA, 15 bp, Homo sapiens
gaaaaaataattttg

SEQ ID NO: 1617434 - DNA, 15 bp, Homo sapiens
aaaaaataattttgg

SEQ ID NO: 1617435 - DNA, 15 bp, Homo sapiens
aaaaataattttgga

SEQ ID NO: 1617436 - DNA, 15 bp, Homo sapiens
aaaataattttggaa

SEQ ID NO: 1617437 - DNA, 15 bp, Homo sapiens
aaataattttggaag

SEQ ID NO: 1617438 - DNA, 15 bp, Homo sapiens
aataattttggaagg

SEQ ID NO: 1617439 - DNA, 15 bp, Homo sapiens
ataattttggaaggg

SEQ ID NO: 1617440 - DNA, 15 bp, Homo sapiens
taattttggaaggga

SEQ ID NO: 1617441 - DNA, 15 bp, Homo sapiens
aattttggaagggaa

SEQ ID NO: 1617442 - DNA, 15 bp, Homo sapiens
attttggaagggaaa

SEQ ID NO: 1617443 - DNA, 15 bp, Homo sapiens
ttttggaagggaaag

SEQ ID NO: 1617444 - DNA, 15 bp, Homo sapiens
tttggaagggaaagg

SEQ ID NO: 1617445 - DNA, 15 bp, Homo sapiens
ttggaagggaaaggg

SEQ ID NO: 1617446 - DNA, 15 bp, Homo sapiens
tggaagggaaagggg

SEQ ID NO: 1617447 - DNA, 15 bp, Homo sapiens
ggaagggaaagggga

SEQ ID NO: 1617448 - DNA, 15 bp, Homo sapiens
gaagggaaaggggag

SEQ ID NO: 1617449 - DNA, 15 bp, Homo sapiens
aagggaaaggggagg

SEQ ID NO: 1617450 - DNA, 15 bp, Homo sapiens
agggaaaggggagga

SEQ ID NO: 1617451 - DNA, 15 bp, Homo sapiens
gggaaaggggaggaa

SEQ ID NO: 1617452 - DNA, 15 bp, Homo sapiens
ggaaaggggaggaaa

SEQ ID NO: 1617453 - DNA, 15 bp, Homo sapiens
gaaaggggaggaaat

SEQ ID NO: 1617454 - DNA, 15 bp, Homo sapiens
aaaggggaggaaatg

SEQ ID NO: 1617455 - DNA, 15 bp, Homo sapiens
aaggggaggaaatga

SEQ ID NO: 1617456 - DNA, 15 bp, Homo sapiens
aggggaggaaatgaa

SEQ ID NO: 1617457 - DNA, 15 bp, Homo sapiens
ggggaggaaatgaaa

SEQ ID NO: 1617458 - DNA, 15 bp, Homo sapiens
gggaggaaatgaaat

SEQ ID NO: 1617459 - DNA, 15 bp, Homo sapiens
ggaggaaatgaaatg

SEQ ID NO: 1617460 - DNA, 15 bp, Homo sapiens
gaggaaatgaaatga

SEQ ID NO: 1617461 - DNA, 15 bp, Homo sapiens
aggaaatgaaatgac

SEQ ID NO: 1617462 - DNA, 15 bp, Homo sapiens
ggaaatgaaatgact

SEQ ID NO: 1617463 - DNA, 15 bp, Homo sapiens
gaaatgaaatgacta

SEQ ID NO: 1617464 - DNA, 15 bp, Homo sapiens
aaatgaaatgactag

SEQ ID NO: 1617465 - DNA, 15 bp, Homo sapiens
aatgaaatgactagg

SEQ ID NO: 1617466 - DNA, 15 bp, Homo sapiens
atgaaatgactaggc

SEQ ID NO: 1617467 - DNA, 15 bp, Homo sapiens
tgaaatgactaggca

SEQ ID NO: 1617468 - DNA, 15 bp, Homo sapiens
gaaatgactaggcag

SEQ ID NO: 1617469 - DNA, 15 bp, Homo sapiens
aaatgactaggcagg

SEQ ID NO: 1617470 - DNA, 15 bp, Homo sapiens
aatgactaggcagga

SEQ ID NO: 1617471 - DNA, 15 bp, Homo sapiens
atgactaggcaggaa

SEQ ID NO: 1617472 - DNA, 15 bp, Homo sapiens
tgactaggcaggaac

SEQ ID NO: 1617473 - DNA, 15 bp, Homo sapiens
gactaggcaggaact

SEQ ID NO: 1617474 - DNA, 15 bp, Homo sapiens
actaggcaggaactc

SEQ ID NO: 1617475 - DNA, 15 bp, Homo sapiens
ctaggcaggaactca

SEQ ID NO: 1617476 - DNA, 15 bp, Homo sapiens
taggcaggaactcat

SEQ ID NO: 1617477 - DNA, 15 bp, Homo sapiens
aggcaggaactcatg

SEQ ID NO: 1617478 - DNA, 15 bp, Homo sapiens
ggcaggaactcatga

SEQ ID NO: 1617479 - DNA, 15 bp, Homo sapiens
gcaggaactcatgag

SEQ ID NO: 1617480 - DNA, 15 bp, Homo sapiens
caggaactcatgaga

SEQ ID NO: 1617481 - DNA, 15 bp, Homo sapiens
aggaactcatgagat

SEQ ID NO: 1617482 - DNA, 15 bp, Homo sapiens
ggaactcatgagatt

SEQ ID NO: 1617483 - DNA, 15 bp, Homo sapiens
gaactcatgagattg

SEQ ID NO: 1617484 - DNA, 15 bp, Homo sapiens
aactcatgagattgt

SEQ ID NO: 1617485 - DNA, 15 bp, Homo sapiens
actcatgagattgta

SEQ ID NO: 1617486 - DNA, 15 bp, Homo sapiens
ctcatgagattgtaa

SEQ ID NO: 1617487 - DNA, 15 bp, Homo sapiens
tcatgagattgtaaa

SEQ ID NO: 1617488 - DNA, 15 bp, Homo sapiens
catgagattgtaaat

SEQ ID NO: 1617489 - DNA, 15 bp, Homo sapiens
atgagattgtaaatg

SEQ ID NO: 1617490 - DNA, 15 bp, Homo sapiens
tgagattgtaaatgg

SEQ ID NO: 1617491 - DNA, 15 bp, Homo sapiens
gagattgtaaatggt

SEQ ID NO: 1617492 - DNA, 15 bp, Homo sapiens
agattgtaaatggtc

SEQ ID NO: 1617493 - DNA, 15 bp, Homo sapiens
gattgtaaatggtca

SEQ ID NO: 1617494 - DNA, 15 bp, Homo sapiens
attgtaaatggtcag

SEQ ID NO: 1617495 - DNA, 15 bp, Homo sapiens
ttgtaaatggtcagc

SEQ ID NO: 1617496 - DNA, 15 bp, Homo sapiens
tgtaaatggtcagcc

SEQ ID NO: 1617497 - DNA, 15 bp, Homo sapiens
gtaaatggtcagcca

SEQ ID NO: 1617498 - DNA, 15 bp, Homo sapiens
taaatggtcagccag

SEQ ID NO: 1617499 - DNA, 15 bp, Homo sapiens
aaatggtcagccaga

SEQ ID NO: 1617500 - DNA, 15 bp, Homo sapiens
aatggtcagccagaa

SEQ ID NO: 1617501 - DNA, 15 bp, Homo sapiens
atggtcagccagaaa

SEQ ID NO: 1617502 - DNA, 15 bp, Homo sapiens
tggtcagccagaaat

SEQ ID NO: 1617503 - DNA, 15 bp, Homo sapiens
ggtcagccagaaatc

SEQ ID NO: 1617504 - DNA, 15 bp, Homo sapiens
gtcagccagaaatca

SEQ ID NO: 1617505 - DNA, 15 bp, Homo sapiens
tcagccagaaatcaa

SEQ ID NO: 1617506 - DNA, 15 bp, Homo sapiens
cagccagaaatcaag

SEQ ID NO: 1617507 - DNA, 15 bp, Homo sapiens
agccagaaatcaagt

SEQ ID NO: 1617508 - DNA, 15 bp, Homo sapiens
gccagaaatcaagtt

SEQ ID NO: 1617509 - DNA, 15 bp, Homo sapiens
ccagaaatcaagtta

SEQ ID NO: 1617510 - DNA, 15 bp, Homo sapiens
cagaaatcaagttat

SEQ ID NO: 1617511 - DNA, 15 bp, Homo sapiens
agaaatcaagttatg

SEQ ID NO: 1617512 - DNA, 15 bp, Homo sapiens
gaaatcaagttatgt

SEQ ID NO: 1617513 - DNA, 15 bp, Homo sapiens
aaatcaagttatgtt

SEQ ID NO: 1617514 - DNA, 15 bp, Homo sapiens
aatcaagttatgtta

SEQ ID NO: 1617515 - DNA, 15 bp, Homo sapiens
atcaagttatgttat

SEQ ID NO: 1617516 - DNA, 15 bp, Homo sapiens
tcaagttatgttata

SEQ ID NO: 1617517 - DNA, 15 bp, Homo sapiens
caagttatgttatag

SEQ ID NO: 1617518 - DNA, 15 bp, Homo sapiens
aagttatgttataga

SEQ ID NO: 1617519 - DNA, 15 bp, Homo sapiens
agttatgttatagaa

SEQ ID NO: 1617520 - DNA, 15 bp, Homo sapiens
gttatgttatagaag

SEQ ID NO: 1617521 - DNA, 15 bp, Homo sapiens
ttatgttatagaaga

SEQ ID NO: 1617522 - DNA, 15 bp, Homo sapiens
tatgttatagaagat

SEQ ID NO: 1617523 - DNA, 15 bp, Homo sapiens
atgttatagaagatg

SEQ ID NO: 1617524 - DNA, 15 bp, Homo sapiens
tgttatagaagatga

SEQ ID NO: 1617525 - DNA, 15 bp, Homo sapiens
gttatagaagatgag

SEQ ID NO: 1617526 - DNA, 15 bp, Homo sapiens
ttatagaagatgaga

SEQ ID NO: 1617527 - DNA, 15 bp, Homo sapiens
tatagaagatgagag

SEQ ID NO: 1617528 - DNA, 15 bp, Homo sapiens
atagaagatgagagg

SEQ ID NO: 1617529 - DNA, 15 bp, Homo sapiens
tagaagatgagagga

SEQ ID NO: 1617530 - DNA, 15 bp, Homo sapiens
agaagatgagaggag

SEQ ID NO: 1617531 - DNA, 15 bp, Homo sapiens
gaagatgagaggagg

SEQ ID NO: 1617532 - DNA, 15 bp, Homo sapiens
aagatgagaggaggg

SEQ ID NO: 1617533 - DNA, 15 bp, Homo sapiens
agatgagaggagggg

SEQ ID NO: 1617534 - DNA, 15 bp, Homo sapiens
gatgagaggaggggg

SEQ ID NO: 1617535 - DNA, 15 bp, Homo sapiens
atgagaggagggggc

SEQ ID NO: 1617536 - DNA, 15 bp, Homo sapiens
tgagaggagggggct

SEQ ID NO: 1617537 - DNA, 15 bp, Homo sapiens
gagaggagggggctg

SEQ ID NO: 1617538 - DNA, 15 bp, Homo sapiens
agaggagggggctgg

SEQ ID NO: 1617539 - DNA, 15 bp, Homo sapiens
gaggagggggctggg

SEQ ID NO: 1617540 - DNA, 15 bp, Homo sapiens
aggagggggctgggc

SEQ ID NO: 1617541 - DNA, 15 bp, Homo sapiens
ggagggggctgggcg

SEQ ID NO: 1617542 - DNA, 15 bp, Homo sapiens
gagggggctgggcgt

SEQ ID NO: 1617543 - DNA, 15 bp, Homo sapiens
agggggctgggcgtg

SEQ ID NO: 1617544 - DNA, 15 bp, Homo sapiens
gggggctgggcgtgg

SEQ ID NO: 1617545 - DNA, 15 bp, Homo sapiens
ggggctgggcgtggt

SEQ ID NO: 1617546 - DNA, 15 bp, Homo sapiens
gaggccgaggtgggt

SEQ ID NO: 1617547 - DNA, 15 bp, Homo sapiens
aggccgaggtgggtg

SEQ ID NO: 1617548 - DNA, 15 bp, Homo sapiens
ggccgaggtgggtgg

SEQ ID NO: 1617549 - DNA, 15 bp, Homo sapiens
ggtgggtggatcacg

SEQ ID NO: 1617550 - DNA, 15 bp, Homo sapiens
gtgggtggatcacga

SEQ ID NO: 1617551 - DNA, 15 bp, Homo sapiens
tgggtggatcacgag

SEQ ID NO: 1617552 - DNA, 15 bp, Homo sapiens
gatcgagaccatctg

SEQ ID NO: 1617553 - DNA, 15 bp, Homo sapiens
atcgagaccatctgg

SEQ ID NO: 1617554 - DNA, 15 bp, Homo sapiens
tcgagaccatctggc

SEQ ID NO: 1617555 - DNA, 15 bp, Homo sapiens
cgagaccatctggct

SEQ ID NO: 1617556 - DNA, 15 bp, Homo sapiens
gagaccatctggcta

SEQ ID NO: 1617557 - DNA, 15 bp, Homo sapiens
agaccatctggctaa

SEQ ID NO: 1617558 - DNA, 15 bp, Homo sapiens
gaccatctggctaac

SEQ ID NO: 1617559 - DNA, 15 bp, Homo sapiens
accatctggctaaca

SEQ ID NO: 1617560 - DNA, 15 bp, Homo sapiens
ccatctggctaacac

SEQ ID NO: 1617561 - DNA, 15 bp, Homo sapiens
catctggctaacacg

SEQ ID NO: 1617562 - DNA, 15 bp, Homo sapiens
atctggctaacacgg

SEQ ID NO: 1617563 - DNA, 15 bp, Homo sapiens
tctggctaacacggt

SEQ ID NO: 1617564 - DNA, 15 bp, Homo sapiens
caaaaaaaattagcc

SEQ ID NO: 1617565 - DNA, 15 bp, Homo sapiens
aaaaattagccggac

SEQ ID NO: 1617566 - DNA, 15 bp, Homo sapiens
aaaattagccggacg

SEQ ID NO: 1617567 - DNA, 15 bp, Homo sapiens
aaattagccggacgt

SEQ ID NO: 1617568 - DNA, 15 bp, Homo sapiens
aattagccggacgtg

SEQ ID NO: 1617569 - DNA, 15 bp, Homo sapiens
attagccggacgtgg

SEQ ID NO: 1617570 - DNA, 15 bp, Homo sapiens
ttagccggacgtggt

SEQ ID NO: 1617571 - DNA, 15 bp, Homo sapiens
tagccggacgtggtg

SEQ ID NO: 1617572 - DNA, 15 bp, Homo sapiens
agccggacgtggtgt

SEQ ID NO: 1617573 - DNA, 15 bp, Homo sapiens
gccggacgtggtgtt

SEQ ID NO: 1617574 - DNA, 15 bp, Homo sapiens
ccggacgtggtgttg

SEQ ID NO: 1617575 - DNA, 15 bp, Homo sapiens
cggacgtggtgttgg

SEQ ID NO: 1617576 - DNA, 15 bp, Homo sapiens
ggacgtggtgttggg

SEQ ID NO: 1617577 - DNA, 15 bp, Homo sapiens
gacgtggtgttgggc

SEQ ID NO: 1617578 - DNA, 15 bp, Homo sapiens
acgtggtgttgggcg

SEQ ID NO: 1617579 - DNA, 15 bp, Homo sapiens
cgtggtgttgggcgc

SEQ ID NO: 1617580 - DNA, 15 bp, Homo sapiens
gtggtgttgggcgcc

SEQ ID NO: 1617581 - DNA, 15 bp, Homo sapiens
tggtgttgggcgcct

SEQ ID NO: 1617582 - DNA, 15 bp, Homo sapiens
ggtgttgggcgcctg

SEQ ID NO: 1617583 - DNA, 15 bp, Homo sapiens
gtgttgggcgcctgt

SEQ ID NO: 1617584 - DNA, 15 bp, Homo sapiens
tgttgggcgcctgta

SEQ ID NO: 1617585 - DNA, 15 bp, Homo sapiens
gttgggcgcctgtag

SEQ ID NO: 1617586 - DNA, 15 bp, Homo sapiens
ttgggcgcctgtagt

SEQ ID NO: 1617587 - DNA, 15 bp, Homo sapiens
aggcaggaaaatggc

SEQ ID NO: 1617588 - DNA, 15 bp, Homo sapiens
ggcaggaaaatggcg

SEQ ID NO: 1617589 - DNA, 15 bp, Homo sapiens
gcaggaaaatggcgt

SEQ ID NO: 1617590 - DNA, 15 bp, Homo sapiens
caggaaaatggcgtc

SEQ ID NO: 1617591 - DNA, 15 bp, Homo sapiens
aggaaaatggcgtca

SEQ ID NO: 1617592 - DNA, 15 bp, Homo sapiens
ggaaaatggcgtcaa

SEQ ID NO: 1617593 - DNA, 15 bp, Homo sapiens
gaaaatggcgtcaac

SEQ ID NO: 1617594 - DNA, 15 bp, Homo sapiens
aaaatggcgtcaacc

SEQ ID NO: 1617595 - DNA, 15 bp, Homo sapiens
aaatggcgtcaaccc

SEQ ID NO: 1617596 - DNA, 15 bp, Homo sapiens
aatggcgtcaaccca

SEQ ID NO: 1617597 - DNA, 15 bp, Homo sapiens
atggcgtcaacccag

SEQ ID NO: 1617598 - DNA, 15 bp, Homo sapiens
tggcgtcaacccagg

SEQ ID NO: 1617599 - DNA, 15 bp, Homo sapiens
ggcgtcaacccagga

SEQ ID NO: 1617600 - DNA, 15 bp, Homo sapiens
gcgtcaacccaggag

SEQ ID NO: 1617601 - DNA, 15 bp, Homo sapiens
cgtcaacccaggagg

SEQ ID NO: 1617602 - DNA, 15 bp, Homo sapiens
gtcaacccaggaggc

SEQ ID NO: 1617603 - DNA, 15 bp, Homo sapiens
tcaacccaggaggca

SEQ ID NO: 1617604 - DNA, 15 bp, Homo sapiens
caacccaggaggcag

SEQ ID NO: 1617605 - DNA, 15 bp, Homo sapiens
cccaggaggcagagc

SEQ ID NO: 1617606 - DNA, 15 bp, Homo sapiens
ccaggaggcagagct

SEQ ID NO: 1617607 - DNA, 15 bp, Homo sapiens
caggaggcagagctt

SEQ ID NO: 1617608 - DNA, 15 bp, Homo sapiens
aggaggcagagcttg

SEQ ID NO: 1617609 - DNA, 15 bp, Homo sapiens
cagagcttgcagtgt

SEQ ID NO: 1617610 - DNA, 15 bp, Homo sapiens
agagcttgcagtgtg

SEQ ID NO: 1617611 - DNA, 15 bp, Homo sapiens
gagcttgcagtgtga

SEQ ID NO: 1617612 - DNA, 15 bp, Homo sapiens
agcttgcagtgtgag

SEQ ID NO: 1617613 - DNA, 15 bp, Homo sapiens
gcttgcagtgtgagc

SEQ ID NO: 1617614 - DNA, 15 bp, Homo sapiens
cttgcagtgtgagcg

SEQ ID NO: 1617615 - DNA, 15 bp, Homo sapiens
ttgcagtgtgagcgg

SEQ ID NO: 1617616 - DNA, 15 bp, Homo sapiens
tgcagtgtgagcgga

SEQ ID NO: 1617617 - DNA, 15 bp, Homo sapiens
gcagtgtgagcggag

SEQ ID NO: 1617618 - DNA, 15 bp, Homo sapiens
cagtgtgagcggaga

SEQ ID NO: 1617619 - DNA, 15 bp, Homo sapiens
agtgtgagcggagat

SEQ ID NO: 1617620 - DNA, 15 bp, Homo sapiens
gtgtgagcggagatc

SEQ ID NO: 1617621 - DNA, 15 bp, Homo sapiens
tgtgagcggagatca

SEQ ID NO: 1617622 - DNA, 15 bp, Homo sapiens
ggagatcacgccacg

SEQ ID NO: 1617623 - DNA, 15 bp, Homo sapiens
gagatcacgccacgg

SEQ ID NO: 1617624 - DNA, 15 bp, Homo sapiens
agatcacgccacgga

SEQ ID NO: 1617625 - DNA, 15 bp, Homo sapiens
gatcacgccacggaa

SEQ ID NO: 1617626 - DNA, 15 bp, Homo sapiens
atcacgccacggaac

SEQ ID NO: 1617627 - DNA, 15 bp, Homo sapiens
tcacgccacggaact

SEQ ID NO: 1617628 - DNA, 15 bp, Homo sapiens
cacgccacggaactc

SEQ ID NO: 1617629 - DNA, 15 bp, Homo sapiens
acgccacggaactcc

SEQ ID NO: 1617630 - DNA, 15 bp, Homo sapiens
cgccacggaactcca

SEQ ID NO: 1617631 - DNA, 15 bp, Homo sapiens
gccacggaactccag

SEQ ID NO: 1617632 - DNA, 15 bp, Homo sapiens
ccacggaactccagc

SEQ ID NO: 1617633 - DNA, 15 bp, Homo sapiens
cacggaactccagcc

SEQ ID NO: 1617634 - DNA, 15 bp, Homo sapiens
acggaactccagcct

SEQ ID NO: 1617635 - DNA, 15 bp, Homo sapiens
cggaactccagcctg

SEQ ID NO: 1617636 - DNA, 15 bp, Homo sapiens
ggaactccagcctgg

SEQ ID NO: 1617637 - DNA, 15 bp, Homo sapiens
gaactccagcctggg

SEQ ID NO: 1617638 - DNA, 15 bp, Homo sapiens
aactccagcctgggc

SEQ ID NO: 1617639 - DNA, 15 bp, Homo sapiens
acagagcgagacttc

SEQ ID NO: 1617640 - DNA, 15 bp, Homo sapiens
cagagcgagacttcg

SEQ ID NO: 1617641 - DNA, 15 bp, Homo sapiens
agagcgagacttcgt

SEQ ID NO: 1617642 - DNA, 15 bp, Homo sapiens
gagcgagacttcgtc

SEQ ID NO: 1617643 - DNA, 15 bp, Homo sapiens
agcgagacttcgtct

SEQ ID NO: 1617644 - DNA, 15 bp, Homo sapiens
gcgagacttcgtctc

SEQ ID NO: 1617645 - DNA, 15 bp, Homo sapiens
cgagacttcgtctca

SEQ ID NO: 1617646 - DNA, 15 bp, Homo sapiens
gagacttcgtctcaa

SEQ ID NO: 1617647 - DNA, 15 bp, Homo sapiens
agacttcgtctcaaa

SEQ ID NO: 1617648 - DNA, 15 bp, Homo sapiens
gacttcgtctcaaaa

SEQ ID NO: 1617649 - DNA, 15 bp, Homo sapiens
acttcgtctcaaaaa

SEQ ID NO: 1617650 - DNA, 15 bp, Homo sapiens
cttcgtctcaaaaaa

SEQ ID NO: 1617651 - DNA, 15 bp, Homo sapiens
ttcgtctcaaaaaaa

SEQ ID NO: 1617652 - DNA, 15 bp, Homo sapiens
tcgtctcaaaaaaaa

SEQ ID NO: 1617653 - DNA, 15 bp, Homo sapiens
caaaaaaaaaaaaag

SEQ ID NO: 1617654 - DNA, 15 bp, Homo sapiens
aaaaaaaaaagatga

SEQ ID NO: 1617655 - DNA, 15 bp, Homo sapiens
aaaaaaaaagatgag

SEQ ID NO: 1617656 - DNA, 15 bp, Homo sapiens
aaaaaaaagatgaga

SEQ ID NO: 1617657 - DNA, 15 bp, Homo sapiens
aaaaaaagatgagag

SEQ ID NO: 1617658 - DNA, 15 bp, Homo sapiens
aaaaaagatgagagg

SEQ ID NO: 1617659 - DNA, 15 bp, Homo sapiens
aaaaagatgagagga

SEQ ID NO: 1617660 - DNA, 15 bp, Homo sapiens
aaaagatgagaggag

SEQ ID NO: 1617661 - DNA, 15 bp, Homo sapiens
aaagatgagaggagg

SEQ ID NO: 1617662 - DNA, 15 bp, Homo sapiens
aagatgagaggagga

SEQ ID NO: 1617663 - DNA, 15 bp, Homo sapiens
agatgagaggaggaa

SEQ ID NO: 1617664 - DNA, 15 bp, Homo sapiens
gatgagaggaggaaa

SEQ ID NO: 1617665 - DNA, 15 bp, Homo sapiens
atgagaggaggaaaa

SEQ ID NO: 1617666 - DNA, 15 bp, Homo sapiens
tgagaggaggaaaaa

SEQ ID NO: 1617667 - DNA, 15 bp, Homo sapiens
gagaggaggaaaaag

SEQ ID NO: 1617668 - DNA, 15 bp, Homo sapiens
agaggaggaaaaagc

SEQ ID NO: 1617669 - DNA, 15 bp, Homo sapiens
gaggaggaaaaagca

SEQ ID NO: 1617670 - DNA, 15 bp, Homo sapiens
aggaggaaaaagcac

SEQ ID NO: 1617671 - DNA, 15 bp, Homo sapiens
ggaggaaaaagcacc

SEQ ID NO: 1617672 - DNA, 15 bp, Homo sapiens
gaggaaaaagcacca

SEQ ID NO: 1617673 - DNA, 15 bp, Homo sapiens
aggaaaaagcaccat

SEQ ID NO: 1617674 - DNA, 15 bp, Homo sapiens
ggaaaaagcaccatg

SEQ ID NO: 1617675 - DNA, 15 bp, Homo sapiens
gaaaaagcaccatgg

SEQ ID NO: 1617676 - DNA, 15 bp, Homo sapiens
aaaaagcaccatggt

SEQ ID NO: 1617677 - DNA, 15 bp, Homo sapiens
aaaagcaccatggtc

SEQ ID NO: 1617678 - DNA, 15 bp, Homo sapiens
aaagcaccatggtct

SEQ ID NO: 1617679 - DNA, 15 bp, Homo sapiens
aagcaccatggtctt

SEQ ID NO: 1617680 - DNA, 15 bp, Homo sapiens
agcaccatggtctta

SEQ ID NO: 1617681 - DNA, 15 bp, Homo sapiens
gcaccatggtcttat

SEQ ID NO: 1617682 - DNA, 15 bp, Homo sapiens
caccatggtcttatg

SEQ ID NO: 1617683 - DNA, 15 bp, Homo sapiens
accatggtcttatgg

SEQ ID NO: 1617684 - DNA, 15 bp, Homo sapiens
ccatggtcttatggg

SEQ ID NO: 1617685 - DNA, 15 bp, Homo sapiens
catggtcttatgggt

SEQ ID NO: 1617686 - DNA, 15 bp, Homo sapiens
atggtcttatgggtg

SEQ ID NO: 1617687 - DNA, 15 bp, Homo sapiens
tggtcttatgggtgt

SEQ ID NO: 1617688 - DNA, 15 bp, Homo sapiens
ggtcttatgggtgtg

SEQ ID NO: 1617689 - DNA, 15 bp, Homo sapiens
gtcttatgggtgtgg

SEQ ID NO: 1617690 - DNA, 15 bp, Homo sapiens
tcttatgggtgtgga

SEQ ID NO: 1617691 - DNA, 15 bp, Homo sapiens
cttatgggtgtggaa

SEQ ID NO: 1617692 - DNA, 15 bp, Homo sapiens
ttatgggtgtggaat

SEQ ID NO: 1617693 - DNA, 15 bp, Homo sapiens
tatgggtgtggaatt

SEQ ID NO: 1617694 - DNA, 15 bp, Homo sapiens
atgggtgtggaatta

SEQ ID NO: 1617695 - DNA, 15 bp, Homo sapiens
tgggtgtggaattag

SEQ ID NO: 1617696 - DNA, 15 bp, Homo sapiens
gggtgtggaattagc

SEQ ID NO: 1617697 - DNA, 15 bp, Homo sapiens
ggtgtggaattagca

SEQ ID NO: 1617698 - DNA, 15 bp, Homo sapiens
gtgtggaattagcaa

SEQ ID NO: 1617699 - DNA, 15 bp, Homo sapiens
tgtggaattagcaag

SEQ ID NO: 1617700 - DNA, 15 bp, Homo sapiens
gtggaattagcaagc

SEQ ID NO: 1617701 - DNA, 15 bp, Homo sapiens
tggaattagcaagca

SEQ ID NO: 1617702 - DNA, 15 bp, Homo sapiens
ggaattagcaagcac

SEQ ID NO: 1617703 - DNA, 15 bp, Homo sapiens
gaattagcaagcact

SEQ ID NO: 1617704 - DNA, 15 bp, Homo sapiens
aattagcaagcactt

SEQ ID NO: 1617705 - DNA, 15 bp, Homo sapiens
attagcaagcacttt

SEQ ID NO: 1617706 - DNA, 15 bp, Homo sapiens
ttagcaagcactttg

SEQ ID NO: 1617707 - DNA, 15 bp, Homo sapiens
tagcaagcactttga

SEQ ID NO: 1617708 - DNA, 15 bp, Homo sapiens
agcaagcactttgaa

SEQ ID NO: 1617709 - DNA, 15 bp, Homo sapiens
gcaagcactttgaag

SEQ ID NO: 1617710 - DNA, 15 bp, Homo sapiens
caagcactttgaagt

SEQ ID NO: 1617711 - DNA, 15 bp, Homo sapiens
aagcactttgaagtt

SEQ ID NO: 1617712 - DNA, 15 bp, Homo sapiens
agcactttgaagtta

SEQ ID NO: 1617713 - DNA, 15 bp, Homo sapiens
gcactttgaagttat

SEQ ID NO: 1617714 - DNA, 15 bp, Homo sapiens
cactttgaagttatg

SEQ ID NO: 1617715 - DNA, 15 bp, Homo sapiens
actttgaagttatga

SEQ ID NO: 1617716 - DNA, 15 bp, Homo sapiens
ctttgaagttatgaa

SEQ ID NO: 1617717 - DNA, 15 bp, Homo sapiens
ttgaagttatgaaaa

SEQ ID NO: 1617718 - DNA, 15 bp, Homo sapiens
tgaagttatgaaaac

SEQ ID NO: 1617719 - DNA, 15 bp, Homo sapiens
gaagttatgaaaacc

SEQ ID NO: 1617720 - DNA, 15 bp, Homo sapiens
aagttatgaaaacct

SEQ ID NO: 1617721 - DNA, 15 bp, Homo sapiens
agttatgaaaacctg

SEQ ID NO: 1617722 - DNA, 15 bp, Homo sapiens
gttatgaaaacctga

SEQ ID NO: 1617723 - DNA, 15 bp, Homo sapiens
ttatgaaaacctgag

SEQ ID NO: 1617724 - DNA, 15 bp, Homo sapiens
tatgaaaacctgagt

SEQ ID NO: 1617725 - DNA, 15 bp, Homo sapiens
atgaaaacctgagtt

SEQ ID NO: 1617726 - DNA, 15 bp, Homo sapiens
tgaaaacctgagttc

SEQ ID NO: 1617727 - DNA, 15 bp, Homo sapiens
gaaaacctgagttct

SEQ ID NO: 1617728 - DNA, 15 bp, Homo sapiens
aaaacctgagttctg

SEQ ID NO: 1617729 - DNA, 15 bp, Homo sapiens
aaacctgagttctga

SEQ ID NO: 1617730 - DNA, 15 bp, Homo sapiens
aacctgagttctgag

SEQ ID NO: 1617731 - DNA, 15 bp, Homo sapiens
acctgagttctgagg

SEQ ID NO: 1617732 - DNA, 15 bp, Homo sapiens
cctgagttctgagga

SEQ ID NO: 1617733 - DNA, 15 bp, Homo sapiens
ctgagttctgaggag

SEQ ID NO: 1617734 - DNA, 15 bp, Homo sapiens
tgagttctgaggagc

SEQ ID NO: 1617735 - DNA, 15 bp, Homo sapiens
gagttctgaggagct

SEQ ID NO: 1617736 - DNA, 15 bp, Homo sapiens
agttctgaggagctc

SEQ ID NO: 1617737 - DNA, 15 bp, Homo sapiens
gttctgaggagctct

SEQ ID NO: 1617738 - DNA, 15 bp, Homo sapiens
ttctgaggagctctg

SEQ ID NO: 1617739 - DNA, 15 bp, Homo sapiens
tctgaggagctctga

SEQ ID NO: 1617740 - DNA, 15 bp, Homo sapiens
ctgaggagctctgag

SEQ ID NO: 1617741 - DNA, 15 bp, Homo sapiens
tgaggagctctgagc

SEQ ID NO: 1617742 - DNA, 15 bp, Homo sapiens
gaggagctctgagct

SEQ ID NO: 1617743 - DNA, 15 bp, Homo sapiens
aggagctctgagctc

SEQ ID NO: 1617744 - DNA, 15 bp, Homo sapiens
ggagctctgagctct

SEQ ID NO: 1617745 - DNA, 15 bp, Homo sapiens
gagctctgagctctt

SEQ ID NO: 1617746 - DNA, 15 bp, Homo sapiens
agctctgagctcttt

SEQ ID NO: 1617747 - DNA, 15 bp, Homo sapiens
gctctgagctctttt

SEQ ID NO: 1617748 - DNA, 15 bp, Homo sapiens
ctctgagctctttta

SEQ ID NO: 1617749 - DNA, 15 bp, Homo sapiens
tctgagctcttttaa

SEQ ID NO: 1617750 - DNA, 15 bp, Homo sapiens
ctgagctcttttaaa

SEQ ID NO: 1617751 - DNA, 15 bp, Homo sapiens
tgagctcttttaaat

SEQ ID NO: 1617752 - DNA, 15 bp, Homo sapiens
gagctcttttaaata

SEQ ID NO: 1617753 - DNA, 15 bp, Homo sapiens
agctcttttaaatac

SEQ ID NO: 1617754 - DNA, 15 bp, Homo sapiens
gctcttttaaataca

SEQ ID NO: 1617755 - DNA, 15 bp, Homo sapiens
ctcttttaaatacac

SEQ ID NO: 1617756 - DNA, 15 bp, Homo sapiens
tcttttaaatacaca

SEQ ID NO: 1617757 - DNA, 15 bp, Homo sapiens
cttttaaatacacag

SEQ ID NO: 1617758 - DNA, 15 bp, Homo sapiens
ttttaaatacacagg

SEQ ID NO: 1617759 - DNA, 15 bp, Homo sapiens
tttaaatacacagga

SEQ ID NO: 1617760 - DNA, 15 bp, Homo sapiens
ttaaatacacaggaa

SEQ ID NO: 1617761 - DNA, 15 bp, Homo sapiens
taaatacacaggaat

SEQ ID NO: 1617762 - DNA, 15 bp, Homo sapiens
aaatacacaggaatt

SEQ ID NO: 1617763 - DNA, 15 bp, Homo sapiens
aatacacaggaattt

SEQ ID NO: 1617764 - DNA, 15 bp, Homo sapiens
atacacaggaattta

SEQ ID NO: 1617765 - DNA, 15 bp, Homo sapiens
tacacaggaatttaa

SEQ ID NO: 1617766 - DNA, 15 bp, Homo sapiens
acacaggaatttaaa

SEQ ID NO: 1617767 - DNA, 15 bp, Homo sapiens
cacaggaatttaaac

SEQ ID NO: 1617768 - DNA, 15 bp, Homo sapiens
acaggaatttaaacg

SEQ ID NO: 1617769 - DNA, 15 bp, Homo sapiens
caggaatttaaacga

SEQ ID NO: 1617770 - DNA, 15 bp, Homo sapiens
aggaatttaaacgag

SEQ ID NO: 1617771 - DNA, 15 bp, Homo sapiens
ggaatttaaacgagt

SEQ ID NO: 1617772 - DNA, 15 bp, Homo sapiens
gaatttaaacgagta

SEQ ID NO: 1617773 - DNA, 15 bp, Homo sapiens
aatttaaacgagtat

SEQ ID NO: 1617774 - DNA, 15 bp, Homo sapiens
atttaaacgagtata

SEQ ID NO: 1617775 - DNA, 15 bp, Homo sapiens
tttaaacgagtatac

SEQ ID NO: 1617776 - DNA, 15 bp, Homo sapiens
ttaaacgagtatacc

SEQ ID NO: 1617777 - DNA, 15 bp, Homo sapiens
taaacgagtataccc

SEQ ID NO: 1617778 - DNA, 15 bp, Homo sapiens
aaacgagtataccca

SEQ ID NO: 1617779 - DNA, 15 bp, Homo sapiens
aacgagtatacccaa

SEQ ID NO: 1617780 - DNA, 15 bp, Homo sapiens
acgagtatacccaaa

SEQ ID NO: 1617781 - DNA, 15 bp, Homo sapiens
cgagtatacccaaat

SEQ ID NO: 1617782 - DNA, 15 bp, Homo sapiens
gagtatacccaaata

SEQ ID NO: 1617783 - DNA, 15 bp, Homo sapiens
agtatacccaaatag

SEQ ID NO: 1617784 - DNA, 15 bp, Homo sapiens
gtatacccaaatagg

SEQ ID NO: 1617785 - DNA, 15 bp, Homo sapiens
tatacccaaataggt

SEQ ID NO: 1617786 - DNA, 15 bp, Homo sapiens
atacccaaataggtt

SEQ ID NO: 1617787 - DNA, 15 bp, Homo sapiens
tacccaaataggttt

SEQ ID NO: 1617788 - DNA, 15 bp, Homo sapiens
acccaaataggtttg

SEQ ID NO: 1617789 - DNA, 15 bp, Homo sapiens
cccaaataggtttga

SEQ ID NO: 1617790 - DNA, 15 bp, Homo sapiens
ccaaataggtttgag

SEQ ID NO: 1617791 - DNA, 15 bp, Homo sapiens
caaataggtttgagg

SEQ ID NO: 1617792 - DNA, 15 bp, Homo sapiens
aaataggtttgagga

SEQ ID NO: 1617793 - DNA, 15 bp, Homo sapiens
aataggtttgaggaa

SEQ ID NO: 1617794 - DNA, 15 bp, Homo sapiens
ataggtttgaggaag

SEQ ID NO: 1617795 - DNA, 15 bp, Homo sapiens
taggtttgaggaagg

SEQ ID NO: 1617796 - DNA, 15 bp, Homo sapiens
aggtttgaggaagga

SEQ ID NO: 1617797 - DNA, 15 bp, Homo sapiens
ggtttgaggaaggaa

SEQ ID NO: 1617798 - DNA, 15 bp, Homo sapiens
gtttgaggaaggaaa

SEQ ID NO: 1617799 - DNA, 15 bp, Homo sapiens
tttgaggaaggaaat

SEQ ID NO: 1617800 - DNA, 15 bp, Homo sapiens
ttgaggaaggaaatg

SEQ ID NO: 1617801 - DNA, 15 bp, Homo sapiens
tgaggaaggaaatgt

SEQ ID NO: 1617802 - DNA, 15 bp, Homo sapiens
gaggaaggaaatgta

SEQ ID NO: 1617803 - DNA, 15 bp, Homo sapiens
aggaaggaaatgtag

SEQ ID NO: 1617804 - DNA, 15 bp, Homo sapiens
ggaaggaaatgtagc

SEQ ID NO: 1617805 - DNA, 15 bp, Homo sapiens
gaaggaaatgtagcc

SEQ ID NO: 1617806 - DNA, 15 bp, Homo sapiens
aaggaaatgtagcca

SEQ ID NO: 1617807 - DNA, 15 bp, Homo sapiens
aggaaatgtagccat

SEQ ID NO: 1617808 - DNA, 15 bp, Homo sapiens
ggaaatgtagccata

SEQ ID NO: 1617809 - DNA, 15 bp, Homo sapiens
gaaatgtagccatat

SEQ ID NO: 1617810 - DNA, 15 bp, Homo sapiens
aaatgtagccatata

SEQ ID NO: 1617811 - DNA, 15 bp, Homo sapiens
aatgtagccatatat

SEQ ID NO: 1617812 - DNA, 15 bp, Homo sapiens
atgtagccatatatt

SEQ ID NO: 1617813 - DNA, 15 bp, Homo sapiens
tgtagccatatattt

SEQ ID NO: 1617814 - DNA, 15 bp, Homo sapiens
gtagccatatatttc

SEQ ID NO: 1617815 - DNA, 15 bp, Homo sapiens
tagccatatatttct

SEQ ID NO: 1617816 - DNA, 15 bp, Homo sapiens
agccatatatttcta

SEQ ID NO: 1617817 - DNA, 15 bp, Homo sapiens
gccatatatttctaa

SEQ ID NO: 1617818 - DNA, 15 bp, Homo sapiens
ccatatatttctaaa

SEQ ID NO: 1617819 - DNA, 15 bp, Homo sapiens
catatatttctaaaa

SEQ ID NO: 1617820 - DNA, 15 bp, Homo sapiens
atatatttctaaaaa

SEQ ID NO: 1617821 - DNA, 15 bp, Homo sapiens
tatatttctaaaaac

SEQ ID NO: 1617822 - DNA, 15 bp, Homo sapiens
atatttctaaaaacc

SEQ ID NO: 1617823 - DNA, 15 bp, Homo sapiens
tatttctaaaaacca

SEQ ID NO: 1617824 - DNA, 15 bp, Homo sapiens
atttctaaaaaccaa

SEQ ID NO: 1617825 - DNA, 15 bp, Homo sapiens
tttctaaaaaccaaa

SEQ ID NO: 1617826 - DNA, 15 bp, Homo sapiens
ttctaaaaaccaaac

SEQ ID NO: 1617827 - DNA, 15 bp, Homo sapiens
tctaaaaaccaaact

SEQ ID NO: 1617828 - DNA, 15 bp, Homo sapiens
ctaaaaaccaaactt

SEQ ID NO: 1617829 - DNA, 15 bp, Homo sapiens
taaaaaccaaacttc

SEQ ID NO: 1617830 - DNA, 15 bp, Homo sapiens
aaaaaccaaacttct

SEQ ID NO: 1617831 - DNA, 15 bp, Homo sapiens
aaaaccaaacttcta

SEQ ID NO: 1617832 - DNA, 15 bp, Homo sapiens
aaaccaaacttctaa

SEQ ID NO: 1617833 - DNA, 15 bp, Homo sapiens
aaccaaacttctaaa

SEQ ID NO: 1617834 - DNA, 15 bp, Homo sapiens
accaaacttctaaaa

SEQ ID NO: 1617835 - DNA, 15 bp, Homo sapiens
ccaaacttctaaaaa

SEQ ID NO: 1617836 - DNA, 15 bp, Homo sapiens
caaacttctaaaaac

SEQ ID NO: 1617837 - DNA, 15 bp, Homo sapiens
aaacttctaaaaact

SEQ ID NO: 1617838 - DNA, 15 bp, Homo sapiens
aacttctaaaaacta

SEQ ID NO: 1617839 - DNA, 15 bp, Homo sapiens
acttctaaaaactat

SEQ ID NO: 1617840 - DNA, 15 bp, Homo sapiens
cttctaaaaactatt

SEQ ID NO: 1617841 - DNA, 15 bp, Homo sapiens
ttctaaaaactattt

SEQ ID NO: 1617842 - DNA, 15 bp, Homo sapiens
tctaaaaactatttt

SEQ ID NO: 1617843 - DNA, 15 bp, Homo sapiens
ctaaaaactatttta

SEQ ID NO: 1617844 - DNA, 15 bp, Homo sapiens
taaaaactattttaa

SEQ ID NO: 1617845 - DNA, 15 bp, Homo sapiens
aaaaactattttaat

SEQ ID NO: 1617846 - DNA, 15 bp, Homo sapiens
aaaactattttaata

SEQ ID NO: 1617847 - DNA, 15 bp, Homo sapiens
aaactattttaatat

SEQ ID NO: 1617848 - DNA, 15 bp, Homo sapiens
aactattttaatatt

SEQ ID NO: 1617849 - DNA, 15 bp, Homo sapiens
actattttaatattg

SEQ ID NO: 1617850 - DNA, 15 bp, Homo sapiens
ctattttaatattgt

SEQ ID NO: 1617851 - DNA, 15 bp, Homo sapiens
tattttaatattgtt

SEQ ID NO: 1617852 - DNA, 15 bp, Homo sapiens
attttaatattgttt

SEQ ID NO: 1617853 - DNA, 15 bp, Homo sapiens
ttttaatattgtttc

SEQ ID NO: 1617854 - DNA, 15 bp, Homo sapiens
tttaatattgtttct

SEQ ID NO: 1617855 - DNA, 15 bp, Homo sapiens
ttaatattgtttctt

SEQ ID NO: 1617856 - DNA, 15 bp, Homo sapiens
taatattgtttctta

SEQ ID NO: 1617857 - DNA, 15 bp, Homo sapiens
aatattgtttcttaa

SEQ ID NO: 1617858 - DNA, 15 bp, Homo sapiens
atattgtttcttaaa

SEQ ID NO: 1617859 - DNA, 15 bp, Homo sapiens
tattgtttcttaaat

SEQ ID NO: 1617860 - DNA, 15 bp, Homo sapiens
attgtttcttaaata

SEQ ID NO: 1617861 - DNA, 15 bp, Homo sapiens
ttgtttcttaaatac

SEQ ID NO: 1617862 - DNA, 15 bp, Homo sapiens
tgtttcttaaataca

SEQ ID NO: 1617863 - DNA, 15 bp, Homo sapiens
gtttcttaaatacac

SEQ ID NO: 1617864 - DNA, 15 bp, Homo sapiens
tttcttaaatacacc

SEQ ID NO: 1617865 - DNA, 15 bp, Homo sapiens
ttcttaaatacaccg

SEQ ID NO: 1617866 - DNA, 15 bp, Homo sapiens
tcttaaatacaccgt

SEQ ID NO: 1617867 - DNA, 15 bp, Homo sapiens
cttaaatacaccgta

SEQ ID NO: 1617868 - DNA, 15 bp, Homo sapiens
ttaaatacaccgtaa

SEQ ID NO: 1617869 - DNA, 15 bp, Homo sapiens
taaatacaccgtaat

SEQ ID NO: 1617870 - DNA, 15 bp, Homo sapiens
aaatacaccgtaatg

SEQ ID NO: 1617871 - DNA, 15 bp, Homo sapiens
aatacaccgtaatgc

SEQ ID NO: 1617872 - DNA, 15 bp, Homo sapiens
atacaccgtaatgca

SEQ ID NO: 1617873 - DNA, 15 bp, Homo sapiens
tacaccgtaatgcag

SEQ ID NO: 1617874 - DNA, 15 bp, Homo sapiens
acaccgtaatgcagt

SEQ ID NO: 1617875 - DNA, 15 bp, Homo sapiens
caccgtaatgcagtg

SEQ ID NO: 1617876 - DNA, 15 bp, Homo sapiens
accgtaatgcagtga

SEQ ID NO: 1617877 - DNA, 15 bp, Homo sapiens
ccgtaatgcagtgaa

SEQ ID NO: 1617878 - DNA, 15 bp, Homo sapiens
cgtaatgcagtgaaa

SEQ ID NO: 1617879 - DNA, 15 bp, Homo sapiens
gtaatgcagtgaaat

SEQ ID NO: 1617880 - DNA, 15 bp, Homo sapiens
taatgcagtgaaatc

SEQ ID NO: 1617881 - DNA, 15 bp, Homo sapiens
aatgcagtgaaatct

SEQ ID NO: 1617882 - DNA, 15 bp, Homo sapiens
atgcagtgaaatctt

SEQ ID NO: 1617883 - DNA, 15 bp, Homo sapiens
tgcagtgaaatcttc

SEQ ID NO: 1617884 - DNA, 15 bp, Homo sapiens
gcagtgaaatcttcc

SEQ ID NO: 1617885 - DNA, 15 bp, Homo sapiens
cagtgaaatcttcct

SEQ ID NO: 1617886 - DNA, 15 bp, Homo sapiens
agtgaaatcttcctg

SEQ ID NO: 1617887 - DNA, 15 bp, Homo sapiens
gtgaaatcttcctgc

SEQ ID NO: 1617888 - DNA, 15 bp, Homo sapiens
tgaaatcttcctgct

SEQ ID NO: 1617889 - DNA, 15 bp, Homo sapiens
gaaatcttcctgctc

SEQ ID NO: 1617890 - DNA, 15 bp, Homo sapiens
aaatcttcctgctca

SEQ ID NO: 1617891 - DNA, 15 bp, Homo sapiens
aatcttcctgctcac

SEQ ID NO: 1617892 - DNA, 15 bp, Homo sapiens
atcttcctgctcaca

SEQ ID NO: 1617893 - DNA, 15 bp, Homo sapiens
tcttcctgctcacag

SEQ ID NO: 1617894 - DNA, 15 bp, Homo sapiens
cttcctgctcacagc

SEQ ID NO: 1617895 - DNA, 15 bp, Homo sapiens
ttcctgctcacagca

SEQ ID NO: 1617896 - DNA, 15 bp, Homo sapiens
tcctgctcacagcag

SEQ ID NO: 1617897 - DNA, 15 bp, Homo sapiens
cctgctcacagcaga

SEQ ID NO: 1617898 - DNA, 15 bp, Homo sapiens
ctgctcacagcagac

SEQ ID NO: 1617899 - DNA, 15 bp, Homo sapiens
tgctcacagcagact

SEQ ID NO: 1617900 - DNA, 15 bp, Homo sapiens
gctcacagcagactt

SEQ ID NO: 1617901 - DNA, 15 bp, Homo sapiens
ctcacagcagacttt

SEQ ID NO: 1617902 - DNA, 15 bp, Homo sapiens
tcacagcagactttc

SEQ ID NO: 1617903 - DNA, 15 bp, Homo sapiens
cacagcagactttca

SEQ ID NO: 1617904 - DNA, 15 bp, Homo sapiens
acagcagactttcac

SEQ ID NO: 1617905 - DNA, 15 bp, Homo sapiens
cagcagactttcact

SEQ ID NO: 1617906 - DNA, 15 bp, Homo sapiens
agcagactttcacta

SEQ ID NO: 1617907 - DNA, 15 bp, Homo sapiens
gcagactttcactag

SEQ ID NO: 1617908 - DNA, 15 bp, Homo sapiens
cagactttcactaga

SEQ ID NO: 1617909 - DNA, 15 bp, Homo sapiens
agactttcactagat

SEQ ID NO: 1617910 - DNA, 15 bp, Homo sapiens
gactttcactagatt

SEQ ID NO: 1617911 - DNA, 15 bp, Homo sapiens
actttcactagattc

SEQ ID NO: 1617912 - DNA, 15 bp, Homo sapiens
ctttcactagattcc

SEQ ID NO: 1617913 - DNA, 15 bp, Homo sapiens
tttcactagattcca

SEQ ID NO: 1617914 - DNA, 15 bp, Homo sapiens
ttcactagattccat

SEQ ID NO: 1617915 - DNA, 15 bp, Homo sapiens
tcactagattccata

SEQ ID NO: 1617916 - DNA, 15 bp, Homo sapiens
cactagattccatag

SEQ ID NO: 1617917 - DNA, 15 bp, Homo sapiens
actagattccataga

SEQ ID NO: 1617918 - DNA, 15 bp, Homo sapiens
ctagattccatagaa

SEQ ID NO: 1617919 - DNA, 15 bp, Homo sapiens
tagattccatagaaa

SEQ ID NO: 1617920 - DNA, 15 bp, Homo sapiens
agattccatagaaaa

SEQ ID NO: 1617921 - DNA, 15 bp, Homo sapiens
gattccatagaaaat

SEQ ID NO: 1617922 - DNA, 15 bp, Homo sapiens
attccatagaaaatg

SEQ ID NO: 1617923 - DNA, 15 bp, Homo sapiens
ttccatagaaaatgc

SEQ ID NO: 1617924 - DNA, 15 bp, Homo sapiens
tccatagaaaatgca

SEQ ID NO: 1617925 - DNA, 15 bp, Homo sapiens
ccatagaaaatgcac

SEQ ID NO: 1617926 - DNA, 15 bp, Homo sapiens
catagaaaatgcacc

SEQ ID NO: 1617927 - DNA, 15 bp, Homo sapiens
atagaaaatgcacca

SEQ ID NO: 1617928 - DNA, 15 bp, Homo sapiens
tagaaaatgcaccaa

SEQ ID NO: 1617929 - DNA, 15 bp, Homo sapiens
agaaaatgcaccaaa

SEQ ID NO: 1617930 - DNA, 15 bp, Homo sapiens
gaaaatgcaccaaat

SEQ ID NO: 1617931 - DNA, 15 bp, Homo sapiens
aaaatgcaccaaatg

SEQ ID NO: 1617932 - DNA, 15 bp, Homo sapiens
aaatgcaccaaatgt

SEQ ID NO: 1617933 - DNA, 15 bp, Homo sapiens
aatgcaccaaatgtc

SEQ ID NO: 1617934 - DNA, 15 bp, Homo sapiens
atgcaccaaatgtca

SEQ ID NO: 1617935 - DNA, 15 bp, Homo sapiens
tgcaccaaatgtcaa

SEQ ID NO: 1617936 - DNA, 15 bp, Homo sapiens
gcaccaaatgtcaac

SEQ ID NO: 1617937 - DNA, 15 bp, Homo sapiens
caccaaatgtcaacg

SEQ ID NO: 1617938 - DNA, 15 bp, Homo sapiens
accaaatgtcaacga

SEQ ID NO: 1617939 - DNA, 15 bp, Homo sapiens
ccaaatgtcaacgat

SEQ ID NO: 1617940 - DNA, 15 bp, Homo sapiens
caaatgtcaacgata

SEQ ID NO: 1617941 - DNA, 15 bp, Homo sapiens
aaatgtcaacgataa

SEQ ID NO: 1617942 - DNA, 15 bp, Homo sapiens
aatgtcaacgataac

SEQ ID NO: 1617943 - DNA, 15 bp, Homo sapiens
atgtcaacgataacg

SEQ ID NO: 1617944 - DNA, 15 bp, Homo sapiens
tgtcaacgataacgg

SEQ ID NO: 1617945 - DNA, 15 bp, Homo sapiens
gtcaacgataacggt

SEQ ID NO: 1617946 - DNA, 15 bp, Homo sapiens
tcaacgataacggta

SEQ ID NO: 1617947 - DNA, 15 bp, Homo sapiens
caacgataacggtat

SEQ ID NO: 1617948 - DNA, 15 bp, Homo sapiens
aacgataacggtatt

SEQ ID NO: 1617949 - DNA, 15 bp, Homo sapiens
acgataacggtattt

SEQ ID NO: 1617950 - DNA, 15 bp, Homo sapiens
cgataacggtattta

SEQ ID NO: 1617951 - DNA, 15 bp, Homo sapiens
gataacggtatttat

SEQ ID NO: 1617952 - DNA, 15 bp, Homo sapiens
ataacggtatttatc

SEQ ID NO: 1617953 - DNA, 15 bp, Homo sapiens
taacggtatttatca

SEQ ID NO: 1617954 - DNA, 15 bp, Homo sapiens
aacggtatttatcag

SEQ ID NO: 1617955 - DNA, 15 bp, Homo sapiens
acggtatttatcagg

SEQ ID NO: 1617956 - DNA, 15 bp, Homo sapiens
cggtatttatcaggc

SEQ ID NO: 1617957 - DNA, 15 bp, Homo sapiens
ggtatttatcaggcc

SEQ ID NO: 1617958 - DNA, 15 bp, Homo sapiens
gtatttatcaggccg

SEQ ID NO: 1617959 - DNA, 15 bp, Homo sapiens
tatttatcaggccgg

SEQ ID NO: 1617960 - DNA, 15 bp, Homo sapiens
atttatcaggccgga

SEQ ID NO: 1617961 - DNA, 15 bp, Homo sapiens
tttatcaggccggac

SEQ ID NO: 1617962 - DNA, 15 bp, Homo sapiens
ttatcaggccggaca

SEQ ID NO: 1617963 - DNA, 15 bp, Homo sapiens
tatcaggccggacac

SEQ ID NO: 1617964 - DNA, 15 bp, Homo sapiens
atcaggccggacaca

SEQ ID NO: 1617965 - DNA, 15 bp, Homo sapiens
tcaggccggacacat

SEQ ID NO: 1617966 - DNA, 15 bp, Homo sapiens
caggccggacacatt

SEQ ID NO: 1617967 - DNA, 15 bp, Homo sapiens
aggccggacacattt

SEQ ID NO: 1617968 - DNA, 15 bp, Homo sapiens
ggccggacacatttt

SEQ ID NO: 1617969 - DNA, 15 bp, Homo sapiens
gccggacacattttc

SEQ ID NO: 1617970 - DNA, 15 bp, Homo sapiens
ccggacacattttct

SEQ ID NO: 1617971 - DNA, 15 bp, Homo sapiens
cggacacattttctt

SEQ ID NO: 1617972 - DNA, 15 bp, Homo sapiens
ggacacattttcttc

SEQ ID NO: 1617973 - DNA, 15 bp, Homo sapiens
gacacattttcttct

SEQ ID NO: 1617974 - DNA, 15 bp, Homo sapiens
acacattttcttctt

SEQ ID NO: 1617975 - DNA, 15 bp, Homo sapiens
cacattttcttcttt

SEQ ID NO: 1617976 - DNA, 15 bp, Homo sapiens
acattttcttcttta

SEQ ID NO: 1617977 - DNA, 15 bp, Homo sapiens
cattttcttctttat

SEQ ID NO: 1617978 - DNA, 15 bp, Homo sapiens
attttcttctttatg

SEQ ID NO: 1617979 - DNA, 15 bp, Homo sapiens
ttttcttctttatgc

SEQ ID NO: 1617980 - DNA, 15 bp, Homo sapiens
tttcttctttatgct

SEQ ID NO: 1617981 - DNA, 15 bp, Homo sapiens
ttcttctttatgctt

SEQ ID NO: 1617982 - DNA, 15 bp, Homo sapiens
tcttctttatgcttc

SEQ ID NO: 1617983 - DNA, 15 bp, Homo sapiens
cttctttatgcttct

SEQ ID NO: 1617984 - DNA, 15 bp, Homo sapiens
ttctttatgcttctg

SEQ ID NO: 1617985 - DNA, 15 bp, Homo sapiens
tctttatgcttctgt

SEQ ID NO: 1617986 - DNA, 15 bp, Homo sapiens
ctttatgcttctgtc

SEQ ID NO: 1617987 - DNA, 15 bp, Homo sapiens
tttatgcttctgtca

SEQ ID NO: 1617988 - DNA, 15 bp, Homo sapiens
ttatgcttctgtcaa

SEQ ID NO: 1617989 - DNA, 15 bp, Homo sapiens
tatgcttctgtcaat

SEQ ID NO: 1617990 - DNA, 15 bp, Homo sapiens
atgcttctgtcaatg

SEQ ID NO: 1617991 - DNA, 15 bp, Homo sapiens
tgcttctgtcaatgt

SEQ ID NO: 1617992 - DNA, 15 bp, Homo sapiens
gcttctgtcaatgtt

SEQ ID NO: 1617993 - DNA, 15 bp, Homo sapiens
cttctgtcaatgttt

SEQ ID NO: 1617994 - DNA, 15 bp, Homo sapiens
ttctgtcaatgtttc

SEQ ID NO: 1617995 - DNA, 15 bp, Homo sapiens
tctgtcaatgtttct

SEQ ID NO: 1617996 - DNA, 15 bp, Homo sapiens
ctgtcaatgtttctg

SEQ ID NO: 1617997 - DNA, 15 bp, Homo sapiens
tgtcaatgtttctgc

SEQ ID NO: 1617998 - DNA, 15 bp, Homo sapiens
gtcaatgtttctgca

SEQ ID NO: 1617999 - DNA, 15 bp, Homo sapiens
tcaatgtttctgcaa

SEQ ID NO: 1618000 - DNA, 15 bp, Homo sapiens
caatgtttctgcaat

SEQ ID NO: 1618001 - DNA, 15 bp, Homo sapiens
aatgtttctgcaatg

SEQ ID NO: 1618002 - DNA, 15 bp, Homo sapiens
atgtttctgcaatga

SEQ ID NO: 1618003 - DNA, 15 bp, Homo sapiens
tgtttctgcaatgag

SEQ ID NO: 1618004 - DNA, 15 bp, Homo sapiens
gtttctgcaatgagg

SEQ ID NO: 1618005 - DNA, 15 bp, Homo sapiens
tttctgcaatgagga

SEQ ID NO: 1618006 - DNA, 15 bp, Homo sapiens
ttctgcaatgaggac

SEQ ID NO: 1618007 - DNA, 15 bp, Homo sapiens
tctgcaatgaggaca

SEQ ID NO: 1618008 - DNA, 15 bp, Homo sapiens
ctgcaatgaggacat

SEQ ID NO: 1618009 - DNA, 15 bp, Homo sapiens
tgcaatgaggacata

SEQ ID NO: 1618010 - DNA, 15 bp, Homo sapiens
gcaatgaggacatat

SEQ ID NO: 1618011 - DNA, 15 bp, Homo sapiens
caatgaggacatata

SEQ ID NO: 1618012 - DNA, 15 bp, Homo sapiens
aatgaggacatataa

SEQ ID NO: 1618013 - DNA, 15 bp, Homo sapiens
atgaggacatataat

SEQ ID NO: 1618014 - DNA, 15 bp, Homo sapiens
tgaggacatataatt

SEQ ID NO: 1618015 - DNA, 15 bp, Homo sapiens
gaggacatataattc

SEQ ID NO: 1618016 - DNA, 15 bp, Homo sapiens
aggacatataattct

SEQ ID NO: 1618017 - DNA, 15 bp, Homo sapiens
ggacatataattcta

SEQ ID NO: 1618018 - DNA, 15 bp, Homo sapiens
gacatataattctat

SEQ ID NO: 1618019 - DNA, 15 bp, Homo sapiens
acatataattctata

SEQ ID NO: 1618020 - DNA, 15 bp, Homo sapiens
catataattctataa

SEQ ID NO: 1618021 - DNA, 15 bp, Homo sapiens
atataattctataat

SEQ ID NO: 1618022 - DNA, 15 bp, Homo sapiens
tataattctataatg

SEQ ID NO: 1618023 - DNA, 15 bp, Homo sapiens
ataattctataatga

SEQ ID NO: 1618024 - DNA, 15 bp, Homo sapiens
taattctataatgaa

SEQ ID NO: 1618025 - DNA, 15 bp, Homo sapiens
aattctataatgaaa

SEQ ID NO: 1618026 - DNA, 15 bp, Homo sapiens
attctataatgaaaa

SEQ ID NO: 1618027 - DNA, 15 bp, Homo sapiens
ttctataatgaaaaa

SEQ ID NO: 1618028 - DNA, 15 bp, Homo sapiens
tctataatgaaaaaa

SEQ ID NO: 1618029 - DNA, 15 bp, Homo sapiens
ctataatgaaaaaag

SEQ ID NO: 1618030 - DNA, 15 bp, Homo sapiens
tataatgaaaaaagt

SEQ ID NO: 1618031 - DNA, 15 bp, Homo sapiens
ataatgaaaaaagta

SEQ ID NO: 1618032 - DNA, 15 bp, Homo sapiens
taatgaaaaaagtaa

SEQ ID NO: 1618033 - DNA, 15 bp, Homo sapiens
aatgaaaaaagtaaa

SEQ ID NO: 1618034 - DNA, 15 bp, Homo sapiens
atgaaaaaagtaaat

SEQ ID NO: 1618035 - DNA, 15 bp, Homo sapiens
tgaaaaaagtaaata

SEQ ID NO: 1618036 - DNA, 15 bp, Homo sapiens
gaaaaaagtaaatat

SEQ ID NO: 1618037 - DNA, 15 bp, Homo sapiens
aaaaaagtaaatatg

SEQ ID NO: 1618038 - DNA, 15 bp, Homo sapiens
aaaaagtaaatatgc

SEQ ID NO: 1618039 - DNA, 15 bp, Homo sapiens
aaaagtaaatatgca

SEQ ID NO: 1618040 - DNA, 15 bp, Homo sapiens
aaagtaaatatgcat

SEQ ID NO: 1618041 - DNA, 15 bp, Homo sapiens
aagtaaatatgcatc

SEQ ID NO: 1618042 - DNA, 15 bp, Homo sapiens
agtaaatatgcatca

SEQ ID NO: 1618043 - DNA, 15 bp, Homo sapiens
gtaaatatgcatcat

SEQ ID NO: 1618044 - DNA, 15 bp, Homo sapiens
taaatatgcatcatg

SEQ ID NO: 1618045 - DNA, 15 bp, Homo sapiens
aaatatgcatcatgc

SEQ ID NO: 1618046 - DNA, 15 bp, Homo sapiens
aatatgcatcatgcc

SEQ ID NO: 1618047 - DNA, 15 bp, Homo sapiens
atatgcatcatgccc

SEQ ID NO: 1618048 - DNA, 15 bp, Homo sapiens
tatgcatcatgccca

SEQ ID NO: 1618049 - DNA, 15 bp, Homo sapiens
atgcatcatgcccat

SEQ ID NO: 1618050 - DNA, 15 bp, Homo sapiens
tgcatcatgcccatg

SEQ ID NO: 1618051 - DNA, 15 bp, Homo sapiens
gcatcatgcccatgt

SEQ ID NO: 1618052 - DNA, 15 bp, Homo sapiens
catcatgcccatgta

SEQ ID NO: 1618053 - DNA, 15 bp, Homo sapiens
atcatgcccatgtac

SEQ ID NO: 1618054 - DNA, 15 bp, Homo sapiens
tcatgcccatgtacc

SEQ ID NO: 1618055 - DNA, 15 bp, Homo sapiens
catgcccatgtacct

SEQ ID NO: 1618056 - DNA, 15 bp, Homo sapiens
atgcccatgtaccta

SEQ ID NO: 1618057 - DNA, 15 bp, Homo sapiens
tgcccatgtacctac

SEQ ID NO: 1618058 - DNA, 15 bp, Homo sapiens
gcccatgtacctacc

SEQ ID NO: 1618059 - DNA, 15 bp, Homo sapiens
cccatgtacctacca

SEQ ID NO: 1618060 - DNA, 15 bp, Homo sapiens
ccatgtacctaccaa

SEQ ID NO: 1618061 - DNA, 15 bp, Homo sapiens
catgtacctaccaaa

SEQ ID NO: 1618062 - DNA, 15 bp, Homo sapiens
atgtacctaccaaat

SEQ ID NO: 1618063 - DNA, 15 bp, Homo sapiens
tgtacctaccaaata

SEQ ID NO: 1618064 - DNA, 15 bp, Homo sapiens
gtacctaccaaatac

SEQ ID NO: 1618065 - DNA, 15 bp, Homo sapiens
tacctaccaaataca

SEQ ID NO: 1618066 - DNA, 15 bp, Homo sapiens
acctaccaaatacat

SEQ ID NO: 1618067 - DNA, 15 bp, Homo sapiens
cctaccaaatacata

SEQ ID NO: 1618068 - DNA, 15 bp, Homo sapiens
ctaccaaatacatat

SEQ ID NO: 1618069 - DNA, 15 bp, Homo sapiens
taccaaatacatata

SEQ ID NO: 1618070 - DNA, 15 bp, Homo sapiens
accaaatacatatat

SEQ ID NO: 1618071 - DNA, 15 bp, Homo sapiens
ccaaatacatatatg

SEQ ID NO: 1618072 - DNA, 15 bp, Homo sapiens
caaatacatatatgt

SEQ ID NO: 1618073 - DNA, 15 bp, Homo sapiens
aaatacatatatgtg

SEQ ID NO: 1618074 - DNA, 15 bp, Homo sapiens
aatacatatatgtgt

SEQ ID NO: 1618075 - DNA, 15 bp, Homo sapiens
atacatatatgtgtg

SEQ ID NO: 1618076 - DNA, 15 bp, Homo sapiens
tacatatatgtgtgt

SEQ ID NO: 1618077 - DNA, 15 bp, Homo sapiens
acatatatgtgtgtg

SEQ ID NO: 1618078 - DNA, 15 bp, Homo sapiens
catatatgtgtgtgc

SEQ ID NO: 1618079 - DNA, 15 bp, Homo sapiens
tatatgtgtgtgcac

SEQ ID NO: 1618080 - DNA, 15 bp, Homo sapiens
atatgtgtgtgcaca

SEQ ID NO: 1618081 - DNA, 15 bp, Homo sapiens
tatgtgtgtgcacat

SEQ ID NO: 1618082 - DNA, 15 bp, Homo sapiens
atgtgtgtgcacatg

SEQ ID NO: 1618083 - DNA, 15 bp, Homo sapiens
tgtgtgtgcacatgc

SEQ ID NO: 1618084 - DNA, 15 bp, Homo sapiens
gtgtgtgcacatgca

SEQ ID NO: 1618085 - DNA, 15 bp, Homo sapiens
tgtgtgcacatgcat

SEQ ID NO: 1618086 - DNA, 15 bp, Homo sapiens
gtgtgcacatgcatg

SEQ ID NO: 1618087 - DNA, 15 bp, Homo sapiens
tgtgcacatgcatgt

SEQ ID NO: 1618088 - DNA, 15 bp, Homo sapiens
gtgcacatgcatgta

SEQ ID NO: 1618089 - DNA, 15 bp, Homo sapiens
tgcacatgcatgtaa

SEQ ID NO: 1618090 - DNA, 15 bp, Homo sapiens
gcacatgcatgtaag

SEQ ID NO: 1618091 - DNA, 15 bp, Homo sapiens
cacatgcatgtaagt

SEQ ID NO: 1618092 - DNA, 15 bp, Homo sapiens
acatgcatgtaagtt

SEQ ID NO: 1618093 - DNA, 15 bp, Homo sapiens
catgcatgtaagttt

SEQ ID NO: 1618094 - DNA, 15 bp, Homo sapiens
atgcatgtaagtttt

SEQ ID NO: 1618095 - DNA, 15 bp, Homo sapiens
tgcatgtaagttttg

SEQ ID NO: 1618096 - DNA, 15 bp, Homo sapiens
gcatgtaagttttgt

SEQ ID NO: 1618097 - DNA, 15 bp, Homo sapiens
catgtaagttttgtt

SEQ ID NO: 1618098 - DNA, 15 bp, Homo sapiens
atgtaagttttgttt

SEQ ID NO: 1618099 - DNA, 15 bp, Homo sapiens
tgtaagttttgtttt

SEQ ID NO: 1618100 - DNA, 15 bp, Homo sapiens
gtaagttttgttttt

SEQ ID NO: 1618101 - DNA, 15 bp, Homo sapiens
taagttttgtttttc

SEQ ID NO: 1618102 - DNA, 15 bp, Homo sapiens
aagttttgtttttct

SEQ ID NO: 1618103 - DNA, 15 bp, Homo sapiens
agttttgtttttctt

SEQ ID NO: 1618104 - DNA, 15 bp, Homo sapiens
gttttgtttttcttt

SEQ ID NO: 1618105 - DNA, 15 bp, Homo sapiens
ttttgtttttctttc

SEQ ID NO: 1618106 - DNA, 15 bp, Homo sapiens
tttgtttttctttct

SEQ ID NO: 1618107 - DNA, 15 bp, Homo sapiens
ttttttttccctgag

SEQ ID NO: 1618108 - DNA, 15 bp, Homo sapiens
tttttttccctgaga

SEQ ID NO: 1618109 - DNA, 15 bp, Homo sapiens
ttttttccctgagac

SEQ ID NO: 1618110 - DNA, 15 bp, Homo sapiens
tttttccctgagaca

SEQ ID NO: 1618111 - DNA, 15 bp, Homo sapiens
ttttccctgagacag

SEQ ID NO: 1618112 - DNA, 15 bp, Homo sapiens
tttccctgagacaga

SEQ ID NO: 1618113 - DNA, 15 bp, Homo sapiens
ttccctgagacagag

SEQ ID NO: 1618114 - DNA, 15 bp, Homo sapiens
tccctgagacagagt

SEQ ID NO: 1618115 - DNA, 15 bp, Homo sapiens
ccctgagacagagtc

SEQ ID NO: 1618116 - DNA, 15 bp, Homo sapiens
cctgagacagagtct

SEQ ID NO: 1618117 - DNA, 15 bp, Homo sapiens
ctgagacagagtctc

SEQ ID NO: 1618118 - DNA, 15 bp, Homo sapiens
ctcactctgtcacca

SEQ ID NO: 1618119 - DNA, 15 bp, Homo sapiens
tcactctgtcaccaa

SEQ ID NO: 1618120 - DNA, 15 bp, Homo sapiens
cactctgtcaccaag

SEQ ID NO: 1618121 - DNA, 15 bp, Homo sapiens
actctgtcaccaagg

SEQ ID NO: 1618122 - DNA, 15 bp, Homo sapiens
ctctgtcaccaaggc

SEQ ID NO: 1618123 - DNA, 15 bp, Homo sapiens
tctgtcaccaaggct

SEQ ID NO: 1618124 - DNA, 15 bp, Homo sapiens
ctgtcaccaaggctg

SEQ ID NO: 1618125 - DNA, 15 bp, Homo sapiens
tgtcaccaaggctgg

SEQ ID NO: 1618126 - DNA, 15 bp, Homo sapiens
gtcaccaaggctgga

SEQ ID NO: 1618127 - DNA, 15 bp, Homo sapiens
tcaccaaggctggag

SEQ ID NO: 1618128 - DNA, 15 bp, Homo sapiens
caccaaggctggagt

SEQ ID NO: 1618129 - DNA, 15 bp, Homo sapiens
accaaggctggagtg

SEQ ID NO: 1618130 - DNA, 15 bp, Homo sapiens
ggagtgcagcggtgt

SEQ ID NO: 1618131 - DNA, 15 bp, Homo sapiens
gagtgcagcggtgtg

SEQ ID NO: 1618132 - DNA, 15 bp, Homo sapiens
agtgcagcggtgtga

SEQ ID NO: 1618133 - DNA, 15 bp, Homo sapiens
gtgcagcggtgtgat

SEQ ID NO: 1618134 - DNA, 15 bp, Homo sapiens
tgcagcggtgtgatc

SEQ ID NO: 1618135 - DNA, 15 bp, Homo sapiens
gcagcggtgtgatct

SEQ ID NO: 1618136 - DNA, 15 bp, Homo sapiens
cagcggtgtgatctg

SEQ ID NO: 1618137 - DNA, 15 bp, Homo sapiens
agcggtgtgatctgg

SEQ ID NO: 1618138 - DNA, 15 bp, Homo sapiens
gcggtgtgatctggg

SEQ ID NO: 1618139 - DNA, 15 bp, Homo sapiens
cggtgtgatctgggc

SEQ ID NO: 1618140 - DNA, 15 bp, Homo sapiens
ggtgtgatctgggct

SEQ ID NO: 1618141 - DNA, 15 bp, Homo sapiens
gagtagctgggaatt

SEQ ID NO: 1618142 - DNA, 15 bp, Homo sapiens
agtagctgggaatta

SEQ ID NO: 1618143 - DNA, 15 bp, Homo sapiens
gtagctgggaattac

SEQ ID NO: 1618144 - DNA, 15 bp, Homo sapiens
tagctgggaattaca

SEQ ID NO: 1618145 - DNA, 15 bp, Homo sapiens
agctgggaattacag

SEQ ID NO: 1618146 - DNA, 15 bp, Homo sapiens
gctgggaattacagg

SEQ ID NO: 1618147 - DNA, 15 bp, Homo sapiens
ctgggaattacaggc

SEQ ID NO: 1618148 - DNA, 15 bp, Homo sapiens
tgggaattacaggcg

SEQ ID NO: 1618149 - DNA, 15 bp, Homo sapiens
gggaattacaggcgc

SEQ ID NO: 1618150 - DNA, 15 bp, Homo sapiens
ggaattacaggcgcc

SEQ ID NO: 1618151 - DNA, 15 bp, Homo sapiens
gaattacaggcgccc

SEQ ID NO: 1618152 - DNA, 15 bp, Homo sapiens
aattacaggcgccca

SEQ ID NO: 1618153 - DNA, 15 bp, Homo sapiens
ggcgcccaccaccaa

SEQ ID NO: 1618154 - DNA, 15 bp, Homo sapiens
gcgcccaccaccaag

SEQ ID NO: 1618155 - DNA, 15 bp, Homo sapiens
cgcccaccaccaagc

SEQ ID NO: 1618156 - DNA, 15 bp, Homo sapiens
ccaccaccaagccca

SEQ ID NO: 1618157 - DNA, 15 bp, Homo sapiens
caccaccaagcccag

SEQ ID NO: 1618158 - DNA, 15 bp, Homo sapiens
accaccaagcccagc

SEQ ID NO: 1618159 - DNA, 15 bp, Homo sapiens
ccaccaagcccagct

SEQ ID NO: 1618160 - DNA, 15 bp, Homo sapiens
caccaagcccagcta

SEQ ID NO: 1618161 - DNA, 15 bp, Homo sapiens
accaagcccagctaa

SEQ ID NO: 1618162 - DNA, 15 bp, Homo sapiens
ccaagcccagctaat

SEQ ID NO: 1618163 - DNA, 15 bp, Homo sapiens
caagcccagctaatt

SEQ ID NO: 1618164 - DNA, 15 bp, Homo sapiens
aagcccagctaattt

SEQ ID NO: 1618165 - DNA, 15 bp, Homo sapiens
agcccagctaatttt

SEQ ID NO: 1618166 - DNA, 15 bp, Homo sapiens
ttcaccatgttggct

SEQ ID NO: 1618167 - DNA, 15 bp, Homo sapiens
tcaccatgttggcta

SEQ ID NO: 1618168 - DNA, 15 bp, Homo sapiens
caccatgttggctag

SEQ ID NO: 1618169 - DNA, 15 bp, Homo sapiens
accatgttggctagg

SEQ ID NO: 1618170 - DNA, 15 bp, Homo sapiens
ccatgttggctaggc

SEQ ID NO: 1618171 - DNA, 15 bp, Homo sapiens
catgttggctaggct

SEQ ID NO: 1618172 - DNA, 15 bp, Homo sapiens
atgttggctaggctg

SEQ ID NO: 1618173 - DNA, 15 bp, Homo sapiens
tgttggctaggctgg

SEQ ID NO: 1618174 - DNA, 15 bp, Homo sapiens
gttggctaggctggt

SEQ ID NO: 1618175 - DNA, 15 bp, Homo sapiens
ttggctaggctggtc

SEQ ID NO: 1618176 - DNA, 15 bp, Homo sapiens
tggctaggctggtct

SEQ ID NO: 1618177 - DNA, 15 bp, Homo sapiens
ggctaggctggtctg

SEQ ID NO: 1618178 - DNA, 15 bp, Homo sapiens
gctaggctggtctga

SEQ ID NO: 1618179 - DNA, 15 bp, Homo sapiens
ctaggctggtctgaa

SEQ ID NO: 1618180 - DNA, 15 bp, Homo sapiens
taggctggtctgaaa

SEQ ID NO: 1618181 - DNA, 15 bp, Homo sapiens
aggctggtctgaaac

SEQ ID NO: 1618182 - DNA, 15 bp, Homo sapiens
ggctggtctgaaact

SEQ ID NO: 1618183 - DNA, 15 bp, Homo sapiens
gctggtctgaaactc

SEQ ID NO: 1618184 - DNA, 15 bp, Homo sapiens
ctggtctgaaactcc

SEQ ID NO: 1618185 - DNA, 15 bp, Homo sapiens
tctgaaactcctgac

SEQ ID NO: 1618186 - DNA, 15 bp, Homo sapiens
ctgaaactcctgacc

SEQ ID NO: 1618187 - DNA, 15 bp, Homo sapiens
tgaaactcctgacct

SEQ ID NO: 1618188 - DNA, 15 bp, Homo sapiens
gaaactcctgacctc

SEQ ID NO: 1618189 - DNA, 15 bp, Homo sapiens
actcctgacctcaga
